United States Patent Application Publication US 2019/0048337 A1 - sequence listing, part 15

SEQ ID NO: 484041 - RNA, 20 nt, Artificial Sequence
  Synthetic
cacuguucaagaaaauacga

SEQ ID NO: 484042 - RNA, 21 nt, Artificial Sequence
  Synthetic
ccacuguucaagaaaauacga

SEQ ID NO: 484043 - RNA, 22 nt, Artificial Sequence
  Synthetic
accacuguucaagaaaauacga

SEQ ID NO: 484044 - RNA, 23 nt, Artificial Sequence
  Synthetic
aaccacuguucaagaaaauacga

SEQ ID NO: 484045 - RNA, 24 nt, Artificial Sequence
  Synthetic
aaaccacuguucaagaaaauacga

SEQ ID NO: 484046 - RNA, 18 nt, Artificial Sequence
  Synthetic
ucaccuuguaaaauacga

SEQ ID NO: 484047 - RNA, 19 nt, Artificial Sequence
  Synthetic
aucaccuuguaaaauacga

SEQ ID NO: 484048 - RNA, 20 nt, Artificial Sequence
  Synthetic
gaucaccuuguaaaauacga

SEQ ID NO: 484049 - RNA, 21 nt, Artificial Sequence
  Synthetic
ugaucaccuuguaaaauacga

SEQ ID NO: 484050 - RNA, 22 nt, Artificial Sequence
  Synthetic
augaucaccuuguaaaauacga

SEQ ID NO: 484051 - RNA, 23 nt, Artificial Sequence
  Synthetic
uaugaucaccuuguaaaauacga

SEQ ID NO: 484052 - RNA, 24 nt, Artificial Sequence
  Synthetic
guaugaucaccuuguaaaauacga

SEQ ID NO: 484053 - RNA, 18 nt, Artificial Sequence
  Synthetic
uaaaacaaaaagauacga

SEQ ID NO: 484054 - RNA, 19 nt, Artificial Sequence
  Synthetic
uuaaaacaaaaagauacga

SEQ ID NO: 484055 - RNA, 20 nt, Artificial Sequence
  Synthetic
uuuaaaacaaaaagauacga

SEQ ID NO: 484056 - RNA, 21 nt, Artificial Sequence
  Synthetic
uuuuaaaacaaaaagauacga

SEQ ID NO: 484057 - RNA, 22 nt, Artificial Sequence
  Synthetic
auuuuaaaacaaaaagauacga

SEQ ID NO: 484058 - RNA, 23 nt, Artificial Sequence
  Synthetic
uauuuuaaaacaaaaagauacga

SEQ ID NO: 484059 - RNA, 24 nt, Artificial Sequence
  Synthetic
uuauuuuaaaacaaaaagauacga

SEQ ID NO: 484060 - RNA, 18 nt, Artificial Sequence
  Synthetic
auguauuccaagauacga

SEQ ID NO: 484061 - RNA, 19 nt, Artificial Sequence
  Synthetic
aauguauuccaagauacga

SEQ ID NO: 484062 - RNA, 20 nt, Artificial Sequence
  Synthetic
aaauguauuccaagauacga

SEQ ID NO: 484063 - RNA, 21 nt, Artificial Sequence
  Synthetic
gaaauguauuccaagauacga

SEQ ID NO: 484064 - RNA, 22 nt, Artificial Sequence
  Synthetic
agaaauguauuccaagauacga

SEQ ID NO: 484065 - RNA, 23 nt, Artificial Sequence
  Synthetic
aagaaauguauuccaagauacga

SEQ ID NO: 484066 - RNA, 24 nt, Artificial Sequence
  Synthetic
aaagaaauguauuccaagauacga

SEQ ID NO: 484067 - RNA, 18 nt, Artificial Sequence
  Synthetic
cuugagggauguauacga

SEQ ID NO: 484068 - RNA, 19 nt, Artificial Sequence
  Synthetic
ccuugagggauguauacga

SEQ ID NO: 484069 - RNA, 20 nt, Artificial Sequence
  Synthetic
gccuugagggauguauacga

SEQ ID NO: 484070 - RNA, 21 nt, Artificial Sequence
  Synthetic
agccuugagggauguauacga

SEQ ID NO: 484071 - RNA, 22 nt, Artificial Sequence
  Synthetic
gagccuugagggauguauacga

SEQ ID NO: 484072 - RNA, 23 nt, Artificial Sequence
  Synthetic
ugagccuugagggauguauacga

SEQ ID NO: 484073 - RNA, 24 nt, Artificial Sequence
  Synthetic
uugagccuugagggauguauacga

SEQ ID NO: 484074 - RNA, 18 nt, Artificial Sequence
  Synthetic
uaaacagaacuuauacga

SEQ ID NO: 484075 - RNA, 19 nt, Artificial Sequence
  Synthetic
cuaaacagaacuuauacga

SEQ ID NO: 484076 - RNA, 20 nt, Artificial Sequence
  Synthetic
acuaaacagaacuuauacga

SEQ ID NO: 484077 - RNA, 21 nt, Artificial Sequence
  Synthetic
uacuaaacagaacuuauacga

SEQ ID NO: 484078 - RNA, 22 nt, Artificial Sequence
  Synthetic
auacuaaacagaacuuauacga

SEQ ID NO: 484079 - RNA, 23 nt, Artificial Sequence
  Synthetic
gauacuaaacagaacuuauacga

SEQ ID NO: 484080 - RNA, 24 nt, Artificial Sequence
  Synthetic
agauacuaaacagaacuuauacga

SEQ ID NO: 484081 - RNA, 18 nt, Artificial Sequence
  Synthetic
aaaguacaaugacuacga

SEQ ID NO: 484082 - RNA, 19 nt, Artificial Sequence
  Synthetic
caaaguacaaugacuacga

SEQ ID NO: 484083 - RNA, 20 nt, Artificial Sequence
  Synthetic
acaaaguacaaugacuacga

SEQ ID NO: 484084 - RNA, 21 nt, Artificial Sequence
  Synthetic
cacaaaguacaaugacuacga

SEQ ID NO: 484085 - RNA, 22 nt, Artificial Sequence
  Synthetic
acacaaaguacaaugacuacga

SEQ ID NO: 484086 - RNA, 23 nt, Artificial Sequence
  Synthetic
aacacaaaguacaaugacuacga

SEQ ID NO: 484087 - RNA, 24 nt, Artificial Sequence
  Synthetic
aaacacaaaguacaaugacuacga

SEQ ID NO: 484088 - RNA, 18 nt, Artificial Sequence
  Synthetic
uuaucagaacuccuacga

SEQ ID NO: 484089 - RNA, 19 nt, Artificial Sequence
  Synthetic
cuuaucagaacuccuacga

SEQ ID NO: 484090 - RNA, 20 nt, Artificial Sequence
  Synthetic
ccuuaucagaacuccuacga

SEQ ID NO: 484091 - RNA, 21 nt, Artificial Sequence
  Synthetic
accuuaucagaacuccuacga

SEQ ID NO: 484092 - RNA, 22 nt, Artificial Sequence
  Synthetic
uaccuuaucagaacuccuacga

SEQ ID NO: 484093 - RNA, 23 nt, Artificial Sequence
  Synthetic
cuaccuuaucagaacuccuacga

SEQ ID NO: 484094 - RNA, 24 nt, Artificial Sequence
  Synthetic
gcuaccuuaucagaacuccuacga

SEQ ID NO: 484095 - RNA, 18 nt, Artificial Sequence
  Synthetic
uucaacucccacuuacga

SEQ ID NO: 484096 - RNA, 19 nt, Artificial Sequence
  Synthetic
guucaacucccacuuacga

SEQ ID NO: 484097 - RNA, 20 nt, Artificial Sequence
  Synthetic
uguucaacucccacuuacga

SEQ ID NO: 484098 - RNA, 21 nt, Artificial Sequence
  Synthetic
uuguucaacucccacuuacga

SEQ ID NO: 484099 - RNA, 22 nt, Artificial Sequence
  Synthetic
guuguucaacucccacuuacga

SEQ ID NO: 484100 - RNA, 23 nt, Artificial Sequence
  Synthetic
cguuguucaacucccacuuacga

SEQ ID NO: 484101 - RNA, 24 nt, Artificial Sequence
  Synthetic
ucguuguucaacucccacuuacga

SEQ ID NO: 484102 - RNA, 18 nt, Artificial Sequence
  Synthetic
auauuuauagcuuuacga

SEQ ID NO: 484103 - RNA, 19 nt, Artificial Sequence
  Synthetic
gauauuuauagcuuuacga

SEQ ID NO: 484104 - RNA, 20 nt, Artificial Sequence
  Synthetic
agauauuuauagcuuuacga

SEQ ID NO: 484105 - RNA, 21 nt, Artificial Sequence
  Synthetic
uagauauuuauagcuuuacga

SEQ ID NO: 484106 - RNA, 22 nt, Artificial Sequence
  Synthetic
uuagauauuuauagcuuuacga

SEQ ID NO: 484107 - RNA, 23 nt, Artificial Sequence
  Synthetic
uuuagauauuuauagcuuuacga

SEQ ID NO: 484108 - RNA, 24 nt, Artificial Sequence
  Synthetic
auuuagauauuuauagcuuuacga

SEQ ID NO: 484109 - RNA, 18 nt, Artificial Sequence
  Synthetic
gagaagugaagaaaccga

SEQ ID NO: 484110 - RNA, 19 nt, Artificial Sequence
  Synthetic
agagaagugaagaaaccga

SEQ ID NO: 484111 - RNA, 20 nt, Artificial Sequence
  Synthetic
gagagaagugaagaaaccga

SEQ ID NO: 484112 - RNA, 21 nt, Artificial Sequence
  Synthetic
agagagaagugaagaaaccga

SEQ ID NO: 484113 - RNA, 22 nt, Artificial Sequence
  Synthetic
uagagagaagugaagaaaccga

SEQ ID NO: 484114 - RNA, 23 nt, Artificial Sequence
  Synthetic
guagagagaagugaagaaaccga

SEQ ID NO: 484115 - RNA, 24 nt, Artificial Sequence
  Synthetic
gguagagagaagugaagaaaccga

SEQ ID NO: 484116 - RNA, 18 nt, Artificial Sequence
  Synthetic
ugccauguuagagaccga

SEQ ID NO: 484117 - RNA, 19 nt, Artificial Sequence
  Synthetic
uugccauguuagagaccga

SEQ ID NO: 484118 - RNA, 20 nt, Artificial Sequence
  Synthetic
auugccauguuagagaccga

SEQ ID NO: 484119 - RNA, 21 nt, Artificial Sequence
  Synthetic
aauugccauguuagagaccga

SEQ ID NO: 484120 - RNA, 22 nt, Artificial Sequence
  Synthetic
aaauugccauguuagagaccga

SEQ ID NO: 484121 - RNA, 23 nt, Artificial Sequence
  Synthetic
caaauugccauguuagagaccga

SEQ ID NO: 484122 - RNA, 24 nt, Artificial Sequence
  Synthetic
gcaaauugccauguuagagaccga

SEQ ID NO: 484123 - RNA, 18 nt, Artificial Sequence
  Synthetic
gaaguugacaaugaccga

SEQ ID NO: 484124 - RNA, 19 nt, Artificial Sequence
  Synthetic
agaaguugacaaugaccga

SEQ ID NO: 484125 - RNA, 20 nt, Artificial Sequence
  Synthetic
cagaaguugacaaugaccga

SEQ ID NO: 484126 - RNA, 21 nt, Artificial Sequence
  Synthetic
ucagaaguugacaaugaccga

SEQ ID NO: 484127 - RNA, 22 nt, Artificial Sequence
  Synthetic
aucagaaguugacaaugaccga

SEQ ID NO: 484128 - RNA, 23 nt, Artificial Sequence
  Synthetic
caucagaaguugacaaugaccga

SEQ ID NO: 484129 - RNA, 24 nt, Artificial Sequence
  Synthetic
ccaucagaaguugacaaugaccga

SEQ ID NO: 484130 - RNA, 18 nt, Artificial Sequence
  Synthetic
aauauuaagcaugaccga

SEQ ID NO: 484131 - RNA, 19 nt, Artificial Sequence
  Synthetic
gaauauuaagcaugaccga

SEQ ID NO: 484132 - RNA, 20 nt, Artificial Sequence
  Synthetic
ugaauauuaagcaugaccga

SEQ ID NO: 484133 - RNA, 21 nt, Artificial Sequence
  Synthetic
cugaauauuaagcaugaccga

SEQ ID NO: 484134 - RNA, 22 nt, Artificial Sequence
  Synthetic
gcugaauauuaagcaugaccga

SEQ ID NO: 484135 - RNA, 23 nt, Artificial Sequence
  Synthetic
agcugaauauuaagcaugaccga

SEQ ID NO: 484136 - RNA, 24 nt, Artificial Sequence
  Synthetic
cagcugaauauuaagcaugaccga

SEQ ID NO: 484137 - RNA, 18 nt, Artificial Sequence
  Synthetic
uuaaagaagagcuaccga

SEQ ID NO: 484138 - RNA, 19 nt, Artificial Sequence
  Synthetic
auuaaagaagagcuaccga

SEQ ID NO: 484139 - RNA, 20 nt, Artificial Sequence
  Synthetic
aauuaaagaagagcuaccga

SEQ ID NO: 484140 - RNA, 21 nt, Artificial Sequence
  Synthetic
aaauuaaagaagagcuaccga

SEQ ID NO: 484141 - RNA, 22 nt, Artificial Sequence
  Synthetic
aaaauuaaagaagagcuaccga

SEQ ID NO: 484142 - RNA, 23 nt, Artificial Sequence
  Synthetic
caaaauuaaagaagagcuaccga

SEQ ID NO: 484143 - RNA, 24 nt, Artificial Sequence
  Synthetic
gcaaaauuaaagaagagcuaccga

SEQ ID NO: 484144 - RNA, 18 nt, Artificial Sequence
  Synthetic
uaagauaguaccacccga

SEQ ID NO: 484145 - RNA, 19 nt, Artificial Sequence
  Synthetic
cuaagauaguaccacccga

SEQ ID NO: 484146 - RNA, 20 nt, Artificial Sequence
  Synthetic
acuaagauaguaccacccga

SEQ ID NO: 484147 - RNA, 21 nt, Artificial Sequence
  Synthetic
gacuaagauaguaccacccga

SEQ ID NO: 484148 - RNA, 22 nt, Artificial Sequence
  Synthetic
agacuaagauaguaccacccga

SEQ ID NO: 484149 - RNA, 23 nt, Artificial Sequence
  Synthetic
cagacuaagauaguaccacccga

SEQ ID NO: 484150 - RNA, 24 nt, Artificial Sequence
  Synthetic
ccagacuaagauaguaccacccga

SEQ ID NO: 484151 - RNA, 18 nt, Artificial Sequence
  Synthetic
agcaagcuggagacccga

SEQ ID NO: 484152 - RNA, 19 nt, Artificial Sequence
  Synthetic
aagcaagcuggagacccga

SEQ ID NO: 484153 - RNA, 20 nt, Artificial Sequence
  Synthetic
caagcaagcuggagacccga

SEQ ID NO: 484154 - RNA, 21 nt, Artificial Sequence
  Synthetic
acaagcaagcuggagacccga

SEQ ID NO: 484155 - RNA, 22 nt, Artificial Sequence
  Synthetic
aacaagcaagcuggagacccga

SEQ ID NO: 484156 - RNA, 23 nt, Artificial Sequence
  Synthetic
gaacaagcaagcuggagacccga

SEQ ID NO: 484157 - RNA, 24 nt, Artificial Sequence
  Synthetic
ugaacaagcaagcuggagacccga

SEQ ID NO: 484158 - RNA, 18 nt, Artificial Sequence
  Synthetic
uaaguugacccuucccga

SEQ ID NO: 484159 - RNA, 19 nt, Artificial Sequence
  Synthetic
auaaguugacccuucccga

SEQ ID NO: 484160 - RNA, 20 nt, Artificial Sequence
  Synthetic
uauaaguugacccuucccga

SEQ ID NO: 484161 - RNA, 21 nt, Artificial Sequence
  Synthetic
guauaaguugacccuucccga

SEQ ID NO: 484162 - RNA, 22 nt, Artificial Sequence
  Synthetic
aguauaaguugacccuucccga

SEQ ID NO: 484163 - RNA, 23 nt, Artificial Sequence
  Synthetic
aaguauaaguugacccuucccga

SEQ ID NO: 484164 - RNA, 24 nt, Artificial Sequence
  Synthetic
caaguauaaguugacccuucccga

SEQ ID NO: 484165 - RNA, 18 nt, Artificial Sequence
  Synthetic
uacccuuuugacggccga

SEQ ID NO: 484166 - RNA, 19 nt, Artificial Sequence
  Synthetic
cuacccuuuugacggccga

SEQ ID NO: 484167 - RNA, 20 nt, Artificial Sequence
  Synthetic
ucuacccuuuugacggccga

SEQ ID NO: 484168 - RNA, 21 nt, Artificial Sequence
  Synthetic
cucuacccuuuugacggccga

SEQ ID NO: 484169 - RNA, 22 nt, Artificial Sequence
  Synthetic
acucuacccuuuugacggccga

SEQ ID NO: 484170 - RNA, 23 nt, Artificial Sequence
  Synthetic
aacucuacccuuuugacggccga

SEQ ID NO: 484171 - RNA, 24 nt, Artificial Sequence
  Synthetic
aaacucuacccuuuugacggccga

SEQ ID NO: 484172 - RNA, 18 nt, Artificial Sequence
  Synthetic
cacacagacaacauccga

SEQ ID NO: 484173 - RNA, 19 nt, Artificial Sequence
  Synthetic
ucacacagacaacauccga

SEQ ID NO: 484174 - RNA, 20 nt, Artificial Sequence
  Synthetic
cucacacagacaacauccga

SEQ ID NO: 484175 - RNA, 21 nt, Artificial Sequence
  Synthetic
acucacacagacaacauccga

SEQ ID NO: 484176 - RNA, 22 nt, Artificial Sequence
  Synthetic
cacucacacagacaacauccga

SEQ ID NO: 484177 - RNA, 23 nt, Artificial Sequence
  Synthetic
gcacucacacagacaacauccga

SEQ ID NO: 484178 - RNA, 24 nt, Artificial Sequence
  Synthetic
agcacucacacagacaacauccga

SEQ ID NO: 484179 - RNA, 18 nt, Artificial Sequence
  Synthetic
cauggaccuuacauccga

SEQ ID NO: 484180 - RNA, 19 nt, Artificial Sequence
  Synthetic
ucauggaccuuacauccga

SEQ ID NO: 484181 - RNA, 20 nt, Artificial Sequence
  Synthetic
cucauggaccuuacauccga

SEQ ID NO: 484182 - RNA, 21 nt, Artificial Sequence
  Synthetic
ccucauggaccuuacauccga

SEQ ID NO: 484183 - RNA, 22 nt, Artificial Sequence
  Synthetic
gccucauggaccuuacauccga

SEQ ID NO: 484184 - RNA, 23 nt, Artificial Sequence
  Synthetic
ugccucauggaccuuacauccga

SEQ ID NO: 484185 - RNA, 24 nt, Artificial Sequence
  Synthetic
cugccucauggaccuuacauccga

SEQ ID NO: 484186 - RNA, 18 nt, Artificial Sequence
  Synthetic
aaagccauuaccauccga

SEQ ID NO: 484187 - RNA, 19 nt, Artificial Sequence
  Synthetic
caaagccauuaccauccga

SEQ ID NO: 484188 - RNA, 20 nt, Artificial Sequence
  Synthetic
acaaagccauuaccauccga

SEQ ID NO: 484189 - RNA, 21 nt, Artificial Sequence
  Synthetic
cacaaagccauuaccauccga

SEQ ID NO: 484190 - RNA, 22 nt, Artificial Sequence
  Synthetic
ucacaaagccauuaccauccga

SEQ ID NO: 484191 - RNA, 23 nt, Artificial Sequence
  Synthetic
gucacaaagccauuaccauccga

SEQ ID NO: 484192 - RNA, 24 nt, Artificial Sequence
  Synthetic
ugucacaaagccauuaccauccga

SEQ ID NO: 484193 - RNA, 18 nt, Artificial Sequence
  Synthetic
uuacuuguuccaguccga

SEQ ID NO: 484194 - RNA, 19 nt, Artificial Sequence
  Synthetic
uuuacuuguuccaguccga

SEQ ID NO: 484195 - RNA, 20 nt, Artificial Sequence
  Synthetic
uuuuacuuguuccaguccga

SEQ ID NO: 484196 - RNA, 21 nt, Artificial Sequence
  Synthetic
uuuuuacuuguuccaguccga

SEQ ID NO: 484197 - RNA, 22 nt, Artificial Sequence
  Synthetic
uuuuuuacuuguuccaguccga

SEQ ID NO: 484198 - RNA, 23 nt, Artificial Sequence
  Synthetic
auuuuuuacuuguuccaguccga

SEQ ID NO: 484199 - RNA, 24 nt, Artificial Sequence
  Synthetic
uauuuuuuacuuguuccaguccga

SEQ ID NO: 484200 - RNA, 18 nt, Artificial Sequence
  Synthetic
uaaauacaccuguuccga

SEQ ID NO: 484201 - RNA, 19 nt, Artificial Sequence
  Synthetic
guaaauacaccuguuccga

SEQ ID NO: 484202 - RNA, 20 nt, Artificial Sequence
  Synthetic
gguaaauacaccuguuccga

SEQ ID NO: 484203 - RNA, 21 nt, Artificial Sequence
  Synthetic
ggguaaauacaccuguuccga

SEQ ID NO: 484204 - RNA, 22 nt, Artificial Sequence
  Synthetic
uggguaaauacaccuguuccga

SEQ ID NO: 484205 - RNA, 23 nt, Artificial Sequence
  Synthetic
uuggguaaauacaccuguuccga

SEQ ID NO: 484206 - RNA, 24 nt, Artificial Sequence
  Synthetic
auuggguaaauacaccuguuccga

SEQ ID NO: 484207 - RNA, 18 nt, Artificial Sequence
  Synthetic
agaggguagagaaagcga

SEQ ID NO: 484208 - RNA, 19 nt, Artificial Sequence
  Synthetic
aagaggguagagaaagcga

SEQ ID NO: 484209 - RNA, 20 nt, Artificial Sequence
  Synthetic
aaagaggguagagaaagcga

SEQ ID NO: 484210 - RNA, 21 nt, Artificial Sequence
  Synthetic
gaaagaggguagagaaagcga

SEQ ID NO: 484211 - RNA, 22 nt, Artificial Sequence
  Synthetic
agaaagaggguagagaaagcga

SEQ ID NO: 484212 - RNA, 23 nt, Artificial Sequence
  Synthetic
cagaaagaggguagagaaagcga

SEQ ID NO: 484213 - RNA, 24 nt, Artificial Sequence
  Synthetic
acagaaagaggguagagaaagcga

SEQ ID NO: 484214 - RNA, 18 nt, Artificial Sequence
  Synthetic
agcugcacaaacaagcga

SEQ ID NO: 484215 - RNA, 19 nt, Artificial Sequence
  Synthetic
uagcugcacaaacaagcga

SEQ ID NO: 484216 - RNA, 20 nt, Artificial Sequence
  Synthetic
guagcugcacaaacaagcga

SEQ ID NO: 484217 - RNA, 21 nt, Artificial Sequence
  Synthetic
aguagcugcacaaacaagcga

SEQ ID NO: 484218 - RNA, 22 nt, Artificial Sequence
  Synthetic
gaguagcugcacaaacaagcga

SEQ ID NO: 484219 - RNA, 23 nt, Artificial Sequence
  Synthetic
ggaguagcugcacaaacaagcga

SEQ ID NO: 484220 - RNA, 24 nt, Artificial Sequence
  Synthetic
aggaguagcugcacaaacaagcga

SEQ ID NO: 484221 - RNA, 18 nt, Artificial Sequence
  Synthetic
auagaaauaaagaagcga

SEQ ID NO: 484222 - RNA, 19 nt, Artificial Sequence
  Synthetic
uauagaaauaaagaagcga

SEQ ID NO: 484223 - RNA, 20 nt, Artificial Sequence
  Synthetic
auauagaaauaaagaagcga

SEQ ID NO: 484224 - RNA, 21 nt, Artificial Sequence
  Synthetic
aauauagaaauaaagaagcga

SEQ ID NO: 484225 - RNA, 22 nt, Artificial Sequence
  Synthetic
uaauauagaaauaaagaagcga

SEQ ID NO: 484226 - RNA, 23 nt, Artificial Sequence
  Synthetic
guaauauagaaauaaagaagcga

SEQ ID NO: 484227 - RNA, 24 nt, Artificial Sequence
  Synthetic
gguaauauagaaauaaagaagcga

SEQ ID NO: 484228 - RNA, 18 nt, Artificial Sequence
  Synthetic
uucuccacacuucagcga

SEQ ID NO: 484229 - RNA, 19 nt, Artificial Sequence
  Synthetic
auucuccacacuucagcga

SEQ ID NO: 484230 - RNA, 20 nt, Artificial Sequence
  Synthetic
cauucuccacacuucagcga

SEQ ID NO: 484231 - RNA, 21 nt, Artificial Sequence
  Synthetic
ccauucuccacacuucagcga

SEQ ID NO: 484232 - RNA, 22 nt, Artificial Sequence
  Synthetic
accauucuccacacuucagcga

SEQ ID NO: 484233 - RNA, 23 nt, Artificial Sequence
  Synthetic
aaccauucuccacacuucagcga

SEQ ID NO: 484234 - RNA, 24 nt, Artificial Sequence
  Synthetic
gaaccauucuccacacuucagcga

SEQ ID NO: 484235 - RNA, 18 nt, Artificial Sequence
  Synthetic
aaaauggggaaagagcga

SEQ ID NO: 484236 - RNA, 19 nt, Artificial Sequence
  Synthetic
caaaauggggaaagagcga

SEQ ID NO: 484237 - RNA, 20 nt, Artificial Sequence
  Synthetic
ucaaaauggggaaagagcga

SEQ ID NO: 484238 - RNA, 21 nt, Artificial Sequence
  Synthetic
cucaaaauggggaaagagcga

SEQ ID NO: 484239 - RNA, 22 nt, Artificial Sequence
  Synthetic
gcucaaaauggggaaagagcga

SEQ ID NO: 484240 - RNA, 23 nt, Artificial Sequence
  Synthetic
agcucaaaauggggaaagagcga

SEQ ID NO: 484241 - RNA, 24 nt, Artificial Sequence
  Synthetic
aagcucaaaauggggaaagagcga

SEQ ID NO: 484242 - RNA, 18 nt, Artificial Sequence
  Synthetic
uguucaagaugugagcga

SEQ ID NO: 484243 - RNA, 19 nt, Artificial Sequence
  Synthetic
auguucaagaugugagcga

SEQ ID NO: 484244 - RNA, 20 nt, Artificial Sequence
  Synthetic
gauguucaagaugugagcga

SEQ ID NO: 484245 - RNA, 21 nt, Artificial Sequence
  Synthetic
ggauguucaagaugugagcga

SEQ ID NO: 484246 - RNA, 22 nt, Artificial Sequence
  Synthetic
gggauguucaagaugugagcga

SEQ ID NO: 484247 - RNA, 23 nt, Artificial Sequence
  Synthetic
agggauguucaagaugugagcga

SEQ ID NO: 484248 - RNA, 24 nt, Artificial Sequence
  Synthetic
gagggauguucaagaugugagcga

SEQ ID NO: 484249 - RNA, 18 nt, Artificial Sequence
  Synthetic
cugaaauaaauauagcga

SEQ ID NO: 484250 - RNA, 19 nt, Artificial Sequence
  Synthetic
ucugaaauaaauauagcga

SEQ ID NO: 484251 - RNA, 20 nt, Artificial Sequence
  Synthetic
uucugaaauaaauauagcga

SEQ ID NO: 484252 - RNA, 21 nt, Artificial Sequence
  Synthetic
cuucugaaauaaauauagcga

SEQ ID NO: 484253 - RNA, 22 nt, Artificial Sequence
  Synthetic
gcuucugaaauaaauauagcga

SEQ ID NO: 484254 - RNA, 23 nt, Artificial Sequence
  Synthetic
ugcuucugaaauaaauauagcga

SEQ ID NO: 484255 - RNA, 24 nt, Artificial Sequence
  Synthetic
cugcuucugaaauaaauauagcga

SEQ ID NO: 484256 - RNA, 18 nt, Artificial Sequence
  Synthetic
aauucaaaauauuagcga

SEQ ID NO: 484257 - RNA, 19 nt, Artificial Sequence
  Synthetic
caauucaaaauauuagcga

SEQ ID NO: 484258 - RNA, 20 nt, Artificial Sequence
  Synthetic
acaauucaaaauauuagcga

SEQ ID NO: 484259 - RNA, 21 nt, Artificial Sequence
  Synthetic
uacaauucaaaauauuagcga

SEQ ID NO: 484260 - RNA, 22 nt, Artificial Sequence
  Synthetic
guacaauucaaaauauuagcga

SEQ ID NO: 484261 - RNA, 23 nt, Artificial Sequence
  Synthetic
aguacaauucaaaauauuagcga

SEQ ID NO: 484262 - RNA, 24 nt, Artificial Sequence
  Synthetic
aaguacaauucaaaauauuagcga

SEQ ID NO: 484263 - RNA, 18 nt, Artificial Sequence
  Synthetic
uucucaaagugaacgcga

SEQ ID NO: 484264 - RNA, 19 nt, Artificial Sequence
  Synthetic
guucucaaagugaacgcga

SEQ ID NO: 484265 - RNA, 20 nt, Artificial Sequence
  Synthetic
gguucucaaagugaacgcga

SEQ ID NO: 484266 - RNA, 21 nt, Artificial Sequence
  Synthetic
ugguucucaaagugaacgcga

SEQ ID NO: 484267 - RNA, 22 nt, Artificial Sequence
  Synthetic
uugguucucaaagugaacgcga

SEQ ID NO: 484268 - RNA, 23 nt, Artificial Sequence
  Synthetic
cuugguucucaaagugaacgcga

SEQ ID NO: 484269 - RNA, 24 nt, Artificial Sequence
  Synthetic
acuugguucucaaagugaacgcga

SEQ ID NO: 484270 - RNA, 18 nt, Artificial Sequence
  Synthetic
gcacuccagccugggcga

SEQ ID NO: 484271 - RNA, 19 nt, Artificial Sequence
  Synthetic
ugcacuccagccugggcga

SEQ ID NO: 484272 - RNA, 20 nt, Artificial Sequence
  Synthetic
uugcacuccagccugggcga

SEQ ID NO: 484273 - RNA, 21 nt, Artificial Sequence
  Synthetic
auugcacuccagccugggcga

SEQ ID NO: 484274 - RNA, 22 nt, Artificial Sequence
  Synthetic
cauugcacuccagccugggcga

SEQ ID NO: 484275 - RNA, 23 nt, Artificial Sequence
  Synthetic
ccauugcacuccagccugggcga

SEQ ID NO: 484276 - RNA, 24 nt, Artificial Sequence
  Synthetic
gccauugcacuccagccugggcga

SEQ ID NO: 484277 - RNA, 18 nt, Artificial Sequence
  Synthetic
ucacuccagccugggcga

SEQ ID NO: 484278 - RNA, 19 nt, Artificial Sequence
  Synthetic
cucacuccagccugggcga

SEQ ID NO: 484279 - RNA, 20 nt, Artificial Sequence
  Synthetic
ccucacuccagccugggcga

SEQ ID NO: 484280 - RNA, 21 nt, Artificial Sequence
  Synthetic
accucacuccagccugggcga

SEQ ID NO: 484281 - RNA, 22 nt, Artificial Sequence
  Synthetic
caccucacuccagccugggcga

SEQ ID NO: 484282 - RNA, 23 nt, Artificial Sequence
  Synthetic
ccaccucacuccagccugggcga

SEQ ID NO: 484283 - RNA, 24 nt, Artificial Sequence
  Synthetic
gccaccucacuccagccugggcga

SEQ ID NO: 484284 - RNA, 18 nt, Artificial Sequence
  Synthetic
gcacuccugccugggcga

SEQ ID NO: 484285 - RNA, 19 nt, Artificial Sequence
  Synthetic
ugcacuccugccugggcga

SEQ ID NO: 484286 - RNA, 20 nt, Artificial Sequence
  Synthetic
cugcacuccugccugggcga

SEQ ID NO: 484287 - RNA, 21 nt, Artificial Sequence
  Synthetic
acugcacuccugccugggcga

SEQ ID NO: 484288 - RNA, 22 nt, Artificial Sequence
  Synthetic
cacugcacuccugccugggcga

SEQ ID NO: 484289 - RNA, 23 nt, Artificial Sequence
  Synthetic
ccacugcacuccugccugggcga

SEQ ID NO: 484290 - RNA, 24 nt, Artificial Sequence
  Synthetic
gccacugcacuccugccugggcga

SEQ ID NO: 484291 - RNA, 18 nt, Artificial Sequence
  Synthetic
gagugaugaugauggcga

SEQ ID NO: 484292 - RNA, 19 nt, Artificial Sequence
  Synthetic
agagugaugaugauggcga

SEQ ID NO: 484293 - RNA, 20 nt, Artificial Sequence
  Synthetic
gagagugaugaugauggcga

SEQ ID NO: 484294 - RNA, 21 nt, Artificial Sequence
  Synthetic
agagagugaugaugauggcga

SEQ ID NO: 484295 - RNA, 22 nt, Artificial Sequence
  Synthetic
aagagagugaugaugauggcga

SEQ ID NO: 484296 - RNA, 23 nt, Artificial Sequence
  Synthetic
gaagagagugaugaugauggcga

SEQ ID NO: 484297 - RNA, 24 nt, Artificial Sequence
  Synthetic
ggaagagagugaugaugauggcga

SEQ ID NO: 484298 - RNA, 21 nt, Artificial Sequence
  Synthetic
cacugcacuccagccuggcga

SEQ ID NO: 484299 - RNA, 22 nt, Artificial Sequence
  Synthetic
ccacugcacuccagccuggcga

SEQ ID NO: 484300 - RNA, 23 nt, Artificial Sequence
  Synthetic
accacugcacuccagccuggcga

SEQ ID NO: 484301 - RNA, 24 nt, Artificial Sequence
  Synthetic
caccacugcacuccagccuggcga

SEQ ID NO: 484302 - RNA, 23 nt, Artificial Sequence
  Synthetic
gccacugcacuccagccuggcga

SEQ ID NO: 484303 - RNA, 24 nt, Artificial Sequence
  Synthetic
cgccacugcacuccagccuggcga

SEQ ID NO: 484304 - RNA, 18 nt, Artificial Sequence
  Synthetic
ccuugugggagguggcga

SEQ ID NO: 484305 - RNA, 19 nt, Artificial Sequence
  Synthetic
accuugugggagguggcga

SEQ ID NO: 484306 - RNA, 20 nt, Artificial Sequence
  Synthetic
uaccuugugggagguggcga

SEQ ID NO: 484307 - RNA, 21 nt, Artificial Sequence
  Synthetic
uuaccuugugggagguggcga

SEQ ID NO: 484308 - RNA, 22 nt, Artificial Sequence
  Synthetic
cuuaccuugugggagguggcga

SEQ ID NO: 484309 - RNA, 23 nt, Artificial Sequence
  Synthetic
ccuuaccuugugggagguggcga

SEQ ID NO: 484310 - RNA, 24 nt, Artificial Sequence
  Synthetic
cccuuaccuugugggagguggcga

SEQ ID NO: 484311 - RNA, 18 nt, Artificial Sequence
  Synthetic
gcaaugaccuggaugcga

SEQ ID NO: 484312 - RNA, 19 nt, Artificial Sequence
  Synthetic
ugcaaugaccuggaugcga

SEQ ID NO: 484313 - RNA, 20 nt, Artificial Sequence
  Synthetic
uugcaaugaccuggaugcga

SEQ ID NO: 484314 - RNA, 21 nt, Artificial Sequence
  Synthetic
uuugcaaugaccuggaugcga

SEQ ID NO: 484315 - RNA, 22 nt, Artificial Sequence
  Synthetic
auuugcaaugaccuggaugcga

SEQ ID NO: 484316 - RNA, 23 nt, Artificial Sequence
  Synthetic
cauuugcaaugaccuggaugcga

SEQ ID NO: 484317 - RNA, 24 nt, Artificial Sequence
  Synthetic
gcauuugcaaugaccuggaugcga

SEQ ID NO: 484318 - RNA, 18 nt, Artificial Sequence
  Synthetic
auggcuuuauagcugcga

SEQ ID NO: 484319 - RNA, 19 nt, Artificial Sequence
  Synthetic
cauggcuuuauagcugcga

SEQ ID NO: 484320 - RNA, 20 nt, Artificial Sequence
  Synthetic
ccauggcuuuauagcugcga

SEQ ID NO: 484321 - RNA, 21 nt, Artificial Sequence
  Synthetic
gccauggcuuuauagcugcga

SEQ ID NO: 484322 - RNA, 22 nt, Artificial Sequence
  Synthetic
ggccauggcuuuauagcugcga

SEQ ID NO: 484323 - RNA, 23 nt, Artificial Sequence
  Synthetic
cggccauggcuuuauagcugcga

SEQ ID NO: 484324 - RNA, 24 nt, Artificial Sequence
  Synthetic
ucggccauggcuuuauagcugcga

SEQ ID NO: 484325 - RNA, 18 nt, Artificial Sequence
  Synthetic
uauccaaaauacuugcga

SEQ ID NO: 484326 - RNA, 19 nt, Artificial Sequence
  Synthetic
auauccaaaauacuugcga

SEQ ID NO: 484327 - RNA, 20 nt, Artificial Sequence
  Synthetic
cauauccaaaauacuugcga

SEQ ID NO: 484328 - RNA, 21 nt, Artificial Sequence
  Synthetic
ucauauccaaaauacuugcga

SEQ ID NO: 484329 - RNA, 22 nt, Artificial Sequence
  Synthetic
cucauauccaaaauacuugcga

SEQ ID NO: 484330 - RNA, 23 nt, Artificial Sequence
  Synthetic
ucucauauccaaaauacuugcga

SEQ ID NO: 484331 - RNA, 24 nt, Artificial Sequence
  Synthetic
aucucauauccaaaauacuugcga

SEQ ID NO: 484332 - RNA, 18 nt, Artificial Sequence
  Synthetic
uuugucuuuuacuugcga

SEQ ID NO: 484333 - RNA, 19 nt, Artificial Sequence
  Synthetic
uuuugucuuuuacuugcga

SEQ ID NO: 484334 - RNA, 20 nt, Artificial Sequence
  Synthetic
auuuugucuuuuacuugcga

SEQ ID NO: 484335 - RNA, 21 nt, Artificial Sequence
  Synthetic
aauuuugucuuuuacuugcga

SEQ ID NO: 484336 - RNA, 22 nt, Artificial Sequence
  Synthetic
uaauuuugucuuuuacuugcga

SEQ ID NO: 484337 - RNA, 23 nt, Artificial Sequence
  Synthetic
uuaauuuugucuuuuacuugcga

SEQ ID NO: 484338 - RNA, 24 nt, Artificial Sequence
  Synthetic
cuuaauuuugucuuuuacuugcga

SEQ ID NO: 484339 - RNA, 18 nt, Artificial Sequence
  Synthetic
agcccaugggcuuugcga

SEQ ID NO: 484340 - RNA, 19 nt, Artificial Sequence
  Synthetic
cagcccaugggcuuugcga

SEQ ID NO: 484341 - RNA, 20 nt, Artificial Sequence
  Synthetic
ccagcccaugggcuuugcga

SEQ ID NO: 484342 - RNA, 21 nt, Artificial Sequence
  Synthetic
uccagcccaugggcuuugcga

SEQ ID NO: 484343 - RNA, 22 nt, Artificial Sequence
  Synthetic
guccagcccaugggcuuugcga

SEQ ID NO: 484344 - RNA, 23 nt, Artificial Sequence
  Synthetic
uguccagcccaugggcuuugcga

SEQ ID NO: 484345 - RNA, 24 nt, Artificial Sequence
  Synthetic
uuguccagcccaugggcuuugcga

SEQ ID NO: 484346 - RNA, 18 nt, Artificial Sequence
  Synthetic
cauuuauagcaaaaucga

SEQ ID NO: 484347 - RNA, 19 nt, Artificial Sequence
  Synthetic
acauuuauagcaaaaucga

SEQ ID NO: 484348 - RNA, 20 nt, Artificial Sequence
  Synthetic
uacauuuauagcaaaaucga

SEQ ID NO: 484349 - RNA, 21 nt, Artificial Sequence
  Synthetic
uuacauuuauagcaaaaucga

SEQ ID NO: 484350 - RNA, 22 nt, Artificial Sequence
  Synthetic
uuuacauuuauagcaaaaucga

SEQ ID NO: 484351 - RNA, 23 nt, Artificial Sequence
  Synthetic
uuuuacauuuauagcaaaaucga

SEQ ID NO: 484352 - RNA, 24 nt, Artificial Sequence
  Synthetic
auuuuacauuuauagcaaaaucga

SEQ ID NO: 484353 - RNA, 18 nt, Artificial Sequence
  Synthetic
gauuaggucuucaaucga

SEQ ID NO: 484354 - RNA, 19 nt, Artificial Sequence
  Synthetic
ugauuaggucuucaaucga

SEQ ID NO: 484355 - RNA, 20 nt, Artificial Sequence
  Synthetic
uugauuaggucuucaaucga

SEQ ID NO: 484356 - RNA, 21 nt, Artificial Sequence
  Synthetic
uuugauuaggucuucaaucga

SEQ ID NO: 484357 - RNA, 22 nt, Artificial Sequence
  Synthetic
uuuugauuaggucuucaaucga

SEQ ID NO: 484358 - RNA, 23 nt, Artificial Sequence
  Synthetic
uuuuugauuaggucuucaaucga

SEQ ID NO: 484359 - RNA, 24 nt, Artificial Sequence
  Synthetic
cuuuuugauuaggucuucaaucga

SEQ ID NO: 484360 - RNA, 18 nt, Artificial Sequence
  Synthetic
agaggacauuugaaucga

SEQ ID NO: 484361 - RNA, 19 nt, Artificial Sequence
  Synthetic
aagaggacauuugaaucga

SEQ ID NO: 484362 - RNA, 20 nt, Artificial Sequence
  Synthetic
uaagaggacauuugaaucga

SEQ ID NO: 484363 - RNA, 21 nt, Artificial Sequence
  Synthetic
uuaagaggacauuugaaucga

SEQ ID NO: 484364 - RNA, 22 nt, Artificial Sequence
  Synthetic
uuuaagaggacauuugaaucga

SEQ ID NO: 484365 - RNA, 23 nt, Artificial Sequence
  Synthetic
cuuuaagaggacauuugaaucga

SEQ ID NO: 484366 - RNA, 24 nt, Artificial Sequence
  Synthetic
gcuuuaagaggacauuugaaucga

SEQ ID NO: 484367 - RNA, 18 nt, Artificial Sequence
  Synthetic
gugggacauuaacaucga

SEQ ID NO: 484368 - RNA, 19 nt, Artificial Sequence
  Synthetic
ugugggacauuaacaucga

SEQ ID NO: 484369 - RNA, 20 nt, Artificial Sequence
  Synthetic
cugugggacauuaacaucga

SEQ ID NO: 484370 - RNA, 21 nt, Artificial Sequence
  Synthetic
ccugugggacauuaacaucga

SEQ ID NO: 484371 - RNA, 22 nt, Artificial Sequence
  Synthetic
uccugugggacauuaacaucga

SEQ ID NO: 484372 - RNA, 23 nt, Artificial Sequence
  Synthetic
uuccugugggacauuaacaucga

SEQ ID NO: 484373 - RNA, 24 nt, Artificial Sequence
  Synthetic
guuccugugggacauuaacaucga

SEQ ID NO: 484374 - RNA, 18 nt, Artificial Sequence
  Synthetic
aauaugaggauacaucga

SEQ ID NO: 484375 - RNA, 19 nt, Artificial Sequence
  Synthetic
gaauaugaggauacaucga

SEQ ID NO: 484376 - RNA, 20 nt, Artificial Sequence
  Synthetic
ugaauaugaggauacaucga

SEQ ID NO: 484377 - RNA, 21 nt, Artificial Sequence
  Synthetic
gugaauaugaggauacaucga

SEQ ID NO: 484378 - RNA, 22 nt, Artificial Sequence
  Synthetic
agugaauaugaggauacaucga

SEQ ID NO: 484379 - RNA, 23 nt, Artificial Sequence
  Synthetic
uagugaauaugaggauacaucga

SEQ ID NO: 484380 - RNA, 24 nt, Artificial Sequence
  Synthetic
auagugaauaugaggauacaucga

SEQ ID NO: 484381 - RNA, 18 nt, Artificial Sequence
  Synthetic
auaauacaaaugcaucga

SEQ ID NO: 484382 - RNA, 19 nt, Artificial Sequence
  Synthetic
aauaauacaaaugcaucga

SEQ ID NO: 484383 - RNA, 20 nt, Artificial Sequence
  Synthetic
aaauaauacaaaugcaucga

SEQ ID NO: 484384 - RNA, 21 nt, Artificial Sequence
  Synthetic
uaaauaauacaaaugcaucga

SEQ ID NO: 484385 - RNA, 22 nt, Artificial Sequence
  Synthetic
guaaauaauacaaaugcaucga

SEQ ID NO: 484386 - RNA, 23 nt, Artificial Sequence
  Synthetic
aguaaauaauacaaaugcaucga

SEQ ID NO: 484387 - RNA, 24 nt, Artificial Sequence
  Synthetic
aaguaaauaauacaaaugcaucga

SEQ ID NO: 484388 - RNA, 18 nt, Artificial Sequence
  Synthetic
gauuuaaccagucaucga

SEQ ID NO: 484389 - RNA, 19 nt, Artificial Sequence
  Synthetic
ggauuuaaccagucaucga

SEQ ID NO: 484390 - RNA, 20 nt, Artificial Sequence
  Synthetic
uggauuuaaccagucaucga

SEQ ID NO: 484391 - RNA, 21 nt, Artificial Sequence
  Synthetic
guggauuuaaccagucaucga

SEQ ID NO: 484392 - RNA, 22 nt, Artificial Sequence
  Synthetic
uguggauuuaaccagucaucga

SEQ ID NO: 484393 - RNA, 23 nt, Artificial Sequence
  Synthetic
uuguggauuuaaccagucaucga

SEQ ID NO: 484394 - RNA, 24 nt, Artificial Sequence
  Synthetic
uuuguggauuuaaccagucaucga

SEQ ID NO: 484395 - RNA, 18 nt, Artificial Sequence
  Synthetic
cauuuuuuuuccuaucga

SEQ ID NO: 484396 - RNA, 19 nt, Artificial Sequence
  Synthetic
acauuuuuuuuccuaucga

SEQ ID NO: 484397 - RNA, 20 nt, Artificial Sequence
  Synthetic
uacauuuuuuuuccuaucga

SEQ ID NO: 484398 - RNA, 21 nt, Artificial Sequence
  Synthetic
auacauuuuuuuuccuaucga

SEQ ID NO: 484399 - RNA, 22 nt, Artificial Sequence
  Synthetic
cauacauuuuuuuuccuaucga

SEQ ID NO: 484400 - RNA, 23 nt, Artificial Sequence
  Synthetic
acauacauuuuuuuuccuaucga

SEQ ID NO: 484401 - RNA, 24 nt, Artificial Sequence
  Synthetic
cacauacauuuuuuuuccuaucga

SEQ ID NO: 484402 - RNA, 18 nt, Artificial Sequence
  Synthetic
uuuacuucucuaacucga

SEQ ID NO: 484403 - RNA, 19 nt, Artificial Sequence
  Synthetic
uuuuacuucucuaacucga

SEQ ID NO: 484404 - RNA, 20 nt, Artificial Sequence
  Synthetic
uuuuuacuucucuaacucga

SEQ ID NO: 484405 - RNA, 21 nt, Artificial Sequence
  Synthetic
uuuuuuacuucucuaacucga

SEQ ID NO: 484406 - RNA, 22 nt, Artificial Sequence
  Synthetic
cuuuuuuacuucucuaacucga

SEQ ID NO: 484407 - RNA, 23 nt, Artificial Sequence
  Synthetic
acuuuuuuacuucucuaacucga

SEQ ID NO: 484408 - RNA, 24 nt, Artificial Sequence
  Synthetic
uacuuuuuuacuucucuaacucga

SEQ ID NO: 484409 - RNA, 18 nt, Artificial Sequence
  Synthetic
uuuuuucaaggcccucga

SEQ ID NO: 484410 - RNA, 19 nt, Artificial Sequence
  Synthetic
uuuuuuucaaggcccucga

SEQ ID NO: 484411 - RNA, 20 nt, Artificial Sequence
  Synthetic
auuuuuuucaaggcccucga

SEQ ID NO: 484412 - RNA, 21 nt, Artificial Sequence
  Synthetic
uauuuuuuucaaggcccucga

SEQ ID NO: 484413 - RNA, 22 nt, Artificial Sequence
  Synthetic
cuauuuuuuucaaggcccucga

SEQ ID NO: 484414 - RNA, 23 nt, Artificial Sequence
  Synthetic
ccuauuuuuuucaaggcccucga

SEQ ID NO: 484415 - RNA, 24 nt, Artificial Sequence
  Synthetic
accuauuuuuuucaaggcccucga

SEQ ID NO: 484416 - RNA, 18 nt, Artificial Sequence
  Synthetic
auuuaaugagcaagucga

SEQ ID NO: 484417 - RNA, 19 nt, Artificial Sequence
  Synthetic
cauuuaaugagcaagucga

SEQ ID NO: 484418 - RNA, 20 nt, Artificial Sequence
  Synthetic
acauuuaaugagcaagucga

SEQ ID NO: 484419 - RNA, 21 nt, Artificial Sequence
  Synthetic
cacauuuaaugagcaagucga

SEQ ID NO: 484420 - RNA, 22 nt, Artificial Sequence
  Synthetic
ucacauuuaaugagcaagucga

SEQ ID NO: 484421 - RNA, 23 nt, Artificial Sequence
  Synthetic
gucacauuuaaugagcaagucga

SEQ ID NO: 484422 - RNA, 24 nt, Artificial Sequence
  Synthetic
ggucacauuuaaugagcaagucga

SEQ ID NO: 484423 - RNA, 18 nt, Artificial Sequence
  Synthetic
cuggacuuucugggucga

SEQ ID NO: 484424 - RNA, 19 nt, Artificial Sequence
  Synthetic
gcuggacuuucugggucga

SEQ ID NO: 484425 - RNA, 20 nt, Artificial Sequence
  Synthetic
agcuggacuuucugggucga

SEQ ID NO: 484426 - RNA, 21 nt, Artificial Sequence
  Synthetic
cagcuggacuuucugggucga

SEQ ID NO: 484427 - RNA, 22 nt, Artificial Sequence
  Synthetic
ccagcuggacuuucugggucga

SEQ ID NO: 484428 - RNA, 23 nt, Artificial Sequence
  Synthetic
gccagcuggacuuucugggucga

SEQ ID NO: 484429 - RNA, 24 nt, Artificial Sequence
  Synthetic
ggccagcuggacuuucugggucga

SEQ ID NO: 484430 - RNA, 18 nt, Artificial Sequence
  Synthetic
caucugcuaagaugucga

SEQ ID NO: 484431 - RNA, 19 nt, Artificial Sequence
  Synthetic
acaucugcuaagaugucga

SEQ ID NO: 484432 - RNA, 20 nt, Artificial Sequence
  Synthetic
aacaucugcuaagaugucga

SEQ ID NO: 484433 - RNA, 21 nt, Artificial Sequence
  Synthetic
caacaucugcuaagaugucga

SEQ ID NO: 484434 - RNA, 22 nt, Artificial Sequence
  Synthetic
ccaacaucugcuaagaugucga

SEQ ID NO: 484435 - RNA, 23 nt, Artificial Sequence
  Synthetic
gccaacaucugcuaagaugucga

SEQ ID NO: 484436 - RNA, 24 nt, Artificial Sequence
  Synthetic
ugccaacaucugcuaagaugucga

SEQ ID NO: 484437 - RNA, 18 nt, Artificial Sequence
  Synthetic
ucaggacgugauauucga

SEQ ID NO: 484438 - RNA, 19 nt, Artificial Sequence
  Synthetic
cucaggacgugauauucga

SEQ ID NO: 484439 - RNA, 20 nt, Artificial Sequence
  Synthetic
ucucaggacgugauauucga

SEQ ID NO: 484440 - RNA, 21 nt, Artificial Sequence
  Synthetic
gucucaggacgugauauucga

SEQ ID NO: 484441 - RNA, 22 nt, Artificial Sequence
  Synthetic
ugucucaggacgugauauucga

SEQ ID NO: 484442 - RNA, 23 nt, Artificial Sequence
  Synthetic
cugucucaggacgugauauucga

SEQ ID NO: 484443 - RNA, 24 nt, Artificial Sequence
  Synthetic
acugucucaggacgugauauucga

SEQ ID NO: 484444 - RNA, 18 nt, Artificial Sequence
  Synthetic
aaaaaaucaguuguucga

SEQ ID NO: 484445 - RNA, 19 nt, Artificial Sequence
  Synthetic
aaaaaaaucaguuguucga

SEQ ID NO: 484446 - RNA, 20 nt, Artificial Sequence
  Synthetic
uaaaaaaaucaguuguucga

SEQ ID NO: 484447 - RNA, 21 nt, Artificial Sequence
  Synthetic
uuaaaaaaaucaguuguucga

SEQ ID NO: 484448 - RNA, 22 nt, Artificial Sequence
  Synthetic
uuuaaaaaaaucaguuguucga

SEQ ID NO: 484449 - RNA, 23 nt, Artificial Sequence
  Synthetic
auuuaaaaaaaucaguuguucga

SEQ ID NO: 484450 - RNA, 24 nt, Artificial Sequence
  Synthetic
uauuuaaaaaaaucaguuguucga

SEQ ID NO: 484451 - RNA, 18 nt, Artificial Sequence
  Synthetic
aaaaaaaaaaaaaaagga

SEQ ID NO: 484452 - RNA, 19 nt, Artificial Sequence
  Synthetic
uaaaaaaaaaaaaaaagga

SEQ ID NO: 484453 - RNA, 20 nt, Artificial Sequence
  Synthetic
uuaaaaaaaaaaaaaaagga

SEQ ID NO: 484454 - RNA, 21 nt, Artificial Sequence
  Synthetic
uuuaaaaaaaaaaaaaaagga

SEQ ID NO: 484455 - RNA, 22 nt, Artificial Sequence
  Synthetic
cuuuaaaaaaaaaaaaaaagga

SEQ ID NO: 484456 - RNA, 23 nt, Artificial Sequence
  Synthetic
acuuuaaaaaaaaaaaaaaagga

SEQ ID NO: 484457 - RNA, 24 nt, Artificial Sequence
  Synthetic
gacuuuaaaaaaaaaaaaaaagga

SEQ ID NO: 484458 - RNA, 18 nt, Artificial Sequence
  Synthetic
ggagaaaaaaaaaaagga

SEQ ID NO: 484459 - RNA, 19 nt, Artificial Sequence
  Synthetic
aggagaaaaaaaaaaagga

SEQ ID NO: 484460 - RNA, 20 nt, Artificial Sequence
  Synthetic
aaggagaaaaaaaaaaagga

SEQ ID NO: 484461 - RNA, 21 nt, Artificial Sequence
  Synthetic
gaaggagaaaaaaaaaaagga

SEQ ID NO: 484462 - RNA, 22 nt, Artificial Sequence
  Synthetic
ggaaggagaaaaaaaaaaagga

SEQ ID NO: 484463 - RNA, 23 nt, Artificial Sequence
  Synthetic
gggaaggagaaaaaaaaaaagga

SEQ ID NO: 484464 - RNA, 24 nt, Artificial Sequence
  Synthetic
agggaaggagaaaaaaaaaaagga

SEQ ID NO: 484465 - RNA, 18 nt, Artificial Sequence
  Synthetic
gaaauuaaaaaaaaagga

SEQ ID NO: 484466 - RNA, 19 nt, Artificial Sequence
  Synthetic
agaaauuaaaaaaaaagga

SEQ ID NO: 484467 - RNA, 20 nt, Artificial Sequence
  Synthetic
cagaaauuaaaaaaaaagga

SEQ ID NO: 484468 - RNA, 21 nt, Artificial Sequence
  Synthetic
acagaaauuaaaaaaaaagga

SEQ ID NO: 484469 - RNA, 22 nt, Artificial Sequence
  Synthetic
aacagaaauuaaaaaaaaagga

SEQ ID NO: 484470 - RNA, 23 nt, Artificial Sequence
  Synthetic
gaacagaaauuaaaaaaaaagga

SEQ ID NO: 484471 - RNA, 24 nt, Artificial Sequence
  Synthetic
agaacagaaauuaaaaaaaaagga

SEQ ID NO: 484472 - RNA, 18 nt, Artificial Sequence
  Synthetic
aaggauaagaaaaaagga

SEQ ID NO: 484473 - RNA, 19 nt, Artificial Sequence
  Synthetic
aaaggauaagaaaaaagga

SEQ ID NO: 484474 - RNA, 20 nt, Artificial Sequence
  Synthetic
aaaaggauaagaaaaaagga

SEQ ID NO: 484475 - RNA, 21 nt, Artificial Sequence
  Synthetic
aaaaaggauaagaaaaaagga

SEQ ID NO: 484476 - RNA, 22 nt, Artificial Sequence
  Synthetic
aaaaaaggauaagaaaaaagga

SEQ ID NO: 484477 - RNA, 23 nt, Artificial Sequence
  Synthetic
aaaaaaaggauaagaaaaaagga

SEQ ID NO: 484478 - RNA, 24 nt, Artificial Sequence
  Synthetic
aaaaaaaaggauaagaaaaaagga

SEQ ID NO: 484479 - RNA, 18 nt, Artificial Sequence
  Synthetic
uguuucccccaaaaagga

SEQ ID NO: 484480 - RNA, 19 nt, Artificial Sequence
  Synthetic
auguuucccccaaaaagga

SEQ ID NO: 484481 - RNA, 20 nt, Artificial Sequence
  Synthetic
aauguuucccccaaaaagga

SEQ ID NO: 484482 - RNA, 21 nt, Artificial Sequence
  Synthetic
gaauguuucccccaaaaagga

SEQ ID NO: 484483 - RNA, 22 nt, Artificial Sequence
  Synthetic
agaauguuucccccaaaaagga

SEQ ID NO: 484484 - RNA, 23 nt, Artificial Sequence
  Synthetic
uagaauguuucccccaaaaagga

SEQ ID NO: 484485 - RNA, 24 nt, Artificial Sequence
  Synthetic
uuagaauguuucccccaaaaagga

SEQ ID NO: 484486 - RNA, 18 nt, Artificial Sequence
  Synthetic
cauaaaaaggaaaaagga

SEQ ID NO: 484487 - RNA, 19 nt, Artificial Sequence
  Synthetic
acauaaaaaggaaaaagga

SEQ ID NO: 484488 - RNA, 20 nt, Artificial Sequence
  Synthetic
uacauaaaaaggaaaaagga

SEQ ID NO: 484489 - RNA, 21 nt, Artificial Sequence
  Synthetic
auacauaaaaaggaaaaagga

SEQ ID NO: 484490 - RNA, 22 nt, Artificial Sequence
  Synthetic
aauacauaaaaaggaaaaagga

SEQ ID NO: 484491 - RNA, 23 nt, Artificial Sequence
  Synthetic
uaauacauaaaaaggaaaaagga

SEQ ID NO: 484492 - RNA, 24 nt, Artificial Sequence
  Synthetic
auaauacauaaaaaggaaaaagga

SEQ ID NO: 484493 - RNA, 18 nt, Artificial Sequence
  Synthetic
cugcagccauaaaaagga

SEQ ID NO: 484494 - RNA, 19 nt, Artificial Sequence
  Synthetic
ucugcagccauaaaaagga

SEQ ID NO: 484495 - RNA, 20 nt, Artificial Sequence
  Synthetic
cucugcagccauaaaaagga

SEQ ID NO: 484496 - RNA, 21 nt, Artificial Sequence
  Synthetic
acucugcagccauaaaaagga

SEQ ID NO: 484497 - RNA, 22 nt, Artificial Sequence
  Synthetic
uacucugcagccauaaaaagga

SEQ ID NO: 484498 - RNA, 23 nt, Artificial Sequence
  Synthetic
auacucugcagccauaaaaagga

SEQ ID NO: 484499 - RNA, 24 nt, Artificial Sequence
  Synthetic
aauacucugcagccauaaaaagga

SEQ ID NO: 484500 - RNA, 18 nt, Artificial Sequence
  Synthetic
auucagucauaaaaagga

SEQ ID NO: 484501 - RNA, 19 nt, Artificial Sequence
  Synthetic
uauucagucauaaaaagga

SEQ ID NO: 484502 - RNA, 20 nt, Artificial Sequence
  Synthetic
uuauucagucauaaaaagga

SEQ ID NO: 484503 - RNA, 21 nt, Artificial Sequence
  Synthetic
auuauucagucauaaaaagga

SEQ ID NO: 484504 - RNA, 22 nt, Artificial Sequence
  Synthetic
uauuauucagucauaaaaagga

SEQ ID NO: 484505 - RNA, 23 nt, Artificial Sequence
  Synthetic
auauuauucagucauaaaaagga

SEQ ID NO: 484506 - RNA, 24 nt, Artificial Sequence
  Synthetic
aauauuauucagucauaaaaagga

SEQ ID NO: 484507 - RNA, 18 nt, Artificial Sequence
  Synthetic
auugcagaaacaaaagga

SEQ ID NO: 484508 - RNA, 19 nt, Artificial Sequence
  Synthetic
cauugcagaaacaaaagga

SEQ ID NO: 484509 - RNA, 20 nt, Artificial Sequence
  Synthetic
gcauugcagaaacaaaagga

SEQ ID NO: 484510 - RNA, 21 nt, Artificial Sequence
  Synthetic
agcauugcagaaacaaaagga

SEQ ID NO: 484511 - RNA, 22 nt, Artificial Sequence
  Synthetic
aagcauugcagaaacaaaagga

SEQ ID NO: 484512 - RNA, 23 nt, Artificial Sequence
  Synthetic
aaagcauugcagaaacaaaagga

SEQ ID NO: 484513 - RNA, 24 nt, Artificial Sequence
  Synthetic
aaaagcauugcagaaacaaaagga

SEQ ID NO: 484514 - RNA, 18 nt, Artificial Sequence
  Synthetic
cucaacucaagaaaagga

SEQ ID NO: 484515 - RNA, 19 nt, Artificial Sequence
  Synthetic
gcucaacucaagaaaagga

SEQ ID NO: 484516 - RNA, 20 nt, Artificial Sequence
  Synthetic
agcucaacucaagaaaagga

SEQ ID NO: 484517 - RNA, 21 nt, Artificial Sequence
  Synthetic
gagcucaacucaagaaaagga

SEQ ID NO: 484518 - RNA, 22 nt, Artificial Sequence
  Synthetic
ugagcucaacucaagaaaagga

SEQ ID NO: 484519 - RNA, 23 nt, Artificial Sequence
  Synthetic
augagcucaacucaagaaaagga

SEQ ID NO: 484520 - RNA, 24 nt, Artificial Sequence
  Synthetic
aaugagcucaacucaagaaaagga

SEQ ID NO: 484521 - RNA, 18 nt, Artificial Sequence
  Synthetic
uuacaauuaugaaaagga

SEQ ID NO: 484522 - RNA, 19 nt, Artificial Sequence
  Synthetic
uuuacaauuaugaaaagga

SEQ ID NO: 484523 - RNA, 20 nt, Artificial Sequence
  Synthetic
guuuacaauuaugaaaagga

SEQ ID NO: 484524 - RNA, 21 nt, Artificial Sequence
  Synthetic
uguuuacaauuaugaaaagga

SEQ ID NO: 484525 - RNA, 22 nt, Artificial Sequence
  Synthetic
uuguuuacaauuaugaaaagga

SEQ ID NO: 484526 - RNA, 23 nt, Artificial Sequence
  Synthetic
auuguuuacaauuaugaaaagga

SEQ ID NO: 484527 - RNA, 24 nt, Artificial Sequence
  Synthetic
cauuguuuacaauuaugaaaagga

SEQ ID NO: 484528 - RNA, 18 nt, Artificial Sequence
  Synthetic
ugaaaauauugaaaagga

SEQ ID NO: 484529 - RNA, 19 nt, Artificial Sequence
  Synthetic
augaaaauauugaaaagga

SEQ ID NO: 484530 - RNA, 20 nt, Artificial Sequence
  Synthetic
gaugaaaauauugaaaagga

SEQ ID NO: 484531 - RNA, 21 nt, Artificial Sequence
  Synthetic
ugaugaaaauauugaaaagga

SEQ ID NO: 484532 - RNA, 22 nt, Artificial Sequence
  Synthetic
cugaugaaaauauugaaaagga

SEQ ID NO: 484533 - RNA, 23 nt, Artificial Sequence
  Synthetic
acugaugaaaauauugaaaagga

SEQ ID NO: 484534 - RNA, 24 nt, Artificial Sequence
  Synthetic
cacugaugaaaauauugaaaagga

SEQ ID NO: 484535 - RNA, 18 nt, Artificial Sequence
  Synthetic
aggcucaaaauaaaagga

SEQ ID NO: 484536 - RNA, 19 nt, Artificial Sequence
  Synthetic
uaggcucaaaauaaaagga

SEQ ID NO: 484537 - RNA, 20 nt, Artificial Sequence
  Synthetic
auaggcucaaaauaaaagga

SEQ ID NO: 484538 - RNA, 21 nt, Artificial Sequence
  Synthetic
cauaggcucaaaauaaaagga

SEQ ID NO: 484539 - RNA, 22 nt, Artificial Sequence
  Synthetic
acauaggcucaaaauaaaagga

SEQ ID NO: 484540 - RNA, 23 nt, Artificial Sequence
  Synthetic
cacauaggcucaaaauaaaagga

SEQ ID NO: 484541 - RNA, 24 nt, Artificial Sequence
  Synthetic
acacauaggcucaaaauaaaagga

SEQ ID NO: 484542 - RNA, 18 nt, Artificial Sequence
  Synthetic
ucacuugugguaaaagga

SEQ ID NO: 484543 - RNA, 19 nt, Artificial Sequence
  Synthetic
aucacuugugguaaaagga

SEQ ID NO: 484544 - RNA, 20 nt, Artificial Sequence
  Synthetic
uaucacuugugguaaaagga

SEQ ID NO: 484545 - RNA, 21 nt, Artificial Sequence
  Synthetic
auaucacuugugguaaaagga

SEQ ID NO: 484546 - RNA, 22 nt, Artificial Sequence
  Synthetic
aauaucacuugugguaaaagga

SEQ ID NO: 484547 - RNA, 23 nt, Artificial Sequence
  Synthetic
aaauaucacuugugguaaaagga

SEQ ID NO: 484548 - RNA, 24 nt, Artificial Sequence
  Synthetic
aaaauaucacuugugguaaaagga

SEQ ID NO: 484549 - RNA, 18 nt, Artificial Sequence
  Synthetic
cgaaaaacuuacaaagga

SEQ ID NO: 484550 - RNA, 19 nt, Artificial Sequence
  Synthetic
gcgaaaaacuuacaaagga

SEQ ID NO: 484551 - RNA, 20 nt, Artificial Sequence
  Synthetic
agcgaaaaacuuacaaagga

SEQ ID NO: 484552 - RNA, 21 nt, Artificial Sequence
  Synthetic
aagcgaaaaacuuacaaagga

SEQ ID NO: 484553 - RNA, 22 nt, Artificial Sequence
  Synthetic
gaagcgaaaaacuuacaaagga

SEQ ID NO: 484554 - RNA, 23 nt, Artificial Sequence
  Synthetic
ugaagcgaaaaacuuacaaagga

SEQ ID NO: 484555 - RNA, 24 nt, Artificial Sequence
  Synthetic
cugaagcgaaaaacuuacaaagga

SEQ ID NO: 484556 - RNA, 18 nt, Artificial Sequence
  Synthetic
cccugcaacgccaaagga

SEQ ID NO: 484557 - RNA, 19 nt, Artificial Sequence
  Synthetic
acccugcaacgccaaagga

SEQ ID NO: 484558 - RNA, 20 nt, Artificial Sequence
  Synthetic
uacccugcaacgccaaagga

SEQ ID NO: 484559 - RNA, 21 nt, Artificial Sequence
  Synthetic
guacccugcaacgccaaagga

SEQ ID NO: 484560 - RNA, 22 nt, Artificial Sequence
  Synthetic
uguacccugcaacgccaaagga

SEQ ID NO: 484561 - RNA, 23 nt, Artificial Sequence
  Synthetic
cuguacccugcaacgccaaagga

SEQ ID NO: 484562 - RNA, 24 nt, Artificial Sequence
  Synthetic
gcuguacccugcaacgccaaagga

SEQ ID NO: 484563 - RNA, 18 nt, Artificial Sequence
  Synthetic
gucuugguugccaaagga

SEQ ID NO: 484564 - RNA, 19 nt, Artificial Sequence
  Synthetic
ugucuugguugccaaagga

SEQ ID NO: 484565 - RNA, 20 nt, Artificial Sequence
  Synthetic
gugucuugguugccaaagga

SEQ ID NO: 484566 - RNA, 21 nt, Artificial Sequence
  Synthetic
agugucuugguugccaaagga

SEQ ID NO: 484567 - RNA, 22 nt, Artificial Sequence
  Synthetic
cagugucuugguugccaaagga

SEQ ID NO: 484568 - RNA, 23 nt, Artificial Sequence
  Synthetic
ucagugucuugguugccaaagga

SEQ ID NO: 484569 - RNA, 24 nt, Artificial Sequence
  Synthetic
cucagugucuugguugccaaagga

SEQ ID NO: 484570 - RNA, 18 nt, Artificial Sequence
  Synthetic
cauauaugcagcaaagga

SEQ ID NO: 484571 - RNA, 19 nt, Artificial Sequence
  Synthetic
acauauaugcagcaaagga

SEQ ID NO: 484572 - RNA, 20 nt, Artificial Sequence
  Synthetic
uacauauaugcagcaaagga

SEQ ID NO: 484573 - RNA, 21 nt, Artificial Sequence
  Synthetic
auacauauaugcagcaaagga

SEQ ID NO: 484574 - RNA, 22 nt, Artificial Sequence
  Synthetic
uauacauauaugcagcaaagga

SEQ ID NO: 484575 - RNA, 23 nt, Artificial Sequence
  Synthetic
auauacauauaugcagcaaagga

SEQ ID NO: 484576 - RNA, 24 nt, Artificial Sequence
  Synthetic
uauauacauauaugcagcaaagga

SEQ ID NO: 484577 - RNA, 18 nt, Artificial Sequence
  Synthetic
ucaaaguguuucaaagga

SEQ ID NO: 484578 - RNA, 19 nt, Artificial Sequence
  Synthetic
aucaaaguguuucaaagga

SEQ ID NO: 484579 - RNA, 20 nt, Artificial Sequence
  Synthetic
aaucaaaguguuucaaagga

SEQ ID NO: 484580 - RNA, 21 nt, Artificial Sequence
  Synthetic
uaaucaaaguguuucaaagga

SEQ ID NO: 484581 - RNA, 22 nt, Artificial Sequence
  Synthetic
uuaaucaaaguguuucaaagga

SEQ ID NO: 484582 - RNA, 23 nt, Artificial Sequence
  Synthetic
uuuaaucaaaguguuucaaagga

SEQ ID NO: 484583 - RNA, 24 nt, Artificial Sequence
  Synthetic
uuuuaaucaaaguguuucaaagga

SEQ ID NO: 484584 - RNA, 18 nt, Artificial Sequence
  Synthetic
aagaaacaaaagaaagga

SEQ ID NO: 484585 - RNA, 19 nt, Artificial Sequence
  Synthetic
gaagaaacaaaagaaagga

SEQ ID NO: 484586 - RNA, 20 nt, Artificial Sequence
  Synthetic
ggaagaaacaaaagaaagga

SEQ ID NO: 484587 - RNA, 21 nt, Artificial Sequence
  Synthetic
aggaagaaacaaaagaaagga

SEQ ID NO: 484588 - RNA, 22 nt, Artificial Sequence
  Synthetic
aaggaagaaacaaaagaaagga

SEQ ID NO: 484589 - RNA, 23 nt, Artificial Sequence
  Synthetic
gaaggaagaaacaaaagaaagga

SEQ ID NO: 484590 - RNA, 24 nt, Artificial Sequence
  Synthetic
ggaaggaagaaacaaaagaaagga

SEQ ID NO: 484591 - RNA, 18 nt, Artificial Sequence
  Synthetic
aaagaaagaaagaaagga

SEQ ID NO: 484592 - RNA, 19 nt, Artificial Sequence
  Synthetic
gaaagaaagaaagaaagga

SEQ ID NO: 484593 - RNA, 20 nt, Artificial Sequence
  Synthetic
agaaagaaagaaagaaagga

SEQ ID NO: 484594 - RNA, 21 nt, Artificial Sequence
  Synthetic
aagaaagaaagaaagaaagga

SEQ ID NO: 484595 - RNA, 22 nt, Artificial Sequence
  Synthetic
gaagaaagaaagaaagaaagga

SEQ ID NO: 484596 - RNA, 23 nt, Artificial Sequence
  Synthetic
agaagaaagaaagaaagaaagga

SEQ ID NO: 484597 - RNA, 24 nt, Artificial Sequence
  Synthetic
aagaagaaagaaagaaagaaagga

SEQ ID NO: 484598 - RNA, 18 nt, Artificial Sequence
  Synthetic
agagguagaaagaaagga

SEQ ID NO: 484599 - RNA, 19 nt, Artificial Sequence
  Synthetic
gagagguagaaagaaagga

SEQ ID NO: 484600 - RNA, 20 nt, Artificial Sequence
  Synthetic
agagagguagaaagaaagga

SEQ ID NO: 484601 - RNA, 21 nt, Artificial Sequence
  Synthetic
gagagagguagaaagaaagga

SEQ ID NO: 484602 - RNA, 22 nt, Artificial Sequence
  Synthetic
ggagagagguagaaagaaagga

SEQ ID NO: 484603 - RNA, 23 nt, Artificial Sequence
  Synthetic
aggagagagguagaaagaaagga

SEQ ID NO: 484604 - RNA, 24 nt, Artificial Sequence
  Synthetic
aaggagagagguagaaagaaagga

SEQ ID NO: 484605 - RNA, 18 nt, Artificial Sequence
  Synthetic
uacagaaaacagaaagga

SEQ ID NO: 484606 - RNA, 19 nt, Artificial Sequence
  Synthetic
cuacagaaaacagaaagga

SEQ ID NO: 484607 - RNA, 20 nt, Artificial Sequence
  Synthetic
acuacagaaaacagaaagga

SEQ ID NO: 484608 - RNA, 21 nt, Artificial Sequence
  Synthetic
aacuacagaaaacagaaagga

SEQ ID NO: 484609 - RNA, 22 nt, Artificial Sequence
  Synthetic
aaacuacagaaaacagaaagga

SEQ ID NO: 484610 - RNA, 23 nt, Artificial Sequence
  Synthetic
caaacuacagaaaacagaaagga

SEQ ID NO: 484611 - RNA, 24 nt, Artificial Sequence
  Synthetic
ucaaacuacagaaaacagaaagga

SEQ ID NO: 484612 - RNA, 18 nt, Artificial Sequence
  Synthetic
uuaaauuauuagaaagga

SEQ ID NO: 484613 - RNA, 19 nt, Artificial Sequence
  Synthetic
auuaaauuauuagaaagga

SEQ ID NO: 484614 - RNA, 20 nt, Artificial Sequence
  Synthetic
uauuaaauuauuagaaagga

SEQ ID NO: 484615 - RNA, 21 nt, Artificial Sequence
  Synthetic
uuauuaaauuauuagaaagga

SEQ ID NO: 484616 - RNA, 22 nt, Artificial Sequence
  Synthetic
auuauuaaauuauuagaaagga

SEQ ID NO: 484617 - RNA, 23 nt, Artificial Sequence
  Synthetic
gauuauuaaauuauuagaaagga

SEQ ID NO: 484618 - RNA, 24 nt, Artificial Sequence
  Synthetic
cgauuauuaaauuauuagaaagga

SEQ ID NO: 484619 - RNA, 18 nt, Artificial Sequence
  Synthetic
ugcggauguuagaaagga

SEQ ID NO: 484620 - RNA, 19 nt, Artificial Sequence
  Synthetic
uugcggauguuagaaagga

SEQ ID NO: 484621 - RNA, 20 nt, Artificial Sequence
  Synthetic
guugcggauguuagaaagga

SEQ ID NO: 484622 - RNA, 21 nt, Artificial Sequence
  Synthetic
uguugcggauguuagaaagga

SEQ ID NO: 484623 - RNA, 22 nt, Artificial Sequence
  Synthetic
auguugcggauguuagaaagga

SEQ ID NO: 484624 - RNA, 23 nt, Artificial Sequence
  Synthetic
aauguugcggauguuagaaagga

SEQ ID NO: 484625 - RNA, 24 nt, Artificial Sequence
  Synthetic
caauguugcggauguuagaaagga

SEQ ID NO: 484626 - RNA, 18 nt, Artificial Sequence
  Synthetic
aggaacagaaggaaagga

SEQ ID NO: 484627 - RNA, 19 nt, Artificial Sequence
  Synthetic
aaggaacagaaggaaagga

SEQ ID NO: 484628 - RNA, 20 nt, Artificial Sequence
  Synthetic
aaaggaacagaaggaaagga

SEQ ID NO: 484629 - RNA, 21 nt, Artificial Sequence
  Synthetic
aaaaggaacagaaggaaagga

SEQ ID NO: 484630 - RNA, 22 nt, Artificial Sequence
  Synthetic
gaaaaggaacagaaggaaagga

SEQ ID NO: 484631 - RNA, 23 nt, Artificial Sequence
  Synthetic
ggaaaaggaacagaaggaaagga

SEQ ID NO: 484632 - RNA, 24 nt, Artificial Sequence
  Synthetic
aggaaaaggaacagaaggaaagga

SEQ ID NO: 484633 - RNA, 18 nt, Artificial Sequence
  Synthetic
aaagaagggaggaaagga

SEQ ID NO: 484634 - RNA, 19 nt, Artificial Sequence
  Synthetic
aaaagaagggaggaaagga

SEQ ID NO: 484635 - RNA, 20 nt, Artificial Sequence
  Synthetic
gaaaagaagggaggaaagga

SEQ ID NO: 484636 - RNA, 21 nt, Artificial Sequence
  Synthetic
agaaaagaagggaggaaagga

SEQ ID NO: 484637 - RNA, 22 nt, Artificial Sequence
  Synthetic
aagaaaagaagggaggaaagga

SEQ ID NO: 484638 - RNA, 23 nt, Artificial Sequence
  Synthetic
gaagaaaagaagggaggaaagga

SEQ ID NO: 484639 - RNA, 24 nt, Artificial Sequence
  Synthetic
ggaagaaaagaagggaggaaagga

SEQ ID NO: 484640 - RNA, 18 nt, Artificial Sequence
  Synthetic
aguauucuagggaaagga

SEQ ID NO: 484641 - RNA, 19 nt, Artificial Sequence
  Synthetic
aaguauucuagggaaagga

SEQ ID NO: 484642 - RNA, 20 nt, Artificial Sequence
  Synthetic
aaaguauucuagggaaagga

SEQ ID NO: 484643 - RNA, 21 nt, Artificial Sequence
  Synthetic
gaaaguauucuagggaaagga

SEQ ID NO: 484644 - RNA, 22 nt, Artificial Sequence
  Synthetic
agaaaguauucuagggaaagga

SEQ ID NO: 484645 - RNA, 23 nt, Artificial Sequence
  Synthetic
aagaaaguauucuagggaaagga

SEQ ID NO: 484646 - RNA, 24 nt, Artificial Sequence
  Synthetic
aaagaaaguauucuagggaaagga

SEQ ID NO: 484647 - RNA, 18 nt, Artificial Sequence
  Synthetic
ucaaagugagugaaagga

SEQ ID NO: 484648 - RNA, 19 nt, Artificial Sequence
  Synthetic
aucaaagugagugaaagga

SEQ ID NO: 484649 - RNA, 20 nt, Artificial Sequence
  Synthetic
uaucaaagugagugaaagga

SEQ ID NO: 484650 - RNA, 21 nt, Artificial Sequence
  Synthetic
uuaucaaagugagugaaagga

SEQ ID NO: 484651 - RNA, 22 nt, Artificial Sequence
  Synthetic
cuuaucaaagugagugaaagga

SEQ ID NO: 484652 - RNA, 23 nt, Artificial Sequence
  Synthetic
ccuuaucaaagugagugaaagga

SEQ ID NO: 484653 - RNA, 24 nt, Artificial Sequence
  Synthetic
gccuuaucaaagugagugaaagga

SEQ ID NO: 484654 - RNA, 18 nt, Artificial Sequence
  Synthetic
cauuuauuagugaaagga

SEQ ID NO: 484655 - RNA, 19 nt, Artificial Sequence
  Synthetic
ucauuuauuagugaaagga

SEQ ID NO: 484656 - RNA, 20 nt, Artificial Sequence
  Synthetic
aucauuuauuagugaaagga

SEQ ID NO: 484657 - RNA, 21 nt, Artificial Sequence
  Synthetic
aaucauuuauuagugaaagga

SEQ ID NO: 484658 - RNA, 22 nt, Artificial Sequence
  Synthetic
aaaucauuuauuagugaaagga

SEQ ID NO: 484659 - RNA, 23 nt, Artificial Sequence
  Synthetic
uaaaucauuuauuagugaaagga

SEQ ID NO: 484660 - RNA, 24 nt, Artificial Sequence
  Synthetic
auaaaucauuuauuagugaaagga

SEQ ID NO: 484661 - RNA, 18 nt, Artificial Sequence
  Synthetic
uuaaucaucaauaaagga

SEQ ID NO: 484662 - RNA, 19 nt, Artificial Sequence
  Synthetic
auuaaucaucaauaaagga

SEQ ID NO: 484663 - RNA, 20 nt, Artificial Sequence
  Synthetic
uauuaaucaucaauaaagga

SEQ ID NO: 484664 - RNA, 21 nt, Artificial Sequence
  Synthetic
auauuaaucaucaauaaagga

SEQ ID NO: 484665 - RNA, 22 nt, Artificial Sequence
  Synthetic
aauauuaaucaucaauaaagga

SEQ ID NO: 484666 - RNA, 23 nt, Artificial Sequence
  Synthetic
gaauauuaaucaucaauaaagga

SEQ ID NO: 484667 - RNA, 24 nt, Artificial Sequence
  Synthetic
agaauauuaaucaucaauaaagga

SEQ ID NO: 484668 - RNA, 18 nt, Artificial Sequence
  Synthetic
augcaucaggauaaagga

SEQ ID NO: 484669 - RNA, 19 nt, Artificial Sequence
  Synthetic
uaugcaucaggauaaagga

SEQ ID NO: 484670 - RNA, 20 nt, Artificial Sequence
  Synthetic
auaugcaucaggauaaagga

SEQ ID NO: 484671 - RNA, 21 nt, Artificial Sequence
  Synthetic
aauaugcaucaggauaaagga

SEQ ID NO: 484672 - RNA, 22 nt, Artificial Sequence
  Synthetic
caauaugcaucaggauaaagga

SEQ ID NO: 484673 - RNA, 23 nt, Artificial Sequence
  Synthetic
acaauaugcaucaggauaaagga

SEQ ID NO: 484674 - RNA, 24 nt, Artificial Sequence
  Synthetic
gacaauaugcaucaggauaaagga

SEQ ID NO: 484675 - RNA, 21 nt, Artificial Sequence
  Synthetic
gacuggguaauuuauaaagga

SEQ ID NO: 484676 - RNA, 22 nt, Artificial Sequence
  Synthetic
agacuggguaauuuauaaagga

SEQ ID NO: 484677 - RNA, 23 nt, Artificial Sequence
  Synthetic
gagacuggguaauuuauaaagga

SEQ ID NO: 484678 - RNA, 24 nt, Artificial Sequence
  Synthetic
ugagacuggguaauuuauaaagga

SEQ ID NO: 484679 - RNA, 18 nt, Artificial Sequence
  Synthetic
ugggugauuuauaaagga

SEQ ID NO: 484680 - RNA, 19 nt, Artificial Sequence
  Synthetic
cugggugauuuauaaagga

SEQ ID NO: 484681 - RNA, 20 nt, Artificial Sequence
  Synthetic
acugggugauuuauaaagga

SEQ ID NO: 484682 - RNA, 21 nt, Artificial Sequence
  Synthetic
gacugggugauuuauaaagga

SEQ ID NO: 484683 - RNA, 22 nt, Artificial Sequence
  Synthetic
agacugggugauuuauaaagga

SEQ ID NO: 484684 - RNA, 23 nt, Artificial Sequence
  Synthetic
gagacugggugauuuauaaagga

SEQ ID NO: 484685 - RNA, 24 nt, Artificial Sequence
  Synthetic
ugagacugggugauuuauaaagga

SEQ ID NO: 484686 - RNA, 18 nt, Artificial Sequence
  Synthetic
aucacuuguacuaaagga

SEQ ID NO: 484687 - RNA, 19 nt, Artificial Sequence
  Synthetic
aaucacuuguacuaaagga

SEQ ID NO: 484688 - RNA, 20 nt, Artificial Sequence
  Synthetic
gaaucacuuguacuaaagga

SEQ ID NO: 484689 - RNA, 21 nt, Artificial Sequence
  Synthetic
agaaucacuuguacuaaagga

SEQ ID NO: 484690 - RNA, 22 nt, Artificial Sequence
  Synthetic
aagaaucacuuguacuaaagga

SEQ ID NO: 484691 - RNA, 23 nt, Artificial Sequence
  Synthetic
uaagaaucacuuguacuaaagga

SEQ ID NO: 484692 - RNA, 24 nt, Artificial Sequence
  Synthetic
auaagaaucacuuguacuaaagga

SEQ ID NO: 484693 - RNA, 18 nt, Artificial Sequence
  Synthetic
gcaauccaauguaaagga

SEQ ID NO: 484694 - RNA, 19 nt, Artificial Sequence
  Synthetic
ggcaauccaauguaaagga

SEQ ID NO: 484695 - RNA, 20 nt, Artificial Sequence
  Synthetic
uggcaauccaauguaaagga

SEQ ID NO: 484696 - RNA, 21 nt, Artificial Sequence
  Synthetic
auggcaauccaauguaaagga

SEQ ID NO: 484697 - RNA, 22 nt, Artificial Sequence
  Synthetic
aauggcaauccaauguaaagga

SEQ ID NO: 484698 - RNA, 23 nt, Artificial Sequence
  Synthetic
uaauggcaauccaauguaaagga

SEQ ID NO: 484699 - RNA, 24 nt, Artificial Sequence
  Synthetic
auaauggcaauccaauguaaagga

SEQ ID NO: 484700 - RNA, 18 nt, Artificial Sequence
  Synthetic
augacagcuuuuaaagga

SEQ ID NO: 484701 - RNA, 19 nt, Artificial Sequence
  Synthetic
uaugacagcuuuuaaagga

SEQ ID NO: 484702 - RNA, 20 nt, Artificial Sequence
  Synthetic
guaugacagcuuuuaaagga

SEQ ID NO: 484703 - RNA, 21 nt, Artificial Sequence
  Synthetic
aguaugacagcuuuuaaagga

SEQ ID NO: 484704 - RNA, 22 nt, Artificial Sequence
  Synthetic
caguaugacagcuuuuaaagga

SEQ ID NO: 484705 - RNA, 23 nt, Artificial Sequence
  Synthetic
acaguaugacagcuuuuaaagga

SEQ ID NO: 484706 - RNA, 24 nt, Artificial Sequence
  Synthetic
uacaguaugacagcuuuuaaagga

SEQ ID NO: 484707 - RNA, 18 nt, Artificial Sequence
  Synthetic
gagcauaaagaacaagga

SEQ ID NO: 484708 - RNA, 19 nt, Artificial Sequence
  Synthetic
agagcauaaagaacaagga

SEQ ID NO: 484709 - RNA, 20 nt, Artificial Sequence
  Synthetic
uagagcauaaagaacaagga

SEQ ID NO: 484710 - RNA, 21 nt, Artificial Sequence
  Synthetic
cuagagcauaaagaacaagga

SEQ ID NO: 484711 - RNA, 22 nt, Artificial Sequence
  Synthetic
ucuagagcauaaagaacaagga

SEQ ID NO: 484712 - RNA, 23 nt, Artificial Sequence
  Synthetic
uucuagagcauaaagaacaagga

SEQ ID NO: 484713 - RNA, 24 nt, Artificial Sequence
  Synthetic
uuucuagagcauaaagaacaagga

SEQ ID NO: 484714 - RNA, 19 nt, Artificial Sequence
  Synthetic
cagcaaacuaucacaagga

SEQ ID NO: 484715 - RNA, 20 nt, Artificial Sequence
  Synthetic
ucagcaaacuaucacaagga

SEQ ID NO: 484716 - RNA, 21 nt, Artificial Sequence
  Synthetic
cucagcaaacuaucacaagga

SEQ ID NO: 484717 - RNA, 22 nt, Artificial Sequence
  Synthetic
ucucagcaaacuaucacaagga

SEQ ID NO: 484718 - RNA, 23 nt, Artificial Sequence
  Synthetic
uucucagcaaacuaucacaagga

SEQ ID NO: 484719 - RNA, 24 nt, Artificial Sequence
  Synthetic
uuucucagcaaacuaucacaagga

SEQ ID NO: 484720 - RNA, 21 nt, Artificial Sequence
  Synthetic
cugagcaaacuaucacaagga

SEQ ID NO: 484721 - RNA, 22 nt, Artificial Sequence
  Synthetic
ucugagcaaacuaucacaagga

SEQ ID NO: 484722 - RNA, 23 nt, Artificial Sequence
  Synthetic
uucugagcaaacuaucacaagga

SEQ ID NO: 484723 - RNA, 24 nt, Artificial Sequence
  Synthetic
auucugagcaaacuaucacaagga

SEQ ID NO: 484724 - RNA, 18 nt, Artificial Sequence
  Synthetic
uuuccagguagacaagga

SEQ ID NO: 484725 - RNA, 19 nt, Artificial Sequence
  Synthetic
uuuuccagguagacaagga

SEQ ID NO: 484726 - RNA, 20 nt, Artificial Sequence
  Synthetic
auuuuccagguagacaagga

SEQ ID NO: 484727 - RNA, 21 nt, Artificial Sequence
  Synthetic
aauuuuccagguagacaagga

SEQ ID NO: 484728 - RNA, 22 nt, Artificial Sequence
  Synthetic
gaauuuuccagguagacaagga

SEQ ID NO: 484729 - RNA, 23 nt, Artificial Sequence
  Synthetic
ugaauuuuccagguagacaagga

SEQ ID NO: 484730 - RNA, 24 nt, Artificial Sequence
  Synthetic
uugaauuuuccagguagacaagga

SEQ ID NO: 484731 - RNA, 18 nt, Artificial Sequence
  Synthetic
gcaaagacacuacaagga

SEQ ID NO: 484732 - RNA, 19 nt, Artificial Sequence
  Synthetic
ggcaaagacacuacaagga

SEQ ID NO: 484733 - RNA, 20 nt, Artificial Sequence
  Synthetic
aggcaaagacacuacaagga

SEQ ID NO: 484734 - RNA, 21 nt, Artificial Sequence
  Synthetic
caggcaaagacacuacaagga

SEQ ID NO: 484735 - RNA, 22 nt, Artificial Sequence
  Synthetic
ccaggcaaagacacuacaagga

SEQ ID NO: 484736 - RNA, 23 nt, Artificial Sequence
  Synthetic
gccaggcaaagacacuacaagga

SEQ ID NO: 484737 - RNA, 24 nt, Artificial Sequence
  Synthetic
agccaggcaaagacacuacaagga

SEQ ID NO: 484738 - RNA, 18 nt, Artificial Sequence
  Synthetic
agcaagauuaaccaagga

SEQ ID NO: 484739 - RNA, 19 nt, Artificial Sequence
  Synthetic
uagcaagauuaaccaagga

SEQ ID NO: 484740 - RNA, 20 nt, Artificial Sequence
  Synthetic
uuagcaagauuaaccaagga

SEQ ID NO: 484741 - RNA, 21 nt, Artificial Sequence
  Synthetic
auuagcaagauuaaccaagga

SEQ ID NO: 484742 - RNA, 22 nt, Artificial Sequence
  Synthetic
cauuagcaagauuaaccaagga

SEQ ID NO: 484743 - RNA, 23 nt, Artificial Sequence
  Synthetic
ccauuagcaagauuaaccaagga

SEQ ID NO: 484744 - RNA, 24 nt, Artificial Sequence
  Synthetic
accauuagcaagauuaaccaagga

SEQ ID NO: 484745 - RNA, 18 nt, Artificial Sequence
  Synthetic
uuuggguuugaccaagga

SEQ ID NO: 484746 - RNA, 19 nt, Artificial Sequence
  Synthetic
guuuggguuugaccaagga

SEQ ID NO: 484747 - RNA, 20 nt, Artificial Sequence
  Synthetic
uguuuggguuugaccaagga

SEQ ID NO: 484748 - RNA, 21 nt, Artificial Sequence
  Synthetic
cuguuuggguuugaccaagga

SEQ ID NO: 484749 - RNA, 22 nt, Artificial Sequence
  Synthetic
ucuguuuggguuugaccaagga

SEQ ID NO: 484750 - RNA, 23 nt, Artificial Sequence
  Synthetic
uucuguuuggguuugaccaagga

SEQ ID NO: 484751 - RNA, 24 nt, Artificial Sequence
  Synthetic
uuucuguuuggguuugaccaagga

SEQ ID NO: 484752 - RNA, 18 nt, Artificial Sequence
  Synthetic
aauagggaggcccaagga

SEQ ID NO: 484753 - RNA, 19 nt, Artificial Sequence
  Synthetic
gaauagggaggcccaagga

SEQ ID NO: 484754 - RNA, 20 nt, Artificial Sequence
  Synthetic
ggaauagggaggcccaagga

SEQ ID NO: 484755 - RNA, 21 nt, Artificial Sequence
  Synthetic
gggaauagggaggcccaagga

SEQ ID NO: 484756 - RNA, 22 nt, Artificial Sequence
  Synthetic
agggaauagggaggcccaagga

SEQ ID NO: 484757 - RNA, 23 nt, Artificial Sequence
  Synthetic
cagggaauagggaggcccaagga

SEQ ID NO: 484758 - RNA, 24 nt, Artificial Sequence
  Synthetic
ucagggaauagggaggcccaagga

SEQ ID NO: 484759 - RNA, 18 nt, Artificial Sequence
  Synthetic
auggcaagugcccaagga

SEQ ID NO: 484760 - RNA, 19 nt, Artificial Sequence
  Synthetic
aauggcaagugcccaagga

SEQ ID NO: 484761 - RNA, 20 nt, Artificial Sequence
  Synthetic
aaauggcaagugcccaagga

SEQ ID NO: 484762 - RNA, 21 nt, Artificial Sequence
  Synthetic
aaaauggcaagugcccaagga

SEQ ID NO: 484763 - RNA, 22 nt, Artificial Sequence
  Synthetic
aaaaauggcaagugcccaagga

SEQ ID NO: 484764 - RNA, 23 nt, Artificial Sequence
  Synthetic
uaaaaauggcaagugcccaagga

SEQ ID NO: 484765 - RNA, 24 nt, Artificial Sequence
  Synthetic
auaaaaauggcaagugcccaagga

SEQ ID NO: 484766 - RNA, 18 nt, Artificial Sequence
  Synthetic
cuuuaacucucccaagga

SEQ ID NO: 484767 - RNA, 19 nt, Artificial Sequence
  Synthetic
ucuuuaacucucccaagga

SEQ ID NO: 484768 - RNA, 20 nt, Artificial Sequence
  Synthetic
aucuuuaacucucccaagga

SEQ ID NO: 484769 - RNA, 21 nt, Artificial Sequence
  Synthetic
aaucuuuaacucucccaagga

SEQ ID NO: 484770 - RNA, 22 nt, Artificial Sequence
  Synthetic
gaaucuuuaacucucccaagga

SEQ ID NO: 484771 - RNA, 23 nt, Artificial Sequence
  Synthetic
ggaaucuuuaacucucccaagga

SEQ ID NO: 484772 - RNA, 24 nt, Artificial Sequence
  Synthetic
aggaaucuuuaacucucccaagga

SEQ ID NO: 484773 - RNA, 18 nt, Artificial Sequence
  Synthetic
gcuuugggaggccaagga

SEQ ID NO: 484774 - RNA, 19 nt, Artificial Sequence
  Synthetic
ugcuuugggaggccaagga

SEQ ID NO: 484775 - RNA, 20 nt, Artificial Sequence
  Synthetic
gugcuuugggaggccaagga

SEQ ID NO: 484776 - RNA, 21 nt, Artificial Sequence
  Synthetic
agugcuuugggaggccaagga

SEQ ID NO: 484777 - RNA, 22 nt, Artificial Sequence
  Synthetic
uagugcuuugggaggccaagga

SEQ ID NO: 484778 - RNA, 23 nt, Artificial Sequence
  Synthetic
cuagugcuuugggaggccaagga

SEQ ID NO: 484779 - RNA, 24 nt, Artificial Sequence
  Synthetic
ccuagugcuuugggaggccaagga

SEQ ID NO: 484780 - RNA, 18 nt, Artificial Sequence
  Synthetic
cgaaaagucggccaagga

SEQ ID NO: 484781 - RNA, 19 nt, Artificial Sequence
  Synthetic
ucgaaaagucggccaagga

SEQ ID NO: 484782 - RNA, 20 nt, Artificial Sequence
  Synthetic
aucgaaaagucggccaagga

SEQ ID NO: 484783 - RNA, 21 nt, Artificial Sequence
  Synthetic
caucgaaaagucggccaagga

SEQ ID NO: 484784 - RNA, 22 nt, Artificial Sequence
  Synthetic
ucaucgaaaagucggccaagga

SEQ ID NO: 484785 - RNA, 23 nt, Artificial Sequence
  Synthetic
cucaucgaaaagucggccaagga

SEQ ID NO: 484786 - RNA, 24 nt, Artificial Sequence
  Synthetic
ccucaucgaaaagucggccaagga

SEQ ID NO: 484787 - RNA, 18 nt, Artificial Sequence
  Synthetic
acacuugaugggcaagga

SEQ ID NO: 484788 - RNA, 19 nt, Artificial Sequence
  Synthetic
uacacuugaugggcaagga

SEQ ID NO: 484789 - RNA, 20 nt, Artificial Sequence
  Synthetic
auacacuugaugggcaagga

SEQ ID NO: 484790 - RNA, 21 nt, Artificial Sequence
  Synthetic
gauacacuugaugggcaagga

SEQ ID NO: 484791 - RNA, 22 nt, Artificial Sequence
  Synthetic
agauacacuugaugggcaagga

SEQ ID NO: 484792 - RNA, 23 nt, Artificial Sequence
  Synthetic
aagauacacuugaugggcaagga

SEQ ID NO: 484793 - RNA, 24 nt, Artificial Sequence
  Synthetic
aaagauacacuugaugggcaagga

SEQ ID NO: 484794 - RNA, 18 nt, Artificial Sequence
  Synthetic
gaaggacuuagucaagga

SEQ ID NO: 484795 - RNA, 19 nt, Artificial Sequence
  Synthetic
agaaggacuuagucaagga

SEQ ID NO: 484796 - RNA, 20 nt, Artificial Sequence
  Synthetic
aagaaggacuuagucaagga

SEQ ID NO: 484797 - RNA, 21 nt, Artificial Sequence
  Synthetic
uaagaaggacuuagucaagga

SEQ ID NO: 484798 - RNA, 22 nt, Artificial Sequence
  Synthetic
guaagaaggacuuagucaagga

SEQ ID NO: 484799 - RNA, 23 nt, Artificial Sequence
  Synthetic
aguaagaaggacuuagucaagga

SEQ ID NO: 484800 - RNA, 24 nt, Artificial Sequence
  Synthetic
uaguaagaaggacuuagucaagga

SEQ ID NO: 484801 - RNA, 18 nt, Artificial Sequence
  Synthetic
auuucauuuugucaagga

SEQ ID NO: 484802 - RNA, 19 nt, Artificial Sequence
  Synthetic
uauuucauuuugucaagga

SEQ ID NO: 484803 - RNA, 20 nt, Artificial Sequence
  Synthetic
guauuucauuuugucaagga

SEQ ID NO: 484804 - RNA, 21 nt, Artificial Sequence
  Synthetic
uguauuucauuuugucaagga

SEQ ID NO: 484805 - RNA, 22 nt, Artificial Sequence
  Synthetic
auguauuucauuuugucaagga

SEQ ID NO: 484806 - RNA, 23 nt, Artificial Sequence
  Synthetic
aauguauuucauuuugucaagga

SEQ ID NO: 484807 - RNA, 24 nt, Artificial Sequence
  Synthetic
aaauguauuucauuuugucaagga

SEQ ID NO: 484808 - RNA, 18 nt, Artificial Sequence
  Synthetic
uuguccuugguucaagga

SEQ ID NO: 484809 - RNA, 19 nt, Artificial Sequence
  Synthetic
cuuguccuugguucaagga

SEQ ID NO: 484810 - RNA, 20 nt, Artificial Sequence
  Synthetic
ucuuguccuugguucaagga

SEQ ID NO: 484811 - RNA, 21 nt, Artificial Sequence
  Synthetic
uucuuguccuugguucaagga

SEQ ID NO: 484812 - RNA, 22 nt, Artificial Sequence
  Synthetic
auucuuguccuugguucaagga

SEQ ID NO: 484813 - RNA, 23 nt, Artificial Sequence
  Synthetic
uauucuuguccuugguucaagga

SEQ ID NO: 484814 - RNA, 24 nt, Artificial Sequence
  Synthetic
cuauucuuguccuugguucaagga

SEQ ID NO: 484815 - RNA, 18 nt, Artificial Sequence
  Synthetic
uucuuaaaguuucaagga

SEQ ID NO: 484816 - RNA, 19 nt, Artificial Sequence
  Synthetic
auucuuaaaguuucaagga

SEQ ID NO: 484817 - RNA, 20 nt, Artificial Sequence
  Synthetic
uauucuuaaaguuucaagga

SEQ ID NO: 484818 - RNA, 21 nt, Artificial Sequence
  Synthetic
auauucuuaaaguuucaagga

SEQ ID NO: 484819 - RNA, 22 nt, Artificial Sequence
  Synthetic
gauauucuuaaaguuucaagga

SEQ ID NO: 484820 - RNA, 23 nt, Artificial Sequence
  Synthetic
agauauucuuaaaguuucaagga

SEQ ID NO: 484821 - RNA, 24 nt, Artificial Sequence
  Synthetic
cagauauucuuaaaguuucaagga

SEQ ID NO: 484822 - RNA, 18 nt, Artificial Sequence
  Synthetic
gacagaaaggaagaagga

SEQ ID NO: 484823 - RNA, 19 nt, Artificial Sequence
  Synthetic
agacagaaaggaagaagga

SEQ ID NO: 484824 - RNA, 20 nt, Artificial Sequence
  Synthetic
aagacagaaaggaagaagga

SEQ ID NO: 484825 - RNA, 21 nt, Artificial Sequence
  Synthetic
aaagacagaaaggaagaagga

SEQ ID NO: 484826 - RNA, 22 nt, Artificial Sequence
  Synthetic
aaaagacagaaaggaagaagga

SEQ ID NO: 484827 - RNA, 23 nt, Artificial Sequence
  Synthetic
aaaaagacagaaaggaagaagga

SEQ ID NO: 484828 - RNA, 24 nt, Artificial Sequence
  Synthetic
gaaaaagacagaaaggaagaagga

SEQ ID NO: 484829 - RNA, 18 nt, Artificial Sequence
  Synthetic
aaaggaaaggaagaagga

SEQ ID NO: 484830 - RNA, 19 nt, Artificial Sequence
  Synthetic
gaaaggaaaggaagaagga

SEQ ID NO: 484831 - RNA, 20 nt, Artificial Sequence
  Synthetic
ggaaaggaaaggaagaagga

SEQ ID NO: 484832 - RNA, 21 nt, Artificial Sequence
  Synthetic
aggaaaggaaaggaagaagga

SEQ ID NO: 484833 - RNA, 22 nt, Artificial Sequence
  Synthetic
aaggaaaggaaaggaagaagga

SEQ ID NO: 484834 - RNA, 23 nt, Artificial Sequence
  Synthetic
gaaggaaaggaaaggaagaagga

SEQ ID NO: 484835 - RNA, 24 nt, Artificial Sequence
  Synthetic
agaaggaaaggaaaggaagaagga

SEQ ID NO: 484836 - RNA, 18 nt, Artificial Sequence
  Synthetic
auccuaaaaacagaagga

SEQ ID NO: 484837 - RNA, 19 nt, Artificial Sequence
  Synthetic
cauccuaaaaacagaagga

SEQ ID NO: 484838 - RNA, 20 nt, Artificial Sequence
  Synthetic
ccauccuaaaaacagaagga

SEQ ID NO: 484839 - RNA, 21 nt, Artificial Sequence
  Synthetic
gccauccuaaaaacagaagga

SEQ ID NO: 484840 - RNA, 22 nt, Artificial Sequence
  Synthetic
ugccauccuaaaaacagaagga

SEQ ID NO: 484841 - RNA, 23 nt, Artificial Sequence
  Synthetic
cugccauccuaaaaacagaagga

SEQ ID NO: 484842 - RNA, 24 nt, Artificial Sequence
  Synthetic
ucugccauccuaaaaacagaagga

SEQ ID NO: 484843 - RNA, 18 nt, Artificial Sequence
  Synthetic
ggaaaaggaacagaagga

SEQ ID NO: 484844 - RNA, 19 nt, Artificial Sequence
  Synthetic
aggaaaaggaacagaagga

SEQ ID NO: 484845 - RNA, 20 nt, Artificial Sequence
  Synthetic
aaggaaaaggaacagaagga

SEQ ID NO: 484846 - RNA, 21 nt, Artificial Sequence
  Synthetic
aaaggaaaaggaacagaagga

SEQ ID NO: 484847 - RNA, 22 nt, Artificial Sequence
  Synthetic
aaaaggaaaaggaacagaagga

SEQ ID NO: 484848 - RNA, 23 nt, Artificial Sequence
  Synthetic
gaaaaggaaaaggaacagaagga

SEQ ID NO: 484849 - RNA, 24 nt, Artificial Sequence
  Synthetic
ggaaaaggaaaaggaacagaagga

SEQ ID NO: 484850 - RNA, 18 nt, Artificial Sequence
  Synthetic
uuucccaucacagaagga

SEQ ID NO: 484851 - RNA, 19 nt, Artificial Sequence
  Synthetic
auuucccaucacagaagga

SEQ ID NO: 484852 - RNA, 20 nt, Artificial Sequence
  Synthetic
gauuucccaucacagaagga

SEQ ID NO: 484853 - RNA, 21 nt, Artificial Sequence
  Synthetic
agauuucccaucacagaagga

SEQ ID NO: 484854 - RNA, 22 nt, Artificial Sequence
  Synthetic
gagauuucccaucacagaagga

SEQ ID NO: 484855 - RNA, 23 nt, Artificial Sequence
  Synthetic
agagauuucccaucacagaagga

SEQ ID NO: 484856 - RNA, 24 nt, Artificial Sequence
  Synthetic
cagagauuucccaucacagaagga

SEQ ID NO: 484857 - RNA, 18 nt, Artificial Sequence
  Synthetic
ggaagagaaccagaagga

SEQ ID NO: 484858 - RNA, 19 nt, Artificial Sequence
  Synthetic
aggaagagaaccagaagga

SEQ ID NO: 484859 - RNA, 20 nt, Artificial Sequence
  Synthetic
caggaagagaaccagaagga

SEQ ID NO: 484860 - RNA, 21 nt, Artificial Sequence
  Synthetic
ccaggaagagaaccagaagga

SEQ ID NO: 484861 - RNA, 22 nt, Artificial Sequence
  Synthetic
cccaggaagagaaccagaagga

SEQ ID NO: 484862 - RNA, 23 nt, Artificial Sequence
  Synthetic
acccaggaagagaaccagaagga

SEQ ID NO: 484863 - RNA, 24 nt, Artificial Sequence
  Synthetic
gacccaggaagagaaccagaagga

SEQ ID NO: 484864 - RNA, 18 nt, Artificial Sequence
  Synthetic
gagaaaaagauagaagga

SEQ ID NO: 484865 - RNA, 19 nt, Artificial Sequence
  Synthetic
ggagaaaaagauagaagga

SEQ ID NO: 484866 - RNA, 20 nt, Artificial Sequence
  Synthetic
uggagaaaaagauagaagga

SEQ ID NO: 484867 - RNA, 21 nt, Artificial Sequence
  Synthetic
guggagaaaaagauagaagga

SEQ ID NO: 484868 - RNA, 22 nt, Artificial Sequence
  Synthetic
gguggagaaaaagauagaagga

SEQ ID NO: 484869 - RNA, 23 nt, Artificial Sequence
  Synthetic
ugguggagaaaaagauagaagga

SEQ ID NO: 484870 - RNA, 24 nt, Artificial Sequence
  Synthetic
cugguggagaaaaagauagaagga

SEQ ID NO: 484871 - RNA, 18 nt, Artificial Sequence
  Synthetic
aauuuguugaacgaagga

SEQ ID NO: 484872 - RNA, 19 nt, Artificial Sequence
  Synthetic
caauuuguugaacgaagga

SEQ ID NO: 484873 - RNA, 20 nt, Artificial Sequence
  Synthetic
acaauuuguugaacgaagga

SEQ ID NO: 484874 - RNA, 21 nt, Artificial Sequence
  Synthetic
gacaauuuguugaacgaagga

SEQ ID NO: 484875 - RNA, 22 nt, Artificial Sequence
  Synthetic
agacaauuuguugaacgaagga

SEQ ID NO: 484876 - RNA, 23 nt, Artificial Sequence
  Synthetic
aagacaauuuguugaacgaagga

SEQ ID NO: 484877 - RNA, 24 nt, Artificial Sequence
  Synthetic
aaagacaauuuguugaacgaagga

SEQ ID NO: 484878 - RNA, 18 nt, Artificial Sequence
  Synthetic
ugggaugggggcgaagga

SEQ ID NO: 484879 - RNA, 19 nt, Artificial Sequence
  Synthetic
gugggaugggggcgaagga

SEQ ID NO: 484880 - RNA, 20 nt, Artificial Sequence
  Synthetic
ggugggaugggggcgaagga

SEQ ID NO: 484881 - RNA, 21 nt, Artificial Sequence
  Synthetic
gggugggaugggggcgaagga

SEQ ID NO: 484882 - RNA, 22 nt, Artificial Sequence
  Synthetic
agggugggaugggggcgaagga

SEQ ID NO: 484883 - RNA, 23 nt, Artificial Sequence
  Synthetic
gagggugggaugggggcgaagga

SEQ ID NO: 484884 - RNA, 24 nt, Artificial Sequence
  Synthetic
agagggugggaugggggcgaagga

SEQ ID NO: 484885 - RNA, 18 nt, Artificial Sequence
  Synthetic
aaagaaagaaaggaagga

SEQ ID NO: 484886 - RNA, 19 nt, Artificial Sequence
  Synthetic
gaaagaaagaaaggaagga

SEQ ID NO: 484887 - RNA, 20 nt, Artificial Sequence
  Synthetic
agaaagaaagaaaggaagga

SEQ ID NO: 484888 - RNA, 21 nt, Artificial Sequence
  Synthetic
aagaaagaaagaaaggaagga

SEQ ID NO: 484889 - RNA, 22 nt, Artificial Sequence
  Synthetic
aaagaaagaaagaaaggaagga

SEQ ID NO: 484890 - RNA, 23 nt, Artificial Sequence
  Synthetic
gaaagaaagaaagaaaggaagga

SEQ ID NO: 484891 - RNA, 24 nt, Artificial Sequence
  Synthetic
agaaagaaagaaagaaaggaagga

SEQ ID NO: 484892 - RNA, 18 nt, Artificial Sequence
  Synthetic
gaaaggaagaaggaagga

SEQ ID NO: 484893 - RNA, 19 nt, Artificial Sequence
  Synthetic
ggaaaggaagaaggaagga

SEQ ID NO: 484894 - RNA, 20 nt, Artificial Sequence
  Synthetic
aggaaaggaagaaggaagga

SEQ ID NO: 484895 - RNA, 21 nt, Artificial Sequence
  Synthetic
aaggaaaggaagaaggaagga

SEQ ID NO: 484896 - RNA, 22 nt, Artificial Sequence
  Synthetic
aaaggaaaggaagaaggaagga

SEQ ID NO: 484897 - RNA, 23 nt, Artificial Sequence
  Synthetic
gaaaggaaaggaagaaggaagga

SEQ ID NO: 484898 - RNA, 24 nt, Artificial Sequence
  Synthetic
ggaaaggaaaggaagaaggaagga

SEQ ID NO: 484899 - RNA, 18 nt, Artificial Sequence
  Synthetic
ggaagaaggaaggaagga

SEQ ID NO: 484900 - RNA, 19 nt, Artificial Sequence
  Synthetic
aggaagaaggaaggaagga

SEQ ID NO: 484901 - RNA, 20 nt, Artificial Sequence
  Synthetic
aaggaagaaggaaggaagga

SEQ ID NO: 484902 - RNA, 21 nt, Artificial Sequence
  Synthetic
aaaggaagaaggaaggaagga

SEQ ID NO: 484903 - RNA, 22 nt, Artificial Sequence
  Synthetic
gaaaggaagaaggaaggaagga

SEQ ID NO: 484904 - RNA, 23 nt, Artificial Sequence
  Synthetic
ggaaaggaagaaggaaggaagga

SEQ ID NO: 484905 - RNA, 24 nt, Artificial Sequence
  Synthetic
aggaaaggaagaaggaaggaagga

SEQ ID NO: 484906 - RNA, 18 nt, Artificial Sequence
  Synthetic
gcaggaaggcaggaagga

SEQ ID NO: 484907 - RNA, 19 nt, Artificial Sequence
  Synthetic
ggcaggaaggcaggaagga

SEQ ID NO: 484908 - RNA, 20 nt, Artificial Sequence
  Synthetic
aggcaggaaggcaggaagga

SEQ ID NO: 484909 - RNA, 21 nt, Artificial Sequence
  Synthetic
aaggcaggaaggcaggaagga

SEQ ID NO: 484910 - RNA, 22 nt, Artificial Sequence
  Synthetic
caaggcaggaaggcaggaagga

SEQ ID NO: 484911 - RNA, 23 nt, Artificial Sequence
  Synthetic
acaaggcaggaaggcaggaagga

SEQ ID NO: 484912 - RNA, 24 nt, Artificial Sequence
  Synthetic
gacaaggcaggaaggcaggaagga

SEQ ID NO: 484913 - RNA, 18 nt, Artificial Sequence
  Synthetic
gggacuacagaggaagga

SEQ ID NO: 484914 - RNA, 19 nt, Artificial Sequence
  Synthetic
ggggacuacagaggaagga

SEQ ID NO: 484915 - RNA, 20 nt, Artificial Sequence
  Synthetic
uggggacuacagaggaagga

SEQ ID NO: 484916 - RNA, 21 nt, Artificial Sequence
  Synthetic
cuggggacuacagaggaagga

SEQ ID NO: 484917 - RNA, 22 nt, Artificial Sequence
  Synthetic
acuggggacuacagaggaagga

SEQ ID NO: 484918 - RNA, 23 nt, Artificial Sequence
  Synthetic
cacuggggacuacagaggaagga

SEQ ID NO: 484919 - RNA, 24 nt, Artificial Sequence
  Synthetic
acacuggggacuacagaggaagga

SEQ ID NO: 484920 - RNA, 18 nt, Artificial Sequence
  Synthetic
ggaggaagagaggaagga

SEQ ID NO: 484921 - RNA, 19 nt, Artificial Sequence
  Synthetic
gggaggaagagaggaagga

SEQ ID NO: 484922 - RNA, 20 nt, Artificial Sequence
  Synthetic
agggaggaagagaggaagga

SEQ ID NO: 484923 - RNA, 21 nt, Artificial Sequence
  Synthetic
gagggaggaagagaggaagga

SEQ ID NO: 484924 - RNA, 22 nt, Artificial Sequence
  Synthetic
ggagggaggaagagaggaagga

SEQ ID NO: 484925 - RNA, 23 nt, Artificial Sequence
  Synthetic
cggagggaggaagagaggaagga

SEQ ID NO: 484926 - RNA, 24 nt, Artificial Sequence
  Synthetic
gcggagggaggaagagaggaagga

SEQ ID NO: 484927 - RNA, 18 nt, Artificial Sequence
  Synthetic
ggagggagggaggaagga

SEQ ID NO: 484928 - RNA, 19 nt, Artificial Sequence
  Synthetic
gggagggagggaggaagga

SEQ ID NO: 484929 - RNA, 20 nt, Artificial Sequence
  Synthetic
agggagggagggaggaagga

SEQ ID NO: 484930 - RNA, 21 nt, Artificial Sequence
  Synthetic
gagggagggagggaggaagga

SEQ ID NO: 484931 - RNA, 22 nt, Artificial Sequence
  Synthetic
ggagggagggagggaggaagga

SEQ ID NO: 484932 - RNA, 23 nt, Artificial Sequence
  Synthetic
gggagggagggagggaggaagga

SEQ ID NO: 484933 - RNA, 24 nt, Artificial Sequence
  Synthetic
agggagggagggagggaggaagga

SEQ ID NO: 484934 - RNA, 18 nt, Artificial Sequence
  Synthetic
aauuaaugugaggaagga

SEQ ID NO: 484935 - RNA, 19 nt, Artificial Sequence
  Synthetic
gaauuaaugugaggaagga

SEQ ID NO: 484936 - RNA, 20 nt, Artificial Sequence
  Synthetic
ugaauuaaugugaggaagga

SEQ ID NO: 484937 - RNA, 21 nt, Artificial Sequence
  Synthetic
gugaauuaaugugaggaagga

SEQ ID NO: 484938 - RNA, 22 nt, Artificial Sequence
  Synthetic
ugugaauuaaugugaggaagga

SEQ ID NO: 484939 - RNA, 23 nt, Artificial Sequence
  Synthetic
augugaauuaaugugaggaagga

SEQ ID NO: 484940 - RNA, 24 nt, Artificial Sequence
  Synthetic
caugugaauuaaugugaggaagga

SEQ ID NO: 484941 - RNA, 18 nt, Artificial Sequence
  Synthetic
ggguaaucaagggaagga

SEQ ID NO: 484942 - RNA, 19 nt, Artificial Sequence
  Synthetic
aggguaaucaagggaagga

SEQ ID NO: 484943 - RNA, 20 nt, Artificial Sequence
  Synthetic
caggguaaucaagggaagga

SEQ ID NO: 484944 - RNA, 21 nt, Artificial Sequence
  Synthetic
gcaggguaaucaagggaagga

SEQ ID NO: 484945 - RNA, 22 nt, Artificial Sequence
  Synthetic
ggcaggguaaucaagggaagga

SEQ ID NO: 484946 - RNA, 23 nt, Artificial Sequence
  Synthetic
aggcaggguaaucaagggaagga

SEQ ID NO: 484947 - RNA, 24 nt, Artificial Sequence
  Synthetic
uaggcaggguaaucaagggaagga

SEQ ID NO: 484948 - RNA, 18 nt, Artificial Sequence
  Synthetic
gggaagggaagggaagga

SEQ ID NO: 484949 - RNA, 19 nt, Artificial Sequence
  Synthetic
agggaagggaagggaagga

SEQ ID NO: 484950 - RNA, 20 nt, Artificial Sequence
  Synthetic
aagggaagggaagggaagga

SEQ ID NO: 484951 - RNA, 21 nt, Artificial Sequence
  Synthetic
gaagggaagggaagggaagga

SEQ ID NO: 484952 - RNA, 22 nt, Artificial Sequence
  Synthetic
ggaagggaagggaagggaagga

SEQ ID NO: 484953 - RNA, 23 nt, Artificial Sequence
  Synthetic
gggaagggaagggaagggaagga

SEQ ID NO: 484954 - RNA, 24 nt, Artificial Sequence
  Synthetic
agggaagggaagggaagggaagga

SEQ ID NO: 484955 - RNA, 18 nt, Artificial Sequence
  Synthetic
caggcaguaagggaagga

SEQ ID NO: 484956 - RNA, 19 nt, Artificial Sequence
  Synthetic
ccaggcaguaagggaagga

SEQ ID NO: 484957 - RNA, 20 nt, Artificial Sequence
  Synthetic
gccaggcaguaagggaagga

SEQ ID NO: 484958 - RNA, 21 nt, Artificial Sequence
  Synthetic
agccaggcaguaagggaagga

SEQ ID NO: 484959 - RNA, 22 nt, Artificial Sequence
  Synthetic
aagccaggcaguaagggaagga

SEQ ID NO: 484960 - RNA, 23 nt, Artificial Sequence
  Synthetic
gaagccaggcaguaagggaagga

SEQ ID NO: 484961 - RNA, 24 nt, Artificial Sequence
  Synthetic
ggaagccaggcaguaagggaagga

SEQ ID NO: 484962 - RNA, 18 nt, Artificial Sequence
  Synthetic
aagcaggauagggaagga

SEQ ID NO: 484963 - RNA, 19 nt, Artificial Sequence
  Synthetic
aaagcaggauagggaagga

SEQ ID NO: 484964 - RNA, 20 nt, Artificial Sequence
  Synthetic
gaaagcaggauagggaagga

SEQ ID NO: 484965 - RNA, 21 nt, Artificial Sequence
  Synthetic
ugaaagcaggauagggaagga

SEQ ID NO: 484966 - RNA, 22 nt, Artificial Sequence
  Synthetic
augaaagcaggauagggaagga

SEQ ID NO: 484967 - RNA, 23 nt, Artificial Sequence
  Synthetic
aaugaaagcaggauagggaagga

SEQ ID NO: 484968 - RNA, 24 nt, Artificial Sequence
  Synthetic
gaaugaaagcaggauagggaagga

SEQ ID NO: 484969 - RNA, 18 nt, Artificial Sequence
  Synthetic
gucaaauugggggaagga

SEQ ID NO: 484970 - RNA, 19 nt, Artificial Sequence
  Synthetic
ggucaaauugggggaagga

SEQ ID NO: 484971 - RNA, 20 nt, Artificial Sequence
  Synthetic
uggucaaauugggggaagga

SEQ ID NO: 484972 - RNA, 21 nt, Artificial Sequence
  Synthetic
cuggucaaauugggggaagga

SEQ ID NO: 484973 - RNA, 22 nt, Artificial Sequence
  Synthetic
ucuggucaaauugggggaagga

SEQ ID NO: 484974 - RNA, 23 nt, Artificial Sequence
  Synthetic
gucuggucaaauugggggaagga

SEQ ID NO: 484975 - RNA, 24 nt, Artificial Sequence
  Synthetic
agucuggucaaauugggggaagga

SEQ ID NO: 484976 - RNA, 18 nt, Artificial Sequence
  Synthetic
uaguagaugugggaagga

SEQ ID NO: 484977 - RNA, 19 nt, Artificial Sequence
  Synthetic
cuaguagaugugggaagga

SEQ ID NO: 484978 - RNA, 20 nt, Artificial Sequence
  Synthetic
acuaguagaugugggaagga

SEQ ID NO: 484979 - RNA, 21 nt, Artificial Sequence
  Synthetic
gacuaguagaugugggaagga

SEQ ID NO: 484980 - RNA, 22 nt, Artificial Sequence
  Synthetic
ggacuaguagaugugggaagga

SEQ ID NO: 484981 - RNA, 23 nt, Artificial Sequence
  Synthetic
cggacuaguagaugugggaagga

SEQ ID NO: 484982 - RNA, 24 nt, Artificial Sequence
  Synthetic
gcggacuaguagaugugggaagga

SEQ ID NO: 484983 - RNA, 18 nt, Artificial Sequence
  Synthetic
cuuacuauacuggaagga

SEQ ID NO: 484984 - RNA, 19 nt, Artificial Sequence
  Synthetic
ccuuacuauacuggaagga

SEQ ID NO: 484985 - RNA, 20 nt, Artificial Sequence
  Synthetic
cccuuacuauacuggaagga

SEQ ID NO: 484986 - RNA, 21 nt, Artificial Sequence
  Synthetic
gcccuuacuauacuggaagga

SEQ ID NO: 484987 - RNA, 22 nt, Artificial Sequence
  Synthetic
ugcccuuacuauacuggaagga

SEQ ID NO: 484988 - RNA, 23 nt, Artificial Sequence
  Synthetic
gugcccuuacuauacuggaagga

SEQ ID NO: 484989 - RNA, 24 nt, Artificial Sequence
  Synthetic
ggugcccuuacuauacuggaagga

SEQ ID NO: 484990 - RNA, 18 nt, Artificial Sequence
  Synthetic
ggccugccuguggaagga

SEQ ID NO: 484991 - RNA, 19 nt, Artificial Sequence
  Synthetic
gggccugccuguggaagga

SEQ ID NO: 484992 - RNA, 20 nt, Artificial Sequence
  Synthetic
ggggccugccuguggaagga

SEQ ID NO: 484993 - RNA, 21 nt, Artificial Sequence
  Synthetic
aggggccugccuguggaagga

SEQ ID NO: 484994 - RNA, 22 nt, Artificial Sequence
  Synthetic
caggggccugccuguggaagga

SEQ ID NO: 484995 - RNA, 23 nt, Artificial Sequence
  Synthetic
ccaggggccugccuguggaagga

SEQ ID NO: 484996 - RNA, 24 nt, Artificial Sequence
  Synthetic
gccaggggccugccuguggaagga

SEQ ID NO: 484997 - RNA, 18 nt, Artificial Sequence
  Synthetic
acgugaaugaaugaagga

SEQ ID NO: 484998 - RNA, 19 nt, Artificial Sequence
  Synthetic
uacgugaaugaaugaagga

SEQ ID NO: 484999 - RNA, 20 nt, Artificial Sequence
  Synthetic
auacgugaaugaaugaagga

SEQ ID NO: 485000 - RNA, 21 nt, Artificial Sequence
  Synthetic
aauacgugaaugaaugaagga

SEQ ID NO: 485001 - RNA, 22 nt, Artificial Sequence
  Synthetic
uaauacgugaaugaaugaagga

SEQ ID NO: 485002 - RNA, 23 nt, Artificial Sequence
  Synthetic
uuaauacgugaaugaaugaagga

SEQ ID NO: 485003 - RNA, 24 nt, Artificial Sequence
  Synthetic
cuuaauacgugaaugaaugaagga

SEQ ID NO: 485004 - RNA, 18 nt, Artificial Sequence
  Synthetic
uugaagugaacugaagga

SEQ ID NO: 485005 - RNA, 19 nt, Artificial Sequence
  Synthetic
cuugaagugaacugaagga

SEQ ID NO: 485006 - RNA, 20 nt, Artificial Sequence
  Synthetic
ucuugaagugaacugaagga

SEQ ID NO: 485007 - RNA, 21 nt, Artificial Sequence
  Synthetic
uucuugaagugaacugaagga

SEQ ID NO: 485008 - RNA, 22 nt, Artificial Sequence
  Synthetic
cuucuugaagugaacugaagga

SEQ ID NO: 485009 - RNA, 23 nt, Artificial Sequence
  Synthetic
ccuucuugaagugaacugaagga

SEQ ID NO: 485010 - RNA, 24 nt, Artificial Sequence
  Synthetic
uccuucuugaagugaacugaagga

SEQ ID NO: 485011 - RNA, 18 nt, Artificial Sequence
  Synthetic
aguugacgaagugaagga

SEQ ID NO: 485012 - RNA, 19 nt, Artificial Sequence
  Synthetic
aaguugacgaagugaagga

SEQ ID NO: 485013 - RNA, 20 nt, Artificial Sequence
  Synthetic
gaaguugacgaagugaagga

SEQ ID NO: 485014 - RNA, 21 nt, Artificial Sequence
  Synthetic
agaaguugacgaagugaagga

SEQ ID NO: 485015 - RNA, 22 nt, Artificial Sequence
  Synthetic
aagaaguugacgaagugaagga

SEQ ID NO: 485016 - RNA, 23 nt, Artificial Sequence
  Synthetic
aaagaaguugacgaagugaagga

SEQ ID NO: 485017 - RNA, 24 nt, Artificial Sequence
  Synthetic
uaaagaaguugacgaagugaagga

SEQ ID NO: 485018 - RNA, 18 nt, Artificial Sequence
  Synthetic
auaaauauuuuugaagga

SEQ ID NO: 485019 - RNA, 19 nt, Artificial Sequence
  Synthetic
aauaaauauuuuugaagga

SEQ ID NO: 485020 - RNA, 20 nt, Artificial Sequence
  Synthetic
caauaaauauuuuugaagga

SEQ ID NO: 485021 - RNA, 21 nt, Artificial Sequence
  Synthetic
ucaauaaauauuuuugaagga

SEQ ID NO: 485022 - RNA, 22 nt, Artificial Sequence
  Synthetic
cucaauaaauauuuuugaagga

SEQ ID NO: 485023 - RNA, 23 nt, Artificial Sequence
  Synthetic
gcucaauaaauauuuuugaagga

SEQ ID NO: 485024 - RNA, 24 nt, Artificial Sequence
  Synthetic
ugcucaauaaauauuuuugaagga

SEQ ID NO: 485025 - RNA, 18 nt, Artificial Sequence
  Synthetic
aaaaaaaaggaauaagga

SEQ ID NO: 485026 - RNA, 19 nt, Artificial Sequence
  Synthetic
aaaaaaaaaggaauaagga

SEQ ID NO: 485027 - RNA, 20 nt, Artificial Sequence
  Synthetic
aaaaaaaaaaggaauaagga

SEQ ID NO: 485028 - RNA, 21 nt, Artificial Sequence
  Synthetic
aaaaaaaaaaaggaauaagga

SEQ ID NO: 485029 - RNA, 22 nt, Artificial Sequence
  Synthetic
aaaaaaaaaaaaggaauaagga

SEQ ID NO: 485030 - RNA, 23 nt, Artificial Sequence
  Synthetic
aaaaaaaaaaaaaggaauaagga

SEQ ID NO: 485031 - RNA, 24 nt, Artificial Sequence
  Synthetic
aaaaaaaaaaaaaaggaauaagga

SEQ ID NO: 485032 - RNA, 18 nt, Artificial Sequence
  Synthetic
accacucaaagcuaagga

SEQ ID NO: 485033 - RNA, 19 nt, Artificial Sequence
  Synthetic
aaccacucaaagcuaagga

SEQ ID NO: 485034 - RNA, 20 nt, Artificial Sequence
  Synthetic
aaaccacucaaagcuaagga

SEQ ID NO: 485035 - RNA, 21 nt, Artificial Sequence
  Synthetic
aaaaccacucaaagcuaagga

SEQ ID NO: 485036 - RNA, 22 nt, Artificial Sequence
  Synthetic
gaaaaccacucaaagcuaagga

SEQ ID NO: 485037 - RNA, 23 nt, Artificial Sequence
  Synthetic
agaaaaccacucaaagcuaagga

SEQ ID NO: 485038 - RNA, 24 nt, Artificial Sequence
  Synthetic
aagaaaaccacucaaagcuaagga

SEQ ID NO: 485039 - RNA, 18 nt, Artificial Sequence
  Synthetic
ccuuuauuguaguaagga

SEQ ID NO: 485040 - RNA, 19 nt, Artificial Sequence
  Synthetic
gccuuuauuguaguaagga

SEQ ID NO: 485041 - RNA, 20 nt, Artificial Sequence
  Synthetic
ugccuuuauuguaguaagga

SEQ ID NO: 485042 - RNA, 21 nt, Artificial Sequence
  Synthetic
gugccuuuauuguaguaagga

SEQ ID NO: 485043 - RNA, 22 nt, Artificial Sequence
  Synthetic
ugugccuuuauuguaguaagga

SEQ ID NO: 485044 - RNA, 23 nt, Artificial Sequence
  Synthetic
augugccuuuauuguaguaagga

SEQ ID NO: 485045 - RNA, 24 nt, Artificial Sequence
  Synthetic
uaugugccuuuauuguaguaagga

SEQ ID NO: 485046 - RNA, 18 nt, Artificial Sequence
  Synthetic
agacaaauaauguaagga

SEQ ID NO: 485047 - RNA, 19 nt, Artificial Sequence
  Synthetic
gagacaaauaauguaagga

SEQ ID NO: 485048 - RNA, 20 nt, Artificial Sequence
  Synthetic
agagacaaauaauguaagga

SEQ ID NO: 485049 - RNA, 21 nt, Artificial Sequence
  Synthetic
aagagacaaauaauguaagga

SEQ ID NO: 485050 - RNA, 22 nt, Artificial Sequence
  Synthetic
aaagagacaaauaauguaagga

SEQ ID NO: 485051 - RNA, 23 nt, Artificial Sequence
  Synthetic
aaaagagacaaauaauguaagga

SEQ ID NO: 485052 - RNA, 24 nt, Artificial Sequence
  Synthetic
aaaaagagacaaauaauguaagga

SEQ ID NO: 485053 - RNA, 18 nt, Artificial Sequence
  Synthetic
gauuaaggaaauuaagga

SEQ ID NO: 485054 - RNA, 19 nt, Artificial Sequence
  Synthetic
ggauuaaggaaauuaagga

SEQ ID NO: 485055 - RNA, 20 nt, Artificial Sequence
  Synthetic
gggauuaaggaaauuaagga

SEQ ID NO: 485056 - RNA, 21 nt, Artificial Sequence
  Synthetic
ggggauuaaggaaauuaagga

SEQ ID NO: 485057 - RNA, 22 nt, Artificial Sequence
  Synthetic
uggggauuaaggaaauuaagga

SEQ ID NO: 485058 - RNA, 23 nt, Artificial Sequence
  Synthetic
auggggauuaaggaaauuaagga

SEQ ID NO: 485059 - RNA, 24 nt, Artificial Sequence
  Synthetic
aauggggauuaaggaaauuaagga

SEQ ID NO: 485060 - RNA, 18 nt, Artificial Sequence
  Synthetic
uuaggaggugauuaagga

SEQ ID NO: 485061 - RNA, 19 nt, Artificial Sequence
  Synthetic
uuuaggaggugauuaagga

SEQ ID NO: 485062 - RNA, 20 nt, Artificial Sequence
  Synthetic
cuuuaggaggugauuaagga

SEQ ID NO: 485063 - RNA, 21 nt, Artificial Sequence
  Synthetic
gcuuuaggaggugauuaagga

SEQ ID NO: 485064 - RNA, 22 nt, Artificial Sequence
  Synthetic
agcuuuaggaggugauuaagga

SEQ ID NO: 485065 - RNA, 23 nt, Artificial Sequence
  Synthetic
gagcuuuaggaggugauuaagga

SEQ ID NO: 485066 - RNA, 24 nt, Artificial Sequence
  Synthetic
ggagcuuuaggaggugauuaagga

SEQ ID NO: 485067 - RNA, 18 nt, Artificial Sequence
  Synthetic
cuuacuuuugcuuaagga

SEQ ID NO: 485068 - RNA, 19 nt, Artificial Sequence
  Synthetic
ccuuacuuuugcuuaagga

SEQ ID NO: 485069 - RNA, 20 nt, Artificial Sequence
  Synthetic
uccuuacuuuugcuuaagga

SEQ ID NO: 485070 - RNA, 21 nt, Artificial Sequence
  Synthetic
cuccuuacuuuugcuuaagga

SEQ ID NO: 485071 - RNA, 22 nt, Artificial Sequence
  Synthetic
acuccuuacuuuugcuuaagga

SEQ ID NO: 485072 - RNA, 23 nt, Artificial Sequence
  Synthetic
gacuccuuacuuuugcuuaagga

SEQ ID NO: 485073 - RNA, 24 nt, Artificial Sequence
  Synthetic
ugacuccuuacuuuugcuuaagga

SEQ ID NO: 485074 - RNA, 18 nt, Artificial Sequence
  Synthetic
ucagagagggaaacagga

SEQ ID NO: 485075 - RNA, 19 nt, Artificial Sequence
  Synthetic
aucagagagggaaacagga

SEQ ID NO: 485076 - RNA, 20 nt, Artificial Sequence
  Synthetic
aaucagagagggaaacagga

SEQ ID NO: 485077 - RNA, 21 nt, Artificial Sequence
  Synthetic
caaucagagagggaaacagga

SEQ ID NO: 485078 - RNA, 22 nt, Artificial Sequence
  Synthetic
acaaucagagagggaaacagga

SEQ ID NO: 485079 - RNA, 23 nt, Artificial Sequence
  Synthetic
cacaaucagagagggaaacagga

SEQ ID NO: 485080 - RNA, 24 nt, Artificial Sequence
  Synthetic
ucacaaucagagagggaaacagga

SEQ ID NO: 485081 - RNA, 18 nt, Artificial Sequence
  Synthetic
aggguagaaagaacagga

SEQ ID NO: 485082 - RNA, 19 nt, Artificial Sequence
  Synthetic
gaggguagaaagaacagga

SEQ ID NO: 485083 - RNA, 20 nt, Artificial Sequence
  Synthetic
ggaggguagaaagaacagga

SEQ ID NO: 485084 - RNA, 21 nt, Artificial Sequence
  Synthetic
gggaggguagaaagaacagga

SEQ ID NO: 485085 - RNA, 22 nt, Artificial Sequence
  Synthetic
ugggaggguagaaagaacagga

SEQ ID NO: 485086 - RNA, 23 nt, Artificial Sequence
  Synthetic
gugggaggguagaaagaacagga

SEQ ID NO: 485087 - RNA, 24 nt, Artificial Sequence
  Synthetic
ggugggaggguagaaagaacagga

SEQ ID NO: 485088 - RNA, 18 nt, Artificial Sequence
  Synthetic
acacuguagggaacagga

SEQ ID NO: 485089 - RNA, 19 nt, Artificial Sequence
  Synthetic
aacacuguagggaacagga

SEQ ID NO: 485090 - RNA, 20 nt, Artificial Sequence
  Synthetic
aaacacuguagggaacagga

SEQ ID NO: 485091 - RNA, 21 nt, Artificial Sequence
  Synthetic
gaaacacuguagggaacagga

SEQ ID NO: 485092 - RNA, 22 nt, Artificial Sequence
  Synthetic
ggaaacacuguagggaacagga

SEQ ID NO: 485093 - RNA, 23 nt, Artificial Sequence
  Synthetic
aggaaacacuguagggaacagga

SEQ ID NO: 485094 - RNA, 24 nt, Artificial Sequence
  Synthetic
uaggaaacacuguagggaacagga

SEQ ID NO: 485095 - RNA, 18 nt, Artificial Sequence
  Synthetic
gcugcaauaaacacagga

SEQ ID NO: 485096 - RNA, 19 nt, Artificial Sequence
  Synthetic
ugcugcaauaaacacagga

SEQ ID NO: 485097 - RNA, 20 nt, Artificial Sequence
  Synthetic
augcugcaauaaacacagga

SEQ ID NO: 485098 - RNA, 21 nt, Artificial Sequence
  Synthetic
aaugcugcaauaaacacagga

SEQ ID NO: 485099 - RNA, 22 nt, Artificial Sequence
  Synthetic
uaaugcugcaauaaacacagga

SEQ ID NO: 485100 - RNA, 23 nt, Artificial Sequence
  Synthetic
cuaaugcugcaauaaacacagga

SEQ ID NO: 485101 - RNA, 24 nt, Artificial Sequence
  Synthetic
acuaaugcugcaauaaacacagga

SEQ ID NO: 485102 - RNA, 18 nt, Artificial Sequence
  Synthetic
acagaguuacacacagga

SEQ ID NO: 485103 - RNA, 19 nt, Artificial Sequence
  Synthetic
aacagaguuacacacagga

SEQ ID NO: 485104 - RNA, 20 nt, Artificial Sequence
  Synthetic
gaacagaguuacacacagga

SEQ ID NO: 485105 - RNA, 21 nt, Artificial Sequence
  Synthetic
ugaacagaguuacacacagga

SEQ ID NO: 485106 - RNA, 22 nt, Artificial Sequence
  Synthetic
uugaacagaguuacacacagga

SEQ ID NO: 485107 - RNA, 23 nt, Artificial Sequence
  Synthetic
uuugaacagaguuacacacagga

SEQ ID NO: 485108 - RNA, 24 nt, Artificial Sequence
  Synthetic
auuugaacagaguuacacacagga

SEQ ID NO: 485109 - RNA, 18 nt, Artificial Sequence
  Synthetic
aguagagaagacacagga

SEQ ID NO: 485110 - RNA, 19 nt, Artificial Sequence
  Synthetic
gaguagagaagacacagga

SEQ ID NO: 485111 - RNA, 20 nt, Artificial Sequence
  Synthetic
ugaguagagaagacacagga

SEQ ID NO: 485112 - RNA, 21 nt, Artificial Sequence
  Synthetic
uugaguagagaagacacagga

SEQ ID NO: 485113 - RNA, 22 nt, Artificial Sequence
  Synthetic
uuugaguagagaagacacagga

SEQ ID NO: 485114 - RNA, 23 nt, Artificial Sequence
  Synthetic
uuuugaguagagaagacacagga

SEQ ID NO: 485115 - RNA, 24 nt, Artificial Sequence
  Synthetic
uuuuugaguagagaagacacagga

SEQ ID NO: 485116 - RNA, 18 nt, Artificial Sequence
  Synthetic
aguuuaauugacacagga

SEQ ID NO: 485117 - RNA, 19 nt, Artificial Sequence
  Synthetic
aaguuuaauugacacagga

SEQ ID NO: 485118 - RNA, 20 nt, Artificial Sequence
  Synthetic
aaaguuuaauugacacagga

SEQ ID NO: 485119 - RNA, 21 nt, Artificial Sequence
  Synthetic
gaaaguuuaauugacacagga

SEQ ID NO: 485120 - RNA, 22 nt, Artificial Sequence
  Synthetic
ugaaaguuuaauugacacagga

SEQ ID NO: 485121 - RNA, 23 nt, Artificial Sequence
  Synthetic
cugaaaguuuaauugacacagga

SEQ ID NO: 485122 - RNA, 24 nt, Artificial Sequence
  Synthetic
ccugaaaguuuaauugacacagga

SEQ ID NO: 485123 - RNA, 18 nt, Artificial Sequence
  Synthetic
cuuuacagcuacacagga

SEQ ID NO: 485124 - RNA, 19 nt, Artificial Sequence
  Synthetic
gcuuuacagcuacacagga

SEQ ID NO: 485125 - RNA, 20 nt, Artificial Sequence
  Synthetic
agcuuuacagcuacacagga

SEQ ID NO: 485126 - RNA, 21 nt, Artificial Sequence
  Synthetic
cagcuuuacagcuacacagga

SEQ ID NO: 485127 - RNA, 22 nt, Artificial Sequence
  Synthetic
ccagcuuuacagcuacacagga

SEQ ID NO: 485128 - RNA, 23 nt, Artificial Sequence
  Synthetic
uccagcuuuacagcuacacagga

SEQ ID NO: 485129 - RNA, 24 nt, Artificial Sequence
  Synthetic
cuccagcuuuacagcuacacagga

SEQ ID NO: 485130 - RNA, 18 nt, Artificial Sequence
  Synthetic
cuuuaauaugccacagga

SEQ ID NO: 485131 - RNA, 19 nt, Artificial Sequence
  Synthetic
ucuuuaauaugccacagga

SEQ ID NO: 485132 - RNA, 20 nt, Artificial Sequence
  Synthetic
cucuuuaauaugccacagga

SEQ ID NO: 485133 - RNA, 21 nt, Artificial Sequence
  Synthetic
ucucuuuaauaugccacagga

SEQ ID NO: 485134 - RNA, 22 nt, Artificial Sequence
  Synthetic
uucucuuuaauaugccacagga

SEQ ID NO: 485135 - RNA, 23 nt, Artificial Sequence
  Synthetic
uuucucuuuaauaugccacagga

SEQ ID NO: 485136 - RNA, 24 nt, Artificial Sequence
  Synthetic
cuuucucuuuaauaugccacagga

SEQ ID NO: 485137 - RNA, 18 nt, Artificial Sequence
  Synthetic
auauauagcugcacagga

SEQ ID NO: 485138 - RNA, 19 nt, Artificial Sequence
  Synthetic
uauauauagcugcacagga

SEQ ID NO: 485139 - RNA, 20 nt, Artificial Sequence
  Synthetic
auauauauagcugcacagga

SEQ ID NO: 485140 - RNA, 21 nt, Artificial Sequence
  Synthetic
uauauauauagcugcacagga

SEQ ID NO: 485141 - RNA, 22 nt, Artificial Sequence
  Synthetic
auauauauauagcugcacagga

SEQ ID NO: 485142 - RNA, 23 nt, Artificial Sequence
  Synthetic
uauauauauauagcugcacagga

SEQ ID NO: 485143 - RNA, 24 nt, Artificial Sequence
  Synthetic
auauauauauauagcugcacagga

SEQ ID NO: 485144 - RNA, 18 nt, Artificial Sequence
  Synthetic
guggauugcaucacagga

SEQ ID NO: 485145 - RNA, 19 nt, Artificial Sequence
  Synthetic
aguggauugcaucacagga

SEQ ID NO: 485146 - RNA, 20 nt, Artificial Sequence
  Synthetic
caguggauugcaucacagga

SEQ ID NO: 485147 - RNA, 21 nt, Artificial Sequence
  Synthetic
acaguggauugcaucacagga

SEQ ID NO: 485148 - RNA, 22 nt, Artificial Sequence
  Synthetic
cacaguggauugcaucacagga

SEQ ID NO: 485149 - RNA, 23 nt, Artificial Sequence
  Synthetic
acacaguggauugcaucacagga

SEQ ID NO: 485150 - RNA, 24 nt, Artificial Sequence
  Synthetic
cacacaguggauugcaucacagga

SEQ ID NO: 485151 - RNA, 18 nt, Artificial Sequence
  Synthetic
gaacacauggucacagga

SEQ ID NO: 485152 - RNA, 19 nt, Artificial Sequence
  Synthetic
agaacacauggucacagga

SEQ ID NO: 485153 - RNA, 20 nt, Artificial Sequence
  Synthetic
gagaacacauggucacagga

SEQ ID NO: 485154 - RNA, 21 nt, Artificial Sequence
  Synthetic
ugagaacacauggucacagga

SEQ ID NO: 485155 - RNA, 22 nt, Artificial Sequence
  Synthetic
augagaacacauggucacagga

SEQ ID NO: 485156 - RNA, 23 nt, Artificial Sequence
  Synthetic
aaugagaacacauggucacagga

SEQ ID NO: 485157 - RNA, 24 nt, Artificial Sequence
  Synthetic
caaugagaacacauggucacagga

SEQ ID NO: 485158 - RNA, 18 nt, Artificial Sequence
  Synthetic
auagggaccaagacagga

SEQ ID NO: 485159 - RNA, 19 nt, Artificial Sequence
  Synthetic
uauagggaccaagacagga

SEQ ID NO: 485160 - RNA, 20 nt, Artificial Sequence
  Synthetic
auauagggaccaagacagga

SEQ ID NO: 485161 - RNA, 21 nt, Artificial Sequence
  Synthetic
uauauagggaccaagacagga

SEQ ID NO: 485162 - RNA, 22 nt, Artificial Sequence
  Synthetic
uuauauagggaccaagacagga

SEQ ID NO: 485163 - RNA, 23 nt, Artificial Sequence
  Synthetic
cuuauauagggaccaagacagga

SEQ ID NO: 485164 - RNA, 24 nt, Artificial Sequence
  Synthetic
ucuuauauagggaccaagacagga

SEQ ID NO: 485165 - RNA, 18 nt, Artificial Sequence
  Synthetic
uaccacaugaauacagga

SEQ ID NO: 485166 - RNA, 19 nt, Artificial Sequence
  Synthetic
auaccacaugaauacagga

SEQ ID NO: 485167 - RNA, 20 nt, Artificial Sequence
  Synthetic
cauaccacaugaauacagga

SEQ ID NO: 485168 - RNA, 21 nt, Artificial Sequence
  Synthetic
acauaccacaugaauacagga

SEQ ID NO: 485169 - RNA, 22 nt, Artificial Sequence
  Synthetic
uacauaccacaugaauacagga

SEQ ID NO: 485170 - RNA, 23 nt, Artificial Sequence
  Synthetic
auacauaccacaugaauacagga

SEQ ID NO: 485171 - RNA, 24 nt, Artificial Sequence
  Synthetic
cauacauaccacaugaauacagga

SEQ ID NO: 485172 - RNA, 18 nt, Artificial Sequence
  Synthetic
gugugauuuaguacagga

SEQ ID NO: 485173 - RNA, 19 nt, Artificial Sequence
  Synthetic
ggugugauuuaguacagga

SEQ ID NO: 485174 - RNA, 20 nt, Artificial Sequence
  Synthetic
aggugugauuuaguacagga

SEQ ID NO: 485175 - RNA, 21 nt, Artificial Sequence
  Synthetic
gaggugugauuuaguacagga

SEQ ID NO: 485176 - RNA, 22 nt, Artificial Sequence
  Synthetic
ugaggugugauuuaguacagga

SEQ ID NO: 485177 - RNA, 23 nt, Artificial Sequence
  Synthetic
gugaggugugauuuaguacagga

SEQ ID NO: 485178 - RNA, 24 nt, Artificial Sequence
  Synthetic
agugaggugugauuuaguacagga

SEQ ID NO: 485179 - RNA, 18 nt, Artificial Sequence
  Synthetic
agugcuggaauuacagga

SEQ ID NO: 485180 - RNA, 19 nt, Artificial Sequence
  Synthetic
aagugcuggaauuacagga

SEQ ID NO: 485181 - RNA, 20 nt, Artificial Sequence
  Synthetic
aaagugcuggaauuacagga

SEQ ID NO: 485182 - RNA, 21 nt, Artificial Sequence
  Synthetic
caaagugcuggaauuacagga

SEQ ID NO: 485183 - RNA, 22 nt, Artificial Sequence
  Synthetic
ccaaagugcuggaauuacagga

SEQ ID NO: 485184 - RNA, 23 nt, Artificial Sequence
  Synthetic
cccaaagugcuggaauuacagga

SEQ ID NO: 485185 - RNA, 24 nt, Artificial Sequence
  Synthetic
ucccaaagugcuggaauuacagga

SEQ ID NO: 485186 - RNA, 18 nt, Artificial Sequence
  Synthetic
uuguuuccccaaccagga

SEQ ID NO: 485187 - RNA, 19 nt, Artificial Sequence
  Synthetic
auuguuuccccaaccagga

SEQ ID NO: 485188 - RNA, 20 nt, Artificial Sequence
  Synthetic
gauuguuuccccaaccagga

SEQ ID NO: 485189 - RNA, 21 nt, Artificial Sequence
  Synthetic
agauuguuuccccaaccagga

SEQ ID NO: 485190 - RNA, 22 nt, Artificial Sequence
  Synthetic
aagauuguuuccccaaccagga

SEQ ID NO: 485191 - RNA, 23 nt, Artificial Sequence
  Synthetic
aaagauuguuuccccaaccagga

SEQ ID NO: 485192 - RNA, 24 nt, Artificial Sequence
  Synthetic
aaaagauuguuuccccaaccagga

SEQ ID NO: 485193 - RNA, 18 nt, Artificial Sequence
  Synthetic
gacauaaaauaaccagga

SEQ ID NO: 485194 - RNA, 19 nt, Artificial Sequence
  Synthetic
ggacauaaaauaaccagga

SEQ ID NO: 485195 - RNA, 20 nt, Artificial Sequence
  Synthetic
uggacauaaaauaaccagga

SEQ ID NO: 485196 - RNA, 21 nt, Artificial Sequence
  Synthetic
uuggacauaaaauaaccagga

SEQ ID NO: 485197 - RNA, 22 nt, Artificial Sequence
  Synthetic
uuuggacauaaaauaaccagga

SEQ ID NO: 485198 - RNA, 23 nt, Artificial Sequence
  Synthetic
uuuuggacauaaaauaaccagga

SEQ ID NO: 485199 - RNA, 24 nt, Artificial Sequence
  Synthetic
auuuuggacauaaaauaaccagga

SEQ ID NO: 485200 - RNA, 18 nt, Artificial Sequence
  Synthetic
gauggcagcacaccagga

SEQ ID NO: 485201 - RNA, 19 nt, Artificial Sequence
  Synthetic
ugauggcagcacaccagga

SEQ ID NO: 485202 - RNA, 20 nt, Artificial Sequence
  Synthetic
uugauggcagcacaccagga

SEQ ID NO: 485203 - RNA, 21 nt, Artificial Sequence
  Synthetic
auugauggcagcacaccagga

SEQ ID NO: 485204 - RNA, 22 nt, Artificial Sequence
  Synthetic
uauugauggcagcacaccagga

SEQ ID NO: 485205 - RNA, 23 nt, Artificial Sequence
  Synthetic
guauugauggcagcacaccagga

SEQ ID NO: 485206 - RNA, 24 nt, Artificial Sequence
  Synthetic
uguauugauggcagcacaccagga

SEQ ID NO: 485207 - RNA, 18 nt, Artificial Sequence
  Synthetic
augcagccaggaccagga

SEQ ID NO: 485208 - RNA, 19 nt, Artificial Sequence
  Synthetic
gaugcagccaggaccagga

SEQ ID NO: 485209 - RNA, 20 nt, Artificial Sequence
  Synthetic
agaugcagccaggaccagga

SEQ ID NO: 485210 - RNA, 21 nt, Artificial Sequence
  Synthetic
cagaugcagccaggaccagga

SEQ ID NO: 485211 - RNA, 22 nt, Artificial Sequence
  Synthetic
ucagaugcagccaggaccagga

SEQ ID NO: 485212 - RNA, 23 nt, Artificial Sequence
  Synthetic
gucagaugcagccaggaccagga

SEQ ID NO: 485213 - RNA, 24 nt, Artificial Sequence
  Synthetic
agucagaugcagccaggaccagga

SEQ ID NO: 485214 - RNA, 18 nt, Artificial Sequence
  Synthetic
aauugcuugaacccagga

SEQ ID NO: 485215 - RNA, 19 nt, Artificial Sequence
  Synthetic
gaauugcuugaacccagga

SEQ ID NO: 485216 - RNA, 20 nt, Artificial Sequence
  Synthetic
agaauugcuugaacccagga

SEQ ID NO: 485217 - RNA, 21 nt, Artificial Sequence
  Synthetic
gagaauugcuugaacccagga

SEQ ID NO: 485218 - RNA, 22 nt, Artificial Sequence
  Synthetic
agagaauugcuugaacccagga

SEQ ID NO: 485219 - RNA, 23 nt, Artificial Sequence
  Synthetic
cagagaauugcuugaacccagga

SEQ ID NO: 485220 - RNA, 24 nt, Artificial Sequence
  Synthetic
acagagaauugcuugaacccagga

SEQ ID NO: 485221 - RNA, 18 nt, Artificial Sequence
  Synthetic
ugggauauauacccagga

SEQ ID NO: 485222 - RNA, 19 nt, Artificial Sequence
  Synthetic
uugggauauauacccagga

SEQ ID NO: 485223 - RNA, 20 nt, Artificial Sequence
  Synthetic
uuugggauauauacccagga

SEQ ID NO: 485224 - RNA, 21 nt, Artificial Sequence
  Synthetic
cuuugggauauauacccagga

SEQ ID NO: 485225 - RNA, 22 nt, Artificial Sequence
  Synthetic
ucuuugggauauauacccagga

SEQ ID NO: 485226 - RNA, 23 nt, Artificial Sequence
  Synthetic
uucuuugggauauauacccagga

SEQ ID NO: 485227 - RNA, 24 nt, Artificial Sequence
  Synthetic
auucuuugggauauauacccagga

SEQ ID NO: 485228 - RNA, 18 nt, Artificial Sequence
  Synthetic
aaacucuacaucccagga

SEQ ID NO: 485229 - RNA, 19 nt, Artificial Sequence
  Synthetic
uaaacucuacaucccagga

SEQ ID NO: 485230 - RNA, 20 nt, Artificial Sequence
  Synthetic
uuaaacucuacaucccagga

SEQ ID NO: 485231 - RNA, 21 nt, Artificial Sequence
  Synthetic
auuaaacucuacaucccagga

SEQ ID NO: 485232 - RNA, 22 nt, Artificial Sequence
  Synthetic
gauuaaacucuacaucccagga

SEQ ID NO: 485233 - RNA, 23 nt, Artificial Sequence
  Synthetic
ggauuaaacucuacaucccagga

SEQ ID NO: 485234 - RNA, 24 nt, Artificial Sequence
  Synthetic
aggauuaaacucuacaucccagga

SEQ ID NO: 485235 - RNA, 18 nt, Artificial Sequence
  Synthetic
guaacccauaucccagga

SEQ ID NO: 485236 - RNA, 19 nt, Artificial Sequence
  Synthetic
aguaacccauaucccagga

SEQ ID NO: 485237 - RNA, 20 nt, Artificial Sequence
  Synthetic
aaguaacccauaucccagga

SEQ ID NO: 485238 - RNA, 21 nt, Artificial Sequence
  Synthetic
gaaguaacccauaucccagga

SEQ ID NO: 485239 - RNA, 22 nt, Artificial Sequence
  Synthetic
ggaaguaacccauaucccagga

SEQ ID NO: 485240 - RNA, 23 nt, Artificial Sequence
  Synthetic
aggaaguaacccauaucccagga

SEQ ID NO: 485241 - RNA, 24 nt, Artificial Sequence
  Synthetic
caggaaguaacccauaucccagga

SEQ ID NO: 485242 - RNA, 18 nt, Artificial Sequence
  Synthetic
cuguaaaagcagccagga

SEQ ID NO: 485243 - RNA, 19 nt, Artificial Sequence
  Synthetic
ccuguaaaagcagccagga

SEQ ID NO: 485244 - RNA, 20 nt, Artificial Sequence
  Synthetic
gccuguaaaagcagccagga

SEQ ID NO: 485245 - RNA, 21 nt, Artificial Sequence
  Synthetic
agccuguaaaagcagccagga

SEQ ID NO: 485246 - RNA, 22 nt, Artificial Sequence
  Synthetic
cagccuguaaaagcagccagga

SEQ ID NO: 485247 - RNA, 23 nt, Artificial Sequence
  Synthetic
ccagccuguaaaagcagccagga

SEQ ID NO: 485248 - RNA, 24 nt, Artificial Sequence
  Synthetic
gccagccuguaaaagcagccagga

SEQ ID NO: 485249 - RNA, 18 nt, Artificial Sequence
  Synthetic
cugugaaagcagccagga

SEQ ID NO: 485250 - RNA, 19 nt, Artificial Sequence
  Synthetic
ccugugaaagcagccagga

SEQ ID NO: 485251 - RNA, 20 nt, Artificial Sequence
  Synthetic
gccugugaaagcagccagga

SEQ ID NO: 485252 - RNA, 21 nt, Artificial Sequence
  Synthetic
agccugugaaagcagccagga

SEQ ID NO: 485253 - RNA, 22 nt, Artificial Sequence
  Synthetic
uagccugugaaagcagccagga

SEQ ID NO: 485254 - RNA, 23 nt, Artificial Sequence
  Synthetic
cuagccugugaaagcagccagga

SEQ ID NO: 485255 - RNA, 24 nt, Artificial Sequence
  Synthetic
gcuagccugugaaagcagccagga

SEQ ID NO: 485256 - RNA, 18 nt, Artificial Sequence
  Synthetic
uaggaaaaagagccagga

SEQ ID NO: 485257 - RNA, 19 nt, Artificial Sequence
  Synthetic
uuaggaaaaagagccagga

SEQ ID NO: 485258 - RNA, 20 nt, Artificial Sequence
  Synthetic
auuaggaaaaagagccagga

SEQ ID NO: 485259 - RNA, 21 nt, Artificial Sequence
  Synthetic
gauuaggaaaaagagccagga

SEQ ID NO: 485260 - RNA, 22 nt, Artificial Sequence
  Synthetic
ugauuaggaaaaagagccagga

SEQ ID NO: 485261 - RNA, 23 nt, Artificial Sequence
  Synthetic
augauuaggaaaaagagccagga

SEQ ID NO: 485262 - RNA, 24 nt, Artificial Sequence
  Synthetic
aaugauuaggaaaaagagccagga

SEQ ID NO: 485263 - RNA, 18 nt, Artificial Sequence
  Synthetic
agaaagaagaugccagga

SEQ ID NO: 485264 - RNA, 19 nt, Artificial Sequence
  Synthetic
aagaaagaagaugccagga

SEQ ID NO: 485265 - RNA, 20 nt, Artificial Sequence
  Synthetic
gaagaaagaagaugccagga

SEQ ID NO: 485266 - RNA, 21 nt, Artificial Sequence
  Synthetic
ggaagaaagaagaugccagga

SEQ ID NO: 485267 - RNA, 22 nt, Artificial Sequence
  Synthetic
uggaagaaagaagaugccagga

SEQ ID NO: 485268 - RNA, 23 nt, Artificial Sequence
  Synthetic
cuggaagaaagaagaugccagga

SEQ ID NO: 485269 - RNA, 24 nt, Artificial Sequence
  Synthetic
ucuggaagaaagaagaugccagga

SEQ ID NO: 485270 - RNA, 18 nt, Artificial Sequence
  Synthetic
gugaagaagcugccagga

SEQ ID NO: 485271 - RNA, 19 nt, Artificial Sequence
  Synthetic
agugaagaagcugccagga

SEQ ID NO: 485272 - RNA, 20 nt, Artificial Sequence
  Synthetic
uagugaagaagcugccagga

SEQ ID NO: 485273 - RNA, 21 nt, Artificial Sequence
  Synthetic
auagugaagaagcugccagga

SEQ ID NO: 485274 - RNA, 22 nt, Artificial Sequence
  Synthetic
cauagugaagaagcugccagga

SEQ ID NO: 485275 - RNA, 23 nt, Artificial Sequence
  Synthetic
acauagugaagaagcugccagga

SEQ ID NO: 485276 - RNA, 24 nt, Artificial Sequence
  Synthetic
uacauagugaagaagcugccagga

SEQ ID NO: 485277 - RNA, 18 nt, Artificial Sequence
  Synthetic
gaaagaaaugcuccagga

SEQ ID NO: 485278 - RNA, 19 nt, Artificial Sequence
  Synthetic
agaaagaaaugcuccagga

SEQ ID NO: 485279 - RNA, 20 nt, Artificial Sequence
  Synthetic
aagaaagaaaugcuccagga

SEQ ID NO: 485280 - RNA, 21 nt, Artificial Sequence
  Synthetic
gaagaaagaaaugcuccagga

SEQ ID NO: 485281 - RNA, 22 nt, Artificial Sequence
  Synthetic
agaagaaagaaaugcuccagga

SEQ ID NO: 485282 - RNA, 23 nt, Artificial Sequence
  Synthetic
uagaagaaagaaaugcuccagga

SEQ ID NO: 485283 - RNA, 24 nt, Artificial Sequence
  Synthetic
auagaagaaagaaaugcuccagga

SEQ ID NO: 485284 - RNA, 18 nt, Artificial Sequence
  Synthetic
uacuguaacaguccagga

SEQ ID NO: 485285 - RNA, 19 nt, Artificial Sequence
  Synthetic
cuacuguaacaguccagga

SEQ ID NO: 485286 - RNA, 20 nt, Artificial Sequence
  Synthetic
acuacuguaacaguccagga

SEQ ID NO: 485287 - RNA, 21 nt, Artificial Sequence
  Synthetic
gacuacuguaacaguccagga

SEQ ID NO: 485288 - RNA, 22 nt, Artificial Sequence
  Synthetic
agacuacuguaacaguccagga

SEQ ID NO: 485289 - RNA, 23 nt, Artificial Sequence
  Synthetic
aagacuacuguaacaguccagga

SEQ ID NO: 485290 - RNA, 24 nt, Artificial Sequence
  Synthetic
uaagacuacuguaacaguccagga

SEQ ID NO: 485291 - RNA, 18 nt, Artificial Sequence
  Synthetic
uuaaaagggauuccagga

SEQ ID NO: 485292 - RNA, 19 nt, Artificial Sequence
  Synthetic
cuuaaaagggauuccagga

SEQ ID NO: 485293 - RNA, 20 nt, Artificial Sequence
  Synthetic
ucuuaaaagggauuccagga

SEQ ID NO: 485294 - RNA, 21 nt, Artificial Sequence
  Synthetic
aucuuaaaagggauuccagga

SEQ ID NO: 485295 - RNA, 22 nt, Artificial Sequence
  Synthetic
aaucuuaaaagggauuccagga

SEQ ID NO: 485296 - RNA, 23 nt, Artificial Sequence
  Synthetic
aaaucuuaaaagggauuccagga

SEQ ID NO: 485297 - RNA, 24 nt, Artificial Sequence
  Synthetic
gaaaucuuaaaagggauuccagga

SEQ ID NO: 485298 - RNA, 18 nt, Artificial Sequence
  Synthetic
uuagugaucuuuccagga

SEQ ID NO: 485299 - RNA, 19 nt, Artificial Sequence
  Synthetic
uuuagugaucuuuccagga

SEQ ID NO: 485300 - RNA, 20 nt, Artificial Sequence
  Synthetic
guuuagugaucuuuccagga

SEQ ID NO: 485301 - RNA, 21 nt, Artificial Sequence
  Synthetic
aguuuagugaucuuuccagga

SEQ ID NO: 485302 - RNA, 22 nt, Artificial Sequence
  Synthetic
aaguuuagugaucuuuccagga

SEQ ID NO: 485303 - RNA, 23 nt, Artificial Sequence
  Synthetic
caaguuuagugaucuuuccagga

SEQ ID NO: 485304 - RNA, 24 nt, Artificial Sequence
  Synthetic
gcaaguuuagugaucuuuccagga

SEQ ID NO: 485305 - RNA, 18 nt, Artificial Sequence
  Synthetic
aggcucugguuuccagga

SEQ ID NO: 485306 - RNA, 19 nt, Artificial Sequence
  Synthetic
uaggcucugguuuccagga

SEQ ID NO: 485307 - RNA, 20 nt, Artificial Sequence
  Synthetic
uuaggcucugguuuccagga

SEQ ID NO: 485308 - RNA, 21 nt, Artificial Sequence
  Synthetic
uuuaggcucugguuuccagga

SEQ ID NO: 485309 - RNA, 22 nt, Artificial Sequence
  Synthetic
uuuuaggcucugguuuccagga

SEQ ID NO: 485310 - RNA, 23 nt, Artificial Sequence
  Synthetic
auuuuaggcucugguuuccagga

SEQ ID NO: 485311 - RNA, 24 nt, Artificial Sequence
  Synthetic
cauuuuaggcucugguuuccagga

SEQ ID NO: 485312 - RNA, 18 nt, Artificial Sequence
  Synthetic
ugaagaaugaaagcagga

SEQ ID NO: 485313 - RNA, 19 nt, Artificial Sequence
  Synthetic
gugaagaaugaaagcagga

SEQ ID NO: 485314 - RNA, 20 nt, Artificial Sequence
  Synthetic
ugugaagaaugaaagcagga

SEQ ID NO: 485315 - RNA, 21 nt, Artificial Sequence
  Synthetic
augugaagaaugaaagcagga

SEQ ID NO: 485316 - RNA, 22 nt, Artificial Sequence
  Synthetic
aaugugaagaaugaaagcagga

SEQ ID NO: 485317 - RNA, 23 nt, Artificial Sequence
  Synthetic
caaugugaagaaugaaagcagga

SEQ ID NO: 485318 - RNA, 24 nt, Artificial Sequence
  Synthetic
acaaugugaagaaugaaagcagga

SEQ ID NO: 485319 - RNA, 18 nt, Artificial Sequence
  Synthetic
uaaaaggauaaagcagga

SEQ ID NO: 485320 - RNA, 19 nt, Artificial Sequence
  Synthetic
uuaaaaggauaaagcagga

SEQ ID NO: 485321 - RNA, 20 nt, Artificial Sequence
  Synthetic
uuuaaaaggauaaagcagga

SEQ ID NO: 485322 - RNA, 21 nt, Artificial Sequence
  Synthetic
uuuuaaaaggauaaagcagga

SEQ ID NO: 485323 - RNA, 22 nt, Artificial Sequence
  Synthetic
auuuuaaaaggauaaagcagga

SEQ ID NO: 485324 - RNA, 23 nt, Artificial Sequence
  Synthetic
uauuuuaaaaggauaaagcagga

SEQ ID NO: 485325 - RNA, 24 nt, Artificial Sequence
  Synthetic
auauuuuaaaaggauaaagcagga

SEQ ID NO: 485326 - RNA, 18 nt, Artificial Sequence
  Synthetic
ccgggaugaacagcagga

SEQ ID NO: 485327 - RNA, 19 nt, Artificial Sequence
  Synthetic
accgggaugaacagcagga

SEQ ID NO: 485328 - RNA, 20 nt, Artificial Sequence
  Synthetic
uaccgggaugaacagcagga

SEQ ID NO: 485329 - RNA, 21 nt, Artificial Sequence
  Synthetic
guaccgggaugaacagcagga

SEQ ID NO: 485330 - RNA, 22 nt, Artificial Sequence
  Synthetic
gguaccgggaugaacagcagga

SEQ ID NO: 485331 - RNA, 23 nt, Artificial Sequence
  Synthetic
ugguaccgggaugaacagcagga

SEQ ID NO: 485332 - RNA, 24 nt, Artificial Sequence
  Synthetic
augguaccgggaugaacagcagga

SEQ ID NO: 485333 - RNA, 18 nt, Artificial Sequence
  Synthetic
gaacaccuggacgcagga

SEQ ID NO: 485334 - RNA, 19 nt, Artificial Sequence
  Synthetic
agaacaccuggacgcagga

SEQ ID NO: 485335 - RNA, 20 nt, Artificial Sequence
  Synthetic
gagaacaccuggacgcagga

SEQ ID NO: 485336 - RNA, 21 nt, Artificial Sequence
  Synthetic
ugagaacaccuggacgcagga

SEQ ID NO: 485337 - RNA, 22 nt, Artificial Sequence
  Synthetic
augagaacaccuggacgcagga

SEQ ID NO: 485338 - RNA, 23 nt, Artificial Sequence
  Synthetic
aaugagaacaccuggacgcagga

SEQ ID NO: 485339 - RNA, 24 nt, Artificial Sequence
  Synthetic
caaugagaacaccuggacgcagga

SEQ ID NO: 485340 - RNA, 18 nt, Artificial Sequence
  Synthetic
aacacuagcaaggcagga

SEQ ID NO: 485341 - RNA, 19 nt, Artificial Sequence
  Synthetic
gaacacuagcaaggcagga

SEQ ID NO: 485342 - RNA, 20 nt, Artificial Sequence
  Synthetic
agaacacuagcaaggcagga

SEQ ID NO: 485343 - RNA, 21 nt, Artificial Sequence
  Synthetic
uagaacacuagcaaggcagga

SEQ ID NO: 485344 - RNA, 22 nt, Artificial Sequence
  Synthetic
uuagaacacuagcaaggcagga

SEQ ID NO: 485345 - RNA, 23 nt, Artificial Sequence
  Synthetic
guuagaacacuagcaaggcagga

SEQ ID NO: 485346 - RNA, 24 nt, Artificial Sequence
  Synthetic
aguuagaacacuagcaaggcagga

SEQ ID NO: 485347 - RNA, 18 nt, Artificial Sequence
  Synthetic
caaggcaggaaggcagga

SEQ ID NO: 485348 - RNA, 19 nt, Artificial Sequence
  Synthetic
acaaggcaggaaggcagga

SEQ ID NO: 485349 - RNA, 20 nt, Artificial Sequence
  Synthetic
gacaaggcaggaaggcagga

SEQ ID NO: 485350 - RNA, 21 nt, Artificial Sequence
  Synthetic
agacaaggcaggaaggcagga

SEQ ID NO: 485351 - RNA, 22 nt, Artificial Sequence
  Synthetic
aagacaaggcaggaaggcagga

SEQ ID NO: 485352 - RNA, 23 nt, Artificial Sequence
  Synthetic
caagacaaggcaggaaggcagga

SEQ ID NO: 485353 - RNA, 24 nt, Artificial Sequence
  Synthetic
gcaagacaaggcaggaaggcagga

SEQ ID NO: 485354 - RNA, 18 nt, Artificial Sequence
  Synthetic
gcaagaagagaggcagga

SEQ ID NO: 485355 - RNA, 19 nt, Artificial Sequence
  Synthetic
agcaagaagagaggcagga

SEQ ID NO: 485356 - RNA, 20 nt, Artificial Sequence
  Synthetic
gagcaagaagagaggcagga

SEQ ID NO: 485357 - RNA, 21 nt, Artificial Sequence
  Synthetic
ggagcaagaagagaggcagga

SEQ ID NO: 485358 - RNA, 22 nt, Artificial Sequence
  Synthetic
aggagcaagaagagaggcagga

SEQ ID NO: 485359 - RNA, 23 nt, Artificial Sequence
  Synthetic
aaggagcaagaagagaggcagga

SEQ ID NO: 485360 - RNA, 24 nt, Artificial Sequence
  Synthetic
gaaggagcaagaagagaggcagga

SEQ ID NO: 485361 - RNA, 18 nt, Artificial Sequence
  Synthetic
gagagacaggaggcagga

SEQ ID NO: 485362 - RNA, 19 nt, Artificial Sequence
  Synthetic
ggagagacaggaggcagga

SEQ ID NO: 485363 - RNA, 20 nt, Artificial Sequence
  Synthetic
uggagagacaggaggcagga

SEQ ID NO: 485364 - RNA, 21 nt, Artificial Sequence
  Synthetic
auggagagacaggaggcagga

SEQ ID NO: 485365 - RNA, 22 nt, Artificial Sequence
  Synthetic
aauggagagacaggaggcagga

SEQ ID NO: 485366 - RNA, 23 nt, Artificial Sequence
  Synthetic
gaauggagagacaggaggcagga

SEQ ID NO: 485367 - RNA, 24 nt, Artificial Sequence
  Synthetic
agaauggagagacaggaggcagga

SEQ ID NO: 485368 - RNA, 18 nt, Artificial Sequence
  Synthetic
uggagugcaguggcagga

SEQ ID NO: 485369 - RNA, 19 nt, Artificial Sequence
  Synthetic
cuggagugcaguggcagga

SEQ ID NO: 485370 - RNA, 20 nt, Artificial Sequence
  Synthetic
gcuggagugcaguggcagga

SEQ ID NO: 485371 - RNA, 21 nt, Artificial Sequence
  Synthetic
ggcuggagugcaguggcagga

SEQ ID NO: 485372 - RNA, 22 nt, Artificial Sequence
  Synthetic
aggcuggagugcaguggcagga

SEQ ID NO: 485373 - RNA, 23 nt, Artificial Sequence
  Synthetic
caggcuggagugcaguggcagga

SEQ ID NO: 485374 - RNA, 24 nt, Artificial Sequence
  Synthetic
ccaggcuggagugcaguggcagga

SEQ ID NO: 485375 - RNA, 18 nt, Artificial Sequence
  Synthetic
cuucacaggguggcagga

SEQ ID NO: 485376 - RNA, 19 nt, Artificial Sequence
  Synthetic
ucuucacaggguggcagga

SEQ ID NO: 485377 - RNA, 20 nt, Artificial Sequence
  Synthetic
cucuucacaggguggcagga

SEQ ID NO: 485378 - RNA, 21 nt, Artificial Sequence
  Synthetic
ccucuucacaggguggcagga

SEQ ID NO: 485379 - RNA, 22 nt, Artificial Sequence
  Synthetic
accucuucacaggguggcagga

SEQ ID NO: 485380 - RNA, 23 nt, Artificial Sequence
  Synthetic
caccucuucacaggguggcagga

SEQ ID NO: 485381 - RNA, 24 nt, Artificial Sequence
  Synthetic
gcaccucuucacaggguggcagga

SEQ ID NO: 485382 - RNA, 18 nt, Artificial Sequence
  Synthetic
cagaagucugcugcagga

SEQ ID NO: 485383 - RNA, 19 nt, Artificial Sequence
  Synthetic
gcagaagucugcugcagga

SEQ ID NO: 485384 - RNA, 20 nt, Artificial Sequence
  Synthetic
ggcagaagucugcugcagga

SEQ ID NO: 485385 - RNA, 21 nt, Artificial Sequence
  Synthetic
aggcagaagucugcugcagga

SEQ ID NO: 485386 - RNA, 22 nt, Artificial Sequence
  Synthetic
caggcagaagucugcugcagga

SEQ ID NO: 485387 - RNA, 23 nt, Artificial Sequence
  Synthetic
ccaggcagaagucugcugcagga

SEQ ID NO: 485388 - RNA, 24 nt, Artificial Sequence
  Synthetic
uccaggcagaagucugcugcagga

SEQ ID NO: 485389 - RNA, 18 nt, Artificial Sequence
  Synthetic
uuauucagaugugcagga

SEQ ID NO: 485390 - RNA, 19 nt, Artificial Sequence
  Synthetic
guuauucagaugugcagga

SEQ ID NO: 485391 - RNA, 20 nt, Artificial Sequence
  Synthetic
gguuauucagaugugcagga

SEQ ID NO: 485392 - RNA, 21 nt, Artificial Sequence
  Synthetic
ggguuauucagaugugcagga

SEQ ID NO: 485393 - RNA, 22 nt, Artificial Sequence
  Synthetic
aggguuauucagaugugcagga

SEQ ID NO: 485394 - RNA, 23 nt, Artificial Sequence
  Synthetic
uaggguuauucagaugugcagga

SEQ ID NO: 485395 - RNA, 24 nt, Artificial Sequence
  Synthetic
auaggguuauucagaugugcagga

SEQ ID NO: 485396 - RNA, 18 nt, Artificial Sequence
  Synthetic
uuuaaucauuuugcagga

SEQ ID NO: 485397 - RNA, 19 nt, Artificial Sequence
  Synthetic
uuuuaaucauuuugcagga

SEQ ID NO: 485398 - RNA, 20 nt, Artificial Sequence
  Synthetic
guuuuaaucauuuugcagga

SEQ ID NO: 485399 - RNA, 21 nt, Artificial Sequence
  Synthetic
aguuuuaaucauuuugcagga

SEQ ID NO: 485400 - RNA, 22 nt, Artificial Sequence
  Synthetic
aaguuuuaaucauuuugcagga

SEQ ID NO: 485401 - RNA, 23 nt, Artificial Sequence
  Synthetic
caaguuuuaaucauuuugcagga

SEQ ID NO: 485402 - RNA, 24 nt, Artificial Sequence
  Synthetic
ccaaguuuuaaucauuuugcagga

SEQ ID NO: 485403 - RNA, 18 nt, Artificial Sequence
  Synthetic
auuaucagaaaaucagga

SEQ ID NO: 485404 - RNA, 19 nt, Artificial Sequence
  Synthetic
aauuaucagaaaaucagga

SEQ ID NO: 485405 - RNA, 20 nt, Artificial Sequence
  Synthetic
gaauuaucagaaaaucagga

SEQ ID NO: 485406 - RNA, 21 nt, Artificial Sequence
  Synthetic
ugaauuaucagaaaaucagga

SEQ ID NO: 485407 - RNA, 22 nt, Artificial Sequence
  Synthetic
cugaauuaucagaaaaucagga

SEQ ID NO: 485408 - RNA, 23 nt, Artificial Sequence
  Synthetic
ucugaauuaucagaaaaucagga

SEQ ID NO: 485409 - RNA, 24 nt, Artificial Sequence
  Synthetic
aucugaauuaucagaaaaucagga

SEQ ID NO: 485410 - RNA, 18 nt, Artificial Sequence
  Synthetic
gaggaugaaucaucagga

SEQ ID NO: 485411 - RNA, 19 nt, Artificial Sequence
  Synthetic
ugaggaugaaucaucagga

SEQ ID NO: 485412 - RNA, 20 nt, Artificial Sequence
  Synthetic
cugaggaugaaucaucagga

SEQ ID NO: 485413 - RNA, 21 nt, Artificial Sequence
  Synthetic
gcugaggaugaaucaucagga

SEQ ID NO: 485414 - RNA, 22 nt, Artificial Sequence
  Synthetic
ggcugaggaugaaucaucagga

SEQ ID NO: 485415 - RNA, 23 nt, Artificial Sequence
  Synthetic
aggcugaggaugaaucaucagga

SEQ ID NO: 485416 - RNA, 24 nt, Artificial Sequence
  Synthetic
gaggcugaggaugaaucaucagga

SEQ ID NO: 485417 - RNA, 18 nt, Artificial Sequence
  Synthetic
aaguaaaguaacucagga

SEQ ID NO: 485418 - RNA, 19 nt, Artificial Sequence
  Synthetic
caaguaaaguaacucagga

SEQ ID NO: 485419 - RNA, 20 nt, Artificial Sequence
  Synthetic
ccaaguaaaguaacucagga

SEQ ID NO: 485420 - RNA, 21 nt, Artificial Sequence
  Synthetic
uccaaguaaaguaacucagga

SEQ ID NO: 485421 - RNA, 22 nt, Artificial Sequence
  Synthetic
uuccaaguaaaguaacucagga

SEQ ID NO: 485422 - RNA, 23 nt, Artificial Sequence
  Synthetic
auuccaaguaaaguaacucagga

SEQ ID NO: 485423 - RNA, 24 nt, Artificial Sequence
  Synthetic
uauuccaaguaaaguaacucagga

SEQ ID NO: 485424 - RNA, 18 nt, Artificial Sequence
  Synthetic
aagugaaguaacucagga

SEQ ID NO: 485425 - RNA, 19 nt, Artificial Sequence
  Synthetic
uaagugaaguaacucagga

SEQ ID NO: 485426 - RNA, 20 nt, Artificial Sequence
  Synthetic
guaagugaaguaacucagga

SEQ ID NO: 485427 - RNA, 21 nt, Artificial Sequence
  Synthetic
uguaagugaaguaacucagga

SEQ ID NO: 485428 - RNA, 22 nt, Artificial Sequence
  Synthetic
uuguaagugaaguaacucagga

SEQ ID NO: 485429 - RNA, 23 nt, Artificial Sequence
  Synthetic
auuguaagugaaguaacucagga

SEQ ID NO: 485430 - RNA, 24 nt, Artificial Sequence
  Synthetic
cauuguaagugaaguaacucagga

SEQ ID NO: 485431 - RNA, 18 nt, Artificial Sequence
  Synthetic
uauuauucgagcucagga

SEQ ID NO: 485432 - RNA, 19 nt, Artificial Sequence
  Synthetic
auauuauucgagcucagga

SEQ ID NO: 485433 - RNA, 20 nt, Artificial Sequence
  Synthetic
aauauuauucgagcucagga

SEQ ID NO: 485434 - RNA, 21 nt, Artificial Sequence
  Synthetic
aaauauuauucgagcucagga

SEQ ID NO: 485435 - RNA, 22 nt, Artificial Sequence
  Synthetic
caaauauuauucgagcucagga

SEQ ID NO: 485436 - RNA, 23 nt, Artificial Sequence
  Synthetic
gcaaauauuauucgagcucagga

SEQ ID NO: 485437 - RNA, 24 nt, Artificial Sequence
  Synthetic
agcaaauauuauucgagcucagga

SEQ ID NO: 485438 - RNA, 18 nt, Artificial Sequence
  Synthetic
caaguagcuaucucagga

SEQ ID NO: 485439 - RNA, 19 nt, Artificial Sequence
  Synthetic
ucaaguagcuaucucagga

SEQ ID NO: 485440 - RNA, 20 nt, Artificial Sequence
  Synthetic
uucaaguagcuaucucagga

SEQ ID NO: 485441 - RNA, 21 nt, Artificial Sequence
  Synthetic
auucaaguagcuaucucagga

SEQ ID NO: 485442 - RNA, 22 nt, Artificial Sequence
  Synthetic
gauucaaguagcuaucucagga

SEQ ID NO: 485443 - RNA, 23 nt, Artificial Sequence
  Synthetic
cgauucaaguagcuaucucagga

SEQ ID NO: 485444 - RNA, 24 nt, Artificial Sequence
  Synthetic
acgauucaaguagcuaucucagga

SEQ ID NO: 485445 - RNA, 18 nt, Artificial Sequence
  Synthetic
gacgcucccgagucagga

SEQ ID NO: 485446 - RNA, 19 nt, Artificial Sequence
  Synthetic
ugacgcucccgagucagga

SEQ ID NO: 485447 - RNA, 20 nt, Artificial Sequence
  Synthetic
augacgcucccgagucagga

SEQ ID NO: 485448 - RNA, 21 nt, Artificial Sequence
  Synthetic
uaugacgcucccgagucagga

SEQ ID NO: 485449 - RNA, 22 nt, Artificial Sequence
  Synthetic
guaugacgcucccgagucagga

SEQ ID NO: 485450 - RNA, 23 nt, Artificial Sequence
  Synthetic
uguaugacgcucccgagucagga

SEQ ID NO: 485451 - RNA, 24 nt, Artificial Sequence
  Synthetic
auguaugacgcucccgagucagga

SEQ ID NO: 485452 - RNA, 18 nt, Artificial Sequence
  Synthetic
uagacaagaaggucagga

SEQ ID NO: 485453 - RNA, 19 nt, Artificial Sequence
  Synthetic
auagacaagaaggucagga

SEQ ID NO: 485454 - RNA, 20 nt, Artificial Sequence
  Synthetic
gauagacaagaaggucagga

SEQ ID NO: 485455 - RNA, 21 nt, Artificial Sequence
  Synthetic
ugauagacaagaaggucagga

SEQ ID NO: 485456 - RNA, 22 nt, Artificial Sequence
  Synthetic
uugauagacaagaaggucagga

SEQ ID NO: 485457 - RNA, 23 nt, Artificial Sequence
  Synthetic
uuugauagacaagaaggucagga

SEQ ID NO: 485458 - RNA, 24 nt, Artificial Sequence
  Synthetic
guuugauagacaagaaggucagga

SEQ ID NO: 485459 - RNA, 18 nt, Artificial Sequence
  Synthetic
auaugucaugauucagga

SEQ ID NO: 485460 - RNA, 19 nt, Artificial Sequence
  Synthetic
uauaugucaugauucagga

SEQ ID NO: 485461 - RNA, 20 nt, Artificial Sequence
  Synthetic
auauaugucaugauucagga

SEQ ID NO: 485462 - RNA, 21 nt, Artificial Sequence
  Synthetic
uauauaugucaugauucagga

SEQ ID NO: 485463 - RNA, 22 nt, Artificial Sequence
  Synthetic
auauauaugucaugauucagga

SEQ ID NO: 485464 - RNA, 23 nt, Artificial Sequence
  Synthetic
uauauauaugucaugauucagga

SEQ ID NO: 485465 - RNA, 24 nt, Artificial Sequence
  Synthetic
auauauauaugucaugauucagga

SEQ ID NO: 485466 - RNA, 18 nt, Artificial Sequence
  Synthetic
uuugcuggauauucagga

SEQ ID NO: 485467 - RNA, 19 nt, Artificial Sequence
  Synthetic
uuuugcuggauauucagga

SEQ ID NO: 485468 - RNA, 20 nt, Artificial Sequence
  Synthetic
uuuuugcuggauauucagga

SEQ ID NO: 485469 - RNA, 21 nt, Artificial Sequence
  Synthetic
auuuuugcuggauauucagga

SEQ ID NO: 485470 - RNA, 22 nt, Artificial Sequence
  Synthetic
uauuuuugcuggauauucagga

SEQ ID NO: 485471 - RNA, 23 nt, Artificial Sequence
  Synthetic
cuauuuuugcuggauauucagga

SEQ ID NO: 485472 - RNA, 24 nt, Artificial Sequence
  Synthetic
acuauuuuugcuggauauucagga

SEQ ID NO: 485473 - RNA, 18 nt, Artificial Sequence
  Synthetic
ccggaccccuuuucagga

SEQ ID NO: 485474 - RNA, 19 nt, Artificial Sequence
  Synthetic
cccggaccccuuuucagga

SEQ ID NO: 485475 - RNA, 20 nt, Artificial Sequence
  Synthetic
gcccggaccccuuuucagga

SEQ ID NO: 485476 - RNA, 21 nt, Artificial Sequence
  Synthetic
ugcccggaccccuuuucagga

SEQ ID NO: 485477 - RNA, 22 nt, Artificial Sequence
  Synthetic
cugcccggaccccuuuucagga

SEQ ID NO: 485478 - RNA, 23 nt, Artificial Sequence
  Synthetic
gcugcccggaccccuuuucagga

SEQ ID NO: 485479 - RNA, 24 nt, Artificial Sequence
  Synthetic
ggcugcccggaccccuuuucagga

SEQ ID NO: 485480 - RNA, 18 nt, Artificial Sequence
  Synthetic
gcacuugguuuuucagga

SEQ ID NO: 485481 - RNA, 19 nt, Artificial Sequence
  Synthetic
ggcacuugguuuuucagga

SEQ ID NO: 485482 - RNA, 20 nt, Artificial Sequence
  Synthetic
gggcacuugguuuuucagga

SEQ ID NO: 485483 - RNA, 21 nt, Artificial Sequence
  Synthetic
agggcacuugguuuuucagga

SEQ ID NO: 485484 - RNA, 22 nt, Artificial Sequence
  Synthetic
aagggcacuugguuuuucagga

SEQ ID NO: 485485 - RNA, 23 nt, Artificial Sequence
  Synthetic
gaagggcacuugguuuuucagga

SEQ ID NO: 485486 - RNA, 24 nt, Artificial Sequence
  Synthetic
ugaagggcacuugguuuuucagga

SEQ ID NO: 485487 - RNA, 18 nt, Artificial Sequence
  Synthetic
acauugguuaaaagagga

SEQ ID NO: 485488 - RNA, 19 nt, Artificial Sequence
  Synthetic
gacauugguuaaaagagga

SEQ ID NO: 485489 - RNA, 20 nt, Artificial Sequence
  Synthetic
ggacauugguuaaaagagga

SEQ ID NO: 485490 - RNA, 21 nt, Artificial Sequence
  Synthetic
aggacauugguuaaaagagga

SEQ ID NO: 485491 - RNA, 22 nt, Artificial Sequence
  Synthetic
aaggacauugguuaaaagagga

SEQ ID NO: 485492 - RNA, 23 nt, Artificial Sequence
  Synthetic
aaaggacauugguuaaaagagga

SEQ ID NO: 485493 - RNA, 24 nt, Artificial Sequence
  Synthetic
aaaaggacauugguuaaaagagga

SEQ ID NO: 485494 - RNA, 18 nt, Artificial Sequence
  Synthetic
aggaaagaagaaagagga

SEQ ID NO: 485495 - RNA, 19 nt, Artificial Sequence
  Synthetic
aaggaaagaagaaagagga

SEQ ID NO: 485496 - RNA, 20 nt, Artificial Sequence
  Synthetic
gaaggaaagaagaaagagga

SEQ ID NO: 485497 - RNA, 21 nt, Artificial Sequence
  Synthetic
ugaaggaaagaagaaagagga

SEQ ID NO: 485498 - RNA, 22 nt, Artificial Sequence
  Synthetic
gugaaggaaagaagaaagagga

SEQ ID NO: 485499 - RNA, 23 nt, Artificial Sequence
  Synthetic
agugaaggaaagaagaaagagga

SEQ ID NO: 485500 - RNA, 24 nt, Artificial Sequence
  Synthetic
aagugaaggaaagaagaaagagga

SEQ ID NO: 485501 - RNA, 18 nt, Artificial Sequence
  Synthetic
uauugcacagaaagagga

SEQ ID NO: 485502 - RNA, 19 nt, Artificial Sequence
  Synthetic
auauugcacagaaagagga

SEQ ID NO: 485503 - RNA, 20 nt, Artificial Sequence
  Synthetic
uauauugcacagaaagagga

SEQ ID NO: 485504 - RNA, 21 nt, Artificial Sequence
  Synthetic
auauauugcacagaaagagga

SEQ ID NO: 485505 - RNA, 22 nt, Artificial Sequence
  Synthetic
aauauauugcacagaaagagga

SEQ ID NO: 485506 - RNA, 23 nt, Artificial Sequence
  Synthetic
caauauauugcacagaaagagga

SEQ ID NO: 485507 - RNA, 24 nt, Artificial Sequence
  Synthetic
acaauauauugcacagaaagagga

SEQ ID NO: 485508 - RNA, 18 nt, Artificial Sequence
  Synthetic
uagaaaauaacaagagga

SEQ ID NO: 485509 - RNA, 19 nt, Artificial Sequence
  Synthetic
auagaaaauaacaagagga

SEQ ID NO: 485510 - RNA, 20 nt, Artificial Sequence
  Synthetic
aauagaaaauaacaagagga

SEQ ID NO: 485511 - RNA, 21 nt, Artificial Sequence
  Synthetic
aaauagaaaauaacaagagga

SEQ ID NO: 485512 - RNA, 22 nt, Artificial Sequence
  Synthetic
gaaauagaaaauaacaagagga

SEQ ID NO: 485513 - RNA, 23 nt, Artificial Sequence
  Synthetic
ggaaauagaaaauaacaagagga

SEQ ID NO: 485514 - RNA, 24 nt, Artificial Sequence
  Synthetic
aggaaauagaaaauaacaagagga

SEQ ID NO: 485515 - RNA, 18 nt, Artificial Sequence
  Synthetic
aaaauucuaacaagagga

SEQ ID NO: 485516 - RNA, 19 nt, Artificial Sequence
  Synthetic
gaaaauucuaacaagagga

SEQ ID NO: 485517 - RNA, 20 nt, Artificial Sequence
  Synthetic
ugaaaauucuaacaagagga

SEQ ID NO: 485518 - RNA, 21 nt, Artificial Sequence
  Synthetic
augaaaauucuaacaagagga

SEQ ID NO: 485519 - RNA, 22 nt, Artificial Sequence
  Synthetic
uaugaaaauucuaacaagagga

SEQ ID NO: 485520 - RNA, 23 nt, Artificial Sequence
  Synthetic
guaugaaaauucuaacaagagga

SEQ ID NO: 485521 - RNA, 24 nt, Artificial Sequence
  Synthetic
uguaugaaaauucuaacaagagga

SEQ ID NO: 485522 - RNA, 18 nt, Artificial Sequence
  Synthetic
gagagagagagaagagga

SEQ ID NO: 485523 - RNA, 19 nt, Artificial Sequence
  Synthetic
agagagagagagaagagga

SEQ ID NO: 485524 - RNA, 20 nt, Artificial Sequence
  Synthetic
gagagagagagagaagagga

SEQ ID NO: 485525 - RNA, 21 nt, Artificial Sequence
  Synthetic
agagagagagagagaagagga

SEQ ID NO: 485526 - RNA, 22 nt, Artificial Sequence
  Synthetic
gagagagagagagagaagagga

SEQ ID NO: 485527 - RNA, 23 nt, Artificial Sequence
  Synthetic
agagagagagagagagaagagga

SEQ ID NO: 485528 - RNA, 24 nt, Artificial Sequence
  Synthetic
gagagagagagagagagaagagga

SEQ ID NO: 485529 - RNA, 18 nt, Artificial Sequence
  Synthetic
uccucaauuagaagagga

SEQ ID NO: 485530 - RNA, 19 nt, Artificial Sequence
  Synthetic
uuccucaauuagaagagga

SEQ ID NO: 485531 - RNA, 20 nt, Artificial Sequence
  Synthetic
cuuccucaauuagaagagga

SEQ ID NO: 485532 - RNA, 21 nt, Artificial Sequence
  Synthetic
ucuuccucaauuagaagagga

SEQ ID NO: 485533 - RNA, 22 nt, Artificial Sequence
  Synthetic
uucuuccucaauuagaagagga

SEQ ID NO: 485534 - RNA, 23 nt, Artificial Sequence
  Synthetic
uuucuuccucaauuagaagagga

SEQ ID NO: 485535 - RNA, 24 nt, Artificial Sequence
  Synthetic
auuucuuccucaauuagaagagga

SEQ ID NO: 485536 - RNA, 18 nt, Artificial Sequence
  Synthetic
uaugggaagggaagagga

SEQ ID NO: 485537 - RNA, 19 nt, Artificial Sequence
  Synthetic
cuaugggaagggaagagga

SEQ ID NO: 485538 - RNA, 20 nt, Artificial Sequence
  Synthetic
ucuaugggaagggaagagga

SEQ ID NO: 485539 - RNA, 21 nt, Artificial Sequence
  Synthetic
aucuaugggaagggaagagga

SEQ ID NO: 485540 - RNA, 22 nt, Artificial Sequence
  Synthetic
caucuaugggaagggaagagga

SEQ ID NO: 485541 - RNA, 23 nt, Artificial Sequence
  Synthetic
ucaucuaugggaagggaagagga

SEQ ID NO: 485542 - RNA, 24 nt, Artificial Sequence
  Synthetic
gucaucuaugggaagggaagagga

SEQ ID NO: 485543 - RNA, 18 nt, Artificial Sequence
  Synthetic
aucaacaacugaagagga

SEQ ID NO: 485544 - RNA, 19 nt, Artificial Sequence
  Synthetic
uaucaacaacugaagagga

SEQ ID NO: 485545 - RNA, 20 nt, Artificial Sequence
  Synthetic
cuaucaacaacugaagagga

SEQ ID NO: 485546 - RNA, 21 nt, Artificial Sequence
  Synthetic
ucuaucaacaacugaagagga

SEQ ID NO: 485547 - RNA, 22 nt, Artificial Sequence
  Synthetic
uucuaucaacaacugaagagga

SEQ ID NO: 485548 - RNA, 23 nt, Artificial Sequence
  Synthetic
cuucuaucaacaacugaagagga

SEQ ID NO: 485549 - RNA, 24 nt, Artificial Sequence
  Synthetic
ccuucuaucaacaacugaagagga

SEQ ID NO: 485550 - RNA, 18 nt, Artificial Sequence
  Synthetic
uagagugacugaagagga

SEQ ID NO: 485551 - RNA, 19 nt, Artificial Sequence
  Synthetic
guagagugacugaagagga

SEQ ID NO: 485552 - RNA, 20 nt, Artificial Sequence
  Synthetic
uguagagugacugaagagga

SEQ ID NO: 485553 - RNA, 21 nt, Artificial Sequence
  Synthetic
uuguagagugacugaagagga

SEQ ID NO: 485554 - RNA, 22 nt, Artificial Sequence
  Synthetic
cuuguagagugacugaagagga

SEQ ID NO: 485555 - RNA, 23 nt, Artificial Sequence
  Synthetic
acuuguagagugacugaagagga

SEQ ID NO: 485556 - RNA, 24 nt, Artificial Sequence
  Synthetic
uacuuguagagugacugaagagga

SEQ ID NO: 485557 - RNA, 18 nt, Artificial Sequence
  Synthetic
ugagaauacugaagagga

SEQ ID NO: 485558 - RNA, 19 nt, Artificial Sequence
  Synthetic
augagaauacugaagagga

SEQ ID NO: 485559 - RNA, 20 nt, Artificial Sequence
  Synthetic
uaugagaauacugaagagga

SEQ ID NO: 485560 - RNA, 21 nt, Artificial Sequence
  Synthetic
auaugagaauacugaagagga

SEQ ID NO: 485561 - RNA, 22 nt, Artificial Sequence
  Synthetic
uauaugagaauacugaagagga

SEQ ID NO: 485562 - RNA, 23 nt, Artificial Sequence
  Synthetic
auauaugagaauacugaagagga

SEQ ID NO: 485563 - RNA, 24 nt, Artificial Sequence
  Synthetic
gauauaugagaauacugaagagga

SEQ ID NO: 485564 - RNA, 18 nt, Artificial Sequence
  Synthetic
uaaacagaaauaagagga

SEQ ID NO: 485565 - RNA, 19 nt, Artificial Sequence
  Synthetic
auaaacagaaauaagagga

SEQ ID NO: 485566 - RNA, 20 nt, Artificial Sequence
  Synthetic
gauaaacagaaauaagagga

SEQ ID NO: 485567 - RNA, 21 nt, Artificial Sequence
  Synthetic
agauaaacagaaauaagagga

SEQ ID NO: 485568 - RNA, 22 nt, Artificial Sequence
  Synthetic
gagauaaacagaaauaagagga

SEQ ID NO: 485569 - RNA, 23 nt, Artificial Sequence
  Synthetic
ugagauaaacagaaauaagagga

SEQ ID NO: 485570 - RNA, 24 nt, Artificial Sequence
  Synthetic
gugagauaaacagaaauaagagga

SEQ ID NO: 485571 - RNA, 18 nt, Artificial Sequence
  Synthetic
auuuggagaauaagagga

SEQ ID NO: 485572 - RNA, 19 nt, Artificial Sequence
  Synthetic
aauuuggagaauaagagga

SEQ ID NO: 485573 - RNA, 20 nt, Artificial Sequence
  Synthetic
aaauuuggagaauaagagga

SEQ ID NO: 485574 - RNA, 21 nt, Artificial Sequence
  Synthetic
aaaauuuggagaauaagagga

SEQ ID NO: 485575 - RNA, 22 nt, Artificial Sequence
  Synthetic
caaaauuuggagaauaagagga

SEQ ID NO: 485576 - RNA, 23 nt, Artificial Sequence
  Synthetic
ucaaaauuuggagaauaagagga

SEQ ID NO: 485577 - RNA, 24 nt, Artificial Sequence
  Synthetic
aucaaaauuuggagaauaagagga

SEQ ID NO: 485578 - RNA, 18 nt, Artificial Sequence
  Synthetic
acuggggacuacagagga

SEQ ID NO: 485579 - RNA, 19 nt, Artificial Sequence
  Synthetic
cacuggggacuacagagga

SEQ ID NO: 485580 - RNA, 20 nt, Artificial Sequence
  Synthetic
acacuggggacuacagagga

SEQ ID NO: 485581 - RNA, 21 nt, Artificial Sequence
  Synthetic
gacacuggggacuacagagga

SEQ ID NO: 485582 - RNA, 22 nt, Artificial Sequence
  Synthetic
agacacuggggacuacagagga

SEQ ID NO: 485583 - RNA, 23 nt, Artificial Sequence
  Synthetic
uagacacuggggacuacagagga

SEQ ID NO: 485584 - RNA, 24 nt, Artificial Sequence
  Synthetic
auagacacuggggacuacagagga

SEQ ID NO: 485585 - RNA, 18 nt, Artificial Sequence
  Synthetic
aaucuacugcccagagga

SEQ ID NO: 485586 - RNA, 19 nt, Artificial Sequence
  Synthetic
uaaucuacugcccagagga

SEQ ID NO: 485587 - RNA, 20 nt, Artificial Sequence
  Synthetic
auaaucuacugcccagagga

SEQ ID NO: 485588 - RNA, 21 nt, Artificial Sequence
  Synthetic
uauaaucuacugcccagagga

SEQ ID NO: 485589 - RNA, 22 nt, Artificial Sequence
  Synthetic
uuauaaucuacugcccagagga

SEQ ID NO: 485590 - RNA, 23 nt, Artificial Sequence
  Synthetic
uuuauaaucuacugcccagagga

SEQ ID NO: 485591 - RNA, 24 nt, Artificial Sequence
  Synthetic
auuuauaaucuacugcccagagga

SEQ ID NO: 485592 - RNA, 18 nt, Artificial Sequence
  Synthetic
agaaacaaugccagagga

SEQ ID NO: 485593 - RNA, 19 nt, Artificial Sequence
  Synthetic
cagaaacaaugccagagga

SEQ ID NO: 485594 - RNA, 20 nt, Artificial Sequence
  Synthetic
ccagaaacaaugccagagga

SEQ ID NO: 485595 - RNA, 21 nt, Artificial Sequence
  Synthetic
uccagaaacaaugccagagga

SEQ ID NO: 485596 - RNA, 22 nt, Artificial Sequence
  Synthetic
uuccagaaacaaugccagagga

SEQ ID NO: 485597 - RNA, 23 nt, Artificial Sequence
  Synthetic
auuccagaaacaaugccagagga

SEQ ID NO: 485598 - RNA, 24 nt, Artificial Sequence
  Synthetic
gauuccagaaacaaugccagagga

SEQ ID NO: 485599 - RNA, 18 nt, Artificial Sequence
  Synthetic
cauggcauaagcagagga

SEQ ID NO: 485600 - RNA, 19 nt, Artificial Sequence
  Synthetic
acauggcauaagcagagga

SEQ ID NO: 485601 - RNA, 20 nt, Artificial Sequence
  Synthetic
gacauggcauaagcagagga

SEQ ID NO: 485602 - RNA, 21 nt, Artificial Sequence
  Synthetic
agacauggcauaagcagagga

SEQ ID NO: 485603 - RNA, 22 nt, Artificial Sequence
  Synthetic
cagacauggcauaagcagagga

SEQ ID NO: 485604 - RNA, 23 nt, Artificial Sequence
  Synthetic
ucagacauggcauaagcagagga

SEQ ID NO: 485605 - RNA, 24 nt, Artificial Sequence
  Synthetic
uucagacauggcauaagcagagga

SEQ ID NO: 485606 - RNA, 18 nt, Artificial Sequence
  Synthetic
gaaagcaugggcagagga

SEQ ID NO: 485607 - RNA, 19 nt, Artificial Sequence
  Synthetic
ggaaagcaugggcagagga

SEQ ID NO: 485608 - RNA, 20 nt, Artificial Sequence
  Synthetic
uggaaagcaugggcagagga

SEQ ID NO: 485609 - RNA, 21 nt, Artificial Sequence
  Synthetic
guggaaagcaugggcagagga

SEQ ID NO: 485610 - RNA, 22 nt, Artificial Sequence
  Synthetic
uguggaaagcaugggcagagga

SEQ ID NO: 485611 - RNA, 23 nt, Artificial Sequence
  Synthetic
auguggaaagcaugggcagagga

SEQ ID NO: 485612 - RNA, 24 nt, Artificial Sequence
  Synthetic
uauguggaaagcaugggcagagga

SEQ ID NO: 485613 - RNA, 18 nt, Artificial Sequence
  Synthetic
cggaaugugcucagagga

SEQ ID NO: 485614 - RNA, 19 nt, Artificial Sequence
  Synthetic
ucggaaugugcucagagga

SEQ ID NO: 485615 - RNA, 20 nt, Artificial Sequence
  Synthetic
cucggaaugugcucagagga

SEQ ID NO: 485616 - RNA, 21 nt, Artificial Sequence
  Synthetic
acucggaaugugcucagagga

SEQ ID NO: 485617 - RNA, 22 nt, Artificial Sequence
  Synthetic
aacucggaaugugcucagagga

SEQ ID NO: 485618 - RNA, 23 nt, Artificial Sequence
  Synthetic
aaacucggaaugugcucagagga

SEQ ID NO: 485619 - RNA, 24 nt, Artificial Sequence
  Synthetic
gaaacucggaaugugcucagagga

SEQ ID NO: 485620 - RNA, 18 nt, Artificial Sequence
  Synthetic
ugaggaaauuucagagga

SEQ ID NO: 485621 - RNA, 19 nt, Artificial Sequence
  Synthetic
uugaggaaauuucagagga

SEQ ID NO: 485622 - RNA, 20 nt, Artificial Sequence
  Synthetic
uuugaggaaauuucagagga

SEQ ID NO: 485623 - RNA, 21 nt, Artificial Sequence
  Synthetic
auuugaggaaauuucagagga

SEQ ID NO: 485624 - RNA, 22 nt, Artificial Sequence
  Synthetic
uauuugaggaaauuucagagga

SEQ ID NO: 485625 - RNA, 23 nt, Artificial Sequence
  Synthetic
auauuugaggaaauuucagagga

SEQ ID NO: 485626 - RNA, 24 nt, Artificial Sequence
  Synthetic
gauauuugaggaaauuucagagga

SEQ ID NO: 485627 - RNA, 18 nt, Artificial Sequence
  Synthetic
aaacagcaaaagagagga

SEQ ID NO: 485628 - RNA, 19 nt, Artificial Sequence
  Synthetic
caaacagcaaaagagagga

SEQ ID NO: 485629 - RNA, 20 nt, Artificial Sequence
  Synthetic
gcaaacagcaaaagagagga

SEQ ID NO: 485630 - RNA, 21 nt, Artificial Sequence
  Synthetic
agcaaacagcaaaagagagga

SEQ ID NO: 485631 - RNA, 22 nt, Artificial Sequence
  Synthetic
aagcaaacagcaaaagagagga

SEQ ID NO: 485632 - RNA, 23 nt, Artificial Sequence
  Synthetic
aaagcaaacagcaaaagagagga

SEQ ID NO: 485633 - RNA, 24 nt, Artificial Sequence
  Synthetic
aaaagcaaacagcaaaagagagga

SEQ ID NO: 485634 - RNA, 18 nt, Artificial Sequence
  Synthetic
auuuuucaagagagagga

SEQ ID NO: 485635 - RNA, 19 nt, Artificial Sequence
  Synthetic
gauuuuucaagagagagga

SEQ ID NO: 485636 - RNA, 20 nt, Artificial Sequence
  Synthetic
ugauuuuucaagagagagga

SEQ ID NO: 485637 - RNA, 21 nt, Artificial Sequence
  Synthetic
uugauuuuucaagagagagga

SEQ ID NO: 485638 - RNA, 22 nt, Artificial Sequence
  Synthetic
cuugauuuuucaagagagagga

SEQ ID NO: 485639 - RNA, 23 nt, Artificial Sequence
  Synthetic
acuugauuuuucaagagagagga

SEQ ID NO: 485640 - RNA, 24 nt, Artificial Sequence
  Synthetic
uacuugauuuuucaagagagagga

SEQ ID NO: 485641 - RNA, 18 nt, Artificial Sequence
  Synthetic
gggaguagggagagagga

SEQ ID NO: 485642 - RNA, 19 nt, Artificial Sequence
  Synthetic
ggggaguagggagagagga

SEQ ID NO: 485643 - RNA, 20 nt, Artificial Sequence
  Synthetic
uggggaguagggagagagga

SEQ ID NO: 485644 - RNA, 21 nt, Artificial Sequence
  Synthetic
uuggggaguagggagagagga

SEQ ID NO: 485645 - RNA, 22 nt, Artificial Sequence
  Synthetic
auuggggaguagggagagagga

SEQ ID NO: 485646 - RNA, 23 nt, Artificial Sequence
  Synthetic
cauuggggaguagggagagagga

SEQ ID NO: 485647 - RNA, 24 nt, Artificial Sequence
  Synthetic
acauuggggaguagggagagagga

SEQ ID NO: 485648 - RNA, 18 nt, Artificial Sequence
  Synthetic
aaaaagguugggagagga

SEQ ID NO: 485649 - RNA, 19 nt, Artificial Sequence
  Synthetic
aaaaaagguugggagagga

SEQ ID NO: 485650 - RNA, 20 nt, Artificial Sequence
  Synthetic
gaaaaaagguugggagagga

SEQ ID NO: 485651 - RNA, 21 nt, Artificial Sequence
  Synthetic
agaaaaaagguugggagagga

SEQ ID NO: 485652 - RNA, 22 nt, Artificial Sequence
  Synthetic
aagaaaaaagguugggagagga

SEQ ID NO: 485653 - RNA, 23 nt, Artificial Sequence
  Synthetic
aaagaaaaaagguugggagagga

SEQ ID NO: 485654 - RNA, 24 nt, Artificial Sequence
  Synthetic
gaaagaaaaaagguugggagagga

SEQ ID NO: 485655 - RNA, 18 nt, Artificial Sequence
  Synthetic
cucuagauaccuagagga

SEQ ID NO: 485656 - RNA, 19 nt, Artificial Sequence
  Synthetic
gcucuagauaccuagagga

SEQ ID NO: 485657 - RNA, 20 nt, Artificial Sequence
  Synthetic
ugcucuagauaccuagagga

SEQ ID NO: 485658 - RNA, 21 nt, Artificial Sequence
  Synthetic
uugcucuagauaccuagagga

SEQ ID NO: 485659 - RNA, 22 nt, Artificial Sequence
  Synthetic
uuugcucuagauaccuagagga

SEQ ID NO: 485660 - RNA, 23 nt, Artificial Sequence
  Synthetic
guuugcucuagauaccuagagga

SEQ ID NO: 485661 - RNA, 24 nt, Artificial Sequence
  Synthetic
aguuugcucuagauaccuagagga

SEQ ID NO: 485662 - RNA, 18 nt, Artificial Sequence
  Synthetic
uuauucaagguuagagga

SEQ ID NO: 485663 - RNA, 19 nt, Artificial Sequence
  Synthetic
auuauucaagguuagagga

SEQ ID NO: 485664 - RNA, 20 nt, Artificial Sequence
  Synthetic
aauuauucaagguuagagga

SEQ ID NO: 485665 - RNA, 21 nt, Artificial Sequence
  Synthetic
aaauuauucaagguuagagga

SEQ ID NO: 485666 - RNA, 22 nt, Artificial Sequence
  Synthetic
aaaauuauucaagguuagagga

SEQ ID NO: 485667 - RNA, 23 nt, Artificial Sequence
  Synthetic
aaaaauuauucaagguuagagga

SEQ ID NO: 485668 - RNA, 24 nt, Artificial Sequence
  Synthetic
aaaaaauuauucaagguuagagga

SEQ ID NO: 485669 - RNA, 18 nt, Artificial Sequence
  Synthetic
cccacugggcuacgagga

SEQ ID NO: 485670 - RNA, 19 nt, Artificial Sequence
  Synthetic
ccccacugggcuacgagga

SEQ ID NO: 485671 - RNA, 20 nt, Artificial Sequence
  Synthetic
accccacugggcuacgagga

SEQ ID NO: 485672 - RNA, 21 nt, Artificial Sequence
  Synthetic
aaccccacugggcuacgagga

SEQ ID NO: 485673 - RNA, 22 nt, Artificial Sequence
  Synthetic
aaaccccacugggcuacgagga

SEQ ID NO: 485674 - RNA, 23 nt, Artificial Sequence
  Synthetic
aaaaccccacugggcuacgagga

SEQ ID NO: 485675 - RNA, 24 nt, Artificial Sequence
  Synthetic
aaaaaccccacugggcuacgagga

SEQ ID NO: 485676 - RNA, 18 nt, Artificial Sequence
  Synthetic
acuuugggaggccgagga

SEQ ID NO: 485677 - RNA, 19 nt, Artificial Sequence
  Synthetic
cacuuugggaggccgagga

SEQ ID NO: 485678 - RNA, 20 nt, Artificial Sequence
  Synthetic
gcacuuugggaggccgagga

SEQ ID NO: 485679 - RNA, 21 nt, Artificial Sequence
  Synthetic
agcacuuugggaggccgagga

SEQ ID NO: 485680 - RNA, 22 nt, Artificial Sequence
  Synthetic
uagcacuuugggaggccgagga

SEQ ID NO: 485681 - RNA, 23 nt, Artificial Sequence
  Synthetic
cuagcacuuugggaggccgagga

SEQ ID NO: 485682 - RNA, 24 nt, Artificial Sequence
  Synthetic
ccuagcacuuugggaggccgagga

SEQ ID NO: 485683 - RNA, 18 nt, Artificial Sequence
  Synthetic
gggaacaggaaaggagga

SEQ ID NO: 485684 - RNA, 19 nt, Artificial Sequence
  Synthetic
agggaacaggaaaggagga

SEQ ID NO: 485685 - RNA, 20 nt, Artificial Sequence
  Synthetic
uagggaacaggaaaggagga

SEQ ID NO: 485686 - RNA, 21 nt, Artificial Sequence
  Synthetic
guagggaacaggaaaggagga

SEQ ID NO: 485687 - RNA, 22 nt, Artificial Sequence
  Synthetic
uguagggaacaggaaaggagga

SEQ ID NO: 485688 - RNA, 23 nt, Artificial Sequence
  Synthetic
cuguagggaacaggaaaggagga

SEQ ID NO: 485689 - RNA, 24 nt, Artificial Sequence
  Synthetic
acuguagggaacaggaaaggagga

SEQ ID NO: 485690 - RNA, 18 nt, Artificial Sequence
  Synthetic
uaagcacuugaaggagga

SEQ ID NO: 485691 - RNA, 19 nt, Artificial Sequence
  Synthetic
guaagcacuugaaggagga

SEQ ID NO: 485692 - RNA, 20 nt, Artificial Sequence
  Synthetic
aguaagcacuugaaggagga

SEQ ID NO: 485693 - RNA, 21 nt, Artificial Sequence
  Synthetic
aaguaagcacuugaaggagga

SEQ ID NO: 485694 - RNA, 22 nt, Artificial Sequence
  Synthetic
aaaguaagcacuugaaggagga

SEQ ID NO: 485695 - RNA, 23 nt, Artificial Sequence
  Synthetic
aaaaguaagcacuugaaggagga

SEQ ID NO: 485696 - RNA, 24 nt, Artificial Sequence
  Synthetic
caaaaguaagcacuugaaggagga

SEQ ID NO: 485697 - RNA, 18 nt, Artificial Sequence
  Synthetic
cugccaguaacaggagga

SEQ ID NO: 485698 - RNA, 19 nt, Artificial Sequence
  Synthetic
acugccaguaacaggagga

SEQ ID NO: 485699 - RNA, 20 nt, Artificial Sequence
  Synthetic
cacugccaguaacaggagga

SEQ ID NO: 485700 - RNA, 21 nt, Artificial Sequence
  Synthetic
ucacugccaguaacaggagga

SEQ ID NO: 485701 - RNA, 22 nt, Artificial Sequence
  Synthetic
uucacugccaguaacaggagga

SEQ ID NO: 485702 - RNA, 23 nt, Artificial Sequence
  Synthetic
auucacugccaguaacaggagga

SEQ ID NO: 485703 - RNA, 24 nt, Artificial Sequence
  Synthetic
gauucacugccaguaacaggagga

SEQ ID NO: 485704 - RNA, 18 nt, Artificial Sequence
  Synthetic
gacuaugagacaggagga

SEQ ID NO: 485705 - RNA, 19 nt, Artificial Sequence
  Synthetic
ugacuaugagacaggagga

SEQ ID NO: 485706 - RNA, 20 nt, Artificial Sequence
  Synthetic
uugacuaugagacaggagga

SEQ ID NO: 485707 - RNA, 21 nt, Artificial Sequence
  Synthetic
uuugacuaugagacaggagga

SEQ ID NO: 485708 - RNA, 22 nt, Artificial Sequence
  Synthetic
uuuugacuaugagacaggagga

SEQ ID NO: 485709 - RNA, 23 nt, Artificial Sequence
  Synthetic
auuuugacuaugagacaggagga

SEQ ID NO: 485710 - RNA, 24 nt, Artificial Sequence
  Synthetic
uauuuugacuaugagacaggagga

SEQ ID NO: 485711 - RNA, 18 nt, Artificial Sequence
  Synthetic
gaagacacgacaggagga

SEQ ID NO: 485712 - RNA, 19 nt, Artificial Sequence
  Synthetic
ggaagacacgacaggagga

SEQ ID NO: 485713 - RNA, 20 nt, Artificial Sequence
  Synthetic
aggaagacacgacaggagga

SEQ ID NO: 485714 - RNA, 21 nt, Artificial Sequence
  Synthetic
gaggaagacacgacaggagga

SEQ ID NO: 485715 - RNA, 22 nt, Artificial Sequence
  Synthetic
agaggaagacacgacaggagga

SEQ ID NO: 485716 - RNA, 23 nt, Artificial Sequence
  Synthetic
aagaggaagacacgacaggagga

SEQ ID NO: 485717 - RNA, 24 nt, Artificial Sequence
  Synthetic
aaagaggaagacacgacaggagga

SEQ ID NO: 485718 - RNA, 18 nt, Artificial Sequence
  Synthetic
acauuuuagucaggagga

SEQ ID NO: 485719 - RNA, 19 nt, Artificial Sequence
  Synthetic
aacauuuuagucaggagga

SEQ ID NO: 485720 - RNA, 20 nt, Artificial Sequence
  Synthetic
uaacauuuuagucaggagga

SEQ ID NO: 485721 - RNA, 21 nt, Artificial Sequence
  Synthetic
cuaacauuuuagucaggagga

SEQ ID NO: 485722 - RNA, 22 nt, Artificial Sequence
  Synthetic
acuaacauuuuagucaggagga

SEQ ID NO: 485723 - RNA, 23 nt, Artificial Sequence
  Synthetic
aacuaacauuuuagucaggagga

SEQ ID NO: 485724 - RNA, 24 nt, Artificial Sequence
  Synthetic
aaacuaacauuuuagucaggagga

SEQ ID NO: 485725 - RNA, 18 nt, Artificial Sequence
  Synthetic
ggauuugggguaggagga

SEQ ID NO: 485726 - RNA, 19 nt, Artificial Sequence
  Synthetic
uggauuugggguaggagga

SEQ ID NO: 485727 - RNA, 20 nt, Artificial Sequence
  Synthetic
uuggauuugggguaggagga

SEQ ID NO: 485728 - RNA, 21 nt, Artificial Sequence
  Synthetic
uuuggauuugggguaggagga

SEQ ID NO: 485729 - RNA, 22 nt, Artificial Sequence
  Synthetic
auuuggauuugggguaggagga

SEQ ID NO: 485730 - RNA, 23 nt, Artificial Sequence
  Synthetic
cauuuggauuugggguaggagga

SEQ ID NO: 485731 - RNA, 24 nt, Artificial Sequence
  Synthetic
ccauuuggauuugggguaggagga

SEQ ID NO: 485732 - RNA, 18 nt, Artificial Sequence
  Synthetic
uugaauggaaagggagga

SEQ ID NO: 485733 - RNA, 19 nt, Artificial Sequence
  Synthetic
guugaauggaaagggagga

SEQ ID NO: 485734 - RNA, 20 nt, Artificial Sequence
  Synthetic
uguugaauggaaagggagga

SEQ ID NO: 485735 - RNA, 21 nt, Artificial Sequence
  Synthetic
uuguugaauggaaagggagga

SEQ ID NO: 485736 - RNA, 22 nt, Artificial Sequence
  Synthetic
uuuguugaauggaaagggagga

SEQ ID NO: 485737 - RNA, 23 nt, Artificial Sequence
  Synthetic
cuuuguugaauggaaagggagga

SEQ ID NO: 485738 - RNA, 24 nt, Artificial Sequence
  Synthetic
ucuuuguugaauggaaagggagga

SEQ ID NO: 485739 - RNA, 18 nt, Artificial Sequence
  Synthetic
gaagaaaagaagggagga

SEQ ID NO: 485740 - RNA, 19 nt, Artificial Sequence
  Synthetic
ggaagaaaagaagggagga

SEQ ID NO: 485741 - RNA, 20 nt, Artificial Sequence
  Synthetic
aggaagaaaagaagggagga

SEQ ID NO: 485742 - RNA, 21 nt, Artificial Sequence
  Synthetic
gaggaagaaaagaagggagga

SEQ ID NO: 485743 - RNA, 22 nt, Artificial Sequence
  Synthetic
ggaggaagaaaagaagggagga

SEQ ID NO: 485744 - RNA, 23 nt, Artificial Sequence
  Synthetic
uggaggaagaaaagaagggagga

SEQ ID NO: 485745 - RNA, 24 nt, Artificial Sequence
  Synthetic
auggaggaagaaaagaagggagga

SEQ ID NO: 485746 - RNA, 18 nt, Artificial Sequence
  Synthetic
ggacuacuagagggagga

SEQ ID NO: 485747 - RNA, 19 nt, Artificial Sequence
  Synthetic
gggacuacuagagggagga

SEQ ID NO: 485748 - RNA, 20 nt, Artificial Sequence
  Synthetic
ggggacuacuagagggagga

SEQ ID NO: 485749 - RNA, 21 nt, Artificial Sequence
  Synthetic
uggggacuacuagagggagga

SEQ ID NO: 485750 - RNA, 22 nt, Artificial Sequence
  Synthetic
cuggggacuacuagagggagga

SEQ ID NO: 485751 - RNA, 23 nt, Artificial Sequence
  Synthetic
ccuggggacuacuagagggagga

SEQ ID NO: 485752 - RNA, 24 nt, Artificial Sequence
  Synthetic
cccuggggacuacuagagggagga

SEQ ID NO: 485753 - RNA, 18 nt, Artificial Sequence
  Synthetic
cagaggaaggagggagga

SEQ ID NO: 485754 - RNA, 19 nt, Artificial Sequence
  Synthetic
acagaggaaggagggagga

SEQ ID NO: 485755 - RNA, 20 nt, Artificial Sequence
  Synthetic
uacagaggaaggagggagga

SEQ ID NO: 485756 - RNA, 21 nt, Artificial Sequence
  Synthetic
cuacagaggaaggagggagga

SEQ ID NO: 485757 - RNA, 22 nt, Artificial Sequence
  Synthetic
acuacagaggaaggagggagga

SEQ ID NO: 485758 - RNA, 23 nt, Artificial Sequence
  Synthetic
gacuacagaggaaggagggagga

SEQ ID NO: 485759 - RNA, 24 nt, Artificial Sequence
  Synthetic
ggacuacagaggaaggagggagga

SEQ ID NO: 485760 - RNA, 18 nt, Artificial Sequence
  Synthetic
ggagggagggagggagga

SEQ ID NO: 485761 - RNA, 19 nt, Artificial Sequence
  Synthetic
gggagggagggagggagga

SEQ ID NO: 485762 - RNA, 20 nt, Artificial Sequence
  Synthetic
agggagggagggagggagga

SEQ ID NO: 485763 - RNA, 21 nt, Artificial Sequence
  Synthetic
cagggagggagggagggagga

SEQ ID NO: 485764 - RNA, 22 nt, Artificial Sequence
  Synthetic
ucagggagggagggagggagga

SEQ ID NO: 485765 - RNA, 23 nt, Artificial Sequence
  Synthetic
gucagggagggagggagggagga

SEQ ID NO: 485766 - RNA, 24 nt, Artificial Sequence
  Synthetic
agucagggagggagggagggagga

SEQ ID NO: 485767 - RNA, 18 nt, Artificial Sequence
  Synthetic
aaagagaugccgggagga

SEQ ID NO: 485768 - RNA, 19 nt, Artificial Sequence
  Synthetic
aaaagagaugccgggagga

SEQ ID NO: 485769 - RNA, 20 nt, Artificial Sequence
  Synthetic
uaaaagagaugccgggagga

SEQ ID NO: 485770 - RNA, 21 nt, Artificial Sequence
  Synthetic
uuaaaagagaugccgggagga

SEQ ID NO: 485771 - RNA, 22 nt, Artificial Sequence
  Synthetic
uuuaaaagagaugccgggagga

SEQ ID NO: 485772 - RNA, 23 nt, Artificial Sequence
  Synthetic
uuuuaaaagagaugccgggagga

SEQ ID NO: 485773 - RNA, 24 nt, Artificial Sequence
  Synthetic
cuuuuaaaagagaugccgggagga

SEQ ID NO: 485774 - RNA, 18 nt, Artificial Sequence
  Synthetic
ggggaggggaggggagga

SEQ ID NO: 485775 - RNA, 19 nt, Artificial Sequence
  Synthetic
aggggaggggaggggagga

SEQ ID NO: 485776 - RNA, 20 nt, Artificial Sequence
  Synthetic
gaggggaggggaggggagga

SEQ ID NO: 485777 - RNA, 21 nt, Artificial Sequence
  Synthetic
ggaggggaggggaggggagga

SEQ ID NO: 485778 - RNA, 22 nt, Artificial Sequence
  Synthetic
gggaggggaggggaggggagga

SEQ ID NO: 485779 - RNA, 23 nt, Artificial Sequence
  Synthetic
ggggaggggaggggaggggagga

SEQ ID NO: 485780 - RNA, 24 nt, Artificial Sequence
  Synthetic
aggggaggggaggggaggggagga

SEQ ID NO: 485781 - RNA, 18 nt, Artificial Sequence
  Synthetic
aucuuuggcgggggagga

SEQ ID NO: 485782 - RNA, 19 nt, Artificial Sequence
  Synthetic
caucuuuggcgggggagga

SEQ ID NO: 485783 - RNA, 20 nt, Artificial Sequence
  Synthetic
acaucuuuggcgggggagga

SEQ ID NO: 485784 - RNA, 21 nt, Artificial Sequence
  Synthetic
gacaucuuuggcgggggagga

SEQ ID NO: 485785 - RNA, 22 nt, Artificial Sequence
  Synthetic
ggacaucuuuggcgggggagga

SEQ ID NO: 485786 - RNA, 23 nt, Artificial Sequence
  Synthetic
uggacaucuuuggcgggggagga

SEQ ID NO: 485787 - RNA, 24 nt, Artificial Sequence
  Synthetic
auggacaucuuuggcgggggagga

SEQ ID NO: 485788 - RNA, 18 nt, Artificial Sequence
  Synthetic
uguguagaugggggagga

SEQ ID NO: 485789 - RNA, 19 nt, Artificial Sequence
  Synthetic
guguguagaugggggagga

SEQ ID NO: 485790 - RNA, 20 nt, Artificial Sequence
  Synthetic
uguguguagaugggggagga

SEQ ID NO: 485791 - RNA, 21 nt, Artificial Sequence
  Synthetic
auguguguagaugggggagga

SEQ ID NO: 485792 - RNA, 22 nt, Artificial Sequence
  Synthetic
uauguguguagaugggggagga

SEQ ID NO: 485793 - RNA, 23 nt, Artificial Sequence
  Synthetic
guauguguguagaugggggagga

SEQ ID NO: 485794 - RNA, 24 nt, Artificial Sequence
  Synthetic
aguauguguguagaugggggagga

SEQ ID NO: 485795 - RNA, 18 nt, Artificial Sequence
  Synthetic
agccaaucguggggagga

SEQ ID NO: 485796 - RNA, 19 nt, Artificial Sequence
  Synthetic
uagccaaucguggggagga

SEQ ID NO: 485797 - RNA, 20 nt, Artificial Sequence
  Synthetic
guagccaaucguggggagga

SEQ ID NO: 485798 - RNA, 21 nt, Artificial Sequence
  Synthetic
aguagccaaucguggggagga

SEQ ID NO: 485799 - RNA, 22 nt, Artificial Sequence
  Synthetic
aaguagccaaucguggggagga

SEQ ID NO: 485800 - RNA, 23 nt, Artificial Sequence
  Synthetic
aaaguagccaaucguggggagga

SEQ ID NO: 485801 - RNA, 24 nt, Artificial Sequence
  Synthetic
aaaaguagccaaucguggggagga

SEQ ID NO: 485802 - RNA, 18 nt, Artificial Sequence
  Synthetic
acauagcugcugggagga

SEQ ID NO: 485803 - RNA, 19 nt, Artificial Sequence
  Synthetic
aacauagcugcugggagga

SEQ ID NO: 485804 - RNA, 20 nt, Artificial Sequence
  Synthetic
aaacauagcugcugggagga

SEQ ID NO: 485805 - RNA, 21 nt, Artificial Sequence
  Synthetic
gaaacauagcugcugggagga

SEQ ID NO: 485806 - RNA, 22 nt, Artificial Sequence
  Synthetic
agaaacauagcugcugggagga

SEQ ID NO: 485807 - RNA, 23 nt, Artificial Sequence
  Synthetic
gagaaacauagcugcugggagga

SEQ ID NO: 485808 - RNA, 24 nt, Artificial Sequence
  Synthetic
ggagaaacauagcugcugggagga

SEQ ID NO: 485809 - RNA, 18 nt, Artificial Sequence
  Synthetic
guggggagggugggagga

SEQ ID NO: 485810 - RNA, 19 nt, Artificial Sequence
  Synthetic
aguggggagggugggagga

SEQ ID NO: 485811 - RNA, 20 nt, Artificial Sequence
  Synthetic
gaguggggagggugggagga

SEQ ID NO: 485812 - RNA, 21 nt, Artificial Sequence
  Synthetic
ggaguggggagggugggagga

SEQ ID NO: 485813 - RNA, 22 nt, Artificial Sequence
  Synthetic
uggaguggggagggugggagga

SEQ ID NO: 485814 - RNA, 23 nt, Artificial Sequence
  Synthetic
cuggaguggggagggugggagga

SEQ ID NO: 485815 - RNA, 24 nt, Artificial Sequence
  Synthetic
acuggaguggggagggugggagga

SEQ ID NO: 485816 - RNA, 18 nt, Artificial Sequence
  Synthetic
guguggagggugggagga

SEQ ID NO: 485817 - RNA, 19 nt, Artificial Sequence
  Synthetic
aguguggagggugggagga

SEQ ID NO: 485818 - RNA, 20 nt, Artificial Sequence
  Synthetic
gaguguggagggugggagga

SEQ ID NO: 485819 - RNA, 21 nt, Artificial Sequence
  Synthetic
agaguguggagggugggagga

SEQ ID NO: 485820 - RNA, 22 nt, Artificial Sequence
  Synthetic
uagaguguggagggugggagga

SEQ ID NO: 485821 - RNA, 23 nt, Artificial Sequence
  Synthetic
uuagaguguggagggugggagga

SEQ ID NO: 485822 - RNA, 24 nt, Artificial Sequence
  Synthetic
auuagaguguggagggugggagga

SEQ ID NO: 485823 - RNA, 18 nt, Artificial Sequence
  Synthetic
acauaaaaugugggagga

SEQ ID NO: 485824 - RNA, 19 nt, Artificial Sequence
  Synthetic
aacauaaaaugugggagga

SEQ ID NO: 485825 - RNA, 20 nt, Artificial Sequence
  Synthetic
aaacauaaaaugugggagga

SEQ ID NO: 485826 - RNA, 21 nt, Artificial Sequence
  Synthetic
gaaacauaaaaugugggagga

SEQ ID NO: 485827 - RNA, 22 nt, Artificial Sequence
  Synthetic
agaaacauaaaaugugggagga

SEQ ID NO: 485828 - RNA, 23 nt, Artificial Sequence
  Synthetic
uagaaacauaaaaugugggagga

SEQ ID NO: 485829 - RNA, 24 nt, Artificial Sequence
  Synthetic
uuagaaacauaaaaugugggagga

SEQ ID NO: 485830 - RNA, 18 nt, Artificial Sequence
  Synthetic
uacauccgauugggagga

SEQ ID NO: 485831 - RNA, 19 nt, Artificial Sequence
  Synthetic
uuacauccgauugggagga

SEQ ID NO: 485832 - RNA, 20 nt, Artificial Sequence
  Synthetic
cuuacauccgauugggagga

SEQ ID NO: 485833 - RNA, 21 nt, Artificial Sequence
  Synthetic
ccuuacauccgauugggagga

SEQ ID NO: 485834 - RNA, 22 nt, Artificial Sequence
  Synthetic
accuuacauccgauugggagga

SEQ ID NO: 485835 - RNA, 23 nt, Artificial Sequence
  Synthetic
gaccuuacauccgauugggagga

SEQ ID NO: 485836 - RNA, 24 nt, Artificial Sequence
  Synthetic
ggaccuuacauccgauugggagga

SEQ ID NO: 485837 - RNA, 18 nt, Artificial Sequence
  Synthetic
agucuucuguugggagga

SEQ ID NO: 485838 - RNA, 19 nt, Artificial Sequence
  Synthetic
uagucuucuguugggagga

SEQ ID NO: 485839 - RNA, 20 nt, Artificial Sequence
  Synthetic
cuagucuucuguugggagga

SEQ ID NO: 485840 - RNA, 21 nt, Artificial Sequence
  Synthetic
gcuagucuucuguugggagga

SEQ ID NO: 485841 - RNA, 22 nt, Artificial Sequence
  Synthetic
ugcuagucuucuguugggagga

SEQ ID NO: 485842 - RNA, 23 nt, Artificial Sequence
  Synthetic
cugcuagucuucuguugggagga

SEQ ID NO: 485843 - RNA, 24 nt, Artificial Sequence
  Synthetic
ucugcuagucuucuguugggagga

SEQ ID NO: 485844 - RNA, 18 nt, Artificial Sequence
  Synthetic
uuugagacuuugggagga

SEQ ID NO: 485845 - RNA, 19 nt, Artificial Sequence
  Synthetic
uuuugagacuuugggagga

SEQ ID NO: 485846 - RNA, 20 nt, Artificial Sequence
  Synthetic
auuuugagacuuugggagga

SEQ ID NO: 485847 - RNA, 21 nt, Artificial Sequence
  Synthetic
aauuuugagacuuugggagga

SEQ ID NO: 485848 - RNA, 22 nt, Artificial Sequence
  Synthetic
uaauuuugagacuuugggagga

SEQ ID NO: 485849 - RNA, 23 nt, Artificial Sequence
  Synthetic
cuaauuuugagacuuugggagga

SEQ ID NO: 485850 - RNA, 24 nt, Artificial Sequence
  Synthetic
ccuaauuuugagacuuugggagga

SEQ ID NO: 485851 - RNA, 18 nt, Artificial Sequence
  Synthetic
uugcuaagggcuggagga

SEQ ID NO: 485852 - RNA, 19 nt, Artificial Sequence
  Synthetic
guugcuaagggcuggagga

SEQ ID NO: 485853 - RNA, 20 nt, Artificial Sequence
  Synthetic
gguugcuaagggcuggagga

SEQ ID NO: 485854 - RNA, 21 nt, Artificial Sequence
  Synthetic
ugguugcuaagggcuggagga

SEQ ID NO: 485855 - RNA, 22 nt, Artificial Sequence
  Synthetic
gugguugcuaagggcuggagga

SEQ ID NO: 485856 - RNA, 23 nt, Artificial Sequence
  Synthetic
ggugguugcuaagggcuggagga

SEQ ID NO: 485857 - RNA, 24 nt, Artificial Sequence
  Synthetic
uggugguugcuaagggcuggagga

SEQ ID NO: 485858 - RNA, 18 nt, Artificial Sequence
  Synthetic
agcaaugaagaaugagga

SEQ ID NO: 485859 - RNA, 19 nt, Artificial Sequence
  Synthetic
gagcaaugaagaaugagga

SEQ ID NO: 485860 - RNA, 20 nt, Artificial Sequence
  Synthetic
agagcaaugaagaaugagga

SEQ ID NO: 485861 - RNA, 21 nt, Artificial Sequence
  Synthetic
aagagcaaugaagaaugagga

SEQ ID NO: 485862 - RNA, 22 nt, Artificial Sequence
  Synthetic
aaagagcaaugaagaaugagga

SEQ ID NO: 485863 - RNA, 23 nt, Artificial Sequence
  Synthetic
caaagagcaaugaagaaugagga

SEQ ID NO: 485864 - RNA, 24 nt, Artificial Sequence
  Synthetic
acaaagagcaaugaagaaugagga

SEQ ID NO: 485865 - RNA, 18 nt, Artificial Sequence
  Synthetic
cugaauuaaggaugagga

SEQ ID NO: 485866 - RNA, 19 nt, Artificial Sequence
  Synthetic
acugaauuaaggaugagga

SEQ ID NO: 485867 - RNA, 20 nt, Artificial Sequence
  Synthetic
aacugaauuaaggaugagga

SEQ ID NO: 485868 - RNA, 21 nt, Artificial Sequence
  Synthetic
aaacugaauuaaggaugagga

SEQ ID NO: 485869 - RNA, 22 nt, Artificial Sequence
  Synthetic
caaacugaauuaaggaugagga

SEQ ID NO: 485870 - RNA, 23 nt, Artificial Sequence
  Synthetic
acaaacugaauuaaggaugagga

SEQ ID NO: 485871 - RNA, 24 nt, Artificial Sequence
  Synthetic
uacaaacugaauuaaggaugagga

SEQ ID NO: 485872 - RNA, 18 nt, Artificial Sequence
  Synthetic
accaggaugguaugagga

SEQ ID NO: 485873 - RNA, 19 nt, Artificial Sequence
  Synthetic
gaccaggaugguaugagga

SEQ ID NO: 485874 - RNA, 20 nt, Artificial Sequence
  Synthetic
agaccaggaugguaugagga

SEQ ID NO: 485875 - RNA, 21 nt, Artificial Sequence
  Synthetic
cagaccaggaugguaugagga

SEQ ID NO: 485876 - RNA, 22 nt, Artificial Sequence
  Synthetic
ccagaccaggaugguaugagga

SEQ ID NO: 485877 - RNA, 23 nt, Artificial Sequence
  Synthetic
cccagaccaggaugguaugagga

SEQ ID NO: 485878 - RNA, 24 nt, Artificial Sequence
  Synthetic
ucccagaccaggaugguaugagga

SEQ ID NO: 485879 - RNA, 18 nt, Artificial Sequence
  Synthetic
aggugcuuuguaugagga

SEQ ID NO: 485880 - RNA, 19 nt, Artificial Sequence
  Synthetic
aaggugcuuuguaugagga

SEQ ID NO: 485881 - RNA, 20 nt, Artificial Sequence
  Synthetic
gaaggugcuuuguaugagga

SEQ ID NO: 485882 - RNA, 21 nt, Artificial Sequence
  Synthetic
agaaggugcuuuguaugagga

SEQ ID NO: 485883 - RNA, 22 nt, Artificial Sequence
  Synthetic
gagaaggugcuuuguaugagga

SEQ ID NO: 485884 - RNA, 23 nt, Artificial Sequence
  Synthetic
ugagaaggugcuuuguaugagga

SEQ ID NO: 485885 - RNA, 24 nt, Artificial Sequence
  Synthetic
gugagaaggugcuuuguaugagga

SEQ ID NO: 485886 - RNA, 18 nt, Artificial Sequence
  Synthetic
gcuaugcaaaacugagga

SEQ ID NO: 485887 - RNA, 19 nt, Artificial Sequence
  Synthetic
ggcuaugcaaaacugagga

SEQ ID NO: 485888 - RNA, 20 nt, Artificial Sequence
  Synthetic
uggcuaugcaaaacugagga

SEQ ID NO: 485889 - RNA, 21 nt, Artificial Sequence
  Synthetic
uuggcuaugcaaaacugagga

SEQ ID NO: 485890 - RNA, 22 nt, Artificial Sequence
  Synthetic
guuggcuaugcaaaacugagga

SEQ ID NO: 485891 - RNA, 23 nt, Artificial Sequence
  Synthetic
uguuggcuaugcaaaacugagga

SEQ ID NO: 485892 - RNA, 24 nt, Artificial Sequence
  Synthetic
uuguuggcuaugcaaaacugagga

SEQ ID NO: 485893 - RNA, 18 nt, Artificial Sequence
  Synthetic
aggaugguuaccugagga

SEQ ID NO: 485894 - RNA, 19 nt, Artificial Sequence
  Synthetic
aaggaugguuaccugagga

SEQ ID NO: 485895 - RNA, 20 nt, Artificial Sequence
  Synthetic
gaaggaugguuaccugagga

SEQ ID NO: 485896 - RNA, 21 nt, Artificial Sequence
  Synthetic
agaaggaugguuaccugagga

SEQ ID NO: 485897 - RNA, 22 nt, Artificial Sequence
  Synthetic
uagaaggaugguuaccugagga

SEQ ID NO: 485898 - RNA, 23 nt, Artificial Sequence
  Synthetic
guagaaggaugguuaccugagga

SEQ ID NO: 485899 - RNA, 24 nt, Artificial Sequence
  Synthetic
aguagaaggaugguuaccugagga

SEQ ID NO: 485900 - RNA, 18 nt, Artificial Sequence
  Synthetic
ccaaaugucuccugagga

SEQ ID NO: 485901 - RNA, 19 nt, Artificial Sequence
  Synthetic
accaaaugucuccugagga

SEQ ID NO: 485902 - RNA, 20 nt, Artificial Sequence
  Synthetic
uaccaaaugucuccugagga

SEQ ID NO: 485903 - RNA, 21 nt, Artificial Sequence
  Synthetic
uuaccaaaugucuccugagga

SEQ ID NO: 485904 - RNA, 22 nt, Artificial Sequence
  Synthetic
auuaccaaaugucuccugagga

SEQ ID NO: 485905 - RNA, 23 nt, Artificial Sequence
  Synthetic
cauuaccaaaugucuccugagga

SEQ ID NO: 485906 - RNA, 24 nt, Artificial Sequence
  Synthetic
acauuaccaaaugucuccugagga

SEQ ID NO: 485907 - RNA, 18 nt, Artificial Sequence
  Synthetic
ucagaaauggagugagga

SEQ ID NO: 485908 - RNA, 19 nt, Artificial Sequence
  Synthetic
uucagaaauggagugagga

SEQ ID NO: 485909 - RNA, 20 nt, Artificial Sequence
  Synthetic
guucagaaauggagugagga

SEQ ID NO: 485910 - RNA, 21 nt, Artificial Sequence
  Synthetic
aguucagaaauggagugagga

SEQ ID NO: 485911 - RNA, 22 nt, Artificial Sequence
  Synthetic
aaguucagaaauggagugagga

SEQ ID NO: 485912 - RNA, 23 nt, Artificial Sequence
  Synthetic
gaaguucagaaauggagugagga

SEQ ID NO: 485913 - RNA, 24 nt, Artificial Sequence
  Synthetic
agaaguucagaaauggagugagga

SEQ ID NO: 485914 - RNA, 18 nt, Artificial Sequence
  Synthetic
aaggagaaugagugagga

SEQ ID NO: 485915 - RNA, 19 nt, Artificial Sequence
  Synthetic
gaaggagaaugagugagga

SEQ ID NO: 485916 - RNA, 20 nt, Artificial Sequence
  Synthetic
agaaggagaaugagugagga

SEQ ID NO: 485917 - RNA, 21 nt, Artificial Sequence
  Synthetic
aagaaggagaaugagugagga

SEQ ID NO: 485918 - RNA, 22 nt, Artificial Sequence
  Synthetic
caagaaggagaaugagugagga

SEQ ID NO: 485919 - RNA, 23 nt, Artificial Sequence
  Synthetic
gcaagaaggagaaugagugagga

SEQ ID NO: 485920 - RNA, 24 nt, Artificial Sequence
  Synthetic
ggcaagaaggagaaugagugagga

SEQ ID NO: 485921 - RNA, 18 nt, Artificial Sequence
  Synthetic
auaagaauucguugagga

SEQ ID NO: 485922 - RNA, 19 nt, Artificial Sequence
  Synthetic
aauaagaauucguugagga

SEQ ID NO: 485923 - RNA, 20 nt, Artificial Sequence
  Synthetic
gaauaagaauucguugagga

SEQ ID NO: 485924 - RNA, 21 nt, Artificial Sequence
  Synthetic
agaauaagaauucguugagga

SEQ ID NO: 485925 - RNA, 22 nt, Artificial Sequence
  Synthetic
aagaauaagaauucguugagga

SEQ ID NO: 485926 - RNA, 23 nt, Artificial Sequence
  Synthetic
aaagaauaagaauucguugagga

SEQ ID NO: 485927 - RNA, 24 nt, Artificial Sequence
  Synthetic
gaaagaauaagaauucguugagga

SEQ ID NO: 485928 - RNA, 18 nt, Artificial Sequence
  Synthetic
cacaaccuuauuugagga

SEQ ID NO: 485929 - RNA, 19 nt, Artificial Sequence
  Synthetic
ucacaaccuuauuugagga

SEQ ID NO: 485930 - RNA, 20 nt, Artificial Sequence
  Synthetic
cucacaaccuuauuugagga

SEQ ID NO: 485931 - RNA, 21 nt, Artificial Sequence
  Synthetic
acucacaaccuuauuugagga

SEQ ID NO: 485932 - RNA, 22 nt, Artificial Sequence
  Synthetic
gacucacaaccuuauuugagga

SEQ ID NO: 485933 - RNA, 23 nt, Artificial Sequence
  Synthetic
ugacucacaaccuuauuugagga

SEQ ID NO: 485934 - RNA, 24 nt, Artificial Sequence
  Synthetic
augacucacaaccuuauuugagga

SEQ ID NO: 485935 - RNA, 18 nt, Artificial Sequence
  Synthetic
ugaaaauugcuuugagga

SEQ ID NO: 485936 - RNA, 19 nt, Artificial Sequence
  Synthetic
gugaaaauugcuuugagga

SEQ ID NO: 485937 - RNA, 20 nt, Artificial Sequence
  Synthetic
ugugaaaauugcuuugagga

SEQ ID NO: 485938 - RNA, 21 nt, Artificial Sequence
  Synthetic
gugugaaaauugcuuugagga

SEQ ID NO: 485939 - RNA, 22 nt, Artificial Sequence
  Synthetic
ggugugaaaauugcuuugagga

SEQ ID NO: 485940 - RNA, 23 nt, Artificial Sequence
  Synthetic
gggugugaaaauugcuuugagga

SEQ ID NO: 485941 - RNA, 24 nt, Artificial Sequence
  Synthetic
ugggugugaaaauugcuuugagga

SEQ ID NO: 485942 - RNA, 18 nt, Artificial Sequence
  Synthetic
gaugauguuguuugagga

SEQ ID NO: 485943 - RNA, 19 nt, Artificial Sequence
  Synthetic
cgaugauguuguuugagga

SEQ ID NO: 485944 - RNA, 20 nt, Artificial Sequence
  Synthetic
gcgaugauguuguuugagga

SEQ ID NO: 485945 - RNA, 21 nt, Artificial Sequence
  Synthetic
agcgaugauguuguuugagga

SEQ ID NO: 485946 - RNA, 22 nt, Artificial Sequence
  Synthetic
gagcgaugauguuguuugagga

SEQ ID NO: 485947 - RNA, 23 nt, Artificial Sequence
  Synthetic
ggagcgaugauguuguuugagga

SEQ ID NO: 485948 - RNA, 24 nt, Artificial Sequence
  Synthetic
aggagcgaugauguuguuugagga

SEQ ID NO: 485949 - RNA, 18 nt, Artificial Sequence
  Synthetic
auccuuuuagaaauagga

SEQ ID NO: 485950 - RNA, 19 nt, Artificial Sequence
  Synthetic
aauccuuuuagaaauagga

SEQ ID NO: 485951 - RNA, 20 nt, Artificial Sequence
  Synthetic
aaauccuuuuagaaauagga

SEQ ID NO: 485952 - RNA, 21 nt, Artificial Sequence
  Synthetic
uaaauccuuuuagaaauagga

SEQ ID NO: 485953 - RNA, 22 nt, Artificial Sequence
  Synthetic
auaaauccuuuuagaaauagga

SEQ ID NO: 485954 - RNA, 23 nt, Artificial Sequence
  Synthetic
aauaaauccuuuuagaaauagga

SEQ ID NO: 485955 - RNA, 24 nt, Artificial Sequence
  Synthetic
aaauaaauccuuuuagaaauagga

SEQ ID NO: 485956 - RNA, 18 nt, Artificial Sequence
  Synthetic
caaacucuuuaaauagga

SEQ ID NO: 485957 - RNA, 19 nt, Artificial Sequence
  Synthetic
acaaacucuuuaaauagga

SEQ ID NO: 485958 - RNA, 20 nt, Artificial Sequence
  Synthetic
uacaaacucuuuaaauagga

SEQ ID NO: 485959 - RNA, 21 nt, Artificial Sequence
  Synthetic
cuacaaacucuuuaaauagga

SEQ ID NO: 485960 - RNA, 22 nt, Artificial Sequence
  Synthetic
acuacaaacucuuuaaauagga

SEQ ID NO: 485961 - RNA, 23 nt, Artificial Sequence
  Synthetic
aacuacaaacucuuuaaauagga

SEQ ID NO: 485962 - RNA, 24 nt, Artificial Sequence
  Synthetic
aaacuacaaacucuuuaaauagga

SEQ ID NO: 485963 - RNA, 18 nt, Artificial Sequence
  Synthetic
ggagucaccucaauagga

SEQ ID NO: 485964 - RNA, 19 nt, Artificial Sequence
  Synthetic
aggagucaccucaauagga

SEQ ID NO: 485965 - RNA, 20 nt, Artificial Sequence
  Synthetic
uaggagucaccucaauagga

SEQ ID NO: 485966 - RNA, 21 nt, Artificial Sequence
  Synthetic
cuaggagucaccucaauagga

SEQ ID NO: 485967 - RNA, 22 nt, Artificial Sequence
  Synthetic
ucuaggagucaccucaauagga

SEQ ID NO: 485968 - RNA, 23 nt, Artificial Sequence
  Synthetic
gucuaggagucaccucaauagga

SEQ ID NO: 485969 - RNA, 24 nt, Artificial Sequence
  Synthetic
ugucuaggagucaccucaauagga

SEQ ID NO: 485970 - RNA, 18 nt, Artificial Sequence
  Synthetic
aagcacaagcacauagga

SEQ ID NO: 485971 - RNA, 19 nt, Artificial Sequence
  Synthetic
aaagcacaagcacauagga

SEQ ID NO: 485972 - RNA, 20 nt, Artificial Sequence
  Synthetic
caaagcacaagcacauagga

SEQ ID NO: 485973 - RNA, 21 nt, Artificial Sequence
  Synthetic
acaaagcacaagcacauagga

SEQ ID NO: 485974 - RNA, 22 nt, Artificial Sequence
  Synthetic
cacaaagcacaagcacauagga

SEQ ID NO: 485975 - RNA, 23 nt, Artificial Sequence
  Synthetic
ccacaaagcacaagcacauagga

SEQ ID NO: 485976 - RNA, 24 nt, Artificial Sequence
  Synthetic
cccacaaagcacaagcacauagga

SEQ ID NO: 485977 - RNA, 18 nt, Artificial Sequence
  Synthetic
guuaggcuuggcauagga

SEQ ID NO: 485978 - RNA, 19 nt, Artificial Sequence
  Synthetic
gguuaggcuuggcauagga

SEQ ID NO: 485979 - RNA, 20 nt, Artificial Sequence
  Synthetic
ugguuaggcuuggcauagga

SEQ ID NO: 485980 - RNA, 21 nt, Artificial Sequence
  Synthetic
uugguuaggcuuggcauagga

SEQ ID NO: 485981 - RNA, 22 nt, Artificial Sequence
  Synthetic
auugguuaggcuuggcauagga

SEQ ID NO: 485982 - RNA, 23 nt, Artificial Sequence
  Synthetic
aauugguuaggcuuggcauagga

SEQ ID NO: 485983 - RNA, 24 nt, Artificial Sequence
  Synthetic
aaauugguuaggcuuggcauagga

SEQ ID NO: 485984 - RNA, 18 nt, Artificial Sequence
  Synthetic
cagcuaagaugcauagga

SEQ ID NO: 485985 - RNA, 19 nt, Artificial Sequence
  Synthetic
acagcuaagaugcauagga

SEQ ID NO: 485986 - RNA, 20 nt, Artificial Sequence
  Synthetic
cacagcuaagaugcauagga

SEQ ID NO: 485987 - RNA, 21 nt, Artificial Sequence
  Synthetic
acacagcuaagaugcauagga

SEQ ID NO: 485988 - RNA, 22 nt, Artificial Sequence
  Synthetic
cacacagcuaagaugcauagga

SEQ ID NO: 485989 - RNA, 23 nt, Artificial Sequence
  Synthetic
ucacacagcuaagaugcauagga

SEQ ID NO: 485990 - RNA, 24 nt, Artificial Sequence
  Synthetic
uucacacagcuaagaugcauagga

SEQ ID NO: 485991 - RNA, 18 nt, Artificial Sequence
  Synthetic
agaaggagaacgauagga

SEQ ID NO: 485992 - RNA, 19 nt, Artificial Sequence
  Synthetic
gagaaggagaacgauagga

SEQ ID NO: 485993 - RNA, 20 nt, Artificial Sequence
  Synthetic
ggagaaggagaacgauagga

SEQ ID NO: 485994 - RNA, 21 nt, Artificial Sequence
  Synthetic
aggagaaggagaacgauagga

SEQ ID NO: 485995 - RNA, 22 nt, Artificial Sequence
  Synthetic
caggagaaggagaacgauagga

SEQ ID NO: 485996 - RNA, 23 nt, Artificial Sequence
  Synthetic
acaggagaaggagaacgauagga

SEQ ID NO: 485997 - RNA, 24 nt, Artificial Sequence
  Synthetic
aacaggagaaggagaacgauagga

SEQ ID NO: 485998 - RNA, 18 nt, Artificial Sequence
  Synthetic
aaaaugacagggauagga

SEQ ID NO: 485999 - RNA, 19 nt, Artificial Sequence
  Synthetic
aaaaaugacagggauagga

SEQ ID NO: 486000 - RNA, 20 nt, Artificial Sequence
  Synthetic
gaaaaaugacagggauagga

SEQ ID NO: 486001 - RNA, 21 nt, Artificial Sequence
  Synthetic
ggaaaaaugacagggauagga

SEQ ID NO: 486002 - RNA, 22 nt, Artificial Sequence
  Synthetic
aggaaaaaugacagggauagga

SEQ ID NO: 486003 - RNA, 23 nt, Artificial Sequence
  Synthetic
caggaaaaaugacagggauagga

SEQ ID NO: 486004 - RNA, 24 nt, Artificial Sequence
  Synthetic
ccaggaaaaaugacagggauagga

SEQ ID NO: 486005 - RNA, 18 nt, Artificial Sequence
  Synthetic
aagggcacucugauagga

SEQ ID NO: 486006 - RNA, 19 nt, Artificial Sequence
  Synthetic
aaagggcacucugauagga

SEQ ID NO: 486007 - RNA, 20 nt, Artificial Sequence
  Synthetic
aaaagggcacucugauagga

SEQ ID NO: 486008 - RNA, 21 nt, Artificial Sequence
  Synthetic
aaaaagggcacucugauagga

SEQ ID NO: 486009 - RNA, 22 nt, Artificial Sequence
  Synthetic
aaaaaagggcacucugauagga

SEQ ID NO: 486010 - RNA, 23 nt, Artificial Sequence
  Synthetic
gaaaaaagggcacucugauagga

SEQ ID NO: 486011 - RNA, 24 nt, Artificial Sequence
  Synthetic
ugaaaaaagggcacucugauagga

SEQ ID NO: 486012 - RNA, 18 nt, Artificial Sequence
  Synthetic
guaacagaagugauagga

SEQ ID NO: 486013 - RNA, 19 nt, Artificial Sequence
  Synthetic
aguaacagaagugauagga

SEQ ID NO: 486014 - RNA, 20 nt, Artificial Sequence
  Synthetic
gaguaacagaagugauagga

SEQ ID NO: 486015 - RNA, 21 nt, Artificial Sequence
  Synthetic
ugaguaacagaagugauagga

SEQ ID NO: 486016 - RNA, 22 nt, Artificial Sequence
  Synthetic
gugaguaacagaagugauagga

SEQ ID NO: 486017 - RNA, 23 nt, Artificial Sequence
  Synthetic
ugugaguaacagaagugauagga

SEQ ID NO: 486018 - RNA, 24 nt, Artificial Sequence
  Synthetic
gugugaguaacagaagugauagga

SEQ ID NO: 486019 - RNA, 18 nt, Artificial Sequence
  Synthetic
uuucacagggugauagga

SEQ ID NO: 486020 - RNA, 19 nt, Artificial Sequence
  Synthetic
uuuucacagggugauagga

SEQ ID NO: 486021 - RNA, 20 nt, Artificial Sequence
  Synthetic
cuuuucacagggugauagga

SEQ ID NO: 486022 - RNA, 21 nt, Artificial Sequence
  Synthetic
ccuuuucacagggugauagga

SEQ ID NO: 486023 - RNA, 22 nt, Artificial Sequence
  Synthetic
accuuuucacagggugauagga

SEQ ID NO: 486024 - RNA, 23 nt, Artificial Sequence
  Synthetic
caccuuuucacagggugauagga

SEQ ID NO: 486025 - RNA, 24 nt, Artificial Sequence
  Synthetic
gcaccuuuucacagggugauagga

SEQ ID NO: 486026 - RNA, 18 nt, Artificial Sequence
  Synthetic
ucuagguuuuugauagga

SEQ ID NO: 486027 - RNA, 19 nt, Artificial Sequence
  Synthetic
uucuagguuuuugauagga

SEQ ID NO: 486028 - RNA, 20 nt, Artificial Sequence
  Synthetic
cuucuagguuuuugauagga

SEQ ID NO: 486029 - RNA, 21 nt, Artificial Sequence
  Synthetic
ccuucuagguuuuugauagga

SEQ ID NO: 486030 - RNA, 22 nt, Artificial Sequence
  Synthetic
uccuucuagguuuuugauagga

SEQ ID NO: 486031 - RNA, 23 nt, Artificial Sequence
  Synthetic
cuccuucuagguuuuugauagga

SEQ ID NO: 486032 - RNA, 24 nt, Artificial Sequence
  Synthetic
ccuccuucuagguuuuugauagga

SEQ ID NO: 486033 - RNA, 18 nt, Artificial Sequence
  Synthetic
agaauauauucuauagga

SEQ ID NO: 486034 - RNA, 19 nt, Artificial Sequence
  Synthetic
cagaauauauucuauagga

SEQ ID NO: 486035 - RNA, 20 nt, Artificial Sequence
  Synthetic
ucagaauauauucuauagga

SEQ ID NO: 486036 - RNA, 21 nt, Artificial Sequence
  Synthetic
cucagaauauauucuauagga

SEQ ID NO: 486037 - RNA, 22 nt, Artificial Sequence
  Synthetic
ucucagaauauauucuauagga

SEQ ID NO: 486038 - RNA, 23 nt, Artificial Sequence
  Synthetic
aucucagaauauauucuauagga

SEQ ID NO: 486039 - RNA, 24 nt, Artificial Sequence
  Synthetic
caucucagaauauauucuauagga

SEQ ID NO: 486040 - RNA, 18 nt, Artificial Sequence
  Synthetic
agugcugggauuauagga

SEQ ID NO: 486041 - RNA, 19 nt, Artificial Sequence
  Synthetic
aagugcugggauuauagga

SEQ ID NO: 486042 - RNA, 20 nt, Artificial Sequence
  Synthetic
aaagugcugggauuauagga

SEQ ID NO: 486043 - RNA, 21 nt, Artificial Sequence
  Synthetic
caaagugcugggauuauagga

SEQ ID NO: 486044 - RNA, 22 nt, Artificial Sequence
  Synthetic
ccaaagugcugggauuauagga

SEQ ID NO: 486045 - RNA, 23 nt, Artificial Sequence
  Synthetic
cccaaagugcugggauuauagga

SEQ ID NO: 486046 - RNA, 24 nt, Artificial Sequence
  Synthetic
ucccaaagugcugggauuauagga

SEQ ID NO: 486047 - RNA, 18 nt, Artificial Sequence
  Synthetic
agcaaaacaaaacuagga

SEQ ID NO: 486048 - RNA, 19 nt, Artificial Sequence
  Synthetic
aagcaaaacaaaacuagga

SEQ ID NO: 486049 - RNA, 20 nt, Artificial Sequence
  Synthetic
uaagcaaaacaaaacuagga

SEQ ID NO: 486050 - RNA, 21 nt, Artificial Sequence
  Synthetic
auaagcaaaacaaaacuagga

SEQ ID NO: 486051 - RNA, 22 nt, Artificial Sequence
  Synthetic
cauaagcaaaacaaaacuagga

SEQ ID NO: 486052 - RNA, 23 nt, Artificial Sequence
  Synthetic
ucauaagcaaaacaaaacuagga

SEQ ID NO: 486053 - RNA, 24 nt, Artificial Sequence
  Synthetic
uucauaagcaaaacaaaacuagga

SEQ ID NO: 486054 - RNA, 18 nt, Artificial Sequence
  Synthetic
aaaccagaaacccuagga

SEQ ID NO: 486055 - RNA, 19 nt, Artificial Sequence
  Synthetic
gaaaccagaaacccuagga

SEQ ID NO: 486056 - RNA, 20 nt, Artificial Sequence
  Synthetic
cgaaaccagaaacccuagga

SEQ ID NO: 486057 - RNA, 21 nt, Artificial Sequence
  Synthetic
gcgaaaccagaaacccuagga

SEQ ID NO: 486058 - RNA, 22 nt, Artificial Sequence
  Synthetic
agcgaaaccagaaacccuagga

SEQ ID NO: 486059 - RNA, 23 nt, Artificial Sequence
  Synthetic
gagcgaaaccagaaacccuagga

SEQ ID NO: 486060 - RNA, 24 nt, Artificial Sequence
  Synthetic
agagcgaaaccagaaacccuagga

SEQ ID NO: 486061 - RNA, 18 nt, Artificial Sequence
  Synthetic
gacagauuguuccuagga

SEQ ID NO: 486062 - RNA, 19 nt, Artificial Sequence
  Synthetic
agacagauuguuccuagga

SEQ ID NO: 486063 - RNA, 20 nt, Artificial Sequence
  Synthetic
gagacagauuguuccuagga

SEQ ID NO: 486064 - RNA, 21 nt, Artificial Sequence
  Synthetic
agagacagauuguuccuagga

SEQ ID NO: 486065 - RNA, 22 nt, Artificial Sequence
  Synthetic
gagagacagauuguuccuagga

SEQ ID NO: 486066 - RNA, 23 nt, Artificial Sequence
  Synthetic
ggagagacagauuguuccuagga

SEQ ID NO: 486067 - RNA, 24 nt, Artificial Sequence
  Synthetic
aggagagacagauuguuccuagga

SEQ ID NO: 486068 - RNA, 18 nt, Artificial Sequence
  Synthetic
uccuggggaaggcuagga

SEQ ID NO: 486069 - RNA, 19 nt, Artificial Sequence
  Synthetic
cuccuggggaaggcuagga

SEQ ID NO: 486070 - RNA, 20 nt, Artificial Sequence
  Synthetic
ccuccuggggaaggcuagga

SEQ ID NO: 486071 - RNA, 21 nt, Artificial Sequence
  Synthetic
uccuccuggggaaggcuagga

SEQ ID NO: 486072 - RNA, 22 nt, Artificial Sequence
  Synthetic
auccuccuggggaaggcuagga

SEQ ID NO: 486073 - RNA, 23 nt, Artificial Sequence
  Synthetic
gauccuccuggggaaggcuagga

SEQ ID NO: 486074 - RNA, 24 nt, Artificial Sequence
  Synthetic
agauccuccuggggaaggcuagga

SEQ ID NO: 486075 - RNA, 18 nt, Artificial Sequence
  Synthetic
aaagaggaggugcuagga

SEQ ID NO: 486076 - RNA, 19 nt, Artificial Sequence
  Synthetic
aaaagaggaggugcuagga

SEQ ID NO: 486077 - RNA, 20 nt, Artificial Sequence
  Synthetic
aaaaagaggaggugcuagga

SEQ ID NO: 486078 - RNA, 21 nt, Artificial Sequence
  Synthetic
uaaaaagaggaggugcuagga

SEQ ID NO: 486079 - RNA, 22 nt, Artificial Sequence
  Synthetic
cuaaaaagaggaggugcuagga

SEQ ID NO: 486080 - RNA, 23 nt, Artificial Sequence
  Synthetic
ccuaaaaagaggaggugcuagga

SEQ ID NO: 486081 - RNA, 24 nt, Artificial Sequence
  Synthetic
gccuaaaaagaggaggugcuagga

SEQ ID NO: 486082 - RNA, 18 nt, Artificial Sequence
  Synthetic
agggaagagcaucuagga

SEQ ID NO: 486083 - RNA, 19 nt, Artificial Sequence
  Synthetic
aagggaagagcaucuagga

SEQ ID NO: 486084 - RNA, 20 nt, Artificial Sequence
  Synthetic
caagggaagagcaucuagga

SEQ ID NO: 486085 - RNA, 21 nt, Artificial Sequence
  Synthetic
gcaagggaagagcaucuagga

SEQ ID NO: 486086 - RNA, 22 nt, Artificial Sequence
  Synthetic
agcaagggaagagcaucuagga

SEQ ID NO: 486087 - RNA, 23 nt, Artificial Sequence
  Synthetic
cagcaagggaagagcaucuagga

SEQ ID NO: 486088 - RNA, 24 nt, Artificial Sequence
  Synthetic
acagcaagggaagagcaucuagga

SEQ ID NO: 486089 - RNA, 18 nt, Artificial Sequence
  Synthetic
gauucagugggucuagga

SEQ ID NO: 486090 - RNA, 19 nt, Artificial Sequence
  Synthetic
ugauucagugggucuagga

SEQ ID NO: 486091 - RNA, 20 nt, Artificial Sequence
  Synthetic
gugauucagugggucuagga

SEQ ID NO: 486092 - RNA, 21 nt, Artificial Sequence
  Synthetic
ugugauucagugggucuagga

SEQ ID NO: 486093 - RNA, 22 nt, Artificial Sequence
  Synthetic
uugugauucagugggucuagga

SEQ ID NO: 486094 - RNA, 23 nt, Artificial Sequence
  Synthetic
auugugauucagugggucuagga

SEQ ID NO: 486095 - RNA, 24 nt, Artificial Sequence
  Synthetic
gauugugauucagugggucuagga

SEQ ID NO: 486096 - RNA, 18 nt, Artificial Sequence
  Synthetic
gucauccuccuucuagga

SEQ ID NO: 486097 - RNA, 19 nt, Artificial Sequence
  Synthetic
ggucauccuccuucuagga

SEQ ID NO: 486098 - RNA, 20 nt, Artificial Sequence
  Synthetic
uggucauccuccuucuagga

SEQ ID NO: 486099 - RNA, 21 nt, Artificial Sequence
  Synthetic
auggucauccuccuucuagga

SEQ ID NO: 486100 - RNA, 22 nt, Artificial Sequence
  Synthetic
cauggucauccuccuucuagga

SEQ ID NO: 486101 - RNA, 23 nt, Artificial Sequence
  Synthetic
ucauggucauccuccuucuagga

SEQ ID NO: 486102 - RNA, 24 nt, Artificial Sequence
  Synthetic
uucauggucauccuccuucuagga

SEQ ID NO: 486103 - RNA, 18 nt, Artificial Sequence
  Synthetic
guacuccuauuucuagga

SEQ ID NO: 486104 - RNA, 19 nt, Artificial Sequence
  Synthetic
aguacuccuauuucuagga

SEQ ID NO: 486105 - RNA, 20 nt, Artificial Sequence
  Synthetic
uaguacuccuauuucuagga

SEQ ID NO: 486106 - RNA, 21 nt, Artificial Sequence
  Synthetic
guaguacuccuauuucuagga

SEQ ID NO: 486107 - RNA, 22 nt, Artificial Sequence
  Synthetic
gguaguacuccuauuucuagga

SEQ ID NO: 486108 - RNA, 23 nt, Artificial Sequence
  Synthetic
agguaguacuccuauuucuagga

SEQ ID NO: 486109 - RNA, 24 nt, Artificial Sequence
  Synthetic
cagguaguacuccuauuucuagga

SEQ ID NO: 486110 - RNA, 18 nt, Artificial Sequence
  Synthetic
agcucagauaaaguagga

SEQ ID NO: 486111 - RNA, 19 nt, Artificial Sequence
  Synthetic
aagcucagauaaaguagga

SEQ ID NO: 486112 - RNA, 20 nt, Artificial Sequence
  Synthetic
uaagcucagauaaaguagga

SEQ ID NO: 486113 - RNA, 21 nt, Artificial Sequence
  Synthetic
auaagcucagauaaaguagga

SEQ ID NO: 486114 - RNA, 22 nt, Artificial Sequence
  Synthetic
gauaagcucagauaaaguagga

SEQ ID NO: 486115 - RNA, 23 nt, Artificial Sequence
  Synthetic
ggauaagcucagauaaaguagga

SEQ ID NO: 486116 - RNA, 24 nt, Artificial Sequence
  Synthetic
uggauaagcucagauaaaguagga

SEQ ID NO: 486117 - RNA, 18 nt, Artificial Sequence
  Synthetic
agcucagccacaguagga

SEQ ID NO: 486118 - RNA, 19 nt, Artificial Sequence
  Synthetic
cagcucagccacaguagga

SEQ ID NO: 486119 - RNA, 20 nt, Artificial Sequence
  Synthetic
ccagcucagccacaguagga

SEQ ID NO: 486120 - RNA, 21 nt, Artificial Sequence
  Synthetic
accagcucagccacaguagga

SEQ ID NO: 486121 - RNA, 22 nt, Artificial Sequence
  Synthetic
uaccagcucagccacaguagga

SEQ ID NO: 486122 - RNA, 23 nt, Artificial Sequence
  Synthetic
auaccagcucagccacaguagga

SEQ ID NO: 486123 - RNA, 24 nt, Artificial Sequence
  Synthetic
gauaccagcucagccacaguagga

SEQ ID NO: 486124 - RNA, 18 nt, Artificial Sequence
  Synthetic
agcuuagucacaguagga

SEQ ID NO: 486125 - RNA, 19 nt, Artificial Sequence
  Synthetic
cagcuuagucacaguagga

SEQ ID NO: 486126 - RNA, 20 nt, Artificial Sequence
  Synthetic
ccagcuuagucacaguagga

SEQ ID NO: 486127 - RNA, 21 nt, Artificial Sequence
  Synthetic
accagcuuagucacaguagga

SEQ ID NO: 486128 - RNA, 22 nt, Artificial Sequence
  Synthetic
uaccagcuuagucacaguagga

SEQ ID NO: 486129 - RNA, 23 nt, Artificial Sequence
  Synthetic
auaccagcuuagucacaguagga

SEQ ID NO: 486130 - RNA, 24 nt, Artificial Sequence
  Synthetic
gauaccagcuuagucacaguagga

SEQ ID NO: 486131 - RNA, 18 nt, Artificial Sequence
  Synthetic
aauuguuggagaguagga

SEQ ID NO: 486132 - RNA, 19 nt, Artificial Sequence
  Synthetic
aaauuguuggagaguagga

SEQ ID NO: 486133 - RNA, 20 nt, Artificial Sequence
  Synthetic
gaaauuguuggagaguagga

SEQ ID NO: 486134 - RNA, 21 nt, Artificial Sequence
  Synthetic
ggaaauuguuggagaguagga

SEQ ID NO: 486135 - RNA, 22 nt, Artificial Sequence
  Synthetic
aggaaauuguuggagaguagga

SEQ ID NO: 486136 - RNA, 23 nt, Artificial Sequence
  Synthetic
gaggaaauuguuggagaguagga

SEQ ID NO: 486137 - RNA, 24 nt, Artificial Sequence
  Synthetic
ugaggaaauuguuggagaguagga

SEQ ID NO: 486138 - RNA, 18 nt, Artificial Sequence
  Synthetic
aguguguguaagguagga

SEQ ID NO: 486139 - RNA, 19 nt, Artificial Sequence
  Synthetic
aaguguguguaagguagga

SEQ ID NO: 486140 - RNA, 20 nt, Artificial Sequence
  Synthetic
aaaguguguguaagguagga

SEQ ID NO: 486141 - RNA, 21 nt, Artificial Sequence
  Synthetic
uaaaguguguguaagguagga

SEQ ID NO: 486142 - RNA, 22 nt, Artificial Sequence
  Synthetic
guaaaguguguguaagguagga

SEQ ID NO: 486143 - RNA, 23 nt, Artificial Sequence
  Synthetic
aguaaaguguguguaagguagga

SEQ ID NO: 486144 - RNA, 24 nt, Artificial Sequence
  Synthetic
uaguaaaguguguguaagguagga

SEQ ID NO: 486145 - RNA, 18 nt, Artificial Sequence
  Synthetic
uguuucacugggguagga

SEQ ID NO: 486146 - RNA, 19 nt, Artificial Sequence
  Synthetic
auguuucacugggguagga

SEQ ID NO: 486147 - RNA, 20 nt, Artificial Sequence
  Synthetic
uauguuucacugggguagga

SEQ ID NO: 486148 - RNA, 21 nt, Artificial Sequence
  Synthetic
cuauguuucacugggguagga

SEQ ID NO: 486149 - RNA, 22 nt, Artificial Sequence
  Synthetic
acuauguuucacugggguagga

SEQ ID NO: 486150 - RNA, 23 nt, Artificial Sequence
  Synthetic
uacuauguuucacugggguagga

SEQ ID NO: 486151 - RNA, 24 nt, Artificial Sequence
  Synthetic
uuacuauguuucacugggguagga

SEQ ID NO: 486152 - RNA, 18 nt, Artificial Sequence
  Synthetic
gugaugauacugguagga

SEQ ID NO: 486153 - RNA, 19 nt, Artificial Sequence
  Synthetic
ugugaugauacugguagga

SEQ ID NO: 486154 - RNA, 20 nt, Artificial Sequence
  Synthetic
cugugaugauacugguagga

SEQ ID NO: 486155 - RNA, 21 nt, Artificial Sequence
  Synthetic
ucugugaugauacugguagga

SEQ ID NO: 486156 - RNA, 22 nt, Artificial Sequence
  Synthetic
aucugugaugauacugguagga

SEQ ID NO: 486157 - RNA, 23 nt, Artificial Sequence
  Synthetic
caucugugaugauacugguagga

SEQ ID NO: 486158 - RNA, 24 nt, Artificial Sequence
  Synthetic
acaucugugaugauacugguagga

SEQ ID NO: 486159 - RNA, 18 nt, Artificial Sequence
  Synthetic
acagaaaaaaaauuagga

SEQ ID NO: 486160 - RNA, 19 nt, Artificial Sequence
  Synthetic
aacagaaaaaaaauuagga

SEQ ID NO: 486161 - RNA, 20 nt, Artificial Sequence
  Synthetic
gaacagaaaaaaaauuagga

SEQ ID NO: 486162 - RNA, 21 nt, Artificial Sequence
  Synthetic
ggaacagaaaaaaaauuagga

SEQ ID NO: 486163 - RNA, 22 nt, Artificial Sequence
  Synthetic
aggaacagaaaaaaaauuagga

SEQ ID NO: 486164 - RNA, 23 nt, Artificial Sequence
  Synthetic
aaggaacagaaaaaaaauuagga

SEQ ID NO: 486165 - RNA, 24 nt, Artificial Sequence
  Synthetic
aaaggaacagaaaaaaaauuagga

SEQ ID NO: 486166 - RNA, 18 nt, Artificial Sequence
  Synthetic
gaguucauaaaauuagga

SEQ ID NO: 486167 - RNA, 19 nt, Artificial Sequence
  Synthetic
agaguucauaaaauuagga

SEQ ID NO: 486168 - RNA, 20 nt, Artificial Sequence
  Synthetic
cagaguucauaaaauuagga

SEQ ID NO: 486169 - RNA, 21 nt, Artificial Sequence
  Synthetic
ucagaguucauaaaauuagga

SEQ ID NO: 486170 - RNA, 22 nt, Artificial Sequence
  Synthetic
aucagaguucauaaaauuagga

SEQ ID NO: 486171 - RNA, 23 nt, Artificial Sequence
  Synthetic
aaucagaguucauaaaauuagga

SEQ ID NO: 486172 - RNA, 24 nt, Artificial Sequence
  Synthetic
gaaucagaguucauaaaauuagga

SEQ ID NO: 486173 - RNA, 18 nt, Artificial Sequence
  Synthetic
cagaaacucacauuagga

SEQ ID NO: 486174 - RNA, 19 nt, Artificial Sequence
  Synthetic
ucagaaacucacauuagga

SEQ ID NO: 486175 - RNA, 20 nt, Artificial Sequence
  Synthetic
aucagaaacucacauuagga

SEQ ID NO: 486176 - RNA, 21 nt, Artificial Sequence
  Synthetic
uaucagaaacucacauuagga

SEQ ID NO: 486177 - RNA, 22 nt, Artificial Sequence
  Synthetic
uuaucagaaacucacauuagga

SEQ ID NO: 486178 - RNA, 23 nt, Artificial Sequence
  Synthetic
cuuaucagaaacucacauuagga

SEQ ID NO: 486179 - RNA, 24 nt, Artificial Sequence
  Synthetic
ucuuaucagaaacucacauuagga

SEQ ID NO: 486180 - RNA, 18 nt, Artificial Sequence
  Synthetic
ucuagaaguccauuagga

SEQ ID NO: 486181 - RNA, 19 nt, Artificial Sequence
  Synthetic
cucuagaaguccauuagga

SEQ ID NO: 486182 - RNA, 20 nt, Artificial Sequence
  Synthetic
gcucuagaaguccauuagga

SEQ ID NO: 486183 - RNA, 21 nt, Artificial Sequence
  Synthetic
agcucuagaaguccauuagga

SEQ ID NO: 486184 - RNA, 22 nt, Artificial Sequence
  Synthetic
aagcucuagaaguccauuagga

SEQ ID NO: 486185 - RNA, 23 nt, Artificial Sequence
  Synthetic
aaagcucuagaaguccauuagga

SEQ ID NO: 486186 - RNA, 24 nt, Artificial Sequence
  Synthetic
gaaagcucuagaaguccauuagga

SEQ ID NO: 486187 - RNA, 18 nt, Artificial Sequence
  Synthetic
ggggaaggcagauuagga

SEQ ID NO: 486188 - RNA, 19 nt, Artificial Sequence
  Synthetic
aggggaaggcagauuagga

SEQ ID NO: 486189 - RNA, 20 nt, Artificial Sequence
  Synthetic
gaggggaaggcagauuagga

SEQ ID NO: 486190 - RNA, 21 nt, Artificial Sequence
  Synthetic
ugaggggaaggcagauuagga

SEQ ID NO: 486191 - RNA, 22 nt, Artificial Sequence
  Synthetic
cugaggggaaggcagauuagga

SEQ ID NO: 486192 - RNA, 23 nt, Artificial Sequence
  Synthetic
ccugaggggaaggcagauuagga

SEQ ID NO: 486193 - RNA, 24 nt, Artificial Sequence
  Synthetic
cccugaggggaaggcagauuagga

SEQ ID NO: 486194 - RNA, 18 nt, Artificial Sequence
  Synthetic
ucagaggaaauauuagga

SEQ ID NO: 486195 - RNA, 19 nt, Artificial Sequence
  Synthetic
cucagaggaaauauuagga

SEQ ID NO: 486196 - RNA, 20 nt, Artificial Sequence
  Synthetic
acucagaggaaauauuagga

SEQ ID NO: 486197 - RNA, 21 nt, Artificial Sequence
  Synthetic
aacucagaggaaauauuagga

SEQ ID NO: 486198 - RNA, 22 nt, Artificial Sequence
  Synthetic
gaacucagaggaaauauuagga

SEQ ID NO: 486199 - RNA, 23 nt, Artificial Sequence
  Synthetic
ggaacucagaggaaauauuagga

SEQ ID NO: 486200 - RNA, 24 nt, Artificial Sequence
  Synthetic
uggaacucagaggaaauauuagga

SEQ ID NO: 486201 - RNA, 18 nt, Artificial Sequence
  Synthetic
ggugaaagugacuuagga

SEQ ID NO: 486202 - RNA, 19 nt, Artificial Sequence
  Synthetic
cggugaaagugacuuagga

SEQ ID NO: 486203 - RNA, 20 nt, Artificial Sequence
  Synthetic
ucggugaaagugacuuagga

SEQ ID NO: 486204 - RNA, 21 nt, Artificial Sequence
  Synthetic
cucggugaaagugacuuagga

SEQ ID NO: 486205 - RNA, 22 nt, Artificial Sequence
  Synthetic
ccucggugaaagugacuuagga

SEQ ID NO: 486206 - RNA, 23 nt, Artificial Sequence
  Synthetic
cccucggugaaagugacuuagga

SEQ ID NO: 486207 - RNA, 24 nt, Artificial Sequence
  Synthetic
ucccucggugaaagugacuuagga

SEQ ID NO: 486208 - RNA, 18 nt, Artificial Sequence
  Synthetic
cucuauucagccuuagga

SEQ ID NO: 486209 - RNA, 19 nt, Artificial Sequence
  Synthetic
acucuauucagccuuagga

SEQ ID NO: 486210 - RNA, 20 nt, Artificial Sequence
  Synthetic
aacucuauucagccuuagga

SEQ ID NO: 486211 - RNA, 21 nt, Artificial Sequence
  Synthetic
gaacucuauucagccuuagga

SEQ ID NO: 486212 - RNA, 22 nt, Artificial Sequence
  Synthetic
ggaacucuauucagccuuagga

SEQ ID NO: 486213 - RNA, 23 nt, Artificial Sequence
  Synthetic
uggaacucuauucagccuuagga

SEQ ID NO: 486214 - RNA, 24 nt, Artificial Sequence
  Synthetic
auggaacucuauucagccuuagga

SEQ ID NO: 486215 - RNA, 18 nt, Artificial Sequence
  Synthetic
ggaauagaccauuuagga

SEQ ID NO: 486216 - RNA, 19 nt, Artificial Sequence
  Synthetic
aggaauagaccauuuagga

SEQ ID NO: 486217 - RNA, 20 nt, Artificial Sequence
  Synthetic
gaggaauagaccauuuagga

SEQ ID NO: 486218 - RNA, 21 nt, Artificial Sequence
  Synthetic
ugaggaauagaccauuuagga

SEQ ID NO: 486219 - RNA, 22 nt, Artificial Sequence
  Synthetic
augaggaauagaccauuuagga

SEQ ID NO: 486220 - RNA, 23 nt, Artificial Sequence
  Synthetic
aaugaggaauagaccauuuagga

SEQ ID NO: 486221 - RNA, 24 nt, Artificial Sequence
  Synthetic
uaaugaggaauagaccauuuagga

SEQ ID NO: 486222 - RNA, 18 nt, Artificial Sequence
  Synthetic
agguggaucacuuuagga

SEQ ID NO: 486223 - RNA, 19 nt, Artificial Sequence
  Synthetic
uagguggaucacuuuagga

SEQ ID NO: 486224 - RNA, 20 nt, Artificial Sequence
  Synthetic
guagguggaucacuuuagga

SEQ ID NO: 486225 - RNA, 21 nt, Artificial Sequence
  Synthetic
gguagguggaucacuuuagga

SEQ ID NO: 486226 - RNA, 22 nt, Artificial Sequence
  Synthetic
agguagguggaucacuuuagga

SEQ ID NO: 486227 - RNA, 23 nt, Artificial Sequence
  Synthetic
gagguagguggaucacuuuagga

SEQ ID NO: 486228 - RNA, 24 nt, Artificial Sequence
  Synthetic
cgagguagguggaucacuuuagga

SEQ ID NO: 486229 - RNA, 18 nt, Artificial Sequence
  Synthetic
aagguguuggcuuuagga

SEQ ID NO: 486230 - RNA, 19 nt, Artificial Sequence
  Synthetic
aaagguguuggcuuuagga

SEQ ID NO: 486231 - RNA, 20 nt, Artificial Sequence
  Synthetic
aaaagguguuggcuuuagga

SEQ ID NO: 486232 - RNA, 21 nt, Artificial Sequence
  Synthetic
uaaaagguguuggcuuuagga

SEQ ID NO: 486233 - RNA, 22 nt, Artificial Sequence
  Synthetic
uuaaaagguguuggcuuuagga

SEQ ID NO: 486234 - RNA, 23 nt, Artificial Sequence
  Synthetic
auuaaaagguguuggcuuuagga

SEQ ID NO: 486235 - RNA, 24 nt, Artificial Sequence
  Synthetic
aauuaaaagguguuggcuuuagga

SEQ ID NO: 486236 - RNA, 18 nt, Artificial Sequence
  Synthetic
gagaaccacaguuuagga

SEQ ID NO: 486237 - RNA, 19 nt, Artificial Sequence
  Synthetic
agagaaccacaguuuagga

SEQ ID NO: 486238 - RNA, 20 nt, Artificial Sequence
  Synthetic
gagagaaccacaguuuagga

SEQ ID NO: 486239 - RNA, 21 nt, Artificial Sequence
  Synthetic
ugagagaaccacaguuuagga

SEQ ID NO: 486240 - RNA, 22 nt, Artificial Sequence
  Synthetic
augagagaaccacaguuuagga

SEQ ID NO: 486241 - RNA, 23 nt, Artificial Sequence
  Synthetic
gaugagagaaccacaguuuagga

SEQ ID NO: 486242 - RNA, 24 nt, Artificial Sequence
  Synthetic
agaugagagaaccacaguuuagga

SEQ ID NO: 486243 - RNA, 18 nt, Artificial Sequence
  Synthetic
cuaucccuuuguuuagga

SEQ ID NO: 486244 - RNA, 19 nt, Artificial Sequence
  Synthetic
ucuaucccuuuguuuagga

SEQ ID NO: 486245 - RNA, 20 nt, Artificial Sequence
  Synthetic
uucuaucccuuuguuuagga

SEQ ID NO: 486246 - RNA, 21 nt, Artificial Sequence
  Synthetic
uuucuaucccuuuguuuagga

SEQ ID NO: 486247 - RNA, 22 nt, Artificial Sequence
  Synthetic
uuuucuaucccuuuguuuagga

SEQ ID NO: 486248 - RNA, 23 nt, Artificial Sequence
  Synthetic
guuuucuaucccuuuguuuagga

SEQ ID NO: 486249 - RNA, 24 nt, Artificial Sequence
  Synthetic
gguuuucuaucccuuuguuuagga

SEQ ID NO: 486250 - RNA, 18 nt, Artificial Sequence
  Synthetic
aacuggaaauaaaacgga

SEQ ID NO: 486251 - RNA, 19 nt, Artificial Sequence
  Synthetic
uaacuggaaauaaaacgga

SEQ ID NO: 486252 - RNA, 20 nt, Artificial Sequence
  Synthetic
uuaacuggaaauaaaacgga

SEQ ID NO: 486253 - RNA, 21 nt, Artificial Sequence
  Synthetic
uuuaacuggaaauaaaacgga

SEQ ID NO: 486254 - RNA, 22 nt, Artificial Sequence
  Synthetic
guuuaacuggaaauaaaacgga

SEQ ID NO: 486255 - RNA, 23 nt, Artificial Sequence
  Synthetic
uguuuaacuggaaauaaaacgga

SEQ ID NO: 486256 - RNA, 24 nt, Artificial Sequence
  Synthetic
auguuuaacuggaaauaaaacgga

SEQ ID NO: 486257 - RNA, 18 nt, Artificial Sequence
  Synthetic
ucauauggcuaaaacgga

SEQ ID NO: 486258 - RNA, 19 nt, Artificial Sequence
  Synthetic
uucauauggcuaaaacgga

SEQ ID NO: 486259 - RNA, 20 nt, Artificial Sequence
  Synthetic
auucauauggcuaaaacgga

SEQ ID NO: 486260 - RNA, 21 nt, Artificial Sequence
  Synthetic
aauucauauggcuaaaacgga

SEQ ID NO: 486261 - RNA, 22 nt, Artificial Sequence
  Synthetic
aaauucauauggcuaaaacgga

SEQ ID NO: 486262 - RNA, 23 nt, Artificial Sequence
  Synthetic
caaauucauauggcuaaaacgga

SEQ ID NO: 486263 - RNA, 24 nt, Artificial Sequence
  Synthetic
acaaauucauauggcuaaaacgga

SEQ ID NO: 486264 - RNA, 18 nt, Artificial Sequence
  Synthetic
ccaucacagauaaacgga

SEQ ID NO: 486265 - RNA, 19 nt, Artificial Sequence
  Synthetic
accaucacagauaaacgga

SEQ ID NO: 486266 - RNA, 20 nt, Artificial Sequence
  Synthetic
caccaucacagauaaacgga

SEQ ID NO: 486267 - RNA, 21 nt, Artificial Sequence
  Synthetic
ucaccaucacagauaaacgga

SEQ ID NO: 486268 - RNA, 22 nt, Artificial Sequence
  Synthetic
aucaccaucacagauaaacgga

SEQ ID NO: 486269 - RNA, 23 nt, Artificial Sequence
  Synthetic
uaucaccaucacagauaaacgga

SEQ ID NO: 486270 - RNA, 24 nt, Artificial Sequence
  Synthetic
cuaucaccaucacagauaaacgga

SEQ ID NO: 486271 - RNA, 18 nt, Artificial Sequence
  Synthetic
cauuugcaacaacacgga

SEQ ID NO: 486272 - RNA, 19 nt, Artificial Sequence
  Synthetic
ucauuugcaacaacacgga

SEQ ID NO: 486273 - RNA, 20 nt, Artificial Sequence
  Synthetic
gucauuugcaacaacacgga

SEQ ID NO: 486274 - RNA, 21 nt, Artificial Sequence
  Synthetic
ugucauuugcaacaacacgga

SEQ ID NO: 486275 - RNA, 22 nt, Artificial Sequence
  Synthetic
cugucauuugcaacaacacgga

SEQ ID NO: 486276 - RNA, 23 nt, Artificial Sequence
  Synthetic
ccugucauuugcaacaacacgga

SEQ ID NO: 486277 - RNA, 24 nt, Artificial Sequence
  Synthetic
uccugucauuugcaacaacacgga

SEQ ID NO: 486278 - RNA, 18 nt, Artificial Sequence
  Synthetic
cuugaguggucacacgga

SEQ ID NO: 486279 - RNA, 19 nt, Artificial Sequence
  Synthetic
gcuugaguggucacacgga

SEQ ID NO: 486280 - RNA, 20 nt, Artificial Sequence
  Synthetic
ggcuugaguggucacacgga

SEQ ID NO: 486281 - RNA, 21 nt, Artificial Sequence
  Synthetic
aggcuugaguggucacacgga

SEQ ID NO: 486282 - RNA, 22 nt, Artificial Sequence
  Synthetic
aaggcuugaguggucacacgga

SEQ ID NO: 486283 - RNA, 23 nt, Artificial Sequence
  Synthetic
uaaggcuugaguggucacacgga

SEQ ID NO: 486284 - RNA, 24 nt, Artificial Sequence
  Synthetic
auaaggcuugaguggucacacgga

SEQ ID NO: 486285 - RNA, 18 nt, Artificial Sequence
  Synthetic
aggaaaaugaagcacgga

SEQ ID NO: 486286 - RNA, 19 nt, Artificial Sequence
  Synthetic
aaggaaaaugaagcacgga

SEQ ID NO: 486287 - RNA, 20 nt, Artificial Sequence
  Synthetic
caaggaaaaugaagcacgga

SEQ ID NO: 486288 - RNA, 21 nt, Artificial Sequence
  Synthetic
acaaggaaaaugaagcacgga

SEQ ID NO: 486289 - RNA, 22 nt, Artificial Sequence
  Synthetic
gacaaggaaaaugaagcacgga

SEQ ID NO: 486290 - RNA, 23 nt, Artificial Sequence
  Synthetic
agacaaggaaaaugaagcacgga

SEQ ID NO: 486291 - RNA, 24 nt, Artificial Sequence
  Synthetic
uagacaaggaaaaugaagcacgga

SEQ ID NO: 486292 - RNA, 18 nt, Artificial Sequence
  Synthetic
cucaggcauuacuacgga

SEQ ID NO: 486293 - RNA, 19 nt, Artificial Sequence
  Synthetic
acucaggcauuacuacgga

SEQ ID NO: 486294 - RNA, 20 nt, Artificial Sequence
  Synthetic
cacucaggcauuacuacgga

SEQ ID NO: 486295 - RNA, 21 nt, Artificial Sequence
  Synthetic
acacucaggcauuacuacgga

SEQ ID NO: 486296 - RNA, 22 nt, Artificial Sequence
  Synthetic
gacacucaggcauuacuacgga

SEQ ID NO: 486297 - RNA, 23 nt, Artificial Sequence
  Synthetic
ugacacucaggcauuacuacgga

SEQ ID NO: 486298 - RNA, 24 nt, Artificial Sequence
  Synthetic
gugacacucaggcauuacuacgga

SEQ ID NO: 486299 - RNA, 18 nt, Artificial Sequence
  Synthetic
ugcaacuuauauuacgga

SEQ ID NO: 486300 - RNA, 19 nt, Artificial Sequence
  Synthetic
uugcaacuuauauuacgga

SEQ ID NO: 486301 - RNA, 20 nt, Artificial Sequence
  Synthetic
uuugcaacuuauauuacgga

SEQ ID NO: 486302 - RNA, 21 nt, Artificial Sequence
  Synthetic
cuuugcaacuuauauuacgga

SEQ ID NO: 486303 - RNA, 22 nt, Artificial Sequence
  Synthetic
ccuuugcaacuuauauuacgga

SEQ ID NO: 486304 - RNA, 23 nt, Artificial Sequence
  Synthetic
uccuuugcaacuuauauuacgga

SEQ ID NO: 486305 - RNA, 24 nt, Artificial Sequence
  Synthetic
cuccuuugcaacuuauauuacgga

SEQ ID NO: 486306 - RNA, 18 nt, Artificial Sequence
  Synthetic
agugguggggguuacgga

SEQ ID NO: 486307 - RNA, 19 nt, Artificial Sequence
  Synthetic
uagugguggggguuacgga

SEQ ID NO: 486308 - RNA, 20 nt, Artificial Sequence
  Synthetic
guagugguggggguuacgga

SEQ ID NO: 486309 - RNA, 21 nt, Artificial Sequence
  Synthetic
gguagugguggggguuacgga

SEQ ID NO: 486310 - RNA, 22 nt, Artificial Sequence
  Synthetic
ugguagugguggggguuacgga

SEQ ID NO: 486311 - RNA, 23 nt, Artificial Sequence
  Synthetic
augguagugguggggguuacgga

SEQ ID NO: 486312 - RNA, 24 nt, Artificial Sequence
  Synthetic
aaugguagugguggggguuacgga

SEQ ID NO: 486313 - RNA, 18 nt, Artificial Sequence
  Synthetic
gagcuaaguaacuccgga

SEQ ID NO: 486314 - RNA, 19 nt, Artificial Sequence
  Synthetic
agagcuaaguaacuccgga

SEQ ID NO: 486315 - RNA, 20 nt, Artificial Sequence
  Synthetic
cagagcuaaguaacuccgga

SEQ ID NO: 486316 - RNA, 21 nt, Artificial Sequence
  Synthetic
ucagagcuaaguaacuccgga

SEQ ID NO: 486317 - RNA, 22 nt, Artificial Sequence
  Synthetic
aucagagcuaaguaacuccgga

SEQ ID NO: 486318 - RNA, 23 nt, Artificial Sequence
  Synthetic
caucagagcuaaguaacuccgga

SEQ ID NO: 486319 - RNA, 24 nt, Artificial Sequence
  Synthetic
acaucagagcuaaguaacuccgga

SEQ ID NO: 486320 - RNA, 18 nt, Artificial Sequence
  Synthetic
gaguacagagcaagcgga

SEQ ID NO: 486321 - RNA, 19 nt, Artificial Sequence
  Synthetic
ugaguacagagcaagcgga

SEQ ID NO: 486322 - RNA, 20 nt, Artificial Sequence
  Synthetic
uugaguacagagcaagcgga

SEQ ID NO: 486323 - RNA, 21 nt, Artificial Sequence
  Synthetic
uuugaguacagagcaagcgga

SEQ ID NO: 486324 - RNA, 22 nt, Artificial Sequence
  Synthetic
guuugaguacagagcaagcgga

SEQ ID NO: 486325 - RNA, 23 nt, Artificial Sequence
  Synthetic
aguuugaguacagagcaagcgga

SEQ ID NO: 486326 - RNA, 24 nt, Artificial Sequence
  Synthetic
aaguuugaguacagagcaagcgga

SEQ ID NO: 486327 - RNA, 18 nt, Artificial Sequence
  Synthetic
aaguggggaagaagcgga

SEQ ID NO: 486328 - RNA, 19 nt, Artificial Sequence
  Synthetic
gaaguggggaagaagcgga

SEQ ID NO: 486329 - RNA, 20 nt, Artificial Sequence
  Synthetic
ggaaguggggaagaagcgga

SEQ ID NO: 486330 - RNA, 21 nt, Artificial Sequence
  Synthetic
gggaaguggggaagaagcgga

SEQ ID NO: 486331 - RNA, 22 nt, Artificial Sequence
  Synthetic
agggaaguggggaagaagcgga

SEQ ID NO: 486332 - RNA, 23 nt, Artificial Sequence
  Synthetic
aagggaaguggggaagaagcgga

SEQ ID NO: 486333 - RNA, 24 nt, Artificial Sequence
  Synthetic
uaagggaaguggggaagaagcgga

SEQ ID NO: 486334 - RNA, 18 nt, Artificial Sequence
  Synthetic
cuacauggaaacagcgga

SEQ ID NO: 486335 - RNA, 19 nt, Artificial Sequence
  Synthetic
ucuacauggaaacagcgga

SEQ ID NO: 486336 - RNA, 20 nt, Artificial Sequence
  Synthetic
aucuacauggaaacagcgga

SEQ ID NO: 486337 - RNA, 21 nt, Artificial Sequence
  Synthetic
caucuacauggaaacagcgga

SEQ ID NO: 486338 - RNA, 22 nt, Artificial Sequence
  Synthetic
ucaucuacauggaaacagcgga

SEQ ID NO: 486339 - RNA, 23 nt, Artificial Sequence
  Synthetic
gucaucuacauggaaacagcgga

SEQ ID NO: 486340 - RNA, 24 nt, Artificial Sequence
  Synthetic
agucaucuacauggaaacagcgga

SEQ ID NO: 486341 - RNA, 18 nt, Artificial Sequence
  Synthetic
ccagaggcuacuagcgga

SEQ ID NO: 486342 - RNA, 19 nt, Artificial Sequence
  Synthetic
uccagaggcuacuagcgga

SEQ ID NO: 486343 - RNA, 20 nt, Artificial Sequence
  Synthetic
guccagaggcuacuagcgga

SEQ ID NO: 486344 - RNA, 21 nt, Artificial Sequence
  Synthetic
aguccagaggcuacuagcgga

SEQ ID NO: 486345 - RNA, 22 nt, Artificial Sequence
  Synthetic
uaguccagaggcuacuagcgga

SEQ ID NO: 486346 - RNA, 23 nt, Artificial Sequence
  Synthetic
guaguccagaggcuacuagcgga

SEQ ID NO: 486347 - RNA, 24 nt, Artificial Sequence
  Synthetic
aguaguccagaggcuacuagcgga

SEQ ID NO: 486348 - RNA, 18 nt, Artificial Sequence
  Synthetic
cucaaauaccugggcgga

SEQ ID NO: 486349 - RNA, 19 nt, Artificial Sequence
  Synthetic
ucucaaauaccugggcgga

SEQ ID NO: 486350 - RNA, 20 nt, Artificial Sequence
  Synthetic
cucucaaauaccugggcgga

SEQ ID NO: 486351 - RNA, 21 nt, Artificial Sequence
  Synthetic
ucucucaaauaccugggcgga

SEQ ID NO: 486352 - RNA, 22 nt, Artificial Sequence
  Synthetic
aucucucaaauaccugggcgga

SEQ ID NO: 486353 - RNA, 23 nt, Artificial Sequence
  Synthetic
aaucucucaaauaccugggcgga

SEQ ID NO: 486354 - RNA, 24 nt, Artificial Sequence
  Synthetic
gaaucucucaaauaccugggcgga

SEQ ID NO: 486355 - RNA, 18 nt, Artificial Sequence
  Synthetic
cccagugcuaccugcgga

SEQ ID NO: 486356 - RNA, 19 nt, Artificial Sequence
  Synthetic
acccagugcuaccugcgga

SEQ ID NO: 486357 - RNA, 20 nt, Artificial Sequence
  Synthetic
uacccagugcuaccugcgga

SEQ ID NO: 486358 - RNA, 21 nt, Artificial Sequence
  Synthetic
auacccagugcuaccugcgga

SEQ ID NO: 486359 - RNA, 22 nt, Artificial Sequence
  Synthetic
aauacccagugcuaccugcgga

SEQ ID NO: 486360 - RNA, 23 nt, Artificial Sequence
  Synthetic
aaauacccagugcuaccugcgga

SEQ ID NO: 486361 - RNA, 24 nt, Artificial Sequence
  Synthetic
caaauacccagugcuaccugcgga

SEQ ID NO: 486362 - RNA, 18 nt, Artificial Sequence
  Synthetic
cacaaaagucaaaucgga

SEQ ID NO: 486363 - RNA, 19 nt, Artificial Sequence
  Synthetic
gcacaaaagucaaaucgga

SEQ ID NO: 486364 - RNA, 20 nt, Artificial Sequence
  Synthetic
ugcacaaaagucaaaucgga

SEQ ID NO: 486365 - RNA, 21 nt, Artificial Sequence
  Synthetic
augcacaaaagucaaaucgga

SEQ ID NO: 486366 - RNA, 22 nt, Artificial Sequence
  Synthetic
aaugcacaaaagucaaaucgga

SEQ ID NO: 486367 - RNA, 23 nt, Artificial Sequence
  Synthetic
aaaugcacaaaagucaaaucgga

SEQ ID NO: 486368 - RNA, 24 nt, Artificial Sequence
  Synthetic
aaaaugcacaaaagucaaaucgga

SEQ ID NO: 486369 - RNA, 18 nt, Artificial Sequence
  Synthetic
gaaagccuacacaucgga

SEQ ID NO: 486370 - RNA, 19 nt, Artificial Sequence
  Synthetic
agaaagccuacacaucgga

SEQ ID NO: 486371 - RNA, 20 nt, Artificial Sequence
  Synthetic
aagaaagccuacacaucgga

SEQ ID NO: 486372 - RNA, 21 nt, Artificial Sequence
  Synthetic
gaagaaagccuacacaucgga

SEQ ID NO: 486373 - RNA, 22 nt, Artificial Sequence
  Synthetic
ggaagaaagccuacacaucgga

SEQ ID NO: 486374 - RNA, 23 nt, Artificial Sequence
  Synthetic
gggaagaaagccuacacaucgga

SEQ ID NO: 486375 - RNA, 24 nt, Artificial Sequence
  Synthetic
ugggaagaaagccuacacaucgga

SEQ ID NO: 486376 - RNA, 18 nt, Artificial Sequence
  Synthetic
ccgcaggcuguucucgga

SEQ ID NO: 486377 - RNA, 19 nt, Artificial Sequence
  Synthetic
accgcaggcuguucucgga

SEQ ID NO: 486378 - RNA, 20 nt, Artificial Sequence
  Synthetic
uaccgcaggcuguucucgga

SEQ ID NO: 486379 - RNA, 21 nt, Artificial Sequence
  Synthetic
guaccgcaggcuguucucgga

SEQ ID NO: 486380 - RNA, 22 nt, Artificial Sequence
  Synthetic
uguaccgcaggcuguucucgga

SEQ ID NO: 486381 - RNA, 23 nt, Artificial Sequence
  Synthetic
guguaccgcaggcuguucucgga

SEQ ID NO: 486382 - RNA, 24 nt, Artificial Sequence
  Synthetic
uguguaccgcaggcuguucucgga

SEQ ID NO: 486383 - RNA, 18 nt, Artificial Sequence
  Synthetic
aguuugugucuugucgga

SEQ ID NO: 486384 - RNA, 19 nt, Artificial Sequence
  Synthetic
aaguuugugucuugucgga

SEQ ID NO: 486385 - RNA, 20 nt, Artificial Sequence
  Synthetic
aaaguuugugucuugucgga

SEQ ID NO: 486386 - RNA, 21 nt, Artificial Sequence
  Synthetic
uaaaguuugugucuugucgga

SEQ ID NO: 486387 - RNA, 22 nt, Artificial Sequence
  Synthetic
cuaaaguuugugucuugucgga

SEQ ID NO: 486388 - RNA, 23 nt, Artificial Sequence
  Synthetic
ccuaaaguuugugucuugucgga

SEQ ID NO: 486389 - RNA, 24 nt, Artificial Sequence
  Synthetic
cccuaaaguuugugucuugucgga

SEQ ID NO: 486390 - RNA, 18 nt, Artificial Sequence
  Synthetic
auauucucagguuucgga

SEQ ID NO: 486391 - RNA, 19 nt, Artificial Sequence
  Synthetic
aauauucucagguuucgga

SEQ ID NO: 486392 - RNA, 20 nt, Artificial Sequence
  Synthetic
aaauauucucagguuucgga

SEQ ID NO: 486393 - RNA, 21 nt, Artificial Sequence
  Synthetic
gaaauauucucagguuucgga

SEQ ID NO: 486394 - RNA, 22 nt, Artificial Sequence
  Synthetic
ggaaauauucucagguuucgga

SEQ ID NO: 486395 - RNA, 23 nt, Artificial Sequence
  Synthetic
gggaaauauucucagguuucgga

SEQ ID NO: 486396 - RNA, 24 nt, Artificial Sequence
  Synthetic
ggggaaauauucucagguuucgga

SEQ ID NO: 486397 - RNA, 18 nt, Artificial Sequence
  Synthetic
gcucuuaagaaaaaggga

SEQ ID NO: 486398 - RNA, 19 nt, Artificial Sequence
  Synthetic
ugcucuuaagaaaaaggga

SEQ ID NO: 486399 - RNA, 20 nt, Artificial Sequence
  Synthetic
gugcucuuaagaaaaaggga

SEQ ID NO: 486400 - RNA, 21 nt, Artificial Sequence
  Synthetic
agugcucuuaagaaaaaggga

SEQ ID NO: 486401 - RNA, 22 nt, Artificial Sequence
  Synthetic
gagugcucuuaagaaaaaggga

SEQ ID NO: 486402 - RNA, 23 nt, Artificial Sequence
  Synthetic
ugagugcucuuaagaaaaaggga

SEQ ID NO: 486403 - RNA, 24 nt, Artificial Sequence
  Synthetic
cugagugcucuuaagaaaaaggga

SEQ ID NO: 486404 - RNA, 18 nt, Artificial Sequence
  Synthetic
cuaugcuaagaaaaggga

SEQ ID NO: 486405 - RNA, 19 nt, Artificial Sequence
  Synthetic
acuaugcuaagaaaaggga

SEQ ID NO: 486406 - RNA, 20 nt, Artificial Sequence
  Synthetic
cacuaugcuaagaaaaggga

SEQ ID NO: 486407 - RNA, 21 nt, Artificial Sequence
  Synthetic
ccacuaugcuaagaaaaggga

SEQ ID NO: 486408 - RNA, 22 nt, Artificial Sequence
  Synthetic
uccacuaugcuaagaaaaggga

SEQ ID NO: 486409 - RNA, 23 nt, Artificial Sequence
  Synthetic
uuccacuaugcuaagaaaaggga

SEQ ID NO: 486410 - RNA, 24 nt, Artificial Sequence
  Synthetic
uuuccacuaugcuaagaaaaggga

SEQ ID NO: 486411 - RNA, 18 nt, Artificial Sequence
  Synthetic
ucugggaaggaaaaggga

SEQ ID NO: 486412 - RNA, 19 nt, Artificial Sequence
  Synthetic
aucugggaaggaaaaggga

SEQ ID NO: 486413 - RNA, 20 nt, Artificial Sequence
  Synthetic
caucugggaaggaaaaggga

SEQ ID NO: 486414 - RNA, 21 nt, Artificial Sequence
  Synthetic
ccaucugggaaggaaaaggga

SEQ ID NO: 486415 - RNA, 22 nt, Artificial Sequence
  Synthetic
uccaucugggaaggaaaaggga

SEQ ID NO: 486416 - RNA, 23 nt, Artificial Sequence
  Synthetic
guccaucugggaaggaaaaggga

SEQ ID NO: 486417 - RNA, 24 nt, Artificial Sequence
  Synthetic
aguccaucugggaaggaaaaggga

SEQ ID NO: 486418 - RNA, 18 nt, Artificial Sequence
  Synthetic
ugaagcauggaaaaggga

SEQ ID NO: 486419 - RNA, 19 nt, Artificial Sequence
  Synthetic
augaagcauggaaaaggga

SEQ ID NO: 486420 - RNA, 20 nt, Artificial Sequence
  Synthetic
aaugaagcauggaaaaggga

SEQ ID NO: 486421 - RNA, 21 nt, Artificial Sequence
  Synthetic
aaaugaagcauggaaaaggga

SEQ ID NO: 486422 - RNA, 22 nt, Artificial Sequence
  Synthetic
aaaaugaagcauggaaaaggga

SEQ ID NO: 486423 - RNA, 23 nt, Artificial Sequence
  Synthetic
aaaaaugaagcauggaaaaggga

SEQ ID NO: 486424 - RNA, 24 nt, Artificial Sequence
  Synthetic
aaaaaaugaagcauggaaaaggga

SEQ ID NO: 486425 - RNA, 18 nt, Artificial Sequence
  Synthetic
gagggagagggaaaggga

SEQ ID NO: 486426 - RNA, 19 nt, Artificial Sequence
  Synthetic
agagggagagggaaaggga

SEQ ID NO: 486427 - RNA, 20 nt, Artificial Sequence
  Synthetic
gagagggagagggaaaggga

SEQ ID NO: 486428 - RNA, 21 nt, Artificial Sequence
  Synthetic
ggagagggagagggaaaggga

SEQ ID NO: 486429 - RNA, 22 nt, Artificial Sequence
  Synthetic
gggagagggagagggaaaggga

SEQ ID NO: 486430 - RNA, 23 nt, Artificial Sequence
  Synthetic
agggagagggagagggaaaggga

SEQ ID NO: 486431 - RNA, 24 nt, Artificial Sequence
  Synthetic
cagggagagggagagggaaaggga

SEQ ID NO: 486432 - RNA, 18 nt, Artificial Sequence
  Synthetic
aaaaaaaggggaaaggga

SEQ ID NO: 486433 - RNA, 19 nt, Artificial Sequence
  Synthetic
caaaaaaaggggaaaggga

SEQ ID NO: 486434 - RNA, 20 nt, Artificial Sequence
  Synthetic
acaaaaaaaggggaaaggga

SEQ ID NO: 486435 - RNA, 21 nt, Artificial Sequence
  Synthetic
cacaaaaaaaggggaaaggga

SEQ ID NO: 486436 - RNA, 22 nt, Artificial Sequence
  Synthetic
acacaaaaaaaggggaaaggga

SEQ ID NO: 486437 - RNA, 23 nt, Artificial Sequence
  Synthetic
cacacaaaaaaaggggaaaggga

SEQ ID NO: 486438 - RNA, 24 nt, Artificial Sequence
  Synthetic
ucacacaaaaaaaggggaaaggga

SEQ ID NO: 486439 - RNA, 18 nt, Artificial Sequence
  Synthetic
acacugcugggaaaggga

SEQ ID NO: 486440 - RNA, 19 nt, Artificial Sequence
  Synthetic
uacacugcugggaaaggga

SEQ ID NO: 486441 - RNA, 20 nt, Artificial Sequence
  Synthetic
guacacugcugggaaaggga

SEQ ID NO: 486442 - RNA, 21 nt, Artificial Sequence
  Synthetic
uguacacugcugggaaaggga

SEQ ID NO: 486443 - RNA, 22 nt, Artificial Sequence
  Synthetic
cuguacacugcugggaaaggga

SEQ ID NO: 486444 - RNA, 23 nt, Artificial Sequence
  Synthetic
ucuguacacugcugggaaaggga

SEQ ID NO: 486445 - RNA, 24 nt, Artificial Sequence
  Synthetic
aucuguacacugcugggaaaggga

SEQ ID NO: 486446 - RNA, 18 nt, Artificial Sequence
  Synthetic
auuugucaaugaaaggga

SEQ ID NO: 486447 - RNA, 19 nt, Artificial Sequence
  Synthetic
uauuugucaaugaaaggga

SEQ ID NO: 486448 - RNA, 20 nt, Artificial Sequence
  Synthetic
auauuugucaaugaaaggga

SEQ ID NO: 486449 - RNA, 21 nt, Artificial Sequence
  Synthetic
aauauuugucaaugaaaggga

SEQ ID NO: 486450 - RNA, 22 nt, Artificial Sequence
  Synthetic
uaauauuugucaaugaaaggga

SEQ ID NO: 486451 - RNA, 23 nt, Artificial Sequence
  Synthetic
auaauauuugucaaugaaaggga

SEQ ID NO: 486452 - RNA, 24 nt, Artificial Sequence
  Synthetic
uauaauauuugucaaugaaaggga

SEQ ID NO: 486453 - RNA, 18 nt, Artificial Sequence
  Synthetic
aacaaguggugaaaggga

SEQ ID NO: 486454 - RNA, 19 nt, Artificial Sequence
  Synthetic
aaacaaguggugaaaggga

SEQ ID NO: 486455 - RNA, 20 nt, Artificial Sequence
  Synthetic
gaaacaaguggugaaaggga

SEQ ID NO: 486456 - RNA, 21 nt, Artificial Sequence
  Synthetic
ugaaacaaguggugaaaggga

SEQ ID NO: 486457 - RNA, 22 nt, Artificial Sequence
  Synthetic
uugaaacaaguggugaaaggga

SEQ ID NO: 486458 - RNA, 23 nt, Artificial Sequence
  Synthetic
uuugaaacaaguggugaaaggga

SEQ ID NO: 486459 - RNA, 24 nt, Artificial Sequence
  Synthetic
guuugaaacaaguggugaaaggga

SEQ ID NO: 486460 - RNA, 18 nt, Artificial Sequence
  Synthetic
agacuggaaauaaaggga

SEQ ID NO: 486461 - RNA, 19 nt, Artificial Sequence
  Synthetic
cagacuggaaauaaaggga

SEQ ID NO: 486462 - RNA, 20 nt, Artificial Sequence
  Synthetic
acagacuggaaauaaaggga

SEQ ID NO: 486463 - RNA, 21 nt, Artificial Sequence
  Synthetic
cacagacuggaaauaaaggga

SEQ ID NO: 486464 - RNA, 22 nt, Artificial Sequence
  Synthetic
acacagacuggaaauaaaggga

SEQ ID NO: 486465 - RNA, 23 nt, Artificial Sequence
  Synthetic
cacacagacuggaaauaaaggga

SEQ ID NO: 486466 - RNA, 24 nt, Artificial Sequence
  Synthetic
acacacagacuggaaauaaaggga

SEQ ID NO: 486467 - RNA, 18 nt, Artificial Sequence
  Synthetic
uaggaauggauaaaggga

SEQ ID NO: 486468 - RNA, 19 nt, Artificial Sequence
  Synthetic
auaggaauggauaaaggga

SEQ ID NO: 486469 - RNA, 20 nt, Artificial Sequence
  Synthetic
uauaggaauggauaaaggga

SEQ ID NO: 486470 - RNA, 21 nt, Artificial Sequence
  Synthetic
auauaggaauggauaaaggga

SEQ ID NO: 486471 - RNA, 22 nt, Artificial Sequence
  Synthetic
aauauaggaauggauaaaggga

SEQ ID NO: 486472 - RNA, 23 nt, Artificial Sequence
  Synthetic
uaauauaggaauggauaaaggga

SEQ ID NO: 486473 - RNA, 24 nt, Artificial Sequence
  Synthetic
auaauauaggaauggauaaaggga

SEQ ID NO: 486474 - RNA, 18 nt, Artificial Sequence
  Synthetic
gcaauaaccuuaaaggga

SEQ ID NO: 486475 - RNA, 19 nt, Artificial Sequence
  Synthetic
ugcaauaaccuuaaaggga

SEQ ID NO: 486476 - RNA, 20 nt, Artificial Sequence
  Synthetic
augcaauaaccuuaaaggga

SEQ ID NO: 486477 - RNA, 21 nt, Artificial Sequence
  Synthetic
aaugcaauaaccuuaaaggga

SEQ ID NO: 486478 - RNA, 22 nt, Artificial Sequence
  Synthetic
aaaugcaauaaccuuaaaggga

SEQ ID NO: 486479 - RNA, 23 nt, Artificial Sequence
  Synthetic
uaaaugcaauaaccuuaaaggga

SEQ ID NO: 486480 - RNA, 24 nt, Artificial Sequence
  Synthetic
uuaaaugcaauaaccuuaaaggga

SEQ ID NO: 486481 - RNA, 18 nt, Artificial Sequence
  Synthetic
uaaugacaccccaaggga

SEQ ID NO: 486482 - RNA, 19 nt, Artificial Sequence
  Synthetic
auaaugacaccccaaggga

SEQ ID NO: 486483 - RNA, 20 nt, Artificial Sequence
  Synthetic
gauaaugacaccccaaggga

SEQ ID NO: 486484 - RNA, 21 nt, Artificial Sequence
  Synthetic
agauaaugacaccccaaggga

SEQ ID NO: 486485 - RNA, 22 nt, Artificial Sequence
  Synthetic
cagauaaugacaccccaaggga

SEQ ID NO: 486486 - RNA, 23 nt, Artificial Sequence
  Synthetic
acagauaaugacaccccaaggga

SEQ ID NO: 486487 - RNA, 24 nt, Artificial Sequence
  Synthetic
aacagauaaugacaccccaaggga

SEQ ID NO: 486488 - RNA, 18 nt, Artificial Sequence
  Synthetic
agaauaaagagcaaggga

SEQ ID NO: 486489 - RNA, 19 nt, Artificial Sequence
  Synthetic
cagaauaaagagcaaggga

SEQ ID NO: 486490 - RNA, 20 nt, Artificial Sequence
  Synthetic
ccagaauaaagagcaaggga

SEQ ID NO: 486491 - RNA, 21 nt, Artificial Sequence
  Synthetic
cccagaauaaagagcaaggga

SEQ ID NO: 486492 - RNA, 22 nt, Artificial Sequence
  Synthetic
ucccagaauaaagagcaaggga

SEQ ID NO: 486493 - RNA, 23 nt, Artificial Sequence
  Synthetic
cucccagaauaaagagcaaggga

SEQ ID NO: 486494 - RNA, 24 nt, Artificial Sequence
  Synthetic
ccucccagaauaaagagcaaggga

SEQ ID NO: 486495 - RNA, 18 nt, Artificial Sequence
  Synthetic
ggcaggguaaucaaggga

SEQ ID NO: 486496 - RNA, 19 nt, Artificial Sequence
  Synthetic
aggcaggguaaucaaggga

SEQ ID NO: 486497 - RNA, 20 nt, Artificial Sequence
  Synthetic
uaggcaggguaaucaaggga

SEQ ID NO: 486498 - RNA, 21 nt, Artificial Sequence
  Synthetic
auaggcaggguaaucaaggga

SEQ ID NO: 486499 - RNA, 22 nt, Artificial Sequence
  Synthetic
gauaggcaggguaaucaaggga

SEQ ID NO: 486500 - RNA, 23 nt, Artificial Sequence
  Synthetic
ggauaggcaggguaaucaaggga

SEQ ID NO: 486501 - RNA, 24 nt, Artificial Sequence
  Synthetic
gggauaggcaggguaaucaaggga

SEQ ID NO: 486502 - RNA, 18 nt, Artificial Sequence
  Synthetic
cauaucaaccucaaggga

SEQ ID NO: 486503 - RNA, 19 nt, Artificial Sequence
  Synthetic
ucauaucaaccucaaggga

SEQ ID NO: 486504 - RNA, 20 nt, Artificial Sequence
  Synthetic
gucauaucaaccucaaggga

SEQ ID NO: 486505 - RNA, 21 nt, Artificial Sequence
  Synthetic
ugucauaucaaccucaaggga

SEQ ID NO: 486506 - RNA, 22 nt, Artificial Sequence
  Synthetic
cugucauaucaaccucaaggga

SEQ ID NO: 486507 - RNA, 23 nt, Artificial Sequence
  Synthetic
ucugucauaucaaccucaaggga

SEQ ID NO: 486508 - RNA, 24 nt, Artificial Sequence
  Synthetic
aucugucauaucaaccucaaggga

SEQ ID NO: 486509 - RNA, 18 nt, Artificial Sequence
  Synthetic
gguuucauucucaaggga

SEQ ID NO: 486510 - RNA, 19 nt, Artificial Sequence
  Synthetic
ggguuucauucucaaggga

SEQ ID NO: 486511 - RNA, 20 nt, Artificial Sequence
  Synthetic
aggguuucauucucaaggga

SEQ ID NO: 486512 - RNA, 21 nt, Artificial Sequence
  Synthetic
caggguuucauucucaaggga

SEQ ID NO: 486513 - RNA, 22 nt, Artificial Sequence
  Synthetic
ucaggguuucauucucaaggga

SEQ ID NO: 486514 - RNA, 23 nt, Artificial Sequence
  Synthetic
gucaggguuucauucucaaggga

SEQ ID NO: 486515 - RNA, 24 nt, Artificial Sequence
  Synthetic
agucaggguuucauucucaaggga

SEQ ID NO: 486516 - RNA, 18 nt, Artificial Sequence
  Synthetic
ggaagggaagggaaggga

SEQ ID NO: 486517 - RNA, 19 nt, Artificial Sequence
  Synthetic
gggaagggaagggaaggga

SEQ ID NO: 486518 - RNA, 20 nt, Artificial Sequence
  Synthetic
agggaagggaagggaaggga

SEQ ID NO: 486519 - RNA, 21 nt, Artificial Sequence
  Synthetic
gagggaagggaagggaaggga

SEQ ID NO: 486520 - RNA, 22 nt, Artificial Sequence
  Synthetic
ggagggaagggaagggaaggga

SEQ ID NO: 486521 - RNA, 23 nt, Artificial Sequence
  Synthetic
gggagggaagggaagggaaggga

SEQ ID NO: 486522 - RNA, 24 nt, Artificial Sequence
  Synthetic
ggggagggaagggaagggaaggga

SEQ ID NO: 486523 - RNA, 18 nt, Artificial Sequence
  Synthetic
gggagggaagggaaggga

SEQ ID NO: 486524 - RNA, 19 nt, Artificial Sequence
  Synthetic
ggggagggaagggaaggga

SEQ ID NO: 486525 - RNA, 20 nt, Artificial Sequence
  Synthetic
aggggagggaagggaaggga

SEQ ID NO: 486526 - RNA, 21 nt, Artificial Sequence
  Synthetic
gaggggagggaagggaaggga

SEQ ID NO: 486527 - RNA, 22 nt, Artificial Sequence
  Synthetic
agaggggagggaagggaaggga

SEQ ID NO: 486528 - RNA, 23 nt, Artificial Sequence
  Synthetic
gagaggggagggaagggaaggga

SEQ ID NO: 486529 - RNA, 24 nt, Artificial Sequence
  Synthetic
agagaggggagggaagggaaggga

SEQ ID NO: 486530 - RNA, 18 nt, Artificial Sequence
  Synthetic
gagaggggagggaaggga

SEQ ID NO: 486531 - RNA, 19 nt, Artificial Sequence
  Synthetic
agagaggggagggaaggga

SEQ ID NO: 486532 - RNA, 20 nt, Artificial Sequence
  Synthetic
gagagaggggagggaaggga

SEQ ID NO: 486533 - RNA, 21 nt, Artificial Sequence
  Synthetic
ugagagaggggagggaaggga

SEQ ID NO: 486534 - RNA, 22 nt, Artificial Sequence
  Synthetic
gugagagaggggagggaaggga

SEQ ID NO: 486535 - RNA, 23 nt, Artificial Sequence
  Synthetic
ugugagagaggggagggaaggga

SEQ ID NO: 486536 - RNA, 24 nt, Artificial Sequence
  Synthetic
gugugagagaggggagggaaggga

SEQ ID NO: 486537 - RNA, 19 nt, Artificial Sequence
  Synthetic
ggagaggggagggaaggga

SEQ ID NO: 486538 - RNA, 20 nt, Artificial Sequence
  Synthetic
aggagaggggagggaaggga

SEQ ID NO: 486539 - RNA, 21 nt, Artificial Sequence
  Synthetic
aaggagaggggagggaaggga

SEQ ID NO: 486540 - RNA, 22 nt, Artificial Sequence
  Synthetic
gaaggagaggggagggaaggga

SEQ ID NO: 486541 - RNA, 23 nt, Artificial Sequence
  Synthetic
ggaaggagaggggagggaaggga

SEQ ID NO: 486542 - RNA, 24 nt, Artificial Sequence
  Synthetic
gggaaggagaggggagggaaggga

SEQ ID NO: 486543 - RNA, 18 nt, Artificial Sequence
  Synthetic
aaagguagggggaaggga

SEQ ID NO: 486544 - RNA, 19 nt, Artificial Sequence
  Synthetic
uaaagguagggggaaggga

SEQ ID NO: 486545 - RNA, 20 nt, Artificial Sequence
  Synthetic
auaaagguagggggaaggga

SEQ ID NO: 486546 - RNA, 21 nt, Artificial Sequence
  Synthetic
aauaaagguagggggaaggga

SEQ ID NO: 486547 - RNA, 22 nt, Artificial Sequence
  Synthetic
aaauaaagguagggggaaggga

SEQ ID NO: 486548 - RNA, 23 nt, Artificial Sequence
  Synthetic
aaaauaaagguagggggaaggga

SEQ ID NO: 486549 - RNA, 24 nt, Artificial Sequence
  Synthetic
aaaaauaaagguagggggaaggga

SEQ ID NO: 486550 - RNA, 18 nt, Artificial Sequence
  Synthetic
aaaagugaagauaaggga

SEQ ID NO: 486551 - RNA, 19 nt, Artificial Sequence
  Synthetic
uaaaagugaagauaaggga

SEQ ID NO: 486552 - RNA, 20 nt, Artificial Sequence
  Synthetic
auaaaagugaagauaaggga

SEQ ID NO: 486553 - RNA, 21 nt, Artificial Sequence
  Synthetic
aauaaaagugaagauaaggga

SEQ ID NO: 486554 - RNA, 22 nt, Artificial Sequence
  Synthetic
gaauaaaagugaagauaaggga

SEQ ID NO: 486555 - RNA, 23 nt, Artificial Sequence
  Synthetic
ugaauaaaagugaagauaaggga

SEQ ID NO: 486556 - RNA, 24 nt, Artificial Sequence
  Synthetic
cugaauaaaagugaagauaaggga

SEQ ID NO: 486557 - RNA, 18 nt, Artificial Sequence
  Synthetic
ucccuuucuuauaaggga

SEQ ID NO: 486558 - RNA, 19 nt, Artificial Sequence
  Synthetic
uucccuuucuuauaaggga

SEQ ID NO: 486559 - RNA, 20 nt, Artificial Sequence
  Synthetic
cuucccuuucuuauaaggga

SEQ ID NO: 486560 - RNA, 21 nt, Artificial Sequence
  Synthetic
ucuucccuuucuuauaaggga

SEQ ID NO: 486561 - RNA, 22 nt, Artificial Sequence
  Synthetic
cucuucccuuucuuauaaggga

SEQ ID NO: 486562 - RNA, 23 nt, Artificial Sequence
  Synthetic
acucuucccuuucuuauaaggga

SEQ ID NO: 486563 - RNA, 24 nt, Artificial Sequence
  Synthetic
uacucuucccuuucuuauaaggga

SEQ ID NO: 486564 - RNA, 18 nt, Artificial Sequence
  Synthetic
aagccaggcaguaaggga

SEQ ID NO: 486565 - RNA, 19 nt, Artificial Sequence
  Synthetic
gaagccaggcaguaaggga

SEQ ID NO: 486566 - RNA, 20 nt, Artificial Sequence
  Synthetic
ggaagccaggcaguaaggga

SEQ ID NO: 486567 - RNA, 21 nt, Artificial Sequence
  Synthetic
aggaagccaggcaguaaggga

SEQ ID NO: 486568 - RNA, 22 nt, Artificial Sequence
  Synthetic
caggaagccaggcaguaaggga

SEQ ID NO: 486569 - RNA, 23 nt, Artificial Sequence
  Synthetic
ucaggaagccaggcaguaaggga

SEQ ID NO: 486570 - RNA, 24 nt, Artificial Sequence
  Synthetic
gucaggaagccaggcaguaaggga

SEQ ID NO: 486571 - RNA, 18 nt, Artificial Sequence
  Synthetic
uuccuuuuucuuaaggga

SEQ ID NO: 486572 - RNA, 19 nt, Artificial Sequence
  Synthetic
auuccuuuuucuuaaggga

SEQ ID NO: 486573 - RNA, 20 nt, Artificial Sequence
  Synthetic
uauuccuuuuucuuaaggga

SEQ ID NO: 486574 - RNA, 21 nt, Artificial Sequence
  Synthetic
uuauuccuuuuucuuaaggga

SEQ ID NO: 486575 - RNA, 22 nt, Artificial Sequence
  Synthetic
auuauuccuuuuucuuaaggga

SEQ ID NO: 486576 - RNA, 23 nt, Artificial Sequence
  Synthetic
uauuauuccuuuuucuuaaggga

SEQ ID NO: 486577 - RNA, 24 nt, Artificial Sequence
  Synthetic
uuauuauuccuuuuucuuaaggga

SEQ ID NO: 486578 - RNA, 18 nt, Artificial Sequence
  Synthetic
acuaugagguuuaaggga

SEQ ID NO: 486579 - RNA, 19 nt, Artificial Sequence
  Synthetic
aacuaugagguuuaaggga

SEQ ID NO: 486580 - RNA, 20 nt, Artificial Sequence
  Synthetic
aaacuaugagguuuaaggga

SEQ ID NO: 486581 - RNA, 21 nt, Artificial Sequence
  Synthetic
aaaacuaugagguuuaaggga

SEQ ID NO: 486582 - RNA, 22 nt, Artificial Sequence
  Synthetic
gaaaacuaugagguuuaaggga

SEQ ID NO: 486583 - RNA, 23 nt, Artificial Sequence
  Synthetic
ugaaaacuaugagguuuaaggga

SEQ ID NO: 486584 - RNA, 24 nt, Artificial Sequence
  Synthetic
uugaaaacuaugagguuuaaggga

SEQ ID NO: 486585 - RNA, 18 nt, Artificial Sequence
  Synthetic
gcacaauuaaaacaggga

SEQ ID NO: 486586 - RNA, 19 nt, Artificial Sequence
  Synthetic
agcacaauuaaaacaggga

SEQ ID NO: 486587 - RNA, 20 nt, Artificial Sequence
  Synthetic
aagcacaauuaaaacaggga

SEQ ID NO: 486588 - RNA, 21 nt, Artificial Sequence
  Synthetic
uaagcacaauuaaaacaggga

SEQ ID NO: 486589 - RNA, 22 nt, Artificial Sequence
  Synthetic
uuaagcacaauuaaaacaggga

SEQ ID NO: 486590 - RNA, 23 nt, Artificial Sequence
  Synthetic
auuaagcacaauuaaaacaggga

SEQ ID NO: 486591 - RNA, 24 nt, Artificial Sequence
  Synthetic
uauuaagcacaauuaaaacaggga

SEQ ID NO: 486592 - RNA, 18 nt, Artificial Sequence
  Synthetic
aaaauagggaaacaggga

SEQ ID NO: 486593 - RNA, 19 nt, Artificial Sequence
  Synthetic
gaaaauagggaaacaggga

SEQ ID NO: 486594 - RNA, 20 nt, Artificial Sequence
  Synthetic
agaaaauagggaaacaggga

SEQ ID NO: 486595 - RNA, 21 nt, Artificial Sequence
  Synthetic
gagaaaauagggaaacaggga

SEQ ID NO: 486596 - RNA, 22 nt, Artificial Sequence
  Synthetic
agagaaaauagggaaacaggga

SEQ ID NO: 486597 - RNA, 23 nt, Artificial Sequence
  Synthetic
gagagaaaauagggaaacaggga

SEQ ID NO: 486598 - RNA, 24 nt, Artificial Sequence
  Synthetic
ugagagaaaauagggaaacaggga

SEQ ID NO: 486599 - RNA, 18 nt, Artificial Sequence
  Synthetic
aacacauggacacaggga

SEQ ID NO: 486600 - RNA, 19 nt, Artificial Sequence
  Synthetic
gaacacauggacacaggga

SEQ ID NO: 486601 - RNA, 20 nt, Artificial Sequence
  Synthetic
agaacacauggacacaggga

SEQ ID NO: 486602 - RNA, 21 nt, Artificial Sequence
  Synthetic
gagaacacauggacacaggga

SEQ ID NO: 486603 - RNA, 22 nt, Artificial Sequence
  Synthetic
ugagaacacauggacacaggga

SEQ ID NO: 486604 - RNA, 23 nt, Artificial Sequence
  Synthetic
augagaacacauggacacaggga

SEQ ID NO: 486605 - RNA, 24 nt, Artificial Sequence
  Synthetic
aaugagaacacauggacacaggga

SEQ ID NO: 486606 - RNA, 23 nt, Artificial Sequence
  Synthetic
gugagaacacauggacacaggga

SEQ ID NO: 486607 - RNA, 24 nt, Artificial Sequence
  Synthetic
agugagaacacauggacacaggga

SEQ ID NO: 486608 - RNA, 18 nt, Artificial Sequence
  Synthetic
aacauauggacacaggga

SEQ ID NO: 486609 - RNA, 19 nt, Artificial Sequence
  Synthetic
aaacauauggacacaggga

SEQ ID NO: 486610 - RNA, 20 nt, Artificial Sequence
  Synthetic
aaaacauauggacacaggga

SEQ ID NO: 486611 - RNA, 21 nt, Artificial Sequence
  Synthetic
gaaaacauauggacacaggga

SEQ ID NO: 486612 - RNA, 22 nt, Artificial Sequence
  Synthetic
ugaaaacauauggacacaggga

SEQ ID NO: 486613 - RNA, 23 nt, Artificial Sequence
  Synthetic
augaaaacauauggacacaggga

SEQ ID NO: 486614 - RNA, 24 nt, Artificial Sequence
  Synthetic
aaugaaaacauauggacacaggga

SEQ ID NO: 486615 - RNA, 18 nt, Artificial Sequence
  Synthetic
aacccaaagccacaggga

SEQ ID NO: 486616 - RNA, 19 nt, Artificial Sequence
  Synthetic
aaacccaaagccacaggga

SEQ ID NO: 486617 - RNA, 20 nt, Artificial Sequence
  Synthetic
aaaacccaaagccacaggga

SEQ ID NO: 486618 - RNA, 21 nt, Artificial Sequence
  Synthetic
aaaaacccaaagccacaggga

SEQ ID NO: 486619 - RNA, 22 nt, Artificial Sequence
  Synthetic
aaaaaacccaaagccacaggga

SEQ ID NO: 486620 - RNA, 23 nt, Artificial Sequence
  Synthetic
aaaaaaacccaaagccacaggga

SEQ ID NO: 486621 - RNA, 24 nt, Artificial Sequence
  Synthetic
caaaaaaacccaaagccacaggga

SEQ ID NO: 486622 - RNA, 18 nt, Artificial Sequence
  Synthetic
gagugacagagacaggga

SEQ ID NO: 486623 - RNA, 19 nt, Artificial Sequence
  Synthetic
agagugacagagacaggga

SEQ ID NO: 486624 - RNA, 20 nt, Artificial Sequence
  Synthetic
gagagugacagagacaggga

SEQ ID NO: 486625 - RNA, 21 nt, Artificial Sequence
  Synthetic
ggagagugacagagacaggga

SEQ ID NO: 486626 - RNA, 22 nt, Artificial Sequence
  Synthetic
aggagagugacagagacaggga

SEQ ID NO: 486627 - RNA, 23 nt, Artificial Sequence
  Synthetic
aaggagagugacagagacaggga

SEQ ID NO: 486628 - RNA, 24 nt, Artificial Sequence
  Synthetic
aaaggagagugacagagacaggga

SEQ ID NO: 486629 - RNA, 18 nt, Artificial Sequence
  Synthetic
guuguuagaagccaggga

SEQ ID NO: 486630 - RNA, 19 nt, Artificial Sequence
  Synthetic
aguuguuagaagccaggga

SEQ ID NO: 486631 - RNA, 20 nt, Artificial Sequence
  Synthetic
aaguuguuagaagccaggga

SEQ ID NO: 486632 - RNA, 21 nt, Artificial Sequence
  Synthetic
gaaguuguuagaagccaggga

SEQ ID NO: 486633 - RNA, 22 nt, Artificial Sequence
  Synthetic
ggaaguuguuagaagccaggga

SEQ ID NO: 486634 - RNA, 23 nt, Artificial Sequence
  Synthetic
gggaaguuguuagaagccaggga

SEQ ID NO: 486635 - RNA, 24 nt, Artificial Sequence
  Synthetic
agggaaguuguuagaagccaggga

SEQ ID NO: 486636 - RNA, 18 nt, Artificial Sequence
  Synthetic
gcaaaacuaaagcaggga

SEQ ID NO: 486637 - RNA, 19 nt, Artificial Sequence
  Synthetic
agcaaaacuaaagcaggga

SEQ ID NO: 486638 - RNA, 20 nt, Artificial Sequence
  Synthetic
gagcaaaacuaaagcaggga

SEQ ID NO: 486639 - RNA, 21 nt, Artificial Sequence
  Synthetic
ggagcaaaacuaaagcaggga

SEQ ID NO: 486640 - RNA, 22 nt, Artificial Sequence
  Synthetic
aggagcaaaacuaaagcaggga

SEQ ID NO: 486641 - RNA, 23 nt, Artificial Sequence
  Synthetic
gaggagcaaaacuaaagcaggga

SEQ ID NO: 486642 - RNA, 24 nt, Artificial Sequence
  Synthetic
ugaggagcaaaacuaaagcaggga

SEQ ID NO: 486643 - RNA, 18 nt, Artificial Sequence
  Synthetic
uuuugucucuggcaggga

SEQ ID NO: 486644 - RNA, 19 nt, Artificial Sequence
  Synthetic
auuuugucucuggcaggga

SEQ ID NO: 486645 - RNA, 20 nt, Artificial Sequence
  Synthetic
cauuuugucucuggcaggga

SEQ ID NO: 486646 - RNA, 21 nt, Artificial Sequence
  Synthetic
acauuuugucucuggcaggga

SEQ ID NO: 486647 - RNA, 22 nt, Artificial Sequence
  Synthetic
aacauuuugucucuggcaggga

SEQ ID NO: 486648 - RNA, 23 nt, Artificial Sequence
  Synthetic
aaacauuuugucucuggcaggga

SEQ ID NO: 486649 - RNA, 24 nt, Artificial Sequence
  Synthetic
caaacauuuugucucuggcaggga

SEQ ID NO: 486650 - RNA, 18 nt, Artificial Sequence
  Synthetic
aagaggcccuugcaggga

SEQ ID NO: 486651 - RNA, 19 nt, Artificial Sequence
  Synthetic
aaagaggcccuugcaggga

SEQ ID NO: 486652 - RNA, 20 nt, Artificial Sequence
  Synthetic
caaagaggcccuugcaggga

SEQ ID NO: 486653 - RNA, 21 nt, Artificial Sequence
  Synthetic
ccaaagaggcccuugcaggga

SEQ ID NO: 486654 - RNA, 22 nt, Artificial Sequence
  Synthetic
cccaaagaggcccuugcaggga

SEQ ID NO: 486655 - RNA, 23 nt, Artificial Sequence
  Synthetic
gcccaaagaggcccuugcaggga

SEQ ID NO: 486656 - RNA, 24 nt, Artificial Sequence
  Synthetic
ugcccaaagaggcccuugcaggga

SEQ ID NO: 486657 - RNA, 18 nt, Artificial Sequence
  Synthetic
aaagaagaaagucaggga

SEQ ID NO: 486658 - RNA, 19 nt, Artificial Sequence
  Synthetic
gaaagaagaaagucaggga

SEQ ID NO: 486659 - RNA, 20 nt, Artificial Sequence
  Synthetic
ggaaagaagaaagucaggga

SEQ ID NO: 486660 - RNA, 21 nt, Artificial Sequence
  Synthetic
aggaaagaagaaagucaggga

SEQ ID NO: 486661 - RNA, 22 nt, Artificial Sequence
  Synthetic
aaggaaagaagaaagucaggga

SEQ ID NO: 486662 - RNA, 23 nt, Artificial Sequence
  Synthetic
gaaggaaagaagaaagucaggga

SEQ ID NO: 486663 - RNA, 24 nt, Artificial Sequence
  Synthetic
agaaggaaagaagaaagucaggga

SEQ ID NO: 486664 - RNA, 18 nt, Artificial Sequence
  Synthetic
gauuaacggggucaggga

SEQ ID NO: 486665 - RNA, 19 nt, Artificial Sequence
  Synthetic
ggauuaacggggucaggga

SEQ ID NO: 486666 - RNA, 20 nt, Artificial Sequence
  Synthetic
gggauuaacggggucaggga

SEQ ID NO: 486667 - RNA, 21 nt, Artificial Sequence
  Synthetic
ugggauuaacggggucaggga

SEQ ID NO: 486668 - RNA, 22 nt, Artificial Sequence
  Synthetic
cugggauuaacggggucaggga

SEQ ID NO: 486669 - RNA, 23 nt, Artificial Sequence
  Synthetic
acugggauuaacggggucaggga

SEQ ID NO: 486670 - RNA, 24 nt, Artificial Sequence
  Synthetic
aacugggauuaacggggucaggga

SEQ ID NO: 486671 - RNA, 18 nt, Artificial Sequence
  Synthetic
guuucuuacauucaggga

SEQ ID NO: 486672 - RNA, 19 nt, Artificial Sequence
  Synthetic
uguuucuuacauucaggga

SEQ ID NO: 486673 - RNA, 20 nt, Artificial Sequence
  Synthetic
cuguuucuuacauucaggga

SEQ ID NO: 486674 - RNA, 21 nt, Artificial Sequence
  Synthetic
ccuguuucuuacauucaggga

SEQ ID NO: 486675 - RNA, 22 nt, Artificial Sequence
  Synthetic
accuguuucuuacauucaggga

SEQ ID NO: 486676 - RNA, 23 nt, Artificial Sequence
  Synthetic
caccuguuucuuacauucaggga

SEQ ID NO: 486677 - RNA, 24 nt, Artificial Sequence
  Synthetic
gcaccuguuucuuacauucaggga

SEQ ID NO: 486678 - RNA, 18 nt, Artificial Sequence
  Synthetic
cguauauccuuucaggga

SEQ ID NO: 486679 - RNA, 19 nt, Artificial Sequence
  Synthetic
ucguauauccuuucaggga

SEQ ID NO: 486680 - RNA, 20 nt, Artificial Sequence
  Synthetic
uucguauauccuuucaggga

SEQ ID NO: 486681 - RNA, 21 nt, Artificial Sequence
  Synthetic
uuucguauauccuuucaggga

SEQ ID NO: 486682 - RNA, 22 nt, Artificial Sequence
  Synthetic
cuuucguauauccuuucaggga

SEQ ID NO: 486683 - RNA, 23 nt, Artificial Sequence
  Synthetic
ucuuucguauauccuuucaggga

SEQ ID NO: 486684 - RNA, 24 nt, Artificial Sequence
  Synthetic
gucuuucguauauccuuucaggga

SEQ ID NO: 486685 - RNA, 18 nt, Artificial Sequence
  Synthetic
aaaaaaaagaaagaggga

SEQ ID NO: 486686 - RNA, 19 nt, Artificial Sequence
  Synthetic
gaaaaaaaagaaagaggga

SEQ ID NO: 486687 - RNA, 20 nt, Artificial Sequence
  Synthetic
agaaaaaaaagaaagaggga

SEQ ID NO: 486688 - RNA, 21 nt, Artificial Sequence
  Synthetic
aagaaaaaaaagaaagaggga

SEQ ID NO: 486689 - RNA, 22 nt, Artificial Sequence
  Synthetic
aaagaaaaaaaagaaagaggga

SEQ ID NO: 486690 - RNA, 23 nt, Artificial Sequence
  Synthetic
aaaagaaaaaaaagaaagaggga

SEQ ID NO: 486691 - RNA, 24 nt, Artificial Sequence
  Synthetic
aaaaagaaaaaaaagaaagaggga

SEQ ID NO: 486692 - RNA, 18 nt, Artificial Sequence
  Synthetic
aaagcagugaaagaggga

SEQ ID NO: 486693 - RNA, 19 nt, Artificial Sequence
  Synthetic
caaagcagugaaagaggga

SEQ ID NO: 486694 - RNA, 20 nt, Artificial Sequence
  Synthetic
ccaaagcagugaaagaggga

SEQ ID NO: 486695 - RNA, 21 nt, Artificial Sequence
  Synthetic
cccaaagcagugaaagaggga

SEQ ID NO: 486696 - RNA, 22 nt, Artificial Sequence
  Synthetic
gcccaaagcagugaaagaggga

SEQ ID NO: 486697 - RNA, 23 nt, Artificial Sequence
  Synthetic
ugcccaaagcagugaaagaggga

SEQ ID NO: 486698 - RNA, 24 nt, Artificial Sequence
  Synthetic
uugcccaaagcagugaaagaggga

SEQ ID NO: 486699 - RNA, 18 nt, Artificial Sequence
  Synthetic
aacaugaauaaagaggga

SEQ ID NO: 486700 - RNA, 19 nt, Artificial Sequence
  Synthetic
uaacaugaauaaagaggga

SEQ ID NO: 486701 - RNA, 20 nt, Artificial Sequence
  Synthetic
guaacaugaauaaagaggga

SEQ ID NO: 486702 - RNA, 21 nt, Artificial Sequence
  Synthetic
uguaacaugaauaaagaggga

SEQ ID NO: 486703 - RNA, 22 nt, Artificial Sequence
  Synthetic
auguaacaugaauaaagaggga

SEQ ID NO: 486704 - RNA, 23 nt, Artificial Sequence
  Synthetic
aauguaacaugaauaaagaggga

SEQ ID NO: 486705 - RNA, 24 nt, Artificial Sequence
  Synthetic
uaauguaacaugaauaaagaggga

SEQ ID NO: 486706 - RNA, 18 nt, Artificial Sequence
  Synthetic
uguguauauacagaggga

SEQ ID NO: 486707 - RNA, 19 nt, Artificial Sequence
  Synthetic
auguguauauacagaggga

SEQ ID NO: 486708 - RNA, 20 nt, Artificial Sequence
  Synthetic
uauguguauauacagaggga

SEQ ID NO: 486709 - RNA, 21 nt, Artificial Sequence
  Synthetic
auauguguauauacagaggga

SEQ ID NO: 486710 - RNA, 22 nt, Artificial Sequence
  Synthetic
gauauguguauauacagaggga

SEQ ID NO: 486711 - RNA, 23 nt, Artificial Sequence
  Synthetic
ggauauguguauauacagaggga

SEQ ID NO: 486712 - RNA, 24 nt, Artificial Sequence
  Synthetic
aggauauguguauauacagaggga

SEQ ID NO: 486713 - RNA, 18 nt, Artificial Sequence
  Synthetic
ccaaaguuagcagaggga

SEQ ID NO: 486714 - RNA, 19 nt, Artificial Sequence
  Synthetic
cccaaaguuagcagaggga

SEQ ID NO: 486715 - RNA, 20 nt, Artificial Sequence
  Synthetic
gcccaaaguuagcagaggga

SEQ ID NO: 486716 - RNA, 21 nt, Artificial Sequence
  Synthetic
agcccaaaguuagcagaggga

SEQ ID NO: 486717 - RNA, 22 nt, Artificial Sequence
  Synthetic
aagcccaaaguuagcagaggga

SEQ ID NO: 486718 - RNA, 23 nt, Artificial Sequence
  Synthetic
uaagcccaaaguuagcagaggga

SEQ ID NO: 486719 - RNA, 24 nt, Artificial Sequence
  Synthetic
cuaagcccaaaguuagcagaggga

SEQ ID NO: 486720 - RNA, 18 nt, Artificial Sequence
  Synthetic
ggagguggugcagaggga

SEQ ID NO: 486721 - RNA, 19 nt, Artificial Sequence
  Synthetic
aggagguggugcagaggga

SEQ ID NO: 486722 - RNA, 20 nt, Artificial Sequence
  Synthetic
aaggagguggugcagaggga

SEQ ID NO: 486723 - RNA, 21 nt, Artificial Sequence
  Synthetic
aaaggagguggugcagaggga

SEQ ID NO: 486724 - RNA, 22 nt, Artificial Sequence
  Synthetic
uaaaggagguggugcagaggga

SEQ ID NO: 486725 - RNA, 23 nt, Artificial Sequence
  Synthetic
guaaaggagguggugcagaggga

SEQ ID NO: 486726 - RNA, 24 nt, Artificial Sequence
  Synthetic
aguaaaggagguggugcagaggga

SEQ ID NO: 486727 - RNA, 21 nt, Artificial Sequence
  Synthetic
agagagagagagagagaggga

SEQ ID NO: 486728 - RNA, 22 nt, Artificial Sequence
  Synthetic
gagagagagagagagagaggga

SEQ ID NO: 486729 - RNA, 23 nt, Artificial Sequence
  Synthetic
ggagagagagagagagagaggga

SEQ ID NO: 486730 - RNA, 24 nt, Artificial Sequence
  Synthetic
gggagagagagagagagagaggga

SEQ ID NO: 486731 - RNA, 21 nt, Artificial Sequence
  Synthetic
ggagagagagagagagaggga

SEQ ID NO: 486732 - RNA, 22 nt, Artificial Sequence
  Synthetic
uggagagagagagagagaggga

SEQ ID NO: 486733 - RNA, 23 nt, Artificial Sequence
  Synthetic
auggagagagagagagagaggga

SEQ ID NO: 486734 - RNA, 24 nt, Artificial Sequence
  Synthetic
uauggagagagagagagagaggga

SEQ ID NO: 486735 - RNA, 18 nt, Artificial Sequence
  Synthetic
gagagagggagagaggga

SEQ ID NO: 486736 - RNA, 19 nt, Artificial Sequence
  Synthetic
agagagagggagagaggga

SEQ ID NO: 486737 - RNA, 20 nt, Artificial Sequence
  Synthetic
gagagagagggagagaggga

SEQ ID NO: 486738 - RNA, 21 nt, Artificial Sequence
  Synthetic
agagagagagggagagaggga

SEQ ID NO: 486739 - RNA, 22 nt, Artificial Sequence
  Synthetic
gagagagagagggagagaggga

SEQ ID NO: 486740 - RNA, 23 nt, Artificial Sequence
  Synthetic
agagagagagagggagagaggga

SEQ ID NO: 486741 - RNA, 24 nt, Artificial Sequence
  Synthetic
gagagagagagagggagagaggga

SEQ ID NO: 486742 - RNA, 19 nt, Artificial Sequence
  Synthetic
ggagagagggagagaggga

SEQ ID NO: 486743 - RNA, 20 nt, Artificial Sequence
  Synthetic
gggagagagggagagaggga

SEQ ID NO: 486744 - RNA, 21 nt, Artificial Sequence
  Synthetic
agggagagagggagagaggga

SEQ ID NO: 486745 - RNA, 22 nt, Artificial Sequence
  Synthetic
gagggagagagggagagaggga

SEQ ID NO: 486746 - RNA, 23 nt, Artificial Sequence
  Synthetic
agagggagagagggagagaggga

SEQ ID NO: 486747 - RNA, 24 nt, Artificial Sequence
  Synthetic
gagagggagagagggagagaggga

SEQ ID NO: 486748 - RNA, 18 nt, Artificial Sequence
  Synthetic
agagaggcaggagaggga

SEQ ID NO: 486749 - RNA, 19 nt, Artificial Sequence
  Synthetic
aagagaggcaggagaggga

SEQ ID NO: 486750 - RNA, 20 nt, Artificial Sequence
  Synthetic
gaagagaggcaggagaggga

SEQ ID NO: 486751 - RNA, 21 nt, Artificial Sequence
  Synthetic
agaagagaggcaggagaggga

SEQ ID NO: 486752 - RNA, 22 nt, Artificial Sequence
  Synthetic
aagaagagaggcaggagaggga

SEQ ID NO: 486753 - RNA, 23 nt, Artificial Sequence
  Synthetic
caagaagagaggcaggagaggga

SEQ ID NO: 486754 - RNA, 24 nt, Artificial Sequence
  Synthetic
gcaagaagagaggcaggagaggga

SEQ ID NO: 486755 - RNA, 18 nt, Artificial Sequence
  Synthetic
cagagacagggagaggga

SEQ ID NO: 486756 - RNA, 19 nt, Artificial Sequence
  Synthetic
acagagacagggagaggga

SEQ ID NO: 486757 - RNA, 20 nt, Artificial Sequence
  Synthetic
gacagagacagggagaggga

SEQ ID NO: 486758 - RNA, 21 nt, Artificial Sequence
  Synthetic
ugacagagacagggagaggga

SEQ ID NO: 486759 - RNA, 22 nt, Artificial Sequence
  Synthetic
gugacagagacagggagaggga

SEQ ID NO: 486760 - RNA, 23 nt, Artificial Sequence
  Synthetic
agugacagagacagggagaggga

SEQ ID NO: 486761 - RNA, 24 nt, Artificial Sequence
  Synthetic
gagugacagagacagggagaggga

SEQ ID NO: 486762 - RNA, 18 nt, Artificial Sequence
  Synthetic
cagggagagggagaggga

SEQ ID NO: 486763 - RNA, 19 nt, Artificial Sequence
  Synthetic
acagggagagggagaggga

SEQ ID NO: 486764 - RNA, 20 nt, Artificial Sequence
  Synthetic
gacagggagagggagaggga

SEQ ID NO: 486765 - RNA, 21 nt, Artificial Sequence
  Synthetic
agacagggagagggagaggga

SEQ ID NO: 486766 - RNA, 22 nt, Artificial Sequence
  Synthetic
gagacagggagagggagaggga

SEQ ID NO: 486767 - RNA, 23 nt, Artificial Sequence
  Synthetic
agagacagggagagggagaggga

SEQ ID NO: 486768 - RNA, 24 nt, Artificial Sequence
  Synthetic
cagagacagggagagggagaggga

SEQ ID NO: 486769 - RNA, 18 nt, Artificial Sequence
  Synthetic
ggagagaguggagaggga

SEQ ID NO: 486770 - RNA, 19 nt, Artificial Sequence
  Synthetic
gggagagaguggagaggga

SEQ ID NO: 486771 - RNA, 20 nt, Artificial Sequence
  Synthetic
agggagagaguggagaggga

SEQ ID NO: 486772 - RNA, 21 nt, Artificial Sequence
  Synthetic
gagggagagaguggagaggga

SEQ ID NO: 486773 - RNA, 22 nt, Artificial Sequence
  Synthetic
agagggagagaguggagaggga

SEQ ID NO: 486774 - RNA, 23 nt, Artificial Sequence
  Synthetic
gagagggagagaguggagaggga

SEQ ID NO: 486775 - RNA, 24 nt, Artificial Sequence
  Synthetic
agagagggagagaguggagaggga

SEQ ID NO: 486776 - RNA, 18 nt, Artificial Sequence
  Synthetic
gcauucuguggagaggga

SEQ ID NO: 486777 - RNA, 19 nt, Artificial Sequence
  Synthetic
agcauucuguggagaggga

SEQ ID NO: 486778 - RNA, 20 nt, Artificial Sequence
  Synthetic
uagcauucuguggagaggga

SEQ ID NO: 486779 - RNA, 21 nt, Artificial Sequence
  Synthetic
auagcauucuguggagaggga

SEQ ID NO: 486780 - RNA, 22 nt, Artificial Sequence
  Synthetic
aauagcauucuguggagaggga

SEQ ID NO: 486781 - RNA, 23 nt, Artificial Sequence
  Synthetic
uaauagcauucuguggagaggga

SEQ ID NO: 486782 - RNA, 24 nt, Artificial Sequence
  Synthetic
auaauagcauucuguggagaggga

SEQ ID NO: 486783 - RNA, 18 nt, Artificial Sequence
  Synthetic
uggggguguggagaggga

SEQ ID NO: 486784 - RNA, 19 nt, Artificial Sequence
  Synthetic
auggggguguggagaggga

SEQ ID NO: 486785 - RNA, 20 nt, Artificial Sequence
  Synthetic
uauggggguguggagaggga

SEQ ID NO: 486786 - RNA, 21 nt, Artificial Sequence
  Synthetic
guauggggguguggagaggga

SEQ ID NO: 486787 - RNA, 22 nt, Artificial Sequence
  Synthetic
gguauggggguguggagaggga

SEQ ID NO: 486788 - RNA, 23 nt, Artificial Sequence
  Synthetic
ggguauggggguguggagaggga

SEQ ID NO: 486789 - RNA, 24 nt, Artificial Sequence
  Synthetic
uggguauggggguguggagaggga

SEQ ID NO: 486790 - RNA, 18 nt, Artificial Sequence
  Synthetic
uaaaucaguugagaggga

SEQ ID NO: 486791 - RNA, 19 nt, Artificial Sequence
  Synthetic
guaaaucaguugagaggga

SEQ ID NO: 486792 - RNA, 20 nt, Artificial Sequence
  Synthetic
aguaaaucaguugagaggga

SEQ ID NO: 486793 - RNA, 21 nt, Artificial Sequence
  Synthetic
aaguaaaucaguugagaggga

SEQ ID NO: 486794 - RNA, 22 nt, Artificial Sequence
  Synthetic
caaguaaaucaguugagaggga

SEQ ID NO: 486795 - RNA, 23 nt, Artificial Sequence
  Synthetic
acaaguaaaucaguugagaggga

SEQ ID NO: 486796 - RNA, 24 nt, Artificial Sequence
  Synthetic
gacaaguaaaucaguugagaggga

SEQ ID NO: 486797 - RNA, 18 nt, Artificial Sequence
  Synthetic
augggaagaaacgaggga

SEQ ID NO: 486798 - RNA, 19 nt, Artificial Sequence
  Synthetic
caugggaagaaacgaggga

SEQ ID NO: 486799 - RNA, 20 nt, Artificial Sequence
  Synthetic
acaugggaagaaacgaggga

SEQ ID NO: 486800 - RNA, 21 nt, Artificial Sequence
  Synthetic
aacaugggaagaaacgaggga

SEQ ID NO: 486801 - RNA, 22 nt, Artificial Sequence
  Synthetic
gaacaugggaagaaacgaggga

SEQ ID NO: 486802 - RNA, 23 nt, Artificial Sequence
  Synthetic
ugaacaugggaagaaacgaggga

SEQ ID NO: 486803 - RNA, 24 nt, Artificial Sequence
  Synthetic
augaacaugggaagaaacgaggga

SEQ ID NO: 486804 - RNA, 18 nt, Artificial Sequence
  Synthetic
ggagggaggaaggaggga

SEQ ID NO: 486805 - RNA, 19 nt, Artificial Sequence
  Synthetic
gggagggaggaaggaggga

SEQ ID NO: 486806 - RNA, 20 nt, Artificial Sequence
  Synthetic
agggagggaggaaggaggga

SEQ ID NO: 486807 - RNA, 21 nt, Artificial Sequence
  Synthetic
gagggagggaggaaggaggga

SEQ ID NO: 486808 - RNA, 22 nt, Artificial Sequence
  Synthetic
ggagggagggaggaaggaggga

SEQ ID NO: 486809 - RNA, 23 nt, Artificial Sequence
  Synthetic
gggagggagggaggaaggaggga

SEQ ID NO: 486810 - RNA, 24 nt, Artificial Sequence
  Synthetic
agggagggagggaggaaggaggga

SEQ ID NO: 486811 - RNA, 18 nt, Artificial Sequence
  Synthetic
auggaaagggaggaggga

SEQ ID NO: 486812 - RNA, 19 nt, Artificial Sequence
  Synthetic
aauggaaagggaggaggga

SEQ ID NO: 486813 - RNA, 20 nt, Artificial Sequence
  Synthetic
gaauggaaagggaggaggga

SEQ ID NO: 486814 - RNA, 21 nt, Artificial Sequence
  Synthetic
ugaauggaaagggaggaggga

SEQ ID NO: 486815 - RNA, 22 nt, Artificial Sequence
  Synthetic
uugaauggaaagggaggaggga

SEQ ID NO: 486816 - RNA, 23 nt, Artificial Sequence
  Synthetic
guugaauggaaagggaggaggga

SEQ ID NO: 486817 - RNA, 24 nt, Artificial Sequence
  Synthetic
uguugaauggaaagggaggaggga

SEQ ID NO: 486818 - RNA, 18 nt, Artificial Sequence
  Synthetic
uacuagagggaggaggga

SEQ ID NO: 486819 - RNA, 19 nt, Artificial Sequence
  Synthetic
cuacuagagggaggaggga

SEQ ID NO: 486820 - RNA, 20 nt, Artificial Sequence
  Synthetic
acuacuagagggaggaggga

SEQ ID NO: 486821 - RNA, 21 nt, Artificial Sequence
  Synthetic
gacuacuagagggaggaggga

SEQ ID NO: 486822 - RNA, 22 nt, Artificial Sequence
  Synthetic
ggacuacuagagggaggaggga

SEQ ID NO: 486823 - RNA, 23 nt, Artificial Sequence
  Synthetic
gggacuacuagagggaggaggga

SEQ ID NO: 486824 - RNA, 24 nt, Artificial Sequence
  Synthetic
ggggacuacuagagggaggaggga

SEQ ID NO: 486825 - RNA, 18 nt, Artificial Sequence
  Synthetic
agaaugagugaggaggga

SEQ ID NO: 486826 - RNA, 19 nt, Artificial Sequence
  Synthetic
gagaaugagugaggaggga

SEQ ID NO: 486827 - RNA, 20 nt, Artificial Sequence
  Synthetic
ggagaaugagugaggaggga

SEQ ID NO: 486828 - RNA, 21 nt, Artificial Sequence
  Synthetic
aggagaaugagugaggaggga

SEQ ID NO: 486829 - RNA, 22 nt, Artificial Sequence
  Synthetic
aaggagaaugagugaggaggga

SEQ ID NO: 486830 - RNA, 23 nt, Artificial Sequence
  Synthetic
gaaggagaaugagugaggaggga

SEQ ID NO: 486831 - RNA, 24 nt, Artificial Sequence
  Synthetic
agaaggagaaugagugaggaggga

SEQ ID NO: 486832 - RNA, 18 nt, Artificial Sequence
  Synthetic
ggagaacgauaggaggga

SEQ ID NO: 486833 - RNA, 19 nt, Artificial Sequence
  Synthetic
aggagaacgauaggaggga

SEQ ID NO: 486834 - RNA, 20 nt, Artificial Sequence
  Synthetic
aaggagaacgauaggaggga

SEQ ID NO: 486835 - RNA, 21 nt, Artificial Sequence
  Synthetic
gaaggagaacgauaggaggga

SEQ ID NO: 486836 - RNA, 22 nt, Artificial Sequence
  Synthetic
agaaggagaacgauaggaggga

SEQ ID NO: 486837 - RNA, 23 nt, Artificial Sequence
  Synthetic
gagaaggagaacgauaggaggga

SEQ ID NO: 486838 - RNA, 24 nt, Artificial Sequence
  Synthetic
ggagaaggagaacgauaggaggga

SEQ ID NO: 486839 - RNA, 18 nt, Artificial Sequence
  Synthetic
aaaggggaaagggaggga

SEQ ID NO: 486840 - RNA, 19 nt, Artificial Sequence
  Synthetic
aaaaggggaaagggaggga

SEQ ID NO: 486841 - RNA, 20 nt, Artificial Sequence
  Synthetic
aaaaaggggaaagggaggga

SEQ ID NO: 486842 - RNA, 21 nt, Artificial Sequence
  Synthetic
aaaaaaggggaaagggaggga

SEQ ID NO: 486843 - RNA, 22 nt, Artificial Sequence
  Synthetic
aaaaaaaggggaaagggaggga

SEQ ID NO: 486844 - RNA, 23 nt, Artificial Sequence
  Synthetic
caaaaaaaggggaaagggaggga

SEQ ID NO: 486845 - RNA, 24 nt, Artificial Sequence
  Synthetic
acaaaaaaaggggaaagggaggga

SEQ ID NO: 486846 - RNA, 18 nt, Artificial Sequence
  Synthetic
aagaaagucagggaggga

SEQ ID NO: 486847 - RNA, 19 nt, Artificial Sequence
  Synthetic
gaagaaagucagggaggga

SEQ ID NO: 486848 - RNA, 20 nt, Artificial Sequence
  Synthetic
agaagaaagucagggaggga

SEQ ID NO: 486849 - RNA, 21 nt, Artificial Sequence
  Synthetic
aagaagaaagucagggaggga

SEQ ID NO: 486850 - RNA, 22 nt, Artificial Sequence
  Synthetic
aaagaagaaagucagggaggga

SEQ ID NO: 486851 - RNA, 23 nt, Artificial Sequence
  Synthetic
gaaagaagaaagucagggaggga

SEQ ID NO: 486852 - RNA, 24 nt, Artificial Sequence
  Synthetic
ggaaagaagaaagucagggaggga

SEQ ID NO: 486853 - RNA, 18 nt, Artificial Sequence
  Synthetic
aaaagaaagagggaggga

SEQ ID NO: 486854 - RNA, 19 nt, Artificial Sequence
  Synthetic
aaaaagaaagagggaggga

SEQ ID NO: 486855 - RNA, 20 nt, Artificial Sequence
  Synthetic
aaaaaagaaagagggaggga

SEQ ID NO: 486856 - RNA, 21 nt, Artificial Sequence
  Synthetic
aaaaaaagaaagagggaggga

SEQ ID NO: 486857 - RNA, 22 nt, Artificial Sequence
  Synthetic
aaaaaaaagaaagagggaggga

SEQ ID NO: 486858 - RNA, 23 nt, Artificial Sequence
  Synthetic
gaaaaaaaagaaagagggaggga

SEQ ID NO: 486859 - RNA, 24 nt, Artificial Sequence
  Synthetic
agaaaaaaaagaaagagggaggga

SEQ ID NO: 486860 - RNA, 18 nt, Artificial Sequence
  Synthetic
gagagagagagggaggga

SEQ ID NO: 486861 - RNA, 19 nt, Artificial Sequence
  Synthetic
agagagagagagggaggga

SEQ ID NO: 486862 - RNA, 20 nt, Artificial Sequence
  Synthetic
gagagagagagagggaggga

SEQ ID NO: 486863 - RNA, 21 nt, Artificial Sequence
  Synthetic
agagagagagagagggaggga

SEQ ID NO: 486864 - RNA, 22 nt, Artificial Sequence
  Synthetic
gagagagagagagagggaggga

SEQ ID NO: 486865 - RNA, 23 nt, Artificial Sequence
  Synthetic
agagagagagagagagggaggga

SEQ ID NO: 486866 - RNA, 24 nt, Artificial Sequence
  Synthetic
gagagagagagagagagggaggga

SEQ ID NO: 486867 - RNA, 18 nt, Artificial Sequence
  Synthetic
agaguggagagggaggga

SEQ ID NO: 486868 - RNA, 19 nt, Artificial Sequence
  Synthetic
gagaguggagagggaggga

SEQ ID NO: 486869 - RNA, 20 nt, Artificial Sequence
  Synthetic
agagaguggagagggaggga

SEQ ID NO: 486870 - RNA, 21 nt, Artificial Sequence
  Synthetic
gagagaguggagagggaggga

SEQ ID NO: 486871 - RNA, 22 nt, Artificial Sequence
  Synthetic
ggagagaguggagagggaggga

SEQ ID NO: 486872 - RNA, 23 nt, Artificial Sequence
  Synthetic
gggagagaguggagagggaggga

SEQ ID NO: 486873 - RNA, 24 nt, Artificial Sequence
  Synthetic
agggagagaguggagagggaggga

SEQ ID NO: 486874 - RNA, 18 nt, Artificial Sequence
  Synthetic
ggaggaaggagggaggga

SEQ ID NO: 486875 - RNA, 19 nt, Artificial Sequence
  Synthetic
gggaggaaggagggaggga

SEQ ID NO: 486876 - RNA, 20 nt, Artificial Sequence
  Synthetic
agggaggaaggagggaggga

SEQ ID NO: 486877 - RNA, 21 nt, Artificial Sequence
  Synthetic
gagggaggaaggagggaggga

SEQ ID NO: 486878 - RNA, 22 nt, Artificial Sequence
  Synthetic
ggagggaggaaggagggaggga

SEQ ID NO: 486879 - RNA, 23 nt, Artificial Sequence
  Synthetic
gggagggaggaaggagggaggga

SEQ ID NO: 486880 - RNA, 24 nt, Artificial Sequence
  Synthetic
agggagggaggaaggagggaggga

SEQ ID NO: 486881 - RNA, 18 nt, Artificial Sequence
  Synthetic
aaagggaggagggaggga

SEQ ID NO: 486882 - RNA, 19 nt, Artificial Sequence
  Synthetic
gaaagggaggagggaggga

SEQ ID NO: 486883 - RNA, 20 nt, Artificial Sequence
  Synthetic
ggaaagggaggagggaggga

SEQ ID NO: 486884 - RNA, 21 nt, Artificial Sequence
  Synthetic
uggaaagggaggagggaggga

SEQ ID NO: 486885 - RNA, 22 nt, Artificial Sequence
  Synthetic
auggaaagggaggagggaggga

SEQ ID NO: 486886 - RNA, 23 nt, Artificial Sequence
  Synthetic
aauggaaagggaggagggaggga

SEQ ID NO: 486887 - RNA, 24 nt, Artificial Sequence
  Synthetic
gaauggaaagggaggagggaggga

SEQ ID NO: 486888 - RNA, 18 nt, Artificial Sequence
  Synthetic
gggaaagggagggaggga

SEQ ID NO: 486889 - RNA, 19 nt, Artificial Sequence
  Synthetic
ggggaaagggagggaggga

SEQ ID NO: 486890 - RNA, 20 nt, Artificial Sequence
  Synthetic
aggggaaagggagggaggga

SEQ ID NO: 486891 - RNA, 21 nt, Artificial Sequence
  Synthetic
aaggggaaagggagggaggga

SEQ ID NO: 486892 - RNA, 22 nt, Artificial Sequence
  Synthetic
aaaggggaaagggagggaggga

SEQ ID NO: 486893 - RNA, 23 nt, Artificial Sequence
  Synthetic
aaaaggggaaagggagggaggga

SEQ ID NO: 486894 - RNA, 24 nt, Artificial Sequence
  Synthetic
aaaaaggggaaagggagggaggga

SEQ ID NO: 486895 - RNA, 18 nt, Artificial Sequence
  Synthetic
aagucagggagggaggga

SEQ ID NO: 486896 - RNA, 19 nt, Artificial Sequence
  Synthetic
aaagucagggagggaggga

SEQ ID NO: 486897 - RNA, 20 nt, Artificial Sequence
  Synthetic
gaaagucagggagggaggga

SEQ ID NO: 486898 - RNA, 21 nt, Artificial Sequence
  Synthetic
agaaagucagggagggaggga

SEQ ID NO: 486899 - RNA, 22 nt, Artificial Sequence
  Synthetic
aagaaagucagggagggaggga

SEQ ID NO: 486900 - RNA, 23 nt, Artificial Sequence
  Synthetic
gaagaaagucagggagggaggga

SEQ ID NO: 486901 - RNA, 24 nt, Artificial Sequence
  Synthetic
agaagaaagucagggagggaggga

SEQ ID NO: 486902 - RNA, 18 nt, Artificial Sequence
  Synthetic
uggagagggagggaggga

SEQ ID NO: 486903 - RNA, 19 nt, Artificial Sequence
  Synthetic
guggagagggagggaggga

SEQ ID NO: 486904 - RNA, 20 nt, Artificial Sequence
  Synthetic
aguggagagggagggaggga

SEQ ID NO: 486905 - RNA, 21 nt, Artificial Sequence
  Synthetic
gaguggagagggagggaggga

SEQ ID NO: 486906 - RNA, 22 nt, Artificial Sequence
  Synthetic
agaguggagagggagggaggga

SEQ ID NO: 486907 - RNA, 23 nt, Artificial Sequence
  Synthetic
gagaguggagagggagggaggga

SEQ ID NO: 486908 - RNA, 24 nt, Artificial Sequence
  Synthetic
agagaguggagagggagggaggga

SEQ ID NO: 486909 - RNA, 18 nt, Artificial Sequence
  Synthetic
gaaggagggagggaggga

SEQ ID NO: 486910 - RNA, 19 nt, Artificial Sequence
  Synthetic
ggaaggagggagggaggga

SEQ ID NO: 486911 - RNA, 20 nt, Artificial Sequence
  Synthetic
aggaaggagggagggaggga

SEQ ID NO: 486912 - RNA, 21 nt, Artificial Sequence
  Synthetic
gaggaaggagggagggaggga

SEQ ID NO: 486913 - RNA, 22 nt, Artificial Sequence
  Synthetic
ggaggaaggagggagggaggga

SEQ ID NO: 486914 - RNA, 23 nt, Artificial Sequence
  Synthetic
gggaggaaggagggagggaggga

SEQ ID NO: 486915 - RNA, 24 nt, Artificial Sequence
  Synthetic
agggaggaaggagggagggaggga

SEQ ID NO: 486916 - RNA, 18 nt, Artificial Sequence
  Synthetic
ugugagagaggggaggga

SEQ ID NO: 486917 - RNA, 19 nt, Artificial Sequence
  Synthetic
gugugagagaggggaggga

SEQ ID NO: 486918 - RNA, 20 nt, Artificial Sequence
  Synthetic
ugugugagagaggggaggga

SEQ ID NO: 486919 - RNA, 21 nt, Artificial Sequence
  Synthetic
augugugagagaggggaggga

SEQ ID NO: 486920 - RNA, 22 nt, Artificial Sequence
  Synthetic
aaugugugagagaggggaggga

SEQ ID NO: 486921 - RNA, 23 nt, Artificial Sequence
  Synthetic
uaaugugugagagaggggaggga

SEQ ID NO: 486922 - RNA, 24 nt, Artificial Sequence
  Synthetic
cuaaugugugagagaggggaggga

SEQ ID NO: 486923 - RNA, 18 nt, Artificial Sequence
  Synthetic
ggaaggagaggggaggga

SEQ ID NO: 486924 - RNA, 19 nt, Artificial Sequence
  Synthetic
gggaaggagaggggaggga

SEQ ID NO: 486925 - RNA, 20 nt, Artificial Sequence
  Synthetic
agggaaggagaggggaggga

SEQ ID NO: 486926 - RNA, 21 nt, Artificial Sequence
  Synthetic
aagggaaggagaggggaggga

SEQ ID NO: 486927 - RNA, 22 nt, Artificial Sequence
  Synthetic
gaagggaaggagaggggaggga

SEQ ID NO: 486928 - RNA, 23 nt, Artificial Sequence
  Synthetic
ggaagggaaggagaggggaggga

SEQ ID NO: 486929 - RNA, 24 nt, Artificial Sequence
  Synthetic
gggaagggaaggagaggggaggga

SEQ ID NO: 486930 - RNA, 18 nt, Artificial Sequence
  Synthetic
uacuagaguggggaggga

SEQ ID NO: 486931 - RNA, 19 nt, Artificial Sequence
  Synthetic
cuacuagaguggggaggga

SEQ ID NO: 486932 - RNA, 20 nt, Artificial Sequence
  Synthetic
acuacuagaguggggaggga

SEQ ID NO: 486933 - RNA, 21 nt, Artificial Sequence
  Synthetic
gacuacuagaguggggaggga

SEQ ID NO: 486934 - RNA, 22 nt, Artificial Sequence
  Synthetic
ggacuacuagaguggggaggga

SEQ ID NO: 486935 - RNA, 23 nt, Artificial Sequence
  Synthetic
aggacuacuagaguggggaggga

SEQ ID NO: 486936 - RNA, 24 nt, Artificial Sequence
  Synthetic
gaggacuacuagaguggggaggga

SEQ ID NO: 486937 - RNA, 18 nt, Artificial Sequence
  Synthetic
ugugugucccuggaggga

SEQ ID NO: 486938 - RNA, 19 nt, Artificial Sequence
  Synthetic
gugugugucccuggaggga

SEQ ID NO: 486939 - RNA, 20 nt, Artificial Sequence
  Synthetic
agugugugucccuggaggga

SEQ ID NO: 486940 - RNA, 21 nt, Artificial Sequence
  Synthetic
cagugugugucccuggaggga

SEQ ID NO: 486941 - RNA, 22 nt, Artificial Sequence
  Synthetic
ccagugugugucccuggaggga

SEQ ID NO: 486942 - RNA, 23 nt, Artificial Sequence
  Synthetic
accagugugugucccuggaggga

SEQ ID NO: 486943 - RNA, 24 nt, Artificial Sequence
  Synthetic
uaccagugugugucccuggaggga

SEQ ID NO: 486944 - RNA, 18 nt, Artificial Sequence
  Synthetic
aacauagauagugaggga

SEQ ID NO: 486945 - RNA, 19 nt, Artificial Sequence
  Synthetic
aaacauagauagugaggga

SEQ ID NO: 486946 - RNA, 20 nt, Artificial Sequence
  Synthetic
uaaacauagauagugaggga

SEQ ID NO: 486947 - RNA, 21 nt, Artificial Sequence
  Synthetic
cuaaacauagauagugaggga

SEQ ID NO: 486948 - RNA, 22 nt, Artificial Sequence
  Synthetic
acuaaacauagauagugaggga

SEQ ID NO: 486949 - RNA, 23 nt, Artificial Sequence
  Synthetic
uacuaaacauagauagugaggga

SEQ ID NO: 486950 - RNA, 24 nt, Artificial Sequence
  Synthetic
guacuaaacauagauagugaggga

SEQ ID NO: 486951 - RNA, 18 nt, Artificial Sequence
  Synthetic
uugugagguagugaggga

SEQ ID NO: 486952 - RNA, 19 nt, Artificial Sequence
  Synthetic
uuugugagguagugaggga

SEQ ID NO: 486953 - RNA, 20 nt, Artificial Sequence
  Synthetic
uuuugugagguagugaggga

SEQ ID NO: 486954 - RNA, 21 nt, Artificial Sequence
  Synthetic
uuuuugugagguagugaggga

SEQ ID NO: 486955 - RNA, 22 nt, Artificial Sequence
  Synthetic
cuuuuugugagguagugaggga

SEQ ID NO: 486956 - RNA, 23 nt, Artificial Sequence
  Synthetic
acuuuuugugagguagugaggga

SEQ ID NO: 486957 - RNA, 24 nt, Artificial Sequence
  Synthetic
aacuuuuugugagguagugaggga

SEQ ID NO: 486958 - RNA, 18 nt, Artificial Sequence
  Synthetic
aagaacacacaauaggga

SEQ ID NO: 486959 - RNA, 19 nt, Artificial Sequence
  Synthetic
caagaacacacaauaggga

SEQ ID NO: 486960 - RNA, 20 nt, Artificial Sequence
  Synthetic
gcaagaacacacaauaggga

SEQ ID NO: 486961 - RNA, 21 nt, Artificial Sequence
  Synthetic
agcaagaacacacaauaggga

SEQ ID NO: 486962 - RNA, 22 nt, Artificial Sequence
  Synthetic
uagcaagaacacacaauaggga

SEQ ID NO: 486963 - RNA, 23 nt, Artificial Sequence
  Synthetic
guagcaagaacacacaauaggga

SEQ ID NO: 486964 - RNA, 24 nt, Artificial Sequence
  Synthetic
gguagcaagaacacacaauaggga

SEQ ID NO: 486965 - RNA, 18 nt, Artificial Sequence
  Synthetic
augaaagcaggauaggga

SEQ ID NO: 486966 - RNA, 19 nt, Artificial Sequence
  Synthetic
aaugaaagcaggauaggga

SEQ ID NO: 486967 - RNA, 20 nt, Artificial Sequence
  Synthetic
gaaugaaagcaggauaggga

SEQ ID NO: 486968 - RNA, 21 nt, Artificial Sequence
  Synthetic
agaaugaaagcaggauaggga

SEQ ID NO: 486969 - RNA, 22 nt, Artificial Sequence
  Synthetic
aagaaugaaagcaggauaggga

SEQ ID NO: 486970 - RNA, 23 nt, Artificial Sequence
  Synthetic
gaagaaugaaagcaggauaggga

SEQ ID NO: 486971 - RNA, 24 nt, Artificial Sequence
  Synthetic
ugaagaaugaaagcaggauaggga

SEQ ID NO: 486972 - RNA, 18 nt, Artificial Sequence
  Synthetic
auacugguaggauaggga

SEQ ID NO: 486973 - RNA, 19 nt, Artificial Sequence
  Synthetic
gauacugguaggauaggga

SEQ ID NO: 486974 - RNA, 20 nt, Artificial Sequence
  Synthetic
ugauacugguaggauaggga

SEQ ID NO: 486975 - RNA, 21 nt, Artificial Sequence
  Synthetic
augauacugguaggauaggga

SEQ ID NO: 486976 - RNA, 22 nt, Artificial Sequence
  Synthetic
gaugauacugguaggauaggga

SEQ ID NO: 486977 - RNA, 23 nt, Artificial Sequence
  Synthetic
ugaugauacugguaggauaggga

SEQ ID NO: 486978 - RNA, 24 nt, Artificial Sequence
  Synthetic
gugaugauacugguaggauaggga

SEQ ID NO: 486979 - RNA, 18 nt, Artificial Sequence
  Synthetic
aguauagaaaccuaggga

SEQ ID NO: 486980 - RNA, 19 nt, Artificial Sequence
  Synthetic
caguauagaaaccuaggga

SEQ ID NO: 486981 - RNA, 20 nt, Artificial Sequence
  Synthetic
acaguauagaaaccuaggga

SEQ ID NO: 486982 - RNA, 21 nt, Artificial Sequence
  Synthetic
aacaguauagaaaccuaggga

SEQ ID NO: 486983 - RNA, 22 nt, Artificial Sequence
  Synthetic
gaacaguauagaaaccuaggga

SEQ ID NO: 486984 - RNA, 23 nt, Artificial Sequence
  Synthetic
ugaacaguauagaaaccuaggga

SEQ ID NO: 486985 - RNA, 24 nt, Artificial Sequence
  Synthetic
uugaacaguauagaaaccuaggga

SEQ ID NO: 486986 - RNA, 18 nt, Artificial Sequence
  Synthetic
gauaagauuaccuaggga

SEQ ID NO: 486987 - RNA, 19 nt, Artificial Sequence
  Synthetic
agauaagauuaccuaggga

SEQ ID NO: 486988 - RNA, 20 nt, Artificial Sequence
  Synthetic
uagauaagauuaccuaggga

SEQ ID NO: 486989 - RNA, 21 nt, Artificial Sequence
  Synthetic
auagauaagauuaccuaggga

SEQ ID NO: 486990 - RNA, 22 nt, Artificial Sequence
  Synthetic
cauagauaagauuaccuaggga

SEQ ID NO: 486991 - RNA, 23 nt, Artificial Sequence
  Synthetic
acauagauaagauuaccuaggga

SEQ ID NO: 486992 - RNA, 24 nt, Artificial Sequence
  Synthetic
aacauagauaagauuaccuaggga

SEQ ID NO: 486993 - RNA, 18 nt, Artificial Sequence
  Synthetic
uaagcaaaaggcuaggga

SEQ ID NO: 486994 - RNA, 19 nt, Artificial Sequence
  Synthetic
uuaagcaaaaggcuaggga

SEQ ID NO: 486995 - RNA, 20 nt, Artificial Sequence
  Synthetic
cuuaagcaaaaggcuaggga

SEQ ID NO: 486996 - RNA, 21 nt, Artificial Sequence
  Synthetic
acuuaagcaaaaggcuaggga

SEQ ID NO: 486997 - RNA, 22 nt, Artificial Sequence
  Synthetic
cacuuaagcaaaaggcuaggga

SEQ ID NO: 486998 - RNA, 23 nt, Artificial Sequence
  Synthetic
gcacuuaagcaaaaggcuaggga

SEQ ID NO: 486999 - RNA, 24 nt, Artificial Sequence
  Synthetic
agcacuuaagcaaaaggcuaggga

SEQ ID NO: 487000 - RNA, 18 nt, Artificial Sequence
  Synthetic
cagaaauaggaguaggga

SEQ ID NO: 487001 - RNA, 19 nt, Artificial Sequence
  Synthetic
ucagaaauaggaguaggga

SEQ ID NO: 487002 - RNA, 20 nt, Artificial Sequence
  Synthetic
aucagaaauaggaguaggga

SEQ ID NO: 487003 - RNA, 21 nt, Artificial Sequence
  Synthetic
gaucagaaauaggaguaggga

SEQ ID NO: 487004 - RNA, 22 nt, Artificial Sequence
  Synthetic
agaucagaaauaggaguaggga

SEQ ID NO: 487005 - RNA, 23 nt, Artificial Sequence
  Synthetic
gagaucagaaauaggaguaggga

SEQ ID NO: 487006 - RNA, 24 nt, Artificial Sequence
  Synthetic
agagaucagaaauaggaguaggga

SEQ ID NO: 487007 - RNA, 18 nt, Artificial Sequence
  Synthetic
uacauuggggaguaggga

SEQ ID NO: 487008 - RNA, 19 nt, Artificial Sequence
  Synthetic
auacauuggggaguaggga

SEQ ID NO: 487009 - RNA, 20 nt, Artificial Sequence
  Synthetic
gauacauuggggaguaggga

SEQ ID NO: 487010 - RNA, 21 nt, Artificial Sequence
  Synthetic
ggauacauuggggaguaggga

SEQ ID NO: 487011 - RNA, 22 nt, Artificial Sequence
  Synthetic
aggauacauuggggaguaggga

SEQ ID NO: 487012 - RNA, 23 nt, Artificial Sequence
  Synthetic
uaggauacauuggggaguaggga

SEQ ID NO: 487013 - RNA, 24 nt, Artificial Sequence
  Synthetic
cuaggauacauuggggaguaggga

SEQ ID NO: 487014 - RNA, 18 nt, Artificial Sequence
  Synthetic
auccuagugagguaggga

SEQ ID NO: 487015 - RNA, 19 nt, Artificial Sequence
  Synthetic
cauccuagugagguaggga

SEQ ID NO: 487016 - RNA, 20 nt, Artificial Sequence
  Synthetic
acauccuagugagguaggga

SEQ ID NO: 487017 - RNA, 21 nt, Artificial Sequence
  Synthetic
aacauccuagugagguaggga

SEQ ID NO: 487018 - RNA, 22 nt, Artificial Sequence
  Synthetic
caacauccuagugagguaggga

SEQ ID NO: 487019 - RNA, 23 nt, Artificial Sequence
  Synthetic
acaacauccuagugagguaggga

SEQ ID NO: 487020 - RNA, 24 nt, Artificial Sequence
  Synthetic
cacaacauccuagugagguaggga

SEQ ID NO: 487021 - RNA, 18 nt, Artificial Sequence
  Synthetic
aaaacacgagauuaggga

SEQ ID NO: 487022 - RNA, 19 nt, Artificial Sequence
  Synthetic
uaaaacacgagauuaggga

SEQ ID NO: 487023 - RNA, 20 nt, Artificial Sequence
  Synthetic
guaaaacacgagauuaggga

SEQ ID NO: 487024 - RNA, 21 nt, Artificial Sequence
  Synthetic
gguaaaacacgagauuaggga

SEQ ID NO: 487025 - RNA, 22 nt, Artificial Sequence
  Synthetic
agguaaaacacgagauuaggga

SEQ ID NO: 487026 - RNA, 23 nt, Artificial Sequence
  Synthetic
uagguaaaacacgagauuaggga

SEQ ID NO: 487027 - RNA, 24 nt, Artificial Sequence
  Synthetic
guagguaaaacacgagauuaggga

SEQ ID NO: 487028 - RNA, 18 nt, Artificial Sequence
  Synthetic
gauuauuauaguuaggga

SEQ ID NO: 487029 - RNA, 19 nt, Artificial Sequence
  Synthetic
ggauuauuauaguuaggga

SEQ ID NO: 487030 - RNA, 20 nt, Artificial Sequence
  Synthetic
aggauuauuauaguuaggga

SEQ ID NO: 487031 - RNA, 21 nt, Artificial Sequence
  Synthetic
caggauuauuauaguuaggga

SEQ ID NO: 487032 - RNA, 22 nt, Artificial Sequence
  Synthetic
ucaggauuauuauaguuaggga

SEQ ID NO: 487033 - RNA, 23 nt, Artificial Sequence
  Synthetic
aucaggauuauuauaguuaggga

SEQ ID NO: 487034 - RNA, 24 nt, Artificial Sequence
  Synthetic
caucaggauuauuauaguuaggga

SEQ ID NO: 487035 - RNA, 18 nt, Artificial Sequence
  Synthetic
aagggagaagguuaggga

SEQ ID NO: 487036 - RNA, 19 nt, Artificial Sequence
  Synthetic
gaagggagaagguuaggga

SEQ ID NO: 487037 - RNA, 20 nt, Artificial Sequence
  Synthetic
agaagggagaagguuaggga

SEQ ID NO: 487038 - RNA, 21 nt, Artificial Sequence
  Synthetic
cagaagggagaagguuaggga

SEQ ID NO: 487039 - RNA, 22 nt, Artificial Sequence
  Synthetic
gcagaagggagaagguuaggga

SEQ ID NO: 487040 - RNA, 23 nt, Artificial Sequence
  Synthetic
ggcagaagggagaagguuaggga

SEQ ID NO: 487041 - RNA, 24 nt, Artificial Sequence
  Synthetic
gggcagaagggagaagguuaggga

SEQ ID NO: 487042 - RNA, 18 nt, Artificial Sequence
  Synthetic
ggaucaacagauacggga

SEQ ID NO: 487043 - RNA, 19 nt, Artificial Sequence
  Synthetic
aggaucaacagauacggga

SEQ ID NO: 487044 - RNA, 20 nt, Artificial Sequence
  Synthetic
gaggaucaacagauacggga

SEQ ID NO: 487045 - RNA, 21 nt, Artificial Sequence
  Synthetic
ugaggaucaacagauacggga

SEQ ID NO: 487046 - RNA, 22 nt, Artificial Sequence
  Synthetic
uugaggaucaacagauacggga

SEQ ID NO: 487047 - RNA, 23 nt, Artificial Sequence
  Synthetic
uuugaggaucaacagauacggga

SEQ ID NO: 487048 - RNA, 24 nt, Artificial Sequence
  Synthetic
auuugaggaucaacagauacggga

SEQ ID NO: 487049 - RNA, 18 nt, Artificial Sequence
  Synthetic
gaaguuucaaaggcggga

SEQ ID NO: 487050 - RNA, 19 nt, Artificial Sequence
  Synthetic
agaaguuucaaaggcggga

SEQ ID NO: 487051 - RNA, 20 nt, Artificial Sequence
  Synthetic
cagaaguuucaaaggcggga

SEQ ID NO: 487052 - RNA, 21 nt, Artificial Sequence
  Synthetic
ucagaaguuucaaaggcggga

SEQ ID NO: 487053 - RNA, 22 nt, Artificial Sequence
  Synthetic
uucagaaguuucaaaggcggga

SEQ ID NO: 487054 - RNA, 23 nt, Artificial Sequence
  Synthetic
uuucagaaguuucaaaggcggga

SEQ ID NO: 487055 - RNA, 24 nt, Artificial Sequence
  Synthetic
uuuucagaaguuucaaaggcggga

SEQ ID NO: 487056 - RNA, 18 nt, Artificial Sequence
  Synthetic
caugcaaauauugcggga

SEQ ID NO: 487057 - RNA, 19 nt, Artificial Sequence
  Synthetic
ccaugcaaauauugcggga

SEQ ID NO: 487058 - RNA, 20 nt, Artificial Sequence
  Synthetic
gccaugcaaauauugcggga

SEQ ID NO: 487059 - RNA, 21 nt, Artificial Sequence
  Synthetic
ggccaugcaaauauugcggga

SEQ ID NO: 487060 - RNA, 22 nt, Artificial Sequence
  Synthetic
aggccaugcaaauauugcggga

SEQ ID NO: 487061 - RNA, 23 nt, Artificial Sequence
  Synthetic
gaggccaugcaaauauugcggga

SEQ ID NO: 487062 - RNA, 24 nt, Artificial Sequence
  Synthetic
ggaggccaugcaaauauugcggga

SEQ ID NO: 487063 - RNA, 18 nt, Artificial Sequence
  Synthetic
ucacacaaaaaaagggga

SEQ ID NO: 487064 - RNA, 19 nt, Artificial Sequence
  Synthetic
gucacacaaaaaaagggga

SEQ ID NO: 487065 - RNA, 20 nt, Artificial Sequence
  Synthetic
ugucacacaaaaaaagggga

SEQ ID NO: 487066 - RNA, 21 nt, Artificial Sequence
  Synthetic
cugucacacaaaaaaagggga

SEQ ID NO: 487067 - RNA, 22 nt, Artificial Sequence
  Synthetic
acugucacacaaaaaaagggga

SEQ ID NO: 487068 - RNA, 23 nt, Artificial Sequence
  Synthetic
uacugucacacaaaaaaagggga

SEQ ID NO: 487069 - RNA, 24 nt, Artificial Sequence
  Synthetic
uuacugucacacaaaaaaagggga

SEQ ID NO: 487070 - RNA, 18 nt, Artificial Sequence
  Synthetic
ggggagcugaaaagggga

SEQ ID NO: 487071 - RNA, 19 nt, Artificial Sequence
  Synthetic
aggggagcugaaaagggga

SEQ ID NO: 487072 - RNA, 20 nt, Artificial Sequence
  Synthetic
aaggggagcugaaaagggga

SEQ ID NO: 487073 - RNA, 21 nt, Artificial Sequence
  Synthetic
gaaggggagcugaaaagggga

SEQ ID NO: 487074 - RNA, 22 nt, Artificial Sequence
  Synthetic
ggaaggggagcugaaaagggga

SEQ ID NO: 487075 - RNA, 23 nt, Artificial Sequence
  Synthetic
gggaaggggagcugaaaagggga

SEQ ID NO: 487076 - RNA, 24 nt, Artificial Sequence
  Synthetic
ugggaaggggagcugaaaagggga

SEQ ID NO: 487077 - RNA, 18 nt, Artificial Sequence
  Synthetic
gggugaggggcaagggga

SEQ ID NO: 487078 - RNA, 19 nt, Artificial Sequence
  Synthetic
ggggugaggggcaagggga

SEQ ID NO: 487079 - RNA, 20 nt, Artificial Sequence
  Synthetic
aggggugaggggcaagggga

SEQ ID NO: 487080 - RNA, 21 nt, Artificial Sequence
  Synthetic
aaggggugaggggcaagggga

SEQ ID NO: 487081 - RNA, 22 nt, Artificial Sequence
  Synthetic
caaggggugaggggcaagggga

SEQ ID NO: 487082 - RNA, 23 nt, Artificial Sequence
  Synthetic
ucaaggggugaggggcaagggga

SEQ ID NO: 487083 - RNA, 24 nt, Artificial Sequence
  Synthetic
gucaaggggugaggggcaagggga

SEQ ID NO: 487084 - RNA, 18 nt, Artificial Sequence
  Synthetic
aagacaaaaagaagggga

SEQ ID NO: 487085 - RNA, 19 nt, Artificial Sequence
  Synthetic
aaagacaaaaagaagggga

SEQ ID NO: 487086 - RNA, 20 nt, Artificial Sequence
  Synthetic
aaaagacaaaaagaagggga

SEQ ID NO: 487087 - RNA, 21 nt, Artificial Sequence
  Synthetic
gaaaagacaaaaagaagggga

SEQ ID NO: 487088 - RNA, 22 nt, Artificial Sequence
  Synthetic
ggaaaagacaaaaagaagggga

SEQ ID NO: 487089 - RNA, 23 nt, Artificial Sequence
  Synthetic
aggaaaagacaaaaagaagggga

SEQ ID NO: 487090 - RNA, 24 nt, Artificial Sequence
  Synthetic
gaggaaaagacaaaaagaagggga

SEQ ID NO: 487091 - RNA, 18 nt, Artificial Sequence
  Synthetic
ggagggaagggaagggga

SEQ ID NO: 487092 - RNA, 19 nt, Artificial Sequence
  Synthetic
gggagggaagggaagggga

SEQ ID NO: 487093 - RNA, 20 nt, Artificial Sequence
  Synthetic
ggggagggaagggaagggga

SEQ ID NO: 487094 - RNA, 21 nt, Artificial Sequence
  Synthetic
aggggagggaagggaagggga

SEQ ID NO: 487095 - RNA, 22 nt, Artificial Sequence
  Synthetic
gaggggagggaagggaagggga

SEQ ID NO: 487096 - RNA, 23 nt, Artificial Sequence
  Synthetic
agaggggagggaagggaagggga

SEQ ID NO: 487097 - RNA, 24 nt, Artificial Sequence
  Synthetic
gagaggggagggaagggaagggga

SEQ ID NO: 487098 - RNA, 18 nt, Artificial Sequence
  Synthetic
ggaaaaaaaauaagggga

SEQ ID NO: 487099 - RNA, 19 nt, Artificial Sequence
  Synthetic
gggaaaaaaaauaagggga

SEQ ID NO: 487100 - RNA, 20 nt, Artificial Sequence
  Synthetic
ugggaaaaaaaauaagggga

SEQ ID NO: 487101 - RNA, 21 nt, Artificial Sequence
  Synthetic
uugggaaaaaaaauaagggga

SEQ ID NO: 487102 - RNA, 22 nt, Artificial Sequence
  Synthetic
uuugggaaaaaaaauaagggga

SEQ ID NO: 487103 - RNA, 23 nt, Artificial Sequence
  Synthetic
uuuugggaaaaaaaauaagggga

SEQ ID NO: 487104 - RNA, 24 nt, Artificial Sequence
  Synthetic
auuuugggaaaaaaaauaagggga

SEQ ID NO: 487105 - RNA, 18 nt, Artificial Sequence
  Synthetic
auuguuuuacacagggga

SEQ ID NO: 487106 - RNA, 19 nt, Artificial Sequence
  Synthetic
uauuguuuuacacagggga

SEQ ID NO: 487107 - RNA, 20 nt, Artificial Sequence
  Synthetic
auauuguuuuacacagggga

SEQ ID NO: 487108 - RNA, 21 nt, Artificial Sequence
  Synthetic
cauauuguuuuacacagggga

SEQ ID NO: 487109 - RNA, 22 nt, Artificial Sequence
  Synthetic
ucauauuguuuuacacagggga

SEQ ID NO: 487110 - RNA, 23 nt, Artificial Sequence
  Synthetic
aucauauuguuuuacacagggga

SEQ ID NO: 487111 - RNA, 24 nt, Artificial Sequence
  Synthetic
caucauauuguuuuacacagggga

SEQ ID NO: 487112 - RNA, 18 nt, Artificial Sequence
  Synthetic
aaagagcuagacagggga

SEQ ID NO: 487113 - RNA, 19 nt, Artificial Sequence
  Synthetic
aaaagagcuagacagggga

SEQ ID NO: 487114 - RNA, 20 nt, Artificial Sequence
  Synthetic
uaaaagagcuagacagggga

SEQ ID NO: 487115 - RNA, 21 nt, Artificial Sequence
  Synthetic
uuaaaagagcuagacagggga

SEQ ID NO: 487116 - RNA, 22 nt, Artificial Sequence
  Synthetic
uuuaaaagagcuagacagggga

SEQ ID NO: 487117 - RNA, 23 nt, Artificial Sequence
  Synthetic
cuuuaaaagagcuagacagggga

SEQ ID NO: 487118 - RNA, 24 nt, Artificial Sequence
  Synthetic
gcuuuaaaagagcuagacagggga

SEQ ID NO: 487119 - RNA, 18 nt, Artificial Sequence
  Synthetic
gauaguggugccagggga

SEQ ID NO: 487120 - RNA, 19 nt, Artificial Sequence
  Synthetic
agauaguggugccagggga

SEQ ID NO: 487121 - RNA, 20 nt, Artificial Sequence
  Synthetic
cagauaguggugccagggga

SEQ ID NO: 487122 - RNA, 21 nt, Artificial Sequence
  Synthetic
acagauaguggugccagggga

SEQ ID NO: 487123 - RNA, 22 nt, Artificial Sequence
  Synthetic
gacagauaguggugccagggga

SEQ ID NO: 487124 - RNA, 23 nt, Artificial Sequence
  Synthetic
agacagauaguggugccagggga

SEQ ID NO: 487125 - RNA, 24 nt, Artificial Sequence
  Synthetic
gagacagauaguggugccagggga

SEQ ID NO: 487126 - RNA, 18 nt, Artificial Sequence
  Synthetic
agugcugcaugcagggga

SEQ ID NO: 487127 - RNA, 19 nt, Artificial Sequence
  Synthetic
uagugcugcaugcagggga

SEQ ID NO: 487128 - RNA, 20 nt, Artificial Sequence
  Synthetic
cuagugcugcaugcagggga

SEQ ID NO: 487129 - RNA, 21 nt, Artificial Sequence
  Synthetic
acuagugcugcaugcagggga

SEQ ID NO: 487130 - RNA, 22 nt, Artificial Sequence
  Synthetic
cacuagugcugcaugcagggga

SEQ ID NO: 487131 - RNA, 23 nt, Artificial Sequence
  Synthetic
acacuagugcugcaugcagggga

SEQ ID NO: 487132 - RNA, 24 nt, Artificial Sequence
  Synthetic
uacacuagugcugcaugcagggga

SEQ ID NO: 487133 - RNA, 18 nt, Artificial Sequence
  Synthetic
ccggggccucucagggga

SEQ ID NO: 487134 - RNA, 19 nt, Artificial Sequence
  Synthetic
accggggccucucagggga

SEQ ID NO: 487135 - RNA, 20 nt, Artificial Sequence
  Synthetic
caccggggccucucagggga

SEQ ID NO: 487136 - RNA, 21 nt, Artificial Sequence
  Synthetic
acaccggggccucucagggga

SEQ ID NO: 487137 - RNA, 22 nt, Artificial Sequence
  Synthetic
cacaccggggccucucagggga

SEQ ID NO: 487138 - RNA, 23 nt, Artificial Sequence
  Synthetic
acacaccggggccucucagggga

SEQ ID NO: 487139 - RNA, 24 nt, Artificial Sequence
  Synthetic
cacacaccggggccucucagggga

SEQ ID NO: 487140 - RNA, 18 nt, Artificial Sequence
  Synthetic
aauacucaagucagggga

SEQ ID NO: 487141 - RNA, 19 nt, Artificial Sequence
  Synthetic
aaauacucaagucagggga

SEQ ID NO: 487142 - RNA, 20 nt, Artificial Sequence
  Synthetic
gaaauacucaagucagggga

SEQ ID NO: 487143 - RNA, 21 nt, Artificial Sequence
  Synthetic
agaaauacucaagucagggga

SEQ ID NO: 487144 - RNA, 22 nt, Artificial Sequence
  Synthetic
gagaaauacucaagucagggga

SEQ ID NO: 487145 - RNA, 23 nt, Artificial Sequence
  Synthetic
ggagaaauacucaagucagggga

SEQ ID NO: 487146 - RNA, 24 nt, Artificial Sequence
  Synthetic
uggagaaauacucaagucagggga

SEQ ID NO: 487147 - RNA, 18 nt, Artificial Sequence
  Synthetic
aggucagauaagagggga

SEQ ID NO: 487148 - RNA, 19 nt, Artificial Sequence
  Synthetic
aaggucagauaagagggga

SEQ ID NO: 487149 - RNA, 20 nt, Artificial Sequence
  Synthetic
aaaggucagauaagagggga

SEQ ID NO: 487150 - RNA, 21 nt, Artificial Sequence
  Synthetic
aaaaggucagauaagagggga

SEQ ID NO: 487151 - RNA, 22 nt, Artificial Sequence
  Synthetic
aaaaaggucagauaagagggga

SEQ ID NO: 487152 - RNA, 23 nt, Artificial Sequence
  Synthetic
aaaaaaggucagauaagagggga

SEQ ID NO: 487153 - RNA, 24 nt, Artificial Sequence
  Synthetic
aaaaaaaggucagauaagagggga

SEQ ID NO: 487154 - RNA, 18 nt, Artificial Sequence
  Synthetic
aaugaaccuaagagggga

SEQ ID NO: 487155 - RNA, 19 nt, Artificial Sequence
  Synthetic
uaaugaaccuaagagggga

SEQ ID NO: 487156 - RNA, 20 nt, Artificial Sequence
  Synthetic
guaaugaaccuaagagggga

SEQ ID NO: 487157 - RNA, 21 nt, Artificial Sequence
  Synthetic
aguaaugaaccuaagagggga

SEQ ID NO: 487158 - RNA, 22 nt, Artificial Sequence
  Synthetic
aaguaaugaaccuaagagggga

SEQ ID NO: 487159 - RNA, 23 nt, Artificial Sequence
  Synthetic
caaguaaugaaccuaagagggga

SEQ ID NO: 487160 - RNA, 24 nt, Artificial Sequence
  Synthetic
ccaaguaaugaaccuaagagggga

SEQ ID NO: 487161 - RNA, 18 nt, Artificial Sequence
  Synthetic
aaugugugagagagggga

SEQ ID NO: 487162 - RNA, 19 nt, Artificial Sequence
  Synthetic
uaaugugugagagagggga

SEQ ID NO: 487163 - RNA, 20 nt, Artificial Sequence
  Synthetic
cuaaugugugagagagggga

SEQ ID NO: 487164 - RNA, 21 nt, Artificial Sequence
  Synthetic
ucuaaugugugagagagggga

SEQ ID NO: 487165 - RNA, 22 nt, Artificial Sequence
  Synthetic
cucuaaugugugagagagggga

SEQ ID NO: 487166 - RNA, 23 nt, Artificial Sequence
  Synthetic
ucucuaaugugugagagagggga

SEQ ID NO: 487167 - RNA, 24 nt, Artificial Sequence
  Synthetic
uucucuaaugugugagagagggga

SEQ ID NO: 487168 - RNA, 18 nt, Artificial Sequence
  Synthetic
gaagggaaggagagggga

SEQ ID NO: 487169 - RNA, 19 nt, Artificial Sequence
  Synthetic
ggaagggaaggagagggga

SEQ ID NO: 487170 - RNA, 20 nt, Artificial Sequence
  Synthetic
gggaagggaaggagagggga

SEQ ID NO: 487171 - RNA, 21 nt, Artificial Sequence
  Synthetic
agggaagggaaggagagggga

SEQ ID NO: 487172 - RNA, 22 nt, Artificial Sequence
  Synthetic
aagggaagggaaggagagggga

SEQ ID NO: 487173 - RNA, 23 nt, Artificial Sequence
  Synthetic
gaagggaagggaaggagagggga

SEQ ID NO: 487174 - RNA, 24 nt, Artificial Sequence
  Synthetic
ggaagggaagggaaggagagggga

SEQ ID NO: 487175 - RNA, 18 nt, Artificial Sequence
  Synthetic
gguugccaaaggagggga

SEQ ID NO: 487176 - RNA, 19 nt, Artificial Sequence
  Synthetic
ugguugccaaaggagggga

SEQ ID NO: 487177 - RNA, 20 nt, Artificial Sequence
  Synthetic
uugguugccaaaggagggga

SEQ ID NO: 487178 - RNA, 21 nt, Artificial Sequence
  Synthetic
cuugguugccaaaggagggga

SEQ ID NO: 487179 - RNA, 22 nt, Artificial Sequence
  Synthetic
ucuugguugccaaaggagggga

SEQ ID NO: 487180 - RNA, 23 nt, Artificial Sequence
  Synthetic
gucuugguugccaaaggagggga

SEQ ID NO: 487181 - RNA, 24 nt, Artificial Sequence
  Synthetic
ugucuugguugccaaaggagggga

SEQ ID NO: 487182 - RNA, 18 nt, Artificial Sequence
  Synthetic
uaauauuaagggagggga

SEQ ID NO: 487183 - RNA, 19 nt, Artificial Sequence
  Synthetic
uuaauauuaagggagggga

SEQ ID NO: 487184 - RNA, 20 nt, Artificial Sequence
  Synthetic
guuaauauuaagggagggga

SEQ ID NO: 487185 - RNA, 21 nt, Artificial Sequence
  Synthetic
uguuaauauuaagggagggga

SEQ ID NO: 487186 - RNA, 22 nt, Artificial Sequence
  Synthetic
auguuaauauuaagggagggga

SEQ ID NO: 487187 - RNA, 23 nt, Artificial Sequence
  Synthetic
aauguuaauauuaagggagggga

SEQ ID NO: 487188 - RNA, 24 nt, Artificial Sequence
  Synthetic
aaauguuaauauuaagggagggga

SEQ ID NO: 487189 - RNA, 18 nt, Artificial Sequence
  Synthetic
gaagggaaggggagggga

SEQ ID NO: 487190 - RNA, 19 nt, Artificial Sequence
  Synthetic
ggaagggaaggggagggga

SEQ ID NO: 487191 - RNA, 20 nt, Artificial Sequence
  Synthetic
gggaagggaaggggagggga

SEQ ID NO: 487192 - RNA, 21 nt, Artificial Sequence
  Synthetic
agggaagggaaggggagggga

SEQ ID NO: 487193 - RNA, 22 nt, Artificial Sequence
  Synthetic
gagggaagggaaggggagggga

SEQ ID NO: 487194 - RNA, 23 nt, Artificial Sequence
  Synthetic
ggagggaagggaaggggagggga

SEQ ID NO: 487195 - RNA, 24 nt, Artificial Sequence
  Synthetic
gggagggaagggaaggggagggga

SEQ ID NO: 487196 - RNA, 18 nt, Artificial Sequence
  Synthetic
gaaggggaggggagggga

SEQ ID NO: 487197 - RNA, 19 nt, Artificial Sequence
  Synthetic
ggaaggggaggggagggga

SEQ ID NO: 487198 - RNA, 20 nt, Artificial Sequence
  Synthetic
gggaaggggaggggagggga

SEQ ID NO: 487199 - RNA, 21 nt, Artificial Sequence
  Synthetic
agggaaggggaggggagggga

SEQ ID NO: 487200 - RNA, 22 nt, Artificial Sequence
  Synthetic
aagggaaggggaggggagggga

SEQ ID NO: 487201 - RNA, 23 nt, Artificial Sequence
  Synthetic
gaagggaaggggaggggagggga

SEQ ID NO: 487202 - RNA, 24 nt, Artificial Sequence
  Synthetic
ggaagggaaggggaggggagggga

SEQ ID NO: 487203 - RNA, 18 nt, Artificial Sequence
  Synthetic
ggaggggaggggagggga

SEQ ID NO: 487204 - RNA, 19 nt, Artificial Sequence
  Synthetic
gggaggggaggggagggga

SEQ ID NO: 487205 - RNA, 20 nt, Artificial Sequence
  Synthetic
ggggaggggaggggagggga

SEQ ID NO: 487206 - RNA, 21 nt, Artificial Sequence
  Synthetic
aggggaggggaggggagggga

SEQ ID NO: 487207 - RNA, 22 nt, Artificial Sequence
  Synthetic
aaggggaggggaggggagggga

SEQ ID NO: 487208 - RNA, 23 nt, Artificial Sequence
  Synthetic
gaaggggaggggaggggagggga

SEQ ID NO: 487209 - RNA, 24 nt, Artificial Sequence
  Synthetic
ggaaggggaggggaggggagggga

SEQ ID NO: 487210 - RNA, 18 nt, Artificial Sequence
  Synthetic
gcccaagggaugagggga

SEQ ID NO: 487211 - RNA, 19 nt, Artificial Sequence
  Synthetic
ggcccaagggaugagggga

SEQ ID NO: 487212 - RNA, 20 nt, Artificial Sequence
  Synthetic
aggcccaagggaugagggga

SEQ ID NO: 487213 - RNA, 21 nt, Artificial Sequence
  Synthetic
uaggcccaagggaugagggga

SEQ ID NO: 487214 - RNA, 22 nt, Artificial Sequence
  Synthetic
cuaggcccaagggaugagggga

SEQ ID NO: 487215 - RNA, 23 nt, Artificial Sequence
  Synthetic
ucuaggcccaagggaugagggga

SEQ ID NO: 487216 - RNA, 24 nt, Artificial Sequence
  Synthetic
aucuaggcccaagggaugagggga

SEQ ID NO: 487217 - RNA, 18 nt, Artificial Sequence
  Synthetic
auuaucccagugagggga

SEQ ID NO: 487218 - RNA, 19 nt, Artificial Sequence
  Synthetic
aauuaucccagugagggga

SEQ ID NO: 487219 - RNA, 20 nt, Artificial Sequence
  Synthetic
aaauuaucccagugagggga

SEQ ID NO: 487220 - RNA, 21 nt, Artificial Sequence
  Synthetic
aaaauuaucccagugagggga

SEQ ID NO: 487221 - RNA, 22 nt, Artificial Sequence
  Synthetic
caaaauuaucccagugagggga

SEQ ID NO: 487222 - RNA, 23 nt, Artificial Sequence
  Synthetic
ucaaaauuaucccagugagggga

SEQ ID NO: 487223 - RNA, 24 nt, Artificial Sequence
  Synthetic
cucaaaauuaucccagugagggga

SEQ ID NO: 487224 - RNA, 18 nt, Artificial Sequence
  Synthetic
ugucguggggugagggga

SEQ ID NO: 487225 - RNA, 19 nt, Artificial Sequence
  Synthetic
cugucguggggugagggga

SEQ ID NO: 487226 - RNA, 20 nt, Artificial Sequence
  Synthetic
ccugucguggggugagggga

SEQ ID NO: 487227 - RNA, 21 nt, Artificial Sequence
  Synthetic
gccugucguggggugagggga

SEQ ID NO: 487228 - RNA, 22 nt, Artificial Sequence
  Synthetic
ggccugucguggggugagggga

SEQ ID NO: 487229 - RNA, 23 nt, Artificial Sequence
  Synthetic
gggccugucguggggugagggga

SEQ ID NO: 487230 - RNA, 24 nt, Artificial Sequence
  Synthetic
ggggccugucguggggugagggga

SEQ ID NO: 487231 - RNA, 18 nt, Artificial Sequence
  Synthetic
uauagcuaugugagggga

SEQ ID NO: 487232 - RNA, 19 nt, Artificial Sequence
  Synthetic
auauagcuaugugagggga

SEQ ID NO: 487233 - RNA, 20 nt, Artificial Sequence
  Synthetic
gauauagcuaugugagggga

SEQ ID NO: 487234 - RNA, 21 nt, Artificial Sequence
  Synthetic
ugauauagcuaugugagggga

SEQ ID NO: 487235 - RNA, 22 nt, Artificial Sequence
  Synthetic
uugauauagcuaugugagggga

SEQ ID NO: 487236 - RNA, 23 nt, Artificial Sequence
  Synthetic
auugauauagcuaugugagggga

SEQ ID NO: 487237 - RNA, 24 nt, Artificial Sequence
  Synthetic
gauugauauagcuaugugagggga

SEQ ID NO: 487238 - RNA, 18 nt, Artificial Sequence
  Synthetic
uuacugagagauagggga

SEQ ID NO: 487239 - RNA, 19 nt, Artificial Sequence
  Synthetic
auuacugagagauagggga

SEQ ID NO: 487240 - RNA, 20 nt, Artificial Sequence
  Synthetic
cauuacugagagauagggga

SEQ ID NO: 487241 - RNA, 21 nt, Artificial Sequence
  Synthetic
acauuacugagagauagggga

SEQ ID NO: 487242 - RNA, 22 nt, Artificial Sequence
  Synthetic
uacauuacugagagauagggga

SEQ ID NO: 487243 - RNA, 23 nt, Artificial Sequence
  Synthetic
cuacauuacugagagauagggga

SEQ ID NO: 487244 - RNA, 24 nt, Artificial Sequence
  Synthetic
ccuacauuacugagagauagggga

SEQ ID NO: 487245 - RNA, 18 nt, Artificial Sequence
  Synthetic
ccaucagaaacuagggga

SEQ ID NO: 487246 - RNA, 19 nt, Artificial Sequence
  Synthetic
accaucagaaacuagggga

SEQ ID NO: 487247 - RNA, 20 nt, Artificial Sequence
  Synthetic
aaccaucagaaacuagggga

SEQ ID NO: 487248 - RNA, 21 nt, Artificial Sequence
  Synthetic
aaaccaucagaaacuagggga

SEQ ID NO: 487249 - RNA, 22 nt, Artificial Sequence
  Synthetic
caaaccaucagaaacuagggga

SEQ ID NO: 487250 - RNA, 23 nt, Artificial Sequence
  Synthetic
acaaaccaucagaaacuagggga

SEQ ID NO: 487251 - RNA, 24 nt, Artificial Sequence
  Synthetic
aacaaaccaucagaaacuagggga

SEQ ID NO: 487252 - RNA, 18 nt, Artificial Sequence
  Synthetic
gagcuaucacguagggga

SEQ ID NO: 487253 - RNA, 19 nt, Artificial Sequence
  Synthetic
ggagcuaucacguagggga

SEQ ID NO: 487254 - RNA, 20 nt, Artificial Sequence
  Synthetic
cggagcuaucacguagggga

SEQ ID NO: 487255 - RNA, 21 nt, Artificial Sequence
  Synthetic
acggagcuaucacguagggga

SEQ ID NO: 487256 - RNA, 22 nt, Artificial Sequence
  Synthetic
uacggagcuaucacguagggga

SEQ ID NO: 487257 - RNA, 23 nt, Artificial Sequence
  Synthetic
guacggagcuaucacguagggga

SEQ ID NO: 487258 - RNA, 24 nt, Artificial Sequence
  Synthetic
aguacggagcuaucacguagggga

SEQ ID NO: 487259 - RNA, 18 nt, Artificial Sequence
  Synthetic
agaucuggagcucgggga

SEQ ID NO: 487260 - RNA, 19 nt, Artificial Sequence
  Synthetic
gagaucuggagcucgggga

SEQ ID NO: 487261 - RNA, 20 nt, Artificial Sequence
  Synthetic
agagaucuggagcucgggga

SEQ ID NO: 487262 - RNA, 21 nt, Artificial Sequence
  Synthetic
aagagaucuggagcucgggga

SEQ ID NO: 487263 - RNA, 22 nt, Artificial Sequence
  Synthetic
caagagaucuggagcucgggga

SEQ ID NO: 487264 - RNA, 23 nt, Artificial Sequence
  Synthetic
ucaagagaucuggagcucgggga

SEQ ID NO: 487265 - RNA, 24 nt, Artificial Sequence
  Synthetic
aucaagagaucuggagcucgggga

SEQ ID NO: 487266 - RNA, 18 nt, Artificial Sequence
  Synthetic
uaguggaggagucgggga

SEQ ID NO: 487267 - RNA, 19 nt, Artificial Sequence
  Synthetic
auaguggaggagucgggga

SEQ ID NO: 487268 - RNA, 20 nt, Artificial Sequence
  Synthetic
gauaguggaggagucgggga

SEQ ID NO: 487269 - RNA, 21 nt, Artificial Sequence
  Synthetic
ggauaguggaggagucgggga

SEQ ID NO: 487270 - RNA, 22 nt, Artificial Sequence
  Synthetic
aggauaguggaggagucgggga

SEQ ID NO: 487271 - RNA, 23 nt, Artificial Sequence
  Synthetic
aaggauaguggaggagucgggga

SEQ ID NO: 487272 - RNA, 24 nt, Artificial Sequence
  Synthetic
gaaggauaguggaggagucgggga

SEQ ID NO: 487273 - RNA, 18 nt, Artificial Sequence
  Synthetic
augggggaggaaggggga

SEQ ID NO: 487274 - RNA, 19 nt, Artificial Sequence
  Synthetic
gaugggggaggaaggggga

SEQ ID NO: 487275 - RNA, 20 nt, Artificial Sequence
  Synthetic
agaugggggaggaaggggga

SEQ ID NO: 487276 - RNA, 21 nt, Artificial Sequence
  Synthetic
uagaugggggaggaaggggga

SEQ ID NO: 487277 - RNA, 22 nt, Artificial Sequence
  Synthetic
guagaugggggaggaaggggga

SEQ ID NO: 487278 - RNA, 23 nt, Artificial Sequence
  Synthetic
uguagaugggggaggaaggggga

SEQ ID NO: 487279 - RNA, 24 nt, Artificial Sequence
  Synthetic
guguagaugggggaggaaggggga

SEQ ID NO: 487280 - RNA, 18 nt, Artificial Sequence
  Synthetic
aaguggaaauaaggggga

SEQ ID NO: 487281 - RNA, 19 nt, Artificial Sequence
  Synthetic
uaaguggaaauaaggggga

SEQ ID NO: 487282 - RNA, 20 nt, Artificial Sequence
  Synthetic
cuaaguggaaauaaggggga

SEQ ID NO: 487283 - RNA, 21 nt, Artificial Sequence
  Synthetic
ucuaaguggaaauaaggggga

SEQ ID NO: 487284 - RNA, 22 nt, Artificial Sequence
  Synthetic
uucuaaguggaaauaaggggga

SEQ ID NO: 487285 - RNA, 23 nt, Artificial Sequence
  Synthetic
guucuaaguggaaauaaggggga

SEQ ID NO: 487286 - RNA, 24 nt, Artificial Sequence
  Synthetic
aguucuaaguggaaauaaggggga

SEQ ID NO: 487287 - RNA, 18 nt, Artificial Sequence
  Synthetic
uguuuacuuugaggggga

SEQ ID NO: 487288 - RNA, 19 nt, Artificial Sequence
  Synthetic
cuguuuacuuugaggggga

SEQ ID NO: 487289 - RNA, 20 nt, Artificial Sequence
  Synthetic
ccuguuuacuuugaggggga

SEQ ID NO: 487290 - RNA, 21 nt, Artificial Sequence
  Synthetic
cccuguuuacuuugaggggga

SEQ ID NO: 487291 - RNA, 22 nt, Artificial Sequence
  Synthetic
ucccuguuuacuuugaggggga

SEQ ID NO: 487292 - RNA, 23 nt, Artificial Sequence
  Synthetic
uucccuguuuacuuugaggggga

SEQ ID NO: 487293 - RNA, 24 nt, Artificial Sequence
  Synthetic
cuucccuguuuacuuugaggggga

SEQ ID NO: 487294 - RNA, 18 nt, Artificial Sequence
  Synthetic
aggguagugguaggggga

SEQ ID NO: 487295 - RNA, 19 nt, Artificial Sequence
  Synthetic
aaggguagugguaggggga

SEQ ID NO: 487296 - RNA, 20 nt, Artificial Sequence
  Synthetic
gaaggguagugguaggggga

SEQ ID NO: 487297 - RNA, 21 nt, Artificial Sequence
  Synthetic
ggaaggguagugguaggggga

SEQ ID NO: 487298 - RNA, 22 nt, Artificial Sequence
  Synthetic
gggaaggguagugguaggggga

SEQ ID NO: 487299 - RNA, 23 nt, Artificial Sequence
  Synthetic
ugggaaggguagugguaggggga

SEQ ID NO: 487300 - RNA, 24 nt, Artificial Sequence
  Synthetic
cugggaaggguagugguaggggga

SEQ ID NO: 487301 - RNA, 18 nt, Artificial Sequence
  Synthetic
uaagcaaugcagggggga

SEQ ID NO: 487302 - RNA, 19 nt, Artificial Sequence
  Synthetic
uuaagcaaugcagggggga

SEQ ID NO: 487303 - RNA, 20 nt, Artificial Sequence
  Synthetic
guuaagcaaugcagggggga

SEQ ID NO: 487304 - RNA, 21 nt, Artificial Sequence
  Synthetic
aguuaagcaaugcagggggga

SEQ ID NO: 487305 - RNA, 22 nt, Artificial Sequence
  Synthetic
aaguuaagcaaugcagggggga

SEQ ID NO: 487306 - RNA, 23 nt, Artificial Sequence
  Synthetic
caaguuaagcaaugcagggggga

SEQ ID NO: 487307 - RNA, 24 nt, Artificial Sequence
  Synthetic
ucaaguuaagcaaugcagggggga

SEQ ID NO: 487308 - RNA, 18 nt, Artificial Sequence
  Synthetic
auggauuucaggggggga

SEQ ID NO: 487309 - RNA, 19 nt, Artificial Sequence
  Synthetic
uauggauuucaggggggga

SEQ ID NO: 487310 - RNA, 20 nt, Artificial Sequence
  Synthetic
auauggauuucaggggggga

SEQ ID NO: 487311 - RNA, 21 nt, Artificial Sequence
  Synthetic
aauauggauuucaggggggga

SEQ ID NO: 487312 - RNA, 22 nt, Artificial Sequence
  Synthetic
gaauauggauuucaggggggga

SEQ ID NO: 487313 - RNA, 23 nt, Artificial Sequence
  Synthetic
agaauauggauuucaggggggga

SEQ ID NO: 487314 - RNA, 24 nt, Artificial Sequence
  Synthetic
cagaauauggauuucaggggggga

SEQ ID NO: 487315 - RNA, 18 nt, Artificial Sequence
  Synthetic
auuuuuauaaugggggga

SEQ ID NO: 487316 - RNA, 19 nt, Artificial Sequence
  Synthetic
aauuuuuauaaugggggga

SEQ ID NO: 487317 - RNA, 20 nt, Artificial Sequence
  Synthetic
caauuuuuauaaugggggga

SEQ ID NO: 487318 - RNA, 21 nt, Artificial Sequence
  Synthetic
acaauuuuuauaaugggggga

SEQ ID NO: 487319 - RNA, 22 nt, Artificial Sequence
  Synthetic
gacaauuuuuauaaugggggga

SEQ ID NO: 487320 - RNA, 23 nt, Artificial Sequence
  Synthetic
agacaauuuuuauaaugggggga

SEQ ID NO: 487321 - RNA, 24 nt, Artificial Sequence
  Synthetic
aagacaauuuuuauaaugggggga

SEQ ID NO: 487322 - RNA, 18 nt, Artificial Sequence
  Synthetic
cuuuuggcucugggggga

SEQ ID NO: 487323 - RNA, 19 nt, Artificial Sequence
  Synthetic
acuuuuggcucugggggga

SEQ ID NO: 487324 - RNA, 20 nt, Artificial Sequence
  Synthetic
uacuuuuggcucugggggga

SEQ ID NO: 487325 - RNA, 21 nt, Artificial Sequence
  Synthetic
uuacuuuuggcucugggggga

SEQ ID NO: 487326 - RNA, 22 nt, Artificial Sequence
  Synthetic
guuacuuuuggcucugggggga

SEQ ID NO: 487327 - RNA, 23 nt, Artificial Sequence
  Synthetic
gguuacuuuuggcucugggggga

SEQ ID NO: 487328 - RNA, 24 nt, Artificial Sequence
  Synthetic
ugguuacuuuuggcucugggggga

SEQ ID NO: 487329 - RNA, 18 nt, Artificial Sequence
  Synthetic
ugcuguggggugggggga

SEQ ID NO: 487330 - RNA, 19 nt, Artificial Sequence
  Synthetic
cugcuguggggugggggga

SEQ ID NO: 487331 - RNA, 20 nt, Artificial Sequence
  Synthetic
acugcuguggggugggggga

SEQ ID NO: 487332 - RNA, 21 nt, Artificial Sequence
  Synthetic
gacugcuguggggugggggga

SEQ ID NO: 487333 - RNA, 22 nt, Artificial Sequence
  Synthetic
ggacugcuguggggugggggga

SEQ ID NO: 487334 - RNA, 23 nt, Artificial Sequence
  Synthetic
gggacugcuguggggugggggga

SEQ ID NO: 487335 - RNA, 24 nt, Artificial Sequence
  Synthetic
ggggacugcuguggggugggggga

SEQ ID NO: 487336 - RNA, 20 nt, Artificial Sequence
  Synthetic
ccugcuguggggugggggga

SEQ ID NO: 487337 - RNA, 21 nt, Artificial Sequence
  Synthetic
gccugcuguggggugggggga

SEQ ID NO: 487338 - RNA, 22 nt, Artificial Sequence
  Synthetic
ggccugcuguggggugggggga

SEQ ID NO: 487339 - RNA, 23 nt, Artificial Sequence
  Synthetic
gggccugcuguggggugggggga

SEQ ID NO: 487340 - RNA, 24 nt, Artificial Sequence
  Synthetic
ggggccugcuguggggugggggga

SEQ ID NO: 487341 - RNA, 18 nt, Artificial Sequence
  Synthetic
uguuguggggugggggga

SEQ ID NO: 487342 - RNA, 19 nt, Artificial Sequence
  Synthetic
cuguuguggggugggggga

SEQ ID NO: 487343 - RNA, 21 nt, Artificial Sequence
  Synthetic
aacuguuguggggugggggga

SEQ ID NO: 487344 - RNA, 22 nt, Artificial Sequence
  Synthetic
gaacuguuguggggugggggga

SEQ ID NO: 487345 - RNA, 23 nt, Artificial Sequence
  Synthetic
ggaacuguuguggggugggggga

SEQ ID NO: 487346 - RNA, 24 nt, Artificial Sequence
  Synthetic
gggaacuguuguggggugggggga

SEQ ID NO: 487347 - RNA, 20 nt, Artificial Sequence
  Synthetic
ccuguuguggggugggggga

SEQ ID NO: 487348 - RNA, 21 nt, Artificial Sequence
  Synthetic
gccuguuguggggugggggga

SEQ ID NO: 487349 - RNA, 22 nt, Artificial Sequence
  Synthetic
ggccuguuguggggugggggga

SEQ ID NO: 487350 - RNA, 23 nt, Artificial Sequence
  Synthetic
gggccuguuguggggugggggga

SEQ ID NO: 487351 - RNA, 24 nt, Artificial Sequence
  Synthetic
ggggccuguuguggggugggggga

SEQ ID NO: 487352 - RNA, 18 nt, Artificial Sequence
  Synthetic
gggcuugggaguggggga

SEQ ID NO: 487353 - RNA, 19 nt, Artificial Sequence
  Synthetic
agggcuugggaguggggga

SEQ ID NO: 487354 - RNA, 20 nt, Artificial Sequence
  Synthetic
cagggcuugggaguggggga

SEQ ID NO: 487355 - RNA, 21 nt, Artificial Sequence
  Synthetic
ucagggcuugggaguggggga

SEQ ID NO: 487356 - RNA, 22 nt, Artificial Sequence
  Synthetic
uucagggcuugggaguggggga

SEQ ID NO: 487357 - RNA, 23 nt, Artificial Sequence
  Synthetic
guucagggcuugggaguggggga

SEQ ID NO: 487358 - RNA, 24 nt, Artificial Sequence
  Synthetic
aguucagggcuugggaguggggga

SEQ ID NO: 487359 - RNA, 18 nt, Artificial Sequence
  Synthetic
ggccugugagguggggga

SEQ ID NO: 487360 - RNA, 19 nt, Artificial Sequence
  Synthetic
uggccugugagguggggga

SEQ ID NO: 487361 - RNA, 20 nt, Artificial Sequence
  Synthetic
uuggccugugagguggggga

SEQ ID NO: 487362 - RNA, 21 nt, Artificial Sequence
  Synthetic
auuggccugugagguggggga

SEQ ID NO: 487363 - RNA, 22 nt, Artificial Sequence
  Synthetic
uauuggccugugagguggggga

SEQ ID NO: 487364 - RNA, 23 nt, Artificial Sequence
  Synthetic
uuauuggccugugagguggggga

SEQ ID NO: 487365 - RNA, 24 nt, Artificial Sequence
  Synthetic
uuuauuggccugugagguggggga

SEQ ID NO: 487366 - RNA, 18 nt, Artificial Sequence
  Synthetic
ucuggucaaauuggggga

SEQ ID NO: 487367 - RNA, 19 nt, Artificial Sequence
  Synthetic
gucuggucaaauuggggga

SEQ ID NO: 487368 - RNA, 20 nt, Artificial Sequence
  Synthetic
agucuggucaaauuggggga

SEQ ID NO: 487369 - RNA, 21 nt, Artificial Sequence
  Synthetic
aagucuggucaaauuggggga

SEQ ID NO: 487370 - RNA, 22 nt, Artificial Sequence
  Synthetic
caagucuggucaaauuggggga

SEQ ID NO: 487371 - RNA, 23 nt, Artificial Sequence
  Synthetic
ucaagucuggucaaauuggggga

SEQ ID NO: 487372 - RNA, 24 nt, Artificial Sequence
  Synthetic
uucaagucuggucaaauuggggga

SEQ ID NO: 487373 - RNA, 18 nt, Artificial Sequence
  Synthetic
uaguuacguuuuggggga

SEQ ID NO: 487374 - RNA, 19 nt, Artificial Sequence
  Synthetic
guaguuacguuuuggggga

SEQ ID NO: 487375 - RNA, 20 nt, Artificial Sequence
  Synthetic
aguaguuacguuuuggggga

SEQ ID NO: 487376 - RNA, 21 nt, Artificial Sequence
  Synthetic
uaguaguuacguuuuggggga

SEQ ID NO: 487377 - RNA, 22 nt, Artificial Sequence
  Synthetic
uuaguaguuacguuuuggggga

SEQ ID NO: 487378 - RNA, 23 nt, Artificial Sequence
  Synthetic
auuaguaguuacguuuuggggga

SEQ ID NO: 487379 - RNA, 24 nt, Artificial Sequence
  Synthetic
uauuaguaguuacguuuuggggga

SEQ ID NO: 487380 - RNA, 18 nt, Artificial Sequence
  Synthetic
aaaagcucaaaaugggga

SEQ ID NO: 487381 - RNA, 19 nt, Artificial Sequence
  Synthetic
caaaagcucaaaaugggga

SEQ ID NO: 487382 - RNA, 20 nt, Artificial Sequence
  Synthetic
gcaaaagcucaaaaugggga

SEQ ID NO: 487383 - RNA, 21 nt, Artificial Sequence
  Synthetic
agcaaaagcucaaaaugggga

SEQ ID NO: 487384 - RNA, 22 nt, Artificial Sequence
  Synthetic
gagcaaaagcucaaaaugggga

SEQ ID NO: 487385 - RNA, 23 nt, Artificial Sequence
  Synthetic
ggagcaaaagcucaaaaugggga

SEQ ID NO: 487386 - RNA, 24 nt, Artificial Sequence
  Synthetic
cggagcaaaagcucaaaaugggga

SEQ ID NO: 487387 - RNA, 18 nt, Artificial Sequence
  Synthetic
gagucaucagaaugggga

SEQ ID NO: 487388 - RNA, 19 nt, Artificial Sequence
  Synthetic
ggagucaucagaaugggga

SEQ ID NO: 487389 - RNA, 20 nt, Artificial Sequence
  Synthetic
gggagucaucagaaugggga

SEQ ID NO: 487390 - RNA, 21 nt, Artificial Sequence
  Synthetic
ugggagucaucagaaugggga

SEQ ID NO: 487391 - RNA, 22 nt, Artificial Sequence
  Synthetic
uugggagucaucagaaugggga

SEQ ID NO: 487392 - RNA, 23 nt, Artificial Sequence
  Synthetic
guugggagucaucagaaugggga

SEQ ID NO: 487393 - RNA, 24 nt, Artificial Sequence
  Synthetic
aguugggagucaucagaaugggga

SEQ ID NO: 487394 - RNA, 18 nt, Artificial Sequence
  Synthetic
cuuggcagcacaugggga

SEQ ID NO: 487395 - RNA, 19 nt, Artificial Sequence
  Synthetic
ccuuggcagcacaugggga

SEQ ID NO: 487396 - RNA, 20 nt, Artificial Sequence
  Synthetic
accuuggcagcacaugggga

SEQ ID NO: 487397 - RNA, 21 nt, Artificial Sequence
  Synthetic
aaccuuggcagcacaugggga

SEQ ID NO: 487398 - RNA, 22 nt, Artificial Sequence
  Synthetic
aaaccuuggcagcacaugggga

SEQ ID NO: 487399 - RNA, 23 nt, Artificial Sequence
  Synthetic
aaaaccuuggcagcacaugggga

SEQ ID NO: 487400 - RNA, 24 nt, Artificial Sequence
  Synthetic
gaaaaccuuggcagcacaugggga

SEQ ID NO: 487401 - RNA, 18 nt, Artificial Sequence
  Synthetic
uguuguaaccacugggga

SEQ ID NO: 487402 - RNA, 19 nt, Artificial Sequence
  Synthetic
auguuguaaccacugggga

SEQ ID NO: 487403 - RNA, 20 nt, Artificial Sequence
  Synthetic
cauguuguaaccacugggga

SEQ ID NO: 487404 - RNA, 21 nt, Artificial Sequence
  Synthetic
acauguuguaaccacugggga

SEQ ID NO: 487405 - RNA, 22 nt, Artificial Sequence
  Synthetic
gacauguuguaaccacugggga

SEQ ID NO: 487406 - RNA, 23 nt, Artificial Sequence
  Synthetic
agacauguuguaaccacugggga

SEQ ID NO: 487407 - RNA, 24 nt, Artificial Sequence
  Synthetic
aagacauguuguaaccacugggga

SEQ ID NO: 487408 - RNA, 18 nt, Artificial Sequence
  Synthetic
caauuccacuacugggga

SEQ ID NO: 487409 - RNA, 19 nt, Artificial Sequence
  Synthetic
gcaauuccacuacugggga

SEQ ID NO: 487410 - RNA, 20 nt, Artificial Sequence
  Synthetic
agcaauuccacuacugggga

SEQ ID NO: 487411 - RNA, 21 nt, Artificial Sequence
  Synthetic
cagcaauuccacuacugggga

SEQ ID NO: 487412 - RNA, 22 nt, Artificial Sequence
  Synthetic
acagcaauuccacuacugggga

SEQ ID NO: 487413 - RNA, 23 nt, Artificial Sequence
  Synthetic
uacagcaauuccacuacugggga

SEQ ID NO: 487414 - RNA, 24 nt, Artificial Sequence
  Synthetic
auacagcaauuccacuacugggga

SEQ ID NO: 487415 - RNA, 18 nt, Artificial Sequence
  Synthetic
gcgggggaaggcugggga

SEQ ID NO: 487416 - RNA, 19 nt, Artificial Sequence
  Synthetic
agcgggggaaggcugggga

SEQ ID NO: 487417 - RNA, 20 nt, Artificial Sequence
  Synthetic
aagcgggggaaggcugggga

SEQ ID NO: 487418 - RNA, 21 nt, Artificial Sequence
  Synthetic
gaagcgggggaaggcugggga

SEQ ID NO: 487419 - RNA, 22 nt, Artificial Sequence
  Synthetic
agaagcgggggaaggcugggga

SEQ ID NO: 487420 - RNA, 23 nt, Artificial Sequence
  Synthetic
gagaagcgggggaaggcugggga

SEQ ID NO: 487421 - RNA, 24 nt, Artificial Sequence
  Synthetic
agagaagcgggggaaggcugggga

SEQ ID NO: 487422 - RNA, 18 nt, Artificial Sequence
  Synthetic
auagaugagggcugggga

SEQ ID NO: 487423 - RNA, 19 nt, Artificial Sequence
  Synthetic
aauagaugagggcugggga

SEQ ID NO: 487424 - RNA, 20 nt, Artificial Sequence
  Synthetic
aaauagaugagggcugggga

SEQ ID NO: 487425 - RNA, 21 nt, Artificial Sequence
  Synthetic
gaaauagaugagggcugggga

SEQ ID NO: 487426 - RNA, 22 nt, Artificial Sequence
  Synthetic
ugaaauagaugagggcugggga

SEQ ID NO: 487427 - RNA, 23 nt, Artificial Sequence
  Synthetic
gugaaauagaugagggcugggga

SEQ ID NO: 487428 - RNA, 24 nt, Artificial Sequence
  Synthetic
ugugaaauagaugagggcugggga

SEQ ID NO: 487429 - RNA, 18 nt, Artificial Sequence
  Synthetic
guugccaggggcugggga

SEQ ID NO: 487430 - RNA, 19 nt, Artificial Sequence
  Synthetic
gguugccaggggcugggga

SEQ ID NO: 487431 - RNA, 20 nt, Artificial Sequence
  Synthetic
ugguugccaggggcugggga

SEQ ID NO: 487432 - RNA, 21 nt, Artificial Sequence
  Synthetic
gugguugccaggggcugggga

SEQ ID NO: 487433 - RNA, 22 nt, Artificial Sequence
  Synthetic
ggugguugccaggggcugggga

SEQ ID NO: 487434 - RNA, 23 nt, Artificial Sequence
  Synthetic
uggugguugccaggggcugggga

SEQ ID NO: 487435 - RNA, 24 nt, Artificial Sequence
  Synthetic
cuggugguugccaggggcugggga

SEQ ID NO: 487436 - RNA, 18 nt, Artificial Sequence
  Synthetic
acacagaaacucugggga

SEQ ID NO: 487437 - RNA, 19 nt, Artificial Sequence
  Synthetic
gacacagaaacucugggga

SEQ ID NO: 487438 - RNA, 20 nt, Artificial Sequence
  Synthetic
ugacacagaaacucugggga

SEQ ID NO: 487439 - RNA, 21 nt, Artificial Sequence
  Synthetic
cugacacagaaacucugggga

SEQ ID NO: 487440 - RNA, 22 nt, Artificial Sequence
  Synthetic
acugacacagaaacucugggga

SEQ ID NO: 487441 - RNA, 23 nt, Artificial Sequence
  Synthetic
aacugacacagaaacucugggga

SEQ ID NO: 487442 - RNA, 24 nt, Artificial Sequence
  Synthetic
caacugacacagaaacucugggga

SEQ ID NO: 487443 - RNA, 18 nt, Artificial Sequence
  Synthetic
ggacuacuagagugggga

SEQ ID NO: 487444 - RNA, 19 nt, Artificial Sequence
  Synthetic
aggacuacuagagugggga

SEQ ID NO: 487445 - RNA, 20 nt, Artificial Sequence
  Synthetic
gaggacuacuagagugggga

SEQ ID NO: 487446 - RNA, 21 nt, Artificial Sequence
  Synthetic
ggaggacuacuagagugggga

SEQ ID NO: 487447 - RNA, 22 nt, Artificial Sequence
  Synthetic
cggaggacuacuagagugggga

SEQ ID NO: 487448 - RNA, 23 nt, Artificial Sequence
  Synthetic
acggaggacuacuagagugggga

SEQ ID NO: 487449 - RNA, 24 nt, Artificial Sequence
  Synthetic
aacggaggacuacuagagugggga

SEQ ID NO: 487450 - RNA, 18 nt, Artificial Sequence
  Synthetic
ccaagcugggagugggga

SEQ ID NO: 487451 - RNA, 19 nt, Artificial Sequence
  Synthetic
accaagcugggagugggga

SEQ ID NO: 487452 - RNA, 20 nt, Artificial Sequence
  Synthetic
gaccaagcugggagugggga

SEQ ID NO: 487453 - RNA, 21 nt, Artificial Sequence
  Synthetic
ugaccaagcugggagugggga

SEQ ID NO: 487454 - RNA, 22 nt, Artificial Sequence
  Synthetic
uugaccaagcugggagugggga

SEQ ID NO: 487455 - RNA, 23 nt, Artificial Sequence
  Synthetic
cuugaccaagcugggagugggga

SEQ ID NO: 487456 - RNA, 24 nt, Artificial Sequence
  Synthetic
gcuugaccaagcugggagugggga

SEQ ID NO: 487457 - RNA, 18 nt, Artificial Sequence
  Synthetic
augagauuugagugggga

SEQ ID NO: 487458 - RNA, 19 nt, Artificial Sequence
  Synthetic
aaugagauuugagugggga

SEQ ID NO: 487459 - RNA, 20 nt, Artificial Sequence
  Synthetic
aaaugagauuugagugggga

SEQ ID NO: 487460 - RNA, 21 nt, Artificial Sequence
  Synthetic
aaaaugagauuugagugggga

SEQ ID NO: 487461 - RNA, 22 nt, Artificial Sequence
  Synthetic
caaaaugagauuugagugggga

SEQ ID NO: 487462 - RNA, 23 nt, Artificial Sequence
  Synthetic
ucaaaaugagauuugagugggga

SEQ ID NO: 487463 - RNA, 24 nt, Artificial Sequence
  Synthetic
uucaaaaugagauuugagugggga

SEQ ID NO: 487464 - RNA, 18 nt, Artificial Sequence
  Synthetic
cacaaaaagacuugggga

SEQ ID NO: 487465 - RNA, 19 nt, Artificial Sequence
  Synthetic
ucacaaaaagacuugggga

SEQ ID NO: 487466 - RNA, 20 nt, Artificial Sequence
  Synthetic
uucacaaaaagacuugggga

SEQ ID NO: 487467 - RNA, 21 nt, Artificial Sequence
  Synthetic
uuucacaaaaagacuugggga

SEQ ID NO: 487468 - RNA, 22 nt, Artificial Sequence
  Synthetic
uuuucacaaaaagacuugggga

SEQ ID NO: 487469 - RNA, 23 nt, Artificial Sequence
  Synthetic
uuuuucacaaaaagacuugggga

SEQ ID NO: 487470 - RNA, 24 nt, Artificial Sequence
  Synthetic
auuuuucacaaaaagacuugggga

SEQ ID NO: 487471 - RNA, 18 nt, Artificial Sequence
  Synthetic
uagucauagaguugggga

SEQ ID NO: 487472 - RNA, 19 nt, Artificial Sequence
  Synthetic
auagucauagaguugggga

SEQ ID NO: 487473 - RNA, 20 nt, Artificial Sequence
  Synthetic
gauagucauagaguugggga

SEQ ID NO: 487474 - RNA, 21 nt, Artificial Sequence
  Synthetic
ugauagucauagaguugggga

SEQ ID NO: 487475 - RNA, 22 nt, Artificial Sequence
  Synthetic
augauagucauagaguugggga

SEQ ID NO: 487476 - RNA, 23 nt, Artificial Sequence
  Synthetic
aaugauagucauagaguugggga

SEQ ID NO: 487477 - RNA, 24 nt, Artificial Sequence
  Synthetic
gaaugauagucauagaguugggga

SEQ ID NO: 487478 - RNA, 18 nt, Artificial Sequence
  Synthetic
aaugacccgauuugggga

SEQ ID NO: 487479 - RNA, 19 nt, Artificial Sequence
  Synthetic
aaaugacccgauuugggga

SEQ ID NO: 487480 - RNA, 20 nt, Artificial Sequence
  Synthetic
aaaaugacccgauuugggga

SEQ ID NO: 487481 - RNA, 21 nt, Artificial Sequence
  Synthetic
caaaaugacccgauuugggga

SEQ ID NO: 487482 - RNA, 22 nt, Artificial Sequence
  Synthetic
acaaaaugacccgauuugggga

SEQ ID NO: 487483 - RNA, 23 nt, Artificial Sequence
  Synthetic
uacaaaaugacccgauuugggga

SEQ ID NO: 487484 - RNA, 24 nt, Artificial Sequence
  Synthetic
guacaaaaugacccgauuugggga

SEQ ID NO: 487485 - RNA, 18 nt, Artificial Sequence
  Synthetic
aaucagaugcuuugggga

SEQ ID NO: 487486 - RNA, 19 nt, Artificial Sequence
  Synthetic
aaaucagaugcuuugggga

SEQ ID NO: 487487 - RNA, 20 nt, Artificial Sequence
  Synthetic
aaaaucagaugcuuugggga

SEQ ID NO: 487488 - RNA, 21 nt, Artificial Sequence
  Synthetic
uaaaaucagaugcuuugggga

SEQ ID NO: 487489 - RNA, 22 nt, Artificial Sequence
  Synthetic
cuaaaaucagaugcuuugggga

SEQ ID NO: 487490 - RNA, 23 nt, Artificial Sequence
  Synthetic
ucuaaaaucagaugcuuugggga

SEQ ID NO: 487491 - RNA, 24 nt, Artificial Sequence
  Synthetic
aucuaaaaucagaugcuuugggga

SEQ ID NO: 487492 - RNA, 18 nt, Artificial Sequence
  Synthetic
ccuugcaaauuuugggga

SEQ ID NO: 487493 - RNA, 19 nt, Artificial Sequence
  Synthetic
cccuugcaaauuuugggga

SEQ ID NO: 487494 - RNA, 20 nt, Artificial Sequence
  Synthetic
ccccuugcaaauuuugggga

SEQ ID NO: 487495 - RNA, 21 nt, Artificial Sequence
  Synthetic
uccccuugcaaauuuugggga

SEQ ID NO: 487496 - RNA, 22 nt, Artificial Sequence
  Synthetic
uuccccuugcaaauuuugggga

SEQ ID NO: 487497 - RNA, 23 nt, Artificial Sequence
  Synthetic
uuuccccuugcaaauuuugggga

SEQ ID NO: 487498 - RNA, 24 nt, Artificial Sequence
  Synthetic
uuuuccccuugcaaauuuugggga

SEQ ID NO: 487499 - RNA, 18 nt, Artificial Sequence
  Synthetic
gcucuuaucuuuugggga

SEQ ID NO: 487500 - RNA, 19 nt, Artificial Sequence
  Synthetic
agcucuuaucuuuugggga

SEQ ID NO: 487501 - RNA, 20 nt, Artificial Sequence
  Synthetic
aagcucuuaucuuuugggga

SEQ ID NO: 487502 - RNA, 21 nt, Artificial Sequence
  Synthetic
aaagcucuuaucuuuugggga

SEQ ID NO: 487503 - RNA, 22 nt, Artificial Sequence
  Synthetic
uaaagcucuuaucuuuugggga

SEQ ID NO: 487504 - RNA, 23 nt, Artificial Sequence
  Synthetic
auaaagcucuuaucuuuugggga

SEQ ID NO: 487505 - RNA, 24 nt, Artificial Sequence
  Synthetic
gauaaagcucuuaucuuuugggga

SEQ ID NO: 487506 - RNA, 18 nt, Artificial Sequence
  Synthetic
aauuguuugcaaauggga

SEQ ID NO: 487507 - RNA, 19 nt, Artificial Sequence
  Synthetic
aaauuguuugcaaauggga

SEQ ID NO: 487508 - RNA, 20 nt, Artificial Sequence
  Synthetic
uaaauuguuugcaaauggga

SEQ ID NO: 487509 - RNA, 21 nt, Artificial Sequence
  Synthetic
uuaaauuguuugcaaauggga

SEQ ID NO: 487510 - RNA, 22 nt, Artificial Sequence
  Synthetic
cuuaaauuguuugcaaauggga

SEQ ID NO: 487511 - RNA, 23 nt, Artificial Sequence
  Synthetic
ucuuaaauuguuugcaaauggga

SEQ ID NO: 487512 - RNA, 24 nt, Artificial Sequence
  Synthetic
cucuuaaauuguuugcaaauggga

SEQ ID NO: 487513 - RNA, 18 nt, Artificial Sequence
  Synthetic
ggaaagccagaaauggga

SEQ ID NO: 487514 - RNA, 19 nt, Artificial Sequence
  Synthetic
gggaaagccagaaauggga

SEQ ID NO: 487515 - RNA, 20 nt, Artificial Sequence
  Synthetic
ggggaaagccagaaauggga

SEQ ID NO: 487516 - RNA, 21 nt, Artificial Sequence
  Synthetic
aggggaaagccagaaauggga

SEQ ID NO: 487517 - RNA, 22 nt, Artificial Sequence
  Synthetic
uaggggaaagccagaaauggga

SEQ ID NO: 487518 - RNA, 23 nt, Artificial Sequence
  Synthetic
auaggggaaagccagaaauggga

SEQ ID NO: 487519 - RNA, 24 nt, Artificial Sequence
  Synthetic
uauaggggaaagccagaaauggga

SEQ ID NO: 487520 - RNA, 18 nt, Artificial Sequence
  Synthetic
uacuacuugcuaauggga

SEQ ID NO: 487521 - RNA, 19 nt, Artificial Sequence
  Synthetic
auacuacuugcuaauggga

SEQ ID NO: 487522 - RNA, 20 nt, Artificial Sequence
  Synthetic
aauacuacuugcuaauggga

SEQ ID NO: 487523 - RNA, 21 nt, Artificial Sequence
  Synthetic
caauacuacuugcuaauggga

SEQ ID NO: 487524 - RNA, 22 nt, Artificial Sequence
  Synthetic
acaauacuacuugcuaauggga

SEQ ID NO: 487525 - RNA, 23 nt, Artificial Sequence
  Synthetic
uacaauacuacuugcuaauggga

SEQ ID NO: 487526 - RNA, 24 nt, Artificial Sequence
  Synthetic
guacaauacuacuugcuaauggga

SEQ ID NO: 487527 - RNA, 18 nt, Artificial Sequence
  Synthetic
uaacaaggguuaauggga

SEQ ID NO: 487528 - RNA, 19 nt, Artificial Sequence
  Synthetic
cuaacaaggguuaauggga

SEQ ID NO: 487529 - RNA, 20 nt, Artificial Sequence
  Synthetic
ccuaacaaggguuaauggga

SEQ ID NO: 487530 - RNA, 21 nt, Artificial Sequence
  Synthetic
cccuaacaaggguuaauggga

SEQ ID NO: 487531 - RNA, 22 nt, Artificial Sequence
  Synthetic
acccuaacaaggguuaauggga

SEQ ID NO: 487532 - RNA, 23 nt, Artificial Sequence
  Synthetic
cacccuaacaaggguuaauggga

SEQ ID NO: 487533 - RNA, 24 nt, Artificial Sequence
  Synthetic
ucacccuaacaaggguuaauggga

SEQ ID NO: 487534 - RNA, 18 nt, Artificial Sequence
  Synthetic
cagaaauggaacauggga

SEQ ID NO: 487535 - RNA, 19 nt, Artificial Sequence
  Synthetic
acagaaauggaacauggga

SEQ ID NO: 487536 - RNA, 20 nt, Artificial Sequence
  Synthetic
gacagaaauggaacauggga

SEQ ID NO: 487537 - RNA, 21 nt, Artificial Sequence
  Synthetic
ggacagaaauggaacauggga

SEQ ID NO: 487538 - RNA, 22 nt, Artificial Sequence
  Synthetic
aggacagaaauggaacauggga

SEQ ID NO: 487539 - RNA, 23 nt, Artificial Sequence
  Synthetic
uaggacagaaauggaacauggga

SEQ ID NO: 487540 - RNA, 24 nt, Artificial Sequence
  Synthetic
auaggacagaaauggaacauggga

SEQ ID NO: 487541 - RNA, 18 nt, Artificial Sequence
  Synthetic
aagucacugcacauggga

SEQ ID NO: 487542 - RNA, 19 nt, Artificial Sequence
  Synthetic
aaagucacugcacauggga

SEQ ID NO: 487543 - RNA, 20 nt, Artificial Sequence
  Synthetic
gaaagucacugcacauggga

SEQ ID NO: 487544 - RNA, 21 nt, Artificial Sequence
  Synthetic
ugaaagucacugcacauggga

SEQ ID NO: 487545 - RNA, 22 nt, Artificial Sequence
  Synthetic
cugaaagucacugcacauggga

SEQ ID NO: 487546 - RNA, 23 nt, Artificial Sequence
  Synthetic
ucugaaagucacugcacauggga

SEQ ID NO: 487547 - RNA, 24 nt, Artificial Sequence
  Synthetic
aucugaaagucacugcacauggga

SEQ ID NO: 487548 - RNA, 18 nt, Artificial Sequence
  Synthetic
aaaaagaauagcauggga

SEQ ID NO: 487549 - RNA, 19 nt, Artificial Sequence
  Synthetic
uaaaaagaauagcauggga

SEQ ID NO: 487550 - RNA, 20 nt, Artificial Sequence
  Synthetic
guaaaaagaauagcauggga

SEQ ID NO: 487551 - RNA, 21 nt, Artificial Sequence
  Synthetic
gguaaaaagaauagcauggga

SEQ ID NO: 487552 - RNA, 22 nt, Artificial Sequence
  Synthetic
agguaaaaagaauagcauggga

SEQ ID NO: 487553 - RNA, 23 nt, Artificial Sequence
  Synthetic
cagguaaaaagaauagcauggga

SEQ ID NO: 487554 - RNA, 24 nt, Artificial Sequence
  Synthetic
ccagguaaaaagaauagcauggga

SEQ ID NO: 487555 - RNA, 18 nt, Artificial Sequence
  Synthetic
ugggagucugucauggga

SEQ ID NO: 487556 - RNA, 19 nt, Artificial Sequence
  Synthetic
cugggagucugucauggga

SEQ ID NO: 487557 - RNA, 20 nt, Artificial Sequence
  Synthetic
ccugggagucugucauggga

SEQ ID NO: 487558 - RNA, 21 nt, Artificial Sequence
  Synthetic
uccugggagucugucauggga

SEQ ID NO: 487559 - RNA, 22 nt, Artificial Sequence
  Synthetic
uuccugggagucugucauggga

SEQ ID NO: 487560 - RNA, 23 nt, Artificial Sequence
  Synthetic
auuccugggagucugucauggga

SEQ ID NO: 487561 - RNA, 24 nt, Artificial Sequence
  Synthetic
cauuccugggagucugucauggga

SEQ ID NO: 487562 - RNA, 18 nt, Artificial Sequence
  Synthetic
gguaauggggagauggga

SEQ ID NO: 487563 - RNA, 19 nt, Artificial Sequence
  Synthetic
ugguaauggggagauggga

SEQ ID NO: 487564 - RNA, 20 nt, Artificial Sequence
  Synthetic
uugguaauggggagauggga

SEQ ID NO: 487565 - RNA, 21 nt, Artificial Sequence
  Synthetic
auugguaauggggagauggga

SEQ ID NO: 487566 - RNA, 22 nt, Artificial Sequence
  Synthetic
gauugguaauggggagauggga

SEQ ID NO: 487567 - RNA, 23 nt, Artificial Sequence
  Synthetic
agauugguaauggggagauggga

SEQ ID NO: 487568 - RNA, 24 nt, Artificial Sequence
  Synthetic
gagauugguaauggggagauggga

SEQ ID NO: 487569 - RNA, 18 nt, Artificial Sequence
  Synthetic
gugggcugacugauggga

SEQ ID NO: 487570 - RNA, 19 nt, Artificial Sequence
  Synthetic
agugggcugacugauggga

SEQ ID NO: 487571 - RNA, 20 nt, Artificial Sequence
  Synthetic
uagugggcugacugauggga

SEQ ID NO: 487572 - RNA, 21 nt, Artificial Sequence
  Synthetic
cuagugggcugacugauggga

SEQ ID NO: 487573 - RNA, 22 nt, Artificial Sequence
  Synthetic
ucuagugggcugacugauggga

SEQ ID NO: 487574 - RNA, 23 nt, Artificial Sequence
  Synthetic
uucuagugggcugacugauggga

SEQ ID NO: 487575 - RNA, 24 nt, Artificial Sequence
  Synthetic
cuucuagugggcugacugauggga

SEQ ID NO: 487576 - RNA, 18 nt, Artificial Sequence
  Synthetic
cacgacauuuugauggga

SEQ ID NO: 487577 - RNA, 19 nt, Artificial Sequence
  Synthetic
ucacgacauuuugauggga

SEQ ID NO: 487578 - RNA, 20 nt, Artificial Sequence
  Synthetic
aucacgacauuuugauggga

SEQ ID NO: 487579 - RNA, 21 nt, Artificial Sequence
  Synthetic
aaucacgacauuuugauggga

SEQ ID NO: 487580 - RNA, 22 nt, Artificial Sequence
  Synthetic
caaucacgacauuuugauggga

SEQ ID NO: 487581 - RNA, 23 nt, Artificial Sequence
  Synthetic
ccaaucacgacauuuugauggga

SEQ ID NO: 487582 - RNA, 24 nt, Artificial Sequence
  Synthetic
uccaaucacgacauuuugauggga

SEQ ID NO: 487583 - RNA, 18 nt, Artificial Sequence
  Synthetic
aucaagagaaauauggga

SEQ ID NO: 487584 - RNA, 19 nt, Artificial Sequence
  Synthetic
aaucaagagaaauauggga

SEQ ID NO: 487585 - RNA, 20 nt, Artificial Sequence
  Synthetic
gaaucaagagaaauauggga

SEQ ID NO: 487586 - RNA, 21 nt, Artificial Sequence
  Synthetic
ggaaucaagagaaauauggga

SEQ ID NO: 487587 - RNA, 22 nt, Artificial Sequence
  Synthetic
uggaaucaagagaaauauggga

SEQ ID NO: 487588 - RNA, 23 nt, Artificial Sequence
  Synthetic
uuggaaucaagagaaauauggga

SEQ ID NO: 487589 - RNA, 24 nt, Artificial Sequence
  Synthetic
uuuggaaucaagagaaauauggga

SEQ ID NO: 487590 - RNA, 18 nt, Artificial Sequence
  Synthetic
cugauuacuccuauggga

SEQ ID NO: 487591 - RNA, 19 nt, Artificial Sequence
  Synthetic
ucugauuacuccuauggga

SEQ ID NO: 487592 - RNA, 20 nt, Artificial Sequence
  Synthetic
gucugauuacuccuauggga

SEQ ID NO: 487593 - RNA, 21 nt, Artificial Sequence
  Synthetic
ggucugauuacuccuauggga

SEQ ID NO: 487594 - RNA, 22 nt, Artificial Sequence
  Synthetic
gggucugauuacuccuauggga

SEQ ID NO: 487595 - RNA, 23 nt, Artificial Sequence
  Synthetic
agggucugauuacuccuauggga

SEQ ID NO: 487596 - RNA, 24 nt, Artificial Sequence
  Synthetic
aagggucugauuacuccuauggga

SEQ ID NO: 487597 - RNA, 18 nt, Artificial Sequence
  Synthetic
augaugucaucuauggga

SEQ ID NO: 487598 - RNA, 19 nt, Artificial Sequence
  Synthetic
aaugaugucaucuauggga

SEQ ID NO: 487599 - RNA, 20 nt, Artificial Sequence
  Synthetic
caaugaugucaucuauggga

SEQ ID NO: 487600 - RNA, 21 nt, Artificial Sequence
  Synthetic
gcaaugaugucaucuauggga

SEQ ID NO: 487601 - RNA, 22 nt, Artificial Sequence
  Synthetic
ugcaaugaugucaucuauggga

SEQ ID NO: 487602 - RNA, 23 nt, Artificial Sequence
  Synthetic
augcaaugaugucaucuauggga

SEQ ID NO: 487603 - RNA, 24 nt, Artificial Sequence
  Synthetic
aaugcaaugaugucaucuauggga

SEQ ID NO: 487604 - RNA, 18 nt, Artificial Sequence
  Synthetic
uacuuaaaaaaacuggga

SEQ ID NO: 487605 - RNA, 19 nt, Artificial Sequence
  Synthetic
guacuuaaaaaaacuggga

SEQ ID NO: 487606 - RNA, 20 nt, Artificial Sequence
  Synthetic
aguacuuaaaaaaacuggga

SEQ ID NO: 487607 - RNA, 21 nt, Artificial Sequence
  Synthetic
caguacuuaaaaaaacuggga

SEQ ID NO: 487608 - RNA, 22 nt, Artificial Sequence
  Synthetic
gcaguacuuaaaaaaacuggga

SEQ ID NO: 487609 - RNA, 23 nt, Artificial Sequence
  Synthetic
ggcaguacuuaaaaaaacuggga

SEQ ID NO: 487610 - RNA, 24 nt, Artificial Sequence
  Synthetic
uggcaguacuuaaaaaaacuggga

SEQ ID NO: 487611 - RNA, 18 nt, Artificial Sequence
  Synthetic
agaggcucauaacuggga

SEQ ID NO: 487612 - RNA, 19 nt, Artificial Sequence
  Synthetic
gagaggcucauaacuggga

SEQ ID NO: 487613 - RNA, 20 nt, Artificial Sequence
  Synthetic
ggagaggcucauaacuggga

SEQ ID NO: 487614 - RNA, 21 nt, Artificial Sequence
  Synthetic
gggagaggcucauaacuggga

SEQ ID NO: 487615 - RNA, 22 nt, Artificial Sequence
  Synthetic
ggggagaggcucauaacuggga

SEQ ID NO: 487616 - RNA, 23 nt, Artificial Sequence
  Synthetic
aggggagaggcucauaacuggga

SEQ ID NO: 487617 - RNA, 24 nt, Artificial Sequence
  Synthetic
caggggagaggcucauaacuggga

SEQ ID NO: 487618 - RNA, 18 nt, Artificial Sequence
  Synthetic
uagugucauucacuggga

SEQ ID NO: 487619 - RNA, 19 nt, Artificial Sequence
  Synthetic
auagugucauucacuggga

SEQ ID NO: 487620 - RNA, 20 nt, Artificial Sequence
  Synthetic
gauagugucauucacuggga

SEQ ID NO: 487621 - RNA, 21 nt, Artificial Sequence
  Synthetic
ggauagugucauucacuggga

SEQ ID NO: 487622 - RNA, 22 nt, Artificial Sequence
  Synthetic
uggauagugucauucacuggga

SEQ ID NO: 487623 - RNA, 23 nt, Artificial Sequence
  Synthetic
cuggauagugucauucacuggga

SEQ ID NO: 487624 - RNA, 24 nt, Artificial Sequence
  Synthetic
acuggauagugucauucacuggga

SEQ ID NO: 487625 - RNA, 18 nt, Artificial Sequence
  Synthetic
ugcacccuuuuacuggga

SEQ ID NO: 487626 - RNA, 19 nt, Artificial Sequence
  Synthetic
augcacccuuuuacuggga

SEQ ID NO: 487627 - RNA, 20 nt, Artificial Sequence
  Synthetic
aaugcacccuuuuacuggga

SEQ ID NO: 487628 - RNA, 21 nt, Artificial Sequence
  Synthetic
gaaugcacccuuuuacuggga

SEQ ID NO: 487629 - RNA, 22 nt, Artificial Sequence
  Synthetic
cgaaugcacccuuuuacuggga

SEQ ID NO: 487630 - RNA, 23 nt, Artificial Sequence
  Synthetic
ccgaaugcacccuuuuacuggga

SEQ ID NO: 487631 - RNA, 24 nt, Artificial Sequence
  Synthetic
cccgaaugcacccuuuuacuggga

SEQ ID NO: 487632 - RNA, 18 nt, Artificial Sequence
  Synthetic
agcuacacagaccuggga

SEQ ID NO: 487633 - RNA, 19 nt, Artificial Sequence
  Synthetic
aagcuacacagaccuggga

SEQ ID NO: 487634 - RNA, 20 nt, Artificial Sequence
  Synthetic
aaagcuacacagaccuggga

SEQ ID NO: 487635 - RNA, 21 nt, Artificial Sequence
  Synthetic
aaaagcuacacagaccuggga

SEQ ID NO: 487636 - RNA, 22 nt, Artificial Sequence
  Synthetic
caaaagcuacacagaccuggga

SEQ ID NO: 487637 - RNA, 23 nt, Artificial Sequence
  Synthetic
ccaaaagcuacacagaccuggga

SEQ ID NO: 487638 - RNA, 24 nt, Artificial Sequence
  Synthetic
uccaaaagcuacacagaccuggga

SEQ ID NO: 487639 - RNA, 18 nt, Artificial Sequence
  Synthetic
agggauuuaucccuggga

SEQ ID NO: 487640 - RNA, 19 nt, Artificial Sequence
  Synthetic
gagggauuuaucccuggga

SEQ ID NO: 487641 - RNA, 20 nt, Artificial Sequence
  Synthetic
agagggauuuaucccuggga

SEQ ID NO: 487642 - RNA, 21 nt, Artificial Sequence
  Synthetic
aagagggauuuaucccuggga

SEQ ID NO: 487643 - RNA, 22 nt, Artificial Sequence
  Synthetic
caagagggauuuaucccuggga

SEQ ID NO: 487644 - RNA, 23 nt, Artificial Sequence
  Synthetic
ccaagagggauuuaucccuggga

SEQ ID NO: 487645 - RNA, 24 nt, Artificial Sequence
  Synthetic
accaagagggauuuaucccuggga

SEQ ID NO: 487646 - RNA, 18 nt, Artificial Sequence
  Synthetic
ugcuugaccaagcuggga

SEQ ID NO: 487647 - RNA, 19 nt, Artificial Sequence
  Synthetic
augcuugaccaagcuggga

SEQ ID NO: 487648 - RNA, 20 nt, Artificial Sequence
  Synthetic
uaugcuugaccaagcuggga

SEQ ID NO: 487649 - RNA, 21 nt, Artificial Sequence
  Synthetic
uuaugcuugaccaagcuggga

SEQ ID NO: 487650 - RNA, 22 nt, Artificial Sequence
  Synthetic
auuaugcuugaccaagcuggga

SEQ ID NO: 487651 - RNA, 23 nt, Artificial Sequence
  Synthetic
uauuaugcuugaccaagcuggga

SEQ ID NO: 487652 - RNA, 24 nt, Artificial Sequence
  Synthetic
cuauuaugcuugaccaagcuggga

SEQ ID NO: 487653 - RNA, 18 nt, Artificial Sequence
  Synthetic
cccaacaccgggcuggga

SEQ ID NO: 487654 - RNA, 19 nt, Artificial Sequence
  Synthetic
gcccaacaccgggcuggga

SEQ ID NO: 487655 - RNA, 20 nt, Artificial Sequence
  Synthetic
agcccaacaccgggcuggga

SEQ ID NO: 487656 - RNA, 21 nt, Artificial Sequence
  Synthetic
gagcccaacaccgggcuggga

SEQ ID NO: 487657 - RNA, 22 nt, Artificial Sequence
  Synthetic
ugagcccaacaccgggcuggga

SEQ ID NO: 487658 - RNA, 23 nt, Artificial Sequence
  Synthetic
cugagcccaacaccgggcuggga

SEQ ID NO: 487659 - RNA, 24 nt, Artificial Sequence
  Synthetic
acugagcccaacaccgggcuggga

SEQ ID NO: 487660 - RNA, 18 nt, Artificial Sequence
  Synthetic
uguaccagcaugcuggga

SEQ ID NO: 487661 - RNA, 19 nt, Artificial Sequence
  Synthetic
uuguaccagcaugcuggga

SEQ ID NO: 487662 - RNA, 20 nt, Artificial Sequence
  Synthetic
auuguaccagcaugcuggga

SEQ ID NO: 487663 - RNA, 21 nt, Artificial Sequence
  Synthetic
aauuguaccagcaugcuggga

SEQ ID NO: 487664 - RNA, 22 nt, Artificial Sequence
  Synthetic
aaauuguaccagcaugcuggga

SEQ ID NO: 487665 - RNA, 23 nt, Artificial Sequence
  Synthetic
caaauuguaccagcaugcuggga

SEQ ID NO: 487666 - RNA, 24 nt, Artificial Sequence
  Synthetic
acaaauuguaccagcaugcuggga

SEQ ID NO: 487667 - RNA, 18 nt, Artificial Sequence
  Synthetic
aucuguacacugcuggga

SEQ ID NO: 487668 - RNA, 19 nt, Artificial Sequence
  Synthetic
uaucuguacacugcuggga

SEQ ID NO: 487669 - RNA, 20 nt, Artificial Sequence
  Synthetic
cuaucuguacacugcuggga

SEQ ID NO: 487670 - RNA, 21 nt, Artificial Sequence
  Synthetic
ucuaucuguacacugcuggga

SEQ ID NO: 487671 - RNA, 22 nt, Artificial Sequence
  Synthetic
aucuaucuguacacugcuggga

SEQ ID NO: 487672 - RNA, 23 nt, Artificial Sequence
  Synthetic
caucuaucuguacacugcuggga

SEQ ID NO: 487673 - RNA, 24 nt, Artificial Sequence
  Synthetic
acaucuaucuguacacugcuggga

SEQ ID NO: 487674 - RNA, 18 nt, Artificial Sequence
  Synthetic
acuuaaguccaucuggga

SEQ ID NO: 487675 - RNA, 19 nt, Artificial Sequence
  Synthetic
gacuuaaguccaucuggga

SEQ ID NO: 487676 - RNA, 20 nt, Artificial Sequence
  Synthetic
ggacuuaaguccaucuggga

SEQ ID NO: 487677 - RNA, 21 nt, Artificial Sequence
  Synthetic
aggacuuaaguccaucuggga

SEQ ID NO: 487678 - RNA, 22 nt, Artificial Sequence
  Synthetic
aaggacuuaaguccaucuggga

SEQ ID NO: 487679 - RNA, 23 nt, Artificial Sequence
  Synthetic
aaaggacuuaaguccaucuggga

SEQ ID NO: 487680 - RNA, 24 nt, Artificial Sequence
  Synthetic
gaaaggacuuaaguccaucuggga

SEQ ID NO: 487681 - RNA, 18 nt, Artificial Sequence
  Synthetic
aaugaaauaucucuggga

SEQ ID NO: 487682 - RNA, 19 nt, Artificial Sequence
  Synthetic
aaaugaaauaucucuggga

SEQ ID NO: 487683 - RNA, 20 nt, Artificial Sequence
  Synthetic
aaaaugaaauaucucuggga

SEQ ID NO: 487684 - RNA, 21 nt, Artificial Sequence
  Synthetic
uaaaaugaaauaucucuggga

SEQ ID NO: 487685 - RNA, 22 nt, Artificial Sequence
  Synthetic
auaaaaugaaauaucucuggga

SEQ ID NO: 487686 - RNA, 23 nt, Artificial Sequence
  Synthetic
aauaaaaugaaauaucucuggga

SEQ ID NO: 487687 - RNA, 24 nt, Artificial Sequence
  Synthetic
aaauaaaaugaaauaucucuggga

SEQ ID NO: 487688 - RNA, 18 nt, Artificial Sequence
  Synthetic
uagaaaagaaaaguggga

SEQ ID NO: 487689 - RNA, 19 nt, Artificial Sequence
  Synthetic
auagaaaagaaaaguggga

SEQ ID NO: 487690 - RNA, 20 nt, Artificial Sequence
  Synthetic
gauagaaaagaaaaguggga

SEQ ID NO: 487691 - RNA, 21 nt, Artificial Sequence
  Synthetic
agauagaaaagaaaaguggga

SEQ ID NO: 487692 - RNA, 22 nt, Artificial Sequence
  Synthetic
aagauagaaaagaaaaguggga

SEQ ID NO: 487693 - RNA, 23 nt, Artificial Sequence
  Synthetic
uaagauagaaaagaaaaguggga

SEQ ID NO: 487694 - RNA, 24 nt, Artificial Sequence
  Synthetic
uuaagauagaaaagaaaaguggga

SEQ ID NO: 487695 - RNA, 18 nt, Artificial Sequence
  Synthetic
auuugagcugaaguggga

SEQ ID NO: 487696 - RNA, 19 nt, Artificial Sequence
  Synthetic
cauuugagcugaaguggga

SEQ ID NO: 487697 - RNA, 20 nt, Artificial Sequence
  Synthetic
acauuugagcugaaguggga

SEQ ID NO: 487698 - RNA, 21 nt, Artificial Sequence
  Synthetic
cacauuugagcugaaguggga

SEQ ID NO: 487699 - RNA, 22 nt, Artificial Sequence
  Synthetic
ucacauuugagcugaaguggga

SEQ ID NO: 487700 - RNA, 23 nt, Artificial Sequence
  Synthetic
uucacauuugagcugaaguggga

SEQ ID NO: 487701 - RNA, 24 nt, Artificial Sequence
  Synthetic
auucacauuugagcugaaguggga

SEQ ID NO: 487702 - RNA, 18 nt, Artificial Sequence
  Synthetic
acucacucguaaguggga

SEQ ID NO: 487703 - RNA, 19 nt, Artificial Sequence
  Synthetic
gacucacucguaaguggga

SEQ ID NO: 487704 - RNA, 20 nt, Artificial Sequence
  Synthetic
ggacucacucguaaguggga

SEQ ID NO: 487705 - RNA, 21 nt, Artificial Sequence
  Synthetic
uggacucacucguaaguggga

SEQ ID NO: 487706 - RNA, 22 nt, Artificial Sequence
  Synthetic
auggacucacucguaaguggga

SEQ ID NO: 487707 - RNA, 23 nt, Artificial Sequence
  Synthetic
cauggacucacucguaaguggga

SEQ ID NO: 487708 - RNA, 24 nt, Artificial Sequence
  Synthetic
gcauggacucacucguaaguggga

SEQ ID NO: 487709 - RNA, 18 nt, Artificial Sequence
  Synthetic
aaguggcucucaguggga

SEQ ID NO: 487710 - RNA, 19 nt, Artificial Sequence
  Synthetic
aaaguggcucucaguggga

SEQ ID NO: 487711 - RNA, 20 nt, Artificial Sequence
  Synthetic
gaaaguggcucucaguggga

SEQ ID NO: 487712 - RNA, 21 nt, Artificial Sequence
  Synthetic
ugaaaguggcucucaguggga

SEQ ID NO: 487713 - RNA, 22 nt, Artificial Sequence
  Synthetic
augaaaguggcucucaguggga

SEQ ID NO: 487714 - RNA, 23 nt, Artificial Sequence
  Synthetic
gaugaaaguggcucucaguggga

SEQ ID NO: 487715 - RNA, 24 nt, Artificial Sequence
  Synthetic
cgaugaaaguggcucucaguggga

SEQ ID NO: 487716 - RNA, 18 nt, Artificial Sequence
  Synthetic
uauuuaggggagguggga

SEQ ID NO: 487717 - RNA, 19 nt, Artificial Sequence
  Synthetic
uuauuuaggggagguggga

SEQ ID NO: 487718 - RNA, 20 nt, Artificial Sequence
  Synthetic
uuuauuuaggggagguggga

SEQ ID NO: 487719 - RNA, 21 nt, Artificial Sequence
  Synthetic
uuuuauuuaggggagguggga

SEQ ID NO: 487720 - RNA, 22 nt, Artificial Sequence
  Synthetic
auuuuauuuaggggagguggga

SEQ ID NO: 487721 - RNA, 23 nt, Artificial Sequence
  Synthetic
aauuuuauuuaggggagguggga

SEQ ID NO: 487722 - RNA, 24 nt, Artificial Sequence
  Synthetic
gaauuuuauuuaggggagguggga

SEQ ID NO: 487723 - RNA, 18 nt, Artificial Sequence
  Synthetic
ugggaggcugagguggga

SEQ ID NO: 487724 - RNA, 19 nt, Artificial Sequence
  Synthetic
uugggaggcugagguggga

SEQ ID NO: 487725 - RNA, 20 nt, Artificial Sequence
  Synthetic
cuugggaggcugagguggga

SEQ ID NO: 487726 - RNA, 21 nt, Artificial Sequence
  Synthetic
acuugggaggcugagguggga

SEQ ID NO: 487727 - RNA, 22 nt, Artificial Sequence
  Synthetic
cacuugggaggcugagguggga

SEQ ID NO: 487728 - RNA, 23 nt, Artificial Sequence
  Synthetic
ccacuugggaggcugagguggga

SEQ ID NO: 487729 - RNA, 24 nt, Artificial Sequence
  Synthetic
gccacuugggaggcugagguggga

SEQ ID NO: 487730 - RNA, 18 nt, Artificial Sequence
  Synthetic
ucucacucuuagguggga

SEQ ID NO: 487731 - RNA, 19 nt, Artificial Sequence
  Synthetic
uucucacucuuagguggga

SEQ ID NO: 487732 - RNA, 20 nt, Artificial Sequence
  Synthetic
guucucacucuuagguggga

SEQ ID NO: 487733 - RNA, 21 nt, Artificial Sequence
  Synthetic
uguucucacucuuagguggga

SEQ ID NO: 487734 - RNA, 22 nt, Artificial Sequence
  Synthetic
auguucucacucuuagguggga

SEQ ID NO: 487735 - RNA, 23 nt, Artificial Sequence
  Synthetic
cauguucucacucuuagguggga

SEQ ID NO: 487736 - RNA, 24 nt, Artificial Sequence
  Synthetic
gcauguucucacucuuagguggga

SEQ ID NO: 487737 - RNA, 18 nt, Artificial Sequence
  Synthetic
aagggcgagaggguggga

SEQ ID NO: 487738 - RNA, 19 nt, Artificial Sequence
  Synthetic
gaagggcgagaggguggga

SEQ ID NO: 487739 - RNA, 20 nt, Artificial Sequence
  Synthetic
agaagggcgagaggguggga

SEQ ID NO: 487740 - RNA, 21 nt, Artificial Sequence
  Synthetic
cagaagggcgagaggguggga

SEQ ID NO: 487741 - RNA, 22 nt, Artificial Sequence
  Synthetic
ucagaagggcgagaggguggga

SEQ ID NO: 487742 - RNA, 23 nt, Artificial Sequence
  Synthetic
cucagaagggcgagaggguggga

SEQ ID NO: 487743 - RNA, 24 nt, Artificial Sequence
  Synthetic
acucagaagggcgagaggguggga

SEQ ID NO: 487744 - RNA, 18 nt, Artificial Sequence
  Synthetic
gggaaagggaugguggga

SEQ ID NO: 487745 - RNA, 19 nt, Artificial Sequence
  Synthetic
agggaaagggaugguggga

SEQ ID NO: 487746 - RNA, 20 nt, Artificial Sequence
  Synthetic
aagggaaagggaugguggga

SEQ ID NO: 487747 - RNA, 21 nt, Artificial Sequence
  Synthetic
aaagggaaagggaugguggga

SEQ ID NO: 487748 - RNA, 22 nt, Artificial Sequence
  Synthetic
gaaagggaaagggaugguggga

SEQ ID NO: 487749 - RNA, 23 nt, Artificial Sequence
  Synthetic
ggaaagggaaagggaugguggga

SEQ ID NO: 487750 - RNA, 24 nt, Artificial Sequence
  Synthetic
gggaaagggaaagggaugguggga

SEQ ID NO: 487751 - RNA, 18 nt, Artificial Sequence
  Synthetic
ugaauacgagugguggga

SEQ ID NO: 487752 - RNA, 19 nt, Artificial Sequence
  Synthetic
uugaauacgagugguggga

SEQ ID NO: 487753 - RNA, 20 nt, Artificial Sequence
  Synthetic
guugaauacgagugguggga

SEQ ID NO: 487754 - RNA, 21 nt, Artificial Sequence
  Synthetic
uguugaauacgagugguggga

SEQ ID NO: 487755 - RNA, 22 nt, Artificial Sequence
  Synthetic
auguugaauacgagugguggga

SEQ ID NO: 487756 - RNA, 23 nt, Artificial Sequence
  Synthetic
uauguugaauacgagugguggga

SEQ ID NO: 487757 - RNA, 24 nt, Artificial Sequence
  Synthetic
uuauguugaauacgagugguggga

SEQ ID NO: 487758 - RNA, 18 nt, Artificial Sequence
  Synthetic
ggacuaguagauguggga

SEQ ID NO: 487759 - RNA, 19 nt, Artificial Sequence
  Synthetic
cggacuaguagauguggga

SEQ ID NO: 487760 - RNA, 20 nt, Artificial Sequence
  Synthetic
gcggacuaguagauguggga

SEQ ID NO: 487761 - RNA, 21 nt, Artificial Sequence
  Synthetic
cgcggacuaguagauguggga

SEQ ID NO: 487762 - RNA, 22 nt, Artificial Sequence
  Synthetic
ccgcggacuaguagauguggga

SEQ ID NO: 487763 - RNA, 23 nt, Artificial Sequence
  Synthetic
accgcggacuaguagauguggga

SEQ ID NO: 487764 - RNA, 24 nt, Artificial Sequence
  Synthetic
uaccgcggacuaguagauguggga

SEQ ID NO: 487765 - RNA, 18 nt, Artificial Sequence
  Synthetic
aauuaagccuguguggga

SEQ ID NO: 487766 - RNA, 19 nt, Artificial Sequence
  Synthetic
uaauuaagccuguguggga

SEQ ID NO: 487767 - RNA, 20 nt, Artificial Sequence
  Synthetic
auaauuaagccuguguggga

SEQ ID NO: 487768 - RNA, 21 nt, Artificial Sequence
  Synthetic
uauaauuaagccuguguggga

SEQ ID NO: 487769 - RNA, 22 nt, Artificial Sequence
  Synthetic
uuauaauuaagccuguguggga

SEQ ID NO: 487770 - RNA, 23 nt, Artificial Sequence
  Synthetic
auuauaauuaagccuguguggga

SEQ ID NO: 487771 - RNA, 24 nt, Artificial Sequence
  Synthetic
uauuauaauuaagccuguguggga

SEQ ID NO: 487772 - RNA, 18 nt, Artificial Sequence
  Synthetic
auucuucggguuguggga

SEQ ID NO: 487773 - RNA, 19 nt, Artificial Sequence
  Synthetic
gauucuucggguuguggga

SEQ ID NO: 487774 - RNA, 20 nt, Artificial Sequence
  Synthetic
ggauucuucggguuguggga

SEQ ID NO: 487775 - RNA, 21 nt, Artificial Sequence
  Synthetic
aggauucuucggguuguggga

SEQ ID NO: 487776 - RNA, 22 nt, Artificial Sequence
  Synthetic
aaggauucuucggguuguggga

SEQ ID NO: 487777 - RNA, 23 nt, Artificial Sequence
  Synthetic
aaaggauucuucggguuguggga

SEQ ID NO: 487778 - RNA, 24 nt, Artificial Sequence
  Synthetic
caaaggauucuucggguuguggga

SEQ ID NO: 487779 - RNA, 18 nt, Artificial Sequence
  Synthetic
ucugagggaaaauuggga

SEQ ID NO: 487780 - RNA, 19 nt, Artificial Sequence
  Synthetic
aucugagggaaaauuggga

SEQ ID NO: 487781 - RNA, 20 nt, Artificial Sequence
  Synthetic
aaucugagggaaaauuggga

SEQ ID NO: 487782 - RNA, 21 nt, Artificial Sequence
  Synthetic
aaaucugagggaaaauuggga

SEQ ID NO: 487783 - RNA, 22 nt, Artificial Sequence
  Synthetic
aaaaucugagggaaaauuggga

SEQ ID NO: 487784 - RNA, 23 nt, Artificial Sequence
  Synthetic
gaaaaucugagggaaaauuggga

SEQ ID NO: 487785 - RNA, 24 nt, Artificial Sequence
  Synthetic
agaaaaucugagggaaaauuggga

SEQ ID NO: 487786 - RNA, 18 nt, Artificial Sequence
  Synthetic
aaugaagugagauuggga

SEQ ID NO: 487787 - RNA, 19 nt, Artificial Sequence
  Synthetic
aaaugaagugagauuggga

SEQ ID NO: 487788 - RNA, 20 nt, Artificial Sequence
  Synthetic
aaaaugaagugagauuggga

SEQ ID NO: 487789 - RNA, 21 nt, Artificial Sequence
  Synthetic
gaaaaugaagugagauuggga

SEQ ID NO: 487790 - RNA, 22 nt, Artificial Sequence
  Synthetic
ggaaaaugaagugagauuggga

SEQ ID NO: 487791 - RNA, 23 nt, Artificial Sequence
  Synthetic
gggaaaaugaagugagauuggga

SEQ ID NO: 487792 - RNA, 24 nt, Artificial Sequence
  Synthetic
agggaaaaugaagugagauuggga

SEQ ID NO: 487793 - RNA, 18 nt, Artificial Sequence
  Synthetic
ugugucaguagauuggga

SEQ ID NO: 487794 - RNA, 19 nt, Artificial Sequence
  Synthetic
augugucaguagauuggga

SEQ ID NO: 487795 - RNA, 20 nt, Artificial Sequence
  Synthetic
caugugucaguagauuggga

SEQ ID NO: 487796 - RNA, 21 nt, Artificial Sequence
  Synthetic
acaugugucaguagauuggga

SEQ ID NO: 487797 - RNA, 22 nt, Artificial Sequence
  Synthetic
uacaugugucaguagauuggga

SEQ ID NO: 487798 - RNA, 23 nt, Artificial Sequence
  Synthetic
auacaugugucaguagauuggga

SEQ ID NO: 487799 - RNA, 24 nt, Artificial Sequence
  Synthetic
aauacaugugucaguagauuggga

SEQ ID NO: 487800 - RNA, 18 nt, Artificial Sequence
  Synthetic
ggaagguaaguauuggga

SEQ ID NO: 487801 - RNA, 19 nt, Artificial Sequence
  Synthetic
aggaagguaaguauuggga

SEQ ID NO: 487802 - RNA, 20 nt, Artificial Sequence
  Synthetic
aaggaagguaaguauuggga

SEQ ID NO: 487803 - RNA, 21 nt, Artificial Sequence
  Synthetic
aaaggaagguaaguauuggga

SEQ ID NO: 487804 - RNA, 22 nt, Artificial Sequence
  Synthetic
aaaaggaagguaaguauuggga

SEQ ID NO: 487805 - RNA, 23 nt, Artificial Sequence
  Synthetic
uaaaaggaagguaaguauuggga

SEQ ID NO: 487806 - RNA, 24 nt, Artificial Sequence
  Synthetic
cuaaaaggaagguaaguauuggga

SEQ ID NO: 487807 - RNA, 18 nt, Artificial Sequence
  Synthetic
uaaguggggagcuuggga

SEQ ID NO: 487808 - RNA, 19 nt, Artificial Sequence
  Synthetic
cuaaguggggagcuuggga

SEQ ID NO: 487809 - RNA, 20 nt, Artificial Sequence
  Synthetic
ucuaaguggggagcuuggga

SEQ ID NO: 487810 - RNA, 21 nt, Artificial Sequence
  Synthetic
cucuaaguggggagcuuggga

SEQ ID NO: 487811 - RNA, 22 nt, Artificial Sequence
  Synthetic
acucuaaguggggagcuuggga

SEQ ID NO: 487812 - RNA, 23 nt, Artificial Sequence
  Synthetic
gacucuaaguggggagcuuggga

SEQ ID NO: 487813 - RNA, 24 nt, Artificial Sequence
  Synthetic
ggacucuaaguggggagcuuggga

SEQ ID NO: 487814 - RNA, 18 nt, Artificial Sequence
  Synthetic
agaguucagggcuuggga

SEQ ID NO: 487815 - RNA, 19 nt, Artificial Sequence
  Synthetic
cagaguucagggcuuggga

SEQ ID NO: 487816 - RNA, 20 nt, Artificial Sequence
  Synthetic
ucagaguucagggcuuggga

SEQ ID NO: 487817 - RNA, 21 nt, Artificial Sequence
  Synthetic
cucagaguucagggcuuggga

SEQ ID NO: 487818 - RNA, 22 nt, Artificial Sequence
  Synthetic
ccucagaguucagggcuuggga

SEQ ID NO: 487819 - RNA, 23 nt, Artificial Sequence
  Synthetic
cccucagaguucagggcuuggga

SEQ ID NO: 487820 - RNA, 24 nt, Artificial Sequence
  Synthetic
ccccucagaguucagggcuuggga

SEQ ID NO: 487821 - RNA, 18 nt, Artificial Sequence
  Synthetic
uauccaaaaugcuuggga

SEQ ID NO: 487822 - RNA, 19 nt, Artificial Sequence
  Synthetic
auauccaaaaugcuuggga

SEQ ID NO: 487823 - RNA, 20 nt, Artificial Sequence
  Synthetic
cauauccaaaaugcuuggga

SEQ ID NO: 487824 - RNA, 21 nt, Artificial Sequence
  Synthetic
ccauauccaaaaugcuuggga

SEQ ID NO: 487825 - RNA, 22 nt, Artificial Sequence
  Synthetic
cccauauccaaaaugcuuggga

SEQ ID NO: 487826 - RNA, 23 nt, Artificial Sequence
  Synthetic
ucccauauccaaaaugcuuggga

SEQ ID NO: 487827 - RNA, 24 nt, Artificial Sequence
  Synthetic
aucccauauccaaaaugcuuggga

SEQ ID NO: 487828 - RNA, 18 nt, Artificial Sequence
  Synthetic
aaagaaaaaagguuggga

SEQ ID NO: 487829 - RNA, 19 nt, Artificial Sequence
  Synthetic
gaaagaaaaaagguuggga

SEQ ID NO: 487830 - RNA, 20 nt, Artificial Sequence
  Synthetic
ggaaagaaaaaagguuggga

SEQ ID NO: 487831 - RNA, 21 nt, Artificial Sequence
  Synthetic
uggaaagaaaaaagguuggga

SEQ ID NO: 487832 - RNA, 22 nt, Artificial Sequence
  Synthetic
auggaaagaaaaaagguuggga

SEQ ID NO: 487833 - RNA, 23 nt, Artificial Sequence
  Synthetic
aauggaaagaaaaaagguuggga

SEQ ID NO: 487834 - RNA, 24 nt, Artificial Sequence
  Synthetic
gaauggaaagaaaaaagguuggga

SEQ ID NO: 487835 - RNA, 18 nt, Artificial Sequence
  Synthetic
uuguguuaaagguuggga

SEQ ID NO: 487836 - RNA, 19 nt, Artificial Sequence
  Synthetic
uuuguguuaaagguuggga

SEQ ID NO: 487837 - RNA, 20 nt, Artificial Sequence
  Synthetic
uuuuguguuaaagguuggga

SEQ ID NO: 487838 - RNA, 21 nt, Artificial Sequence
  Synthetic
auuuuguguuaaagguuggga

SEQ ID NO: 487839 - RNA, 22 nt, Artificial Sequence
  Synthetic
uauuuuguguuaaagguuggga

SEQ ID NO: 487840 - RNA, 23 nt, Artificial Sequence
  Synthetic
uuauuuuguguuaaagguuggga

SEQ ID NO: 487841 - RNA, 24 nt, Artificial Sequence
  Synthetic
auuauuuuguguuaaagguuggga

SEQ ID NO: 487842 - RNA, 18 nt, Artificial Sequence
  Synthetic
aaagaauugggguuggga

SEQ ID NO: 487843 - RNA, 19 nt, Artificial Sequence
  Synthetic
gaaagaauugggguuggga

SEQ ID NO: 487844 - RNA, 20 nt, Artificial Sequence
  Synthetic
agaaagaauugggguuggga

SEQ ID NO: 487845 - RNA, 21 nt, Artificial Sequence
  Synthetic
aagaaagaauugggguuggga

SEQ ID NO: 487846 - RNA, 22 nt, Artificial Sequence
  Synthetic
aaagaaagaauugggguuggga

SEQ ID NO: 487847 - RNA, 23 nt, Artificial Sequence
  Synthetic
aaaagaaagaauugggguuggga

SEQ ID NO: 487848 - RNA, 24 nt, Artificial Sequence
  Synthetic
aaaaagaaagaauugggguuggga

SEQ ID NO: 487849 - RNA, 18 nt, Artificial Sequence
  Synthetic
ucuuugaacaauuuggga

SEQ ID NO: 487850 - RNA, 19 nt, Artificial Sequence
  Synthetic
aucuuugaacaauuuggga

SEQ ID NO: 487851 - RNA, 20 nt, Artificial Sequence
  Synthetic
aaucuuugaacaauuuggga

SEQ ID NO: 487852 - RNA, 21 nt, Artificial Sequence
  Synthetic
uaaucuuugaacaauuuggga

SEQ ID NO: 487853 - RNA, 22 nt, Artificial Sequence
  Synthetic
guaaucuuugaacaauuuggga

SEQ ID NO: 487854 - RNA, 23 nt, Artificial Sequence
  Synthetic
cguaaucuuugaacaauuuggga

SEQ ID NO: 487855 - RNA, 24 nt, Artificial Sequence
  Synthetic
gcguaaucuuugaacaauuuggga

SEQ ID NO: 487856 - RNA, 18 nt, Artificial Sequence
  Synthetic
auccauuuuaauuuggga

SEQ ID NO: 487857 - RNA, 19 nt, Artificial Sequence
  Synthetic
uauccauuuuaauuuggga

SEQ ID NO: 487858 - RNA, 20 nt, Artificial Sequence
  Synthetic
auauccauuuuaauuuggga

SEQ ID NO: 487859 - RNA, 21 nt, Artificial Sequence
  Synthetic
aauauccauuuuaauuuggga

SEQ ID NO: 487860 - RNA, 22 nt, Artificial Sequence
  Synthetic
uaauauccauuuuaauuuggga

SEQ ID NO: 487861 - RNA, 23 nt, Artificial Sequence
  Synthetic
cuaauauccauuuuaauuuggga

SEQ ID NO: 487862 - RNA, 24 nt, Artificial Sequence
  Synthetic
ucuaauauccauuuuaauuuggga

SEQ ID NO: 487863 - RNA, 18 nt, Artificial Sequence
  Synthetic
agaguugcagauuuggga

SEQ ID NO: 487864 - RNA, 19 nt, Artificial Sequence
  Synthetic
cagaguugcagauuuggga

SEQ ID NO: 487865 - RNA, 20 nt, Artificial Sequence
  Synthetic
ucagaguugcagauuuggga

SEQ ID NO: 487866 - RNA, 21 nt, Artificial Sequence
  Synthetic
cucagaguugcagauuuggga

SEQ ID NO: 487867 - RNA, 22 nt, Artificial Sequence
  Synthetic
ccucagaguugcagauuuggga

SEQ ID NO: 487868 - RNA, 23 nt, Artificial Sequence
  Synthetic
gccucagaguugcagauuuggga

SEQ ID NO: 487869 - RNA, 24 nt, Artificial Sequence
  Synthetic
ggccucagaguugcagauuuggga

SEQ ID NO: 487870 - RNA, 18 nt, Artificial Sequence
  Synthetic
cucuuuaguuauuuggga

SEQ ID NO: 487871 - RNA, 19 nt, Artificial Sequence
  Synthetic
acucuuuaguuauuuggga

SEQ ID NO: 487872 - RNA, 20 nt, Artificial Sequence
  Synthetic
aacucuuuaguuauuuggga

SEQ ID NO: 487873 - RNA, 21 nt, Artificial Sequence
  Synthetic
aaacucuuuaguuauuuggga

SEQ ID NO: 487874 - RNA, 22 nt, Artificial Sequence
  Synthetic
uaaacucuuuaguuauuuggga

SEQ ID NO: 487875 - RNA, 23 nt, Artificial Sequence
  Synthetic
uuaaacucuuuaguuauuuggga

SEQ ID NO: 487876 - RNA, 24 nt, Artificial Sequence
  Synthetic
uuuaaacucuuuaguuauuuggga

SEQ ID NO: 487877 - RNA, 18 nt, Artificial Sequence
  Synthetic
uuccuggaugcuuuggga

SEQ ID NO: 487878 - RNA, 19 nt, Artificial Sequence
  Synthetic
uuuccuggaugcuuuggga

SEQ ID NO: 487879 - RNA, 20 nt, Artificial Sequence
  Synthetic
cuuuccuggaugcuuuggga

SEQ ID NO: 487880 - RNA, 21 nt, Artificial Sequence
  Synthetic
ucuuuccuggaugcuuuggga

SEQ ID NO: 487881 - RNA, 22 nt, Artificial Sequence
  Synthetic
gucuuuccuggaugcuuuggga

SEQ ID NO: 487882 - RNA, 23 nt, Artificial Sequence
  Synthetic
agucuuuccuggaugcuuuggga

SEQ ID NO: 487883 - RNA, 24 nt, Artificial Sequence
  Synthetic
cagucuuuccuggaugcuuuggga

SEQ ID NO: 487884 - RNA, 18 nt, Artificial Sequence
  Synthetic
ccacaguagauuuuggga

SEQ ID NO: 487885 - RNA, 19 nt, Artificial Sequence
  Synthetic
cccacaguagauuuuggga

SEQ ID NO: 487886 - RNA, 20 nt, Artificial Sequence
  Synthetic
acccacaguagauuuuggga

SEQ ID NO: 487887 - RNA, 21 nt, Artificial Sequence
  Synthetic
cacccacaguagauuuuggga

SEQ ID NO: 487888 - RNA, 22 nt, Artificial Sequence
  Synthetic
ucacccacaguagauuuuggga

SEQ ID NO: 487889 - RNA, 23 nt, Artificial Sequence
  Synthetic
aucacccacaguagauuuuggga

SEQ ID NO: 487890 - RNA, 24 nt, Artificial Sequence
  Synthetic
uaucacccacaguagauuuuggga

SEQ ID NO: 487891 - RNA, 18 nt, Artificial Sequence
  Synthetic
uuaguaugucuuuuggga

SEQ ID NO: 487892 - RNA, 19 nt, Artificial Sequence
  Synthetic
uuuaguaugucuuuuggga

SEQ ID NO: 487893 - RNA, 20 nt, Artificial Sequence
  Synthetic
uuuuaguaugucuuuuggga

SEQ ID NO: 487894 - RNA, 21 nt, Artificial Sequence
  Synthetic
cuuuuaguaugucuuuuggga

SEQ ID NO: 487895 - RNA, 22 nt, Artificial Sequence
  Synthetic
gcuuuuaguaugucuuuuggga

SEQ ID NO: 487896 - RNA, 23 nt, Artificial Sequence
  Synthetic
ggcuuuuaguaugucuuuuggga

SEQ ID NO: 487897 - RNA, 24 nt, Artificial Sequence
  Synthetic
aggcuuuuaguaugucuuuuggga

SEQ ID NO: 487898 - RNA, 18 nt, Artificial Sequence
  Synthetic
uccaaagggaaaaaugga

SEQ ID NO: 487899 - RNA, 19 nt, Artificial Sequence
  Synthetic
uuccaaagggaaaaaugga

SEQ ID NO: 487900 - RNA, 20 nt, Artificial Sequence
  Synthetic
uuuccaaagggaaaaaugga

SEQ ID NO: 487901 - RNA, 21 nt, Artificial Sequence
  Synthetic
cuuuccaaagggaaaaaugga

SEQ ID NO: 487902 - RNA, 22 nt, Artificial Sequence
  Synthetic
acuuuccaaagggaaaaaugga

SEQ ID NO: 487903 - RNA, 23 nt, Artificial Sequence
  Synthetic
gacuuuccaaagggaaaaaugga

SEQ ID NO: 487904 - RNA, 24 nt, Artificial Sequence
  Synthetic
agacuuuccaaagggaaaaaugga

SEQ ID NO: 487905 - RNA, 18 nt, Artificial Sequence
  Synthetic
uucucuaaagaaaaugga

SEQ ID NO: 487906 - RNA, 19 nt, Artificial Sequence
  Synthetic
auucucuaaagaaaaugga

SEQ ID NO: 487907 - RNA, 20 nt, Artificial Sequence
  Synthetic
uauucucuaaagaaaaugga

SEQ ID NO: 487908 - RNA, 21 nt, Artificial Sequence
  Synthetic
uuauucucuaaagaaaaugga

SEQ ID NO: 487909 - RNA, 22 nt, Artificial Sequence
  Synthetic
auuauucucuaaagaaaaugga

SEQ ID NO: 487910 - RNA, 23 nt, Artificial Sequence
  Synthetic
cauuauucucuaaagaaaaugga

SEQ ID NO: 487911 - RNA, 24 nt, Artificial Sequence
  Synthetic
ucauuauucucuaaagaaaaugga

SEQ ID NO: 487912 - RNA, 18 nt, Artificial Sequence
  Synthetic
agcaguuaggaaaaugga

SEQ ID NO: 487913 - RNA, 19 nt, Artificial Sequence
  Synthetic
uagcaguuaggaaaaugga

SEQ ID NO: 487914 - RNA, 20 nt, Artificial Sequence
  Synthetic
cuagcaguuaggaaaaugga

SEQ ID NO: 487915 - RNA, 21 nt, Artificial Sequence
  Synthetic
ucuagcaguuaggaaaaugga

SEQ ID NO: 487916 - RNA, 22 nt, Artificial Sequence
  Synthetic
aucuagcaguuaggaaaaugga

SEQ ID NO: 487917 - RNA, 23 nt, Artificial Sequence
  Synthetic
aaucuagcaguuaggaaaaugga

SEQ ID NO: 487918 - RNA, 24 nt, Artificial Sequence
  Synthetic
aaaucuagcaguuaggaaaaugga

SEQ ID NO: 487919 - RNA, 18 nt, Artificial Sequence
  Synthetic
gaaaacagaacaaaugga

SEQ ID NO: 487920 - RNA, 19 nt, Artificial Sequence
  Synthetic
agaaaacagaacaaaugga

SEQ ID NO: 487921 - RNA, 20 nt, Artificial Sequence
  Synthetic
aagaaaacagaacaaaugga

SEQ ID NO: 487922 - RNA, 21 nt, Artificial Sequence
  Synthetic
gaagaaaacagaacaaaugga

SEQ ID NO: 487923 - RNA, 22 nt, Artificial Sequence
  Synthetic
ggaagaaaacagaacaaaugga

SEQ ID NO: 487924 - RNA, 23 nt, Artificial Sequence
  Synthetic
aggaagaaaacagaacaaaugga

SEQ ID NO: 487925 - RNA, 24 nt, Artificial Sequence
  Synthetic
gaggaagaaaacagaacaaaugga

SEQ ID NO: 487926 - RNA, 18 nt, Artificial Sequence
  Synthetic
aaugugauuacaaaugga

SEQ ID NO: 487927 - RNA, 19 nt, Artificial Sequence
  Synthetic
uaaugugauuacaaaugga

SEQ ID NO: 487928 - RNA, 20 nt, Artificial Sequence
  Synthetic
auaaugugauuacaaaugga

SEQ ID NO: 487929 - RNA, 21 nt, Artificial Sequence
  Synthetic
gauaaugugauuacaaaugga

SEQ ID NO: 487930 - RNA, 22 nt, Artificial Sequence
  Synthetic
ggauaaugugauuacaaaugga

SEQ ID NO: 487931 - RNA, 23 nt, Artificial Sequence
  Synthetic
uggauaaugugauuacaaaugga

SEQ ID NO: 487932 - RNA, 24 nt, Artificial Sequence
  Synthetic
auggauaaugugauuacaaaugga

SEQ ID NO: 487933 - RNA, 18 nt, Artificial Sequence
  Synthetic
auccaaauuccaaaugga

SEQ ID NO: 487934 - RNA, 19 nt, Artificial Sequence
  Synthetic
gauccaaauuccaaaugga

SEQ ID NO: 487935 - RNA, 20 nt, Artificial Sequence
  Synthetic
ugauccaaauuccaaaugga

SEQ ID NO: 487936 - RNA, 21 nt, Artificial Sequence
  Synthetic
augauccaaauuccaaaugga

SEQ ID NO: 487937 - RNA, 22 nt, Artificial Sequence
  Synthetic
aaugauccaaauuccaaaugga

SEQ ID NO: 487938 - RNA, 23 nt, Artificial Sequence
  Synthetic
aaaugauccaaauuccaaaugga

SEQ ID NO: 487939 - RNA, 24 nt, Artificial Sequence
  Synthetic
aaaaugauccaaauuccaaaugga

SEQ ID NO: 487940 - RNA, 18 nt, Artificial Sequence
  Synthetic
uaaauuggcucaaaugga

SEQ ID NO: 487941 - RNA, 19 nt, Artificial Sequence
  Synthetic
cuaaauuggcucaaaugga

SEQ ID NO: 487942 - RNA, 20 nt, Artificial Sequence
  Synthetic
ccuaaauuggcucaaaugga

SEQ ID NO: 487943 - RNA, 21 nt, Artificial Sequence
  Synthetic
uccuaaauuggcucaaaugga

SEQ ID NO: 487944 - RNA, 22 nt, Artificial Sequence
  Synthetic
guccuaaauuggcucaaaugga

SEQ ID NO: 487945 - RNA, 23 nt, Artificial Sequence
  Synthetic
uguccuaaauuggcucaaaugga

SEQ ID NO: 487946 - RNA, 24 nt, Artificial Sequence
  Synthetic
auguccuaaauuggcucaaaugga

SEQ ID NO: 487947 - RNA, 18 nt, Artificial Sequence
  Synthetic
gucaguggcagaaaugga

SEQ ID NO: 487948 - RNA, 19 nt, Artificial Sequence
  Synthetic
agucaguggcagaaaugga

SEQ ID NO: 487949 - RNA, 20 nt, Artificial Sequence
  Synthetic
gagucaguggcagaaaugga

SEQ ID NO: 487950 - RNA, 21 nt, Artificial Sequence
  Synthetic
ggagucaguggcagaaaugga

SEQ ID NO: 487951 - RNA, 22 nt, Artificial Sequence
  Synthetic
aggagucaguggcagaaaugga

SEQ ID NO: 487952 - RNA, 23 nt, Artificial Sequence
  Synthetic
gaggagucaguggcagaaaugga

SEQ ID NO: 487953 - RNA, 24 nt, Artificial Sequence
  Synthetic
ggaggagucaguggcagaaaugga

SEQ ID NO: 487954 - RNA, 18 nt, Artificial Sequence
  Synthetic
aagaaguucagaaaugga

SEQ ID NO: 487955 - RNA, 19 nt, Artificial Sequence
  Synthetic
caagaaguucagaaaugga

SEQ ID NO: 487956 - RNA, 20 nt, Artificial Sequence
  Synthetic
acaagaaguucagaaaugga

SEQ ID NO: 487957 - RNA, 21 nt, Artificial Sequence
  Synthetic
aacaagaaguucagaaaugga

SEQ ID NO: 487958 - RNA, 22 nt, Artificial Sequence
  Synthetic
gaacaagaaguucagaaaugga

SEQ ID NO: 487959 - RNA, 23 nt, Artificial Sequence
  Synthetic
ugaacaagaaguucagaaaugga

SEQ ID NO: 487960 - RNA, 24 nt, Artificial Sequence
  Synthetic
gugaacaagaaguucagaaaugga

SEQ ID NO: 487961 - RNA, 18 nt, Artificial Sequence
  Synthetic
cucucuucaggaaaugga

SEQ ID NO: 487962 - RNA, 19 nt, Artificial Sequence
  Synthetic
ccucucuucaggaaaugga

SEQ ID NO: 487963 - RNA, 20 nt, Artificial Sequence
  Synthetic
uccucucuucaggaaaugga

SEQ ID NO: 487964 - RNA, 21 nt, Artificial Sequence
  Synthetic
cuccucucuucaggaaaugga

SEQ ID NO: 487965 - RNA, 22 nt, Artificial Sequence
  Synthetic
gcuccucucuucaggaaaugga

SEQ ID NO: 487966 - RNA, 23 nt, Artificial Sequence
  Synthetic
ugcuccucucuucaggaaaugga

SEQ ID NO: 487967 - RNA, 24 nt, Artificial Sequence
  Synthetic
cugcuccucucuucaggaaaugga

SEQ ID NO: 487968 - RNA, 18 nt, Artificial Sequence
  Synthetic
agaagaaaaauaaaugga

SEQ ID NO: 487969 - RNA, 19 nt, Artificial Sequence
  Synthetic
cagaagaaaaauaaaugga

SEQ ID NO: 487970 - RNA, 20 nt, Artificial Sequence
  Synthetic
gcagaagaaaaauaaaugga

SEQ ID NO: 487971 - RNA, 21 nt, Artificial Sequence
  Synthetic
ggcagaagaaaaauaaaugga

SEQ ID NO: 487972 - RNA, 22 nt, Artificial Sequence
  Synthetic
uggcagaagaaaaauaaaugga

SEQ ID NO: 487973 - RNA, 23 nt, Artificial Sequence
  Synthetic
auggcagaagaaaaauaaaugga

SEQ ID NO: 487974 - RNA, 24 nt, Artificial Sequence
  Synthetic
uauggcagaagaaaaauaaaugga

SEQ ID NO: 487975 - RNA, 18 nt, Artificial Sequence
  Synthetic
aauagccagauaaaugga

SEQ ID NO: 487976 - RNA, 19 nt, Artificial Sequence
  Synthetic
uaauagccagauaaaugga

SEQ ID NO: 487977 - RNA, 20 nt, Artificial Sequence
  Synthetic
guaauagccagauaaaugga

SEQ ID NO: 487978 - RNA, 21 nt, Artificial Sequence
  Synthetic
aguaauagccagauaaaugga

SEQ ID NO: 487979 - RNA, 22 nt, Artificial Sequence
  Synthetic
gaguaauagccagauaaaugga

SEQ ID NO: 487980 - RNA, 23 nt, Artificial Sequence
  Synthetic
ggaguaauagccagauaaaugga

SEQ ID NO: 487981 - RNA, 24 nt, Artificial Sequence
  Synthetic
aggaguaauagccagauaaaugga

SEQ ID NO: 487982 - RNA, 18 nt, Artificial Sequence
  Synthetic
cacaguauuauaaaugga

SEQ ID NO: 487983 - RNA, 19 nt, Artificial Sequence
  Synthetic
ucacaguauuauaaaugga

SEQ ID NO: 487984 - RNA, 20 nt, Artificial Sequence
  Synthetic
aucacaguauuauaaaugga

SEQ ID NO: 487985 - RNA, 21 nt, Artificial Sequence
  Synthetic
gaucacaguauuauaaaugga

SEQ ID NO: 487986 - RNA, 22 nt, Artificial Sequence
  Synthetic
ugaucacaguauuauaaaugga

SEQ ID NO: 487987 - RNA, 23 nt, Artificial Sequence
  Synthetic
cugaucacaguauuauaaaugga

SEQ ID NO: 487988 - RNA, 24 nt, Artificial Sequence
  Synthetic
gcugaucacaguauuauaaaugga

SEQ ID NO: 487989 - RNA, 18 nt, Artificial Sequence
  Synthetic
augugauacguaaaugga

SEQ ID NO: 487990 - RNA, 19 nt, Artificial Sequence
  Synthetic
caugugauacguaaaugga

SEQ ID NO: 487991 - RNA, 20 nt, Artificial Sequence
  Synthetic
ucaugugauacguaaaugga

SEQ ID NO: 487992 - RNA, 21 nt, Artificial Sequence
  Synthetic
uucaugugauacguaaaugga

SEQ ID NO: 487993 - RNA, 22 nt, Artificial Sequence
  Synthetic
uuucaugugauacguaaaugga

SEQ ID NO: 487994 - RNA, 23 nt, Artificial Sequence
  Synthetic
auuucaugugauacguaaaugga

SEQ ID NO: 487995 - RNA, 24 nt, Artificial Sequence
  Synthetic
cauuucaugugauacguaaaugga

SEQ ID NO: 487996 - RNA, 18 nt, Artificial Sequence
  Synthetic
cucuccccauuaaaugga

SEQ ID NO: 487997 - RNA, 19 nt, Artificial Sequence
  Synthetic
acucuccccauuaaaugga

SEQ ID NO: 487998 - RNA, 20 nt, Artificial Sequence
  Synthetic
cacucuccccauuaaaugga

SEQ ID NO: 487999 - RNA, 21 nt, Artificial Sequence
  Synthetic
ucacucuccccauuaaaugga

SEQ ID NO: 488000 - RNA, 22 nt, Artificial Sequence
  Synthetic
aucacucuccccauuaaaugga

SEQ ID NO: 488001 - RNA, 23 nt, Artificial Sequence
  Synthetic
aaucacucuccccauuaaaugga

SEQ ID NO: 488002 - RNA, 24 nt, Artificial Sequence
  Synthetic
gaaucacucuccccauuaaaugga

SEQ ID NO: 488003 - RNA, 18 nt, Artificial Sequence
  Synthetic
uucucugaccacaaugga

SEQ ID NO: 488004 - RNA, 19 nt, Artificial Sequence
  Synthetic
cuucucugaccacaaugga

SEQ ID NO: 488005 - RNA, 20 nt, Artificial Sequence
  Synthetic
ucuucucugaccacaaugga

SEQ ID NO: 488006 - RNA, 21 nt, Artificial Sequence
  Synthetic
aucuucucugaccacaaugga

SEQ ID NO: 488007 - RNA, 22 nt, Artificial Sequence
  Synthetic
caucuucucugaccacaaugga

SEQ ID NO: 488008 - RNA, 23 nt, Artificial Sequence
  Synthetic
gcaucuucucugaccacaaugga

SEQ ID NO: 488009 - RNA, 24 nt, Artificial Sequence
  Synthetic
agcaucuucucugaccacaaugga

SEQ ID NO: 488010 - RNA, 18 nt, Artificial Sequence
  Synthetic
auaaagagccagaaugga

SEQ ID NO: 488011 - RNA, 19 nt, Artificial Sequence
  Synthetic
aauaaagagccagaaugga

SEQ ID NO: 488012 - RNA, 20 nt, Artificial Sequence
  Synthetic
caauaaagagccagaaugga

SEQ ID NO: 488013 - RNA, 21 nt, Artificial Sequence
  Synthetic
gcaauaaagagccagaaugga

SEQ ID NO: 488014 - RNA, 22 nt, Artificial Sequence
  Synthetic
ggcaauaaagagccagaaugga

SEQ ID NO: 488015 - RNA, 23 nt, Artificial Sequence
  Synthetic
gggcaauaaagagccagaaugga

SEQ ID NO: 488016 - RNA, 24 nt, Artificial Sequence
  Synthetic
ugggcaauaaagagccagaaugga

SEQ ID NO: 488017 - RNA, 18 nt, Artificial Sequence
  Synthetic
acauaagaucagaaugga

SEQ ID NO: 488018 - RNA, 19 nt, Artificial Sequence
  Synthetic
cacauaagaucagaaugga

SEQ ID NO: 488019 - RNA, 20 nt, Artificial Sequence
  Synthetic
acacauaagaucagaaugga

SEQ ID NO: 488020 - RNA, 21 nt, Artificial Sequence
  Synthetic
aacacauaagaucagaaugga

SEQ ID NO: 488021 - RNA, 22 nt, Artificial Sequence
  Synthetic
uaacacauaagaucagaaugga

SEQ ID NO: 488022 - RNA, 23 nt, Artificial Sequence
  Synthetic
uuaacacauaagaucagaaugga

SEQ ID NO: 488023 - RNA, 24 nt, Artificial Sequence
  Synthetic
uuuaacacauaagaucagaaugga

SEQ ID NO: 488024 - RNA, 18 nt, Artificial Sequence
  Synthetic
uugggaugagagaaugga

SEQ ID NO: 488025 - RNA, 19 nt, Artificial Sequence
  Synthetic
auugggaugagagaaugga

SEQ ID NO: 488026 - RNA, 20 nt, Artificial Sequence
  Synthetic
aauugggaugagagaaugga

SEQ ID NO: 488027 - RNA, 21 nt, Artificial Sequence
  Synthetic
gaauugggaugagagaaugga

SEQ ID NO: 488028 - RNA, 22 nt, Artificial Sequence
  Synthetic
ugaauugggaugagagaaugga

SEQ ID NO: 488029 - RNA, 23 nt, Artificial Sequence
  Synthetic
uugaauugggaugagagaaugga

SEQ ID NO: 488030 - RNA, 24 nt, Artificial Sequence
  Synthetic
uuugaauugggaugagagaaugga

SEQ ID NO: 488031 - RNA, 18 nt, Artificial Sequence
  Synthetic
aaaggacaaacgaaugga

SEQ ID NO: 488032 - RNA, 19 nt, Artificial Sequence
  Synthetic
gaaaggacaaacgaaugga

SEQ ID NO: 488033 - RNA, 20 nt, Artificial Sequence
  Synthetic
ugaaaggacaaacgaaugga

SEQ ID NO: 488034 - RNA, 21 nt, Artificial Sequence
  Synthetic
cugaaaggacaaacgaaugga

SEQ ID NO: 488035 - RNA, 22 nt, Artificial Sequence
  Synthetic
ucugaaaggacaaacgaaugga

SEQ ID NO: 488036 - RNA, 23 nt, Artificial Sequence
  Synthetic
cucugaaaggacaaacgaaugga

SEQ ID NO: 488037 - RNA, 24 nt, Artificial Sequence
  Synthetic
acucugaaaggacaaacgaaugga

SEQ ID NO: 488038 - RNA, 18 nt, Artificial Sequence
  Synthetic
ucuuuaaauaggaaugga

SEQ ID NO: 488039 - RNA, 19 nt, Artificial Sequence
  Synthetic
cucuuuaaauaggaaugga

SEQ ID NO: 488040 - RNA, 20 nt, Artificial Sequence
  Synthetic
acucuuuaaauaggaaugga

SEQ ID NO: 488041 - RNA, 21 nt, Artificial Sequence
  Synthetic
aacucuuuaaauaggaaugga

SEQ ID NO: 488042 - RNA, 22 nt, Artificial Sequence
  Synthetic
aaacucuuuaaauaggaaugga

SEQ ID NO: 488043 - RNA, 23 nt, Artificial Sequence
  Synthetic
caaacucuuuaaauaggaaugga

SEQ ID NO: 488044 - RNA, 24 nt, Artificial Sequence
  Synthetic
acaaacucuuuaaauaggaaugga

SEQ ID NO: 488045 - RNA, 18 nt, Artificial Sequence
  Synthetic
agaaacuaggggaaugga

SEQ ID NO: 488046 - RNA, 19 nt, Artificial Sequence
  Synthetic
cagaaacuaggggaaugga

SEQ ID NO: 488047 - RNA, 20 nt, Artificial Sequence
  Synthetic
ucagaaacuaggggaaugga

SEQ ID NO: 488048 - RNA, 21 nt, Artificial Sequence
  Synthetic
aucagaaacuaggggaaugga

SEQ ID NO: 488049 - RNA, 22 nt, Artificial Sequence
  Synthetic
caucagaaacuaggggaaugga

SEQ ID NO: 488050 - RNA, 23 nt, Artificial Sequence
  Synthetic
ccaucagaaacuaggggaaugga

SEQ ID NO: 488051 - RNA, 24 nt, Artificial Sequence
  Synthetic
accaucagaaacuaggggaaugga

SEQ ID NO: 488052 - RNA, 18 nt, Artificial Sequence
  Synthetic
ugcuggaggaugaaugga

SEQ ID NO: 488053 - RNA, 19 nt, Artificial Sequence
  Synthetic
cugcuggaggaugaaugga

SEQ ID NO: 488054 - RNA, 20 nt, Artificial Sequence
  Synthetic
ucugcuggaggaugaaugga

SEQ ID NO: 488055 - RNA, 21 nt, Artificial Sequence
  Synthetic
cucugcuggaggaugaaugga

SEQ ID NO: 488056 - RNA, 22 nt, Artificial Sequence
  Synthetic
ucucugcuggaggaugaaugga

SEQ ID NO: 488057 - RNA, 23 nt, Artificial Sequence
  Synthetic
uucucugcuggaggaugaaugga

SEQ ID NO: 488058 - RNA, 24 nt, Artificial Sequence
  Synthetic
auucucugcuggaggaugaaugga

SEQ ID NO: 488059 - RNA, 18 nt, Artificial Sequence
  Synthetic
uuuucuuuguugaaugga

SEQ ID NO: 488060 - RNA, 19 nt, Artificial Sequence
  Synthetic
uuuuucuuuguugaaugga

SEQ ID NO: 488061 - RNA, 20 nt, Artificial Sequence
  Synthetic
auuuuucuuuguugaaugga

SEQ ID NO: 488062 - RNA, 21 nt, Artificial Sequence
  Synthetic
uauuuuucuuuguugaaugga

SEQ ID NO: 488063 - RNA, 22 nt, Artificial Sequence
  Synthetic
cuauuuuucuuuguugaaugga

SEQ ID NO: 488064 - RNA, 23 nt, Artificial Sequence
  Synthetic
ucuauuuuucuuuguugaaugga

SEQ ID NO: 488065 - RNA, 24 nt, Artificial Sequence
  Synthetic
aucuauuuuucuuuguugaaugga

SEQ ID NO: 488066 - RNA, 18 nt, Artificial Sequence
  Synthetic
ccucuggcaaauaaugga

SEQ ID NO: 488067 - RNA, 19 nt, Artificial Sequence
  Synthetic
uccucuggcaaauaaugga

SEQ ID NO: 488068 - RNA, 20 nt, Artificial Sequence
  Synthetic
guccucuggcaaauaaugga

SEQ ID NO: 488069 - RNA, 21 nt, Artificial Sequence
  Synthetic
gguccucuggcaaauaaugga

SEQ ID NO: 488070 - RNA, 22 nt, Artificial Sequence
  Synthetic
agguccucuggcaaauaaugga

SEQ ID NO: 488071 - RNA, 23 nt, Artificial Sequence
  Synthetic
gagguccucuggcaaauaaugga

SEQ ID NO: 488072 - RNA, 24 nt, Artificial Sequence
  Synthetic
ugagguccucuggcaaauaaugga

SEQ ID NO: 488073 - RNA, 18 nt, Artificial Sequence
  Synthetic
ggaagcgcuaaacaugga

SEQ ID NO: 488074 - RNA, 19 nt, Artificial Sequence
  Synthetic
aggaagcgcuaaacaugga

SEQ ID NO: 488075 - RNA, 20 nt, Artificial Sequence
  Synthetic
aaggaagcgcuaaacaugga

SEQ ID NO: 488076 - RNA, 21 nt, Artificial Sequence
  Synthetic
gaaggaagcgcuaaacaugga

SEQ ID NO: 488077 - RNA, 22 nt, Artificial Sequence
  Synthetic
ugaaggaagcgcuaaacaugga

SEQ ID NO: 488078 - RNA, 23 nt, Artificial Sequence
  Synthetic
cugaaggaagcgcuaaacaugga

SEQ ID NO: 488079 - RNA, 24 nt, Artificial Sequence
  Synthetic
ccugaaggaagcgcuaaacaugga

SEQ ID NO: 488080 - RNA, 18 nt, Artificial Sequence
  Synthetic
cauuugcaacaacaugga

SEQ ID NO: 488081 - RNA, 19 nt, Artificial Sequence
  Synthetic
ucauuugcaacaacaugga

SEQ ID NO: 488082 - RNA, 20 nt, Artificial Sequence
  Synthetic
gucauuugcaacaacaugga

SEQ ID NO: 488083 - RNA, 21 nt, Artificial Sequence
  Synthetic
ugucauuugcaacaacaugga

SEQ ID NO: 488084 - RNA, 22 nt, Artificial Sequence
  Synthetic
cugucauuugcaacaacaugga

SEQ ID NO: 488085 - RNA, 23 nt, Artificial Sequence
  Synthetic
ccugucauuugcaacaacaugga

SEQ ID NO: 488086 - RNA, 24 nt, Artificial Sequence
  Synthetic
uccugucauuugcaacaacaugga

SEQ ID NO: 488087 - RNA, 18 nt, Artificial Sequence
  Synthetic
ucuuugcagcaacaugga

SEQ ID NO: 488088 - RNA, 19 nt, Artificial Sequence
  Synthetic
uucuuugcagcaacaugga

SEQ ID NO: 488089 - RNA, 20 nt, Artificial Sequence
  Synthetic
guucuuugcagcaacaugga

SEQ ID NO: 488090 - RNA, 21 nt, Artificial Sequence
  Synthetic
uguucuuugcagcaacaugga

SEQ ID NO: 488091 - RNA, 22 nt, Artificial Sequence
  Synthetic
auguucuuugcagcaacaugga

SEQ ID NO: 488092 - RNA, 23 nt, Artificial Sequence
  Synthetic
uauguucuuugcagcaacaugga

SEQ ID NO: 488093 - RNA, 24 nt, Artificial Sequence
  Synthetic
uuauguucuuugcagcaacaugga

SEQ ID NO: 488094 - RNA, 18 nt, Artificial Sequence
  Synthetic
cuuuugcagcaacaugga

SEQ ID NO: 488095 - RNA, 19 nt, Artificial Sequence
  Synthetic
ucuuuugcagcaacaugga

SEQ ID NO: 488096 - RNA, 20 nt, Artificial Sequence
  Synthetic
gucuuuugcagcaacaugga

SEQ ID NO: 488097 - RNA, 21 nt, Artificial Sequence
  Synthetic
ugucuuuugcagcaacaugga

SEQ ID NO: 488098 - RNA, 22 nt, Artificial Sequence
  Synthetic
augucuuuugcagcaacaugga

SEQ ID NO: 488099 - RNA, 23 nt, Artificial Sequence
  Synthetic
caugucuuuugcagcaacaugga

SEQ ID NO: 488100 - RNA, 24 nt, Artificial Sequence
  Synthetic
ucaugucuuuugcagcaacaugga

SEQ ID NO: 488101 - RNA, 18 nt, Artificial Sequence
  Synthetic
uaggaagaagaacaugga

SEQ ID NO: 488102 - RNA, 19 nt, Artificial Sequence
  Synthetic
auaggaagaagaacaugga

SEQ ID NO: 488103 - RNA, 20 nt, Artificial Sequence
  Synthetic
uauaggaagaagaacaugga

SEQ ID NO: 488104 - RNA, 21 nt, Artificial Sequence
  Synthetic
auauaggaagaagaacaugga

SEQ ID NO: 488105 - RNA, 22 nt, Artificial Sequence
  Synthetic
aauauaggaagaagaacaugga

SEQ ID NO: 488106 - RNA, 23 nt, Artificial Sequence
  Synthetic
aaauauaggaagaagaacaugga

SEQ ID NO: 488107 - RNA, 24 nt, Artificial Sequence
  Synthetic
aaaauauaggaagaagaacaugga

SEQ ID NO: 488108 - RNA, 18 nt, Artificial Sequence
  Synthetic
gaauaacaugaacaugga

SEQ ID NO: 488109 - RNA, 19 nt, Artificial Sequence
  Synthetic
agaauaacaugaacaugga

SEQ ID NO: 488110 - RNA, 20 nt, Artificial Sequence
  Synthetic
aagaauaacaugaacaugga

SEQ ID NO: 488111 - RNA, 21 nt, Artificial Sequence
  Synthetic
aaagaauaacaugaacaugga

SEQ ID NO: 488112 - RNA, 22 nt, Artificial Sequence
  Synthetic
uaaagaauaacaugaacaugga

SEQ ID NO: 488113 - RNA, 23 nt, Artificial Sequence
  Synthetic
auaaagaauaacaugaacaugga

SEQ ID NO: 488114 - RNA, 24 nt, Artificial Sequence
  Synthetic
aauaaagaauaacaugaacaugga

SEQ ID NO: 488115 - RNA, 18 nt, Artificial Sequence
  Synthetic
gacaugaaauuacaugga

SEQ ID NO: 488116 - RNA, 19 nt, Artificial Sequence
  Synthetic
ugacaugaaauuacaugga

SEQ ID NO: 488117 - RNA, 20 nt, Artificial Sequence
  Synthetic
augacaugaaauuacaugga

SEQ ID NO: 488118 - RNA, 21 nt, Artificial Sequence
  Synthetic
uaugacaugaaauuacaugga

SEQ ID NO: 488119 - RNA, 22 nt, Artificial Sequence
  Synthetic
guaugacaugaaauuacaugga

SEQ ID NO: 488120 - RNA, 23 nt, Artificial Sequence
  Synthetic
gguaugacaugaaauuacaugga

SEQ ID NO: 488121 - RNA, 24 nt, Artificial Sequence
  Synthetic
agguaugacaugaaauuacaugga

SEQ ID NO: 488122 - RNA, 18 nt, Artificial Sequence
  Synthetic
uucuauuguuaccaugga

SEQ ID NO: 488123 - RNA, 19 nt, Artificial Sequence
  Synthetic
cuucuauuguuaccaugga

SEQ ID NO: 488124 - RNA, 20 nt, Artificial Sequence
  Synthetic
ucuucuauuguuaccaugga

SEQ ID NO: 488125 - RNA, 21 nt, Artificial Sequence
  Synthetic
uucuucuauuguuaccaugga

SEQ ID NO: 488126 - RNA, 22 nt, Artificial Sequence
  Synthetic
cuucuucuauuguuaccaugga

SEQ ID NO: 488127 - RNA, 23 nt, Artificial Sequence
  Synthetic
gcuucuucuauuguuaccaugga

SEQ ID NO: 488128 - RNA, 24 nt, Artificial Sequence
  Synthetic
agcuucuucuauuguuaccaugga

SEQ ID NO: 488129 - RNA, 18 nt, Artificial Sequence
  Synthetic
caauauauaacccaugga

SEQ ID NO: 488130 - RNA, 19 nt, Artificial Sequence
  Synthetic
ucaauauauaacccaugga

SEQ ID NO: 488131 - RNA, 20 nt, Artificial Sequence
  Synthetic
uucaauauauaacccaugga

SEQ ID NO: 488132 - RNA, 21 nt, Artificial Sequence
  Synthetic
auucaauauauaacccaugga

SEQ ID NO: 488133 - RNA, 22 nt, Artificial Sequence
  Synthetic
aauucaauauauaacccaugga

SEQ ID NO: 488134 - RNA, 23 nt, Artificial Sequence
  Synthetic
caauucaauauauaacccaugga

SEQ ID NO: 488135 - RNA, 24 nt, Artificial Sequence
  Synthetic
gcaauucaauauauaacccaugga

SEQ ID NO: 488136 - RNA, 18 nt, Artificial Sequence
  Synthetic
uacaacagggagcaugga

SEQ ID NO: 488137 - RNA, 19 nt, Artificial Sequence
  Synthetic
guacaacagggagcaugga

SEQ ID NO: 488138 - RNA, 20 nt, Artificial Sequence
  Synthetic
aguacaacagggagcaugga

SEQ ID NO: 488139 - RNA, 21 nt, Artificial Sequence
  Synthetic
uaguacaacagggagcaugga

SEQ ID NO: 488140 - RNA, 22 nt, Artificial Sequence
  Synthetic
uuaguacaacagggagcaugga

SEQ ID NO: 488141 - RNA, 23 nt, Artificial Sequence
  Synthetic
guuaguacaacagggagcaugga

SEQ ID NO: 488142 - RNA, 24 nt, Artificial Sequence
  Synthetic
uguuaguacaacagggagcaugga

SEQ ID NO: 488143 - RNA, 18 nt, Artificial Sequence
  Synthetic
acaacacauaggcaugga

SEQ ID NO: 488144 - RNA, 19 nt, Artificial Sequence
  Synthetic
gacaacacauaggcaugga

SEQ ID NO: 488145 - RNA, 20 nt, Artificial Sequence
  Synthetic
ggacaacacauaggcaugga

SEQ ID NO: 488146 - RNA, 21 nt, Artificial Sequence
  Synthetic
gggacaacacauaggcaugga

SEQ ID NO: 488147 - RNA, 22 nt, Artificial Sequence
  Synthetic
agggacaacacauaggcaugga

SEQ ID NO: 488148 - RNA, 23 nt, Artificial Sequence
  Synthetic
aagggacaacacauaggcaugga

SEQ ID NO: 488149 - RNA, 24 nt, Artificial Sequence
  Synthetic
gaagggacaacacauaggcaugga

SEQ ID NO: 488150 - RNA, 18 nt, Artificial Sequence
  Synthetic
cuguuuaaaaugcaugga

SEQ ID NO: 488151 - RNA, 19 nt, Artificial Sequence
  Synthetic
acuguuuaaaaugcaugga

SEQ ID NO: 488152 - RNA, 20 nt, Artificial Sequence
  Synthetic
uacuguuuaaaaugcaugga

SEQ ID NO: 488153 - RNA, 21 nt, Artificial Sequence
  Synthetic
cuacuguuuaaaaugcaugga

SEQ ID NO: 488154 - RNA, 22 nt, Artificial Sequence
  Synthetic
ccuacuguuuaaaaugcaugga

SEQ ID NO: 488155 - RNA, 23 nt, Artificial Sequence
  Synthetic
gccuacuguuuaaaaugcaugga

SEQ ID NO: 488156 - RNA, 24 nt, Artificial Sequence
  Synthetic
ggccuacuguuuaaaaugcaugga

SEQ ID NO: 488157 - RNA, 18 nt, Artificial Sequence
  Synthetic
cauuugcaacaucaugga

SEQ ID NO: 488158 - RNA, 19 nt, Artificial Sequence
  Synthetic
ucauuugcaacaucaugga

SEQ ID NO: 488159 - RNA, 20 nt, Artificial Sequence
  Synthetic
uucauuugcaacaucaugga

SEQ ID NO: 488160 - RNA, 21 nt, Artificial Sequence
  Synthetic
uuucauuugcaacaucaugga

SEQ ID NO: 488161 - RNA, 22 nt, Artificial Sequence
  Synthetic
cuuucauuugcaacaucaugga

SEQ ID NO: 488162 - RNA, 23 nt, Artificial Sequence
  Synthetic
ccuuucauuugcaacaucaugga

SEQ ID NO: 488163 - RNA, 24 nt, Artificial Sequence
  Synthetic
uccuuucauuugcaacaucaugga

SEQ ID NO: 488164 - RNA, 18 nt, Artificial Sequence
  Synthetic
agauuuacacaucaugga

SEQ ID NO: 488165 - RNA, 19 nt, Artificial Sequence
  Synthetic
cagauuuacacaucaugga

SEQ ID NO: 488166 - RNA, 20 nt, Artificial Sequence
  Synthetic
acagauuuacacaucaugga

SEQ ID NO: 488167 - RNA, 21 nt, Artificial Sequence
  Synthetic
uacagauuuacacaucaugga

SEQ ID NO: 488168 - RNA, 22 nt, Artificial Sequence
  Synthetic
cuacagauuuacacaucaugga

SEQ ID NO: 488169 - RNA, 23 nt, Artificial Sequence
  Synthetic
ucuacagauuuacacaucaugga

SEQ ID NO: 488170 - RNA, 24 nt, Artificial Sequence
  Synthetic
aucuacagauuuacacaucaugga

SEQ ID NO: 488171 - RNA, 18 nt, Artificial Sequence
  Synthetic
uucuucagagaucaugga

SEQ ID NO: 488172 - RNA, 19 nt, Artificial Sequence
  Synthetic
auucuucagagaucaugga

SEQ ID NO: 488173 - RNA, 20 nt, Artificial Sequence
  Synthetic
gauucuucagagaucaugga

SEQ ID NO: 488174 - RNA, 21 nt, Artificial Sequence
  Synthetic
agauucuucagagaucaugga

SEQ ID NO: 488175 - RNA, 22 nt, Artificial Sequence
  Synthetic
gagauucuucagagaucaugga

SEQ ID NO: 488176 - RNA, 23 nt, Artificial Sequence
  Synthetic
ggagauucuucagagaucaugga

SEQ ID NO: 488177 - RNA, 24 nt, Artificial Sequence
  Synthetic
uggagauucuucagagaucaugga

SEQ ID NO: 488178 - RNA, 18 nt, Artificial Sequence
  Synthetic
acucugcuggaucaugga

SEQ ID NO: 488179 - RNA, 19 nt, Artificial Sequence
  Synthetic
aacucugcuggaucaugga

SEQ ID NO: 488180 - RNA, 20 nt, Artificial Sequence
  Synthetic
aaacucugcuggaucaugga

SEQ ID NO: 488181 - RNA, 21 nt, Artificial Sequence
  Synthetic
gaaacucugcuggaucaugga

SEQ ID NO: 488182 - RNA, 22 nt, Artificial Sequence
  Synthetic
ugaaacucugcuggaucaugga

SEQ ID NO: 488183 - RNA, 23 nt, Artificial Sequence
  Synthetic
cugaaacucugcuggaucaugga

SEQ ID NO: 488184 - RNA, 24 nt, Artificial Sequence
  Synthetic
gcugaaacucugcuggaucaugga

SEQ ID NO: 488185 - RNA, 21 nt, Artificial Sequence
  Synthetic
agaacauuccaugcucaugga

SEQ ID NO: 488186 - RNA, 22 nt, Artificial Sequence
  Synthetic
aagaacauuccaugcucaugga

SEQ ID NO: 488187 - RNA, 23 nt, Artificial Sequence
  Synthetic
gaagaacauuccaugcucaugga

SEQ ID NO: 488188 - RNA, 24 nt, Artificial Sequence
  Synthetic
ggaagaacauuccaugcucaugga

SEQ ID NO: 488189 - RNA, 18 nt, Artificial Sequence
  Synthetic
ucauagccacuucaugga

SEQ ID NO: 488190 - RNA, 19 nt, Artificial Sequence
  Synthetic
cucauagccacuucaugga

SEQ ID NO: 488191 - RNA, 20 nt, Artificial Sequence
  Synthetic
gcucauagccacuucaugga

SEQ ID NO: 488192 - RNA, 21 nt, Artificial Sequence
  Synthetic
ggcucauagccacuucaugga

SEQ ID NO: 488193 - RNA, 22 nt, Artificial Sequence
  Synthetic
gggcucauagccacuucaugga

SEQ ID NO: 488194 - RNA, 23 nt, Artificial Sequence
  Synthetic
ggggcucauagccacuucaugga

SEQ ID NO: 488195 - RNA, 24 nt, Artificial Sequence
  Synthetic
aggggcucauagccacuucaugga

SEQ ID NO: 488196 - RNA, 18 nt, Artificial Sequence
  Synthetic
cuggacacaaaagaugga

SEQ ID NO: 488197 - RNA, 19 nt, Artificial Sequence
  Synthetic
ucuggacacaaaagaugga

SEQ ID NO: 488198 - RNA, 20 nt, Artificial Sequence
  Synthetic
cucuggacacaaaagaugga

SEQ ID NO: 488199 - RNA, 21 nt, Artificial Sequence
  Synthetic
gcucuggacacaaaagaugga

SEQ ID NO: 488200 - RNA, 22 nt, Artificial Sequence
  Synthetic
ugcucuggacacaaaagaugga

SEQ ID NO: 488201 - RNA, 23 nt, Artificial Sequence
  Synthetic
augcucuggacacaaaagaugga

SEQ ID NO: 488202 - RNA, 24 nt, Artificial Sequence
  Synthetic
uaugcucuggacacaaaagaugga

SEQ ID NO: 488203 - RNA, 18 nt, Artificial Sequence
  Synthetic
uacuucugaaaagaugga

SEQ ID NO: 488204 - RNA, 19 nt, Artificial Sequence
  Synthetic
cuacuucugaaaagaugga

SEQ ID NO: 488205 - RNA, 20 nt, Artificial Sequence
  Synthetic
acuacuucugaaaagaugga

SEQ ID NO: 488206 - RNA, 21 nt, Artificial Sequence
  Synthetic
uacuacuucugaaaagaugga

SEQ ID NO: 488207 - RNA, 22 nt, Artificial Sequence
  Synthetic
uuacuacuucugaaaagaugga

SEQ ID NO: 488208 - RNA, 23 nt, Artificial Sequence
  Synthetic
uuuacuacuucugaaaagaugga

SEQ ID NO: 488209 - RNA, 24 nt, Artificial Sequence
  Synthetic
auuuacuacuucugaaaagaugga

SEQ ID NO: 488210 - RNA, 18 nt, Artificial Sequence
  Synthetic
aaauuaauucaagaugga

SEQ ID NO: 488211 - RNA, 19 nt, Artificial Sequence
  Synthetic
aaaauuaauucaagaugga

SEQ ID NO: 488212 - RNA, 20 nt, Artificial Sequence
  Synthetic
aaaaauuaauucaagaugga

SEQ ID NO: 488213 - RNA, 21 nt, Artificial Sequence
  Synthetic
caaaaauuaauucaagaugga

SEQ ID NO: 488214 - RNA, 22 nt, Artificial Sequence
  Synthetic
acaaaaauuaauucaagaugga

SEQ ID NO: 488215 - RNA, 23 nt, Artificial Sequence
  Synthetic
uacaaaaauuaauucaagaugga

SEQ ID NO: 488216 - RNA, 24 nt, Artificial Sequence
  Synthetic
auacaaaaauuaauucaagaugga

SEQ ID NO: 488217 - RNA, 18 nt, Artificial Sequence
  Synthetic
uacaaaaaagaagaugga

SEQ ID NO: 488218 - RNA, 19 nt, Artificial Sequence
  Synthetic
auacaaaaaagaagaugga

SEQ ID NO: 488219 - RNA, 20 nt, Artificial Sequence
  Synthetic
aauacaaaaaagaagaugga

SEQ ID NO: 488220 - RNA, 21 nt, Artificial Sequence
  Synthetic
gaauacaaaaaagaagaugga

SEQ ID NO: 488221 - RNA, 22 nt, Artificial Sequence
  Synthetic
ggaauacaaaaaagaagaugga

SEQ ID NO: 488222 - RNA, 23 nt, Artificial Sequence
  Synthetic
uggaauacaaaaaagaagaugga

SEQ ID NO: 488223 - RNA, 24 nt, Artificial Sequence
  Synthetic
uuggaauacaaaaaagaagaugga

SEQ ID NO: 488224 - RNA, 18 nt, Artificial Sequence
  Synthetic
ugcaggcucagagaugga

SEQ ID NO: 488225 - RNA, 19 nt, Artificial Sequence
  Synthetic
uugcaggcucagagaugga

SEQ ID NO: 488226 - RNA, 20 nt, Artificial Sequence
  Synthetic
uuugcaggcucagagaugga

SEQ ID NO: 488227 - RNA, 21 nt, Artificial Sequence
  Synthetic
uuuugcaggcucagagaugga

SEQ ID NO: 488228 - RNA, 22 nt, Artificial Sequence
  Synthetic
auuuugcaggcucagagaugga

SEQ ID NO: 488229 - RNA, 23 nt, Artificial Sequence
  Synthetic
gauuuugcaggcucagagaugga

SEQ ID NO: 488230 - RNA, 24 nt, Artificial Sequence
  Synthetic
cgauuuugcaggcucagagaugga

SEQ ID NO: 488231 - RNA, 18 nt, Artificial Sequence
  Synthetic
caacagaagauagaugga

SEQ ID NO: 488232 - RNA, 19 nt, Artificial Sequence
  Synthetic
acaacagaagauagaugga

SEQ ID NO: 488233 - RNA, 20 nt, Artificial Sequence
  Synthetic
uacaacagaagauagaugga

SEQ ID NO: 488234 - RNA, 21 nt, Artificial Sequence
  Synthetic
auacaacagaagauagaugga

SEQ ID NO: 488235 - RNA, 22 nt, Artificial Sequence
  Synthetic
gauacaacagaagauagaugga

SEQ ID NO: 488236 - RNA, 23 nt, Artificial Sequence
  Synthetic
agauacaacagaagauagaugga

SEQ ID NO: 488237 - RNA, 24 nt, Artificial Sequence
  Synthetic
uagauacaacagaagauagaugga

SEQ ID NO: 488238 - RNA, 18 nt, Artificial Sequence
  Synthetic
augaagcuuguagaugga

SEQ ID NO: 488239 - RNA, 19 nt, Artificial Sequence
  Synthetic
aaugaagcuuguagaugga

SEQ ID NO: 488240 - RNA, 20 nt, Artificial Sequence
  Synthetic
aaaugaagcuuguagaugga

SEQ ID NO: 488241 - RNA, 21 nt, Artificial Sequence
  Synthetic
aaaaugaagcuuguagaugga

SEQ ID NO: 488242 - RNA, 22 nt, Artificial Sequence
  Synthetic
caaaaugaagcuuguagaugga

SEQ ID NO: 488243 - RNA, 23 nt, Artificial Sequence
  Synthetic
gcaaaaugaagcuuguagaugga

SEQ ID NO: 488244 - RNA, 24 nt, Artificial Sequence
  Synthetic
agcaaaaugaagcuuguagaugga

SEQ ID NO: 488245 - RNA, 18 nt, Artificial Sequence
  Synthetic
agaagaugccaggaugga

SEQ ID NO: 488246 - RNA, 19 nt, Artificial Sequence
  Synthetic
aagaagaugccaggaugga

SEQ ID NO: 488247 - RNA, 20 nt, Artificial Sequence
  Synthetic
aaagaagaugccaggaugga

SEQ ID NO: 488248 - RNA, 21 nt, Artificial Sequence
  Synthetic
gaaagaagaugccaggaugga

SEQ ID NO: 488249 - RNA, 22 nt, Artificial Sequence
  Synthetic
agaaagaagaugccaggaugga

SEQ ID NO: 488250 - RNA, 23 nt, Artificial Sequence
  Synthetic
aagaaagaagaugccaggaugga

SEQ ID NO: 488251 - RNA, 24 nt, Artificial Sequence
  Synthetic
gaagaaagaagaugccaggaugga

SEQ ID NO: 488252 - RNA, 18 nt, Artificial Sequence
  Synthetic
uuaccaacgauggaugga

SEQ ID NO: 488253 - RNA, 19 nt, Artificial Sequence
  Synthetic
guuaccaacgauggaugga

SEQ ID NO: 488254 - RNA, 20 nt, Artificial Sequence
  Synthetic
aguuaccaacgauggaugga

SEQ ID NO: 488255 - RNA, 21 nt, Artificial Sequence
  Synthetic
uaguuaccaacgauggaugga

SEQ ID NO: 488256 - RNA, 22 nt, Artificial Sequence
  Synthetic
auaguuaccaacgauggaugga

SEQ ID NO: 488257 - RNA, 23 nt, Artificial Sequence
  Synthetic
cauaguuaccaacgauggaugga

SEQ ID NO: 488258 - RNA, 24 nt, Artificial Sequence
  Synthetic
acauaguuaccaacgauggaugga

SEQ ID NO: 488259 - RNA, 18 nt, Artificial Sequence
  Synthetic
aguggauggauggaugga

SEQ ID NO: 488260 - RNA, 19 nt, Artificial Sequence
  Synthetic
aaguggauggauggaugga

SEQ ID NO: 488261 - RNA, 20 nt, Artificial Sequence
  Synthetic
uaaguggauggauggaugga

SEQ ID NO: 488262 - RNA, 21 nt, Artificial Sequence
  Synthetic
auaaguggauggauggaugga

SEQ ID NO: 488263 - RNA, 22 nt, Artificial Sequence
  Synthetic
aauaaguggauggauggaugga

SEQ ID NO: 488264 - RNA, 23 nt, Artificial Sequence
  Synthetic
gaauaaguggauggauggaugga

SEQ ID NO: 488265 - RNA, 24 nt, Artificial Sequence
  Synthetic
ugaauaaguggauggauggaugga

SEQ ID NO: 488266 - RNA, 18 nt, Artificial Sequence
  Synthetic
aauaaguggauggaugga

SEQ ID NO: 488267 - RNA, 19 nt, Artificial Sequence
  Synthetic
gaauaaguggauggaugga

SEQ ID NO: 488268 - RNA, 20 nt, Artificial Sequence
  Synthetic
ugaauaaguggauggaugga

SEQ ID NO: 488269 - RNA, 21 nt, Artificial Sequence
  Synthetic
augaauaaguggauggaugga

SEQ ID NO: 488270 - RNA, 22 nt, Artificial Sequence
  Synthetic
gaugaauaaguggauggaugga

SEQ ID NO: 488271 - RNA, 23 nt, Artificial Sequence
  Synthetic
agaugaauaaguggauggaugga

SEQ ID NO: 488272 - RNA, 24 nt, Artificial Sequence
  Synthetic
uagaugaauaaguggauggaugga

SEQ ID NO: 488273 - RNA, 18 nt, Artificial Sequence
  Synthetic
uaagccagcuuggaugga

SEQ ID NO: 488274 - RNA, 19 nt, Artificial Sequence
  Synthetic
uuaagccagcuuggaugga

SEQ ID NO: 488275 - RNA, 20 nt, Artificial Sequence
  Synthetic
cuuaagccagcuuggaugga

SEQ ID NO: 488276 - RNA, 21 nt, Artificial Sequence
  Synthetic
acuuaagccagcuuggaugga

SEQ ID NO: 488277 - RNA, 22 nt, Artificial Sequence
  Synthetic
uacuuaagccagcuuggaugga

SEQ ID NO: 488278 - RNA, 23 nt, Artificial Sequence
  Synthetic
uuacuuaagccagcuuggaugga

SEQ ID NO: 488279 - RNA, 24 nt, Artificial Sequence
  Synthetic
uuuacuuaagccagcuuggaugga

SEQ ID NO: 488280 - RNA, 18 nt, Artificial Sequence
  Synthetic
ugcuugcuacaugaugga

SEQ ID NO: 488281 - RNA, 19 nt, Artificial Sequence
  Synthetic
gugcuugcuacaugaugga

SEQ ID NO: 488282 - RNA, 20 nt, Artificial Sequence
  Synthetic
ggugcuugcuacaugaugga

SEQ ID NO: 488283 - RNA, 21 nt, Artificial Sequence
  Synthetic
gggugcuugcuacaugaugga

SEQ ID NO: 488284 - RNA, 22 nt, Artificial Sequence
  Synthetic
ugggugcuugcuacaugaugga

SEQ ID NO: 488285 - RNA, 23 nt, Artificial Sequence
  Synthetic
gugggugcuugcuacaugaugga

SEQ ID NO: 488286 - RNA, 24 nt, Artificial Sequence
  Synthetic
agugggugcuugcuacaugaugga

SEQ ID NO: 488287 - RNA, 18 nt, Artificial Sequence
  Synthetic
caaaugaaggcugaugga

SEQ ID NO: 488288 - RNA, 19 nt, Artificial Sequence
  Synthetic
acaaaugaaggcugaugga

SEQ ID NO: 488289 - RNA, 20 nt, Artificial Sequence
  Synthetic
gacaaaugaaggcugaugga

SEQ ID NO: 488290 - RNA, 21 nt, Artificial Sequence
  Synthetic
ugacaaaugaaggcugaugga

SEQ ID NO: 488291 - RNA, 22 nt, Artificial Sequence
  Synthetic
cugacaaaugaaggcugaugga

SEQ ID NO: 488292 - RNA, 23 nt, Artificial Sequence
  Synthetic
ucugacaaaugaaggcugaugga

SEQ ID NO: 488293 - RNA, 24 nt, Artificial Sequence
  Synthetic
cucugacaaaugaaggcugaugga

SEQ ID NO: 488294 - RNA, 18 nt, Artificial Sequence
  Synthetic
gagaaagaugcugaugga

SEQ ID NO: 488295 - RNA, 19 nt, Artificial Sequence
  Synthetic
agagaaagaugcugaugga

SEQ ID NO: 488296 - RNA, 20 nt, Artificial Sequence
  Synthetic
cagagaaagaugcugaugga

SEQ ID NO: 488297 - RNA, 21 nt, Artificial Sequence
  Synthetic
gcagagaaagaugcugaugga

SEQ ID NO: 488298 - RNA, 22 nt, Artificial Sequence
  Synthetic
ugcagagaaagaugcugaugga

SEQ ID NO: 488299 - RNA, 23 nt, Artificial Sequence
  Synthetic
gugcagagaaagaugcugaugga

SEQ ID NO: 488300 - RNA, 24 nt, Artificial Sequence
  Synthetic
ggugcagagaaagaugcugaugga

SEQ ID NO: 488301 - RNA, 18 nt, Artificial Sequence
  Synthetic
gaggcuacgcuugaugga

SEQ ID NO: 488302 - RNA, 19 nt, Artificial Sequence
  Synthetic
agaggcuacgcuugaugga

SEQ ID NO: 488303 - RNA, 20 nt, Artificial Sequence
  Synthetic
uagaggcuacgcuugaugga

SEQ ID NO: 488304 - RNA, 21 nt, Artificial Sequence
  Synthetic
auagaggcuacgcuugaugga

SEQ ID NO: 488305 - RNA, 22 nt, Artificial Sequence
  Synthetic
uauagaggcuacgcuugaugga

SEQ ID NO: 488306 - RNA, 23 nt, Artificial Sequence
  Synthetic
auauagaggcuacgcuugaugga

SEQ ID NO: 488307 - RNA, 24 nt, Artificial Sequence
  Synthetic
uauauagaggcuacgcuugaugga

SEQ ID NO: 488308 - RNA, 18 nt, Artificial Sequence
  Synthetic
aguaagaagaaauaugga

SEQ ID NO: 488309 - RNA, 19 nt, Artificial Sequence
  Synthetic
caguaagaagaaauaugga

SEQ ID NO: 488310 - RNA, 20 nt, Artificial Sequence
  Synthetic
gcaguaagaagaaauaugga

SEQ ID NO: 488311 - RNA, 21 nt, Artificial Sequence
  Synthetic
ggcaguaagaagaaauaugga

SEQ ID NO: 488312 - RNA, 22 nt, Artificial Sequence
  Synthetic
uggcaguaagaagaaauaugga

SEQ ID NO: 488313 - RNA, 23 nt, Artificial Sequence
  Synthetic
uuggcaguaagaagaaauaugga

SEQ ID NO: 488314 - RNA, 24 nt, Artificial Sequence
  Synthetic
cuuggcaguaagaagaaauaugga

SEQ ID NO: 488315 - RNA, 18 nt, Artificial Sequence
  Synthetic
uuaaaaugauaauaugga

SEQ ID NO: 488316 - RNA, 19 nt, Artificial Sequence
  Synthetic
uuuaaaaugauaauaugga

SEQ ID NO: 488317 - RNA, 20 nt, Artificial Sequence
  Synthetic
uuuuaaaaugauaauaugga

SEQ ID NO: 488318 - RNA, 21 nt, Artificial Sequence
  Synthetic
auuuuaaaaugauaauaugga

SEQ ID NO: 488319 - RNA, 22 nt, Artificial Sequence
  Synthetic
aauuuuaaaaugauaauaugga

SEQ ID NO: 488320 - RNA, 23 nt, Artificial Sequence
  Synthetic
aaauuuuaaaaugauaauaugga

SEQ ID NO: 488321 - RNA, 24 nt, Artificial Sequence
  Synthetic
uaaauuuuaaaaugauaauaugga

SEQ ID NO: 488322 - RNA, 18 nt, Artificial Sequence
  Synthetic
gauacagaggcauaugga

SEQ ID NO: 488323 - RNA, 19 nt, Artificial Sequence
  Synthetic
ggauacagaggcauaugga

SEQ ID NO: 488324 - RNA, 20 nt, Artificial Sequence
  Synthetic
gggauacagaggcauaugga

SEQ ID NO: 488325 - RNA, 21 nt, Artificial Sequence
  Synthetic
agggauacagaggcauaugga

SEQ ID NO: 488326 - RNA, 22 nt, Artificial Sequence
  Synthetic
cagggauacagaggcauaugga

SEQ ID NO: 488327 - RNA, 23 nt, Artificial Sequence
  Synthetic
acagggauacagaggcauaugga

SEQ ID NO: 488328 - RNA, 24 nt, Artificial Sequence
  Synthetic
aacagggauacagaggcauaugga

SEQ ID NO: 488329 - RNA, 18 nt, Artificial Sequence
  Synthetic
uauauauauagauaugga

SEQ ID NO: 488330 - RNA, 19 nt, Artificial Sequence
  Synthetic
auauauauauagauaugga

SEQ ID NO: 488331 - RNA, 20 nt, Artificial Sequence
  Synthetic
uauauauauauagauaugga

SEQ ID NO: 488332 - RNA, 21 nt, Artificial Sequence
  Synthetic
cuauauauauauagauaugga

SEQ ID NO: 488333 - RNA, 22 nt, Artificial Sequence
  Synthetic
ucuauauauauauagauaugga

SEQ ID NO: 488334 - RNA, 23 nt, Artificial Sequence
  Synthetic
aucuauauauauauagauaugga

SEQ ID NO: 488335 - RNA, 24 nt, Artificial Sequence
  Synthetic
caucuauauauauauagauaugga

SEQ ID NO: 488336 - RNA, 18 nt, Artificial Sequence
  Synthetic
acaauguauauauaugga

SEQ ID NO: 488337 - RNA, 19 nt, Artificial Sequence
  Synthetic
cacaauguauauauaugga

SEQ ID NO: 488338 - RNA, 20 nt, Artificial Sequence
  Synthetic
ccacaauguauauauaugga

SEQ ID NO: 488339 - RNA, 21 nt, Artificial Sequence
  Synthetic
uccacaauguauauauaugga

SEQ ID NO: 488340 - RNA, 22 nt, Artificial Sequence
  Synthetic
uuccacaauguauauauaugga

SEQ ID NO: 488341 - RNA, 23 nt, Artificial Sequence
  Synthetic
auuccacaauguauauauaugga

SEQ ID NO: 488342 - RNA, 24 nt, Artificial Sequence
  Synthetic
uauuccacaauguauauauaugga

SEQ ID NO: 488343 - RNA, 18 nt, Artificial Sequence
  Synthetic
augauuauccuauaugga

SEQ ID NO: 488344 - RNA, 19 nt, Artificial Sequence
  Synthetic
uaugauuauccuauaugga

SEQ ID NO: 488345 - RNA, 20 nt, Artificial Sequence
  Synthetic
auaugauuauccuauaugga

SEQ ID NO: 488346 - RNA, 21 nt, Artificial Sequence
  Synthetic
aauaugauuauccuauaugga

SEQ ID NO: 488347 - RNA, 22 nt, Artificial Sequence
  Synthetic
uaauaugauuauccuauaugga

SEQ ID NO: 488348 - RNA, 23 nt, Artificial Sequence
  Synthetic
cuaauaugauuauccuauaugga

SEQ ID NO: 488349 - RNA, 24 nt, Artificial Sequence
  Synthetic
acuaauaugauuauccuauaugga

SEQ ID NO: 488350 - RNA, 18 nt, Artificial Sequence
  Synthetic
aucuucauuuuauaugga

SEQ ID NO: 488351 - RNA, 19 nt, Artificial Sequence
  Synthetic
uaucuucauuuuauaugga

SEQ ID NO: 488352 - RNA, 20 nt, Artificial Sequence
  Synthetic
uuaucuucauuuuauaugga

SEQ ID NO: 488353 - RNA, 21 nt, Artificial Sequence
  Synthetic
auuaucuucauuuuauaugga

SEQ ID NO: 488354 - RNA, 22 nt, Artificial Sequence
  Synthetic
aauuaucuucauuuuauaugga

SEQ ID NO: 488355 - RNA, 23 nt, Artificial Sequence
  Synthetic
caauuaucuucauuuuauaugga

SEQ ID NO: 488356 - RNA, 24 nt, Artificial Sequence
  Synthetic
ccaauuaucuucauuuuauaugga

SEQ ID NO: 488357 - RNA, 18 nt, Artificial Sequence
  Synthetic
uugacaauugacuaugga

SEQ ID NO: 488358 - RNA, 19 nt, Artificial Sequence
  Synthetic
uuugacaauugacuaugga

SEQ ID NO: 488359 - RNA, 20 nt, Artificial Sequence
  Synthetic
cuuugacaauugacuaugga

SEQ ID NO: 488360 - RNA, 21 nt, Artificial Sequence
  Synthetic
gcuuugacaauugacuaugga

SEQ ID NO: 488361 - RNA, 22 nt, Artificial Sequence
  Synthetic
ugcuuugacaauugacuaugga

SEQ ID NO: 488362 - RNA, 23 nt, Artificial Sequence
  Synthetic
uugcuuugacaauugacuaugga

SEQ ID NO: 488363 - RNA, 24 nt, Artificial Sequence
  Synthetic
cuugcuuugacaauugacuaugga

SEQ ID NO: 488364 - RNA, 18 nt, Artificial Sequence
  Synthetic
cuauaagugaucuaugga

SEQ ID NO: 488365 - RNA, 19 nt, Artificial Sequence
  Synthetic
ccuauaagugaucuaugga

SEQ ID NO: 488366 - RNA, 20 nt, Artificial Sequence
  Synthetic
cccuauaagugaucuaugga

SEQ ID NO: 488367 - RNA, 21 nt, Artificial Sequence
  Synthetic
ucccuauaagugaucuaugga

SEQ ID NO: 488368 - RNA, 22 nt, Artificial Sequence
  Synthetic
cucccuauaagugaucuaugga

SEQ ID NO: 488369 - RNA, 23 nt, Artificial Sequence
  Synthetic
acucccuauaagugaucuaugga

SEQ ID NO: 488370 - RNA, 24 nt, Artificial Sequence
  Synthetic
aacucccuauaagugaucuaugga

SEQ ID NO: 488371 - RNA, 18 nt, Artificial Sequence
  Synthetic
uaguaguaguaguaugga

SEQ ID NO: 488372 - RNA, 19 nt, Artificial Sequence
  Synthetic
guaguaguaguaguaugga

SEQ ID NO: 488373 - RNA, 20 nt, Artificial Sequence
  Synthetic
gguaguaguaguaguaugga

SEQ ID NO: 488374 - RNA, 21 nt, Artificial Sequence
  Synthetic
ugguaguaguaguaguaugga

SEQ ID NO: 488375 - RNA, 22 nt, Artificial Sequence
  Synthetic
gugguaguaguaguaguaugga

SEQ ID NO: 488376 - RNA, 23 nt, Artificial Sequence
  Synthetic
agugguaguaguaguaguaugga

SEQ ID NO: 488377 - RNA, 24 nt, Artificial Sequence
  Synthetic
uagugguaguaguaguaguaugga

SEQ ID NO: 488378 - RNA, 18 nt, Artificial Sequence
  Synthetic
agucacaauguguaugga

SEQ ID NO: 488379 - RNA, 19 nt, Artificial Sequence
  Synthetic
aagucacaauguguaugga

SEQ ID NO: 488380 - RNA, 20 nt, Artificial Sequence
  Synthetic
aaagucacaauguguaugga

SEQ ID NO: 488381 - RNA, 21 nt, Artificial Sequence
  Synthetic
caaagucacaauguguaugga

SEQ ID NO: 488382 - RNA, 22 nt, Artificial Sequence
  Synthetic
ucaaagucacaauguguaugga

SEQ ID NO: 488383 - RNA, 23 nt, Artificial Sequence
  Synthetic
cucaaagucacaauguguaugga

SEQ ID NO: 488384 - RNA, 24 nt, Artificial Sequence
  Synthetic
gcucaaagucacaauguguaugga

SEQ ID NO: 488385 - RNA, 18 nt, Artificial Sequence
  Synthetic
aaaagguaacauuaugga

SEQ ID NO: 488386 - RNA, 19 nt, Artificial Sequence
  Synthetic
uaaaagguaacauuaugga

SEQ ID NO: 488387 - RNA, 20 nt, Artificial Sequence
  Synthetic
uuaaaagguaacauuaugga

SEQ ID NO: 488388 - RNA, 21 nt, Artificial Sequence
  Synthetic
auuaaaagguaacauuaugga

SEQ ID NO: 488389 - RNA, 22 nt, Artificial Sequence
  Synthetic
uauuaaaagguaacauuaugga

SEQ ID NO: 488390 - RNA, 23 nt, Artificial Sequence
  Synthetic
uuauuaaaagguaacauuaugga

SEQ ID NO: 488391 - RNA, 24 nt, Artificial Sequence
  Synthetic
uuuauuaaaagguaacauuaugga

SEQ ID NO: 488392 - RNA, 18 nt, Artificial Sequence
  Synthetic
guaucagucuauuaugga

SEQ ID NO: 488393 - RNA, 19 nt, Artificial Sequence
  Synthetic
aguaucagucuauuaugga

SEQ ID NO: 488394 - RNA, 20 nt, Artificial Sequence
  Synthetic
aaguaucagucuauuaugga

SEQ ID NO: 488395 - RNA, 21 nt, Artificial Sequence
  Synthetic
aaaguaucagucuauuaugga

SEQ ID NO: 488396 - RNA, 22 nt, Artificial Sequence
  Synthetic
aaaaguaucagucuauuaugga

SEQ ID NO: 488397 - RNA, 23 nt, Artificial Sequence
  Synthetic
caaaaguaucagucuauuaugga

SEQ ID NO: 488398 - RNA, 24 nt, Artificial Sequence
  Synthetic
acaaaaguaucagucuauuaugga

SEQ ID NO: 488399 - RNA, 18 nt, Artificial Sequence
  Synthetic
guagaaugguauuaugga

SEQ ID NO: 488400 - RNA, 19 nt, Artificial Sequence
  Synthetic
uguagaaugguauuaugga

SEQ ID NO: 488401 - RNA, 20 nt, Artificial Sequence
  Synthetic
auguagaaugguauuaugga

SEQ ID NO: 488402 - RNA, 21 nt, Artificial Sequence
  Synthetic
cauguagaaugguauuaugga

SEQ ID NO: 488403 - RNA, 22 nt, Artificial Sequence
  Synthetic
ccauguagaaugguauuaugga

SEQ ID NO: 488404 - RNA, 23 nt, Artificial Sequence
  Synthetic
accauguagaaugguauuaugga

SEQ ID NO: 488405 - RNA, 24 nt, Artificial Sequence
  Synthetic
uaccauguagaaugguauuaugga

SEQ ID NO: 488406 - RNA, 18 nt, Artificial Sequence
  Synthetic
acauuccaugcuuaugga

SEQ ID NO: 488407 - RNA, 19 nt, Artificial Sequence
  Synthetic
aacauuccaugcuuaugga

SEQ ID NO: 488408 - RNA, 20 nt, Artificial Sequence
  Synthetic
aaacauuccaugcuuaugga

SEQ ID NO: 488409 - RNA, 21 nt, Artificial Sequence
  Synthetic
aaaacauuccaugcuuaugga

SEQ ID NO: 488410 - RNA, 22 nt, Artificial Sequence
  Synthetic
aaaaacauuccaugcuuaugga

SEQ ID NO: 488411 - RNA, 23 nt, Artificial Sequence
  Synthetic
gaaaaacauuccaugcuuaugga

SEQ ID NO: 488412 - RNA, 24 nt, Artificial Sequence
  Synthetic
ggaaaaacauuccaugcuuaugga

SEQ ID NO: 488413 - RNA, 18 nt, Artificial Sequence
  Synthetic
uauagaaacuguuaugga

SEQ ID NO: 488414 - RNA, 19 nt, Artificial Sequence
  Synthetic
auauagaaacuguuaugga

SEQ ID NO: 488415 - RNA, 20 nt, Artificial Sequence
  Synthetic
aauauagaaacuguuaugga

SEQ ID NO: 488416 - RNA, 21 nt, Artificial Sequence
  Synthetic
gaauauagaaacuguuaugga

SEQ ID NO: 488417 - RNA, 22 nt, Artificial Sequence
  Synthetic
agaauauagaaacuguuaugga

SEQ ID NO: 488418 - RNA, 23 nt, Artificial Sequence
  Synthetic
cagaauauagaaacuguuaugga

SEQ ID NO: 488419 - RNA, 24 nt, Artificial Sequence
  Synthetic
ucagaauauagaaacuguuaugga

SEQ ID NO: 488420 - RNA, 18 nt, Artificial Sequence
  Synthetic
uguucaauuauuuaugga

SEQ ID NO: 488421 - RNA, 19 nt, Artificial Sequence
  Synthetic
auguucaauuauuuaugga

SEQ ID NO: 488422 - RNA, 20 nt, Artificial Sequence
  Synthetic
aauguucaauuauuuaugga

SEQ ID NO: 488423 - RNA, 21 nt, Artificial Sequence
  Synthetic
aaauguucaauuauuuaugga

SEQ ID NO: 488424 - RNA, 22 nt, Artificial Sequence
  Synthetic
uaaauguucaauuauuuaugga

SEQ ID NO: 488425 - RNA, 23 nt, Artificial Sequence
  Synthetic
auaaauguucaauuauuuaugga

SEQ ID NO: 488426 - RNA, 24 nt, Artificial Sequence
  Synthetic
aauaaauguucaauuauuuaugga

SEQ ID NO: 488427 - RNA, 18 nt, Artificial Sequence
  Synthetic
gcuaacaugguaacugga

SEQ ID NO: 488428 - RNA, 19 nt, Artificial Sequence
  Synthetic
ggcuaacaugguaacugga

SEQ ID NO: 488429 - RNA, 20 nt, Artificial Sequence
  Synthetic
aggcuaacaugguaacugga

SEQ ID NO: 488430 - RNA, 21 nt, Artificial Sequence
  Synthetic
gaggcuaacaugguaacugga

SEQ ID NO: 488431 - RNA, 22 nt, Artificial Sequence
  Synthetic
ggaggcuaacaugguaacugga

SEQ ID NO: 488432 - RNA, 23 nt, Artificial Sequence
  Synthetic
gggaggcuaacaugguaacugga

SEQ ID NO: 488433 - RNA, 24 nt, Artificial Sequence
  Synthetic
ugggaggcuaacaugguaacugga

SEQ ID NO: 488434 - RNA, 18 nt, Artificial Sequence
  Synthetic
cagagagaagacacugga

SEQ ID NO: 488435 - RNA, 19 nt, Artificial Sequence
  Synthetic
gcagagagaagacacugga

SEQ ID NO: 488436 - RNA, 20 nt, Artificial Sequence
  Synthetic
agcagagagaagacacugga

SEQ ID NO: 488437 - RNA, 21 nt, Artificial Sequence
  Synthetic
aagcagagagaagacacugga

SEQ ID NO: 488438 - RNA, 22 nt, Artificial Sequence
  Synthetic
aaagcagagagaagacacugga

SEQ ID NO: 488439 - RNA, 23 nt, Artificial Sequence
  Synthetic
aaaagcagagagaagacacugga

SEQ ID NO: 488440 - RNA, 24 nt, Artificial Sequence
  Synthetic
gaaaagcagagagaagacacugga

SEQ ID NO: 488441 - RNA, 18 nt, Artificial Sequence
  Synthetic
cuaacuuagaccacugga

SEQ ID NO: 488442 - RNA, 19 nt, Artificial Sequence
  Synthetic
acuaacuuagaccacugga

SEQ ID NO: 488443 - RNA, 20 nt, Artificial Sequence
  Synthetic
gacuaacuuagaccacugga

SEQ ID NO: 488444 - RNA, 21 nt, Artificial Sequence
  Synthetic
cgacuaacuuagaccacugga

SEQ ID NO: 488445 - RNA, 22 nt, Artificial Sequence
  Synthetic
acgacuaacuuagaccacugga

SEQ ID NO: 488446 - RNA, 23 nt, Artificial Sequence
  Synthetic
aacgacuaacuuagaccacugga

SEQ ID NO: 488447 - RNA, 24 nt, Artificial Sequence
  Synthetic
aaacgacuaacuuagaccacugga

SEQ ID NO: 488448 - RNA, 18 nt, Artificial Sequence
  Synthetic
aaaauguaaagcacugga

SEQ ID NO: 488449 - RNA, 19 nt, Artificial Sequence
  Synthetic
caaaauguaaagcacugga

SEQ ID NO: 488450 - RNA, 20 nt, Artificial Sequence
  Synthetic
acaaaauguaaagcacugga

SEQ ID NO: 488451 - RNA, 21 nt, Artificial Sequence
  Synthetic
aacaaaauguaaagcacugga

SEQ ID NO: 488452 - RNA, 22 nt, Artificial Sequence
  Synthetic
gaacaaaauguaaagcacugga

SEQ ID NO: 488453 - RNA, 23 nt, Artificial Sequence
  Synthetic
agaacaaaauguaaagcacugga

SEQ ID NO: 488454 - RNA, 24 nt, Artificial Sequence
  Synthetic
aagaacaaaauguaaagcacugga

SEQ ID NO: 488455 - RNA, 18 nt, Artificial Sequence
  Synthetic
uggcuggagggcacugga

SEQ ID NO: 488456 - RNA, 19 nt, Artificial Sequence
  Synthetic
cuggcuggagggcacugga

SEQ ID NO: 488457 - RNA, 20 nt, Artificial Sequence
  Synthetic
ucuggcuggagggcacugga

SEQ ID NO: 488458 - RNA, 21 nt, Artificial Sequence
  Synthetic
uucuggcuggagggcacugga

SEQ ID NO: 488459 - RNA, 22 nt, Artificial Sequence
  Synthetic
auucuggcuggagggcacugga

SEQ ID NO: 488460 - RNA, 23 nt, Artificial Sequence
  Synthetic
cauucuggcuggagggcacugga

SEQ ID NO: 488461 - RNA, 24 nt, Artificial Sequence
  Synthetic
ucauucuggcuggagggcacugga

SEQ ID NO: 488462 - RNA, 18 nt, Artificial Sequence
  Synthetic
agugcaaacaucacugga

SEQ ID NO: 488463 - RNA, 19 nt, Artificial Sequence
  Synthetic
uagugcaaacaucacugga

SEQ ID NO: 488464 - RNA, 20 nt, Artificial Sequence
  Synthetic
guagugcaaacaucacugga

SEQ ID NO: 488465 - RNA, 21 nt, Artificial Sequence
  Synthetic
uguagugcaaacaucacugga

SEQ ID NO: 488466 - RNA, 22 nt, Artificial Sequence
  Synthetic
auguagugcaaacaucacugga

SEQ ID NO: 488467 - RNA, 23 nt, Artificial Sequence
  Synthetic
cauguagugcaaacaucacugga

SEQ ID NO: 488468 - RNA, 24 nt, Artificial Sequence
  Synthetic
ccauguagugcaaacaucacugga

SEQ ID NO: 488469 - RNA, 18 nt, Artificial Sequence
  Synthetic
uaaaaaugggagacugga

SEQ ID NO: 488470 - RNA, 19 nt, Artificial Sequence
  Synthetic
guaaaaaugggagacugga

SEQ ID NO: 488471 - RNA, 20 nt, Artificial Sequence
  Synthetic
aguaaaaaugggagacugga

SEQ ID NO: 488472 - RNA, 21 nt, Artificial Sequence
  Synthetic
uaguaaaaaugggagacugga

SEQ ID NO: 488473 - RNA, 22 nt, Artificial Sequence
  Synthetic
uuaguaaaaaugggagacugga

SEQ ID NO: 488474 - RNA, 23 nt, Artificial Sequence
  Synthetic
uuuaguaaaaaugggagacugga

SEQ ID NO: 488475 - RNA, 24 nt, Artificial Sequence
  Synthetic
cuuuaguaaaaaugggagacugga

SEQ ID NO: 488476 - RNA, 18 nt, Artificial Sequence
  Synthetic
acauuugaaucgacugga

SEQ ID NO: 488477 - RNA, 19 nt, Artificial Sequence
  Synthetic
gacauuugaaucgacugga

SEQ ID NO: 488478 - RNA, 20 nt, Artificial Sequence
  Synthetic
ggacauuugaaucgacugga

SEQ ID NO: 488479 - RNA, 21 nt, Artificial Sequence
  Synthetic
aggacauuugaaucgacugga

SEQ ID NO: 488480 - RNA, 22 nt, Artificial Sequence
  Synthetic
gaggacauuugaaucgacugga

SEQ ID NO: 488481 - RNA, 23 nt, Artificial Sequence
  Synthetic
agaggacauuugaaucgacugga

SEQ ID NO: 488482 - RNA, 24 nt, Artificial Sequence
  Synthetic
aagaggacauuugaaucgacugga

SEQ ID NO: 488483 - RNA, 18 nt, Artificial Sequence
  Synthetic
auugauucacauacugga

SEQ ID NO: 488484 - RNA, 19 nt, Artificial Sequence
  Synthetic
cauugauucacauacugga

SEQ ID NO: 488485 - RNA, 20 nt, Artificial Sequence
  Synthetic
acauugauucacauacugga

SEQ ID NO: 488486 - RNA, 21 nt, Artificial Sequence
  Synthetic
uacauugauucacauacugga

SEQ ID NO: 488487 - RNA, 22 nt, Artificial Sequence
  Synthetic
guacauugauucacauacugga

SEQ ID NO: 488488 - RNA, 23 nt, Artificial Sequence
  Synthetic
aguacauugauucacauacugga

SEQ ID NO: 488489 - RNA, 24 nt, Artificial Sequence
  Synthetic
aaguacauugauucacauacugga

SEQ ID NO: 488490 - RNA, 18 nt, Artificial Sequence
  Synthetic
ugcccuuacuauacugga

SEQ ID NO: 488491 - RNA, 19 nt, Artificial Sequence
  Synthetic
gugcccuuacuauacugga

SEQ ID NO: 488492 - RNA, 20 nt, Artificial Sequence
  Synthetic
ggugcccuuacuauacugga

SEQ ID NO: 488493 - RNA, 21 nt, Artificial Sequence
  Synthetic
aggugcccuuacuauacugga

SEQ ID NO: 488494 - RNA, 22 nt, Artificial Sequence
  Synthetic
gaggugcccuuacuauacugga

SEQ ID NO: 488495 - RNA, 23 nt, Artificial Sequence
  Synthetic
agaggugcccuuacuauacugga

SEQ ID NO: 488496 - RNA, 24 nt, Artificial Sequence
  Synthetic
cagaggugcccuuacuauacugga

SEQ ID NO: 488497 - RNA, 18 nt, Artificial Sequence
  Synthetic
acguggaagccuacugga

SEQ ID NO: 488498 - RNA, 19 nt, Artificial Sequence
  Synthetic
gacguggaagccuacugga

SEQ ID NO: 488499 - RNA, 20 nt, Artificial Sequence
  Synthetic
agacguggaagccuacugga

SEQ ID NO: 488500 - RNA, 21 nt, Artificial Sequence
  Synthetic
cagacguggaagccuacugga

SEQ ID NO: 488501 - RNA, 22 nt, Artificial Sequence
  Synthetic
acagacguggaagccuacugga

SEQ ID NO: 488502 - RNA, 23 nt, Artificial Sequence
  Synthetic
aacagacguggaagccuacugga

SEQ ID NO: 488503 - RNA, 24 nt, Artificial Sequence
  Synthetic
caacagacguggaagccuacugga

SEQ ID NO: 488504 - RNA, 18 nt, Artificial Sequence
  Synthetic
agagaagaaagaccugga

SEQ ID NO: 488505 - RNA, 19 nt, Artificial Sequence
  Synthetic
cagagaagaaagaccugga

SEQ ID NO: 488506 - RNA, 20 nt, Artificial Sequence
  Synthetic
ccagagaagaaagaccugga

SEQ ID NO: 488507 - RNA, 21 nt, Artificial Sequence
  Synthetic
uccagagaagaaagaccugga

SEQ ID NO: 488508 - RNA, 22 nt, Artificial Sequence
  Synthetic
auccagagaagaaagaccugga

SEQ ID NO: 488509 - RNA, 23 nt, Artificial Sequence
  Synthetic
cauccagagaagaaagaccugga

SEQ ID NO: 488510 - RNA, 24 nt, Artificial Sequence
  Synthetic
acauccagagaagaaagaccugga

SEQ ID NO: 488511 - RNA, 18 nt, Artificial Sequence
  Synthetic
uuuuuaaaugacccugga

SEQ ID NO: 488512 - RNA, 19 nt, Artificial Sequence
  Synthetic
auuuuuaaaugacccugga

SEQ ID NO: 488513 - RNA, 20 nt, Artificial Sequence
  Synthetic
uauuuuuaaaugacccugga

SEQ ID NO: 488514 - RNA, 21 nt, Artificial Sequence
  Synthetic
uuauuuuuaaaugacccugga

SEQ ID NO: 488515 - RNA, 22 nt, Artificial Sequence
  Synthetic
guuauuuuuaaaugacccugga

SEQ ID NO: 488516 - RNA, 23 nt, Artificial Sequence
  Synthetic
aguuauuuuuaaaugacccugga

SEQ ID NO: 488517 - RNA, 24 nt, Artificial Sequence
  Synthetic
uaguuauuuuuaaaugacccugga

SEQ ID NO: 488518 - RNA, 18 nt, Artificial Sequence
  Synthetic
ccagugugugucccugga

SEQ ID NO: 488519 - RNA, 19 nt, Artificial Sequence
  Synthetic
accagugugugucccugga

SEQ ID NO: 488520 - RNA, 20 nt, Artificial Sequence
  Synthetic
uaccagugugugucccugga

SEQ ID NO: 488521 - RNA, 21 nt, Artificial Sequence
  Synthetic
auaccagugugugucccugga

SEQ ID NO: 488522 - RNA, 22 nt, Artificial Sequence
  Synthetic
aauaccagugugugucccugga

SEQ ID NO: 488523 - RNA, 23 nt, Artificial Sequence
  Synthetic
caauaccagugugugucccugga

SEQ ID NO: 488524 - RNA, 24 nt, Artificial Sequence
  Synthetic
ucaauaccagugugugucccugga

SEQ ID NO: 488525 - RNA, 18 nt, Artificial Sequence
  Synthetic
auuuaguauaauccugga

SEQ ID NO: 488526 - RNA, 19 nt, Artificial Sequence
  Synthetic
cauuuaguauaauccugga

SEQ ID NO: 488527 - RNA, 20 nt, Artificial Sequence
  Synthetic
acauuuaguauaauccugga

SEQ ID NO: 488528 - RNA, 21 nt, Artificial Sequence
  Synthetic
cacauuuaguauaauccugga

SEQ ID NO: 488529 - RNA, 22 nt, Artificial Sequence
  Synthetic
acacauuuaguauaauccugga

SEQ ID NO: 488530 - RNA, 23 nt, Artificial Sequence
  Synthetic
uacacauuuaguauaauccugga

SEQ ID NO: 488531 - RNA, 24 nt, Artificial Sequence
  Synthetic
auacacauuuaguauaauccugga

SEQ ID NO: 488532 - RNA, 18 nt, Artificial Sequence
  Synthetic
uuuuuuuuuuuuccugga

SEQ ID NO: 488533 - RNA, 19 nt, Artificial Sequence
  Synthetic
auuuuuuuuuuuuccugga

SEQ ID NO: 488534 - RNA, 20 nt, Artificial Sequence
  Synthetic
uauuuuuuuuuuuuccugga

SEQ ID NO: 488535 - RNA, 21 nt, Artificial Sequence
  Synthetic
auauuuuuuuuuuuuccugga

SEQ ID NO: 488536 - RNA, 22 nt, Artificial Sequence
  Synthetic
gauauuuuuuuuuuuuccugga

SEQ ID NO: 488537 - RNA, 23 nt, Artificial Sequence
  Synthetic
agauauuuuuuuuuuuuccugga

SEQ ID NO: 488538 - RNA, 24 nt, Artificial Sequence
  Synthetic
uagauauuuuuuuuuuuuccugga

SEQ ID NO: 488539 - RNA, 18 nt, Artificial Sequence
  Synthetic
gcgaacugagaagcugga

SEQ ID NO: 488540 - RNA, 19 nt, Artificial Sequence
  Synthetic
cgcgaacugagaagcugga

SEQ ID NO: 488541 - RNA, 20 nt, Artificial Sequence
  Synthetic
acgcgaacugagaagcugga

SEQ ID NO: 488542 - RNA, 21 nt, Artificial Sequence
  Synthetic
cacgcgaacugagaagcugga

SEQ ID NO: 488543 - RNA, 22 nt, Artificial Sequence
  Synthetic
acacgcgaacugagaagcugga

SEQ ID NO: 488544 - RNA, 23 nt, Artificial Sequence
  Synthetic
cacacgcgaacugagaagcugga

SEQ ID NO: 488545 - RNA, 24 nt, Artificial Sequence
  Synthetic
ccacacgcgaacugagaagcugga

SEQ ID NO: 488546 - RNA, 18 nt, Artificial Sequence
  Synthetic
gaagcaaguacagcugga

SEQ ID NO: 488547 - RNA, 19 nt, Artificial Sequence
  Synthetic
agaagcaaguacagcugga

SEQ ID NO: 488548 - RNA, 20 nt, Artificial Sequence
  Synthetic
cagaagcaaguacagcugga

SEQ ID NO: 488549 - RNA, 21 nt, Artificial Sequence
  Synthetic
gcagaagcaaguacagcugga

SEQ ID NO: 488550 - RNA, 22 nt, Artificial Sequence
  Synthetic
agcagaagcaaguacagcugga

SEQ ID NO: 488551 - RNA, 23 nt, Artificial Sequence
  Synthetic
aagcagaagcaaguacagcugga

SEQ ID NO: 488552 - RNA, 24 nt, Artificial Sequence
  Synthetic
uaagcagaagcaaguacagcugga

SEQ ID NO: 488553 - RNA, 18 nt, Artificial Sequence
  Synthetic
gaagagugaccagcugga

SEQ ID NO: 488554 - RNA, 19 nt, Artificial Sequence
  Synthetic
agaagagugaccagcugga

SEQ ID NO: 488555 - RNA, 20 nt, Artificial Sequence
  Synthetic
cagaagagugaccagcugga

SEQ ID NO: 488556 - RNA, 21 nt, Artificial Sequence
  Synthetic
gcagaagagugaccagcugga

SEQ ID NO: 488557 - RNA, 22 nt, Artificial Sequence
  Synthetic
cgcagaagagugaccagcugga

SEQ ID NO: 488558 - RNA, 23 nt, Artificial Sequence
  Synthetic
acgcagaagagugaccagcugga

SEQ ID NO: 488559 - RNA, 24 nt, Artificial Sequence
  Synthetic
uacgcagaagagugaccagcugga

SEQ ID NO: 488560 - RNA, 18 nt, Artificial Sequence
  Synthetic
gggaaguggucagcugga

SEQ ID NO: 488561 - RNA, 19 nt, Artificial Sequence
  Synthetic
ugggaaguggucagcugga

SEQ ID NO: 488562 - RNA, 20 nt, Artificial Sequence
  Synthetic
gugggaaguggucagcugga

SEQ ID NO: 488563 - RNA, 21 nt, Artificial Sequence
  Synthetic
agugggaaguggucagcugga

SEQ ID NO: 488564 - RNA, 22 nt, Artificial Sequence
  Synthetic
gagugggaaguggucagcugga

SEQ ID NO: 488565 - RNA, 23 nt, Artificial Sequence
  Synthetic
ggagugggaaguggucagcugga

SEQ ID NO: 488566 - RNA, 24 nt, Artificial Sequence
  Synthetic
uggagugggaaguggucagcugga

SEQ ID NO: 488567 - RNA, 18 nt, Artificial Sequence
  Synthetic
uugugugggggagcugga

SEQ ID NO: 488568 - RNA, 19 nt, Artificial Sequence
  Synthetic
uuugugugggggagcugga

SEQ ID NO: 488569 - RNA, 20 nt, Artificial Sequence
  Synthetic
uuuugugugggggagcugga

SEQ ID NO: 488570 - RNA, 21 nt, Artificial Sequence
  Synthetic
uuuuugugugggggagcugga

SEQ ID NO: 488571 - RNA, 22 nt, Artificial Sequence
  Synthetic
cuuuuugugugggggagcugga

SEQ ID NO: 488572 - RNA, 23 nt, Artificial Sequence
  Synthetic
ucuuuuugugugggggagcugga

SEQ ID NO: 488573 - RNA, 24 nt, Artificial Sequence
  Synthetic
uucuuuuugugugggggagcugga

SEQ ID NO: 488574 - RNA, 18 nt, Artificial Sequence
  Synthetic
agcuccaguuuagcugga

SEQ ID NO: 488575 - RNA, 19 nt, Artificial Sequence
  Synthetic
aagcuccaguuuagcugga

SEQ ID NO: 488576 - RNA, 20 nt, Artificial Sequence
  Synthetic
caagcuccaguuuagcugga

SEQ ID NO: 488577 - RNA, 21 nt, Artificial Sequence
  Synthetic
ccaagcuccaguuuagcugga

SEQ ID NO: 488578 - RNA, 22 nt, Artificial Sequence
  Synthetic
cccaagcuccaguuuagcugga

SEQ ID NO: 488579 - RNA, 23 nt, Artificial Sequence
  Synthetic
ucccaagcuccaguuuagcugga

SEQ ID NO: 488580 - RNA, 24 nt, Artificial Sequence
  Synthetic
cucccaagcuccaguuuagcugga

SEQ ID NO: 488581 - RNA, 18 nt, Artificial Sequence
  Synthetic
ggcaacaaacacgcugga

SEQ ID NO: 488582 - RNA, 19 nt, Artificial Sequence
  Synthetic
aggcaacaaacacgcugga

SEQ ID NO: 488583 - RNA, 20 nt, Artificial Sequence
  Synthetic
aaggcaacaaacacgcugga

SEQ ID NO: 488584 - RNA, 21 nt, Artificial Sequence
  Synthetic
aaaggcaacaaacacgcugga

SEQ ID NO: 488585 - RNA, 22 nt, Artificial Sequence
  Synthetic
aaaaggcaacaaacacgcugga

SEQ ID NO: 488586 - RNA, 23 nt, Artificial Sequence
  Synthetic
aaaaaggcaacaaacacgcugga

SEQ ID NO: 488587 - RNA, 24 nt, Artificial Sequence
  Synthetic
caaaaaggcaacaaacacgcugga

SEQ ID NO: 488588 - RNA, 21 nt, Artificial Sequence
  Synthetic
cgcucugucacccaggcugga

SEQ ID NO: 488589 - RNA, 22 nt, Artificial Sequence
  Synthetic
ucgcucugucacccaggcugga

SEQ ID NO: 488590 - RNA, 23 nt, Artificial Sequence
  Synthetic
cucgcucugucacccaggcugga

SEQ ID NO: 488591 - RNA, 24 nt, Artificial Sequence
  Synthetic
ucucgcucugucacccaggcugga

SEQ ID NO: 488592 - RNA, 18 nt, Artificial Sequence
  Synthetic
ucugucgcccaggcugga

SEQ ID NO: 488593 - RNA, 19 nt, Artificial Sequence
  Synthetic
cucugucgcccaggcugga

SEQ ID NO: 488594 - RNA, 20 nt, Artificial Sequence
  Synthetic
gcucugucgcccaggcugga

SEQ ID NO: 488595 - RNA, 21 nt, Artificial Sequence
  Synthetic
ggcucugucgcccaggcugga

SEQ ID NO: 488596 - RNA, 22 nt, Artificial Sequence
  Synthetic
uggcucugucgcccaggcugga

SEQ ID NO: 488597 - RNA, 23 nt, Artificial Sequence
  Synthetic
cuggcucugucgcccaggcugga

SEQ ID NO: 488598 - RNA, 24 nt, Artificial Sequence
  Synthetic
ucuggcucugucgcccaggcugga

SEQ ID NO: 488599 - RNA, 18 nt, Artificial Sequence
  Synthetic
ucuguccccuaggcugga

SEQ ID NO: 488600 - RNA, 19 nt, Artificial Sequence
  Synthetic
cucuguccccuaggcugga

SEQ ID NO: 488601 - RNA, 20 nt, Artificial Sequence
  Synthetic
acucuguccccuaggcugga

SEQ ID NO: 488602 - RNA, 21 nt, Artificial Sequence
  Synthetic
cacucuguccccuaggcugga

SEQ ID NO: 488603 - RNA, 22 nt, Artificial Sequence
  Synthetic
ucacucuguccccuaggcugga

SEQ ID NO: 488604 - RNA, 23 nt, Artificial Sequence
  Synthetic
cucacucuguccccuaggcugga

SEQ ID NO: 488605 - RNA, 24 nt, Artificial Sequence
  Synthetic
ucucacucuguccccuaggcugga

SEQ ID NO: 488606 - RNA, 18 nt, Artificial Sequence
  Synthetic
aagacacaaggggcugga

SEQ ID NO: 488607 - RNA, 19 nt, Artificial Sequence
  Synthetic
gaagacacaaggggcugga

SEQ ID NO: 488608 - RNA, 20 nt, Artificial Sequence
  Synthetic
agaagacacaaggggcugga

SEQ ID NO: 488609 - RNA, 21 nt, Artificial Sequence
  Synthetic
cagaagacacaaggggcugga

SEQ ID NO: 488610 - RNA, 22 nt, Artificial Sequence
  Synthetic
ucagaagacacaaggggcugga

SEQ ID NO: 488611 - RNA, 23 nt, Artificial Sequence
  Synthetic
uucagaagacacaaggggcugga

SEQ ID NO: 488612 - RNA, 24 nt, Artificial Sequence
  Synthetic
uuucagaagacacaaggggcugga

SEQ ID NO: 488613 - RNA, 18 nt, Artificial Sequence
  Synthetic
uccaaacucugggcugga

SEQ ID NO: 488614 - RNA, 19 nt, Artificial Sequence
  Synthetic
uuccaaacucugggcugga

SEQ ID NO: 488615 - RNA, 20 nt, Artificial Sequence
  Synthetic
uuuccaaacucugggcugga

SEQ ID NO: 488616 - RNA, 21 nt, Artificial Sequence
  Synthetic
guuuccaaacucugggcugga

SEQ ID NO: 488617 - RNA, 22 nt, Artificial Sequence
  Synthetic
aguuuccaaacucugggcugga

SEQ ID NO: 488618 - RNA, 23 nt, Artificial Sequence
  Synthetic
caguuuccaaacucugggcugga

SEQ ID NO: 488619 - RNA, 24 nt, Artificial Sequence
  Synthetic
ucaguuuccaaacucugggcugga

SEQ ID NO: 488620 - RNA, 18 nt, Artificial Sequence
  Synthetic
uaaggaaaccuggcugga

SEQ ID NO: 488621 - RNA, 19 nt, Artificial Sequence
  Synthetic
cuaaggaaaccuggcugga

SEQ ID NO: 488622 - RNA, 20 nt, Artificial Sequence
  Synthetic
ccuaaggaaaccuggcugga

SEQ ID NO: 488623 - RNA, 21 nt, Artificial Sequence
  Synthetic
uccuaaggaaaccuggcugga

SEQ ID NO: 488624 - RNA, 22 nt, Artificial Sequence
  Synthetic
guccuaaggaaaccuggcugga

SEQ ID NO: 488625 - RNA, 23 nt, Artificial Sequence
  Synthetic
gguccuaaggaaaccuggcugga

SEQ ID NO: 488626 - RNA, 24 nt, Artificial Sequence
  Synthetic
agguccuaaggaaaccuggcugga

SEQ ID NO: 488627 - RNA, 18 nt, Artificial Sequence
  Synthetic
cccaguucaguggcugga

SEQ ID NO: 488628 - RNA, 19 nt, Artificial Sequence
  Synthetic
gcccaguucaguggcugga

SEQ ID NO: 488629 - RNA, 20 nt, Artificial Sequence
  Synthetic
ugcccaguucaguggcugga

SEQ ID NO: 488630 - RNA, 21 nt, Artificial Sequence
  Synthetic
augcccaguucaguggcugga

SEQ ID NO: 488631 - RNA, 22 nt, Artificial Sequence
  Synthetic
gaugcccaguucaguggcugga

SEQ ID NO: 488632 - RNA, 23 nt, Artificial Sequence
  Synthetic
cgaugcccaguucaguggcugga

SEQ ID NO: 488633 - RNA, 24 nt, Artificial Sequence
  Synthetic
gcgaugcccaguucaguggcugga

SEQ ID NO: 488634 - RNA, 18 nt, Artificial Sequence
  Synthetic
gacugaauagaugcugga

SEQ ID NO: 488635 - RNA, 19 nt, Artificial Sequence
  Synthetic
ugacugaauagaugcugga

SEQ ID NO: 488636 - RNA, 20 nt, Artificial Sequence
  Synthetic
gugacugaauagaugcugga

SEQ ID NO: 488637 - RNA, 21 nt, Artificial Sequence
  Synthetic
ggugacugaauagaugcugga

SEQ ID NO: 488638 - RNA, 22 nt, Artificial Sequence
  Synthetic
uggugacugaauagaugcugga

SEQ ID NO: 488639 - RNA, 23 nt, Artificial Sequence
  Synthetic
uuggugacugaauagaugcugga

SEQ ID NO: 488640 - RNA, 24 nt, Artificial Sequence
  Synthetic
uuuggugacugaauagaugcugga

SEQ ID NO: 488641 - RNA, 18 nt, Artificial Sequence
  Synthetic
aaucauguaucugcugga

SEQ ID NO: 488642 - RNA, 19 nt, Artificial Sequence
  Synthetic
gaaucauguaucugcugga

SEQ ID NO: 488643 - RNA, 20 nt, Artificial Sequence
  Synthetic
ugaaucauguaucugcugga

SEQ ID NO: 488644 - RNA, 21 nt, Artificial Sequence
  Synthetic
uugaaucauguaucugcugga

SEQ ID NO: 488645 - RNA, 22 nt, Artificial Sequence
  Synthetic
uuugaaucauguaucugcugga

SEQ ID NO: 488646 - RNA, 23 nt, Artificial Sequence
  Synthetic
uuuugaaucauguaucugcugga

SEQ ID NO: 488647 - RNA, 24 nt, Artificial Sequence
  Synthetic
auuuugaaucauguaucugcugga

SEQ ID NO: 488648 - RNA, 18 nt, Artificial Sequence
  Synthetic
uuuuguucccuugcugga

SEQ ID NO: 488649 - RNA, 19 nt, Artificial Sequence
  Synthetic
guuuuguucccuugcugga

SEQ ID NO: 488650 - RNA, 20 nt, Artificial Sequence
  Synthetic
aguuuuguucccuugcugga

SEQ ID NO: 488651 - RNA, 21 nt, Artificial Sequence
  Synthetic
caguuuuguucccuugcugga

SEQ ID NO: 488652 - RNA, 22 nt, Artificial Sequence
  Synthetic
ccaguuuuguucccuugcugga

SEQ ID NO: 488653 - RNA, 23 nt, Artificial Sequence
  Synthetic
uccaguuuuguucccuugcugga

SEQ ID NO: 488654 - RNA, 24 nt, Artificial Sequence
  Synthetic
auccaguuuuguucccuugcugga

SEQ ID NO: 488655 - RNA, 18 nt, Artificial Sequence
  Synthetic
ucacaugcugaaucugga

SEQ ID NO: 488656 - RNA, 19 nt, Artificial Sequence
  Synthetic
uucacaugcugaaucugga

SEQ ID NO: 488657 - RNA, 20 nt, Artificial Sequence
  Synthetic
cuucacaugcugaaucugga

SEQ ID NO: 488658 - RNA, 21 nt, Artificial Sequence
  Synthetic
acuucacaugcugaaucugga

SEQ ID NO: 488659 - RNA, 22 nt, Artificial Sequence
  Synthetic
uacuucacaugcugaaucugga

SEQ ID NO: 488660 - RNA, 23 nt, Artificial Sequence
  Synthetic
auacuucacaugcugaaucugga

SEQ ID NO: 488661 - RNA, 24 nt, Artificial Sequence
  Synthetic
cauacuucacaugcugaaucugga

SEQ ID NO: 488662 - RNA, 18 nt, Artificial Sequence
  Synthetic
uuucaagugagaucugga

SEQ ID NO: 488663 - RNA, 19 nt, Artificial Sequence
  Synthetic
uuuucaagugagaucugga

SEQ ID NO: 488664 - RNA, 20 nt, Artificial Sequence
  Synthetic
guuuucaagugagaucugga

SEQ ID NO: 488665 - RNA, 21 nt, Artificial Sequence
  Synthetic
aguuuucaagugagaucugga

SEQ ID NO: 488666 - RNA, 22 nt, Artificial Sequence
  Synthetic
gaguuuucaagugagaucugga

SEQ ID NO: 488667 - RNA, 23 nt, Artificial Sequence
  Synthetic
agaguuuucaagugagaucugga

SEQ ID NO: 488668 - RNA, 24 nt, Artificial Sequence
  Synthetic
uagaguuuucaagugagaucugga

SEQ ID NO: 488669 - RNA, 18 nt, Artificial Sequence
  Synthetic
gaugucuauagaucugga

SEQ ID NO: 488670 - RNA, 19 nt, Artificial Sequence
  Synthetic
ugaugucuauagaucugga

SEQ ID NO: 488671 - RNA, 20 nt, Artificial Sequence
  Synthetic
cugaugucuauagaucugga

SEQ ID NO: 488672 - RNA, 21 nt, Artificial Sequence
  Synthetic
acugaugucuauagaucugga

SEQ ID NO: 488673 - RNA, 22 nt, Artificial Sequence
  Synthetic
uacugaugucuauagaucugga

SEQ ID NO: 488674 - RNA, 23 nt, Artificial Sequence
  Synthetic
cuacugaugucuauagaucugga

SEQ ID NO: 488675 - RNA, 24 nt, Artificial Sequence
  Synthetic
ucuacugaugucuauagaucugga

SEQ ID NO: 488676 - RNA, 18 nt, Artificial Sequence
  Synthetic
uugcuuaaucccucugga

SEQ ID NO: 488677 - RNA, 19 nt, Artificial Sequence
  Synthetic
auugcuuaaucccucugga

SEQ ID NO: 488678 - RNA, 20 nt, Artificial Sequence
  Synthetic
gauugcuuaaucccucugga

SEQ ID NO: 488679 - RNA, 21 nt, Artificial Sequence
  Synthetic
agauugcuuaaucccucugga

SEQ ID NO: 488680 - RNA, 22 nt, Artificial Sequence
  Synthetic
aagauugcuuaaucccucugga

SEQ ID NO: 488681 - RNA, 23 nt, Artificial Sequence
  Synthetic
gaagauugcuuaaucccucugga

SEQ ID NO: 488682 - RNA, 24 nt, Artificial Sequence
  Synthetic
agaagauugcuuaaucccucugga

SEQ ID NO: 488683 - RNA, 18 nt, Artificial Sequence
  Synthetic
gagcucuaggccucugga

SEQ ID NO: 488684 - RNA, 19 nt, Artificial Sequence
  Synthetic
ugagcucuaggccucugga

SEQ ID NO: 488685 - RNA, 20 nt, Artificial Sequence
  Synthetic
cugagcucuaggccucugga

SEQ ID NO: 488686 - RNA, 21 nt, Artificial Sequence
  Synthetic
ccugagcucuaggccucugga

SEQ ID NO: 488687 - RNA, 22 nt, Artificial Sequence
  Synthetic
gccugagcucuaggccucugga

SEQ ID NO: 488688 - RNA, 23 nt, Artificial Sequence
  Synthetic
ggccugagcucuaggccucugga

SEQ ID NO: 488689 - RNA, 24 nt, Artificial Sequence
  Synthetic
gggccugagcucuaggccucugga

SEQ ID NO: 488690 - RNA, 18 nt, Artificial Sequence
  Synthetic
acauaagaacucucugga

SEQ ID NO: 488691 - RNA, 19 nt, Artificial Sequence
  Synthetic
gacauaagaacucucugga

SEQ ID NO: 488692 - RNA, 20 nt, Artificial Sequence
  Synthetic
agacauaagaacucucugga

SEQ ID NO: 488693 - RNA, 21 nt, Artificial Sequence
  Synthetic
uagacauaagaacucucugga

SEQ ID NO: 488694 - RNA, 22 nt, Artificial Sequence
  Synthetic
guagacauaagaacucucugga

SEQ ID NO: 488695 - RNA, 23 nt, Artificial Sequence
  Synthetic
aguagacauaagaacucucugga

SEQ ID NO: 488696 - RNA, 24 nt, Artificial Sequence
  Synthetic
caguagacauaagaacucucugga

SEQ ID NO: 488697 - RNA, 18 nt, Artificial Sequence
  Synthetic
ugagggagguucucugga

SEQ ID NO: 488698 - RNA, 19 nt, Artificial Sequence
  Synthetic
cugagggagguucucugga

SEQ ID NO: 488699 - RNA, 20 nt, Artificial Sequence
  Synthetic
gcugagggagguucucugga

SEQ ID NO: 488700 - RNA, 21 nt, Artificial Sequence
  Synthetic
ggcugagggagguucucugga

SEQ ID NO: 488701 - RNA, 22 nt, Artificial Sequence
  Synthetic
uggcugagggagguucucugga

SEQ ID NO: 488702 - RNA, 23 nt, Artificial Sequence
  Synthetic
uuggcugagggagguucucugga

SEQ ID NO: 488703 - RNA, 24 nt, Artificial Sequence
  Synthetic
uuuggcugagggagguucucugga

SEQ ID NO: 488704 - RNA, 24 nt, Artificial Sequence
  Synthetic
uggagaaugucuuaguggucugga

SEQ ID NO: 488705 - RNA, 18 nt, Artificial Sequence
  Synthetic
aacugaaaaucuucugga

SEQ ID NO: 488706 - RNA, 19 nt, Artificial Sequence
  Synthetic
aaacugaaaaucuucugga

SEQ ID NO: 488707 - RNA, 20 nt, Artificial Sequence
  Synthetic
uaaacugaaaaucuucugga

SEQ ID NO: 488708 - RNA, 21 nt, Artificial Sequence
  Synthetic
guaaacugaaaaucuucugga

SEQ ID NO: 488709 - RNA, 22 nt, Artificial Sequence
  Synthetic
gguaaacugaaaaucuucugga

SEQ ID NO: 488710 - RNA, 23 nt, Artificial Sequence
  Synthetic
ggguaaacugaaaaucuucugga

SEQ ID NO: 488711 - RNA, 24 nt, Artificial Sequence
  Synthetic
uggguaaacugaaaaucuucugga

SEQ ID NO: 488712 - RNA, 18 nt, Artificial Sequence
  Synthetic
aaccuaaaauguucugga

SEQ ID NO: 488713 - RNA, 19 nt, Artificial Sequence
  Synthetic
uaaccuaaaauguucugga

SEQ ID NO: 488714 - RNA, 20 nt, Artificial Sequence
  Synthetic
uuaaccuaaaauguucugga

SEQ ID NO: 488715 - RNA, 21 nt, Artificial Sequence
  Synthetic
cuuaaccuaaaauguucugga

SEQ ID NO: 488716 - RNA, 22 nt, Artificial Sequence
  Synthetic
acuuaaccuaaaauguucugga

SEQ ID NO: 488717 - RNA, 23 nt, Artificial Sequence
  Synthetic
aacuuaaccuaaaauguucugga

SEQ ID NO: 488718 - RNA, 24 nt, Artificial Sequence
  Synthetic
aaacuuaaccuaaaauguucugga

SEQ ID NO: 488719 - RNA, 18 nt, Artificial Sequence
  Synthetic
gcguuucaaauuucugga

SEQ ID NO: 488720 - RNA, 19 nt, Artificial Sequence
  Synthetic
ugcguuucaaauuucugga

SEQ ID NO: 488721 - RNA, 20 nt, Artificial Sequence
  Synthetic
augcguuucaaauuucugga

SEQ ID NO: 488722 - RNA, 21 nt, Artificial Sequence
  Synthetic
aaugcguuucaaauuucugga

SEQ ID NO: 488723 - RNA, 22 nt, Artificial Sequence
  Synthetic
gaaugcguuucaaauuucugga

SEQ ID NO: 488724 - RNA, 23 nt, Artificial Sequence
  Synthetic
agaaugcguuucaaauuucugga

SEQ ID NO: 488725 - RNA, 24 nt, Artificial Sequence
  Synthetic
gagaaugcguuucaaauuucugga

SEQ ID NO: 488726 - RNA, 18 nt, Artificial Sequence
  Synthetic
uuaagaaaagaaagugga

SEQ ID NO: 488727 - RNA, 19 nt, Artificial Sequence
  Synthetic
auuaagaaaagaaagugga

SEQ ID NO: 488728 - RNA, 20 nt, Artificial Sequence
  Synthetic
aauuaagaaaagaaagugga

SEQ ID NO: 488729 - RNA, 21 nt, Artificial Sequence
  Synthetic
aaauuaagaaaagaaagugga

SEQ ID NO: 488730 - RNA, 22 nt, Artificial Sequence
  Synthetic
gaaauuaagaaaagaaagugga

SEQ ID NO: 488731 - RNA, 23 nt, Artificial Sequence
  Synthetic
ugaaauuaagaaaagaaagugga

SEQ ID NO: 488732 - RNA, 24 nt, Artificial Sequence
  Synthetic
cugaaauuaagaaaagaaagugga

SEQ ID NO: 488733 - RNA, 18 nt, Artificial Sequence
  Synthetic
uaugaggguagaagugga

SEQ ID NO: 488734 - RNA, 19 nt, Artificial Sequence
  Synthetic
cuaugaggguagaagugga

SEQ ID NO: 488735 - RNA, 20 nt, Artificial Sequence
  Synthetic
gcuaugaggguagaagugga

SEQ ID NO: 488736 - RNA, 21 nt, Artificial Sequence
  Synthetic
ugcuaugaggguagaagugga

SEQ ID NO: 488737 - RNA, 22 nt, Artificial Sequence
  Synthetic
augcuaugaggguagaagugga

SEQ ID NO: 488738 - RNA, 23 nt, Artificial Sequence
  Synthetic
aaugcuaugaggguagaagugga

SEQ ID NO: 488739 - RNA, 24 nt, Artificial Sequence
  Synthetic
uaaugcuaugaggguagaagugga

SEQ ID NO: 488740 - RNA, 18 nt, Artificial Sequence
  Synthetic
cucaguuacggaagugga

SEQ ID NO: 488741 - RNA, 19 nt, Artificial Sequence
  Synthetic
gcucaguuacggaagugga

SEQ ID NO: 488742 - RNA, 20 nt, Artificial Sequence
  Synthetic
agcucaguuacggaagugga

SEQ ID NO: 488743 - RNA, 21 nt, Artificial Sequence
  Synthetic
gagcucaguuacggaagugga

SEQ ID NO: 488744 - RNA, 22 nt, Artificial Sequence
  Synthetic
agagcucaguuacggaagugga

SEQ ID NO: 488745 - RNA, 23 nt, Artificial Sequence
  Synthetic
aagagcucaguuacggaagugga

SEQ ID NO: 488746 - RNA, 24 nt, Artificial Sequence
  Synthetic
uaagagcucaguuacggaagugga

SEQ ID NO: 488747 - RNA, 18 nt, Artificial Sequence
  Synthetic
agccuggaguacagugga

SEQ ID NO: 488748 - RNA, 19 nt, Artificial Sequence
  Synthetic
cagccuggaguacagugga

SEQ ID NO: 488749 - RNA, 20 nt, Artificial Sequence
  Synthetic
ucagccuggaguacagugga

SEQ ID NO: 488750 - RNA, 21 nt, Artificial Sequence
  Synthetic
cucagccuggaguacagugga

SEQ ID NO: 488751 - RNA, 22 nt, Artificial Sequence
  Synthetic
acucagccuggaguacagugga

SEQ ID NO: 488752 - RNA, 23 nt, Artificial Sequence
  Synthetic
cacucagccuggaguacagugga

SEQ ID NO: 488753 - RNA, 24 nt, Artificial Sequence
  Synthetic
ucacucagccuggaguacagugga

SEQ ID NO: 488754 - RNA, 18 nt, Artificial Sequence
  Synthetic
cagauuuguagcagugga

SEQ ID NO: 488755 - RNA, 19 nt, Artificial Sequence
  Synthetic
acagauuuguagcagugga

SEQ ID NO: 488756 - RNA, 20 nt, Artificial Sequence
  Synthetic
aacagauuuguagcagugga

SEQ ID NO: 488757 - RNA, 21 nt, Artificial Sequence
  Synthetic
aaacagauuuguagcagugga

SEQ ID NO: 488758 - RNA, 22 nt, Artificial Sequence
  Synthetic
uaaacagauuuguagcagugga

SEQ ID NO: 488759 - RNA, 23 nt, Artificial Sequence
  Synthetic
uuaaacagauuuguagcagugga

SEQ ID NO: 488760 - RNA, 24 nt, Artificial Sequence
  Synthetic
auuaaacagauuuguagcagugga

SEQ ID NO: 488761 - RNA, 18 nt, Artificial Sequence
  Synthetic
uuaggaagaaucagugga

SEQ ID NO: 488762 - RNA, 19 nt, Artificial Sequence
  Synthetic
guuaggaagaaucagugga

SEQ ID NO: 488763 - RNA, 20 nt, Artificial Sequence
  Synthetic
gguuaggaagaaucagugga

SEQ ID NO: 488764 - RNA, 21 nt, Artificial Sequence
  Synthetic
ugguuaggaagaaucagugga

SEQ ID NO: 488765 - RNA, 22 nt, Artificial Sequence
  Synthetic
gugguuaggaagaaucagugga

SEQ ID NO: 488766 - RNA, 23 nt, Artificial Sequence
  Synthetic
cgugguuaggaagaaucagugga

SEQ ID NO: 488767 - RNA, 24 nt, Artificial Sequence
  Synthetic
ucgugguuaggaagaaucagugga

SEQ ID NO: 488768 - RNA, 18 nt, Artificial Sequence
  Synthetic
aaugaagaacucagugga

SEQ ID NO: 488769 - RNA, 19 nt, Artificial Sequence
  Synthetic
gaaugaagaacucagugga

SEQ ID NO: 488770 - RNA, 20 nt, Artificial Sequence
  Synthetic
ugaaugaagaacucagugga

SEQ ID NO: 488771 - RNA, 21 nt, Artificial Sequence
  Synthetic
uugaaugaagaacucagugga

SEQ ID NO: 488772 - RNA, 22 nt, Artificial Sequence
  Synthetic
auugaaugaagaacucagugga

SEQ ID NO: 488773 - RNA, 23 nt, Artificial Sequence
  Synthetic
cauugaaugaagaacucagugga

SEQ ID NO: 488774 - RNA, 24 nt, Artificial Sequence
  Synthetic
ucauugaaugaagaacucagugga

SEQ ID NO: 488775 - RNA, 18 nt, Artificial Sequence
  Synthetic
gaacuucccaagagugga

SEQ ID NO: 488776 - RNA, 19 nt, Artificial Sequence
  Synthetic
agaacuucccaagagugga

SEQ ID NO: 488777 - RNA, 20 nt, Artificial Sequence
  Synthetic
aagaacuucccaagagugga

SEQ ID NO: 488778 - RNA, 21 nt, Artificial Sequence
  Synthetic
gaagaacuucccaagagugga

SEQ ID NO: 488779 - RNA, 22 nt, Artificial Sequence
  Synthetic
ggaagaacuucccaagagugga

SEQ ID NO: 488780 - RNA, 23 nt, Artificial Sequence
  Synthetic
gggaagaacuucccaagagugga

SEQ ID NO: 488781 - RNA, 24 nt, Artificial Sequence
  Synthetic
ggggaagaacuucccaagagugga

SEQ ID NO: 488782 - RNA, 18 nt, Artificial Sequence
  Synthetic
agagagggagagagugga

SEQ ID NO: 488783 - RNA, 19 nt, Artificial Sequence
  Synthetic
gagagagggagagagugga

SEQ ID NO: 488784 - RNA, 20 nt, Artificial Sequence
  Synthetic
ggagagagggagagagugga

SEQ ID NO: 488785 - RNA, 21 nt, Artificial Sequence
  Synthetic
gggagagagggagagagugga

SEQ ID NO: 488786 - RNA, 22 nt, Artificial Sequence
  Synthetic
agggagagagggagagagugga

SEQ ID NO: 488787 - RNA, 23 nt, Artificial Sequence
  Synthetic
gagggagagagggagagagugga

SEQ ID NO: 488788 - RNA, 24 nt, Artificial Sequence
  Synthetic
agagggagagagggagagagugga

SEQ ID NO: 488789 - RNA, 18 nt, Artificial Sequence
  Synthetic
caaacauccuauagugga

SEQ ID NO: 488790 - RNA, 19 nt, Artificial Sequence
  Synthetic
ccaaacauccuauagugga

SEQ ID NO: 488791 - RNA, 20 nt, Artificial Sequence
  Synthetic
gccaaacauccuauagugga

SEQ ID NO: 488792 - RNA, 21 nt, Artificial Sequence
  Synthetic
ugccaaacauccuauagugga

SEQ ID NO: 488793 - RNA, 22 nt, Artificial Sequence
  Synthetic
augccaaacauccuauagugga

SEQ ID NO: 488794 - RNA, 23 nt, Artificial Sequence
  Synthetic
gaugccaaacauccuauagugga

SEQ ID NO: 488795 - RNA, 24 nt, Artificial Sequence
  Synthetic
ugaugccaaacauccuauagugga

SEQ ID NO: 488796 - RNA, 18 nt, Artificial Sequence
  Synthetic
uaaugaauauguagugga

SEQ ID NO: 488797 - RNA, 19 nt, Artificial Sequence
  Synthetic
cuaaugaauauguagugga

SEQ ID NO: 488798 - RNA, 20 nt, Artificial Sequence
  Synthetic
acuaaugaauauguagugga

SEQ ID NO: 488799 - RNA, 21 nt, Artificial Sequence
  Synthetic
aacuaaugaauauguagugga

SEQ ID NO: 488800 - RNA, 22 nt, Artificial Sequence
  Synthetic
gaacuaaugaauauguagugga

SEQ ID NO: 488801 - RNA, 23 nt, Artificial Sequence
  Synthetic
agaacuaaugaauauguagugga

SEQ ID NO: 488802 - RNA, 24 nt, Artificial Sequence
  Synthetic
cagaacuaaugaauauguagugga

SEQ ID NO: 488803 - RNA, 18 nt, Artificial Sequence
  Synthetic
cauuugcagcaacgugga

SEQ ID NO: 488804 - RNA, 19 nt, Artificial Sequence
  Synthetic
ucauuugcagcaacgugga

SEQ ID NO: 488805 - RNA, 20 nt, Artificial Sequence
  Synthetic
gucauuugcagcaacgugga

SEQ ID NO: 488806 - RNA, 21 nt, Artificial Sequence
  Synthetic
ugucauuugcagcaacgugga

SEQ ID NO: 488807 - RNA, 22 nt, Artificial Sequence
  Synthetic
cugucauuugcagcaacgugga

SEQ ID NO: 488808 - RNA, 23 nt, Artificial Sequence
  Synthetic
ccugucauuugcagcaacgugga

SEQ ID NO: 488809 - RNA, 24 nt, Artificial Sequence
  Synthetic
uccugucauuugcagcaacgugga

SEQ ID NO: 488810 - RNA, 18 nt, Artificial Sequence
  Synthetic
gagagagauaggcgugga

SEQ ID NO: 488811 - RNA, 19 nt, Artificial Sequence
  Synthetic
agagagagauaggcgugga

SEQ ID NO: 488812 - RNA, 20 nt, Artificial Sequence
  Synthetic
cagagagagauaggcgugga

SEQ ID NO: 488813 - RNA, 21 nt, Artificial Sequence
  Synthetic
acagagagagauaggcgugga

SEQ ID NO: 488814 - RNA, 22 nt, Artificial Sequence
  Synthetic
cacagagagagauaggcgugga

SEQ ID NO: 488815 - RNA, 23 nt, Artificial Sequence
  Synthetic
acacagagagagauaggcgugga

SEQ ID NO: 488816 - RNA, 24 nt, Artificial Sequence
  Synthetic
gacacagagagagauaggcgugga

SEQ ID NO: 488817 - RNA, 18 nt, Artificial Sequence
  Synthetic
uauugaaaaguaggugga

SEQ ID NO: 488818 - RNA, 19 nt, Artificial Sequence
  Synthetic
auauugaaaaguaggugga

SEQ ID NO: 488819 - RNA, 20 nt, Artificial Sequence
  Synthetic
cauauugaaaaguaggugga

SEQ ID NO: 488820 - RNA, 21 nt, Artificial Sequence
  Synthetic
acauauugaaaaguaggugga

SEQ ID NO: 488821 - RNA, 22 nt, Artificial Sequence
  Synthetic
gacauauugaaaaguaggugga

SEQ ID NO: 488822 - RNA, 23 nt, Artificial Sequence
  Synthetic
ggacauauugaaaaguaggugga

SEQ ID NO: 488823 - RNA, 24 nt, Artificial Sequence
  Synthetic
aggacauauugaaaaguaggugga

SEQ ID NO: 488824 - RNA, 18 nt, Artificial Sequence
  Synthetic
agauaacauuagggugga

SEQ ID NO: 488825 - RNA, 19 nt, Artificial Sequence
  Synthetic
aagauaacauuagggugga

SEQ ID NO: 488826 - RNA, 20 nt, Artificial Sequence
  Synthetic
aaagauaacauuagggugga

SEQ ID NO: 488827 - RNA, 21 nt, Artificial Sequence
  Synthetic
gaaagauaacauuagggugga

SEQ ID NO: 488828 - RNA, 22 nt, Artificial Sequence
  Synthetic
agaaagauaacauuagggugga

SEQ ID NO: 488829 - RNA, 23 nt, Artificial Sequence
  Synthetic
aagaaagauaacauuagggugga

SEQ ID NO: 488830 - RNA, 24 nt, Artificial Sequence
  Synthetic
uaagaaagauaacauuagggugga

SEQ ID NO: 488831 - RNA, 18 nt, Artificial Sequence
  Synthetic
gcugcaguggugggugga

SEQ ID NO: 488832 - RNA, 19 nt, Artificial Sequence
  Synthetic
agcugcaguggugggugga

SEQ ID NO: 488833 - RNA, 20 nt, Artificial Sequence
  Synthetic
aagcugcaguggugggugga

SEQ ID NO: 488834 - RNA, 21 nt, Artificial Sequence
  Synthetic
aaagcugcaguggugggugga

SEQ ID NO: 488835 - RNA, 22 nt, Artificial Sequence
  Synthetic
aaaagcugcaguggugggugga

SEQ ID NO: 488836 - RNA, 23 nt, Artificial Sequence
  Synthetic
caaaagcugcaguggugggugga

SEQ ID NO: 488837 - RNA, 24 nt, Artificial Sequence
  Synthetic
ucaaaagcugcaguggugggugga

SEQ ID NO: 488838 - RNA, 18 nt, Artificial Sequence
  Synthetic
aacagugauuugggugga

SEQ ID NO: 488839 - RNA, 19 nt, Artificial Sequence
  Synthetic
aaacagugauuugggugga

SEQ ID NO: 488840 - RNA, 20 nt, Artificial Sequence
  Synthetic
gaaacagugauuugggugga

SEQ ID NO: 488841 - RNA, 21 nt, Artificial Sequence
  Synthetic
agaaacagugauuugggugga

SEQ ID NO: 488842 - RNA, 22 nt, Artificial Sequence
  Synthetic
aagaaacagugauuugggugga

SEQ ID NO: 488843 - RNA, 23 nt, Artificial Sequence
  Synthetic
aaagaaacagugauuugggugga

SEQ ID NO: 488844 - RNA, 24 nt, Artificial Sequence
  Synthetic
aaaagaaacagugauuugggugga

SEQ ID NO: 488845 - RNA, 18 nt, Artificial Sequence
  Synthetic
uuuaaguuaaaaugugga

SEQ ID NO: 488846 - RNA, 19 nt, Artificial Sequence
  Synthetic
cuuuaaguuaaaaugugga

SEQ ID NO: 488847 - RNA, 20 nt, Artificial Sequence
  Synthetic
ucuuuaaguuaaaaugugga

SEQ ID NO: 488848 - RNA, 21 nt, Artificial Sequence
  Synthetic
gucuuuaaguuaaaaugugga

SEQ ID NO: 488849 - RNA, 22 nt, Artificial Sequence
  Synthetic
agucuuuaaguuaaaaugugga

SEQ ID NO: 488850 - RNA, 23 nt, Artificial Sequence
  Synthetic
gagucuuuaaguuaaaaugugga

SEQ ID NO: 488851 - RNA, 24 nt, Artificial Sequence
  Synthetic
ggagucuuuaaguuaaaaugugga

SEQ ID NO: 488852 - RNA, 18 nt, Artificial Sequence
  Synthetic
uggagcuugacaugugga

SEQ ID NO: 488853 - RNA, 19 nt, Artificial Sequence
  Synthetic
guggagcuugacaugugga

SEQ ID NO: 488854 - RNA, 20 nt, Artificial Sequence
  Synthetic
uguggagcuugacaugugga

SEQ ID NO: 488855 - RNA, 21 nt, Artificial Sequence
  Synthetic
cuguggagcuugacaugugga

SEQ ID NO: 488856 - RNA, 22 nt, Artificial Sequence
  Synthetic
gcuguggagcuugacaugugga

SEQ ID NO: 488857 - RNA, 23 nt, Artificial Sequence
  Synthetic
ggcuguggagcuugacaugugga

SEQ ID NO: 488858 - RNA, 24 nt, Artificial Sequence
  Synthetic
aggcuguggagcuugacaugugga

SEQ ID NO: 488859 - RNA, 18 nt, Artificial Sequence
  Synthetic
aaaaggaccucaugugga

SEQ ID NO: 488860 - RNA, 19 nt, Artificial Sequence
  Synthetic
caaaaggaccucaugugga

SEQ ID NO: 488861 - RNA, 20 nt, Artificial Sequence
  Synthetic
gcaaaaggaccucaugugga

SEQ ID NO: 488862 - RNA, 21 nt, Artificial Sequence
  Synthetic
ugcaaaaggaccucaugugga

SEQ ID NO: 488863 - RNA, 22 nt, Artificial Sequence
  Synthetic
cugcaaaaggaccucaugugga

SEQ ID NO: 488864 - RNA, 23 nt, Artificial Sequence
  Synthetic
acugcaaaaggaccucaugugga

SEQ ID NO: 488865 - RNA, 24 nt, Artificial Sequence
  Synthetic
aacugcaaaaggaccucaugugga

SEQ ID NO: 488866 - RNA, 18 nt, Artificial Sequence
  Synthetic
acccuaauccuaugugga

SEQ ID NO: 488867 - RNA, 19 nt, Artificial Sequence
  Synthetic
uacccuaauccuaugugga

SEQ ID NO: 488868 - RNA, 20 nt, Artificial Sequence
  Synthetic
cuacccuaauccuaugugga

SEQ ID NO: 488869 - RNA, 21 nt, Artificial Sequence
  Synthetic
acuacccuaauccuaugugga

SEQ ID NO: 488870 - RNA, 22 nt, Artificial Sequence
  Synthetic
uacuacccuaauccuaugugga

SEQ ID NO: 488871 - RNA, 23 nt, Artificial Sequence
  Synthetic
auacuacccuaauccuaugugga

SEQ ID NO: 488872 - RNA, 24 nt, Artificial Sequence
  Synthetic
cauacuacccuaauccuaugugga

SEQ ID NO: 488873 - RNA, 18 nt, Artificial Sequence
  Synthetic
ccuuuaauucuaugugga

SEQ ID NO: 488874 - RNA, 19 nt, Artificial Sequence
  Synthetic
cccuuuaauucuaugugga

SEQ ID NO: 488875 - RNA, 20 nt, Artificial Sequence
  Synthetic
ucccuuuaauucuaugugga

SEQ ID NO: 488876 - RNA, 21 nt, Artificial Sequence
  Synthetic
cucccuuuaauucuaugugga

SEQ ID NO: 488877 - RNA, 22 nt, Artificial Sequence
  Synthetic
ucucccuuuaauucuaugugga

SEQ ID NO: 488878 - RNA, 23 nt, Artificial Sequence
  Synthetic
aucucccuuuaauucuaugugga

SEQ ID NO: 488879 - RNA, 24 nt, Artificial Sequence
  Synthetic
aaucucccuuuaauucuaugugga

SEQ ID NO: 488880 - RNA, 18 nt, Artificial Sequence
  Synthetic
aacagaaaauacugugga

SEQ ID NO: 488881 - RNA, 19 nt, Artificial Sequence
  Synthetic
aaacagaaaauacugugga

SEQ ID NO: 488882 - RNA, 20 nt, Artificial Sequence
  Synthetic
gaaacagaaaauacugugga

SEQ ID NO: 488883 - RNA, 21 nt, Artificial Sequence
  Synthetic
agaaacagaaaauacugugga

SEQ ID NO: 488884 - RNA, 22 nt, Artificial Sequence
  Synthetic
cagaaacagaaaauacugugga

SEQ ID NO: 488885 - RNA, 23 nt, Artificial Sequence
  Synthetic
acagaaacagaaaauacugugga

SEQ ID NO: 488886 - RNA, 24 nt, Artificial Sequence
  Synthetic
cacagaaacagaaaauacugugga

SEQ ID NO: 488887 - RNA, 18 nt, Artificial Sequence
  Synthetic
auaauagcauucugugga

SEQ ID NO: 488888 - RNA, 19 nt, Artificial Sequence
  Synthetic
uauaauagcauucugugga

SEQ ID NO: 488889 - RNA, 20 nt, Artificial Sequence
  Synthetic
cuauaauagcauucugugga

SEQ ID NO: 488890 - RNA, 21 nt, Artificial Sequence
  Synthetic
acuauaauagcauucugugga

SEQ ID NO: 488891 - RNA, 22 nt, Artificial Sequence
  Synthetic
uacuauaauagcauucugugga

SEQ ID NO: 488892 - RNA, 23 nt, Artificial Sequence
  Synthetic
uuacuauaauagcauucugugga

SEQ ID NO: 488893 - RNA, 24 nt, Artificial Sequence
  Synthetic
guuacuauaauagcauucugugga

SEQ ID NO: 488894 - RNA, 18 nt, Artificial Sequence
  Synthetic
cggcuaggacagugugga

SEQ ID NO: 488895 - RNA, 19 nt, Artificial Sequence
  Synthetic
ucggcuaggacagugugga

SEQ ID NO: 488896 - RNA, 20 nt, Artificial Sequence
  Synthetic
cucggcuaggacagugugga

SEQ ID NO: 488897 - RNA, 21 nt, Artificial Sequence
  Synthetic
ccucggcuaggacagugugga

SEQ ID NO: 488898 - RNA, 22 nt, Artificial Sequence
  Synthetic
accucggcuaggacagugugga

SEQ ID NO: 488899 - RNA, 23 nt, Artificial Sequence
  Synthetic
aaccucggcuaggacagugugga

SEQ ID NO: 488900 - RNA, 24 nt, Artificial Sequence
  Synthetic
gaaccucggcuaggacagugugga

SEQ ID NO: 488901 - RNA, 18 nt, Artificial Sequence
  Synthetic
aaugaaggggagugugga

SEQ ID NO: 488902 - RNA, 19 nt, Artificial Sequence
  Synthetic
gaaugaaggggagugugga

SEQ ID NO: 488903 - RNA, 20 nt, Artificial Sequence
  Synthetic
ugaaugaaggggagugugga

SEQ ID NO: 488904 - RNA, 21 nt, Artificial Sequence
  Synthetic
uugaaugaaggggagugugga

SEQ ID NO: 488905 - RNA, 22 nt, Artificial Sequence
  Synthetic
cuugaaugaaggggagugugga

SEQ ID NO: 488906 - RNA, 23 nt, Artificial Sequence
  Synthetic
ccuugaaugaaggggagugugga

SEQ ID NO: 488907 - RNA, 24 nt, Artificial Sequence
  Synthetic
cccuugaaugaaggggagugugga

SEQ ID NO: 488908 - RNA, 18 nt, Artificial Sequence
  Synthetic
uuagugauagggugugga

SEQ ID NO: 488909 - RNA, 19 nt, Artificial Sequence
  Synthetic
cuuagugauagggugugga

SEQ ID NO: 488910 - RNA, 20 nt, Artificial Sequence
  Synthetic
acuuagugauagggugugga

SEQ ID NO: 488911 - RNA, 21 nt, Artificial Sequence
  Synthetic
cacuuagugauagggugugga

SEQ ID NO: 488912 - RNA, 22 nt, Artificial Sequence
  Synthetic
ucacuuagugauagggugugga

SEQ ID NO: 488913 - RNA, 23 nt, Artificial Sequence
  Synthetic
gucacuuagugauagggugugga

SEQ ID NO: 488914 - RNA, 24 nt, Artificial Sequence
  Synthetic
ugucacuuagugauagggugugga

SEQ ID NO: 488915 - RNA, 18 nt, Artificial Sequence
  Synthetic
uggguaugggggugugga

SEQ ID NO: 488916 - RNA, 19 nt, Artificial Sequence
  Synthetic
guggguaugggggugugga

SEQ ID NO: 488917 - RNA, 20 nt, Artificial Sequence
  Synthetic
gguggguaugggggugugga

SEQ ID NO: 488918 - RNA, 21 nt, Artificial Sequence
  Synthetic
ugguggguaugggggugugga

SEQ ID NO: 488919 - RNA, 22 nt, Artificial Sequence
  Synthetic
gugguggguaugggggugugga

SEQ ID NO: 488920 - RNA, 23 nt, Artificial Sequence
  Synthetic
agugguggguaugggggugugga

SEQ ID NO: 488921 - RNA, 24 nt, Artificial Sequence
  Synthetic
gagugguggguaugggggugugga

SEQ ID NO: 488922 - RNA, 18 nt, Artificial Sequence
  Synthetic
auaccacucuggugugga

SEQ ID NO: 488923 - RNA, 19 nt, Artificial Sequence
  Synthetic
cauaccacucuggugugga

SEQ ID NO: 488924 - RNA, 20 nt, Artificial Sequence
  Synthetic
ucauaccacucuggugugga

SEQ ID NO: 488925 - RNA, 21 nt, Artificial Sequence
  Synthetic
aucauaccacucuggugugga

SEQ ID NO: 488926 - RNA, 22 nt, Artificial Sequence
  Synthetic
caucauaccacucuggugugga

SEQ ID NO: 488927 - RNA, 23 nt, Artificial Sequence
  Synthetic
ucaucauaccacucuggugugga

SEQ ID NO: 488928 - RNA, 24 nt, Artificial Sequence
  Synthetic
cucaucauaccacucuggugugga

SEQ ID NO: 488929 - RNA, 18 nt, Artificial Sequence
  Synthetic
guaaccaaacugugugga

SEQ ID NO: 488930 - RNA, 19 nt, Artificial Sequence
  Synthetic
uguaaccaaacugugugga

SEQ ID NO: 488931 - RNA, 20 nt, Artificial Sequence
  Synthetic
auguaaccaaacugugugga

SEQ ID NO: 488932 - RNA, 21 nt, Artificial Sequence
  Synthetic
aauguaaccaaacugugugga

SEQ ID NO: 488933 - RNA, 22 nt, Artificial Sequence
  Synthetic
gaauguaaccaaacugugugga

SEQ ID NO: 488934 - RNA, 23 nt, Artificial Sequence
  Synthetic
ugaauguaaccaaacugugugga

SEQ ID NO: 488935 - RNA, 24 nt, Artificial Sequence
  Synthetic
augaauguaaccaaacugugugga

SEQ ID NO: 488936 - RNA, 18 nt, Artificial Sequence
  Synthetic
ucccauugggugugugga

SEQ ID NO: 488937 - RNA, 19 nt, Artificial Sequence
  Synthetic
uucccauugggugugugga

SEQ ID NO: 488938 - RNA, 20 nt, Artificial Sequence
  Synthetic
uuucccauugggugugugga

SEQ ID NO: 488939 - RNA, 21 nt, Artificial Sequence
  Synthetic
uuuucccauugggugugugga

SEQ ID NO: 488940 - RNA, 22 nt, Artificial Sequence
  Synthetic
auuuucccauugggugugugga

SEQ ID NO: 488941 - RNA, 23 nt, Artificial Sequence
  Synthetic
aauuuucccauugggugugugga

SEQ ID NO: 488942 - RNA, 24 nt, Artificial Sequence
  Synthetic
aaauuuucccauugggugugugga

SEQ ID NO: 488943 - RNA, 18 nt, Artificial Sequence
  Synthetic
acuuguggucauugugga

SEQ ID NO: 488944 - RNA, 19 nt, Artificial Sequence
  Synthetic
aacuuguggucauugugga

SEQ ID NO: 488945 - RNA, 20 nt, Artificial Sequence
  Synthetic
uaacuuguggucauugugga

SEQ ID NO: 488946 - RNA, 21 nt, Artificial Sequence
  Synthetic
auaacuuguggucauugugga

SEQ ID NO: 488947 - RNA, 22 nt, Artificial Sequence
  Synthetic
uauaacuuguggucauugugga

SEQ ID NO: 488948 - RNA, 23 nt, Artificial Sequence
  Synthetic
guauaacuuguggucauugugga

SEQ ID NO: 488949 - RNA, 24 nt, Artificial Sequence
  Synthetic
aguauaacuuguggucauugugga

SEQ ID NO: 488950 - RNA, 18 nt, Artificial Sequence
  Synthetic
cuauaccuggguugugga

SEQ ID NO: 488951 - RNA, 19 nt, Artificial Sequence
  Synthetic
ccuauaccuggguugugga

SEQ ID NO: 488952 - RNA, 20 nt, Artificial Sequence
  Synthetic
accuauaccuggguugugga

SEQ ID NO: 488953 - RNA, 21 nt, Artificial Sequence
  Synthetic
uaccuauaccuggguugugga

SEQ ID NO: 488954 - RNA, 22 nt, Artificial Sequence
  Synthetic
auaccuauaccuggguugugga

SEQ ID NO: 488955 - RNA, 23 nt, Artificial Sequence
  Synthetic
uauaccuauaccuggguugugga

SEQ ID NO: 488956 - RNA, 24 nt, Artificial Sequence
  Synthetic
auauaccuauaccuggguugugga

SEQ ID NO: 488957 - RNA, 18 nt, Artificial Sequence
  Synthetic
uggcagaagauuugugga

SEQ ID NO: 488958 - RNA, 19 nt, Artificial Sequence
  Synthetic
auggcagaagauuugugga

SEQ ID NO: 488959 - RNA, 20 nt, Artificial Sequence
  Synthetic
aauggcagaagauuugugga

SEQ ID NO: 488960 - RNA, 21 nt, Artificial Sequence
  Synthetic
aaauggcagaagauuugugga

SEQ ID NO: 488961 - RNA, 22 nt, Artificial Sequence
  Synthetic
gaaauggcagaagauuugugga

SEQ ID NO: 488962 - RNA, 23 nt, Artificial Sequence
  Synthetic
ggaaauggcagaagauuugugga

SEQ ID NO: 488963 - RNA, 24 nt, Artificial Sequence
  Synthetic
uggaaauggcagaagauuugugga

SEQ ID NO: 488964 - RNA, 18 nt, Artificial Sequence
  Synthetic
gaccuggggaaaauugga

SEQ ID NO: 488965 - RNA, 19 nt, Artificial Sequence
  Synthetic
agaccuggggaaaauugga

SEQ ID NO: 488966 - RNA, 20 nt, Artificial Sequence
  Synthetic
aagaccuggggaaaauugga

SEQ ID NO: 488967 - RNA, 21 nt, Artificial Sequence
  Synthetic
caagaccuggggaaaauugga

SEQ ID NO: 488968 - RNA, 22 nt, Artificial Sequence
  Synthetic
ucaagaccuggggaaaauugga

SEQ ID NO: 488969 - RNA, 23 nt, Artificial Sequence
  Synthetic
gucaagaccuggggaaaauugga

SEQ ID NO: 488970 - RNA, 24 nt, Artificial Sequence
  Synthetic
ugucaagaccuggggaaaauugga

SEQ ID NO: 488971 - RNA, 18 nt, Artificial Sequence
  Synthetic
auuauauaacaaauugga

SEQ ID NO: 488972 - RNA, 19 nt, Artificial Sequence
  Synthetic
uauuauauaacaaauugga

SEQ ID NO: 488973 - RNA, 20 nt, Artificial Sequence
  Synthetic
auauuauauaacaaauugga

SEQ ID NO: 488974 - RNA, 21 nt, Artificial Sequence
  Synthetic
aauauuauauaacaaauugga

SEQ ID NO: 488975 - RNA, 22 nt, Artificial Sequence
  Synthetic
uaauauuauauaacaaauugga

SEQ ID NO: 488976 - RNA, 23 nt, Artificial Sequence
  Synthetic
cuaauauuauauaacaaauugga

SEQ ID NO: 488977 - RNA, 24 nt, Artificial Sequence
  Synthetic
ucuaauauuauauaacaaauugga

SEQ ID NO: 488978 - RNA, 18 nt, Artificial Sequence
  Synthetic
uaaaauucuacaauugga

SEQ ID NO: 488979 - RNA, 19 nt, Artificial Sequence
  Synthetic
guaaaauucuacaauugga

SEQ ID NO: 488980 - RNA, 20 nt, Artificial Sequence
  Synthetic
uguaaaauucuacaauugga

SEQ ID NO: 488981 - RNA, 21 nt, Artificial Sequence
  Synthetic
uuguaaaauucuacaauugga

SEQ ID NO: 488982 - RNA, 22 nt, Artificial Sequence
  Synthetic
auuguaaaauucuacaauugga

SEQ ID NO: 488983 - RNA, 23 nt, Artificial Sequence
  Synthetic
aauuguaaaauucuacaauugga

SEQ ID NO: 488984 - RNA, 24 nt, Artificial Sequence
  Synthetic
caauuguaaaauucuacaauugga

SEQ ID NO: 488985 - RNA, 18 nt, Artificial Sequence
  Synthetic
uuuguaccaucaauugga

SEQ ID NO: 488986 - RNA, 19 nt, Artificial Sequence
  Synthetic
auuuguaccaucaauugga

SEQ ID NO: 488987 - RNA, 20 nt, Artificial Sequence
  Synthetic
aauuuguaccaucaauugga

SEQ ID NO: 488988 - RNA, 21 nt, Artificial Sequence
  Synthetic
aaauuuguaccaucaauugga

SEQ ID NO: 488989 - RNA, 22 nt, Artificial Sequence
  Synthetic
uaaauuuguaccaucaauugga

SEQ ID NO: 488990 - RNA, 23 nt, Artificial Sequence
  Synthetic
uuaaauuuguaccaucaauugga

SEQ ID NO: 488991 - RNA, 24 nt, Artificial Sequence
  Synthetic
uuuaaauuuguaccaucaauugga

SEQ ID NO: 488992 - RNA, 18 nt, Artificial Sequence
  Synthetic
aaauauugcagaauugga

SEQ ID NO: 488993 - RNA, 19 nt, Artificial Sequence
  Synthetic
aaaauauugcagaauugga

SEQ ID NO: 488994 - RNA, 20 nt, Artificial Sequence
  Synthetic
gaaaauauugcagaauugga

SEQ ID NO: 488995 - RNA, 21 nt, Artificial Sequence
  Synthetic
ugaaaauauugcagaauugga

SEQ ID NO: 488996 - RNA, 22 nt, Artificial Sequence
  Synthetic
augaaaauauugcagaauugga

SEQ ID NO: 488997 - RNA, 23 nt, Artificial Sequence
  Synthetic
aaugaaaauauugcagaauugga

SEQ ID NO: 488998 - RNA, 24 nt, Artificial Sequence
  Synthetic
gaaugaaaauauugcagaauugga

SEQ ID NO: 488999 - RNA, 18 nt, Artificial Sequence
  Synthetic
caaaagcagagaauugga

SEQ ID NO: 489000 - RNA, 19 nt, Artificial Sequence
  Synthetic
ccaaaagcagagaauugga

SEQ ID NO: 489001 - RNA, 20 nt, Artificial Sequence
  Synthetic
gccaaaagcagagaauugga

SEQ ID NO: 489002 - RNA, 21 nt, Artificial Sequence
  Synthetic
ggccaaaagcagagaauugga

SEQ ID NO: 489003 - RNA, 22 nt, Artificial Sequence
  Synthetic
uggccaaaagcagagaauugga

SEQ ID NO: 489004 - RNA, 23 nt, Artificial Sequence
  Synthetic
guggccaaaagcagagaauugga

SEQ ID NO: 489005 - RNA, 24 nt, Artificial Sequence
  Synthetic
aguggccaaaagcagagaauugga

SEQ ID NO: 489006 - RNA, 18 nt, Artificial Sequence
  Synthetic
aaacaaaaaggaauugga

SEQ ID NO: 489007 - RNA, 19 nt, Artificial Sequence
  Synthetic
aaaacaaaaaggaauugga

SEQ ID NO: 489008 - RNA, 20 nt, Artificial Sequence
  Synthetic
uaaaacaaaaaggaauugga

SEQ ID NO: 489009 - RNA, 21 nt, Artificial Sequence
  Synthetic
auaaaacaaaaaggaauugga

SEQ ID NO: 489010 - RNA, 22 nt, Artificial Sequence
  Synthetic
aauaaaacaaaaaggaauugga

SEQ ID NO: 489011 - RNA, 23 nt, Artificial Sequence
  Synthetic
caauaaaacaaaaaggaauugga

SEQ ID NO: 489012 - RNA, 24 nt, Artificial Sequence
  Synthetic
ucaauaaaacaaaaaggaauugga

SEQ ID NO: 489013 - RNA, 18 nt, Artificial Sequence
  Synthetic
ugugggacagacauugga

SEQ ID NO: 489014 - RNA, 19 nt, Artificial Sequence
  Synthetic
augugggacagacauugga

SEQ ID NO: 489015 - RNA, 20 nt, Artificial Sequence
  Synthetic
aaugugggacagacauugga

SEQ ID NO: 489016 - RNA, 21 nt, Artificial Sequence
  Synthetic
aaaugugggacagacauugga

SEQ ID NO: 489017 - RNA, 22 nt, Artificial Sequence
  Synthetic
gaaaugugggacagacauugga

SEQ ID NO: 489018 - RNA, 23 nt, Artificial Sequence
  Synthetic
agaaaugugggacagacauugga

SEQ ID NO: 489019 - RNA, 24 nt, Artificial Sequence
  Synthetic
aagaaaugugggacagacauugga

SEQ ID NO: 489020 - RNA, 18 nt, Artificial Sequence
  Synthetic
guguagaaauagauugga

SEQ ID NO: 489021 - RNA, 19 nt, Artificial Sequence
  Synthetic
gguguagaaauagauugga

SEQ ID NO: 489022 - RNA, 20 nt, Artificial Sequence
  Synthetic
ggguguagaaauagauugga

SEQ ID NO: 489023 - RNA, 21 nt, Artificial Sequence
  Synthetic
aggguguagaaauagauugga

SEQ ID NO: 489024 - RNA, 22 nt, Artificial Sequence
  Synthetic
uaggguguagaaauagauugga

SEQ ID NO: 489025 - RNA, 23 nt, Artificial Sequence
  Synthetic
cuaggguguagaaauagauugga

SEQ ID NO: 489026 - RNA, 24 nt, Artificial Sequence
  Synthetic
ucuaggguguagaaauagauugga

SEQ ID NO: 489027 - RNA, 19 nt, Artificial Sequence
  Synthetic
uguguagaaauagauugga

SEQ ID NO: 489028 - RNA, 20 nt, Artificial Sequence
  Synthetic
uuguguagaaauagauugga

SEQ ID NO: 489029 - RNA, 21 nt, Artificial Sequence
  Synthetic
uuuguguagaaauagauugga

SEQ ID NO: 489030 - RNA, 22 nt, Artificial Sequence
  Synthetic
uuuuguguagaaauagauugga

SEQ ID NO: 489031 - RNA, 23 nt, Artificial Sequence
  Synthetic
cuuuuguguagaaauagauugga

SEQ ID NO: 489032 - RNA, 24 nt, Artificial Sequence
  Synthetic
gcuuuuguguagaaauagauugga

SEQ ID NO: 489033 - RNA, 18 nt, Artificial Sequence
  Synthetic
auuggagaguagauugga

SEQ ID NO: 489034 - RNA, 19 nt, Artificial Sequence
  Synthetic
aauuggagaguagauugga

SEQ ID NO: 489035 - RNA, 20 nt, Artificial Sequence
  Synthetic
uaauuggagaguagauugga

SEQ ID NO: 489036 - RNA, 21 nt, Artificial Sequence
  Synthetic
cuaauuggagaguagauugga

SEQ ID NO: 489037 - RNA, 22 nt, Artificial Sequence
  Synthetic
gcuaauuggagaguagauugga

SEQ ID NO: 489038 - RNA, 23 nt, Artificial Sequence
  Synthetic
ugcuaauuggagaguagauugga

SEQ ID NO: 489039 - RNA, 24 nt, Artificial Sequence
  Synthetic
uugcuaauuggagaguagauugga

SEQ ID NO: 489040 - RNA, 18 nt, Artificial Sequence
  Synthetic
uugcacaaccugauugga

SEQ ID NO: 489041 - RNA, 19 nt, Artificial Sequence
  Synthetic
auugcacaaccugauugga

SEQ ID NO: 489042 - RNA, 20 nt, Artificial Sequence
  Synthetic
aauugcacaaccugauugga

SEQ ID NO: 489043 - RNA, 21 nt, Artificial Sequence
  Synthetic
gaauugcacaaccugauugga

SEQ ID NO: 489044 - RNA, 22 nt, Artificial Sequence
  Synthetic
ugaauugcacaaccugauugga

SEQ ID NO: 489045 - RNA, 23 nt, Artificial Sequence
  Synthetic
augaauugcacaaccugauugga

SEQ ID NO: 489046 - RNA, 24 nt, Artificial Sequence
  Synthetic
aaugaauugcacaaccugauugga

SEQ ID NO: 489047 - RNA, 18 nt, Artificial Sequence
  Synthetic
aaacauuauuauauugga

SEQ ID NO: 489048 - RNA, 19 nt, Artificial Sequence
  Synthetic
aaaacauuauuauauugga

SEQ ID NO: 489049 - RNA, 20 nt, Artificial Sequence
  Synthetic
uaaaacauuauuauauugga

SEQ ID NO: 489050 - RNA, 21 nt, Artificial Sequence
  Synthetic
uuaaaacauuauuauauugga

SEQ ID NO: 489051 - RNA, 22 nt, Artificial Sequence
  Synthetic
uuuaaaacauuauuauauugga

SEQ ID NO: 489052 - RNA, 23 nt, Artificial Sequence
  Synthetic
uuuuaaaacauuauuauauugga

SEQ ID NO: 489053 - RNA, 24 nt, Artificial Sequence
  Synthetic
uuuuuaaaacauuauuauauugga

SEQ ID NO: 489054 - RNA, 18 nt, Artificial Sequence
  Synthetic
aaaguucauguuauugga

SEQ ID NO: 489055 - RNA, 19 nt, Artificial Sequence
  Synthetic
gaaaguucauguuauugga

SEQ ID NO: 489056 - RNA, 20 nt, Artificial Sequence
  Synthetic
ggaaaguucauguuauugga

SEQ ID NO: 489057 - RNA, 21 nt, Artificial Sequence
  Synthetic
aggaaaguucauguuauugga

SEQ ID NO: 489058 - RNA, 22 nt, Artificial Sequence
  Synthetic
aaggaaaguucauguuauugga

SEQ ID NO: 489059 - RNA, 23 nt, Artificial Sequence
  Synthetic
uaaggaaaguucauguuauugga

SEQ ID NO: 489060 - RNA, 24 nt, Artificial Sequence
  Synthetic
auaaggaaaguucauguuauugga

SEQ ID NO: 489061 - RNA, 18 nt, Artificial Sequence
  Synthetic
accugguuaguacuugga

SEQ ID NO: 489062 - RNA, 19 nt, Artificial Sequence
  Synthetic
gaccugguuaguacuugga

SEQ ID NO: 489063 - RNA, 20 nt, Artificial Sequence
  Synthetic
cgaccugguuaguacuugga

SEQ ID NO: 489064 - RNA, 21 nt, Artificial Sequence
  Synthetic
ucgaccugguuaguacuugga

SEQ ID NO: 489065 - RNA, 22 nt, Artificial Sequence
  Synthetic
uucgaccugguuaguacuugga

SEQ ID NO: 489066 - RNA, 23 nt, Artificial Sequence
  Synthetic
guucgaccugguuaguacuugga

SEQ ID NO: 489067 - RNA, 24 nt, Artificial Sequence
  Synthetic
gguucgaccugguuaguacuugga

SEQ ID NO: 489068 - RNA, 18 nt, Artificial Sequence
  Synthetic
ggguuagggaaccuugga

SEQ ID NO: 489069 - RNA, 19 nt, Artificial Sequence
  Synthetic
uggguuagggaaccuugga

SEQ ID NO: 489070 - RNA, 20 nt, Artificial Sequence
  Synthetic
guggguuagggaaccuugga

SEQ ID NO: 489071 - RNA, 21 nt, Artificial Sequence
  Synthetic
aguggguuagggaaccuugga

SEQ ID NO: 489072 - RNA, 22 nt, Artificial Sequence
  Synthetic
aaguggguuagggaaccuugga

SEQ ID NO: 489073 - RNA, 23 nt, Artificial Sequence
  Synthetic
caaguggguuagggaaccuugga

SEQ ID NO: 489074 - RNA, 24 nt, Artificial Sequence
  Synthetic
ucaaguggguuagggaaccuugga

SEQ ID NO: 489075 - RNA, 18 nt, Artificial Sequence
  Synthetic
gaaagauggucgcuugga

SEQ ID NO: 489076 - RNA, 19 nt, Artificial Sequence
  Synthetic
ggaaagauggucgcuugga

SEQ ID NO: 489077 - RNA, 20 nt, Artificial Sequence
  Synthetic
aggaaagauggucgcuugga

SEQ ID NO: 489078 - RNA, 21 nt, Artificial Sequence
  Synthetic
gaggaaagauggucgcuugga

SEQ ID NO: 489079 - RNA, 22 nt, Artificial Sequence
  Synthetic
ugaggaaagauggucgcuugga

SEQ ID NO: 489080 - RNA, 23 nt, Artificial Sequence
  Synthetic
gugaggaaagauggucgcuugga

SEQ ID NO: 489081 - RNA, 24 nt, Artificial Sequence
  Synthetic
agugaggaaagauggucgcuugga

SEQ ID NO: 489082 - RNA, 18 nt, Artificial Sequence
  Synthetic
cauuugcaacaucuugga

SEQ ID NO: 489083 - RNA, 19 nt, Artificial Sequence
  Synthetic
ucauuugcaacaucuugga

SEQ ID NO: 489084 - RNA, 20 nt, Artificial Sequence
  Synthetic
gucauuugcaacaucuugga

SEQ ID NO: 489085 - RNA, 21 nt, Artificial Sequence
  Synthetic
ugucauuugcaacaucuugga

SEQ ID NO: 489086 - RNA, 22 nt, Artificial Sequence
  Synthetic
cugucauuugcaacaucuugga

SEQ ID NO: 489087 - RNA, 23 nt, Artificial Sequence
  Synthetic
ccugucauuugcaacaucuugga

SEQ ID NO: 489088 - RNA, 24 nt, Artificial Sequence
  Synthetic
uccugucauuugcaacaucuugga

SEQ ID NO: 489089 - RNA, 18 nt, Artificial Sequence
  Synthetic
uuaaaaaaacuucuugga

SEQ ID NO: 489090 - RNA, 19 nt, Artificial Sequence
  Synthetic
auuaaaaaaacuucuugga

SEQ ID NO: 489091 - RNA, 20 nt, Artificial Sequence
  Synthetic
aauuaaaaaaacuucuugga

SEQ ID NO: 489092 - RNA, 21 nt, Artificial Sequence
  Synthetic
aaauuaaaaaaacuucuugga

SEQ ID NO: 489093 - RNA, 22 nt, Artificial Sequence
  Synthetic
uaaauuaaaaaaacuucuugga

SEQ ID NO: 489094 - RNA, 23 nt, Artificial Sequence
  Synthetic
auaaauuaaaaaaacuucuugga

SEQ ID NO: 489095 - RNA, 24 nt, Artificial Sequence
  Synthetic
aauaaauuaaaaaaacuucuugga

SEQ ID NO: 489096 - RNA, 18 nt, Artificial Sequence
  Synthetic
uuccauuagguucuugga

SEQ ID NO: 489097 - RNA, 19 nt, Artificial Sequence
  Synthetic
uuuccauuagguucuugga

SEQ ID NO: 489098 - RNA, 20 nt, Artificial Sequence
  Synthetic
uuuuccauuagguucuugga

SEQ ID NO: 489099 - RNA, 21 nt, Artificial Sequence
  Synthetic
auuuuccauuagguucuugga

SEQ ID NO: 489100 - RNA, 22 nt, Artificial Sequence
  Synthetic
aauuuuccauuagguucuugga

SEQ ID NO: 489101 - RNA, 23 nt, Artificial Sequence
  Synthetic
uaauuuuccauuagguucuugga

SEQ ID NO: 489102 - RNA, 24 nt, Artificial Sequence
  Synthetic
guaauuuuccauuagguucuugga

SEQ ID NO: 489103 - RNA, 18 nt, Artificial Sequence
  Synthetic
ggaaaucugcaaguugga

SEQ ID NO: 489104 - RNA, 19 nt, Artificial Sequence
  Synthetic
uggaaaucugcaaguugga

SEQ ID NO: 489105 - RNA, 20 nt, Artificial Sequence
  Synthetic
auggaaaucugcaaguugga

SEQ ID NO: 489106 - RNA, 21 nt, Artificial Sequence
  Synthetic
aauggaaaucugcaaguugga

SEQ ID NO: 489107 - RNA, 22 nt, Artificial Sequence
  Synthetic
aaauggaaaucugcaaguugga

SEQ ID NO: 489108 - RNA, 23 nt, Artificial Sequence
  Synthetic
uaaauggaaaucugcaaguugga

SEQ ID NO: 489109 - RNA, 24 nt, Artificial Sequence
  Synthetic
uuaaauggaaaucugcaaguugga

SEQ ID NO: 489110 - RNA, 18 nt, Artificial Sequence
  Synthetic
acauucaaagagguugga

SEQ ID NO: 489111 - RNA, 19 nt, Artificial Sequence
  Synthetic
cacauucaaagagguugga

SEQ ID NO: 489112 - RNA, 20 nt, Artificial Sequence
  Synthetic
ucacauucaaagagguugga

SEQ ID NO: 489113 - RNA, 21 nt, Artificial Sequence
  Synthetic
uucacauucaaagagguugga

SEQ ID NO: 489114 - RNA, 22 nt, Artificial Sequence
  Synthetic
auucacauucaaagagguugga

SEQ ID NO: 489115 - RNA, 23 nt, Artificial Sequence
  Synthetic
uauucacauucaaagagguugga

SEQ ID NO: 489116 - RNA, 24 nt, Artificial Sequence
  Synthetic
auauucacauucaaagagguugga

SEQ ID NO: 489117 - RNA, 18 nt, Artificial Sequence
  Synthetic
gaaccuuaauagguugga

SEQ ID NO: 489118 - RNA, 19 nt, Artificial Sequence
  Synthetic
ugaaccuuaauagguugga

SEQ ID NO: 489119 - RNA, 20 nt, Artificial Sequence
  Synthetic
uugaaccuuaauagguugga

SEQ ID NO: 489120 - RNA, 21 nt, Artificial Sequence
  Synthetic
uuugaaccuuaauagguugga

SEQ ID NO: 489121 - RNA, 22 nt, Artificial Sequence
  Synthetic
guuugaaccuuaauagguugga

SEQ ID NO: 489122 - RNA, 23 nt, Artificial Sequence
  Synthetic
gguuugaaccuuaauagguugga

SEQ ID NO: 489123 - RNA, 24 nt, Artificial Sequence
  Synthetic
ggguuugaaccuuaauagguugga

SEQ ID NO: 489124 - RNA, 18 nt, Artificial Sequence
  Synthetic
uaggcuguugggguugga

SEQ ID NO: 489125 - RNA, 19 nt, Artificial Sequence
  Synthetic
auaggcuguugggguugga

SEQ ID NO: 489126 - RNA, 20 nt, Artificial Sequence
  Synthetic
cauaggcuguugggguugga

SEQ ID NO: 489127 - RNA, 21 nt, Artificial Sequence
  Synthetic
acauaggcuguugggguugga

SEQ ID NO: 489128 - RNA, 22 nt, Artificial Sequence
  Synthetic
uacauaggcuguugggguugga

SEQ ID NO: 489129 - RNA, 23 nt, Artificial Sequence
  Synthetic
auacauaggcuguugggguugga

SEQ ID NO: 489130 - RNA, 24 nt, Artificial Sequence
  Synthetic
cauacauaggcuguugggguugga

SEQ ID NO: 489131 - RNA, 18 nt, Artificial Sequence
  Synthetic
aaauacaucaaauuugga

SEQ ID NO: 489132 - RNA, 19 nt, Artificial Sequence
  Synthetic
aaaauacaucaaauuugga

SEQ ID NO: 489133 - RNA, 20 nt, Artificial Sequence
  Synthetic
uaaaauacaucaaauuugga

SEQ ID NO: 489134 - RNA, 21 nt, Artificial Sequence
  Synthetic
auaaaauacaucaaauuugga

SEQ ID NO: 489135 - RNA, 22 nt, Artificial Sequence
  Synthetic
aauaaaauacaucaaauuugga

SEQ ID NO: 489136 - RNA, 23 nt, Artificial Sequence
  Synthetic
aaauaaaauacaucaaauuugga

SEQ ID NO: 489137 - RNA, 24 nt, Artificial Sequence
  Synthetic
gaaauaaaauacaucaaauuugga

SEQ ID NO: 489138 - RNA, 18 nt, Artificial Sequence
  Synthetic
ucgacaccugaauuugga

SEQ ID NO: 489139 - RNA, 19 nt, Artificial Sequence
  Synthetic
aucgacaccugaauuugga

SEQ ID NO: 489140 - RNA, 20 nt, Artificial Sequence
  Synthetic
uaucgacaccugaauuugga

SEQ ID NO: 489141 - RNA, 21 nt, Artificial Sequence
  Synthetic
uuaucgacaccugaauuugga

SEQ ID NO: 489142 - RNA, 22 nt, Artificial Sequence
  Synthetic
auuaucgacaccugaauuugga

SEQ ID NO: 489143 - RNA, 23 nt, Artificial Sequence
  Synthetic
cauuaucgacaccugaauuugga

SEQ ID NO: 489144 - RNA, 24 nt, Artificial Sequence
  Synthetic
acauuaucgacaccugaauuugga

SEQ ID NO: 489145 - RNA, 18 nt, Artificial Sequence
  Synthetic
guuuuguuauaauuugga

SEQ ID NO: 489146 - RNA, 19 nt, Artificial Sequence
  Synthetic
uguuuuguuauaauuugga

SEQ ID NO: 489147 - RNA, 20 nt, Artificial Sequence
  Synthetic
uuguuuuguuauaauuugga

SEQ ID NO: 489148 - RNA, 21 nt, Artificial Sequence
  Synthetic
uuuguuuuguuauaauuugga

SEQ ID NO: 489149 - RNA, 22 nt, Artificial Sequence
  Synthetic
cuuuguuuuguuauaauuugga

SEQ ID NO: 489150 - RNA, 23 nt, Artificial Sequence
  Synthetic
gcuuuguuuuguuauaauuugga

SEQ ID NO: 489151 - RNA, 24 nt, Artificial Sequence
  Synthetic
ugcuuuguuuuguuauaauuugga

SEQ ID NO: 489152 - RNA, 18 nt, Artificial Sequence
  Synthetic
ggaaugaaugcauuugga

SEQ ID NO: 489153 - RNA, 19 nt, Artificial Sequence
  Synthetic
uggaaugaaugcauuugga

SEQ ID NO: 489154 - RNA, 20 nt, Artificial Sequence
  Synthetic
guggaaugaaugcauuugga

SEQ ID NO: 489155 - RNA, 21 nt, Artificial Sequence
  Synthetic
aguggaaugaaugcauuugga

SEQ ID NO: 489156 - RNA, 22 nt, Artificial Sequence
  Synthetic
caguggaaugaaugcauuugga

SEQ ID NO: 489157 - RNA, 23 nt, Artificial Sequence
  Synthetic
acaguggaaugaaugcauuugga

SEQ ID NO: 489158 - RNA, 24 nt, Artificial Sequence
  Synthetic
uacaguggaaugaaugcauuugga

SEQ ID NO: 489159 - RNA, 18 nt, Artificial Sequence
  Synthetic
gugggucaaggauuugga

SEQ ID NO: 489160 - RNA, 19 nt, Artificial Sequence
  Synthetic
ugugggucaaggauuugga

SEQ ID NO: 489161 - RNA, 20 nt, Artificial Sequence
  Synthetic
cugugggucaaggauuugga

SEQ ID NO: 489162 - RNA, 21 nt, Artificial Sequence
  Synthetic
ucugugggucaaggauuugga

SEQ ID NO: 489163 - RNA, 22 nt, Artificial Sequence
  Synthetic
uucugugggucaaggauuugga

SEQ ID NO: 489164 - RNA, 23 nt, Artificial Sequence
  Synthetic
auucugugggucaaggauuugga

SEQ ID NO: 489165 - RNA, 24 nt, Artificial Sequence
  Synthetic
uauucugugggucaaggauuugga

SEQ ID NO: 489166 - RNA, 18 nt, Artificial Sequence
  Synthetic
aucuaaguuguauuugga

SEQ ID NO: 489167 - RNA, 19 nt, Artificial Sequence
  Synthetic
aaucuaaguuguauuugga

SEQ ID NO: 489168 - RNA, 20 nt, Artificial Sequence
  Synthetic
gaaucuaaguuguauuugga

SEQ ID NO: 489169 - RNA, 21 nt, Artificial Sequence
  Synthetic
ugaaucuaaguuguauuugga

SEQ ID NO: 489170 - RNA, 22 nt, Artificial Sequence
  Synthetic
uugaaucuaaguuguauuugga

SEQ ID NO: 489171 - RNA, 23 nt, Artificial Sequence
  Synthetic
auugaaucuaaguuguauuugga

SEQ ID NO: 489172 - RNA, 24 nt, Artificial Sequence
  Synthetic
gauugaaucuaaguuguauuugga

SEQ ID NO: 489173 - RNA, 18 nt, Artificial Sequence
  Synthetic
uucauuuccuuauuugga

SEQ ID NO: 489174 - RNA, 19 nt, Artificial Sequence
  Synthetic
auucauuuccuuauuugga

SEQ ID NO: 489175 - RNA, 20 nt, Artificial Sequence
  Synthetic
cauucauuuccuuauuugga

SEQ ID NO: 489176 - RNA, 21 nt, Artificial Sequence
  Synthetic
acauucauuuccuuauuugga

SEQ ID NO: 489177 - RNA, 22 nt, Artificial Sequence
  Synthetic
cacauucauuuccuuauuugga

SEQ ID NO: 489178 - RNA, 23 nt, Artificial Sequence
  Synthetic
ucacauucauuuccuuauuugga

SEQ ID NO: 489179 - RNA, 24 nt, Artificial Sequence
  Synthetic
cucacauucauuuccuuauuugga

SEQ ID NO: 489180 - RNA, 18 nt, Artificial Sequence
  Synthetic
uguggggaugacuuugga

SEQ ID NO: 489181 - RNA, 19 nt, Artificial Sequence
  Synthetic
uuguggggaugacuuugga

SEQ ID NO: 489182 - RNA, 20 nt, Artificial Sequence
  Synthetic
auuguggggaugacuuugga

SEQ ID NO: 489183 - RNA, 21 nt, Artificial Sequence
  Synthetic
aauuguggggaugacuuugga

SEQ ID NO: 489184 - RNA, 22 nt, Artificial Sequence
  Synthetic
caauuguggggaugacuuugga

SEQ ID NO: 489185 - RNA, 23 nt, Artificial Sequence
  Synthetic
ucaauuguggggaugacuuugga

SEQ ID NO: 489186 - RNA, 24 nt, Artificial Sequence
  Synthetic
gucaauuguggggaugacuuugga

SEQ ID NO: 489187 - RNA, 18 nt, Artificial Sequence
  Synthetic
uaguguuuucucuuugga

SEQ ID NO: 489188 - RNA, 19 nt, Artificial Sequence
  Synthetic
guaguguuuucucuuugga

SEQ ID NO: 489189 - RNA, 20 nt, Artificial Sequence
  Synthetic
aguaguguuuucucuuugga

SEQ ID NO: 489190 - RNA, 21 nt, Artificial Sequence
  Synthetic
aaguaguguuuucucuuugga

SEQ ID NO: 489191 - RNA, 22 nt, Artificial Sequence
  Synthetic
aaaguaguguuuucucuuugga

SEQ ID NO: 489192 - RNA, 23 nt, Artificial Sequence
  Synthetic
gaaaguaguguuuucucuuugga

SEQ ID NO: 489193 - RNA, 24 nt, Artificial Sequence
  Synthetic
agaaaguaguguuuucucuuugga

SEQ ID NO: 489194 - RNA, 18 nt, Artificial Sequence
  Synthetic
ucccgcaaggaguuugga

SEQ ID NO: 489195 - RNA, 19 nt, Artificial Sequence
  Synthetic
cucccgcaaggaguuugga

SEQ ID NO: 489196 - RNA, 20 nt, Artificial Sequence
  Synthetic
ucucccgcaaggaguuugga

SEQ ID NO: 489197 - RNA, 21 nt, Artificial Sequence
  Synthetic
uucucccgcaaggaguuugga

SEQ ID NO: 489198 - RNA, 22 nt, Artificial Sequence
  Synthetic
auucucccgcaaggaguuugga

SEQ ID NO: 489199 - RNA, 23 nt, Artificial Sequence
  Synthetic
uauucucccgcaaggaguuugga

SEQ ID NO: 489200 - RNA, 24 nt, Artificial Sequence
  Synthetic
guauucucccgcaaggaguuugga

SEQ ID NO: 489201 - RNA, 18 nt, Artificial Sequence
  Synthetic
uggacuauguaguuugga

SEQ ID NO: 489202 - RNA, 19 nt, Artificial Sequence
  Synthetic
uuggacuauguaguuugga

SEQ ID NO: 489203 - RNA, 20 nt, Artificial Sequence
  Synthetic
auuggacuauguaguuugga

SEQ ID NO: 489204 - RNA, 21 nt, Artificial Sequence
  Synthetic
uauuggacuauguaguuugga

SEQ ID NO: 489205 - RNA, 22 nt, Artificial Sequence
  Synthetic
uuauuggacuauguaguuugga

SEQ ID NO: 489206 - RNA, 23 nt, Artificial Sequence
  Synthetic
auuauuggacuauguaguuugga

SEQ ID NO: 489207 - RNA, 24 nt, Artificial Sequence
  Synthetic
aauuauuggacuauguaguuugga

SEQ ID NO: 489208 - RNA, 18 nt, Artificial Sequence
  Synthetic
uccaucaauagguuugga

SEQ ID NO: 489209 - RNA, 19 nt, Artificial Sequence
  Synthetic
auccaucaauagguuugga

SEQ ID NO: 489210 - RNA, 20 nt, Artificial Sequence
  Synthetic
uauccaucaauagguuugga

SEQ ID NO: 489211 - RNA, 21 nt, Artificial Sequence
  Synthetic
auauccaucaauagguuugga

SEQ ID NO: 489212 - RNA, 22 nt, Artificial Sequence
  Synthetic
aauauccaucaauagguuugga

SEQ ID NO: 489213 - RNA, 23 nt, Artificial Sequence
  Synthetic
uaauauccaucaauagguuugga

SEQ ID NO: 489214 - RNA, 24 nt, Artificial Sequence
  Synthetic
cuaauauccaucaauagguuugga

SEQ ID NO: 489215 - RNA, 18 nt, Artificial Sequence
  Synthetic
uuugggggaugguuugga

SEQ ID NO: 489216 - RNA, 19 nt, Artificial Sequence
  Synthetic
guuugggggaugguuugga

SEQ ID NO: 489217 - RNA, 20 nt, Artificial Sequence
  Synthetic
uguuugggggaugguuugga

SEQ ID NO: 489218 - RNA, 21 nt, Artificial Sequence
  Synthetic
uuguuugggggaugguuugga

SEQ ID NO: 489219 - RNA, 22 nt, Artificial Sequence
  Synthetic
uuuguuugggggaugguuugga

SEQ ID NO: 489220 - RNA, 23 nt, Artificial Sequence
  Synthetic
guuuguuugggggaugguuugga

SEQ ID NO: 489221 - RNA, 24 nt, Artificial Sequence
  Synthetic
gguuuguuugggggaugguuugga

SEQ ID NO: 489222 - RNA, 18 nt, Artificial Sequence
  Synthetic
uggugccaccuguuugga

SEQ ID NO: 489223 - RNA, 19 nt, Artificial Sequence
  Synthetic
guggugccaccuguuugga

SEQ ID NO: 489224 - RNA, 20 nt, Artificial Sequence
  Synthetic
uguggugccaccuguuugga

SEQ ID NO: 489225 - RNA, 21 nt, Artificial Sequence
  Synthetic
uuguggugccaccuguuugga

SEQ ID NO: 489226 - RNA, 22 nt, Artificial Sequence
  Synthetic
auuguggugccaccuguuugga

SEQ ID NO: 489227 - RNA, 23 nt, Artificial Sequence
  Synthetic
cauuguggugccaccuguuugga

SEQ ID NO: 489228 - RNA, 24 nt, Artificial Sequence
  Synthetic
ucauuguggugccaccuguuugga

SEQ ID NO: 489229 - RNA, 18 nt, Artificial Sequence
  Synthetic
caaucugcauuguuugga

SEQ ID NO: 489230 - RNA, 19 nt, Artificial Sequence
  Synthetic
acaaucugcauuguuugga

SEQ ID NO: 489231 - RNA, 20 nt, Artificial Sequence
  Synthetic
uacaaucugcauuguuugga

SEQ ID NO: 489232 - RNA, 21 nt, Artificial Sequence
  Synthetic
guacaaucugcauuguuugga

SEQ ID NO: 489233 - RNA, 22 nt, Artificial Sequence
  Synthetic
gguacaaucugcauuguuugga

SEQ ID NO: 489234 - RNA, 23 nt, Artificial Sequence
  Synthetic
ggguacaaucugcauuguuugga

SEQ ID NO: 489235 - RNA, 24 nt, Artificial Sequence
  Synthetic
gggguacaaucugcauuguuugga

SEQ ID NO: 489236 - RNA, 18 nt, Artificial Sequence
  Synthetic
cccagcugccauuuugga

SEQ ID NO: 489237 - RNA, 19 nt, Artificial Sequence
  Synthetic
acccagcugccauuuugga

SEQ ID NO: 489238 - RNA, 20 nt, Artificial Sequence
  Synthetic
aacccagcugccauuuugga

SEQ ID NO: 489239 - RNA, 21 nt, Artificial Sequence
  Synthetic
caacccagcugccauuuugga

SEQ ID NO: 489240 - RNA, 22 nt, Artificial Sequence
  Synthetic
ucaacccagcugccauuuugga

SEQ ID NO: 489241 - RNA, 23 nt, Artificial Sequence
  Synthetic
gucaacccagcugccauuuugga

SEQ ID NO: 489242 - RNA, 24 nt, Artificial Sequence
  Synthetic
ugucaacccagcugccauuuugga

SEQ ID NO: 489243 - RNA, 18 nt, Artificial Sequence
  Synthetic
aaucuuugcacuuuugga

SEQ ID NO: 489244 - RNA, 19 nt, Artificial Sequence
  Synthetic
gaaucuuugcacuuuugga

SEQ ID NO: 489245 - RNA, 20 nt, Artificial Sequence
  Synthetic
ggaaucuuugcacuuuugga

SEQ ID NO: 489246 - RNA, 21 nt, Artificial Sequence
  Synthetic
gggaaucuuugcacuuuugga

SEQ ID NO: 489247 - RNA, 22 nt, Artificial Sequence
  Synthetic
agggaaucuuugcacuuuugga

SEQ ID NO: 489248 - RNA, 23 nt, Artificial Sequence
  Synthetic
gagggaaucuuugcacuuuugga

SEQ ID NO: 489249 - RNA, 24 nt, Artificial Sequence
  Synthetic
agagggaaucuuugcacuuuugga

SEQ ID NO: 489250 - RNA, 18 nt, Artificial Sequence
  Synthetic
agcagaaaauguuuugga

SEQ ID NO: 489251 - RNA, 19 nt, Artificial Sequence
  Synthetic
aagcagaaaauguuuugga

SEQ ID NO: 489252 - RNA, 20 nt, Artificial Sequence
  Synthetic
aaagcagaaaauguuuugga

SEQ ID NO: 489253 - RNA, 21 nt, Artificial Sequence
  Synthetic
caaagcagaaaauguuuugga

SEQ ID NO: 489254 - RNA, 22 nt, Artificial Sequence
  Synthetic
ccaaagcagaaaauguuuugga

SEQ ID NO: 489255 - RNA, 23 nt, Artificial Sequence
  Synthetic
cccaaagcagaaaauguuuugga

SEQ ID NO: 489256 - RNA, 24 nt, Artificial Sequence
  Synthetic
gcccaaagcagaaaauguuuugga

SEQ ID NO: 489257 - RNA, 18 nt, Artificial Sequence
  Synthetic
ugccuauugauuuuugga

SEQ ID NO: 489258 - RNA, 19 nt, Artificial Sequence
  Synthetic
gugccuauugauuuuugga

SEQ ID NO: 489259 - RNA, 20 nt, Artificial Sequence
  Synthetic
ggugccuauugauuuuugga

SEQ ID NO: 489260 - RNA, 21 nt, Artificial Sequence
  Synthetic
aggugccuauugauuuuugga

SEQ ID NO: 489261 - RNA, 22 nt, Artificial Sequence
  Synthetic
caggugccuauugauuuuugga

SEQ ID NO: 489262 - RNA, 23 nt, Artificial Sequence
  Synthetic
gcaggugccuauugauuuuugga

SEQ ID NO: 489263 - RNA, 24 nt, Artificial Sequence
  Synthetic
agcaggugccuauugauuuuugga

SEQ ID NO: 489264 - RNA, 18 nt, Artificial Sequence
  Synthetic
uacagaagacuuuuugga

SEQ ID NO: 489265 - RNA, 19 nt, Artificial Sequence
  Synthetic
uuacagaagacuuuuugga

SEQ ID NO: 489266 - RNA, 20 nt, Artificial Sequence
  Synthetic
auuacagaagacuuuuugga

SEQ ID NO: 489267 - RNA, 21 nt, Artificial Sequence
  Synthetic
uauuacagaagacuuuuugga

SEQ ID NO: 489268 - RNA, 22 nt, Artificial Sequence
  Synthetic
auauuacagaagacuuuuugga

SEQ ID NO: 489269 - RNA, 23 nt, Artificial Sequence
  Synthetic
aauauuacagaagacuuuuugga

SEQ ID NO: 489270 - RNA, 24 nt, Artificial Sequence
  Synthetic
aaauauuacagaagacuuuuugga

SEQ ID NO: 489271 - RNA, 18 nt, Artificial Sequence
  Synthetic
gauuaaaaaaaaaaauga

SEQ ID NO: 489272 - RNA, 19 nt, Artificial Sequence
  Synthetic
agauuaaaaaaaaaaauga

SEQ ID NO: 489273 - RNA, 20 nt, Artificial Sequence
  Synthetic
cagauuaaaaaaaaaaauga

SEQ ID NO: 489274 - RNA, 21 nt, Artificial Sequence
  Synthetic
ucagauuaaaaaaaaaaauga

SEQ ID NO: 489275 - RNA, 22 nt, Artificial Sequence
  Synthetic
uucagauuaaaaaaaaaaauga

SEQ ID NO: 489276 - RNA, 23 nt, Artificial Sequence
  Synthetic
cuucagauuaaaaaaaaaaauga

SEQ ID NO: 489277 - RNA, 24 nt, Artificial Sequence
  Synthetic
gcuucagauuaaaaaaaaaaauga

SEQ ID NO: 489278 - RNA, 18 nt, Artificial Sequence
  Synthetic
aaugucuucaaaaaauga

SEQ ID NO: 489279 - RNA, 19 nt, Artificial Sequence
  Synthetic
aaaugucuucaaaaaauga

SEQ ID NO: 489280 - RNA, 20 nt, Artificial Sequence
  Synthetic
aaaaugucuucaaaaaauga

SEQ ID NO: 489281 - RNA, 21 nt, Artificial Sequence
  Synthetic
aaaaaugucuucaaaaaauga

SEQ ID NO: 489282 - RNA, 22 nt, Artificial Sequence
  Synthetic
gaaaaaugucuucaaaaaauga

SEQ ID NO: 489283 - RNA, 23 nt, Artificial Sequence
  Synthetic
ugaaaaaugucuucaaaaaauga

SEQ ID NO: 489284 - RNA, 24 nt, Artificial Sequence
  Synthetic
uugaaaaaugucuucaaaaaauga

SEQ ID NO: 489285 - RNA, 18 nt, Artificial Sequence
  Synthetic
ugguaccaggaaaaauga

SEQ ID NO: 489286 - RNA, 19 nt, Artificial Sequence
  Synthetic
augguaccaggaaaaauga

SEQ ID NO: 489287 - RNA, 20 nt, Artificial Sequence
  Synthetic
aaugguaccaggaaaaauga

SEQ ID NO: 489288 - RNA, 21 nt, Artificial Sequence
  Synthetic
caaugguaccaggaaaaauga

SEQ ID NO: 489289 - RNA, 22 nt, Artificial Sequence
  Synthetic
gcaaugguaccaggaaaaauga

SEQ ID NO: 489290 - RNA, 23 nt, Artificial Sequence
  Synthetic
ggcaaugguaccaggaaaaauga

SEQ ID NO: 489291 - RNA, 24 nt, Artificial Sequence
  Synthetic
gggcaaugguaccaggaaaaauga

SEQ ID NO: 489292 - RNA, 18 nt, Artificial Sequence
  Synthetic
uacuugugggaaaaauga

SEQ ID NO: 489293 - RNA, 19 nt, Artificial Sequence
  Synthetic
auacuugugggaaaaauga

SEQ ID NO: 489294 - RNA, 20 nt, Artificial Sequence
  Synthetic
cauacuugugggaaaaauga

SEQ ID NO: 489295 - RNA, 21 nt, Artificial Sequence
  Synthetic
ccauacuugugggaaaaauga

SEQ ID NO: 489296 - RNA, 22 nt, Artificial Sequence
  Synthetic
accauacuugugggaaaaauga

SEQ ID NO: 489297 - RNA, 23 nt, Artificial Sequence
  Synthetic
gaccauacuugugggaaaaauga

SEQ ID NO: 489298 - RNA, 24 nt, Artificial Sequence
  Synthetic
agaccauacuugugggaaaaauga

SEQ ID NO: 489299 - RNA, 18 nt, Artificial Sequence
  Synthetic
aacaaacaaacaaaauga

SEQ ID NO: 489300 - RNA, 19 nt, Artificial Sequence
  Synthetic
aaacaaacaaacaaaauga

SEQ ID NO: 489301 - RNA, 20 nt, Artificial Sequence
  Synthetic
caaacaaacaaacaaaauga

SEQ ID NO: 489302 - RNA, 21 nt, Artificial Sequence
  Synthetic
acaaacaaacaaacaaaauga

SEQ ID NO: 489303 - RNA, 22 nt, Artificial Sequence
  Synthetic
aacaaacaaacaaacaaaauga

SEQ ID NO: 489304 - RNA, 23 nt, Artificial Sequence
  Synthetic
aaacaaacaaacaaacaaaauga

SEQ ID NO: 489305 - RNA, 24 nt, Artificial Sequence
  Synthetic
gaaacaaacaaacaaacaaaauga

SEQ ID NO: 489306 - RNA, 18 nt, Artificial Sequence
  Synthetic
uuuacuuugccaaaauga

SEQ ID NO: 489307 - RNA, 19 nt, Artificial Sequence
  Synthetic
cuuuacuuugccaaaauga

SEQ ID NO: 489308 - RNA, 20 nt, Artificial Sequence
  Synthetic
ccuuuacuuugccaaaauga

SEQ ID NO: 489309 - RNA, 21 nt, Artificial Sequence
  Synthetic
uccuuuacuuugccaaaauga

SEQ ID NO: 489310 - RNA, 22 nt, Artificial Sequence
  Synthetic
uuccuuuacuuugccaaaauga

SEQ ID NO: 489311 - RNA, 23 nt, Artificial Sequence
  Synthetic
uuuccuuuacuuugccaaaauga

SEQ ID NO: 489312 - RNA, 24 nt, Artificial Sequence
  Synthetic
uuuuccuuuacuuugccaaaauga

SEQ ID NO: 489313 - RNA, 18 nt, Artificial Sequence
  Synthetic
agaagaaaaagaaaauga

SEQ ID NO: 489314 - RNA, 19 nt, Artificial Sequence
  Synthetic
aagaagaaaaagaaaauga

SEQ ID NO: 489315 - RNA, 20 nt, Artificial Sequence
  Synthetic
aaagaagaaaaagaaaauga

SEQ ID NO: 489316 - RNA, 21 nt, Artificial Sequence
  Synthetic
gaaagaagaaaaagaaaauga

SEQ ID NO: 489317 - RNA, 22 nt, Artificial Sequence
  Synthetic
agaaagaagaaaaagaaaauga

SEQ ID NO: 489318 - RNA, 23 nt, Artificial Sequence
  Synthetic
aagaaagaagaaaaagaaaauga

SEQ ID NO: 489319 - RNA, 24 nt, Artificial Sequence
  Synthetic
aaagaaagaagaaaaagaaaauga

SEQ ID NO: 489320 - RNA, 18 nt, Artificial Sequence
  Synthetic
uacuaguaaagaaaauga

SEQ ID NO: 489321 - RNA, 19 nt, Artificial Sequence
  Synthetic
uuacuaguaaagaaaauga

SEQ ID NO: 489322 - RNA, 20 nt, Artificial Sequence
  Synthetic
uuuacuaguaaagaaaauga

SEQ ID NO: 489323 - RNA, 21 nt, Artificial Sequence
  Synthetic
uuuuacuaguaaagaaaauga

SEQ ID NO: 489324 - RNA, 22 nt, Artificial Sequence
  Synthetic
auuuuacuaguaaagaaaauga

SEQ ID NO: 489325 - RNA, 23 nt, Artificial Sequence
  Synthetic
uauuuuacuaguaaagaaaauga

SEQ ID NO: 489326 - RNA, 24 nt, Artificial Sequence
  Synthetic
cuauuuuacuaguaaagaaaauga

SEQ ID NO: 489327 - RNA, 18 nt, Artificial Sequence
  Synthetic
uggauguaaagaaaauga

SEQ ID NO: 489328 - RNA, 19 nt, Artificial Sequence
  Synthetic
uuggauguaaagaaaauga

SEQ ID NO: 489329 - RNA, 20 nt, Artificial Sequence
  Synthetic
auuggauguaaagaaaauga

SEQ ID NO: 489330 - RNA, 21 nt, Artificial Sequence
  Synthetic
gauuggauguaaagaaaauga

SEQ ID NO: 489331 - RNA, 22 nt, Artificial Sequence
  Synthetic
agauuggauguaaagaaaauga

SEQ ID NO: 489332 - RNA, 23 nt, Artificial Sequence
  Synthetic
gagauuggauguaaagaaaauga

SEQ ID NO: 489333 - RNA, 24 nt, Artificial Sequence
  Synthetic
agagauuggauguaaagaaaauga

SEQ ID NO: 489334 - RNA, 18 nt, Artificial Sequence
  Synthetic
agaguccugggaaaauga

SEQ ID NO: 489335 - RNA, 19 nt, Artificial Sequence
  Synthetic
aagaguccugggaaaauga

SEQ ID NO: 489336 - RNA, 20 nt, Artificial Sequence
  Synthetic
gaagaguccugggaaaauga

SEQ ID NO: 489337 - RNA, 21 nt, Artificial Sequence
  Synthetic
agaagaguccugggaaaauga

SEQ ID NO: 489338 - RNA, 22 nt, Artificial Sequence
  Synthetic
aagaagaguccugggaaaauga

SEQ ID NO: 489339 - RNA, 23 nt, Artificial Sequence
  Synthetic
aaagaagaguccugggaaaauga

SEQ ID NO: 489340 - RNA, 24 nt, Artificial Sequence
  Synthetic
uaaagaagaguccugggaaaauga

SEQ ID NO: 489341 - RNA, 18 nt, Artificial Sequence
  Synthetic
uauacuuauggaaaauga

SEQ ID NO: 489342 - RNA, 19 nt, Artificial Sequence
  Synthetic
guauacuuauggaaaauga

SEQ ID NO: 489343 - RNA, 20 nt, Artificial Sequence
  Synthetic
aguauacuuauggaaaauga

SEQ ID NO: 489344 - RNA, 21 nt, Artificial Sequence
  Synthetic
aaguauacuuauggaaaauga

SEQ ID NO: 489345 - RNA, 22 nt, Artificial Sequence
  Synthetic
aaaguauacuuauggaaaauga

SEQ ID NO: 489346 - RNA, 23 nt, Artificial Sequence
  Synthetic
uaaaguauacuuauggaaaauga

SEQ ID NO: 489347 - RNA, 24 nt, Artificial Sequence
  Synthetic
uuaaaguauacuuauggaaaauga

SEQ ID NO: 489348 - RNA, 18 nt, Artificial Sequence
  Synthetic
gaaauuguuugaaaauga

SEQ ID NO: 489349 - RNA, 19 nt, Artificial Sequence
  Synthetic
agaaauuguuugaaaauga

SEQ ID NO: 489350 - RNA, 20 nt, Artificial Sequence
  Synthetic
cagaaauuguuugaaaauga

SEQ ID NO: 489351 - RNA, 21 nt, Artificial Sequence
  Synthetic
gcagaaauuguuugaaaauga

SEQ ID NO: 489352 - RNA, 22 nt, Artificial Sequence
  Synthetic
agcagaaauuguuugaaaauga

SEQ ID NO: 489353 - RNA, 23 nt, Artificial Sequence
  Synthetic
aagcagaaauuguuugaaaauga

SEQ ID NO: 489354 - RNA, 24 nt, Artificial Sequence
  Synthetic
uaagcagaaauuguuugaaaauga

SEQ ID NO: 489355 - RNA, 18 nt, Artificial Sequence
  Synthetic
uaagcuauaauaaaauga

SEQ ID NO: 489356 - RNA, 19 nt, Artificial Sequence
  Synthetic
auaagcuauaauaaaauga

SEQ ID NO: 489357 - RNA, 20 nt, Artificial Sequence
  Synthetic
uauaagcuauaauaaaauga

SEQ ID NO: 489358 - RNA, 21 nt, Artificial Sequence
  Synthetic
cuauaagcuauaauaaaauga

SEQ ID NO: 489359 - RNA, 22 nt, Artificial Sequence
  Synthetic
gcuauaagcuauaauaaaauga

SEQ ID NO: 489360 - RNA, 23 nt, Artificial Sequence
  Synthetic
ugcuauaagcuauaauaaaauga

SEQ ID NO: 489361 - RNA, 24 nt, Artificial Sequence
  Synthetic
augcuauaagcuauaauaaaauga

SEQ ID NO: 489362 - RNA, 18 nt, Artificial Sequence
  Synthetic
cuuuuaaauauaaaauga

SEQ ID NO: 489363 - RNA, 19 nt, Artificial Sequence
  Synthetic
ucuuuuaaauauaaaauga

SEQ ID NO: 489364 - RNA, 20 nt, Artificial Sequence
  Synthetic
uucuuuuaaauauaaaauga

SEQ ID NO: 489365 - RNA, 21 nt, Artificial Sequence
  Synthetic
auucuuuuaaauauaaaauga

SEQ ID NO: 489366 - RNA, 22 nt, Artificial Sequence
  Synthetic
cauucuuuuaaauauaaaauga

SEQ ID NO: 489367 - RNA, 23 nt, Artificial Sequence
  Synthetic
acauucuuuuaaauauaaaauga

SEQ ID NO: 489368 - RNA, 24 nt, Artificial Sequence
  Synthetic
cacauucuuuuaaauauaaaauga

SEQ ID NO: 489369 - RNA, 18 nt, Artificial Sequence
  Synthetic
gacugcacauuaaaauga

SEQ ID NO: 489370 - RNA, 19 nt, Artificial Sequence
  Synthetic
ugacugcacauuaaaauga

SEQ ID NO: 489371 - RNA, 20 nt, Artificial Sequence
  Synthetic
gugacugcacauuaaaauga

SEQ ID NO: 489372 - RNA, 21 nt, Artificial Sequence
  Synthetic
agugacugcacauuaaaauga

SEQ ID NO: 489373 - RNA, 22 nt, Artificial Sequence
  Synthetic
uagugacugcacauuaaaauga

SEQ ID NO: 489374 - RNA, 23 nt, Artificial Sequence
  Synthetic
auagugacugcacauuaaaauga

SEQ ID NO: 489375 - RNA, 24 nt, Artificial Sequence
  Synthetic
gauagugacugcacauuaaaauga

SEQ ID NO: 489376 - RNA, 18 nt, Artificial Sequence
  Synthetic
uaggccccauuaaaauga

SEQ ID NO: 489377 - RNA, 19 nt, Artificial Sequence
  Synthetic
uuaggccccauuaaaauga

SEQ ID NO: 489378 - RNA, 20 nt, Artificial Sequence
  Synthetic
cuuaggccccauuaaaauga

SEQ ID NO: 489379 - RNA, 21 nt, Artificial Sequence
  Synthetic
ucuuaggccccauuaaaauga

SEQ ID NO: 489380 - RNA, 22 nt, Artificial Sequence
  Synthetic
uucuuaggccccauuaaaauga

SEQ ID NO: 489381 - RNA, 23 nt, Artificial Sequence
  Synthetic
uuucuuaggccccauuaaaauga

SEQ ID NO: 489382 - RNA, 24 nt, Artificial Sequence
  Synthetic
cuuucuuaggccccauuaaaauga

SEQ ID NO: 489383 - RNA, 18 nt, Artificial Sequence
  Synthetic
ggugaguaaaacaaauga

SEQ ID NO: 489384 - RNA, 19 nt, Artificial Sequence
  Synthetic
aggugaguaaaacaaauga

SEQ ID NO: 489385 - RNA, 20 nt, Artificial Sequence
  Synthetic
aaggugaguaaaacaaauga

SEQ ID NO: 489386 - RNA, 21 nt, Artificial Sequence
  Synthetic
caaggugaguaaaacaaauga

SEQ ID NO: 489387 - RNA, 22 nt, Artificial Sequence
  Synthetic
acaaggugaguaaaacaaauga

SEQ ID NO: 489388 - RNA, 23 nt, Artificial Sequence
  Synthetic
aacaaggugaguaaaacaaauga

SEQ ID NO: 489389 - RNA, 24 nt, Artificial Sequence
  Synthetic
uaacaaggugaguaaaacaaauga

SEQ ID NO: 489390 - RNA, 18 nt, Artificial Sequence
  Synthetic
gccuucguuggcaaauga

SEQ ID NO: 489391 - RNA, 19 nt, Artificial Sequence
  Synthetic
ugccuucguuggcaaauga

SEQ ID NO: 489392 - RNA, 20 nt, Artificial Sequence
  Synthetic
gugccuucguuggcaaauga

SEQ ID NO: 489393 - RNA, 21 nt, Artificial Sequence
  Synthetic
ugugccuucguuggcaaauga

SEQ ID NO: 489394 - RNA, 22 nt, Artificial Sequence
  Synthetic
cugugccuucguuggcaaauga

SEQ ID NO: 489395 - RNA, 23 nt, Artificial Sequence
  Synthetic
gcugugccuucguuggcaaauga

SEQ ID NO: 489396 - RNA, 24 nt, Artificial Sequence
  Synthetic
ugcugugccuucguuggcaaauga

SEQ ID NO: 489397 - RNA, 18 nt, Artificial Sequence
  Synthetic
auaggagagaagaaauga

SEQ ID NO: 489398 - RNA, 19 nt, Artificial Sequence
  Synthetic
cauaggagagaagaaauga

SEQ ID NO: 489399 - RNA, 20 nt, Artificial Sequence
  Synthetic
gcauaggagagaagaaauga

SEQ ID NO: 489400 - RNA, 21 nt, Artificial Sequence
  Synthetic
ugcauaggagagaagaaauga

SEQ ID NO: 489401 - RNA, 22 nt, Artificial Sequence
  Synthetic
augcauaggagagaagaaauga

SEQ ID NO: 489402 - RNA, 23 nt, Artificial Sequence
  Synthetic
gaugcauaggagagaagaaauga

SEQ ID NO: 489403 - RNA, 24 nt, Artificial Sequence
  Synthetic
agaugcauaggagagaagaaauga

SEQ ID NO: 489404 - RNA, 18 nt, Artificial Sequence
  Synthetic
gacaaagugaagaaauga

SEQ ID NO: 489405 - RNA, 19 nt, Artificial Sequence
  Synthetic
agacaaagugaagaaauga

SEQ ID NO: 489406 - RNA, 20 nt, Artificial Sequence
  Synthetic
aagacaaagugaagaaauga

SEQ ID NO: 489407 - RNA, 21 nt, Artificial Sequence
  Synthetic
gaagacaaagugaagaaauga

SEQ ID NO: 489408 - RNA, 22 nt, Artificial Sequence
  Synthetic
agaagacaaagugaagaaauga

SEQ ID NO: 489409 - RNA, 23 nt, Artificial Sequence
  Synthetic
cagaagacaaagugaagaaauga

SEQ ID NO: 489410 - RNA, 24 nt, Artificial Sequence
  Synthetic
acagaagacaaagugaagaaauga

SEQ ID NO: 489411 - RNA, 18 nt, Artificial Sequence
  Synthetic
cacacagcuaagaaauga

SEQ ID NO: 489412 - RNA, 19 nt, Artificial Sequence
  Synthetic
ucacacagcuaagaaauga

SEQ ID NO: 489413 - RNA, 20 nt, Artificial Sequence
  Synthetic
aucacacagcuaagaaauga

SEQ ID NO: 489414 - RNA, 21 nt, Artificial Sequence
  Synthetic
aaucacacagcuaagaaauga

SEQ ID NO: 489415 - RNA, 22 nt, Artificial Sequence
  Synthetic
aaaucacacagcuaagaaauga

SEQ ID NO: 489416 - RNA, 23 nt, Artificial Sequence
  Synthetic
uaaaucacacagcuaagaaauga

SEQ ID NO: 489417 - RNA, 24 nt, Artificial Sequence
  Synthetic
cuaaaucacacagcuaagaaauga

SEQ ID NO: 489418 - RNA, 18 nt, Artificial Sequence
  Synthetic
aguagaaaacagaaauga

SEQ ID NO: 489419 - RNA, 19 nt, Artificial Sequence
  Synthetic
caguagaaaacagaaauga

SEQ ID NO: 489420 - RNA, 20 nt, Artificial Sequence
  Synthetic
ucaguagaaaacagaaauga

SEQ ID NO: 489421 - RNA, 21 nt, Artificial Sequence
  Synthetic
cucaguagaaaacagaaauga

SEQ ID NO: 489422 - RNA, 22 nt, Artificial Sequence
  Synthetic
acucaguagaaaacagaaauga

SEQ ID NO: 489423 - RNA, 23 nt, Artificial Sequence
  Synthetic
cacucaguagaaaacagaaauga

SEQ ID NO: 489424 - RNA, 24 nt, Artificial Sequence
  Synthetic
ucacucaguagaaaacagaaauga

SEQ ID NO: 489425 - RNA, 18 nt, Artificial Sequence
  Synthetic
uagucuccacagaaauga

SEQ ID NO: 489426 - RNA, 19 nt, Artificial Sequence
  Synthetic
cuagucuccacagaaauga

SEQ ID NO: 489427 - RNA, 20 nt, Artificial Sequence
  Synthetic
ucuagucuccacagaaauga

SEQ ID NO: 489428 - RNA, 21 nt, Artificial Sequence
  Synthetic
aucuagucuccacagaaauga

SEQ ID NO: 489429 - RNA, 22 nt, Artificial Sequence
  Synthetic
caucuagucuccacagaaauga

SEQ ID NO: 489430 - RNA, 23 nt, Artificial Sequence
  Synthetic
ucaucuagucuccacagaaauga

SEQ ID NO: 489431 - RNA, 24 nt, Artificial Sequence
  Synthetic
gucaucuagucuccacagaaauga

SEQ ID NO: 489432 - RNA, 18 nt, Artificial Sequence
  Synthetic
cauuggagacagaaauga

SEQ ID NO: 489433 - RNA, 19 nt, Artificial Sequence
  Synthetic
gcauuggagacagaaauga

SEQ ID NO: 489434 - RNA, 20 nt, Artificial Sequence
  Synthetic
ugcauuggagacagaaauga

SEQ ID NO: 489435 - RNA, 21 nt, Artificial Sequence
  Synthetic
augcauuggagacagaaauga

SEQ ID NO: 489436 - RNA, 22 nt, Artificial Sequence
  Synthetic
aaugcauuggagacagaaauga

SEQ ID NO: 489437 - RNA, 23 nt, Artificial Sequence
  Synthetic
uaaugcauuggagacagaaauga

SEQ ID NO: 489438 - RNA, 24 nt, Artificial Sequence
  Synthetic
uuaaugcauuggagacagaaauga

SEQ ID NO: 489439 - RNA, 18 nt, Artificial Sequence
  Synthetic
aaguaaaaucagaaauga

SEQ ID NO: 489440 - RNA, 19 nt, Artificial Sequence
  Synthetic
uaaguaaaaucagaaauga

SEQ ID NO: 489441 - RNA, 20 nt, Artificial Sequence
  Synthetic
auaaguaaaaucagaaauga

SEQ ID NO: 489442 - RNA, 21 nt, Artificial Sequence
  Synthetic
aauaaguaaaaucagaaauga

SEQ ID NO: 489443 - RNA, 22 nt, Artificial Sequence
  Synthetic
aaauaaguaaaaucagaaauga

SEQ ID NO: 489444 - RNA, 23 nt, Artificial Sequence
  Synthetic
caaauaaguaaaaucagaaauga

SEQ ID NO: 489445 - RNA, 24 nt, Artificial Sequence
  Synthetic
ucaaauaaguaaaaucagaaauga

SEQ ID NO: 489446 - RNA, 18 nt, Artificial Sequence
  Synthetic
gaaauauauuagaaauga

SEQ ID NO: 489447 - RNA, 19 nt, Artificial Sequence
  Synthetic
ggaaauauauuagaaauga

SEQ ID NO: 489448 - RNA, 20 nt, Artificial Sequence
  Synthetic
aggaaauauauuagaaauga

SEQ ID NO: 489449 - RNA, 21 nt, Artificial Sequence
  Synthetic
caggaaauauauuagaaauga

SEQ ID NO: 489450 - RNA, 22 nt, Artificial Sequence
  Synthetic
acaggaaauauauuagaaauga

SEQ ID NO: 489451 - RNA, 23 nt, Artificial Sequence
  Synthetic
aacaggaaauauauuagaaauga

SEQ ID NO: 489452 - RNA, 24 nt, Artificial Sequence
  Synthetic
caacaggaaauauauuagaaauga

SEQ ID NO: 489453 - RNA, 18 nt, Artificial Sequence
  Synthetic
aaaauguguuagaaauga

SEQ ID NO: 489454 - RNA, 19 nt, Artificial Sequence
  Synthetic
aaaaauguguuagaaauga

SEQ ID NO: 489455 - RNA, 20 nt, Artificial Sequence
  Synthetic
aaaaaauguguuagaaauga

SEQ ID NO: 489456 - RNA, 21 nt, Artificial Sequence
  Synthetic
aaaaaaauguguuagaaauga

SEQ ID NO: 489457 - RNA, 22 nt, Artificial Sequence
  Synthetic
uaaaaaaauguguuagaaauga

SEQ ID NO: 489458 - RNA, 23 nt, Artificial Sequence
  Synthetic
uuaaaaaaauguguuagaaauga

SEQ ID NO: 489459 - RNA, 24 nt, Artificial Sequence
  Synthetic
guuaaaaaaauguguuagaaauga

SEQ ID NO: 489460 - RNA, 18 nt, Artificial Sequence
  Synthetic
cuuaguauagcgaaauga

SEQ ID NO: 489461 - RNA, 19 nt, Artificial Sequence
  Synthetic
ccuuaguauagcgaaauga

SEQ ID NO: 489462 - RNA, 20 nt, Artificial Sequence
  Synthetic
accuuaguauagcgaaauga

SEQ ID NO: 489463 - RNA, 21 nt, Artificial Sequence
  Synthetic
gaccuuaguauagcgaaauga

SEQ ID NO: 489464 - RNA, 22 nt, Artificial Sequence
  Synthetic
ugaccuuaguauagcgaaauga

SEQ ID NO: 489465 - RNA, 23 nt, Artificial Sequence
  Synthetic
uugaccuuaguauagcgaaauga

SEQ ID NO: 489466 - RNA, 24 nt, Artificial Sequence
  Synthetic
uuugaccuuaguauagcgaaauga

SEQ ID NO: 489467 - RNA, 18 nt, Artificial Sequence
  Synthetic
uauauucuagggaaauga

SEQ ID NO: 489468 - RNA, 19 nt, Artificial Sequence
  Synthetic
uuauauucuagggaaauga

SEQ ID NO: 489469 - RNA, 20 nt, Artificial Sequence
  Synthetic
auuauauucuagggaaauga

SEQ ID NO: 489470 - RNA, 21 nt, Artificial Sequence
  Synthetic
aauuauauucuagggaaauga

SEQ ID NO: 489471 - RNA, 22 nt, Artificial Sequence
  Synthetic
caauuauauucuagggaaauga

SEQ ID NO: 489472 - RNA, 23 nt, Artificial Sequence
  Synthetic
ccaauuauauucuagggaaauga

SEQ ID NO: 489473 - RNA, 24 nt, Artificial Sequence
  Synthetic
accaauuauauucuagggaaauga

SEQ ID NO: 489474 - RNA, 18 nt, Artificial Sequence
  Synthetic
ggcgcacuggggaaauga

SEQ ID NO: 489475 - RNA, 19 nt, Artificial Sequence
  Synthetic
aggcgcacuggggaaauga

SEQ ID NO: 489476 - RNA, 20 nt, Artificial Sequence
  Synthetic
caggcgcacuggggaaauga

SEQ ID NO: 489477 - RNA, 21 nt, Artificial Sequence
  Synthetic
acaggcgcacuggggaaauga

SEQ ID NO: 489478 - RNA, 22 nt, Artificial Sequence
  Synthetic
gacaggcgcacuggggaaauga

SEQ ID NO: 489479 - RNA, 23 nt, Artificial Sequence
  Synthetic
ggacaggcgcacuggggaaauga

SEQ ID NO: 489480 - RNA, 24 nt, Artificial Sequence
  Synthetic
aggacaggcgcacuggggaaauga

SEQ ID NO: 489481 - RNA, 18 nt, Artificial Sequence
  Synthetic
gacauuaauuggaaauga

SEQ ID NO: 489482 - RNA, 19 nt, Artificial Sequence
  Synthetic
ugacauuaauuggaaauga

SEQ ID NO: 489483 - RNA, 20 nt, Artificial Sequence
  Synthetic
cugacauuaauuggaaauga

SEQ ID NO: 489484 - RNA, 21 nt, Artificial Sequence
  Synthetic
gcugacauuaauuggaaauga

SEQ ID NO: 489485 - RNA, 22 nt, Artificial Sequence
  Synthetic
agcugacauuaauuggaaauga

SEQ ID NO: 489486 - RNA, 23 nt, Artificial Sequence
  Synthetic
aagcugacauuaauuggaaauga

SEQ ID NO: 489487 - RNA, 24 nt, Artificial Sequence
  Synthetic
aaagcugacauuaauuggaaauga

SEQ ID NO: 489488 - RNA, 18 nt, Artificial Sequence
  Synthetic
auuaucagcaugaaauga

SEQ ID NO: 489489 - RNA, 19 nt, Artificial Sequence
  Synthetic
cauuaucagcaugaaauga

SEQ ID NO: 489490 - RNA, 20 nt, Artificial Sequence
  Synthetic
ucauuaucagcaugaaauga

SEQ ID NO: 489491 - RNA, 21 nt, Artificial Sequence
  Synthetic
cucauuaucagcaugaaauga

SEQ ID NO: 489492 - RNA, 22 nt, Artificial Sequence
  Synthetic
ucucauuaucagcaugaaauga

SEQ ID NO: 489493 - RNA, 23 nt, Artificial Sequence
  Synthetic
uucucauuaucagcaugaaauga

SEQ ID NO: 489494 - RNA, 24 nt, Artificial Sequence
  Synthetic
guucucauuaucagcaugaaauga

SEQ ID NO: 489495 - RNA, 18 nt, Artificial Sequence
  Synthetic
caauggaagaugaaauga

SEQ ID NO: 489496 - RNA, 19 nt, Artificial Sequence
  Synthetic
gcaauggaagaugaaauga

SEQ ID NO: 489497 - RNA, 20 nt, Artificial Sequence
  Synthetic
agcaauggaagaugaaauga

SEQ ID NO: 489498 - RNA, 21 nt, Artificial Sequence
  Synthetic
cagcaauggaagaugaaauga

SEQ ID NO: 489499 - RNA, 22 nt, Artificial Sequence
  Synthetic
ucagcaauggaagaugaaauga

SEQ ID NO: 489500 - RNA, 23 nt, Artificial Sequence
  Synthetic
aucagcaauggaagaugaaauga

SEQ ID NO: 489501 - RNA, 24 nt, Artificial Sequence
  Synthetic
uaucagcaauggaagaugaaauga

SEQ ID NO: 489502 - RNA, 18 nt, Artificial Sequence
  Synthetic
gaugcucugaugaaauga

SEQ ID NO: 489503 - RNA, 19 nt, Artificial Sequence
  Synthetic
agaugcucugaugaaauga

SEQ ID NO: 489504 - RNA, 20 nt, Artificial Sequence
  Synthetic
aagaugcucugaugaaauga

SEQ ID NO: 489505 - RNA, 21 nt, Artificial Sequence
  Synthetic
gaagaugcucugaugaaauga

SEQ ID NO: 489506 - RNA, 22 nt, Artificial Sequence
  Synthetic
ugaagaugcucugaugaaauga

SEQ ID NO: 489507 - RNA, 23 nt, Artificial Sequence
  Synthetic
gugaagaugcucugaugaaauga

SEQ ID NO: 489508 - RNA, 24 nt, Artificial Sequence
  Synthetic
ugugaagaugcucugaugaaauga

SEQ ID NO: 489509 - RNA, 18 nt, Artificial Sequence
  Synthetic
uggugcaguaugaaauga

SEQ ID NO: 489510 - RNA, 19 nt, Artificial Sequence
  Synthetic
uuggugcaguaugaaauga

SEQ ID NO: 489511 - RNA, 20 nt, Artificial Sequence
  Synthetic
auuggugcaguaugaaauga

SEQ ID NO: 489512 - RNA, 21 nt, Artificial Sequence
  Synthetic
uauuggugcaguaugaaauga

SEQ ID NO: 489513 - RNA, 22 nt, Artificial Sequence
  Synthetic
guauuggugcaguaugaaauga

SEQ ID NO: 489514 - RNA, 23 nt, Artificial Sequence
  Synthetic
uguauuggugcaguaugaaauga

SEQ ID NO: 489515 - RNA, 24 nt, Artificial Sequence
  Synthetic
auguauuggugcaguaugaaauga

SEQ ID NO: 489516 - RNA, 18 nt, Artificial Sequence
  Synthetic
uucaccaaguugaaauga

SEQ ID NO: 489517 - RNA, 19 nt, Artificial Sequence
  Synthetic
auucaccaaguugaaauga

SEQ ID NO: 489518 - RNA, 20 nt, Artificial Sequence
  Synthetic
gauucaccaaguugaaauga

SEQ ID NO: 489519 - RNA, 21 nt, Artificial Sequence
  Synthetic
agauucaccaaguugaaauga

SEQ ID NO: 489520 - RNA, 22 nt, Artificial Sequence
  Synthetic
cagauucaccaaguugaaauga

SEQ ID NO: 489521 - RNA, 23 nt, Artificial Sequence
  Synthetic
ucagauucaccaaguugaaauga

SEQ ID NO: 489522 - RNA, 24 nt, Artificial Sequence
  Synthetic
gucagauucaccaaguugaaauga

SEQ ID NO: 489523 - RNA, 18 nt, Artificial Sequence
  Synthetic
gaaugaacaaauaaauga

SEQ ID NO: 489524 - RNA, 19 nt, Artificial Sequence
  Synthetic
ugaaugaacaaauaaauga

SEQ ID NO: 489525 - RNA, 20 nt, Artificial Sequence
  Synthetic
uugaaugaacaaauaaauga

SEQ ID NO: 489526 - RNA, 21 nt, Artificial Sequence
  Synthetic
guugaaugaacaaauaaauga

SEQ ID NO: 489527 - RNA, 22 nt, Artificial Sequence
  Synthetic
uguugaaugaacaaauaaauga

SEQ ID NO: 489528 - RNA, 23 nt, Artificial Sequence
  Synthetic
uuguugaaugaacaaauaaauga

SEQ ID NO: 489529 - RNA, 24 nt, Artificial Sequence
  Synthetic
uuuguugaaugaacaaauaaauga

SEQ ID NO: 489530 - RNA, 18 nt, Artificial Sequence
  Synthetic
auaucuuccaauaaauga

SEQ ID NO: 489531 - RNA, 19 nt, Artificial Sequence
  Synthetic
uauaucuuccaauaaauga

SEQ ID NO: 489532 - RNA, 20 nt, Artificial Sequence
  Synthetic
uuauaucuuccaauaaauga

SEQ ID NO: 489533 - RNA, 21 nt, Artificial Sequence
  Synthetic
uuuauaucuuccaauaaauga

SEQ ID NO: 489534 - RNA, 22 nt, Artificial Sequence
  Synthetic
uuuuauaucuuccaauaaauga

SEQ ID NO: 489535 - RNA, 23 nt, Artificial Sequence
  Synthetic
auuuuauaucuuccaauaaauga

SEQ ID NO: 489536 - RNA, 24 nt, Artificial Sequence
  Synthetic
cauuuuauaucuuccaauaaauga

SEQ ID NO: 489537 - RNA, 18 nt, Artificial Sequence
  Synthetic
ugaugaauuaauaaauga

SEQ ID NO: 489538 - RNA, 19 nt, Artificial Sequence
  Synthetic
uugaugaauuaauaaauga

SEQ ID NO: 489539 - RNA, 20 nt, Artificial Sequence
  Synthetic
uuugaugaauuaauaaauga

SEQ ID NO: 489540 - RNA, 21 nt, Artificial Sequence
  Synthetic
auuugaugaauuaauaaauga

SEQ ID NO: 489541 - RNA, 22 nt, Artificial Sequence
  Synthetic
uauuugaugaauuaauaaauga

SEQ ID NO: 489542 - RNA, 23 nt, Artificial Sequence
  Synthetic
auauuugaugaauuaauaaauga

SEQ ID NO: 489543 - RNA, 24 nt, Artificial Sequence
  Synthetic
aauauuugaugaauuaauaaauga

SEQ ID NO: 489544 - RNA, 18 nt, Artificial Sequence
  Synthetic
cauaagguggauaaauga

SEQ ID NO: 489545 - RNA, 19 nt, Artificial Sequence
  Synthetic
ccauaagguggauaaauga

SEQ ID NO: 489546 - RNA, 20 nt, Artificial Sequence
  Synthetic
accauaagguggauaaauga

SEQ ID NO: 489547 - RNA, 21 nt, Artificial Sequence
  Synthetic
aaccauaagguggauaaauga

SEQ ID NO: 489548 - RNA, 22 nt, Artificial Sequence
  Synthetic
gaaccauaagguggauaaauga

SEQ ID NO: 489549 - RNA, 23 nt, Artificial Sequence
  Synthetic
cgaaccauaagguggauaaauga

SEQ ID NO: 489550 - RNA, 24 nt, Artificial Sequence
  Synthetic
ccgaaccauaagguggauaaauga

SEQ ID NO: 489551 - RNA, 18 nt, Artificial Sequence
  Synthetic
cagauaaaugauaaauga

SEQ ID NO: 489552 - RNA, 19 nt, Artificial Sequence
  Synthetic
ucagauaaaugauaaauga

SEQ ID NO: 489553 - RNA, 20 nt, Artificial Sequence
  Synthetic
aucagauaaaugauaaauga

SEQ ID NO: 489554 - RNA, 21 nt, Artificial Sequence
  Synthetic
gaucagauaaaugauaaauga

SEQ ID NO: 489555 - RNA, 22 nt, Artificial Sequence
  Synthetic
ugaucagauaaaugauaaauga

SEQ ID NO: 489556 - RNA, 23 nt, Artificial Sequence
  Synthetic
augaucagauaaaugauaaauga

SEQ ID NO: 489557 - RNA, 24 nt, Artificial Sequence
  Synthetic
aaugaucagauaaaugauaaauga

SEQ ID NO: 489558 - RNA, 18 nt, Artificial Sequence
  Synthetic
cuuccagaauauaaauga

SEQ ID NO: 489559 - RNA, 19 nt, Artificial Sequence
  Synthetic
ucuuccagaauauaaauga

SEQ ID NO: 489560 - RNA, 20 nt, Artificial Sequence
  Synthetic
uucuuccagaauauaaauga

SEQ ID NO: 489561 - RNA, 21 nt, Artificial Sequence
  Synthetic
auucuuccagaauauaaauga

SEQ ID NO: 489562 - RNA, 22 nt, Artificial Sequence
  Synthetic
uauucuuccagaauauaaauga

SEQ ID NO: 489563 - RNA, 23 nt, Artificial Sequence
  Synthetic
auauucuuccagaauauaaauga

SEQ ID NO: 489564 - RNA, 24 nt, Artificial Sequence
  Synthetic
aauauucuuccagaauauaaauga

SEQ ID NO: 489565 - RNA, 18 nt, Artificial Sequence
  Synthetic
uacaugcuuccuaaauga

SEQ ID NO: 489566 - RNA, 19 nt, Artificial Sequence
  Synthetic
guacaugcuuccuaaauga

SEQ ID NO: 489567 - RNA, 20 nt, Artificial Sequence
  Synthetic
aguacaugcuuccuaaauga

SEQ ID NO: 489568 - RNA, 21 nt, Artificial Sequence
  Synthetic
caguacaugcuuccuaaauga

SEQ ID NO: 489569 - RNA, 22 nt, Artificial Sequence
  Synthetic
ccaguacaugcuuccuaaauga

SEQ ID NO: 489570 - RNA, 23 nt, Artificial Sequence
  Synthetic
cccaguacaugcuuccuaaauga

SEQ ID NO: 489571 - RNA, 24 nt, Artificial Sequence
  Synthetic
ccccaguacaugcuuccuaaauga

SEQ ID NO: 489572 - RNA, 18 nt, Artificial Sequence
  Synthetic
uagauagcugcuaaauga

SEQ ID NO: 489573 - RNA, 19 nt, Artificial Sequence
  Synthetic
auagauagcugcuaaauga

SEQ ID NO: 489574 - RNA, 20 nt, Artificial Sequence
  Synthetic
aauagauagcugcuaaauga

SEQ ID NO: 489575 - RNA, 21 nt, Artificial Sequence
  Synthetic
caauagauagcugcuaaauga

SEQ ID NO: 489576 - RNA, 22 nt, Artificial Sequence
  Synthetic
ucaauagauagcugcuaaauga

SEQ ID NO: 489577 - RNA, 23 nt, Artificial Sequence
  Synthetic
uucaauagauagcugcuaaauga

SEQ ID NO: 489578 - RNA, 24 nt, Artificial Sequence
  Synthetic
cuucaauagauagcugcuaaauga

SEQ ID NO: 489579 - RNA, 18 nt, Artificial Sequence
  Synthetic
uaggaaaaaaguaaauga

SEQ ID NO: 489580 - RNA, 19 nt, Artificial Sequence
  Synthetic
guaggaaaaaaguaaauga

SEQ ID NO: 489581 - RNA, 20 nt, Artificial Sequence
  Synthetic
aguaggaaaaaaguaaauga

SEQ ID NO: 489582 - RNA, 21 nt, Artificial Sequence
  Synthetic
gaguaggaaaaaaguaaauga

SEQ ID NO: 489583 - RNA, 22 nt, Artificial Sequence
  Synthetic
agaguaggaaaaaaguaaauga

SEQ ID NO: 489584 - RNA, 23 nt, Artificial Sequence
  Synthetic
aagaguaggaaaaaaguaaauga

SEQ ID NO: 489585 - RNA, 24 nt, Artificial Sequence
  Synthetic
uaagaguaggaaaaaaguaaauga

SEQ ID NO: 489586 - RNA, 18 nt, Artificial Sequence
  Synthetic
cuuuucauucuuaaauga

SEQ ID NO: 489587 - RNA, 19 nt, Artificial Sequence
  Synthetic
acuuuucauucuuaaauga

SEQ ID NO: 489588 - RNA, 20 nt, Artificial Sequence
  Synthetic
uacuuuucauucuuaaauga

SEQ ID NO: 489589 - RNA, 21 nt, Artificial Sequence
  Synthetic
guacuuuucauucuuaaauga

SEQ ID NO: 489590 - RNA, 22 nt, Artificial Sequence
  Synthetic
uguacuuuucauucuuaaauga

SEQ ID NO: 489591 - RNA, 23 nt, Artificial Sequence
  Synthetic
auguacuuuucauucuuaaauga

SEQ ID NO: 489592 - RNA, 24 nt, Artificial Sequence
  Synthetic
aauguacuuuucauucuuaaauga

SEQ ID NO: 489593 - RNA, 18 nt, Artificial Sequence
  Synthetic
ugugucacgaaacaauga

SEQ ID NO: 489594 - RNA, 19 nt, Artificial Sequence
  Synthetic
uugugucacgaaacaauga

SEQ ID NO: 489595 - RNA, 20 nt, Artificial Sequence
  Synthetic
uuugugucacgaaacaauga

SEQ ID NO: 489596 - RNA, 21 nt, Artificial Sequence
  Synthetic
auuugugucacgaaacaauga

SEQ ID NO: 489597 - RNA, 22 nt, Artificial Sequence
  Synthetic
aauuugugucacgaaacaauga

SEQ ID NO: 489598 - RNA, 23 nt, Artificial Sequence
  Synthetic
aaauuugugucacgaaacaauga

SEQ ID NO: 489599 - RNA, 24 nt, Artificial Sequence
  Synthetic
aaaauuugugucacgaaacaauga

SEQ ID NO: 489600 - RNA, 18 nt, Artificial Sequence
  Synthetic
gucauacugaaacaauga

SEQ ID NO: 489601 - RNA, 19 nt, Artificial Sequence
  Synthetic
ggucauacugaaacaauga

SEQ ID NO: 489602 - RNA, 20 nt, Artificial Sequence
  Synthetic
aggucauacugaaacaauga

SEQ ID NO: 489603 - RNA, 21 nt, Artificial Sequence
  Synthetic
caggucauacugaaacaauga

SEQ ID NO: 489604 - RNA, 22 nt, Artificial Sequence
  Synthetic
acaggucauacugaaacaauga

SEQ ID NO: 489605 - RNA, 23 nt, Artificial Sequence
  Synthetic
aacaggucauacugaaacaauga

SEQ ID NO: 489606 - RNA, 24 nt, Artificial Sequence
  Synthetic
uaacaggucauacugaaacaauga

SEQ ID NO: 489607 - RNA, 18 nt, Artificial Sequence
  Synthetic
uaaagaaauaaacaauga

SEQ ID NO: 489608 - RNA, 19 nt, Artificial Sequence
  Synthetic
guaaagaaauaaacaauga

SEQ ID NO: 489609 - RNA, 20 nt, Artificial Sequence
  Synthetic
aguaaagaaauaaacaauga

SEQ ID NO: 489610 - RNA, 21 nt, Artificial Sequence
  Synthetic
aaguaaagaaauaaacaauga

SEQ ID NO: 489611 - RNA, 22 nt, Artificial Sequence
  Synthetic
aaaguaaagaaauaaacaauga

SEQ ID NO: 489612 - RNA, 23 nt, Artificial Sequence
  Synthetic
aaaaguaaagaaauaaacaauga

SEQ ID NO: 489613 - RNA, 24 nt, Artificial Sequence
  Synthetic
gaaaaguaaagaaauaaacaauga

SEQ ID NO: 489614 - RNA, 18 nt, Artificial Sequence
  Synthetic
aaaaggaaccaacaauga

SEQ ID NO: 489615 - RNA, 19 nt, Artificial Sequence
  Synthetic
gaaaaggaaccaacaauga

SEQ ID NO: 489616 - RNA, 20 nt, Artificial Sequence
  Synthetic
ugaaaaggaaccaacaauga

SEQ ID NO: 489617 - RNA, 21 nt, Artificial Sequence
  Synthetic
gugaaaaggaaccaacaauga

SEQ ID NO: 489618 - RNA, 22 nt, Artificial Sequence
  Synthetic
ugugaaaaggaaccaacaauga

SEQ ID NO: 489619 - RNA, 23 nt, Artificial Sequence
  Synthetic
uugugaaaaggaaccaacaauga

SEQ ID NO: 489620 - RNA, 24 nt, Artificial Sequence
  Synthetic
guugugaaaaggaaccaacaauga

SEQ ID NO: 489621 - RNA, 18 nt, Artificial Sequence
  Synthetic
uuucgcuuauaacaauga

SEQ ID NO: 489622 - RNA, 19 nt, Artificial Sequence
  Synthetic
auuucgcuuauaacaauga

SEQ ID NO: 489623 - RNA, 20 nt, Artificial Sequence
  Synthetic
aauuucgcuuauaacaauga

SEQ ID NO: 489624 - RNA, 21 nt, Artificial Sequence
  Synthetic
uaauuucgcuuauaacaauga

SEQ ID NO: 489625 - RNA, 22 nt, Artificial Sequence
  Synthetic
auaauuucgcuuauaacaauga

SEQ ID NO: 489626 - RNA, 23 nt, Artificial Sequence
  Synthetic
aauaauuucgcuuauaacaauga

SEQ ID NO: 489627 - RNA, 24 nt, Artificial Sequence
  Synthetic
gaauaauuucgcuuauaacaauga

SEQ ID NO: 489628 - RNA, 18 nt, Artificial Sequence
  Synthetic
uuucugccuacacaauga

SEQ ID NO: 489629 - RNA, 19 nt, Artificial Sequence
  Synthetic
cuuucugccuacacaauga

SEQ ID NO: 489630 - RNA, 20 nt, Artificial Sequence
  Synthetic
ccuuucugccuacacaauga

SEQ ID NO: 489631 - RNA, 21 nt, Artificial Sequence
  Synthetic
uccuuucugccuacacaauga

SEQ ID NO: 489632 - RNA, 22 nt, Artificial Sequence
  Synthetic
uuccuuucugccuacacaauga

SEQ ID NO: 489633 - RNA, 23 nt, Artificial Sequence
  Synthetic
auuccuuucugccuacacaauga

SEQ ID NO: 489634 - RNA, 24 nt, Artificial Sequence
  Synthetic
cauuccuuucugccuacacaauga

SEQ ID NO: 489635 - RNA, 18 nt, Artificial Sequence
  Synthetic
gaauacuuaugacaauga

SEQ ID NO: 489636 - RNA, 19 nt, Artificial Sequence
  Synthetic
ggaauacuuaugacaauga

SEQ ID NO: 489637 - RNA, 20 nt, Artificial Sequence
  Synthetic
uggaauacuuaugacaauga

SEQ ID NO: 489638 - RNA, 21 nt, Artificial Sequence
  Synthetic
guggaauacuuaugacaauga

SEQ ID NO: 489639 - RNA, 22 nt, Artificial Sequence
  Synthetic
aguggaauacuuaugacaauga

SEQ ID NO: 489640 - RNA, 23 nt, Artificial Sequence
  Synthetic
aaguggaauacuuaugacaauga

SEQ ID NO: 489641 - RNA, 24 nt, Artificial Sequence
  Synthetic
aaaguggaauacuuaugacaauga

SEQ ID NO: 489642 - RNA, 18 nt, Artificial Sequence
  Synthetic
aaucacugacuacaauga

SEQ ID NO: 489643 - RNA, 19 nt, Artificial Sequence
  Synthetic
aaaucacugacuacaauga

SEQ ID NO: 489644 - RNA, 20 nt, Artificial Sequence
  Synthetic
caaaucacugacuacaauga

SEQ ID NO: 489645 - RNA, 21 nt, Artificial Sequence
  Synthetic
ccaaaucacugacuacaauga

SEQ ID NO: 489646 - RNA, 22 nt, Artificial Sequence
  Synthetic
accaaaucacugacuacaauga

SEQ ID NO: 489647 - RNA, 23 nt, Artificial Sequence
  Synthetic
gaccaaaucacugacuacaauga

SEQ ID NO: 489648 - RNA, 24 nt, Artificial Sequence
  Synthetic
ugaccaaaucacugacuacaauga

SEQ ID NO: 489649 - RNA, 18 nt, Artificial Sequence
  Synthetic
acugaugaucaccaauga

SEQ ID NO: 489650 - RNA, 19 nt, Artificial Sequence
  Synthetic
aacugaugaucaccaauga

SEQ ID NO: 489651 - RNA, 20 nt, Artificial Sequence
  Synthetic
aaacugaugaucaccaauga

SEQ ID NO: 489652 - RNA, 21 nt, Artificial Sequence
  Synthetic
aaaacugaugaucaccaauga

SEQ ID NO: 489653 - RNA, 22 nt, Artificial Sequence
  Synthetic
aaaaacugaugaucaccaauga

SEQ ID NO: 489654 - RNA, 23 nt, Artificial Sequence
  Synthetic
caaaaacugaugaucaccaauga

SEQ ID NO: 489655 - RNA, 24 nt, Artificial Sequence
  Synthetic
ucaaaaacugaugaucaccaauga

SEQ ID NO: 489656 - RNA, 18 nt, Artificial Sequence
  Synthetic
caggggagaaggcaauga

SEQ ID NO: 489657 - RNA, 19 nt, Artificial Sequence
  Synthetic
acaggggagaaggcaauga

SEQ ID NO: 489658 - RNA, 20 nt, Artificial Sequence
  Synthetic
uacaggggagaaggcaauga

SEQ ID NO: 489659 - RNA, 21 nt, Artificial Sequence
  Synthetic
cuacaggggagaaggcaauga

SEQ ID NO: 489660 - RNA, 22 nt, Artificial Sequence
  Synthetic
ucuacaggggagaaggcaauga

SEQ ID NO: 489661 - RNA, 23 nt, Artificial Sequence
  Synthetic
gucuacaggggagaaggcaauga

SEQ ID NO: 489662 - RNA, 24 nt, Artificial Sequence
  Synthetic
agucuacaggggagaaggcaauga

SEQ ID NO: 489663 - RNA, 18 nt, Artificial Sequence
  Synthetic
acagaugacuggcaauga

SEQ ID NO: 489664 - RNA, 19 nt, Artificial Sequence
  Synthetic
aacagaugacuggcaauga

SEQ ID NO: 489665 - RNA, 20 nt, Artificial Sequence
  Synthetic
gaacagaugacuggcaauga

SEQ ID NO: 489666 - RNA, 21 nt, Artificial Sequence
  Synthetic
agaacagaugacuggcaauga

SEQ ID NO: 489667 - RNA, 22 nt, Artificial Sequence
  Synthetic
gagaacagaugacuggcaauga

SEQ ID NO: 489668 - RNA, 23 nt, Artificial Sequence
  Synthetic
ggagaacagaugacuggcaauga

SEQ ID NO: 489669 - RNA, 24 nt, Artificial Sequence
  Synthetic
aggagaacagaugacuggcaauga

SEQ ID NO: 489670 - RNA, 18 nt, Artificial Sequence
  Synthetic
uuucuaaacuaucaauga

SEQ ID NO: 489671 - RNA, 19 nt, Artificial Sequence
  Synthetic
uuuucuaaacuaucaauga

SEQ ID NO: 489672 - RNA, 20 nt, Artificial Sequence
  Synthetic
cuuuucuaaacuaucaauga

SEQ ID NO: 489673 - RNA, 21 nt, Artificial Sequence
  Synthetic
acuuuucuaaacuaucaauga

SEQ ID NO: 489674 - RNA, 22 nt, Artificial Sequence
  Synthetic
aacuuuucuaaacuaucaauga

SEQ ID NO: 489675 - RNA, 23 nt, Artificial Sequence
  Synthetic
aaacuuuucuaaacuaucaauga

SEQ ID NO: 489676 - RNA, 24 nt, Artificial Sequence
  Synthetic
uaaacuuuucuaaacuaucaauga

SEQ ID NO: 489677 - RNA, 18 nt, Artificial Sequence
  Synthetic
cuaguccacacucaauga

SEQ ID NO: 489678 - RNA, 19 nt, Artificial Sequence
  Synthetic
ucuaguccacacucaauga

SEQ ID NO: 489679 - RNA, 20 nt, Artificial Sequence
  Synthetic
aucuaguccacacucaauga

SEQ ID NO: 489680 - RNA, 21 nt, Artificial Sequence
  Synthetic
aaucuaguccacacucaauga

SEQ ID NO: 489681 - RNA, 22 nt, Artificial Sequence
  Synthetic
gaaucuaguccacacucaauga

SEQ ID NO: 489682 - RNA, 23 nt, Artificial Sequence
  Synthetic
ugaaucuaguccacacucaauga

SEQ ID NO: 489683 - RNA, 24 nt, Artificial Sequence
  Synthetic
cugaaucuaguccacacucaauga

SEQ ID NO: 489684 - RNA, 18 nt, Artificial Sequence
  Synthetic
cauuaaaccggucaauga

SEQ ID NO: 489685 - RNA, 19 nt, Artificial Sequence
  Synthetic
gcauuaaaccggucaauga

SEQ ID NO: 489686 - RNA, 20 nt, Artificial Sequence
  Synthetic
agcauuaaaccggucaauga

SEQ ID NO: 489687 - RNA, 21 nt, Artificial Sequence
  Synthetic
gagcauuaaaccggucaauga

SEQ ID NO: 489688 - RNA, 22 nt, Artificial Sequence
  Synthetic
agagcauuaaaccggucaauga

SEQ ID NO: 489689 - RNA, 23 nt, Artificial Sequence
  Synthetic
gagagcauuaaaccggucaauga

SEQ ID NO: 489690 - RNA, 24 nt, Artificial Sequence
  Synthetic
ugagagcauuaaaccggucaauga

SEQ ID NO: 489691 - RNA, 18 nt, Artificial Sequence
  Synthetic
uauaauauuugucaauga

SEQ ID NO: 489692 - RNA, 19 nt, Artificial Sequence
  Synthetic
uuauaauauuugucaauga

SEQ ID NO: 489693 - RNA, 20 nt, Artificial Sequence
  Synthetic
uuuauaauauuugucaauga

SEQ ID NO: 489694 - RNA, 21 nt, Artificial Sequence
  Synthetic
cuuuauaauauuugucaauga

SEQ ID NO: 489695 - RNA, 22 nt, Artificial Sequence
  Synthetic
ucuuuauaauauuugucaauga

SEQ ID NO: 489696 - RNA, 23 nt, Artificial Sequence
  Synthetic
aucuuuauaauauuugucaauga

SEQ ID NO: 489697 - RNA, 24 nt, Artificial Sequence
  Synthetic
caucuuuauaauauuugucaauga

SEQ ID NO: 489698 - RNA, 18 nt, Artificial Sequence
  Synthetic
uaaauguuuauucaauga

SEQ ID NO: 489699 - RNA, 19 nt, Artificial Sequence
  Synthetic
auaaauguuuauucaauga

SEQ ID NO: 489700 - RNA, 20 nt, Artificial Sequence
  Synthetic
gauaaauguuuauucaauga

SEQ ID NO: 489701 - RNA, 21 nt, Artificial Sequence
  Synthetic
agauaaauguuuauucaauga

SEQ ID NO: 489702 - RNA, 22 nt, Artificial Sequence
  Synthetic
uagauaaauguuuauucaauga

SEQ ID NO: 489703 - RNA, 23 nt, Artificial Sequence
  Synthetic
cuagauaaauguuuauucaauga

SEQ ID NO: 489704 - RNA, 24 nt, Artificial Sequence
  Synthetic
acuagauaaauguuuauucaauga

SEQ ID NO: 489705 - RNA, 18 nt, Artificial Sequence
  Synthetic
ugaaggaaugaagaauga

SEQ ID NO: 489706 - RNA, 19 nt, Artificial Sequence
  Synthetic
augaaggaaugaagaauga

SEQ ID NO: 489707 - RNA, 20 nt, Artificial Sequence
  Synthetic
aaugaaggaaugaagaauga

SEQ ID NO: 489708 - RNA, 21 nt, Artificial Sequence
  Synthetic
gaaugaaggaaugaagaauga

SEQ ID NO: 489709 - RNA, 22 nt, Artificial Sequence
  Synthetic
ugaaugaaggaaugaagaauga

SEQ ID NO: 489710 - RNA, 23 nt, Artificial Sequence
  Synthetic
augaaugaaggaaugaagaauga

SEQ ID NO: 489711 - RNA, 24 nt, Artificial Sequence
  Synthetic
aaugaaugaaggaaugaagaauga

SEQ ID NO: 489712 - RNA, 18 nt, Artificial Sequence
  Synthetic
aggcaaccuacagaauga

SEQ ID NO: 489713 - RNA, 19 nt, Artificial Sequence
  Synthetic
caggcaaccuacagaauga

SEQ ID NO: 489714 - RNA, 20 nt, Artificial Sequence
  Synthetic
acaggcaaccuacagaauga

SEQ ID NO: 489715 - RNA, 21 nt, Artificial Sequence
  Synthetic
aacaggcaaccuacagaauga

SEQ ID NO: 489716 - RNA, 22 nt, Artificial Sequence
  Synthetic
caacaggcaaccuacagaauga

SEQ ID NO: 489717 - RNA, 23 nt, Artificial Sequence
  Synthetic
ucaacaggcaaccuacagaauga

SEQ ID NO: 489718 - RNA, 24 nt, Artificial Sequence
  Synthetic
gucaacaggcaaccuacagaauga

SEQ ID NO: 489719 - RNA, 18 nt, Artificial Sequence
  Synthetic
uggcaagaaggagaauga

SEQ ID NO: 489720 - RNA, 19 nt, Artificial Sequence
  Synthetic
guggcaagaaggagaauga

SEQ ID NO: 489721 - RNA, 20 nt, Artificial Sequence
  Synthetic
gguggcaagaaggagaauga

SEQ ID NO: 489722 - RNA, 21 nt, Artificial Sequence
  Synthetic
agguggcaagaaggagaauga

SEQ ID NO: 489723 - RNA, 22 nt, Artificial Sequence
  Synthetic
aagguggcaagaaggagaauga

SEQ ID NO: 489724 - RNA, 23 nt, Artificial Sequence
  Synthetic
caagguggcaagaaggagaauga

SEQ ID NO: 489725 - RNA, 24 nt, Artificial Sequence
  Synthetic
acaagguggcaagaaggagaauga

SEQ ID NO: 489726 - RNA, 18 nt, Artificial Sequence
  Synthetic
aagcaaccuauagaauga

SEQ ID NO: 489727 - RNA, 19 nt, Artificial Sequence
  Synthetic
aaagcaaccuauagaauga

SEQ ID NO: 489728 - RNA, 20 nt, Artificial Sequence
  Synthetic
aaaagcaaccuauagaauga

SEQ ID NO: 489729 - RNA, 21 nt, Artificial Sequence
  Synthetic
uaaaagcaaccuauagaauga

SEQ ID NO: 489730 - RNA, 22 nt, Artificial Sequence
  Synthetic
uuaaaagcaaccuauagaauga

SEQ ID NO: 489731 - RNA, 23 nt, Artificial Sequence
  Synthetic
auuaaaagcaaccuauagaauga

SEQ ID NO: 489732 - RNA, 24 nt, Artificial Sequence
  Synthetic
aauuaaaagcaaccuauagaauga

SEQ ID NO: 489733 - RNA, 18 nt, Artificial Sequence
  Synthetic
acuggugggcaggaauga

SEQ ID NO: 489734 - RNA, 19 nt, Artificial Sequence
  Synthetic
cacuggugggcaggaauga

SEQ ID NO: 489735 - RNA, 20 nt, Artificial Sequence
  Synthetic
ccacuggugggcaggaauga

SEQ ID NO: 489736 - RNA, 21 nt, Artificial Sequence
  Synthetic
gccacuggugggcaggaauga

SEQ ID NO: 489737 - RNA, 22 nt, Artificial Sequence
  Synthetic
agccacuggugggcaggaauga

SEQ ID NO: 489738 - RNA, 23 nt, Artificial Sequence
  Synthetic
gagccacuggugggcaggaauga

SEQ ID NO: 489739 - RNA, 24 nt, Artificial Sequence
  Synthetic
ggagccacuggugggcaggaauga

SEQ ID NO: 489740 - RNA, 18 nt, Artificial Sequence
  Synthetic
auugcagaauuggaauga

SEQ ID NO: 489741 - RNA, 19 nt, Artificial Sequence
  Synthetic
uauugcagaauuggaauga

SEQ ID NO: 489742 - RNA, 20 nt, Artificial Sequence
  Synthetic
auauugcagaauuggaauga

SEQ ID NO: 489743 - RNA, 21 nt, Artificial Sequence
  Synthetic
aauauugcagaauuggaauga

SEQ ID NO: 489744 - RNA, 22 nt, Artificial Sequence
  Synthetic
aaauauugcagaauuggaauga

SEQ ID NO: 489745 - RNA, 23 nt, Artificial Sequence
  Synthetic
aaaauauugcagaauuggaauga

SEQ ID NO: 489746 - RNA, 24 nt, Artificial Sequence
  Synthetic
gaaaauauugcagaauuggaauga

SEQ ID NO: 489747 - RNA, 18 nt, Artificial Sequence
  Synthetic
gaacaaauaaaugaauga

SEQ ID NO: 489748 - RNA, 19 nt, Artificial Sequence
  Synthetic
ugaacaaauaaaugaauga

SEQ ID NO: 489749 - RNA, 20 nt, Artificial Sequence
  Synthetic
augaacaaauaaaugaauga

SEQ ID NO: 489750 - RNA, 21 nt, Artificial Sequence
  Synthetic
aaugaacaaauaaaugaauga

SEQ ID NO: 489751 - RNA, 22 nt, Artificial Sequence
  Synthetic
gaaugaacaaauaaaugaauga

SEQ ID NO: 489752 - RNA, 23 nt, Artificial Sequence
  Synthetic
ugaaugaacaaauaaaugaauga

SEQ ID NO: 489753 - RNA, 24 nt, Artificial Sequence
  Synthetic
uugaaugaacaaauaaaugaauga

SEQ ID NO: 489754 - RNA, 18 nt, Artificial Sequence
  Synthetic
cuuuugaugaaugaauga

SEQ ID NO: 489755 - RNA, 19 nt, Artificial Sequence
  Synthetic
acuuuugaugaaugaauga

SEQ ID NO: 489756 - RNA, 20 nt, Artificial Sequence
  Synthetic
aacuuuugaugaaugaauga

SEQ ID NO: 489757 - RNA, 21 nt, Artificial Sequence
  Synthetic
uaacuuuugaugaaugaauga

SEQ ID NO: 489758 - RNA, 22 nt, Artificial Sequence
  Synthetic
auaacuuuugaugaaugaauga

SEQ ID NO: 489759 - RNA, 23 nt, Artificial Sequence
  Synthetic
gauaacuuuugaugaaugaauga

SEQ ID NO: 489760 - RNA, 24 nt, Artificial Sequence
  Synthetic
ugauaacuuuugaugaaugaauga

SEQ ID NO: 489761 - RNA, 18 nt, Artificial Sequence
  Synthetic
auaacuuuugaugaauga

SEQ ID NO: 489762 - RNA, 19 nt, Artificial Sequence
  Synthetic
gauaacuuuugaugaauga

SEQ ID NO: 489763 - RNA, 20 nt, Artificial Sequence
  Synthetic
ugauaacuuuugaugaauga

SEQ ID NO: 489764 - RNA, 21 nt, Artificial Sequence
  Synthetic
uugauaacuuuugaugaauga

SEQ ID NO: 489765 - RNA, 22 nt, Artificial Sequence
  Synthetic
guugauaacuuuugaugaauga

SEQ ID NO: 489766 - RNA, 23 nt, Artificial Sequence
  Synthetic
aguugauaacuuuugaugaauga

SEQ ID NO: 489767 - RNA, 24 nt, Artificial Sequence
  Synthetic
uaguugauaacuuuugaugaauga

SEQ ID NO: 489768 - RNA, 18 nt, Artificial Sequence
  Synthetic
agaguuuucuaugaauga

SEQ ID NO: 489769 - RNA, 19 nt, Artificial Sequence
  Synthetic
aagaguuuucuaugaauga

SEQ ID NO: 489770 - RNA, 20 nt, Artificial Sequence
  Synthetic
caagaguuuucuaugaauga

SEQ ID NO: 489771 - RNA, 21 nt, Artificial Sequence
  Synthetic
ccaagaguuuucuaugaauga

SEQ ID NO: 489772 - RNA, 22 nt, Artificial Sequence
  Synthetic
accaagaguuuucuaugaauga

SEQ ID NO: 489773 - RNA, 23 nt, Artificial Sequence
  Synthetic
caccaagaguuuucuaugaauga

SEQ ID NO: 489774 - RNA, 24 nt, Artificial Sequence
  Synthetic
acaccaagaguuuucuaugaauga

SEQ ID NO: 489775 - RNA, 18 nt, Artificial Sequence
  Synthetic
uaaggauucccugaauga

SEQ ID NO: 489776 - RNA, 19 nt, Artificial Sequence
  Synthetic
cuaaggauucccugaauga

SEQ ID NO: 489777 - RNA, 20 nt, Artificial Sequence
  Synthetic
gcuaaggauucccugaauga

SEQ ID NO: 489778 - RNA, 21 nt, Artificial Sequence
  Synthetic
agcuaaggauucccugaauga

SEQ ID NO: 489779 - RNA, 22 nt, Artificial Sequence
  Synthetic
cagcuaaggauucccugaauga

SEQ ID NO: 489780 - RNA, 23 nt, Artificial Sequence
  Synthetic
acagcuaaggauucccugaauga

SEQ ID NO: 489781 - RNA, 24 nt, Artificial Sequence
  Synthetic
aacagcuaaggauucccugaauga

SEQ ID NO: 489782 - RNA, 18 nt, Artificial Sequence
  Synthetic
aagaugcuaucugaauga

SEQ ID NO: 489783 - RNA, 19 nt, Artificial Sequence
  Synthetic
gaagaugcuaucugaauga

SEQ ID NO: 489784 - RNA, 20 nt, Artificial Sequence
  Synthetic
agaagaugcuaucugaauga

SEQ ID NO: 489785 - RNA, 21 nt, Artificial Sequence
  Synthetic
uagaagaugcuaucugaauga

SEQ ID NO: 489786 - RNA, 22 nt, Artificial Sequence
  Synthetic
guagaagaugcuaucugaauga

SEQ ID NO: 489787 - RNA, 23 nt, Artificial Sequence
  Synthetic
uguagaagaugcuaucugaauga

SEQ ID NO: 489788 - RNA, 24 nt, Artificial Sequence
  Synthetic
uuguagaagaugcuaucugaauga

SEQ ID NO: 489789 - RNA, 18 nt, Artificial Sequence
  Synthetic
aagagcauuucugaauga

SEQ ID NO: 489790 - RNA, 19 nt, Artificial Sequence
  Synthetic
aaagagcauuucugaauga

SEQ ID NO: 489791 - RNA, 20 nt, Artificial Sequence
  Synthetic
uaaagagcauuucugaauga

SEQ ID NO: 489792 - RNA, 21 nt, Artificial Sequence
  Synthetic
cuaaagagcauuucugaauga

SEQ ID NO: 489793 - RNA, 22 nt, Artificial Sequence
  Synthetic
gcuaaagagcauuucugaauga

SEQ ID NO: 489794 - RNA, 23 nt, Artificial Sequence
  Synthetic
ugcuaaagagcauuucugaauga

SEQ ID NO: 489795 - RNA, 24 nt, Artificial Sequence
  Synthetic
cugcuaaagagcauuucugaauga

SEQ ID NO: 489796 - RNA, 18 nt, Artificial Sequence
  Synthetic
uucuuaauacgugaauga

SEQ ID NO: 489797 - RNA, 19 nt, Artificial Sequence
  Synthetic
auucuuaauacgugaauga

SEQ ID NO: 489798 - RNA, 20 nt, Artificial Sequence
  Synthetic
uauucuuaauacgugaauga

SEQ ID NO: 489799 - RNA, 21 nt, Artificial Sequence
  Synthetic
cuauucuuaauacgugaauga

SEQ ID NO: 489800 - RNA, 22 nt, Artificial Sequence
  Synthetic
acuauucuuaauacgugaauga

SEQ ID NO: 489801 - RNA, 23 nt, Artificial Sequence
  Synthetic
gacuauucuuaauacgugaauga

SEQ ID NO: 489802 - RNA, 24 nt, Artificial Sequence
  Synthetic
agacuauucuuaauacgugaauga

SEQ ID NO: 489803 - RNA, 18 nt, Artificial Sequence
  Synthetic
uguagauucauugaauga

SEQ ID NO: 489804 - RNA, 19 nt, Artificial Sequence
  Synthetic
guguagauucauugaauga

SEQ ID NO: 489805 - RNA, 20 nt, Artificial Sequence
  Synthetic
aguguagauucauugaauga

SEQ ID NO: 489806 - RNA, 21 nt, Artificial Sequence
  Synthetic
uaguguagauucauugaauga

SEQ ID NO: 489807 - RNA, 22 nt, Artificial Sequence
  Synthetic
auaguguagauucauugaauga

SEQ ID NO: 489808 - RNA, 23 nt, Artificial Sequence
  Synthetic
cauaguguagauucauugaauga

SEQ ID NO: 489809 - RNA, 24 nt, Artificial Sequence
  Synthetic
acauaguguagauucauugaauga

SEQ ID NO: 489810 - RNA, 18 nt, Artificial Sequence
  Synthetic
uuggagccccuugaauga

SEQ ID NO: 489811 - RNA, 19 nt, Artificial Sequence
  Synthetic
guuggagccccuugaauga

SEQ ID NO: 489812 - RNA, 20 nt, Artificial Sequence
  Synthetic
gguuggagccccuugaauga

SEQ ID NO: 489813 - RNA, 21 nt, Artificial Sequence
  Synthetic
ugguuggagccccuugaauga

SEQ ID NO: 489814 - RNA, 22 nt, Artificial Sequence
  Synthetic
augguuggagccccuugaauga

SEQ ID NO: 489815 - RNA, 23 nt, Artificial Sequence
  Synthetic
aaugguuggagccccuugaauga

SEQ ID NO: 489816 - RNA, 24 nt, Artificial Sequence
  Synthetic
gaaugguuggagccccuugaauga

SEQ ID NO: 489817 - RNA, 18 nt, Artificial Sequence
  Synthetic
agaaagcaucuugaauga

SEQ ID NO: 489818 - RNA, 19 nt, Artificial Sequence
  Synthetic
cagaaagcaucuugaauga

SEQ ID NO: 489819 - RNA, 20 nt, Artificial Sequence
  Synthetic
acagaaagcaucuugaauga

SEQ ID NO: 489820 - RNA, 21 nt, Artificial Sequence
  Synthetic
gacagaaagcaucuugaauga

SEQ ID NO: 489821 - RNA, 22 nt, Artificial Sequence
  Synthetic
agacagaaagcaucuugaauga

SEQ ID NO: 489822 - RNA, 23 nt, Artificial Sequence
  Synthetic
aagacagaaagcaucuugaauga

SEQ ID NO: 489823 - RNA, 24 nt, Artificial Sequence
  Synthetic
aaagacagaaagcaucuugaauga

SEQ ID NO: 489824 - RNA, 18 nt, Artificial Sequence
  Synthetic
cagagagccaaauaauga

SEQ ID NO: 489825 - RNA, 19 nt, Artificial Sequence
  Synthetic
acagagagccaaauaauga

SEQ ID NO: 489826 - RNA, 20 nt, Artificial Sequence
  Synthetic
gacagagagccaaauaauga

SEQ ID NO: 489827 - RNA, 21 nt, Artificial Sequence
  Synthetic
agacagagagccaaauaauga

SEQ ID NO: 489828 - RNA, 22 nt, Artificial Sequence
  Synthetic
cagacagagagccaaauaauga

SEQ ID NO: 489829 - RNA, 23 nt, Artificial Sequence
  Synthetic
acagacagagagccaaauaauga

SEQ ID NO: 489830 - RNA, 24 nt, Artificial Sequence
  Synthetic
aacagacagagagccaaauaauga

SEQ ID NO: 489831 - RNA, 18 nt, Artificial Sequence
  Synthetic
aguuaauagaaauaauga

SEQ ID NO: 489832 - RNA, 19 nt, Artificial Sequence
  Synthetic
uaguuaauagaaauaauga

SEQ ID NO: 489833 - RNA, 20 nt, Artificial Sequence
  Synthetic
uuaguuaauagaaauaauga

SEQ ID NO: 489834 - RNA, 21 nt, Artificial Sequence
  Synthetic
cuuaguuaauagaaauaauga

SEQ ID NO: 489835 - RNA, 22 nt, Artificial Sequence
  Synthetic
acuuaguuaauagaaauaauga

SEQ ID NO: 489836 - RNA, 23 nt, Artificial Sequence
  Synthetic
aacuuaguuaauagaaauaauga

SEQ ID NO: 489837 - RNA, 24 nt, Artificial Sequence
  Synthetic
gaacuuaguuaauagaaauaauga

SEQ ID NO: 489838 - RNA, 18 nt, Artificial Sequence
  Synthetic
ugguaguaauaauaauga

SEQ ID NO: 489839 - RNA, 19 nt, Artificial Sequence
  Synthetic
gugguaguaauaauaauga

SEQ ID NO: 489840 - RNA, 20 nt, Artificial Sequence
  Synthetic
agugguaguaauaauaauga

SEQ ID NO: 489841 - RNA, 21 nt, Artificial Sequence
  Synthetic
aagugguaguaauaauaauga

SEQ ID NO: 489842 - RNA, 22 nt, Artificial Sequence
  Synthetic
caagugguaguaauaauaauga

SEQ ID NO: 489843 - RNA, 23 nt, Artificial Sequence
  Synthetic
acaagugguaguaauaauaauga

SEQ ID NO: 489844 - RNA, 24 nt, Artificial Sequence
  Synthetic
gacaagugguaguaauaauaauga

SEQ ID NO: 489845 - RNA, 18 nt, Artificial Sequence
  Synthetic
uagccuugguaauaauga

SEQ ID NO: 489846 - RNA, 19 nt, Artificial Sequence
  Synthetic
uuagccuugguaauaauga

SEQ ID NO: 489847 - RNA, 20 nt, Artificial Sequence
  Synthetic
cuuagccuugguaauaauga

SEQ ID NO: 489848 - RNA, 21 nt, Artificial Sequence
  Synthetic
gcuuagccuugguaauaauga

SEQ ID NO: 489849 - RNA, 22 nt, Artificial Sequence
  Synthetic
agcuuagccuugguaauaauga

SEQ ID NO: 489850 - RNA, 23 nt, Artificial Sequence
  Synthetic
aagcuuagccuugguaauaauga

SEQ ID NO: 489851 - RNA, 24 nt, Artificial Sequence
  Synthetic
gaagcuuagccuugguaauaauga

SEQ ID NO: 489852 - RNA, 18 nt, Artificial Sequence
  Synthetic
agguauguuagauaauga

SEQ ID NO: 489853 - RNA, 19 nt, Artificial Sequence
  Synthetic
cagguauguuagauaauga

SEQ ID NO: 489854 - RNA, 20 nt, Artificial Sequence
  Synthetic
gcagguauguuagauaauga

SEQ ID NO: 489855 - RNA, 21 nt, Artificial Sequence
  Synthetic
agcagguauguuagauaauga

SEQ ID NO: 489856 - RNA, 22 nt, Artificial Sequence
  Synthetic
aagcagguauguuagauaauga

SEQ ID NO: 489857 - RNA, 23 nt, Artificial Sequence
  Synthetic
gaagcagguauguuagauaauga

SEQ ID NO: 489858 - RNA, 24 nt, Artificial Sequence
  Synthetic
ggaagcagguauguuagauaauga

SEQ ID NO: 489859 - RNA, 18 nt, Artificial Sequence
  Synthetic
uacuaaaacauauaauga

SEQ ID NO: 489860 - RNA, 19 nt, Artificial Sequence
  Synthetic
cuacuaaaacauauaauga

SEQ ID NO: 489861 - RNA, 20 nt, Artificial Sequence
  Synthetic
gcuacuaaaacauauaauga

SEQ ID NO: 489862 - RNA, 21 nt, Artificial Sequence
  Synthetic
ggcuacuaaaacauauaauga

SEQ ID NO: 489863 - RNA, 22 nt, Artificial Sequence
  Synthetic
gggcuacuaaaacauauaauga

SEQ ID NO: 489864 - RNA, 23 nt, Artificial Sequence
  Synthetic
ugggcuacuaaaacauauaauga

SEQ ID NO: 489865 - RNA, 24 nt, Artificial Sequence
  Synthetic
uugggcuacuaaaacauauaauga

SEQ ID NO: 489866 - RNA, 18 nt, Artificial Sequence
  Synthetic
uuuaaucauugcuaauga

SEQ ID NO: 489867 - RNA, 19 nt, Artificial Sequence
  Synthetic
uuuuaaucauugcuaauga

SEQ ID NO: 489868 - RNA, 20 nt, Artificial Sequence
  Synthetic
auuuuaaucauugcuaauga

SEQ ID NO: 489869 - RNA, 21 nt, Artificial Sequence
  Synthetic
aauuuuaaucauugcuaauga

SEQ ID NO: 489870 - RNA, 22 nt, Artificial Sequence
  Synthetic
uaauuuuaaucauugcuaauga

SEQ ID NO: 489871 - RNA, 23 nt, Artificial Sequence
  Synthetic
uuaauuuuaaucauugcuaauga

SEQ ID NO: 489872 - RNA, 24 nt, Artificial Sequence
  Synthetic
auuaauuuuaaucauugcuaauga

SEQ ID NO: 489873 - RNA, 18 nt, Artificial Sequence
  Synthetic
acaauauauuucuaauga

SEQ ID NO: 489874 - RNA, 19 nt, Artificial Sequence
  Synthetic
cacaauauauuucuaauga

SEQ ID NO: 489875 - RNA, 20 nt, Artificial Sequence
  Synthetic
gcacaauauauuucuaauga

SEQ ID NO: 489876 - RNA, 21 nt, Artificial Sequence
  Synthetic
ugcacaauauauuucuaauga

SEQ ID NO: 489877 - RNA, 22 nt, Artificial Sequence
  Synthetic
augcacaauauauuucuaauga

SEQ ID NO: 489878 - RNA, 23 nt, Artificial Sequence
  Synthetic
aaugcacaauauauuucuaauga

SEQ ID NO: 489879 - RNA, 24 nt, Artificial Sequence
  Synthetic
uaaugcacaauauauuucuaauga

SEQ ID NO: 489880 - RNA, 18 nt, Artificial Sequence
  Synthetic
cauauuugaaaguaauga

SEQ ID NO: 489881 - RNA, 19 nt, Artificial Sequence
  Synthetic
acauauuugaaaguaauga

SEQ ID NO: 489882 - RNA, 20 nt, Artificial Sequence
  Synthetic
aacauauuugaaaguaauga

SEQ ID NO: 489883 - RNA, 21 nt, Artificial Sequence
  Synthetic
aaacauauuugaaaguaauga

SEQ ID NO: 489884 - RNA, 22 nt, Artificial Sequence
  Synthetic
aaaacauauuugaaaguaauga

SEQ ID NO: 489885 - RNA, 23 nt, Artificial Sequence
  Synthetic
caaaacauauuugaaaguaauga

SEQ ID NO: 489886 - RNA, 24 nt, Artificial Sequence
  Synthetic
ucaaaacauauuugaaaguaauga

SEQ ID NO: 489887 - RNA, 18 nt, Artificial Sequence
  Synthetic
uaauaaacacuguaauga

SEQ ID NO: 489888 - RNA, 19 nt, Artificial Sequence
  Synthetic
auaauaaacacuguaauga

SEQ ID NO: 489889 - RNA, 20 nt, Artificial Sequence
  Synthetic
aauaauaaacacuguaauga

SEQ ID NO: 489890 - RNA, 21 nt, Artificial Sequence
  Synthetic
uaauaauaaacacuguaauga

SEQ ID NO: 489891 - RNA, 22 nt, Artificial Sequence
  Synthetic
cuaauaauaaacacuguaauga

SEQ ID NO: 489892 - RNA, 23 nt, Artificial Sequence
  Synthetic
ccuaauaauaaacacuguaauga

SEQ ID NO: 489893 - RNA, 24 nt, Artificial Sequence
  Synthetic
accuaauaauaaacacuguaauga

SEQ ID NO: 489894 - RNA, 18 nt, Artificial Sequence
  Synthetic
acuucccugcuguaauga

SEQ ID NO: 489895 - RNA, 19 nt, Artificial Sequence
  Synthetic
uacuucccugcuguaauga

SEQ ID NO: 489896 - RNA, 20 nt, Artificial Sequence
  Synthetic
uuacuucccugcuguaauga

SEQ ID NO: 489897 - RNA, 21 nt, Artificial Sequence
  Synthetic
uuuacuucccugcuguaauga

SEQ ID NO: 489898 - RNA, 22 nt, Artificial Sequence
  Synthetic
uuuuacuucccugcuguaauga

SEQ ID NO: 489899 - RNA, 23 nt, Artificial Sequence
  Synthetic
cuuuuacuucccugcuguaauga

SEQ ID NO: 489900 - RNA, 24 nt, Artificial Sequence
  Synthetic
ucuuuuacuucccugcuguaauga

SEQ ID NO: 489901 - RNA, 18 nt, Artificial Sequence
  Synthetic
ucucuggauguguaauga

SEQ ID NO: 489902 - RNA, 19 nt, Artificial Sequence
  Synthetic
uucucuggauguguaauga

SEQ ID NO: 489903 - RNA, 20 nt, Artificial Sequence
  Synthetic
uuucucuggauguguaauga

SEQ ID NO: 489904 - RNA, 21 nt, Artificial Sequence
  Synthetic
auuucucuggauguguaauga

SEQ ID NO: 489905 - RNA, 22 nt, Artificial Sequence
  Synthetic
uauuucucuggauguguaauga

SEQ ID NO: 489906 - RNA, 23 nt, Artificial Sequence
  Synthetic
cuauuucucuggauguguaauga

SEQ ID NO: 489907 - RNA, 24 nt, Artificial Sequence
  Synthetic
ucuauuucucuggauguguaauga

SEQ ID NO: 489908 - RNA, 18 nt, Artificial Sequence
  Synthetic
ccaugcaucacuuaauga

SEQ ID NO: 489909 - RNA, 19 nt, Artificial Sequence
  Synthetic
uccaugcaucacuuaauga

SEQ ID NO: 489910 - RNA, 20 nt, Artificial Sequence
  Synthetic
auccaugcaucacuuaauga

SEQ ID NO: 489911 - RNA, 21 nt, Artificial Sequence
  Synthetic
cauccaugcaucacuuaauga

SEQ ID NO: 489912 - RNA, 22 nt, Artificial Sequence
  Synthetic
ucauccaugcaucacuuaauga

SEQ ID NO: 489913 - RNA, 23 nt, Artificial Sequence
  Synthetic
uucauccaugcaucacuuaauga

SEQ ID NO: 489914 - RNA, 24 nt, Artificial Sequence
  Synthetic
auucauccaugcaucacuuaauga

SEQ ID NO: 489915 - RNA, 18 nt, Artificial Sequence
  Synthetic
uuuacaauagguuaauga

SEQ ID NO: 489916 - RNA, 19 nt, Artificial Sequence
  Synthetic
guuuacaauagguuaauga

SEQ ID NO: 489917 - RNA, 20 nt, Artificial Sequence
  Synthetic
uguuuacaauagguuaauga

SEQ ID NO: 489918 - RNA, 21 nt, Artificial Sequence
  Synthetic
uuguuuacaauagguuaauga

SEQ ID NO: 489919 - RNA, 22 nt, Artificial Sequence
  Synthetic
auuguuuacaauagguuaauga

SEQ ID NO: 489920 - RNA, 23 nt, Artificial Sequence
  Synthetic
aauuguuuacaauagguuaauga

SEQ ID NO: 489921 - RNA, 24 nt, Artificial Sequence
  Synthetic
uaauuguuuacaauagguuaauga

SEQ ID NO: 489922 - RNA, 18 nt, Artificial Sequence
  Synthetic
gcagugggaaaaacauga

SEQ ID NO: 489923 - RNA, 19 nt, Artificial Sequence
  Synthetic
agcagugggaaaaacauga

SEQ ID NO: 489924 - RNA, 20 nt, Artificial Sequence
  Synthetic
aagcagugggaaaaacauga

SEQ ID NO: 489925 - RNA, 21 nt, Artificial Sequence
  Synthetic
gaagcagugggaaaaacauga

SEQ ID NO: 489926 - RNA, 22 nt, Artificial Sequence
  Synthetic
ugaagcagugggaaaaacauga

SEQ ID NO: 489927 - RNA, 23 nt, Artificial Sequence
  Synthetic
uugaagcagugggaaaaacauga

SEQ ID NO: 489928 - RNA, 24 nt, Artificial Sequence
  Synthetic
uuugaagcagugggaaaaacauga

SEQ ID NO: 489929 - RNA, 18 nt, Artificial Sequence
  Synthetic
gauccuuuuaaaacauga

SEQ ID NO: 489930 - RNA, 19 nt, Artificial Sequence
  Synthetic
ugauccuuuuaaaacauga

SEQ ID NO: 489931 - RNA, 20 nt, Artificial Sequence
  Synthetic
gugauccuuuuaaaacauga

SEQ ID NO: 489932 - RNA, 21 nt, Artificial Sequence
  Synthetic
ugugauccuuuuaaaacauga

SEQ ID NO: 489933 - RNA, 22 nt, Artificial Sequence
  Synthetic
gugugauccuuuuaaaacauga

SEQ ID NO: 489934 - RNA, 23 nt, Artificial Sequence
  Synthetic
agugugauccuuuuaaaacauga

SEQ ID NO: 489935 - RNA, 24 nt, Artificial Sequence
  Synthetic
cagugugauccuuuuaaaacauga

SEQ ID NO: 489936 - RNA, 18 nt, Artificial Sequence
  Synthetic
cuggcuaaaacaacauga

SEQ ID NO: 489937 - RNA, 19 nt, Artificial Sequence
  Synthetic
acuggcuaaaacaacauga

SEQ ID NO: 489938 - RNA, 20 nt, Artificial Sequence
  Synthetic
cacuggcuaaaacaacauga

SEQ ID NO: 489939 - RNA, 21 nt, Artificial Sequence
  Synthetic
ucacuggcuaaaacaacauga

SEQ ID NO: 489940 - RNA, 22 nt, Artificial Sequence
  Synthetic
cucacuggcuaaaacaacauga

SEQ ID NO: 489941 - RNA, 23 nt, Artificial Sequence
  Synthetic
ccucacuggcuaaaacaacauga

SEQ ID NO: 489942 - RNA, 24 nt, Artificial Sequence
  Synthetic
cccucacuggcuaaaacaacauga

SEQ ID NO: 489943 - RNA, 18 nt, Artificial Sequence
  Synthetic
auuagaaguacaacauga

SEQ ID NO: 489944 - RNA, 19 nt, Artificial Sequence
  Synthetic
aauuagaaguacaacauga

SEQ ID NO: 489945 - RNA, 20 nt, Artificial Sequence
  Synthetic
caauuagaaguacaacauga

SEQ ID NO: 489946 - RNA, 21 nt, Artificial Sequence
  Synthetic
ucaauuagaaguacaacauga

SEQ ID NO: 489947 - RNA, 22 nt, Artificial Sequence
  Synthetic
uucaauuagaaguacaacauga

SEQ ID NO: 489948 - RNA, 23 nt, Artificial Sequence
  Synthetic
uuucaauuagaaguacaacauga

SEQ ID NO: 489949 - RNA, 24 nt, Artificial Sequence
  Synthetic
uuuucaauuagaaguacaacauga

SEQ ID NO: 489950 - RNA, 18 nt, Artificial Sequence
  Synthetic
aacugggagggaacauga

SEQ ID NO: 489951 - RNA, 19 nt, Artificial Sequence
  Synthetic
uaacugggagggaacauga

SEQ ID NO: 489952 - RNA, 20 nt, Artificial Sequence
  Synthetic
auaacugggagggaacauga

SEQ ID NO: 489953 - RNA, 21 nt, Artificial Sequence
  Synthetic
cauaacugggagggaacauga

SEQ ID NO: 489954 - RNA, 22 nt, Artificial Sequence
  Synthetic
ucauaacugggagggaacauga

SEQ ID NO: 489955 - RNA, 23 nt, Artificial Sequence
  Synthetic
cucauaacugggagggaacauga

SEQ ID NO: 489956 - RNA, 24 nt, Artificial Sequence
  Synthetic
gcucauaacugggagggaacauga

SEQ ID NO: 489957 - RNA, 18 nt, Artificial Sequence
  Synthetic
guggaauuuugaacauga

SEQ ID NO: 489958 - RNA, 19 nt, Artificial Sequence
  Synthetic
uguggaauuuugaacauga

SEQ ID NO: 489959 - RNA, 20 nt, Artificial Sequence
  Synthetic
cuguggaauuuugaacauga

SEQ ID NO: 489960 - RNA, 21 nt, Artificial Sequence
  Synthetic
ucuguggaauuuugaacauga

SEQ ID NO: 489961 - RNA, 22 nt, Artificial Sequence
  Synthetic
aucuguggaauuuugaacauga

SEQ ID NO: 489962 - RNA, 23 nt, Artificial Sequence
  Synthetic
gaucuguggaauuuugaacauga

SEQ ID NO: 489963 - RNA, 24 nt, Artificial Sequence
  Synthetic
agaucuguggaauuuugaacauga

SEQ ID NO: 489964 - RNA, 18 nt, Artificial Sequence
  Synthetic
ucguauaauauaacauga

SEQ ID NO: 489965 - RNA, 19 nt, Artificial Sequence
  Synthetic
uucguauaauauaacauga

SEQ ID NO: 489966 - RNA, 20 nt, Artificial Sequence
  Synthetic
uuucguauaauauaacauga

SEQ ID NO: 489967 - RNA, 21 nt, Artificial Sequence
  Synthetic
cuuucguauaauauaacauga

SEQ ID NO: 489968 - RNA, 22 nt, Artificial Sequence
  Synthetic
acuuucguauaauauaacauga

SEQ ID NO: 489969 - RNA, 23 nt, Artificial Sequence
  Synthetic
uacuuucguauaauauaacauga

SEQ ID NO: 489970 - RNA, 24 nt, Artificial Sequence
  Synthetic
uuacuuucguauaauauaacauga

SEQ ID NO: 489971 - RNA, 18 nt, Artificial Sequence
  Synthetic
uuauaaaguuuaacauga

SEQ ID NO: 489972 - RNA, 19 nt, Artificial Sequence
  Synthetic
cuuauaaaguuuaacauga

SEQ ID NO: 489973 - RNA, 20 nt, Artificial Sequence
  Synthetic
ucuuauaaaguuuaacauga

SEQ ID NO: 489974 - RNA, 21 nt, Artificial Sequence
  Synthetic
uucuuauaaaguuuaacauga

SEQ ID NO: 489975 - RNA, 22 nt, Artificial Sequence
  Synthetic
auucuuauaaaguuuaacauga

SEQ ID NO: 489976 - RNA, 23 nt, Artificial Sequence
  Synthetic
aauucuuauaaaguuuaacauga

SEQ ID NO: 489977 - RNA, 24 nt, Artificial Sequence
  Synthetic
aaauucuuauaaaguuuaacauga

SEQ ID NO: 489978 - RNA, 18 nt, Artificial Sequence
  Synthetic
gaugauuuugacacauga

SEQ ID NO: 489979 - RNA, 19 nt, Artificial Sequence
  Synthetic
ugaugauuuugacacauga

SEQ ID NO: 489980 - RNA, 20 nt, Artificial Sequence
  Synthetic
cugaugauuuugacacauga

SEQ ID NO: 489981 - RNA, 21 nt, Artificial Sequence
  Synthetic
acugaugauuuugacacauga

SEQ ID NO: 489982 - RNA, 22 nt, Artificial Sequence
  Synthetic
aacugaugauuuugacacauga

SEQ ID NO: 489983 - RNA, 23 nt, Artificial Sequence
  Synthetic
caacugaugauuuugacacauga

SEQ ID NO: 489984 - RNA, 24 nt, Artificial Sequence
  Synthetic
ucaacugaugauuuugacacauga

SEQ ID NO: 489985 - RNA, 18 nt, Artificial Sequence
  Synthetic
acuuauaguuccacauga

SEQ ID NO: 489986 - RNA, 19 nt, Artificial Sequence
  Synthetic
aacuuauaguuccacauga

SEQ ID NO: 489987 - RNA, 20 nt, Artificial Sequence
  Synthetic
gaacuuauaguuccacauga

SEQ ID NO: 489988 - RNA, 21 nt, Artificial Sequence
  Synthetic
ugaacuuauaguuccacauga

SEQ ID NO: 489989 - RNA, 22 nt, Artificial Sequence
  Synthetic
uugaacuuauaguuccacauga

SEQ ID NO: 489990 - RNA, 23 nt, Artificial Sequence
  Synthetic
auugaacuuauaguuccacauga

SEQ ID NO: 489991 - RNA, 24 nt, Artificial Sequence
  Synthetic
aauugaacuuauaguuccacauga

SEQ ID NO: 489992 - RNA, 18 nt, Artificial Sequence
  Synthetic
caaaauaaaaagacauga

SEQ ID NO: 489993 - RNA, 19 nt, Artificial Sequence
  Synthetic
acaaaauaaaaagacauga

SEQ ID NO: 489994 - RNA, 20 nt, Artificial Sequence
  Synthetic
cacaaaauaaaaagacauga

SEQ ID NO: 489995 - RNA, 21 nt, Artificial Sequence
  Synthetic
acacaaaauaaaaagacauga

SEQ ID NO: 489996 - RNA, 22 nt, Artificial Sequence
  Synthetic
gacacaaaauaaaaagacauga

SEQ ID NO: 489997 - RNA, 23 nt, Artificial Sequence
  Synthetic
ggacacaaaauaaaaagacauga

SEQ ID NO: 489998 - RNA, 24 nt, Artificial Sequence
  Synthetic
gggacacaaaauaaaaagacauga

SEQ ID NO: 489999 - RNA, 18 nt, Artificial Sequence
  Synthetic
ugacuggagaagacauga

SEQ ID NO: 490000 - RNA, 19 nt, Artificial Sequence
  Synthetic
augacuggagaagacauga

SEQ ID NO: 490001 - RNA, 20 nt, Artificial Sequence
  Synthetic
caugacuggagaagacauga

SEQ ID NO: 490002 - RNA, 21 nt, Artificial Sequence
  Synthetic
ucaugacuggagaagacauga

SEQ ID NO: 490003 - RNA, 22 nt, Artificial Sequence
  Synthetic
uucaugacuggagaagacauga

SEQ ID NO: 490004 - RNA, 23 nt, Artificial Sequence
  Synthetic
guucaugacuggagaagacauga

SEQ ID NO: 490005 - RNA, 24 nt, Artificial Sequence
  Synthetic
uguucaugacuggagaagacauga

SEQ ID NO: 490006 - RNA, 18 nt, Artificial Sequence
  Synthetic
uuuucacucuggacauga

SEQ ID NO: 490007 - RNA, 19 nt, Artificial Sequence
  Synthetic
guuuucacucuggacauga

SEQ ID NO: 490008 - RNA, 20 nt, Artificial Sequence
  Synthetic
uguuuucacucuggacauga

SEQ ID NO: 490009 - RNA, 21 nt, Artificial Sequence
  Synthetic
guguuuucacucuggacauga

SEQ ID NO: 490010 - RNA, 22 nt, Artificial Sequence
  Synthetic
aguguuuucacucuggacauga

SEQ ID NO: 490011 - RNA, 23 nt, Artificial Sequence
  Synthetic
caguguuuucacucuggacauga

SEQ ID NO: 490012 - RNA, 24 nt, Artificial Sequence
  Synthetic
ccaguguuuucacucuggacauga

SEQ ID NO: 490013 - RNA, 18 nt, Artificial Sequence
  Synthetic
gcauagguaaugacauga

SEQ ID NO: 490014 - RNA, 19 nt, Artificial Sequence
  Synthetic
ggcauagguaaugacauga

SEQ ID NO: 490015 - RNA, 20 nt, Artificial Sequence
  Synthetic
gggcauagguaaugacauga

SEQ ID NO: 490016 - RNA, 21 nt, Artificial Sequence
  Synthetic
ugggcauagguaaugacauga

SEQ ID NO: 490017 - RNA, 22 nt, Artificial Sequence
  Synthetic
cugggcauagguaaugacauga

SEQ ID NO: 490018 - RNA, 23 nt, Artificial Sequence
  Synthetic
ucugggcauagguaaugacauga

SEQ ID NO: 490019 - RNA, 24 nt, Artificial Sequence
  Synthetic
cucugggcauagguaaugacauga

SEQ ID NO: 490020 - RNA, 18 nt, Artificial Sequence
  Synthetic
gccucauggaugacauga

SEQ ID NO: 490021 - RNA, 19 nt, Artificial Sequence
  Synthetic
ugccucauggaugacauga

SEQ ID NO: 490022 - RNA, 20 nt, Artificial Sequence
  Synthetic
gugccucauggaugacauga

SEQ ID NO: 490023 - RNA, 21 nt, Artificial Sequence
  Synthetic
ugugccucauggaugacauga

SEQ ID NO: 490024 - RNA, 22 nt, Artificial Sequence
  Synthetic
augugccucauggaugacauga

SEQ ID NO: 490025 - RNA, 23 nt, Artificial Sequence
  Synthetic
aaugugccucauggaugacauga

SEQ ID NO: 490026 - RNA, 24 nt, Artificial Sequence
  Synthetic
gaaugugccucauggaugacauga

SEQ ID NO: 490027 - RNA, 18 nt, Artificial Sequence
  Synthetic
gaacaagaucugacauga

SEQ ID NO: 490028 - RNA, 19 nt, Artificial Sequence
  Synthetic
ugaacaagaucugacauga

SEQ ID NO: 490029 - RNA, 20 nt, Artificial Sequence
  Synthetic
augaacaagaucugacauga

SEQ ID NO: 490030 - RNA, 21 nt, Artificial Sequence
  Synthetic
aaugaacaagaucugacauga

SEQ ID NO: 490031 - RNA, 22 nt, Artificial Sequence
  Synthetic
aaaugaacaagaucugacauga

SEQ ID NO: 490032 - RNA, 23 nt, Artificial Sequence
  Synthetic
uaaaugaacaagaucugacauga

SEQ ID NO: 490033 - RNA, 24 nt, Artificial Sequence
  Synthetic
uuaaaugaacaagaucugacauga

SEQ ID NO: 490034 - RNA, 18 nt, Artificial Sequence
  Synthetic
uuccuuaccuugacauga

SEQ ID NO: 490035 - RNA, 19 nt, Artificial Sequence
  Synthetic
uuuccuuaccuugacauga

SEQ ID NO: 490036 - RNA, 20 nt, Artificial Sequence
  Synthetic
auuuccuuaccuugacauga

SEQ ID NO: 490037 - RNA, 21 nt, Artificial Sequence
  Synthetic
uauuuccuuaccuugacauga

SEQ ID NO: 490038 - RNA, 22 nt, Artificial Sequence
  Synthetic
uuauuuccuuaccuugacauga

SEQ ID NO: 490039 - RNA, 23 nt, Artificial Sequence
  Synthetic
guuauuuccuuaccuugacauga

SEQ ID NO: 490040 - RNA, 24 nt, Artificial Sequence
  Synthetic
gguuauuuccuuaccuugacauga

SEQ ID NO: 490041 - RNA, 18 nt, Artificial Sequence
  Synthetic
cuauuauugaauacauga

SEQ ID NO: 490042 - RNA, 19 nt, Artificial Sequence
  Synthetic
ucuauuauugaauacauga

SEQ ID NO: 490043 - RNA, 20 nt, Artificial Sequence
  Synthetic
uucuauuauugaauacauga

SEQ ID NO: 490044 - RNA, 21 nt, Artificial Sequence
  Synthetic
auucuauuauugaauacauga

SEQ ID NO: 490045 - RNA, 22 nt, Artificial Sequence
  Synthetic
cauucuauuauugaauacauga

SEQ ID NO: 490046 - RNA, 23 nt, Artificial Sequence
  Synthetic
gcauucuauuauugaauacauga

SEQ ID NO: 490047 - RNA, 24 nt, Artificial Sequence
  Synthetic
agcauucuauuauugaauacauga

SEQ ID NO: 490048 - RNA, 18 nt, Artificial Sequence
  Synthetic
uguuuauucauuacauga

SEQ ID NO: 490049 - RNA, 19 nt, Artificial Sequence
  Synthetic
cuguuuauucauuacauga

SEQ ID NO: 490050 - RNA, 20 nt, Artificial Sequence
  Synthetic
acuguuuauucauuacauga

SEQ ID NO: 490051 - RNA, 21 nt, Artificial Sequence
  Synthetic
gacuguuuauucauuacauga

SEQ ID NO: 490052 - RNA, 22 nt, Artificial Sequence
  Synthetic
ugacuguuuauucauuacauga

SEQ ID NO: 490053 - RNA, 23 nt, Artificial Sequence
  Synthetic
uugacuguuuauucauuacauga

SEQ ID NO: 490054 - RNA, 24 nt, Artificial Sequence
  Synthetic
uuugacuguuuauucauuacauga

SEQ ID NO: 490055 - RNA, 18 nt, Artificial Sequence
  Synthetic
cuaaaaaaggaaccauga

SEQ ID NO: 490056 - RNA, 19 nt, Artificial Sequence
  Synthetic
acuaaaaaaggaaccauga

SEQ ID NO: 490057 - RNA, 20 nt, Artificial Sequence
  Synthetic
cacuaaaaaaggaaccauga

SEQ ID NO: 490058 - RNA, 21 nt, Artificial Sequence
  Synthetic
ucacuaaaaaaggaaccauga

SEQ ID NO: 490059 - RNA, 22 nt, Artificial Sequence
  Synthetic
aucacuaaaaaaggaaccauga

SEQ ID NO: 490060 - RNA, 23 nt, Artificial Sequence
  Synthetic
gaucacuaaaaaaggaaccauga

SEQ ID NO: 490061 - RNA, 24 nt, Artificial Sequence
  Synthetic
ugaucacuaaaaaaggaaccauga

SEQ ID NO: 490062 - RNA, 18 nt, Artificial Sequence
  Synthetic
cuuugcccuucaccauga

SEQ ID NO: 490063 - RNA, 19 nt, Artificial Sequence
  Synthetic
ccuuugcccuucaccauga

SEQ ID NO: 490064 - RNA, 20 nt, Artificial Sequence
  Synthetic
cccuuugcccuucaccauga

SEQ ID NO: 490065 - RNA, 21 nt, Artificial Sequence
  Synthetic
ccccuuugcccuucaccauga

SEQ ID NO: 490066 - RNA, 22 nt, Artificial Sequence
  Synthetic
uccccuuugcccuucaccauga

SEQ ID NO: 490067 - RNA, 23 nt, Artificial Sequence
  Synthetic
cuccccuuugcccuucaccauga

SEQ ID NO: 490068 - RNA, 24 nt, Artificial Sequence
  Synthetic
gcuccccuuugcccuucaccauga

SEQ ID NO: 490069 - RNA, 18 nt, Artificial Sequence
  Synthetic
acuuacuucugaccauga

SEQ ID NO: 490070 - RNA, 19 nt, Artificial Sequence
  Synthetic
gacuuacuucugaccauga

SEQ ID NO: 490071 - RNA, 20 nt, Artificial Sequence
  Synthetic
agacuuacuucugaccauga

SEQ ID NO: 490072 - RNA, 21 nt, Artificial Sequence
  Synthetic
cagacuuacuucugaccauga

SEQ ID NO: 490073 - RNA, 22 nt, Artificial Sequence
  Synthetic
ccagacuuacuucugaccauga

SEQ ID NO: 490074 - RNA, 23 nt, Artificial Sequence
  Synthetic
uccagacuuacuucugaccauga

SEQ ID NO: 490075 - RNA, 24 nt, Artificial Sequence
  Synthetic
cuccagacuuacuucugaccauga

SEQ ID NO: 490076 - RNA, 18 nt, Artificial Sequence
  Synthetic
uaauugggcugcccauga

SEQ ID NO: 490077 - RNA, 19 nt, Artificial Sequence
  Synthetic
uuaauugggcugcccauga

SEQ ID NO: 490078 - RNA, 20 nt, Artificial Sequence
  Synthetic
auuaauugggcugcccauga

SEQ ID NO: 490079 - RNA, 21 nt, Artificial Sequence
  Synthetic
cauuaauugggcugcccauga

SEQ ID NO: 490080 - RNA, 22 nt, Artificial Sequence
  Synthetic
ccauuaauugggcugcccauga

SEQ ID NO: 490081 - RNA, 23 nt, Artificial Sequence
  Synthetic
uccauuaauugggcugcccauga

SEQ ID NO: 490082 - RNA, 24 nt, Artificial Sequence
  Synthetic
cuccauuaauugggcugcccauga

SEQ ID NO: 490083 - RNA, 18 nt, Artificial Sequence
  Synthetic
auuaugcacccuccauga

SEQ ID NO: 490084 - RNA, 19 nt, Artificial Sequence
  Synthetic
cauuaugcacccuccauga

SEQ ID NO: 490085 - RNA, 20 nt, Artificial Sequence
  Synthetic
acauuaugcacccuccauga

SEQ ID NO: 490086 - RNA, 21 nt, Artificial Sequence
  Synthetic
aacauuaugcacccuccauga

SEQ ID NO: 490087 - RNA, 22 nt, Artificial Sequence
  Synthetic
gaacauuaugcacccuccauga

SEQ ID NO: 490088 - RNA, 23 nt, Artificial Sequence
  Synthetic
ugaacauuaugcacccuccauga

SEQ ID NO: 490089 - RNA, 24 nt, Artificial Sequence
  Synthetic
augaacauuaugcacccuccauga

SEQ ID NO: 490090 - RNA, 18 nt, Artificial Sequence
  Synthetic
ggaauauguucuccauga

SEQ ID NO: 490091 - RNA, 19 nt, Artificial Sequence
  Synthetic
uggaauauguucuccauga

SEQ ID NO: 490092 - RNA, 20 nt, Artificial Sequence
  Synthetic
cuggaauauguucuccauga

SEQ ID NO: 490093 - RNA, 21 nt, Artificial Sequence
  Synthetic
ucuggaauauguucuccauga

SEQ ID NO: 490094 - RNA, 22 nt, Artificial Sequence
  Synthetic
aucuggaauauguucuccauga

SEQ ID NO: 490095 - RNA, 23 nt, Artificial Sequence
  Synthetic
caucuggaauauguucuccauga

SEQ ID NO: 490096 - RNA, 24 nt, Artificial Sequence
  Synthetic
acaucuggaauauguucuccauga

SEQ ID NO: 490097 - RNA, 18 nt, Artificial Sequence
  Synthetic
uguaauugucaagcauga

SEQ ID NO: 490098 - RNA, 19 nt, Artificial Sequence
  Synthetic
uuguaauugucaagcauga

SEQ ID NO: 490099 - RNA, 20 nt, Artificial Sequence
  Synthetic
auuguaauugucaagcauga

SEQ ID NO: 490100 - RNA, 21 nt, Artificial Sequence
  Synthetic
aauuguaauugucaagcauga

SEQ ID NO: 490101 - RNA, 22 nt, Artificial Sequence
  Synthetic
aaauuguaauugucaagcauga

SEQ ID NO: 490102 - RNA, 23 nt, Artificial Sequence
  Synthetic
aaaauuguaauugucaagcauga

SEQ ID NO: 490103 - RNA, 24 nt, Artificial Sequence
  Synthetic
gaaaauuguaauugucaagcauga

SEQ ID NO: 490104 - RNA, 18 nt, Artificial Sequence
  Synthetic
acagugggaggagcauga

SEQ ID NO: 490105 - RNA, 19 nt, Artificial Sequence
  Synthetic
cacagugggaggagcauga

SEQ ID NO: 490106 - RNA, 20 nt, Artificial Sequence
  Synthetic
ccacagugggaggagcauga

SEQ ID NO: 490107 - RNA, 21 nt, Artificial Sequence
  Synthetic
cccacagugggaggagcauga

SEQ ID NO: 490108 - RNA, 22 nt, Artificial Sequence
  Synthetic
ccccacagugggaggagcauga

SEQ ID NO: 490109 - RNA, 23 nt, Artificial Sequence
  Synthetic
uccccacagugggaggagcauga

SEQ ID NO: 490110 - RNA, 24 nt, Artificial Sequence
  Synthetic
guccccacagugggaggagcauga

SEQ ID NO: 490111 - RNA, 18 nt, Artificial Sequence
  Synthetic
cuugaaacaugagcauga

SEQ ID NO: 490112 - RNA, 19 nt, Artificial Sequence
  Synthetic
gcuugaaacaugagcauga

SEQ ID NO: 490113 - RNA, 20 nt, Artificial Sequence
  Synthetic
ggcuugaaacaugagcauga

SEQ ID NO: 490114 - RNA, 21 nt, Artificial Sequence
  Synthetic
uggcuugaaacaugagcauga

SEQ ID NO: 490115 - RNA, 22 nt, Artificial Sequence
  Synthetic
cuggcuugaaacaugagcauga

SEQ ID NO: 490116 - RNA, 23 nt, Artificial Sequence
  Synthetic
ucuggcuugaaacaugagcauga

SEQ ID NO: 490117 - RNA, 24 nt, Artificial Sequence
  Synthetic
uucuggcuugaaacaugagcauga

SEQ ID NO: 490118 - RNA, 18 nt, Artificial Sequence
  Synthetic
uugaugauuauagcauga

SEQ ID NO: 490119 - RNA, 19 nt, Artificial Sequence
  Synthetic
cuugaugauuauagcauga

SEQ ID NO: 490120 - RNA, 20 nt, Artificial Sequence
  Synthetic
ucuugaugauuauagcauga

SEQ ID NO: 490121 - RNA, 21 nt, Artificial Sequence
  Synthetic
aucuugaugauuauagcauga

SEQ ID NO: 490122 - RNA, 22 nt, Artificial Sequence
  Synthetic
aaucuugaugauuauagcauga

SEQ ID NO: 490123 - RNA, 23 nt, Artificial Sequence
  Synthetic
caaucuugaugauuauagcauga

SEQ ID NO: 490124 - RNA, 24 nt, Artificial Sequence
  Synthetic
acaaucuugaugauuauagcauga

SEQ ID NO: 490125 - RNA, 18 nt, Artificial Sequence
  Synthetic
acaguuucuuuagcauga

SEQ ID NO: 490126 - RNA, 19 nt, Artificial Sequence
  Synthetic
uacaguuucuuuagcauga

SEQ ID NO: 490127 - RNA, 20 nt, Artificial Sequence
  Synthetic
auacaguuucuuuagcauga

SEQ ID NO: 490128 - RNA, 21 nt, Artificial Sequence
  Synthetic
cauacaguuucuuuagcauga

SEQ ID NO: 490129 - RNA, 22 nt, Artificial Sequence
  Synthetic
ccauacaguuucuuuagcauga

SEQ ID NO: 490130 - RNA, 23 nt, Artificial Sequence
  Synthetic
cccauacaguuucuuuagcauga

SEQ ID NO: 490131 - RNA, 24 nt, Artificial Sequence
  Synthetic
ucccauacaguuucuuuagcauga

SEQ ID NO: 490132 - RNA, 18 nt, Artificial Sequence
  Synthetic
ucuuugacuuaggcauga

SEQ ID NO: 490133 - RNA, 19 nt, Artificial Sequence
  Synthetic
uucuuugacuuaggcauga

SEQ ID NO: 490134 - RNA, 20 nt, Artificial Sequence
  Synthetic
auucuuugacuuaggcauga

SEQ ID NO: 490135 - RNA, 21 nt, Artificial Sequence
  Synthetic
cauucuuugacuuaggcauga

SEQ ID NO: 490136 - RNA, 22 nt, Artificial Sequence
  Synthetic
acauucuuugacuuaggcauga

SEQ ID NO: 490137 - RNA, 23 nt, Artificial Sequence
  Synthetic
uacauucuuugacuuaggcauga

SEQ ID NO: 490138 - RNA, 24 nt, Artificial Sequence
  Synthetic
uuacauucuuugacuuaggcauga

SEQ ID NO: 490139 - RNA, 18 nt, Artificial Sequence
  Synthetic
acuugcacugcggcauga

SEQ ID NO: 490140 - RNA, 19 nt, Artificial Sequence
  Synthetic
cacuugcacugcggcauga

SEQ ID NO: 490141 - RNA, 20 nt, Artificial Sequence
  Synthetic
acacuugcacugcggcauga

SEQ ID NO: 490142 - RNA, 21 nt, Artificial Sequence
  Synthetic
cacacuugcacugcggcauga

SEQ ID NO: 490143 - RNA, 22 nt, Artificial Sequence
  Synthetic
acacacuugcacugcggcauga

SEQ ID NO: 490144 - RNA, 23 nt, Artificial Sequence
  Synthetic
cacacacuugcacugcggcauga

SEQ ID NO: 490145 - RNA, 24 nt, Artificial Sequence
  Synthetic
ucacacacuugcacugcggcauga

SEQ ID NO: 490146 - RNA, 18 nt, Artificial Sequence
  Synthetic
aauaugagcugggcauga

SEQ ID NO: 490147 - RNA, 19 nt, Artificial Sequence
  Synthetic
aaauaugagcugggcauga

SEQ ID NO: 490148 - RNA, 20 nt, Artificial Sequence
  Synthetic
uaaauaugagcugggcauga

SEQ ID NO: 490149 - RNA, 21 nt, Artificial Sequence
  Synthetic
auaaauaugagcugggcauga

SEQ ID NO: 490150 - RNA, 22 nt, Artificial Sequence
  Synthetic
uauaaauaugagcugggcauga

SEQ ID NO: 490151 - RNA, 23 nt, Artificial Sequence
  Synthetic
auauaaauaugagcugggcauga

SEQ ID NO: 490152 - RNA, 24 nt, Artificial Sequence
  Synthetic
cauauaaauaugagcugggcauga

SEQ ID NO: 490153 - RNA, 18 nt, Artificial Sequence
  Synthetic
agaagaagcaaugcauga

SEQ ID NO: 490154 - RNA, 19 nt, Artificial Sequence
  Synthetic
cagaagaagcaaugcauga

SEQ ID NO: 490155 - RNA, 20 nt, Artificial Sequence
  Synthetic
acagaagaagcaaugcauga

SEQ ID NO: 490156 - RNA, 21 nt, Artificial Sequence
  Synthetic
cacagaagaagcaaugcauga

SEQ ID NO: 490157 - RNA, 22 nt, Artificial Sequence
  Synthetic
ccacagaagaagcaaugcauga

SEQ ID NO: 490158 - RNA, 23 nt, Artificial Sequence
  Synthetic
cccacagaagaagcaaugcauga

SEQ ID NO: 490159 - RNA, 24 nt, Artificial Sequence
  Synthetic
ucccacagaagaagcaaugcauga

SEQ ID NO: 490160 - RNA, 18 nt, Artificial Sequence
  Synthetic
cugaccacgagugcauga

SEQ ID NO: 490161 - RNA, 19 nt, Artificial Sequence
  Synthetic
gcugaccacgagugcauga

SEQ ID NO: 490162 - RNA, 20 nt, Artificial Sequence
  Synthetic
agcugaccacgagugcauga

SEQ ID NO: 490163 - RNA, 21 nt, Artificial Sequence
  Synthetic
cagcugaccacgagugcauga

SEQ ID NO: 490164 - RNA, 22 nt, Artificial Sequence
  Synthetic
ccagcugaccacgagugcauga

SEQ ID NO: 490165 - RNA, 23 nt, Artificial Sequence
  Synthetic
accagcugaccacgagugcauga

SEQ ID NO: 490166 - RNA, 24 nt, Artificial Sequence
  Synthetic
uaccagcugaccacgagugcauga

SEQ ID NO: 490167 - RNA, 18 nt, Artificial Sequence
  Synthetic
uuuguaaaguuugcauga

SEQ ID NO: 490168 - RNA, 19 nt, Artificial Sequence
  Synthetic
uuuuguaaaguuugcauga

SEQ ID NO: 490169 - RNA, 20 nt, Artificial Sequence
  Synthetic
uuuuuguaaaguuugcauga

SEQ ID NO: 490170 - RNA, 21 nt, Artificial Sequence
  Synthetic
auuuuuguaaaguuugcauga

SEQ ID NO: 490171 - RNA, 22 nt, Artificial Sequence
  Synthetic
aauuuuuguaaaguuugcauga

SEQ ID NO: 490172 - RNA, 23 nt, Artificial Sequence
  Synthetic
aaauuuuuguaaaguuugcauga

SEQ ID NO: 490173 - RNA, 24 nt, Artificial Sequence
  Synthetic
aaaauuuuuguaaaguuugcauga

SEQ ID NO: 490174 - RNA, 18 nt, Artificial Sequence
  Synthetic
caggaaaacacaucauga

SEQ ID NO: 490175 - RNA, 19 nt, Artificial Sequence
  Synthetic
ucaggaaaacacaucauga

SEQ ID NO: 490176 - RNA, 20 nt, Artificial Sequence
  Synthetic
uucaggaaaacacaucauga

SEQ ID NO: 490177 - RNA, 21 nt, Artificial Sequence
  Synthetic
cuucaggaaaacacaucauga

SEQ ID NO: 490178 - RNA, 22 nt, Artificial Sequence
  Synthetic
ucuucaggaaaacacaucauga

SEQ ID NO: 490179 - RNA, 23 nt, Artificial Sequence
  Synthetic
uucuucaggaaaacacaucauga

SEQ ID NO: 490180 - RNA, 24 nt, Artificial Sequence
  Synthetic
uuucuucaggaaaacacaucauga

SEQ ID NO: 490181 - RNA, 18 nt, Artificial Sequence
  Synthetic
auuuuaaauccaucauga

SEQ ID NO: 490182 - RNA, 19 nt, Artificial Sequence
  Synthetic
cauuuuaaauccaucauga

SEQ ID NO: 490183 - RNA, 20 nt, Artificial Sequence
  Synthetic
ucauuuuaaauccaucauga

SEQ ID NO: 490184 - RNA, 21 nt, Artificial Sequence
  Synthetic
aucauuuuaaauccaucauga

SEQ ID NO: 490185 - RNA, 22 nt, Artificial Sequence
  Synthetic
caucauuuuaaauccaucauga

SEQ ID NO: 490186 - RNA, 23 nt, Artificial Sequence
  Synthetic
ucaucauuuuaaauccaucauga

SEQ ID NO: 490187 - RNA, 24 nt, Artificial Sequence
  Synthetic
uucaucauuuuaaauccaucauga

SEQ ID NO: 490188 - RNA, 18 nt, Artificial Sequence
  Synthetic
uugaaaauuccaucauga

SEQ ID NO: 490189 - RNA, 19 nt, Artificial Sequence
  Synthetic
uuugaaaauuccaucauga

SEQ ID NO: 490190 - RNA, 20 nt, Artificial Sequence
  Synthetic
auuugaaaauuccaucauga

SEQ ID NO: 490191 - RNA, 21 nt, Artificial Sequence
  Synthetic
uauuugaaaauuccaucauga

SEQ ID NO: 490192 - RNA, 22 nt, Artificial Sequence
  Synthetic
auauuugaaaauuccaucauga

SEQ ID NO: 490193 - RNA, 23 nt, Artificial Sequence
  Synthetic
gauauuugaaaauuccaucauga

SEQ ID NO: 490194 - RNA, 24 nt, Artificial Sequence
  Synthetic
ugauauuugaaaauuccaucauga

SEQ ID NO: 490195 - RNA, 18 nt, Artificial Sequence
  Synthetic
auauguuuguuaucauga

SEQ ID NO: 490196 - RNA, 19 nt, Artificial Sequence
  Synthetic
aauauguuuguuaucauga

SEQ ID NO: 490197 - RNA, 20 nt, Artificial Sequence
  Synthetic
uaauauguuuguuaucauga

SEQ ID NO: 490198 - RNA, 21 nt, Artificial Sequence
  Synthetic
auaauauguuuguuaucauga

SEQ ID NO: 490199 - RNA, 22 nt, Artificial Sequence
  Synthetic
uauaauauguuuguuaucauga

SEQ ID NO: 490200 - RNA, 23 nt, Artificial Sequence
  Synthetic
guauaauauguuuguuaucauga

SEQ ID NO: 490201 - RNA, 24 nt, Artificial Sequence
  Synthetic
aguauaauauguuuguuaucauga

SEQ ID NO: 490202 - RNA, 18 nt, Artificial Sequence
  Synthetic
acagaggaaaggucauga

SEQ ID NO: 490203 - RNA, 19 nt, Artificial Sequence
  Synthetic
cacagaggaaaggucauga

SEQ ID NO: 490204 - RNA, 20 nt, Artificial Sequence
  Synthetic
acacagaggaaaggucauga

SEQ ID NO: 490205 - RNA, 21 nt, Artificial Sequence
  Synthetic
uacacagaggaaaggucauga

SEQ ID NO: 490206 - RNA, 22 nt, Artificial Sequence
  Synthetic
auacacagaggaaaggucauga

SEQ ID NO: 490207 - RNA, 23 nt, Artificial Sequence
  Synthetic
cauacacagaggaaaggucauga

SEQ ID NO: 490208 - RNA, 24 nt, Artificial Sequence
  Synthetic
acauacacagaggaaaggucauga

SEQ ID NO: 490209 - RNA, 18 nt, Artificial Sequence
  Synthetic
aucaauaaauauucauga

SEQ ID NO: 490210 - RNA, 19 nt, Artificial Sequence
  Synthetic
caucaauaaauauucauga

SEQ ID NO: 490211 - RNA, 20 nt, Artificial Sequence
  Synthetic
acaucaauaaauauucauga

SEQ ID NO: 490212 - RNA, 21 nt, Artificial Sequence
  Synthetic
aacaucaauaaauauucauga

SEQ ID NO: 490213 - RNA, 22 nt, Artificial Sequence
  Synthetic
gaacaucaauaaauauucauga

SEQ ID NO: 490214 - RNA, 23 nt, Artificial Sequence
  Synthetic
ggaacaucaauaaauauucauga

SEQ ID NO: 490215 - RNA, 24 nt, Artificial Sequence
  Synthetic
uggaacaucaauaaauauucauga

SEQ ID NO: 490216 - RNA, 18 nt, Artificial Sequence
  Synthetic
uggcaagcagcuucauga

SEQ ID NO: 490217 - RNA, 19 nt, Artificial Sequence
  Synthetic
cuggcaagcagcuucauga

SEQ ID NO: 490218 - RNA, 20 nt, Artificial Sequence
  Synthetic
gcuggcaagcagcuucauga

SEQ ID NO: 490219 - RNA, 21 nt, Artificial Sequence
  Synthetic
agcuggcaagcagcuucauga

SEQ ID NO: 490220 - RNA, 22 nt, Artificial Sequence
  Synthetic
uagcuggcaagcagcuucauga

SEQ ID NO: 490221 - RNA, 23 nt, Artificial Sequence
  Synthetic
auagcuggcaagcagcuucauga

SEQ ID NO: 490222 - RNA, 24 nt, Artificial Sequence
  Synthetic
uauagcuggcaagcagcuucauga

SEQ ID NO: 490223 - RNA, 18 nt, Artificial Sequence
  Synthetic
uauugauuugcuucauga

SEQ ID NO: 490224 - RNA, 19 nt, Artificial Sequence
  Synthetic
auauugauuugcuucauga

SEQ ID NO: 490225 - RNA, 20 nt, Artificial Sequence
  Synthetic
gauauugauuugcuucauga

SEQ ID NO: 490226 - RNA, 21 nt, Artificial Sequence
  Synthetic
agauauugauuugcuucauga

SEQ ID NO: 490227 - RNA, 22 nt, Artificial Sequence
  Synthetic
gagauauugauuugcuucauga

SEQ ID NO: 490228 - RNA, 23 nt, Artificial Sequence
  Synthetic
ugagauauugauuugcuucauga

SEQ ID NO: 490229 - RNA, 24 nt, Artificial Sequence
  Synthetic
gugagauauugauuugcuucauga

SEQ ID NO: 490230 - RNA, 18 nt, Artificial Sequence
  Synthetic
gaaauaauagguucauga

SEQ ID NO: 490231 - RNA, 19 nt, Artificial Sequence
  Synthetic
ggaaauaauagguucauga

SEQ ID NO: 490232 - RNA, 20 nt, Artificial Sequence
  Synthetic
aggaaauaauagguucauga

SEQ ID NO: 490233 - RNA, 21 nt, Artificial Sequence
  Synthetic
aaggaaauaauagguucauga

SEQ ID NO: 490234 - RNA, 22 nt, Artificial Sequence
  Synthetic
aaaggaaauaauagguucauga

SEQ ID NO: 490235 - RNA, 23 nt, Artificial Sequence
  Synthetic
aaaaggaaauaauagguucauga

SEQ ID NO: 490236 - RNA, 24 nt, Artificial Sequence
  Synthetic
caaaaggaaauaauagguucauga

SEQ ID NO: 490237 - RNA, 18 nt, Artificial Sequence
  Synthetic
cuugugaaauguucauga

SEQ ID NO: 490238 - RNA, 19 nt, Artificial Sequence
  Synthetic
ccuugugaaauguucauga

SEQ ID NO: 490239 - RNA, 20 nt, Artificial Sequence
  Synthetic
cccuugugaaauguucauga

SEQ ID NO: 490240 - RNA, 21 nt, Artificial Sequence
  Synthetic
acccuugugaaauguucauga

SEQ ID NO: 490241 - RNA, 22 nt, Artificial Sequence
  Synthetic
cacccuugugaaauguucauga

SEQ ID NO: 490242 - RNA, 23 nt, Artificial Sequence
  Synthetic
ucacccuugugaaauguucauga

SEQ ID NO: 490243 - RNA, 24 nt, Artificial Sequence
  Synthetic
gucacccuugugaaauguucauga

SEQ ID NO: 490244 - RNA, 18 nt, Artificial Sequence
  Synthetic
cauuuuaaguuuucauga

SEQ ID NO: 490245 - RNA, 19 nt, Artificial Sequence
  Synthetic
acauuuuaaguuuucauga

SEQ ID NO: 490246 - RNA, 20 nt, Artificial Sequence
  Synthetic
cacauuuuaaguuuucauga

SEQ ID NO: 490247 - RNA, 21 nt, Artificial Sequence
  Synthetic
gcacauuuuaaguuuucauga

SEQ ID NO: 490248 - RNA, 22 nt, Artificial Sequence
  Synthetic
ggcacauuuuaaguuuucauga

SEQ ID NO: 490249 - RNA, 23 nt, Artificial Sequence
  Synthetic
aggcacauuuuaaguuuucauga

SEQ ID NO: 490250 - RNA, 24 nt, Artificial Sequence
  Synthetic
caggcacauuuuaaguuuucauga

SEQ ID NO: 490251 - RNA, 18 nt, Artificial Sequence
  Synthetic
uuuuuuuuuuuuucauga

SEQ ID NO: 490252 - RNA, 19 nt, Artificial Sequence
  Synthetic
cuuuuuuuuuuuuucauga

SEQ ID NO: 490253 - RNA, 20 nt, Artificial Sequence
  Synthetic
ucuuuuuuuuuuuuucauga

SEQ ID NO: 490254 - RNA, 21 nt, Artificial Sequence
  Synthetic
uucuuuuuuuuuuuuucauga

SEQ ID NO: 490255 - RNA, 22 nt, Artificial Sequence
  Synthetic
auucuuuuuuuuuuuuucauga

SEQ ID NO: 490256 - RNA, 23 nt, Artificial Sequence
  Synthetic
uauucuuuuuuuuuuuuucauga

SEQ ID NO: 490257 - RNA, 24 nt, Artificial Sequence
  Synthetic
auauucuuuuuuuuuuuuucauga

SEQ ID NO: 490258 - RNA, 18 nt, Artificial Sequence
  Synthetic
guuaagccauaaagauga

SEQ ID NO: 490259 - RNA, 19 nt, Artificial Sequence
  Synthetic
aguuaagccauaaagauga

SEQ ID NO: 490260 - RNA, 20 nt, Artificial Sequence
  Synthetic
uaguuaagccauaaagauga

SEQ ID NO: 490261 - RNA, 21 nt, Artificial Sequence
  Synthetic
auaguuaagccauaaagauga

SEQ ID NO: 490262 - RNA, 22 nt, Artificial Sequence
  Synthetic
uauaguuaagccauaaagauga

SEQ ID NO: 490263 - RNA, 23 nt, Artificial Sequence
  Synthetic
auauaguuaagccauaaagauga

SEQ ID NO: 490264 - RNA, 24 nt, Artificial Sequence
  Synthetic
gauauaguuaagccauaaagauga

SEQ ID NO: 490265 - RNA, 18 nt, Artificial Sequence
  Synthetic
aucauaguaagaagauga

SEQ ID NO: 490266 - RNA, 19 nt, Artificial Sequence
  Synthetic
uaucauaguaagaagauga

SEQ ID NO: 490267 - RNA, 20 nt, Artificial Sequence
  Synthetic
cuaucauaguaagaagauga

SEQ ID NO: 490268 - RNA, 21 nt, Artificial Sequence
  Synthetic
gcuaucauaguaagaagauga

SEQ ID NO: 490269 - RNA, 22 nt, Artificial Sequence
  Synthetic
ugcuaucauaguaagaagauga

SEQ ID NO: 490270 - RNA, 23 nt, Artificial Sequence
  Synthetic
augcuaucauaguaagaagauga

SEQ ID NO: 490271 - RNA, 24 nt, Artificial Sequence
  Synthetic
uaugcuaucauaguaagaagauga

SEQ ID NO: 490272 - RNA, 18 nt, Artificial Sequence
  Synthetic
aagcaggugggaagauga

SEQ ID NO: 490273 - RNA, 19 nt, Artificial Sequence
  Synthetic
caagcaggugggaagauga

SEQ ID NO: 490274 - RNA, 20 nt, Artificial Sequence
  Synthetic
ucaagcaggugggaagauga

SEQ ID NO: 490275 - RNA, 21 nt, Artificial Sequence
  Synthetic
aucaagcaggugggaagauga

SEQ ID NO: 490276 - RNA, 22 nt, Artificial Sequence
  Synthetic
gaucaagcaggugggaagauga

SEQ ID NO: 490277 - RNA, 23 nt, Artificial Sequence
  Synthetic
agaucaagcaggugggaagauga

SEQ ID NO: 490278 - RNA, 24 nt, Artificial Sequence
  Synthetic
gagaucaagcaggugggaagauga

SEQ ID NO: 490279 - RNA, 18 nt, Artificial Sequence
  Synthetic
uaaaaauacugaagauga

SEQ ID NO: 490280 - RNA, 19 nt, Artificial Sequence
  Synthetic
auaaaaauacugaagauga

SEQ ID NO: 490281 - RNA, 20 nt, Artificial Sequence
  Synthetic
cauaaaaauacugaagauga

SEQ ID NO: 490282 - RNA, 21 nt, Artificial Sequence
  Synthetic
ucauaaaaauacugaagauga

SEQ ID NO: 490283 - RNA, 22 nt, Artificial Sequence
  Synthetic
uucauaaaaauacugaagauga

SEQ ID NO: 490284 - RNA, 23 nt, Artificial Sequence
  Synthetic
uuucauaaaaauacugaagauga

SEQ ID NO: 490285 - RNA, 24 nt, Artificial Sequence
  Synthetic
uuuucauaaaaauacugaagauga

SEQ ID NO: 490286 - RNA, 18 nt, Artificial Sequence
  Synthetic
accauuagcugaagauga

SEQ ID NO: 490287 - RNA, 19 nt, Artificial Sequence
  Synthetic
aaccauuagcugaagauga

SEQ ID NO: 490288 - RNA, 20 nt, Artificial Sequence
  Synthetic
uaaccauuagcugaagauga

SEQ ID NO: 490289 - RNA, 21 nt, Artificial Sequence
  Synthetic
guaaccauuagcugaagauga

SEQ ID NO: 490290 - RNA, 22 nt, Artificial Sequence
  Synthetic
uguaaccauuagcugaagauga

SEQ ID NO: 490291 - RNA, 23 nt, Artificial Sequence
  Synthetic
auguaaccauuagcugaagauga

SEQ ID NO: 490292 - RNA, 24 nt, Artificial Sequence
  Synthetic
gauguaaccauuagcugaagauga

SEQ ID NO: 490293 - RNA, 18 nt, Artificial Sequence
  Synthetic
aaagagcaaauaagauga

SEQ ID NO: 490294 - RNA, 19 nt, Artificial Sequence
  Synthetic
caaagagcaaauaagauga

SEQ ID NO: 490295 - RNA, 20 nt, Artificial Sequence
  Synthetic
acaaagagcaaauaagauga

SEQ ID NO: 490296 - RNA, 21 nt, Artificial Sequence
  Synthetic
cacaaagagcaaauaagauga

SEQ ID NO: 490297 - RNA, 22 nt, Artificial Sequence
  Synthetic
acacaaagagcaaauaagauga

SEQ ID NO: 490298 - RNA, 23 nt, Artificial Sequence
  Synthetic
aacacaaagagcaaauaagauga

SEQ ID NO: 490299 - RNA, 24 nt, Artificial Sequence
  Synthetic
aaacacaaagagcaaauaagauga

SEQ ID NO: 490300 - RNA, 18 nt, Artificial Sequence
  Synthetic
uucuucuccauaagauga

SEQ ID NO: 490301 - RNA, 19 nt, Artificial Sequence
  Synthetic
uuucuucuccauaagauga

SEQ ID NO: 490302 - RNA, 20 nt, Artificial Sequence
  Synthetic
auuucuucuccauaagauga

SEQ ID NO: 490303 - RNA, 21 nt, Artificial Sequence
  Synthetic
uauuucuucuccauaagauga

SEQ ID NO: 490304 - RNA, 22 nt, Artificial Sequence
  Synthetic
guauuucuucuccauaagauga

SEQ ID NO: 490305 - RNA, 23 nt, Artificial Sequence
  Synthetic
uguauuucuucuccauaagauga

SEQ ID NO: 490306 - RNA, 24 nt, Artificial Sequence
  Synthetic
auguauuucuucuccauaagauga

SEQ ID NO: 490307 - RNA, 18 nt, Artificial Sequence
  Synthetic
acacuaacuuuaagauga

SEQ ID NO: 490308 - RNA, 19 nt, Artificial Sequence
  Synthetic
aacacuaacuuuaagauga

SEQ ID NO: 490309 - RNA, 20 nt, Artificial Sequence
  Synthetic
aaacacuaacuuuaagauga

SEQ ID NO: 490310 - RNA, 21 nt, Artificial Sequence
  Synthetic
gaaacacuaacuuuaagauga

SEQ ID NO: 490311 - RNA, 22 nt, Artificial Sequence
  Synthetic
ggaaacacuaacuuuaagauga

SEQ ID NO: 490312 - RNA, 23 nt, Artificial Sequence
  Synthetic
uggaaacacuaacuuuaagauga

SEQ ID NO: 490313 - RNA, 24 nt, Artificial Sequence
  Synthetic
uuggaaacacuaacuuuaagauga

SEQ ID NO: 490314 - RNA, 18 nt, Artificial Sequence
  Synthetic
gccccacaugacagauga

SEQ ID NO: 490315 - RNA, 19 nt, Artificial Sequence
  Synthetic
agccccacaugacagauga

SEQ ID NO: 490316 - RNA, 20 nt, Artificial Sequence
  Synthetic
uagccccacaugacagauga

SEQ ID NO: 490317 - RNA, 21 nt, Artificial Sequence
  Synthetic
uuagccccacaugacagauga

SEQ ID NO: 490318 - RNA, 22 nt, Artificial Sequence
  Synthetic
auuagccccacaugacagauga

SEQ ID NO: 490319 - RNA, 23 nt, Artificial Sequence
  Synthetic
uauuagccccacaugacagauga

SEQ ID NO: 490320 - RNA, 24 nt, Artificial Sequence
  Synthetic
uuauuagccccacaugacagauga

SEQ ID NO: 490321 - RNA, 18 nt, Artificial Sequence
  Synthetic
uaacuaaauaccagauga

SEQ ID NO: 490322 - RNA, 19 nt, Artificial Sequence
  Synthetic
cuaacuaaauaccagauga

SEQ ID NO: 490323 - RNA, 20 nt, Artificial Sequence
  Synthetic
ccuaacuaaauaccagauga

SEQ ID NO: 490324 - RNA, 21 nt, Artificial Sequence
  Synthetic
uccuaacuaaauaccagauga

SEQ ID NO: 490325 - RNA, 22 nt, Artificial Sequence
  Synthetic
uuccuaacuaaauaccagauga

SEQ ID NO: 490326 - RNA, 23 nt, Artificial Sequence
  Synthetic
auuccuaacuaaauaccagauga

SEQ ID NO: 490327 - RNA, 24 nt, Artificial Sequence
  Synthetic
aauuccuaacuaaauaccagauga

SEQ ID NO: 490328 - RNA, 18 nt, Artificial Sequence
  Synthetic
aaguaauuccccagauga

SEQ ID NO: 490329 - RNA, 19 nt, Artificial Sequence
  Synthetic
uaaguaauuccccagauga

SEQ ID NO: 490330 - RNA, 20 nt, Artificial Sequence
  Synthetic
uuaaguaauuccccagauga

SEQ ID NO: 490331 - RNA, 21 nt, Artificial Sequence
  Synthetic
uuuaaguaauuccccagauga

SEQ ID NO: 490332 - RNA, 22 nt, Artificial Sequence
  Synthetic
auuuaaguaauuccccagauga

SEQ ID NO: 490333 - RNA, 23 nt, Artificial Sequence
  Synthetic
cauuuaaguaauuccccagauga

SEQ ID NO: 490334 - RNA, 24 nt, Artificial Sequence
  Synthetic
gcauuuaaguaauuccccagauga

SEQ ID NO: 490335 - RNA, 18 nt, Artificial Sequence
  Synthetic
cagagaaugagcagauga

SEQ ID NO: 490336 - RNA, 19 nt, Artificial Sequence
  Synthetic
acagagaaugagcagauga

SEQ ID NO: 490337 - RNA, 20 nt, Artificial Sequence
  Synthetic
uacagagaaugagcagauga

SEQ ID NO: 490338 - RNA, 21 nt, Artificial Sequence
  Synthetic
guacagagaaugagcagauga

SEQ ID NO: 490339 - RNA, 22 nt, Artificial Sequence
  Synthetic
aguacagagaaugagcagauga

SEQ ID NO: 490340 - RNA, 23 nt, Artificial Sequence
  Synthetic
gaguacagagaaugagcagauga

SEQ ID NO: 490341 - RNA, 24 nt, Artificial Sequence
  Synthetic
ggaguacagagaaugagcagauga

SEQ ID NO: 490342 - RNA, 18 nt, Artificial Sequence
  Synthetic
gggcaaguuuucagauga

SEQ ID NO: 490343 - RNA, 19 nt, Artificial Sequence
  Synthetic
ggggcaaguuuucagauga

SEQ ID NO: 490344 - RNA, 20 nt, Artificial Sequence
  Synthetic
uggggcaaguuuucagauga

SEQ ID NO: 490345 - RNA, 21 nt, Artificial Sequence
  Synthetic
uuggggcaaguuuucagauga

SEQ ID NO: 490346 - RNA, 22 nt, Artificial Sequence
  Synthetic
uuuggggcaaguuuucagauga

SEQ ID NO: 490347 - RNA, 23 nt, Artificial Sequence
  Synthetic
cuuuggggcaaguuuucagauga

SEQ ID NO: 490348 - RNA, 24 nt, Artificial Sequence
  Synthetic
acuuuggggcaaguuuucagauga

SEQ ID NO: 490349 - RNA, 18 nt, Artificial Sequence
  Synthetic
gcguccaucaagagauga

SEQ ID NO: 490350 - RNA, 19 nt, Artificial Sequence
  Synthetic
agcguccaucaagagauga

SEQ ID NO: 490351 - RNA, 20 nt, Artificial Sequence
  Synthetic
gagcguccaucaagagauga

SEQ ID NO: 490352 - RNA, 21 nt, Artificial Sequence
  Synthetic
ugagcguccaucaagagauga

SEQ ID NO: 490353 - RNA, 22 nt, Artificial Sequence
  Synthetic
cugagcguccaucaagagauga

SEQ ID NO: 490354 - RNA, 23 nt, Artificial Sequence
  Synthetic
ccugagcguccaucaagagauga

SEQ ID NO: 490355 - RNA, 24 nt, Artificial Sequence
  Synthetic
accugagcguccaucaagagauga

SEQ ID NO: 490356 - RNA, 18 nt, Artificial Sequence
  Synthetic
ucugacucagagagauga

SEQ ID NO: 490357 - RNA, 19 nt, Artificial Sequence
  Synthetic
uucugacucagagagauga

SEQ ID NO: 490358 - RNA, 20 nt, Artificial Sequence
  Synthetic
cuucugacucagagagauga

SEQ ID NO: 490359 - RNA, 21 nt, Artificial Sequence
  Synthetic
acuucugacucagagagauga

SEQ ID NO: 490360 - RNA, 22 nt, Artificial Sequence
  Synthetic
uacuucugacucagagagauga

SEQ ID NO: 490361 - RNA, 23 nt, Artificial Sequence
  Synthetic
cuacuucugacucagagagauga

SEQ ID NO: 490362 - RNA, 24 nt, Artificial Sequence
  Synthetic
ucuacuucugacucagagagauga

SEQ ID NO: 490363 - RNA, 18 nt, Artificial Sequence
  Synthetic
gacauuuaauagagauga

SEQ ID NO: 490364 - RNA, 19 nt, Artificial Sequence
  Synthetic
ugacauuuaauagagauga

SEQ ID NO: 490365 - RNA, 20 nt, Artificial Sequence
  Synthetic
augacauuuaauagagauga

SEQ ID NO: 490366 - RNA, 21 nt, Artificial Sequence
  Synthetic
uaugacauuuaauagagauga

SEQ ID NO: 490367 - RNA, 22 nt, Artificial Sequence
  Synthetic
uuaugacauuuaauagagauga

SEQ ID NO: 490368 - RNA, 23 nt, Artificial Sequence
  Synthetic
cuuaugacauuuaauagagauga

SEQ ID NO: 490369 - RNA, 24 nt, Artificial Sequence
  Synthetic
ccuuaugacauuuaauagagauga

SEQ ID NO: 490370 - RNA, 18 nt, Artificial Sequence
  Synthetic
aaacaaagcaggagauga

SEQ ID NO: 490371 - RNA, 19 nt, Artificial Sequence
  Synthetic
uaaacaaagcaggagauga

SEQ ID NO: 490372 - RNA, 20 nt, Artificial Sequence
  Synthetic
auaaacaaagcaggagauga

SEQ ID NO: 490373 - RNA, 21 nt, Artificial Sequence
  Synthetic
uauaaacaaagcaggagauga

SEQ ID NO: 490374 - RNA, 22 nt, Artificial Sequence
  Synthetic
uuauaaacaaagcaggagauga

SEQ ID NO: 490375 - RNA, 23 nt, Artificial Sequence
  Synthetic
uuuauaaacaaagcaggagauga

SEQ ID NO: 490376 - RNA, 24 nt, Artificial Sequence
  Synthetic
cuuuauaaacaaagcaggagauga

SEQ ID NO: 490377 - RNA, 18 nt, Artificial Sequence
  Synthetic
ggauuagguaggagauga

SEQ ID NO: 490378 - RNA, 19 nt, Artificial Sequence
  Synthetic
aggauuagguaggagauga

SEQ ID NO: 490379 - RNA, 20 nt, Artificial Sequence
  Synthetic
caggauuagguaggagauga

SEQ ID NO: 490380 - RNA, 21 nt, Artificial Sequence
  Synthetic
gcaggauuagguaggagauga

SEQ ID NO: 490381 - RNA, 22 nt, Artificial Sequence
  Synthetic
ugcaggauuagguaggagauga

SEQ ID NO: 490382 - RNA, 23 nt, Artificial Sequence
  Synthetic
cugcaggauuagguaggagauga

SEQ ID NO: 490383 - RNA, 24 nt, Artificial Sequence
  Synthetic
ucugcaggauuagguaggagauga

SEQ ID NO: 490384 - RNA, 18 nt, Artificial Sequence
  Synthetic
gucucauguuggagauga

SEQ ID NO: 490385 - RNA, 19 nt, Artificial Sequence
  Synthetic
agucucauguuggagauga

SEQ ID NO: 490386 - RNA, 20 nt, Artificial Sequence
  Synthetic
aagucucauguuggagauga

SEQ ID NO: 490387 - RNA, 21 nt, Artificial Sequence
  Synthetic
aaagucucauguuggagauga

SEQ ID NO: 490388 - RNA, 22 nt, Artificial Sequence
  Synthetic
gaaagucucauguuggagauga

SEQ ID NO: 490389 - RNA, 23 nt, Artificial Sequence
  Synthetic
agaaagucucauguuggagauga

SEQ ID NO: 490390 - RNA, 24 nt, Artificial Sequence
  Synthetic
aagaaagucucauguuggagauga

SEQ ID NO: 490391 - RNA, 18 nt, Artificial Sequence
  Synthetic
uagaugauaaauagauga

SEQ ID NO: 490392 - RNA, 19 nt, Artificial Sequence
  Synthetic
auagaugauaaauagauga

SEQ ID NO: 490393 - RNA, 20 nt, Artificial Sequence
  Synthetic
uauagaugauaaauagauga

SEQ ID NO: 490394 - RNA, 21 nt, Artificial Sequence
  Synthetic
auauagaugauaaauagauga

SEQ ID NO: 490395 - RNA, 22 nt, Artificial Sequence
  Synthetic
gauauagaugauaaauagauga

SEQ ID NO: 490396 - RNA, 23 nt, Artificial Sequence
  Synthetic
ggauauagaugauaaauagauga

SEQ ID NO: 490397 - RNA, 24 nt, Artificial Sequence
  Synthetic
uggauauagaugauaaauagauga

SEQ ID NO: 490398 - RNA, 18 nt, Artificial Sequence
  Synthetic
acaacuauacauagauga

SEQ ID NO: 490399 - RNA, 19 nt, Artificial Sequence
  Synthetic
aacaacuauacauagauga

SEQ ID NO: 490400 - RNA, 20 nt, Artificial Sequence
  Synthetic
uaacaacuauacauagauga

SEQ ID NO: 490401 - RNA, 21 nt, Artificial Sequence
  Synthetic
uuaacaacuauacauagauga

SEQ ID NO: 490402 - RNA, 22 nt, Artificial Sequence
  Synthetic
auuaacaacuauacauagauga

SEQ ID NO: 490403 - RNA, 23 nt, Artificial Sequence
  Synthetic
uauuaacaacuauacauagauga

SEQ ID NO: 490404 - RNA, 24 nt, Artificial Sequence
  Synthetic
uuauuaacaacuauacauagauga

SEQ ID NO: 490405 - RNA, 18 nt, Artificial Sequence
  Synthetic
gacucuuguucuagauga

SEQ ID NO: 490406 - RNA, 19 nt, Artificial Sequence
  Synthetic
agacucuuguucuagauga

SEQ ID NO: 490407 - RNA, 20 nt, Artificial Sequence
  Synthetic
aagacucuuguucuagauga

SEQ ID NO: 490408 - RNA, 21 nt, Artificial Sequence
  Synthetic
aaagacucuuguucuagauga

SEQ ID NO: 490409 - RNA, 22 nt, Artificial Sequence
  Synthetic
gaaagacucuuguucuagauga

SEQ ID NO: 490410 - RNA, 23 nt, Artificial Sequence
  Synthetic
agaaagacucuuguucuagauga

SEQ ID NO: 490411 - RNA, 24 nt, Artificial Sequence
  Synthetic
aagaaagacucuuguucuagauga

SEQ ID NO: 490412 - RNA, 18 nt, Artificial Sequence
  Synthetic
guguccaucaguagauga

SEQ ID NO: 490413 - RNA, 19 nt, Artificial Sequence
  Synthetic
aguguccaucaguagauga

SEQ ID NO: 490414 - RNA, 20 nt, Artificial Sequence
  Synthetic
aaguguccaucaguagauga

SEQ ID NO: 490415 - RNA, 21 nt, Artificial Sequence
  Synthetic
uaaguguccaucaguagauga

SEQ ID NO: 490416 - RNA, 22 nt, Artificial Sequence
  Synthetic
cuaaguguccaucaguagauga

SEQ ID NO: 490417 - RNA, 23 nt, Artificial Sequence
  Synthetic
ccuaaguguccaucaguagauga

SEQ ID NO: 490418 - RNA, 24 nt, Artificial Sequence
  Synthetic
accuaaguguccaucaguagauga

SEQ ID NO: 490419 - RNA, 18 nt, Artificial Sequence
  Synthetic
acuuugccuaguagauga

SEQ ID NO: 490420 - RNA, 19 nt, Artificial Sequence
  Synthetic
aacuuugccuaguagauga

SEQ ID NO: 490421 - RNA, 20 nt, Artificial Sequence
  Synthetic
uaacuuugccuaguagauga

SEQ ID NO: 490422 - RNA, 21 nt, Artificial Sequence
  Synthetic
cuaacuuugccuaguagauga

SEQ ID NO: 490423 - RNA, 22 nt, Artificial Sequence
  Synthetic
gcuaacuuugccuaguagauga

SEQ ID NO: 490424 - RNA, 23 nt, Artificial Sequence
  Synthetic
agcuaacuuugccuaguagauga

SEQ ID NO: 490425 - RNA, 24 nt, Artificial Sequence
  Synthetic
cagcuaacuuugccuaguagauga

SEQ ID NO: 490426 - RNA, 18 nt, Artificial Sequence
  Synthetic
agauguggaaaacgauga

SEQ ID NO: 490427 - RNA, 19 nt, Artificial Sequence
  Synthetic
uagauguggaaaacgauga

SEQ ID NO: 490428 - RNA, 20 nt, Artificial Sequence
  Synthetic
guagauguggaaaacgauga

SEQ ID NO: 490429 - RNA, 21 nt, Artificial Sequence
  Synthetic
aguagauguggaaaacgauga

SEQ ID NO: 490430 - RNA, 22 nt, Artificial Sequence
  Synthetic
gaguagauguggaaaacgauga

SEQ ID NO: 490431 - RNA, 23 nt, Artificial Sequence
  Synthetic
ugaguagauguggaaaacgauga

SEQ ID NO: 490432 - RNA, 24 nt, Artificial Sequence
  Synthetic
uugaguagauguggaaaacgauga

SEQ ID NO: 490433 - RNA, 18 nt, Artificial Sequence
  Synthetic
uggauuguugaucgauga

SEQ ID NO: 490434 - RNA, 19 nt, Artificial Sequence
  Synthetic
cuggauuguugaucgauga

SEQ ID NO: 490435 - RNA, 20 nt, Artificial Sequence
  Synthetic
gcuggauuguugaucgauga

SEQ ID NO: 490436 - RNA, 21 nt, Artificial Sequence
  Synthetic
ggcuggauuguugaucgauga

SEQ ID NO: 490437 - RNA, 22 nt, Artificial Sequence
  Synthetic
gggcuggauuguugaucgauga

SEQ ID NO: 490438 - RNA, 23 nt, Artificial Sequence
  Synthetic
agggcuggauuguugaucgauga

SEQ ID NO: 490439 - RNA, 24 nt, Artificial Sequence
  Synthetic
aagggcuggauuguugaucgauga

SEQ ID NO: 490440 - RNA, 18 nt, Artificial Sequence
  Synthetic
ucucagugaaaaggauga

SEQ ID NO: 490441 - RNA, 19 nt, Artificial Sequence
  Synthetic
aucucagugaaaaggauga

SEQ ID NO: 490442 - RNA, 20 nt, Artificial Sequence
  Synthetic
gaucucagugaaaaggauga

SEQ ID NO: 490443 - RNA, 21 nt, Artificial Sequence
  Synthetic
ugaucucagugaaaaggauga

SEQ ID NO: 490444 - RNA, 22 nt, Artificial Sequence
  Synthetic
augaucucagugaaaaggauga

SEQ ID NO: 490445 - RNA, 23 nt, Artificial Sequence
  Synthetic
gaugaucucagugaaaaggauga

SEQ ID NO: 490446 - RNA, 24 nt, Artificial Sequence
  Synthetic
ggaugaucucagugaaaaggauga

SEQ ID NO: 490447 - RNA, 18 nt, Artificial Sequence
  Synthetic
agcauauucagaggauga

SEQ ID NO: 490448 - RNA, 19 nt, Artificial Sequence
  Synthetic
aagcauauucagaggauga

SEQ ID NO: 490449 - RNA, 20 nt, Artificial Sequence
  Synthetic
gaagcauauucagaggauga

SEQ ID NO: 490450 - RNA, 21 nt, Artificial Sequence
  Synthetic
ugaagcauauucagaggauga

SEQ ID NO: 490451 - RNA, 22 nt, Artificial Sequence
  Synthetic
cugaagcauauucagaggauga

SEQ ID NO: 490452 - RNA, 23 nt, Artificial Sequence
  Synthetic
gcugaagcauauucagaggauga

SEQ ID NO: 490453 - RNA, 24 nt, Artificial Sequence
  Synthetic
agcugaagcauauucagaggauga

SEQ ID NO: 490454 - RNA, 18 nt, Artificial Sequence
  Synthetic
caauguuuuggaggauga

SEQ ID NO: 490455 - RNA, 19 nt, Artificial Sequence
  Synthetic
ucaauguuuuggaggauga

SEQ ID NO: 490456 - RNA, 20 nt, Artificial Sequence
  Synthetic
uucaauguuuuggaggauga

SEQ ID NO: 490457 - RNA, 21 nt, Artificial Sequence
  Synthetic
cuucaauguuuuggaggauga

SEQ ID NO: 490458 - RNA, 22 nt, Artificial Sequence
  Synthetic
gcuucaauguuuuggaggauga

SEQ ID NO: 490459 - RNA, 23 nt, Artificial Sequence
  Synthetic
ugcuucaauguuuuggaggauga

SEQ ID NO: 490460 - RNA, 24 nt, Artificial Sequence
  Synthetic
cugcuucaauguuuuggaggauga

SEQ ID NO: 490461 - RNA, 18 nt, Artificial Sequence
  Synthetic
aaaguucucuuaggauga

SEQ ID NO: 490462 - RNA, 19 nt, Artificial Sequence
  Synthetic
aaaaguucucuuaggauga

SEQ ID NO: 490463 - RNA, 20 nt, Artificial Sequence
  Synthetic
aaaaaguucucuuaggauga

SEQ ID NO: 490464 - RNA, 21 nt, Artificial Sequence
  Synthetic
aaaaaaguucucuuaggauga

SEQ ID NO: 490465 - RNA, 22 nt, Artificial Sequence
  Synthetic
uaaaaaaguucucuuaggauga

SEQ ID NO: 490466 - RNA, 23 nt, Artificial Sequence
  Synthetic
cuaaaaaaguucucuuaggauga

SEQ ID NO: 490467 - RNA, 24 nt, Artificial Sequence
  Synthetic
acuaaaaaaguucucuuaggauga

SEQ ID NO: 490468 - RNA, 18 nt, Artificial Sequence
  Synthetic
ucuaggcccaagggauga

SEQ ID NO: 490469 - RNA, 19 nt, Artificial Sequence
  Synthetic
aucuaggcccaagggauga

SEQ ID NO: 490470 - RNA, 20 nt, Artificial Sequence
  Synthetic
caucuaggcccaagggauga

SEQ ID NO: 490471 - RNA, 21 nt, Artificial Sequence
  Synthetic
acaucuaggcccaagggauga

SEQ ID NO: 490472 - RNA, 22 nt, Artificial Sequence
  Synthetic
uacaucuaggcccaagggauga

SEQ ID NO: 490473 - RNA, 23 nt, Artificial Sequence
  Synthetic
cuacaucuaggcccaagggauga

SEQ ID NO: 490474 - RNA, 24 nt, Artificial Sequence
  Synthetic
acuacaucuaggcccaagggauga

SEQ ID NO: 490475 - RNA, 18 nt, Artificial Sequence
  Synthetic
gggcugugaucgggauga

SEQ ID NO: 490476 - RNA, 19 nt, Artificial Sequence
  Synthetic
ggggcugugaucgggauga

SEQ ID NO: 490477 - RNA, 20 nt, Artificial Sequence
  Synthetic
uggggcugugaucgggauga

SEQ ID NO: 490478 - RNA, 21 nt, Artificial Sequence
  Synthetic
cuggggcugugaucgggauga

SEQ ID NO: 490479 - RNA, 22 nt, Artificial Sequence
  Synthetic
ccuggggcugugaucgggauga

SEQ ID NO: 490480 - RNA, 23 nt, Artificial Sequence
  Synthetic
uccuggggcugugaucgggauga

SEQ ID NO: 490481 - RNA, 24 nt, Artificial Sequence
  Synthetic
uuccuggggcugugaucgggauga

SEQ ID NO: 490482 - RNA, 18 nt, Artificial Sequence
  Synthetic
ucacgucugcugggauga

SEQ ID NO: 490483 - RNA, 19 nt, Artificial Sequence
  Synthetic
cucacgucugcugggauga

SEQ ID NO: 490484 - RNA, 20 nt, Artificial Sequence
  Synthetic
acucacgucugcugggauga

SEQ ID NO: 490485 - RNA, 21 nt, Artificial Sequence
  Synthetic
cacucacgucugcugggauga

SEQ ID NO: 490486 - RNA, 22 nt, Artificial Sequence
  Synthetic
ucacucacgucugcugggauga

SEQ ID NO: 490487 - RNA, 23 nt, Artificial Sequence
  Synthetic
cucacucacgucugcugggauga

SEQ ID NO: 490488 - RNA, 24 nt, Artificial Sequence
  Synthetic
acucacucacgucugcugggauga

SEQ ID NO: 490489 - RNA, 18 nt, Artificial Sequence
  Synthetic
ugaaaguaagugggauga

SEQ ID NO: 490490 - RNA, 19 nt, Artificial Sequence
  Synthetic
uugaaaguaagugggauga

SEQ ID NO: 490491 - RNA, 20 nt, Artificial Sequence
  Synthetic
uuugaaaguaagugggauga

SEQ ID NO: 490492 - RNA, 21 nt, Artificial Sequence
  Synthetic
cuuugaaaguaagugggauga

SEQ ID NO: 490493 - RNA, 22 nt, Artificial Sequence
  Synthetic
acuuugaaaguaagugggauga

SEQ ID NO: 490494 - RNA, 23 nt, Artificial Sequence
  Synthetic
aacuuugaaaguaagugggauga

SEQ ID NO: 490495 - RNA, 24 nt, Artificial Sequence
  Synthetic
uaacuuugaaaguaagugggauga

SEQ ID NO: 490496 - RNA, 18 nt, Artificial Sequence
  Synthetic
uaauauaaaaauggauga

SEQ ID NO: 490497 - RNA, 19 nt, Artificial Sequence
  Synthetic
uuaauauaaaaauggauga

SEQ ID NO: 490498 - RNA, 20 nt, Artificial Sequence
  Synthetic
uuuaauauaaaaauggauga

SEQ ID NO: 490499 - RNA, 21 nt, Artificial Sequence
  Synthetic
uuuuaauauaaaaauggauga

SEQ ID NO: 490500 - RNA, 22 nt, Artificial Sequence
  Synthetic
guuuuaauauaaaaauggauga

SEQ ID NO: 490501 - RNA, 23 nt, Artificial Sequence
  Synthetic
aguuuuaauauaaaaauggauga

SEQ ID NO: 490502 - RNA, 24 nt, Artificial Sequence
  Synthetic
gaguuuuaauauaaaaauggauga

SEQ ID NO: 490503 - RNA, 18 nt, Artificial Sequence
  Synthetic
augggagcccaaugauga

SEQ ID NO: 490504 - RNA, 19 nt, Artificial Sequence
  Synthetic
caugggagcccaaugauga

SEQ ID NO: 490505 - RNA, 20 nt, Artificial Sequence
  Synthetic
gcaugggagcccaaugauga

SEQ ID NO: 490506 - RNA, 21 nt, Artificial Sequence
  Synthetic
ggcaugggagcccaaugauga

SEQ ID NO: 490507 - RNA, 22 nt, Artificial Sequence
  Synthetic
gggcaugggagcccaaugauga

SEQ ID NO: 490508 - RNA, 23 nt, Artificial Sequence
  Synthetic
agggcaugggagcccaaugauga

SEQ ID NO: 490509 - RNA, 24 nt, Artificial Sequence
  Synthetic
aagggcaugggagcccaaugauga

SEQ ID NO: 490510 - RNA, 18 nt, Artificial Sequence
  Synthetic
ucuacucagcaaugauga

SEQ ID NO: 490511 - RNA, 19 nt, Artificial Sequence
  Synthetic
cucuacucagcaaugauga

SEQ ID NO: 490512 - RNA, 20 nt, Artificial Sequence
  Synthetic
ccucuacucagcaaugauga

SEQ ID NO: 490513 - RNA, 21 nt, Artificial Sequence
  Synthetic
accucuacucagcaaugauga

SEQ ID NO: 490514 - RNA, 22 nt, Artificial Sequence
  Synthetic
aaccucuacucagcaaugauga

SEQ ID NO: 490515 - RNA, 23 nt, Artificial Sequence
  Synthetic
uaaccucuacucagcaaugauga

SEQ ID NO: 490516 - RNA, 24 nt, Artificial Sequence
  Synthetic
cuaaccucuacucagcaaugauga

SEQ ID NO: 490517 - RNA, 18 nt, Artificial Sequence
  Synthetic
uauaccaccuccugauga

SEQ ID NO: 490518 - RNA, 19 nt, Artificial Sequence
  Synthetic
auauaccaccuccugauga

SEQ ID NO: 490519 - RNA, 20 nt, Artificial Sequence
  Synthetic
uauauaccaccuccugauga

SEQ ID NO: 490520 - RNA, 21 nt, Artificial Sequence
  Synthetic
uuauauaccaccuccugauga

SEQ ID NO: 490521 - RNA, 22 nt, Artificial Sequence
  Synthetic
auuauauaccaccuccugauga

SEQ ID NO: 490522 - RNA, 23 nt, Artificial Sequence
  Synthetic
cauuauauaccaccuccugauga

SEQ ID NO: 490523 - RNA, 24 nt, Artificial Sequence
  Synthetic
gcauuauauaccaccuccugauga

SEQ ID NO: 490524 - RNA, 18 nt, Artificial Sequence
  Synthetic
aguuccuuuaugugauga

SEQ ID NO: 490525 - RNA, 19 nt, Artificial Sequence
  Synthetic
caguuccuuuaugugauga

SEQ ID NO: 490526 - RNA, 20 nt, Artificial Sequence
  Synthetic
ucaguuccuuuaugugauga

SEQ ID NO: 490527 - RNA, 21 nt, Artificial Sequence
  Synthetic
gucaguuccuuuaugugauga

SEQ ID NO: 490528 - RNA, 22 nt, Artificial Sequence
  Synthetic
agucaguuccuuuaugugauga

SEQ ID NO: 490529 - RNA, 23 nt, Artificial Sequence
  Synthetic
aagucaguuccuuuaugugauga

SEQ ID NO: 490530 - RNA, 24 nt, Artificial Sequence
  Synthetic
gaagucaguuccuuuaugugauga

SEQ ID NO: 490531 - RNA, 18 nt, Artificial Sequence
  Synthetic
auaacauaauauugauga

SEQ ID NO: 490532 - RNA, 19 nt, Artificial Sequence
  Synthetic
cauaacauaauauugauga

SEQ ID NO: 490533 - RNA, 20 nt, Artificial Sequence
  Synthetic
gcauaacauaauauugauga

SEQ ID NO: 490534 - RNA, 21 nt, Artificial Sequence
  Synthetic
agcauaacauaauauugauga

SEQ ID NO: 490535 - RNA, 22 nt, Artificial Sequence
  Synthetic
uagcauaacauaauauugauga

SEQ ID NO: 490536 - RNA, 23 nt, Artificial Sequence
  Synthetic
cuagcauaacauaauauugauga

SEQ ID NO: 490537 - RNA, 24 nt, Artificial Sequence
  Synthetic
gcuagcauaacauaauauugauga

SEQ ID NO: 490538 - RNA, 18 nt, Artificial Sequence
  Synthetic
ucagacaaaaguugauga

SEQ ID NO: 490539 - RNA, 19 nt, Artificial Sequence
  Synthetic
gucagacaaaaguugauga

SEQ ID NO: 490540 - RNA, 20 nt, Artificial Sequence
  Synthetic
agucagacaaaaguugauga

SEQ ID NO: 490541 - RNA, 21 nt, Artificial Sequence
  Synthetic
aagucagacaaaaguugauga

SEQ ID NO: 490542 - RNA, 22 nt, Artificial Sequence
  Synthetic
uaagucagacaaaaguugauga

SEQ ID NO: 490543 - RNA, 23 nt, Artificial Sequence
  Synthetic
cuaagucagacaaaaguugauga

SEQ ID NO: 490544 - RNA, 24 nt, Artificial Sequence
  Synthetic
ucuaagucagacaaaaguugauga

SEQ ID NO: 490545 - RNA, 18 nt, Artificial Sequence
  Synthetic
auauuugcaaaaauauga

SEQ ID NO: 490546 - RNA, 19 nt, Artificial Sequence
  Synthetic
uauauuugcaaaaauauga

SEQ ID NO: 490547 - RNA, 20 nt, Artificial Sequence
  Synthetic
auauauuugcaaaaauauga

SEQ ID NO: 490548 - RNA, 21 nt, Artificial Sequence
  Synthetic
aauauauuugcaaaaauauga

SEQ ID NO: 490549 - RNA, 22 nt, Artificial Sequence
  Synthetic
aaauauauuugcaaaaauauga

SEQ ID NO: 490550 - RNA, 23 nt, Artificial Sequence
  Synthetic
aaaauauauuugcaaaaauauga

SEQ ID NO: 490551 - RNA, 24 nt, Artificial Sequence
  Synthetic
aaaaauauauuugcaaaaauauga

SEQ ID NO: 490552 - RNA, 18 nt, Artificial Sequence
  Synthetic
agucaagguaaaauauga

SEQ ID NO: 490553 - RNA, 19 nt, Artificial Sequence
  Synthetic
uagucaagguaaaauauga

SEQ ID NO: 490554 - RNA, 20 nt, Artificial Sequence
  Synthetic
auagucaagguaaaauauga

SEQ ID NO: 490555 - RNA, 21 nt, Artificial Sequence
  Synthetic
aauagucaagguaaaauauga

SEQ ID NO: 490556 - RNA, 22 nt, Artificial Sequence
  Synthetic
aaauagucaagguaaaauauga

SEQ ID NO: 490557 - RNA, 23 nt, Artificial Sequence
  Synthetic
aaaauagucaagguaaaauauga

SEQ ID NO: 490558 - RNA, 24 nt, Artificial Sequence
  Synthetic
caaaauagucaagguaaaauauga

SEQ ID NO: 490559 - RNA, 18 nt, Artificial Sequence
  Synthetic
cucaacucucaaauauga

SEQ ID NO: 490560 - RNA, 19 nt, Artificial Sequence
  Synthetic
ucucaacucucaaauauga

SEQ ID NO: 490561 - RNA, 20 nt, Artificial Sequence
  Synthetic
uucucaacucucaaauauga

SEQ ID NO: 490562 - RNA, 21 nt, Artificial Sequence
  Synthetic
uuucucaacucucaaauauga

SEQ ID NO: 490563 - RNA, 22 nt, Artificial Sequence
  Synthetic
uuuucucaacucucaaauauga

SEQ ID NO: 490564 - RNA, 23 nt, Artificial Sequence
  Synthetic
uuuuucucaacucucaaauauga

SEQ ID NO: 490565 - RNA, 24 nt, Artificial Sequence
  Synthetic
auuuuucucaacucucaaauauga

SEQ ID NO: 490566 - RNA, 18 nt, Artificial Sequence
  Synthetic
aucuaccuagaaauauga

SEQ ID NO: 490567 - RNA, 19 nt, Artificial Sequence
  Synthetic
caucuaccuagaaauauga

SEQ ID NO: 490568 - RNA, 20 nt, Artificial Sequence
  Synthetic
acaucuaccuagaaauauga

SEQ ID NO: 490569 - RNA, 21 nt, Artificial Sequence
  Synthetic
aacaucuaccuagaaauauga

SEQ ID NO: 490570 - RNA, 22 nt, Artificial Sequence
  Synthetic
caacaucuaccuagaaauauga

SEQ ID NO: 490571 - RNA, 23 nt, Artificial Sequence
  Synthetic
gcaacaucuaccuagaaauauga

SEQ ID NO: 490572 - RNA, 24 nt, Artificial Sequence
  Synthetic
ggcaacaucuaccuagaaauauga

SEQ ID NO: 490573 - RNA, 18 nt, Artificial Sequence
  Synthetic
auuuuauugcccauauga

SEQ ID NO: 490574 - RNA, 19 nt, Artificial Sequence
  Synthetic
cauuuuauugcccauauga

SEQ ID NO: 490575 - RNA, 20 nt, Artificial Sequence
  Synthetic
acauuuuauugcccauauga

SEQ ID NO: 490576 - RNA, 21 nt, Artificial Sequence
  Synthetic
cacauuuuauugcccauauga

SEQ ID NO: 490577 - RNA, 22 nt, Artificial Sequence
  Synthetic
acacauuuuauugcccauauga

SEQ ID NO: 490578 - RNA, 23 nt, Artificial Sequence
  Synthetic
uacacauuuuauugcccauauga

SEQ ID NO: 490579 - RNA, 24 nt, Artificial Sequence
  Synthetic
auacacauuuuauugcccauauga

SEQ ID NO: 490580 - RNA, 18 nt, Artificial Sequence
  Synthetic
uuuagauugugcauauga

SEQ ID NO: 490581 - RNA, 19 nt, Artificial Sequence
  Synthetic
uuuuagauugugcauauga

SEQ ID NO: 490582 - RNA, 20 nt, Artificial Sequence
  Synthetic
uuuuuagauugugcauauga

SEQ ID NO: 490583 - RNA, 21 nt, Artificial Sequence
  Synthetic
guuuuuagauugugcauauga

SEQ ID NO: 490584 - RNA, 22 nt, Artificial Sequence
  Synthetic
uguuuuuagauugugcauauga

SEQ ID NO: 490585 - RNA, 23 nt, Artificial Sequence
  Synthetic
auguuuuuagauugugcauauga

SEQ ID NO: 490586 - RNA, 24 nt, Artificial Sequence
  Synthetic
gauguuuuuagauugugcauauga

SEQ ID NO: 490587 - RNA, 18 nt, Artificial Sequence
  Synthetic
gauaaucauaucauauga

SEQ ID NO: 490588 - RNA, 19 nt, Artificial Sequence
  Synthetic
agauaaucauaucauauga

SEQ ID NO: 490589 - RNA, 20 nt, Artificial Sequence
  Synthetic
uagauaaucauaucauauga

SEQ ID NO: 490590 - RNA, 21 nt, Artificial Sequence
  Synthetic
auagauaaucauaucauauga

SEQ ID NO: 490591 - RNA, 22 nt, Artificial Sequence
  Synthetic
gauagauaaucauaucauauga

SEQ ID NO: 490592 - RNA, 23 nt, Artificial Sequence
  Synthetic
ugauagauaaucauaucauauga

SEQ ID NO: 490593 - RNA, 24 nt, Artificial Sequence
  Synthetic
uugauagauaaucauaucauauga

SEQ ID NO: 490594 - RNA, 18 nt, Artificial Sequence
  Synthetic
cuuauucaucucauauga

SEQ ID NO: 490595 - RNA, 19 nt, Artificial Sequence
  Synthetic
acuuauucaucucauauga

SEQ ID NO: 490596 - RNA, 20 nt, Artificial Sequence
  Synthetic
gacuuauucaucucauauga

SEQ ID NO: 490597 - RNA, 21 nt, Artificial Sequence
  Synthetic
ggacuuauucaucucauauga

SEQ ID NO: 490598 - RNA, 22 nt, Artificial Sequence
  Synthetic
aggacuuauucaucucauauga

SEQ ID NO: 490599 - RNA, 23 nt, Artificial Sequence
  Synthetic
uaggacuuauucaucucauauga

SEQ ID NO: 490600 - RNA, 24 nt, Artificial Sequence
  Synthetic
guaggacuuauucaucucauauga

SEQ ID NO: 490601 - RNA, 18 nt, Artificial Sequence
  Synthetic
caacagccaaggauauga

SEQ ID NO: 490602 - RNA, 19 nt, Artificial Sequence
  Synthetic
ccaacagccaaggauauga

SEQ ID NO: 490603 - RNA, 20 nt, Artificial Sequence
  Synthetic
accaacagccaaggauauga

SEQ ID NO: 490604 - RNA, 21 nt, Artificial Sequence
  Synthetic
gaccaacagccaaggauauga

SEQ ID NO: 490605 - RNA, 22 nt, Artificial Sequence
  Synthetic
ggaccaacagccaaggauauga

SEQ ID NO: 490606 - RNA, 23 nt, Artificial Sequence
  Synthetic
uggaccaacagccaaggauauga

SEQ ID NO: 490607 - RNA, 24 nt, Artificial Sequence
  Synthetic
uuggaccaacagccaaggauauga

SEQ ID NO: 490608 - RNA, 18 nt, Artificial Sequence
  Synthetic
ugaguguguaugauauga

SEQ ID NO: 490609 - RNA, 19 nt, Artificial Sequence
  Synthetic
cugaguguguaugauauga

SEQ ID NO: 490610 - RNA, 20 nt, Artificial Sequence
  Synthetic
gcugaguguguaugauauga

SEQ ID NO: 490611 - RNA, 21 nt, Artificial Sequence
  Synthetic
ggcugaguguguaugauauga

SEQ ID NO: 490612 - RNA, 22 nt, Artificial Sequence
  Synthetic
aggcugaguguguaugauauga

SEQ ID NO: 490613 - RNA, 23 nt, Artificial Sequence
  Synthetic
uaggcugaguguguaugauauga

SEQ ID NO: 490614 - RNA, 24 nt, Artificial Sequence
  Synthetic
cuaggcugaguguguaugauauga

SEQ ID NO: 490615 - RNA, 18 nt, Artificial Sequence
  Synthetic
caaaaguggaauauauga

SEQ ID NO: 490616 - RNA, 19 nt, Artificial Sequence
  Synthetic
ucaaaaguggaauauauga

SEQ ID NO: 490617 - RNA, 20 nt, Artificial Sequence
  Synthetic
cucaaaaguggaauauauga

SEQ ID NO: 490618 - RNA, 21 nt, Artificial Sequence
  Synthetic
acucaaaaguggaauauauga

SEQ ID NO: 490619 - RNA, 22 nt, Artificial Sequence
  Synthetic
uacucaaaaguggaauauauga

SEQ ID NO: 490620 - RNA, 23 nt, Artificial Sequence
  Synthetic
auacucaaaaguggaauauauga

SEQ ID NO: 490621 - RNA, 24 nt, Artificial Sequence
  Synthetic
cauacucaaaaguggaauauauga

SEQ ID NO: 490622 - RNA, 18 nt, Artificial Sequence
  Synthetic
auaaugaugaauauauga

SEQ ID NO: 490623 - RNA, 19 nt, Artificial Sequence
  Synthetic
aauaaugaugaauauauga

SEQ ID NO: 490624 - RNA, 20 nt, Artificial Sequence
  Synthetic
aaauaaugaugaauauauga

SEQ ID NO: 490625 - RNA, 21 nt, Artificial Sequence
  Synthetic
aaaauaaugaugaauauauga

SEQ ID NO: 490626 - RNA, 22 nt, Artificial Sequence
  Synthetic
uaaaauaaugaugaauauauga

SEQ ID NO: 490627 - RNA, 23 nt, Artificial Sequence
  Synthetic
auaaaauaaugaugaauauauga

SEQ ID NO: 490628 - RNA, 24 nt, Artificial Sequence
  Synthetic
aauaaaauaaugaugaauauauga

SEQ ID NO: 490629 - RNA, 18 nt, Artificial Sequence
  Synthetic
auucuaauacauauauga

SEQ ID NO: 490630 - RNA, 19 nt, Artificial Sequence
  Synthetic
cauucuaauacauauauga

SEQ ID NO: 490631 - RNA, 20 nt, Artificial Sequence
  Synthetic
ucauucuaauacauauauga

SEQ ID NO: 490632 - RNA, 21 nt, Artificial Sequence
  Synthetic
uucauucuaauacauauauga

SEQ ID NO: 490633 - RNA, 22 nt, Artificial Sequence
  Synthetic
auucauucuaauacauauauga

SEQ ID NO: 490634 - RNA, 23 nt, Artificial Sequence
  Synthetic
uauucauucuaauacauauauga

SEQ ID NO: 490635 - RNA, 24 nt, Artificial Sequence
  Synthetic
uuauucauucuaauacauauauga

SEQ ID NO: 490636 - RNA, 18 nt, Artificial Sequence
  Synthetic
uagacaguccauauauga

SEQ ID NO: 490637 - RNA, 19 nt, Artificial Sequence
  Synthetic
cuagacaguccauauauga

SEQ ID NO: 490638 - RNA, 20 nt, Artificial Sequence
  Synthetic
acuagacaguccauauauga

SEQ ID NO: 490639 - RNA, 21 nt, Artificial Sequence
  Synthetic
aacuagacaguccauauauga

SEQ ID NO: 490640 - RNA, 22 nt, Artificial Sequence
  Synthetic
uaacuagacaguccauauauga

SEQ ID NO: 490641 - RNA, 23 nt, Artificial Sequence
  Synthetic
cuaacuagacaguccauauauga

SEQ ID NO: 490642 - RNA, 24 nt, Artificial Sequence
  Synthetic
acuaacuagacaguccauauauga

SEQ ID NO: 490643 - RNA, 18 nt, Artificial Sequence
  Synthetic
ggggacaaagguauauga

SEQ ID NO: 490644 - RNA, 19 nt, Artificial Sequence
  Synthetic
uggggacaaagguauauga

SEQ ID NO: 490645 - RNA, 20 nt, Artificial Sequence
  Synthetic
cuggggacaaagguauauga

SEQ ID NO: 490646 - RNA, 21 nt, Artificial Sequence
  Synthetic
ucuggggacaaagguauauga

SEQ ID NO: 490647 - RNA, 22 nt, Artificial Sequence
  Synthetic
uucuggggacaaagguauauga

SEQ ID NO: 490648 - RNA, 23 nt, Artificial Sequence
  Synthetic
uuucuggggacaaagguauauga

SEQ ID NO: 490649 - RNA, 24 nt, Artificial Sequence
  Synthetic
auuucuggggacaaagguauauga

SEQ ID NO: 490650 - RNA, 18 nt, Artificial Sequence
  Synthetic
uucucagaacuuauauga

SEQ ID NO: 490651 - RNA, 19 nt, Artificial Sequence
  Synthetic
cuucucagaacuuauauga

SEQ ID NO: 490652 - RNA, 20 nt, Artificial Sequence
  Synthetic
ucuucucagaacuuauauga

SEQ ID NO: 490653 - RNA, 21 nt, Artificial Sequence
  Synthetic
uucuucucagaacuuauauga

SEQ ID NO: 490654 - RNA, 22 nt, Artificial Sequence
  Synthetic
uuucuucucagaacuuauauga

SEQ ID NO: 490655 - RNA, 23 nt, Artificial Sequence
  Synthetic
auuucuucucagaacuuauauga

SEQ ID NO: 490656 - RNA, 24 nt, Artificial Sequence
  Synthetic
uauuucuucucagaacuuauauga

SEQ ID NO: 490657 - RNA, 18 nt, Artificial Sequence
  Synthetic
gaauccugguaacuauga

SEQ ID NO: 490658 - RNA, 19 nt, Artificial Sequence
  Synthetic
ugaauccugguaacuauga

SEQ ID NO: 490659 - RNA, 20 nt, Artificial Sequence
  Synthetic
cugaauccugguaacuauga

SEQ ID NO: 490660 - RNA, 21 nt, Artificial Sequence
  Synthetic
ucugaauccugguaacuauga

SEQ ID NO: 490661 - RNA, 22 nt, Artificial Sequence
  Synthetic
gucugaauccugguaacuauga

SEQ ID NO: 490662 - RNA, 23 nt, Artificial Sequence
  Synthetic
ugucugaauccugguaacuauga

SEQ ID NO: 490663 - RNA, 24 nt, Artificial Sequence
  Synthetic
augucugaauccugguaacuauga

SEQ ID NO: 490664 - RNA, 18 nt, Artificial Sequence
  Synthetic
uuauugaauacacuauga

SEQ ID NO: 490665 - RNA, 19 nt, Artificial Sequence
  Synthetic
uuuauugaauacacuauga

SEQ ID NO: 490666 - RNA, 20 nt, Artificial Sequence
  Synthetic
auuuauugaauacacuauga

SEQ ID NO: 490667 - RNA, 21 nt, Artificial Sequence
  Synthetic
aauuuauugaauacacuauga

SEQ ID NO: 490668 - RNA, 22 nt, Artificial Sequence
  Synthetic
uaauuuauugaauacacuauga

SEQ ID NO: 490669 - RNA, 23 nt, Artificial Sequence
  Synthetic
auaauuuauugaauacacuauga

SEQ ID NO: 490670 - RNA, 24 nt, Artificial Sequence
  Synthetic
aauaauuuauugaauacacuauga

SEQ ID NO: 490671 - RNA, 18 nt, Artificial Sequence
  Synthetic
aagaacucuauacuauga

SEQ ID NO: 490672 - RNA, 19 nt, Artificial Sequence
  Synthetic
caagaacucuauacuauga

SEQ ID NO: 490673 - RNA, 20 nt, Artificial Sequence
  Synthetic
gcaagaacucuauacuauga

SEQ ID NO: 490674 - RNA, 21 nt, Artificial Sequence
  Synthetic
agcaagaacucuauacuauga

SEQ ID NO: 490675 - RNA, 22 nt, Artificial Sequence
  Synthetic
uagcaagaacucuauacuauga

SEQ ID NO: 490676 - RNA, 23 nt, Artificial Sequence
  Synthetic
cuagcaagaacucuauacuauga

SEQ ID NO: 490677 - RNA, 24 nt, Artificial Sequence
  Synthetic
ccuagcaagaacucuauacuauga

SEQ ID NO: 490678 - RNA, 18 nt, Artificial Sequence
  Synthetic
uucccaccccaccuauga

SEQ ID NO: 490679 - RNA, 19 nt, Artificial Sequence
  Synthetic
auucccaccccaccuauga

SEQ ID NO: 490680 - RNA, 20 nt, Artificial Sequence
  Synthetic
aauucccaccccaccuauga

SEQ ID NO: 490681 - RNA, 21 nt, Artificial Sequence
  Synthetic
caauucccaccccaccuauga

SEQ ID NO: 490682 - RNA, 22 nt, Artificial Sequence
  Synthetic
ucaauucccaccccaccuauga

SEQ ID NO: 490683 - RNA, 23 nt, Artificial Sequence
  Synthetic
uucaauucccaccccaccuauga

SEQ ID NO: 490684 - RNA, 24 nt, Artificial Sequence
  Synthetic
guucaauucccaccccaccuauga

SEQ ID NO: 490685 - RNA, 18 nt, Artificial Sequence
  Synthetic
ucgauaaaauggcuauga

SEQ ID NO: 490686 - RNA, 19 nt, Artificial Sequence
  Synthetic
uucgauaaaauggcuauga

SEQ ID NO: 490687 - RNA, 20 nt, Artificial Sequence
  Synthetic
cuucgauaaaauggcuauga

SEQ ID NO: 490688 - RNA, 21 nt, Artificial Sequence
  Synthetic
ccuucgauaaaauggcuauga

SEQ ID NO: 490689 - RNA, 22 nt, Artificial Sequence
  Synthetic
cccuucgauaaaauggcuauga

SEQ ID NO: 490690 - RNA, 23 nt, Artificial Sequence
  Synthetic
ucccuucgauaaaauggcuauga

SEQ ID NO: 490691 - RNA, 24 nt, Artificial Sequence
  Synthetic
gucccuucgauaaaauggcuauga

SEQ ID NO: 490692 - RNA, 18 nt, Artificial Sequence
  Synthetic
uauuuucaauaucuauga

SEQ ID NO: 490693 - RNA, 19 nt, Artificial Sequence
  Synthetic
auauuuucaauaucuauga

SEQ ID NO: 490694 - RNA, 20 nt, Artificial Sequence
  Synthetic
aauauuuucaauaucuauga

SEQ ID NO: 490695 - RNA, 21 nt, Artificial Sequence
  Synthetic
gaauauuuucaauaucuauga

SEQ ID NO: 490696 - RNA, 22 nt, Artificial Sequence
  Synthetic
ugaauauuuucaauaucuauga

SEQ ID NO: 490697 - RNA, 23 nt, Artificial Sequence
  Synthetic
augaauauuuucaauaucuauga

SEQ ID NO: 490698 - RNA, 24 nt, Artificial Sequence
  Synthetic
uaugaauauuuucaauaucuauga

SEQ ID NO: 490699 - RNA, 18 nt, Artificial Sequence
  Synthetic
gguuccuucacucuauga

SEQ ID NO: 490700 - RNA, 19 nt, Artificial Sequence
  Synthetic
ugguuccuucacucuauga

SEQ ID NO: 490701 - RNA, 20 nt, Artificial Sequence
  Synthetic
cugguuccuucacucuauga

SEQ ID NO: 490702 - RNA, 21 nt, Artificial Sequence
  Synthetic
ccugguuccuucacucuauga

SEQ ID NO: 490703 - RNA, 22 nt, Artificial Sequence
  Synthetic
cccugguuccuucacucuauga

SEQ ID NO: 490704 - RNA, 23 nt, Artificial Sequence
  Synthetic
ucccugguuccuucacucuauga

SEQ ID NO: 490705 - RNA, 24 nt, Artificial Sequence
  Synthetic
aucccugguuccuucacucuauga

SEQ ID NO: 490706 - RNA, 18 nt, Artificial Sequence
  Synthetic
accaagaguuuucuauga

SEQ ID NO: 490707 - RNA, 19 nt, Artificial Sequence
  Synthetic
caccaagaguuuucuauga

SEQ ID NO: 490708 - RNA, 20 nt, Artificial Sequence
  Synthetic
acaccaagaguuuucuauga

SEQ ID NO: 490709 - RNA, 21 nt, Artificial Sequence
  Synthetic
gacaccaagaguuuucuauga

SEQ ID NO: 490710 - RNA, 22 nt, Artificial Sequence
  Synthetic
ggacaccaagaguuuucuauga

SEQ ID NO: 490711 - RNA, 23 nt, Artificial Sequence
  Synthetic
gggacaccaagaguuuucuauga

SEQ ID NO: 490712 - RNA, 24 nt, Artificial Sequence
  Synthetic
agggacaccaagaguuuucuauga

SEQ ID NO: 490713 - RNA, 18 nt, Artificial Sequence
  Synthetic
accauguagcuaguauga

SEQ ID NO: 490714 - RNA, 19 nt, Artificial Sequence
  Synthetic
aaccauguagcuaguauga

SEQ ID NO: 490715 - RNA, 20 nt, Artificial Sequence
  Synthetic
uaaccauguagcuaguauga

SEQ ID NO: 490716 - RNA, 21 nt, Artificial Sequence
  Synthetic
cuaaccauguagcuaguauga

SEQ ID NO: 490717 - RNA, 22 nt, Artificial Sequence
  Synthetic
gcuaaccauguagcuaguauga

SEQ ID NO: 490718 - RNA, 23 nt, Artificial Sequence
  Synthetic
ugcuaaccauguagcuaguauga

SEQ ID NO: 490719 - RNA, 24 nt, Artificial Sequence
  Synthetic
augcuaaccauguagcuaguauga

SEQ ID NO: 490720 - RNA, 18 nt, Artificial Sequence
  Synthetic
uaacauguuuacguauga

SEQ ID NO: 490721 - RNA, 19 nt, Artificial Sequence
  Synthetic
uuaacauguuuacguauga

SEQ ID NO: 490722 - RNA, 20 nt, Artificial Sequence
  Synthetic
auuaacauguuuacguauga

SEQ ID NO: 490723 - RNA, 21 nt, Artificial Sequence
  Synthetic
aauuaacauguuuacguauga

SEQ ID NO: 490724 - RNA, 22 nt, Artificial Sequence
  Synthetic
caauuaacauguuuacguauga

SEQ ID NO: 490725 - RNA, 23 nt, Artificial Sequence
  Synthetic
acaauuaacauguuuacguauga

SEQ ID NO: 490726 - RNA, 24 nt, Artificial Sequence
  Synthetic
uacaauuaacauguuuacguauga

SEQ ID NO: 490727 - RNA, 18 nt, Artificial Sequence
  Synthetic
uuuuaagcaagcguauga

SEQ ID NO: 490728 - RNA, 19 nt, Artificial Sequence
  Synthetic
auuuuaagcaagcguauga

SEQ ID NO: 490729 - RNA, 20 nt, Artificial Sequence
  Synthetic
uauuuuaagcaagcguauga

SEQ ID NO: 490730 - RNA, 21 nt, Artificial Sequence
  Synthetic
auauuuuaagcaagcguauga

SEQ ID NO: 490731 - RNA, 22 nt, Artificial Sequence
  Synthetic
aauauuuuaagcaagcguauga

SEQ ID NO: 490732 - RNA, 23 nt, Artificial Sequence
  Synthetic
aaauauuuuaagcaagcguauga

SEQ ID NO: 490733 - RNA, 24 nt, Artificial Sequence
  Synthetic
caaauauuuuaagcaagcguauga

SEQ ID NO: 490734 - RNA, 18 nt, Artificial Sequence
  Synthetic
caaaaauggaggguauga

SEQ ID NO: 490735 - RNA, 19 nt, Artificial Sequence
  Synthetic
acaaaaauggaggguauga

SEQ ID NO: 490736 - RNA, 20 nt, Artificial Sequence
  Synthetic
gacaaaaauggaggguauga

SEQ ID NO: 490737 - RNA, 21 nt, Artificial Sequence
  Synthetic
ugacaaaaauggaggguauga

SEQ ID NO: 490738 - RNA, 22 nt, Artificial Sequence
  Synthetic
uugacaaaaauggaggguauga

SEQ ID NO: 490739 - RNA, 23 nt, Artificial Sequence
  Synthetic
uuugacaaaaauggaggguauga

SEQ ID NO: 490740 - RNA, 24 nt, Artificial Sequence
  Synthetic
auuugacaaaaauggaggguauga

SEQ ID NO: 490741 - RNA, 18 nt, Artificial Sequence
  Synthetic
acuuugguggggguauga

SEQ ID NO: 490742 - RNA, 19 nt, Artificial Sequence
  Synthetic
aacuuugguggggguauga

SEQ ID NO: 490743 - RNA, 20 nt, Artificial Sequence
  Synthetic
uaacuuugguggggguauga

SEQ ID NO: 490744 - RNA, 21 nt, Artificial Sequence
  Synthetic
uuaacuuugguggggguauga

SEQ ID NO: 490745 - RNA, 22 nt, Artificial Sequence
  Synthetic
auuaacuuugguggggguauga

SEQ ID NO: 490746 - RNA, 23 nt, Artificial Sequence
  Synthetic
cauuaacuuugguggggguauga

SEQ ID NO: 490747 - RNA, 24 nt, Artificial Sequence
  Synthetic
acauuaacuuugguggggguauga

SEQ ID NO: 490748 - RNA, 18 nt, Artificial Sequence
  Synthetic
cugacugaaaauguauga

SEQ ID NO: 490749 - RNA, 19 nt, Artificial Sequence
  Synthetic
gcugacugaaaauguauga

SEQ ID NO: 490750 - RNA, 20 nt, Artificial Sequence
  Synthetic
agcugacugaaaauguauga

SEQ ID NO: 490751 - RNA, 21 nt, Artificial Sequence
  Synthetic
uagcugacugaaaauguauga

SEQ ID NO: 490752 - RNA, 22 nt, Artificial Sequence
  Synthetic
uuagcugacugaaaauguauga

SEQ ID NO: 490753 - RNA, 23 nt, Artificial Sequence
  Synthetic
auuagcugacugaaaauguauga

SEQ ID NO: 490754 - RNA, 24 nt, Artificial Sequence
  Synthetic
cauuagcugacugaaaauguauga

SEQ ID NO: 490755 - RNA, 18 nt, Artificial Sequence
  Synthetic
uucacguacuauguauga

SEQ ID NO: 490756 - RNA, 19 nt, Artificial Sequence
  Synthetic
auucacguacuauguauga

SEQ ID NO: 490757 - RNA, 20 nt, Artificial Sequence
  Synthetic
gauucacguacuauguauga

SEQ ID NO: 490758 - RNA, 21 nt, Artificial Sequence
  Synthetic
agauucacguacuauguauga

SEQ ID NO: 490759 - RNA, 22 nt, Artificial Sequence
  Synthetic
cagauucacguacuauguauga

SEQ ID NO: 490760 - RNA, 23 nt, Artificial Sequence
  Synthetic
acagauucacguacuauguauga

SEQ ID NO: 490761 - RNA, 24 nt, Artificial Sequence
  Synthetic
aacagauucacguacuauguauga

SEQ ID NO: 490762 - RNA, 18 nt, Artificial Sequence
  Synthetic
uccaugguuccuguauga

SEQ ID NO: 490763 - RNA, 19 nt, Artificial Sequence
  Synthetic
uuccaugguuccuguauga

SEQ ID NO: 490764 - RNA, 20 nt, Artificial Sequence
  Synthetic
guuccaugguuccuguauga

SEQ ID NO: 490765 - RNA, 21 nt, Artificial Sequence
  Synthetic
aguuccaugguuccuguauga

SEQ ID NO: 490766 - RNA, 22 nt, Artificial Sequence
  Synthetic
caguuccaugguuccuguauga

SEQ ID NO: 490767 - RNA, 23 nt, Artificial Sequence
  Synthetic
acaguuccaugguuccuguauga

SEQ ID NO: 490768 - RNA, 24 nt, Artificial Sequence
  Synthetic
aacaguuccaugguuccuguauga

SEQ ID NO: 490769 - RNA, 18 nt, Artificial Sequence
  Synthetic
gguuggucaaguguauga

SEQ ID NO: 490770 - RNA, 19 nt, Artificial Sequence
  Synthetic
agguuggucaaguguauga

SEQ ID NO: 490771 - RNA, 20 nt, Artificial Sequence
  Synthetic
aagguuggucaaguguauga

SEQ ID NO: 490772 - RNA, 21 nt, Artificial Sequence
  Synthetic
aaagguuggucaaguguauga

SEQ ID NO: 490773 - RNA, 22 nt, Artificial Sequence
  Synthetic
aaaagguuggucaaguguauga

SEQ ID NO: 490774 - RNA, 23 nt, Artificial Sequence
  Synthetic
uaaaagguuggucaaguguauga

SEQ ID NO: 490775 - RNA, 24 nt, Artificial Sequence
  Synthetic
uuaaaagguuggucaaguguauga

SEQ ID NO: 490776 - RNA, 18 nt, Artificial Sequence
  Synthetic
ucaauuuagcuuguauga

SEQ ID NO: 490777 - RNA, 19 nt, Artificial Sequence
  Synthetic
aucaauuuagcuuguauga

SEQ ID NO: 490778 - RNA, 20 nt, Artificial Sequence
  Synthetic
uaucaauuuagcuuguauga

SEQ ID NO: 490779 - RNA, 21 nt, Artificial Sequence
  Synthetic
uuaucaauuuagcuuguauga

SEQ ID NO: 490780 - RNA, 22 nt, Artificial Sequence
  Synthetic
cuuaucaauuuagcuuguauga

SEQ ID NO: 490781 - RNA, 23 nt, Artificial Sequence
  Synthetic
ucuuaucaauuuagcuuguauga

SEQ ID NO: 490782 - RNA, 24 nt, Artificial Sequence
  Synthetic
uucuuaucaauuuagcuuguauga

SEQ ID NO: 490783 - RNA, 18 nt, Artificial Sequence
  Synthetic
cucaacucccaauuauga

SEQ ID NO: 490784 - RNA, 19 nt, Artificial Sequence
  Synthetic
gcucaacucccaauuauga

SEQ ID NO: 490785 - RNA, 20 nt, Artificial Sequence
  Synthetic
ugcucaacucccaauuauga

SEQ ID NO: 490786 - RNA, 21 nt, Artificial Sequence
  Synthetic
uugcucaacucccaauuauga

SEQ ID NO: 490787 - RNA, 22 nt, Artificial Sequence
  Synthetic
auugcucaacucccaauuauga

SEQ ID NO: 490788 - RNA, 23 nt, Artificial Sequence
  Synthetic
cauugcucaacucccaauuauga

SEQ ID NO: 490789 - RNA, 24 nt, Artificial Sequence
  Synthetic
ucauugcucaacucccaauuauga

SEQ ID NO: 490790 - RNA, 18 nt, Artificial Sequence
  Synthetic
uucaacucccacuuauga

SEQ ID NO: 490791 - RNA, 19 nt, Artificial Sequence
  Synthetic
guucaacucccacuuauga

SEQ ID NO: 490792 - RNA, 20 nt, Artificial Sequence
  Synthetic
cguucaacucccacuuauga

SEQ ID NO: 490793 - RNA, 21 nt, Artificial Sequence
  Synthetic
ucguucaacucccacuuauga

SEQ ID NO: 490794 - RNA, 22 nt, Artificial Sequence
  Synthetic
aucguucaacucccacuuauga

SEQ ID NO: 490795 - RNA, 23 nt, Artificial Sequence
  Synthetic
caucguucaacucccacuuauga

SEQ ID NO: 490796 - RNA, 24 nt, Artificial Sequence
  Synthetic
ucaucguucaacucccacuuauga

SEQ ID NO: 490797 - RNA, 18 nt, Artificial Sequence
  Synthetic
gucuuuccuuucuuauga

SEQ ID NO: 490798 - RNA, 19 nt, Artificial Sequence
  Synthetic
agucuuuccuuucuuauga

SEQ ID NO: 490799 - RNA, 20 nt, Artificial Sequence
  Synthetic
uagucuuuccuuucuuauga

SEQ ID NO: 490800 - RNA, 21 nt, Artificial Sequence
  Synthetic
uuagucuuuccuuucuuauga

SEQ ID NO: 490801 - RNA, 22 nt, Artificial Sequence
  Synthetic
uuuagucuuuccuuucuuauga

SEQ ID NO: 490802 - RNA, 23 nt, Artificial Sequence
  Synthetic
uuuuagucuuuccuuucuuauga

SEQ ID NO: 490803 - RNA, 24 nt, Artificial Sequence
  Synthetic
auuuuagucuuuccuuucuuauga

SEQ ID NO: 490804 - RNA, 18 nt, Artificial Sequence
  Synthetic
uugggauccuaguuauga

SEQ ID NO: 490805 - RNA, 19 nt, Artificial Sequence
  Synthetic
cuugggauccuaguuauga

SEQ ID NO: 490806 - RNA, 20 nt, Artificial Sequence
  Synthetic
ucuugggauccuaguuauga

SEQ ID NO: 490807 - RNA, 21 nt, Artificial Sequence
  Synthetic
uucuugggauccuaguuauga

SEQ ID NO: 490808 - RNA, 22 nt, Artificial Sequence
  Synthetic
auucuugggauccuaguuauga

SEQ ID NO: 490809 - RNA, 23 nt, Artificial Sequence
  Synthetic
aauucuugggauccuaguuauga

SEQ ID NO: 490810 - RNA, 24 nt, Artificial Sequence
  Synthetic
uaauucuugggauccuaguuauga

SEQ ID NO: 490811 - RNA, 18 nt, Artificial Sequence
  Synthetic
uuauauuuuuauuuauga

SEQ ID NO: 490812 - RNA, 19 nt, Artificial Sequence
  Synthetic
uuuauauuuuuauuuauga

SEQ ID NO: 490813 - RNA, 20 nt, Artificial Sequence
  Synthetic
auuuauauuuuuauuuauga

SEQ ID NO: 490814 - RNA, 21 nt, Artificial Sequence
  Synthetic
aauuuauauuuuuauuuauga

SEQ ID NO: 490815 - RNA, 22 nt, Artificial Sequence
  Synthetic
uaauuuauauuuuuauuuauga

SEQ ID NO: 490816 - RNA, 23 nt, Artificial Sequence
  Synthetic
auaauuuauauuuuuauuuauga

SEQ ID NO: 490817 - RNA, 24 nt, Artificial Sequence
  Synthetic
cauaauuuauauuuuuauuuauga

SEQ ID NO: 490818 - RNA, 18 nt, Artificial Sequence
  Synthetic
uagauagguuguuuauga

SEQ ID NO: 490819 - RNA, 19 nt, Artificial Sequence
  Synthetic
auagauagguuguuuauga

SEQ ID NO: 490820 - RNA, 20 nt, Artificial Sequence
  Synthetic
uauagauagguuguuuauga

SEQ ID NO: 490821 - RNA, 21 nt, Artificial Sequence
  Synthetic
auauagauagguuguuuauga

SEQ ID NO: 490822 - RNA, 22 nt, Artificial Sequence
  Synthetic
aauauagauagguuguuuauga

SEQ ID NO: 490823 - RNA, 23 nt, Artificial Sequence
  Synthetic
aaauauagauagguuguuuauga

SEQ ID NO: 490824 - RNA, 24 nt, Artificial Sequence
  Synthetic
caaauauagauagguuguuuauga

SEQ ID NO: 490825 - RNA, 18 nt, Artificial Sequence
  Synthetic
acaauauauguuuuauga

SEQ ID NO: 490826 - RNA, 19 nt, Artificial Sequence
  Synthetic
uacaauauauguuuuauga

SEQ ID NO: 490827 - RNA, 20 nt, Artificial Sequence
  Synthetic
uuacaauauauguuuuauga

SEQ ID NO: 490828 - RNA, 21 nt, Artificial Sequence
  Synthetic
auuacaauauauguuuuauga

SEQ ID NO: 490829 - RNA, 22 nt, Artificial Sequence
  Synthetic
aauuacaauauauguuuuauga

SEQ ID NO: 490830 - RNA, 23 nt, Artificial Sequence
  Synthetic
caauuacaauauauguuuuauga

SEQ ID NO: 490831 - RNA, 24 nt, Artificial Sequence
  Synthetic
ucaauuacaauauauguuuuauga

SEQ ID NO: 490832 - RNA, 18 nt, Artificial Sequence
  Synthetic
ugaagccucaaaaacuga

SEQ ID NO: 490833 - RNA, 19 nt, Artificial Sequence
  Synthetic
augaagccucaaaaacuga

SEQ ID NO: 490834 - RNA, 20 nt, Artificial Sequence
  Synthetic
caugaagccucaaaaacuga

SEQ ID NO: 490835 - RNA, 21 nt, Artificial Sequence
  Synthetic
ccaugaagccucaaaaacuga

SEQ ID NO: 490836 - RNA, 22 nt, Artificial Sequence
  Synthetic
cccaugaagccucaaaaacuga

SEQ ID NO: 490837 - RNA, 23 nt, Artificial Sequence
  Synthetic
gcccaugaagccucaaaaacuga

SEQ ID NO: 490838 - RNA, 24 nt, Artificial Sequence
  Synthetic
ggcccaugaagccucaaaaacuga

SEQ ID NO: 490839 - RNA, 18 nt, Artificial Sequence
  Synthetic
uucucuuucaaaaacuga

SEQ ID NO: 490840 - RNA, 19 nt, Artificial Sequence
  Synthetic
uuucucuuucaaaaacuga

SEQ ID NO: 490841 - RNA, 20 nt, Artificial Sequence
  Synthetic
auuucucuuucaaaaacuga

SEQ ID NO: 490842 - RNA, 21 nt, Artificial Sequence
  Synthetic
gauuucucuuucaaaaacuga

SEQ ID NO: 490843 - RNA, 22 nt, Artificial Sequence
  Synthetic
ggauuucucuuucaaaaacuga

SEQ ID NO: 490844 - RNA, 23 nt, Artificial Sequence
  Synthetic
gggauuucucuuucaaaaacuga

SEQ ID NO: 490845 - RNA, 24 nt, Artificial Sequence
  Synthetic
ggggauuucucuuucaaaaacuga

SEQ ID NO: 490846 - RNA, 18 nt, Artificial Sequence
  Synthetic
uauguuuacgaaaacuga

SEQ ID NO: 490847 - RNA, 19 nt, Artificial Sequence
  Synthetic
guauguuuacgaaaacuga

SEQ ID NO: 490848 - RNA, 20 nt, Artificial Sequence
  Synthetic
uguauguuuacgaaaacuga

SEQ ID NO: 490849 - RNA, 21 nt, Artificial Sequence
  Synthetic
cuguauguuuacgaaaacuga

SEQ ID NO: 490850 - RNA, 22 nt, Artificial Sequence
  Synthetic
ucuguauguuuacgaaaacuga

SEQ ID NO: 490851 - RNA, 23 nt, Artificial Sequence
  Synthetic
cucuguauguuuacgaaaacuga

SEQ ID NO: 490852 - RNA, 24 nt, Artificial Sequence
  Synthetic
ucucuguauguuuacgaaaacuga

SEQ ID NO: 490853 - RNA, 18 nt, Artificial Sequence
  Synthetic
agaaaacccagaaacuga

SEQ ID NO: 490854 - RNA, 19 nt, Artificial Sequence
  Synthetic
gagaaaacccagaaacuga

SEQ ID NO: 490855 - RNA, 20 nt, Artificial Sequence
  Synthetic
ugagaaaacccagaaacuga

SEQ ID NO: 490856 - RNA, 21 nt, Artificial Sequence
  Synthetic
cugagaaaacccagaaacuga

SEQ ID NO: 490857 - RNA, 22 nt, Artificial Sequence
  Synthetic
ccugagaaaacccagaaacuga

SEQ ID NO: 490858 - RNA, 23 nt, Artificial Sequence
  Synthetic
uccugagaaaacccagaaacuga

SEQ ID NO: 490859 - RNA, 24 nt, Artificial Sequence
  Synthetic
auccugagaaaacccagaaacuga

SEQ ID NO: 490860 - RNA, 18 nt, Artificial Sequence
  Synthetic
uauaucaaaauaaacuga

SEQ ID NO: 490861 - RNA, 19 nt, Artificial Sequence
  Synthetic
uuauaucaaaauaaacuga

SEQ ID NO: 490862 - RNA, 20 nt, Artificial Sequence
  Synthetic
auuauaucaaaauaaacuga

SEQ ID NO: 490863 - RNA, 21 nt, Artificial Sequence
  Synthetic
cauuauaucaaaauaaacuga

SEQ ID NO: 490864 - RNA, 22 nt, Artificial Sequence
  Synthetic
ucauuauaucaaaauaaacuga

SEQ ID NO: 490865 - RNA, 23 nt, Artificial Sequence
  Synthetic
uucauuauaucaaaauaaacuga

SEQ ID NO: 490866 - RNA, 24 nt, Artificial Sequence
  Synthetic
auucauuauaucaaaauaaacuga

SEQ ID NO: 490867 - RNA, 18 nt, Artificial Sequence
  Synthetic
aaggugaagguaaacuga

SEQ ID NO: 490868 - RNA, 19 nt, Artificial Sequence
  Synthetic
uaaggugaagguaaacuga

SEQ ID NO: 490869 - RNA, 20 nt, Artificial Sequence
  Synthetic
cuaaggugaagguaaacuga

SEQ ID NO: 490870 - RNA, 21 nt, Artificial Sequence
  Synthetic
ucuaaggugaagguaaacuga

SEQ ID NO: 490871 - RNA, 22 nt, Artificial Sequence
  Synthetic
gucuaaggugaagguaaacuga

SEQ ID NO: 490872 - RNA, 23 nt, Artificial Sequence
  Synthetic
agucuaaggugaagguaaacuga

SEQ ID NO: 490873 - RNA, 24 nt, Artificial Sequence
  Synthetic
aagucuaaggugaagguaaacuga

SEQ ID NO: 490874 - RNA, 18 nt, Artificial Sequence
  Synthetic
agcaaucacuacaacuga

SEQ ID NO: 490875 - RNA, 19 nt, Artificial Sequence
  Synthetic
uagcaaucacuacaacuga

SEQ ID NO: 490876 - RNA, 20 nt, Artificial Sequence
  Synthetic
uuagcaaucacuacaacuga

SEQ ID NO: 490877 - RNA, 21 nt, Artificial Sequence
  Synthetic
auuagcaaucacuacaacuga

SEQ ID NO: 490878 - RNA, 22 nt, Artificial Sequence
  Synthetic
aauuagcaaucacuacaacuga

SEQ ID NO: 490879 - RNA, 23 nt, Artificial Sequence
  Synthetic
uaauuagcaaucacuacaacuga

SEQ ID NO: 490880 - RNA, 24 nt, Artificial Sequence
  Synthetic
uuaauuagcaaucacuacaacuga

SEQ ID NO: 490881 - RNA, 18 nt, Artificial Sequence
  Synthetic
uaaaaucucaccaacuga

SEQ ID NO: 490882 - RNA, 19 nt, Artificial Sequence
  Synthetic
guaaaaucucaccaacuga

SEQ ID NO: 490883 - RNA, 20 nt, Artificial Sequence
  Synthetic
aguaaaaucucaccaacuga

SEQ ID NO: 490884 - RNA, 21 nt, Artificial Sequence
  Synthetic
aaguaaaaucucaccaacuga

SEQ ID NO: 490885 - RNA, 22 nt, Artificial Sequence
  Synthetic
aaaguaaaaucucaccaacuga

SEQ ID NO: 490886 - RNA, 23 nt, Artificial Sequence
  Synthetic
caaaguaaaaucucaccaacuga

SEQ ID NO: 490887 - RNA, 24 nt, Artificial Sequence
  Synthetic
ucaaaguaaaaucucaccaacuga

SEQ ID NO: 490888 - RNA, 18 nt, Artificial Sequence
  Synthetic
ugccuguucaucaacuga

SEQ ID NO: 490889 - RNA, 19 nt, Artificial Sequence
  Synthetic
cugccuguucaucaacuga

SEQ ID NO: 490890 - RNA, 20 nt, Artificial Sequence
  Synthetic
acugccuguucaucaacuga

SEQ ID NO: 490891 - RNA, 21 nt, Artificial Sequence
  Synthetic
aacugccuguucaucaacuga

SEQ ID NO: 490892 - RNA, 22 nt, Artificial Sequence
  Synthetic
aaacugccuguucaucaacuga

SEQ ID NO: 490893 - RNA, 23 nt, Artificial Sequence
  Synthetic
aaaacugccuguucaucaacuga

SEQ ID NO: 490894 - RNA, 24 nt, Artificial Sequence
  Synthetic
caaaacugccuguucaucaacuga

SEQ ID NO: 490895 - RNA, 18 nt, Artificial Sequence
  Synthetic
aagugcuauaagaacuga

SEQ ID NO: 490896 - RNA, 19 nt, Artificial Sequence
  Synthetic
gaagugcuauaagaacuga

SEQ ID NO: 490897 - RNA, 20 nt, Artificial Sequence
  Synthetic
ugaagugcuauaagaacuga

SEQ ID NO: 490898 - RNA, 21 nt, Artificial Sequence
  Synthetic
augaagugcuauaagaacuga

SEQ ID NO: 490899 - RNA, 22 nt, Artificial Sequence
  Synthetic
aaugaagugcuauaagaacuga

SEQ ID NO: 490900 - RNA, 23 nt, Artificial Sequence
  Synthetic
aaaugaagugcuauaagaacuga

SEQ ID NO: 490901 - RNA, 24 nt, Artificial Sequence
  Synthetic
aaaaugaagugcuauaagaacuga

SEQ ID NO: 490902 - RNA, 18 nt, Artificial Sequence
  Synthetic
aaaucagagcagaacuga

SEQ ID NO: 490903 - RNA, 19 nt, Artificial Sequence
  Synthetic
aaaaucagagcagaacuga

SEQ ID NO: 490904 - RNA, 20 nt, Artificial Sequence
  Synthetic
uaaaaucagagcagaacuga

SEQ ID NO: 490905 - RNA, 21 nt, Artificial Sequence
  Synthetic
cuaaaaucagagcagaacuga

SEQ ID NO: 490906 - RNA, 22 nt, Artificial Sequence
  Synthetic
acuaaaaucagagcagaacuga

SEQ ID NO: 490907 - RNA, 23 nt, Artificial Sequence
  Synthetic
aacuaaaaucagagcagaacuga

SEQ ID NO: 490908 - RNA, 24 nt, Artificial Sequence
  Synthetic
uaacuaaaaucagagcagaacuga

SEQ ID NO: 490909 - RNA, 18 nt, Artificial Sequence
  Synthetic
aaaccaaaguagaacuga

SEQ ID NO: 490910 - RNA, 19 nt, Artificial Sequence
  Synthetic
caaaccaaaguagaacuga

SEQ ID NO: 490911 - RNA, 20 nt, Artificial Sequence
  Synthetic
ccaaaccaaaguagaacuga

SEQ ID NO: 490912 - RNA, 21 nt, Artificial Sequence
  Synthetic
accaaaccaaaguagaacuga

SEQ ID NO: 490913 - RNA, 22 nt, Artificial Sequence
  Synthetic
aaccaaaccaaaguagaacuga

SEQ ID NO: 490914 - RNA, 23 nt, Artificial Sequence
  Synthetic
uaaccaaaccaaaguagaacuga

SEQ ID NO: 490915 - RNA, 24 nt, Artificial Sequence
  Synthetic
auaaccaaaccaaaguagaacuga

SEQ ID NO: 490916 - RNA, 18 nt, Artificial Sequence
  Synthetic
ccugacaacacgaacuga

SEQ ID NO: 490917 - RNA, 19 nt, Artificial Sequence
  Synthetic
uccugacaacacgaacuga

SEQ ID NO: 490918 - RNA, 20 nt, Artificial Sequence
  Synthetic
uuccugacaacacgaacuga

SEQ ID NO: 490919 - RNA, 21 nt, Artificial Sequence
  Synthetic
auuccugacaacacgaacuga

SEQ ID NO: 490920 - RNA, 22 nt, Artificial Sequence
  Synthetic
aauuccugacaacacgaacuga

SEQ ID NO: 490921 - RNA, 23 nt, Artificial Sequence
  Synthetic
uaauuccugacaacacgaacuga

SEQ ID NO: 490922 - RNA, 24 nt, Artificial Sequence
  Synthetic
cuaauuccugacaacacgaacuga

SEQ ID NO: 490923 - RNA, 18 nt, Artificial Sequence
  Synthetic
auccugccaaugaacuga

SEQ ID NO: 490924 - RNA, 19 nt, Artificial Sequence
  Synthetic
cauccugccaaugaacuga

SEQ ID NO: 490925 - RNA, 20 nt, Artificial Sequence
  Synthetic
acauccugccaaugaacuga

SEQ ID NO: 490926 - RNA, 21 nt, Artificial Sequence
  Synthetic
aacauccugccaaugaacuga

SEQ ID NO: 490927 - RNA, 22 nt, Artificial Sequence
  Synthetic
aaacauccugccaaugaacuga

SEQ ID NO: 490928 - RNA, 23 nt, Artificial Sequence
  Synthetic
caaacauccugccaaugaacuga

SEQ ID NO: 490929 - RNA, 24 nt, Artificial Sequence
  Synthetic
gcaaacauccugccaaugaacuga

SEQ ID NO: 490930 - RNA, 18 nt, Artificial Sequence
  Synthetic
cuucuugaagugaacuga

SEQ ID NO: 490931 - RNA, 19 nt, Artificial Sequence
  Synthetic
ccuucuugaagugaacuga

SEQ ID NO: 490932 - RNA, 20 nt, Artificial Sequence
  Synthetic
uccuucuugaagugaacuga

SEQ ID NO: 490933 - RNA, 21 nt, Artificial Sequence
  Synthetic
guccuucuugaagugaacuga

SEQ ID NO: 490934 - RNA, 22 nt, Artificial Sequence
  Synthetic
cguccuucuugaagugaacuga

SEQ ID NO: 490935 - RNA, 23 nt, Artificial Sequence
  Synthetic
ccguccuucuugaagugaacuga

SEQ ID NO: 490936 - RNA, 24 nt, Artificial Sequence
  Synthetic
gccguccuucuugaagugaacuga

SEQ ID NO: 490937 - RNA, 18 nt, Artificial Sequence
  Synthetic
uuauugggucuuaacuga

SEQ ID NO: 490938 - RNA, 19 nt, Artificial Sequence
  Synthetic
auuauugggucuuaacuga

SEQ ID NO: 490939 - RNA, 20 nt, Artificial Sequence
  Synthetic
uauuauugggucuuaacuga

SEQ ID NO: 490940 - RNA, 21 nt, Artificial Sequence
  Synthetic
cuauuauugggucuuaacuga

SEQ ID NO: 490941 - RNA, 22 nt, Artificial Sequence
  Synthetic
ucuauuauugggucuuaacuga

SEQ ID NO: 490942 - RNA, 23 nt, Artificial Sequence
  Synthetic
uucuauuauugggucuuaacuga

SEQ ID NO: 490943 - RNA, 24 nt, Artificial Sequence
  Synthetic
cuucuauuauugggucuuaacuga

SEQ ID NO: 490944 - RNA, 18 nt, Artificial Sequence
  Synthetic
guggcauaaacacacuga

SEQ ID NO: 490945 - RNA, 19 nt, Artificial Sequence
  Synthetic
uguggcauaaacacacuga

SEQ ID NO: 490946 - RNA, 20 nt, Artificial Sequence
  Synthetic
cuguggcauaaacacacuga

SEQ ID NO: 490947 - RNA, 21 nt, Artificial Sequence
  Synthetic
ucuguggcauaaacacacuga

SEQ ID NO: 490948 - RNA, 22 nt, Artificial Sequence
  Synthetic
cucuguggcauaaacacacuga

SEQ ID NO: 490949 - RNA, 23 nt, Artificial Sequence
  Synthetic
gcucuguggcauaaacacacuga

SEQ ID NO: 490950 - RNA, 24 nt, Artificial Sequence
  Synthetic
ugcucuguggcauaaacacacuga

SEQ ID NO: 490951 - RNA, 18 nt, Artificial Sequence
  Synthetic
agguugauaacacacuga

SEQ ID NO: 490952 - RNA, 19 nt, Artificial Sequence
  Synthetic
aagguugauaacacacuga

SEQ ID NO: 490953 - RNA, 20 nt, Artificial Sequence
  Synthetic
aaagguugauaacacacuga

SEQ ID NO: 490954 - RNA, 21 nt, Artificial Sequence
  Synthetic
aaaagguugauaacacacuga

SEQ ID NO: 490955 - RNA, 22 nt, Artificial Sequence
  Synthetic
aaaaagguugauaacacacuga

SEQ ID NO: 490956 - RNA, 23 nt, Artificial Sequence
  Synthetic
caaaaagguugauaacacacuga

SEQ ID NO: 490957 - RNA, 24 nt, Artificial Sequence
  Synthetic
ucaaaaagguugauaacacacuga

SEQ ID NO: 490958 - RNA, 18 nt, Artificial Sequence
  Synthetic
uauccauucauccacuga

SEQ ID NO: 490959 - RNA, 19 nt, Artificial Sequence
  Synthetic
uuauccauucauccacuga

SEQ ID NO: 490960 - RNA, 20 nt, Artificial Sequence
  Synthetic
uuuauccauucauccacuga

SEQ ID NO: 490961 - RNA, 21 nt, Artificial Sequence
  Synthetic
cuuuauccauucauccacuga

SEQ ID NO: 490962 - RNA, 22 nt, Artificial Sequence
  Synthetic
ucuuuauccauucauccacuga

SEQ ID NO: 490963 - RNA, 23 nt, Artificial Sequence
  Synthetic
uucuuuauccauucauccacuga

SEQ ID NO: 490964 - RNA, 24 nt, Artificial Sequence
  Synthetic
uuucuuuauccauucauccacuga

SEQ ID NO: 490965 - RNA, 18 nt, Artificial Sequence
  Synthetic
uuaguuucagagcacuga

SEQ ID NO: 490966 - RNA, 19 nt, Artificial Sequence
  Synthetic
uuuaguuucagagcacuga

SEQ ID NO: 490967 - RNA, 20 nt, Artificial Sequence
  Synthetic
auuuaguuucagagcacuga

SEQ ID NO: 490968 - RNA, 21 nt, Artificial Sequence
  Synthetic
uauuuaguuucagagcacuga

SEQ ID NO: 490969 - RNA, 22 nt, Artificial Sequence
  Synthetic
auauuuaguuucagagcacuga

SEQ ID NO: 490970 - RNA, 23 nt, Artificial Sequence
  Synthetic
gauauuuaguuucagagcacuga

SEQ ID NO: 490971 - RNA, 24 nt, Artificial Sequence
  Synthetic
agauauuuaguuucagagcacuga

SEQ ID NO: 490972 - RNA, 18 nt, Artificial Sequence
  Synthetic
gcaaugaauagucacuga

SEQ ID NO: 490973 - RNA, 19 nt, Artificial Sequence
  Synthetic
ugcaaugaauagucacuga

SEQ ID NO: 490974 - RNA, 20 nt, Artificial Sequence
  Synthetic
gugcaaugaauagucacuga

SEQ ID NO: 490975 - RNA, 21 nt, Artificial Sequence
  Synthetic
ugugcaaugaauagucacuga

SEQ ID NO: 490976 - RNA, 22 nt, Artificial Sequence
  Synthetic
gugugcaaugaauagucacuga

SEQ ID NO: 490977 - RNA, 23 nt, Artificial Sequence
  Synthetic
ggugugcaaugaauagucacuga

SEQ ID NO: 490978 - RNA, 24 nt, Artificial Sequence
  Synthetic
uggugugcaaugaauagucacuga

SEQ ID NO: 490979 - RNA, 18 nt, Artificial Sequence
  Synthetic
ccucuacuuagucacuga

SEQ ID NO: 490980 - RNA, 19 nt, Artificial Sequence
  Synthetic
uccucuacuuagucacuga

SEQ ID NO: 490981 - RNA, 20 nt, Artificial Sequence
  Synthetic
uuccucuacuuagucacuga

SEQ ID NO: 490982 - RNA, 21 nt, Artificial Sequence
  Synthetic
guuccucuacuuagucacuga

SEQ ID NO: 490983 - RNA, 22 nt, Artificial Sequence
  Synthetic
uguuccucuacuuagucacuga

SEQ ID NO: 490984 - RNA, 23 nt, Artificial Sequence
  Synthetic
cuguuccucuacuuagucacuga

SEQ ID NO: 490985 - RNA, 24 nt, Artificial Sequence
  Synthetic
ucuguuccucuacuuagucacuga

SEQ ID NO: 490986 - RNA, 18 nt, Artificial Sequence
  Synthetic
aagacgaagguucacuga

SEQ ID NO: 490987 - RNA, 19 nt, Artificial Sequence
  Synthetic
aaagacgaagguucacuga

SEQ ID NO: 490988 - RNA, 20 nt, Artificial Sequence
  Synthetic
gaaagacgaagguucacuga

SEQ ID NO: 490989 - RNA, 21 nt, Artificial Sequence
  Synthetic
agaaagacgaagguucacuga

SEQ ID NO: 490990 - RNA, 22 nt, Artificial Sequence
  Synthetic
cagaaagacgaagguucacuga

SEQ ID NO: 490991 - RNA, 23 nt, Artificial Sequence
  Synthetic
ccagaaagacgaagguucacuga

SEQ ID NO: 490992 - RNA, 24 nt, Artificial Sequence
  Synthetic
accagaaagacgaagguucacuga

SEQ ID NO: 490993 - RNA, 18 nt, Artificial Sequence
  Synthetic
auuugaaauuuucacuga

SEQ ID NO: 490994 - RNA, 19 nt, Artificial Sequence
  Synthetic
aauuugaaauuuucacuga

SEQ ID NO: 490995 - RNA, 20 nt, Artificial Sequence
  Synthetic
aaauuugaaauuuucacuga

SEQ ID NO: 490996 - RNA, 21 nt, Artificial Sequence
  Synthetic
uaaauuugaaauuuucacuga

SEQ ID NO: 490997 - RNA, 22 nt, Artificial Sequence
  Synthetic
uuaaauuugaaauuuucacuga

SEQ ID NO: 490998 - RNA, 23 nt, Artificial Sequence
  Synthetic
auuaaauuugaaauuuucacuga

SEQ ID NO: 490999 - RNA, 24 nt, Artificial Sequence
  Synthetic
aauuaaauuugaaauuuucacuga

SEQ ID NO: 491000 - RNA, 18 nt, Artificial Sequence
  Synthetic
cuuuccuauuuucacuga

SEQ ID NO: 491001 - RNA, 19 nt, Artificial Sequence
  Synthetic
acuuuccuauuuucacuga

SEQ ID NO: 491002 - RNA, 20 nt, Artificial Sequence
  Synthetic
uacuuuccuauuuucacuga

SEQ ID NO: 491003 - RNA, 21 nt, Artificial Sequence
  Synthetic
cuacuuuccuauuuucacuga

SEQ ID NO: 491004 - RNA, 22 nt, Artificial Sequence
  Synthetic
ucuacuuuccuauuuucacuga

SEQ ID NO: 491005 - RNA, 23 nt, Artificial Sequence
  Synthetic
uucuacuuuccuauuuucacuga

SEQ ID NO: 491006 - RNA, 24 nt, Artificial Sequence
  Synthetic
uuucuacuuuccuauuuucacuga

SEQ ID NO: 491007 - RNA, 18 nt, Artificial Sequence
  Synthetic
aaugguguaaaagacuga

SEQ ID NO: 491008 - RNA, 19 nt, Artificial Sequence
  Synthetic
caaugguguaaaagacuga

SEQ ID NO: 491009 - RNA, 20 nt, Artificial Sequence
  Synthetic
acaaugguguaaaagacuga

SEQ ID NO: 491010 - RNA, 21 nt, Artificial Sequence
  Synthetic
uacaaugguguaaaagacuga

SEQ ID NO: 491011 - RNA, 22 nt, Artificial Sequence
  Synthetic
cuacaaugguguaaaagacuga

SEQ ID NO: 491012 - RNA, 23 nt, Artificial Sequence
  Synthetic
acuacaaugguguaaaagacuga

SEQ ID NO: 491013 - RNA, 24 nt, Artificial Sequence
  Synthetic
gacuacaaugguguaaaagacuga

SEQ ID NO: 491014 - RNA, 18 nt, Artificial Sequence
  Synthetic
aauauuuuaaaagacuga

SEQ ID NO: 491015 - RNA, 19 nt, Artificial Sequence
  Synthetic
caauauuuuaaaagacuga

SEQ ID NO: 491016 - RNA, 20 nt, Artificial Sequence
  Synthetic
ucaauauuuuaaaagacuga

SEQ ID NO: 491017 - RNA, 21 nt, Artificial Sequence
  Synthetic
gucaauauuuuaaaagacuga

SEQ ID NO: 491018 - RNA, 22 nt, Artificial Sequence
  Synthetic
agucaauauuuuaaaagacuga

SEQ ID NO: 491019 - RNA, 23 nt, Artificial Sequence
  Synthetic
aagucaauauuuuaaaagacuga

SEQ ID NO: 491020 - RNA, 24 nt, Artificial Sequence
  Synthetic
uaagucaauauuuuaaaagacuga

SEQ ID NO: 491021 - RNA, 18 nt, Artificial Sequence
  Synthetic
uccuccuucuaggacuga

SEQ ID NO: 491022 - RNA, 19 nt, Artificial Sequence
  Synthetic
auccuccuucuaggacuga

SEQ ID NO: 491023 - RNA, 20 nt, Artificial Sequence
  Synthetic
cauccuccuucuaggacuga

SEQ ID NO: 491024 - RNA, 21 nt, Artificial Sequence
  Synthetic
ucauccuccuucuaggacuga

SEQ ID NO: 491025 - RNA, 22 nt, Artificial Sequence
  Synthetic
gucauccuccuucuaggacuga

SEQ ID NO: 491026 - RNA, 23 nt, Artificial Sequence
  Synthetic
ggucauccuccuucuaggacuga

SEQ ID NO: 491027 - RNA, 24 nt, Artificial Sequence
  Synthetic
uggucauccuccuucuaggacuga

SEQ ID NO: 491028 - RNA, 18 nt, Artificial Sequence
  Synthetic
guucaccucagggacuga

SEQ ID NO: 491029 - RNA, 19 nt, Artificial Sequence
  Synthetic
aguucaccucagggacuga

SEQ ID NO: 491030 - RNA, 20 nt, Artificial Sequence
  Synthetic
caguucaccucagggacuga

SEQ ID NO: 491031 - RNA, 21 nt, Artificial Sequence
  Synthetic
ccaguucaccucagggacuga

SEQ ID NO: 491032 - RNA, 22 nt, Artificial Sequence
  Synthetic
cccaguucaccucagggacuga

SEQ ID NO: 491033 - RNA, 23 nt, Artificial Sequence
  Synthetic
ucccaguucaccucagggacuga

SEQ ID NO: 491034 - RNA, 24 nt, Artificial Sequence
  Synthetic
aucccaguucaccucagggacuga

SEQ ID NO: 491035 - RNA, 18 nt, Artificial Sequence
  Synthetic
uuuaauagagaugacuga

SEQ ID NO: 491036 - RNA, 19 nt, Artificial Sequence
  Synthetic
auuuaauagagaugacuga

SEQ ID NO: 491037 - RNA, 20 nt, Artificial Sequence
  Synthetic
cauuuaauagagaugacuga

SEQ ID NO: 491038 - RNA, 21 nt, Artificial Sequence
  Synthetic
acauuuaauagagaugacuga

SEQ ID NO: 491039 - RNA, 22 nt, Artificial Sequence
  Synthetic
gacauuuaauagagaugacuga

SEQ ID NO: 491040 - RNA, 23 nt, Artificial Sequence
  Synthetic
ugacauuuaauagagaugacuga

SEQ ID NO: 491041 - RNA, 24 nt, Artificial Sequence
  Synthetic
augacauuuaauagagaugacuga

SEQ ID NO: 491042 - RNA, 18 nt, Artificial Sequence
  Synthetic
uucuagugggcugacuga

SEQ ID NO: 491043 - RNA, 19 nt, Artificial Sequence
  Synthetic
cuucuagugggcugacuga

SEQ ID NO: 491044 - RNA, 20 nt, Artificial Sequence
  Synthetic
ccuucuagugggcugacuga

SEQ ID NO: 491045 - RNA, 21 nt, Artificial Sequence
  Synthetic
gccuucuagugggcugacuga

SEQ ID NO: 491046 - RNA, 22 nt, Artificial Sequence
  Synthetic
ugccuucuagugggcugacuga

SEQ ID NO: 491047 - RNA, 23 nt, Artificial Sequence
  Synthetic
augccuucuagugggcugacuga

SEQ ID NO: 491048 - RNA, 24 nt, Artificial Sequence
  Synthetic
caugccuucuagugggcugacuga

SEQ ID NO: 491049 - RNA, 18 nt, Artificial Sequence
  Synthetic
uguugggacucugacuga

SEQ ID NO: 491050 - RNA, 19 nt, Artificial Sequence
  Synthetic
uuguugggacucugacuga

SEQ ID NO: 491051 - RNA, 20 nt, Artificial Sequence
  Synthetic
cuuguugggacucugacuga

SEQ ID NO: 491052 - RNA, 21 nt, Artificial Sequence
  Synthetic
ucuuguugggacucugacuga

SEQ ID NO: 491053 - RNA, 22 nt, Artificial Sequence
  Synthetic
uucuuguugggacucugacuga

SEQ ID NO: 491054 - RNA, 23 nt, Artificial Sequence
  Synthetic
uuucuuguugggacucugacuga

SEQ ID NO: 491055 - RNA, 24 nt, Artificial Sequence
  Synthetic
guuucuuguugggacucugacuga

SEQ ID NO: 491056 - RNA, 18 nt, Artificial Sequence
  Synthetic
ucauucuacaaauacuga

SEQ ID NO: 491057 - RNA, 19 nt, Artificial Sequence
  Synthetic
uucauucuacaaauacuga

SEQ ID NO: 491058 - RNA, 20 nt, Artificial Sequence
  Synthetic
auucauucuacaaauacuga

SEQ ID NO: 491059 - RNA, 21 nt, Artificial Sequence
  Synthetic
cauucauucuacaaauacuga

SEQ ID NO: 491060 - RNA, 22 nt, Artificial Sequence
  Synthetic
ucauucauucuacaaauacuga

SEQ ID NO: 491061 - RNA, 23 nt, Artificial Sequence
  Synthetic
uucauucauucuacaaauacuga

SEQ ID NO: 491062 - RNA, 24 nt, Artificial Sequence
  Synthetic
cuucauucauucuacaaauacuga

SEQ ID NO: 491063 - RNA, 18 nt, Artificial Sequence
  Synthetic
uauaacauagcauacuga

SEQ ID NO: 491064 - RNA, 19 nt, Artificial Sequence
  Synthetic
uuauaacauagcauacuga

SEQ ID NO: 491065 - RNA, 20 nt, Artificial Sequence
  Synthetic
uuuauaacauagcauacuga

SEQ ID NO: 491066 - RNA, 21 nt, Artificial Sequence
  Synthetic
uuuuauaacauagcauacuga

SEQ ID NO: 491067 - RNA, 22 nt, Artificial Sequence
  Synthetic
auuuuauaacauagcauacuga

SEQ ID NO: 491068 - RNA, 23 nt, Artificial Sequence
  Synthetic
aauuuuauaacauagcauacuga

SEQ ID NO: 491069 - RNA, 24 nt, Artificial Sequence
  Synthetic
aaauuuuauaacauagcauacuga

SEQ ID NO: 491070 - RNA, 21 nt, Artificial Sequence
  Synthetic
ccacagccaauaucauacuga

SEQ ID NO: 491071 - RNA, 22 nt, Artificial Sequence
  Synthetic
cccacagccaauaucauacuga

SEQ ID NO: 491072 - RNA, 23 nt, Artificial Sequence
  Synthetic
acccacagccaauaucauacuga

SEQ ID NO: 491073 - RNA, 24 nt, Artificial Sequence
  Synthetic
aacccacagccaauaucauacuga

SEQ ID NO: 491074 - RNA, 18 nt, Artificial Sequence
  Synthetic
cagccaguaucauacuga

SEQ ID NO: 491075 - RNA, 19 nt, Artificial Sequence
  Synthetic
acagccaguaucauacuga

SEQ ID NO: 491076 - RNA, 20 nt, Artificial Sequence
  Synthetic
cacagccaguaucauacuga

SEQ ID NO: 491077 - RNA, 21 nt, Artificial Sequence
  Synthetic
ccacagccaguaucauacuga

SEQ ID NO: 491078 - RNA, 22 nt, Artificial Sequence
  Synthetic
cccacagccaguaucauacuga

SEQ ID NO: 491079 - RNA, 23 nt, Artificial Sequence
  Synthetic
acccacagccaguaucauacuga

SEQ ID NO: 491080 - RNA, 24 nt, Artificial Sequence
  Synthetic
aacccacagccaguaucauacuga

SEQ ID NO: 491081 - RNA, 18 nt, Artificial Sequence
  Synthetic
aaaauaccaagcuacuga

SEQ ID NO: 491082 - RNA, 19 nt, Artificial Sequence
  Synthetic
caaaauaccaagcuacuga

SEQ ID NO: 491083 - RNA, 20 nt, Artificial Sequence
  Synthetic
ccaaaauaccaagcuacuga

SEQ ID NO: 491084 - RNA, 21 nt, Artificial Sequence
  Synthetic
accaaaauaccaagcuacuga

SEQ ID NO: 491085 - RNA, 22 nt, Artificial Sequence
  Synthetic
uaccaaaauaccaagcuacuga

SEQ ID NO: 491086 - RNA, 23 nt, Artificial Sequence
  Synthetic
uuaccaaaauaccaagcuacuga

SEQ ID NO: 491087 - RNA, 24 nt, Artificial Sequence
  Synthetic
guuaccaaaauaccaagcuacuga

SEQ ID NO: 491088 - RNA, 18 nt, Artificial Sequence
  Synthetic
caagcaagaaucuacuga

SEQ ID NO: 491089 - RNA, 19 nt, Artificial Sequence
  Synthetic
acaagcaagaaucuacuga

SEQ ID NO: 491090 - RNA, 20 nt, Artificial Sequence
  Synthetic
uacaagcaagaaucuacuga

SEQ ID NO: 491091 - RNA, 21 nt, Artificial Sequence
  Synthetic
uuacaagcaagaaucuacuga

SEQ ID NO: 491092 - RNA, 22 nt, Artificial Sequence
  Synthetic
guuacaagcaagaaucuacuga

SEQ ID NO: 491093 - RNA, 23 nt, Artificial Sequence
  Synthetic
aguuacaagcaagaaucuacuga

SEQ ID NO: 491094 - RNA, 24 nt, Artificial Sequence
  Synthetic
caguuacaagcaagaaucuacuga

SEQ ID NO: 491095 - RNA, 18 nt, Artificial Sequence
  Synthetic
aauuccuuuagguacuga

SEQ ID NO: 491096 - RNA, 19 nt, Artificial Sequence
  Synthetic
aaauuccuuuagguacuga

SEQ ID NO: 491097 - RNA, 20 nt, Artificial Sequence
  Synthetic
uaaauuccuuuagguacuga

SEQ ID NO: 491098 - RNA, 21 nt, Artificial Sequence
  Synthetic
auaaauuccuuuagguacuga

SEQ ID NO: 491099 - RNA, 22 nt, Artificial Sequence
  Synthetic
aauaaauuccuuuagguacuga

SEQ ID NO: 491100 - RNA, 23 nt, Artificial Sequence
  Synthetic
aaauaaauuccuuuagguacuga

SEQ ID NO: 491101 - RNA, 24 nt, Artificial Sequence
  Synthetic
aaaauaaauuccuuuagguacuga

SEQ ID NO: 491102 - RNA, 18 nt, Artificial Sequence
  Synthetic
agacaauucuuguacuga

SEQ ID NO: 491103 - RNA, 19 nt, Artificial Sequence
  Synthetic
uagacaauucuuguacuga

SEQ ID NO: 491104 - RNA, 20 nt, Artificial Sequence
  Synthetic
cuagacaauucuuguacuga

SEQ ID NO: 491105 - RNA, 21 nt, Artificial Sequence
  Synthetic
ucuagacaauucuuguacuga

SEQ ID NO: 491106 - RNA, 22 nt, Artificial Sequence
  Synthetic
uucuagacaauucuuguacuga

SEQ ID NO: 491107 - RNA, 23 nt, Artificial Sequence
  Synthetic
auucuagacaauucuuguacuga

SEQ ID NO: 491108 - RNA, 24 nt, Artificial Sequence
  Synthetic
uauucuagacaauucuuguacuga

SEQ ID NO: 491109 - RNA, 18 nt, Artificial Sequence
  Synthetic
aauaauacuaauuacuga

SEQ ID NO: 491110 - RNA, 19 nt, Artificial Sequence
  Synthetic
uaauaauacuaauuacuga

SEQ ID NO: 491111 - RNA, 20 nt, Artificial Sequence
  Synthetic
auaauaauacuaauuacuga

SEQ ID NO: 491112 - RNA, 21 nt, Artificial Sequence
  Synthetic
aauaauaauacuaauuacuga

SEQ ID NO: 491113 - RNA, 22 nt, Artificial Sequence
  Synthetic
uaauaauaauacuaauuacuga

SEQ ID NO: 491114 - RNA, 23 nt, Artificial Sequence
  Synthetic
auaauaauaauacuaauuacuga

SEQ ID NO: 491115 - RNA, 24 nt, Artificial Sequence
  Synthetic
aauaauaauaauacuaauuacuga

SEQ ID NO: 491116 - RNA, 18 nt, Artificial Sequence
  Synthetic
ccauacauugcuuacuga

SEQ ID NO: 491117 - RNA, 19 nt, Artificial Sequence
  Synthetic
uccauacauugcuuacuga

SEQ ID NO: 491118 - RNA, 20 nt, Artificial Sequence
  Synthetic
uuccauacauugcuuacuga

SEQ ID NO: 491119 - RNA, 21 nt, Artificial Sequence
  Synthetic
auuccauacauugcuuacuga

SEQ ID NO: 491120 - RNA, 22 nt, Artificial Sequence
  Synthetic
aauuccauacauugcuuacuga

SEQ ID NO: 491121 - RNA, 23 nt, Artificial Sequence
  Synthetic
caauuccauacauugcuuacuga

SEQ ID NO: 491122 - RNA, 24 nt, Artificial Sequence
  Synthetic
acaauuccauacauugcuuacuga

SEQ ID NO: 491123 - RNA, 18 nt, Artificial Sequence
  Synthetic
uuucuaaacucuuacuga

SEQ ID NO: 491124 - RNA, 19 nt, Artificial Sequence
  Synthetic
uuuucuaaacucuuacuga

SEQ ID NO: 491125 - RNA, 20 nt, Artificial Sequence
  Synthetic
uuuuucuaaacucuuacuga

SEQ ID NO: 491126 - RNA, 21 nt, Artificial Sequence
  Synthetic
uuuuuucuaaacucuuacuga

SEQ ID NO: 491127 - RNA, 22 nt, Artificial Sequence
  Synthetic
auuuuuucuaaacucuuacuga

SEQ ID NO: 491128 - RNA, 23 nt, Artificial Sequence
  Synthetic
uauuuuuucuaaacucuuacuga

SEQ ID NO: 491129 - RNA, 24 nt, Artificial Sequence
  Synthetic
cuauuuuuucuaaacucuuacuga

SEQ ID NO: 491130 - RNA, 18 nt, Artificial Sequence
  Synthetic
aagaaauccaaaaccuga

SEQ ID NO: 491131 - RNA, 19 nt, Artificial Sequence
  Synthetic
aaagaaauccaaaaccuga

SEQ ID NO: 491132 - RNA, 20 nt, Artificial Sequence
  Synthetic
uaaagaaauccaaaaccuga

SEQ ID NO: 491133 - RNA, 21 nt, Artificial Sequence
  Synthetic
auaaagaaauccaaaaccuga

SEQ ID NO: 491134 - RNA, 22 nt, Artificial Sequence
  Synthetic
cauaaagaaauccaaaaccuga

SEQ ID NO: 491135 - RNA, 23 nt, Artificial Sequence
  Synthetic
ccauaaagaaauccaaaaccuga

SEQ ID NO: 491136 - RNA, 24 nt, Artificial Sequence
  Synthetic
accauaaagaaauccaaaaccuga

SEQ ID NO: 491137 - RNA, 18 nt, Artificial Sequence
  Synthetic
aaagcucuggaaaccuga

SEQ ID NO: 491138 - RNA, 19 nt, Artificial Sequence
  Synthetic
uaaagcucuggaaaccuga

SEQ ID NO: 491139 - RNA, 20 nt, Artificial Sequence
  Synthetic
guaaagcucuggaaaccuga

SEQ ID NO: 491140 - RNA, 21 nt, Artificial Sequence
  Synthetic
gguaaagcucuggaaaccuga

SEQ ID NO: 491141 - RNA, 22 nt, Artificial Sequence
  Synthetic
agguaaagcucuggaaaccuga

SEQ ID NO: 491142 - RNA, 23 nt, Artificial Sequence
  Synthetic
cagguaaagcucuggaaaccuga

SEQ ID NO: 491143 - RNA, 24 nt, Artificial Sequence
  Synthetic
ucagguaaagcucuggaaaccuga

SEQ ID NO: 491144 - RNA, 18 nt, Artificial Sequence
  Synthetic
ucuacuguuuaaaccuga

SEQ ID NO: 491145 - RNA, 19 nt, Artificial Sequence
  Synthetic
uucuacuguuuaaaccuga

SEQ ID NO: 491146 - RNA, 20 nt, Artificial Sequence
  Synthetic
uuucuacuguuuaaaccuga

SEQ ID NO: 491147 - RNA, 21 nt, Artificial Sequence
  Synthetic
cuuucuacuguuuaaaccuga

SEQ ID NO: 491148 - RNA, 22 nt, Artificial Sequence
  Synthetic
acuuucuacuguuuaaaccuga

SEQ ID NO: 491149 - RNA, 23 nt, Artificial Sequence
  Synthetic
uacuuucuacuguuuaaaccuga

SEQ ID NO: 491150 - RNA, 24 nt, Artificial Sequence
  Synthetic
uuacuuucuacuguuuaaaccuga

SEQ ID NO: 491151 - RNA, 18 nt, Artificial Sequence
  Synthetic
augaauugcacaaccuga

SEQ ID NO: 491152 - RNA, 19 nt, Artificial Sequence
  Synthetic
aaugaauugcacaaccuga

SEQ ID NO: 491153 - RNA, 20 nt, Artificial Sequence
  Synthetic
caaugaauugcacaaccuga

SEQ ID NO: 491154 - RNA, 21 nt, Artificial Sequence
  Synthetic
acaaugaauugcacaaccuga

SEQ ID NO: 491155 - RNA, 22 nt, Artificial Sequence
  Synthetic
gacaaugaauugcacaaccuga

SEQ ID NO: 491156 - RNA, 23 nt, Artificial Sequence
  Synthetic
ggacaaugaauugcacaaccuga

SEQ ID NO: 491157 - RNA, 24 nt, Artificial Sequence
  Synthetic
gggacaaugaauugcacaaccuga

SEQ ID NO: 491158 - RNA, 18 nt, Artificial Sequence
  Synthetic
aucccaauugcaaccuga

SEQ ID NO: 491159 - RNA, 19 nt, Artificial Sequence
  Synthetic
aaucccaauugcaaccuga

SEQ ID NO: 491160 - RNA, 20 nt, Artificial Sequence
  Synthetic
aaaucccaauugcaaccuga

SEQ ID NO: 491161 - RNA, 21 nt, Artificial Sequence
  Synthetic
caaaucccaauugcaaccuga

SEQ ID NO: 491162 - RNA, 22 nt, Artificial Sequence
  Synthetic
ucaaaucccaauugcaaccuga

SEQ ID NO: 491163 - RNA, 23 nt, Artificial Sequence
  Synthetic
cucaaaucccaauugcaaccuga

SEQ ID NO: 491164 - RNA, 24 nt, Artificial Sequence
  Synthetic
gcucaaaucccaauugcaaccuga

SEQ ID NO: 491165 - RNA, 18 nt, Artificial Sequence
  Synthetic
aguagucacugaaccuga

SEQ ID NO: 491166 - RNA, 19 nt, Artificial Sequence
  Synthetic
caguagucacugaaccuga

SEQ ID NO: 491167 - RNA, 20 nt, Artificial Sequence
  Synthetic
acaguagucacugaaccuga

SEQ ID NO: 491168 - RNA, 21 nt, Artificial Sequence
  Synthetic
cacaguagucacugaaccuga

SEQ ID NO: 491169 - RNA, 22 nt, Artificial Sequence
  Synthetic
acacaguagucacugaaccuga

SEQ ID NO: 491170 - RNA, 23 nt, Artificial Sequence
  Synthetic
uacacaguagucacugaaccuga

SEQ ID NO: 491171 - RNA, 24 nt, Artificial Sequence
  Synthetic
auacacaguagucacugaaccuga

SEQ ID NO: 491172 - RNA, 18 nt, Artificial Sequence
  Synthetic
aaagcaucauuaaccuga

SEQ ID NO: 491173 - RNA, 19 nt, Artificial Sequence
  Synthetic
uaaagcaucauuaaccuga

SEQ ID NO: 491174 - RNA, 20 nt, Artificial Sequence
  Synthetic
auaaagcaucauuaaccuga

SEQ ID NO: 491175 - RNA, 21 nt, Artificial Sequence
  Synthetic
aauaaagcaucauuaaccuga

SEQ ID NO: 491176 - RNA, 22 nt, Artificial Sequence
  Synthetic
caauaaagcaucauuaaccuga

SEQ ID NO: 491177 - RNA, 23 nt, Artificial Sequence
  Synthetic
acaauaaagcaucauuaaccuga

SEQ ID NO: 491178 - RNA, 24 nt, Artificial Sequence
  Synthetic
uacaauaaagcaucauuaaccuga

SEQ ID NO: 491179 - RNA, 18 nt, Artificial Sequence
  Synthetic
aagcucuuauuaaccuga

SEQ ID NO: 491180 - RNA, 19 nt, Artificial Sequence
  Synthetic
gaagcucuuauuaaccuga

SEQ ID NO: 491181 - RNA, 20 nt, Artificial Sequence
  Synthetic
agaagcucuuauuaaccuga

SEQ ID NO: 491182 - RNA, 21 nt, Artificial Sequence
  Synthetic
aagaagcucuuauuaaccuga

SEQ ID NO: 491183 - RNA, 22 nt, Artificial Sequence
  Synthetic
gaagaagcucuuauuaaccuga

SEQ ID NO: 491184 - RNA, 23 nt, Artificial Sequence
  Synthetic
ugaagaagcucuuauuaaccuga

SEQ ID NO: 491185 - RNA, 24 nt, Artificial Sequence
  Synthetic
augaagaagcucuuauuaaccuga

SEQ ID NO: 491186 - RNA, 18 nt, Artificial Sequence
  Synthetic
accuaacaucacaccuga

SEQ ID NO: 491187 - RNA, 19 nt, Artificial Sequence
  Synthetic
uaccuaacaucacaccuga

SEQ ID NO: 491188 - RNA, 20 nt, Artificial Sequence
  Synthetic
cuaccuaacaucacaccuga

SEQ ID NO: 491189 - RNA, 21 nt, Artificial Sequence
  Synthetic
acuaccuaacaucacaccuga

SEQ ID NO: 491190 - RNA, 22 nt, Artificial Sequence
  Synthetic
gacuaccuaacaucacaccuga

SEQ ID NO: 491191 - RNA, 23 nt, Artificial Sequence
  Synthetic
ugacuaccuaacaucacaccuga

SEQ ID NO: 491192 - RNA, 24 nt, Artificial Sequence
  Synthetic
cugacuaccuaacaucacaccuga

SEQ ID NO: 491193 - RNA, 18 nt, Artificial Sequence
  Synthetic
uuuccucacagcaccuga

SEQ ID NO: 491194 - RNA, 19 nt, Artificial Sequence
  Synthetic
uuuuccucacagcaccuga

SEQ ID NO: 491195 - RNA, 20 nt, Artificial Sequence
  Synthetic
uuuuuccucacagcaccuga

SEQ ID NO: 491196 - RNA, 21 nt, Artificial Sequence
  Synthetic
guuuuuccucacagcaccuga

SEQ ID NO: 491197 - RNA, 22 nt, Artificial Sequence
  Synthetic
uguuuuuccucacagcaccuga

SEQ ID NO: 491198 - RNA, 23 nt, Artificial Sequence
  Synthetic
uuguuuuuccucacagcaccuga

SEQ ID NO: 491199 - RNA, 24 nt, Artificial Sequence
  Synthetic
uuuguuuuuccucacagcaccuga

SEQ ID NO: 491200 - RNA, 18 nt, Artificial Sequence
  Synthetic
uucucuguuuggaccuga

SEQ ID NO: 491201 - RNA, 19 nt, Artificial Sequence
  Synthetic
uuucucuguuuggaccuga

SEQ ID NO: 491202 - RNA, 20 nt, Artificial Sequence
  Synthetic
guuucucuguuuggaccuga

SEQ ID NO: 491203 - RNA, 21 nt, Artificial Sequence
  Synthetic
aguuucucuguuuggaccuga

SEQ ID NO: 491204 - RNA, 22 nt, Artificial Sequence
  Synthetic
uaguuucucuguuuggaccuga

SEQ ID NO: 491205 - RNA, 23 nt, Artificial Sequence
  Synthetic
cuaguuucucuguuuggaccuga

SEQ ID NO: 491206 - RNA, 24 nt, Artificial Sequence
  Synthetic
ccuaguuucucuguuuggaccuga

SEQ ID NO: 491207 - RNA, 18 nt, Artificial Sequence
  Synthetic
cuaauagacaauaccuga

SEQ ID NO: 491208 - RNA, 19 nt, Artificial Sequence
  Synthetic
ucuaauagacaauaccuga

SEQ ID NO: 491209 - RNA, 20 nt, Artificial Sequence
  Synthetic
aucuaauagacaauaccuga

SEQ ID NO: 491210 - RNA, 21 nt, Artificial Sequence
  Synthetic
caucuaauagacaauaccuga

SEQ ID NO: 491211 - RNA, 22 nt, Artificial Sequence
  Synthetic
ccaucuaauagacaauaccuga

SEQ ID NO: 491212 - RNA, 23 nt, Artificial Sequence
  Synthetic
accaucuaauagacaauaccuga

SEQ ID NO: 491213 - RNA, 24 nt, Artificial Sequence
  Synthetic
aaccaucuaauagacaauaccuga

SEQ ID NO: 491214 - RNA, 18 nt, Artificial Sequence
  Synthetic
acagucugcauuaccuga

SEQ ID NO: 491215 - RNA, 19 nt, Artificial Sequence
  Synthetic
cacagucugcauuaccuga

SEQ ID NO: 491216 - RNA, 20 nt, Artificial Sequence
  Synthetic
acacagucugcauuaccuga

SEQ ID NO: 491217 - RNA, 21 nt, Artificial Sequence
  Synthetic
cacacagucugcauuaccuga

SEQ ID NO: 491218 - RNA, 22 nt, Artificial Sequence
  Synthetic
acacacagucugcauuaccuga

SEQ ID NO: 491219 - RNA, 23 nt, Artificial Sequence
  Synthetic
cacacacagucugcauuaccuga

SEQ ID NO: 491220 - RNA, 24 nt, Artificial Sequence
  Synthetic
ccacacacagucugcauuaccuga

SEQ ID NO: 491221 - RNA, 18 nt, Artificial Sequence
  Synthetic
acacacgaagaacccuga

SEQ ID NO: 491222 - RNA, 19 nt, Artificial Sequence
  Synthetic
aacacacgaagaacccuga

SEQ ID NO: 491223 - RNA, 20 nt, Artificial Sequence
  Synthetic
uaacacacgaagaacccuga

SEQ ID NO: 491224 - RNA, 21 nt, Artificial Sequence
  Synthetic
guaacacacgaagaacccuga

SEQ ID NO: 491225 - RNA, 22 nt, Artificial Sequence
  Synthetic
aguaacacacgaagaacccuga

SEQ ID NO: 491226 - RNA, 23 nt, Artificial Sequence
  Synthetic
uaguaacacacgaagaacccuga

SEQ ID NO: 491227 - RNA, 24 nt, Artificial Sequence
  Synthetic
cuaguaacacacgaagaacccuga

SEQ ID NO: 491228 - RNA, 18 nt, Artificial Sequence
  Synthetic
ugcauucuuuuacccuga

SEQ ID NO: 491229 - RNA, 19 nt, Artificial Sequence
  Synthetic
cugcauucuuuuacccuga

SEQ ID NO: 491230 - RNA, 20 nt, Artificial Sequence
  Synthetic
ccugcauucuuuuacccuga

SEQ ID NO: 491231 - RNA, 21 nt, Artificial Sequence
  Synthetic
cccugcauucuuuuacccuga

SEQ ID NO: 491232 - RNA, 22 nt, Artificial Sequence
  Synthetic
gcccugcauucuuuuacccuga

SEQ ID NO: 491233 - RNA, 23 nt, Artificial Sequence
  Synthetic
agcccugcauucuuuuacccuga

SEQ ID NO: 491234 - RNA, 24 nt, Artificial Sequence
  Synthetic
cagcccugcauucuuuuacccuga

SEQ ID NO: 491235 - RNA, 18 nt, Artificial Sequence
  Synthetic
uuaucuauaagccccuga

SEQ ID NO: 491236 - RNA, 19 nt, Artificial Sequence
  Synthetic
uuuaucuauaagccccuga

SEQ ID NO: 491237 - RNA, 20 nt, Artificial Sequence
  Synthetic
uuuuaucuauaagccccuga

SEQ ID NO: 491238 - RNA, 21 nt, Artificial Sequence
  Synthetic
guuuuaucuauaagccccuga

SEQ ID NO: 491239 - RNA, 22 nt, Artificial Sequence
  Synthetic
aguuuuaucuauaagccccuga

SEQ ID NO: 491240 - RNA, 23 nt, Artificial Sequence
  Synthetic
gaguuuuaucuauaagccccuga

SEQ ID NO: 491241 - RNA, 24 nt, Artificial Sequence
  Synthetic
ggaguuuuaucuauaagccccuga

SEQ ID NO: 491242 - RNA, 18 nt, Artificial Sequence
  Synthetic
aacaaucagauccccuga

SEQ ID NO: 491243 - RNA, 19 nt, Artificial Sequence
  Synthetic
uaacaaucagauccccuga

SEQ ID NO: 491244 - RNA, 20 nt, Artificial Sequence
  Synthetic
cuaacaaucagauccccuga

SEQ ID NO: 491245 - RNA, 21 nt, Artificial Sequence
  Synthetic
ucuaacaaucagauccccuga

SEQ ID NO: 491246 - RNA, 22 nt, Artificial Sequence
  Synthetic
gucuaacaaucagauccccuga

SEQ ID NO: 491247 - RNA, 23 nt, Artificial Sequence
  Synthetic
ugucuaacaaucagauccccuga

SEQ ID NO: 491248 - RNA, 24 nt, Artificial Sequence
  Synthetic
augucuaacaaucagauccccuga

SEQ ID NO: 491249 - RNA, 18 nt, Artificial Sequence
  Synthetic
cccaccugcguccccuga

SEQ ID NO: 491250 - RNA, 19 nt, Artificial Sequence
  Synthetic
ccccaccugcguccccuga

SEQ ID NO: 491251 - RNA, 20 nt, Artificial Sequence
  Synthetic
accccaccugcguccccuga

SEQ ID NO: 491252 - RNA, 21 nt, Artificial Sequence
  Synthetic
caccccaccugcguccccuga

SEQ ID NO: 491253 - RNA, 22 nt, Artificial Sequence
  Synthetic
acaccccaccugcguccccuga

SEQ ID NO: 491254 - RNA, 23 nt, Artificial Sequence
  Synthetic
uacaccccaccugcguccccuga

SEQ ID NO: 491255 - RNA, 24 nt, Artificial Sequence
  Synthetic
cuacaccccaccugcguccccuga

SEQ ID NO: 491256 - RNA, 18 nt, Artificial Sequence
  Synthetic
cacauuuuaaggcccuga

SEQ ID NO: 491257 - RNA, 19 nt, Artificial Sequence
  Synthetic
acacauuuuaaggcccuga

SEQ ID NO: 491258 - RNA, 20 nt, Artificial Sequence
  Synthetic
gacacauuuuaaggcccuga

SEQ ID NO: 491259 - RNA, 21 nt, Artificial Sequence
  Synthetic
ugacacauuuuaaggcccuga

SEQ ID NO: 491260 - RNA, 22 nt, Artificial Sequence
  Synthetic
augacacauuuuaaggcccuga

SEQ ID NO: 491261 - RNA, 23 nt, Artificial Sequence
  Synthetic
aaugacacauuuuaaggcccuga

SEQ ID NO: 491262 - RNA, 24 nt, Artificial Sequence
  Synthetic
aaaugacacauuuuaaggcccuga

SEQ ID NO: 491263 - RNA, 18 nt, Artificial Sequence
  Synthetic
aggcaucugccucccuga

SEQ ID NO: 491264 - RNA, 19 nt, Artificial Sequence
  Synthetic
caggcaucugccucccuga

SEQ ID NO: 491265 - RNA, 20 nt, Artificial Sequence
  Synthetic
gcaggcaucugccucccuga

SEQ ID NO: 491266 - RNA, 21 nt, Artificial Sequence
  Synthetic
ggcaggcaucugccucccuga

SEQ ID NO: 491267 - RNA, 22 nt, Artificial Sequence
  Synthetic
aggcaggcaucugccucccuga

SEQ ID NO: 491268 - RNA, 23 nt, Artificial Sequence
  Synthetic
aaggcaggcaucugccucccuga

SEQ ID NO: 491269 - RNA, 24 nt, Artificial Sequence
  Synthetic
aaaggcaggcaucugccucccuga

SEQ ID NO: 491270 - RNA, 18 nt, Artificial Sequence
  Synthetic
aaccaccauugucccuga

SEQ ID NO: 491271 - RNA, 19 nt, Artificial Sequence
  Synthetic
uaaccaccauugucccuga

SEQ ID NO: 491272 - RNA, 20 nt, Artificial Sequence
  Synthetic
uuaaccaccauugucccuga

SEQ ID NO: 491273 - RNA, 21 nt, Artificial Sequence
  Synthetic
guuaaccaccauugucccuga

SEQ ID NO: 491274 - RNA, 22 nt, Artificial Sequence
  Synthetic
uguuaaccaccauugucccuga

SEQ ID NO: 491275 - RNA, 23 nt, Artificial Sequence
  Synthetic
guguuaaccaccauugucccuga

SEQ ID NO: 491276 - RNA, 24 nt, Artificial Sequence
  Synthetic
uguguuaaccaccauugucccuga

SEQ ID NO: 491277 - RNA, 18 nt, Artificial Sequence
  Synthetic
aucuggcagauucccuga

SEQ ID NO: 491278 - RNA, 19 nt, Artificial Sequence
  Synthetic
caucuggcagauucccuga

SEQ ID NO: 491279 - RNA, 20 nt, Artificial Sequence
  Synthetic
acaucuggcagauucccuga

SEQ ID NO: 491280 - RNA, 21 nt, Artificial Sequence
  Synthetic
gacaucuggcagauucccuga

SEQ ID NO: 491281 - RNA, 22 nt, Artificial Sequence
  Synthetic
ggacaucuggcagauucccuga

SEQ ID NO: 491282 - RNA, 23 nt, Artificial Sequence
  Synthetic
uggacaucuggcagauucccuga

SEQ ID NO: 491283 - RNA, 24 nt, Artificial Sequence
  Synthetic
cuggacaucuggcagauucccuga

SEQ ID NO: 491284 - RNA, 18 nt, Artificial Sequence
  Synthetic
cagcuaaggauucccuga

SEQ ID NO: 491285 - RNA, 19 nt, Artificial Sequence
  Synthetic
acagcuaaggauucccuga

SEQ ID NO: 491286 - RNA, 20 nt, Artificial Sequence
  Synthetic
aacagcuaaggauucccuga

SEQ ID NO: 491287 - RNA, 21 nt, Artificial Sequence
  Synthetic
gaacagcuaaggauucccuga

SEQ ID NO: 491288 - RNA, 22 nt, Artificial Sequence
  Synthetic
ugaacagcuaaggauucccuga

SEQ ID NO: 491289 - RNA, 23 nt, Artificial Sequence
  Synthetic
uugaacagcuaaggauucccuga

SEQ ID NO: 491290 - RNA, 24 nt, Artificial Sequence
  Synthetic
auugaacagcuaaggauucccuga

SEQ ID NO: 491291 - RNA, 18 nt, Artificial Sequence
  Synthetic
aauuugcucuaagccuga

SEQ ID NO: 491292 - RNA, 19 nt, Artificial Sequence
  Synthetic
gaauuugcucuaagccuga

SEQ ID NO: 491293 - RNA, 20 nt, Artificial Sequence
  Synthetic
agaauuugcucuaagccuga

SEQ ID NO: 491294 - RNA, 21 nt, Artificial Sequence
  Synthetic
cagaauuugcucuaagccuga

SEQ ID NO: 491295 - RNA, 22 nt, Artificial Sequence
  Synthetic
ucagaauuugcucuaagccuga

SEQ ID NO: 491296 - RNA, 23 nt, Artificial Sequence
  Synthetic
cucagaauuugcucuaagccuga

SEQ ID NO: 491297 - RNA, 24 nt, Artificial Sequence
  Synthetic
ucucagaauuugcucuaagccuga

SEQ ID NO: 491298 - RNA, 18 nt, Artificial Sequence
  Synthetic
auuuugauggcagccuga

SEQ ID NO: 491299 - RNA, 19 nt, Artificial Sequence
  Synthetic
cauuuugauggcagccuga

SEQ ID NO: 491300 - RNA, 20 nt, Artificial Sequence
  Synthetic
ucauuuugauggcagccuga

SEQ ID NO: 491301 - RNA, 21 nt, Artificial Sequence
  Synthetic
cucauuuugauggcagccuga

SEQ ID NO: 491302 - RNA, 22 nt, Artificial Sequence
  Synthetic
ucucauuuugauggcagccuga

SEQ ID NO: 491303 - RNA, 23 nt, Artificial Sequence
  Synthetic
gucucauuuugauggcagccuga

SEQ ID NO: 491304 - RNA, 24 nt, Artificial Sequence
  Synthetic
agucucauuuugauggcagccuga

SEQ ID NO: 491305 - RNA, 18 nt, Artificial Sequence
  Synthetic
uuaacuacaugggccuga

SEQ ID NO: 491306 - RNA, 19 nt, Artificial Sequence
  Synthetic
auuaacuacaugggccuga

SEQ ID NO: 491307 - RNA, 20 nt, Artificial Sequence
  Synthetic
aauuaacuacaugggccuga

SEQ ID NO: 491308 - RNA, 21 nt, Artificial Sequence
  Synthetic
gaauuaacuacaugggccuga

SEQ ID NO: 491309 - RNA, 22 nt, Artificial Sequence
  Synthetic
agaauuaacuacaugggccuga

SEQ ID NO: 491310 - RNA, 23 nt, Artificial Sequence
  Synthetic
aagaauuaacuacaugggccuga

SEQ ID NO: 491311 - RNA, 24 nt, Artificial Sequence
  Synthetic
caagaauuaacuacaugggccuga

SEQ ID NO: 491312 - RNA, 18 nt, Artificial Sequence
  Synthetic
uuguuaauuccauccuga

SEQ ID NO: 491313 - RNA, 19 nt, Artificial Sequence
  Synthetic
uuuguuaauuccauccuga

SEQ ID NO: 491314 - RNA, 20 nt, Artificial Sequence
  Synthetic
auuuguuaauuccauccuga

SEQ ID NO: 491315 - RNA, 21 nt, Artificial Sequence
  Synthetic
aauuuguuaauuccauccuga

SEQ ID NO: 491316 - RNA, 22 nt, Artificial Sequence
  Synthetic
aaauuuguuaauuccauccuga

SEQ ID NO: 491317 - RNA, 23 nt, Artificial Sequence
  Synthetic
caaauuuguuaauuccauccuga

SEQ ID NO: 491318 - RNA, 24 nt, Artificial Sequence
  Synthetic
ucaaauuuguuaauuccauccuga

SEQ ID NO: 491319 - RNA, 18 nt, Artificial Sequence
  Synthetic
ucuuggcuguuauccuga

SEQ ID NO: 491320 - RNA, 19 nt, Artificial Sequence
  Synthetic
aucuuggcuguuauccuga

SEQ ID NO: 491321 - RNA, 20 nt, Artificial Sequence
  Synthetic
gaucuuggcuguuauccuga

SEQ ID NO: 491322 - RNA, 21 nt, Artificial Sequence
  Synthetic
ggaucuuggcuguuauccuga

SEQ ID NO: 491323 - RNA, 22 nt, Artificial Sequence
  Synthetic
aggaucuuggcuguuauccuga

SEQ ID NO: 491324 - RNA, 23 nt, Artificial Sequence
  Synthetic
aaggaucuuggcuguuauccuga

SEQ ID NO: 491325 - RNA, 24 nt, Artificial Sequence
  Synthetic
gaaggaucuuggcuguuauccuga

SEQ ID NO: 491326 - RNA, 18 nt, Artificial Sequence
  Synthetic
acgggaaauuuauccuga

SEQ ID NO: 491327 - RNA, 19 nt, Artificial Sequence
  Synthetic
cacgggaaauuuauccuga

SEQ ID NO: 491328 - RNA, 20 nt, Artificial Sequence
  Synthetic
ucacgggaaauuuauccuga

SEQ ID NO: 491329 - RNA, 21 nt, Artificial Sequence
  Synthetic
uucacgggaaauuuauccuga

SEQ ID NO: 491330 - RNA, 22 nt, Artificial Sequence
  Synthetic
uuucacgggaaauuuauccuga

SEQ ID NO: 491331 - RNA, 23 nt, Artificial Sequence
  Synthetic
auuucacgggaaauuuauccuga

SEQ ID NO: 491332 - RNA, 24 nt, Artificial Sequence
  Synthetic
uauuucacgggaaauuuauccuga

SEQ ID NO: 491333 - RNA, 18 nt, Artificial Sequence
  Synthetic
gcuaauagacacuccuga

SEQ ID NO: 491334 - RNA, 19 nt, Artificial Sequence
  Synthetic
agcuaauagacacuccuga

SEQ ID NO: 491335 - RNA, 20 nt, Artificial Sequence
  Synthetic
gagcuaauagacacuccuga

SEQ ID NO: 491336 - RNA, 21 nt, Artificial Sequence
  Synthetic
ggagcuaauagacacuccuga

SEQ ID NO: 491337 - RNA, 22 nt, Artificial Sequence
  Synthetic
gggagcuaauagacacuccuga

SEQ ID NO: 491338 - RNA, 23 nt, Artificial Sequence
  Synthetic
ugggagcuaauagacacuccuga

SEQ ID NO: 491339 - RNA, 24 nt, Artificial Sequence
  Synthetic
augggagcuaauagacacuccuga

SEQ ID NO: 491340 - RNA, 18 nt, Artificial Sequence
  Synthetic
cccuaaaagagcuccuga

SEQ ID NO: 491341 - RNA, 19 nt, Artificial Sequence
  Synthetic
gcccuaaaagagcuccuga

SEQ ID NO: 491342 - RNA, 20 nt, Artificial Sequence
  Synthetic
ugcccuaaaagagcuccuga

SEQ ID NO: 491343 - RNA, 21 nt, Artificial Sequence
  Synthetic
cugcccuaaaagagcuccuga

SEQ ID NO: 491344 - RNA, 22 nt, Artificial Sequence
  Synthetic
ccugcccuaaaagagcuccuga

SEQ ID NO: 491345 - RNA, 23 nt, Artificial Sequence
  Synthetic
gccugcccuaaaagagcuccuga

SEQ ID NO: 491346 - RNA, 24 nt, Artificial Sequence
  Synthetic
ggccugcccuaaaagagcuccuga

SEQ ID NO: 491347 - RNA, 18 nt, Artificial Sequence
  Synthetic
ggaaugaagugcuccuga

SEQ ID NO: 491348 - RNA, 19 nt, Artificial Sequence
  Synthetic
cggaaugaagugcuccuga

SEQ ID NO: 491349 - RNA, 20 nt, Artificial Sequence
  Synthetic
ucggaaugaagugcuccuga

SEQ ID NO: 491350 - RNA, 21 nt, Artificial Sequence
  Synthetic
gucggaaugaagugcuccuga

SEQ ID NO: 491351 - RNA, 22 nt, Artificial Sequence
  Synthetic
ugucggaaugaagugcuccuga

SEQ ID NO: 491352 - RNA, 23 nt, Artificial Sequence
  Synthetic
uugucggaaugaagugcuccuga

SEQ ID NO: 491353 - RNA, 24 nt, Artificial Sequence
  Synthetic
cuugucggaaugaagugcuccuga

SEQ ID NO: 491354 - RNA, 18 nt, Artificial Sequence
  Synthetic
auguugggcaucuccuga

SEQ ID NO: 491355 - RNA, 19 nt, Artificial Sequence
  Synthetic
gauguugggcaucuccuga

SEQ ID NO: 491356 - RNA, 20 nt, Artificial Sequence
  Synthetic
ggauguugggcaucuccuga

SEQ ID NO: 491357 - RNA, 21 nt, Artificial Sequence
  Synthetic
aggauguugggcaucuccuga

SEQ ID NO: 491358 - RNA, 22 nt, Artificial Sequence
  Synthetic
uaggauguugggcaucuccuga

SEQ ID NO: 491359 - RNA, 23 nt, Artificial Sequence
  Synthetic
cuaggauguugggcaucuccuga

SEQ ID NO: 491360 - RNA, 24 nt, Artificial Sequence
  Synthetic
ucuaggauguugggcaucuccuga

SEQ ID NO: 491361 - RNA, 18 nt, Artificial Sequence
  Synthetic
agguaaaacaauuccuga

SEQ ID NO: 491362 - RNA, 19 nt, Artificial Sequence
  Synthetic
gagguaaaacaauuccuga

SEQ ID NO: 491363 - RNA, 20 nt, Artificial Sequence
  Synthetic
agagguaaaacaauuccuga

SEQ ID NO: 491364 - RNA, 21 nt, Artificial Sequence
  Synthetic
uagagguaaaacaauuccuga

SEQ ID NO: 491365 - RNA, 22 nt, Artificial Sequence
  Synthetic
auagagguaaaacaauuccuga

SEQ ID NO: 491366 - RNA, 23 nt, Artificial Sequence
  Synthetic
aauagagguaaaacaauuccuga

SEQ ID NO: 491367 - RNA, 24 nt, Artificial Sequence
  Synthetic
uaauagagguaaaacaauuccuga

SEQ ID NO: 491368 - RNA, 18 nt, Artificial Sequence
  Synthetic
uuucaauguuauuccuga

SEQ ID NO: 491369 - RNA, 19 nt, Artificial Sequence
  Synthetic
auuucaauguuauuccuga

SEQ ID NO: 491370 - RNA, 20 nt, Artificial Sequence
  Synthetic
uauuucaauguuauuccuga

SEQ ID NO: 491371 - RNA, 21 nt, Artificial Sequence
  Synthetic
uuauuucaauguuauuccuga

SEQ ID NO: 491372 - RNA, 22 nt, Artificial Sequence
  Synthetic
uuuauuucaauguuauuccuga

SEQ ID NO: 491373 - RNA, 23 nt, Artificial Sequence
  Synthetic
cuuuauuucaauguuauuccuga

SEQ ID NO: 491374 - RNA, 24 nt, Artificial Sequence
  Synthetic
ucuuuauuucaauguuauuccuga

SEQ ID NO: 491375 - RNA, 18 nt, Artificial Sequence
  Synthetic
accauauuuauuuccuga

SEQ ID NO: 491376 - RNA, 19 nt, Artificial Sequence
  Synthetic
aaccauauuuauuuccuga

SEQ ID NO: 491377 - RNA, 20 nt, Artificial Sequence
  Synthetic
uaaccauauuuauuuccuga

SEQ ID NO: 491378 - RNA, 21 nt, Artificial Sequence
  Synthetic
uuaaccauauuuauuuccuga

SEQ ID NO: 491379 - RNA, 22 nt, Artificial Sequence
  Synthetic
uuuaaccauauuuauuuccuga

SEQ ID NO: 491380 - RNA, 23 nt, Artificial Sequence
  Synthetic
uuuuaaccauauuuauuuccuga

SEQ ID NO: 491381 - RNA, 24 nt, Artificial Sequence
  Synthetic
uuuuuaaccauauuuauuuccuga

SEQ ID NO: 491382 - RNA, 18 nt, Artificial Sequence
  Synthetic
uguuuacuuuuuuccuga

SEQ ID NO: 491383 - RNA, 19 nt, Artificial Sequence
  Synthetic
uuguuuacuuuuuuccuga

SEQ ID NO: 491384 - RNA, 20 nt, Artificial Sequence
  Synthetic
auuguuuacuuuuuuccuga

SEQ ID NO: 491385 - RNA, 21 nt, Artificial Sequence
  Synthetic
uauuguuuacuuuuuuccuga

SEQ ID NO: 491386 - RNA, 22 nt, Artificial Sequence
  Synthetic
auauuguuuacuuuuuuccuga

SEQ ID NO: 491387 - RNA, 23 nt, Artificial Sequence
  Synthetic
aauauuguuuacuuuuuuccuga

SEQ ID NO: 491388 - RNA, 24 nt, Artificial Sequence
  Synthetic
aaauauuguuuacuuuuuuccuga

SEQ ID NO: 491389 - RNA, 18 nt, Artificial Sequence
  Synthetic
uguuauaauaaaagcuga

SEQ ID NO: 491390 - RNA, 19 nt, Artificial Sequence
  Synthetic
auguuauaauaaaagcuga

SEQ ID NO: 491391 - RNA, 20 nt, Artificial Sequence
  Synthetic
aauguuauaauaaaagcuga

SEQ ID NO: 491392 - RNA, 21 nt, Artificial Sequence
  Synthetic
caauguuauaauaaaagcuga

SEQ ID NO: 491393 - RNA, 22 nt, Artificial Sequence
  Synthetic
ccaauguuauaauaaaagcuga

SEQ ID NO: 491394 - RNA, 23 nt, Artificial Sequence
  Synthetic
cccaauguuauaauaaaagcuga

SEQ ID NO: 491395 - RNA, 24 nt, Artificial Sequence
  Synthetic
ucccaauguuauaauaaaagcuga

SEQ ID NO: 491396 - RNA, 18 nt, Artificial Sequence
  Synthetic
ugucacuaacaaagcuga

SEQ ID NO: 491397 - RNA, 19 nt, Artificial Sequence
  Synthetic
cugucacuaacaaagcuga

SEQ ID NO: 491398 - RNA, 20 nt, Artificial Sequence
  Synthetic
ccugucacuaacaaagcuga

SEQ ID NO: 491399 - RNA, 21 nt, Artificial Sequence
  Synthetic
cccugucacuaacaaagcuga

SEQ ID NO: 491400 - RNA, 22 nt, Artificial Sequence
  Synthetic
ucccugucacuaacaaagcuga

SEQ ID NO: 491401 - RNA, 23 nt, Artificial Sequence
  Synthetic
aucccugucacuaacaaagcuga

SEQ ID NO: 491402 - RNA, 24 nt, Artificial Sequence
  Synthetic
aaucccugucacuaacaaagcuga

SEQ ID NO: 491403 - RNA, 18 nt, Artificial Sequence
  Synthetic
agcucuucacaaagcuga

SEQ ID NO: 491404 - RNA, 19 nt, Artificial Sequence
  Synthetic
aagcucuucacaaagcuga

SEQ ID NO: 491405 - RNA, 20 nt, Artificial Sequence
  Synthetic
uaagcucuucacaaagcuga

SEQ ID NO: 491406 - RNA, 21 nt, Artificial Sequence
  Synthetic
auaagcucuucacaaagcuga

SEQ ID NO: 491407 - RNA, 22 nt, Artificial Sequence
  Synthetic
gauaagcucuucacaaagcuga

SEQ ID NO: 491408 - RNA, 23 nt, Artificial Sequence
  Synthetic
agauaagcucuucacaaagcuga

SEQ ID NO: 491409 - RNA, 24 nt, Artificial Sequence
  Synthetic
aagauaagcucuucacaaagcuga

SEQ ID NO: 491410 - RNA, 18 nt, Artificial Sequence
  Synthetic
gcauucaccacaagcuga

SEQ ID NO: 491411 - RNA, 19 nt, Artificial Sequence
  Synthetic
agcauucaccacaagcuga

SEQ ID NO: 491412 - RNA, 20 nt, Artificial Sequence
  Synthetic
cagcauucaccacaagcuga

SEQ ID NO: 491413 - RNA, 21 nt, Artificial Sequence
  Synthetic
ucagcauucaccacaagcuga

SEQ ID NO: 491414 - RNA, 22 nt, Artificial Sequence
  Synthetic
cucagcauucaccacaagcuga

SEQ ID NO: 491415 - RNA, 23 nt, Artificial Sequence
  Synthetic
ucucagcauucaccacaagcuga

SEQ ID NO: 491416 - RNA, 24 nt, Artificial Sequence
  Synthetic
cucucagcauucaccacaagcuga

SEQ ID NO: 491417 - RNA, 18 nt, Artificial Sequence
  Synthetic
ucaaguuuaucaagcuga

SEQ ID NO: 491418 - RNA, 19 nt, Artificial Sequence
  Synthetic
uucaaguuuaucaagcuga

SEQ ID NO: 491419 - RNA, 20 nt, Artificial Sequence
  Synthetic
auucaaguuuaucaagcuga

SEQ ID NO: 491420 - RNA, 21 nt, Artificial Sequence
  Synthetic
uauucaaguuuaucaagcuga

SEQ ID NO: 491421 - RNA, 22 nt, Artificial Sequence
  Synthetic
uuauucaaguuuaucaagcuga

SEQ ID NO: 491422 - RNA, 23 nt, Artificial Sequence
  Synthetic
uuuauucaaguuuaucaagcuga

SEQ ID NO: 491423 - RNA, 24 nt, Artificial Sequence
  Synthetic
auuuauucaaguuuaucaagcuga

SEQ ID NO: 491424 - RNA, 18 nt, Artificial Sequence
  Synthetic
uggauauaaagaagcuga

SEQ ID NO: 491425 - RNA, 19 nt, Artificial Sequence
  Synthetic
cuggauauaaagaagcuga

SEQ ID NO: 491426 - RNA, 20 nt, Artificial Sequence
  Synthetic
ccuggauauaaagaagcuga

SEQ ID NO: 491427 - RNA, 21 nt, Artificial Sequence
  Synthetic
gccuggauauaaagaagcuga

SEQ ID NO: 491428 - RNA, 22 nt, Artificial Sequence
  Synthetic
ugccuggauauaaagaagcuga

SEQ ID NO: 491429 - RNA, 23 nt, Artificial Sequence
  Synthetic
augccuggauauaaagaagcuga

SEQ ID NO: 491430 - RNA, 24 nt, Artificial Sequence
  Synthetic
uaugccuggauauaaagaagcuga

SEQ ID NO: 491431 - RNA, 18 nt, Artificial Sequence
  Synthetic
ugcagaaauugaagcuga

SEQ ID NO: 491432 - RNA, 19 nt, Artificial Sequence
  Synthetic
gugcagaaauugaagcuga

SEQ ID NO: 491433 - RNA, 20 nt, Artificial Sequence
  Synthetic
ugugcagaaauugaagcuga

SEQ ID NO: 491434 - RNA, 21 nt, Artificial Sequence
  Synthetic
uugugcagaaauugaagcuga

SEQ ID NO: 491435 - RNA, 22 nt, Artificial Sequence
  Synthetic
auugugcagaaauugaagcuga

SEQ ID NO: 491436 - RNA, 23 nt, Artificial Sequence
  Synthetic
aauugugcagaaauugaagcuga

SEQ ID NO: 491437 - RNA, 24 nt, Artificial Sequence
  Synthetic
gaauugugcagaaauugaagcuga

SEQ ID NO: 491438 - RNA, 18 nt, Artificial Sequence
  Synthetic
auuccccuuuacagcuga

SEQ ID NO: 491439 - RNA, 19 nt, Artificial Sequence
  Synthetic
uauuccccuuuacagcuga

SEQ ID NO: 491440 - RNA, 20 nt, Artificial Sequence
  Synthetic
uuauuccccuuuacagcuga

SEQ ID NO: 491441 - RNA, 21 nt, Artificial Sequence
  Synthetic
uuuauuccccuuuacagcuga

SEQ ID NO: 491442 - RNA, 22 nt, Artificial Sequence
  Synthetic
auuuauuccccuuuacagcuga

SEQ ID NO: 491443 - RNA, 23 nt, Artificial Sequence
  Synthetic
uauuuauuccccuuuacagcuga

SEQ ID NO: 491444 - RNA, 24 nt, Artificial Sequence
  Synthetic
uuauuuauuccccuuuacagcuga

SEQ ID NO: 491445 - RNA, 18 nt, Artificial Sequence
  Synthetic
uaccaagacuccagcuga

SEQ ID NO: 491446 - RNA, 19 nt, Artificial Sequence
  Synthetic
auaccaagacuccagcuga

SEQ ID NO: 491447 - RNA, 20 nt, Artificial Sequence
  Synthetic
gauaccaagacuccagcuga

SEQ ID NO: 491448 - RNA, 21 nt, Artificial Sequence
  Synthetic
ugauaccaagacuccagcuga

SEQ ID NO: 491449 - RNA, 22 nt, Artificial Sequence
  Synthetic
cugauaccaagacuccagcuga

SEQ ID NO: 491450 - RNA, 23 nt, Artificial Sequence
  Synthetic
ccugauaccaagacuccagcuga

SEQ ID NO: 491451 - RNA, 24 nt, Artificial Sequence
  Synthetic
accugauaccaagacuccagcuga

SEQ ID NO: 491452 - RNA, 18 nt, Artificial Sequence
  Synthetic
aaggagaauggcagcuga

SEQ ID NO: 491453 - RNA, 19 nt, Artificial Sequence
  Synthetic
uaaggagaauggcagcuga

SEQ ID NO: 491454 - RNA, 20 nt, Artificial Sequence
  Synthetic
uuaaggagaauggcagcuga

SEQ ID NO: 491455 - RNA, 21 nt, Artificial Sequence
  Synthetic
auuaaggagaauggcagcuga

SEQ ID NO: 491456 - RNA, 22 nt, Artificial Sequence
  Synthetic
uauuaaggagaauggcagcuga

SEQ ID NO: 491457 - RNA, 23 nt, Artificial Sequence
  Synthetic
guauuaaggagaauggcagcuga

SEQ ID NO: 491458 - RNA, 24 nt, Artificial Sequence
  Synthetic
aguauuaaggagaauggcagcuga

SEQ ID NO: 491459 - RNA, 18 nt, Artificial Sequence
  Synthetic
uucaaauuucagagcuga

SEQ ID NO: 491460 - RNA, 19 nt, Artificial Sequence
  Synthetic
uuucaaauuucagagcuga

SEQ ID NO: 491461 - RNA, 20 nt, Artificial Sequence
  Synthetic
uuuucaaauuucagagcuga

SEQ ID NO: 491462 - RNA, 21 nt, Artificial Sequence
  Synthetic
uuuuucaaauuucagagcuga

SEQ ID NO: 491463 - RNA, 22 nt, Artificial Sequence
  Synthetic
uuuuuucaaauuucagagcuga

SEQ ID NO: 491464 - RNA, 23 nt, Artificial Sequence
  Synthetic
uuuuuuucaaauuucagagcuga

SEQ ID NO: 491465 - RNA, 24 nt, Artificial Sequence
  Synthetic
uuuuuuuucaaauuucagagcuga

SEQ ID NO: 491466 - RNA, 18 nt, Artificial Sequence
  Synthetic
agaggaaaagagagcuga

SEQ ID NO: 491467 - RNA, 19 nt, Artificial Sequence
  Synthetic
aagaggaaaagagagcuga

SEQ ID NO: 491468 - RNA, 20 nt, Artificial Sequence
  Synthetic
gaagaggaaaagagagcuga

SEQ ID NO: 491469 - RNA, 21 nt, Artificial Sequence
  Synthetic
cgaagaggaaaagagagcuga

SEQ ID NO: 491470 - RNA, 22 nt, Artificial Sequence
  Synthetic
ccgaagaggaaaagagagcuga

SEQ ID NO: 491471 - RNA, 23 nt, Artificial Sequence
  Synthetic
accgaagaggaaaagagagcuga

SEQ ID NO: 491472 - RNA, 24 nt, Artificial Sequence
  Synthetic
aaccgaagaggaaaagagagcuga

SEQ ID NO: 491473 - RNA, 18 nt, Artificial Sequence
  Synthetic
agugcuuaaaggagcuga

SEQ ID NO: 491474 - RNA, 19 nt, Artificial Sequence
  Synthetic
aagugcuuaaaggagcuga

SEQ ID NO: 491475 - RNA, 20 nt, Artificial Sequence
  Synthetic
gaagugcuuaaaggagcuga

SEQ ID NO: 491476 - RNA, 21 nt, Artificial Sequence
  Synthetic
agaagugcuuaaaggagcuga

SEQ ID NO: 491477 - RNA, 22 nt, Artificial Sequence
  Synthetic
gagaagugcuuaaaggagcuga

SEQ ID NO: 491478 - RNA, 23 nt, Artificial Sequence
  Synthetic
agagaagugcuuaaaggagcuga

SEQ ID NO: 491479 - RNA, 24 nt, Artificial Sequence
  Synthetic
cagagaagugcuuaaaggagcuga

SEQ ID NO: 491480 - RNA, 18 nt, Artificial Sequence
  Synthetic
auaccgcugcugagcuga

SEQ ID NO: 491481 - RNA, 19 nt, Artificial Sequence
  Synthetic
aauaccgcugcugagcuga

SEQ ID NO: 491482 - RNA, 20 nt, Artificial Sequence
  Synthetic
uaauaccgcugcugagcuga

SEQ ID NO: 491483 - RNA, 21 nt, Artificial Sequence
  Synthetic
cuaauaccgcugcugagcuga

SEQ ID NO: 491484 - RNA, 22 nt, Artificial Sequence
  Synthetic
ucuaauaccgcugcugagcuga

SEQ ID NO: 491485 - RNA, 23 nt, Artificial Sequence
  Synthetic
aucuaauaccgcugcugagcuga

SEQ ID NO: 491486 - RNA, 24 nt, Artificial Sequence
  Synthetic
aaucuaauaccgcugcugagcuga

SEQ ID NO: 491487 - RNA, 18 nt, Artificial Sequence
  Synthetic
auuacaaaauugagcuga

SEQ ID NO: 491488 - RNA, 19 nt, Artificial Sequence
  Synthetic
aauuacaaaauugagcuga

SEQ ID NO: 491489 - RNA, 20 nt, Artificial Sequence
  Synthetic
uaauuacaaaauugagcuga

SEQ ID NO: 491490 - RNA, 21 nt, Artificial Sequence
  Synthetic
uuaauuacaaaauugagcuga

SEQ ID NO: 491491 - RNA, 22 nt, Artificial Sequence
  Synthetic
guuaauuacaaaauugagcuga

SEQ ID NO: 491492 - RNA, 23 nt, Artificial Sequence
  Synthetic
uguuaauuacaaaauugagcuga

SEQ ID NO: 491493 - RNA, 24 nt, Artificial Sequence
  Synthetic
auguuaauuacaaaauugagcuga

SEQ ID NO: 491494 - RNA, 18 nt, Artificial Sequence
  Synthetic
ucugaaaaaauuagcuga

SEQ ID NO: 491495 - RNA, 19 nt, Artificial Sequence
  Synthetic
uucugaaaaaauuagcuga

SEQ ID NO: 491496 - RNA, 20 nt, Artificial Sequence
  Synthetic
auucugaaaaaauuagcuga

SEQ ID NO: 491497 - RNA, 21 nt, Artificial Sequence
  Synthetic
aauucugaaaaaauuagcuga

SEQ ID NO: 491498 - RNA, 22 nt, Artificial Sequence
  Synthetic
aaauucugaaaaaauuagcuga

SEQ ID NO: 491499 - RNA, 23 nt, Artificial Sequence
  Synthetic
aaaauucugaaaaaauuagcuga

SEQ ID NO: 491500 - RNA, 24 nt, Artificial Sequence
  Synthetic
uaaaauucugaaaaaauuagcuga

SEQ ID NO: 491501 - RNA, 18 nt, Artificial Sequence
  Synthetic
agcccacccauuagcuga

SEQ ID NO: 491502 - RNA, 19 nt, Artificial Sequence
  Synthetic
uagcccacccauuagcuga

SEQ ID NO: 491503 - RNA, 20 nt, Artificial Sequence
  Synthetic
cuagcccacccauuagcuga

SEQ ID NO: 491504 - RNA, 21 nt, Artificial Sequence
  Synthetic
ccuagcccacccauuagcuga

SEQ ID NO: 491505 - RNA, 22 nt, Artificial Sequence
  Synthetic
cccuagcccacccauuagcuga

SEQ ID NO: 491506 - RNA, 23 nt, Artificial Sequence
  Synthetic
ccccuagcccacccauuagcuga

SEQ ID NO: 491507 - RNA, 24 nt, Artificial Sequence
  Synthetic
gccccuagcccacccauuagcuga

SEQ ID NO: 491508 - RNA, 18 nt, Artificial Sequence
  Synthetic
aacuggucacuuagcuga

SEQ ID NO: 491509 - RNA, 19 nt, Artificial Sequence
  Synthetic
uaacuggucacuuagcuga

SEQ ID NO: 491510 - RNA, 20 nt, Artificial Sequence
  Synthetic
cuaacuggucacuuagcuga

SEQ ID NO: 491511 - RNA, 21 nt, Artificial Sequence
  Synthetic
acuaacuggucacuuagcuga

SEQ ID NO: 491512 - RNA, 22 nt, Artificial Sequence
  Synthetic
uacuaacuggucacuuagcuga

SEQ ID NO: 491513 - RNA, 23 nt, Artificial Sequence
  Synthetic
uuacuaacuggucacuuagcuga

SEQ ID NO: 491514 - RNA, 24 nt, Artificial Sequence
  Synthetic
cuuacuaacuggucacuuagcuga

SEQ ID NO: 491515 - RNA, 18 nt, Artificial Sequence
  Synthetic
acuguauagcuuagcuga

SEQ ID NO: 491516 - RNA, 19 nt, Artificial Sequence
  Synthetic
gacuguauagcuuagcuga

SEQ ID NO: 491517 - RNA, 20 nt, Artificial Sequence
  Synthetic
ugacuguauagcuuagcuga

SEQ ID NO: 491518 - RNA, 21 nt, Artificial Sequence
  Synthetic
cugacuguauagcuuagcuga

SEQ ID NO: 491519 - RNA, 22 nt, Artificial Sequence
  Synthetic
acugacuguauagcuuagcuga

SEQ ID NO: 491520 - RNA, 23 nt, Artificial Sequence
  Synthetic
gacugacuguauagcuuagcuga

SEQ ID NO: 491521 - RNA, 24 nt, Artificial Sequence
  Synthetic
agacugacuguauagcuuagcuga

SEQ ID NO: 491522 - RNA, 18 nt, Artificial Sequence
  Synthetic
acuaugcauaugcgcuga

SEQ ID NO: 491523 - RNA, 19 nt, Artificial Sequence
  Synthetic
aacuaugcauaugcgcuga

SEQ ID NO: 491524 - RNA, 20 nt, Artificial Sequence
  Synthetic
aaacuaugcauaugcgcuga

SEQ ID NO: 491525 - RNA, 21 nt, Artificial Sequence
  Synthetic
caaacuaugcauaugcgcuga

SEQ ID NO: 491526 - RNA, 22 nt, Artificial Sequence
  Synthetic
acaaacuaugcauaugcgcuga

SEQ ID NO: 491527 - RNA, 23 nt, Artificial Sequence
  Synthetic
aacaaacuaugcauaugcgcuga

SEQ ID NO: 491528 - RNA, 24 nt, Artificial Sequence
  Synthetic
gaacaaacuaugcauaugcgcuga

SEQ ID NO: 491529 - RNA, 18 nt, Artificial Sequence
  Synthetic
cauguggagccaggcuga

SEQ ID NO: 491530 - RNA, 19 nt, Artificial Sequence
  Synthetic
ccauguggagccaggcuga

SEQ ID NO: 491531 - RNA, 20 nt, Artificial Sequence
  Synthetic
uccauguggagccaggcuga

SEQ ID NO: 491532 - RNA, 21 nt, Artificial Sequence
  Synthetic
uuccauguggagccaggcuga

SEQ ID NO: 491533 - RNA, 22 nt, Artificial Sequence
  Synthetic
uuuccauguggagccaggcuga

SEQ ID NO: 491534 - RNA, 23 nt, Artificial Sequence
  Synthetic
uuuuccauguggagccaggcuga

SEQ ID NO: 491535 - RNA, 24 nt, Artificial Sequence
  Synthetic
auuuuccauguggagccaggcuga

SEQ ID NO: 491536 - RNA, 18 nt, Artificial Sequence
  Synthetic
ggcuacucaguaggcuga

SEQ ID NO: 491537 - RNA, 19 nt, Artificial Sequence
  Synthetic
uggcuacucaguaggcuga

SEQ ID NO: 491538 - RNA, 20 nt, Artificial Sequence
  Synthetic
cuggcuacucaguaggcuga

SEQ ID NO: 491539 - RNA, 21 nt, Artificial Sequence
  Synthetic
ccuggcuacucaguaggcuga

SEQ ID NO: 491540 - RNA, 22 nt, Artificial Sequence
  Synthetic
uccuggcuacucaguaggcuga

SEQ ID NO: 491541 - RNA, 23 nt, Artificial Sequence
  Synthetic
auccuggcuacucaguaggcuga

SEQ ID NO: 491542 - RNA, 24 nt, Artificial Sequence
  Synthetic
aauccuggcuacucaguaggcuga

SEQ ID NO: 491543 - RNA, 18 nt, Artificial Sequence
  Synthetic
cugguccuugagggcuga

SEQ ID NO: 491544 - RNA, 19 nt, Artificial Sequence
  Synthetic
gcugguccuugagggcuga

SEQ ID NO: 491545 - RNA, 20 nt, Artificial Sequence
  Synthetic
ggcugguccuugagggcuga

SEQ ID NO: 491546 - RNA, 21 nt, Artificial Sequence
  Synthetic
uggcugguccuugagggcuga

SEQ ID NO: 491547 - RNA, 22 nt, Artificial Sequence
  Synthetic
uuggcugguccuugagggcuga

SEQ ID NO: 491548 - RNA, 23 nt, Artificial Sequence
  Synthetic
uuuggcugguccuugagggcuga

SEQ ID NO: 491549 - RNA, 24 nt, Artificial Sequence
  Synthetic
uuuuggcugguccuugagggcuga

SEQ ID NO: 491550 - RNA, 18 nt, Artificial Sequence
  Synthetic
caacuuaugaugggcuga

SEQ ID NO: 491551 - RNA, 19 nt, Artificial Sequence
  Synthetic
ucaacuuaugaugggcuga

SEQ ID NO: 491552 - RNA, 20 nt, Artificial Sequence
  Synthetic
uucaacuuaugaugggcuga

SEQ ID NO: 491553 - RNA, 21 nt, Artificial Sequence
  Synthetic
uuucaacuuaugaugggcuga

SEQ ID NO: 491554 - RNA, 22 nt, Artificial Sequence
  Synthetic
uuuucaacuuaugaugggcuga

SEQ ID NO: 491555 - RNA, 23 nt, Artificial Sequence
  Synthetic
auuuucaacuuaugaugggcuga

SEQ ID NO: 491556 - RNA, 24 nt, Artificial Sequence
  Synthetic
uauuuucaacuuaugaugggcuga

SEQ ID NO: 491557 - RNA, 18 nt, Artificial Sequence
  Synthetic
uggcuuccuuuuggcuga

SEQ ID NO: 491558 - RNA, 19 nt, Artificial Sequence
  Synthetic
guggcuuccuuuuggcuga

SEQ ID NO: 491559 - RNA, 20 nt, Artificial Sequence
  Synthetic
gguggcuuccuuuuggcuga

SEQ ID NO: 491560 - RNA, 21 nt, Artificial Sequence
  Synthetic
agguggcuuccuuuuggcuga

SEQ ID NO: 491561 - RNA, 22 nt, Artificial Sequence
  Synthetic
aagguggcuuccuuuuggcuga

SEQ ID NO: 491562 - RNA, 23 nt, Artificial Sequence
  Synthetic
caagguggcuuccuuuuggcuga

SEQ ID NO: 491563 - RNA, 24 nt, Artificial Sequence
  Synthetic
ucaagguggcuuccuuuuggcuga

SEQ ID NO: 491564 - RNA, 18 nt, Artificial Sequence
  Synthetic
gucuagggaaaaugcuga

SEQ ID NO: 491565 - RNA, 19 nt, Artificial Sequence
  Synthetic
ugucuagggaaaaugcuga

SEQ ID NO: 491566 - RNA, 20 nt, Artificial Sequence
  Synthetic
uugucuagggaaaaugcuga

SEQ ID NO: 491567 - RNA, 21 nt, Artificial Sequence
  Synthetic
auugucuagggaaaaugcuga

SEQ ID NO: 491568 - RNA, 22 nt, Artificial Sequence
  Synthetic
gauugucuagggaaaaugcuga

SEQ ID NO: 491569 - RNA, 23 nt, Artificial Sequence
  Synthetic
agauugucuagggaaaaugcuga

SEQ ID NO: 491570 - RNA, 24 nt, Artificial Sequence
  Synthetic
aagauugucuagggaaaaugcuga

SEQ ID NO: 491571 - RNA, 18 nt, Artificial Sequence
  Synthetic
uugauaaagaaaugcuga

SEQ ID NO: 491572 - RNA, 19 nt, Artificial Sequence
  Synthetic
auugauaaagaaaugcuga

SEQ ID NO: 491573 - RNA, 20 nt, Artificial Sequence
  Synthetic
aauugauaaagaaaugcuga

SEQ ID NO: 491574 - RNA, 21 nt, Artificial Sequence
  Synthetic
caauugauaaagaaaugcuga

SEQ ID NO: 491575 - RNA, 22 nt, Artificial Sequence
  Synthetic
acaauugauaaagaaaugcuga

SEQ ID NO: 491576 - RNA, 23 nt, Artificial Sequence
  Synthetic
gacaauugauaaagaaaugcuga

SEQ ID NO: 491577 - RNA, 24 nt, Artificial Sequence
  Synthetic
ugacaauugauaaagaaaugcuga

SEQ ID NO: 491578 - RNA, 18 nt, Artificial Sequence
  Synthetic
caguuguaugaaugcuga

SEQ ID NO: 491579 - RNA, 19 nt, Artificial Sequence
  Synthetic
ucaguuguaugaaugcuga

SEQ ID NO: 491580 - RNA, 20 nt, Artificial Sequence
  Synthetic
uucaguuguaugaaugcuga

SEQ ID NO: 491581 - RNA, 21 nt, Artificial Sequence
  Synthetic
guucaguuguaugaaugcuga

SEQ ID NO: 491582 - RNA, 22 nt, Artificial Sequence
  Synthetic
uguucaguuguaugaaugcuga

SEQ ID NO: 491583 - RNA, 23 nt, Artificial Sequence
  Synthetic
cuguucaguuguaugaaugcuga

SEQ ID NO: 491584 - RNA, 24 nt, Artificial Sequence
  Synthetic
ucuguucaguuguaugaaugcuga

SEQ ID NO: 491585 - RNA, 18 nt, Artificial Sequence
  Synthetic
caauuagguuaaugcuga

SEQ ID NO: 491586 - RNA, 19 nt, Artificial Sequence
  Synthetic
ccaauuagguuaaugcuga

SEQ ID NO: 491587 - RNA, 20 nt, Artificial Sequence
  Synthetic
uccaauuagguuaaugcuga

SEQ ID NO: 491588 - RNA, 21 nt, Artificial Sequence
  Synthetic
uuccaauuagguuaaugcuga

SEQ ID NO: 491589 - RNA, 22 nt, Artificial Sequence
  Synthetic
guuccaauuagguuaaugcuga

SEQ ID NO: 491590 - RNA, 23 nt, Artificial Sequence
  Synthetic
uguuccaauuagguuaaugcuga

SEQ ID NO: 491591 - RNA, 24 nt, Artificial Sequence
  Synthetic
guguuccaauuagguuaaugcuga

SEQ ID NO: 491592 - RNA, 18 nt, Artificial Sequence
  Synthetic
auagucacaccaugcuga

SEQ ID NO: 491593 - RNA, 19 nt, Artificial Sequence
  Synthetic
cauagucacaccaugcuga

SEQ ID NO: 491594 - RNA, 20 nt, Artificial Sequence
  Synthetic
acauagucacaccaugcuga

SEQ ID NO: 491595 - RNA, 21 nt, Artificial Sequence
  Synthetic
cacauagucacaccaugcuga

SEQ ID NO: 491596 - RNA, 22 nt, Artificial Sequence
  Synthetic
ccacauagucacaccaugcuga

SEQ ID NO: 491597 - RNA, 23 nt, Artificial Sequence
  Synthetic
uccacauagucacaccaugcuga

SEQ ID NO: 491598 - RNA, 24 nt, Artificial Sequence
  Synthetic
cuccacauagucacaccaugcuga

SEQ ID NO: 491599 - RNA, 18 nt, Artificial Sequence
  Synthetic
ugcagagaaagaugcuga

SEQ ID NO: 491600 - RNA, 19 nt, Artificial Sequence
  Synthetic
gugcagagaaagaugcuga

SEQ ID NO: 491601 - RNA, 20 nt, Artificial Sequence
  Synthetic
ggugcagagaaagaugcuga

SEQ ID NO: 491602 - RNA, 21 nt, Artificial Sequence
  Synthetic
aggugcagagaaagaugcuga

SEQ ID NO: 491603 - RNA, 22 nt, Artificial Sequence
  Synthetic
aaggugcagagaaagaugcuga

SEQ ID NO: 491604 - RNA, 23 nt, Artificial Sequence
  Synthetic
gaaggugcagagaaagaugcuga

SEQ ID NO: 491605 - RNA, 24 nt, Artificial Sequence
  Synthetic
ggaaggugcagagaaagaugcuga

SEQ ID NO: 491606 - RNA, 18 nt, Artificial Sequence
  Synthetic
auucucauuagaugcuga

SEQ ID NO: 491607 - RNA, 19 nt, Artificial Sequence
  Synthetic
aauucucauuagaugcuga

SEQ ID NO: 491608 - RNA, 20 nt, Artificial Sequence
  Synthetic
uaauucucauuagaugcuga

SEQ ID NO: 491609 - RNA, 21 nt, Artificial Sequence
  Synthetic
guaauucucauuagaugcuga

SEQ ID NO: 491610 - RNA, 22 nt, Artificial Sequence
  Synthetic
uguaauucucauuagaugcuga

SEQ ID NO: 491611 - RNA, 23 nt, Artificial Sequence
  Synthetic
cuguaauucucauuagaugcuga

SEQ ID NO: 491612 - RNA, 24 nt, Artificial Sequence
  Synthetic
acuguaauucucauuagaugcuga

SEQ ID NO: 491613 - RNA, 18 nt, Artificial Sequence
  Synthetic
ugcggagauugaugcuga

SEQ ID NO: 491614 - RNA, 19 nt, Artificial Sequence
  Synthetic
augcggagauugaugcuga

SEQ ID NO: 491615 - RNA, 20 nt, Artificial Sequence
  Synthetic
gaugcggagauugaugcuga

SEQ ID NO: 491616 - RNA, 21 nt, Artificial Sequence
  Synthetic
agaugcggagauugaugcuga

SEQ ID NO: 491617 - RNA, 22 nt, Artificial Sequence
  Synthetic
cagaugcggagauugaugcuga

SEQ ID NO: 491618 - RNA, 23 nt, Artificial Sequence
  Synthetic
acagaugcggagauugaugcuga

SEQ ID NO: 491619 - RNA, 24 nt, Artificial Sequence
  Synthetic
cacagaugcggagauugaugcuga

SEQ ID NO: 491620 - RNA, 18 nt, Artificial Sequence
  Synthetic
uugaaaauauuaugcuga

SEQ ID NO: 491621 - RNA, 19 nt, Artificial Sequence
  Synthetic
cuugaaaauauuaugcuga

SEQ ID NO: 491622 - RNA, 20 nt, Artificial Sequence
  Synthetic
ccuugaaaauauuaugcuga

SEQ ID NO: 491623 - RNA, 21 nt, Artificial Sequence
  Synthetic
accuugaaaauauuaugcuga

SEQ ID NO: 491624 - RNA, 22 nt, Artificial Sequence
  Synthetic
aaccuugaaaauauuaugcuga

SEQ ID NO: 491625 - RNA, 23 nt, Artificial Sequence
  Synthetic
gaaccuugaaaauauuaugcuga

SEQ ID NO: 491626 - RNA, 24 nt, Artificial Sequence
  Synthetic
ugaaccuugaaaauauuaugcuga

SEQ ID NO: 491627 - RNA, 18 nt, Artificial Sequence
  Synthetic
cugccuguggacugcuga

SEQ ID NO: 491628 - RNA, 19 nt, Artificial Sequence
  Synthetic
gcugccuguggacugcuga

SEQ ID NO: 491629 - RNA, 20 nt, Artificial Sequence
  Synthetic
ugcugccuguggacugcuga

SEQ ID NO: 491630 - RNA, 21 nt, Artificial Sequence
  Synthetic
cugcugccuguggacugcuga

SEQ ID NO: 491631 - RNA, 22 nt, Artificial Sequence
  Synthetic
ccugcugccuguggacugcuga

SEQ ID NO: 491632 - RNA, 23 nt, Artificial Sequence
  Synthetic
uccugcugccuguggacugcuga

SEQ ID NO: 491633 - RNA, 24 nt, Artificial Sequence
  Synthetic
uuccugcugccuguggacugcuga

SEQ ID NO: 491634 - RNA, 18 nt, Artificial Sequence
  Synthetic
uggagcaacaagugcuga

SEQ ID NO: 491635 - RNA, 19 nt, Artificial Sequence
  Synthetic
guggagcaacaagugcuga

SEQ ID NO: 491636 - RNA, 20 nt, Artificial Sequence
  Synthetic
gguggagcaacaagugcuga

SEQ ID NO: 491637 - RNA, 21 nt, Artificial Sequence
  Synthetic
agguggagcaacaagugcuga

SEQ ID NO: 491638 - RNA, 22 nt, Artificial Sequence
  Synthetic
aagguggagcaacaagugcuga

SEQ ID NO: 491639 - RNA, 23 nt, Artificial Sequence
  Synthetic
aaagguggagcaacaagugcuga

SEQ ID NO: 491640 - RNA, 24 nt, Artificial Sequence
  Synthetic
gaaagguggagcaacaagugcuga

SEQ ID NO: 491641 - RNA, 18 nt, Artificial Sequence
  Synthetic
cacaugaagaggugcuga

SEQ ID NO: 491642 - RNA, 19 nt, Artificial Sequence
  Synthetic
ucacaugaagaggugcuga

SEQ ID NO: 491643 - RNA, 20 nt, Artificial Sequence
  Synthetic
cucacaugaagaggugcuga

SEQ ID NO: 491644 - RNA, 21 nt, Artificial Sequence
  Synthetic
ucucacaugaagaggugcuga

SEQ ID NO: 491645 - RNA, 22 nt, Artificial Sequence
  Synthetic
cucucacaugaagaggugcuga

SEQ ID NO: 491646 - RNA, 23 nt, Artificial Sequence
  Synthetic
gcucucacaugaagaggugcuga

SEQ ID NO: 491647 - RNA, 24 nt, Artificial Sequence
  Synthetic
ugcucucacaugaagaggugcuga

SEQ ID NO: 491648 - RNA, 18 nt, Artificial Sequence
  Synthetic
gggaugguucugugcuga

SEQ ID NO: 491649 - RNA, 19 nt, Artificial Sequence
  Synthetic
ggggaugguucugugcuga

SEQ ID NO: 491650 - RNA, 20 nt, Artificial Sequence
  Synthetic
cggggaugguucugugcuga

SEQ ID NO: 491651 - RNA, 21 nt, Artificial Sequence
  Synthetic
acggggaugguucugugcuga

SEQ ID NO: 491652 - RNA, 22 nt, Artificial Sequence
  Synthetic
cacggggaugguucugugcuga

SEQ ID NO: 491653 - RNA, 23 nt, Artificial Sequence
  Synthetic
ucacggggaugguucugugcuga

SEQ ID NO: 491654 - RNA, 24 nt, Artificial Sequence
  Synthetic
aucacggggaugguucugugcuga

SEQ ID NO: 491655 - RNA, 18 nt, Artificial Sequence
  Synthetic
gagggcuuaaauugcuga

SEQ ID NO: 491656 - RNA, 19 nt, Artificial Sequence
  Synthetic
ugagggcuuaaauugcuga

SEQ ID NO: 491657 - RNA, 20 nt, Artificial Sequence
  Synthetic
cugagggcuuaaauugcuga

SEQ ID NO: 491658 - RNA, 21 nt, Artificial Sequence
  Synthetic
ucugagggcuuaaauugcuga

SEQ ID NO: 491659 - RNA, 22 nt, Artificial Sequence
  Synthetic
cucugagggcuuaaauugcuga

SEQ ID NO: 491660 - RNA, 23 nt, Artificial Sequence
  Synthetic
ccucugagggcuuaaauugcuga

SEQ ID NO: 491661 - RNA, 24 nt, Artificial Sequence
  Synthetic
uccucugagggcuuaaauugcuga

SEQ ID NO: 491662 - RNA, 18 nt, Artificial Sequence
  Synthetic
caagcugaugcuugcuga

SEQ ID NO: 491663 - RNA, 19 nt, Artificial Sequence
  Synthetic
ccaagcugaugcuugcuga

SEQ ID NO: 491664 - RNA, 20 nt, Artificial Sequence
  Synthetic
accaagcugaugcuugcuga

SEQ ID NO: 491665 - RNA, 21 nt, Artificial Sequence
  Synthetic
caccaagcugaugcuugcuga

SEQ ID NO: 491666 - RNA, 22 nt, Artificial Sequence
  Synthetic
ucaccaagcugaugcuugcuga

SEQ ID NO: 491667 - RNA, 23 nt, Artificial Sequence
  Synthetic
cucaccaagcugaugcuugcuga

SEQ ID NO: 491668 - RNA, 24 nt, Artificial Sequence
  Synthetic
ccucaccaagcugaugcuugcuga

SEQ ID NO: 491669 - RNA, 18 nt, Artificial Sequence
  Synthetic
ucaguaagcauuugcuga

SEQ ID NO: 491670 - RNA, 19 nt, Artificial Sequence
  Synthetic
uucaguaagcauuugcuga

SEQ ID NO: 491671 - RNA, 20 nt, Artificial Sequence
  Synthetic
uuucaguaagcauuugcuga

SEQ ID NO: 491672 - RNA, 21 nt, Artificial Sequence
  Synthetic
guuucaguaagcauuugcuga

SEQ ID NO: 491673 - RNA, 22 nt, Artificial Sequence
  Synthetic
gguuucaguaagcauuugcuga

SEQ ID NO: 491674 - RNA, 23 nt, Artificial Sequence
  Synthetic
agguuucaguaagcauuugcuga

SEQ ID NO: 491675 - RNA, 24 nt, Artificial Sequence
  Synthetic
aagguuucaguaagcauuugcuga

SEQ ID NO: 491676 - RNA, 18 nt, Artificial Sequence
  Synthetic
gaguaauguguuugcuga

SEQ ID NO: 491677 - RNA, 19 nt, Artificial Sequence
  Synthetic
agaguaauguguuugcuga

SEQ ID NO: 491678 - RNA, 20 nt, Artificial Sequence
  Synthetic
gagaguaauguguuugcuga

SEQ ID NO: 491679 - RNA, 21 nt, Artificial Sequence
  Synthetic
ugagaguaauguguuugcuga

SEQ ID NO: 491680 - RNA, 22 nt, Artificial Sequence
  Synthetic
gugagaguaauguguuugcuga

SEQ ID NO: 491681 - RNA, 23 nt, Artificial Sequence
  Synthetic
agugagaguaauguguuugcuga

SEQ ID NO: 491682 - RNA, 24 nt, Artificial Sequence
  Synthetic
uagugagaguaauguguuugcuga

SEQ ID NO: 491683 - RNA, 18 nt, Artificial Sequence
  Synthetic
uacuuuagaaaaaucuga

SEQ ID NO: 491684 - RNA, 19 nt, Artificial Sequence
  Synthetic
uuacuuuagaaaaaucuga

SEQ ID NO: 491685 - RNA, 20 nt, Artificial Sequence
  Synthetic
auuacuuuagaaaaaucuga

SEQ ID NO: 491686 - RNA, 21 nt, Artificial Sequence
  Synthetic
uauuacuuuagaaaaaucuga

SEQ ID NO: 491687 - RNA, 22 nt, Artificial Sequence
  Synthetic
uuauuacuuuagaaaaaucuga

SEQ ID NO: 491688 - RNA, 23 nt, Artificial Sequence
  Synthetic
uuuauuacuuuagaaaaaucuga

SEQ ID NO: 491689 - RNA, 24 nt, Artificial Sequence
  Synthetic
guuuauuacuuuagaaaaaucuga

SEQ ID NO: 491690 - RNA, 18 nt, Artificial Sequence
  Synthetic
uguuuuaacaaaaucuga

SEQ ID NO: 491691 - RNA, 19 nt, Artificial Sequence
  Synthetic
guguuuuaacaaaaucuga

SEQ ID NO: 491692 - RNA, 20 nt, Artificial Sequence
  Synthetic
uguguuuuaacaaaaucuga

SEQ ID NO: 491693 - RNA, 21 nt, Artificial Sequence
  Synthetic
auguguuuuaacaaaaucuga

SEQ ID NO: 491694 - RNA, 22 nt, Artificial Sequence
  Synthetic
gauguguuuuaacaaaaucuga

SEQ ID NO: 491695 - RNA, 23 nt, Artificial Sequence
  Synthetic
ggauguguuuuaacaaaaucuga

SEQ ID NO: 491696 - RNA, 24 nt, Artificial Sequence
  Synthetic
aggauguguuuuaacaaaaucuga

SEQ ID NO: 491697 - RNA, 18 nt, Artificial Sequence
  Synthetic
guauaggacaaaaucuga

SEQ ID NO: 491698 - RNA, 19 nt, Artificial Sequence
  Synthetic
gguauaggacaaaaucuga

SEQ ID NO: 491699 - RNA, 20 nt, Artificial Sequence
  Synthetic
agguauaggacaaaaucuga

SEQ ID NO: 491700 - RNA, 21 nt, Artificial Sequence
  Synthetic
aagguauaggacaaaaucuga

SEQ ID NO: 491701 - RNA, 22 nt, Artificial Sequence
  Synthetic
gaagguauaggacaaaaucuga

SEQ ID NO: 491702 - RNA, 23 nt, Artificial Sequence
  Synthetic
ggaagguauaggacaaaaucuga

SEQ ID NO: 491703 - RNA, 24 nt, Artificial Sequence
  Synthetic
aggaagguauaggacaaaaucuga

SEQ ID NO: 491704 - RNA, 18 nt, Artificial Sequence
  Synthetic
gcggaagagaaaaucuga

SEQ ID NO: 491705 - RNA, 19 nt, Artificial Sequence
  Synthetic
ugcggaagagaaaaucuga

SEQ ID NO: 491706 - RNA, 20 nt, Artificial Sequence
  Synthetic
augcggaagagaaaaucuga

SEQ ID NO: 491707 - RNA, 21 nt, Artificial Sequence
  Synthetic
aaugcggaagagaaaaucuga

SEQ ID NO: 491708 - RNA, 22 nt, Artificial Sequence
  Synthetic
aaaugcggaagagaaaaucuga

SEQ ID NO: 491709 - RNA, 23 nt, Artificial Sequence
  Synthetic
uaaaugcggaagagaaaaucuga

SEQ ID NO: 491710 - RNA, 24 nt, Artificial Sequence
  Synthetic
uuaaaugcggaagagaaaaucuga

SEQ ID NO: 491711 - RNA, 18 nt, Artificial Sequence
  Synthetic
aaacauuuaagaaucuga

SEQ ID NO: 491712 - RNA, 19 nt, Artificial Sequence
  Synthetic
gaaacauuuaagaaucuga

SEQ ID NO: 491713 - RNA, 20 nt, Artificial Sequence
  Synthetic
agaaacauuuaagaaucuga

SEQ ID NO: 491714 - RNA, 21 nt, Artificial Sequence
  Synthetic
aagaaacauuuaagaaucuga

SEQ ID NO: 491715 - RNA, 22 nt, Artificial Sequence
  Synthetic
gaagaaacauuuaagaaucuga

SEQ ID NO: 491716 - RNA, 23 nt, Artificial Sequence
  Synthetic
ggaagaaacauuuaagaaucuga

SEQ ID NO: 491717 - RNA, 24 nt, Artificial Sequence
  Synthetic
aggaagaaacauuuaagaaucuga

SEQ ID NO: 491718 - RNA, 18 nt, Artificial Sequence
  Synthetic
cccagugaacgaaucuga

SEQ ID NO: 491719 - RNA, 19 nt, Artificial Sequence
  Synthetic
acccagugaacgaaucuga

SEQ ID NO: 491720 - RNA, 20 nt, Artificial Sequence
  Synthetic
aacccagugaacgaaucuga

SEQ ID NO: 491721 - RNA, 21 nt, Artificial Sequence
  Synthetic
caacccagugaacgaaucuga

SEQ ID NO: 491722 - RNA, 22 nt, Artificial Sequence
  Synthetic
ccaacccagugaacgaaucuga

SEQ ID NO: 491723 - RNA, 23 nt, Artificial Sequence
  Synthetic
accaacccagugaacgaaucuga

SEQ ID NO: 491724 - RNA, 24 nt, Artificial Sequence
  Synthetic
caccaacccagugaacgaaucuga

SEQ ID NO: 491725 - RNA, 18 nt, Artificial Sequence
  Synthetic
aauacaaauggaaucuga

SEQ ID NO: 491726 - RNA, 19 nt, Artificial Sequence
  Synthetic
aaauacaaauggaaucuga

SEQ ID NO: 491727 - RNA, 20 nt, Artificial Sequence
  Synthetic
caaauacaaauggaaucuga

SEQ ID NO: 491728 - RNA, 21 nt, Artificial Sequence
  Synthetic
ccaaauacaaauggaaucuga

SEQ ID NO: 491729 - RNA, 22 nt, Artificial Sequence
  Synthetic
cccaaauacaaauggaaucuga

SEQ ID NO: 491730 - RNA, 23 nt, Artificial Sequence
  Synthetic
ccccaaauacaaauggaaucuga

SEQ ID NO: 491731 - RNA, 24 nt, Artificial Sequence
  Synthetic
uccccaaauacaaauggaaucuga

SEQ ID NO: 491732 - RNA, 18 nt, Artificial Sequence
  Synthetic
ucuauauuugacaucuga

SEQ ID NO: 491733 - RNA, 19 nt, Artificial Sequence
  Synthetic
uucuauauuugacaucuga

SEQ ID NO: 491734 - RNA, 20 nt, Artificial Sequence
  Synthetic
cuucuauauuugacaucuga

SEQ ID NO: 491735 - RNA, 21 nt, Artificial Sequence
  Synthetic
ucuucuauauuugacaucuga

SEQ ID NO: 491736 - RNA, 22 nt, Artificial Sequence
  Synthetic
uucuucuauauuugacaucuga

SEQ ID NO: 491737 - RNA, 23 nt, Artificial Sequence
  Synthetic
guucuucuauauuugacaucuga

SEQ ID NO: 491738 - RNA, 24 nt, Artificial Sequence
  Synthetic
uguucuucuauauuugacaucuga

SEQ ID NO: 491739 - RNA, 18 nt, Artificial Sequence
  Synthetic
uccuuugccuucaucuga

SEQ ID NO: 491740 - RNA, 19 nt, Artificial Sequence
  Synthetic
uuccuuugccuucaucuga

SEQ ID NO: 491741 - RNA, 20 nt, Artificial Sequence
  Synthetic
auuccuuugccuucaucuga

SEQ ID NO: 491742 - RNA, 21 nt, Artificial Sequence
  Synthetic
uauuccuuugccuucaucuga

SEQ ID NO: 491743 - RNA, 22 nt, Artificial Sequence
  Synthetic
cuauuccuuugccuucaucuga

SEQ ID NO: 491744 - RNA, 23 nt, Artificial Sequence
  Synthetic
ccuauuccuuugccuucaucuga

SEQ ID NO: 491745 - RNA, 24 nt, Artificial Sequence
  Synthetic
uccuauuccuuugccuucaucuga

SEQ ID NO: 491746 - RNA, 18 nt, Artificial Sequence
  Synthetic
uucaguuucuucaucuga

SEQ ID NO: 491747 - RNA, 19 nt, Artificial Sequence
  Synthetic
cuucaguuucuucaucuga

SEQ ID NO: 491748 - RNA, 20 nt, Artificial Sequence
  Synthetic
gcuucaguuucuucaucuga

SEQ ID NO: 491749 - RNA, 21 nt, Artificial Sequence
  Synthetic
ugcuucaguuucuucaucuga

SEQ ID NO: 491750 - RNA, 22 nt, Artificial Sequence
  Synthetic
gugcuucaguuucuucaucuga

SEQ ID NO: 491751 - RNA, 23 nt, Artificial Sequence
  Synthetic
ugugcuucaguuucuucaucuga

SEQ ID NO: 491752 - RNA, 24 nt, Artificial Sequence
  Synthetic
cugugcuucaguuucuucaucuga

SEQ ID NO: 491753 - RNA, 18 nt, Artificial Sequence
  Synthetic
auuuaaauaaagaucuga

SEQ ID NO: 491754 - RNA, 19 nt, Artificial Sequence
  Synthetic
uauuuaaauaaagaucuga

SEQ ID NO: 491755 - RNA, 20 nt, Artificial Sequence
  Synthetic
guauuuaaauaaagaucuga

SEQ ID NO: 491756 - RNA, 21 nt, Artificial Sequence
  Synthetic
gguauuuaaauaaagaucuga

SEQ ID NO: 491757 - RNA, 22 nt, Artificial Sequence
  Synthetic
ugguauuuaaauaaagaucuga

SEQ ID NO: 491758 - RNA, 23 nt, Artificial Sequence
  Synthetic
gugguauuuaaauaaagaucuga

SEQ ID NO: 491759 - RNA, 24 nt, Artificial Sequence
  Synthetic
ggugguauuuaaauaaagaucuga

SEQ ID NO: 491760 - RNA, 18 nt, Artificial Sequence
  Synthetic
uuuuaaguaaagaucuga

SEQ ID NO: 491761 - RNA, 19 nt, Artificial Sequence
  Synthetic
uuuuuaaguaaagaucuga

SEQ ID NO: 491762 - RNA, 20 nt, Artificial Sequence
  Synthetic
guuuuuaaguaaagaucuga

SEQ ID NO: 491763 - RNA, 21 nt, Artificial Sequence
  Synthetic
aguuuuuaaguaaagaucuga

SEQ ID NO: 491764 - RNA, 22 nt, Artificial Sequence
  Synthetic
caguuuuuaaguaaagaucuga

SEQ ID NO: 491765 - RNA, 23 nt, Artificial Sequence
  Synthetic
gcaguuuuuaaguaaagaucuga

SEQ ID NO: 491766 - RNA, 24 nt, Artificial Sequence
  Synthetic
ggcaguuuuuaaguaaagaucuga

SEQ ID NO: 491767 - RNA, 18 nt, Artificial Sequence
  Synthetic
uucuugcuacagaucuga

SEQ ID NO: 491768 - RNA, 19 nt, Artificial Sequence
  Synthetic
uuucuugcuacagaucuga

SEQ ID NO: 491769 - RNA, 20 nt, Artificial Sequence
  Synthetic
cuuucuugcuacagaucuga

SEQ ID NO: 491770 - RNA, 21 nt, Artificial Sequence
  Synthetic
ccuuucuugcuacagaucuga

SEQ ID NO: 491771 - RNA, 22 nt, Artificial Sequence
  Synthetic
accuuucuugcuacagaucuga

SEQ ID NO: 491772 - RNA, 23 nt, Artificial Sequence
  Synthetic
uaccuuucuugcuacagaucuga

SEQ ID NO: 491773 - RNA, 24 nt, Artificial Sequence
  Synthetic
cuaccuuucuugcuacagaucuga

SEQ ID NO: 491774 - RNA, 18 nt, Artificial Sequence
  Synthetic
aaaccgagagagaucuga

SEQ ID NO: 491775 - RNA, 19 nt, Artificial Sequence
  Synthetic
gaaaccgagagagaucuga

SEQ ID NO: 491776 - RNA, 20 nt, Artificial Sequence
  Synthetic
agaaaccgagagagaucuga

SEQ ID NO: 491777 - RNA, 21 nt, Artificial Sequence
  Synthetic
aagaaaccgagagagaucuga

SEQ ID NO: 491778 - RNA, 22 nt, Artificial Sequence
  Synthetic
gaagaaaccgagagagaucuga

SEQ ID NO: 491779 - RNA, 23 nt, Artificial Sequence
  Synthetic
ugaagaaaccgagagagaucuga

SEQ ID NO: 491780 - RNA, 24 nt, Artificial Sequence
  Synthetic
gugaagaaaccgagagagaucuga

SEQ ID NO: 491781 - RNA, 18 nt, Artificial Sequence
  Synthetic
aucgaacagaggaucuga

SEQ ID NO: 491782 - RNA, 19 nt, Artificial Sequence
  Synthetic
caucgaacagaggaucuga

SEQ ID NO: 491783 - RNA, 20 nt, Artificial Sequence
  Synthetic
gcaucgaacagaggaucuga

SEQ ID NO: 491784 - RNA, 21 nt, Artificial Sequence
  Synthetic
agcaucgaacagaggaucuga

SEQ ID NO: 491785 - RNA, 22 nt, Artificial Sequence
  Synthetic
aagcaucgaacagaggaucuga

SEQ ID NO: 491786 - RNA, 23 nt, Artificial Sequence
  Synthetic
aaagcaucgaacagaggaucuga

SEQ ID NO: 491787 - RNA, 24 nt, Artificial Sequence
  Synthetic
caaagcaucgaacagaggaucuga

SEQ ID NO: 491788 - RNA, 18 nt, Artificial Sequence
  Synthetic
aaacauuaagggaucuga

SEQ ID NO: 491789 - RNA, 19 nt, Artificial Sequence
  Synthetic
caaacauuaagggaucuga

SEQ ID NO: 491790 - RNA, 20 nt, Artificial Sequence
  Synthetic
gcaaacauuaagggaucuga

SEQ ID NO: 491791 - RNA, 21 nt, Artificial Sequence
  Synthetic
agcaaacauuaagggaucuga

SEQ ID NO: 491792 - RNA, 22 nt, Artificial Sequence
  Synthetic
aagcaaacauuaagggaucuga

SEQ ID NO: 491793 - RNA, 23 nt, Artificial Sequence
  Synthetic
aaagcaaacauuaagggaucuga

SEQ ID NO: 491794 - RNA, 24 nt, Artificial Sequence
  Synthetic
uaaagcaaacauuaagggaucuga

SEQ ID NO: 491795 - RNA, 18 nt, Artificial Sequence
  Synthetic
ucaaauaagcugaucuga

SEQ ID NO: 491796 - RNA, 19 nt, Artificial Sequence
  Synthetic
aucaaauaagcugaucuga

SEQ ID NO: 491797 - RNA, 20 nt, Artificial Sequence
  Synthetic
aaucaaauaagcugaucuga

SEQ ID NO: 491798 - RNA, 21 nt, Artificial Sequence
  Synthetic
uaaucaaauaagcugaucuga

SEQ ID NO: 491799 - RNA, 22 nt, Artificial Sequence
  Synthetic
cuaaucaaauaagcugaucuga

SEQ ID NO: 491800 - RNA, 23 nt, Artificial Sequence
  Synthetic
ucuaaucaaauaagcugaucuga

SEQ ID NO: 491801 - RNA, 24 nt, Artificial Sequence
  Synthetic
uucuaaucaaauaagcugaucuga

SEQ ID NO: 491802 - RNA, 18 nt, Artificial Sequence
  Synthetic
auguggcugcugaucuga

SEQ ID NO: 491803 - RNA, 19 nt, Artificial Sequence
  Synthetic
aauguggcugcugaucuga

SEQ ID NO: 491804 - RNA, 20 nt, Artificial Sequence
  Synthetic
uaauguggcugcugaucuga

SEQ ID NO: 491805 - RNA, 21 nt, Artificial Sequence
  Synthetic
uuaauguggcugcugaucuga

SEQ ID NO: 491806 - RNA, 22 nt, Artificial Sequence
  Synthetic
uuuaauguggcugcugaucuga

SEQ ID NO: 491807 - RNA, 23 nt, Artificial Sequence
  Synthetic
auuuaauguggcugcugaucuga

SEQ ID NO: 491808 - RNA, 24 nt, Artificial Sequence
  Synthetic
aauuuaauguggcugcugaucuga

SEQ ID NO: 491809 - RNA, 18 nt, Artificial Sequence
  Synthetic
aaccauaucuugaucuga

SEQ ID NO: 491810 - RNA, 19 nt, Artificial Sequence
  Synthetic
gaaccauaucuugaucuga

SEQ ID NO: 491811 - RNA, 20 nt, Artificial Sequence
  Synthetic
ggaaccauaucuugaucuga

SEQ ID NO: 491812 - RNA, 21 nt, Artificial Sequence
  Synthetic
aggaaccauaucuugaucuga

SEQ ID NO: 491813 - RNA, 22 nt, Artificial Sequence
  Synthetic
gaggaaccauaucuugaucuga

SEQ ID NO: 491814 - RNA, 23 nt, Artificial Sequence
  Synthetic
ugaggaaccauaucuugaucuga

SEQ ID NO: 491815 - RNA, 24 nt, Artificial Sequence
  Synthetic
augaggaaccauaucuugaucuga

SEQ ID NO: 491816 - RNA, 18 nt, Artificial Sequence
  Synthetic
augauuuaagguaucuga

SEQ ID NO: 491817 - RNA, 19 nt, Artificial Sequence
  Synthetic
gaugauuuaagguaucuga

SEQ ID NO: 491818 - RNA, 20 nt, Artificial Sequence
  Synthetic
agaugauuuaagguaucuga

SEQ ID NO: 491819 - RNA, 21 nt, Artificial Sequence
  Synthetic
gagaugauuuaagguaucuga

SEQ ID NO: 491820 - RNA, 22 nt, Artificial Sequence
  Synthetic
agagaugauuuaagguaucuga

SEQ ID NO: 491821 - RNA, 23 nt, Artificial Sequence
  Synthetic
gagagaugauuuaagguaucuga

SEQ ID NO: 491822 - RNA, 24 nt, Artificial Sequence
  Synthetic
ugagagaugauuuaagguaucuga

SEQ ID NO: 491823 - RNA, 18 nt, Artificial Sequence
  Synthetic
uacuucugccuuaucuga

SEQ ID NO: 491824 - RNA, 19 nt, Artificial Sequence
  Synthetic
guacuucugccuuaucuga

SEQ ID NO: 491825 - RNA, 20 nt, Artificial Sequence
  Synthetic
aguacuucugccuuaucuga

SEQ ID NO: 491826 - RNA, 21 nt, Artificial Sequence
  Synthetic
aaguacuucugccuuaucuga

SEQ ID NO: 491827 - RNA, 22 nt, Artificial Sequence
  Synthetic
gaaguacuucugccuuaucuga

SEQ ID NO: 491828 - RNA, 23 nt, Artificial Sequence
  Synthetic
agaaguacuucugccuuaucuga

SEQ ID NO: 491829 - RNA, 24 nt, Artificial Sequence
  Synthetic
uagaaguacuucugccuuaucuga

SEQ ID NO: 491830 - RNA, 18 nt, Artificial Sequence
  Synthetic
uggauuuugaaacucuga

SEQ ID NO: 491831 - RNA, 19 nt, Artificial Sequence
  Synthetic
cuggauuuugaaacucuga

SEQ ID NO: 491832 - RNA, 20 nt, Artificial Sequence
  Synthetic
gcuggauuuugaaacucuga

SEQ ID NO: 491833 - RNA, 21 nt, Artificial Sequence
  Synthetic
ugcuggauuuugaaacucuga

SEQ ID NO: 491834 - RNA, 22 nt, Artificial Sequence
  Synthetic
augcuggauuuugaaacucuga

SEQ ID NO: 491835 - RNA, 23 nt, Artificial Sequence
  Synthetic
uaugcuggauuuugaaacucuga

SEQ ID NO: 491836 - RNA, 24 nt, Artificial Sequence
  Synthetic
cuaugcuggauuuugaaacucuga

SEQ ID NO: 491837 - RNA, 18 nt, Artificial Sequence
  Synthetic
gaaaaaagggcacucuga

SEQ ID NO: 491838 - RNA, 19 nt, Artificial Sequence
  Synthetic
ugaaaaaagggcacucuga

SEQ ID NO: 491839 - RNA, 20 nt, Artificial Sequence
  Synthetic
uugaaaaaagggcacucuga

SEQ ID NO: 491840 - RNA, 21 nt, Artificial Sequence
  Synthetic
auugaaaaaagggcacucuga

SEQ ID NO: 491841 - RNA, 22 nt, Artificial Sequence
  Synthetic
gauugaaaaaagggcacucuga

SEQ ID NO: 491842 - RNA, 23 nt, Artificial Sequence
  Synthetic
ggauugaaaaaagggcacucuga

SEQ ID NO: 491843 - RNA, 24 nt, Artificial Sequence
  Synthetic
aggauugaaaaaagggcacucuga

SEQ ID NO: 491844 - RNA, 18 nt, Artificial Sequence
  Synthetic
aaguuacaauuacucuga

SEQ ID NO: 491845 - RNA, 19 nt, Artificial Sequence
  Synthetic
caaguuacaauuacucuga

SEQ ID NO: 491846 - RNA, 20 nt, Artificial Sequence
  Synthetic
acaaguuacaauuacucuga

SEQ ID NO: 491847 - RNA, 21 nt, Artificial Sequence
  Synthetic
uacaaguuacaauuacucuga

SEQ ID NO: 491848 - RNA, 22 nt, Artificial Sequence
  Synthetic
auacaaguuacaauuacucuga

SEQ ID NO: 491849 - RNA, 23 nt, Artificial Sequence
  Synthetic
uauacaaguuacaauuacucuga

SEQ ID NO: 491850 - RNA, 24 nt, Artificial Sequence
  Synthetic
auauacaaguuacaauuacucuga

SEQ ID NO: 491851 - RNA, 18 nt, Artificial Sequence
  Synthetic
uagugaucauggcucuga

SEQ ID NO: 491852 - RNA, 19 nt, Artificial Sequence
  Synthetic
cuagugaucauggcucuga

SEQ ID NO: 491853 - RNA, 20 nt, Artificial Sequence
  Synthetic
acuagugaucauggcucuga

SEQ ID NO: 491854 - RNA, 21 nt, Artificial Sequence
  Synthetic
uacuagugaucauggcucuga

SEQ ID NO: 491855 - RNA, 22 nt, Artificial Sequence
  Synthetic
guacuagugaucauggcucuga

SEQ ID NO: 491856 - RNA, 23 nt, Artificial Sequence
  Synthetic
uguacuagugaucauggcucuga

SEQ ID NO: 491857 - RNA, 24 nt, Artificial Sequence
  Synthetic
uuguacuagugaucauggcucuga

SEQ ID NO: 491858 - RNA, 18 nt, Artificial Sequence
  Synthetic
auuuuccaaaaucucuga

SEQ ID NO: 491859 - RNA, 19 nt, Artificial Sequence
  Synthetic
aauuuuccaaaaucucuga

SEQ ID NO: 491860 - RNA, 20 nt, Artificial Sequence
  Synthetic
gaauuuuccaaaaucucuga

SEQ ID NO: 491861 - RNA, 21 nt, Artificial Sequence
  Synthetic
agaauuuuccaaaaucucuga

SEQ ID NO: 491862 - RNA, 22 nt, Artificial Sequence
  Synthetic
uagaauuuuccaaaaucucuga

SEQ ID NO: 491863 - RNA, 23 nt, Artificial Sequence
  Synthetic
cuagaauuuuccaaaaucucuga

SEQ ID NO: 491864 - RNA, 24 nt, Artificial Sequence
  Synthetic
ccuagaauuuuccaaaaucucuga

SEQ ID NO: 491865 - RNA, 18 nt, Artificial Sequence
  Synthetic
ucugaggagaaucucuga

SEQ ID NO: 491866 - RNA, 19 nt, Artificial Sequence
  Synthetic
uucugaggagaaucucuga

SEQ ID NO: 491867 - RNA, 20 nt, Artificial Sequence
  Synthetic
uuucugaggagaaucucuga

SEQ ID NO: 491868 - RNA, 21 nt, Artificial Sequence
  Synthetic
auuucugaggagaaucucuga

SEQ ID NO: 491869 - RNA, 22 nt, Artificial Sequence
  Synthetic
cauuucugaggagaaucucuga

SEQ ID NO: 491870 - RNA, 23 nt, Artificial Sequence
  Synthetic
ucauuucugaggagaaucucuga

SEQ ID NO: 491871 - RNA, 24 nt, Artificial Sequence
  Synthetic
cucauuucugaggagaaucucuga

SEQ ID NO: 491872 - RNA, 18 nt, Artificial Sequence
  Synthetic
augaucugaacucucuga

SEQ ID NO: 491873 - RNA, 19 nt, Artificial Sequence
  Synthetic
uaugaucugaacucucuga

SEQ ID NO: 491874 - RNA, 20 nt, Artificial Sequence
  Synthetic
auaugaucugaacucucuga

SEQ ID NO: 491875 - RNA, 21 nt, Artificial Sequence
  Synthetic
uauaugaucugaacucucuga

SEQ ID NO: 491876 - RNA, 22 nt, Artificial Sequence
  Synthetic
cuauaugaucugaacucucuga

SEQ ID NO: 491877 - RNA, 23 nt, Artificial Sequence
  Synthetic
acuauaugaucugaacucucuga

SEQ ID NO: 491878 - RNA, 24 nt, Artificial Sequence
  Synthetic
gacuauaugaucugaacucucuga

SEQ ID NO: 491879 - RNA, 18 nt, Artificial Sequence
  Synthetic
auuauuccaccucucuga

SEQ ID NO: 491880 - RNA, 19 nt, Artificial Sequence
  Synthetic
gauuauuccaccucucuga

SEQ ID NO: 491881 - RNA, 20 nt, Artificial Sequence
  Synthetic
agauuauuccaccucucuga

SEQ ID NO: 491882 - RNA, 21 nt, Artificial Sequence
  Synthetic
aagauuauuccaccucucuga

SEQ ID NO: 491883 - RNA, 22 nt, Artificial Sequence
  Synthetic
uaagauuauuccaccucucuga

SEQ ID NO: 491884 - RNA, 23 nt, Artificial Sequence
  Synthetic
uuaagauuauuccaccucucuga

SEQ ID NO: 491885 - RNA, 24 nt, Artificial Sequence
  Synthetic
guuaagauuauuccaccucucuga

SEQ ID NO: 491886 - RNA, 18 nt, Artificial Sequence
  Synthetic
aaaguguagucagucuga

SEQ ID NO: 491887 - RNA, 19 nt, Artificial Sequence
  Synthetic
uaaaguguagucagucuga

SEQ ID NO: 491888 - RNA, 20 nt, Artificial Sequence
  Synthetic
guaaaguguagucagucuga

SEQ ID NO: 491889 - RNA, 21 nt, Artificial Sequence
  Synthetic
gguaaaguguagucagucuga

SEQ ID NO: 491890 - RNA, 22 nt, Artificial Sequence
  Synthetic
agguaaaguguagucagucuga

SEQ ID NO: 491891 - RNA, 23 nt, Artificial Sequence
  Synthetic
aagguaaaguguagucagucuga

SEQ ID NO: 491892 - RNA, 24 nt, Artificial Sequence
  Synthetic
aaagguaaaguguagucagucuga

SEQ ID NO: 491893 - RNA, 18 nt, Artificial Sequence
  Synthetic
auuaccaaaagagucuga

SEQ ID NO: 491894 - RNA, 19 nt, Artificial Sequence
  Synthetic
aauuaccaaaagagucuga

SEQ ID NO: 491895 - RNA, 20 nt, Artificial Sequence
  Synthetic
gaauuaccaaaagagucuga

SEQ ID NO: 491896 - RNA, 21 nt, Artificial Sequence
  Synthetic
ugaauuaccaaaagagucuga

SEQ ID NO: 491897 - RNA, 22 nt, Artificial Sequence
  Synthetic
gugaauuaccaaaagagucuga

SEQ ID NO: 491898 - RNA, 23 nt, Artificial Sequence
  Synthetic
ggugaauuaccaaaagagucuga

SEQ ID NO: 491899 - RNA, 24 nt, Artificial Sequence
  Synthetic
aggugaauuaccaaaagagucuga

SEQ ID NO: 491900 - RNA, 18 nt, Artificial Sequence
  Synthetic
cccaaguaaggagucuga

SEQ ID NO: 491901 - RNA, 19 nt, Artificial Sequence
  Synthetic
acccaaguaaggagucuga

SEQ ID NO: 491902 - RNA, 20 nt, Artificial Sequence
  Synthetic
aacccaaguaaggagucuga

SEQ ID NO: 491903 - RNA, 21 nt, Artificial Sequence
  Synthetic
caacccaaguaaggagucuga

SEQ ID NO: 491904 - RNA, 22 nt, Artificial Sequence
  Synthetic
gcaacccaaguaaggagucuga

SEQ ID NO: 491905 - RNA, 23 nt, Artificial Sequence
  Synthetic
agcaacccaaguaaggagucuga

SEQ ID NO: 491906 - RNA, 24 nt, Artificial Sequence
  Synthetic
cagcaacccaaguaaggagucuga

SEQ ID NO: 491907 - RNA, 18 nt, Artificial Sequence
  Synthetic
cauuaacuucuggucuga

SEQ ID NO: 491908 - RNA, 19 nt, Artificial Sequence
  Synthetic
ucauuaacuucuggucuga

SEQ ID NO: 491909 - RNA, 20 nt, Artificial Sequence
  Synthetic
uucauuaacuucuggucuga

SEQ ID NO: 491910 - RNA, 21 nt, Artificial Sequence
  Synthetic
uuucauuaacuucuggucuga

SEQ ID NO: 491911 - RNA, 22 nt, Artificial Sequence
  Synthetic
uuuucauuaacuucuggucuga

SEQ ID NO: 491912 - RNA, 23 nt, Artificial Sequence
  Synthetic
uuuuucauuaacuucuggucuga

SEQ ID NO: 491913 - RNA, 24 nt, Artificial Sequence
  Synthetic
auuuuucauuaacuucuggucuga

SEQ ID NO: 491914 - RNA, 18 nt, Artificial Sequence
  Synthetic
uucucgauugaugucuga

SEQ ID NO: 491915 - RNA, 19 nt, Artificial Sequence
  Synthetic
uuucucgauugaugucuga

SEQ ID NO: 491916 - RNA, 20 nt, Artificial Sequence
  Synthetic
uuuucucgauugaugucuga

SEQ ID NO: 491917 - RNA, 21 nt, Artificial Sequence
  Synthetic
uuuuucucgauugaugucuga

SEQ ID NO: 491918 - RNA, 22 nt, Artificial Sequence
  Synthetic
uuuuuucucgauugaugucuga

SEQ ID NO: 491919 - RNA, 23 nt, Artificial Sequence
  Synthetic
auuuuuucucgauugaugucuga

SEQ ID NO: 491920 - RNA, 24 nt, Artificial Sequence
  Synthetic
gauuuuuucucgauugaugucuga

SEQ ID NO: 491921 - RNA, 18 nt, Artificial Sequence
  Synthetic
cuuuaucuaacugucuga

SEQ ID NO: 491922 - RNA, 19 nt, Artificial Sequence
  Synthetic
ccuuuaucuaacugucuga

SEQ ID NO: 491923 - RNA, 20 nt, Artificial Sequence
  Synthetic
gccuuuaucuaacugucuga

SEQ ID NO: 491924 - RNA, 21 nt, Artificial Sequence
  Synthetic
ggccuuuaucuaacugucuga

SEQ ID NO: 491925 - RNA, 22 nt, Artificial Sequence
  Synthetic
aggccuuuaucuaacugucuga

SEQ ID NO: 491926 - RNA, 23 nt, Artificial Sequence
  Synthetic
gaggccuuuaucuaacugucuga

SEQ ID NO: 491927 - RNA, 24 nt, Artificial Sequence
  Synthetic
agaggccuuuaucuaacugucuga

SEQ ID NO: 491928 - RNA, 18 nt, Artificial Sequence
  Synthetic
cucaacuuuggugucuga

SEQ ID NO: 491929 - RNA, 19 nt, Artificial Sequence
  Synthetic
ucucaacuuuggugucuga

SEQ ID NO: 491930 - RNA, 20 nt, Artificial Sequence
  Synthetic
aucucaacuuuggugucuga

SEQ ID NO: 491931 - RNA, 21 nt, Artificial Sequence
  Synthetic
aaucucaacuuuggugucuga

SEQ ID NO: 491932 - RNA, 22 nt, Artificial Sequence
  Synthetic
caaucucaacuuuggugucuga

SEQ ID NO: 491933 - RNA, 23 nt, Artificial Sequence
  Synthetic
gcaaucucaacuuuggugucuga

SEQ ID NO: 491934 - RNA, 24 nt, Artificial Sequence
  Synthetic
ggcaaucucaacuuuggugucuga

SEQ ID NO: 491935 - RNA, 18 nt, Artificial Sequence
  Synthetic
aguguacaaaaauucuga

SEQ ID NO: 491936 - RNA, 19 nt, Artificial Sequence
  Synthetic
aaguguacaaaaauucuga

SEQ ID NO: 491937 - RNA, 20 nt, Artificial Sequence
  Synthetic
gaaguguacaaaaauucuga

SEQ ID NO: 491938 - RNA, 21 nt, Artificial Sequence
  Synthetic
ggaaguguacaaaaauucuga

SEQ ID NO: 491939 - RNA, 22 nt, Artificial Sequence
  Synthetic
gggaaguguacaaaaauucuga

SEQ ID NO: 491940 - RNA, 23 nt, Artificial Sequence
  Synthetic
agggaaguguacaaaaauucuga

SEQ ID NO: 491941 - RNA, 24 nt, Artificial Sequence
  Synthetic
aagggaaguguacaaaaauucuga

SEQ ID NO: 491942 - RNA, 18 nt, Artificial Sequence
  Synthetic
cuacaucaaaaauucuga

SEQ ID NO: 491943 - RNA, 19 nt, Artificial Sequence
  Synthetic
acuacaucaaaaauucuga

SEQ ID NO: 491944 - RNA, 20 nt, Artificial Sequence
  Synthetic
uacuacaucaaaaauucuga

SEQ ID NO: 491945 - RNA, 21 nt, Artificial Sequence
  Synthetic
auacuacaucaaaaauucuga

SEQ ID NO: 491946 - RNA, 22 nt, Artificial Sequence
  Synthetic
aauacuacaucaaaaauucuga

SEQ ID NO: 491947 - RNA, 23 nt, Artificial Sequence
  Synthetic
aaauacuacaucaaaaauucuga

SEQ ID NO: 491948 - RNA, 24 nt, Artificial Sequence
  Synthetic
uaaauacuacaucaaaaauucuga

SEQ ID NO: 491949 - RNA, 18 nt, Artificial Sequence
  Synthetic
cucccuaggagauucuga

SEQ ID NO: 491950 - RNA, 19 nt, Artificial Sequence
  Synthetic
gcucccuaggagauucuga

SEQ ID NO: 491951 - RNA, 20 nt, Artificial Sequence
  Synthetic
agcucccuaggagauucuga

SEQ ID NO: 491952 - RNA, 21 nt, Artificial Sequence
  Synthetic
aagcucccuaggagauucuga

SEQ ID NO: 491953 - RNA, 22 nt, Artificial Sequence
  Synthetic
caagcucccuaggagauucuga

SEQ ID NO: 491954 - RNA, 23 nt, Artificial Sequence
  Synthetic
acaagcucccuaggagauucuga

SEQ ID NO: 491955 - RNA, 24 nt, Artificial Sequence
  Synthetic
aacaagcucccuaggagauucuga

SEQ ID NO: 491956 - RNA, 18 nt, Artificial Sequence
  Synthetic
ccacuaaaacuauucuga

SEQ ID NO: 491957 - RNA, 19 nt, Artificial Sequence
  Synthetic
uccacuaaaacuauucuga

SEQ ID NO: 491958 - RNA, 20 nt, Artificial Sequence
  Synthetic
uuccacuaaaacuauucuga

SEQ ID NO: 491959 - RNA, 21 nt, Artificial Sequence
  Synthetic
guuccacuaaaacuauucuga

SEQ ID NO: 491960 - RNA, 22 nt, Artificial Sequence
  Synthetic
cguuccacuaaaacuauucuga

SEQ ID NO: 491961 - RNA, 23 nt, Artificial Sequence
  Synthetic
ucguuccacuaaaacuauucuga

SEQ ID NO: 491962 - RNA, 24 nt, Artificial Sequence
  Synthetic
aucguuccacuaaaacuauucuga

SEQ ID NO: 491963 - RNA, 18 nt, Artificial Sequence
  Synthetic
cucuugaggguauucuga

SEQ ID NO: 491964 - RNA, 19 nt, Artificial Sequence
  Synthetic
ucucuugaggguauucuga

SEQ ID NO: 491965 - RNA, 20 nt, Artificial Sequence
  Synthetic
uucucuugaggguauucuga

SEQ ID NO: 491966 - RNA, 21 nt, Artificial Sequence
  Synthetic
uuucucuugaggguauucuga

SEQ ID NO: 491967 - RNA, 22 nt, Artificial Sequence
  Synthetic
uuuucucuugaggguauucuga

SEQ ID NO: 491968 - RNA, 23 nt, Artificial Sequence
  Synthetic
cuuuucucuugaggguauucuga

SEQ ID NO: 491969 - RNA, 24 nt, Artificial Sequence
  Synthetic
gcuuuucucuugaggguauucuga

SEQ ID NO: 491970 - RNA, 18 nt, Artificial Sequence
  Synthetic
uucuaguugguauucuga

SEQ ID NO: 491971 - RNA, 19 nt, Artificial Sequence
  Synthetic
guucuaguugguauucuga

SEQ ID NO: 491972 - RNA, 20 nt, Artificial Sequence
  Synthetic
aguucuaguugguauucuga

SEQ ID NO: 491973 - RNA, 21 nt, Artificial Sequence
  Synthetic
caguucuaguugguauucuga

SEQ ID NO: 491974 - RNA, 22 nt, Artificial Sequence
  Synthetic
ccaguucuaguugguauucuga

SEQ ID NO: 491975 - RNA, 23 nt, Artificial Sequence
  Synthetic
accaguucuaguugguauucuga

SEQ ID NO: 491976 - RNA, 24 nt, Artificial Sequence
  Synthetic
uaccaguucuaguugguauucuga

SEQ ID NO: 491977 - RNA, 18 nt, Artificial Sequence
  Synthetic
aacuuccauguauucuga

SEQ ID NO: 491978 - RNA, 19 nt, Artificial Sequence
  Synthetic
uaacuuccauguauucuga

SEQ ID NO: 491979 - RNA, 20 nt, Artificial Sequence
  Synthetic
uuaacuuccauguauucuga

SEQ ID NO: 491980 - RNA, 21 nt, Artificial Sequence
  Synthetic
uuuaacuuccauguauucuga

SEQ ID NO: 491981 - RNA, 22 nt, Artificial Sequence
  Synthetic
uuuuaacuuccauguauucuga

SEQ ID NO: 491982 - RNA, 23 nt, Artificial Sequence
  Synthetic
cuuuuaacuuccauguauucuga

SEQ ID NO: 491983 - RNA, 24 nt, Artificial Sequence
  Synthetic
acuuuuaacuuccauguauucuga

SEQ ID NO: 491984 - RNA, 18 nt, Artificial Sequence
  Synthetic
uuacacagauuauucuga

SEQ ID NO: 491985 - RNA, 19 nt, Artificial Sequence
  Synthetic
uuuacacagauuauucuga

SEQ ID NO: 491986 - RNA, 20 nt, Artificial Sequence
  Synthetic
uuuuacacagauuauucuga

SEQ ID NO: 491987 - RNA, 21 nt, Artificial Sequence
  Synthetic
uuuuuacacagauuauucuga

SEQ ID NO: 491988 - RNA, 22 nt, Artificial Sequence
  Synthetic
uuuuuuacacagauuauucuga

SEQ ID NO: 491989 - RNA, 23 nt, Artificial Sequence
  Synthetic
guuuuuuacacagauuauucuga

SEQ ID NO: 491990 - RNA, 24 nt, Artificial Sequence
  Synthetic
uguuuuuuacacagauuauucuga

SEQ ID NO: 491991 - RNA, 18 nt, Artificial Sequence
  Synthetic
auuugaaagcccuucuga

SEQ ID NO: 491992 - RNA, 19 nt, Artificial Sequence
  Synthetic
uauuugaaagcccuucuga

SEQ ID NO: 491993 - RNA, 20 nt, Artificial Sequence
  Synthetic
cuauuugaaagcccuucuga

SEQ ID NO: 491994 - RNA, 21 nt, Artificial Sequence
  Synthetic
acuauuugaaagcccuucuga

SEQ ID NO: 491995 - RNA, 22 nt, Artificial Sequence
  Synthetic
cacuauuugaaagcccuucuga

SEQ ID NO: 491996 - RNA, 23 nt, Artificial Sequence
  Synthetic
gcacuauuugaaagcccuucuga

SEQ ID NO: 491997 - RNA, 24 nt, Artificial Sequence
  Synthetic
cgcacuauuugaaagcccuucuga

SEQ ID NO: 491998 - RNA, 18 nt, Artificial Sequence
  Synthetic
uuuccaagggucuucuga

SEQ ID NO: 491999 - RNA, 19 nt, Artificial Sequence
  Synthetic
uuuuccaagggucuucuga

SEQ ID NO: 492000 - RNA, 20 nt, Artificial Sequence
  Synthetic
cuuuuccaagggucuucuga

SEQ ID NO: 492001 - RNA, 21 nt, Artificial Sequence
  Synthetic
ccuuuuccaagggucuucuga

SEQ ID NO: 492002 - RNA, 22 nt, Artificial Sequence
  Synthetic
accuuuuccaagggucuucuga

SEQ ID NO: 492003 - RNA, 23 nt, Artificial Sequence
  Synthetic
aaccuuuuccaagggucuucuga

SEQ ID NO: 492004 - RNA, 24 nt, Artificial Sequence
  Synthetic
aaaccuuuuccaagggucuucuga

SEQ ID NO: 492005 - RNA, 18 nt, Artificial Sequence
  Synthetic
gagaaacugauguucuga

SEQ ID NO: 492006 - RNA, 19 nt, Artificial Sequence
  Synthetic
agagaaacugauguucuga

SEQ ID NO: 492007 - RNA, 20 nt, Artificial Sequence
  Synthetic
aagagaaacugauguucuga

SEQ ID NO: 492008 - RNA, 21 nt, Artificial Sequence
  Synthetic
uaagagaaacugauguucuga

SEQ ID NO: 492009 - RNA, 22 nt, Artificial Sequence
  Synthetic
guaagagaaacugauguucuga

SEQ ID NO: 492010 - RNA, 23 nt, Artificial Sequence
  Synthetic
cguaagagaaacugauguucuga

SEQ ID NO: 492011 - RNA, 24 nt, Artificial Sequence
  Synthetic
ccguaagagaaacugauguucuga

SEQ ID NO: 492012 - RNA, 18 nt, Artificial Sequence
  Synthetic
uggauugauuuguucuga

SEQ ID NO: 492013 - RNA, 19 nt, Artificial Sequence
  Synthetic
guggauugauuuguucuga

SEQ ID NO: 492014 - RNA, 20 nt, Artificial Sequence
  Synthetic
cguggauugauuuguucuga

SEQ ID NO: 492015 - RNA, 21 nt, Artificial Sequence
  Synthetic
acguggauugauuuguucuga

SEQ ID NO: 492016 - RNA, 22 nt, Artificial Sequence
  Synthetic
cacguggauugauuuguucuga

SEQ ID NO: 492017 - RNA, 23 nt, Artificial Sequence
  Synthetic
ccacguggauugauuuguucuga

SEQ ID NO: 492018 - RNA, 24 nt, Artificial Sequence
  Synthetic
cccacguggauugauuuguucuga

SEQ ID NO: 492019 - RNA, 18 nt, Artificial Sequence
  Synthetic
aaaauaaaucauuucuga

SEQ ID NO: 492020 - RNA, 19 nt, Artificial Sequence
  Synthetic
uaaaauaaaucauuucuga

SEQ ID NO: 492021 - RNA, 20 nt, Artificial Sequence
  Synthetic
cuaaaauaaaucauuucuga

SEQ ID NO: 492022 - RNA, 21 nt, Artificial Sequence
  Synthetic
ucuaaaauaaaucauuucuga

SEQ ID NO: 492023 - RNA, 22 nt, Artificial Sequence
  Synthetic
uucuaaaauaaaucauuucuga

SEQ ID NO: 492024 - RNA, 23 nt, Artificial Sequence
  Synthetic
uuucuaaaauaaaucauuucuga

SEQ ID NO: 492025 - RNA, 24 nt, Artificial Sequence
  Synthetic
uuuucuaaaauaaaucauuucuga

SEQ ID NO: 492026 - RNA, 18 nt, Artificial Sequence
  Synthetic
auuuagauauauuucuga

SEQ ID NO: 492027 - RNA, 19 nt, Artificial Sequence
  Synthetic
cauuuagauauauuucuga

SEQ ID NO: 492028 - RNA, 20 nt, Artificial Sequence
  Synthetic
acauuuagauauauuucuga

SEQ ID NO: 492029 - RNA, 21 nt, Artificial Sequence
  Synthetic
gacauuuagauauauuucuga

SEQ ID NO: 492030 - RNA, 22 nt, Artificial Sequence
  Synthetic
ugacauuuagauauauuucuga

SEQ ID NO: 492031 - RNA, 23 nt, Artificial Sequence
  Synthetic
gugacauuuagauauauuucuga

SEQ ID NO: 492032 - RNA, 24 nt, Artificial Sequence
  Synthetic
ggugacauuuagauauauuucuga

SEQ ID NO: 492033 - RNA, 18 nt, Artificial Sequence
  Synthetic
aauuagccgaguuucuga

SEQ ID NO: 492034 - RNA, 19 nt, Artificial Sequence
  Synthetic
uaauuagccgaguuucuga

SEQ ID NO: 492035 - RNA, 20 nt, Artificial Sequence
  Synthetic
auaauuagccgaguuucuga

SEQ ID NO: 492036 - RNA, 21 nt, Artificial Sequence
  Synthetic
aauaauuagccgaguuucuga

SEQ ID NO: 492037 - RNA, 22 nt, Artificial Sequence
  Synthetic
aaauaauuagccgaguuucuga

SEQ ID NO: 492038 - RNA, 23 nt, Artificial Sequence
  Synthetic
aaaauaauuagccgaguuucuga

SEQ ID NO: 492039 - RNA, 24 nt, Artificial Sequence
  Synthetic
aaaaauaauuagccgaguuucuga

SEQ ID NO: 492040 - RNA, 18 nt, Artificial Sequence
  Synthetic
uuaaaggucuguuucuga

SEQ ID NO: 492041 - RNA, 19 nt, Artificial Sequence
  Synthetic
uuuaaaggucuguuucuga

SEQ ID NO: 492042 - RNA, 20 nt, Artificial Sequence
  Synthetic
guuuaaaggucuguuucuga

SEQ ID NO: 492043 - RNA, 21 nt, Artificial Sequence
  Synthetic
uguuuaaaggucuguuucuga

SEQ ID NO: 492044 - RNA, 22 nt, Artificial Sequence
  Synthetic
uuguuuaaaggucuguuucuga

SEQ ID NO: 492045 - RNA, 23 nt, Artificial Sequence
  Synthetic
auuguuuaaaggucuguuucuga

SEQ ID NO: 492046 - RNA, 24 nt, Artificial Sequence
  Synthetic
cauuguuuaaaggucuguuucuga

SEQ ID NO: 492047 - RNA, 18 nt, Artificial Sequence
  Synthetic
gcaccuacacuuuucuga

SEQ ID NO: 492048 - RNA, 19 nt, Artificial Sequence
  Synthetic
ugcaccuacacuuuucuga

SEQ ID NO: 492049 - RNA, 20 nt, Artificial Sequence
  Synthetic
uugcaccuacacuuuucuga

SEQ ID NO: 492050 - RNA, 21 nt, Artificial Sequence
  Synthetic
cuugcaccuacacuuuucuga

SEQ ID NO: 492051 - RNA, 22 nt, Artificial Sequence
  Synthetic
ucuugcaccuacacuuuucuga

SEQ ID NO: 492052 - RNA, 23 nt, Artificial Sequence
  Synthetic
cucuugcaccuacacuuuucuga

SEQ ID NO: 492053 - RNA, 24 nt, Artificial Sequence
  Synthetic
ucucuugcaccuacacuuuucuga

SEQ ID NO: 492054 - RNA, 18 nt, Artificial Sequence
  Synthetic
uccaaagugcuuuucuga

SEQ ID NO: 492055 - RNA, 19 nt, Artificial Sequence
  Synthetic
uuccaaagugcuuuucuga

SEQ ID NO: 492056 - RNA, 20 nt, Artificial Sequence
  Synthetic
auuccaaagugcuuuucuga

SEQ ID NO: 492057 - RNA, 21 nt, Artificial Sequence
  Synthetic
cauuccaaagugcuuuucuga

SEQ ID NO: 492058 - RNA, 22 nt, Artificial Sequence
  Synthetic
gcauuccaaagugcuuuucuga

SEQ ID NO: 492059 - RNA, 23 nt, Artificial Sequence
  Synthetic
cgcauuccaaagugcuuuucuga

SEQ ID NO: 492060 - RNA, 24 nt, Artificial Sequence
  Synthetic
ucgcauuccaaagugcuuuucuga

SEQ ID NO: 492061 - RNA, 18 nt, Artificial Sequence
  Synthetic
ucauaauucaaaaaguga

SEQ ID NO: 492062 - RNA, 19 nt, Artificial Sequence
  Synthetic
cucauaauucaaaaaguga

SEQ ID NO: 492063 - RNA, 20 nt, Artificial Sequence
  Synthetic
ucucauaauucaaaaaguga

SEQ ID NO: 492064 - RNA, 21 nt, Artificial Sequence
  Synthetic
uucucauaauucaaaaaguga

SEQ ID NO: 492065 - RNA, 22 nt, Artificial Sequence
  Synthetic
cuucucauaauucaaaaaguga

SEQ ID NO: 492066 - RNA, 23 nt, Artificial Sequence
  Synthetic
ucuucucauaauucaaaaaguga

SEQ ID NO: 492067 - RNA, 24 nt, Artificial Sequence
  Synthetic
uucuucucauaauucaaaaaguga

SEQ ID NO: 492068 - RNA, 18 nt, Artificial Sequence
  Synthetic
aauauuuugacaaaguga

SEQ ID NO: 492069 - RNA, 19 nt, Artificial Sequence
  Synthetic
aaauauuuugacaaaguga

SEQ ID NO: 492070 - RNA, 20 nt, Artificial Sequence
  Synthetic
aaaauauuuugacaaaguga

SEQ ID NO: 492071 - RNA, 21 nt, Artificial Sequence
  Synthetic
caaaauauuuugacaaaguga

SEQ ID NO: 492072 - RNA, 22 nt, Artificial Sequence
  Synthetic
ucaaaauauuuugacaaaguga

SEQ ID NO: 492073 - RNA, 23 nt, Artificial Sequence
  Synthetic
aucaaaauauuuugacaaaguga

SEQ ID NO: 492074 - RNA, 24 nt, Artificial Sequence
  Synthetic
caucaaaauauuuugacaaaguga

SEQ ID NO: 492075 - RNA, 18 nt, Artificial Sequence
  Synthetic
uacagaagcccaaaguga

SEQ ID NO: 492076 - RNA, 19 nt, Artificial Sequence
  Synthetic
uuacagaagcccaaaguga

SEQ ID NO: 492077 - RNA, 20 nt, Artificial Sequence
  Synthetic
guuacagaagcccaaaguga

SEQ ID NO: 492078 - RNA, 21 nt, Artificial Sequence
  Synthetic
uguuacagaagcccaaaguga

SEQ ID NO: 492079 - RNA, 22 nt, Artificial Sequence
  Synthetic
guguuacagaagcccaaaguga

SEQ ID NO: 492080 - RNA, 23 nt, Artificial Sequence
  Synthetic
aguguuacagaagcccaaaguga

SEQ ID NO: 492081 - RNA, 24 nt, Artificial Sequence
  Synthetic
uaguguuacagaagcccaaaguga

SEQ ID NO: 492082 - RNA, 18 nt, Artificial Sequence
  Synthetic
uuugccuuaucaaaguga

SEQ ID NO: 492083 - RNA, 19 nt, Artificial Sequence
  Synthetic
guuugccuuaucaaaguga

SEQ ID NO: 492084 - RNA, 20 nt, Artificial Sequence
  Synthetic
aguuugccuuaucaaaguga

SEQ ID NO: 492085 - RNA, 21 nt, Artificial Sequence
  Synthetic
caguuugccuuaucaaaguga

SEQ ID NO: 492086 - RNA, 22 nt, Artificial Sequence
  Synthetic
gcaguuugccuuaucaaaguga

SEQ ID NO: 492087 - RNA, 23 nt, Artificial Sequence
  Synthetic
ggcaguuugccuuaucaaaguga

SEQ ID NO: 492088 - RNA, 24 nt, Artificial Sequence
  Synthetic
uggcaguuugccuuaucaaaguga

SEQ ID NO: 492089 - RNA, 18 nt, Artificial Sequence
  Synthetic
ggagcugggagaaaguga

SEQ ID NO: 492090 - RNA, 19 nt, Artificial Sequence
  Synthetic
uggagcugggagaaaguga

SEQ ID NO: 492091 - RNA, 20 nt, Artificial Sequence
  Synthetic
guggagcugggagaaaguga

SEQ ID NO: 492092 - RNA, 21 nt, Artificial Sequence
  Synthetic
uguggagcugggagaaaguga

SEQ ID NO: 492093 - RNA, 22 nt, Artificial Sequence
  Synthetic
cuguggagcugggagaaaguga

SEQ ID NO: 492094 - RNA, 23 nt, Artificial Sequence
  Synthetic
acuguggagcugggagaaaguga

SEQ ID NO: 492095 - RNA, 24 nt, Artificial Sequence
  Synthetic
uacuguggagcugggagaaaguga

SEQ ID NO: 492096 - RNA, 18 nt, Artificial Sequence
  Synthetic
uuacagaaagacaaguga

SEQ ID NO: 492097 - RNA, 19 nt, Artificial Sequence
  Synthetic
auuacagaaagacaaguga

SEQ ID NO: 492098 - RNA, 20 nt, Artificial Sequence
  Synthetic
uauuacagaaagacaaguga

SEQ ID NO: 492099 - RNA, 21 nt, Artificial Sequence
  Synthetic
auauuacagaaagacaaguga

SEQ ID NO: 492100 - RNA, 22 nt, Artificial Sequence
  Synthetic
aauauuacagaaagacaaguga

SEQ ID NO: 492101 - RNA, 23 nt, Artificial Sequence
  Synthetic
gaauauuacagaaagacaaguga

SEQ ID NO: 492102 - RNA, 24 nt, Artificial Sequence
  Synthetic
ugaauauuacagaaagacaaguga

SEQ ID NO: 492103 - RNA, 18 nt, Artificial Sequence
  Synthetic
gcauagagauacaaguga

SEQ ID NO: 492104 - RNA, 19 nt, Artificial Sequence
  Synthetic
ugcauagagauacaaguga

SEQ ID NO: 492105 - RNA, 20 nt, Artificial Sequence
  Synthetic
uugcauagagauacaaguga

SEQ ID NO: 492106 - RNA, 21 nt, Artificial Sequence
  Synthetic
guugcauagagauacaaguga

SEQ ID NO: 492107 - RNA, 22 nt, Artificial Sequence
  Synthetic
aguugcauagagauacaaguga

SEQ ID NO: 492108 - RNA, 23 nt, Artificial Sequence
  Synthetic
gaguugcauagagauacaaguga

SEQ ID NO: 492109 - RNA, 24 nt, Artificial Sequence
  Synthetic
agaguugcauagagauacaaguga

SEQ ID NO: 492110 - RNA, 18 nt, Artificial Sequence
  Synthetic
ggcaucauaagcaaguga

SEQ ID NO: 492111 - RNA, 19 nt, Artificial Sequence
  Synthetic
cggcaucauaagcaaguga

SEQ ID NO: 492112 - RNA, 20 nt, Artificial Sequence
  Synthetic
gcggcaucauaagcaaguga

SEQ ID NO: 492113 - RNA, 21 nt, Artificial Sequence
  Synthetic
ugcggcaucauaagcaaguga

SEQ ID NO: 492114 - RNA, 22 nt, Artificial Sequence
  Synthetic
augcggcaucauaagcaaguga

SEQ ID NO: 492115 - RNA, 23 nt, Artificial Sequence
  Synthetic
aaugcggcaucauaagcaaguga

SEQ ID NO: 492116 - RNA, 24 nt, Artificial Sequence
  Synthetic
caaugcggcaucauaagcaaguga

SEQ ID NO: 492117 - RNA, 18 nt, Artificial Sequence
  Synthetic
ugugaguaacagaaguga

SEQ ID NO: 492118 - RNA, 19 nt, Artificial Sequence
  Synthetic
gugugaguaacagaaguga

SEQ ID NO: 492119 - RNA, 20 nt, Artificial Sequence
  Synthetic
agugugaguaacagaaguga

SEQ ID NO: 492120 - RNA, 21 nt, Artificial Sequence
  Synthetic
aagugugaguaacagaaguga

SEQ ID NO: 492121 - RNA, 22 nt, Artificial Sequence
  Synthetic
aaagugugaguaacagaaguga

SEQ ID NO: 492122 - RNA, 23 nt, Artificial Sequence
  Synthetic
caaagugugaguaacagaaguga

SEQ ID NO: 492123 - RNA, 24 nt, Artificial Sequence
  Synthetic
acaaagugugaguaacagaaguga

SEQ ID NO: 492124 - RNA, 18 nt, Artificial Sequence
  Synthetic
auggagucagagaaguga

SEQ ID NO: 492125 - RNA, 19 nt, Artificial Sequence
  Synthetic
uauggagucagagaaguga

SEQ ID NO: 492126 - RNA, 20 nt, Artificial Sequence
  Synthetic
guauggagucagagaaguga

SEQ ID NO: 492127 - RNA, 21 nt, Artificial Sequence
  Synthetic
gguauggagucagagaaguga

SEQ ID NO: 492128 - RNA, 22 nt, Artificial Sequence
  Synthetic
ugguauggagucagagaaguga

SEQ ID NO: 492129 - RNA, 23 nt, Artificial Sequence
  Synthetic
uugguauggagucagagaaguga

SEQ ID NO: 492130 - RNA, 24 nt, Artificial Sequence
  Synthetic
auugguauggagucagagaaguga

SEQ ID NO: 492131 - RNA, 18 nt, Artificial Sequence
  Synthetic
aagaaguugacgaaguga

SEQ ID NO: 492132 - RNA, 19 nt, Artificial Sequence
  Synthetic
aaagaaguugacgaaguga

SEQ ID NO: 492133 - RNA, 20 nt, Artificial Sequence
  Synthetic
uaaagaaguugacgaaguga

SEQ ID NO: 492134 - RNA, 21 nt, Artificial Sequence
  Synthetic
uuaaagaaguugacgaaguga

SEQ ID NO: 492135 - RNA, 22 nt, Artificial Sequence
  Synthetic
cuuaaagaaguugacgaaguga

SEQ ID NO: 492136 - RNA, 23 nt, Artificial Sequence
  Synthetic
ucuuaaagaaguugacgaaguga

SEQ ID NO: 492137 - RNA, 24 nt, Artificial Sequence
  Synthetic
aucuuaaagaaguugacgaaguga

SEQ ID NO: 492138 - RNA, 18 nt, Artificial Sequence
  Synthetic
aagaucugaaggaaguga

SEQ ID NO: 492139 - RNA, 19 nt, Artificial Sequence
  Synthetic
aaagaucugaaggaaguga

SEQ ID NO: 492140 - RNA, 20 nt, Artificial Sequence
  Synthetic
uaaagaucugaaggaaguga

SEQ ID NO: 492141 - RNA, 21 nt, Artificial Sequence
  Synthetic
auaaagaucugaaggaaguga

SEQ ID NO: 492142 - RNA, 22 nt, Artificial Sequence
  Synthetic
aauaaagaucugaaggaaguga

SEQ ID NO: 492143 - RNA, 23 nt, Artificial Sequence
  Synthetic
aaauaaagaucugaaggaaguga

SEQ ID NO: 492144 - RNA, 24 nt, Artificial Sequence
  Synthetic
uaaauaaagaucugaaggaaguga

SEQ ID NO: 492145 - RNA, 18 nt, Artificial Sequence
  Synthetic
acuaagcuucauaaguga

SEQ ID NO: 492146 - RNA, 19 nt, Artificial Sequence
  Synthetic
aacuaagcuucauaaguga

SEQ ID NO: 492147 - RNA, 20 nt, Artificial Sequence
  Synthetic
aaacuaagcuucauaaguga

SEQ ID NO: 492148 - RNA, 21 nt, Artificial Sequence
  Synthetic
caaacuaagcuucauaaguga

SEQ ID NO: 492149 - RNA, 22 nt, Artificial Sequence
  Synthetic
ccaaacuaagcuucauaaguga

SEQ ID NO: 492150 - RNA, 23 nt, Artificial Sequence
  Synthetic
gccaaacuaagcuucauaaguga

SEQ ID NO: 492151 - RNA, 24 nt, Artificial Sequence
  Synthetic
agccaaacuaagcuucauaaguga

SEQ ID NO: 492152 - RNA, 18 nt, Artificial Sequence
  Synthetic
gcuggaugcaguaaguga

SEQ ID NO: 492153 - RNA, 19 nt, Artificial Sequence
  Synthetic
agcuggaugcaguaaguga

SEQ ID NO: 492154 - RNA, 20 nt, Artificial Sequence
  Synthetic
uagcuggaugcaguaaguga

SEQ ID NO: 492155 - RNA, 21 nt, Artificial Sequence
  Synthetic
uuagcuggaugcaguaaguga

SEQ ID NO: 492156 - RNA, 22 nt, Artificial Sequence
  Synthetic
uuuagcuggaugcaguaaguga

SEQ ID NO: 492157 - RNA, 23 nt, Artificial Sequence
  Synthetic
uuuuagcuggaugcaguaaguga

SEQ ID NO: 492158 - RNA, 24 nt, Artificial Sequence
  Synthetic
cuuuuagcuggaugcaguaaguga

SEQ ID NO: 492159 - RNA, 18 nt, Artificial Sequence
  Synthetic
gguacaaaaaaacaguga

SEQ ID NO: 492160 - RNA, 19 nt, Artificial Sequence
  Synthetic
cgguacaaaaaaacaguga

SEQ ID NO: 492161 - RNA, 20 nt, Artificial Sequence
  Synthetic
acgguacaaaaaaacaguga

SEQ ID NO: 492162 - RNA, 21 nt, Artificial Sequence
  Synthetic
aacgguacaaaaaaacaguga

SEQ ID NO: 492163 - RNA, 22 nt, Artificial Sequence
  Synthetic
aaacgguacaaaaaaacaguga

SEQ ID NO: 492164 - RNA, 23 nt, Artificial Sequence
  Synthetic
uaaacgguacaaaaaaacaguga

SEQ ID NO: 492165 - RNA, 24 nt, Artificial Sequence
  Synthetic
auaaacgguacaaaaaaacaguga

SEQ ID NO: 492166 - RNA, 18 nt, Artificial Sequence
  Synthetic
caauagggugaacaguga

SEQ ID NO: 492167 - RNA, 19 nt, Artificial Sequence
  Synthetic
acaauagggugaacaguga

SEQ ID NO: 492168 - RNA, 20 nt, Artificial Sequence
  Synthetic
uacaauagggugaacaguga

SEQ ID NO: 492169 - RNA, 21 nt, Artificial Sequence
  Synthetic
auacaauagggugaacaguga

SEQ ID NO: 492170 - RNA, 22 nt, Artificial Sequence
  Synthetic
uauacaauagggugaacaguga

SEQ ID NO: 492171 - RNA, 23 nt, Artificial Sequence
  Synthetic
uuauacaauagggugaacaguga

SEQ ID NO: 492172 - RNA, 24 nt, Artificial Sequence
  Synthetic
cuuauacaauagggugaacaguga

SEQ ID NO: 492173 - RNA, 18 nt, Artificial Sequence
  Synthetic
auuugacuaucacaguga

SEQ ID NO: 492174 - RNA, 19 nt, Artificial Sequence
  Synthetic
cauuugacuaucacaguga

SEQ ID NO: 492175 - RNA, 20 nt, Artificial Sequence
  Synthetic
acauuugacuaucacaguga

SEQ ID NO: 492176 - RNA, 21 nt, Artificial Sequence
  Synthetic
gacauuugacuaucacaguga

SEQ ID NO: 492177 - RNA, 22 nt, Artificial Sequence
  Synthetic
ggacauuugacuaucacaguga

SEQ ID NO: 492178 - RNA, 23 nt, Artificial Sequence
  Synthetic
aggacauuugacuaucacaguga

SEQ ID NO: 492179 - RNA, 24 nt, Artificial Sequence
  Synthetic
gaggacauuugacuaucacaguga

SEQ ID NO: 492180 - RNA, 18 nt, Artificial Sequence
  Synthetic
ucaaaauuaucccaguga

SEQ ID NO: 492181 - RNA, 19 nt, Artificial Sequence
  Synthetic
cucaaaauuaucccaguga

SEQ ID NO: 492182 - RNA, 20 nt, Artificial Sequence
  Synthetic
ucucaaaauuaucccaguga

SEQ ID NO: 492183 - RNA, 21 nt, Artificial Sequence
  Synthetic
aucucaaaauuaucccaguga

SEQ ID NO: 492184 - RNA, 22 nt, Artificial Sequence
  Synthetic
uaucucaaaauuaucccaguga

SEQ ID NO: 492185 - RNA, 23 nt, Artificial Sequence
  Synthetic
auaucucaaaauuaucccaguga

SEQ ID NO: 492186 - RNA, 24 nt, Artificial Sequence
  Synthetic
uauaucucaaaauuaucccaguga

SEQ ID NO: 492187 - RNA, 18 nt, Artificial Sequence
  Synthetic
acuuuugaaaagcaguga

SEQ ID NO: 492188 - RNA, 19 nt, Artificial Sequence
  Synthetic
uacuuuugaaaagcaguga

SEQ ID NO: 492189 - RNA, 20 nt, Artificial Sequence
  Synthetic
uuacuuuugaaaagcaguga

SEQ ID NO: 492190 - RNA, 21 nt, Artificial Sequence
  Synthetic
uuuacuuuugaaaagcaguga

SEQ ID NO: 492191 - RNA, 22 nt, Artificial Sequence
  Synthetic
uuuuacuuuugaaaagcaguga

SEQ ID NO: 492192 - RNA, 23 nt, Artificial Sequence
  Synthetic
auuuuacuuuugaaaagcaguga

SEQ ID NO: 492193 - RNA, 24 nt, Artificial Sequence
  Synthetic
aauuuuacuuuugaaaagcaguga

SEQ ID NO: 492194 - RNA, 18 nt, Artificial Sequence
  Synthetic
uguugcccaaagcaguga

SEQ ID NO: 492195 - RNA, 19 nt, Artificial Sequence
  Synthetic
cuguugcccaaagcaguga

SEQ ID NO: 492196 - RNA, 20 nt, Artificial Sequence
  Synthetic
gcuguugcccaaagcaguga

SEQ ID NO: 492197 - RNA, 21 nt, Artificial Sequence
  Synthetic
agcuguugcccaaagcaguga

SEQ ID NO: 492198 - RNA, 22 nt, Artificial Sequence
  Synthetic
cagcuguugcccaaagcaguga

SEQ ID NO: 492199 - RNA, 23 nt, Artificial Sequence
  Synthetic
ucagcuguugcccaaagcaguga

SEQ ID NO: 492200 - RNA, 24 nt, Artificial Sequence
  Synthetic
aucagcuguugcccaaagcaguga

SEQ ID NO: 492201 - RNA, 18 nt, Artificial Sequence
  Synthetic
gcguuuccaaagcaguga

SEQ ID NO: 492202 - RNA, 19 nt, Artificial Sequence
  Synthetic
ugcguuuccaaagcaguga

SEQ ID NO: 492203 - RNA, 20 nt, Artificial Sequence
  Synthetic
gugcguuuccaaagcaguga

SEQ ID NO: 492204 - RNA, 21 nt, Artificial Sequence
  Synthetic
ugugcguuuccaaagcaguga

SEQ ID NO: 492205 - RNA, 22 nt, Artificial Sequence
  Synthetic
uugugcguuuccaaagcaguga

SEQ ID NO: 492206 - RNA, 23 nt, Artificial Sequence
  Synthetic
guugugcguuuccaaagcaguga

SEQ ID NO: 492207 - RNA, 24 nt, Artificial Sequence
  Synthetic
aguugugcguuuccaaagcaguga

SEQ ID NO: 492208 - RNA, 18 nt, Artificial Sequence
  Synthetic
uuugugaaacagcaguga

SEQ ID NO: 492209 - RNA, 19 nt, Artificial Sequence
  Synthetic
cuuugugaaacagcaguga

SEQ ID NO: 492210 - RNA, 20 nt, Artificial Sequence
  Synthetic
ucuuugugaaacagcaguga

SEQ ID NO: 492211 - RNA, 21 nt, Artificial Sequence
  Synthetic
cucuuugugaaacagcaguga

SEQ ID NO: 492212 - RNA, 22 nt, Artificial Sequence
  Synthetic
ucucuuugugaaacagcaguga

SEQ ID NO: 492213 - RNA, 23 nt, Artificial Sequence
  Synthetic
uucucuuugugaaacagcaguga

SEQ ID NO: 492214 - RNA, 24 nt, Artificial Sequence
  Synthetic
auucucuuugugaaacagcaguga

SEQ ID NO: 492215 - RNA, 18 nt, Artificial Sequence
  Synthetic
uccauuagacagcaguga

SEQ ID NO: 492216 - RNA, 19 nt, Artificial Sequence
  Synthetic
auccauuagacagcaguga

SEQ ID NO: 492217 - RNA, 20 nt, Artificial Sequence
  Synthetic
uauccauuagacagcaguga

SEQ ID NO: 492218 - RNA, 21 nt, Artificial Sequence
  Synthetic
guauccauuagacagcaguga

SEQ ID NO: 492219 - RNA, 22 nt, Artificial Sequence
  Synthetic
gguauccauuagacagcaguga

SEQ ID NO: 492220 - RNA, 23 nt, Artificial Sequence
  Synthetic
agguauccauuagacagcaguga

SEQ ID NO: 492221 - RNA, 24 nt, Artificial Sequence
  Synthetic
uagguauccauuagacagcaguga

SEQ ID NO: 492222 - RNA, 18 nt, Artificial Sequence
  Synthetic
uaaaacaaauagcaguga

SEQ ID NO: 492223 - RNA, 19 nt, Artificial Sequence
  Synthetic
auaaaacaaauagcaguga

SEQ ID NO: 492224 - RNA, 20 nt, Artificial Sequence
  Synthetic
aauaaaacaaauagcaguga

SEQ ID NO: 492225 - RNA, 21 nt, Artificial Sequence
  Synthetic
gaauaaaacaaauagcaguga

SEQ ID NO: 492226 - RNA, 22 nt, Artificial Sequence
  Synthetic
agaauaaaacaaauagcaguga

SEQ ID NO: 492227 - RNA, 23 nt, Artificial Sequence
  Synthetic
aagaauaaaacaaauagcaguga

SEQ ID NO: 492228 - RNA, 24 nt, Artificial Sequence
  Synthetic
aaagaauaaaacaaauagcaguga

SEQ ID NO: 492229 - RNA, 18 nt, Artificial Sequence
  Synthetic
caggggcuguagcaguga

SEQ ID NO: 492230 - RNA, 19 nt, Artificial Sequence
  Synthetic
gcaggggcuguagcaguga

SEQ ID NO: 492231 - RNA, 20 nt, Artificial Sequence
  Synthetic
ugcaggggcuguagcaguga

SEQ ID NO: 492232 - RNA, 21 nt, Artificial Sequence
  Synthetic
gugcaggggcuguagcaguga

SEQ ID NO: 492233 - RNA, 22 nt, Artificial Sequence
  Synthetic
ggugcaggggcuguagcaguga

SEQ ID NO: 492234 - RNA, 23 nt, Artificial Sequence
  Synthetic
aggugcaggggcuguagcaguga

SEQ ID NO: 492235 - RNA, 24 nt, Artificial Sequence
  Synthetic
uaggugcaggggcuguagcaguga

SEQ ID NO: 492236 - RNA, 18 nt, Artificial Sequence
  Synthetic
agacagagguugcaguga

SEQ ID NO: 492237 - RNA, 19 nt, Artificial Sequence
  Synthetic
gagacagagguugcaguga

SEQ ID NO: 492238 - RNA, 20 nt, Artificial Sequence
  Synthetic
ggagacagagguugcaguga

SEQ ID NO: 492239 - RNA, 21 nt, Artificial Sequence
  Synthetic
aggagacagagguugcaguga

SEQ ID NO: 492240 - RNA, 22 nt, Artificial Sequence
  Synthetic
caggagacagagguugcaguga

SEQ ID NO: 492241 - RNA, 23 nt, Artificial Sequence
  Synthetic
ccaggagacagagguugcaguga

SEQ ID NO: 492242 - RNA, 24 nt, Artificial Sequence
  Synthetic
cccaggagacagagguugcaguga

SEQ ID NO: 492243 - RNA, 18 nt, Artificial Sequence
  Synthetic
auugaaacaaaucaguga

SEQ ID NO: 492244 - RNA, 19 nt, Artificial Sequence
  Synthetic
uauugaaacaaaucaguga

SEQ ID NO: 492245 - RNA, 20 nt, Artificial Sequence
  Synthetic
cuauugaaacaaaucaguga

SEQ ID NO: 492246 - RNA, 21 nt, Artificial Sequence
  Synthetic
acuauugaaacaaaucaguga

SEQ ID NO: 492247 - RNA, 22 nt, Artificial Sequence
  Synthetic
aacuauugaaacaaaucaguga

SEQ ID NO: 492248 - RNA, 23 nt, Artificial Sequence
  Synthetic
caacuauugaaacaaaucaguga

SEQ ID NO: 492249 - RNA, 24 nt, Artificial Sequence
  Synthetic
acaacuauugaaacaaaucaguga

SEQ ID NO: 492250 - RNA, 18 nt, Artificial Sequence
  Synthetic
uuuuuuuugcuucaguga

SEQ ID NO: 492251 - RNA, 19 nt, Artificial Sequence
  Synthetic
uuuuuuuuugcuucaguga

SEQ ID NO: 492252 - RNA, 20 nt, Artificial Sequence
  Synthetic
cuuuuuuuuugcuucaguga

SEQ ID NO: 492253 - RNA, 21 nt, Artificial Sequence
  Synthetic
acuuuuuuuuugcuucaguga

SEQ ID NO: 492254 - RNA, 22 nt, Artificial Sequence
  Synthetic
gacuuuuuuuuugcuucaguga

SEQ ID NO: 492255 - RNA, 23 nt, Artificial Sequence
  Synthetic
agacuuuuuuuuugcuucaguga

SEQ ID NO: 492256 - RNA, 24 nt, Artificial Sequence
  Synthetic
uagacuuuuuuuuugcuucaguga

SEQ ID NO: 492257 - RNA, 18 nt, Artificial Sequence
  Synthetic
acaaagaaucuucaguga

SEQ ID NO: 492258 - RNA, 19 nt, Artificial Sequence
  Synthetic
aacaaagaaucuucaguga

SEQ ID NO: 492259 - RNA, 20 nt, Artificial Sequence
  Synthetic
aaacaaagaaucuucaguga

SEQ ID NO: 492260 - RNA, 21 nt, Artificial Sequence
  Synthetic
aaaacaaagaaucuucaguga

SEQ ID NO: 492261 - RNA, 22 nt, Artificial Sequence
  Synthetic
gaaaacaaagaaucuucaguga

SEQ ID NO: 492262 - RNA, 23 nt, Artificial Sequence
  Synthetic
agaaaacaaagaaucuucaguga

SEQ ID NO: 492263 - RNA, 24 nt, Artificial Sequence
  Synthetic
aagaaaacaaagaaucuucaguga

SEQ ID NO: 492264 - RNA, 18 nt, Artificial Sequence
  Synthetic
aacucuucauuucaguga

SEQ ID NO: 492265 - RNA, 19 nt, Artificial Sequence
  Synthetic
aaacucuucauuucaguga

SEQ ID NO: 492266 - RNA, 20 nt, Artificial Sequence
  Synthetic
caaacucuucauuucaguga

SEQ ID NO: 492267 - RNA, 21 nt, Artificial Sequence
  Synthetic
ucaaacucuucauuucaguga

SEQ ID NO: 492268 - RNA, 22 nt, Artificial Sequence
  Synthetic
gucaaacucuucauuucaguga

SEQ ID NO: 492269 - RNA, 23 nt, Artificial Sequence
  Synthetic
ggucaaacucuucauuucaguga

SEQ ID NO: 492270 - RNA, 24 nt, Artificial Sequence
  Synthetic
uggucaaacucuucauuucaguga

SEQ ID NO: 492271 - RNA, 18 nt, Artificial Sequence
  Synthetic
gucauagagaaagaguga

SEQ ID NO: 492272 - RNA, 19 nt, Artificial Sequence
  Synthetic
agucauagagaaagaguga

SEQ ID NO: 492273 - RNA, 20 nt, Artificial Sequence
  Synthetic
aagucauagagaaagaguga

SEQ ID NO: 492274 - RNA, 21 nt, Artificial Sequence
  Synthetic
aaagucauagagaaagaguga

SEQ ID NO: 492275 - RNA, 22 nt, Artificial Sequence
  Synthetic
gaaagucauagagaaagaguga

SEQ ID NO: 492276 - RNA, 23 nt, Artificial Sequence
  Synthetic
agaaagucauagagaaagaguga

SEQ ID NO: 492277 - RNA, 24 nt, Artificial Sequence
  Synthetic
aagaaagucauagagaaagaguga

SEQ ID NO: 492278 - RNA, 18 nt, Artificial Sequence
  Synthetic
ccuaaagcucaagaguga

SEQ ID NO: 492279 - RNA, 19 nt, Artificial Sequence
  Synthetic
uccuaaagcucaagaguga

SEQ ID NO: 492280 - RNA, 20 nt, Artificial Sequence
  Synthetic
cuccuaaagcucaagaguga

SEQ ID NO: 492281 - RNA, 21 nt, Artificial Sequence
  Synthetic
ucuccuaaagcucaagaguga

SEQ ID NO: 492282 - RNA, 22 nt, Artificial Sequence
  Synthetic
cucuccuaaagcucaagaguga

SEQ ID NO: 492283 - RNA, 23 nt, Artificial Sequence
  Synthetic
ccucuccuaaagcucaagaguga

SEQ ID NO: 492284 - RNA, 24 nt, Artificial Sequence
  Synthetic
uccucuccuaaagcucaagaguga

SEQ ID NO: 492285 - RNA, 18 nt, Artificial Sequence
  Synthetic
aaguuccccagagaguga

SEQ ID NO: 492286 - RNA, 19 nt, Artificial Sequence
  Synthetic
gaaguuccccagagaguga

SEQ ID NO: 492287 - RNA, 20 nt, Artificial Sequence
  Synthetic
cgaaguuccccagagaguga

SEQ ID NO: 492288 - RNA, 21 nt, Artificial Sequence
  Synthetic
ccgaaguuccccagagaguga

SEQ ID NO: 492289 - RNA, 22 nt, Artificial Sequence
  Synthetic
cccgaaguuccccagagaguga

SEQ ID NO: 492290 - RNA, 23 nt, Artificial Sequence
  Synthetic
acccgaaguuccccagagaguga

SEQ ID NO: 492291 - RNA, 24 nt, Artificial Sequence
  Synthetic
aacccgaaguuccccagagaguga

SEQ ID NO: 492292 - RNA, 18 nt, Artificial Sequence
  Synthetic
auaaguaaaggagaguga

SEQ ID NO: 492293 - RNA, 19 nt, Artificial Sequence
  Synthetic
gauaaguaaaggagaguga

SEQ ID NO: 492294 - RNA, 20 nt, Artificial Sequence
  Synthetic
agauaaguaaaggagaguga

SEQ ID NO: 492295 - RNA, 21 nt, Artificial Sequence
  Synthetic
uagauaaguaaaggagaguga

SEQ ID NO: 492296 - RNA, 22 nt, Artificial Sequence
  Synthetic
auagauaaguaaaggagaguga

SEQ ID NO: 492297 - RNA, 23 nt, Artificial Sequence
  Synthetic
gauagauaaguaaaggagaguga

SEQ ID NO: 492298 - RNA, 24 nt, Artificial Sequence
  Synthetic
agauagauaaguaaaggagaguga

SEQ ID NO: 492299 - RNA, 18 nt, Artificial Sequence
  Synthetic
gugauacuuguagaguga

SEQ ID NO: 492300 - RNA, 19 nt, Artificial Sequence
  Synthetic
agugauacuuguagaguga

SEQ ID NO: 492301 - RNA, 20 nt, Artificial Sequence
  Synthetic
cagugauacuuguagaguga

SEQ ID NO: 492302 - RNA, 21 nt, Artificial Sequence
  Synthetic
ccagugauacuuguagaguga

SEQ ID NO: 492303 - RNA, 22 nt, Artificial Sequence
  Synthetic
cccagugauacuuguagaguga

SEQ ID NO: 492304 - RNA, 23 nt, Artificial Sequence
  Synthetic
ucccagugauacuuguagaguga

SEQ ID NO: 492305 - RNA, 24 nt, Artificial Sequence
  Synthetic
gucccagugauacuuguagaguga

SEQ ID NO: 492306 - RNA, 18 nt, Artificial Sequence
  Synthetic
ggcauagcugaggaguga

SEQ ID NO: 492307 - RNA, 19 nt, Artificial Sequence
  Synthetic
aggcauagcugaggaguga

SEQ ID NO: 492308 - RNA, 20 nt, Artificial Sequence
  Synthetic
uaggcauagcugaggaguga

SEQ ID NO: 492309 - RNA, 21 nt, Artificial Sequence
  Synthetic
guaggcauagcugaggaguga

SEQ ID NO: 492310 - RNA, 22 nt, Artificial Sequence
  Synthetic
aguaggcauagcugaggaguga

SEQ ID NO: 492311 - RNA, 23 nt, Artificial Sequence
  Synthetic
aaguaggcauagcugaggaguga

SEQ ID NO: 492312 - RNA, 24 nt, Artificial Sequence
  Synthetic
gaaguaggcauagcugaggaguga

SEQ ID NO: 492313 - RNA, 18 nt, Artificial Sequence
  Synthetic
uuaagaaaaagggaguga

SEQ ID NO: 492314 - RNA, 19 nt, Artificial Sequence
  Synthetic
cuuaagaaaaagggaguga

SEQ ID NO: 492315 - RNA, 20 nt, Artificial Sequence
  Synthetic
ucuuaagaaaaagggaguga

SEQ ID NO: 492316 - RNA, 21 nt, Artificial Sequence
  Synthetic
cucuuaagaaaaagggaguga

SEQ ID NO: 492317 - RNA, 22 nt, Artificial Sequence
  Synthetic
gcucuuaagaaaaagggaguga

SEQ ID NO: 492318 - RNA, 23 nt, Artificial Sequence
  Synthetic
ugcucuuaagaaaaagggaguga

SEQ ID NO: 492319 - RNA, 24 nt, Artificial Sequence
  Synthetic
gugcucuuaagaaaaagggaguga

SEQ ID NO: 492320 - RNA, 18 nt, Artificial Sequence
  Synthetic
aaaauaaaaauggaguga

SEQ ID NO: 492321 - RNA, 19 nt, Artificial Sequence
  Synthetic
uaaaauaaaaauggaguga

SEQ ID NO: 492322 - RNA, 20 nt, Artificial Sequence
  Synthetic
uuaaaauaaaaauggaguga

SEQ ID NO: 492323 - RNA, 21 nt, Artificial Sequence
  Synthetic
uuuaaaauaaaaauggaguga

SEQ ID NO: 492324 - RNA, 22 nt, Artificial Sequence
  Synthetic
uuuuaaaauaaaaauggaguga

SEQ ID NO: 492325 - RNA, 23 nt, Artificial Sequence
  Synthetic
uuuuuaaaauaaaaauggaguga

SEQ ID NO: 492326 - RNA, 24 nt, Artificial Sequence
  Synthetic
auuuuuaaaauaaaaauggaguga

SEQ ID NO: 492327 - RNA, 18 nt, Artificial Sequence
  Synthetic
aaaccagaccuggaguga

SEQ ID NO: 492328 - RNA, 19 nt, Artificial Sequence
  Synthetic
gaaaccagaccuggaguga

SEQ ID NO: 492329 - RNA, 20 nt, Artificial Sequence
  Synthetic
agaaaccagaccuggaguga

SEQ ID NO: 492330 - RNA, 21 nt, Artificial Sequence
  Synthetic
uagaaaccagaccuggaguga

SEQ ID NO: 492331 - RNA, 22 nt, Artificial Sequence
  Synthetic
uuagaaaccagaccuggaguga

SEQ ID NO: 492332 - RNA, 23 nt, Artificial Sequence
  Synthetic
uuuagaaaccagaccuggaguga

SEQ ID NO: 492333 - RNA, 24 nt, Artificial Sequence
  Synthetic
auuuagaaaccagaccuggaguga

SEQ ID NO: 492334 - RNA, 18 nt, Artificial Sequence
  Synthetic
aagcucuuaacugaguga

SEQ ID NO: 492335 - RNA, 19 nt, Artificial Sequence
  Synthetic
gaagcucuuaacugaguga

SEQ ID NO: 492336 - RNA, 20 nt, Artificial Sequence
  Synthetic
agaagcucuuaacugaguga

SEQ ID NO: 492337 - RNA, 21 nt, Artificial Sequence
  Synthetic
cagaagcucuuaacugaguga

SEQ ID NO: 492338 - RNA, 22 nt, Artificial Sequence
  Synthetic
acagaagcucuuaacugaguga

SEQ ID NO: 492339 - RNA, 23 nt, Artificial Sequence
  Synthetic
uacagaagcucuuaacugaguga

SEQ ID NO: 492340 - RNA, 24 nt, Artificial Sequence
  Synthetic
uuacagaagcucuuaacugaguga

SEQ ID NO: 492341 - RNA, 18 nt, Artificial Sequence
  Synthetic
gcauuccagccugaguga

SEQ ID NO: 492342 - RNA, 19 nt, Artificial Sequence
  Synthetic
ugcauuccagccugaguga

SEQ ID NO: 492343 - RNA, 20 nt, Artificial Sequence
  Synthetic
cugcauuccagccugaguga

SEQ ID NO: 492344 - RNA, 21 nt, Artificial Sequence
  Synthetic
acugcauuccagccugaguga

SEQ ID NO: 492345 - RNA, 22 nt, Artificial Sequence
  Synthetic
cacugcauuccagccugaguga

SEQ ID NO: 492346 - RNA, 23 nt, Artificial Sequence
  Synthetic
ccacugcauuccagccugaguga

SEQ ID NO: 492347 - RNA, 24 nt, Artificial Sequence
  Synthetic
gccacugcauuccagccugaguga

SEQ ID NO: 492348 - RNA, 18 nt, Artificial Sequence
  Synthetic
aagugcuuuucugaguga

SEQ ID NO: 492349 - RNA, 19 nt, Artificial Sequence
  Synthetic
aaagugcuuuucugaguga

SEQ ID NO: 492350 - RNA, 20 nt, Artificial Sequence
  Synthetic
caaagugcuuuucugaguga

SEQ ID NO: 492351 - RNA, 21 nt, Artificial Sequence
  Synthetic
ccaaagugcuuuucugaguga

SEQ ID NO: 492352 - RNA, 22 nt, Artificial Sequence
  Synthetic
uccaaagugcuuuucugaguga

SEQ ID NO: 492353 - RNA, 23 nt, Artificial Sequence
  Synthetic
uuccaaagugcuuuucugaguga

SEQ ID NO: 492354 - RNA, 24 nt, Artificial Sequence
  Synthetic
auuccaaagugcuuuucugaguga

SEQ ID NO: 492355 - RNA, 18 nt, Artificial Sequence
  Synthetic
gaauuaauuagugaguga

SEQ ID NO: 492356 - RNA, 19 nt, Artificial Sequence
  Synthetic
ugaauuaauuagugaguga

SEQ ID NO: 492357 - RNA, 20 nt, Artificial Sequence
  Synthetic
uugaauuaauuagugaguga

SEQ ID NO: 492358 - RNA, 21 nt, Artificial Sequence
  Synthetic
guugaauuaauuagugaguga

SEQ ID NO: 492359 - RNA, 22 nt, Artificial Sequence
  Synthetic
uguugaauuaauuagugaguga

SEQ ID NO: 492360 - RNA, 23 nt, Artificial Sequence
  Synthetic
auguugaauuaauuagugaguga

SEQ ID NO: 492361 - RNA, 24 nt, Artificial Sequence
  Synthetic
cauguugaauuaauuagugaguga

SEQ ID NO: 492362 - RNA, 18 nt, Artificial Sequence
  Synthetic
uuaguaguuugugaguga

SEQ ID NO: 492363 - RNA, 19 nt, Artificial Sequence
  Synthetic
guuaguaguuugugaguga

SEQ ID NO: 492364 - RNA, 20 nt, Artificial Sequence
  Synthetic
aguuaguaguuugugaguga

SEQ ID NO: 492365 - RNA, 21 nt, Artificial Sequence
  Synthetic
aaguuaguaguuugugaguga

SEQ ID NO: 492366 - RNA, 22 nt, Artificial Sequence
  Synthetic
aaaguuaguaguuugugaguga

SEQ ID NO: 492367 - RNA, 23 nt, Artificial Sequence
  Synthetic
gaaaguuaguaguuugugaguga

SEQ ID NO: 492368 - RNA, 24 nt, Artificial Sequence
  Synthetic
ugaaaguuaguaguuugugaguga

SEQ ID NO: 492369 - RNA, 18 nt, Artificial Sequence
  Synthetic
uugaggucauuugaguga

SEQ ID NO: 492370 - RNA, 19 nt, Artificial Sequence
  Synthetic
uuugaggucauuugaguga

SEQ ID NO: 492371 - RNA, 20 nt, Artificial Sequence
  Synthetic
uuuugaggucauuugaguga

SEQ ID NO: 492372 - RNA, 21 nt, Artificial Sequence
  Synthetic
cuuuugaggucauuugaguga

SEQ ID NO: 492373 - RNA, 22 nt, Artificial Sequence
  Synthetic
ucuuuugaggucauuugaguga

SEQ ID NO: 492374 - RNA, 23 nt, Artificial Sequence
  Synthetic
aucuuuugaggucauuugaguga

SEQ ID NO: 492375 - RNA, 24 nt, Artificial Sequence
  Synthetic
aaucuuuugaggucauuugaguga

SEQ ID NO: 492376 - RNA, 18 nt, Artificial Sequence
  Synthetic
uauauuucaaaauaguga

SEQ ID NO: 492377 - RNA, 19 nt, Artificial Sequence
  Synthetic
guauauuucaaaauaguga

SEQ ID NO: 492378 - RNA, 20 nt, Artificial Sequence
  Synthetic
uguauauuucaaaauaguga

SEQ ID NO: 492379 - RNA, 21 nt, Artificial Sequence
  Synthetic
cuguauauuucaaaauaguga

SEQ ID NO: 492380 - RNA, 22 nt, Artificial Sequence
  Synthetic
gcuguauauuucaaaauaguga

SEQ ID NO: 492381 - RNA, 23 nt, Artificial Sequence
  Synthetic
ugcuguauauuucaaaauaguga

SEQ ID NO: 492382 - RNA, 24 nt, Artificial Sequence
  Synthetic
gugcuguauauuucaaaauaguga

SEQ ID NO: 492383 - RNA, 18 nt, Artificial Sequence
  Synthetic
aaaacaguaaaauaguga

SEQ ID NO: 492384 - RNA, 19 nt, Artificial Sequence
  Synthetic
aaaaacaguaaaauaguga

SEQ ID NO: 492385 - RNA, 20 nt, Artificial Sequence
  Synthetic
caaaaacaguaaaauaguga

SEQ ID NO: 492386 - RNA, 21 nt, Artificial Sequence
  Synthetic
ccaaaaacaguaaaauaguga

SEQ ID NO: 492387 - RNA, 22 nt, Artificial Sequence
  Synthetic
accaaaaacaguaaaauaguga

SEQ ID NO: 492388 - RNA, 23 nt, Artificial Sequence
  Synthetic
gaccaaaaacaguaaaauaguga

SEQ ID NO: 492389 - RNA, 24 nt, Artificial Sequence
  Synthetic
ugaccaaaaacaguaaaauaguga

SEQ ID NO: 492390 - RNA, 18 nt, Artificial Sequence
  Synthetic
aggauugaaaccuaguga

SEQ ID NO: 492391 - RNA, 19 nt, Artificial Sequence
  Synthetic
caggauugaaaccuaguga

SEQ ID NO: 492392 - RNA, 20 nt, Artificial Sequence
  Synthetic
gcaggauugaaaccuaguga

SEQ ID NO: 492393 - RNA, 21 nt, Artificial Sequence
  Synthetic
ggcaggauugaaaccuaguga

SEQ ID NO: 492394 - RNA, 22 nt, Artificial Sequence
  Synthetic
aggcaggauugaaaccuaguga

SEQ ID NO: 492395 - RNA, 23 nt, Artificial Sequence
  Synthetic
aaggcaggauugaaaccuaguga

SEQ ID NO: 492396 - RNA, 24 nt, Artificial Sequence
  Synthetic
caaggcaggauugaaaccuaguga

SEQ ID NO: 492397 - RNA, 18 nt, Artificial Sequence
  Synthetic
cuuuuugugagguaguga

SEQ ID NO: 492398 - RNA, 19 nt, Artificial Sequence
  Synthetic
acuuuuugugagguaguga

SEQ ID NO: 492399 - RNA, 20 nt, Artificial Sequence
  Synthetic
aacuuuuugugagguaguga

SEQ ID NO: 492400 - RNA, 21 nt, Artificial Sequence
  Synthetic
caacuuuuugugagguaguga

SEQ ID NO: 492401 - RNA, 22 nt, Artificial Sequence
  Synthetic
ucaacuuuuugugagguaguga

SEQ ID NO: 492402 - RNA, 23 nt, Artificial Sequence
  Synthetic
aucaacuuuuugugagguaguga

SEQ ID NO: 492403 - RNA, 24 nt, Artificial Sequence
  Synthetic
caucaacuuuuugugagguaguga

SEQ ID NO: 492404 - RNA, 18 nt, Artificial Sequence
  Synthetic
uaaaucauuuauuaguga

SEQ ID NO: 492405 - RNA, 19 nt, Artificial Sequence
  Synthetic
auaaaucauuuauuaguga

SEQ ID NO: 492406 - RNA, 20 nt, Artificial Sequence
  Synthetic
aauaaaucauuuauuaguga

SEQ ID NO: 492407 - RNA, 21 nt, Artificial Sequence
  Synthetic
uaauaaaucauuuauuaguga

SEQ ID NO: 492408 - RNA, 22 nt, Artificial Sequence
  Synthetic
uuaauaaaucauuuauuaguga

SEQ ID NO: 492409 - RNA, 23 nt, Artificial Sequence
  Synthetic
cuuaauaaaucauuuauuaguga

SEQ ID NO: 492410 - RNA, 24 nt, Artificial Sequence
  Synthetic
ucuuaauaaaucauuuauuaguga

SEQ ID NO: 492411 - RNA, 18 nt, Artificial Sequence
  Synthetic
uuugugaaaaugacguga

SEQ ID NO: 492412 - RNA, 19 nt, Artificial Sequence
  Synthetic
cuuugugaaaaugacguga

SEQ ID NO: 492413 - RNA, 20 nt, Artificial Sequence
  Synthetic
acuuugugaaaaugacguga

SEQ ID NO: 492414 - RNA, 21 nt, Artificial Sequence
  Synthetic
cacuuugugaaaaugacguga

SEQ ID NO: 492415 - RNA, 22 nt, Artificial Sequence
  Synthetic
ucacuuugugaaaaugacguga

SEQ ID NO: 492416 - RNA, 23 nt, Artificial Sequence
  Synthetic
uucacuuugugaaaaugacguga

SEQ ID NO: 492417 - RNA, 24 nt, Artificial Sequence
  Synthetic
uuucacuuugugaaaaugacguga

SEQ ID NO: 492418 - RNA, 18 nt, Artificial Sequence
  Synthetic
gcauguuugugugcguga

SEQ ID NO: 492419 - RNA, 19 nt, Artificial Sequence
  Synthetic
ugcauguuugugugcguga

SEQ ID NO: 492420 - RNA, 20 nt, Artificial Sequence
  Synthetic
cugcauguuugugugcguga

SEQ ID NO: 492421 - RNA, 21 nt, Artificial Sequence
  Synthetic
ucugcauguuugugugcguga

SEQ ID NO: 492422 - RNA, 22 nt, Artificial Sequence
  Synthetic
uucugcauguuugugugcguga

SEQ ID NO: 492423 - RNA, 23 nt, Artificial Sequence
  Synthetic
guucugcauguuugugugcguga

SEQ ID NO: 492424 - RNA, 24 nt, Artificial Sequence
  Synthetic
uguucugcauguuugugugcguga

SEQ ID NO: 492425 - RNA, 18 nt, Artificial Sequence
  Synthetic
ucauaguucaaaagguga

SEQ ID NO: 492426 - RNA, 19 nt, Artificial Sequence
  Synthetic
aucauaguucaaaagguga

SEQ ID NO: 492427 - RNA, 20 nt, Artificial Sequence
  Synthetic
caucauaguucaaaagguga

SEQ ID NO: 492428 - RNA, 21 nt, Artificial Sequence
  Synthetic
ccaucauaguucaaaagguga

SEQ ID NO: 492429 - RNA, 22 nt, Artificial Sequence
  Synthetic
uccaucauaguucaaaagguga

SEQ ID NO: 492430 - RNA, 23 nt, Artificial Sequence
  Synthetic
cuccaucauaguucaaaagguga

SEQ ID NO: 492431 - RNA, 24 nt, Artificial Sequence
  Synthetic
ccuccaucauaguucaaaagguga

SEQ ID NO: 492432 - RNA, 18 nt, Artificial Sequence
  Synthetic
gacacagggaaaagguga

SEQ ID NO: 492433 - RNA, 19 nt, Artificial Sequence
  Synthetic
ggacacagggaaaagguga

SEQ ID NO: 492434 - RNA, 20 nt, Artificial Sequence
  Synthetic
uggacacagggaaaagguga

SEQ ID NO: 492435 - RNA, 21 nt, Artificial Sequence
  Synthetic
guggacacagggaaaagguga

SEQ ID NO: 492436 - RNA, 22 nt, Artificial Sequence
  Synthetic
uguggacacagggaaaagguga

SEQ ID NO: 492437 - RNA, 23 nt, Artificial Sequence
  Synthetic
auguggacacagggaaaagguga

SEQ ID NO: 492438 - RNA, 24 nt, Artificial Sequence
  Synthetic
aauguggacacagggaaaagguga

SEQ ID NO: 492439 - RNA, 18 nt, Artificial Sequence
  Synthetic
cuagcuaaacaaagguga

SEQ ID NO: 492440 - RNA, 19 nt, Artificial Sequence
  Synthetic
acuagcuaaacaaagguga

SEQ ID NO: 492441 - RNA, 20 nt, Artificial Sequence
  Synthetic
aacuagcuaaacaaagguga

SEQ ID NO: 492442 - RNA, 21 nt, Artificial Sequence
  Synthetic
uaacuagcuaaacaaagguga

SEQ ID NO: 492443 - RNA, 22 nt, Artificial Sequence
  Synthetic
uuaacuagcuaaacaaagguga

SEQ ID NO: 492444 - RNA, 23 nt, Artificial Sequence
  Synthetic
auuaacuagcuaaacaaagguga

SEQ ID NO: 492445 - RNA, 24 nt, Artificial Sequence
  Synthetic
uauuaacuagcuaaacaaagguga

SEQ ID NO: 492446 - RNA, 18 nt, Artificial Sequence
  Synthetic
auaacucaaggaagguga

SEQ ID NO: 492447 - RNA, 19 nt, Artificial Sequence
  Synthetic
aauaacucaaggaagguga

SEQ ID NO: 492448 - RNA, 20 nt, Artificial Sequence
  Synthetic
caauaacucaaggaagguga

SEQ ID NO: 492449 - RNA, 21 nt, Artificial Sequence
  Synthetic
gcaauaacucaaggaagguga

SEQ ID NO: 492450 - RNA, 22 nt, Artificial Sequence
  Synthetic
agcaauaacucaaggaagguga

SEQ ID NO: 492451 - RNA, 23 nt, Artificial Sequence
  Synthetic
aagcaauaacucaaggaagguga

SEQ ID NO: 492452 - RNA, 24 nt, Artificial Sequence
  Synthetic
uaagcaauaacucaaggaagguga

SEQ ID NO: 492453 - RNA, 18 nt, Artificial Sequence
  Synthetic
ccaaguccuugaagguga

SEQ ID NO: 492454 - RNA, 19 nt, Artificial Sequence
  Synthetic
gccaaguccuugaagguga

SEQ ID NO: 492455 - RNA, 20 nt, Artificial Sequence
  Synthetic
ggccaaguccuugaagguga

SEQ ID NO: 492456 - RNA, 21 nt, Artificial Sequence
  Synthetic
uggccaaguccuugaagguga

SEQ ID NO: 492457 - RNA, 22 nt, Artificial Sequence
  Synthetic
auggccaaguccuugaagguga

SEQ ID NO: 492458 - RNA, 23 nt, Artificial Sequence
  Synthetic
gauggccaaguccuugaagguga

SEQ ID NO: 492459 - RNA, 24 nt, Artificial Sequence
  Synthetic
ggauggccaaguccuugaagguga

SEQ ID NO: 492460 - RNA, 18 nt, Artificial Sequence
  Synthetic
gccugaggaauaagguga

SEQ ID NO: 492461 - RNA, 19 nt, Artificial Sequence
  Synthetic
agccugaggaauaagguga

SEQ ID NO: 492462 - RNA, 20 nt, Artificial Sequence
  Synthetic
aagccugaggaauaagguga

SEQ ID NO: 492463 - RNA, 21 nt, Artificial Sequence
  Synthetic
aaagccugaggaauaagguga

SEQ ID NO: 492464 - RNA, 22 nt, Artificial Sequence
  Synthetic
gaaagccugaggaauaagguga

SEQ ID NO: 492465 - RNA, 23 nt, Artificial Sequence
  Synthetic
agaaagccugaggaauaagguga

SEQ ID NO: 492466 - RNA, 24 nt, Artificial Sequence
  Synthetic
aagaaagccugaggaauaagguga

SEQ ID NO: 492467 - RNA, 18 nt, Artificial Sequence
  Synthetic
ccugaguagauaagguga

SEQ ID NO: 492468 - RNA, 19 nt, Artificial Sequence
  Synthetic
uccugaguagauaagguga

SEQ ID NO: 492469 - RNA, 20 nt, Artificial Sequence
  Synthetic
cuccugaguagauaagguga

SEQ ID NO: 492470 - RNA, 21 nt, Artificial Sequence
  Synthetic
ccuccugaguagauaagguga

SEQ ID NO: 492471 - RNA, 22 nt, Artificial Sequence
  Synthetic
accuccugaguagauaagguga

SEQ ID NO: 492472 - RNA, 23 nt, Artificial Sequence
  Synthetic
gaccuccugaguagauaagguga

SEQ ID NO: 492473 - RNA, 24 nt, Artificial Sequence
  Synthetic
agaccuccugaguagauaagguga

SEQ ID NO: 492474 - RNA, 18 nt, Artificial Sequence
  Synthetic
ucaaaugccagcagguga

SEQ ID NO: 492475 - RNA, 19 nt, Artificial Sequence
  Synthetic
uucaaaugccagcagguga

SEQ ID NO: 492476 - RNA, 20 nt, Artificial Sequence
  Synthetic
uuucaaaugccagcagguga

SEQ ID NO: 492477 - RNA, 21 nt, Artificial Sequence
  Synthetic
uuuucaaaugccagcagguga

SEQ ID NO: 492478 - RNA, 22 nt, Artificial Sequence
  Synthetic
auuuucaaaugccagcagguga

SEQ ID NO: 492479 - RNA, 23 nt, Artificial Sequence
  Synthetic
cauuuucaaaugccagcagguga

SEQ ID NO: 492480 - RNA, 24 nt, Artificial Sequence
  Synthetic
gcauuuucaaaugccagcagguga

SEQ ID NO: 492481 - RNA, 18 nt, Artificial Sequence
  Synthetic
uguacacagaagagguga

SEQ ID NO: 492482 - RNA, 19 nt, Artificial Sequence
  Synthetic
cuguacacagaagagguga

SEQ ID NO: 492483 - RNA, 20 nt, Artificial Sequence
  Synthetic
ucuguacacagaagagguga

SEQ ID NO: 492484 - RNA, 21 nt, Artificial Sequence
  Synthetic
cucuguacacagaagagguga

SEQ ID NO: 492485 - RNA, 22 nt, Artificial Sequence
  Synthetic
gcucuguacacagaagagguga

SEQ ID NO: 492486 - RNA, 23 nt, Artificial Sequence
  Synthetic
ugcucuguacacagaagagguga

SEQ ID NO: 492487 - RNA, 24 nt, Artificial Sequence
  Synthetic
gugcucuguacacagaagagguga

SEQ ID NO: 492488 - RNA, 18 nt, Artificial Sequence
  Synthetic
guuguuuuucagagguga

SEQ ID NO: 492489 - RNA, 19 nt, Artificial Sequence
  Synthetic
gguuguuuuucagagguga

SEQ ID NO: 492490 - RNA, 20 nt, Artificial Sequence
  Synthetic
ugguuguuuuucagagguga

SEQ ID NO: 492491 - RNA, 21 nt, Artificial Sequence
  Synthetic
uugguuguuuuucagagguga

SEQ ID NO: 492492 - RNA, 22 nt, Artificial Sequence
  Synthetic
uuugguuguuuuucagagguga

SEQ ID NO: 492493 - RNA, 23 nt, Artificial Sequence
  Synthetic
uuuugguuguuuuucagagguga

SEQ ID NO: 492494 - RNA, 24 nt, Artificial Sequence
  Synthetic
cuuuugguuguuuuucagagguga

SEQ ID NO: 492495 - RNA, 18 nt, Artificial Sequence
  Synthetic
acagagucauagagguga

SEQ ID NO: 492496 - RNA, 19 nt, Artificial Sequence
  Synthetic
uacagagucauagagguga

SEQ ID NO: 492497 - RNA, 20 nt, Artificial Sequence
  Synthetic
guacagagucauagagguga

SEQ ID NO: 492498 - RNA, 21 nt, Artificial Sequence
  Synthetic
uguacagagucauagagguga

SEQ ID NO: 492499 - RNA, 22 nt, Artificial Sequence
  Synthetic
auguacagagucauagagguga

SEQ ID NO: 492500 - RNA, 23 nt, Artificial Sequence
  Synthetic
cauguacagagucauagagguga

SEQ ID NO: 492501 - RNA, 24 nt, Artificial Sequence
  Synthetic
acauguacagagucauagagguga

SEQ ID NO: 492502 - RNA, 18 nt, Artificial Sequence
  Synthetic
uuaacuuuguagagguga

SEQ ID NO: 492503 - RNA, 19 nt, Artificial Sequence
  Synthetic
uuuaacuuuguagagguga

SEQ ID NO: 492504 - RNA, 20 nt, Artificial Sequence
  Synthetic
auuuaacuuuguagagguga

SEQ ID NO: 492505 - RNA, 21 nt, Artificial Sequence
  Synthetic
uauuuaacuuuguagagguga

SEQ ID NO: 492506 - RNA, 22 nt, Artificial Sequence
  Synthetic
uuauuuaacuuuguagagguga

SEQ ID NO: 492507 - RNA, 23 nt, Artificial Sequence
  Synthetic
uuuauuuaacuuuguagagguga

SEQ ID NO: 492508 - RNA, 24 nt, Artificial Sequence
  Synthetic
cuuuauuuaacuuuguagagguga

SEQ ID NO: 492509 - RNA, 18 nt, Artificial Sequence
  Synthetic
aaucuuugcaugagguga

SEQ ID NO: 492510 - RNA, 19 nt, Artificial Sequence
  Synthetic
aaaucuuugcaugagguga

SEQ ID NO: 492511 - RNA, 20 nt, Artificial Sequence
  Synthetic
uaaaucuuugcaugagguga

SEQ ID NO: 492512 - RNA, 21 nt, Artificial Sequence
  Synthetic
guaaaucuuugcaugagguga

SEQ ID NO: 492513 - RNA, 22 nt, Artificial Sequence
  Synthetic
gguaaaucuuugcaugagguga

SEQ ID NO: 492514 - RNA, 23 nt, Artificial Sequence
  Synthetic
ggguaaaucuuugcaugagguga

SEQ ID NO: 492515 - RNA, 24 nt, Artificial Sequence
  Synthetic
gggguaaaucuuugcaugagguga

SEQ ID NO: 492516 - RNA, 18 nt, Artificial Sequence
  Synthetic
uaaucaauggauagguga

SEQ ID NO: 492517 - RNA, 19 nt, Artificial Sequence
  Synthetic
auaaucaauggauagguga

SEQ ID NO: 492518 - RNA, 20 nt, Artificial Sequence
  Synthetic
gauaaucaauggauagguga

SEQ ID NO: 492519 - RNA, 21 nt, Artificial Sequence
  Synthetic
agauaaucaauggauagguga

SEQ ID NO: 492520 - RNA, 22 nt, Artificial Sequence
  Synthetic
aagauaaucaauggauagguga

SEQ ID NO: 492521 - RNA, 23 nt, Artificial Sequence
  Synthetic
gaagauaaucaauggauagguga

SEQ ID NO: 492522 - RNA, 24 nt, Artificial Sequence
  Synthetic
agaagauaaucaauggauagguga

SEQ ID NO: 492523 - RNA, 18 nt, Artificial Sequence
  Synthetic
gcacuaaagccuagguga

SEQ ID NO: 492524 - RNA, 19 nt, Artificial Sequence
  Synthetic
agcacuaaagccuagguga

SEQ ID NO: 492525 - RNA, 20 nt, Artificial Sequence
  Synthetic
cagcacuaaagccuagguga

SEQ ID NO: 492526 - RNA, 21 nt, Artificial Sequence
  Synthetic
acagcacuaaagccuagguga

SEQ ID NO: 492527 - RNA, 22 nt, Artificial Sequence
  Synthetic
cacagcacuaaagccuagguga

SEQ ID NO: 492528 - RNA, 23 nt, Artificial Sequence
  Synthetic
ccacagcacuaaagccuagguga

SEQ ID NO: 492529 - RNA, 24 nt, Artificial Sequence
  Synthetic
gccacagcacuaaagccuagguga

SEQ ID NO: 492530 - RNA, 18 nt, Artificial Sequence
  Synthetic
ucauuucuugguagguga

SEQ ID NO: 492531 - RNA, 19 nt, Artificial Sequence
  Synthetic
aucauuucuugguagguga

SEQ ID NO: 492532 - RNA, 20 nt, Artificial Sequence
  Synthetic
gaucauuucuugguagguga

SEQ ID NO: 492533 - RNA, 21 nt, Artificial Sequence
  Synthetic
agaucauuucuugguagguga

SEQ ID NO: 492534 - RNA, 22 nt, Artificial Sequence
  Synthetic
aagaucauuucuugguagguga

SEQ ID NO: 492535 - RNA, 23 nt, Artificial Sequence
  Synthetic
gaagaucauuucuugguagguga

SEQ ID NO: 492536 - RNA, 24 nt, Artificial Sequence
  Synthetic
ugaagaucauuucuugguagguga

SEQ ID NO: 492537 - RNA, 18 nt, Artificial Sequence
  Synthetic
guugaauaggagcgguga

SEQ ID NO: 492538 - RNA, 19 nt, Artificial Sequence
  Synthetic
uguugaauaggagcgguga

SEQ ID NO: 492539 - RNA, 20 nt, Artificial Sequence
  Synthetic
auguugaauaggagcgguga

SEQ ID NO: 492540 - RNA, 21 nt, Artificial Sequence
  Synthetic
uauguugaauaggagcgguga

SEQ ID NO: 492541 - RNA, 22 nt, Artificial Sequence
  Synthetic
cuauguugaauaggagcgguga

SEQ ID NO: 492542 - RNA, 23 nt, Artificial Sequence
  Synthetic
acuauguugaauaggagcgguga

SEQ ID NO: 492543 - RNA, 24 nt, Artificial Sequence
  Synthetic
cacuauguugaauaggagcgguga

SEQ ID NO: 492544 - RNA, 18 nt, Artificial Sequence
  Synthetic
agaaaaaauuaaggguga

SEQ ID NO: 492545 - RNA, 19 nt, Artificial Sequence
  Synthetic
uagaaaaaauuaaggguga

SEQ ID NO: 492546 - RNA, 20 nt, Artificial Sequence
  Synthetic
uuagaaaaaauuaaggguga

SEQ ID NO: 492547 - RNA, 21 nt, Artificial Sequence
  Synthetic
uuuagaaaaaauuaaggguga

SEQ ID NO: 492548 - RNA, 22 nt, Artificial Sequence
  Synthetic
uuuuagaaaaaauuaaggguga

SEQ ID NO: 492549 - RNA, 23 nt, Artificial Sequence
  Synthetic
guuuuagaaaaaauuaaggguga

SEQ ID NO: 492550 - RNA, 24 nt, Artificial Sequence
  Synthetic
uguuuuagaaaaaauuaaggguga

SEQ ID NO: 492551 - RNA, 18 nt, Artificial Sequence
  Synthetic
caccuuuucacaggguga

SEQ ID NO: 492552 - RNA, 19 nt, Artificial Sequence
  Synthetic
gcaccuuuucacaggguga

SEQ ID NO: 492553 - RNA, 20 nt, Artificial Sequence
  Synthetic
ggcaccuuuucacaggguga

SEQ ID NO: 492554 - RNA, 21 nt, Artificial Sequence
  Synthetic
aggcaccuuuucacaggguga

SEQ ID NO: 492555 - RNA, 22 nt, Artificial Sequence
  Synthetic
aaggcaccuuuucacaggguga

SEQ ID NO: 492556 - RNA, 23 nt, Artificial Sequence
  Synthetic
gaaggcaccuuuucacaggguga

SEQ ID NO: 492557 - RNA, 24 nt, Artificial Sequence
  Synthetic
ggaaggcaccuuuucacaggguga

SEQ ID NO: 492558 - RNA, 18 nt, Artificial Sequence
  Synthetic
aaaaggacaccaggguga

SEQ ID NO: 492559 - RNA, 19 nt, Artificial Sequence
  Synthetic
aaaaaggacaccaggguga

SEQ ID NO: 492560 - RNA, 20 nt, Artificial Sequence
  Synthetic
aaaaaaggacaccaggguga

SEQ ID NO: 492561 - RNA, 21 nt, Artificial Sequence
  Synthetic
aaaaaaaggacaccaggguga

SEQ ID NO: 492562 - RNA, 22 nt, Artificial Sequence
  Synthetic
aaaaaaaaggacaccaggguga

SEQ ID NO: 492563 - RNA, 23 nt, Artificial Sequence
  Synthetic
aaaaaaaaaggacaccaggguga

SEQ ID NO: 492564 - RNA, 24 nt, Artificial Sequence
  Synthetic
aaaaaaaaaaggacaccaggguga

SEQ ID NO: 492565 - RNA, 18 nt, Artificial Sequence
  Synthetic
gacuaaaauucaggguga

SEQ ID NO: 492566 - RNA, 19 nt, Artificial Sequence
  Synthetic
ugacuaaaauucaggguga

SEQ ID NO: 492567 - RNA, 20 nt, Artificial Sequence
  Synthetic
augacuaaaauucaggguga

SEQ ID NO: 492568 - RNA, 21 nt, Artificial Sequence
  Synthetic
uaugacuaaaauucaggguga

SEQ ID NO: 492569 - RNA, 22 nt, Artificial Sequence
  Synthetic
guaugacuaaaauucaggguga

SEQ ID NO: 492570 - RNA, 23 nt, Artificial Sequence
  Synthetic
uguaugacuaaaauucaggguga

SEQ ID NO: 492571 - RNA, 24 nt, Artificial Sequence
  Synthetic
auguaugacuaaaauucaggguga

SEQ ID NO: 492572 - RNA, 18 nt, Artificial Sequence
  Synthetic
aggcacacagagggguga

SEQ ID NO: 492573 - RNA, 19 nt, Artificial Sequence
  Synthetic
caggcacacagagggguga

SEQ ID NO: 492574 - RNA, 20 nt, Artificial Sequence
  Synthetic
ccaggcacacagagggguga

SEQ ID NO: 492575 - RNA, 21 nt, Artificial Sequence
  Synthetic
gccaggcacacagagggguga

SEQ ID NO: 492576 - RNA, 22 nt, Artificial Sequence
  Synthetic
ugccaggcacacagagggguga

SEQ ID NO: 492577 - RNA, 23 nt, Artificial Sequence
  Synthetic
augccaggcacacagagggguga

SEQ ID NO: 492578 - RNA, 24 nt, Artificial Sequence
  Synthetic
uaugccaggcacacagagggguga

SEQ ID NO: 492579 - RNA, 18 nt, Artificial Sequence
  Synthetic
guacagguggagggguga

SEQ ID NO: 492580 - RNA, 19 nt, Artificial Sequence
  Synthetic
gguacagguggagggguga

SEQ ID NO: 492581 - RNA, 20 nt, Artificial Sequence
  Synthetic
agguacagguggagggguga

SEQ ID NO: 492582 - RNA, 21 nt, Artificial Sequence
  Synthetic
uagguacagguggagggguga

SEQ ID NO: 492583 - RNA, 22 nt, Artificial Sequence
  Synthetic
cuagguacagguggagggguga

SEQ ID NO: 492584 - RNA, 23 nt, Artificial Sequence
  Synthetic
acuagguacagguggagggguga

SEQ ID NO: 492585 - RNA, 24 nt, Artificial Sequence
  Synthetic
cacuagguacagguggagggguga

SEQ ID NO: 492586 - RNA, 18 nt, Artificial Sequence
  Synthetic
ucuauaagauagggguga

SEQ ID NO: 492587 - RNA, 19 nt, Artificial Sequence
  Synthetic
uucuauaagauagggguga

SEQ ID NO: 492588 - RNA, 20 nt, Artificial Sequence
  Synthetic
guucuauaagauagggguga

SEQ ID NO: 492589 - RNA, 21 nt, Artificial Sequence
  Synthetic
uguucuauaagauagggguga

SEQ ID NO: 492590 - RNA, 22 nt, Artificial Sequence
  Synthetic
auguucuauaagauagggguga

SEQ ID NO: 492591 - RNA, 23 nt, Artificial Sequence
  Synthetic
aauguucuauaagauagggguga

SEQ ID NO: 492592 - RNA, 24 nt, Artificial Sequence
  Synthetic
gaauguucuauaagauagggguga

SEQ ID NO: 492593 - RNA, 18 nt, Artificial Sequence
  Synthetic
gguuucccuacgggguga

SEQ ID NO: 492594 - RNA, 19 nt, Artificial Sequence
  Synthetic
agguuucccuacgggguga

SEQ ID NO: 492595 - RNA, 20 nt, Artificial Sequence
  Synthetic
cagguuucccuacgggguga

SEQ ID NO: 492596 - RNA, 21 nt, Artificial Sequence
  Synthetic
ucagguuucccuacgggguga

SEQ ID NO: 492597 - RNA, 22 nt, Artificial Sequence
  Synthetic
aucagguuucccuacgggguga

SEQ ID NO: 492598 - RNA, 23 nt, Artificial Sequence
  Synthetic
uaucagguuucccuacgggguga

SEQ ID NO: 492599 - RNA, 24 nt, Artificial Sequence
  Synthetic
auaucagguuucccuacgggguga

SEQ ID NO: 492600 - RNA, 18 nt, Artificial Sequence
  Synthetic
gucccaucugggggguga

SEQ ID NO: 492601 - RNA, 19 nt, Artificial Sequence
  Synthetic
ggucccaucugggggguga

SEQ ID NO: 492602 - RNA, 20 nt, Artificial Sequence
  Synthetic
uggucccaucugggggguga

SEQ ID NO: 492603 - RNA, 21 nt, Artificial Sequence
  Synthetic
auggucccaucugggggguga

SEQ ID NO: 492604 - RNA, 22 nt, Artificial Sequence
  Synthetic
gauggucccaucugggggguga

SEQ ID NO: 492605 - RNA, 23 nt, Artificial Sequence
  Synthetic
agauggucccaucugggggguga

SEQ ID NO: 492606 - RNA, 24 nt, Artificial Sequence
  Synthetic
uagauggucccaucugggggguga

SEQ ID NO: 492607 - RNA, 18 nt, Artificial Sequence
  Synthetic
uacuccagccugggguga

SEQ ID NO: 492608 - RNA, 19 nt, Artificial Sequence
  Synthetic
guacuccagccugggguga

SEQ ID NO: 492609 - RNA, 20 nt, Artificial Sequence
  Synthetic
uguacuccagccugggguga

SEQ ID NO: 492610 - RNA, 21 nt, Artificial Sequence
  Synthetic
cuguacuccagccugggguga

SEQ ID NO: 492611 - RNA, 22 nt, Artificial Sequence
  Synthetic
acuguacuccagccugggguga

SEQ ID NO: 492612 - RNA, 23 nt, Artificial Sequence
  Synthetic
cacuguacuccagccugggguga

SEQ ID NO: 492613 - RNA, 24 nt, Artificial Sequence
  Synthetic
ccacuguacuccagccugggguga

SEQ ID NO: 492614 - RNA, 18 nt, Artificial Sequence
  Synthetic
gggccugucgugggguga

SEQ ID NO: 492615 - RNA, 19 nt, Artificial Sequence
  Synthetic
ggggccugucgugggguga

SEQ ID NO: 492616 - RNA, 20 nt, Artificial Sequence
  Synthetic
cggggccugucgugggguga

SEQ ID NO: 492617 - RNA, 21 nt, Artificial Sequence
  Synthetic
ccggggccugucgugggguga

SEQ ID NO: 492618 - RNA, 22 nt, Artificial Sequence
  Synthetic
accggggccugucgugggguga

SEQ ID NO: 492619 - RNA, 23 nt, Artificial Sequence
  Synthetic
caccggggccugucgugggguga

SEQ ID NO: 492620 - RNA, 24 nt, Artificial Sequence
  Synthetic
acaccggggccugucgugggguga

SEQ ID NO: 492621 - RNA, 21 nt, Artificial Sequence
  Synthetic
acuccacuccagccuggguga

SEQ ID NO: 492622 - RNA, 22 nt, Artificial Sequence
  Synthetic
cacuccacuccagccuggguga

SEQ ID NO: 492623 - RNA, 23 nt, Artificial Sequence
  Synthetic
ccacuccacuccagccuggguga

SEQ ID NO: 492624 - RNA, 24 nt, Artificial Sequence
  Synthetic
gccacuccacuccagccuggguga

SEQ ID NO: 492625 - RNA, 21 nt, Artificial Sequence
  Synthetic
acugcacuccagccuggguga

SEQ ID NO: 492626 - RNA, 22 nt, Artificial Sequence
  Synthetic
cacugcacuccagccuggguga

SEQ ID NO: 492627 - RNA, 23 nt, Artificial Sequence
  Synthetic
ccacugcacuccagccuggguga

SEQ ID NO: 492628 - RNA, 24 nt, Artificial Sequence
  Synthetic
accacugcacuccagccuggguga

SEQ ID NO: 492629 - RNA, 23 nt, Artificial Sequence
  Synthetic
gcacugcacuccagccuggguga

SEQ ID NO: 492630 - RNA, 24 nt, Artificial Sequence
  Synthetic
agcacugcacuccagccuggguga

SEQ ID NO: 492631 - RNA, 24 nt, Artificial Sequence
  Synthetic
ugcacugcacuccagccuggguga

SEQ ID NO: 492632 - RNA, 21 nt, Artificial Sequence
  Synthetic
gcugcacuccagccuggguga

SEQ ID NO: 492633 - RNA, 22 nt, Artificial Sequence
  Synthetic
cgcugcacuccagccuggguga

SEQ ID NO: 492634 - RNA, 23 nt, Artificial Sequence
  Synthetic
ccgcugcacuccagccuggguga

SEQ ID NO: 492635 - RNA, 24 nt, Artificial Sequence
  Synthetic
gccgcugcacuccagccuggguga

SEQ ID NO: 492636 - RNA, 18 nt, Artificial Sequence
  Synthetic
gcacuucagccuggguga

SEQ ID NO: 492637 - RNA, 19 nt, Artificial Sequence
  Synthetic
ugcacuucagccuggguga

SEQ ID NO: 492638 - RNA, 20 nt, Artificial Sequence
  Synthetic
cugcacuucagccuggguga

SEQ ID NO: 492639 - RNA, 21 nt, Artificial Sequence
  Synthetic
acugcacuucagccuggguga

SEQ ID NO: 492640 - RNA, 22 nt, Artificial Sequence
  Synthetic
cacugcacuucagccuggguga

SEQ ID NO: 492641 - RNA, 23 nt, Artificial Sequence
  Synthetic
ccacugcacuucagccuggguga

SEQ ID NO: 492642 - RNA, 24 nt, Artificial Sequence
  Synthetic
accacugcacuucagccuggguga

SEQ ID NO: 492643 - RNA, 18 nt, Artificial Sequence
  Synthetic
aagggcauuccuggguga

SEQ ID NO: 492644 - RNA, 19 nt, Artificial Sequence
  Synthetic
aaagggcauuccuggguga

SEQ ID NO: 492645 - RNA, 20 nt, Artificial Sequence
  Synthetic
gaaagggcauuccuggguga

SEQ ID NO: 492646 - RNA, 21 nt, Artificial Sequence
  Synthetic
agaaagggcauuccuggguga

SEQ ID NO: 492647 - RNA, 22 nt, Artificial Sequence
  Synthetic
cagaaagggcauuccuggguga

SEQ ID NO: 492648 - RNA, 23 nt, Artificial Sequence
  Synthetic
ucagaaagggcauuccuggguga

SEQ ID NO: 492649 - RNA, 24 nt, Artificial Sequence
  Synthetic
uucagaaagggcauuccuggguga

SEQ ID NO: 492650 - RNA, 18 nt, Artificial Sequence
  Synthetic
gaaagaugagcuggguga

SEQ ID NO: 492651 - RNA, 19 nt, Artificial Sequence
  Synthetic
ggaaagaugagcuggguga

SEQ ID NO: 492652 - RNA, 20 nt, Artificial Sequence
  Synthetic
cggaaagaugagcuggguga

SEQ ID NO: 492653 - RNA, 21 nt, Artificial Sequence
  Synthetic
acggaaagaugagcuggguga

SEQ ID NO: 492654 - RNA, 22 nt, Artificial Sequence
  Synthetic
uacggaaagaugagcuggguga

SEQ ID NO: 492655 - RNA, 23 nt, Artificial Sequence
  Synthetic
auacggaaagaugagcuggguga

SEQ ID NO: 492656 - RNA, 24 nt, Artificial Sequence
  Synthetic
cauacggaaagaugagcuggguga

SEQ ID NO: 492657 - RNA, 18 nt, Artificial Sequence
  Synthetic
agauaugggauuggguga

SEQ ID NO: 492658 - RNA, 19 nt, Artificial Sequence
  Synthetic
uagauaugggauuggguga

SEQ ID NO: 492659 - RNA, 20 nt, Artificial Sequence
  Synthetic
cuagauaugggauuggguga

SEQ ID NO: 492660 - RNA, 21 nt, Artificial Sequence
  Synthetic
ucuagauaugggauuggguga

SEQ ID NO: 492661 - RNA, 22 nt, Artificial Sequence
  Synthetic
aucuagauaugggauuggguga

SEQ ID NO: 492662 - RNA, 23 nt, Artificial Sequence
  Synthetic
aaucuagauaugggauuggguga

SEQ ID NO: 492663 - RNA, 24 nt, Artificial Sequence
  Synthetic
aaaucuagauaugggauuggguga

SEQ ID NO: 492664 - RNA, 18 nt, Artificial Sequence
  Synthetic
gcacugcagcuuggguga

SEQ ID NO: 492665 - RNA, 19 nt, Artificial Sequence
  Synthetic
ugcacugcagcuuggguga

SEQ ID NO: 492666 - RNA, 20 nt, Artificial Sequence
  Synthetic
cugcacugcagcuuggguga

SEQ ID NO: 492667 - RNA, 21 nt, Artificial Sequence
  Synthetic
acugcacugcagcuuggguga

SEQ ID NO: 492668 - RNA, 22 nt, Artificial Sequence
  Synthetic
cacugcacugcagcuuggguga

SEQ ID NO: 492669 - RNA, 23 nt, Artificial Sequence
  Synthetic
ccacugcacugcagcuuggguga

SEQ ID NO: 492670 - RNA, 24 nt, Artificial Sequence
  Synthetic
accacugcacugcagcuuggguga

SEQ ID NO: 492671 - RNA, 18 nt, Artificial Sequence
  Synthetic
ugugccugaugaugguga

SEQ ID NO: 492672 - RNA, 19 nt, Artificial Sequence
  Synthetic
cugugccugaugaugguga

SEQ ID NO: 492673 - RNA, 20 nt, Artificial Sequence
  Synthetic
ucugugccugaugaugguga

SEQ ID NO: 492674 - RNA, 21 nt, Artificial Sequence
  Synthetic
aucugugccugaugaugguga

SEQ ID NO: 492675 - RNA, 22 nt, Artificial Sequence
  Synthetic
gaucugugccugaugaugguga

SEQ ID NO: 492676 - RNA, 23 nt, Artificial Sequence
  Synthetic
ggaucugugccugaugaugguga

SEQ ID NO: 492677 - RNA, 24 nt, Artificial Sequence
  Synthetic
aggaucugugccugaugaugguga

SEQ ID NO: 492678 - RNA, 18 nt, Artificial Sequence
  Synthetic
cagcucaucauaugguga

SEQ ID NO: 492679 - RNA, 19 nt, Artificial Sequence
  Synthetic
ucagcucaucauaugguga

SEQ ID NO: 492680 - RNA, 20 nt, Artificial Sequence
  Synthetic
aucagcucaucauaugguga

SEQ ID NO: 492681 - RNA, 21 nt, Artificial Sequence
  Synthetic
aaucagcucaucauaugguga

SEQ ID NO: 492682 - RNA, 22 nt, Artificial Sequence
  Synthetic
aaaucagcucaucauaugguga

SEQ ID NO: 492683 - RNA, 23 nt, Artificial Sequence
  Synthetic
uaaaucagcucaucauaugguga

SEQ ID NO: 492684 - RNA, 24 nt, Artificial Sequence
  Synthetic
auaaaucagcucaucauaugguga

SEQ ID NO: 492685 - RNA, 18 nt, Artificial Sequence
  Synthetic
gcaacuccagccugguga

SEQ ID NO: 492686 - RNA, 19 nt, Artificial Sequence
  Synthetic
ugcaacuccagccugguga

SEQ ID NO: 492687 - RNA, 20 nt, Artificial Sequence
  Synthetic
uugcaacuccagccugguga

SEQ ID NO: 492688 - RNA, 21 nt, Artificial Sequence
  Synthetic
auugcaacuccagccugguga

SEQ ID NO: 492689 - RNA, 22 nt, Artificial Sequence
  Synthetic
cauugcaacuccagccugguga

SEQ ID NO: 492690 - RNA, 23 nt, Artificial Sequence
  Synthetic
ccauugcaacuccagccugguga

SEQ ID NO: 492691 - RNA, 24 nt, Artificial Sequence
  Synthetic
gccauugcaacuccagccugguga

SEQ ID NO: 492692 - RNA, 18 nt, Artificial Sequence
  Synthetic
gauuuaguccucugguga

SEQ ID NO: 492693 - RNA, 19 nt, Artificial Sequence
  Synthetic
agauuuaguccucugguga

SEQ ID NO: 492694 - RNA, 20 nt, Artificial Sequence
  Synthetic
uagauuuaguccucugguga

SEQ ID NO: 492695 - RNA, 21 nt, Artificial Sequence
  Synthetic
cuagauuuaguccucugguga

SEQ ID NO: 492696 - RNA, 22 nt, Artificial Sequence
  Synthetic
ccuagauuuaguccucugguga

SEQ ID NO: 492697 - RNA, 23 nt, Artificial Sequence
  Synthetic
cccuagauuuaguccucugguga

SEQ ID NO: 492698 - RNA, 24 nt, Artificial Sequence
  Synthetic
gcccuagauuuaguccucugguga

SEQ ID NO: 492699 - RNA, 18 nt, Artificial Sequence
  Synthetic
guuugaaacaagugguga

SEQ ID NO: 492700 - RNA, 19 nt, Artificial Sequence
  Synthetic
aguuugaaacaagugguga

SEQ ID NO: 492701 - RNA, 20 nt, Artificial Sequence
  Synthetic
gaguuugaaacaagugguga

SEQ ID NO: 492702 - RNA, 21 nt, Artificial Sequence
  Synthetic
ggaguuugaaacaagugguga

SEQ ID NO: 492703 - RNA, 22 nt, Artificial Sequence
  Synthetic
uggaguuugaaacaagugguga

SEQ ID NO: 492704 - RNA, 23 nt, Artificial Sequence
  Synthetic
uuggaguuugaaacaagugguga

SEQ ID NO: 492705 - RNA, 24 nt, Artificial Sequence
  Synthetic
cuuggaguuugaaacaagugguga

SEQ ID NO: 492706 - RNA, 18 nt, Artificial Sequence
  Synthetic
aucagaggugagugguga

SEQ ID NO: 492707 - RNA, 19 nt, Artificial Sequence
  Synthetic
uaucagaggugagugguga

SEQ ID NO: 492708 - RNA, 20 nt, Artificial Sequence
  Synthetic
uuaucagaggugagugguga

SEQ ID NO: 492709 - RNA, 21 nt, Artificial Sequence
  Synthetic
guuaucagaggugagugguga

SEQ ID NO: 492710 - RNA, 22 nt, Artificial Sequence
  Synthetic
gguuaucagaggugagugguga

SEQ ID NO: 492711 - RNA, 23 nt, Artificial Sequence
  Synthetic
ggguuaucagaggugagugguga

SEQ ID NO: 492712 - RNA, 24 nt, Artificial Sequence
  Synthetic
uggguuaucagaggugagugguga

SEQ ID NO: 492713 - RNA, 18 nt, Artificial Sequence
  Synthetic
auaaggaauuagugguga

SEQ ID NO: 492714 - RNA, 19 nt, Artificial Sequence
  Synthetic
gauaaggaauuagugguga

SEQ ID NO: 492715 - RNA, 20 nt, Artificial Sequence
  Synthetic
ugauaaggaauuagugguga

SEQ ID NO: 492716 - RNA, 21 nt, Artificial Sequence
  Synthetic
uugauaaggaauuagugguga

SEQ ID NO: 492717 - RNA, 22 nt, Artificial Sequence
  Synthetic
cuugauaaggaauuagugguga

SEQ ID NO: 492718 - RNA, 23 nt, Artificial Sequence
  Synthetic
ucuugauaaggaauuagugguga

SEQ ID NO: 492719 - RNA, 24 nt, Artificial Sequence
  Synthetic
cucuugauaaggaauuagugguga

SEQ ID NO: 492720 - RNA, 18 nt, Artificial Sequence
  Synthetic
acauguucccugugguga

SEQ ID NO: 492721 - RNA, 19 nt, Artificial Sequence
  Synthetic
aacauguucccugugguga

SEQ ID NO: 492722 - RNA, 20 nt, Artificial Sequence
  Synthetic
uaacauguucccugugguga

SEQ ID NO: 492723 - RNA, 21 nt, Artificial Sequence
  Synthetic
auaacauguucccugugguga

SEQ ID NO: 492724 - RNA, 22 nt, Artificial Sequence
  Synthetic
uauaacauguucccugugguga

SEQ ID NO: 492725 - RNA, 23 nt, Artificial Sequence
  Synthetic
auauaacauguucccugugguga

SEQ ID NO: 492726 - RNA, 24 nt, Artificial Sequence
  Synthetic
cauauaacauguucccugugguga

SEQ ID NO: 492727 - RNA, 18 nt, Artificial Sequence
  Synthetic
gaugggggagauugguga

SEQ ID NO: 492728 - RNA, 19 nt, Artificial Sequence
  Synthetic
agaugggggagauugguga

SEQ ID NO: 492729 - RNA, 20 nt, Artificial Sequence
  Synthetic
gagaugggggagauugguga

SEQ ID NO: 492730 - RNA, 21 nt, Artificial Sequence
  Synthetic
agagaugggggagauugguga

SEQ ID NO: 492731 - RNA, 22 nt, Artificial Sequence
  Synthetic
cagagaugggggagauugguga

SEQ ID NO: 492732 - RNA, 23 nt, Artificial Sequence
  Synthetic
acagagaugggggagauugguga

SEQ ID NO: 492733 - RNA, 24 nt, Artificial Sequence
  Synthetic
uacagagaugggggagauugguga

SEQ ID NO: 492734 - RNA, 18 nt, Artificial Sequence
  Synthetic
augguauaauauugguga

SEQ ID NO: 492735 - RNA, 19 nt, Artificial Sequence
  Synthetic
aaugguauaauauugguga

SEQ ID NO: 492736 - RNA, 20 nt, Artificial Sequence
  Synthetic
aaaugguauaauauugguga

SEQ ID NO: 492737 - RNA, 21 nt, Artificial Sequence
  Synthetic
aaaaugguauaauauugguga

SEQ ID NO: 492738 - RNA, 22 nt, Artificial Sequence
  Synthetic
gaaaaugguauaauauugguga

SEQ ID NO: 492739 - RNA, 23 nt, Artificial Sequence
  Synthetic
agaaaaugguauaauauugguga

SEQ ID NO: 492740 - RNA, 24 nt, Artificial Sequence
  Synthetic
gagaaaaugguauaauauugguga

SEQ ID NO: 492741 - RNA, 18 nt, Artificial Sequence
  Synthetic
accgagguauauugguga

SEQ ID NO: 492742 - RNA, 19 nt, Artificial Sequence
  Synthetic
uaccgagguauauugguga

SEQ ID NO: 492743 - RNA, 20 nt, Artificial Sequence
  Synthetic
guaccgagguauauugguga

SEQ ID NO: 492744 - RNA, 21 nt, Artificial Sequence
  Synthetic
cguaccgagguauauugguga

SEQ ID NO: 492745 - RNA, 22 nt, Artificial Sequence
  Synthetic
acguaccgagguauauugguga

SEQ ID NO: 492746 - RNA, 23 nt, Artificial Sequence
  Synthetic
uacguaccgagguauauugguga

SEQ ID NO: 492747 - RNA, 24 nt, Artificial Sequence
  Synthetic
cuacguaccgagguauauugguga

SEQ ID NO: 492748 - RNA, 18 nt, Artificial Sequence
  Synthetic
uuaccgacaauuugguga

SEQ ID NO: 492749 - RNA, 19 nt, Artificial Sequence
  Synthetic
uuuaccgacaauuugguga

SEQ ID NO: 492750 - RNA, 20 nt, Artificial Sequence
  Synthetic
uuuuaccgacaauuugguga

SEQ ID NO: 492751 - RNA, 21 nt, Artificial Sequence
  Synthetic
auuuuaccgacaauuugguga

SEQ ID NO: 492752 - RNA, 22 nt, Artificial Sequence
  Synthetic
cauuuuaccgacaauuugguga

SEQ ID NO: 492753 - RNA, 23 nt, Artificial Sequence
  Synthetic
ccauuuuaccgacaauuugguga

SEQ ID NO: 492754 - RNA, 24 nt, Artificial Sequence
  Synthetic
gccauuuuaccgacaauuugguga

SEQ ID NO: 492755 - RNA, 18 nt, Artificial Sequence
  Synthetic
aggauuguccuuugguga

SEQ ID NO: 492756 - RNA, 19 nt, Artificial Sequence
  Synthetic
gaggauuguccuuugguga

SEQ ID NO: 492757 - RNA, 20 nt, Artificial Sequence
  Synthetic
agaggauuguccuuugguga

SEQ ID NO: 492758 - RNA, 21 nt, Artificial Sequence
  Synthetic
cagaggauuguccuuugguga

SEQ ID NO: 492759 - RNA, 22 nt, Artificial Sequence
  Synthetic
gcagaggauuguccuuugguga

SEQ ID NO: 492760 - RNA, 23 nt, Artificial Sequence
  Synthetic
ugcagaggauuguccuuugguga

SEQ ID NO: 492761 - RNA, 24 nt, Artificial Sequence
  Synthetic
augcagaggauuguccuuugguga

SEQ ID NO: 492762 - RNA, 18 nt, Artificial Sequence
  Synthetic
gugaaaggaaaaauguga

SEQ ID NO: 492763 - RNA, 19 nt, Artificial Sequence
  Synthetic
agugaaaggaaaaauguga

SEQ ID NO: 492764 - RNA, 20 nt, Artificial Sequence
  Synthetic
gagugaaaggaaaaauguga

SEQ ID NO: 492765 - RNA, 21 nt, Artificial Sequence
  Synthetic
agagugaaaggaaaaauguga

SEQ ID NO: 492766 - RNA, 22 nt, Artificial Sequence
  Synthetic
aagagugaaaggaaaaauguga

SEQ ID NO: 492767 - RNA, 23 nt, Artificial Sequence
  Synthetic
caagagugaaaggaaaaauguga

SEQ ID NO: 492768 - RNA, 24 nt, Artificial Sequence
  Synthetic
ucaagagugaaaggaaaaauguga

SEQ ID NO: 492769 - RNA, 18 nt, Artificial Sequence
  Synthetic
auugguuuugaaauguga

SEQ ID NO: 492770 - RNA, 19 nt, Artificial Sequence
  Synthetic
gauugguuuugaaauguga

SEQ ID NO: 492771 - RNA, 20 nt, Artificial Sequence
  Synthetic
ugauugguuuugaaauguga

SEQ ID NO: 492772 - RNA, 21 nt, Artificial Sequence
  Synthetic
augauugguuuugaaauguga

SEQ ID NO: 492773 - RNA, 22 nt, Artificial Sequence
  Synthetic
caugauugguuuugaaauguga

SEQ ID NO: 492774 - RNA, 23 nt, Artificial Sequence
  Synthetic
gcaugauugguuuugaaauguga

SEQ ID NO: 492775 - RNA, 24 nt, Artificial Sequence
  Synthetic
ggcaugauugguuuugaaauguga

SEQ ID NO: 492776 - RNA, 18 nt, Artificial Sequence
  Synthetic
uuauuuuuauaaauguga

SEQ ID NO: 492777 - RNA, 19 nt, Artificial Sequence
  Synthetic
auuauuuuuauaaauguga

SEQ ID NO: 492778 - RNA, 20 nt, Artificial Sequence
  Synthetic
cauuauuuuuauaaauguga

SEQ ID NO: 492779 - RNA, 21 nt, Artificial Sequence
  Synthetic
acauuauuuuuauaaauguga

SEQ ID NO: 492780 - RNA, 22 nt, Artificial Sequence
  Synthetic
cacauuauuuuuauaaauguga

SEQ ID NO: 492781 - RNA, 23 nt, Artificial Sequence
  Synthetic
ucacauuauuuuuauaaauguga

SEQ ID NO: 492782 - RNA, 24 nt, Artificial Sequence
  Synthetic
uucacauuauuuuuauaaauguga

SEQ ID NO: 492783 - RNA, 18 nt, Artificial Sequence
  Synthetic
agaaucaaguaaauguga

SEQ ID NO: 492784 - RNA, 19 nt, Artificial Sequence
  Synthetic
cagaaucaaguaaauguga

SEQ ID NO: 492785 - RNA, 20 nt, Artificial Sequence
  Synthetic
gcagaaucaaguaaauguga

SEQ ID NO: 492786 - RNA, 21 nt, Artificial Sequence
  Synthetic
ugcagaaucaaguaaauguga

SEQ ID NO: 492787 - RNA, 22 nt, Artificial Sequence
  Synthetic
cugcagaaucaaguaaauguga

SEQ ID NO: 492788 - RNA, 23 nt, Artificial Sequence
  Synthetic
acugcagaaucaaguaaauguga

SEQ ID NO: 492789 - RNA, 24 nt, Artificial Sequence
  Synthetic
aacugcagaaucaaguaaauguga

SEQ ID NO: 492790 - RNA, 18 nt, Artificial Sequence
  Synthetic
uaaauuuuguaaauguga

SEQ ID NO: 492791 - RNA, 19 nt, Artificial Sequence
  Synthetic
auaaauuuuguaaauguga

SEQ ID NO: 492792 - RNA, 20 nt, Artificial Sequence
  Synthetic
uauaaauuuuguaaauguga

SEQ ID NO: 492793 - RNA, 21 nt, Artificial Sequence
  Synthetic
uuauaaauuuuguaaauguga

SEQ ID NO: 492794 - RNA, 22 nt, Artificial Sequence
  Synthetic
cuuauaaauuuuguaaauguga

SEQ ID NO: 492795 - RNA, 23 nt, Artificial Sequence
  Synthetic
ucuuauaaauuuuguaaauguga

SEQ ID NO: 492796 - RNA, 24 nt, Artificial Sequence
  Synthetic
uucuuauaaauuuuguaaauguga

SEQ ID NO: 492797 - RNA, 18 nt, Artificial Sequence
  Synthetic
cugcauccugcaauguga

SEQ ID NO: 492798 - RNA, 19 nt, Artificial Sequence
  Synthetic
ucugcauccugcaauguga

SEQ ID NO: 492799 - RNA, 20 nt, Artificial Sequence
  Synthetic
cucugcauccugcaauguga

SEQ ID NO: 492800 - RNA, 21 nt, Artificial Sequence
  Synthetic
acucugcauccugcaauguga

SEQ ID NO: 492801 - RNA, 22 nt, Artificial Sequence
  Synthetic
cacucugcauccugcaauguga

SEQ ID NO: 492802 - RNA, 23 nt, Artificial Sequence
  Synthetic
ucacucugcauccugcaauguga

SEQ ID NO: 492803 - RNA, 24 nt, Artificial Sequence
  Synthetic
uucacucugcauccugcaauguga

SEQ ID NO: 492804 - RNA, 18 nt, Artificial Sequence
  Synthetic
ucaucuggaugaauguga

SEQ ID NO: 492805 - RNA, 19 nt, Artificial Sequence
  Synthetic
uucaucuggaugaauguga

SEQ ID NO: 492806 - RNA, 20 nt, Artificial Sequence
  Synthetic
uuucaucuggaugaauguga

SEQ ID NO: 492807 - RNA, 21 nt, Artificial Sequence
  Synthetic
uuuucaucuggaugaauguga

SEQ ID NO: 492808 - RNA, 22 nt, Artificial Sequence
  Synthetic
uuuuucaucuggaugaauguga

SEQ ID NO: 492809 - RNA, 23 nt, Artificial Sequence
  Synthetic
uuuuuucaucuggaugaauguga

SEQ ID NO: 492810 - RNA, 24 nt, Artificial Sequence
  Synthetic
uuuuuuucaucuggaugaauguga

SEQ ID NO: 492811 - RNA, 18 nt, Artificial Sequence
  Synthetic
guaguacaaguaauguga

SEQ ID NO: 492812 - RNA, 19 nt, Artificial Sequence
  Synthetic
gguaguacaaguaauguga

SEQ ID NO: 492813 - RNA, 20 nt, Artificial Sequence
  Synthetic
agguaguacaaguaauguga

SEQ ID NO: 492814 - RNA, 21 nt, Artificial Sequence
  Synthetic
aagguaguacaaguaauguga

SEQ ID NO: 492815 - RNA, 22 nt, Artificial Sequence
  Synthetic
aaagguaguacaaguaauguga

SEQ ID NO: 492816 - RNA, 23 nt, Artificial Sequence
  Synthetic
aaaagguaguacaaguaauguga

SEQ ID NO: 492817 - RNA, 24 nt, Artificial Sequence
  Synthetic
gaaaagguaguacaaguaauguga

SEQ ID NO: 492818 - RNA, 18 nt, Artificial Sequence
  Synthetic
aacauuuaacacauguga

SEQ ID NO: 492819 - RNA, 19 nt, Artificial Sequence
  Synthetic
caacauuuaacacauguga

SEQ ID NO: 492820 - RNA, 20 nt, Artificial Sequence
  Synthetic
gcaacauuuaacacauguga

SEQ ID NO: 492821 - RNA, 21 nt, Artificial Sequence
  Synthetic
ugcaacauuuaacacauguga

SEQ ID NO: 492822 - RNA, 22 nt, Artificial Sequence
  Synthetic
uugcaacauuuaacacauguga

SEQ ID NO: 492823 - RNA, 23 nt, Artificial Sequence
  Synthetic
cuugcaacauuuaacacauguga

SEQ ID NO: 492824 - RNA, 24 nt, Artificial Sequence
  Synthetic
acuugcaacauuuaacacauguga

SEQ ID NO: 492825 - RNA, 18 nt, Artificial Sequence
  Synthetic
ggagaaaauaccauguga

SEQ ID NO: 492826 - RNA, 19 nt, Artificial Sequence
  Synthetic
uggagaaaauaccauguga

SEQ ID NO: 492827 - RNA, 20 nt, Artificial Sequence
  Synthetic
uuggagaaaauaccauguga

SEQ ID NO: 492828 - RNA, 21 nt, Artificial Sequence
  Synthetic
cuuggagaaaauaccauguga

SEQ ID NO: 492829 - RNA, 22 nt, Artificial Sequence
  Synthetic
ucuuggagaaaauaccauguga

SEQ ID NO: 492830 - RNA, 23 nt, Artificial Sequence
  Synthetic
cucuuggagaaaauaccauguga

SEQ ID NO: 492831 - RNA, 24 nt, Artificial Sequence
  Synthetic
ucucuuggagaaaauaccauguga

SEQ ID NO: 492832 - RNA, 18 nt, Artificial Sequence
  Synthetic
cuagguuucuccauguga

SEQ ID NO: 492833 - RNA, 19 nt, Artificial Sequence
  Synthetic
ccuagguuucuccauguga

SEQ ID NO: 492834 - RNA, 20 nt, Artificial Sequence
  Synthetic
gccuagguuucuccauguga

SEQ ID NO: 492835 - RNA, 21 nt, Artificial Sequence
  Synthetic
ugccuagguuucuccauguga

SEQ ID NO: 492836 - RNA, 22 nt, Artificial Sequence
  Synthetic
uugccuagguuucuccauguga

SEQ ID NO: 492837 - RNA, 23 nt, Artificial Sequence
  Synthetic
uuugccuagguuucuccauguga

SEQ ID NO: 492838 - RNA, 24 nt, Artificial Sequence
  Synthetic
uuuugccuagguuucuccauguga

SEQ ID NO: 492839 - RNA, 18 nt, Artificial Sequence
  Synthetic
uauuuuccaggcauguga

SEQ ID NO: 492840 - RNA, 19 nt, Artificial Sequence
  Synthetic
cuauuuuccaggcauguga

SEQ ID NO: 492841 - RNA, 20 nt, Artificial Sequence
  Synthetic
ccuauuuuccaggcauguga

SEQ ID NO: 492842 - RNA, 21 nt, Artificial Sequence
  Synthetic
accuauuuuccaggcauguga

SEQ ID NO: 492843 - RNA, 22 nt, Artificial Sequence
  Synthetic
caccuauuuuccaggcauguga

SEQ ID NO: 492844 - RNA, 23 nt, Artificial Sequence
  Synthetic
gcaccuauuuuccaggcauguga

SEQ ID NO: 492845 - RNA, 24 nt, Artificial Sequence
  Synthetic
agcaccuauuuuccaggcauguga

SEQ ID NO: 492846 - RNA, 18 nt, Artificial Sequence
  Synthetic
cagggccagugcauguga

SEQ ID NO: 492847 - RNA, 19 nt, Artificial Sequence
  Synthetic
ucagggccagugcauguga

SEQ ID NO: 492848 - RNA, 20 nt, Artificial Sequence
  Synthetic
uucagggccagugcauguga

SEQ ID NO: 492849 - RNA, 21 nt, Artificial Sequence
  Synthetic
guucagggccagugcauguga

SEQ ID NO: 492850 - RNA, 22 nt, Artificial Sequence
  Synthetic
gguucagggccagugcauguga

SEQ ID NO: 492851 - RNA, 23 nt, Artificial Sequence
  Synthetic
ugguucagggccagugcauguga

SEQ ID NO: 492852 - RNA, 24 nt, Artificial Sequence
  Synthetic
gugguucagggccagugcauguga

SEQ ID NO: 492853 - RNA, 18 nt, Artificial Sequence
  Synthetic
caaauaaauaucauguga

SEQ ID NO: 492854 - RNA, 19 nt, Artificial Sequence
  Synthetic
acaaauaaauaucauguga

SEQ ID NO: 492855 - RNA, 20 nt, Artificial Sequence
  Synthetic
cacaaauaaauaucauguga

SEQ ID NO: 492856 - RNA, 21 nt, Artificial Sequence
  Synthetic
ccacaaauaaauaucauguga

SEQ ID NO: 492857 - RNA, 22 nt, Artificial Sequence
  Synthetic
gccacaaauaaauaucauguga

SEQ ID NO: 492858 - RNA, 23 nt, Artificial Sequence
  Synthetic
agccacaaauaaauaucauguga

SEQ ID NO: 492859 - RNA, 24 nt, Artificial Sequence
  Synthetic
uagccacaaauaaauaucauguga

SEQ ID NO: 492860 - RNA, 18 nt, Artificial Sequence
  Synthetic
caacugccagucauguga

SEQ ID NO: 492861 - RNA, 19 nt, Artificial Sequence
  Synthetic
ccaacugccagucauguga

SEQ ID NO: 492862 - RNA, 20 nt, Artificial Sequence
  Synthetic
accaacugccagucauguga

SEQ ID NO: 492863 - RNA, 21 nt, Artificial Sequence
  Synthetic
caccaacugccagucauguga

SEQ ID NO: 492864 - RNA, 22 nt, Artificial Sequence
  Synthetic
gcaccaacugccagucauguga

SEQ ID NO: 492865 - RNA, 23 nt, Artificial Sequence
  Synthetic
agcaccaacugccagucauguga

SEQ ID NO: 492866 - RNA, 24 nt, Artificial Sequence
  Synthetic
cagcaccaacugccagucauguga

SEQ ID NO: 492867 - RNA, 18 nt, Artificial Sequence
  Synthetic
uucauauuuuagauguga

SEQ ID NO: 492868 - RNA, 19 nt, Artificial Sequence
  Synthetic
uuucauauuuuagauguga

SEQ ID NO: 492869 - RNA, 20 nt, Artificial Sequence
  Synthetic
auuucauauuuuagauguga

SEQ ID NO: 492870 - RNA, 21 nt, Artificial Sequence
  Synthetic
uauuucauauuuuagauguga

SEQ ID NO: 492871 - RNA, 22 nt, Artificial Sequence
  Synthetic
cuauuucauauuuuagauguga

SEQ ID NO: 492872 - RNA, 23 nt, Artificial Sequence
  Synthetic
gcuauuucauauuuuagauguga

SEQ ID NO: 492873 - RNA, 24 nt, Artificial Sequence
  Synthetic
agcuauuucauauuuuagauguga

SEQ ID NO: 492874 - RNA, 18 nt, Artificial Sequence
  Synthetic
uuuacaguucauauguga

SEQ ID NO: 492875 - RNA, 19 nt, Artificial Sequence
  Synthetic
uuuuacaguucauauguga

SEQ ID NO: 492876 - RNA, 20 nt, Artificial Sequence
  Synthetic
auuuuacaguucauauguga

SEQ ID NO: 492877 - RNA, 21 nt, Artificial Sequence
  Synthetic
aauuuuacaguucauauguga

SEQ ID NO: 492878 - RNA, 22 nt, Artificial Sequence
  Synthetic
aaauuuuacaguucauauguga

SEQ ID NO: 492879 - RNA, 23 nt, Artificial Sequence
  Synthetic
uaaauuuuacaguucauauguga

SEQ ID NO: 492880 - RNA, 24 nt, Artificial Sequence
  Synthetic
uuaaauuuuacaguucauauguga

SEQ ID NO: 492881 - RNA, 18 nt, Artificial Sequence
  Synthetic
aaacaaaaagauauguga

SEQ ID NO: 492882 - RNA, 19 nt, Artificial Sequence
  Synthetic
gaaacaaaaagauauguga

SEQ ID NO: 492883 - RNA, 20 nt, Artificial Sequence
  Synthetic
agaaacaaaaagauauguga

SEQ ID NO: 492884 - RNA, 21 nt, Artificial Sequence
  Synthetic
uagaaacaaaaagauauguga

SEQ ID NO: 492885 - RNA, 22 nt, Artificial Sequence
  Synthetic
cuagaaacaaaaagauauguga

SEQ ID NO: 492886 - RNA, 23 nt, Artificial Sequence
  Synthetic
ucuagaaacaaaaagauauguga

SEQ ID NO: 492887 - RNA, 24 nt, Artificial Sequence
  Synthetic
uucuagaaacaaaaagauauguga

SEQ ID NO: 492888 - RNA, 18 nt, Artificial Sequence
  Synthetic
auugauauagcuauguga

SEQ ID NO: 492889 - RNA, 19 nt, Artificial Sequence
  Synthetic
gauugauauagcuauguga

SEQ ID NO: 492890 - RNA, 20 nt, Artificial Sequence
  Synthetic
cgauugauauagcuauguga

SEQ ID NO: 492891 - RNA, 21 nt, Artificial Sequence
  Synthetic
gcgauugauauagcuauguga

SEQ ID NO: 492892 - RNA, 22 nt, Artificial Sequence
  Synthetic
ggcgauugauauagcuauguga

SEQ ID NO: 492893 - RNA, 23 nt, Artificial Sequence
  Synthetic
gggcgauugauauagcuauguga

SEQ ID NO: 492894 - RNA, 24 nt, Artificial Sequence
  Synthetic
ggggcgauugauauagcuauguga

SEQ ID NO: 492895 - RNA, 18 nt, Artificial Sequence
  Synthetic
auuccuuucucuauguga

SEQ ID NO: 492896 - RNA, 19 nt, Artificial Sequence
  Synthetic
cauuccuuucucuauguga

SEQ ID NO: 492897 - RNA, 20 nt, Artificial Sequence
  Synthetic
ucauuccuuucucuauguga

SEQ ID NO: 492898 - RNA, 21 nt, Artificial Sequence
  Synthetic
uucauuccuuucucuauguga

SEQ ID NO: 492899 - RNA, 22 nt, Artificial Sequence
  Synthetic
uuucauuccuuucucuauguga

SEQ ID NO: 492900 - RNA, 23 nt, Artificial Sequence
  Synthetic
uuuucauuccuuucucuauguga

SEQ ID NO: 492901 - RNA, 24 nt, Artificial Sequence
  Synthetic
uuuuucauuccuuucucuauguga

SEQ ID NO: 492902 - RNA, 18 nt, Artificial Sequence
  Synthetic
acauggguauguauguga

SEQ ID NO: 492903 - RNA, 19 nt, Artificial Sequence
  Synthetic
aacauggguauguauguga

SEQ ID NO: 492904 - RNA, 20 nt, Artificial Sequence
  Synthetic
caacauggguauguauguga

SEQ ID NO: 492905 - RNA, 21 nt, Artificial Sequence
  Synthetic
ccaacauggguauguauguga

SEQ ID NO: 492906 - RNA, 22 nt, Artificial Sequence
  Synthetic
gccaacauggguauguauguga

SEQ ID NO: 492907 - RNA, 23 nt, Artificial Sequence
  Synthetic
ggccaacauggguauguauguga

SEQ ID NO: 492908 - RNA, 24 nt, Artificial Sequence
  Synthetic
aggccaacauggguauguauguga

SEQ ID NO: 492909 - RNA, 18 nt, Artificial Sequence
  Synthetic
auuuaggaugaacuguga

SEQ ID NO: 492910 - RNA, 19 nt, Artificial Sequence
  Synthetic
gauuuaggaugaacuguga

SEQ ID NO: 492911 - RNA, 20 nt, Artificial Sequence
  Synthetic
ugauuuaggaugaacuguga

SEQ ID NO: 492912 - RNA, 21 nt, Artificial Sequence
  Synthetic
augauuuaggaugaacuguga

SEQ ID NO: 492913 - RNA, 22 nt, Artificial Sequence
  Synthetic
aaugauuuaggaugaacuguga

SEQ ID NO: 492914 - RNA, 23 nt, Artificial Sequence
  Synthetic
aaaugauuuaggaugaacuguga

SEQ ID NO: 492915 - RNA, 24 nt, Artificial Sequence
  Synthetic
gaaaugauuuaggaugaacuguga

SEQ ID NO: 492916 - RNA, 18 nt, Artificial Sequence
  Synthetic
gcuuuguuuacacuguga

SEQ ID NO: 492917 - RNA, 19 nt, Artificial Sequence
  Synthetic
ggcuuuguuuacacuguga

SEQ ID NO: 492918 - RNA, 20 nt, Artificial Sequence
  Synthetic
cggcuuuguuuacacuguga

SEQ ID NO: 492919 - RNA, 21 nt, Artificial Sequence
  Synthetic
acggcuuuguuuacacuguga

SEQ ID NO: 492920 - RNA, 22 nt, Artificial Sequence
  Synthetic
gacggcuuuguuuacacuguga

SEQ ID NO: 492921 - RNA, 23 nt, Artificial Sequence
  Synthetic
ugacggcuuuguuuacacuguga

SEQ ID NO: 492922 - RNA, 24 nt, Artificial Sequence
  Synthetic
uugacggcuuuguuuacacuguga

SEQ ID NO: 492923 - RNA, 18 nt, Artificial Sequence
  Synthetic
ugcucuguugcacuguga

SEQ ID NO: 492924 - RNA, 19 nt, Artificial Sequence
  Synthetic
uugcucuguugcacuguga

SEQ ID NO: 492925 - RNA, 20 nt, Artificial Sequence
  Synthetic
cuugcucuguugcacuguga

SEQ ID NO: 492926 - RNA, 21 nt, Artificial Sequence
  Synthetic
ucuugcucuguugcacuguga

SEQ ID NO: 492927 - RNA, 22 nt, Artificial Sequence
  Synthetic
uucuugcucuguugcacuguga

SEQ ID NO: 492928 - RNA, 23 nt, Artificial Sequence
  Synthetic
cuucuugcucuguugcacuguga

SEQ ID NO: 492929 - RNA, 24 nt, Artificial Sequence
  Synthetic
gcuucuugcucuguugcacuguga

SEQ ID NO: 492930 - RNA, 18 nt, Artificial Sequence
  Synthetic
ucguaauagagacuguga

SEQ ID NO: 492931 - RNA, 19 nt, Artificial Sequence
  Synthetic
aucguaauagagacuguga

SEQ ID NO: 492932 - RNA, 20 nt, Artificial Sequence
  Synthetic
aaucguaauagagacuguga

SEQ ID NO: 492933 - RNA, 21 nt, Artificial Sequence
  Synthetic
uaaucguaauagagacuguga

SEQ ID NO: 492934 - RNA, 22 nt, Artificial Sequence
  Synthetic
uuaaucguaauagagacuguga

SEQ ID NO: 492935 - RNA, 23 nt, Artificial Sequence
  Synthetic
auuaaucguaauagagacuguga

SEQ ID NO: 492936 - RNA, 24 nt, Artificial Sequence
  Synthetic
aauuaaucguaauagagacuguga

SEQ ID NO: 492937 - RNA, 21 nt, Artificial Sequence
  Synthetic
agcuuuuugagauuacuguga

SEQ ID NO: 492938 - RNA, 22 nt, Artificial Sequence
  Synthetic
aagcuuuuugagauuacuguga

SEQ ID NO: 492939 - RNA, 23 nt, Artificial Sequence
  Synthetic
aaagcuuuuugagauuacuguga

SEQ ID NO: 492940 - RNA, 24 nt, Artificial Sequence
  Synthetic
uaaagcuuuuugagauuacuguga

SEQ ID NO: 492941 - RNA, 18 nt, Artificial Sequence
  Synthetic
gcauuauuauuacuguga

SEQ ID NO: 492942 - RNA, 19 nt, Artificial Sequence
  Synthetic
ggcauuauuauuacuguga

SEQ ID NO: 492943 - RNA, 20 nt, Artificial Sequence
  Synthetic
uggcauuauuauuacuguga

SEQ ID NO: 492944 - RNA, 21 nt, Artificial Sequence
  Synthetic
uuggcauuauuauuacuguga

SEQ ID NO: 492945 - RNA, 22 nt, Artificial Sequence
  Synthetic
auuggcauuauuauuacuguga

SEQ ID NO: 492946 - RNA, 23 nt, Artificial Sequence
  Synthetic
aauuggcauuauuauuacuguga

SEQ ID NO: 492947 - RNA, 24 nt, Artificial Sequence
  Synthetic
uaauuggcauuauuauuacuguga

SEQ ID NO: 492948 - RNA, 18 nt, Artificial Sequence
  Synthetic
acuaaguauggccuguga

SEQ ID NO: 492949 - RNA, 19 nt, Artificial Sequence
  Synthetic
cacuaaguauggccuguga

SEQ ID NO: 492950 - RNA, 20 nt, Artificial Sequence
  Synthetic
ucacuaaguauggccuguga

SEQ ID NO: 492951 - RNA, 21 nt, Artificial Sequence
  Synthetic
gucacuaaguauggccuguga

SEQ ID NO: 492952 - RNA, 22 nt, Artificial Sequence
  Synthetic
agucacuaaguauggccuguga

SEQ ID NO: 492953 - RNA, 23 nt, Artificial Sequence
  Synthetic
uagucacuaaguauggccuguga

SEQ ID NO: 492954 - RNA, 24 nt, Artificial Sequence
  Synthetic
uuagucacuaaguauggccuguga

SEQ ID NO: 492955 - RNA, 18 nt, Artificial Sequence
  Synthetic
gagcucaauauccuguga

SEQ ID NO: 492956 - RNA, 19 nt, Artificial Sequence
  Synthetic
agagcucaauauccuguga

SEQ ID NO: 492957 - RNA, 20 nt, Artificial Sequence
  Synthetic
aagagcucaauauccuguga

SEQ ID NO: 492958 - RNA, 21 nt, Artificial Sequence
  Synthetic
caagagcucaauauccuguga

SEQ ID NO: 492959 - RNA, 22 nt, Artificial Sequence
  Synthetic
ucaagagcucaauauccuguga

SEQ ID NO: 492960 - RNA, 23 nt, Artificial Sequence
  Synthetic
aucaagagcucaauauccuguga

SEQ ID NO: 492961 - RNA, 24 nt, Artificial Sequence
  Synthetic
uaucaagagcucaauauccuguga

SEQ ID NO: 492962 - RNA, 18 nt, Artificial Sequence
  Synthetic
acauuccuggggcuguga

SEQ ID NO: 492963 - RNA, 19 nt, Artificial Sequence
  Synthetic
aacauuccuggggcuguga

SEQ ID NO: 492964 - RNA, 20 nt, Artificial Sequence
  Synthetic
aaacauuccuggggcuguga

SEQ ID NO: 492965 - RNA, 21 nt, Artificial Sequence
  Synthetic
gaaacauuccuggggcuguga

SEQ ID NO: 492966 - RNA, 22 nt, Artificial Sequence
  Synthetic
ugaaacauuccuggggcuguga

SEQ ID NO: 492967 - RNA, 23 nt, Artificial Sequence
  Synthetic
augaaacauuccuggggcuguga

SEQ ID NO: 492968 - RNA, 24 nt, Artificial Sequence
  Synthetic
caugaaacauuccuggggcuguga

SEQ ID NO: 492969 - RNA, 18 nt, Artificial Sequence
  Synthetic
uaaagacgaucucuguga

SEQ ID NO: 492970 - RNA, 19 nt, Artificial Sequence
  Synthetic
uuaaagacgaucucuguga

SEQ ID NO: 492971 - RNA, 20 nt, Artificial Sequence
  Synthetic
uuuaaagacgaucucuguga

SEQ ID NO: 492972 - RNA, 21 nt, Artificial Sequence
  Synthetic
auuuaaagacgaucucuguga

SEQ ID NO: 492973 - RNA, 22 nt, Artificial Sequence
  Synthetic
uauuuaaagacgaucucuguga

SEQ ID NO: 492974 - RNA, 23 nt, Artificial Sequence
  Synthetic
auauuuaaagacgaucucuguga

SEQ ID NO: 492975 - RNA, 24 nt, Artificial Sequence
  Synthetic
uauauuuaaagacgaucucuguga

SEQ ID NO: 492976 - RNA, 18 nt, Artificial Sequence
  Synthetic
agauuguggagucuguga

SEQ ID NO: 492977 - RNA, 19 nt, Artificial Sequence
  Synthetic
cagauuguggagucuguga

SEQ ID NO: 492978 - RNA, 20 nt, Artificial Sequence
  Synthetic
ccagauuguggagucuguga

SEQ ID NO: 492979 - RNA, 21 nt, Artificial Sequence
  Synthetic
accagauuguggagucuguga

SEQ ID NO: 492980 - RNA, 22 nt, Artificial Sequence
  Synthetic
caccagauuguggagucuguga

SEQ ID NO: 492981 - RNA, 23 nt, Artificial Sequence
  Synthetic
ucaccagauuguggagucuguga

SEQ ID NO: 492982 - RNA, 24 nt, Artificial Sequence
  Synthetic
uucaccagauuguggagucuguga

SEQ ID NO: 492983 - RNA, 18 nt, Artificial Sequence
  Synthetic
acauugucaucaguguga

SEQ ID NO: 492984 - RNA, 19 nt, Artificial Sequence
  Synthetic
uacauugucaucaguguga

SEQ ID NO: 492985 - RNA, 20 nt, Artificial Sequence
  Synthetic
auacauugucaucaguguga

SEQ ID NO: 492986 - RNA, 21 nt, Artificial Sequence
  Synthetic
uauacauugucaucaguguga

SEQ ID NO: 492987 - RNA, 22 nt, Artificial Sequence
  Synthetic
uuauacauugucaucaguguga

SEQ ID NO: 492988 - RNA, 23 nt, Artificial Sequence
  Synthetic
uuuauacauugucaucaguguga

SEQ ID NO: 492989 - RNA, 24 nt, Artificial Sequence
  Synthetic
auuuauacauugucaucaguguga

SEQ ID NO: 492990 - RNA, 18 nt, Artificial Sequence
  Synthetic
aaaauaguaagaguguga

SEQ ID NO: 492991 - RNA, 19 nt, Artificial Sequence
  Synthetic
aaaaauaguaagaguguga

SEQ ID NO: 492992 - RNA, 20 nt, Artificial Sequence
  Synthetic
aaaaaauaguaagaguguga

SEQ ID NO: 492993 - RNA, 21 nt, Artificial Sequence
  Synthetic
uaaaaaauaguaagaguguga

SEQ ID NO: 492994 - RNA, 22 nt, Artificial Sequence
  Synthetic
guaaaaaauaguaagaguguga

SEQ ID NO: 492995 - RNA, 23 nt, Artificial Sequence
  Synthetic
gguaaaaaauaguaagaguguga

SEQ ID NO: 492996 - RNA, 24 nt, Artificial Sequence
  Synthetic
ggguaaaaaauaguaagaguguga

SEQ ID NO: 492997 - RNA, 18 nt, Artificial Sequence
  Synthetic
gaagggggagggguguga

SEQ ID NO: 492998 - RNA, 19 nt, Artificial Sequence
  Synthetic
ggaagggggagggguguga

SEQ ID NO: 492999 - RNA, 20 nt, Artificial Sequence
  Synthetic
gggaagggggagggguguga

SEQ ID NO: 493000 - RNA, 21 nt, Artificial Sequence
  Synthetic
ggggaagggggagggguguga

SEQ ID NO: 493001 - RNA, 22 nt, Artificial Sequence
  Synthetic
uggggaagggggagggguguga

SEQ ID NO: 493002 - RNA, 23 nt, Artificial Sequence
  Synthetic
uuggggaagggggagggguguga

SEQ ID NO: 493003 - RNA, 24 nt, Artificial Sequence
  Synthetic
uuuggggaagggggagggguguga

SEQ ID NO: 493004 - RNA, 19 nt, Artificial Sequence
  Synthetic
ugaagggggagggguguga

SEQ ID NO: 493005 - RNA, 20 nt, Artificial Sequence
  Synthetic
gugaagggggagggguguga

SEQ ID NO: 493006 - RNA, 21 nt, Artificial Sequence
  Synthetic
ugugaagggggagggguguga

SEQ ID NO: 493007 - RNA, 22 nt, Artificial Sequence
  Synthetic
gugugaagggggagggguguga

SEQ ID NO: 493008 - RNA, 23 nt, Artificial Sequence
  Synthetic
ggugugaagggggagggguguga

SEQ ID NO: 493009 - RNA, 24 nt, Artificial Sequence
  Synthetic
gggugugaagggggagggguguga

SEQ ID NO: 493010 - RNA, 18 nt, Artificial Sequence
  Synthetic
aauaugcuggggguguga

SEQ ID NO: 493011 - RNA, 19 nt, Artificial Sequence
  Synthetic
uaauaugcuggggguguga

SEQ ID NO: 493012 - RNA, 20 nt, Artificial Sequence
  Synthetic
auaauaugcuggggguguga

SEQ ID NO: 493013 - RNA, 21 nt, Artificial Sequence
  Synthetic
gauaauaugcuggggguguga

SEQ ID NO: 493014 - RNA, 22 nt, Artificial Sequence
  Synthetic
ugauaauaugcuggggguguga

SEQ ID NO: 493015 - RNA, 23 nt, Artificial Sequence
  Synthetic
gugauaauaugcuggggguguga

SEQ ID NO: 493016 - RNA, 24 nt, Artificial Sequence
  Synthetic
ugugauaauaugcuggggguguga

SEQ ID NO: 493017 - RNA, 18 nt, Artificial Sequence
  Synthetic
ucuuucucuaauguguga

SEQ ID NO: 493018 - RNA, 19 nt, Artificial Sequence
  Synthetic
cucuuucucuaauguguga

SEQ ID NO: 493019 - RNA, 20 nt, Artificial Sequence
  Synthetic
acucuuucucuaauguguga

SEQ ID NO: 493020 - RNA, 21 nt, Artificial Sequence
  Synthetic
aacucuuucucuaauguguga

SEQ ID NO: 493021 - RNA, 22 nt, Artificial Sequence
  Synthetic
uaacucuuucucuaauguguga

SEQ ID NO: 493022 - RNA, 23 nt, Artificial Sequence
  Synthetic
uuaacucuuucucuaauguguga

SEQ ID NO: 493023 - RNA, 24 nt, Artificial Sequence
  Synthetic
cuuaacucuuucucuaauguguga

SEQ ID NO: 493024 - RNA, 18 nt, Artificial Sequence
  Synthetic
cuauaugcacguguguga

SEQ ID NO: 493025 - RNA, 19 nt, Artificial Sequence
  Synthetic
ccuauaugcacguguguga

SEQ ID NO: 493026 - RNA, 20 nt, Artificial Sequence
  Synthetic
gccuauaugcacguguguga

SEQ ID NO: 493027 - RNA, 21 nt, Artificial Sequence
  Synthetic
ugccuauaugcacguguguga

SEQ ID NO: 493028 - RNA, 22 nt, Artificial Sequence
  Synthetic
gugccuauaugcacguguguga

SEQ ID NO: 493029 - RNA, 23 nt, Artificial Sequence
  Synthetic
ugugccuauaugcacguguguga

SEQ ID NO: 493030 - RNA, 24 nt, Artificial Sequence
  Synthetic
gugugccuauaugcacguguguga

SEQ ID NO: 493031 - RNA, 18 nt, Artificial Sequence
  Synthetic
guguguguguguguguga

SEQ ID NO: 493032 - RNA, 19 nt, Artificial Sequence
  Synthetic
uguguguguguguguguga

SEQ ID NO: 493033 - RNA, 20 nt, Artificial Sequence
  Synthetic
auguguguguguguguguga

SEQ ID NO: 493034 - RNA, 21 nt, Artificial Sequence
  Synthetic
uauguguguguguguguguga

SEQ ID NO: 493035 - RNA, 22 nt, Artificial Sequence
  Synthetic
guauguguguguguguguguga

SEQ ID NO: 493036 - RNA, 23 nt, Artificial Sequence
  Synthetic
gguauguguguguguguguguga

SEQ ID NO: 493037 - RNA, 24 nt, Artificial Sequence
  Synthetic
ggguauguguguguguguguguga

SEQ ID NO: 493038 - RNA, 18 nt, Artificial Sequence
  Synthetic
ucccuauccauuguguga

SEQ ID NO: 493039 - RNA, 19 nt, Artificial Sequence
  Synthetic
cucccuauccauuguguga

SEQ ID NO: 493040 - RNA, 20 nt, Artificial Sequence
  Synthetic
gcucccuauccauuguguga

SEQ ID NO: 493041 - RNA, 21 nt, Artificial Sequence
  Synthetic
agcucccuauccauuguguga

SEQ ID NO: 493042 - RNA, 22 nt, Artificial Sequence
  Synthetic
uagcucccuauccauuguguga

SEQ ID NO: 493043 - RNA, 23 nt, Artificial Sequence
  Synthetic
auagcucccuauccauuguguga

SEQ ID NO: 493044 - RNA, 24 nt, Artificial Sequence
  Synthetic
aauagcucccuauccauuguguga

SEQ ID NO: 493045 - RNA, 21 nt, Artificial Sequence
  Synthetic
uucucuuugaagcaauuguga

SEQ ID NO: 493046 - RNA, 22 nt, Artificial Sequence
  Synthetic
auucucuuugaagcaauuguga

SEQ ID NO: 493047 - RNA, 23 nt, Artificial Sequence
  Synthetic
uauucucuuugaagcaauuguga

SEQ ID NO: 493048 - RNA, 24 nt, Artificial Sequence
  Synthetic
uuauucucuuugaagcaauuguga

SEQ ID NO: 493049 - RNA, 18 nt, Artificial Sequence
  Synthetic
aauuuggacacauuguga

SEQ ID NO: 493050 - RNA, 19 nt, Artificial Sequence
  Synthetic
gaauuuggacacauuguga

SEQ ID NO: 493051 - RNA, 20 nt, Artificial Sequence
  Synthetic
ugaauuuggacacauuguga

SEQ ID NO: 493052 - RNA, 21 nt, Artificial Sequence
  Synthetic
augaauuuggacacauuguga

SEQ ID NO: 493053 - RNA, 22 nt, Artificial Sequence
  Synthetic
aaugaauuuggacacauuguga

SEQ ID NO: 493054 - RNA, 23 nt, Artificial Sequence
  Synthetic
aaaugaauuuggacacauuguga

SEQ ID NO: 493055 - RNA, 24 nt, Artificial Sequence
  Synthetic
aaaaugaauuuggacacauuguga

SEQ ID NO: 493056 - RNA, 18 nt, Artificial Sequence
  Synthetic
uugaaagaugcauuguga

SEQ ID NO: 493057 - RNA, 19 nt, Artificial Sequence
  Synthetic
auugaaagaugcauuguga

SEQ ID NO: 493058 - RNA, 20 nt, Artificial Sequence
  Synthetic
gauugaaagaugcauuguga

SEQ ID NO: 493059 - RNA, 21 nt, Artificial Sequence
  Synthetic
agauugaaagaugcauuguga

SEQ ID NO: 493060 - RNA, 22 nt, Artificial Sequence
  Synthetic
gagauugaaagaugcauuguga

SEQ ID NO: 493061 - RNA, 23 nt, Artificial Sequence
  Synthetic
cgagauugaaagaugcauuguga

SEQ ID NO: 493062 - RNA, 24 nt, Artificial Sequence
  Synthetic
acgagauugaaagaugcauuguga

SEQ ID NO: 493063 - RNA, 18 nt, Artificial Sequence
  Synthetic
ggagggccuggauuguga

SEQ ID NO: 493064 - RNA, 19 nt, Artificial Sequence
  Synthetic
aggagggccuggauuguga

SEQ ID NO: 493065 - RNA, 20 nt, Artificial Sequence
  Synthetic
aaggagggccuggauuguga

SEQ ID NO: 493066 - RNA, 21 nt, Artificial Sequence
  Synthetic
gaaggagggccuggauuguga

SEQ ID NO: 493067 - RNA, 22 nt, Artificial Sequence
  Synthetic
ggaaggagggccuggauuguga

SEQ ID NO: 493068 - RNA, 23 nt, Artificial Sequence
  Synthetic
aggaaggagggccuggauuguga

SEQ ID NO: 493069 - RNA, 24 nt, Artificial Sequence
  Synthetic
caggaaggagggccuggauuguga

SEQ ID NO: 493070 - RNA, 18 nt, Artificial Sequence
  Synthetic
gagacaguaguauuguga

SEQ ID NO: 493071 - RNA, 19 nt, Artificial Sequence
  Synthetic
agagacaguaguauuguga

SEQ ID NO: 493072 - RNA, 20 nt, Artificial Sequence
  Synthetic
uagagacaguaguauuguga

SEQ ID NO: 493073 - RNA, 21 nt, Artificial Sequence
  Synthetic
guagagacaguaguauuguga

SEQ ID NO: 493074 - RNA, 22 nt, Artificial Sequence
  Synthetic
gguagagacaguaguauuguga

SEQ ID NO: 493075 - RNA, 23 nt, Artificial Sequence
  Synthetic
ggguagagacaguaguauuguga

SEQ ID NO: 493076 - RNA, 24 nt, Artificial Sequence
  Synthetic
aggguagagacaguaguauuguga

SEQ ID NO: 493077 - RNA, 18 nt, Artificial Sequence
  Synthetic
uuuauauuguacuuguga

SEQ ID NO: 493078 - RNA, 19 nt, Artificial Sequence
  Synthetic
cuuuauauuguacuuguga

SEQ ID NO: 493079 - RNA, 20 nt, Artificial Sequence
  Synthetic
acuuuauauuguacuuguga

SEQ ID NO: 493080 - RNA, 21 nt, Artificial Sequence
  Synthetic
aacuuuauauuguacuuguga

SEQ ID NO: 493081 - RNA, 22 nt, Artificial Sequence
  Synthetic
uaacuuuauauuguacuuguga

SEQ ID NO: 493082 - RNA, 23 nt, Artificial Sequence
  Synthetic
auaacuuuauauuguacuuguga

SEQ ID NO: 493083 - RNA, 24 nt, Artificial Sequence
  Synthetic
cauaacuuuauauuguacuuguga

SEQ ID NO: 493084 - RNA, 18 nt, Artificial Sequence
  Synthetic
ucuauguacaccuuguga

SEQ ID NO: 493085 - RNA, 19 nt, Artificial Sequence
  Synthetic
gucuauguacaccuuguga

SEQ ID NO: 493086 - RNA, 20 nt, Artificial Sequence
  Synthetic
agucuauguacaccuuguga

SEQ ID NO: 493087 - RNA, 21 nt, Artificial Sequence
  Synthetic
cagucuauguacaccuuguga

SEQ ID NO: 493088 - RNA, 22 nt, Artificial Sequence
  Synthetic
ccagucuauguacaccuuguga

SEQ ID NO: 493089 - RNA, 23 nt, Artificial Sequence
  Synthetic
uccagucuauguacaccuuguga

SEQ ID NO: 493090 - RNA, 24 nt, Artificial Sequence
  Synthetic
uuccagucuauguacaccuuguga

SEQ ID NO: 493091 - RNA, 18 nt, Artificial Sequence
  Synthetic
cacuguauuagcuuguga

SEQ ID NO: 493092 - RNA, 19 nt, Artificial Sequence
  Synthetic
acacuguauuagcuuguga

SEQ ID NO: 493093 - RNA, 20 nt, Artificial Sequence
  Synthetic
aacacuguauuagcuuguga

SEQ ID NO: 493094 - RNA, 21 nt, Artificial Sequence
  Synthetic
aaacacuguauuagcuuguga

SEQ ID NO: 493095 - RNA, 22 nt, Artificial Sequence
  Synthetic
uaaacacuguauuagcuuguga

SEQ ID NO: 493096 - RNA, 23 nt, Artificial Sequence
  Synthetic
guaaacacuguauuagcuuguga

SEQ ID NO: 493097 - RNA, 24 nt, Artificial Sequence
  Synthetic
aguaaacacuguauuagcuuguga

SEQ ID NO: 493098 - RNA, 18 nt, Artificial Sequence
  Synthetic
aggccucugggcuuguga

SEQ ID NO: 493099 - RNA, 19 nt, Artificial Sequence
  Synthetic
uaggccucugggcuuguga

SEQ ID NO: 493100 - RNA, 20 nt, Artificial Sequence
  Synthetic
uuaggccucugggcuuguga

SEQ ID NO: 493101 - RNA, 21 nt, Artificial Sequence
  Synthetic
uuuaggccucugggcuuguga

SEQ ID NO: 493102 - RNA, 22 nt, Artificial Sequence
  Synthetic
uuuuaggccucugggcuuguga

SEQ ID NO: 493103 - RNA, 23 nt, Artificial Sequence
  Synthetic
cuuuuaggccucugggcuuguga

SEQ ID NO: 493104 - RNA, 24 nt, Artificial Sequence
  Synthetic
ccuuuuaggccucugggcuuguga

SEQ ID NO: 493105 - RNA, 18 nt, Artificial Sequence
  Synthetic
uuaaucgucaucuuguga

SEQ ID NO: 493106 - RNA, 19 nt, Artificial Sequence
  Synthetic
auuaaucgucaucuuguga

SEQ ID NO: 493107 - RNA, 20 nt, Artificial Sequence
  Synthetic
uauuaaucgucaucuuguga

SEQ ID NO: 493108 - RNA, 21 nt, Artificial Sequence
  Synthetic
cuauuaaucgucaucuuguga

SEQ ID NO: 493109 - RNA, 22 nt, Artificial Sequence
  Synthetic
ucuauuaaucgucaucuuguga

SEQ ID NO: 493110 - RNA, 23 nt, Artificial Sequence
  Synthetic
aucuauuaaucgucaucuuguga

SEQ ID NO: 493111 - RNA, 24 nt, Artificial Sequence
  Synthetic
aaucuauuaaucgucaucuuguga

SEQ ID NO: 493112 - RNA, 18 nt, Artificial Sequence
  Synthetic
agaguugaguaguuguga

SEQ ID NO: 493113 - RNA, 19 nt, Artificial Sequence
  Synthetic
cagaguugaguaguuguga

SEQ ID NO: 493114 - RNA, 20 nt, Artificial Sequence
  Synthetic
gcagaguugaguaguuguga

SEQ ID NO: 493115 - RNA, 21 nt, Artificial Sequence
  Synthetic
agcagaguugaguaguuguga

SEQ ID NO: 493116 - RNA, 22 nt, Artificial Sequence
  Synthetic
cagcagaguugaguaguuguga

SEQ ID NO: 493117 - RNA, 23 nt, Artificial Sequence
  Synthetic
acagcagaguugaguaguuguga

SEQ ID NO: 493118 - RNA, 24 nt, Artificial Sequence
  Synthetic
aacagcagaguugaguaguuguga

SEQ ID NO: 493119 - RNA, 18 nt, Artificial Sequence
  Synthetic
ugguuuuaaggguuguga

SEQ ID NO: 493120 - RNA, 19 nt, Artificial Sequence
  Synthetic
augguuuuaaggguuguga

SEQ ID NO: 493121 - RNA, 20 nt, Artificial Sequence
  Synthetic
aaugguuuuaaggguuguga

SEQ ID NO: 493122 - RNA, 21 nt, Artificial Sequence
  Synthetic
aaaugguuuuaaggguuguga

SEQ ID NO: 493123 - RNA, 22 nt, Artificial Sequence
  Synthetic
aaaaugguuuuaaggguuguga

SEQ ID NO: 493124 - RNA, 23 nt, Artificial Sequence
  Synthetic
aaaaaugguuuuaaggguuguga

SEQ ID NO: 493125 - RNA, 24 nt, Artificial Sequence
  Synthetic
caaaaaugguuuuaaggguuguga

SEQ ID NO: 493126 - RNA, 18 nt, Artificial Sequence
  Synthetic
caaucaucuaguuuguga

SEQ ID NO: 493127 - RNA, 19 nt, Artificial Sequence
  Synthetic
gcaaucaucuaguuuguga

SEQ ID NO: 493128 - RNA, 20 nt, Artificial Sequence
  Synthetic
ugcaaucaucuaguuuguga

SEQ ID NO: 493129 - RNA, 21 nt, Artificial Sequence
  Synthetic
cugcaaucaucuaguuuguga

SEQ ID NO: 493130 - RNA, 22 nt, Artificial Sequence
  Synthetic
acugcaaucaucuaguuuguga

SEQ ID NO: 493131 - RNA, 23 nt, Artificial Sequence
  Synthetic
uacugcaaucaucuaguuuguga

SEQ ID NO: 493132 - RNA, 24 nt, Artificial Sequence
  Synthetic
uuacugcaaucaucuaguuuguga

SEQ ID NO: 493133 - RNA, 18 nt, Artificial Sequence
  Synthetic
aaaguuaguaguuuguga

SEQ ID NO: 493134 - RNA, 19 nt, Artificial Sequence
  Synthetic
gaaaguuaguaguuuguga

SEQ ID NO: 493135 - RNA, 20 nt, Artificial Sequence
  Synthetic
ugaaaguuaguaguuuguga

SEQ ID NO: 493136 - RNA, 21 nt, Artificial Sequence
  Synthetic
augaaaguuaguaguuuguga

SEQ ID NO: 493137 - RNA, 22 nt, Artificial Sequence
  Synthetic
aaugaaaguuaguaguuuguga

SEQ ID NO: 493138 - RNA, 23 nt, Artificial Sequence
  Synthetic
aaaugaaaguuaguaguuuguga

SEQ ID NO: 493139 - RNA, 24 nt, Artificial Sequence
  Synthetic
aaaaugaaaguuaguaguuuguga

SEQ ID NO: 493140 - RNA, 18 nt, Artificial Sequence
  Synthetic
guuuuuuuaauuuuguga

SEQ ID NO: 493141 - RNA, 19 nt, Artificial Sequence
  Synthetic
gguuuuuuuaauuuuguga

SEQ ID NO: 493142 - RNA, 20 nt, Artificial Sequence
  Synthetic
agguuuuuuuaauuuuguga

SEQ ID NO: 493143 - RNA, 21 nt, Artificial Sequence
  Synthetic
cagguuuuuuuaauuuuguga

SEQ ID NO: 493144 - RNA, 22 nt, Artificial Sequence
  Synthetic
ucagguuuuuuuaauuuuguga

SEQ ID NO: 493145 - RNA, 23 nt, Artificial Sequence
  Synthetic
uucagguuuuuuuaauuuuguga

SEQ ID NO: 493146 - RNA, 24 nt, Artificial Sequence
  Synthetic
uuucagguuuuuuuaauuuuguga

SEQ ID NO: 493147 - RNA, 18 nt, Artificial Sequence
  Synthetic
aagugguguuaaaauuga

SEQ ID NO: 493148 - RNA, 19 nt, Artificial Sequence
  Synthetic
gaagugguguuaaaauuga

SEQ ID NO: 493149 - RNA, 20 nt, Artificial Sequence
  Synthetic
ggaagugguguuaaaauuga

SEQ ID NO: 493150 - RNA, 21 nt, Artificial Sequence
  Synthetic
gggaagugguguuaaaauuga

SEQ ID NO: 493151 - RNA, 22 nt, Artificial Sequence
  Synthetic
agggaagugguguuaaaauuga

SEQ ID NO: 493152 - RNA, 23 nt, Artificial Sequence
  Synthetic
aagggaagugguguuaaaauuga

SEQ ID NO: 493153 - RNA, 24 nt, Artificial Sequence
  Synthetic
uaagggaagugguguuaaaauuga

SEQ ID NO: 493154 - RNA, 18 nt, Artificial Sequence
  Synthetic
cccaaugugucaaauuga

SEQ ID NO: 493155 - RNA, 19 nt, Artificial Sequence
  Synthetic
ucccaaugugucaaauuga

SEQ ID NO: 493156 - RNA, 20 nt, Artificial Sequence
  Synthetic
cucccaaugugucaaauuga

SEQ ID NO: 493157 - RNA, 21 nt, Artificial Sequence
  Synthetic
ucucccaaugugucaaauuga

SEQ ID NO: 493158 - RNA, 22 nt, Artificial Sequence
  Synthetic
uucucccaaugugucaaauuga

SEQ ID NO: 493159 - RNA, 23 nt, Artificial Sequence
  Synthetic
cuucucccaaugugucaaauuga

SEQ ID NO: 493160 - RNA, 24 nt, Artificial Sequence
  Synthetic
gcuucucccaaugugucaaauuga

SEQ ID NO: 493161 - RNA, 18 nt, Artificial Sequence
  Synthetic
aggcauccuagaaauuga

SEQ ID NO: 493162 - RNA, 19 nt, Artificial Sequence
  Synthetic
gaggcauccuagaaauuga

SEQ ID NO: 493163 - RNA, 20 nt, Artificial Sequence
  Synthetic
agaggcauccuagaaauuga

SEQ ID NO: 493164 - RNA, 21 nt, Artificial Sequence
  Synthetic
aagaggcauccuagaaauuga

SEQ ID NO: 493165 - RNA, 22 nt, Artificial Sequence
  Synthetic
aaagaggcauccuagaaauuga

SEQ ID NO: 493166 - RNA, 23 nt, Artificial Sequence
  Synthetic
aaaagaggcauccuagaaauuga

SEQ ID NO: 493167 - RNA, 24 nt, Artificial Sequence
  Synthetic
aaaaagaggcauccuagaaauuga

SEQ ID NO: 493168 - RNA, 18 nt, Artificial Sequence
  Synthetic
cuugugauaggaaauuga

SEQ ID NO: 493169 - RNA, 19 nt, Artificial Sequence
  Synthetic
ucuugugauaggaaauuga

SEQ ID NO: 493170 - RNA, 20 nt, Artificial Sequence
  Synthetic
aucuugugauaggaaauuga

SEQ ID NO: 493171 - RNA, 21 nt, Artificial Sequence
  Synthetic
caucuugugauaggaaauuga

SEQ ID NO: 493172 - RNA, 22 nt, Artificial Sequence
  Synthetic
ucaucuugugauaggaaauuga

SEQ ID NO: 493173 - RNA, 23 nt, Artificial Sequence
  Synthetic
gucaucuugugauaggaaauuga

SEQ ID NO: 493174 - RNA, 24 nt, Artificial Sequence
  Synthetic
cgucaucuugugauaggaaauuga

SEQ ID NO: 493175 - RNA, 18 nt, Artificial Sequence
  Synthetic
uacaaguaaauaaauuga

SEQ ID NO: 493176 - RNA, 19 nt, Artificial Sequence
  Synthetic
guacaaguaaauaaauuga

SEQ ID NO: 493177 - RNA, 20 nt, Artificial Sequence
  Synthetic
uguacaaguaaauaaauuga

SEQ ID NO: 493178 - RNA, 21 nt, Artificial Sequence
  Synthetic
cuguacaaguaaauaaauuga

SEQ ID NO: 493179 - RNA, 22 nt, Artificial Sequence
  Synthetic
gcuguacaaguaaauaaauuga

SEQ ID NO: 493180 - RNA, 23 nt, Artificial Sequence
  Synthetic
ggcuguacaaguaaauaaauuga

SEQ ID NO: 493181 - RNA, 24 nt, Artificial Sequence
  Synthetic
cggcuguacaaguaaauaaauuga

SEQ ID NO: 493182 - RNA, 18 nt, Artificial Sequence
  Synthetic
gaguagagaauaaauuga

SEQ ID NO: 493183 - RNA, 19 nt, Artificial Sequence
  Synthetic
agaguagagaauaaauuga

SEQ ID NO: 493184 - RNA, 20 nt, Artificial Sequence
  Synthetic
aagaguagagaauaaauuga

SEQ ID NO: 493185 - RNA, 21 nt, Artificial Sequence
  Synthetic
gaagaguagagaauaaauuga

SEQ ID NO: 493186 - RNA, 22 nt, Artificial Sequence
  Synthetic
ugaagaguagagaauaaauuga

SEQ ID NO: 493187 - RNA, 23 nt, Artificial Sequence
  Synthetic
augaagaguagagaauaaauuga

SEQ ID NO: 493188 - RNA, 24 nt, Artificial Sequence
  Synthetic
uaugaagaguagagaauaaauuga

SEQ ID NO: 493189 - RNA, 18 nt, Artificial Sequence
  Synthetic
uaguauucacuaaauuga

SEQ ID NO: 493190 - RNA, 19 nt, Artificial Sequence
  Synthetic
auaguauucacuaaauuga

SEQ ID NO: 493191 - RNA, 20 nt, Artificial Sequence
  Synthetic
uauaguauucacuaaauuga

SEQ ID NO: 493192 - RNA, 21 nt, Artificial Sequence
  Synthetic
guauaguauucacuaaauuga

SEQ ID NO: 493193 - RNA, 22 nt, Artificial Sequence
  Synthetic
aguauaguauucacuaaauuga

SEQ ID NO: 493194 - RNA, 23 nt, Artificial Sequence
  Synthetic
caguauaguauucacuaaauuga

SEQ ID NO: 493195 - RNA, 24 nt, Artificial Sequence
  Synthetic
ucaguauaguauucacuaaauuga

SEQ ID NO: 493196 - RNA, 18 nt, Artificial Sequence
  Synthetic
aaaauaaaauuaaauuga

SEQ ID NO: 493197 - RNA, 19 nt, Artificial Sequence
  Synthetic
uaaaauaaaauuaaauuga

SEQ ID NO: 493198 - RNA, 20 nt, Artificial Sequence
  Synthetic
cuaaaauaaaauuaaauuga

SEQ ID NO: 493199 - RNA, 21 nt, Artificial Sequence
  Synthetic
acuaaaauaaaauuaaauuga

SEQ ID NO: 493200 - RNA, 22 nt, Artificial Sequence
  Synthetic
aacuaaaauaaaauuaaauuga

SEQ ID NO: 493201 - RNA, 23 nt, Artificial Sequence
  Synthetic
caacuaaaauaaaauuaaauuga

SEQ ID NO: 493202 - RNA, 24 nt, Artificial Sequence
  Synthetic
acaacuaaaauaaaauuaaauuga

SEQ ID NO: 493203 - RNA, 18 nt, Artificial Sequence
  Synthetic
cacugcauacccaauuga

SEQ ID NO: 493204 - RNA, 19 nt, Artificial Sequence
  Synthetic
ucacugcauacccaauuga

SEQ ID NO: 493205 - RNA, 20 nt, Artificial Sequence
  Synthetic
cucacugcauacccaauuga

SEQ ID NO: 493206 - RNA, 21 nt, Artificial Sequence
  Synthetic
ccucacugcauacccaauuga

SEQ ID NO: 493207 - RNA, 22 nt, Artificial Sequence
  Synthetic
cccucacugcauacccaauuga

SEQ ID NO: 493208 - RNA, 23 nt, Artificial Sequence
  Synthetic
ccccucacugcauacccaauuga

SEQ ID NO: 493209 - RNA, 24 nt, Artificial Sequence
  Synthetic
gccccucacugcauacccaauuga

SEQ ID NO: 493210 - RNA, 18 nt, Artificial Sequence
  Synthetic
aaaaaaguauccaauuga

SEQ ID NO: 493211 - RNA, 19 nt, Artificial Sequence
  Synthetic
aaaaaaaguauccaauuga

SEQ ID NO: 493212 - RNA, 20 nt, Artificial Sequence
  Synthetic
aaaaaaaaguauccaauuga

SEQ ID NO: 493213 - RNA, 21 nt, Artificial Sequence
  Synthetic
aaaaaaaaaguauccaauuga

SEQ ID NO: 493214 - RNA, 22 nt, Artificial Sequence
  Synthetic
aaaaaaaaaaguauccaauuga

SEQ ID NO: 493215 - RNA, 23 nt, Artificial Sequence
  Synthetic
aaaaaaaaaaaguauccaauuga

SEQ ID NO: 493216 - RNA, 24 nt, Artificial Sequence
  Synthetic
aaaaaaaaaaaaguauccaauuga

SEQ ID NO: 493217 - RNA, 18 nt, Artificial Sequence
  Synthetic
cacagaugcugcaauuga

SEQ ID NO: 493218 - RNA, 19 nt, Artificial Sequence
  Synthetic
ucacagaugcugcaauuga

SEQ ID NO: 493219 - RNA, 20 nt, Artificial Sequence
  Synthetic
uucacagaugcugcaauuga

SEQ ID NO: 493220 - RNA, 21 nt, Artificial Sequence
  Synthetic
uuucacagaugcugcaauuga

SEQ ID NO: 493221 - RNA, 22 nt, Artificial Sequence
  Synthetic
auuucacagaugcugcaauuga

SEQ ID NO: 493222 - RNA, 23 nt, Artificial Sequence
  Synthetic
aauuucacagaugcugcaauuga

SEQ ID NO: 493223 - RNA, 24 nt, Artificial Sequence
  Synthetic
uaauuucacagaugcugcaauuga

SEQ ID NO: 493224 - RNA, 18 nt, Artificial Sequence
  Synthetic
auuggggcugggaauuga

SEQ ID NO: 493225 - RNA, 19 nt, Artificial Sequence
  Synthetic
uauuggggcugggaauuga

SEQ ID NO: 493226 - RNA, 20 nt, Artificial Sequence
  Synthetic
cuauuggggcugggaauuga

SEQ ID NO: 493227 - RNA, 21 nt, Artificial Sequence
  Synthetic
ccuauuggggcugggaauuga

SEQ ID NO: 493228 - RNA, 22 nt, Artificial Sequence
  Synthetic
gccuauuggggcugggaauuga

SEQ ID NO: 493229 - RNA, 23 nt, Artificial Sequence
  Synthetic
ugccuauuggggcugggaauuga

SEQ ID NO: 493230 - RNA, 24 nt, Artificial Sequence
  Synthetic
gugccuauuggggcugggaauuga

SEQ ID NO: 493231 - RNA, 18 nt, Artificial Sequence
  Synthetic
ggaauccuagauaauuga

SEQ ID NO: 493232 - RNA, 19 nt, Artificial Sequence
  Synthetic
aggaauccuagauaauuga

SEQ ID NO: 493233 - RNA, 20 nt, Artificial Sequence
  Synthetic
aaggaauccuagauaauuga

SEQ ID NO: 493234 - RNA, 21 nt, Artificial Sequence
  Synthetic
caaggaauccuagauaauuga

SEQ ID NO: 493235 - RNA, 22 nt, Artificial Sequence
  Synthetic
acaaggaauccuagauaauuga

SEQ ID NO: 493236 - RNA, 23 nt, Artificial Sequence
  Synthetic
aacaaggaauccuagauaauuga

SEQ ID NO: 493237 - RNA, 24 nt, Artificial Sequence
  Synthetic
aaacaaggaauccuagauaauuga

SEQ ID NO: 493238 - RNA, 18 nt, Artificial Sequence
  Synthetic
uuuuuuuuuuuuaauuga

SEQ ID NO: 493239 - RNA, 19 nt, Artificial Sequence
  Synthetic
uuuuuuuuuuuuuaauuga

SEQ ID NO: 493240 - RNA, 20 nt, Artificial Sequence
  Synthetic
guuuuuuuuuuuuuaauuga

SEQ ID NO: 493241 - RNA, 21 nt, Artificial Sequence
  Synthetic
uguuuuuuuuuuuuuaauuga

SEQ ID NO: 493242 - RNA, 22 nt, Artificial Sequence
  Synthetic
uuguuuuuuuuuuuuuaauuga

SEQ ID NO: 493243 - RNA, 23 nt, Artificial Sequence
  Synthetic
cuuguuuuuuuuuuuuuaauuga

SEQ ID NO: 493244 - RNA, 24 nt, Artificial Sequence
  Synthetic
ucuuguuuuuuuuuuuuuaauuga

SEQ ID NO: 493245 - RNA, 18 nt, Artificial Sequence
  Synthetic
uugacaucauaacauuga

SEQ ID NO: 493246 - RNA, 19 nt, Artificial Sequence
  Synthetic
auugacaucauaacauuga

SEQ ID NO: 493247 - RNA, 20 nt, Artificial Sequence
  Synthetic
uauugacaucauaacauuga

SEQ ID NO: 493248 - RNA, 21 nt, Artificial Sequence
  Synthetic
uuauugacaucauaacauuga

SEQ ID NO: 493249 - RNA, 22 nt, Artificial Sequence
  Synthetic
auuauugacaucauaacauuga

SEQ ID NO: 493250 - RNA, 23 nt, Artificial Sequence
  Synthetic
uauuauugacaucauaacauuga

SEQ ID NO: 493251 - RNA, 24 nt, Artificial Sequence
  Synthetic
cuauuauugacaucauaacauuga

SEQ ID NO: 493252 - RNA, 18 nt, Artificial Sequence
  Synthetic
uaaugguuuacacauuga

SEQ ID NO: 493253 - RNA, 19 nt, Artificial Sequence
  Synthetic
uuaaugguuuacacauuga

SEQ ID NO: 493254 - RNA, 20 nt, Artificial Sequence
  Synthetic
uuuaaugguuuacacauuga

SEQ ID NO: 493255 - RNA, 21 nt, Artificial Sequence
  Synthetic
cuuuaaugguuuacacauuga

SEQ ID NO: 493256 - RNA, 22 nt, Artificial Sequence
  Synthetic
ucuuuaaugguuuacacauuga

SEQ ID NO: 493257 - RNA, 23 nt, Artificial Sequence
  Synthetic
uucuuuaaugguuuacacauuga

SEQ ID NO: 493258 - RNA, 24 nt, Artificial Sequence
  Synthetic
guucuuuaaugguuuacacauuga

SEQ ID NO: 493259 - RNA, 18 nt, Artificial Sequence
  Synthetic
agguaagagggacauuga

SEQ ID NO: 493260 - RNA, 19 nt, Artificial Sequence
  Synthetic
cagguaagagggacauuga

SEQ ID NO: 493261 - RNA, 20 nt, Artificial Sequence
  Synthetic
ccagguaagagggacauuga

SEQ ID NO: 493262 - RNA, 21 nt, Artificial Sequence
  Synthetic
accagguaagagggacauuga

SEQ ID NO: 493263 - RNA, 22 nt, Artificial Sequence
  Synthetic
uaccagguaagagggacauuga

SEQ ID NO: 493264 - RNA, 23 nt, Artificial Sequence
  Synthetic
guaccagguaagagggacauuga

SEQ ID NO: 493265 - RNA, 24 nt, Artificial Sequence
  Synthetic
uguaccagguaagagggacauuga

SEQ ID NO: 493266 - RNA, 18 nt, Artificial Sequence
  Synthetic
gaccuugacugacauuga

SEQ ID NO: 493267 - RNA, 19 nt, Artificial Sequence
  Synthetic
ugaccuugacugacauuga

SEQ ID NO: 493268 - RNA, 20 nt, Artificial Sequence
  Synthetic
cugaccuugacugacauuga

SEQ ID NO: 493269 - RNA, 21 nt, Artificial Sequence
  Synthetic
acugaccuugacugacauuga

SEQ ID NO: 493270 - RNA, 22 nt, Artificial Sequence
  Synthetic
cacugaccuugacugacauuga

SEQ ID NO: 493271 - RNA, 23 nt, Artificial Sequence
  Synthetic
ccacugaccuugacugacauuga

SEQ ID NO: 493272 - RNA, 24 nt, Artificial Sequence
  Synthetic
cccacugaccuugacugacauuga

SEQ ID NO: 493273 - RNA, 18 nt, Artificial Sequence
  Synthetic
gcagaaauuaaccauuga

SEQ ID NO: 493274 - RNA, 19 nt, Artificial Sequence
  Synthetic
ugcagaaauuaaccauuga

SEQ ID NO: 493275 - RNA, 20 nt, Artificial Sequence
  Synthetic
augcagaaauuaaccauuga

SEQ ID NO: 493276 - RNA, 21 nt, Artificial Sequence
  Synthetic
aaugcagaaauuaaccauuga

SEQ ID NO: 493277 - RNA, 22 nt, Artificial Sequence
  Synthetic
aaaugcagaaauuaaccauuga

SEQ ID NO: 493278 - RNA, 23 nt, Artificial Sequence
  Synthetic
gaaaugcagaaauuaaccauuga

SEQ ID NO: 493279 - RNA, 24 nt, Artificial Sequence
  Synthetic
ggaaaugcagaaauuaaccauuga

SEQ ID NO: 493280 - RNA, 18 nt, Artificial Sequence
  Synthetic
agauaaaaaacccauuga

SEQ ID NO: 493281 - RNA, 19 nt, Artificial Sequence
  Synthetic
aagauaaaaaacccauuga

SEQ ID NO: 493282 - RNA, 20 nt, Artificial Sequence
  Synthetic
aaagauaaaaaacccauuga

SEQ ID NO: 493283 - RNA, 21 nt, Artificial Sequence
  Synthetic
caaagauaaaaaacccauuga

SEQ ID NO: 493284 - RNA, 22 nt, Artificial Sequence
  Synthetic
acaaagauaaaaaacccauuga

SEQ ID NO: 493285 - RNA, 23 nt, Artificial Sequence
  Synthetic
cacaaagauaaaaaacccauuga

SEQ ID NO: 493286 - RNA, 24 nt, Artificial Sequence
  Synthetic
ucacaaagauaaaaaacccauuga

SEQ ID NO: 493287 - RNA, 18 nt, Artificial Sequence
  Synthetic
cuguaugcauuccauuga

SEQ ID NO: 493288 - RNA, 19 nt, Artificial Sequence
  Synthetic
acuguaugcauuccauuga

SEQ ID NO: 493289 - RNA, 20 nt, Artificial Sequence
  Synthetic
cacuguaugcauuccauuga

SEQ ID NO: 493290 - RNA, 21 nt, Artificial Sequence
  Synthetic
acacuguaugcauuccauuga

SEQ ID NO: 493291 - RNA, 22 nt, Artificial Sequence
  Synthetic
cacacuguaugcauuccauuga

SEQ ID NO: 493292 - RNA, 23 nt, Artificial Sequence
  Synthetic
acacacuguaugcauuccauuga

SEQ ID NO: 493293 - RNA, 24 nt, Artificial Sequence
  Synthetic
aacacacuguaugcauuccauuga

SEQ ID NO: 493294 - RNA, 18 nt, Artificial Sequence
  Synthetic
cuaacuugaugucauuga

SEQ ID NO: 493295 - RNA, 19 nt, Artificial Sequence
  Synthetic
acuaacuugaugucauuga

SEQ ID NO: 493296 - RNA, 20 nt, Artificial Sequence
  Synthetic
aacuaacuugaugucauuga

SEQ ID NO: 493297 - RNA, 21 nt, Artificial Sequence
  Synthetic
caacuaacuugaugucauuga

SEQ ID NO: 493298 - RNA, 22 nt, Artificial Sequence
  Synthetic
gcaacuaacuugaugucauuga

SEQ ID NO: 493299 - RNA, 23 nt, Artificial Sequence
  Synthetic
agcaacuaacuugaugucauuga

SEQ ID NO: 493300 - RNA, 24 nt, Artificial Sequence
  Synthetic
aagcaacuaacuugaugucauuga

SEQ ID NO: 493301 - RNA, 18 nt, Artificial Sequence
  Synthetic
auaguguagauucauuga

SEQ ID NO: 493302 - RNA, 19 nt, Artificial Sequence
  Synthetic
cauaguguagauucauuga

SEQ ID NO: 493303 - RNA, 20 nt, Artificial Sequence
  Synthetic
acauaguguagauucauuga

SEQ ID NO: 493304 - RNA, 21 nt, Artificial Sequence
  Synthetic
cacauaguguagauucauuga

SEQ ID NO: 493305 - RNA, 22 nt, Artificial Sequence
  Synthetic
ccacauaguguagauucauuga

SEQ ID NO: 493306 - RNA, 23 nt, Artificial Sequence
  Synthetic
cccacauaguguagauucauuga

SEQ ID NO: 493307 - RNA, 24 nt, Artificial Sequence
  Synthetic
ucccacauaguguagauucauuga

SEQ ID NO: 493308 - RNA, 18 nt, Artificial Sequence
  Synthetic
uucuuaaguguucauuga

SEQ ID NO: 493309 - RNA, 19 nt, Artificial Sequence
  Synthetic
cuucuuaaguguucauuga

SEQ ID NO: 493310 - RNA, 20 nt, Artificial Sequence
  Synthetic
ccuucuuaaguguucauuga

SEQ ID NO: 493311 - RNA, 21 nt, Artificial Sequence
  Synthetic
cccuucuuaaguguucauuga

SEQ ID NO: 493312 - RNA, 22 nt, Artificial Sequence
  Synthetic
gcccuucuuaaguguucauuga

SEQ ID NO: 493313 - RNA, 23 nt, Artificial Sequence
  Synthetic
ggcccuucuuaaguguucauuga

SEQ ID NO: 493314 - RNA, 24 nt, Artificial Sequence
  Synthetic
aggcccuucuuaaguguucauuga

SEQ ID NO: 493315 - RNA, 18 nt, Artificial Sequence
  Synthetic
cacacaaucagagauuga

SEQ ID NO: 493316 - RNA, 19 nt, Artificial Sequence
  Synthetic
ucacacaaucagagauuga

SEQ ID NO: 493317 - RNA, 20 nt, Artificial Sequence
  Synthetic
uucacacaaucagagauuga

SEQ ID NO: 493318 - RNA, 21 nt, Artificial Sequence
  Synthetic
auucacacaaucagagauuga

SEQ ID NO: 493319 - RNA, 22 nt, Artificial Sequence
  Synthetic
aauucacacaaucagagauuga

SEQ ID NO: 493320 - RNA, 23 nt, Artificial Sequence
  Synthetic
aaauucacacaaucagagauuga

SEQ ID NO: 493321 - RNA, 24 nt, Artificial Sequence
  Synthetic
aaaauucacacaaucagagauuga

SEQ ID NO: 493322 - RNA, 18 nt, Artificial Sequence
  Synthetic
uuauaauggggggauuga

SEQ ID NO: 493323 - RNA, 19 nt, Artificial Sequence
  Synthetic
uuuauaauggggggauuga

SEQ ID NO: 493324 - RNA, 20 nt, Artificial Sequence
  Synthetic
uuuuauaauggggggauuga

SEQ ID NO: 493325 - RNA, 21 nt, Artificial Sequence
  Synthetic
uuuuuauaauggggggauuga

SEQ ID NO: 493326 - RNA, 22 nt, Artificial Sequence
  Synthetic
auuuuuauaauggggggauuga

SEQ ID NO: 493327 - RNA, 23 nt, Artificial Sequence
  Synthetic
aauuuuuauaauggggggauuga

SEQ ID NO: 493328 - RNA, 24 nt, Artificial Sequence
  Synthetic
caauuuuuauaauggggggauuga

SEQ ID NO: 493329 - RNA, 18 nt, Artificial Sequence
  Synthetic
ucugcaacucaugauuga

SEQ ID NO: 493330 - RNA, 19 nt, Artificial Sequence
  Synthetic
uucugcaacucaugauuga

SEQ ID NO: 493331 - RNA, 20 nt, Artificial Sequence
  Synthetic
auucugcaacucaugauuga

SEQ ID NO: 493332 - RNA, 21 nt, Artificial Sequence
  Synthetic
aauucugcaacucaugauuga

SEQ ID NO: 493333 - RNA, 22 nt, Artificial Sequence
  Synthetic
gaauucugcaacucaugauuga

SEQ ID NO: 493334 - RNA, 23 nt, Artificial Sequence
  Synthetic
ugaauucugcaacucaugauuga

SEQ ID NO: 493335 - RNA, 24 nt, Artificial Sequence
  Synthetic
uugaauucugcaacucaugauuga

SEQ ID NO: 493336 - RNA, 18 nt, Artificial Sequence
  Synthetic
ugugaucgggaugauuga

SEQ ID NO: 493337 - RNA, 19 nt, Artificial Sequence
  Synthetic
cugugaucgggaugauuga

SEQ ID NO: 493338 - RNA, 20 nt, Artificial Sequence
  Synthetic
gcugugaucgggaugauuga

SEQ ID NO: 493339 - RNA, 21 nt, Artificial Sequence
  Synthetic
ggcugugaucgggaugauuga

SEQ ID NO: 493340 - RNA, 22 nt, Artificial Sequence
  Synthetic
gggcugugaucgggaugauuga

SEQ ID NO: 493341 - RNA, 23 nt, Artificial Sequence
  Synthetic
ggggcugugaucgggaugauuga

SEQ ID NO: 493342 - RNA, 24 nt, Artificial Sequence
  Synthetic
uggggcugugaucgggaugauuga

SEQ ID NO: 493343 - RNA, 18 nt, Artificial Sequence
  Synthetic
gagcacagagcugauuga

SEQ ID NO: 493344 - RNA, 19 nt, Artificial Sequence
  Synthetic
ugagcacagagcugauuga

SEQ ID NO: 493345 - RNA, 20 nt, Artificial Sequence
  Synthetic
cugagcacagagcugauuga

SEQ ID NO: 493346 - RNA, 21 nt, Artificial Sequence
  Synthetic
ucugagcacagagcugauuga

SEQ ID NO: 493347 - RNA, 22 nt, Artificial Sequence
  Synthetic
aucugagcacagagcugauuga

SEQ ID NO: 493348 - RNA, 23 nt, Artificial Sequence
  Synthetic
uaucugagcacagagcugauuga

SEQ ID NO: 493349 - RNA, 24 nt, Artificial Sequence
  Synthetic
cuaucugagcacagagcugauuga

SEQ ID NO: 493350 - RNA, 18 nt, Artificial Sequence
  Synthetic
acuuuggugucugauuga

SEQ ID NO: 493351 - RNA, 19 nt, Artificial Sequence
  Synthetic
aacuuuggugucugauuga

SEQ ID NO: 493352 - RNA, 20 nt, Artificial Sequence
  Synthetic
caacuuuggugucugauuga

SEQ ID NO: 493353 - RNA, 21 nt, Artificial Sequence
  Synthetic
ucaacuuuggugucugauuga

SEQ ID NO: 493354 - RNA, 22 nt, Artificial Sequence
  Synthetic
cucaacuuuggugucugauuga

SEQ ID NO: 493355 - RNA, 23 nt, Artificial Sequence
  Synthetic
ucucaacuuuggugucugauuga

SEQ ID NO: 493356 - RNA, 24 nt, Artificial Sequence
  Synthetic
aucucaacuuuggugucugauuga

SEQ ID NO: 493357 - RNA, 18 nt, Artificial Sequence
  Synthetic
ucugguuugugugauuga

SEQ ID NO: 493358 - RNA, 19 nt, Artificial Sequence
  Synthetic
uucugguuugugugauuga

SEQ ID NO: 493359 - RNA, 20 nt, Artificial Sequence
  Synthetic
uuucugguuugugugauuga

SEQ ID NO: 493360 - RNA, 21 nt, Artificial Sequence
  Synthetic
guuucugguuugugugauuga

SEQ ID NO: 493361 - RNA, 22 nt, Artificial Sequence
  Synthetic
uguuucugguuugugugauuga

SEQ ID NO: 493362 - RNA, 23 nt, Artificial Sequence
  Synthetic
auguuucugguuugugugauuga

SEQ ID NO: 493363 - RNA, 24 nt, Artificial Sequence
  Synthetic
uauguuucugguuugugugauuga

SEQ ID NO: 493364 - RNA, 18 nt, Artificial Sequence
  Synthetic
aagggauggaaauauuga

SEQ ID NO: 493365 - RNA, 19 nt, Artificial Sequence
  Synthetic
aaagggauggaaauauuga

SEQ ID NO: 493366 - RNA, 20 nt, Artificial Sequence
  Synthetic
aaaagggauggaaauauuga

SEQ ID NO: 493367 - RNA, 21 nt, Artificial Sequence
  Synthetic
gaaaagggauggaaauauuga

SEQ ID NO: 493368 - RNA, 22 nt, Artificial Sequence
  Synthetic
ggaaaagggauggaaauauuga

SEQ ID NO: 493369 - RNA, 23 nt, Artificial Sequence
  Synthetic
uggaaaagggauggaaauauuga

SEQ ID NO: 493370 - RNA, 24 nt, Artificial Sequence
  Synthetic
auggaaaagggauggaaauauuga

SEQ ID NO: 493371 - RNA, 18 nt, Artificial Sequence
  Synthetic
gcuuuaucuuaauauuga

SEQ ID NO: 493372 - RNA, 19 nt, Artificial Sequence
  Synthetic
ugcuuuaucuuaauauuga

SEQ ID NO: 493373 - RNA, 20 nt, Artificial Sequence
  Synthetic
uugcuuuaucuuaauauuga

SEQ ID NO: 493374 - RNA, 21 nt, Artificial Sequence
  Synthetic
uuugcuuuaucuuaauauuga

SEQ ID NO: 493375 - RNA, 22 nt, Artificial Sequence
  Synthetic
uuuugcuuuaucuuaauauuga

SEQ ID NO: 493376 - RNA, 23 nt, Artificial Sequence
  Synthetic
auuuugcuuuaucuuaauauuga

SEQ ID NO: 493377 - RNA, 24 nt, Artificial Sequence
  Synthetic
cauuuugcuuuaucuuaauauuga

SEQ ID NO: 493378 - RNA, 18 nt, Artificial Sequence
  Synthetic
ucaauauaaauauauuga

SEQ ID NO: 493379 - RNA, 19 nt, Artificial Sequence
  Synthetic
cucaauauaaauauauuga

SEQ ID NO: 493380 - RNA, 20 nt, Artificial Sequence
  Synthetic
gcucaauauaaauauauuga

SEQ ID NO: 493381 - RNA, 21 nt, Artificial Sequence
  Synthetic
agcucaauauaaauauauuga

SEQ ID NO: 493382 - RNA, 22 nt, Artificial Sequence
  Synthetic
gagcucaauauaaauauauuga

SEQ ID NO: 493383 - RNA, 23 nt, Artificial Sequence
  Synthetic
ggagcucaauauaaauauauuga

SEQ ID NO: 493384 - RNA, 24 nt, Artificial Sequence
  Synthetic
aggagcucaauauaaauauauuga

SEQ ID NO: 493385 - RNA, 18 nt, Artificial Sequence
  Synthetic
aaccaagguauauauuga

SEQ ID NO: 493386 - RNA, 19 nt, Artificial Sequence
  Synthetic
aaaccaagguauauauuga

SEQ ID NO: 493387 - RNA, 20 nt, Artificial Sequence
  Synthetic
caaaccaagguauauauuga

SEQ ID NO: 493388 - RNA, 21 nt, Artificial Sequence
  Synthetic
ccaaaccaagguauauauuga

SEQ ID NO: 493389 - RNA, 22 nt, Artificial Sequence
  Synthetic
accaaaccaagguauauauuga

SEQ ID NO: 493390 - RNA, 23 nt, Artificial Sequence
  Synthetic
caccaaaccaagguauauauuga

SEQ ID NO: 493391 - RNA, 24 nt, Artificial Sequence
  Synthetic
ucaccaaaccaagguauauauuga

SEQ ID NO: 493392 - RNA, 18 nt, Artificial Sequence
  Synthetic
uguguggcccuauauuga

SEQ ID NO: 493393 - RNA, 19 nt, Artificial Sequence
  Synthetic
guguguggcccuauauuga

SEQ ID NO: 493394 - RNA, 20 nt, Artificial Sequence
  Synthetic
cguguguggcccuauauuga

SEQ ID NO: 493395 - RNA, 21 nt, Artificial Sequence
  Synthetic
ccguguguggcccuauauuga

SEQ ID NO: 493396 - RNA, 22 nt, Artificial Sequence
  Synthetic
uccguguguggcccuauauuga

SEQ ID NO: 493397 - RNA, 23 nt, Artificial Sequence
  Synthetic
guccguguguggcccuauauuga

SEQ ID NO: 493398 - RNA, 24 nt, Artificial Sequence
  Synthetic
aguccguguguggcccuauauuga

SEQ ID NO: 493399 - RNA, 18 nt, Artificial Sequence
  Synthetic
aaacuaaaugucuauuga

SEQ ID NO: 493400 - RNA, 19 nt, Artificial Sequence
  Synthetic
caaacuaaaugucuauuga

SEQ ID NO: 493401 - RNA, 20 nt, Artificial Sequence
  Synthetic
acaaacuaaaugucuauuga

SEQ ID NO: 493402 - RNA, 21 nt, Artificial Sequence
  Synthetic
aacaaacuaaaugucuauuga

SEQ ID NO: 493403 - RNA, 22 nt, Artificial Sequence
  Synthetic
gaacaaacuaaaugucuauuga

SEQ ID NO: 493404 - RNA, 23 nt, Artificial Sequence
  Synthetic
ugaacaaacuaaaugucuauuga

SEQ ID NO: 493405 - RNA, 24 nt, Artificial Sequence
  Synthetic
gugaacaaacuaaaugucuauuga

SEQ ID NO: 493406 - RNA, 21 nt, Artificial Sequence
  Synthetic
gauucccucuuuuucuauuga

SEQ ID NO: 493407 - RNA, 22 nt, Artificial Sequence
  Synthetic
ggauucccucuuuuucuauuga

SEQ ID NO: 493408 - RNA, 23 nt, Artificial Sequence
  Synthetic
aggauucccucuuuuucuauuga

SEQ ID NO: 493409 - RNA, 24 nt, Artificial Sequence
  Synthetic
gaggauucccucuuuuucuauuga

SEQ ID NO: 493410 - RNA, 18 nt, Artificial Sequence
  Synthetic
uguaaaacauaguauuga

SEQ ID NO: 493411 - RNA, 19 nt, Artificial Sequence
  Synthetic
auguaaaacauaguauuga

SEQ ID NO: 493412 - RNA, 20 nt, Artificial Sequence
  Synthetic
uauguaaaacauaguauuga

SEQ ID NO: 493413 - RNA, 21 nt, Artificial Sequence
  Synthetic
auauguaaaacauaguauuga

SEQ ID NO: 493414 - RNA, 22 nt, Artificial Sequence
  Synthetic
aauauguaaaacauaguauuga

SEQ ID NO: 493415 - RNA, 23 nt, Artificial Sequence
  Synthetic
aaauauguaaaacauaguauuga

SEQ ID NO: 493416 - RNA, 24 nt, Artificial Sequence
  Synthetic
uaaauauguaaaacauaguauuga

SEQ ID NO: 493417 - RNA, 18 nt, Artificial Sequence
  Synthetic
uaugaauauagguauuga

SEQ ID NO: 493418 - RNA, 19 nt, Artificial Sequence
  Synthetic
guaugaauauagguauuga

SEQ ID NO: 493419 - RNA, 20 nt, Artificial Sequence
  Synthetic
aguaugaauauagguauuga

SEQ ID NO: 493420 - RNA, 21 nt, Artificial Sequence
  Synthetic
gaguaugaauauagguauuga

SEQ ID NO: 493421 - RNA, 22 nt, Artificial Sequence
  Synthetic
ugaguaugaauauagguauuga

SEQ ID NO: 493422 - RNA, 23 nt, Artificial Sequence
  Synthetic
uugaguaugaauauagguauuga

SEQ ID NO: 493423 - RNA, 24 nt, Artificial Sequence
  Synthetic
cuugaguaugaauauagguauuga

SEQ ID NO: 493424 - RNA, 18 nt, Artificial Sequence
  Synthetic
cgauaaauuagguauuga

SEQ ID NO: 493425 - RNA, 19 nt, Artificial Sequence
  Synthetic
ucgauaaauuagguauuga

SEQ ID NO: 493426 - RNA, 20 nt, Artificial Sequence
  Synthetic
cucgauaaauuagguauuga

SEQ ID NO: 493427 - RNA, 21 nt, Artificial Sequence
  Synthetic
ucucgauaaauuagguauuga

SEQ ID NO: 493428 - RNA, 22 nt, Artificial Sequence
  Synthetic
cucucgauaaauuagguauuga

SEQ ID NO: 493429 - RNA, 23 nt, Artificial Sequence
  Synthetic
acucucgauaaauuagguauuga

SEQ ID NO: 493430 - RNA, 24 nt, Artificial Sequence
  Synthetic
aacucucgauaaauuagguauuga

SEQ ID NO: 493431 - RNA, 18 nt, Artificial Sequence
  Synthetic
uuagaaacugauuauuga

SEQ ID NO: 493432 - RNA, 19 nt, Artificial Sequence
  Synthetic
auuagaaacugauuauuga

SEQ ID NO: 493433 - RNA, 20 nt, Artificial Sequence
  Synthetic
gauuagaaacugauuauuga

SEQ ID NO: 493434 - RNA, 21 nt, Artificial Sequence
  Synthetic
ggauuagaaacugauuauuga

SEQ ID NO: 493435 - RNA, 22 nt, Artificial Sequence
  Synthetic
uggauuagaaacugauuauuga

SEQ ID NO: 493436 - RNA, 23 nt, Artificial Sequence
  Synthetic
uuggauuagaaacugauuauuga

SEQ ID NO: 493437 - RNA, 24 nt, Artificial Sequence
  Synthetic
uuuggauuagaaacugauuauuga

SEQ ID NO: 493438 - RNA, 18 nt, Artificial Sequence
  Synthetic
ucaauuaaugcuuauuga

SEQ ID NO: 493439 - RNA, 19 nt, Artificial Sequence
  Synthetic
cucaauuaaugcuuauuga

SEQ ID NO: 493440 - RNA, 20 nt, Artificial Sequence
  Synthetic
gcucaauuaaugcuuauuga

SEQ ID NO: 493441 - RNA, 21 nt, Artificial Sequence
  Synthetic
ugcucaauuaaugcuuauuga

SEQ ID NO: 493442 - RNA, 22 nt, Artificial Sequence
  Synthetic
gugcucaauuaaugcuuauuga

SEQ ID NO: 493443 - RNA, 23 nt, Artificial Sequence
  Synthetic
agugcucaauuaaugcuuauuga

SEQ ID NO: 493444 - RNA, 24 nt, Artificial Sequence
  Synthetic
aagugcucaauuaaugcuuauuga

SEQ ID NO: 493445 - RNA, 18 nt, Artificial Sequence
  Synthetic
aaccauaucaguuauuga

SEQ ID NO: 493446 - RNA, 19 nt, Artificial Sequence
  Synthetic
aaaccauaucaguuauuga

SEQ ID NO: 493447 - RNA, 20 nt, Artificial Sequence
  Synthetic
caaaccauaucaguuauuga

SEQ ID NO: 493448 - RNA, 21 nt, Artificial Sequence
  Synthetic
ccaaaccauaucaguuauuga

SEQ ID NO: 493449 - RNA, 22 nt, Artificial Sequence
  Synthetic
gccaaaccauaucaguuauuga

SEQ ID NO: 493450 - RNA, 23 nt, Artificial Sequence
  Synthetic
agccaaaccauaucaguuauuga

SEQ ID NO: 493451 - RNA, 24 nt, Artificial Sequence
  Synthetic
cagccaaaccauaucaguuauuga

SEQ ID NO: 493452 - RNA, 18 nt, Artificial Sequence
  Synthetic
caauaaacuaguuauuga

SEQ ID NO: 493453 - RNA, 19 nt, Artificial Sequence
  Synthetic
ucaauaaacuaguuauuga

SEQ ID NO: 493454 - RNA, 20 nt, Artificial Sequence
  Synthetic
cucaauaaacuaguuauuga

SEQ ID NO: 493455 - RNA, 21 nt, Artificial Sequence
  Synthetic
acucaauaaacuaguuauuga

SEQ ID NO: 493456 - RNA, 22 nt, Artificial Sequence
  Synthetic
cacucaauaaacuaguuauuga

SEQ ID NO: 493457 - RNA, 23 nt, Artificial Sequence
  Synthetic
acacucaauaaacuaguuauuga

SEQ ID NO: 493458 - RNA, 24 nt, Artificial Sequence
  Synthetic
aacacucaauaaacuaguuauuga

SEQ ID NO: 493459 - RNA, 18 nt, Artificial Sequence
  Synthetic
augcaucagaaaacuuga

SEQ ID NO: 493460 - RNA, 19 nt, Artificial Sequence
  Synthetic
uaugcaucagaaaacuuga

SEQ ID NO: 493461 - RNA, 20 nt, Artificial Sequence
  Synthetic
uuaugcaucagaaaacuuga

SEQ ID NO: 493462 - RNA, 21 nt, Artificial Sequence
  Synthetic
uuuaugcaucagaaaacuuga

SEQ ID NO: 493463 - RNA, 22 nt, Artificial Sequence
  Synthetic
uuuuaugcaucagaaaacuuga

SEQ ID NO: 493464 - RNA, 23 nt, Artificial Sequence
  Synthetic
uuuuuaugcaucagaaaacuuga

SEQ ID NO: 493465 - RNA, 24 nt, Artificial Sequence
  Synthetic
auuuuuaugcaucagaaaacuuga

SEQ ID NO: 493466 - RNA, 18 nt, Artificial Sequence
  Synthetic
agugguucucaaacuuga

SEQ ID NO: 493467 - RNA, 19 nt, Artificial Sequence
  Synthetic
cagugguucucaaacuuga

SEQ ID NO: 493468 - RNA, 20 nt, Artificial Sequence
  Synthetic
acagugguucucaaacuuga

SEQ ID NO: 493469 - RNA, 21 nt, Artificial Sequence
  Synthetic
uacagugguucucaaacuuga

SEQ ID NO: 493470 - RNA, 22 nt, Artificial Sequence
  Synthetic
guacagugguucucaaacuuga

SEQ ID NO: 493471 - RNA, 23 nt, Artificial Sequence
  Synthetic
aguacagugguucucaaacuuga

SEQ ID NO: 493472 - RNA, 24 nt, Artificial Sequence
  Synthetic
uaguacagugguucucaaacuuga

SEQ ID NO: 493473 - RNA, 18 nt, Artificial Sequence
  Synthetic
agugauugagaaacuuga

SEQ ID NO: 493474 - RNA, 19 nt, Artificial Sequence
  Synthetic
gagugauugagaaacuuga

SEQ ID NO: 493475 - RNA, 20 nt, Artificial Sequence
  Synthetic
ggagugauugagaaacuuga

SEQ ID NO: 493476 - RNA, 21 nt, Artificial Sequence
  Synthetic
uggagugauugagaaacuuga

SEQ ID NO: 493477 - RNA, 22 nt, Artificial Sequence
  Synthetic
cuggagugauugagaaacuuga

SEQ ID NO: 493478 - RNA, 23 nt, Artificial Sequence
  Synthetic
ccuggagugauugagaaacuuga

SEQ ID NO: 493479 - RNA, 24 nt, Artificial Sequence
  Synthetic
accuggagugauugagaaacuuga

SEQ ID NO: 493480 - RNA, 18 nt, Artificial Sequence
  Synthetic
ucuuuugcagcaacuuga

SEQ ID NO: 493481 - RNA, 19 nt, Artificial Sequence
  Synthetic
cucuuuugcagcaacuuga

SEQ ID NO: 493482 - RNA, 20 nt, Artificial Sequence
  Synthetic
ucucuuuugcagcaacuuga

SEQ ID NO: 493483 - RNA, 21 nt, Artificial Sequence
  Synthetic
aucucuuuugcagcaacuuga

SEQ ID NO: 493484 - RNA, 22 nt, Artificial Sequence
  Synthetic
aaucucuuuugcagcaacuuga

SEQ ID NO: 493485 - RNA, 23 nt, Artificial Sequence
  Synthetic
gaaucucuuuugcagcaacuuga

SEQ ID NO: 493486 - RNA, 24 nt, Artificial Sequence
  Synthetic
agaaucucuuuugcagcaacuuga

SEQ ID NO: 493487 - RNA, 18 nt, Artificial Sequence
  Synthetic
ggugcagcaggaacuuga

SEQ ID NO: 493488 - RNA, 19 nt, Artificial Sequence
  Synthetic
gggugcagcaggaacuuga

SEQ ID NO: 493489 - RNA, 20 nt, Artificial Sequence
  Synthetic
ugggugcagcaggaacuuga

SEQ ID NO: 493490 - RNA, 21 nt, Artificial Sequence
  Synthetic
cugggugcagcaggaacuuga

SEQ ID NO: 493491 - RNA, 22 nt, Artificial Sequence
  Synthetic
ucugggugcagcaggaacuuga

SEQ ID NO: 493492 - RNA, 23 nt, Artificial Sequence
  Synthetic
uucugggugcagcaggaacuuga

SEQ ID NO: 493493 - RNA, 24 nt, Artificial Sequence
  Synthetic
uuucugggugcagcaggaacuuga

SEQ ID NO: 493494 - RNA, 18 nt, Artificial Sequence
  Synthetic
aaguacagauuaacuuga

SEQ ID NO: 493495 - RNA, 19 nt, Artificial Sequence
  Synthetic
uaaguacagauuaacuuga

SEQ ID NO: 493496 - RNA, 20 nt, Artificial Sequence
  Synthetic
guaaguacagauuaacuuga

SEQ ID NO: 493497 - RNA, 21 nt, Artificial Sequence
  Synthetic
gguaaguacagauuaacuuga

SEQ ID NO: 493498 - RNA, 22 nt, Artificial Sequence
  Synthetic
ggguaaguacagauuaacuuga

SEQ ID NO: 493499 - RNA, 23 nt, Artificial Sequence
  Synthetic
uggguaaguacagauuaacuuga

SEQ ID NO: 493500 - RNA, 24 nt, Artificial Sequence
  Synthetic
uuggguaaguacagauuaacuuga

SEQ ID NO: 493501 - RNA, 18 nt, Artificial Sequence
  Synthetic
uccaugcccuuaacuuga

SEQ ID NO: 493502 - RNA, 19 nt, Artificial Sequence
  Synthetic
uuccaugcccuuaacuuga

SEQ ID NO: 493503 - RNA, 20 nt, Artificial Sequence
  Synthetic
uuuccaugcccuuaacuuga

SEQ ID NO: 493504 - RNA, 21 nt, Artificial Sequence
  Synthetic
auuuccaugcccuuaacuuga

SEQ ID NO: 493505 - RNA, 22 nt, Artificial Sequence
  Synthetic
uauuuccaugcccuuaacuuga

SEQ ID NO: 493506 - RNA, 23 nt, Artificial Sequence
  Synthetic
uuauuuccaugcccuuaacuuga

SEQ ID NO: 493507 - RNA, 24 nt, Artificial Sequence
  Synthetic
uuuauuuccaugcccuuaacuuga

SEQ ID NO: 493508 - RNA, 18 nt, Artificial Sequence
  Synthetic
ugcuaaauuuccacuuga

SEQ ID NO: 493509 - RNA, 19 nt, Artificial Sequence
  Synthetic
gugcuaaauuuccacuuga

SEQ ID NO: 493510 - RNA, 20 nt, Artificial Sequence
  Synthetic
ugugcuaaauuuccacuuga

SEQ ID NO: 493511 - RNA, 21 nt, Artificial Sequence
  Synthetic
augugcuaaauuuccacuuga

SEQ ID NO: 493512 - RNA, 22 nt, Artificial Sequence
  Synthetic
aaugugcuaaauuuccacuuga

SEQ ID NO: 493513 - RNA, 23 nt, Artificial Sequence
  Synthetic
gaaugugcuaaauuuccacuuga

SEQ ID NO: 493514 - RNA, 24 nt, Artificial Sequence
  Synthetic
agaaugugcuaaauuuccacuuga

SEQ ID NO: 493515 - RNA, 18 nt, Artificial Sequence
  Synthetic
ucaaaaguaagcacuuga

SEQ ID NO: 493516 - RNA, 19 nt, Artificial Sequence
  Synthetic
aucaaaaguaagcacuuga

SEQ ID NO: 493517 - RNA, 20 nt, Artificial Sequence
  Synthetic
uaucaaaaguaagcacuuga

SEQ ID NO: 493518 - RNA, 21 nt, Artificial Sequence
  Synthetic
guaucaaaaguaagcacuuga

SEQ ID NO: 493519 - RNA, 22 nt, Artificial Sequence
  Synthetic
gguaucaaaaguaagcacuuga

SEQ ID NO: 493520 - RNA, 23 nt, Artificial Sequence
  Synthetic
agguaucaaaaguaagcacuuga

SEQ ID NO: 493521 - RNA, 24 nt, Artificial Sequence
  Synthetic
gagguaucaaaaguaagcacuuga

SEQ ID NO: 493522 - RNA, 18 nt, Artificial Sequence
  Synthetic
caaaaugaagcgacuuga

SEQ ID NO: 493523 - RNA, 19 nt, Artificial Sequence
  Synthetic
ucaaaaugaagcgacuuga

SEQ ID NO: 493524 - RNA, 20 nt, Artificial Sequence
  Synthetic
aucaaaaugaagcgacuuga

SEQ ID NO: 493525 - RNA, 21 nt, Artificial Sequence
  Synthetic
uaucaaaaugaagcgacuuga

SEQ ID NO: 493526 - RNA, 22 nt, Artificial Sequence
  Synthetic
cuaucaaaaugaagcgacuuga

SEQ ID NO: 493527 - RNA, 23 nt, Artificial Sequence
  Synthetic
ucuaucaaaaugaagcgacuuga

SEQ ID NO: 493528 - RNA, 24 nt, Artificial Sequence
  Synthetic
gucuaucaaaaugaagcgacuuga

SEQ ID NO: 493529 - RNA, 18 nt, Artificial Sequence
  Synthetic
aggacuggcaggacuuga

SEQ ID NO: 493530 - RNA, 19 nt, Artificial Sequence
  Synthetic
aaggacuggcaggacuuga

SEQ ID NO: 493531 - RNA, 20 nt, Artificial Sequence
  Synthetic
aaaggacuggcaggacuuga

SEQ ID NO: 493532 - RNA, 21 nt, Artificial Sequence
  Synthetic
uaaaggacuggcaggacuuga

SEQ ID NO: 493533 - RNA, 22 nt, Artificial Sequence
  Synthetic
auaaaggacuggcaggacuuga

SEQ ID NO: 493534 - RNA, 23 nt, Artificial Sequence
  Synthetic
gauaaaggacuggcaggacuuga

SEQ ID NO: 493535 - RNA, 24 nt, Artificial Sequence
  Synthetic
ggauaaaggacuggcaggacuuga

SEQ ID NO: 493536 - RNA, 18 nt, Artificial Sequence
  Synthetic
uauauauaugggacuuga

SEQ ID NO: 493537 - RNA, 19 nt, Artificial Sequence
  Synthetic
auauauauaugggacuuga

SEQ ID NO: 493538 - RNA, 20 nt, Artificial Sequence
  Synthetic
uauauauauaugggacuuga

SEQ ID NO: 493539 - RNA, 21 nt, Artificial Sequence
  Synthetic
uuauauauauaugggacuuga

SEQ ID NO: 493540 - RNA, 22 nt, Artificial Sequence
  Synthetic
uuuauauauauaugggacuuga

SEQ ID NO: 493541 - RNA, 23 nt, Artificial Sequence
  Synthetic
cuuuauauauauaugggacuuga

SEQ ID NO: 493542 - RNA, 24 nt, Artificial Sequence
  Synthetic
acuuuauauauauaugggacuuga

SEQ ID NO: 493543 - RNA, 18 nt, Artificial Sequence
  Synthetic
aacauucuaauuacuuga

SEQ ID NO: 493544 - RNA, 19 nt, Artificial Sequence
  Synthetic
aaacauucuaauuacuuga

SEQ ID NO: 493545 - RNA, 20 nt, Artificial Sequence
  Synthetic
gaaacauucuaauuacuuga

SEQ ID NO: 493546 - RNA, 21 nt, Artificial Sequence
  Synthetic
agaaacauucuaauuacuuga

SEQ ID NO: 493547 - RNA, 22 nt, Artificial Sequence
  Synthetic
uagaaacauucuaauuacuuga

SEQ ID NO: 493548 - RNA, 23 nt, Artificial Sequence
  Synthetic
cuagaaacauucuaauuacuuga

SEQ ID NO: 493549 - RNA, 24 nt, Artificial Sequence
  Synthetic
gcuagaaacauucuaauuacuuga

SEQ ID NO: 493550 - RNA, 18 nt, Artificial Sequence
  Synthetic
gacauugucuuuacuuga

SEQ ID NO: 493551 - RNA, 19 nt, Artificial Sequence
  Synthetic
agacauugucuuuacuuga

SEQ ID NO: 493552 - RNA, 20 nt, Artificial Sequence
  Synthetic
cagacauugucuuuacuuga

SEQ ID NO: 493553 - RNA, 21 nt, Artificial Sequence
  Synthetic
acagacauugucuuuacuuga

SEQ ID NO: 493554 - RNA, 22 nt, Artificial Sequence
  Synthetic
cacagacauugucuuuacuuga

SEQ ID NO: 493555 - RNA, 23 nt, Artificial Sequence
  Synthetic
acacagacauugucuuuacuuga

SEQ ID NO: 493556 - RNA, 24 nt, Artificial Sequence
  Synthetic
aacacagacauugucuuuacuuga

SEQ ID NO: 493557 - RNA, 18 nt, Artificial Sequence
  Synthetic
acacuuuaguaaccuuga

SEQ ID NO: 493558 - RNA, 19 nt, Artificial Sequence
  Synthetic
cacacuuuaguaaccuuga

SEQ ID NO: 493559 - RNA, 20 nt, Artificial Sequence
  Synthetic
gcacacuuuaguaaccuuga

SEQ ID NO: 493560 - RNA, 21 nt, Artificial Sequence
  Synthetic
ugcacacuuuaguaaccuuga

SEQ ID NO: 493561 - RNA, 22 nt, Artificial Sequence
  Synthetic
augcacacuuuaguaaccuuga

SEQ ID NO: 493562 - RNA, 23 nt, Artificial Sequence
  Synthetic
caugcacacuuuaguaaccuuga

SEQ ID NO: 493563 - RNA, 24 nt, Artificial Sequence
  Synthetic
acaugcacacuuuaguaaccuuga

SEQ ID NO: 493564 - RNA, 18 nt, Artificial Sequence
  Synthetic
uauauguuacgaccuuga

SEQ ID NO: 493565 - RNA, 19 nt, Artificial Sequence
  Synthetic
auauauguuacgaccuuga

SEQ ID NO: 493566 - RNA, 20 nt, Artificial Sequence
  Synthetic
gauauauguuacgaccuuga

SEQ ID NO: 493567 - RNA, 21 nt, Artificial Sequence
  Synthetic
agauauauguuacgaccuuga

SEQ ID NO: 493568 - RNA, 22 nt, Artificial Sequence
  Synthetic
uagauauauguuacgaccuuga

SEQ ID NO: 493569 - RNA, 23 nt, Artificial Sequence
  Synthetic
cuagauauauguuacgaccuuga

SEQ ID NO: 493570 - RNA, 24 nt, Artificial Sequence
  Synthetic
ccuagauauauguuacgaccuuga

SEQ ID NO: 493571 - RNA, 18 nt, Artificial Sequence
  Synthetic
uggcuuguucuaccuuga

SEQ ID NO: 493572 - RNA, 19 nt, Artificial Sequence
  Synthetic
auggcuuguucuaccuuga

SEQ ID NO: 493573 - RNA, 20 nt, Artificial Sequence
  Synthetic
cauggcuuguucuaccuuga

SEQ ID NO: 493574 - RNA, 21 nt, Artificial Sequence
  Synthetic
ccauggcuuguucuaccuuga

SEQ ID NO: 493575 - RNA, 22 nt, Artificial Sequence
  Synthetic
uccauggcuuguucuaccuuga

SEQ ID NO: 493576 - RNA, 23 nt, Artificial Sequence
  Synthetic
uuccauggcuuguucuaccuuga

SEQ ID NO: 493577 - RNA, 24 nt, Artificial Sequence
  Synthetic
uuuccauggcuuguucuaccuuga

SEQ ID NO: 493578 - RNA, 18 nt, Artificial Sequence
  Synthetic
augguuggagccccuuga

SEQ ID NO: 493579 - RNA, 19 nt, Artificial Sequence
  Synthetic
aaugguuggagccccuuga

SEQ ID NO: 493580 - RNA, 20 nt, Artificial Sequence
  Synthetic
gaaugguuggagccccuuga

SEQ ID NO: 493581 - RNA, 21 nt, Artificial Sequence
  Synthetic
agaaugguuggagccccuuga

SEQ ID NO: 493582 - RNA, 22 nt, Artificial Sequence
  Synthetic
gagaaugguuggagccccuuga

SEQ ID NO: 493583 - RNA, 23 nt, Artificial Sequence
  Synthetic
cgagaaugguuggagccccuuga

SEQ ID NO: 493584 - RNA, 24 nt, Artificial Sequence
  Synthetic
acgagaaugguuggagccccuuga

SEQ ID NO: 493585 - RNA, 18 nt, Artificial Sequence
  Synthetic
uucucaugucucccuuga

SEQ ID NO: 493586 - RNA, 19 nt, Artificial Sequence
  Synthetic
auucucaugucucccuuga

SEQ ID NO: 493587 - RNA, 20 nt, Artificial Sequence
  Synthetic
uauucucaugucucccuuga

SEQ ID NO: 493588 - RNA, 21 nt, Artificial Sequence
  Synthetic
auauucucaugucucccuuga

SEQ ID NO: 493589 - RNA, 22 nt, Artificial Sequence
  Synthetic
aauauucucaugucucccuuga

SEQ ID NO: 493590 - RNA, 23 nt, Artificial Sequence
  Synthetic
gaauauucucaugucucccuuga

SEQ ID NO: 493591 - RNA, 24 nt, Artificial Sequence
  Synthetic
ggaauauucucaugucucccuuga

SEQ ID NO: 493592 - RNA, 18 nt, Artificial Sequence
  Synthetic
aguucauuuucgccuuga

SEQ ID NO: 493593 - RNA, 19 nt, Artificial Sequence
  Synthetic
uaguucauuuucgccuuga

SEQ ID NO: 493594 - RNA, 20 nt, Artificial Sequence
  Synthetic
auaguucauuuucgccuuga

SEQ ID NO: 493595 - RNA, 21 nt, Artificial Sequence
  Synthetic
uauaguucauuuucgccuuga

SEQ ID NO: 493596 - RNA, 22 nt, Artificial Sequence
  Synthetic
uuauaguucauuuucgccuuga

SEQ ID NO: 493597 - RNA, 23 nt, Artificial Sequence
  Synthetic
auuauaguucauuuucgccuuga

SEQ ID NO: 493598 - RNA, 24 nt, Artificial Sequence
  Synthetic
gauuauaguucauuuucgccuuga

SEQ ID NO: 493599 - RNA, 18 nt, Artificial Sequence
  Synthetic
ucaaagacagggccuuga

SEQ ID NO: 493600 - RNA, 19 nt, Artificial Sequence
  Synthetic
uucaaagacagggccuuga

SEQ ID NO: 493601 - RNA, 20 nt, Artificial Sequence
  Synthetic
guucaaagacagggccuuga

SEQ ID NO: 493602 - RNA, 21 nt, Artificial Sequence
  Synthetic
uguucaaagacagggccuuga

SEQ ID NO: 493603 - RNA, 22 nt, Artificial Sequence
  Synthetic
cuguucaaagacagggccuuga

SEQ ID NO: 493604 - RNA, 23 nt, Artificial Sequence
  Synthetic
ccuguucaaagacagggccuuga

SEQ ID NO: 493605 - RNA, 24 nt, Artificial Sequence
  Synthetic
gccuguucaaagacagggccuuga

SEQ ID NO: 493606 - RNA, 18 nt, Artificial Sequence
  Synthetic
acuauaugagcuccuuga

SEQ ID NO: 493607 - RNA, 19 nt, Artificial Sequence
  Synthetic
uacuauaugagcuccuuga

SEQ ID NO: 493608 - RNA, 20 nt, Artificial Sequence
  Synthetic
uuacuauaugagcuccuuga

SEQ ID NO: 493609 - RNA, 21 nt, Artificial Sequence
  Synthetic
auuacuauaugagcuccuuga

SEQ ID NO: 493610 - RNA, 22 nt, Artificial Sequence
  Synthetic
cauuacuauaugagcuccuuga

SEQ ID NO: 493611 - RNA, 23 nt, Artificial Sequence
  Synthetic
ccauuacuauaugagcuccuuga

SEQ ID NO: 493612 - RNA, 24 nt, Artificial Sequence
  Synthetic
cccauuacuauaugagcuccuuga

SEQ ID NO: 493613 - RNA, 18 nt, Artificial Sequence
  Synthetic
agcaaaguuucuccuuga

SEQ ID NO: 493614 - RNA, 19 nt, Artificial Sequence
  Synthetic
gagcaaaguuucuccuuga

SEQ ID NO: 493615 - RNA, 20 nt, Artificial Sequence
  Synthetic
ugagcaaaguuucuccuuga

SEQ ID NO: 493616 - RNA, 21 nt, Artificial Sequence
  Synthetic
cugagcaaaguuucuccuuga

SEQ ID NO: 493617 - RNA, 22 nt, Artificial Sequence
  Synthetic
ucugagcaaaguuucuccuuga

SEQ ID NO: 493618 - RNA, 23 nt, Artificial Sequence
  Synthetic
cucugagcaaaguuucuccuuga

SEQ ID NO: 493619 - RNA, 24 nt, Artificial Sequence
  Synthetic
ucucugagcaaaguuucuccuuga

SEQ ID NO: 493620 - RNA, 18 nt, Artificial Sequence
  Synthetic
uuggaauagauuccuuga

SEQ ID NO: 493621 - RNA, 19 nt, Artificial Sequence
  Synthetic
uuuggaauagauuccuuga

SEQ ID NO: 493622 - RNA, 20 nt, Artificial Sequence
  Synthetic
cuuuggaauagauuccuuga

SEQ ID NO: 493623 - RNA, 21 nt, Artificial Sequence
  Synthetic
ucuuuggaauagauuccuuga

SEQ ID NO: 493624 - RNA, 22 nt, Artificial Sequence
  Synthetic
aucuuuggaauagauuccuuga

SEQ ID NO: 493625 - RNA, 23 nt, Artificial Sequence
  Synthetic
aaucuuuggaauagauuccuuga

SEQ ID NO: 493626 - RNA, 24 nt, Artificial Sequence
  Synthetic
gaaucuuuggaauagauuccuuga

SEQ ID NO: 493627 - RNA, 18 nt, Artificial Sequence
  Synthetic
gaaaggagcccagcuuga

SEQ ID NO: 493628 - RNA, 19 nt, Artificial Sequence
  Synthetic
ugaaaggagcccagcuuga

SEQ ID NO: 493629 - RNA, 20 nt, Artificial Sequence
  Synthetic
augaaaggagcccagcuuga

SEQ ID NO: 493630 - RNA, 21 nt, Artificial Sequence
  Synthetic
caugaaaggagcccagcuuga

SEQ ID NO: 493631 - RNA, 22 nt, Artificial Sequence
  Synthetic
gcaugaaaggagcccagcuuga

SEQ ID NO: 493632 - RNA, 23 nt, Artificial Sequence
  Synthetic
ggcaugaaaggagcccagcuuga

SEQ ID NO: 493633 - RNA, 24 nt, Artificial Sequence
  Synthetic
cggcaugaaaggagcccagcuuga

SEQ ID NO: 493634 - RNA, 21 nt, Artificial Sequence
  Synthetic
agaaagucaaugguagcuuga

SEQ ID NO: 493635 - RNA, 22 nt, Artificial Sequence
  Synthetic
aagaaagucaaugguagcuuga

SEQ ID NO: 493636 - RNA, 23 nt, Artificial Sequence
  Synthetic
gaagaaagucaaugguagcuuga

SEQ ID NO: 493637 - RNA, 24 nt, Artificial Sequence
  Synthetic
ugaagaaagucaaugguagcuuga

SEQ ID NO: 493638 - RNA, 21 nt, Artificial Sequence
  Synthetic
agaaaggcauugguagcuuga

SEQ ID NO: 493639 - RNA, 22 nt, Artificial Sequence
  Synthetic
aagaaaggcauugguagcuuga

SEQ ID NO: 493640 - RNA, 23 nt, Artificial Sequence
  Synthetic
gaagaaaggcauugguagcuuga

SEQ ID NO: 493641 - RNA, 24 nt, Artificial Sequence
  Synthetic
ugaagaaaggcauugguagcuuga

SEQ ID NO: 493642 - RNA, 18 nt, Artificial Sequence
  Synthetic
uaauuuaaauuagcuuga

SEQ ID NO: 493643 - RNA, 19 nt, Artificial Sequence
  Synthetic
cuaauuuaaauuagcuuga

SEQ ID NO: 493644 - RNA, 20 nt, Artificial Sequence
  Synthetic
ucuaauuuaaauuagcuuga

SEQ ID NO: 493645 - RNA, 21 nt, Artificial Sequence
  Synthetic
aucuaauuuaaauuagcuuga

SEQ ID NO: 493646 - RNA, 22 nt, Artificial Sequence
  Synthetic
uaucuaauuuaaauuagcuuga

SEQ ID NO: 493647 - RNA, 23 nt, Artificial Sequence
  Synthetic
uuaucuaauuuaaauuagcuuga

SEQ ID NO: 493648 - RNA, 24 nt, Artificial Sequence
  Synthetic
uuuaucuaauuuaaauuagcuuga

SEQ ID NO: 493649 - RNA, 18 nt, Artificial Sequence
  Synthetic
uauagaggcuacgcuuga

SEQ ID NO: 493650 - RNA, 19 nt, Artificial Sequence
  Synthetic
auauagaggcuacgcuuga

SEQ ID NO: 493651 - RNA, 20 nt, Artificial Sequence
  Synthetic
uauauagaggcuacgcuuga

SEQ ID NO: 493652 - RNA, 21 nt, Artificial Sequence
  Synthetic
guauauagaggcuacgcuuga

SEQ ID NO: 493653 - RNA, 22 nt, Artificial Sequence
  Synthetic
aguauauagaggcuacgcuuga

SEQ ID NO: 493654 - RNA, 23 nt, Artificial Sequence
  Synthetic
caguauauagaggcuacgcuuga

SEQ ID NO: 493655 - RNA, 24 nt, Artificial Sequence
  Synthetic
acaguauauagaggcuacgcuuga

SEQ ID NO: 493656 - RNA, 18 nt, Artificial Sequence
  Synthetic
gccacaacauaugcuuga

SEQ ID NO: 493657 - RNA, 19 nt, Artificial Sequence
  Synthetic
ugccacaacauaugcuuga

SEQ ID NO: 493658 - RNA, 20 nt, Artificial Sequence
  Synthetic
cugccacaacauaugcuuga

SEQ ID NO: 493659 - RNA, 21 nt, Artificial Sequence
  Synthetic
ucugccacaacauaugcuuga

SEQ ID NO: 493660 - RNA, 22 nt, Artificial Sequence
  Synthetic
cucugccacaacauaugcuuga

SEQ ID NO: 493661 - RNA, 23 nt, Artificial Sequence
  Synthetic
ucucugccacaacauaugcuuga

SEQ ID NO: 493662 - RNA, 24 nt, Artificial Sequence
  Synthetic
gucucugccacaacauaugcuuga

SEQ ID NO: 493663 - RNA, 18 nt, Artificial Sequence
  Synthetic
gauguguugaaaucuuga

SEQ ID NO: 493664 - RNA, 19 nt, Artificial Sequence
  Synthetic
agauguguugaaaucuuga

SEQ ID NO: 493665 - RNA, 20 nt, Artificial Sequence
  Synthetic
aagauguguugaaaucuuga

SEQ ID NO: 493666 - RNA, 21 nt, Artificial Sequence
  Synthetic
aaagauguguugaaaucuuga

SEQ ID NO: 493667 - RNA, 22 nt, Artificial Sequence
  Synthetic
aaaagauguguugaaaucuuga

SEQ ID NO: 493668 - RNA, 23 nt, Artificial Sequence
  Synthetic
aaaaagauguguugaaaucuuga

SEQ ID NO: 493669 - RNA, 24 nt, Artificial Sequence
  Synthetic
gaaaaagauguguugaaaucuuga

SEQ ID NO: 493670 - RNA, 18 nt, Artificial Sequence
  Synthetic
ucauucagagaaucuuga

SEQ ID NO: 493671 - RNA, 19 nt, Artificial Sequence
  Synthetic
uucauucagagaaucuuga

SEQ ID NO: 493672 - RNA, 20 nt, Artificial Sequence
  Synthetic
auucauucagagaaucuuga

SEQ ID NO: 493673 - RNA, 21 nt, Artificial Sequence
  Synthetic
uauucauucagagaaucuuga

SEQ ID NO: 493674 - RNA, 22 nt, Artificial Sequence
  Synthetic
uuauucauucagagaaucuuga

SEQ ID NO: 493675 - RNA, 23 nt, Artificial Sequence
  Synthetic
uuuauucauucagagaaucuuga

SEQ ID NO: 493676 - RNA, 24 nt, Artificial Sequence
  Synthetic
auuuauucauucagagaaucuuga

SEQ ID NO: 493677 - RNA, 18 nt, Artificial Sequence
  Synthetic
agacagaaagcaucuuga

SEQ ID NO: 493678 - RNA, 19 nt, Artificial Sequence
  Synthetic
aagacagaaagcaucuuga

SEQ ID NO: 493679 - RNA, 20 nt, Artificial Sequence
  Synthetic
aaagacagaaagcaucuuga

SEQ ID NO: 493680 - RNA, 21 nt, Artificial Sequence
  Synthetic
uaaagacagaaagcaucuuga

SEQ ID NO: 493681 - RNA, 22 nt, Artificial Sequence
  Synthetic
uuaaagacagaaagcaucuuga

SEQ ID NO: 493682 - RNA, 23 nt, Artificial Sequence
  Synthetic
uuuaaagacagaaagcaucuuga

SEQ ID NO: 493683 - RNA, 24 nt, Artificial Sequence
  Synthetic
uuuuaaagacagaaagcaucuuga

SEQ ID NO: 493684 - RNA, 18 nt, Artificial Sequence
  Synthetic
agggacaagaccucuuga

SEQ ID NO: 493685 - RNA, 19 nt, Artificial Sequence
  Synthetic
cagggacaagaccucuuga

SEQ ID NO: 493686 - RNA, 20 nt, Artificial Sequence
  Synthetic
gcagggacaagaccucuuga

SEQ ID NO: 493687 - RNA, 21 nt, Artificial Sequence
  Synthetic
ugcagggacaagaccucuuga

SEQ ID NO: 493688 - RNA, 22 nt, Artificial Sequence
  Synthetic
cugcagggacaagaccucuuga

SEQ ID NO: 493689 - RNA, 23 nt, Artificial Sequence
  Synthetic
gcugcagggacaagaccucuuga

SEQ ID NO: 493690 - RNA, 24 nt, Artificial Sequence
  Synthetic
ggcugcagggacaagaccucuuga

SEQ ID NO: 493691 - RNA, 18 nt, Artificial Sequence
  Synthetic
auuuauaccugcucuuga

SEQ ID NO: 493692 - RNA, 19 nt, Artificial Sequence
  Synthetic
aauuuauaccugcucuuga

SEQ ID NO: 493693 - RNA, 20 nt, Artificial Sequence
  Synthetic
uaauuuauaccugcucuuga

SEQ ID NO: 493694 - RNA, 21 nt, Artificial Sequence
  Synthetic
uuaauuuauaccugcucuuga

SEQ ID NO: 493695 - RNA, 22 nt, Artificial Sequence
  Synthetic
uuuaauuuauaccugcucuuga

SEQ ID NO: 493696 - RNA, 23 nt, Artificial Sequence
  Synthetic
uuuuaauuuauaccugcucuuga

SEQ ID NO: 493697 - RNA, 24 nt, Artificial Sequence
  Synthetic
uuuuuaauuuauaccugcucuuga

SEQ ID NO: 493698 - RNA, 18 nt, Artificial Sequence
  Synthetic
uccaggcuugucucuuga

SEQ ID NO: 493699 - RNA, 19 nt, Artificial Sequence
  Synthetic
uuccaggcuugucucuuga

SEQ ID NO: 493700 - RNA, 20 nt, Artificial Sequence
  Synthetic
uuuccaggcuugucucuuga

SEQ ID NO: 493701 - RNA, 21 nt, Artificial Sequence
  Synthetic
auuuccaggcuugucucuuga

SEQ ID NO: 493702 - RNA, 22 nt, Artificial Sequence
  Synthetic
cauuuccaggcuugucucuuga

SEQ ID NO: 493703 - RNA, 23 nt, Artificial Sequence
  Synthetic
gcauuuccaggcuugucucuuga

SEQ ID NO: 493704 - RNA, 24 nt, Artificial Sequence
  Synthetic
agcauuuccaggcuugucucuuga

SEQ ID NO: 493705 - RNA, 18 nt, Artificial Sequence
  Synthetic
aaagauaacuucucuuga

SEQ ID NO: 493706 - RNA, 19 nt, Artificial Sequence
  Synthetic
caaagauaacuucucuuga

SEQ ID NO: 493707 - RNA, 20 nt, Artificial Sequence
  Synthetic
gcaaagauaacuucucuuga

SEQ ID NO: 493708 - RNA, 21 nt, Artificial Sequence
  Synthetic
agcaaagauaacuucucuuga

SEQ ID NO: 493709 - RNA, 22 nt, Artificial Sequence
  Synthetic
gagcaaagauaacuucucuuga

SEQ ID NO: 493710 - RNA, 23 nt, Artificial Sequence
  Synthetic
ugagcaaagauaacuucucuuga

SEQ ID NO: 493711 - RNA, 24 nt, Artificial Sequence
  Synthetic
cugagcaaagauaacuucucuuga

SEQ ID NO: 493712 - RNA, 18 nt, Artificial Sequence
  Synthetic
gaagauaggcagucuuga

SEQ ID NO: 493713 - RNA, 19 nt, Artificial Sequence
  Synthetic
ggaagauaggcagucuuga

SEQ ID NO: 493714 - RNA, 20 nt, Artificial Sequence
  Synthetic
gggaagauaggcagucuuga

SEQ ID NO: 493715 - RNA, 21 nt, Artificial Sequence
  Synthetic
ugggaagauaggcagucuuga

SEQ ID NO: 493716 - RNA, 22 nt, Artificial Sequence
  Synthetic
augggaagauaggcagucuuga

SEQ ID NO: 493717 - RNA, 23 nt, Artificial Sequence
  Synthetic
caugggaagauaggcagucuuga

SEQ ID NO: 493718 - RNA, 24 nt, Artificial Sequence
  Synthetic
acaugggaagauaggcagucuuga

SEQ ID NO: 493719 - RNA, 18 nt, Artificial Sequence
  Synthetic
gauuguggugggucuuga

SEQ ID NO: 493720 - RNA, 19 nt, Artificial Sequence
  Synthetic
agauuguggugggucuuga

SEQ ID NO: 493721 - RNA, 20 nt, Artificial Sequence
  Synthetic
aagauuguggugggucuuga

SEQ ID NO: 493722 - RNA, 21 nt, Artificial Sequence
  Synthetic
caagauuguggugggucuuga

SEQ ID NO: 493723 - RNA, 22 nt, Artificial Sequence
  Synthetic
ucaagauuguggugggucuuga

SEQ ID NO: 493724 - RNA, 23 nt, Artificial Sequence
  Synthetic
aucaagauuguggugggucuuga

SEQ ID NO: 493725 - RNA, 24 nt, Artificial Sequence
  Synthetic
gaucaagauuguggugggucuuga

SEQ ID NO: 493726 - RNA, 18 nt, Artificial Sequence
  Synthetic
gaaggaggagauucuuga

SEQ ID NO: 493727 - RNA, 19 nt, Artificial Sequence
  Synthetic
agaaggaggagauucuuga

SEQ ID NO: 493728 - RNA, 20 nt, Artificial Sequence
  Synthetic
uagaaggaggagauucuuga

SEQ ID NO: 493729 - RNA, 21 nt, Artificial Sequence
  Synthetic
auagaaggaggagauucuuga

SEQ ID NO: 493730 - RNA, 22 nt, Artificial Sequence
  Synthetic
uauagaaggaggagauucuuga

SEQ ID NO: 493731 - RNA, 23 nt, Artificial Sequence
  Synthetic
guauagaaggaggagauucuuga

SEQ ID NO: 493732 - RNA, 24 nt, Artificial Sequence
  Synthetic
aguauagaaggaggagauucuuga

SEQ ID NO: 493733 - RNA, 18 nt, Artificial Sequence
  Synthetic
aaggaaagugauucuuga

SEQ ID NO: 493734 - RNA, 19 nt, Artificial Sequence
  Synthetic
gaaggaaagugauucuuga

SEQ ID NO: 493735 - RNA, 20 nt, Artificial Sequence
  Synthetic
agaaggaaagugauucuuga

SEQ ID NO: 493736 - RNA, 21 nt, Artificial Sequence
  Synthetic
cagaaggaaagugauucuuga

SEQ ID NO: 493737 - RNA, 22 nt, Artificial Sequence
  Synthetic
acagaaggaaagugauucuuga

SEQ ID NO: 493738 - RNA, 23 nt, Artificial Sequence
  Synthetic
cacagaaggaaagugauucuuga

SEQ ID NO: 493739 - RNA, 24 nt, Artificial Sequence
  Synthetic
ccacagaaggaaagugauucuuga

SEQ ID NO: 493740 - RNA, 18 nt, Artificial Sequence
  Synthetic
ccuagaauagcuucuuga

SEQ ID NO: 493741 - RNA, 19 nt, Artificial Sequence
  Synthetic
uccuagaauagcuucuuga

SEQ ID NO: 493742 - RNA, 20 nt, Artificial Sequence
  Synthetic
auccuagaauagcuucuuga

SEQ ID NO: 493743 - RNA, 21 nt, Artificial Sequence
  Synthetic
gauccuagaauagcuucuuga

SEQ ID NO: 493744 - RNA, 22 nt, Artificial Sequence
  Synthetic
agauccuagaauagcuucuuga

SEQ ID NO: 493745 - RNA, 23 nt, Artificial Sequence
  Synthetic
aagauccuagaauagcuucuuga

SEQ ID NO: 493746 - RNA, 24 nt, Artificial Sequence
  Synthetic
aaagauccuagaauagcuucuuga

SEQ ID NO: 493747 - RNA, 18 nt, Artificial Sequence
  Synthetic
cauaaaaaaaguucuuga

SEQ ID NO: 493748 - RNA, 19 nt, Artificial Sequence
  Synthetic
ucauaaaaaaaguucuuga

SEQ ID NO: 493749 - RNA, 20 nt, Artificial Sequence
  Synthetic
uucauaaaaaaaguucuuga

SEQ ID NO: 493750 - RNA, 21 nt, Artificial Sequence
  Synthetic
cuucauaaaaaaaguucuuga

SEQ ID NO: 493751 - RNA, 22 nt, Artificial Sequence
  Synthetic
ucuucauaaaaaaaguucuuga

SEQ ID NO: 493752 - RNA, 23 nt, Artificial Sequence
  Synthetic
cucuucauaaaaaaaguucuuga

SEQ ID NO: 493753 - RNA, 24 nt, Artificial Sequence
  Synthetic
gcucuucauaaaaaaaguucuuga

SEQ ID NO: 493754 - RNA, 18 nt, Artificial Sequence
  Synthetic
ucgugagcauaaaguuga

SEQ ID NO: 493755 - RNA, 19 nt, Artificial Sequence
  Synthetic
uucgugagcauaaaguuga

SEQ ID NO: 493756 - RNA, 20 nt, Artificial Sequence
  Synthetic
auucgugagcauaaaguuga

SEQ ID NO: 493757 - RNA, 21 nt, Artificial Sequence
  Synthetic
cauucgugagcauaaaguuga

SEQ ID NO: 493758 - RNA, 22 nt, Artificial Sequence
  Synthetic
acauucgugagcauaaaguuga

SEQ ID NO: 493759 - RNA, 23 nt, Artificial Sequence
  Synthetic
cacauucgugagcauaaaguuga

SEQ ID NO: 493760 - RNA, 24 nt, Artificial Sequence
  Synthetic
acacauucgugagcauaaaguuga

SEQ ID NO: 493761 - RNA, 18 nt, Artificial Sequence
  Synthetic
uuguggcagccaaguuga

SEQ ID NO: 493762 - RNA, 19 nt, Artificial Sequence
  Synthetic
auuguggcagccaaguuga

SEQ ID NO: 493763 - RNA, 20 nt, Artificial Sequence
  Synthetic
gauuguggcagccaaguuga

SEQ ID NO: 493764 - RNA, 21 nt, Artificial Sequence
  Synthetic
ugauuguggcagccaaguuga

SEQ ID NO: 493765 - RNA, 22 nt, Artificial Sequence
  Synthetic
cugauuguggcagccaaguuga

SEQ ID NO: 493766 - RNA, 23 nt, Artificial Sequence
  Synthetic
ucugauuguggcagccaaguuga

SEQ ID NO: 493767 - RNA, 24 nt, Artificial Sequence
  Synthetic
uucugauuguggcagccaaguuga

SEQ ID NO: 493768 - RNA, 18 nt, Artificial Sequence
  Synthetic
agauguguaagaaguuga

SEQ ID NO: 493769 - RNA, 19 nt, Artificial Sequence
  Synthetic
gagauguguaagaaguuga

SEQ ID NO: 493770 - RNA, 20 nt, Artificial Sequence
  Synthetic
ugagauguguaagaaguuga

SEQ ID NO: 493771 - RNA, 21 nt, Artificial Sequence
  Synthetic
augagauguguaagaaguuga

SEQ ID NO: 493772 - RNA, 22 nt, Artificial Sequence
  Synthetic
aaugagauguguaagaaguuga

SEQ ID NO: 493773 - RNA, 23 nt, Artificial Sequence
  Synthetic
aaaugagauguguaagaaguuga

SEQ ID NO: 493774 - RNA, 24 nt, Artificial Sequence
  Synthetic
gaaaugagauguguaagaaguuga

SEQ ID NO: 493775 - RNA, 18 nt, Artificial Sequence
  Synthetic
auaaaagacagaaguuga

SEQ ID NO: 493776 - RNA, 19 nt, Artificial Sequence
  Synthetic
cauaaaagacagaaguuga

SEQ ID NO: 493777 - RNA, 20 nt, Artificial Sequence
  Synthetic
acauaaaagacagaaguuga

SEQ ID NO: 493778 - RNA, 21 nt, Artificial Sequence
  Synthetic
uacauaaaagacagaaguuga

SEQ ID NO: 493779 - RNA, 22 nt, Artificial Sequence
  Synthetic
guacauaaaagacagaaguuga

SEQ ID NO: 493780 - RNA, 23 nt, Artificial Sequence
  Synthetic
uguacauaaaagacagaaguuga

SEQ ID NO: 493781 - RNA, 24 nt, Artificial Sequence
  Synthetic
guguacauaaaagacagaaguuga

SEQ ID NO: 493782 - RNA, 18 nt, Artificial Sequence
  Synthetic
aaucacaucagaaguuga

SEQ ID NO: 493783 - RNA, 19 nt, Artificial Sequence
  Synthetic
gaaucacaucagaaguuga

SEQ ID NO: 493784 - RNA, 20 nt, Artificial Sequence
  Synthetic
agaaucacaucagaaguuga

SEQ ID NO: 493785 - RNA, 21 nt, Artificial Sequence
  Synthetic
uagaaucacaucagaaguuga

SEQ ID NO: 493786 - RNA, 22 nt, Artificial Sequence
  Synthetic
auagaaucacaucagaaguuga

SEQ ID NO: 493787 - RNA, 23 nt, Artificial Sequence
  Synthetic
gauagaaucacaucagaaguuga

SEQ ID NO: 493788 - RNA, 24 nt, Artificial Sequence
  Synthetic
ggauagaaucacaucagaaguuga

SEQ ID NO: 493789 - RNA, 18 nt, Artificial Sequence
  Synthetic
gacaaguaaaucaguuga

SEQ ID NO: 493790 - RNA, 19 nt, Artificial Sequence
  Synthetic
cgacaaguaaaucaguuga

SEQ ID NO: 493791 - RNA, 20 nt, Artificial Sequence
  Synthetic
ccgacaaguaaaucaguuga

SEQ ID NO: 493792 - RNA, 21 nt, Artificial Sequence
  Synthetic
accgacaaguaaaucaguuga

SEQ ID NO: 493793 - RNA, 22 nt, Artificial Sequence
  Synthetic
caccgacaaguaaaucaguuga

SEQ ID NO: 493794 - RNA, 23 nt, Artificial Sequence
  Synthetic
acaccgacaaguaaaucaguuga

SEQ ID NO: 493795 - RNA, 24 nt, Artificial Sequence
  Synthetic
cacaccgacaaguaaaucaguuga

SEQ ID NO: 493796 - RNA, 18 nt, Artificial Sequence
  Synthetic
aaguccccccagaguuga

SEQ ID NO: 493797 - RNA, 19 nt, Artificial Sequence
  Synthetic
uaaguccccccagaguuga

SEQ ID NO: 493798 - RNA, 20 nt, Artificial Sequence
  Synthetic
cuaaguccccccagaguuga

SEQ ID NO: 493799 - RNA, 21 nt, Artificial Sequence
  Synthetic
acuaaguccccccagaguuga

SEQ ID NO: 493800 - RNA, 22 nt, Artificial Sequence
  Synthetic
cacuaaguccccccagaguuga

SEQ ID NO: 493801 - RNA, 23 nt, Artificial Sequence
  Synthetic
ucacuaaguccccccagaguuga

SEQ ID NO: 493802 - RNA, 24 nt, Artificial Sequence
  Synthetic
cucacuaaguccccccagaguuga

SEQ ID NO: 493803 - RNA, 18 nt, Artificial Sequence
  Synthetic
auggacaaugagaguuga

SEQ ID NO: 493804 - RNA, 19 nt, Artificial Sequence
  Synthetic
aauggacaaugagaguuga

SEQ ID NO: 493805 - RNA, 20 nt, Artificial Sequence
  Synthetic
gaauggacaaugagaguuga

SEQ ID NO: 493806 - RNA, 21 nt, Artificial Sequence
  Synthetic
ggaauggacaaugagaguuga

SEQ ID NO: 493807 - RNA, 22 nt, Artificial Sequence
  Synthetic
uggaauggacaaugagaguuga

SEQ ID NO: 493808 - RNA, 23 nt, Artificial Sequence
  Synthetic
uuggaauggacaaugagaguuga

SEQ ID NO: 493809 - RNA, 24 nt, Artificial Sequence
  Synthetic
auuggaauggacaaugagaguuga

SEQ ID NO: 493810 - RNA, 18 nt, Artificial Sequence
  Synthetic
aaagagugugggaguuga

SEQ ID NO: 493811 - RNA, 19 nt, Artificial Sequence
  Synthetic
aaaagagugugggaguuga

SEQ ID NO: 493812 - RNA, 20 nt, Artificial Sequence
  Synthetic
gaaaagagugugggaguuga

SEQ ID NO: 493813 - RNA, 21 nt, Artificial Sequence
  Synthetic
ugaaaagagugugggaguuga

SEQ ID NO: 493814 - RNA, 22 nt, Artificial Sequence
  Synthetic
cugaaaagagugugggaguuga

SEQ ID NO: 493815 - RNA, 23 nt, Artificial Sequence
  Synthetic
ccugaaaagagugugggaguuga

SEQ ID NO: 493816 - RNA, 24 nt, Artificial Sequence
  Synthetic
cccugaaaagagugugggaguuga

SEQ ID NO: 493817 - RNA, 18 nt, Artificial Sequence
  Synthetic
auauucucuacuaguuga

SEQ ID NO: 493818 - RNA, 19 nt, Artificial Sequence
  Synthetic
gauauucucuacuaguuga

SEQ ID NO: 493819 - RNA, 20 nt, Artificial Sequence
  Synthetic
agauauucucuacuaguuga

SEQ ID NO: 493820 - RNA, 21 nt, Artificial Sequence
  Synthetic
uagauauucucuacuaguuga

SEQ ID NO: 493821 - RNA, 22 nt, Artificial Sequence
  Synthetic
uuagauauucucuacuaguuga

SEQ ID NO: 493822 - RNA, 23 nt, Artificial Sequence
  Synthetic
auuagauauucucuacuaguuga

SEQ ID NO: 493823 - RNA, 24 nt, Artificial Sequence
  Synthetic
gauuagauauucucuacuaguuga

SEQ ID NO: 493824 - RNA, 18 nt, Artificial Sequence
  Synthetic
uauugcuucuguaguuga

SEQ ID NO: 493825 - RNA, 19 nt, Artificial Sequence
  Synthetic
guauugcuucuguaguuga

SEQ ID NO: 493826 - RNA, 20 nt, Artificial Sequence
  Synthetic
uguauugcuucuguaguuga

SEQ ID NO: 493827 - RNA, 21 nt, Artificial Sequence
  Synthetic
cuguauugcuucuguaguuga

SEQ ID NO: 493828 - RNA, 22 nt, Artificial Sequence
  Synthetic
ccuguauugcuucuguaguuga

SEQ ID NO: 493829 - RNA, 23 nt, Artificial Sequence
  Synthetic
cccuguauugcuucuguaguuga

SEQ ID NO: 493830 - RNA, 24 nt, Artificial Sequence
  Synthetic
gcccuguauugcuucuguaguuga

SEQ ID NO: 493831 - RNA, 18 nt, Artificial Sequence
  Synthetic
accuuuuaugaacguuga

SEQ ID NO: 493832 - RNA, 19 nt, Artificial Sequence
  Synthetic
gaccuuuuaugaacguuga

SEQ ID NO: 493833 - RNA, 20 nt, Artificial Sequence
  Synthetic
ggaccuuuuaugaacguuga

SEQ ID NO: 493834 - RNA, 21 nt, Artificial Sequence
  Synthetic
uggaccuuuuaugaacguuga

SEQ ID NO: 493835 - RNA, 22 nt, Artificial Sequence
  Synthetic
auggaccuuuuaugaacguuga

SEQ ID NO: 493836 - RNA, 23 nt, Artificial Sequence
  Synthetic
aauggaccuuuuaugaacguuga

SEQ ID NO: 493837 - RNA, 24 nt, Artificial Sequence
  Synthetic
aaauggaccuuuuaugaacguuga

SEQ ID NO: 493838 - RNA, 18 nt, Artificial Sequence
  Synthetic
uaaacaaaaaaccguuga

SEQ ID NO: 493839 - RNA, 19 nt, Artificial Sequence
  Synthetic
cuaaacaaaaaaccguuga

SEQ ID NO: 493840 - RNA, 20 nt, Artificial Sequence
  Synthetic
gcuaaacaaaaaaccguuga

SEQ ID NO: 493841 - RNA, 21 nt, Artificial Sequence
  Synthetic
ugcuaaacaaaaaaccguuga

SEQ ID NO: 493842 - RNA, 22 nt, Artificial Sequence
  Synthetic
gugcuaaacaaaaaaccguuga

SEQ ID NO: 493843 - RNA, 23 nt, Artificial Sequence
  Synthetic
agugcuaaacaaaaaaccguuga

SEQ ID NO: 493844 - RNA, 24 nt, Artificial Sequence
  Synthetic
aagugcuaaacaaaaaaccguuga

SEQ ID NO: 493845 - RNA, 18 nt, Artificial Sequence
  Synthetic
gcacugguuaaucguuga

SEQ ID NO: 493846 - RNA, 19 nt, Artificial Sequence
  Synthetic
agcacugguuaaucguuga

SEQ ID NO: 493847 - RNA, 20 nt, Artificial Sequence
  Synthetic
aagcacugguuaaucguuga

SEQ ID NO: 493848 - RNA, 21 nt, Artificial Sequence
  Synthetic
gaagcacugguuaaucguuga

SEQ ID NO: 493849 - RNA, 22 nt, Artificial Sequence
  Synthetic
ugaagcacugguuaaucguuga

SEQ ID NO: 493850 - RNA, 23 nt, Artificial Sequence
  Synthetic
cugaagcacugguuaaucguuga

SEQ ID NO: 493851 - RNA, 24 nt, Artificial Sequence
  Synthetic
gcugaagcacugguuaaucguuga

SEQ ID NO: 493852 - RNA, 18 nt, Artificial Sequence
  Synthetic
auaaaaacacaagguuga

SEQ ID NO: 493853 - RNA, 19 nt, Artificial Sequence
  Synthetic
uauaaaaacacaagguuga

SEQ ID NO: 493854 - RNA, 20 nt, Artificial Sequence
  Synthetic
cuauaaaaacacaagguuga

SEQ ID NO: 493855 - RNA, 21 nt, Artificial Sequence
  Synthetic
ucuauaaaaacacaagguuga

SEQ ID NO: 493856 - RNA, 22 nt, Artificial Sequence
  Synthetic
cucuauaaaaacacaagguuga

SEQ ID NO: 493857 - RNA, 23 nt, Artificial Sequence
  Synthetic
ucucuauaaaaacacaagguuga

SEQ ID NO: 493858 - RNA, 24 nt, Artificial Sequence
  Synthetic
uucucuauaaaaacacaagguuga

SEQ ID NO: 493859 - RNA, 18 nt, Artificial Sequence
  Synthetic
ggguaguggggggguuga

SEQ ID NO: 493860 - RNA, 19 nt, Artificial Sequence
  Synthetic
aggguaguggggggguuga

SEQ ID NO: 493861 - RNA, 20 nt, Artificial Sequence
  Synthetic
aaggguaguggggggguuga

SEQ ID NO: 493862 - RNA, 21 nt, Artificial Sequence
  Synthetic
gaaggguaguggggggguuga

SEQ ID NO: 493863 - RNA, 22 nt, Artificial Sequence
  Synthetic
ugaaggguaguggggggguuga

SEQ ID NO: 493864 - RNA, 23 nt, Artificial Sequence
  Synthetic
gugaaggguaguggggggguuga

SEQ ID NO: 493865 - RNA, 24 nt, Artificial Sequence
  Synthetic
ugugaaggguaguggggggguuga

SEQ ID NO: 493866 - RNA, 18 nt, Artificial Sequence
  Synthetic
caacuaggagcugguuga

SEQ ID NO: 493867 - RNA, 19 nt, Artificial Sequence
  Synthetic
ucaacuaggagcugguuga

SEQ ID NO: 493868 - RNA, 20 nt, Artificial Sequence
  Synthetic
cucaacuaggagcugguuga

SEQ ID NO: 493869 - RNA, 21 nt, Artificial Sequence
  Synthetic
ccucaacuaggagcugguuga

SEQ ID NO: 493870 - RNA, 22 nt, Artificial Sequence
  Synthetic
accucaacuaggagcugguuga

SEQ ID NO: 493871 - RNA, 23 nt, Artificial Sequence
  Synthetic
caccucaacuaggagcugguuga

SEQ ID NO: 493872 - RNA, 24 nt, Artificial Sequence
  Synthetic
ccaccucaacuaggagcugguuga

SEQ ID NO: 493873 - RNA, 18 nt, Artificial Sequence
  Synthetic
gcugcacguauugguuga

SEQ ID NO: 493874 - RNA, 19 nt, Artificial Sequence
  Synthetic
ggcugcacguauugguuga

SEQ ID NO: 493875 - RNA, 20 nt, Artificial Sequence
  Synthetic
gggcugcacguauugguuga

SEQ ID NO: 493876 - RNA, 21 nt, Artificial Sequence
  Synthetic
cgggcugcacguauugguuga

SEQ ID NO: 493877 - RNA, 22 nt, Artificial Sequence
  Synthetic
acgggcugcacguauugguuga

SEQ ID NO: 493878 - RNA, 23 nt, Artificial Sequence
  Synthetic
gacgggcugcacguauugguuga

SEQ ID NO: 493879 - RNA, 24 nt, Artificial Sequence
  Synthetic
agacgggcugcacguauugguuga

SEQ ID NO: 493880 - RNA, 18 nt, Artificial Sequence
  Synthetic
acuaucuggaaauguuga

SEQ ID NO: 493881 - RNA, 19 nt, Artificial Sequence
  Synthetic
aacuaucuggaaauguuga

SEQ ID NO: 493882 - RNA, 20 nt, Artificial Sequence
  Synthetic
aaacuaucuggaaauguuga

SEQ ID NO: 493883 - RNA, 21 nt, Artificial Sequence
  Synthetic
aaaacuaucuggaaauguuga

SEQ ID NO: 493884 - RNA, 22 nt, Artificial Sequence
  Synthetic
uaaaacuaucuggaaauguuga

SEQ ID NO: 493885 - RNA, 23 nt, Artificial Sequence
  Synthetic
uuaaaacuaucuggaaauguuga

SEQ ID NO: 493886 - RNA, 24 nt, Artificial Sequence
  Synthetic
auuaaaacuaucuggaaauguuga

SEQ ID NO: 493887 - RNA, 18 nt, Artificial Sequence
  Synthetic
acccuuguacaauguuga

SEQ ID NO: 493888 - RNA, 19 nt, Artificial Sequence
  Synthetic
aacccuuguacaauguuga

SEQ ID NO: 493889 - RNA, 20 nt, Artificial Sequence
  Synthetic
gaacccuuguacaauguuga

SEQ ID NO: 493890 - RNA, 21 nt, Artificial Sequence
  Synthetic
agaacccuuguacaauguuga

SEQ ID NO: 493891 - RNA, 22 nt, Artificial Sequence
  Synthetic
gagaacccuuguacaauguuga

SEQ ID NO: 493892 - RNA, 23 nt, Artificial Sequence
  Synthetic
agagaacccuuguacaauguuga

SEQ ID NO: 493893 - RNA, 24 nt, Artificial Sequence
  Synthetic
aagagaacccuuguacaauguuga

SEQ ID NO: 493894 - RNA, 18 nt, Artificial Sequence
  Synthetic
aucuauugaucauguuga

SEQ ID NO: 493895 - RNA, 19 nt, Artificial Sequence
  Synthetic
aaucuauugaucauguuga

SEQ ID NO: 493896 - RNA, 20 nt, Artificial Sequence
  Synthetic
caaucuauugaucauguuga

SEQ ID NO: 493897 - RNA, 21 nt, Artificial Sequence
  Synthetic
ucaaucuauugaucauguuga

SEQ ID NO: 493898 - RNA, 22 nt, Artificial Sequence
  Synthetic
uucaaucuauugaucauguuga

SEQ ID NO: 493899 - RNA, 23 nt, Artificial Sequence
  Synthetic
guucaaucuauugaucauguuga

SEQ ID NO: 493900 - RNA, 24 nt, Artificial Sequence
  Synthetic
uguucaaucuauugaucauguuga

SEQ ID NO: 493901 - RNA, 18 nt, Artificial Sequence
  Synthetic
guaucguaaagauguuga

SEQ ID NO: 493902 - RNA, 19 nt, Artificial Sequence
  Synthetic
aguaucguaaagauguuga

SEQ ID NO: 493903 - RNA, 20 nt, Artificial Sequence
  Synthetic
caguaucguaaagauguuga

SEQ ID NO: 493904 - RNA, 21 nt, Artificial Sequence
  Synthetic
ucaguaucguaaagauguuga

SEQ ID NO: 493905 - RNA, 22 nt, Artificial Sequence
  Synthetic
cucaguaucguaaagauguuga

SEQ ID NO: 493906 - RNA, 23 nt, Artificial Sequence
  Synthetic
acucaguaucguaaagauguuga

SEQ ID NO: 493907 - RNA, 24 nt, Artificial Sequence
  Synthetic
gacucaguaucguaaagauguuga

SEQ ID NO: 493908 - RNA, 18 nt, Artificial Sequence
  Synthetic
uuaagaaaacuauguuga

SEQ ID NO: 493909 - RNA, 19 nt, Artificial Sequence
  Synthetic
cuuaagaaaacuauguuga

SEQ ID NO: 493910 - RNA, 20 nt, Artificial Sequence
  Synthetic
acuuaagaaaacuauguuga

SEQ ID NO: 493911 - RNA, 21 nt, Artificial Sequence
  Synthetic
aacuuaagaaaacuauguuga

SEQ ID NO: 493912 - RNA, 22 nt, Artificial Sequence
  Synthetic
aaacuuaagaaaacuauguuga

SEQ ID NO: 493913 - RNA, 23 nt, Artificial Sequence
  Synthetic
gaaacuuaagaaaacuauguuga

SEQ ID NO: 493914 - RNA, 24 nt, Artificial Sequence
  Synthetic
ugaaacuuaagaaaacuauguuga

SEQ ID NO: 493915 - RNA, 18 nt, Artificial Sequence
  Synthetic
gaaauaagugacuguuga

SEQ ID NO: 493916 - RNA, 19 nt, Artificial Sequence
  Synthetic
ggaaauaagugacuguuga

SEQ ID NO: 493917 - RNA, 20 nt, Artificial Sequence
  Synthetic
aggaaauaagugacuguuga

SEQ ID NO: 493918 - RNA, 21 nt, Artificial Sequence
  Synthetic
gaggaaauaagugacuguuga

SEQ ID NO: 493919 - RNA, 22 nt, Artificial Sequence
  Synthetic
agaggaaauaagugacuguuga

SEQ ID NO: 493920 - RNA, 23 nt, Artificial Sequence
  Synthetic
aagaggaaauaagugacuguuga

SEQ ID NO: 493921 - RNA, 24 nt, Artificial Sequence
  Synthetic
caagaggaaauaagugacuguuga

SEQ ID NO: 493922 - RNA, 18 nt, Artificial Sequence
  Synthetic
ccaacacacaucuguuga

SEQ ID NO: 493923 - RNA, 19 nt, Artificial Sequence
  Synthetic
gccaacacacaucuguuga

SEQ ID NO: 493924 - RNA, 20 nt, Artificial Sequence
  Synthetic
agccaacacacaucuguuga

SEQ ID NO: 493925 - RNA, 21 nt, Artificial Sequence
  Synthetic
uagccaacacacaucuguuga

SEQ ID NO: 493926 - RNA, 22 nt, Artificial Sequence
  Synthetic
cuagccaacacacaucuguuga

SEQ ID NO: 493927 - RNA, 23 nt, Artificial Sequence
  Synthetic
ucuagccaacacacaucuguuga

SEQ ID NO: 493928 - RNA, 24 nt, Artificial Sequence
  Synthetic
uucuagccaacacacaucuguuga

SEQ ID NO: 493929 - RNA, 18 nt, Artificial Sequence
  Synthetic
uuuuaauucugguguuga

SEQ ID NO: 493930 - RNA, 19 nt, Artificial Sequence
  Synthetic
cuuuuaauucugguguuga

SEQ ID NO: 493931 - RNA, 20 nt, Artificial Sequence
  Synthetic
ccuuuuaauucugguguuga

SEQ ID NO: 493932 - RNA, 21 nt, Artificial Sequence
  Synthetic
gccuuuuaauucugguguuga

SEQ ID NO: 493933 - RNA, 22 nt, Artificial Sequence
  Synthetic
ugccuuuuaauucugguguuga

SEQ ID NO: 493934 - RNA, 23 nt, Artificial Sequence
  Synthetic
augccuuuuaauucugguguuga

SEQ ID NO: 493935 - RNA, 24 nt, Artificial Sequence
  Synthetic
caugccuuuuaauucugguguuga

SEQ ID NO: 493936 - RNA, 18 nt, Artificial Sequence
  Synthetic
uccaagaaacauuguuga

SEQ ID NO: 493937 - RNA, 19 nt, Artificial Sequence
  Synthetic
guccaagaaacauuguuga

SEQ ID NO: 493938 - RNA, 20 nt, Artificial Sequence
  Synthetic
uguccaagaaacauuguuga

SEQ ID NO: 493939 - RNA, 21 nt, Artificial Sequence
  Synthetic
auguccaagaaacauuguuga

SEQ ID NO: 493940 - RNA, 22 nt, Artificial Sequence
  Synthetic
aauguccaagaaacauuguuga

SEQ ID NO: 493941 - RNA, 23 nt, Artificial Sequence
  Synthetic
aaauguccaagaaacauuguuga

SEQ ID NO: 493942 - RNA, 24 nt, Artificial Sequence
  Synthetic
aaaauguccaagaaacauuguuga

SEQ ID NO: 493943 - RNA, 18 nt, Artificial Sequence
  Synthetic
gcuaugaaauauuguuga

SEQ ID NO: 493944 - RNA, 19 nt, Artificial Sequence
  Synthetic
agcuaugaaauauuguuga

SEQ ID NO: 493945 - RNA, 20 nt, Artificial Sequence
  Synthetic
aagcuaugaaauauuguuga

SEQ ID NO: 493946 - RNA, 21 nt, Artificial Sequence
  Synthetic
aaagcuaugaaauauuguuga

SEQ ID NO: 493947 - RNA, 22 nt, Artificial Sequence
  Synthetic
gaaagcuaugaaauauuguuga

SEQ ID NO: 493948 - RNA, 23 nt, Artificial Sequence
  Synthetic
ugaaagcuaugaaauauuguuga

SEQ ID NO: 493949 - RNA, 24 nt, Artificial Sequence
  Synthetic
cugaaagcuaugaaauauuguuga

SEQ ID NO: 493950 - RNA, 18 nt, Artificial Sequence
  Synthetic
uugugccucucuuguuga

SEQ ID NO: 493951 - RNA, 19 nt, Artificial Sequence
  Synthetic
auugugccucucuuguuga

SEQ ID NO: 493952 - RNA, 20 nt, Artificial Sequence
  Synthetic
aauugugccucucuuguuga

SEQ ID NO: 493953 - RNA, 21 nt, Artificial Sequence
  Synthetic
caauugugccucucuuguuga

SEQ ID NO: 493954 - RNA, 22 nt, Artificial Sequence
  Synthetic
acaauugugccucucuuguuga

SEQ ID NO: 493955 - RNA, 23 nt, Artificial Sequence
  Synthetic
aacaauugugccucucuuguuga

SEQ ID NO: 493956 - RNA, 24 nt, Artificial Sequence
  Synthetic
aaacaauugugccucucuuguuga

SEQ ID NO: 493957 - RNA, 18 nt, Artificial Sequence
  Synthetic
ucaaagacaauuuguuga

SEQ ID NO: 493958 - RNA, 19 nt, Artificial Sequence
  Synthetic
uucaaagacaauuuguuga

SEQ ID NO: 493959 - RNA, 20 nt, Artificial Sequence
  Synthetic
uuucaaagacaauuuguuga

SEQ ID NO: 493960 - RNA, 21 nt, Artificial Sequence
  Synthetic
guuucaaagacaauuuguuga

SEQ ID NO: 493961 - RNA, 22 nt, Artificial Sequence
  Synthetic
gguuucaaagacaauuuguuga

SEQ ID NO: 493962 - RNA, 23 nt, Artificial Sequence
  Synthetic
ggguuucaaagacaauuuguuga

SEQ ID NO: 493963 - RNA, 24 nt, Artificial Sequence
  Synthetic
uggguuucaaagacaauuuguuga

SEQ ID NO: 493964 - RNA, 18 nt, Artificial Sequence
  Synthetic
ucauuaaauauuuguuga

SEQ ID NO: 493965 - RNA, 19 nt, Artificial Sequence
  Synthetic
uucauuaaauauuuguuga

SEQ ID NO: 493966 - RNA, 20 nt, Artificial Sequence
  Synthetic
auucauuaaauauuuguuga

SEQ ID NO: 493967 - RNA, 21 nt, Artificial Sequence
  Synthetic
cauucauuaaauauuuguuga

SEQ ID NO: 493968 - RNA, 22 nt, Artificial Sequence
  Synthetic
gcauucauuaaauauuuguuga

SEQ ID NO: 493969 - RNA, 23 nt, Artificial Sequence
  Synthetic
ggcauucauuaaauauuuguuga

SEQ ID NO: 493970 - RNA, 24 nt, Artificial Sequence
  Synthetic
aggcauucauuaaauauuuguuga

SEQ ID NO: 493971 - RNA, 18 nt, Artificial Sequence
  Synthetic
ucuauuuuucuuuguuga

SEQ ID NO: 493972 - RNA, 19 nt, Artificial Sequence
  Synthetic
aucuauuuuucuuuguuga

SEQ ID NO: 493973 - RNA, 20 nt, Artificial Sequence
  Synthetic
uaucuauuuuucuuuguuga

SEQ ID NO: 493974 - RNA, 21 nt, Artificial Sequence
  Synthetic
uuaucuauuuuucuuuguuga

SEQ ID NO: 493975 - RNA, 22 nt, Artificial Sequence
  Synthetic
uuuaucuauuuuucuuuguuga

SEQ ID NO: 493976 - RNA, 23 nt, Artificial Sequence
  Synthetic
cuuuaucuauuuuucuuuguuga

SEQ ID NO: 493977 - RNA, 24 nt, Artificial Sequence
  Synthetic
gcuuuaucuauuuuucuuuguuga

SEQ ID NO: 493978 - RNA, 18 nt, Artificial Sequence
  Synthetic
uuuucucugaaaauuuga

SEQ ID NO: 493979 - RNA, 19 nt, Artificial Sequence
  Synthetic
uuuuucucugaaaauuuga

SEQ ID NO: 493980 - RNA, 20 nt, Artificial Sequence
  Synthetic
uuuuuucucugaaaauuuga

SEQ ID NO: 493981 - RNA, 21 nt, Artificial Sequence
  Synthetic
uuuuuuucucugaaaauuuga

SEQ ID NO: 493982 - RNA, 22 nt, Artificial Sequence
  Synthetic
uuuuuuuucucugaaaauuuga

SEQ ID NO: 493983 - RNA, 23 nt, Artificial Sequence
  Synthetic
uuuuuuuuucucugaaaauuuga

SEQ ID NO: 493984 - RNA, 24 nt, Artificial Sequence
  Synthetic
uuuuuuuuuucucugaaaauuuga

SEQ ID NO: 493985 - RNA, 18 nt, Artificial Sequence
  Synthetic
uggauagauuaaauuuga

SEQ ID NO: 493986 - RNA, 19 nt, Artificial Sequence
  Synthetic
auggauagauuaaauuuga

SEQ ID NO: 493987 - RNA, 20 nt, Artificial Sequence
  Synthetic
uauggauagauuaaauuuga

SEQ ID NO: 493988 - RNA, 21 nt, Artificial Sequence
  Synthetic
uuauggauagauuaaauuuga

SEQ ID NO: 493989 - RNA, 22 nt, Artificial Sequence
  Synthetic
cuuauggauagauuaaauuuga

SEQ ID NO: 493990 - RNA, 23 nt, Artificial Sequence
  Synthetic
ccuuauggauagauuaaauuuga

SEQ ID NO: 493991 - RNA, 24 nt, Artificial Sequence
  Synthetic
gccuuauggauagauuaaauuuga

SEQ ID NO: 493992 - RNA, 18 nt, Artificial Sequence
  Synthetic
auuauuagaucaauuuga

SEQ ID NO: 493993 - RNA, 19 nt, Artificial Sequence
  Synthetic
gauuauuagaucaauuuga

SEQ ID NO: 493994 - RNA, 20 nt, Artificial Sequence
  Synthetic
cgauuauuagaucaauuuga

SEQ ID NO: 493995 - RNA, 21 nt, Artificial Sequence
  Synthetic
acgauuauuagaucaauuuga

SEQ ID NO: 493996 - RNA, 22 nt, Artificial Sequence
  Synthetic
gacgauuauuagaucaauuuga

SEQ ID NO: 493997 - RNA, 23 nt, Artificial Sequence
  Synthetic
agacgauuauuagaucaauuuga

SEQ ID NO: 493998 - RNA, 24 nt, Artificial Sequence
  Synthetic
gagacgauuauuagaucaauuuga

SEQ ID NO: 493999 - RNA, 18 nt, Artificial Sequence
  Synthetic
uauccccugggaauuuga

SEQ ID NO: 494000 - RNA, 19 nt, Artificial Sequence
  Synthetic
guauccccugggaauuuga

SEQ ID NO: 494001 - RNA, 20 nt, Artificial Sequence
  Synthetic
aguauccccugggaauuuga

SEQ ID NO: 494002 - RNA, 21 nt, Artificial Sequence
  Synthetic
uaguauccccugggaauuuga

SEQ ID NO: 494003 - RNA, 22 nt, Artificial Sequence
  Synthetic
auaguauccccugggaauuuga

SEQ ID NO: 494004 - RNA, 23 nt, Artificial Sequence
  Synthetic
aauaguauccccugggaauuuga

SEQ ID NO: 494005 - RNA, 24 nt, Artificial Sequence
  Synthetic
caauaguauccccugggaauuuga

SEQ ID NO: 494006 - RNA, 18 nt, Artificial Sequence
  Synthetic
cacagaaucuuaauuuga

SEQ ID NO: 494007 - RNA, 19 nt, Artificial Sequence
  Synthetic
ccacagaaucuuaauuuga

SEQ ID NO: 494008 - RNA, 20 nt, Artificial Sequence
  Synthetic
gccacagaaucuuaauuuga

SEQ ID NO: 494009 - RNA, 21 nt, Artificial Sequence
  Synthetic
ugccacagaaucuuaauuuga

SEQ ID NO: 494010 - RNA, 22 nt, Artificial Sequence
  Synthetic
augccacagaaucuuaauuuga

SEQ ID NO: 494011 - RNA, 23 nt, Artificial Sequence
  Synthetic
uaugccacagaaucuuaauuuga

SEQ ID NO: 494012 - RNA, 24 nt, Artificial Sequence
  Synthetic
auaugccacagaaucuuaauuuga

SEQ ID NO: 494013 - RNA, 18 nt, Artificial Sequence
  Synthetic
acauauaacaacauuuga

SEQ ID NO: 494014 - RNA, 19 nt, Artificial Sequence
  Synthetic
gacauauaacaacauuuga

SEQ ID NO: 494015 - RNA, 20 nt, Artificial Sequence
  Synthetic
ugacauauaacaacauuuga

SEQ ID NO: 494016 - RNA, 21 nt, Artificial Sequence
  Synthetic
gugacauauaacaacauuuga

SEQ ID NO: 494017 - RNA, 22 nt, Artificial Sequence
  Synthetic
ugugacauauaacaacauuuga

SEQ ID NO: 494018 - RNA, 23 nt, Artificial Sequence
  Synthetic
augugacauauaacaacauuuga

SEQ ID NO: 494019 - RNA, 24 nt, Artificial Sequence
  Synthetic
uaugugacauauaacaacauuuga

SEQ ID NO: 494020 - RNA, 18 nt, Artificial Sequence
  Synthetic
uuaauaauacacauuuga

SEQ ID NO: 494021 - RNA, 19 nt, Artificial Sequence
  Synthetic
guuaauaauacacauuuga

SEQ ID NO: 494022 - RNA, 20 nt, Artificial Sequence
  Synthetic
gguuaauaauacacauuuga

SEQ ID NO: 494023 - RNA, 21 nt, Artificial Sequence
  Synthetic
ugguuaauaauacacauuuga

SEQ ID NO: 494024 - RNA, 22 nt, Artificial Sequence
  Synthetic
gugguuaauaauacacauuuga

SEQ ID NO: 494025 - RNA, 23 nt, Artificial Sequence
  Synthetic
ugugguuaauaauacacauuuga

SEQ ID NO: 494026 - RNA, 24 nt, Artificial Sequence
  Synthetic
uugugguuaauaauacacauuuga

SEQ ID NO: 494027 - RNA, 18 nt, Artificial Sequence
  Synthetic
uugauaaucuacauuuga

SEQ ID NO: 494028 - RNA, 19 nt, Artificial Sequence
  Synthetic
uuugauaaucuacauuuga

SEQ ID NO: 494029 - RNA, 20 nt, Artificial Sequence
  Synthetic
auuugauaaucuacauuuga

SEQ ID NO: 494030 - RNA, 21 nt, Artificial Sequence
  Synthetic
aauuugauaaucuacauuuga

SEQ ID NO: 494031 - RNA, 22 nt, Artificial Sequence
  Synthetic
gaauuugauaaucuacauuuga

SEQ ID NO: 494032 - RNA, 23 nt, Artificial Sequence
  Synthetic
agaauuugauaaucuacauuuga

SEQ ID NO: 494033 - RNA, 24 nt, Artificial Sequence
  Synthetic
cagaauuugauaaucuacauuuga

SEQ ID NO: 494034 - RNA, 18 nt, Artificial Sequence
  Synthetic
ggagagggagccauuuga

SEQ ID NO: 494035 - RNA, 19 nt, Artificial Sequence
  Synthetic
aggagagggagccauuuga

SEQ ID NO: 494036 - RNA, 20 nt, Artificial Sequence
  Synthetic
uaggagagggagccauuuga

SEQ ID NO: 494037 - RNA, 21 nt, Artificial Sequence
  Synthetic
cuaggagagggagccauuuga

SEQ ID NO: 494038 - RNA, 22 nt, Artificial Sequence
  Synthetic
ccuaggagagggagccauuuga

SEQ ID NO: 494039 - RNA, 23 nt, Artificial Sequence
  Synthetic
uccuaggagagggagccauuuga

SEQ ID NO: 494040 - RNA, 24 nt, Artificial Sequence
  Synthetic
uuccuaggagagggagccauuuga

SEQ ID NO: 494041 - RNA, 18 nt, Artificial Sequence
  Synthetic
ugcuuccacugcauuuga

SEQ ID NO: 494042 - RNA, 19 nt, Artificial Sequence
  Synthetic
gugcuuccacugcauuuga

SEQ ID NO: 494043 - RNA, 20 nt, Artificial Sequence
  Synthetic
ggugcuuccacugcauuuga

SEQ ID NO: 494044 - RNA, 21 nt, Artificial Sequence
  Synthetic
cggugcuuccacugcauuuga

SEQ ID NO: 494045 - RNA, 22 nt, Artificial Sequence
  Synthetic
acggugcuuccacugcauuuga

SEQ ID NO: 494046 - RNA, 23 nt, Artificial Sequence
  Synthetic
aacggugcuuccacugcauuuga

SEQ ID NO: 494047 - RNA, 24 nt, Artificial Sequence
  Synthetic
gaacggugcuuccacugcauuuga

SEQ ID NO: 494048 - RNA, 18 nt, Artificial Sequence
  Synthetic
caggaccuuuucauuuga

SEQ ID NO: 494049 - RNA, 19 nt, Artificial Sequence
  Synthetic
ucaggaccuuuucauuuga

SEQ ID NO: 494050 - RNA, 20 nt, Artificial Sequence
  Synthetic
uucaggaccuuuucauuuga

SEQ ID NO: 494051 - RNA, 21 nt, Artificial Sequence
  Synthetic
uuucaggaccuuuucauuuga

SEQ ID NO: 494052 - RNA, 22 nt, Artificial Sequence
  Synthetic
auuucaggaccuuuucauuuga

SEQ ID NO: 494053 - RNA, 23 nt, Artificial Sequence
  Synthetic
cauuucaggaccuuuucauuuga

SEQ ID NO: 494054 - RNA, 24 nt, Artificial Sequence
  Synthetic
gcauuucaggaccuuuucauuuga

SEQ ID NO: 494055 - RNA, 18 nt, Artificial Sequence
  Synthetic
augaguauaaagauuuga

SEQ ID NO: 494056 - RNA, 19 nt, Artificial Sequence
  Synthetic
uaugaguauaaagauuuga

SEQ ID NO: 494057 - RNA, 20 nt, Artificial Sequence
  Synthetic
guaugaguauaaagauuuga

SEQ ID NO: 494058 - RNA, 21 nt, Artificial Sequence
  Synthetic
uguaugaguauaaagauuuga

SEQ ID NO: 494059 - RNA, 22 nt, Artificial Sequence
  Synthetic
auguaugaguauaaagauuuga

SEQ ID NO: 494060 - RNA, 23 nt, Artificial Sequence
  Synthetic
gauguaugaguauaaagauuuga

SEQ ID NO: 494061 - RNA, 24 nt, Artificial Sequence
  Synthetic
ugauguaugaguauaaagauuuga

SEQ ID NO: 494062 - RNA, 18 nt, Artificial Sequence
  Synthetic
aagucucuuaagauuuga

SEQ ID NO: 494063 - RNA, 19 nt, Artificial Sequence
  Synthetic
gaagucucuuaagauuuga

SEQ ID NO: 494064 - RNA, 20 nt, Artificial Sequence
  Synthetic
agaagucucuuaagauuuga

SEQ ID NO: 494065 - RNA, 21 nt, Artificial Sequence
  Synthetic
uagaagucucuuaagauuuga

SEQ ID NO: 494066 - RNA, 22 nt, Artificial Sequence
  Synthetic
cuagaagucucuuaagauuuga

SEQ ID NO: 494067 - RNA, 23 nt, Artificial Sequence
  Synthetic
ucuagaagucucuuaagauuuga

SEQ ID NO: 494068 - RNA, 24 nt, Artificial Sequence
  Synthetic
uucuagaagucucuuaagauuuga

SEQ ID NO: 494069 - RNA, 18 nt, Artificial Sequence
  Synthetic
auucaaaaugagauuuga

SEQ ID NO: 494070 - RNA, 19 nt, Artificial Sequence
  Synthetic
aauucaaaaugagauuuga

SEQ ID NO: 494071 - RNA, 20 nt, Artificial Sequence
  Synthetic
uaauucaaaaugagauuuga

SEQ ID NO: 494072 - RNA, 21 nt, Artificial Sequence
  Synthetic
auaauucaaaaugagauuuga

SEQ ID NO: 494073 - RNA, 22 nt, Artificial Sequence
  Synthetic
uauaauucaaaaugagauuuga

SEQ ID NO: 494074 - RNA, 23 nt, Artificial Sequence
  Synthetic
uuauaauucaaaaugagauuuga

SEQ ID NO: 494075 - RNA, 24 nt, Artificial Sequence
  Synthetic
auuauaauucaaaaugagauuuga

SEQ ID NO: 494076 - RNA, 18 nt, Artificial Sequence
  Synthetic
uacacuguaaauauuuga

SEQ ID NO: 494077 - RNA, 19 nt, Artificial Sequence
  Synthetic
auacacuguaaauauuuga

SEQ ID NO: 494078 - RNA, 20 nt, Artificial Sequence
  Synthetic
uauacacuguaaauauuuga

SEQ ID NO: 494079 - RNA, 21 nt, Artificial Sequence
  Synthetic
uuauacacuguaaauauuuga

SEQ ID NO: 494080 - RNA, 22 nt, Artificial Sequence
  Synthetic
auuauacacuguaaauauuuga

SEQ ID NO: 494081 - RNA, 23 nt, Artificial Sequence
  Synthetic
gauuauacacuguaaauauuuga

SEQ ID NO: 494082 - RNA, 24 nt, Artificial Sequence
  Synthetic
ugauuauacacuguaaauauuuga

SEQ ID NO: 494083 - RNA, 18 nt, Artificial Sequence
  Synthetic
uagaaugugaauauuuga

SEQ ID NO: 494084 - RNA, 19 nt, Artificial Sequence
  Synthetic
auagaaugugaauauuuga

SEQ ID NO: 494085 - RNA, 20 nt, Artificial Sequence
  Synthetic
gauagaaugugaauauuuga

SEQ ID NO: 494086 - RNA, 21 nt, Artificial Sequence
  Synthetic
ugauagaaugugaauauuuga

SEQ ID NO: 494087 - RNA, 22 nt, Artificial Sequence
  Synthetic
augauagaaugugaauauuuga

SEQ ID NO: 494088 - RNA, 23 nt, Artificial Sequence
  Synthetic
gaugauagaaugugaauauuuga

SEQ ID NO: 494089 - RNA, 24 nt, Artificial Sequence
  Synthetic
ugaugauagaaugugaauauuuga

SEQ ID NO: 494090 - RNA, 18 nt, Artificial Sequence
  Synthetic
uccccaaagcguauuuga

SEQ ID NO: 494091 - RNA, 19 nt, Artificial Sequence
  Synthetic
guccccaaagcguauuuga

SEQ ID NO: 494092 - RNA, 20 nt, Artificial Sequence
  Synthetic
uguccccaaagcguauuuga

SEQ ID NO: 494093 - RNA, 21 nt, Artificial Sequence
  Synthetic
uuguccccaaagcguauuuga

SEQ ID NO: 494094 - RNA, 22 nt, Artificial Sequence
  Synthetic
cuuguccccaaagcguauuuga

SEQ ID NO: 494095 - RNA, 23 nt, Artificial Sequence
  Synthetic
acuuguccccaaagcguauuuga

SEQ ID NO: 494096 - RNA, 24 nt, Artificial Sequence
  Synthetic
uacuuguccccaaagcguauuuga

SEQ ID NO: 494097 - RNA, 18 nt, Artificial Sequence
  Synthetic
cuucccuguuuacuuuga

SEQ ID NO: 494098 - RNA, 19 nt, Artificial Sequence
  Synthetic
acuucccuguuuacuuuga

SEQ ID NO: 494099 - RNA, 20 nt, Artificial Sequence
  Synthetic
gacuucccuguuuacuuuga

SEQ ID NO: 494100 - RNA, 21 nt, Artificial Sequence
  Synthetic
ggacuucccuguuuacuuuga

SEQ ID NO: 494101 - RNA, 22 nt, Artificial Sequence
  Synthetic
aggacuucccuguuuacuuuga

SEQ ID NO: 494102 - RNA, 23 nt, Artificial Sequence
  Synthetic
aaggacuucccuguuuacuuuga

SEQ ID NO: 494103 - RNA, 24 nt, Artificial Sequence
  Synthetic
uaaggacuucccuguuuacuuuga

SEQ ID NO: 494104 - RNA, 18 nt, Artificial Sequence
  Synthetic
gaaauauuuuuacuuuga

SEQ ID NO: 494105 - RNA, 19 nt, Artificial Sequence
  Synthetic
agaaauauuuuuacuuuga

SEQ ID NO: 494106 - RNA, 20 nt, Artificial Sequence
  Synthetic
gagaaauauuuuuacuuuga

SEQ ID NO: 494107 - RNA, 21 nt, Artificial Sequence
  Synthetic
agagaaauauuuuuacuuuga

SEQ ID NO: 494108 - RNA, 22 nt, Artificial Sequence
  Synthetic
cagagaaauauuuuuacuuuga

SEQ ID NO: 494109 - RNA, 23 nt, Artificial Sequence
  Synthetic
acagagaaauauuuuuacuuuga

SEQ ID NO: 494110 - RNA, 24 nt, Artificial Sequence
  Synthetic
aacagagaaauauuuuuacuuuga

SEQ ID NO: 494111 - RNA, 18 nt, Artificial Sequence
  Synthetic
aaaggauuuugccuuuga

SEQ ID NO: 494112 - RNA, 19 nt, Artificial Sequence
  Synthetic
uaaaggauuuugccuuuga

SEQ ID NO: 494113 - RNA, 20 nt, Artificial Sequence
  Synthetic
uuaaaggauuuugccuuuga

SEQ ID NO: 494114 - RNA, 21 nt, Artificial Sequence
  Synthetic
uuuaaaggauuuugccuuuga

SEQ ID NO: 494115 - RNA, 22 nt, Artificial Sequence
  Synthetic
uuuuaaaggauuuugccuuuga

SEQ ID NO: 494116 - RNA, 23 nt, Artificial Sequence
  Synthetic
uuuuuaaaggauuuugccuuuga

SEQ ID NO: 494117 - RNA, 24 nt, Artificial Sequence
  Synthetic
cuuuuuaaaggauuuugccuuuga

SEQ ID NO: 494118 - RNA, 18 nt, Artificial Sequence
  Synthetic
guuuuuaaccuccuuuga

SEQ ID NO: 494119 - RNA, 19 nt, Artificial Sequence
  Synthetic
aguuuuuaaccuccuuuga

SEQ ID NO: 494120 - RNA, 20 nt, Artificial Sequence
  Synthetic
uaguuuuuaaccuccuuuga

SEQ ID NO: 494121 - RNA, 21 nt, Artificial Sequence
  Synthetic
cuaguuuuuaaccuccuuuga

SEQ ID NO: 494122 - RNA, 22 nt, Artificial Sequence
  Synthetic
gcuaguuuuuaaccuccuuuga

SEQ ID NO: 494123 - RNA, 23 nt, Artificial Sequence
  Synthetic
ugcuaguuuuuaaccuccuuuga

SEQ ID NO: 494124 - RNA, 24 nt, Artificial Sequence
  Synthetic
augcuaguuuuuaaccuccuuuga

SEQ ID NO: 494125 - RNA, 18 nt, Artificial Sequence
  Synthetic
guuguuuauguccuuuga

SEQ ID NO: 494126 - RNA, 19 nt, Artificial Sequence
  Synthetic
aguuguuuauguccuuuga

SEQ ID NO: 494127 - RNA, 20 nt, Artificial Sequence
  Synthetic
gaguuguuuauguccuuuga

SEQ ID NO: 494128 - RNA, 21 nt, Artificial Sequence
  Synthetic
ugaguuguuuauguccuuuga

SEQ ID NO: 494129 - RNA, 22 nt, Artificial Sequence
  Synthetic
augaguuguuuauguccuuuga

SEQ ID NO: 494130 - RNA, 23 nt, Artificial Sequence
  Synthetic
gaugaguuguuuauguccuuuga

SEQ ID NO: 494131 - RNA, 24 nt, Artificial Sequence
  Synthetic
ggaugaguuguuuauguccuuuga

SEQ ID NO: 494132 - RNA, 18 nt, Artificial Sequence
  Synthetic
auauaaccaaggcuuuga

SEQ ID NO: 494133 - RNA, 19 nt, Artificial Sequence
  Synthetic
uauauaaccaaggcuuuga

SEQ ID NO: 494134 - RNA, 20 nt, Artificial Sequence
  Synthetic
auauauaaccaaggcuuuga

SEQ ID NO: 494135 - RNA, 21 nt, Artificial Sequence
  Synthetic
aauauauaaccaaggcuuuga

SEQ ID NO: 494136 - RNA, 22 nt, Artificial Sequence
  Synthetic
aaauauauaaccaaggcuuuga

SEQ ID NO: 494137 - RNA, 23 nt, Artificial Sequence
  Synthetic
aaaauauauaaccaaggcuuuga

SEQ ID NO: 494138 - RNA, 24 nt, Artificial Sequence
  Synthetic
aaaaauauauaaccaaggcuuuga

SEQ ID NO: 494139 - RNA, 18 nt, Artificial Sequence
  Synthetic
acacaacuacugcuuuga

SEQ ID NO: 494140 - RNA, 19 nt, Artificial Sequence
  Synthetic
cacacaacuacugcuuuga

SEQ ID NO: 494141 - RNA, 20 nt, Artificial Sequence
  Synthetic
acacacaacuacugcuuuga

SEQ ID NO: 494142 - RNA, 21 nt, Artificial Sequence
  Synthetic
aacacacaacuacugcuuuga

SEQ ID NO: 494143 - RNA, 22 nt, Artificial Sequence
  Synthetic
aaacacacaacuacugcuuuga

SEQ ID NO: 494144 - RNA, 23 nt, Artificial Sequence
  Synthetic
gaaacacacaacuacugcuuuga

SEQ ID NO: 494145 - RNA, 24 nt, Artificial Sequence
  Synthetic
ugaaacacacaacuacugcuuuga

SEQ ID NO: 494146 - RNA, 18 nt, Artificial Sequence
  Synthetic
gugucccauucucuuuga

SEQ ID NO: 494147 - RNA, 19 nt, Artificial Sequence
  Synthetic
ugugucccauucucuuuga

SEQ ID NO: 494148 - RNA, 20 nt, Artificial Sequence
  Synthetic
uugugucccauucucuuuga

SEQ ID NO: 494149 - RNA, 21 nt, Artificial Sequence
  Synthetic
guugugucccauucucuuuga

SEQ ID NO: 494150 - RNA, 22 nt, Artificial Sequence
  Synthetic
aguugugucccauucucuuuga

SEQ ID NO: 494151 - RNA, 23 nt, Artificial Sequence
  Synthetic
gaguugugucccauucucuuuga

SEQ ID NO: 494152 - RNA, 24 nt, Artificial Sequence
  Synthetic
agaguugugucccauucucuuuga

SEQ ID NO: 494153 - RNA, 18 nt, Artificial Sequence
  Synthetic
uugauccuuaaaguuuga

SEQ ID NO: 494154 - RNA, 19 nt, Artificial Sequence
  Synthetic
auugauccuuaaaguuuga

SEQ ID NO: 494155 - RNA, 20 nt, Artificial Sequence
  Synthetic
aauugauccuuaaaguuuga

SEQ ID NO: 494156 - RNA, 21 nt, Artificial Sequence
  Synthetic
aaauugauccuuaaaguuuga

SEQ ID NO: 494157 - RNA, 22 nt, Artificial Sequence
  Synthetic
uaaauugauccuuaaaguuuga

SEQ ID NO: 494158 - RNA, 23 nt, Artificial Sequence
  Synthetic
uuaaauugauccuuaaaguuuga

SEQ ID NO: 494159 - RNA, 24 nt, Artificial Sequence
  Synthetic
cuuaaauugauccuuaaaguuuga

SEQ ID NO: 494160 - RNA, 18 nt, Artificial Sequence
  Synthetic
uacacaauuucaguuuga

SEQ ID NO: 494161 - RNA, 19 nt, Artificial Sequence
  Synthetic
auacacaauuucaguuuga

SEQ ID NO: 494162 - RNA, 20 nt, Artificial Sequence
  Synthetic
gauacacaauuucaguuuga

SEQ ID NO: 494163 - RNA, 21 nt, Artificial Sequence
  Synthetic
agauacacaauuucaguuuga

SEQ ID NO: 494164 - RNA, 22 nt, Artificial Sequence
  Synthetic
aagauacacaauuucaguuuga

SEQ ID NO: 494165 - RNA, 23 nt, Artificial Sequence
  Synthetic
aaagauacacaauuucaguuuga

SEQ ID NO: 494166 - RNA, 24 nt, Artificial Sequence
  Synthetic
aaaagauacacaauuucaguuuga

SEQ ID NO: 494167 - RNA, 18 nt, Artificial Sequence
  Synthetic
agcaacuuuagaguuuga

SEQ ID NO: 494168 - RNA, 19 nt, Artificial Sequence
  Synthetic
cagcaacuuuagaguuuga

SEQ ID NO: 494169 - RNA, 20 nt, Artificial Sequence
  Synthetic
acagcaacuuuagaguuuga

SEQ ID NO: 494170 - RNA, 21 nt, Artificial Sequence
  Synthetic
gacagcaacuuuagaguuuga

SEQ ID NO: 494171 - RNA, 22 nt, Artificial Sequence
  Synthetic
agacagcaacuuuagaguuuga

SEQ ID NO: 494172 - RNA, 23 nt, Artificial Sequence
  Synthetic
cagacagcaacuuuagaguuuga

SEQ ID NO: 494173 - RNA, 24 nt, Artificial Sequence
  Synthetic
acagacagcaacuuuagaguuuga

SEQ ID NO: 494174 - RNA, 18 nt, Artificial Sequence
  Synthetic
cagucccaaggaguuuga

SEQ ID NO: 494175 - RNA, 19 nt, Artificial Sequence
  Synthetic
acagucccaaggaguuuga

SEQ ID NO: 494176 - RNA, 20 nt, Artificial Sequence
  Synthetic
aacagucccaaggaguuuga

SEQ ID NO: 494177 - RNA, 21 nt, Artificial Sequence
  Synthetic
aaacagucccaaggaguuuga

SEQ ID NO: 494178 - RNA, 22 nt, Artificial Sequence
  Synthetic
aaaacagucccaaggaguuuga

SEQ ID NO: 494179 - RNA, 23 nt, Artificial Sequence
  Synthetic
aaaaacagucccaaggaguuuga

SEQ ID NO: 494180 - RNA, 24 nt, Artificial Sequence
  Synthetic
aaaaaacagucccaaggaguuuga

SEQ ID NO: 494181 - RNA, 18 nt, Artificial Sequence
  Synthetic
augacauugcuaguuuga

SEQ ID NO: 494182 - RNA, 19 nt, Artificial Sequence
  Synthetic
aaugacauugcuaguuuga

SEQ ID NO: 494183 - RNA, 20 nt, Artificial Sequence
  Synthetic
aaaugacauugcuaguuuga

SEQ ID NO: 494184 - RNA, 21 nt, Artificial Sequence
  Synthetic
aaaaugacauugcuaguuuga

SEQ ID NO: 494185 - RNA, 22 nt, Artificial Sequence
  Synthetic
aaaaaugacauugcuaguuuga

SEQ ID NO: 494186 - RNA, 23 nt, Artificial Sequence
  Synthetic
gaaaaaugacauugcuaguuuga

SEQ ID NO: 494187 - RNA, 24 nt, Artificial Sequence
  Synthetic
ugaaaaaugacauugcuaguuuga

SEQ ID NO: 494188 - RNA, 18 nt, Artificial Sequence
  Synthetic
uacauacgaaggguuuga

SEQ ID NO: 494189 - RNA, 19 nt, Artificial Sequence
  Synthetic
auacauacgaaggguuuga

SEQ ID NO: 494190 - RNA, 20 nt, Artificial Sequence
  Synthetic
uauacauacgaaggguuuga

SEQ ID NO: 494191 - RNA, 21 nt, Artificial Sequence
  Synthetic
auauacauacgaaggguuuga

SEQ ID NO: 494192 - RNA, 22 nt, Artificial Sequence
  Synthetic
aauauacauacgaaggguuuga

SEQ ID NO: 494193 - RNA, 23 nt, Artificial Sequence
  Synthetic
gaauauacauacgaaggguuuga

SEQ ID NO: 494194 - RNA, 24 nt, Artificial Sequence
  Synthetic
agaauauacauacgaaggguuuga

SEQ ID NO: 494195 - RNA, 18 nt, Artificial Sequence
  Synthetic
uuauucucauugguuuga

SEQ ID NO: 494196 - RNA, 19 nt, Artificial Sequence
  Synthetic
uuuauucucauugguuuga

SEQ ID NO: 494197 - RNA, 20 nt, Artificial Sequence
  Synthetic
auuuauucucauugguuuga

SEQ ID NO: 494198 - RNA, 21 nt, Artificial Sequence
  Synthetic
uauuuauucucauugguuuga

SEQ ID NO: 494199 - RNA, 22 nt, Artificial Sequence
  Synthetic
guauuuauucucauugguuuga

SEQ ID NO: 494200 - RNA, 23 nt, Artificial Sequence
  Synthetic
uguauuuauucucauugguuuga

SEQ ID NO: 494201 - RNA, 24 nt, Artificial Sequence
  Synthetic
guguauuuauucucauugguuuga

SEQ ID NO: 494202 - RNA, 18 nt, Artificial Sequence
  Synthetic
guaagugcuaauguuuga

SEQ ID NO: 494203 - RNA, 19 nt, Artificial Sequence
  Synthetic
aguaagugcuaauguuuga

SEQ ID NO: 494204 - RNA, 20 nt, Artificial Sequence
  Synthetic
gaguaagugcuaauguuuga

SEQ ID NO: 494205 - RNA, 21 nt, Artificial Sequence
  Synthetic
agaguaagugcuaauguuuga

SEQ ID NO: 494206 - RNA, 22 nt, Artificial Sequence
  Synthetic
aagaguaagugcuaauguuuga

SEQ ID NO: 494207 - RNA, 23 nt, Artificial Sequence
  Synthetic
aaagaguaagugcuaauguuuga

SEQ ID NO: 494208 - RNA, 24 nt, Artificial Sequence
  Synthetic
gaaagaguaagugcuaauguuuga

SEQ ID NO: 494209 - RNA, 18 nt, Artificial Sequence
  Synthetic
uacuuucuugauguuuga

SEQ ID NO: 494210 - RNA, 19 nt, Artificial Sequence
  Synthetic
uuacuuucuugauguuuga

SEQ ID NO: 494211 - RNA, 20 nt, Artificial Sequence
  Synthetic
auuacuuucuugauguuuga

SEQ ID NO: 494212 - RNA, 21 nt, Artificial Sequence
  Synthetic
cauuacuuucuugauguuuga

SEQ ID NO: 494213 - RNA, 22 nt, Artificial Sequence
  Synthetic
acauuacuuucuugauguuuga

SEQ ID NO: 494214 - RNA, 23 nt, Artificial Sequence
  Synthetic
aacauuacuuucuugauguuuga

SEQ ID NO: 494215 - RNA, 24 nt, Artificial Sequence
  Synthetic
aaacauuacuuucuugauguuuga

SEQ ID NO: 494216 - RNA, 18 nt, Artificial Sequence
  Synthetic
acuuuauguacuguuuga

SEQ ID NO: 494217 - RNA, 19 nt, Artificial Sequence
  Synthetic
aacuuuauguacuguuuga

SEQ ID NO: 494218 - RNA, 20 nt, Artificial Sequence
  Synthetic
aaacuuuauguacuguuuga

SEQ ID NO: 494219 - RNA, 21 nt, Artificial Sequence
  Synthetic
gaaacuuuauguacuguuuga

SEQ ID NO: 494220 - RNA, 22 nt, Artificial Sequence
  Synthetic
ggaaacuuuauguacuguuuga

SEQ ID NO: 494221 - RNA, 23 nt, Artificial Sequence
  Synthetic
uggaaacuuuauguacuguuuga

SEQ ID NO: 494222 - RNA, 24 nt, Artificial Sequence
  Synthetic
auggaaacuuuauguacuguuuga

SEQ ID NO: 494223 - RNA, 18 nt, Artificial Sequence
  Synthetic
ccaaaaaggccuguuuga

SEQ ID NO: 494224 - RNA, 19 nt, Artificial Sequence
  Synthetic
cccaaaaaggccuguuuga

SEQ ID NO: 494225 - RNA, 20 nt, Artificial Sequence
  Synthetic
ucccaaaaaggccuguuuga

SEQ ID NO: 494226 - RNA, 21 nt, Artificial Sequence
  Synthetic
cucccaaaaaggccuguuuga

SEQ ID NO: 494227 - RNA, 22 nt, Artificial Sequence
  Synthetic
ucucccaaaaaggccuguuuga

SEQ ID NO: 494228 - RNA, 23 nt, Artificial Sequence
  Synthetic
gucucccaaaaaggccuguuuga

SEQ ID NO: 494229 - RNA, 24 nt, Artificial Sequence
  Synthetic
ugucucccaaaaaggccuguuuga

SEQ ID NO: 494230 - RNA, 18 nt, Artificial Sequence
  Synthetic
uuuaacaauaguguuuga

SEQ ID NO: 494231 - RNA, 19 nt, Artificial Sequence
  Synthetic
uuuuaacaauaguguuuga

SEQ ID NO: 494232 - RNA, 20 nt, Artificial Sequence
  Synthetic
guuuuaacaauaguguuuga

SEQ ID NO: 494233 - RNA, 21 nt, Artificial Sequence
  Synthetic
aguuuuaacaauaguguuuga

SEQ ID NO: 494234 - RNA, 22 nt, Artificial Sequence
  Synthetic
uaguuuuaacaauaguguuuga

SEQ ID NO: 494235 - RNA, 23 nt, Artificial Sequence
  Synthetic
uuaguuuuaacaauaguguuuga

SEQ ID NO: 494236 - RNA, 24 nt, Artificial Sequence
  Synthetic
uuuaguuuuaacaauaguguuuga

SEQ ID NO: 494237 - RNA, 18 nt, Artificial Sequence
  Synthetic
uuccauucaguuguuuga

SEQ ID NO: 494238 - RNA, 19 nt, Artificial Sequence
  Synthetic
uuuccauucaguuguuuga

SEQ ID NO: 494239 - RNA, 20 nt, Artificial Sequence
  Synthetic
cuuuccauucaguuguuuga

SEQ ID NO: 494240 - RNA, 21 nt, Artificial Sequence
  Synthetic
acuuuccauucaguuguuuga

SEQ ID NO: 494241 - RNA, 22 nt, Artificial Sequence
  Synthetic
cacuuuccauucaguuguuuga

SEQ ID NO: 494242 - RNA, 23 nt, Artificial Sequence
  Synthetic
acacuuuccauucaguuguuuga

SEQ ID NO: 494243 - RNA, 24 nt, Artificial Sequence
  Synthetic
uacacuuuccauucaguuguuuga

SEQ ID NO: 494244 - RNA, 18 nt, Artificial Sequence
  Synthetic
uguuuucguuuuguuuga

SEQ ID NO: 494245 - RNA, 19 nt, Artificial Sequence
  Synthetic
auguuuucguuuuguuuga

SEQ ID NO: 494246 - RNA, 20 nt, Artificial Sequence
  Synthetic
aauguuuucguuuuguuuga

SEQ ID NO: 494247 - RNA, 21 nt, Artificial Sequence
  Synthetic
uaauguuuucguuuuguuuga

SEQ ID NO: 494248 - RNA, 22 nt, Artificial Sequence
  Synthetic
uuaauguuuucguuuuguuuga

SEQ ID NO: 494249 - RNA, 23 nt, Artificial Sequence
  Synthetic
guuaauguuuucguuuuguuuga

SEQ ID NO: 494250 - RNA, 24 nt, Artificial Sequence
  Synthetic
aguuaauguuuucguuuuguuuga

SEQ ID NO: 494251 - RNA, 18 nt, Artificial Sequence
  Synthetic
agcaggaugaaauuuuga

SEQ ID NO: 494252 - RNA, 19 nt, Artificial Sequence
  Synthetic
uagcaggaugaaauuuuga

SEQ ID NO: 494253 - RNA, 20 nt, Artificial Sequence
  Synthetic
uuagcaggaugaaauuuuga

SEQ ID NO: 494254 - RNA, 21 nt, Artificial Sequence
  Synthetic
auuagcaggaugaaauuuuga

SEQ ID NO: 494255 - RNA, 22 nt, Artificial Sequence
  Synthetic
aauuagcaggaugaaauuuuga

SEQ ID NO: 494256 - RNA, 23 nt, Artificial Sequence
  Synthetic
gaauuagcaggaugaaauuuuga

SEQ ID NO: 494257 - RNA, 24 nt, Artificial Sequence
  Synthetic
agaauuagcaggaugaaauuuuga

SEQ ID NO: 494258 - RNA, 18 nt, Artificial Sequence
  Synthetic
agagagugagaauuuuga

SEQ ID NO: 494259 - RNA, 19 nt, Artificial Sequence
  Synthetic
gagagagugagaauuuuga

SEQ ID NO: 494260 - RNA, 20 nt, Artificial Sequence
  Synthetic
ggagagagugagaauuuuga

SEQ ID NO: 494261 - RNA, 21 nt, Artificial Sequence
  Synthetic
aggagagagugagaauuuuga

SEQ ID NO: 494262 - RNA, 22 nt, Artificial Sequence
  Synthetic
aaggagagagugagaauuuuga

SEQ ID NO: 494263 - RNA, 23 nt, Artificial Sequence
  Synthetic
caaggagagagugagaauuuuga

SEQ ID NO: 494264 - RNA, 24 nt, Artificial Sequence
  Synthetic
ucaaggagagagugagaauuuuga

SEQ ID NO: 494265 - RNA, 18 nt, Artificial Sequence
  Synthetic
ugaaacccauaauuuuga

SEQ ID NO: 494266 - RNA, 19 nt, Artificial Sequence
  Synthetic
uugaaacccauaauuuuga

SEQ ID NO: 494267 - RNA, 20 nt, Artificial Sequence
  Synthetic
guugaaacccauaauuuuga

SEQ ID NO: 494268 - RNA, 21 nt, Artificial Sequence
  Synthetic
uguugaaacccauaauuuuga

SEQ ID NO: 494269 - RNA, 22 nt, Artificial Sequence
  Synthetic
cuguugaaacccauaauuuuga

SEQ ID NO: 494270 - RNA, 23 nt, Artificial Sequence
  Synthetic
acuguugaaacccauaauuuuga

SEQ ID NO: 494271 - RNA, 24 nt, Artificial Sequence
  Synthetic
aacuguugaaacccauaauuuuga

SEQ ID NO: 494272 - RNA, 18 nt, Artificial Sequence
  Synthetic
uccuugauaagauuuuga

SEQ ID NO: 494273 - RNA, 19 nt, Artificial Sequence
  Synthetic
auccuugauaagauuuuga

SEQ ID NO: 494274 - RNA, 20 nt, Artificial Sequence
  Synthetic
aauccuugauaagauuuuga

SEQ ID NO: 494275 - RNA, 21 nt, Artificial Sequence
  Synthetic
aaauccuugauaagauuuuga

SEQ ID NO: 494276 - RNA, 22 nt, Artificial Sequence
  Synthetic
gaaauccuugauaagauuuuga

SEQ ID NO: 494277 - RNA, 23 nt, Artificial Sequence
  Synthetic
agaaauccuugauaagauuuuga

SEQ ID NO: 494278 - RNA, 24 nt, Artificial Sequence
  Synthetic
cagaaauccuugauaagauuuuga

SEQ ID NO: 494279 - RNA, 18 nt, Artificial Sequence
  Synthetic
ugcuugauaagauuuuga

SEQ ID NO: 494280 - RNA, 19 nt, Artificial Sequence
  Synthetic
uugcuugauaagauuuuga

SEQ ID NO: 494281 - RNA, 20 nt, Artificial Sequence
  Synthetic
uuugcuugauaagauuuuga

SEQ ID NO: 494282 - RNA, 21 nt, Artificial Sequence
  Synthetic
uuuugcuugauaagauuuuga

SEQ ID NO: 494283 - RNA, 22 nt, Artificial Sequence
  Synthetic
guuuugcuugauaagauuuuga

SEQ ID NO: 494284 - RNA, 23 nt, Artificial Sequence
  Synthetic
aguuuugcuugauaagauuuuga

SEQ ID NO: 494285 - RNA, 24 nt, Artificial Sequence
  Synthetic
caguuuugcuugauaagauuuuga

SEQ ID NO: 494286 - RNA, 18 nt, Artificial Sequence
  Synthetic
uucccagugagauuuuga

SEQ ID NO: 494287 - RNA, 19 nt, Artificial Sequence
  Synthetic
uuucccagugagauuuuga

SEQ ID NO: 494288 - RNA, 20 nt, Artificial Sequence
  Synthetic
uuuucccagugagauuuuga

SEQ ID NO: 494289 - RNA, 21 nt, Artificial Sequence
  Synthetic
cuuuucccagugagauuuuga

SEQ ID NO: 494290 - RNA, 22 nt, Artificial Sequence
  Synthetic
ccuuuucccagugagauuuuga

SEQ ID NO: 494291 - RNA, 23 nt, Artificial Sequence
  Synthetic
accuuuucccagugagauuuuga

SEQ ID NO: 494292 - RNA, 24 nt, Artificial Sequence
  Synthetic
uaccuuuucccagugagauuuuga

SEQ ID NO: 494293 - RNA, 18 nt, Artificial Sequence
  Synthetic
cuuaauaucugauuuuga

SEQ ID NO: 494294 - RNA, 19 nt, Artificial Sequence
  Synthetic
gcuuaauaucugauuuuga

SEQ ID NO: 494295 - RNA, 20 nt, Artificial Sequence
  Synthetic
agcuuaauaucugauuuuga

SEQ ID NO: 494296 - RNA, 21 nt, Artificial Sequence
  Synthetic
gagcuuaauaucugauuuuga

SEQ ID NO: 494297 - RNA, 22 nt, Artificial Sequence
  Synthetic
agagcuuaauaucugauuuuga

SEQ ID NO: 494298 - RNA, 23 nt, Artificial Sequence
  Synthetic
aagagcuuaauaucugauuuuga

SEQ ID NO: 494299 - RNA, 24 nt, Artificial Sequence
  Synthetic
caagagcuuaauaucugauuuuga

SEQ ID NO: 494300 - RNA, 18 nt, Artificial Sequence
  Synthetic
aaguguuuacuauuuuga

SEQ ID NO: 494301 - RNA, 19 nt, Artificial Sequence
  Synthetic
gaaguguuuacuauuuuga

SEQ ID NO: 494302 - RNA, 20 nt, Artificial Sequence
  Synthetic
ugaaguguuuacuauuuuga

SEQ ID NO: 494303 - RNA, 21 nt, Artificial Sequence
  Synthetic
cugaaguguuuacuauuuuga

SEQ ID NO: 494304 - RNA, 22 nt, Artificial Sequence
  Synthetic
gcugaaguguuuacuauuuuga

SEQ ID NO: 494305 - RNA, 23 nt, Artificial Sequence
  Synthetic
agcugaaguguuuacuauuuuga

SEQ ID NO: 494306 - RNA, 24 nt, Artificial Sequence
  Synthetic
cagcugaaguguuuacuauuuuga

SEQ ID NO: 494307 - RNA, 18 nt, Artificial Sequence
  Synthetic
auggggacuguauuuuga

SEQ ID NO: 494308 - RNA, 19 nt, Artificial Sequence
  Synthetic
cauggggacuguauuuuga

SEQ ID NO: 494309 - RNA, 20 nt, Artificial Sequence
  Synthetic
ccauggggacuguauuuuga

SEQ ID NO: 494310 - RNA, 21 nt, Artificial Sequence
  Synthetic
accauggggacuguauuuuga

SEQ ID NO: 494311 - RNA, 22 nt, Artificial Sequence
  Synthetic
gaccauggggacuguauuuuga

SEQ ID NO: 494312 - RNA, 23 nt, Artificial Sequence
  Synthetic
ggaccauggggacuguauuuuga

SEQ ID NO: 494313 - RNA, 24 nt, Artificial Sequence
  Synthetic
uggaccauggggacuguauuuuga

SEQ ID NO: 494314 - RNA, 18 nt, Artificial Sequence
  Synthetic
uaaauuucauuauuuuga

SEQ ID NO: 494315 - RNA, 19 nt, Artificial Sequence
  Synthetic
cuaaauuucauuauuuuga

SEQ ID NO: 494316 - RNA, 20 nt, Artificial Sequence
  Synthetic
ccuaaauuucauuauuuuga

SEQ ID NO: 494317 - RNA, 21 nt, Artificial Sequence
  Synthetic
gccuaaauuucauuauuuuga

SEQ ID NO: 494318 - RNA, 22 nt, Artificial Sequence
  Synthetic
agccuaaauuucauuauuuuga

SEQ ID NO: 494319 - RNA, 23 nt, Artificial Sequence
  Synthetic
cagccuaaauuucauuauuuuga

SEQ ID NO: 494320 - RNA, 24 nt, Artificial Sequence
  Synthetic
ccagccuaaauuucauuauuuuga

SEQ ID NO: 494321 - RNA, 18 nt, Artificial Sequence
  Synthetic
uuaaugugaaccuuuuga

SEQ ID NO: 494322 - RNA, 19 nt, Artificial Sequence
  Synthetic
auuaaugugaaccuuuuga

SEQ ID NO: 494323 - RNA, 20 nt, Artificial Sequence
  Synthetic
aauuaaugugaaccuuuuga

SEQ ID NO: 494324 - RNA, 21 nt, Artificial Sequence
  Synthetic
aaauuaaugugaaccuuuuga

SEQ ID NO: 494325 - RNA, 22 nt, Artificial Sequence
  Synthetic
aaaauuaaugugaaccuuuuga

SEQ ID NO: 494326 - RNA, 23 nt, Artificial Sequence
  Synthetic
uaaaauuaaugugaaccuuuuga

SEQ ID NO: 494327 - RNA, 24 nt, Artificial Sequence
  Synthetic
cuaaaauuaaugugaaccuuuuga

SEQ ID NO: 494328 - RNA, 18 nt, Artificial Sequence
  Synthetic
gaauauuacagcuuuuga

SEQ ID NO: 494329 - RNA, 19 nt, Artificial Sequence
  Synthetic
agaauauuacagcuuuuga

SEQ ID NO: 494330 - RNA, 20 nt, Artificial Sequence
  Synthetic
uagaauauuacagcuuuuga

SEQ ID NO: 494331 - RNA, 21 nt, Artificial Sequence
  Synthetic
cuagaauauuacagcuuuuga

SEQ ID NO: 494332 - RNA, 22 nt, Artificial Sequence
  Synthetic
ucuagaauauuacagcuuuuga

SEQ ID NO: 494333 - RNA, 23 nt, Artificial Sequence
  Synthetic
uucuagaauauuacagcuuuuga

SEQ ID NO: 494334 - RNA, 24 nt, Artificial Sequence
  Synthetic
auucuagaauauuacagcuuuuga

SEQ ID NO: 494335 - RNA, 18 nt, Artificial Sequence
  Synthetic
cuucaugaaugcuuuuga

SEQ ID NO: 494336 - RNA, 19 nt, Artificial Sequence
  Synthetic
gcuucaugaaugcuuuuga

SEQ ID NO: 494337 - RNA, 20 nt, Artificial Sequence
  Synthetic
ugcuucaugaaugcuuuuga

SEQ ID NO: 494338 - RNA, 21 nt, Artificial Sequence
  Synthetic
gugcuucaugaaugcuuuuga

SEQ ID NO: 494339 - RNA, 22 nt, Artificial Sequence
  Synthetic
ggugcuucaugaaugcuuuuga

SEQ ID NO: 494340 - RNA, 23 nt, Artificial Sequence
  Synthetic
aggugcuucaugaaugcuuuuga

SEQ ID NO: 494341 - RNA, 24 nt, Artificial Sequence
  Synthetic
caggugcuucaugaaugcuuuuga

SEQ ID NO: 494342 - RNA, 18 nt, Artificial Sequence
  Synthetic
auuuccaacugcuuuuga

SEQ ID NO: 494343 - RNA, 19 nt, Artificial Sequence
  Synthetic
aauuuccaacugcuuuuga

SEQ ID NO: 494344 - RNA, 20 nt, Artificial Sequence
  Synthetic
uaauuuccaacugcuuuuga

SEQ ID NO: 494345 - RNA, 21 nt, Artificial Sequence
  Synthetic
auaauuuccaacugcuuuuga

SEQ ID NO: 494346 - RNA, 22 nt, Artificial Sequence
  Synthetic
cauaauuuccaacugcuuuuga

SEQ ID NO: 494347 - RNA, 23 nt, Artificial Sequence
  Synthetic
gcauaauuuccaacugcuuuuga

SEQ ID NO: 494348 - RNA, 24 nt, Artificial Sequence
  Synthetic
agcauaauuuccaacugcuuuuga

SEQ ID NO: 494349 - RNA, 18 nt, Artificial Sequence
  Synthetic
ucaaagaguugcuuuuga

SEQ ID NO: 494350 - RNA, 19 nt, Artificial Sequence
  Synthetic
gucaaagaguugcuuuuga

SEQ ID NO: 494351 - RNA, 20 nt, Artificial Sequence
  Synthetic
agucaaagaguugcuuuuga

SEQ ID NO: 494352 - RNA, 21 nt, Artificial Sequence
  Synthetic
gagucaaagaguugcuuuuga

SEQ ID NO: 494353 - RNA, 22 nt, Artificial Sequence
  Synthetic
ggagucaaagaguugcuuuuga

SEQ ID NO: 494354 - RNA, 23 nt, Artificial Sequence
  Synthetic
uggagucaaagaguugcuuuuga

SEQ ID NO: 494355 - RNA, 24 nt, Artificial Sequence
  Synthetic
cuggagucaaagaguugcuuuuga

SEQ ID NO: 494356 - RNA, 18 nt, Artificial Sequence
  Synthetic
uaucuaucggucuuuuga

SEQ ID NO: 494357 - RNA, 19 nt, Artificial Sequence
  Synthetic
auaucuaucggucuuuuga

SEQ ID NO: 494358 - RNA, 20 nt, Artificial Sequence
  Synthetic
aauaucuaucggucuuuuga

SEQ ID NO: 494359 - RNA, 21 nt, Artificial Sequence
  Synthetic
gaauaucuaucggucuuuuga

SEQ ID NO: 494360 - RNA, 22 nt, Artificial Sequence
  Synthetic
ugaauaucuaucggucuuuuga

SEQ ID NO: 494361 - RNA, 23 nt, Artificial Sequence
  Synthetic
cugaauaucuaucggucuuuuga

SEQ ID NO: 494362 - RNA, 24 nt, Artificial Sequence
  Synthetic
acugaauaucuaucggucuuuuga

SEQ ID NO: 494363 - RNA, 18 nt, Artificial Sequence
  Synthetic
acaucuguucaguuuuga

SEQ ID NO: 494364 - RNA, 19 nt, Artificial Sequence
  Synthetic
aacaucuguucaguuuuga

SEQ ID NO: 494365 - RNA, 20 nt, Artificial Sequence
  Synthetic
uaacaucuguucaguuuuga

SEQ ID NO: 494366 - RNA, 21 nt, Artificial Sequence
  Synthetic
auaacaucuguucaguuuuga

SEQ ID NO: 494367 - RNA, 22 nt, Artificial Sequence
  Synthetic
aauaacaucuguucaguuuuga

SEQ ID NO: 494368 - RNA, 23 nt, Artificial Sequence
  Synthetic
aaauaacaucuguucaguuuuga

SEQ ID NO: 494369 - RNA, 24 nt, Artificial Sequence
  Synthetic
caaauaacaucuguucaguuuuga

SEQ ID NO: 494370 - RNA, 18 nt, Artificial Sequence
  Synthetic
augaugugaguguuuuga

SEQ ID NO: 494371 - RNA, 19 nt, Artificial Sequence
  Synthetic
aaugaugugaguguuuuga

SEQ ID NO: 494372 - RNA, 20 nt, Artificial Sequence
  Synthetic
caaugaugugaguguuuuga

SEQ ID NO: 494373 - RNA, 21 nt, Artificial Sequence
  Synthetic
acaaugaugugaguguuuuga

SEQ ID NO: 494374 - RNA, 22 nt, Artificial Sequence
  Synthetic
aacaaugaugugaguguuuuga

SEQ ID NO: 494375 - RNA, 23 nt, Artificial Sequence
  Synthetic
gaacaaugaugugaguguuuuga

SEQ ID NO: 494376 - RNA, 24 nt, Artificial Sequence
  Synthetic
ugaacaaugaugugaguguuuuga

SEQ ID NO: 494377 - RNA, 18 nt, Artificial Sequence
  Synthetic
aguacuuuguuguuuuga

SEQ ID NO: 494378 - RNA, 19 nt, Artificial Sequence
  Synthetic
caguacuuuguuguuuuga

SEQ ID NO: 494379 - RNA, 20 nt, Artificial Sequence
  Synthetic
acaguacuuuguuguuuuga

SEQ ID NO: 494380 - RNA, 21 nt, Artificial Sequence
  Synthetic
gacaguacuuuguuguuuuga

SEQ ID NO: 494381 - RNA, 22 nt, Artificial Sequence
  Synthetic
ggacaguacuuuguuguuuuga

SEQ ID NO: 494382 - RNA, 23 nt, Artificial Sequence
  Synthetic
cggacaguacuuuguuguuuuga

SEQ ID NO: 494383 - RNA, 24 nt, Artificial Sequence
  Synthetic
ccggacaguacuuuguuguuuuga

SEQ ID NO: 494384 - RNA, 18 nt, Artificial Sequence
  Synthetic
ugcauaauguauuuuuga

SEQ ID NO: 494385 - RNA, 19 nt, Artificial Sequence
  Synthetic
augcauaauguauuuuuga

SEQ ID NO: 494386 - RNA, 20 nt, Artificial Sequence
  Synthetic
uaugcauaauguauuuuuga

SEQ ID NO: 494387 - RNA, 21 nt, Artificial Sequence
  Synthetic
uuaugcauaauguauuuuuga

SEQ ID NO: 494388 - RNA, 22 nt, Artificial Sequence
  Synthetic
uuuaugcauaauguauuuuuga

SEQ ID NO: 494389 - RNA, 23 nt, Artificial Sequence
  Synthetic
guuuaugcauaauguauuuuuga

SEQ ID NO: 494390 - RNA, 24 nt, Artificial Sequence
  Synthetic
aguuuaugcauaauguauuuuuga

SEQ ID NO: 494391 - RNA, 18 nt, Artificial Sequence
  Synthetic
agggaaucuuauuuuuga

SEQ ID NO: 494392 - RNA, 19 nt, Artificial Sequence
  Synthetic
aagggaaucuuauuuuuga

SEQ ID NO: 494393 - RNA, 20 nt, Artificial Sequence
  Synthetic
caagggaaucuuauuuuuga

SEQ ID NO: 494394 - RNA, 21 nt, Artificial Sequence
  Synthetic
acaagggaaucuuauuuuuga

SEQ ID NO: 494395 - RNA, 22 nt, Artificial Sequence
  Synthetic
aacaagggaaucuuauuuuuga

SEQ ID NO: 494396 - RNA, 23 nt, Artificial Sequence
  Synthetic
uaacaagggaaucuuauuuuuga

SEQ ID NO: 494397 - RNA, 24 nt, Artificial Sequence
  Synthetic
uuaacaagggaaucuuauuuuuga

SEQ ID NO: 494398 - RNA, 18 nt, Artificial Sequence
  Synthetic
cuccuucuagguuuuuga

SEQ ID NO: 494399 - RNA, 19 nt, Artificial Sequence
  Synthetic
ccuccuucuagguuuuuga

SEQ ID NO: 494400 - RNA, 20 nt, Artificial Sequence
  Synthetic
accuccuucuagguuuuuga

SEQ ID NO: 494401 - RNA, 21 nt, Artificial Sequence
  Synthetic
uaccuccuucuagguuuuuga

SEQ ID NO: 494402 - RNA, 22 nt, Artificial Sequence
  Synthetic
uuaccuccuucuagguuuuuga

SEQ ID NO: 494403 - RNA, 23 nt, Artificial Sequence
  Synthetic
auuaccuccuucuagguuuuuga

SEQ ID NO: 494404 - RNA, 24 nt, Artificial Sequence
  Synthetic
uauuaccuccuucuagguuuuuga

SEQ ID NO: 494405 - RNA, 18 nt, Artificial Sequence
  Synthetic
uuugaaaaaaaaaaaaua

SEQ ID NO: 494406 - RNA, 19 nt, Artificial Sequence
  Synthetic
auuugaaaaaaaaaaaaua

SEQ ID NO: 494407 - RNA, 20 nt, Artificial Sequence
  Synthetic
aauuugaaaaaaaaaaaaua

SEQ ID NO: 494408 - RNA, 21 nt, Artificial Sequence
  Synthetic
aaauuugaaaaaaaaaaaaua

SEQ ID NO: 494409 - RNA, 22 nt, Artificial Sequence
  Synthetic
gaaauuugaaaaaaaaaaaaua

SEQ ID NO: 494410 - RNA, 23 nt, Artificial Sequence
  Synthetic
agaaauuugaaaaaaaaaaaaua

SEQ ID NO: 494411 - RNA, 24 nt, Artificial Sequence
  Synthetic
cagaaauuugaaaaaaaaaaaaua

SEQ ID NO: 494412 - RNA, 18 nt, Artificial Sequence
  Synthetic
auuuugggaaaaaaaaua

SEQ ID NO: 494413 - RNA, 19 nt, Artificial Sequence
  Synthetic
gauuuugggaaaaaaaaua

SEQ ID NO: 494414 - RNA, 20 nt, Artificial Sequence
  Synthetic
agauuuugggaaaaaaaaua

SEQ ID NO: 494415 - RNA, 21 nt, Artificial Sequence
  Synthetic
aagauuuugggaaaaaaaaua

SEQ ID NO: 494416 - RNA, 22 nt, Artificial Sequence
  Synthetic
uaagauuuugggaaaaaaaaua

SEQ ID NO: 494417 - RNA, 23 nt, Artificial Sequence
  Synthetic
guaagauuuugggaaaaaaaaua

SEQ ID NO: 494418 - RNA, 24 nt, Artificial Sequence
  Synthetic
uguaagauuuugggaaaaaaaaua

SEQ ID NO: 494419 - RNA, 18 nt, Artificial Sequence
  Synthetic
aaaauaaaauaaaaaaua

SEQ ID NO: 494420 - RNA, 19 nt, Artificial Sequence
  Synthetic
uaaaauaaaauaaaaaaua

SEQ ID NO: 494421 - RNA, 20 nt, Artificial Sequence
  Synthetic
uuaaaauaaaauaaaaaaua

SEQ ID NO: 494422 - RNA, 21 nt, Artificial Sequence
  Synthetic
auuaaaauaaaauaaaaaaua

SEQ ID NO: 494423 - RNA, 22 nt, Artificial Sequence
  Synthetic
aauuaaaauaaaauaaaaaaua

SEQ ID NO: 494424 - RNA, 23 nt, Artificial Sequence
  Synthetic
caauuaaaauaaaauaaaaaaua

SEQ ID NO: 494425 - RNA, 24 nt, Artificial Sequence
  Synthetic
ucaauuaaaauaaaauaaaaaaua

SEQ ID NO: 494426 - RNA, 18 nt, Artificial Sequence
  Synthetic
aaucaggacacaaaaaua

SEQ ID NO: 494427 - RNA, 19 nt, Artificial Sequence
  Synthetic
gaaucaggacacaaaaaua

SEQ ID NO: 494428 - RNA, 20 nt, Artificial Sequence
  Synthetic
agaaucaggacacaaaaaua

SEQ ID NO: 494429 - RNA, 21 nt, Artificial Sequence
  Synthetic
uagaaucaggacacaaaaaua

SEQ ID NO: 494430 - RNA, 22 nt, Artificial Sequence
  Synthetic
uuagaaucaggacacaaaaaua

SEQ ID NO: 494431 - RNA, 23 nt, Artificial Sequence
  Synthetic
uuuagaaucaggacacaaaaaua

SEQ ID NO: 494432 - RNA, 24 nt, Artificial Sequence
  Synthetic
auuuagaaucaggacacaaaaaua

SEQ ID NO: 494433 - RNA, 18 nt, Artificial Sequence
  Synthetic
uuuuacuuuucaaaaaua

SEQ ID NO: 494434 - RNA, 19 nt, Artificial Sequence
  Synthetic
cuuuuacuuuucaaaaaua

SEQ ID NO: 494435 - RNA, 20 nt, Artificial Sequence
  Synthetic
ucuuuuacuuuucaaaaaua

SEQ ID NO: 494436 - RNA, 21 nt, Artificial Sequence
  Synthetic
aucuuuuacuuuucaaaaaua

SEQ ID NO: 494437 - RNA, 22 nt, Artificial Sequence
  Synthetic
aaucuuuuacuuuucaaaaaua

SEQ ID NO: 494438 - RNA, 23 nt, Artificial Sequence
  Synthetic
uaaucuuuuacuuuucaaaaaua

SEQ ID NO: 494439 - RNA, 24 nt, Artificial Sequence
  Synthetic
uuaaucuuuuacuuuucaaaaaua

SEQ ID NO: 494440 - RNA, 18 nt, Artificial Sequence
  Synthetic
uuuacuagaagaaaaaua

SEQ ID NO: 494441 - RNA, 19 nt, Artificial Sequence
  Synthetic
uuuuacuagaagaaaaaua

SEQ ID NO: 494442 - RNA, 20 nt, Artificial Sequence
  Synthetic
guuuuacuagaagaaaaaua

SEQ ID NO: 494443 - RNA, 21 nt, Artificial Sequence
  Synthetic
uguuuuacuagaagaaaaaua

SEQ ID NO: 494444 - RNA, 22 nt, Artificial Sequence
  Synthetic
auguuuuacuagaagaaaaaua

SEQ ID NO: 494445 - RNA, 23 nt, Artificial Sequence
  Synthetic
gauguuuuacuagaagaaaaaua

SEQ ID NO: 494446 - RNA, 24 nt, Artificial Sequence
  Synthetic
ggauguuuuacuagaagaaaaaua

SEQ ID NO: 494447 - RNA, 18 nt, Artificial Sequence
  Synthetic
uucacauugagaaaaaua

SEQ ID NO: 494448 - RNA, 19 nt, Artificial Sequence
  Synthetic
guucacauugagaaaaaua

SEQ ID NO: 494449 - RNA, 20 nt, Artificial Sequence
  Synthetic
uguucacauugagaaaaaua

SEQ ID NO: 494450 - RNA, 21 nt, Artificial Sequence
  Synthetic
auguucacauugagaaaaaua

SEQ ID NO: 494451 - RNA, 22 nt, Artificial Sequence
  Synthetic
cauguucacauugagaaaaaua

SEQ ID NO: 494452 - RNA, 23 nt, Artificial Sequence
  Synthetic
gcauguucacauugagaaaaaua

SEQ ID NO: 494453 - RNA, 24 nt, Artificial Sequence
  Synthetic
ugcauguucacauugagaaaaaua

SEQ ID NO: 494454 - RNA, 18 nt, Artificial Sequence
  Synthetic
gaagaaucuagaaaaaua

SEQ ID NO: 494455 - RNA, 19 nt, Artificial Sequence
  Synthetic
agaagaaucuagaaaaaua

SEQ ID NO: 494456 - RNA, 20 nt, Artificial Sequence
  Synthetic
gagaagaaucuagaaaaaua

SEQ ID NO: 494457 - RNA, 21 nt, Artificial Sequence
  Synthetic
ggagaagaaucuagaaaaaua

SEQ ID NO: 494458 - RNA, 22 nt, Artificial Sequence
  Synthetic
aggagaagaaucuagaaaaaua

SEQ ID NO: 494459 - RNA, 23 nt, Artificial Sequence
  Synthetic
uaggagaagaaucuagaaaaaua

SEQ ID NO: 494460 - RNA, 24 nt, Artificial Sequence
  Synthetic
cuaggagaagaaucuagaaaaaua

SEQ ID NO: 494461 - RNA, 18 nt, Artificial Sequence
  Synthetic
agaaaagugggaaaaaua

SEQ ID NO: 494462 - RNA, 19 nt, Artificial Sequence
  Synthetic
uagaaaagugggaaaaaua

SEQ ID NO: 494463 - RNA, 20 nt, Artificial Sequence
  Synthetic
cuagaaaagugggaaaaaua

SEQ ID NO: 494464 - RNA, 21 nt, Artificial Sequence
  Synthetic
ucuagaaaagugggaaaaaua

SEQ ID NO: 494465 - RNA, 22 nt, Artificial Sequence
  Synthetic
aucuagaaaagugggaaaaaua

SEQ ID NO: 494466 - RNA, 23 nt, Artificial Sequence
  Synthetic
aaucuagaaaagugggaaaaaua

SEQ ID NO: 494467 - RNA, 24 nt, Artificial Sequence
  Synthetic
gaaucuagaaaagugggaaaaaua

SEQ ID NO: 494468 - RNA, 18 nt, Artificial Sequence
  Synthetic
ucuaagagaugaaaaaua

SEQ ID NO: 494469 - RNA, 19 nt, Artificial Sequence
  Synthetic
aucuaagagaugaaaaaua

SEQ ID NO: 494470 - RNA, 20 nt, Artificial Sequence
  Synthetic
caucuaagagaugaaaaaua

SEQ ID NO: 494471 - RNA, 21 nt, Artificial Sequence
  Synthetic
ucaucuaagagaugaaaaaua

SEQ ID NO: 494472 - RNA, 22 nt, Artificial Sequence
  Synthetic
uucaucuaagagaugaaaaaua

SEQ ID NO: 494473 - RNA, 23 nt, Artificial Sequence
  Synthetic
uuucaucuaagagaugaaaaaua

SEQ ID NO: 494474 - RNA, 24 nt, Artificial Sequence
  Synthetic
auuucaucuaagagaugaaaaaua

SEQ ID NO: 494475 - RNA, 18 nt, Artificial Sequence
  Synthetic
accacugacauaaaaaua

SEQ ID NO: 494476 - RNA, 19 nt, Artificial Sequence
  Synthetic
uaccacugacauaaaaaua

SEQ ID NO: 494477 - RNA, 20 nt, Artificial Sequence
  Synthetic
auaccacugacauaaaaaua

SEQ ID NO: 494478 - RNA, 21 nt, Artificial Sequence
  Synthetic
gauaccacugacauaaaaaua

SEQ ID NO: 494479 - RNA, 22 nt, Artificial Sequence
  Synthetic
ggauaccacugacauaaaaaua

SEQ ID NO: 494480 - RNA, 23 nt, Artificial Sequence
  Synthetic
aggauaccacugacauaaaaaua

SEQ ID NO: 494481 - RNA, 24 nt, Artificial Sequence
  Synthetic
uaggauaccacugacauaaaaaua

SEQ ID NO: 494482 - RNA, 18 nt, Artificial Sequence
  Synthetic
cauauuuucauaaaaaua

SEQ ID NO: 494483 - RNA, 19 nt, Artificial Sequence
  Synthetic
acauauuuucauaaaaaua

SEQ ID NO: 494484 - RNA, 20 nt, Artificial Sequence
  Synthetic
aacauauuuucauaaaaaua

SEQ ID NO: 494485 - RNA, 21 nt, Artificial Sequence
  Synthetic
aaacauauuuucauaaaaaua

SEQ ID NO: 494486 - RNA, 22 nt, Artificial Sequence
  Synthetic
aaaacauauuuucauaaaaaua

SEQ ID NO: 494487 - RNA, 23 nt, Artificial Sequence
  Synthetic
uaaaacauauuuucauaaaaaua

SEQ ID NO: 494488 - RNA, 24 nt, Artificial Sequence
  Synthetic
guaaaacauauuuucauaaaaaua

SEQ ID NO: 494489 - RNA, 18 nt, Artificial Sequence
  Synthetic
cacauggugauaaaaaua

SEQ ID NO: 494490 - RNA, 19 nt, Artificial Sequence
  Synthetic
ccacauggugauaaaaaua

SEQ ID NO: 494491 - RNA, 20 nt, Artificial Sequence
  Synthetic
accacauggugauaaaaaua

SEQ ID NO: 494492 - RNA, 21 nt, Artificial Sequence
  Synthetic
aaccacauggugauaaaaaua

SEQ ID NO: 494493 - RNA, 22 nt, Artificial Sequence
  Synthetic
caaccacauggugauaaaaaua

SEQ ID NO: 494494 - RNA, 23 nt, Artificial Sequence
  Synthetic
ccaaccacauggugauaaaaaua

SEQ ID NO: 494495 - RNA, 24 nt, Artificial Sequence
  Synthetic
uccaaccacauggugauaaaaaua

SEQ ID NO: 494496 - RNA, 18 nt, Artificial Sequence
  Synthetic
aaauucauauacaaaaua

SEQ ID NO: 494497 - RNA, 19 nt, Artificial Sequence
  Synthetic
aaaauucauauacaaaaua

SEQ ID NO: 494498 - RNA, 20 nt, Artificial Sequence
  Synthetic
caaaauucauauacaaaaua

SEQ ID NO: 494499 - RNA, 21 nt, Artificial Sequence
  Synthetic
acaaaauucauauacaaaaua

SEQ ID NO: 494500 - RNA, 22 nt, Artificial Sequence
  Synthetic
cacaaaauucauauacaaaaua

SEQ ID NO: 494501 - RNA, 23 nt, Artificial Sequence
  Synthetic
acacaaaauucauauacaaaaua

SEQ ID NO: 494502 - RNA, 24 nt, Artificial Sequence
  Synthetic
gacacaaaauucauauacaaaaua

SEQ ID NO: 494503 - RNA, 18 nt, Artificial Sequence
  Synthetic
ggcguuugaaccaaaaua

SEQ ID NO: 494504 - RNA, 19 nt, Artificial Sequence
  Synthetic
aggcguuugaaccaaaaua

SEQ ID NO: 494505 - RNA, 20 nt, Artificial Sequence
  Synthetic
aaggcguuugaaccaaaaua

SEQ ID NO: 494506 - RNA, 21 nt, Artificial Sequence
  Synthetic
gaaggcguuugaaccaaaaua

SEQ ID NO: 494507 - RNA, 22 nt, Artificial Sequence
  Synthetic
ggaaggcguuugaaccaaaaua

SEQ ID NO: 494508 - RNA, 23 nt, Artificial Sequence
  Synthetic
gggaaggcguuugaaccaaaaua

SEQ ID NO: 494509 - RNA, 24 nt, Artificial Sequence
  Synthetic
agggaaggcguuugaaccaaaaua

SEQ ID NO: 494510 - RNA, 18 nt, Artificial Sequence
  Synthetic
gagaaauuggccaaaaua

SEQ ID NO: 494511 - RNA, 19 nt, Artificial Sequence
  Synthetic
ggagaaauuggccaaaaua

SEQ ID NO: 494512 - RNA, 20 nt, Artificial Sequence
  Synthetic
gggagaaauuggccaaaaua

SEQ ID NO: 494513 - RNA, 21 nt, Artificial Sequence
  Synthetic
ugggagaaauuggccaaaaua

SEQ ID NO: 494514 - RNA, 22 nt, Artificial Sequence
  Synthetic
augggagaaauuggccaaaaua

SEQ ID NO: 494515 - RNA, 23 nt, Artificial Sequence
  Synthetic
aaugggagaaauuggccaaaaua

SEQ ID NO: 494516 - RNA, 24 nt, Artificial Sequence
  Synthetic
gaaugggagaaauuggccaaaaua

SEQ ID NO: 494517 - RNA, 18 nt, Artificial Sequence
  Synthetic
uuuauacuaaucaaaaua

SEQ ID NO: 494518 - RNA, 19 nt, Artificial Sequence
  Synthetic
auuuauacuaaucaaaaua

SEQ ID NO: 494519 - RNA, 20 nt, Artificial Sequence
  Synthetic
cauuuauacuaaucaaaaua

SEQ ID NO: 494520 - RNA, 21 nt, Artificial Sequence
  Synthetic
acauuuauacuaaucaaaaua

SEQ ID NO: 494521 - RNA, 22 nt, Artificial Sequence
  Synthetic
aacauuuauacuaaucaaaaua

SEQ ID NO: 494522 - RNA, 23 nt, Artificial Sequence
  Synthetic
gaacauuuauacuaaucaaaaua

SEQ ID NO: 494523 - RNA, 24 nt, Artificial Sequence
  Synthetic
ugaacauuuauacuaaucaaaaua

SEQ ID NO: 494524 - RNA, 18 nt, Artificial Sequence
  Synthetic
gcuguauauuucaaaaua

SEQ ID NO: 494525 - RNA, 19 nt, Artificial Sequence
  Synthetic
ugcuguauauuucaaaaua

SEQ ID NO: 494526 - RNA, 20 nt, Artificial Sequence
  Synthetic
gugcuguauauuucaaaaua

SEQ ID NO: 494527 - RNA, 21 nt, Artificial Sequence
  Synthetic
ugugcuguauauuucaaaaua

SEQ ID NO: 494528 - RNA, 22 nt, Artificial Sequence
  Synthetic
uugugcuguauauuucaaaaua

SEQ ID NO: 494529 - RNA, 23 nt, Artificial Sequence
  Synthetic
auugugcuguauauuucaaaaua

SEQ ID NO: 494530 - RNA, 24 nt, Artificial Sequence
  Synthetic
uauugugcuguauauuucaaaaua

SEQ ID NO: 494531 - RNA, 18 nt, Artificial Sequence
  Synthetic
agaaguuauuucaaaaua

SEQ ID NO: 494532 - RNA, 19 nt, Artificial Sequence
  Synthetic
aagaaguuauuucaaaaua

SEQ ID NO: 494533 - RNA, 20 nt, Artificial Sequence
  Synthetic
aaagaaguuauuucaaaaua

SEQ ID NO: 494534 - RNA, 21 nt, Artificial Sequence
  Synthetic
gaaagaaguuauuucaaaaua

SEQ ID NO: 494535 - RNA, 22 nt, Artificial Sequence
  Synthetic
ggaaagaaguuauuucaaaaua

SEQ ID NO: 494536 - RNA, 23 nt, Artificial Sequence
  Synthetic
aggaaagaaguuauuucaaaaua

SEQ ID NO: 494537 - RNA, 24 nt, Artificial Sequence
  Synthetic
aaggaaagaaguuauuucaaaaua

SEQ ID NO: 494538 - RNA, 18 nt, Artificial Sequence
  Synthetic
aguuuucaaaagaaaaua

SEQ ID NO: 494539 - RNA, 19 nt, Artificial Sequence
  Synthetic
aaguuuucaaaagaaaaua

SEQ ID NO: 494540 - RNA, 20 nt, Artificial Sequence
  Synthetic
aaaguuuucaaaagaaaaua

SEQ ID NO: 494541 - RNA, 21 nt, Artificial Sequence
  Synthetic
uaaaguuuucaaaagaaaaua

SEQ ID NO: 494542 - RNA, 22 nt, Artificial Sequence
  Synthetic
auaaaguuuucaaaagaaaaua

SEQ ID NO: 494543 - RNA, 23 nt, Artificial Sequence
  Synthetic
aauaaaguuuucaaaagaaaaua

SEQ ID NO: 494544 - RNA, 24 nt, Artificial Sequence
  Synthetic
aaauaaaguuuucaaaagaaaaua

SEQ ID NO: 494545 - RNA, 18 nt, Artificial Sequence
  Synthetic
aaguccucaaagaaaaua

SEQ ID NO: 494546 - RNA, 19 nt, Artificial Sequence
  Synthetic
gaaguccucaaagaaaaua

SEQ ID NO: 494547 - RNA, 20 nt, Artificial Sequence
  Synthetic
ggaaguccucaaagaaaaua

SEQ ID NO: 494548 - RNA, 21 nt, Artificial Sequence
  Synthetic
aggaaguccucaaagaaaaua

SEQ ID NO: 494549 - RNA, 22 nt, Artificial Sequence
  Synthetic
caggaaguccucaaagaaaaua

SEQ ID NO: 494550 - RNA, 23 nt, Artificial Sequence
  Synthetic
acaggaaguccucaaagaaaaua

SEQ ID NO: 494551 - RNA, 24 nt, Artificial Sequence
  Synthetic
uacaggaaguccucaaagaaaaua

SEQ ID NO: 494552 - RNA, 18 nt, Artificial Sequence
  Synthetic
uacuuuucuaagaaaaua

SEQ ID NO: 494553 - RNA, 19 nt, Artificial Sequence
  Synthetic
cuacuuuucuaagaaaaua

SEQ ID NO: 494554 - RNA, 20 nt, Artificial Sequence
  Synthetic
acuacuuuucuaagaaaaua

SEQ ID NO: 494555 - RNA, 21 nt, Artificial Sequence
  Synthetic
uacuacuuuucuaagaaaaua

SEQ ID NO: 494556 - RNA, 22 nt, Artificial Sequence
  Synthetic
cuacuacuuuucuaagaaaaua

SEQ ID NO: 494557 - RNA, 23 nt, Artificial Sequence
  Synthetic
ucuacuacuuuucuaagaaaaua

SEQ ID NO: 494558 - RNA, 24 nt, Artificial Sequence
  Synthetic
aucuacuacuuuucuaagaaaaua

SEQ ID NO: 494559 - RNA, 18 nt, Artificial Sequence
  Synthetic
uuuuaggguaagaaaaua

SEQ ID NO: 494560 - RNA, 19 nt, Artificial Sequence
  Synthetic
auuuuaggguaagaaaaua

SEQ ID NO: 494561 - RNA, 20 nt, Artificial Sequence
  Synthetic
aauuuuaggguaagaaaaua

SEQ ID NO: 494562 - RNA, 21 nt, Artificial Sequence
  Synthetic
aaauuuuaggguaagaaaaua

SEQ ID NO: 494563 - RNA, 22 nt, Artificial Sequence
  Synthetic
aaaauuuuaggguaagaaaaua

SEQ ID NO: 494564 - RNA, 23 nt, Artificial Sequence
  Synthetic
caaaauuuuaggguaagaaaaua

SEQ ID NO: 494565 - RNA, 24 nt, Artificial Sequence
  Synthetic
ucaaaauuuuaggguaagaaaaua

SEQ ID NO: 494566 - RNA, 18 nt, Artificial Sequence
  Synthetic
accguucaacagaaaaua

SEQ ID NO: 494567 - RNA, 19 nt, Artificial Sequence
  Synthetic
uaccguucaacagaaaaua

SEQ ID NO: 494568 - RNA, 20 nt, Artificial Sequence
  Synthetic
uuaccguucaacagaaaaua

SEQ ID NO: 494569 - RNA, 21 nt, Artificial Sequence
  Synthetic
cuuaccguucaacagaaaaua

SEQ ID NO: 494570 - RNA, 22 nt, Artificial Sequence
  Synthetic
acuuaccguucaacagaaaaua

SEQ ID NO: 494571 - RNA, 23 nt, Artificial Sequence
  Synthetic
aacuuaccguucaacagaaaaua

SEQ ID NO: 494572 - RNA, 24 nt, Artificial Sequence
  Synthetic
caacuuaccguucaacagaaaaua

SEQ ID NO: 494573 - RNA, 18 nt, Artificial Sequence
  Synthetic
accugcauacagaaaaua

SEQ ID NO: 494574 - RNA, 19 nt, Artificial Sequence
  Synthetic
aaccugcauacagaaaaua

SEQ ID NO: 494575 - RNA, 20 nt, Artificial Sequence
  Synthetic
aaaccugcauacagaaaaua

SEQ ID NO: 494576 - RNA, 21 nt, Artificial Sequence
  Synthetic
uaaaccugcauacagaaaaua

SEQ ID NO: 494577 - RNA, 22 nt, Artificial Sequence
  Synthetic
cuaaaccugcauacagaaaaua

SEQ ID NO: 494578 - RNA, 23 nt, Artificial Sequence
  Synthetic
acuaaaccugcauacagaaaaua

SEQ ID NO: 494579 - RNA, 24 nt, Artificial Sequence
  Synthetic
aacuaaaccugcauacagaaaaua

SEQ ID NO: 494580 - RNA, 18 nt, Artificial Sequence
  Synthetic
uugauggaagagaaaaua

SEQ ID NO: 494581 - RNA, 19 nt, Artificial Sequence
  Synthetic
cuugauggaagagaaaaua

SEQ ID NO: 494582 - RNA, 20 nt, Artificial Sequence
  Synthetic
ucuugauggaagagaaaaua

SEQ ID NO: 494583 - RNA, 21 nt, Artificial Sequence
  Synthetic
cucuugauggaagagaaaaua

SEQ ID NO: 494584 - RNA, 22 nt, Artificial Sequence
  Synthetic
gcucuugauggaagagaaaaua

SEQ ID NO: 494585 - RNA, 23 nt, Artificial Sequence
  Synthetic
ugcucuugauggaagagaaaaua

SEQ ID NO: 494586 - RNA, 24 nt, Artificial Sequence
  Synthetic
cugcucuugauggaagagaaaaua

SEQ ID NO: 494587 - RNA, 18 nt, Artificial Sequence
  Synthetic
ucaaauugagagaaaaua

SEQ ID NO: 494588 - RNA, 19 nt, Artificial Sequence
  Synthetic
gucaaauugagagaaaaua

SEQ ID NO: 494589 - RNA, 20 nt, Artificial Sequence
  Synthetic
ugucaaauugagagaaaaua

SEQ ID NO: 494590 - RNA, 21 nt, Artificial Sequence
  Synthetic
gugucaaauugagagaaaaua

SEQ ID NO: 494591 - RNA, 22 nt, Artificial Sequence
  Synthetic
ugugucaaauugagagaaaaua

SEQ ID NO: 494592 - RNA, 23 nt, Artificial Sequence
  Synthetic
augugucaaauugagagaaaaua

SEQ ID NO: 494593 - RNA, 24 nt, Artificial Sequence
  Synthetic
aaugugucaaauugagagaaaaua

SEQ ID NO: 494594 - RNA, 18 nt, Artificial Sequence
  Synthetic
agauaaagaaggaaaaua

SEQ ID NO: 494595 - RNA, 19 nt, Artificial Sequence
  Synthetic
aagauaaagaaggaaaaua

SEQ ID NO: 494596 - RNA, 20 nt, Artificial Sequence
  Synthetic
gaagauaaagaaggaaaaua

SEQ ID NO: 494597 - RNA, 21 nt, Artificial Sequence
  Synthetic
agaagauaaagaaggaaaaua

SEQ ID NO: 494598 - RNA, 22 nt, Artificial Sequence
  Synthetic
aagaagauaaagaaggaaaaua

SEQ ID NO: 494599 - RNA, 23 nt, Artificial Sequence
  Synthetic
caagaagauaaagaaggaaaaua

SEQ ID NO: 494600 - RNA, 24 nt, Artificial Sequence
  Synthetic
ucaagaagauaaagaaggaaaaua

SEQ ID NO: 494601 - RNA, 18 nt, Artificial Sequence
  Synthetic
gaugaggagaggaaaaua

SEQ ID NO: 494602 - RNA, 19 nt, Artificial Sequence
  Synthetic
ggaugaggagaggaaaaua

SEQ ID NO: 494603 - RNA, 20 nt, Artificial Sequence
  Synthetic
aggaugaggagaggaaaaua

SEQ ID NO: 494604 - RNA, 21 nt, Artificial Sequence
  Synthetic
aaggaugaggagaggaaaaua

SEQ ID NO: 494605 - RNA, 22 nt, Artificial Sequence
  Synthetic
uaaggaugaggagaggaaaaua

SEQ ID NO: 494606 - RNA, 23 nt, Artificial Sequence
  Synthetic
uuaaggaugaggagaggaaaaua

SEQ ID NO: 494607 - RNA, 24 nt, Artificial Sequence
  Synthetic
auuaaggaugaggagaggaaaaua

SEQ ID NO: 494608 - RNA, 18 nt, Artificial Sequence
  Synthetic
agacuguaagggaaaaua

SEQ ID NO: 494609 - RNA, 19 nt, Artificial Sequence
  Synthetic
gagacuguaagggaaaaua

SEQ ID NO: 494610 - RNA, 20 nt, Artificial Sequence
  Synthetic
agagacuguaagggaaaaua

SEQ ID NO: 494611 - RNA, 21 nt, Artificial Sequence
  Synthetic
aagagacuguaagggaaaaua

SEQ ID NO: 494612 - RNA, 22 nt, Artificial Sequence
  Synthetic
aaagagacuguaagggaaaaua

SEQ ID NO: 494613 - RNA, 23 nt, Artificial Sequence
  Synthetic
caaagagacuguaagggaaaaua

SEQ ID NO: 494614 - RNA, 24 nt, Artificial Sequence
  Synthetic
ucaaagagacuguaagggaaaaua

SEQ ID NO: 494615 - RNA, 18 nt, Artificial Sequence
  Synthetic
auaaaaguaaugaaaaua

SEQ ID NO: 494616 - RNA, 19 nt, Artificial Sequence
  Synthetic
uauaaaaguaaugaaaaua

SEQ ID NO: 494617 - RNA, 20 nt, Artificial Sequence
  Synthetic
cuauaaaaguaaugaaaaua

SEQ ID NO: 494618 - RNA, 21 nt, Artificial Sequence
  Synthetic
acuauaaaaguaaugaaaaua

SEQ ID NO: 494619 - RNA, 22 nt, Artificial Sequence
  Synthetic
aacuauaaaaguaaugaaaaua

SEQ ID NO: 494620 - RNA, 23 nt, Artificial Sequence
  Synthetic
gaacuauaaaaguaaugaaaaua

SEQ ID NO: 494621 - RNA, 24 nt, Artificial Sequence
  Synthetic
ugaacuauaaaaguaaugaaaaua

SEQ ID NO: 494622 - RNA, 18 nt, Artificial Sequence
  Synthetic
aagccacugaugaaaaua

SEQ ID NO: 494623 - RNA, 19 nt, Artificial Sequence
  Synthetic
caagccacugaugaaaaua

SEQ ID NO: 494624 - RNA, 20 nt, Artificial Sequence
  Synthetic
ccaagccacugaugaaaaua

SEQ ID NO: 494625 - RNA, 21 nt, Artificial Sequence
  Synthetic
uccaagccacugaugaaaaua

SEQ ID NO: 494626 - RNA, 22 nt, Artificial Sequence
  Synthetic
auccaagccacugaugaaaaua

SEQ ID NO: 494627 - RNA, 23 nt, Artificial Sequence
  Synthetic
cauccaagccacugaugaaaaua

SEQ ID NO: 494628 - RNA, 24 nt, Artificial Sequence
  Synthetic
ucauccaagccacugaugaaaaua

SEQ ID NO: 494629 - RNA, 18 nt, Artificial Sequence
  Synthetic
gaaggauaacugaaaaua

SEQ ID NO: 494630 - RNA, 19 nt, Artificial Sequence
  Synthetic
ugaaggauaacugaaaaua

SEQ ID NO: 494631 - RNA, 20 nt, Artificial Sequence
  Synthetic
cugaaggauaacugaaaaua

SEQ ID NO: 494632 - RNA, 21 nt, Artificial Sequence
  Synthetic
ucugaaggauaacugaaaaua

SEQ ID NO: 494633 - RNA, 22 nt, Artificial Sequence
  Synthetic
gucugaaggauaacugaaaaua

SEQ ID NO: 494634 - RNA, 23 nt, Artificial Sequence
  Synthetic
ugucugaaggauaacugaaaaua

SEQ ID NO: 494635 - RNA, 24 nt, Artificial Sequence
  Synthetic
gugucugaaggauaacugaaaaua

SEQ ID NO: 494636 - RNA, 18 nt, Artificial Sequence
  Synthetic
ugccuuugauugaaaaua

SEQ ID NO: 494637 - RNA, 19 nt, Artificial Sequence
  Synthetic
uugccuuugauugaaaaua

SEQ ID NO: 494638 - RNA, 20 nt, Artificial Sequence
  Synthetic
uuugccuuugauugaaaaua

SEQ ID NO: 494639 - RNA, 21 nt, Artificial Sequence
  Synthetic
uuuugccuuugauugaaaaua

SEQ ID NO: 494640 - RNA, 22 nt, Artificial Sequence
  Synthetic
auuuugccuuugauugaaaaua

SEQ ID NO: 494641 - RNA, 23 nt, Artificial Sequence
  Synthetic
gauuuugccuuugauugaaaaua

SEQ ID NO: 494642 - RNA, 24 nt, Artificial Sequence
  Synthetic
ggauuuugccuuugauugaaaaua

SEQ ID NO: 494643 - RNA, 18 nt, Artificial Sequence
  Synthetic
uuaaagaauuugaaaaua

SEQ ID NO: 494644 - RNA, 19 nt, Artificial Sequence
  Synthetic
guuaaagaauuugaaaaua

SEQ ID NO: 494645 - RNA, 20 nt, Artificial Sequence
  Synthetic
uguuaaagaauuugaaaaua

SEQ ID NO: 494646 - RNA, 21 nt, Artificial Sequence
  Synthetic
uuguuaaagaauuugaaaaua

SEQ ID NO: 494647 - RNA, 22 nt, Artificial Sequence
  Synthetic
auuguuaaagaauuugaaaaua

SEQ ID NO: 494648 - RNA, 23 nt, Artificial Sequence
  Synthetic
cauuguuaaagaauuugaaaaua

SEQ ID NO: 494649 - RNA, 24 nt, Artificial Sequence
  Synthetic
acauuguuaaagaauuugaaaaua

SEQ ID NO: 494650 - RNA, 18 nt, Artificial Sequence
  Synthetic
ucuugacccaauaaaaua

SEQ ID NO: 494651 - RNA, 19 nt, Artificial Sequence
  Synthetic
uucuugacccaauaaaaua

SEQ ID NO: 494652 - RNA, 20 nt, Artificial Sequence
  Synthetic
auucuugacccaauaaaaua

SEQ ID NO: 494653 - RNA, 21 nt, Artificial Sequence
  Synthetic
aauucuugacccaauaaaaua

SEQ ID NO: 494654 - RNA, 22 nt, Artificial Sequence
  Synthetic
aaauucuugacccaauaaaaua

SEQ ID NO: 494655 - RNA, 23 nt, Artificial Sequence
  Synthetic
aaaauucuugacccaauaaaaua

SEQ ID NO: 494656 - RNA, 24 nt, Artificial Sequence
  Synthetic
aaaaauucuugacccaauaaaaua

SEQ ID NO: 494657 - RNA, 18 nt, Artificial Sequence
  Synthetic
auuauaauugauaaaaua

SEQ ID NO: 494658 - RNA, 19 nt, Artificial Sequence
  Synthetic
aauuauaauugauaaaaua

SEQ ID NO: 494659 - RNA, 20 nt, Artificial Sequence
  Synthetic
aaauuauaauugauaaaaua

SEQ ID NO: 494660 - RNA, 21 nt, Artificial Sequence
  Synthetic
caaauuauaauugauaaaaua

SEQ ID NO: 494661 - RNA, 22 nt, Artificial Sequence
  Synthetic
gcaaauuauaauugauaaaaua

SEQ ID NO: 494662 - RNA, 23 nt, Artificial Sequence
  Synthetic
agcaaauuauaauugauaaaaua

SEQ ID NO: 494663 - RNA, 24 nt, Artificial Sequence
  Synthetic
aagcaaauuauaauugauaaaaua

SEQ ID NO: 494664 - RNA, 18 nt, Artificial Sequence
  Synthetic
uuucucccuuauaaaaua

SEQ ID NO: 494665 - RNA, 19 nt, Artificial Sequence
  Synthetic
uuuucucccuuauaaaaua

SEQ ID NO: 494666 - RNA, 20 nt, Artificial Sequence
  Synthetic
guuuucucccuuauaaaaua

SEQ ID NO: 494667 - RNA, 21 nt, Artificial Sequence
  Synthetic
aguuuucucccuuauaaaaua

SEQ ID NO: 494668 - RNA, 22 nt, Artificial Sequence
  Synthetic
uaguuuucucccuuauaaaaua

SEQ ID NO: 494669 - RNA, 23 nt, Artificial Sequence
  Synthetic
auaguuuucucccuuauaaaaua

SEQ ID NO: 494670 - RNA, 24 nt, Artificial Sequence
  Synthetic
uauaguuuucucccuuauaaaaua

SEQ ID NO: 494671 - RNA, 18 nt, Artificial Sequence
  Synthetic
cuuaaaaacaguaaaaua

SEQ ID NO: 494672 - RNA, 19 nt, Artificial Sequence
  Synthetic
ucuuaaaaacaguaaaaua

SEQ ID NO: 494673 - RNA, 20 nt, Artificial Sequence
  Synthetic
aucuuaaaaacaguaaaaua

SEQ ID NO: 494674 - RNA, 21 nt, Artificial Sequence
  Synthetic
uaucuuaaaaacaguaaaaua

SEQ ID NO: 494675 - RNA, 22 nt, Artificial Sequence
  Synthetic
guaucuuaaaaacaguaaaaua

SEQ ID NO: 494676 - RNA, 23 nt, Artificial Sequence
  Synthetic
gguaucuuaaaaacaguaaaaua

SEQ ID NO: 494677 - RNA, 24 nt, Artificial Sequence
  Synthetic
ugguaucuuaaaaacaguaaaaua

SEQ ID NO: 494678 - RNA, 18 nt, Artificial Sequence
  Synthetic
augaaaugauguaaaaua

SEQ ID NO: 494679 - RNA, 19 nt, Artificial Sequence
  Synthetic
aaugaaaugauguaaaaua

SEQ ID NO: 494680 - RNA, 20 nt, Artificial Sequence
  Synthetic
aaaugaaaugauguaaaaua

SEQ ID NO: 494681 - RNA, 21 nt, Artificial Sequence
  Synthetic
aaaaugaaaugauguaaaaua

SEQ ID NO: 494682 - RNA, 22 nt, Artificial Sequence
  Synthetic
gaaaaugaaaugauguaaaaua

SEQ ID NO: 494683 - RNA, 23 nt, Artificial Sequence
  Synthetic
ugaaaaugaaaugauguaaaaua

SEQ ID NO: 494684 - RNA, 24 nt, Artificial Sequence
  Synthetic
augaaaaugaaaugauguaaaaua

SEQ ID NO: 494685 - RNA, 18 nt, Artificial Sequence
  Synthetic
aacaaggucuguaaaaua

SEQ ID NO: 494686 - RNA, 19 nt, Artificial Sequence
  Synthetic
gaacaaggucuguaaaaua

SEQ ID NO: 494687 - RNA, 20 nt, Artificial Sequence
  Synthetic
ggaacaaggucuguaaaaua

SEQ ID NO: 494688 - RNA, 21 nt, Artificial Sequence
  Synthetic
uggaacaaggucuguaaaaua

SEQ ID NO: 494689 - RNA, 22 nt, Artificial Sequence
  Synthetic
uuggaacaaggucuguaaaaua

SEQ ID NO: 494690 - RNA, 23 nt, Artificial Sequence
  Synthetic
guuggaacaaggucuguaaaaua

SEQ ID NO: 494691 - RNA, 24 nt, Artificial Sequence
  Synthetic
uguuggaacaaggucuguaaaaua

SEQ ID NO: 494692 - RNA, 18 nt, Artificial Sequence
  Synthetic
uuuuaucacauuaaaaua

SEQ ID NO: 494693 - RNA, 19 nt, Artificial Sequence
  Synthetic
auuuuaucacauuaaaaua

SEQ ID NO: 494694 - RNA, 20 nt, Artificial Sequence
  Synthetic
cauuuuaucacauuaaaaua

SEQ ID NO: 494695 - RNA, 21 nt, Artificial Sequence
  Synthetic
acauuuuaucacauuaaaaua

SEQ ID NO: 494696 - RNA, 22 nt, Artificial Sequence
  Synthetic
uacauuuuaucacauuaaaaua

SEQ ID NO: 494697 - RNA, 23 nt, Artificial Sequence
  Synthetic
cuacauuuuaucacauuaaaaua

SEQ ID NO: 494698 - RNA, 24 nt, Artificial Sequence
  Synthetic
acuacauuuuaucacauuaaaaua

SEQ ID NO: 494699 - RNA, 18 nt, Artificial Sequence
  Synthetic
agaaucugcauuaaaaua

SEQ ID NO: 494700 - RNA, 19 nt, Artificial Sequence
  Synthetic
uagaaucugcauuaaaaua

SEQ ID NO: 494701 - RNA, 20 nt, Artificial Sequence
  Synthetic
guagaaucugcauuaaaaua

SEQ ID NO: 494702 - RNA, 21 nt, Artificial Sequence
  Synthetic
uguagaaucugcauuaaaaua

SEQ ID NO: 494703 - RNA, 22 nt, Artificial Sequence
  Synthetic
auguagaaucugcauuaaaaua

SEQ ID NO: 494704 - RNA, 23 nt, Artificial Sequence
  Synthetic
aauguagaaucugcauuaaaaua

SEQ ID NO: 494705 - RNA, 24 nt, Artificial Sequence
  Synthetic
caauguagaaucugcauuaaaaua

SEQ ID NO: 494706 - RNA, 18 nt, Artificial Sequence
  Synthetic
agaaauaauguuaaaaua

SEQ ID NO: 494707 - RNA, 19 nt, Artificial Sequence
  Synthetic
cagaaauaauguuaaaaua

SEQ ID NO: 494708 - RNA, 20 nt, Artificial Sequence
  Synthetic
gcagaaauaauguuaaaaua

SEQ ID NO: 494709 - RNA, 21 nt, Artificial Sequence
  Synthetic
ggcagaaauaauguuaaaaua

SEQ ID NO: 494710 - RNA, 22 nt, Artificial Sequence
  Synthetic
aggcagaaauaauguuaaaaua

SEQ ID NO: 494711 - RNA, 23 nt, Artificial Sequence
  Synthetic
aaggcagaaauaauguuaaaaua

SEQ ID NO: 494712 - RNA, 24 nt, Artificial Sequence
  Synthetic
aaaggcagaaauaauguuaaaaua

SEQ ID NO: 494713 - RNA, 18 nt, Artificial Sequence
  Synthetic
guuuuagcauuuaaaaua

SEQ ID NO: 494714 - RNA, 19 nt, Artificial Sequence
  Synthetic
gguuuuagcauuuaaaaua

SEQ ID NO: 494715 - RNA, 20 nt, Artificial Sequence
  Synthetic
ugguuuuagcauuuaaaaua

SEQ ID NO: 494716 - RNA, 21 nt, Artificial Sequence
  Synthetic
uugguuuuagcauuuaaaaua

SEQ ID NO: 494717 - RNA, 22 nt, Artificial Sequence
  Synthetic
uuugguuuuagcauuuaaaaua

SEQ ID NO: 494718 - RNA, 23 nt, Artificial Sequence
  Synthetic
auuugguuuuagcauuuaaaaua

SEQ ID NO: 494719 - RNA, 24 nt, Artificial Sequence
  Synthetic
uauuugguuuuagcauuuaaaaua

SEQ ID NO: 494720 - RNA, 18 nt, Artificial Sequence
  Synthetic
aaaguuuuuuuuaaaaua

SEQ ID NO: 494721 - RNA, 19 nt, Artificial Sequence
  Synthetic
aaaaguuuuuuuuaaaaua

SEQ ID NO: 494722 - RNA, 20 nt, Artificial Sequence
  Synthetic
uaaaaguuuuuuuuaaaaua

SEQ ID NO: 494723 - RNA, 21 nt, Artificial Sequence
  Synthetic
uuaaaaguuuuuuuuaaaaua

SEQ ID NO: 494724 - RNA, 22 nt, Artificial Sequence
  Synthetic
auuaaaaguuuuuuuuaaaaua

SEQ ID NO: 494725 - RNA, 23 nt, Artificial Sequence
  Synthetic
aauuaaaaguuuuuuuuaaaaua

SEQ ID NO: 494726 - RNA, 24 nt, Artificial Sequence
  Synthetic
aaauuaaaaguuuuuuuuaaaaua

SEQ ID NO: 494727 - RNA, 18 nt, Artificial Sequence
  Synthetic
ccaucucaaaaacaaaua

SEQ ID NO: 494728 - RNA, 19 nt, Artificial Sequence
  Synthetic
cccaucucaaaaacaaaua

SEQ ID NO: 494729 - RNA, 20 nt, Artificial Sequence
  Synthetic
ccccaucucaaaaacaaaua

SEQ ID NO: 494730 - RNA, 21 nt, Artificial Sequence
  Synthetic
accccaucucaaaaacaaaua

SEQ ID NO: 494731 - RNA, 22 nt, Artificial Sequence
  Synthetic
gaccccaucucaaaaacaaaua

SEQ ID NO: 494732 - RNA, 23 nt, Artificial Sequence
  Synthetic
agaccccaucucaaaaacaaaua

SEQ ID NO: 494733 - RNA, 24 nt, Artificial Sequence
  Synthetic
aagaccccaucucaaaaacaaaua

SEQ ID NO: 494734 - RNA, 18 nt, Artificial Sequence
  Synthetic
uagaauggaaaacaaaua

SEQ ID NO: 494735 - RNA, 19 nt, Artificial Sequence
  Synthetic
uuagaauggaaaacaaaua

SEQ ID NO: 494736 - RNA, 20 nt, Artificial Sequence
  Synthetic
uuuagaauggaaaacaaaua

SEQ ID NO: 494737 - RNA, 21 nt, Artificial Sequence
  Synthetic
guuuagaauggaaaacaaaua

SEQ ID NO: 494738 - RNA, 22 nt, Artificial Sequence
  Synthetic
aguuuagaauggaaaacaaaua

SEQ ID NO: 494739 - RNA, 23 nt, Artificial Sequence
  Synthetic
caguuuagaauggaaaacaaaua

SEQ ID NO: 494740 - RNA, 24 nt, Artificial Sequence
  Synthetic
acaguuuagaauggaaaacaaaua

SEQ ID NO: 494741 - RNA, 18 nt, Artificial Sequence
  Synthetic
gaauaaaguaaacaaaua

SEQ ID NO: 494742 - RNA, 19 nt, Artificial Sequence
  Synthetic
agaauaaaguaaacaaaua

SEQ ID NO: 494743 - RNA, 20 nt, Artificial Sequence
  Synthetic
gagaauaaaguaaacaaaua

SEQ ID NO: 494744 - RNA, 21 nt, Artificial Sequence
  Synthetic
ggagaauaaaguaaacaaaua

SEQ ID NO: 494745 - RNA, 22 nt, Artificial Sequence
  Synthetic
aggagaauaaaguaaacaaaua

SEQ ID NO: 494746 - RNA, 23 nt, Artificial Sequence
  Synthetic
caggagaauaaaguaaacaaaua

SEQ ID NO: 494747 - RNA, 24 nt, Artificial Sequence
  Synthetic
acaggagaauaaaguaaacaaaua

SEQ ID NO: 494748 - RNA, 18 nt, Artificial Sequence
  Synthetic
agaaaauguaaacaaaua

SEQ ID NO: 494749 - RNA, 19 nt, Artificial Sequence
  Synthetic
aagaaaauguaaacaaaua

SEQ ID NO: 494750 - RNA, 20 nt, Artificial Sequence
  Synthetic
gaagaaaauguaaacaaaua

SEQ ID NO: 494751 - RNA, 21 nt, Artificial Sequence
  Synthetic
ugaagaaaauguaaacaaaua

SEQ ID NO: 494752 - RNA, 22 nt, Artificial Sequence
  Synthetic
gugaagaaaauguaaacaaaua

SEQ ID NO: 494753 - RNA, 23 nt, Artificial Sequence
  Synthetic
agugaagaaaauguaaacaaaua

SEQ ID NO: 494754 - RNA, 24 nt, Artificial Sequence
  Synthetic
cagugaagaaaauguaaacaaaua

SEQ ID NO: 494755 - RNA, 18 nt, Artificial Sequence
  Synthetic
auuaucaaccaacaaaua

SEQ ID NO: 494756 - RNA, 19 nt, Artificial Sequence
  Synthetic
cauuaucaaccaacaaaua

SEQ ID NO: 494757 - RNA, 20 nt, Artificial Sequence
  Synthetic
ccauuaucaaccaacaaaua

SEQ ID NO: 494758 - RNA, 21 nt, Artificial Sequence
  Synthetic
cccauuaucaaccaacaaaua

SEQ ID NO: 494759 - RNA, 22 nt, Artificial Sequence
  Synthetic
gcccauuaucaaccaacaaaua

SEQ ID NO: 494760 - RNA, 23 nt, Artificial Sequence
  Synthetic
agcccauuaucaaccaacaaaua

SEQ ID NO: 494761 - RNA, 24 nt, Artificial Sequence
  Synthetic
uagcccauuaucaaccaacaaaua

SEQ ID NO: 494762 - RNA, 18 nt, Artificial Sequence
  Synthetic
ucauucauucaacaaaua

SEQ ID NO: 494763 - RNA, 19 nt, Artificial Sequence
  Synthetic
gucauucauucaacaaaua

SEQ ID NO: 494764 - RNA, 20 nt, Artificial Sequence
  Synthetic
ggucauucauucaacaaaua

SEQ ID NO: 494765 - RNA, 21 nt, Artificial Sequence
  Synthetic
aggucauucauucaacaaaua

SEQ ID NO: 494766 - RNA, 22 nt, Artificial Sequence
  Synthetic
uaggucauucauucaacaaaua

SEQ ID NO: 494767 - RNA, 23 nt, Artificial Sequence
  Synthetic
guaggucauucauucaacaaaua

SEQ ID NO: 494768 - RNA, 24 nt, Artificial Sequence
  Synthetic
uguaggucauucauucaacaaaua

SEQ ID NO: 494769 - RNA, 18 nt, Artificial Sequence
  Synthetic
aauuaaacggaacaaaua

SEQ ID NO: 494770 - RNA, 19 nt, Artificial Sequence
  Synthetic
gaauuaaacggaacaaaua

SEQ ID NO: 494771 - RNA, 20 nt, Artificial Sequence
  Synthetic
ggaauuaaacggaacaaaua

SEQ ID NO: 494772 - RNA, 21 nt, Artificial Sequence
  Synthetic
aggaauuaaacggaacaaaua

SEQ ID NO: 494773 - RNA, 22 nt, Artificial Sequence
  Synthetic
gaggaauuaaacggaacaaaua

SEQ ID NO: 494774 - RNA, 23 nt, Artificial Sequence
  Synthetic
agaggaauuaaacggaacaaaua

SEQ ID NO: 494775 - RNA, 24 nt, Artificial Sequence
  Synthetic
aagaggaauuaaacggaacaaaua

SEQ ID NO: 494776 - RNA, 18 nt, Artificial Sequence
  Synthetic
aagaaaugugaacaaaua

SEQ ID NO: 494777 - RNA, 19 nt, Artificial Sequence
  Synthetic
aaagaaaugugaacaaaua

SEQ ID NO: 494778 - RNA, 20 nt, Artificial Sequence
  Synthetic
aaaagaaaugugaacaaaua

SEQ ID NO: 494779 - RNA, 21 nt, Artificial Sequence
  Synthetic
caaaagaaaugugaacaaaua

SEQ ID NO: 494780 - RNA, 22 nt, Artificial Sequence
  Synthetic
acaaaagaaaugugaacaaaua

SEQ ID NO: 494781 - RNA, 23 nt, Artificial Sequence
  Synthetic
aacaaaagaaaugugaacaaaua

SEQ ID NO: 494782 - RNA, 24 nt, Artificial Sequence
  Synthetic
aaacaaaagaaaugugaacaaaua

SEQ ID NO: 494783 - RNA, 18 nt, Artificial Sequence
  Synthetic
uuauaccuacuacaaaua

SEQ ID NO: 494784 - RNA, 19 nt, Artificial Sequence
  Synthetic
uuuauaccuacuacaaaua

SEQ ID NO: 494785 - RNA, 20 nt, Artificial Sequence
  Synthetic
guuuauaccuacuacaaaua

SEQ ID NO: 494786 - RNA, 21 nt, Artificial Sequence
  Synthetic
gguuuauaccuacuacaaaua

SEQ ID NO: 494787 - RNA, 22 nt, Artificial Sequence
  Synthetic
ugguuuauaccuacuacaaaua

SEQ ID NO: 494788 - RNA, 23 nt, Artificial Sequence
  Synthetic
augguuuauaccuacuacaaaua

SEQ ID NO: 494789 - RNA, 24 nt, Artificial Sequence
  Synthetic
uaugguuuauaccuacuacaaaua

SEQ ID NO: 494790 - RNA, 18 nt, Artificial Sequence
  Synthetic
ucauucauucuacaaaua

SEQ ID NO: 494791 - RNA, 19 nt, Artificial Sequence
  Synthetic
uucauucauucuacaaaua

SEQ ID NO: 494792 - RNA, 20 nt, Artificial Sequence
  Synthetic
cuucauucauucuacaaaua

SEQ ID NO: 494793 - RNA, 21 nt, Artificial Sequence
  Synthetic
ccuucauucauucuacaaaua

SEQ ID NO: 494794 - RNA, 22 nt, Artificial Sequence
  Synthetic
cccuucauucauucuacaaaua

SEQ ID NO: 494795 - RNA, 23 nt, Artificial Sequence
  Synthetic
ucccuucauucauucuacaaaua

SEQ ID NO: 494796 - RNA, 24 nt, Artificial Sequence
  Synthetic
gucccuucauucauucuacaaaua

SEQ ID NO: 494797 - RNA, 18 nt, Artificial Sequence
  Synthetic
caaaagcccaaccaaaua

SEQ ID NO: 494798 - RNA, 19 nt, Artificial Sequence
  Synthetic
gcaaaagcccaaccaaaua

SEQ ID NO: 494799 - RNA, 20 nt, Artificial Sequence
  Synthetic
agcaaaagcccaaccaaaua

SEQ ID NO: 494800 - RNA, 21 nt, Artificial Sequence
  Synthetic
uagcaaaagcccaaccaaaua

SEQ ID NO: 494801 - RNA, 22 nt, Artificial Sequence
  Synthetic
uuagcaaaagcccaaccaaaua

SEQ ID NO: 494802 - RNA, 23 nt, Artificial Sequence
  Synthetic
uuuagcaaaagcccaaccaaaua

SEQ ID NO: 494803 - RNA, 24 nt, Artificial Sequence
  Synthetic
cuuuagcaaaagcccaaccaaaua

SEQ ID NO: 494804 - RNA, 18 nt, Artificial Sequence
  Synthetic
gaaguuuuuucccaaaua

SEQ ID NO: 494805 - RNA, 19 nt, Artificial Sequence
  Synthetic
agaaguuuuuucccaaaua

SEQ ID NO: 494806 - RNA, 20 nt, Artificial Sequence
  Synthetic
gagaaguuuuuucccaaaua

SEQ ID NO: 494807 - RNA, 21 nt, Artificial Sequence
  Synthetic
agagaaguuuuuucccaaaua

SEQ ID NO: 494808 - RNA, 22 nt, Artificial Sequence
  Synthetic
aagagaaguuuuuucccaaaua

SEQ ID NO: 494809 - RNA, 23 nt, Artificial Sequence
  Synthetic
caagagaaguuuuuucccaaaua

SEQ ID NO: 494810 - RNA, 24 nt, Artificial Sequence
  Synthetic
ucaagagaaguuuuuucccaaaua

SEQ ID NO: 494811 - RNA, 18 nt, Artificial Sequence
  Synthetic
cagacagagagccaaaua

SEQ ID NO: 494812 - RNA, 19 nt, Artificial Sequence
  Synthetic
acagacagagagccaaaua

SEQ ID NO: 494813 - RNA, 20 nt, Artificial Sequence
  Synthetic
aacagacagagagccaaaua

SEQ ID NO: 494814 - RNA, 21 nt, Artificial Sequence
  Synthetic
uaacagacagagagccaaaua

SEQ ID NO: 494815 - RNA, 22 nt, Artificial Sequence
  Synthetic
auaacagacagagagccaaaua

SEQ ID NO: 494816 - RNA, 23 nt, Artificial Sequence
  Synthetic
aauaacagacagagagccaaaua

SEQ ID NO: 494817 - RNA, 24 nt, Artificial Sequence
  Synthetic
caauaacagacagagagccaaaua

SEQ ID NO: 494818 - RNA, 18 nt, Artificial Sequence
  Synthetic
gaacgcuuuggccaaaua

SEQ ID NO: 494819 - RNA, 19 nt, Artificial Sequence
  Synthetic
ggaacgcuuuggccaaaua

SEQ ID NO: 494820 - RNA, 20 nt, Artificial Sequence
  Synthetic
uggaacgcuuuggccaaaua

SEQ ID NO: 494821 - RNA, 21 nt, Artificial Sequence
  Synthetic
auggaacgcuuuggccaaaua

SEQ ID NO: 494822 - RNA, 22 nt, Artificial Sequence
  Synthetic
gauggaacgcuuuggccaaaua

SEQ ID NO: 494823 - RNA, 23 nt, Artificial Sequence
  Synthetic
ggauggaacgcuuuggccaaaua

SEQ ID NO: 494824 - RNA, 24 nt, Artificial Sequence
  Synthetic
gggauggaacgcuuuggccaaaua

SEQ ID NO: 494825 - RNA, 18 nt, Artificial Sequence
  Synthetic
cuccuccuuguccaaaua

SEQ ID NO: 494826 - RNA, 19 nt, Artificial Sequence
  Synthetic
ucuccuccuuguccaaaua

SEQ ID NO: 494827 - RNA, 20 nt, Artificial Sequence
  Synthetic
cucuccuccuuguccaaaua

SEQ ID NO: 494828 - RNA, 21 nt, Artificial Sequence
  Synthetic
ucucuccuccuuguccaaaua

SEQ ID NO: 494829 - RNA, 22 nt, Artificial Sequence
  Synthetic
cucucuccuccuuguccaaaua

SEQ ID NO: 494830 - RNA, 23 nt, Artificial Sequence
  Synthetic
ccucucuccuccuuguccaaaua

SEQ ID NO: 494831 - RNA, 24 nt, Artificial Sequence
  Synthetic
gccucucuccuccuuguccaaaua

SEQ ID NO: 494832 - RNA, 18 nt, Artificial Sequence
  Synthetic
gacaaagaaaagcaaaua

SEQ ID NO: 494833 - RNA, 19 nt, Artificial Sequence
  Synthetic
agacaaagaaaagcaaaua

SEQ ID NO: 494834 - RNA, 20 nt, Artificial Sequence
  Synthetic
uagacaaagaaaagcaaaua

SEQ ID NO: 494835 - RNA, 21 nt, Artificial Sequence
  Synthetic
auagacaaagaaaagcaaaua

SEQ ID NO: 494836 - RNA, 22 nt, Artificial Sequence
  Synthetic
uauagacaaagaaaagcaaaua

SEQ ID NO: 494837 - RNA, 23 nt, Artificial Sequence
  Synthetic
cuauagacaaagaaaagcaaaua

SEQ ID NO: 494838 - RNA, 24 nt, Artificial Sequence
  Synthetic
acuauagacaaagaaaagcaaaua

SEQ ID NO: 494839 - RNA, 18 nt, Artificial Sequence
  Synthetic
uuucaucuacagcaaaua

SEQ ID NO: 494840 - RNA, 19 nt, Artificial Sequence
  Synthetic
cuuucaucuacagcaaaua

SEQ ID NO: 494841 - RNA, 20 nt, Artificial Sequence
  Synthetic
acuuucaucuacagcaaaua

SEQ ID NO: 494842 - RNA, 21 nt, Artificial Sequence
  Synthetic
cacuuucaucuacagcaaaua

SEQ ID NO: 494843 - RNA, 22 nt, Artificial Sequence
  Synthetic
acacuuucaucuacagcaaaua

SEQ ID NO: 494844 - RNA, 23 nt, Artificial Sequence
  Synthetic
uacacuuucaucuacagcaaaua

SEQ ID NO: 494845 - RNA, 24 nt, Artificial Sequence
  Synthetic
guacacuuucaucuacagcaaaua

SEQ ID NO: 494846 - RNA, 18 nt, Artificial Sequence
  Synthetic
uuaacuugagagcaaaua

SEQ ID NO: 494847 - RNA, 19 nt, Artificial Sequence
  Synthetic
uuuaacuugagagcaaaua

SEQ ID NO: 494848 - RNA, 20 nt, Artificial Sequence
  Synthetic
guuuaacuugagagcaaaua

SEQ ID NO: 494849 - RNA, 21 nt, Artificial Sequence
  Synthetic
gguuuaacuugagagcaaaua

SEQ ID NO: 494850 - RNA, 22 nt, Artificial Sequence
  Synthetic
ugguuuaacuugagagcaaaua

SEQ ID NO: 494851 - RNA, 23 nt, Artificial Sequence
  Synthetic
augguuuaacuugagagcaaaua

SEQ ID NO: 494852 - RNA, 24 nt, Artificial Sequence
  Synthetic
uaugguuuaacuugagagcaaaua

SEQ ID NO: 494853 - RNA, 18 nt, Artificial Sequence
  Synthetic
gagguccucuggcaaaua

SEQ ID NO: 494854 - RNA, 19 nt, Artificial Sequence
  Synthetic
ugagguccucuggcaaaua

SEQ ID NO: 494855 - RNA, 20 nt, Artificial Sequence
  Synthetic
uugagguccucuggcaaaua

SEQ ID NO: 494856 - RNA, 21 nt, Artificial Sequence
  Synthetic
uuugagguccucuggcaaaua

SEQ ID NO: 494857 - RNA, 22 nt, Artificial Sequence
  Synthetic
guuugagguccucuggcaaaua

SEQ ID NO: 494858 - RNA, 23 nt, Artificial Sequence
  Synthetic
aguuugagguccucuggcaaaua

SEQ ID NO: 494859 - RNA, 24 nt, Artificial Sequence
  Synthetic
aaguuugagguccucuggcaaaua

SEQ ID NO: 494860 - RNA, 18 nt, Artificial Sequence
  Synthetic
uaaagauuuuggcaaaua

SEQ ID NO: 494861 - RNA, 19 nt, Artificial Sequence
  Synthetic
uuaaagauuuuggcaaaua

SEQ ID NO: 494862 - RNA, 20 nt, Artificial Sequence
  Synthetic
cuuaaagauuuuggcaaaua

SEQ ID NO: 494863 - RNA, 21 nt, Artificial Sequence
  Synthetic
acuuaaagauuuuggcaaaua

SEQ ID NO: 494864 - RNA, 22 nt, Artificial Sequence
  Synthetic
uacuuaaagauuuuggcaaaua

SEQ ID NO: 494865 - RNA, 23 nt, Artificial Sequence
  Synthetic
cuacuuaaagauuuuggcaaaua

SEQ ID NO: 494866 - RNA, 24 nt, Artificial Sequence
  Synthetic
gcuacuuaaagauuuuggcaaaua

SEQ ID NO: 494867 - RNA, 18 nt, Artificial Sequence
  Synthetic
aauguaagacugcaaaua

SEQ ID NO: 494868 - RNA, 19 nt, Artificial Sequence
  Synthetic
aaauguaagacugcaaaua

SEQ ID NO: 494869 - RNA, 20 nt, Artificial Sequence
  Synthetic
aaaauguaagacugcaaaua

SEQ ID NO: 494870 - RNA, 21 nt, Artificial Sequence
  Synthetic
uaaaauguaagacugcaaaua

SEQ ID NO: 494871 - RNA, 22 nt, Artificial Sequence
  Synthetic
auaaaauguaagacugcaaaua

SEQ ID NO: 494872 - RNA, 23 nt, Artificial Sequence
  Synthetic
uauaaaauguaagacugcaaaua

SEQ ID NO: 494873 - RNA, 24 nt, Artificial Sequence
  Synthetic
uuauaaaauguaagacugcaaaua

SEQ ID NO: 494874 - RNA, 18 nt, Artificial Sequence
  Synthetic
gccaugaggacucaaaua

SEQ ID NO: 494875 - RNA, 19 nt, Artificial Sequence
  Synthetic
ggccaugaggacucaaaua

SEQ ID NO: 494876 - RNA, 20 nt, Artificial Sequence
  Synthetic
uggccaugaggacucaaaua

SEQ ID NO: 494877 - RNA, 21 nt, Artificial Sequence
  Synthetic
uuggccaugaggacucaaaua

SEQ ID NO: 494878 - RNA, 22 nt, Artificial Sequence
  Synthetic
cuuggccaugaggacucaaaua

SEQ ID NO: 494879 - RNA, 23 nt, Artificial Sequence
  Synthetic
ucuuggccaugaggacucaaaua

SEQ ID NO: 494880 - RNA, 24 nt, Artificial Sequence
  Synthetic
aucuuggccaugaggacucaaaua

SEQ ID NO: 494881 - RNA, 18 nt, Artificial Sequence
  Synthetic
auacuuuucccucaaaua

SEQ ID NO: 494882 - RNA, 19 nt, Artificial Sequence
  Synthetic
aauacuuuucccucaaaua

SEQ ID NO: 494883 - RNA, 20 nt, Artificial Sequence
  Synthetic
aaauacuuuucccucaaaua

SEQ ID NO: 494884 - RNA, 21 nt, Artificial Sequence
  Synthetic
uaaauacuuuucccucaaaua

SEQ ID NO: 494885 - RNA, 22 nt, Artificial Sequence
  Synthetic
guaaauacuuuucccucaaaua

SEQ ID NO: 494886 - RNA, 23 nt, Artificial Sequence
  Synthetic
gguaaauacuuuucccucaaaua

SEQ ID NO: 494887 - RNA, 24 nt, Artificial Sequence
  Synthetic
agguaaauacuuuucccucaaaua

SEQ ID NO: 494888 - RNA, 18 nt, Artificial Sequence
  Synthetic
ggaagagaaaaagaaaua

SEQ ID NO: 494889 - RNA, 19 nt, Artificial Sequence
  Synthetic
aggaagagaaaaagaaaua

SEQ ID NO: 494890 - RNA, 20 nt, Artificial Sequence
  Synthetic
caggaagagaaaaagaaaua

SEQ ID NO: 494891 - RNA, 21 nt, Artificial Sequence
  Synthetic
acaggaagagaaaaagaaaua

SEQ ID NO: 494892 - RNA, 22 nt, Artificial Sequence
  Synthetic
gacaggaagagaaaaagaaaua

SEQ ID NO: 494893 - RNA, 23 nt, Artificial Sequence
  Synthetic
agacaggaagagaaaaagaaaua

SEQ ID NO: 494894 - RNA, 24 nt, Artificial Sequence
  Synthetic
aagacaggaagagaaaaagaaaua

SEQ ID NO: 494895 - RNA, 18 nt, Artificial Sequence
  Synthetic
uagagauaaaaagaaaua

SEQ ID NO: 494896 - RNA, 19 nt, Artificial Sequence
  Synthetic
guagagauaaaaagaaaua

SEQ ID NO: 494897 - RNA, 20 nt, Artificial Sequence
  Synthetic
gguagagauaaaaagaaaua

SEQ ID NO: 494898 - RNA, 21 nt, Artificial Sequence
  Synthetic
agguagagauaaaaagaaaua

SEQ ID NO: 494899 - RNA, 22 nt, Artificial Sequence
  Synthetic
gagguagagauaaaaagaaaua

SEQ ID NO: 494900 - RNA, 23 nt, Artificial Sequence
  Synthetic
agagguagagauaaaaagaaaua

SEQ ID NO: 494901 - RNA, 24 nt, Artificial Sequence
  Synthetic
cagagguagagauaaaaagaaaua

SEQ ID NO: 494902 - RNA, 18 nt, Artificial Sequence
  Synthetic
caaagccuccaagaaaua

SEQ ID NO: 494903 - RNA, 19 nt, Artificial Sequence
  Synthetic
gcaaagccuccaagaaaua

SEQ ID NO: 494904 - RNA, 20 nt, Artificial Sequence
  Synthetic
agcaaagccuccaagaaaua

SEQ ID NO: 494905 - RNA, 21 nt, Artificial Sequence
  Synthetic
gagcaaagccuccaagaaaua

SEQ ID NO: 494906 - RNA, 22 nt, Artificial Sequence
  Synthetic
ugagcaaagccuccaagaaaua

SEQ ID NO: 494907 - RNA, 23 nt, Artificial Sequence
  Synthetic
augagcaaagccuccaagaaaua

SEQ ID NO: 494908 - RNA, 24 nt, Artificial Sequence
  Synthetic
aaugagcaaagccuccaagaaaua

SEQ ID NO: 494909 - RNA, 18 nt, Artificial Sequence
  Synthetic
cagacauaaacagaaaua

SEQ ID NO: 494910 - RNA, 19 nt, Artificial Sequence
  Synthetic
ucagacauaaacagaaaua

SEQ ID NO: 494911 - RNA, 20 nt, Artificial Sequence
  Synthetic
uucagacauaaacagaaaua

SEQ ID NO: 494912 - RNA, 21 nt, Artificial Sequence
  Synthetic
cuucagacauaaacagaaaua

SEQ ID NO: 494913 - RNA, 22 nt, Artificial Sequence
  Synthetic
gcuucagacauaaacagaaaua

SEQ ID NO: 494914 - RNA, 23 nt, Artificial Sequence
  Synthetic
agcuucagacauaaacagaaaua

SEQ ID NO: 494915 - RNA, 24 nt, Artificial Sequence
  Synthetic
aagcuucagacauaaacagaaaua

SEQ ID NO: 494916 - RNA, 18 nt, Artificial Sequence
  Synthetic
gauccuggaacagaaaua

SEQ ID NO: 494917 - RNA, 19 nt, Artificial Sequence
  Synthetic
ugauccuggaacagaaaua

SEQ ID NO: 494918 - RNA, 20 nt, Artificial Sequence
  Synthetic
gugauccuggaacagaaaua

SEQ ID NO: 494919 - RNA, 21 nt, Artificial Sequence
  Synthetic
agugauccuggaacagaaaua

SEQ ID NO: 494920 - RNA, 22 nt, Artificial Sequence
  Synthetic
gagugauccuggaacagaaaua

SEQ ID NO: 494921 - RNA, 23 nt, Artificial Sequence
  Synthetic
agagugauccuggaacagaaaua

SEQ ID NO: 494922 - RNA, 24 nt, Artificial Sequence
  Synthetic
aagagugauccuggaacagaaaua

SEQ ID NO: 494923 - RNA, 18 nt, Artificial Sequence
  Synthetic
agaaaucacugagaaaua

SEQ ID NO: 494924 - RNA, 19 nt, Artificial Sequence
  Synthetic
gagaaaucacugagaaaua

SEQ ID NO: 494925 - RNA, 20 nt, Artificial Sequence
  Synthetic
ggagaaaucacugagaaaua

SEQ ID NO: 494926 - RNA, 21 nt, Artificial Sequence
  Synthetic
uggagaaaucacugagaaaua

SEQ ID NO: 494927 - RNA, 22 nt, Artificial Sequence
  Synthetic
auggagaaaucacugagaaaua

SEQ ID NO: 494928 - RNA, 23 nt, Artificial Sequence
  Synthetic
cauggagaaaucacugagaaaua

SEQ ID NO: 494929 - RNA, 24 nt, Artificial Sequence
  Synthetic
ccauggagaaaucacugagaaaua

SEQ ID NO: 494930 - RNA, 18 nt, Artificial Sequence
  Synthetic
uuccuuugcugagaaaua

SEQ ID NO: 494931 - RNA, 19 nt, Artificial Sequence
  Synthetic
uuuccuuugcugagaaaua

SEQ ID NO: 494932 - RNA, 20 nt, Artificial Sequence
  Synthetic
auuuccuuugcugagaaaua

SEQ ID NO: 494933 - RNA, 21 nt, Artificial Sequence
  Synthetic
cauuuccuuugcugagaaaua

SEQ ID NO: 494934 - RNA, 22 nt, Artificial Sequence
  Synthetic
gcauuuccuuugcugagaaaua

SEQ ID NO: 494935 - RNA, 23 nt, Artificial Sequence
  Synthetic
ugcauuuccuuugcugagaaaua

SEQ ID NO: 494936 - RNA, 24 nt, Artificial Sequence
  Synthetic
cugcauuuccuuugcugagaaaua

SEQ ID NO: 494937 - RNA, 18 nt, Artificial Sequence
  Synthetic
uugugacagugagaaaua

SEQ ID NO: 494938 - RNA, 19 nt, Artificial Sequence
  Synthetic
uuugugacagugagaaaua

SEQ ID NO: 494939 - RNA, 20 nt, Artificial Sequence
  Synthetic
cuuugugacagugagaaaua

SEQ ID NO: 494940 - RNA, 21 nt, Artificial Sequence
  Synthetic
ccuuugugacagugagaaaua

SEQ ID NO: 494941 - RNA, 22 nt, Artificial Sequence
  Synthetic
uccuuugugacagugagaaaua

SEQ ID NO: 494942 - RNA, 23 nt, Artificial Sequence
  Synthetic
uuccuuugugacagugagaaaua

SEQ ID NO: 494943 - RNA, 24 nt, Artificial Sequence
  Synthetic
cuuccuuugugacagugagaaaua

SEQ ID NO: 494944 - RNA, 18 nt, Artificial Sequence
  Synthetic
auagguaauauagaaaua

SEQ ID NO: 494945 - RNA, 19 nt, Artificial Sequence
  Synthetic
gauagguaauauagaaaua

SEQ ID NO: 494946 - RNA, 20 nt, Artificial Sequence
  Synthetic
agauagguaauauagaaaua

SEQ ID NO: 494947 - RNA, 21 nt, Artificial Sequence
  Synthetic
aagauagguaauauagaaaua

SEQ ID NO: 494948 - RNA, 22 nt, Artificial Sequence
  Synthetic
aaagauagguaauauagaaaua

SEQ ID NO: 494949 - RNA, 23 nt, Artificial Sequence
  Synthetic
uaaagauagguaauauagaaaua

SEQ ID NO: 494950 - RNA, 24 nt, Artificial Sequence
  Synthetic
auaaagauagguaauauagaaaua

SEQ ID NO: 494951 - RNA, 18 nt, Artificial Sequence
  Synthetic
auucccuuucuagaaaua

SEQ ID NO: 494952 - RNA, 19 nt, Artificial Sequence
  Synthetic
gauucccuuucuagaaaua

SEQ ID NO: 494953 - RNA, 20 nt, Artificial Sequence
  Synthetic
ugauucccuuucuagaaaua

SEQ ID NO: 494954 - RNA, 21 nt, Artificial Sequence
  Synthetic
uugauucccuuucuagaaaua

SEQ ID NO: 494955 - RNA, 22 nt, Artificial Sequence
  Synthetic
uuugauucccuuucuagaaaua

SEQ ID NO: 494956 - RNA, 23 nt, Artificial Sequence
  Synthetic
cuuugauucccuuucuagaaaua

SEQ ID NO: 494957 - RNA, 24 nt, Artificial Sequence
  Synthetic
ccuuugauucccuuucuagaaaua

SEQ ID NO: 494958 - RNA, 18 nt, Artificial Sequence
  Synthetic
agaaaugagguagaaaua

SEQ ID NO: 494959 - RNA, 19 nt, Artificial Sequence
  Synthetic
cagaaaugagguagaaaua

SEQ ID NO: 494960 - RNA, 20 nt, Artificial Sequence
  Synthetic
ucagaaaugagguagaaaua

SEQ ID NO: 494961 - RNA, 21 nt, Artificial Sequence
  Synthetic
aucagaaaugagguagaaaua

SEQ ID NO: 494962 - RNA, 22 nt, Artificial Sequence
  Synthetic
aaucagaaaugagguagaaaua

SEQ ID NO: 494963 - RNA, 23 nt, Artificial Sequence
  Synthetic
gaaucagaaaugagguagaaaua

SEQ ID NO: 494964 - RNA, 24 nt, Artificial Sequence
  Synthetic
agaaucagaaaugagguagaaaua

SEQ ID NO: 494965 - RNA, 18 nt, Artificial Sequence
  Synthetic
acauauggcuacgaaaua

SEQ ID NO: 494966 - RNA, 19 nt, Artificial Sequence
  Synthetic
aacauauggcuacgaaaua

SEQ ID NO: 494967 - RNA, 20 nt, Artificial Sequence
  Synthetic
aaacauauggcuacgaaaua

SEQ ID NO: 494968 - RNA, 21 nt, Artificial Sequence
  Synthetic
gaaacauauggcuacgaaaua

SEQ ID NO: 494969 - RNA, 22 nt, Artificial Sequence
  Synthetic
ugaaacauauggcuacgaaaua

SEQ ID NO: 494970 - RNA, 23 nt, Artificial Sequence
  Synthetic
gugaaacauauggcuacgaaaua

SEQ ID NO: 494971 - RNA, 24 nt, Artificial Sequence
  Synthetic
ggugaaacauauggcuacgaaaua

SEQ ID NO: 494972 - RNA, 18 nt, Artificial Sequence
  Synthetic
guucagauucaggaaaua

SEQ ID NO: 494973 - RNA, 19 nt, Artificial Sequence
  Synthetic
cguucagauucaggaaaua

SEQ ID NO: 494974 - RNA, 20 nt, Artificial Sequence
  Synthetic
acguucagauucaggaaaua

SEQ ID NO: 494975 - RNA, 21 nt, Artificial Sequence
  Synthetic
aacguucagauucaggaaaua

SEQ ID NO: 494976 - RNA, 22 nt, Artificial Sequence
  Synthetic
caacguucagauucaggaaaua

SEQ ID NO: 494977 - RNA, 23 nt, Artificial Sequence
  Synthetic
ccaacguucagauucaggaaaua

SEQ ID NO: 494978 - RNA, 24 nt, Artificial Sequence
  Synthetic
gccaacguucagauucaggaaaua

SEQ ID NO: 494979 - RNA, 18 nt, Artificial Sequence
  Synthetic
guugaaagaagggaaaua

SEQ ID NO: 494980 - RNA, 19 nt, Artificial Sequence
  Synthetic
aguugaaagaagggaaaua

SEQ ID NO: 494981 - RNA, 20 nt, Artificial Sequence
  Synthetic
aaguugaaagaagggaaaua

SEQ ID NO: 494982 - RNA, 21 nt, Artificial Sequence
  Synthetic
gaaguugaaagaagggaaaua

SEQ ID NO: 494983 - RNA, 22 nt, Artificial Sequence
  Synthetic
agaaguugaaagaagggaaaua

SEQ ID NO: 494984 - RNA, 23 nt, Artificial Sequence
  Synthetic
cagaaguugaaagaagggaaaua

SEQ ID NO: 494985 - RNA, 24 nt, Artificial Sequence
  Synthetic
ucagaaguugaaagaagggaaaua

SEQ ID NO: 494986 - RNA, 18 nt, Artificial Sequence
  Synthetic
gauaaauacagggaaaua

SEQ ID NO: 494987 - RNA, 19 nt, Artificial Sequence
  Synthetic
agauaaauacagggaaaua

SEQ ID NO: 494988 - RNA, 20 nt, Artificial Sequence
  Synthetic
aagauaaauacagggaaaua

SEQ ID NO: 494989 - RNA, 21 nt, Artificial Sequence
  Synthetic
aaagauaaauacagggaaaua

SEQ ID NO: 494990 - RNA, 22 nt, Artificial Sequence
  Synthetic
aaaagauaaauacagggaaaua

SEQ ID NO: 494991 - RNA, 23 nt, Artificial Sequence
  Synthetic
gaaaagauaaauacagggaaaua

SEQ ID NO: 494992 - RNA, 24 nt, Artificial Sequence
  Synthetic
agaaaagauaaauacagggaaaua

SEQ ID NO: 494993 - RNA, 18 nt, Artificial Sequence
  Synthetic
acguauuguagggaaaua

SEQ ID NO: 494994 - RNA, 19 nt, Artificial Sequence
  Synthetic
gacguauuguagggaaaua

SEQ ID NO: 494995 - RNA, 20 nt, Artificial Sequence
  Synthetic
agacguauuguagggaaaua

SEQ ID NO: 494996 - RNA, 21 nt, Artificial Sequence
  Synthetic
cagacguauuguagggaaaua

SEQ ID NO: 494997 - RNA, 22 nt, Artificial Sequence
  Synthetic
acagacguauuguagggaaaua

SEQ ID NO: 494998 - RNA, 23 nt, Artificial Sequence
  Synthetic
gacagacguauuguagggaaaua

SEQ ID NO: 494999 - RNA, 24 nt, Artificial Sequence
  Synthetic
agacagacguauuguagggaaaua

SEQ ID NO: 495000 - RNA, 18 nt, Artificial Sequence
  Synthetic
gcaaacacaggggaaaua

SEQ ID NO: 495001 - RNA, 19 nt, Artificial Sequence
  Synthetic
agcaaacacaggggaaaua

SEQ ID NO: 495002 - RNA, 20 nt, Artificial Sequence
  Synthetic
cagcaaacacaggggaaaua

SEQ ID NO: 495003 - RNA, 21 nt, Artificial Sequence
  Synthetic
ucagcaaacacaggggaaaua

SEQ ID NO: 495004 - RNA, 22 nt, Artificial Sequence
  Synthetic
uucagcaaacacaggggaaaua

SEQ ID NO: 495005 - RNA, 23 nt, Artificial Sequence
  Synthetic
auucagcaaacacaggggaaaua

SEQ ID NO: 495006 - RNA, 24 nt, Artificial Sequence
  Synthetic
uauucagcaaacacaggggaaaua

SEQ ID NO: 495007 - RNA, 18 nt, Artificial Sequence
  Synthetic
gggauaaauugggaaaua

SEQ ID NO: 495008 - RNA, 19 nt, Artificial Sequence
  Synthetic
ggggauaaauugggaaaua

SEQ ID NO: 495009 - RNA, 20 nt, Artificial Sequence
  Synthetic
aggggauaaauugggaaaua

SEQ ID NO: 495010 - RNA, 21 nt, Artificial Sequence
  Synthetic
caggggauaaauugggaaaua

SEQ ID NO: 495011 - RNA, 22 nt, Artificial Sequence
  Synthetic
gcaggggauaaauugggaaaua

SEQ ID NO: 495012 - RNA, 23 nt, Artificial Sequence
  Synthetic
ugcaggggauaaauugggaaaua

SEQ ID NO: 495013 - RNA, 24 nt, Artificial Sequence
  Synthetic
cugcaggggauaaauugggaaaua

SEQ ID NO: 495014 - RNA, 18 nt, Artificial Sequence
  Synthetic
ggaaaagggauggaaaua

SEQ ID NO: 495015 - RNA, 19 nt, Artificial Sequence
  Synthetic
uggaaaagggauggaaaua

SEQ ID NO: 495016 - RNA, 20 nt, Artificial Sequence
  Synthetic
auggaaaagggauggaaaua

SEQ ID NO: 495017 - RNA, 21 nt, Artificial Sequence
  Synthetic
cauggaaaagggauggaaaua

SEQ ID NO: 495018 - RNA, 22 nt, Artificial Sequence
  Synthetic
gcauggaaaagggauggaaaua

SEQ ID NO: 495019 - RNA, 23 nt, Artificial Sequence
  Synthetic
agcauggaaaagggauggaaaua

SEQ ID NO: 495020 - RNA, 24 nt, Artificial Sequence
  Synthetic
aagcauggaaaagggauggaaaua

SEQ ID NO: 495021 - RNA, 18 nt, Artificial Sequence
  Synthetic
acacacagacuggaaaua

SEQ ID NO: 495022 - RNA, 19 nt, Artificial Sequence
  Synthetic
uacacacagacuggaaaua

SEQ ID NO: 495023 - RNA, 20 nt, Artificial Sequence
  Synthetic
cuacacacagacuggaaaua

SEQ ID NO: 495024 - RNA, 21 nt, Artificial Sequence
  Synthetic
gcuacacacagacuggaaaua

SEQ ID NO: 495025 - RNA, 22 nt, Artificial Sequence
  Synthetic
agcuacacacagacuggaaaua

SEQ ID NO: 495026 - RNA, 23 nt, Artificial Sequence
  Synthetic
aagcuacacacagacuggaaaua

SEQ ID NO: 495027 - RNA, 24 nt, Artificial Sequence
  Synthetic
aaagcuacacacagacuggaaaua

SEQ ID NO: 495028 - RNA, 18 nt, Artificial Sequence
  Synthetic
caguucuaaguggaaaua

SEQ ID NO: 495029 - RNA, 19 nt, Artificial Sequence
  Synthetic
acaguucuaaguggaaaua

SEQ ID NO: 495030 - RNA, 20 nt, Artificial Sequence
  Synthetic
gacaguucuaaguggaaaua

SEQ ID NO: 495031 - RNA, 21 nt, Artificial Sequence
  Synthetic
agacaguucuaaguggaaaua

SEQ ID NO: 495032 - RNA, 22 nt, Artificial Sequence
  Synthetic
gagacaguucuaaguggaaaua

SEQ ID NO: 495033 - RNA, 23 nt, Artificial Sequence
  Synthetic
agagacaguucuaaguggaaaua

SEQ ID NO: 495034 - RNA, 24 nt, Artificial Sequence
  Synthetic
gagagacaguucuaaguggaaaua

SEQ ID NO: 495035 - RNA, 18 nt, Artificial Sequence
  Synthetic
cuuuuauagguggaaaua

SEQ ID NO: 495036 - RNA, 19 nt, Artificial Sequence
  Synthetic
ucuuuuauagguggaaaua

SEQ ID NO: 495037 - RNA, 20 nt, Artificial Sequence
  Synthetic
uucuuuuauagguggaaaua

SEQ ID NO: 495038 - RNA, 21 nt, Artificial Sequence
  Synthetic
uuucuuuuauagguggaaaua

SEQ ID NO: 495039 - RNA, 22 nt, Artificial Sequence
  Synthetic
uuuucuuuuauagguggaaaua

SEQ ID NO: 495040 - RNA, 23 nt, Artificial Sequence
  Synthetic
cuuuucuuuuauagguggaaaua

SEQ ID NO: 495041 - RNA, 24 nt, Artificial Sequence
  Synthetic
gcuuuucuuuuauagguggaaaua

SEQ ID NO: 495042 - RNA, 18 nt, Artificial Sequence
  Synthetic
uaacuacuaaaugaaaua

SEQ ID NO: 495043 - RNA, 19 nt, Artificial Sequence
  Synthetic
cuaacuacuaaaugaaaua

SEQ ID NO: 495044 - RNA, 20 nt, Artificial Sequence
  Synthetic
ucuaacuacuaaaugaaaua

SEQ ID NO: 495045 - RNA, 21 nt, Artificial Sequence
  Synthetic
uucuaacuacuaaaugaaaua

SEQ ID NO: 495046 - RNA, 22 nt, Artificial Sequence
  Synthetic
uuucuaacuacuaaaugaaaua

SEQ ID NO: 495047 - RNA, 23 nt, Artificial Sequence
  Synthetic
uuuucuaacuacuaaaugaaaua

SEQ ID NO: 495048 - RNA, 24 nt, Artificial Sequence
  Synthetic
auuuucuaacuacuaaaugaaaua

SEQ ID NO: 495049 - RNA, 18 nt, Artificial Sequence
  Synthetic
acuuaauagcaugaaaua

SEQ ID NO: 495050 - RNA, 19 nt, Artificial Sequence
  Synthetic
aacuuaauagcaugaaaua

SEQ ID NO: 495051 - RNA, 20 nt, Artificial Sequence
  Synthetic
aaacuuaauagcaugaaaua

SEQ ID NO: 495052 - RNA, 21 nt, Artificial Sequence
  Synthetic
gaaacuuaauagcaugaaaua

SEQ ID NO: 495053 - RNA, 22 nt, Artificial Sequence
  Synthetic
agaaacuuaauagcaugaaaua

SEQ ID NO: 495054 - RNA, 23 nt, Artificial Sequence
  Synthetic
gagaaacuuaauagcaugaaaua

SEQ ID NO: 495055 - RNA, 24 nt, Artificial Sequence
  Synthetic
agagaaacuuaauagcaugaaaua

SEQ ID NO: 495056 - RNA, 18 nt, Artificial Sequence
  Synthetic
aacacacuaacugaaaua

SEQ ID NO: 495057 - RNA, 19 nt, Artificial Sequence
  Synthetic
aaacacacuaacugaaaua

SEQ ID NO: 495058 - RNA, 20 nt, Artificial Sequence
  Synthetic
aaaacacacuaacugaaaua

SEQ ID NO: 495059 - RNA, 21 nt, Artificial Sequence
  Synthetic
gaaaacacacuaacugaaaua

SEQ ID NO: 495060 - RNA, 22 nt, Artificial Sequence
  Synthetic
ggaaaacacacuaacugaaaua

SEQ ID NO: 495061 - RNA, 23 nt, Artificial Sequence
  Synthetic
uggaaaacacacuaacugaaaua

SEQ ID NO: 495062 - RNA, 24 nt, Artificial Sequence
  Synthetic
auggaaaacacacuaacugaaaua

SEQ ID NO: 495063 - RNA, 18 nt, Artificial Sequence
  Synthetic
uuccauuuagcugaaaua

SEQ ID NO: 495064 - RNA, 19 nt, Artificial Sequence
  Synthetic
cuuccauuuagcugaaaua

SEQ ID NO: 495065 - RNA, 20 nt, Artificial Sequence
  Synthetic
acuuccauuuagcugaaaua

SEQ ID NO: 495066 - RNA, 21 nt, Artificial Sequence
  Synthetic
cacuuccauuuagcugaaaua

SEQ ID NO: 495067 - RNA, 22 nt, Artificial Sequence
  Synthetic
acacuuccauuuagcugaaaua

SEQ ID NO: 495068 - RNA, 23 nt, Artificial Sequence
  Synthetic
aacacuuccauuuagcugaaaua

SEQ ID NO: 495069 - RNA, 24 nt, Artificial Sequence
  Synthetic
aaacacuuccauuuagcugaaaua

SEQ ID NO: 495070 - RNA, 18 nt, Artificial Sequence
  Synthetic
aaauaaagaagugaaaua

SEQ ID NO: 495071 - RNA, 19 nt, Artificial Sequence
  Synthetic
caaauaaagaagugaaaua

SEQ ID NO: 495072 - RNA, 20 nt, Artificial Sequence
  Synthetic
gcaaauaaagaagugaaaua

SEQ ID NO: 495073 - RNA, 21 nt, Artificial Sequence
  Synthetic
agcaaauaaagaagugaaaua

SEQ ID NO: 495074 - RNA, 22 nt, Artificial Sequence
  Synthetic
aagcaaauaaagaagugaaaua

SEQ ID NO: 495075 - RNA, 23 nt, Artificial Sequence
  Synthetic
aaagcaaauaaagaagugaaaua

SEQ ID NO: 495076 - RNA, 24 nt, Artificial Sequence
  Synthetic
aaaagcaaauaaagaagugaaaua

SEQ ID NO: 495077 - RNA, 18 nt, Artificial Sequence
  Synthetic
gugagaagaagugaaaua

SEQ ID NO: 495078 - RNA, 19 nt, Artificial Sequence
  Synthetic
ggugagaagaagugaaaua

SEQ ID NO: 495079 - RNA, 20 nt, Artificial Sequence
  Synthetic
gggugagaagaagugaaaua

SEQ ID NO: 495080 - RNA, 21 nt, Artificial Sequence
  Synthetic
agggugagaagaagugaaaua

SEQ ID NO: 495081 - RNA, 22 nt, Artificial Sequence
  Synthetic
cagggugagaagaagugaaaua

SEQ ID NO: 495082 - RNA, 23 nt, Artificial Sequence
  Synthetic
acagggugagaagaagugaaaua

SEQ ID NO: 495083 - RNA, 24 nt, Artificial Sequence
  Synthetic
aacagggugagaagaagugaaaua

SEQ ID NO: 495084 - RNA, 18 nt, Artificial Sequence
  Synthetic
aaacaguacagugaaaua

SEQ ID NO: 495085 - RNA, 19 nt, Artificial Sequence
  Synthetic
aaaacaguacagugaaaua

SEQ ID NO: 495086 - RNA, 20 nt, Artificial Sequence
  Synthetic
gaaaacaguacagugaaaua

SEQ ID NO: 495087 - RNA, 21 nt, Artificial Sequence
  Synthetic
ugaaaacaguacagugaaaua

SEQ ID NO: 495088 - RNA, 22 nt, Artificial Sequence
  Synthetic
cugaaaacaguacagugaaaua

SEQ ID NO: 495089 - RNA, 23 nt, Artificial Sequence
  Synthetic
acugaaaacaguacagugaaaua

SEQ ID NO: 495090 - RNA, 24 nt, Artificial Sequence
  Synthetic
aacugaaaacaguacagugaaaua

SEQ ID NO: 495091 - RNA, 18 nt, Artificial Sequence
  Synthetic
gauaauacaggugaaaua

SEQ ID NO: 495092 - RNA, 19 nt, Artificial Sequence
  Synthetic
ugauaauacaggugaaaua

SEQ ID NO: 495093 - RNA, 20 nt, Artificial Sequence
  Synthetic
uugauaauacaggugaaaua

SEQ ID NO: 495094 - RNA, 21 nt, Artificial Sequence
  Synthetic
auugauaauacaggugaaaua

SEQ ID NO: 495095 - RNA, 22 nt, Artificial Sequence
  Synthetic
aauugauaauacaggugaaaua

SEQ ID NO: 495096 - RNA, 23 nt, Artificial Sequence
  Synthetic
gaauugauaauacaggugaaaua

SEQ ID NO: 495097 - RNA, 24 nt, Artificial Sequence
  Synthetic
ugaauugauaauacaggugaaaua

SEQ ID NO: 495098 - RNA, 18 nt, Artificial Sequence
  Synthetic
uagucccuauuugaaaua

SEQ ID NO: 495099 - RNA, 19 nt, Artificial Sequence
  Synthetic
cuagucccuauuugaaaua

SEQ ID NO: 495100 - RNA, 20 nt, Artificial Sequence
  Synthetic
gcuagucccuauuugaaaua

SEQ ID NO: 495101 - RNA, 21 nt, Artificial Sequence
  Synthetic
ugcuagucccuauuugaaaua

SEQ ID NO: 495102 - RNA, 22 nt, Artificial Sequence
  Synthetic
cugcuagucccuauuugaaaua

SEQ ID NO: 495103 - RNA, 23 nt, Artificial Sequence
  Synthetic
ccugcuagucccuauuugaaaua

SEQ ID NO: 495104 - RNA, 24 nt, Artificial Sequence
  Synthetic
uccugcuagucccuauuugaaaua

SEQ ID NO: 495105 - RNA, 18 nt, Artificial Sequence
  Synthetic
auaauaauguuugaaaua

SEQ ID NO: 495106 - RNA, 19 nt, Artificial Sequence
  Synthetic
aauaauaauguuugaaaua

SEQ ID NO: 495107 - RNA, 20 nt, Artificial Sequence
  Synthetic
uaauaauaauguuugaaaua

SEQ ID NO: 495108 - RNA, 21 nt, Artificial Sequence
  Synthetic
auaauaauaauguuugaaaua

SEQ ID NO: 495109 - RNA, 22 nt, Artificial Sequence
  Synthetic
aauaauaauaauguuugaaaua

SEQ ID NO: 495110 - RNA, 23 nt, Artificial Sequence
  Synthetic
uaauaauaauaauguuugaaaua

SEQ ID NO: 495111 - RNA, 24 nt, Artificial Sequence
  Synthetic
auaauaauaauaauguuugaaaua

SEQ ID NO: 495112 - RNA, 18 nt, Artificial Sequence
  Synthetic
aacagaguguuugaaaua

SEQ ID NO: 495113 - RNA, 19 nt, Artificial Sequence
  Synthetic
caacagaguguuugaaaua

SEQ ID NO: 495114 - RNA, 20 nt, Artificial Sequence
  Synthetic
acaacagaguguuugaaaua

SEQ ID NO: 495115 - RNA, 21 nt, Artificial Sequence
  Synthetic
cacaacagaguguuugaaaua

SEQ ID NO: 495116 - RNA, 22 nt, Artificial Sequence
  Synthetic
acacaacagaguguuugaaaua

SEQ ID NO: 495117 - RNA, 23 nt, Artificial Sequence
  Synthetic
uacacaacagaguguuugaaaua

SEQ ID NO: 495118 - RNA, 24 nt, Artificial Sequence
  Synthetic
uuacacaacagaguguuugaaaua

SEQ ID NO: 495119 - RNA, 18 nt, Artificial Sequence
  Synthetic
gauguguuacaauaaaua

SEQ ID NO: 495120 - RNA, 19 nt, Artificial Sequence
  Synthetic
agauguguuacaauaaaua

SEQ ID NO: 495121 - RNA, 20 nt, Artificial Sequence
  Synthetic
gagauguguuacaauaaaua

SEQ ID NO: 495122 - RNA, 21 nt, Artificial Sequence
  Synthetic
ugagauguguuacaauaaaua

SEQ ID NO: 495123 - RNA, 22 nt, Artificial Sequence
  Synthetic
augagauguguuacaauaaaua

SEQ ID NO: 495124 - RNA, 23 nt, Artificial Sequence
  Synthetic
uaugagauguguuacaauaaaua

SEQ ID NO: 495125 - RNA, 24 nt, Artificial Sequence
  Synthetic
cuaugagauguguuacaauaaaua

SEQ ID NO: 495126 - RNA, 18 nt, Artificial Sequence
  Synthetic
gcucaacaucaauaaaua

SEQ ID NO: 495127 - RNA, 19 nt, Artificial Sequence
  Synthetic
agcucaacaucaauaaaua

SEQ ID NO: 495128 - RNA, 20 nt, Artificial Sequence
  Synthetic
aagcucaacaucaauaaaua

SEQ ID NO: 495129 - RNA, 21 nt, Artificial Sequence
  Synthetic
aaagcucaacaucaauaaaua

SEQ ID NO: 495130 - RNA, 22 nt, Artificial Sequence
  Synthetic
gaaagcucaacaucaauaaaua

SEQ ID NO: 495131 - RNA, 23 nt, Artificial Sequence
  Synthetic
ugaaagcucaacaucaauaaaua

SEQ ID NO: 495132 - RNA, 24 nt, Artificial Sequence
  Synthetic
cugaaagcucaacaucaauaaaua

SEQ ID NO: 495133 - RNA, 18 nt, Artificial Sequence
  Synthetic
uuauuaguucaauaaaua

SEQ ID NO: 495134 - RNA, 19 nt, Artificial Sequence
  Synthetic
auuauuaguucaauaaaua

SEQ ID NO: 495135 - RNA, 20 nt, Artificial Sequence
  Synthetic
aauuauuaguucaauaaaua

SEQ ID NO: 495136 - RNA, 21 nt, Artificial Sequence
  Synthetic
uaauuauuaguucaauaaaua

SEQ ID NO: 495137 - RNA, 22 nt, Artificial Sequence
  Synthetic
guaauuauuaguucaauaaaua

SEQ ID NO: 495138 - RNA, 23 nt, Artificial Sequence
  Synthetic
uguaauuauuaguucaauaaaua

SEQ ID NO: 495139 - RNA, 24 nt, Artificial Sequence
  Synthetic
auguaauuauuaguucaauaaaua

SEQ ID NO: 495140 - RNA, 18 nt, Artificial Sequence
  Synthetic
auaucuacugaauaaaua

SEQ ID NO: 495141 - RNA, 19 nt, Artificial Sequence
  Synthetic
aauaucuacugaauaaaua

SEQ ID NO: 495142 - RNA, 20 nt, Artificial Sequence
  Synthetic
uaauaucuacugaauaaaua

SEQ ID NO: 495143 - RNA, 21 nt, Artificial Sequence
  Synthetic
uuaauaucuacugaauaaaua

SEQ ID NO: 495144 - RNA, 22 nt, Artificial Sequence
  Synthetic
auuaauaucuacugaauaaaua

SEQ ID NO: 495145 - RNA, 23 nt, Artificial Sequence
  Synthetic
aauuaauaucuacugaauaaaua

SEQ ID NO: 495146 - RNA, 24 nt, Artificial Sequence
  Synthetic
caauuaauaucuacugaauaaaua

SEQ ID NO: 495147 - RNA, 18 nt, Artificial Sequence
  Synthetic
uuuuacuauuaauaaaua

SEQ ID NO: 495148 - RNA, 19 nt, Artificial Sequence
  Synthetic
auuuuacuauuaauaaaua

SEQ ID NO: 495149 - RNA, 20 nt, Artificial Sequence
  Synthetic
aauuuuacuauuaauaaaua

SEQ ID NO: 495150 - RNA, 21 nt, Artificial Sequence
  Synthetic
aaauuuuacuauuaauaaaua

SEQ ID NO: 495151 - RNA, 22 nt, Artificial Sequence
  Synthetic
caaauuuuacuauuaauaaaua

SEQ ID NO: 495152 - RNA, 23 nt, Artificial Sequence
  Synthetic
gcaaauuuuacuauuaauaaaua

SEQ ID NO: 495153 - RNA, 24 nt, Artificial Sequence
  Synthetic
agcaaauuuuacuauuaauaaaua

SEQ ID NO: 495154 - RNA, 18 nt, Artificial Sequence
  Synthetic
guggaaacuuaauaaaua

SEQ ID NO: 495155 - RNA, 19 nt, Artificial Sequence
  Synthetic
uguggaaacuuaauaaaua

SEQ ID NO: 495156 - RNA, 20 nt, Artificial Sequence
  Synthetic
cuguggaaacuuaauaaaua

SEQ ID NO: 495157 - RNA, 21 nt, Artificial Sequence
  Synthetic
acuguggaaacuuaauaaaua

SEQ ID NO: 495158 - RNA, 22 nt, Artificial Sequence
  Synthetic
cacuguggaaacuuaauaaaua

SEQ ID NO: 495159 - RNA, 23 nt, Artificial Sequence
  Synthetic
acacuguggaaacuuaauaaaua

SEQ ID NO: 495160 - RNA, 24 nt, Artificial Sequence
  Synthetic
cacacuguggaaacuuaauaaaua

SEQ ID NO: 495161 - RNA, 18 nt, Artificial Sequence
  Synthetic
uaaguucuuuaauaaaua

SEQ ID NO: 495162 - RNA, 19 nt, Artificial Sequence
  Synthetic
cuaaguucuuuaauaaaua

SEQ ID NO: 495163 - RNA, 20 nt, Artificial Sequence
  Synthetic
ucuaaguucuuuaauaaaua

SEQ ID NO: 495164 - RNA, 21 nt, Artificial Sequence
  Synthetic
uucuaaguucuuuaauaaaua

SEQ ID NO: 495165 - RNA, 22 nt, Artificial Sequence
  Synthetic
uuucuaaguucuuuaauaaaua

SEQ ID NO: 495166 - RNA, 23 nt, Artificial Sequence
  Synthetic
uuuucuaaguucuuuaauaaaua

SEQ ID NO: 495167 - RNA, 24 nt, Artificial Sequence
  Synthetic
uuuuucuaaguucuuuaauaaaua

SEQ ID NO: 495168 - RNA, 18 nt, Artificial Sequence
  Synthetic
cacacauggacauaaaua

SEQ ID NO: 495169 - RNA, 19 nt, Artificial Sequence
  Synthetic
gcacacauggacauaaaua

SEQ ID NO: 495170 - RNA, 20 nt, Artificial Sequence
  Synthetic
agcacacauggacauaaaua

SEQ ID NO: 495171 - RNA, 21 nt, Artificial Sequence
  Synthetic
gagcacacauggacauaaaua

SEQ ID NO: 495172 - RNA, 22 nt, Artificial Sequence
  Synthetic
ugagcacacauggacauaaaua

SEQ ID NO: 495173 - RNA, 23 nt, Artificial Sequence
  Synthetic
cugagcacacauggacauaaaua

SEQ ID NO: 495174 - RNA, 24 nt, Artificial Sequence
  Synthetic
acugagcacacauggacauaaaua

SEQ ID NO: 495175 - RNA, 18 nt, Artificial Sequence
  Synthetic
uccauuuugacauaaaua

SEQ ID NO: 495176 - RNA, 19 nt, Artificial Sequence
  Synthetic
guccauuuugacauaaaua

SEQ ID NO: 495177 - RNA, 20 nt, Artificial Sequence
  Synthetic
aguccauuuugacauaaaua

SEQ ID NO: 495178 - RNA, 21 nt, Artificial Sequence
  Synthetic
gaguccauuuugacauaaaua

SEQ ID NO: 495179 - RNA, 22 nt, Artificial Sequence
  Synthetic
ugaguccauuuugacauaaaua

SEQ ID NO: 495180 - RNA, 23 nt, Artificial Sequence
  Synthetic
augaguccauuuugacauaaaua

SEQ ID NO: 495181 - RNA, 24 nt, Artificial Sequence
  Synthetic
uaugaguccauuuugacauaaaua

SEQ ID NO: 495182 - RNA, 18 nt, Artificial Sequence
  Synthetic
ccccaccagccauaaaua

SEQ ID NO: 495183 - RNA, 19 nt, Artificial Sequence
  Synthetic
accccaccagccauaaaua

SEQ ID NO: 495184 - RNA, 20 nt, Artificial Sequence
  Synthetic
aaccccaccagccauaaaua

SEQ ID NO: 495185 - RNA, 21 nt, Artificial Sequence
  Synthetic
aaaccccaccagccauaaaua

SEQ ID NO: 495186 - RNA, 22 nt, Artificial Sequence
  Synthetic
caaaccccaccagccauaaaua

SEQ ID NO: 495187 - RNA, 23 nt, Artificial Sequence
  Synthetic
acaaaccccaccagccauaaaua

SEQ ID NO: 495188 - RNA, 24 nt, Artificial Sequence
  Synthetic
uacaaaccccaccagccauaaaua

SEQ ID NO: 495189 - RNA, 18 nt, Artificial Sequence
  Synthetic
uggaagaaaagauaaaua

SEQ ID NO: 495190 - RNA, 19 nt, Artificial Sequence
  Synthetic
cuggaagaaaagauaaaua

SEQ ID NO: 495191 - RNA, 20 nt, Artificial Sequence
  Synthetic
acuggaagaaaagauaaaua

SEQ ID NO: 495192 - RNA, 21 nt, Artificial Sequence
  Synthetic
aacuggaagaaaagauaaaua

SEQ ID NO: 495193 - RNA, 22 nt, Artificial Sequence
  Synthetic
caacuggaagaaaagauaaaua

SEQ ID NO: 495194 - RNA, 23 nt, Artificial Sequence
  Synthetic
gcaacuggaagaaaagauaaaua

SEQ ID NO: 495195 - RNA, 24 nt, Artificial Sequence
  Synthetic
ugcaacuggaagaaaagauaaaua

SEQ ID NO: 495196 - RNA, 18 nt, Artificial Sequence
  Synthetic
uaaaggugaagauaaaua

SEQ ID NO: 495197 - RNA, 19 nt, Artificial Sequence
  Synthetic
auaaaggugaagauaaaua

SEQ ID NO: 495198 - RNA, 20 nt, Artificial Sequence
  Synthetic
uauaaaggugaagauaaaua

SEQ ID NO: 495199 - RNA, 21 nt, Artificial Sequence
  Synthetic
guauaaaggugaagauaaaua

SEQ ID NO: 495200 - RNA, 22 nt, Artificial Sequence
  Synthetic
uguauaaaggugaagauaaaua

SEQ ID NO: 495201 - RNA, 23 nt, Artificial Sequence
  Synthetic
auguauaaaggugaagauaaaua

SEQ ID NO: 495202 - RNA, 24 nt, Artificial Sequence
  Synthetic
aauguauaaaggugaagauaaaua

SEQ ID NO: 495203 - RNA, 18 nt, Artificial Sequence
  Synthetic
caauaccgcugauaaaua

SEQ ID NO: 495204 - RNA, 19 nt, Artificial Sequence
  Synthetic
acaauaccgcugauaaaua

SEQ ID NO: 495205 - RNA, 20 nt, Artificial Sequence
  Synthetic
aacaauaccgcugauaaaua

SEQ ID NO: 495206 - RNA, 21 nt, Artificial Sequence
  Synthetic
gaacaauaccgcugauaaaua

SEQ ID NO: 495207 - RNA, 22 nt, Artificial Sequence
  Synthetic
agaacaauaccgcugauaaaua

SEQ ID NO: 495208 - RNA, 23 nt, Artificial Sequence
  Synthetic
cagaacaauaccgcugauaaaua

SEQ ID NO: 495209 - RNA, 24 nt, Artificial Sequence
  Synthetic
acagaacaauaccgcugauaaaua

SEQ ID NO: 495210 - RNA, 18 nt, Artificial Sequence
  Synthetic
ugaauaacaauauaaaua

SEQ ID NO: 495211 - RNA, 19 nt, Artificial Sequence
  Synthetic
cugaauaacaauauaaaua

SEQ ID NO: 495212 - RNA, 20 nt, Artificial Sequence
  Synthetic
acugaauaacaauauaaaua

SEQ ID NO: 495213 - RNA, 21 nt, Artificial Sequence
  Synthetic
aacugaauaacaauauaaaua

SEQ ID NO: 495214 - RNA, 22 nt, Artificial Sequence
  Synthetic
aaacugaauaacaauauaaaua

SEQ ID NO: 495215 - RNA, 23 nt, Artificial Sequence
  Synthetic
uaaacugaauaacaauauaaaua

SEQ ID NO: 495216 - RNA, 24 nt, Artificial Sequence
  Synthetic
guaaacugaauaacaauauaaaua

SEQ ID NO: 495217 - RNA, 18 nt, Artificial Sequence
  Synthetic
uuucuguauauauaaaua

SEQ ID NO: 495218 - RNA, 19 nt, Artificial Sequence
  Synthetic
cuuucuguauauauaaaua

SEQ ID NO: 495219 - RNA, 20 nt, Artificial Sequence
  Synthetic
ccuuucuguauauauaaaua

SEQ ID NO: 495220 - RNA, 21 nt, Artificial Sequence
  Synthetic
uccuuucuguauauauaaaua

SEQ ID NO: 495221 - RNA, 22 nt, Artificial Sequence
  Synthetic
uuccuuucuguauauauaaaua

SEQ ID NO: 495222 - RNA, 23 nt, Artificial Sequence
  Synthetic
auuccuuucuguauauauaaaua

SEQ ID NO: 495223 - RNA, 24 nt, Artificial Sequence
  Synthetic
aauuccuuucuguauauauaaaua

SEQ ID NO: 495224 - RNA, 18 nt, Artificial Sequence
  Synthetic
agcucuuccaacuaaaua

SEQ ID NO: 495225 - RNA, 19 nt, Artificial Sequence
  Synthetic
uagcucuuccaacuaaaua

SEQ ID NO: 495226 - RNA, 20 nt, Artificial Sequence
  Synthetic
cuagcucuuccaacuaaaua

SEQ ID NO: 495227 - RNA, 21 nt, Artificial Sequence
  Synthetic
ccuagcucuuccaacuaaaua

SEQ ID NO: 495228 - RNA, 22 nt, Artificial Sequence
  Synthetic
gccuagcucuuccaacuaaaua

SEQ ID NO: 495229 - RNA, 23 nt, Artificial Sequence
  Synthetic
ugccuagcucuuccaacuaaaua

SEQ ID NO: 495230 - RNA, 24 nt, Artificial Sequence
  Synthetic
uugccuagcucuuccaacuaaaua

SEQ ID NO: 495231 - RNA, 18 nt, Artificial Sequence
  Synthetic
cauaccucuaccuaaaua

SEQ ID NO: 495232 - RNA, 19 nt, Artificial Sequence
  Synthetic
acauaccucuaccuaaaua

SEQ ID NO: 495233 - RNA, 20 nt, Artificial Sequence
  Synthetic
uacauaccucuaccuaaaua

SEQ ID NO: 495234 - RNA, 21 nt, Artificial Sequence
  Synthetic
uuacauaccucuaccuaaaua

SEQ ID NO: 495235 - RNA, 22 nt, Artificial Sequence
  Synthetic
auuacauaccucuaccuaaaua

SEQ ID NO: 495236 - RNA, 23 nt, Artificial Sequence
  Synthetic
uauuacauaccucuaccuaaaua

SEQ ID NO: 495237 - RNA, 24 nt, Artificial Sequence
  Synthetic
guauuacauaccucuaccuaaaua

SEQ ID NO: 495238 - RNA, 18 nt, Artificial Sequence
  Synthetic
auccaugcaaucuaaaua

SEQ ID NO: 495239 - RNA, 19 nt, Artificial Sequence
  Synthetic
aauccaugcaaucuaaaua

SEQ ID NO: 495240 - RNA, 20 nt, Artificial Sequence
  Synthetic
aaauccaugcaaucuaaaua

SEQ ID NO: 495241 - RNA, 21 nt, Artificial Sequence
  Synthetic
uaaauccaugcaaucuaaaua

SEQ ID NO: 495242 - RNA, 22 nt, Artificial Sequence
  Synthetic
uuaaauccaugcaaucuaaaua

SEQ ID NO: 495243 - RNA, 23 nt, Artificial Sequence
  Synthetic
auuaaauccaugcaaucuaaaua

SEQ ID NO: 495244 - RNA, 24 nt, Artificial Sequence
  Synthetic
cauuaaauccaugcaaucuaaaua

SEQ ID NO: 495245 - RNA, 18 nt, Artificial Sequence
  Synthetic
aguccuguggucuaaaua

SEQ ID NO: 495246 - RNA, 19 nt, Artificial Sequence
  Synthetic
caguccuguggucuaaaua

SEQ ID NO: 495247 - RNA, 20 nt, Artificial Sequence
  Synthetic
ccaguccuguggucuaaaua

SEQ ID NO: 495248 - RNA, 21 nt, Artificial Sequence
  Synthetic
accaguccuguggucuaaaua

SEQ ID NO: 495249 - RNA, 22 nt, Artificial Sequence
  Synthetic
uaccaguccuguggucuaaaua

SEQ ID NO: 495250 - RNA, 23 nt, Artificial Sequence
  Synthetic
guaccaguccuguggucuaaaua

SEQ ID NO: 495251 - RNA, 24 nt, Artificial Sequence
  Synthetic
gguaccaguccuguggucuaaaua

SEQ ID NO: 495252 - RNA, 18 nt, Artificial Sequence
  Synthetic
auucuaauuaaguaaaua

SEQ ID NO: 495253 - RNA, 19 nt, Artificial Sequence
  Synthetic
uauucuaauuaaguaaaua

SEQ ID NO: 495254 - RNA, 20 nt, Artificial Sequence
  Synthetic
auauucuaauuaaguaaaua

SEQ ID NO: 495255 - RNA, 21 nt, Artificial Sequence
  Synthetic
gauauucuaauuaaguaaaua

SEQ ID NO: 495256 - RNA, 22 nt, Artificial Sequence
  Synthetic
agauauucuaauuaaguaaaua

SEQ ID NO: 495257 - RNA, 23 nt, Artificial Sequence
  Synthetic
uagauauucuaauuaaguaaaua

SEQ ID NO: 495258 - RNA, 24 nt, Artificial Sequence
  Synthetic
uuagauauucuaauuaaguaaaua

SEQ ID NO: 495259 - RNA, 18 nt, Artificial Sequence
  Synthetic
auaauuucauaguaaaua

SEQ ID NO: 495260 - RNA, 19 nt, Artificial Sequence
  Synthetic
aauaauuucauaguaaaua

SEQ ID NO: 495261 - RNA, 20 nt, Artificial Sequence
  Synthetic
aaauaauuucauaguaaaua

SEQ ID NO: 495262 - RNA, 21 nt, Artificial Sequence
  Synthetic
aaaauaauuucauaguaaaua

SEQ ID NO: 495263 - RNA, 22 nt, Artificial Sequence
  Synthetic
uaaaauaauuucauaguaaaua

SEQ ID NO: 495264 - RNA, 23 nt, Artificial Sequence
  Synthetic
cuaaaauaauuucauaguaaaua

SEQ ID NO: 495265 - RNA, 24 nt, Artificial Sequence
  Synthetic
ucuaaaauaauuucauaguaaaua

SEQ ID NO: 495266 - RNA, 18 nt, Artificial Sequence
  Synthetic
uuuggaaggagguaaaua

SEQ ID NO: 495267 - RNA, 19 nt, Artificial Sequence
  Synthetic
auuuggaaggagguaaaua

SEQ ID NO: 495268 - RNA, 20 nt, Artificial Sequence
  Synthetic
uauuuggaaggagguaaaua

SEQ ID NO: 495269 - RNA, 21 nt, Artificial Sequence
  Synthetic
guauuuggaaggagguaaaua

SEQ ID NO: 495270 - RNA, 22 nt, Artificial Sequence
  Synthetic
uguauuuggaaggagguaaaua

SEQ ID NO: 495271 - RNA, 23 nt, Artificial Sequence
  Synthetic
uuguauuuggaaggagguaaaua

SEQ ID NO: 495272 - RNA, 24 nt, Artificial Sequence
  Synthetic
guuguauuuggaaggagguaaaua

SEQ ID NO: 495273 - RNA, 18 nt, Artificial Sequence
  Synthetic
aauaauauuagguaaaua

SEQ ID NO: 495274 - RNA, 19 nt, Artificial Sequence
  Synthetic
gaauaauauuagguaaaua

SEQ ID NO: 495275 - RNA, 20 nt, Artificial Sequence
  Synthetic
agaauaauauuagguaaaua

SEQ ID NO: 495276 - RNA, 21 nt, Artificial Sequence
  Synthetic
aagaauaauauuagguaaaua

SEQ ID NO: 495277 - RNA, 22 nt, Artificial Sequence
  Synthetic
uaagaauaauauuagguaaaua

SEQ ID NO: 495278 - RNA, 23 nt, Artificial Sequence
  Synthetic
auaagaauaauauuagguaaaua

SEQ ID NO: 495279 - RNA, 24 nt, Artificial Sequence
  Synthetic
uauaagaauaauauuagguaaaua

SEQ ID NO: 495280 - RNA, 18 nt, Artificial Sequence
  Synthetic
caagcuuacauguaaaua

SEQ ID NO: 495281 - RNA, 19 nt, Artificial Sequence
  Synthetic
ucaagcuuacauguaaaua

SEQ ID NO: 495282 - RNA, 20 nt, Artificial Sequence
  Synthetic
cucaagcuuacauguaaaua

SEQ ID NO: 495283 - RNA, 21 nt, Artificial Sequence
  Synthetic
gcucaagcuuacauguaaaua

SEQ ID NO: 495284 - RNA, 22 nt, Artificial Sequence
  Synthetic
ugcucaagcuuacauguaaaua

SEQ ID NO: 495285 - RNA, 23 nt, Artificial Sequence
  Synthetic
uugcucaagcuuacauguaaaua

SEQ ID NO: 495286 - RNA, 24 nt, Artificial Sequence
  Synthetic
auugcucaagcuuacauguaaaua

SEQ ID NO: 495287 - RNA, 18 nt, Artificial Sequence
  Synthetic
cgaauggccauguaaaua

SEQ ID NO: 495288 - RNA, 19 nt, Artificial Sequence
  Synthetic
acgaauggccauguaaaua

SEQ ID NO: 495289 - RNA, 20 nt, Artificial Sequence
  Synthetic
uacgaauggccauguaaaua

SEQ ID NO: 495290 - RNA, 21 nt, Artificial Sequence
  Synthetic
cuacgaauggccauguaaaua

SEQ ID NO: 495291 - RNA, 22 nt, Artificial Sequence
  Synthetic
acuacgaauggccauguaaaua

SEQ ID NO: 495292 - RNA, 23 nt, Artificial Sequence
  Synthetic
gacuacgaauggccauguaaaua

SEQ ID NO: 495293 - RNA, 24 nt, Artificial Sequence
  Synthetic
agacuacgaauggccauguaaaua

SEQ ID NO: 495294 - RNA, 18 nt, Artificial Sequence
  Synthetic
cagccucagauguaaaua

SEQ ID NO: 495295 - RNA, 19 nt, Artificial Sequence
  Synthetic
gcagccucagauguaaaua

SEQ ID NO: 495296 - RNA, 20 nt, Artificial Sequence
  Synthetic
ugcagccucagauguaaaua

SEQ ID NO: 495297 - RNA, 21 nt, Artificial Sequence
  Synthetic
augcagccucagauguaaaua

SEQ ID NO: 495298 - RNA, 22 nt, Artificial Sequence
  Synthetic
uaugcagccucagauguaaaua

SEQ ID NO: 495299 - RNA, 23 nt, Artificial Sequence
  Synthetic
cuaugcagccucagauguaaaua

SEQ ID NO: 495300 - RNA, 24 nt, Artificial Sequence
  Synthetic
ccuaugcagccucagauguaaaua

SEQ ID NO: 495301 - RNA, 18 nt, Artificial Sequence
  Synthetic
uaccagaucuuguaaaua

SEQ ID NO: 495302 - RNA, 19 nt, Artificial Sequence
  Synthetic
auaccagaucuuguaaaua

SEQ ID NO: 495303 - RNA, 20 nt, Artificial Sequence
  Synthetic
uauaccagaucuuguaaaua

SEQ ID NO: 495304 - RNA, 21 nt, Artificial Sequence
  Synthetic
uuauaccagaucuuguaaaua

SEQ ID NO: 495305 - RNA, 22 nt, Artificial Sequence
  Synthetic
uuuauaccagaucuuguaaaua

SEQ ID NO: 495306 - RNA, 23 nt, Artificial Sequence
  Synthetic
uuuuauaccagaucuuguaaaua

SEQ ID NO: 495307 - RNA, 24 nt, Artificial Sequence
  Synthetic
auuuuauaccagaucuuguaaaua

SEQ ID NO: 495308 - RNA, 18 nt, Artificial Sequence
  Synthetic
aucagaaauuuguaaaua

SEQ ID NO: 495309 - RNA, 19 nt, Artificial Sequence
  Synthetic
caucagaaauuuguaaaua

SEQ ID NO: 495310 - RNA, 20 nt, Artificial Sequence
  Synthetic
ucaucagaaauuuguaaaua

SEQ ID NO: 495311 - RNA, 21 nt, Artificial Sequence
  Synthetic
aucaucagaaauuuguaaaua

SEQ ID NO: 495312 - RNA, 22 nt, Artificial Sequence
  Synthetic
caucaucagaaauuuguaaaua

SEQ ID NO: 495313 - RNA, 23 nt, Artificial Sequence
  Synthetic
ucaucaucagaaauuuguaaaua

SEQ ID NO: 495314 - RNA, 24 nt, Artificial Sequence
  Synthetic
aucaucaucagaaauuuguaaaua

SEQ ID NO: 495315 - RNA, 18 nt, Artificial Sequence
  Synthetic
cuuagagacacuuaaaua

SEQ ID NO: 495316 - RNA, 19 nt, Artificial Sequence
  Synthetic
acuuagagacacuuaaaua

SEQ ID NO: 495317 - RNA, 20 nt, Artificial Sequence
  Synthetic
uacuuagagacacuuaaaua

SEQ ID NO: 495318 - RNA, 21 nt, Artificial Sequence
  Synthetic
auacuuagagacacuuaaaua

SEQ ID NO: 495319 - RNA, 22 nt, Artificial Sequence
  Synthetic
aauacuuagagacacuuaaaua

SEQ ID NO: 495320 - RNA, 23 nt, Artificial Sequence
  Synthetic
aaauacuuagagacacuuaaaua

SEQ ID NO: 495321 - RNA, 24 nt, Artificial Sequence
  Synthetic
aaaauacuuagagacacuuaaaua

SEQ ID NO: 495322 - RNA, 18 nt, Artificial Sequence
  Synthetic
augcauguccuuuaaaua

SEQ ID NO: 495323 - RNA, 19 nt, Artificial Sequence
  Synthetic
uaugcauguccuuuaaaua

SEQ ID NO: 495324 - RNA, 20 nt, Artificial Sequence
  Synthetic
uuaugcauguccuuuaaaua

SEQ ID NO: 495325 - RNA, 21 nt, Artificial Sequence
  Synthetic
auuaugcauguccuuuaaaua

SEQ ID NO: 495326 - RNA, 22 nt, Artificial Sequence
  Synthetic
aauuaugcauguccuuuaaaua

SEQ ID NO: 495327 - RNA, 23 nt, Artificial Sequence
  Synthetic
aaauuaugcauguccuuuaaaua

SEQ ID NO: 495328 - RNA, 24 nt, Artificial Sequence
  Synthetic
aaaauuaugcauguccuuuaaaua

SEQ ID NO: 495329 - RNA, 18 nt, Artificial Sequence
  Synthetic
cagcuguagcuuuaaaua

SEQ ID NO: 495330 - RNA, 19 nt, Artificial Sequence
  Synthetic
ccagcuguagcuuuaaaua

SEQ ID NO: 495331 - RNA, 20 nt, Artificial Sequence
  Synthetic
accagcuguagcuuuaaaua

SEQ ID NO: 495332 - RNA, 21 nt, Artificial Sequence
  Synthetic
caccagcuguagcuuuaaaua

SEQ ID NO: 495333 - RNA, 22 nt, Artificial Sequence
  Synthetic
ucaccagcuguagcuuuaaaua

SEQ ID NO: 495334 - RNA, 23 nt, Artificial Sequence
  Synthetic
uucaccagcuguagcuuuaaaua

SEQ ID NO: 495335 - RNA, 24 nt, Artificial Sequence
  Synthetic
guucaccagcuguagcuuuaaaua

SEQ ID NO: 495336 - RNA, 18 nt, Artificial Sequence
  Synthetic
gagcuaucucuuuaaaua

SEQ ID NO: 495337 - RNA, 19 nt, Artificial Sequence
  Synthetic
ggagcuaucucuuuaaaua

SEQ ID NO: 495338 - RNA, 20 nt, Artificial Sequence
  Synthetic
gggagcuaucucuuuaaaua

SEQ ID NO: 495339 - RNA, 21 nt, Artificial Sequence
  Synthetic
ugggagcuaucucuuuaaaua

SEQ ID NO: 495340 - RNA, 22 nt, Artificial Sequence
  Synthetic
augggagcuaucucuuuaaaua

SEQ ID NO: 495341 - RNA, 23 nt, Artificial Sequence
  Synthetic
aaugggagcuaucucuuuaaaua

SEQ ID NO: 495342 - RNA, 24 nt, Artificial Sequence
  Synthetic
aaaugggagcuaucucuuuaaaua

SEQ ID NO: 495343 - RNA, 18 nt, Artificial Sequence
  Synthetic
augaagcuuguuuaaaua

SEQ ID NO: 495344 - RNA, 19 nt, Artificial Sequence
  Synthetic
aaugaagcuuguuuaaaua

SEQ ID NO: 495345 - RNA, 20 nt, Artificial Sequence
  Synthetic
aaaugaagcuuguuuaaaua

SEQ ID NO: 495346 - RNA, 21 nt, Artificial Sequence
  Synthetic
aaaaugaagcuuguuuaaaua

SEQ ID NO: 495347 - RNA, 22 nt, Artificial Sequence
  Synthetic
aaaaaugaagcuuguuuaaaua

SEQ ID NO: 495348 - RNA, 23 nt, Artificial Sequence
  Synthetic
aaaaaaugaagcuuguuuaaaua

SEQ ID NO: 495349 - RNA, 24 nt, Artificial Sequence
  Synthetic
aaaaaaaugaagcuuguuuaaaua

SEQ ID NO: 495350 - RNA, 18 nt, Artificial Sequence
  Synthetic
uuuacaaacuuuuaaaua

SEQ ID NO: 495351 - RNA, 19 nt, Artificial Sequence
  Synthetic
uuuuacaaacuuuuaaaua

SEQ ID NO: 495352 - RNA, 20 nt, Artificial Sequence
  Synthetic
uuuuuacaaacuuuuaaaua

SEQ ID NO: 495353 - RNA, 21 nt, Artificial Sequence
  Synthetic
uuuuuuacaaacuuuuaaaua

SEQ ID NO: 495354 - RNA, 22 nt, Artificial Sequence
  Synthetic
auuuuuuacaaacuuuuaaaua

SEQ ID NO: 495355 - RNA, 23 nt, Artificial Sequence
  Synthetic
cauuuuuuacaaacuuuuaaaua

SEQ ID NO: 495356 - RNA, 24 nt, Artificial Sequence
  Synthetic
ucauuuuuuacaaacuuuuaaaua

SEQ ID NO: 495357 - RNA, 18 nt, Artificial Sequence
  Synthetic
aaguauuucuuuuaaaua

SEQ ID NO: 495358 - RNA, 19 nt, Artificial Sequence
  Synthetic
uaaguauuucuuuuaaaua

SEQ ID NO: 495359 - RNA, 20 nt, Artificial Sequence
  Synthetic
uuaaguauuucuuuuaaaua

SEQ ID NO: 495360 - RNA, 21 nt, Artificial Sequence
  Synthetic
guuaaguauuucuuuuaaaua

SEQ ID NO: 495361 - RNA, 22 nt, Artificial Sequence
  Synthetic
cguuaaguauuucuuuuaaaua

SEQ ID NO: 495362 - RNA, 23 nt, Artificial Sequence
  Synthetic
ucguuaaguauuucuuuuaaaua

SEQ ID NO: 495363 - RNA, 24 nt, Artificial Sequence
  Synthetic
aucguuaaguauuucuuuuaaaua

SEQ ID NO: 495364 - RNA, 18 nt, Artificial Sequence
  Synthetic
cuacaagaguuuuaaaua

SEQ ID NO: 495365 - RNA, 19 nt, Artificial Sequence
  Synthetic
gcuacaagaguuuuaaaua

SEQ ID NO: 495366 - RNA, 20 nt, Artificial Sequence
  Synthetic
agcuacaagaguuuuaaaua

SEQ ID NO: 495367 - RNA, 21 nt, Artificial Sequence
  Synthetic
aagcuacaagaguuuuaaaua

SEQ ID NO: 495368 - RNA, 22 nt, Artificial Sequence
  Synthetic
gaagcuacaagaguuuuaaaua

SEQ ID NO: 495369 - RNA, 23 nt, Artificial Sequence
  Synthetic
agaagcuacaagaguuuuaaaua

SEQ ID NO: 495370 - RNA, 24 nt, Artificial Sequence
  Synthetic
gagaagcuacaagaguuuuaaaua

SEQ ID NO: 495371 - RNA, 18 nt, Artificial Sequence
  Synthetic
aauaauuauuuuuaaaua

SEQ ID NO: 495372 - RNA, 19 nt, Artificial Sequence
  Synthetic
gaauaauuauuuuuaaaua

SEQ ID NO: 495373 - RNA, 20 nt, Artificial Sequence
  Synthetic
ugaauaauuauuuuuaaaua

SEQ ID NO: 495374 - RNA, 21 nt, Artificial Sequence
  Synthetic
cugaauaauuauuuuuaaaua

SEQ ID NO: 495375 - RNA, 22 nt, Artificial Sequence
  Synthetic
ucugaauaauuauuuuuaaaua

SEQ ID NO: 495376 - RNA, 23 nt, Artificial Sequence
  Synthetic
cucugaauaauuauuuuuaaaua

SEQ ID NO: 495377 - RNA, 24 nt, Artificial Sequence
  Synthetic
ucucugaauaauuauuuuuaaaua

SEQ ID NO: 495378 - RNA, 18 nt, Artificial Sequence
  Synthetic
agugggaaguaaacaaua

SEQ ID NO: 495379 - RNA, 19 nt, Artificial Sequence
  Synthetic
cagugggaaguaaacaaua

SEQ ID NO: 495380 - RNA, 20 nt, Artificial Sequence
  Synthetic
ccagugggaaguaaacaaua

SEQ ID NO: 495381 - RNA, 21 nt, Artificial Sequence
  Synthetic
uccagugggaaguaaacaaua

SEQ ID NO: 495382 - RNA, 22 nt, Artificial Sequence
  Synthetic
uuccagugggaaguaaacaaua

SEQ ID NO: 495383 - RNA, 23 nt, Artificial Sequence
  Synthetic
cuuccagugggaaguaaacaaua

SEQ ID NO: 495384 - RNA, 24 nt, Artificial Sequence
  Synthetic
ucuuccagugggaaguaaacaaua

SEQ ID NO: 495385 - RNA, 18 nt, Artificial Sequence
  Synthetic
uucugagacacaacaaua

SEQ ID NO: 495386 - RNA, 19 nt, Artificial Sequence
  Synthetic
auucugagacacaacaaua

SEQ ID NO: 495387 - RNA, 20 nt, Artificial Sequence
  Synthetic
uauucugagacacaacaaua

SEQ ID NO: 495388 - RNA, 21 nt, Artificial Sequence
  Synthetic
cuauucugagacacaacaaua

SEQ ID NO: 495389 - RNA, 22 nt, Artificial Sequence
  Synthetic
ccuauucugagacacaacaaua

SEQ ID NO: 495390 - RNA, 23 nt, Artificial Sequence
  Synthetic
cccuauucugagacacaacaaua

SEQ ID NO: 495391 - RNA, 24 nt, Artificial Sequence
  Synthetic
ucccuauucugagacacaacaaua

SEQ ID NO: 495392 - RNA, 18 nt, Artificial Sequence
  Synthetic
aauauuagaagaacaaua

SEQ ID NO: 495393 - RNA, 19 nt, Artificial Sequence
  Synthetic
aaauauuagaagaacaaua

SEQ ID NO: 495394 - RNA, 20 nt, Artificial Sequence
  Synthetic
caaauauuagaagaacaaua

SEQ ID NO: 495395 - RNA, 21 nt, Artificial Sequence
  Synthetic
gcaaauauuagaagaacaaua

SEQ ID NO: 495396 - RNA, 22 nt, Artificial Sequence
  Synthetic
ggcaaauauuagaagaacaaua

SEQ ID NO: 495397 - RNA, 23 nt, Artificial Sequence
  Synthetic
gggcaaauauuagaagaacaaua

SEQ ID NO: 495398 - RNA, 24 nt, Artificial Sequence
  Synthetic
agggcaaauauuagaagaacaaua

SEQ ID NO: 495399 - RNA, 18 nt, Artificial Sequence
  Synthetic
aaaguuuuacgaacaaua

SEQ ID NO: 495400 - RNA, 19 nt, Artificial Sequence
  Synthetic
caaaguuuuacgaacaaua

SEQ ID NO: 495401 - RNA, 20 nt, Artificial Sequence
  Synthetic
ccaaaguuuuacgaacaaua

SEQ ID NO: 495402 - RNA, 21 nt, Artificial Sequence
  Synthetic
accaaaguuuuacgaacaaua

SEQ ID NO: 495403 - RNA, 22 nt, Artificial Sequence
  Synthetic
aaccaaaguuuuacgaacaaua

SEQ ID NO: 495404 - RNA, 23 nt, Artificial Sequence
  Synthetic
gaaccaaaguuuuacgaacaaua

SEQ ID NO: 495405 - RNA, 24 nt, Artificial Sequence
  Synthetic
cgaaccaaaguuuuacgaacaaua

SEQ ID NO: 495406 - RNA, 18 nt, Artificial Sequence
  Synthetic
uggucauauguaacaaua

SEQ ID NO: 495407 - RNA, 19 nt, Artificial Sequence
  Synthetic
auggucauauguaacaaua

SEQ ID NO: 495408 - RNA, 20 nt, Artificial Sequence
  Synthetic
uauggucauauguaacaaua

SEQ ID NO: 495409 - RNA, 21 nt, Artificial Sequence
  Synthetic
auauggucauauguaacaaua

SEQ ID NO: 495410 - RNA, 22 nt, Artificial Sequence
  Synthetic
gauauggucauauguaacaaua

SEQ ID NO: 495411 - RNA, 23 nt, Artificial Sequence
  Synthetic
agauauggucauauguaacaaua

SEQ ID NO: 495412 - RNA, 24 nt, Artificial Sequence
  Synthetic
uagauauggucauauguaacaaua

SEQ ID NO: 495413 - RNA, 18 nt, Artificial Sequence
  Synthetic
uagcaagaacacacaaua

SEQ ID NO: 495414 - RNA, 19 nt, Artificial Sequence
  Synthetic
guagcaagaacacacaaua

SEQ ID NO: 495415 - RNA, 20 nt, Artificial Sequence
  Synthetic
gguagcaagaacacacaaua

SEQ ID NO: 495416 - RNA, 21 nt, Artificial Sequence
  Synthetic
agguagcaagaacacacaaua

SEQ ID NO: 495417 - RNA, 22 nt, Artificial Sequence
  Synthetic
aagguagcaagaacacacaaua

SEQ ID NO: 495418 - RNA, 23 nt, Artificial Sequence
  Synthetic
aaagguagcaagaacacacaaua

SEQ ID NO: 495419 - RNA, 24 nt, Artificial Sequence
  Synthetic
caaagguagcaagaacacacaaua

SEQ ID NO: 495420 - RNA, 18 nt, Artificial Sequence
  Synthetic
aucaagauaaugacaaua

SEQ ID NO: 495421 - RNA, 19 nt, Artificial Sequence
  Synthetic
caucaagauaaugacaaua

SEQ ID NO: 495422 - RNA, 20 nt, Artificial Sequence
  Synthetic
acaucaagauaaugacaaua

SEQ ID NO: 495423 - RNA, 21 nt, Artificial Sequence
  Synthetic
gacaucaagauaaugacaaua

SEQ ID NO: 495424 - RNA, 22 nt, Artificial Sequence
  Synthetic
ugacaucaagauaaugacaaua

SEQ ID NO: 495425 - RNA, 23 nt, Artificial Sequence
  Synthetic
uugacaucaagauaaugacaaua

SEQ ID NO: 495426 - RNA, 24 nt, Artificial Sequence
  Synthetic
uuugacaucaagauaaugacaaua

SEQ ID NO: 495427 - RNA, 18 nt, Artificial Sequence
  Synthetic
gcacagcgauguacaaua

SEQ ID NO: 495428 - RNA, 19 nt, Artificial Sequence
  Synthetic
agcacagcgauguacaaua

SEQ ID NO: 495429 - RNA, 20 nt, Artificial Sequence
  Synthetic
cagcacagcgauguacaaua

SEQ ID NO: 495430 - RNA, 21 nt, Artificial Sequence
  Synthetic
gcagcacagcgauguacaaua

SEQ ID NO: 495431 - RNA, 22 nt, Artificial Sequence
  Synthetic
agcagcacagcgauguacaaua

SEQ ID NO: 495432 - RNA, 23 nt, Artificial Sequence
  Synthetic
cagcagcacagcgauguacaaua

SEQ ID NO: 495433 - RNA, 24 nt, Artificial Sequence
  Synthetic
ucagcagcacagcgauguacaaua

SEQ ID NO: 495434 - RNA, 18 nt, Artificial Sequence
  Synthetic
uaguuucucuuuacaaua

SEQ ID NO: 495435 - RNA, 19 nt, Artificial Sequence
  Synthetic
cuaguuucucuuuacaaua

SEQ ID NO: 495436 - RNA, 20 nt, Artificial Sequence
  Synthetic
ucuaguuucucuuuacaaua

SEQ ID NO: 495437 - RNA, 21 nt, Artificial Sequence
  Synthetic
cucuaguuucucuuuacaaua

SEQ ID NO: 495438 - RNA, 22 nt, Artificial Sequence
  Synthetic
acucuaguuucucuuuacaaua

SEQ ID NO: 495439 - RNA, 23 nt, Artificial Sequence
  Synthetic
aacucuaguuucucuuuacaaua

SEQ ID NO: 495440 - RNA, 24 nt, Artificial Sequence
  Synthetic
aaacucuaguuucucuuuacaaua

SEQ ID NO: 495441 - RNA, 18 nt, Artificial Sequence
  Synthetic
uguuagguuuuuacaaua

SEQ ID NO: 495442 - RNA, 19 nt, Artificial Sequence
  Synthetic
auguuagguuuuuacaaua

SEQ ID NO: 495443 - RNA, 20 nt, Artificial Sequence
  Synthetic
aauguuagguuuuuacaaua

SEQ ID NO: 495444 - RNA, 21 nt, Artificial Sequence
  Synthetic
aaauguuagguuuuuacaaua

SEQ ID NO: 495445 - RNA, 22 nt, Artificial Sequence
  Synthetic
aaaauguuagguuuuuacaaua

SEQ ID NO: 495446 - RNA, 23 nt, Artificial Sequence
  Synthetic
uaaaauguuagguuuuuacaaua

SEQ ID NO: 495447 - RNA, 24 nt, Artificial Sequence
  Synthetic
uuaaaauguuagguuuuuacaaua

SEQ ID NO: 495448 - RNA, 18 nt, Artificial Sequence
  Synthetic
uauugagcaaaaccaaua

SEQ ID NO: 495449 - RNA, 19 nt, Artificial Sequence
  Synthetic
cuauugagcaaaaccaaua

SEQ ID NO: 495450 - RNA, 20 nt, Artificial Sequence
  Synthetic
ccuauugagcaaaaccaaua

SEQ ID NO: 495451 - RNA, 21 nt, Artificial Sequence
  Synthetic
uccuauugagcaaaaccaaua

SEQ ID NO: 495452 - RNA, 22 nt, Artificial Sequence
  Synthetic
uuccuauugagcaaaaccaaua

SEQ ID NO: 495453 - RNA, 23 nt, Artificial Sequence
  Synthetic
uuuccuauugagcaaaaccaaua

SEQ ID NO: 495454 - RNA, 24 nt, Artificial Sequence
  Synthetic
auuuccuauugagcaaaaccaaua

SEQ ID NO: 495455 - RNA, 18 nt, Artificial Sequence
  Synthetic
cauuauuuuaaaccaaua

SEQ ID NO: 495456 - RNA, 19 nt, Artificial Sequence
  Synthetic
gcauuauuuuaaaccaaua

SEQ ID NO: 495457 - RNA, 20 nt, Artificial Sequence
  Synthetic
ugcauuauuuuaaaccaaua

SEQ ID NO: 495458 - RNA, 21 nt, Artificial Sequence
  Synthetic
uugcauuauuuuaaaccaaua

SEQ ID NO: 495459 - RNA, 22 nt, Artificial Sequence
  Synthetic
uuugcauuauuuuaaaccaaua

SEQ ID NO: 495460 - RNA, 23 nt, Artificial Sequence
  Synthetic
auuugcauuauuuuaaaccaaua

SEQ ID NO: 495461 - RNA, 24 nt, Artificial Sequence
  Synthetic
uauuugcauuauuuuaaaccaaua

SEQ ID NO: 495462 - RNA, 18 nt, Artificial Sequence
  Synthetic
aacuucaagcaaccaaua

SEQ ID NO: 495463 - RNA, 19 nt, Artificial Sequence
  Synthetic
aaacuucaagcaaccaaua

SEQ ID NO: 495464 - RNA, 20 nt, Artificial Sequence
  Synthetic
gaaacuucaagcaaccaaua

SEQ ID NO: 495465 - RNA, 21 nt, Artificial Sequence
  Synthetic
ugaaacuucaagcaaccaaua

SEQ ID NO: 495466 - RNA, 22 nt, Artificial Sequence
  Synthetic
cugaaacuucaagcaaccaaua

SEQ ID NO: 495467 - RNA, 23 nt, Artificial Sequence
  Synthetic
ucugaaacuucaagcaaccaaua

SEQ ID NO: 495468 - RNA, 24 nt, Artificial Sequence
  Synthetic
uucugaaacuucaagcaaccaaua

SEQ ID NO: 495469 - RNA, 18 nt, Artificial Sequence
  Synthetic
auauuuaugcacccaaua

SEQ ID NO: 495470 - RNA, 19 nt, Artificial Sequence
  Synthetic
aauauuuaugcacccaaua

SEQ ID NO: 495471 - RNA, 20 nt, Artificial Sequence
  Synthetic
aaauauuuaugcacccaaua

SEQ ID NO: 495472 - RNA, 21 nt, Artificial Sequence
  Synthetic
uaaauauuuaugcacccaaua

SEQ ID NO: 495473 - RNA, 22 nt, Artificial Sequence
  Synthetic
cuaaauauuuaugcacccaaua

SEQ ID NO: 495474 - RNA, 23 nt, Artificial Sequence
  Synthetic
ccuaaauauuuaugcacccaaua

SEQ ID NO: 495475 - RNA, 24 nt, Artificial Sequence
  Synthetic
uccuaaauauuuaugcacccaaua

SEQ ID NO: 495476 - RNA, 18 nt, Artificial Sequence
  Synthetic
uaaggcauauacccaaua

SEQ ID NO: 495477 - RNA, 19 nt, Artificial Sequence
  Synthetic
auaaggcauauacccaaua

SEQ ID NO: 495478 - RNA, 20 nt, Artificial Sequence
  Synthetic
cauaaggcauauacccaaua

SEQ ID NO: 495479 - RNA, 21 nt, Artificial Sequence
  Synthetic
ccauaaggcauauacccaaua

SEQ ID NO: 495480 - RNA, 22 nt, Artificial Sequence
  Synthetic
uccauaaggcauauacccaaua

SEQ ID NO: 495481 - RNA, 23 nt, Artificial Sequence
  Synthetic
uuccauaaggcauauacccaaua

SEQ ID NO: 495482 - RNA, 24 nt, Artificial Sequence
  Synthetic
uuuccauaaggcauauacccaaua

SEQ ID NO: 495483 - RNA, 18 nt, Artificial Sequence
  Synthetic
cagucccaaugcccaaua

SEQ ID NO: 495484 - RNA, 19 nt, Artificial Sequence
  Synthetic
gcagucccaaugcccaaua

SEQ ID NO: 495485 - RNA, 20 nt, Artificial Sequence
  Synthetic
agcagucccaaugcccaaua

SEQ ID NO: 495486 - RNA, 21 nt, Artificial Sequence
  Synthetic
aagcagucccaaugcccaaua

SEQ ID NO: 495487 - RNA, 22 nt, Artificial Sequence
  Synthetic
gaagcagucccaaugcccaaua

SEQ ID NO: 495488 - RNA, 23 nt, Artificial Sequence
  Synthetic
ggaagcagucccaaugcccaaua

SEQ ID NO: 495489 - RNA, 24 nt, Artificial Sequence
  Synthetic
uggaagcagucccaaugcccaaua

SEQ ID NO: 495490 - RNA, 18 nt, Artificial Sequence
  Synthetic
cuggguauaugcccaaua

SEQ ID NO: 495491 - RNA, 19 nt, Artificial Sequence
  Synthetic
ucuggguauaugcccaaua

SEQ ID NO: 495492 - RNA, 20 nt, Artificial Sequence
  Synthetic
cucuggguauaugcccaaua

SEQ ID NO: 495493 - RNA, 21 nt, Artificial Sequence
  Synthetic
ccucuggguauaugcccaaua

SEQ ID NO: 495494 - RNA, 22 nt, Artificial Sequence
  Synthetic
uccucuggguauaugcccaaua

SEQ ID NO: 495495 - RNA, 23 nt, Artificial Sequence
  Synthetic
uuccucuggguauaugcccaaua

SEQ ID NO: 495496 - RNA, 24 nt, Artificial Sequence
  Synthetic
auuccucuggguauaugcccaaua

SEQ ID NO: 495497 - RNA, 18 nt, Artificial Sequence
  Synthetic
uguuucaagaauccaaua

SEQ ID NO: 495498 - RNA, 19 nt, Artificial Sequence
  Synthetic
auguuucaagaauccaaua

SEQ ID NO: 495499 - RNA, 20 nt, Artificial Sequence
  Synthetic
gauguuucaagaauccaaua

SEQ ID NO: 495500 - RNA, 21 nt, Artificial Sequence
  Synthetic
agauguuucaagaauccaaua

SEQ ID NO: 495501 - RNA, 22 nt, Artificial Sequence
  Synthetic
gagauguuucaagaauccaaua

SEQ ID NO: 495502 - RNA, 23 nt, Artificial Sequence
  Synthetic
ggagauguuucaagaauccaaua

SEQ ID NO: 495503 - RNA, 24 nt, Artificial Sequence
  Synthetic
aggagauguuucaagaauccaaua

SEQ ID NO: 495504 - RNA, 18 nt, Artificial Sequence
  Synthetic
augcuuaguauuccaaua

SEQ ID NO: 495505 - RNA, 19 nt, Artificial Sequence
  Synthetic
caugcuuaguauuccaaua

SEQ ID NO: 495506 - RNA, 20 nt, Artificial Sequence
  Synthetic
acaugcuuaguauuccaaua

SEQ ID NO: 495507 - RNA, 21 nt, Artificial Sequence
  Synthetic
cacaugcuuaguauuccaaua

SEQ ID NO: 495508 - RNA, 22 nt, Artificial Sequence
  Synthetic
ccacaugcuuaguauuccaaua

SEQ ID NO: 495509 - RNA, 23 nt, Artificial Sequence
  Synthetic
cccacaugcuuaguauuccaaua

SEQ ID NO: 495510 - RNA, 24 nt, Artificial Sequence
  Synthetic
ucccacaugcuuaguauuccaaua

SEQ ID NO: 495511 - RNA, 18 nt, Artificial Sequence
  Synthetic
aagaagagaaaagcaaua

SEQ ID NO: 495512 - RNA, 19 nt, Artificial Sequence
  Synthetic
uaagaagagaaaagcaaua

SEQ ID NO: 495513 - RNA, 20 nt, Artificial Sequence
  Synthetic
uuaagaagagaaaagcaaua

SEQ ID NO: 495514 - RNA, 21 nt, Artificial Sequence
  Synthetic
guuaagaagagaaaagcaaua

SEQ ID NO: 495515 - RNA, 22 nt, Artificial Sequence
  Synthetic
gguuaagaagagaaaagcaaua

SEQ ID NO: 495516 - RNA, 23 nt, Artificial Sequence
  Synthetic
agguuaagaagagaaaagcaaua

SEQ ID NO: 495517 - RNA, 24 nt, Artificial Sequence
  Synthetic
aagguuaagaagagaaaagcaaua

SEQ ID NO: 495518 - RNA, 18 nt, Artificial Sequence
  Synthetic
caaaggaagacagcaaua

SEQ ID NO: 495519 - RNA, 19 nt, Artificial Sequence
  Synthetic
acaaaggaagacagcaaua

SEQ ID NO: 495520 - RNA, 20 nt, Artificial Sequence
  Synthetic
cacaaaggaagacagcaaua

SEQ ID NO: 495521 - RNA, 21 nt, Artificial Sequence
  Synthetic
acacaaaggaagacagcaaua

SEQ ID NO: 495522 - RNA, 22 nt, Artificial Sequence
  Synthetic
aacacaaaggaagacagcaaua

SEQ ID NO: 495523 - RNA, 23 nt, Artificial Sequence
  Synthetic
aaacacaaaggaagacagcaaua

SEQ ID NO: 495524 - RNA, 24 nt, Artificial Sequence
  Synthetic
aaaacacaaaggaagacagcaaua

SEQ ID NO: 495525 - RNA, 18 nt, Artificial Sequence
  Synthetic
cuauagacuugcgcaaua

SEQ ID NO: 495526 - RNA, 19 nt, Artificial Sequence
  Synthetic
gcuauagacuugcgcaaua

SEQ ID NO: 495527 - RNA, 20 nt, Artificial Sequence
  Synthetic
ugcuauagacuugcgcaaua

SEQ ID NO: 495528 - RNA, 21 nt, Artificial Sequence
  Synthetic
gugcuauagacuugcgcaaua

SEQ ID NO: 495529 - RNA, 22 nt, Artificial Sequence
  Synthetic
agugcuauagacuugcgcaaua

SEQ ID NO: 495530 - RNA, 23 nt, Artificial Sequence
  Synthetic
cagugcuauagacuugcgcaaua

SEQ ID NO: 495531 - RNA, 24 nt, Artificial Sequence
  Synthetic
acagugcuauagacuugcgcaaua

SEQ ID NO: 495532 - RNA, 18 nt, Artificial Sequence
  Synthetic
aguaacagugaggcaaua

SEQ ID NO: 495533 - RNA, 19 nt, Artificial Sequence
  Synthetic
caguaacagugaggcaaua

SEQ ID NO: 495534 - RNA, 20 nt, Artificial Sequence
  Synthetic
gcaguaacagugaggcaaua

SEQ ID NO: 495535 - RNA, 21 nt, Artificial Sequence
  Synthetic
ggcaguaacagugaggcaaua

SEQ ID NO: 495536 - RNA, 22 nt, Artificial Sequence
  Synthetic
aggcaguaacagugaggcaaua

SEQ ID NO: 495537 - RNA, 23 nt, Artificial Sequence
  Synthetic
aaggcaguaacagugaggcaaua

SEQ ID NO: 495538 - RNA, 24 nt, Artificial Sequence
  Synthetic
aaaggcaguaacagugaggcaaua

SEQ ID NO: 495539 - RNA, 18 nt, Artificial Sequence
  Synthetic
guagagauuugggcaaua

SEQ ID NO: 495540 - RNA, 19 nt, Artificial Sequence
  Synthetic
gguagagauuugggcaaua

SEQ ID NO: 495541 - RNA, 20 nt, Artificial Sequence
  Synthetic
ugguagagauuugggcaaua

SEQ ID NO: 495542 - RNA, 21 nt, Artificial Sequence
  Synthetic
uugguagagauuugggcaaua

SEQ ID NO: 495543 - RNA, 22 nt, Artificial Sequence
  Synthetic
uuugguagagauuugggcaaua

SEQ ID NO: 495544 - RNA, 23 nt, Artificial Sequence
  Synthetic
uuuugguagagauuugggcaaua

SEQ ID NO: 495545 - RNA, 24 nt, Artificial Sequence
  Synthetic
auuuugguagagauuugggcaaua

SEQ ID NO: 495546 - RNA, 18 nt, Artificial Sequence
  Synthetic
gggaaggcugaugcaaua

SEQ ID NO: 495547 - RNA, 19 nt, Artificial Sequence
  Synthetic
ugggaaggcugaugcaaua

SEQ ID NO: 495548 - RNA, 20 nt, Artificial Sequence
  Synthetic
uugggaaggcugaugcaaua

SEQ ID NO: 495549 - RNA, 21 nt, Artificial Sequence
  Synthetic
auugggaaggcugaugcaaua

SEQ ID NO: 495550 - RNA, 22 nt, Artificial Sequence
  Synthetic
aauugggaaggcugaugcaaua

SEQ ID NO: 495551 - RNA, 23 nt, Artificial Sequence
  Synthetic
uaauugggaaggcugaugcaaua

SEQ ID NO: 495552 - RNA, 24 nt, Artificial Sequence
  Synthetic
auaauugggaaggcugaugcaaua

SEQ ID NO: 495553 - RNA, 18 nt, Artificial Sequence
  Synthetic
acacauauaugugcaaua

SEQ ID NO: 495554 - RNA, 19 nt, Artificial Sequence
  Synthetic
cacacauauaugugcaaua

SEQ ID NO: 495555 - RNA, 20 nt, Artificial Sequence
  Synthetic
acacacauauaugugcaaua

SEQ ID NO: 495556 - RNA, 21 nt, Artificial Sequence
  Synthetic
cacacacauauaugugcaaua

SEQ ID NO: 495557 - RNA, 22 nt, Artificial Sequence
  Synthetic
acacacacauauaugugcaaua

SEQ ID NO: 495558 - RNA, 23 nt, Artificial Sequence
  Synthetic
uacacacacauauaugugcaaua

SEQ ID NO: 495559 - RNA, 24 nt, Artificial Sequence
  Synthetic
auacacacacauauaugugcaaua

SEQ ID NO: 495560 - RNA, 18 nt, Artificial Sequence
  Synthetic
uaucaguuguuugcaaua

SEQ ID NO: 495561 - RNA, 19 nt, Artificial Sequence
  Synthetic
auaucaguuguuugcaaua

SEQ ID NO: 495562 - RNA, 20 nt, Artificial Sequence
  Synthetic
aauaucaguuguuugcaaua

SEQ ID NO: 495563 - RNA, 21 nt, Artificial Sequence
  Synthetic
gaauaucaguuguuugcaaua

SEQ ID NO: 495564 - RNA, 22 nt, Artificial Sequence
  Synthetic
ugaauaucaguuguuugcaaua

SEQ ID NO: 495565 - RNA, 23 nt, Artificial Sequence
  Synthetic
augaauaucaguuguuugcaaua

SEQ ID NO: 495566 - RNA, 24 nt, Artificial Sequence
  Synthetic
uaugaauaucaguuguuugcaaua

SEQ ID NO: 495567 - RNA, 18 nt, Artificial Sequence
  Synthetic
gaauauuaaucaucaaua

SEQ ID NO: 495568 - RNA, 19 nt, Artificial Sequence
  Synthetic
agaauauuaaucaucaaua

SEQ ID NO: 495569 - RNA, 20 nt, Artificial Sequence
  Synthetic
uagaauauuaaucaucaaua

SEQ ID NO: 495570 - RNA, 21 nt, Artificial Sequence
  Synthetic
auagaauauuaaucaucaaua

SEQ ID NO: 495571 - RNA, 22 nt, Artificial Sequence
  Synthetic
aauagaauauuaaucaucaaua

SEQ ID NO: 495572 - RNA, 23 nt, Artificial Sequence
  Synthetic
caauagaauauuaaucaucaaua

SEQ ID NO: 495573 - RNA, 24 nt, Artificial Sequence
  Synthetic
acaauagaauauuaaucaucaaua

SEQ ID NO: 495574 - RNA, 18 nt, Artificial Sequence
  Synthetic
gaaauuugauccucaaua

SEQ ID NO: 495575 - RNA, 19 nt, Artificial Sequence
  Synthetic
ugaaauuugauccucaaua

SEQ ID NO: 495576 - RNA, 20 nt, Artificial Sequence
  Synthetic
uugaaauuugauccucaaua

SEQ ID NO: 495577 - RNA, 21 nt, Artificial Sequence
  Synthetic
guugaaauuugauccucaaua

SEQ ID NO: 495578 - RNA, 22 nt, Artificial Sequence
  Synthetic
uguugaaauuugauccucaaua

SEQ ID NO: 495579 - RNA, 23 nt, Artificial Sequence
  Synthetic
auguugaaauuugauccucaaua

SEQ ID NO: 495580 - RNA, 24 nt, Artificial Sequence
  Synthetic
cauguugaaauuugauccucaaua

SEQ ID NO: 495581 - RNA, 18 nt, Artificial Sequence
  Synthetic
cuaguggaacucucaaua

SEQ ID NO: 495582 - RNA, 19 nt, Artificial Sequence
  Synthetic
ccuaguggaacucucaaua

SEQ ID NO: 495583 - RNA, 20 nt, Artificial Sequence
  Synthetic
gccuaguggaacucucaaua

SEQ ID NO: 495584 - RNA, 21 nt, Artificial Sequence
  Synthetic
ggccuaguggaacucucaaua

SEQ ID NO: 495585 - RNA, 22 nt, Artificial Sequence
  Synthetic
aggccuaguggaacucucaaua

SEQ ID NO: 495586 - RNA, 23 nt, Artificial Sequence
  Synthetic
aaggccuaguggaacucucaaua

SEQ ID NO: 495587 - RNA, 24 nt, Artificial Sequence
  Synthetic
gaaggccuaguggaacucucaaua

SEQ ID NO: 495588 - RNA, 18 nt, Artificial Sequence
  Synthetic
uaaacaaguaagucaaua

SEQ ID NO: 495589 - RNA, 19 nt, Artificial Sequence
  Synthetic
uuaaacaaguaagucaaua

SEQ ID NO: 495590 - RNA, 20 nt, Artificial Sequence
  Synthetic
auuaaacaaguaagucaaua

SEQ ID NO: 495591 - RNA, 21 nt, Artificial Sequence
  Synthetic
gauuaaacaaguaagucaaua

SEQ ID NO: 495592 - RNA, 22 nt, Artificial Sequence
  Synthetic
agauuaaacaaguaagucaaua

SEQ ID NO: 495593 - RNA, 23 nt, Artificial Sequence
  Synthetic
aagauuaaacaaguaagucaaua

SEQ ID NO: 495594 - RNA, 24 nt, Artificial Sequence
  Synthetic
aaagauuaaacaaguaagucaaua

SEQ ID NO: 495595 - RNA, 18 nt, Artificial Sequence
  Synthetic
gcuauuuacaauucaaua

SEQ ID NO: 495596 - RNA, 19 nt, Artificial Sequence
  Synthetic
agcuauuuacaauucaaua

SEQ ID NO: 495597 - RNA, 20 nt, Artificial Sequence
  Synthetic
cagcuauuuacaauucaaua

SEQ ID NO: 495598 - RNA, 21 nt, Artificial Sequence
  Synthetic
acagcuauuuacaauucaaua

SEQ ID NO: 495599 - RNA, 22 nt, Artificial Sequence
  Synthetic
cacagcuauuuacaauucaaua

SEQ ID NO: 495600 - RNA, 23 nt, Artificial Sequence
  Synthetic
ccacagcuauuuacaauucaaua

SEQ ID NO: 495601 - RNA, 24 nt, Artificial Sequence
  Synthetic
uccacagcuauuuacaauucaaua

SEQ ID NO: 495602 - RNA, 18 nt, Artificial Sequence
  Synthetic
uuguguucguauucaaua

SEQ ID NO: 495603 - RNA, 19 nt, Artificial Sequence
  Synthetic
cuuguguucguauucaaua

SEQ ID NO: 495604 - RNA, 20 nt, Artificial Sequence
  Synthetic
ucuuguguucguauucaaua

SEQ ID NO: 495605 - RNA, 21 nt, Artificial Sequence
  Synthetic
uucuuguguucguauucaaua

SEQ ID NO: 495606 - RNA, 22 nt, Artificial Sequence
  Synthetic
cuucuuguguucguauucaaua

SEQ ID NO: 495607 - RNA, 23 nt, Artificial Sequence
  Synthetic
ucuucuuguguucguauucaaua

SEQ ID NO: 495608 - RNA, 24 nt, Artificial Sequence
  Synthetic
aucuucuuguguucguauucaaua

SEQ ID NO: 495609 - RNA, 18 nt, Artificial Sequence
  Synthetic
ucagauuucccuucaaua

SEQ ID NO: 495610 - RNA, 19 nt, Artificial Sequence
  Synthetic
cucagauuucccuucaaua

SEQ ID NO: 495611 - RNA, 20 nt, Artificial Sequence
  Synthetic
acucagauuucccuucaaua

SEQ ID NO: 495612 - RNA, 21 nt, Artificial Sequence
  Synthetic
uacucagauuucccuucaaua

SEQ ID NO: 495613 - RNA, 22 nt, Artificial Sequence
  Synthetic
cuacucagauuucccuucaaua

SEQ ID NO: 495614 - RNA, 23 nt, Artificial Sequence
  Synthetic
acuacucagauuucccuucaaua

SEQ ID NO: 495615 - RNA, 24 nt, Artificial Sequence
  Synthetic
aacuacucagauuucccuucaaua

SEQ ID NO: 495616 - RNA, 18 nt, Artificial Sequence
  Synthetic
cuacaguucauuucaaua

SEQ ID NO: 495617 - RNA, 19 nt, Artificial Sequence
  Synthetic
ccuacaguucauuucaaua

SEQ ID NO: 495618 - RNA, 20 nt, Artificial Sequence
  Synthetic
uccuacaguucauuucaaua

SEQ ID NO: 495619 - RNA, 21 nt, Artificial Sequence
  Synthetic
auccuacaguucauuucaaua

SEQ ID NO: 495620 - RNA, 22 nt, Artificial Sequence
  Synthetic
cauccuacaguucauuucaaua

SEQ ID NO: 495621 - RNA, 23 nt, Artificial Sequence
  Synthetic
acauccuacaguucauuucaaua

SEQ ID NO: 495622 - RNA, 24 nt, Artificial Sequence
  Synthetic
uacauccuacaguucauuucaaua

SEQ ID NO: 495623 - RNA, 18 nt, Artificial Sequence
  Synthetic
gucuauuuuuuuucaaua

SEQ ID NO: 495624 - RNA, 19 nt, Artificial Sequence
  Synthetic
ugucuauuuuuuuucaaua

SEQ ID NO: 495625 - RNA, 20 nt, Artificial Sequence
  Synthetic
augucuauuuuuuuucaaua

SEQ ID NO: 495626 - RNA, 21 nt, Artificial Sequence
  Synthetic
uaugucuauuuuuuuucaaua

SEQ ID NO: 495627 - RNA, 22 nt, Artificial Sequence
  Synthetic
auaugucuauuuuuuuucaaua

SEQ ID NO: 495628 - RNA, 23 nt, Artificial Sequence
  Synthetic
uauaugucuauuuuuuuucaaua

SEQ ID NO: 495629 - RNA, 24 nt, Artificial Sequence
  Synthetic
cuauaugucuauuuuuuuucaaua

SEQ ID NO: 495630 - RNA, 18 nt, Artificial Sequence
  Synthetic
gguugcuauaaaagaaua

SEQ ID NO: 495631 - RNA, 19 nt, Artificial Sequence
  Synthetic
ugguugcuauaaaagaaua

SEQ ID NO: 495632 - RNA, 20 nt, Artificial Sequence
  Synthetic
augguugcuauaaaagaaua

SEQ ID NO: 495633 - RNA, 21 nt, Artificial Sequence
  Synthetic
aaugguugcuauaaaagaaua

SEQ ID NO: 495634 - RNA, 22 nt, Artificial Sequence
  Synthetic
uaaugguugcuauaaaagaaua

SEQ ID NO: 495635 - RNA, 23 nt, Artificial Sequence
  Synthetic
auaaugguugcuauaaaagaaua

SEQ ID NO: 495636 - RNA, 24 nt, Artificial Sequence
  Synthetic
gauaaugguugcuauaaaagaaua

SEQ ID NO: 495637 - RNA, 18 nt, Artificial Sequence
  Synthetic
ggaauuucuuaaagaaua

SEQ ID NO: 495638 - RNA, 19 nt, Artificial Sequence
  Synthetic
gggaauuucuuaaagaaua

SEQ ID NO: 495639 - RNA, 20 nt, Artificial Sequence
  Synthetic
agggaauuucuuaaagaaua

SEQ ID NO: 495640 - RNA, 21 nt, Artificial Sequence
  Synthetic
aagggaauuucuuaaagaaua

SEQ ID NO: 495641 - RNA, 22 nt, Artificial Sequence
  Synthetic
aaagggaauuucuuaaagaaua

SEQ ID NO: 495642 - RNA, 23 nt, Artificial Sequence
  Synthetic
caaagggaauuucuuaaagaaua

SEQ ID NO: 495643 - RNA, 24 nt, Artificial Sequence
  Synthetic
ucaaagggaauuucuuaaagaaua

SEQ ID NO: 495644 - RNA, 18 nt, Artificial Sequence
  Synthetic
aaaguguuggcaagaaua

SEQ ID NO: 495645 - RNA, 19 nt, Artificial Sequence
  Synthetic
aaaaguguuggcaagaaua

SEQ ID NO: 495646 - RNA, 20 nt, Artificial Sequence
  Synthetic
aaaaaguguuggcaagaaua

SEQ ID NO: 495647 - RNA, 21 nt, Artificial Sequence
  Synthetic
uaaaaaguguuggcaagaaua

SEQ ID NO: 495648 - RNA, 22 nt, Artificial Sequence
  Synthetic
auaaaaaguguuggcaagaaua

SEQ ID NO: 495649 - RNA, 23 nt, Artificial Sequence
  Synthetic
gauaaaaaguguuggcaagaaua

SEQ ID NO: 495650 - RNA, 24 nt, Artificial Sequence
  Synthetic
agauaaaaaguguuggcaagaaua

SEQ ID NO: 495651 - RNA, 18 nt, Artificial Sequence
  Synthetic
ggagggucaggaagaaua

SEQ ID NO: 495652 - RNA, 19 nt, Artificial Sequence
  Synthetic
aggagggucaggaagaaua

SEQ ID NO: 495653 - RNA, 20 nt, Artificial Sequence
  Synthetic
aaggagggucaggaagaaua

SEQ ID NO: 495654 - RNA, 21 nt, Artificial Sequence
  Synthetic
aaaggagggucaggaagaaua

SEQ ID NO: 495655 - RNA, 22 nt, Artificial Sequence
  Synthetic
caaaggagggucaggaagaaua

SEQ ID NO: 495656 - RNA, 23 nt, Artificial Sequence
  Synthetic
ucaaaggagggucaggaagaaua

SEQ ID NO: 495657 - RNA, 24 nt, Artificial Sequence
  Synthetic
cucaaaggagggucaggaagaaua

SEQ ID NO: 495658 - RNA, 18 nt, Artificial Sequence
  Synthetic
gaaacuagguuaagaaua

SEQ ID NO: 495659 - RNA, 19 nt, Artificial Sequence
  Synthetic
agaaacuagguuaagaaua

SEQ ID NO: 495660 - RNA, 20 nt, Artificial Sequence
  Synthetic
gagaaacuagguuaagaaua

SEQ ID NO: 495661 - RNA, 21 nt, Artificial Sequence
  Synthetic
agagaaacuagguuaagaaua

SEQ ID NO: 495662 - RNA, 22 nt, Artificial Sequence
  Synthetic
uagagaaacuagguuaagaaua

SEQ ID NO: 495663 - RNA, 23 nt, Artificial Sequence
  Synthetic
auagagaaacuagguuaagaaua

SEQ ID NO: 495664 - RNA, 24 nt, Artificial Sequence
  Synthetic
aauagagaaacuagguuaagaaua

SEQ ID NO: 495665 - RNA, 18 nt, Artificial Sequence
  Synthetic
ccacucggaaacagaaua

SEQ ID NO: 495666 - RNA, 19 nt, Artificial Sequence
  Synthetic
gccacucggaaacagaaua

SEQ ID NO: 495667 - RNA, 20 nt, Artificial Sequence
  Synthetic
ugccacucggaaacagaaua

SEQ ID NO: 495668 - RNA, 21 nt, Artificial Sequence
  Synthetic
uugccacucggaaacagaaua

SEQ ID NO: 495669 - RNA, 22 nt, Artificial Sequence
  Synthetic
auugccacucggaaacagaaua

SEQ ID NO: 495670 - RNA, 23 nt, Artificial Sequence
  Synthetic
aauugccacucggaaacagaaua

SEQ ID NO: 495671 - RNA, 24 nt, Artificial Sequence
  Synthetic
caauugccacucggaaacagaaua

SEQ ID NO: 495672 - RNA, 18 nt, Artificial Sequence
  Synthetic
ggucagccucccagaaua

SEQ ID NO: 495673 - RNA, 19 nt, Artificial Sequence
  Synthetic
aggucagccucccagaaua

SEQ ID NO: 495674 - RNA, 20 nt, Artificial Sequence
  Synthetic
gaggucagccucccagaaua

SEQ ID NO: 495675 - RNA, 21 nt, Artificial Sequence
  Synthetic
agaggucagccucccagaaua

SEQ ID NO: 495676 - RNA, 22 nt, Artificial Sequence
  Synthetic
cagaggucagccucccagaaua

SEQ ID NO: 495677 - RNA, 23 nt, Artificial Sequence
  Synthetic
acagaggucagccucccagaaua

SEQ ID NO: 495678 - RNA, 24 nt, Artificial Sequence
  Synthetic
gacagaggucagccucccagaaua

SEQ ID NO: 495679 - RNA, 18 nt, Artificial Sequence
  Synthetic
uugauaacuggcagaaua

SEQ ID NO: 495680 - RNA, 19 nt, Artificial Sequence
  Synthetic
cuugauaacuggcagaaua

SEQ ID NO: 495681 - RNA, 20 nt, Artificial Sequence
  Synthetic
acuugauaacuggcagaaua

SEQ ID NO: 495682 - RNA, 21 nt, Artificial Sequence
  Synthetic
gacuugauaacuggcagaaua

SEQ ID NO: 495683 - RNA, 22 nt, Artificial Sequence
  Synthetic
agacuugauaacuggcagaaua

SEQ ID NO: 495684 - RNA, 23 nt, Artificial Sequence
  Synthetic
aagacuugauaacuggcagaaua

SEQ ID NO: 495685 - RNA, 24 nt, Artificial Sequence
  Synthetic
aaagacuugauaacuggcagaaua

SEQ ID NO: 495686 - RNA, 18 nt, Artificial Sequence
  Synthetic
aagaccaucuucagaaua

SEQ ID NO: 495687 - RNA, 19 nt, Artificial Sequence
  Synthetic
aaagaccaucuucagaaua

SEQ ID NO: 495688 - RNA, 20 nt, Artificial Sequence
  Synthetic
uaaagaccaucuucagaaua

SEQ ID NO: 495689 - RNA, 21 nt, Artificial Sequence
  Synthetic
uuaaagaccaucuucagaaua

SEQ ID NO: 495690 - RNA, 22 nt, Artificial Sequence
  Synthetic
auuaaagaccaucuucagaaua

SEQ ID NO: 495691 - RNA, 23 nt, Artificial Sequence
  Synthetic
aauuaaagaccaucuucagaaua

SEQ ID NO: 495692 - RNA, 24 nt, Artificial Sequence
  Synthetic
uaauuaaagaccaucuucagaaua

SEQ ID NO: 495693 - RNA, 18 nt, Artificial Sequence
  Synthetic
auuagaggcaagagaaua

SEQ ID NO: 495694 - RNA, 19 nt, Artificial Sequence
  Synthetic
cauuagaggcaagagaaua

SEQ ID NO: 495695 - RNA, 20 nt, Artificial Sequence
  Synthetic
acauuagaggcaagagaaua

SEQ ID NO: 495696 - RNA, 21 nt, Artificial Sequence
  Synthetic
aacauuagaggcaagagaaua

SEQ ID NO: 495697 - RNA, 22 nt, Artificial Sequence
  Synthetic
gaacauuagaggcaagagaaua

SEQ ID NO: 495698 - RNA, 23 nt, Artificial Sequence
  Synthetic
agaacauuagaggcaagagaaua

SEQ ID NO: 495699 - RNA, 24 nt, Artificial Sequence
  Synthetic
aagaacauuagaggcaagagaaua

SEQ ID NO: 495700 - RNA, 18 nt, Artificial Sequence
  Synthetic
uauaaagaacagagaaua

SEQ ID NO: 495701 - RNA, 19 nt, Artificial Sequence
  Synthetic
uuauaaagaacagagaaua

SEQ ID NO: 495702 - RNA, 20 nt, Artificial Sequence
  Synthetic
auuauaaagaacagagaaua

SEQ ID NO: 495703 - RNA, 21 nt, Artificial Sequence
  Synthetic
uauuauaaagaacagagaaua

SEQ ID NO: 495704 - RNA, 22 nt, Artificial Sequence
  Synthetic
guauuauaaagaacagagaaua

SEQ ID NO: 495705 - RNA, 23 nt, Artificial Sequence
  Synthetic
aguauuauaaagaacagagaaua

SEQ ID NO: 495706 - RNA, 24 nt, Artificial Sequence
  Synthetic
caguauuauaaagaacagagaaua

SEQ ID NO: 495707 - RNA, 18 nt, Artificial Sequence
  Synthetic
augcuuucacagagaaua

SEQ ID NO: 495708 - RNA, 19 nt, Artificial Sequence
  Synthetic
gaugcuuucacagagaaua

SEQ ID NO: 495709 - RNA, 20 nt, Artificial Sequence
  Synthetic
ggaugcuuucacagagaaua

SEQ ID NO: 495710 - RNA, 21 nt, Artificial Sequence
  Synthetic
gggaugcuuucacagagaaua

SEQ ID NO: 495711 - RNA, 22 nt, Artificial Sequence
  Synthetic
cgggaugcuuucacagagaaua

SEQ ID NO: 495712 - RNA, 23 nt, Artificial Sequence
  Synthetic
acgggaugcuuucacagagaaua

SEQ ID NO: 495713 - RNA, 24 nt, Artificial Sequence
  Synthetic
cacgggaugcuuucacagagaaua

SEQ ID NO: 495714 - RNA, 18 nt, Artificial Sequence
  Synthetic
augaggauacagagaaua

SEQ ID NO: 495715 - RNA, 19 nt, Artificial Sequence
  Synthetic
caugaggauacagagaaua

SEQ ID NO: 495716 - RNA, 20 nt, Artificial Sequence
  Synthetic
ucaugaggauacagagaaua

SEQ ID NO: 495717 - RNA, 21 nt, Artificial Sequence
  Synthetic
uucaugaggauacagagaaua

SEQ ID NO: 495718 - RNA, 22 nt, Artificial Sequence
  Synthetic
guucaugaggauacagagaaua

SEQ ID NO: 495719 - RNA, 23 nt, Artificial Sequence
  Synthetic
uguucaugaggauacagagaaua

SEQ ID NO: 495720 - RNA, 24 nt, Artificial Sequence
  Synthetic
guguucaugaggauacagagaaua

SEQ ID NO: 495721 - RNA, 18 nt, Artificial Sequence
  Synthetic
aggagaagccagagaaua

SEQ ID NO: 495722 - RNA, 19 nt, Artificial Sequence
  Synthetic
aaggagaagccagagaaua

SEQ ID NO: 495723 - RNA, 20 nt, Artificial Sequence
  Synthetic
aaaggagaagccagagaaua

SEQ ID NO: 495724 - RNA, 21 nt, Artificial Sequence
  Synthetic
aaaaggagaagccagagaaua

SEQ ID NO: 495725 - RNA, 22 nt, Artificial Sequence
  Synthetic
uaaaaggagaagccagagaaua

SEQ ID NO: 495726 - RNA, 23 nt, Artificial Sequence
  Synthetic
auaaaaggagaagccagagaaua

SEQ ID NO: 495727 - RNA, 24 nt, Artificial Sequence
  Synthetic
gauaaaaggagaagccagagaaua

SEQ ID NO: 495728 - RNA, 18 nt, Artificial Sequence
  Synthetic
gaaggaacagcgagaaua

SEQ ID NO: 495729 - RNA, 19 nt, Artificial Sequence
  Synthetic
ugaaggaacagcgagaaua

SEQ ID NO: 495730 - RNA, 20 nt, Artificial Sequence
  Synthetic
augaaggaacagcgagaaua

SEQ ID NO: 495731 - RNA, 21 nt, Artificial Sequence
  Synthetic
caugaaggaacagcgagaaua

SEQ ID NO: 495732 - RNA, 22 nt, Artificial Sequence
  Synthetic
acaugaaggaacagcgagaaua

SEQ ID NO: 495733 - RNA, 23 nt, Artificial Sequence
  Synthetic
uacaugaaggaacagcgagaaua

SEQ ID NO: 495734 - RNA, 24 nt, Artificial Sequence
  Synthetic
uuacaugaaggaacagcgagaaua

SEQ ID NO: 495735 - RNA, 18 nt, Artificial Sequence
  Synthetic
aauuagagaaggagaaua

SEQ ID NO: 495736 - RNA, 19 nt, Artificial Sequence
  Synthetic
caauuagagaaggagaaua

SEQ ID NO: 495737 - RNA, 20 nt, Artificial Sequence
  Synthetic
acaauuagagaaggagaaua

SEQ ID NO: 495738 - RNA, 21 nt, Artificial Sequence
  Synthetic
aacaauuagagaaggagaaua

SEQ ID NO: 495739 - RNA, 22 nt, Artificial Sequence
  Synthetic
aaacaauuagagaaggagaaua

SEQ ID NO: 495740 - RNA, 23 nt, Artificial Sequence
  Synthetic
caaacaauuagagaaggagaaua

SEQ ID NO: 495741 - RNA, 24 nt, Artificial Sequence
  Synthetic
ucaaacaauuagagaaggagaaua

SEQ ID NO: 495742 - RNA, 18 nt, Artificial Sequence
  Synthetic
uugagauauaugagaaua

SEQ ID NO: 495743 - RNA, 19 nt, Artificial Sequence
  Synthetic
guugagauauaugagaaua

SEQ ID NO: 495744 - RNA, 20 nt, Artificial Sequence
  Synthetic
aguugagauauaugagaaua

SEQ ID NO: 495745 - RNA, 21 nt, Artificial Sequence
  Synthetic
aaguugagauauaugagaaua

SEQ ID NO: 495746 - RNA, 22 nt, Artificial Sequence
  Synthetic
aaaguugagauauaugagaaua

SEQ ID NO: 495747 - RNA, 23 nt, Artificial Sequence
  Synthetic
caaaguugagauauaugagaaua

SEQ ID NO: 495748 - RNA, 24 nt, Artificial Sequence
  Synthetic
acaaaguugagauauaugagaaua

SEQ ID NO: 495749 - RNA, 18 nt, Artificial Sequence
  Synthetic
gaaauuacuuugagaaua

SEQ ID NO: 495750 - RNA, 19 nt, Artificial Sequence
  Synthetic
agaaauuacuuugagaaua

SEQ ID NO: 495751 - RNA, 20 nt, Artificial Sequence
  Synthetic
gagaaauuacuuugagaaua

SEQ ID NO: 495752 - RNA, 21 nt, Artificial Sequence
  Synthetic
ugagaaauuacuuugagaaua

SEQ ID NO: 495753 - RNA, 22 nt, Artificial Sequence
  Synthetic
augagaaauuacuuugagaaua

SEQ ID NO: 495754 - RNA, 23 nt, Artificial Sequence
  Synthetic
aaugagaaauuacuuugagaaua

SEQ ID NO: 495755 - RNA, 24 nt, Artificial Sequence
  Synthetic
gaaugagaaauuacuuugagaaua

SEQ ID NO: 495756 - RNA, 18 nt, Artificial Sequence
  Synthetic
uacauuucuuugagaaua

SEQ ID NO: 495757 - RNA, 19 nt, Artificial Sequence
  Synthetic
auacauuucuuugagaaua

SEQ ID NO: 495758 - RNA, 20 nt, Artificial Sequence
  Synthetic
cauacauuucuuugagaaua

SEQ ID NO: 495759 - RNA, 21 nt, Artificial Sequence
  Synthetic
ucauacauuucuuugagaaua

SEQ ID NO: 495760 - RNA, 22 nt, Artificial Sequence
  Synthetic
uucauacauuucuuugagaaua

SEQ ID NO: 495761 - RNA, 23 nt, Artificial Sequence
  Synthetic
auucauacauuucuuugagaaua

SEQ ID NO: 495762 - RNA, 24 nt, Artificial Sequence
  Synthetic
uauucauacauuucuuugagaaua

SEQ ID NO: 495763 - RNA, 18 nt, Artificial Sequence
  Synthetic
ugauugacaaauagaaua

SEQ ID NO: 495764 - RNA, 19 nt, Artificial Sequence
  Synthetic
cugauugacaaauagaaua

SEQ ID NO: 495765 - RNA, 20 nt, Artificial Sequence
  Synthetic
acugauugacaaauagaaua

SEQ ID NO: 495766 - RNA, 21 nt, Artificial Sequence
  Synthetic
cacugauugacaaauagaaua

SEQ ID NO: 495767 - RNA, 22 nt, Artificial Sequence
  Synthetic
ucacugauugacaaauagaaua

SEQ ID NO: 495768 - RNA, 23 nt, Artificial Sequence
  Synthetic
gucacugauugacaaauagaaua

SEQ ID NO: 495769 - RNA, 24 nt, Artificial Sequence
  Synthetic
ugucacugauugacaaauagaaua

SEQ ID NO: 495770 - RNA, 18 nt, Artificial Sequence
  Synthetic
aaggauaacaguagaaua

SEQ ID NO: 495771 - RNA, 19 nt, Artificial Sequence
  Synthetic
uaaggauaacaguagaaua

SEQ ID NO: 495772 - RNA, 20 nt, Artificial Sequence
  Synthetic
uuaaggauaacaguagaaua

SEQ ID NO: 495773 - RNA, 21 nt, Artificial Sequence
  Synthetic
cuuaaggauaacaguagaaua

SEQ ID NO: 495774 - RNA, 22 nt, Artificial Sequence
  Synthetic
ucuuaaggauaacaguagaaua

SEQ ID NO: 495775 - RNA, 23 nt, Artificial Sequence
  Synthetic
uucuuaaggauaacaguagaaua

SEQ ID NO: 495776 - RNA, 24 nt, Artificial Sequence
  Synthetic
uuucuuaaggauaacaguagaaua

SEQ ID NO: 495777 - RNA, 18 nt, Artificial Sequence
  Synthetic
gcuuccaauuguagaaua

SEQ ID NO: 495778 - RNA, 19 nt, Artificial Sequence
  Synthetic
ugcuuccaauuguagaaua

SEQ ID NO: 495779 - RNA, 20 nt, Artificial Sequence
  Synthetic
augcuuccaauuguagaaua

SEQ ID NO: 495780 - RNA, 21 nt, Artificial Sequence
  Synthetic
gaugcuuccaauuguagaaua

SEQ ID NO: 495781 - RNA, 22 nt, Artificial Sequence
  Synthetic
ggaugcuuccaauuguagaaua

SEQ ID NO: 495782 - RNA, 23 nt, Artificial Sequence
  Synthetic
uggaugcuuccaauuguagaaua

SEQ ID NO: 495783 - RNA, 24 nt, Artificial Sequence
  Synthetic
auggaugcuuccaauuguagaaua

SEQ ID NO: 495784 - RNA, 18 nt, Artificial Sequence
  Synthetic
uauguaccucuuagaaua

SEQ ID NO: 495785 - RNA, 19 nt, Artificial Sequence
  Synthetic
cuauguaccucuuagaaua

SEQ ID NO: 495786 - RNA, 20 nt, Artificial Sequence
  Synthetic
acuauguaccucuuagaaua

SEQ ID NO: 495787 - RNA, 21 nt, Artificial Sequence
  Synthetic
cacuauguaccucuuagaaua

SEQ ID NO: 495788 - RNA, 22 nt, Artificial Sequence
  Synthetic
acacuauguaccucuuagaaua

SEQ ID NO: 495789 - RNA, 23 nt, Artificial Sequence
  Synthetic
uacacuauguaccucuuagaaua

SEQ ID NO: 495790 - RNA, 24 nt, Artificial Sequence
  Synthetic
guacacuauguaccucuuagaaua

SEQ ID NO: 495791 - RNA, 18 nt, Artificial Sequence
  Synthetic
ucacguucauuuagaaua

SEQ ID NO: 495792 - RNA, 19 nt, Artificial Sequence
  Synthetic
gucacguucauuuagaaua

SEQ ID NO: 495793 - RNA, 20 nt, Artificial Sequence
  Synthetic
ugucacguucauuuagaaua

SEQ ID NO: 495794 - RNA, 21 nt, Artificial Sequence
  Synthetic
augucacguucauuuagaaua

SEQ ID NO: 495795 - RNA, 22 nt, Artificial Sequence
  Synthetic
aaugucacguucauuuagaaua

SEQ ID NO: 495796 - RNA, 23 nt, Artificial Sequence
  Synthetic
gaaugucacguucauuuagaaua

SEQ ID NO: 495797 - RNA, 24 nt, Artificial Sequence
  Synthetic
agaaugucacguucauuuagaaua

SEQ ID NO: 495798 - RNA, 18 nt, Artificial Sequence
  Synthetic
uaacuagaauaacgaaua

SEQ ID NO: 495799 - RNA, 19 nt, Artificial Sequence
  Synthetic
auaacuagaauaacgaaua

SEQ ID NO: 495800 - RNA, 20 nt, Artificial Sequence
  Synthetic
uauaacuagaauaacgaaua

SEQ ID NO: 495801 - RNA, 21 nt, Artificial Sequence
  Synthetic
guauaacuagaauaacgaaua

SEQ ID NO: 495802 - RNA, 22 nt, Artificial Sequence
  Synthetic
uguauaacuagaauaacgaaua

SEQ ID NO: 495803 - RNA, 23 nt, Artificial Sequence
  Synthetic
auguauaacuagaauaacgaaua

SEQ ID NO: 495804 - RNA, 24 nt, Artificial Sequence
  Synthetic
aauguauaacuagaauaacgaaua

SEQ ID NO: 495805 - RNA, 18 nt, Artificial Sequence
  Synthetic
gcggggccacugcgaaua

SEQ ID NO: 495806 - RNA, 19 nt, Artificial Sequence
  Synthetic
ugcggggccacugcgaaua

SEQ ID NO: 495807 - RNA, 20 nt, Artificial Sequence
  Synthetic
cugcggggccacugcgaaua

SEQ ID NO: 495808 - RNA, 21 nt, Artificial Sequence
  Synthetic
gcugcggggccacugcgaaua

SEQ ID NO: 495809 - RNA, 22 nt, Artificial Sequence
  Synthetic
ugcugcggggccacugcgaaua

SEQ ID NO: 495810 - RNA, 23 nt, Artificial Sequence
  Synthetic
gugcugcggggccacugcgaaua

SEQ ID NO: 495811 - RNA, 24 nt, Artificial Sequence
  Synthetic
agugcugcggggccacugcgaaua

SEQ ID NO: 495812 - RNA, 18 nt, Artificial Sequence
  Synthetic
caaaauuauuuucgaaua

SEQ ID NO: 495813 - RNA, 19 nt, Artificial Sequence
  Synthetic
gcaaaauuauuuucgaaua

SEQ ID NO: 495814 - RNA, 20 nt, Artificial Sequence
  Synthetic
agcaaaauuauuuucgaaua

SEQ ID NO: 495815 - RNA, 21 nt, Artificial Sequence
  Synthetic
aagcaaaauuauuuucgaaua

SEQ ID NO: 495816 - RNA, 22 nt, Artificial Sequence
  Synthetic
caagcaaaauuauuuucgaaua

SEQ ID NO: 495817 - RNA, 23 nt, Artificial Sequence
  Synthetic
ucaagcaaaauuauuuucgaaua

SEQ ID NO: 495818 - RNA, 24 nt, Artificial Sequence
  Synthetic
uucaagcaaaauuauuuucgaaua

SEQ ID NO: 495819 - RNA, 18 nt, Artificial Sequence
  Synthetic
aaaaaaaaaaaaggaaua

SEQ ID NO: 495820 - RNA, 19 nt, Artificial Sequence
  Synthetic
aaaaaaaaaaaaaggaaua

SEQ ID NO: 495821 - RNA, 20 nt, Artificial Sequence
  Synthetic
aaaaaaaaaaaaaaggaaua

SEQ ID NO: 495822 - RNA, 21 nt, Artificial Sequence
  Synthetic
aaaaaaaaaaaaaaaggaaua

SEQ ID NO: 495823 - RNA, 22 nt, Artificial Sequence
  Synthetic
aaaaaaaaaaaaaaaaggaaua

SEQ ID NO: 495824 - RNA, 23 nt, Artificial Sequence
  Synthetic
aaaaaaaaaaaaaaaaaggaaua

SEQ ID NO: 495825 - RNA, 24 nt, Artificial Sequence
  Synthetic
aaaaaaaaaaaaaaaaaaggaaua

SEQ ID NO: 495826 - RNA, 18 nt, Artificial Sequence
  Synthetic
gcuuaauauuaaggaaua

SEQ ID NO: 495827 - RNA, 19 nt, Artificial Sequence
  Synthetic
ggcuuaauauuaaggaaua

SEQ ID NO: 495828 - RNA, 20 nt, Artificial Sequence
  Synthetic
gggcuuaauauuaaggaaua

SEQ ID NO: 495829 - RNA, 21 nt, Artificial Sequence
  Synthetic
ggggcuuaauauuaaggaaua

SEQ ID NO: 495830 - RNA, 22 nt, Artificial Sequence
  Synthetic
uggggcuuaauauuaaggaaua

SEQ ID NO: 495831 - RNA, 23 nt, Artificial Sequence
  Synthetic
guggggcuuaauauuaaggaaua

SEQ ID NO: 495832 - RNA, 24 nt, Artificial Sequence
  Synthetic
cguggggcuuaauauuaaggaaua

SEQ ID NO: 495833 - RNA, 18 nt, Artificial Sequence
  Synthetic
aacuaauaaccaggaaua

SEQ ID NO: 495834 - RNA, 19 nt, Artificial Sequence
  Synthetic
aaacuaauaaccaggaaua

SEQ ID NO: 495835 - RNA, 20 nt, Artificial Sequence
  Synthetic
aaaacuaauaaccaggaaua

SEQ ID NO: 495836 - RNA, 21 nt, Artificial Sequence
  Synthetic
caaaacuaauaaccaggaaua

SEQ ID NO: 495837 - RNA, 22 nt, Artificial Sequence
  Synthetic
ccaaaacuaauaaccaggaaua

SEQ ID NO: 495838 - RNA, 23 nt, Artificial Sequence
  Synthetic
accaaaacuaauaaccaggaaua

SEQ ID NO: 495839 - RNA, 24 nt, Artificial Sequence
  Synthetic
aaccaaaacuaauaaccaggaaua

SEQ ID NO: 495840 - RNA, 18 nt, Artificial Sequence
  Synthetic
aguaaccuuggaggaaua

SEQ ID NO: 495841 - RNA, 19 nt, Artificial Sequence
  Synthetic
uaguaaccuuggaggaaua

SEQ ID NO: 495842 - RNA, 20 nt, Artificial Sequence
  Synthetic
cuaguaaccuuggaggaaua

SEQ ID NO: 495843 - RNA, 21 nt, Artificial Sequence
  Synthetic
acuaguaaccuuggaggaaua

SEQ ID NO: 495844 - RNA, 22 nt, Artificial Sequence
  Synthetic
aacuaguaaccuuggaggaaua

SEQ ID NO: 495845 - RNA, 23 nt, Artificial Sequence
  Synthetic
uaacuaguaaccuuggaggaaua

SEQ ID NO: 495846 - RNA, 24 nt, Artificial Sequence
  Synthetic
cuaacuaguaaccuuggaggaaua

SEQ ID NO: 495847 - RNA, 18 nt, Artificial Sequence
  Synthetic
gaucucagaugaggaaua

SEQ ID NO: 495848 - RNA, 19 nt, Artificial Sequence
  Synthetic
ugaucucagaugaggaaua

SEQ ID NO: 495849 - RNA, 20 nt, Artificial Sequence
  Synthetic
cugaucucagaugaggaaua

SEQ ID NO: 495850 - RNA, 21 nt, Artificial Sequence
  Synthetic
ucugaucucagaugaggaaua

SEQ ID NO: 495851 - RNA, 22 nt, Artificial Sequence
  Synthetic
cucugaucucagaugaggaaua

SEQ ID NO: 495852 - RNA, 23 nt, Artificial Sequence
  Synthetic
gcucugaucucagaugaggaaua

SEQ ID NO: 495853 - RNA, 24 nt, Artificial Sequence
  Synthetic
agcucugaucucagaugaggaaua

SEQ ID NO: 495854 - RNA, 18 nt, Artificial Sequence
  Synthetic
agccgauucugaggaaua

SEQ ID NO: 495855 - RNA, 19 nt, Artificial Sequence
  Synthetic
aagccgauucugaggaaua

SEQ ID NO: 495856 - RNA, 20 nt, Artificial Sequence
  Synthetic
gaagccgauucugaggaaua

SEQ ID NO: 495857 - RNA, 21 nt, Artificial Sequence
  Synthetic
ugaagccgauucugaggaaua

SEQ ID NO: 495858 - RNA, 22 nt, Artificial Sequence
  Synthetic
augaagccgauucugaggaaua

SEQ ID NO: 495859 - RNA, 23 nt, Artificial Sequence
  Synthetic
aaugaagccgauucugaggaaua

SEQ ID NO: 495860 - RNA, 24 nt, Artificial Sequence
  Synthetic
aaaugaagccgauucugaggaaua

SEQ ID NO: 495861 - RNA, 18 nt, Artificial Sequence
  Synthetic
agaaaggaccuaggaaua

SEQ ID NO: 495862 - RNA, 19 nt, Artificial Sequence
  Synthetic
gagaaaggaccuaggaaua

SEQ ID NO: 495863 - RNA, 20 nt, Artificial Sequence
  Synthetic
ugagaaaggaccuaggaaua

SEQ ID NO: 495864 - RNA, 21 nt, Artificial Sequence
  Synthetic
augagaaaggaccuaggaaua

SEQ ID NO: 495865 - RNA, 22 nt, Artificial Sequence
  Synthetic
gaugagaaaggaccuaggaaua

SEQ ID NO: 495866 - RNA, 23 nt, Artificial Sequence
  Synthetic
agaugagaaaggaccuaggaaua

SEQ ID NO: 495867 - RNA, 24 nt, Artificial Sequence
  Synthetic
aagaugagaaaggaccuaggaaua

SEQ ID NO: 495868 - RNA, 18 nt, Artificial Sequence
  Synthetic
ggagaacaaaagggaaua

SEQ ID NO: 495869 - RNA, 19 nt, Artificial Sequence
  Synthetic
gggagaacaaaagggaaua

SEQ ID NO: 495870 - RNA, 20 nt, Artificial Sequence
  Synthetic
ggggagaacaaaagggaaua

SEQ ID NO: 495871 - RNA, 21 nt, Artificial Sequence
  Synthetic
aggggagaacaaaagggaaua

SEQ ID NO: 495872 - RNA, 22 nt, Artificial Sequence
  Synthetic
uaggggagaacaaaagggaaua

SEQ ID NO: 495873 - RNA, 23 nt, Artificial Sequence
  Synthetic
uuaggggagaacaaaagggaaua

SEQ ID NO: 495874 - RNA, 24 nt, Artificial Sequence
  Synthetic
uuuaggggagaacaaaagggaaua

SEQ ID NO: 495875 - RNA, 18 nt, Artificial Sequence
  Synthetic
guugugucucagggaaua

SEQ ID NO: 495876 - RNA, 19 nt, Artificial Sequence
  Synthetic
uguugugucucagggaaua

SEQ ID NO: 495877 - RNA, 20 nt, Artificial Sequence
  Synthetic
uuguugugucucagggaaua

SEQ ID NO: 495878 - RNA, 21 nt, Artificial Sequence
  Synthetic
auuguugugucucagggaaua

SEQ ID NO: 495879 - RNA, 22 nt, Artificial Sequence
  Synthetic
uauuguugugucucagggaaua

SEQ ID NO: 495880 - RNA, 23 nt, Artificial Sequence
  Synthetic
auauuguugugucucagggaaua

SEQ ID NO: 495881 - RNA, 24 nt, Artificial Sequence
  Synthetic
aauauuguugugucucagggaaua

SEQ ID NO: 495882 - RNA, 18 nt, Artificial Sequence
  Synthetic
gaaacaauuaauggaaua

SEQ ID NO: 495883 - RNA, 19 nt, Artificial Sequence
  Synthetic
ggaaacaauuaauggaaua

SEQ ID NO: 495884 - RNA, 20 nt, Artificial Sequence
  Synthetic
aggaaacaauuaauggaaua

SEQ ID NO: 495885 - RNA, 21 nt, Artificial Sequence
  Synthetic
aaggaaacaauuaauggaaua

SEQ ID NO: 495886 - RNA, 22 nt, Artificial Sequence
  Synthetic
aaaggaaacaauuaauggaaua

SEQ ID NO: 495887 - RNA, 23 nt, Artificial Sequence
  Synthetic
caaaggaaacaauuaauggaaua

SEQ ID NO: 495888 - RNA, 24 nt, Artificial Sequence
  Synthetic
gcaaaggaaacaauuaauggaaua

SEQ ID NO: 495889 - RNA, 18 nt, Artificial Sequence
  Synthetic
aauaugcaguauggaaua

SEQ ID NO: 495890 - RNA, 19 nt, Artificial Sequence
  Synthetic
aaauaugcaguauggaaua

SEQ ID NO: 495891 - RNA, 20 nt, Artificial Sequence
  Synthetic
uaaauaugcaguauggaaua

SEQ ID NO: 495892 - RNA, 21 nt, Artificial Sequence
  Synthetic
uuaaauaugcaguauggaaua

SEQ ID NO: 495893 - RNA, 22 nt, Artificial Sequence
  Synthetic
guuaaauaugcaguauggaaua

SEQ ID NO: 495894 - RNA, 23 nt, Artificial Sequence
  Synthetic
aguuaaauaugcaguauggaaua

SEQ ID NO: 495895 - RNA, 24 nt, Artificial Sequence
  Synthetic
caguuaaauaugcaguauggaaua

SEQ ID NO: 495896 - RNA, 18 nt, Artificial Sequence
  Synthetic
ugacuaauaucuggaaua

SEQ ID NO: 495897 - RNA, 19 nt, Artificial Sequence
  Synthetic
uugacuaauaucuggaaua

SEQ ID NO: 495898 - RNA, 20 nt, Artificial Sequence
  Synthetic
uuugacuaauaucuggaaua

SEQ ID NO: 495899 - RNA, 21 nt, Artificial Sequence
  Synthetic
auuugacuaauaucuggaaua

SEQ ID NO: 495900 - RNA, 22 nt, Artificial Sequence
  Synthetic
gauuugacuaauaucuggaaua

SEQ ID NO: 495901 - RNA, 23 nt, Artificial Sequence
  Synthetic
agauuugacuaauaucuggaaua

SEQ ID NO: 495902 - RNA, 24 nt, Artificial Sequence
  Synthetic
cagauuugacuaauaucuggaaua

SEQ ID NO: 495903 - RNA, 18 nt, Artificial Sequence
  Synthetic
gcacagacaaguggaaua

SEQ ID NO: 495904 - RNA, 19 nt, Artificial Sequence
  Synthetic
ggcacagacaaguggaaua

SEQ ID NO: 495905 - RNA, 20 nt, Artificial Sequence
  Synthetic
uggcacagacaaguggaaua

SEQ ID NO: 495906 - RNA, 21 nt, Artificial Sequence
  Synthetic
uuggcacagacaaguggaaua

SEQ ID NO: 495907 - RNA, 22 nt, Artificial Sequence
  Synthetic
uuuggcacagacaaguggaaua

SEQ ID NO: 495908 - RNA, 23 nt, Artificial Sequence
  Synthetic
uuuuggcacagacaaguggaaua

SEQ ID NO: 495909 - RNA, 24 nt, Artificial Sequence
  Synthetic
auuuuggcacagacaaguggaaua

SEQ ID NO: 495910 - RNA, 18 nt, Artificial Sequence
  Synthetic
ccagugcaauguggaaua

SEQ ID NO: 495911 - RNA, 19 nt, Artificial Sequence
  Synthetic
uccagugcaauguggaaua

SEQ ID NO: 495912 - RNA, 20 nt, Artificial Sequence
  Synthetic
cuccagugcaauguggaaua

SEQ ID NO: 495913 - RNA, 21 nt, Artificial Sequence
  Synthetic
acuccagugcaauguggaaua

SEQ ID NO: 495914 - RNA, 22 nt, Artificial Sequence
  Synthetic
aacuccagugcaauguggaaua

SEQ ID NO: 495915 - RNA, 23 nt, Artificial Sequence
  Synthetic
aaacuccagugcaauguggaaua

SEQ ID NO: 495916 - RNA, 24 nt, Artificial Sequence
  Synthetic
gaaacuccagugcaauguggaaua

SEQ ID NO: 495917 - RNA, 18 nt, Artificial Sequence
  Synthetic
auguugaauaaaugaaua

SEQ ID NO: 495918 - RNA, 19 nt, Artificial Sequence
  Synthetic
uauguugaauaaaugaaua

SEQ ID NO: 495919 - RNA, 20 nt, Artificial Sequence
  Synthetic
auauguugaauaaaugaaua

SEQ ID NO: 495920 - RNA, 21 nt, Artificial Sequence
  Synthetic
uauauguugaauaaaugaaua

SEQ ID NO: 495921 - RNA, 22 nt, Artificial Sequence
  Synthetic
cuauauguugaauaaaugaaua

SEQ ID NO: 495922 - RNA, 23 nt, Artificial Sequence
  Synthetic
acuauauguugaauaaaugaaua

SEQ ID NO: 495923 - RNA, 24 nt, Artificial Sequence
  Synthetic
uacuauauguugaauaaaugaaua

SEQ ID NO: 495924 - RNA, 18 nt, Artificial Sequence
  Synthetic
aauaauguaacaugaaua

SEQ ID NO: 495925 - RNA, 19 nt, Artificial Sequence
  Synthetic
gaauaauguaacaugaaua

SEQ ID NO: 495926 - RNA, 20 nt, Artificial Sequence
  Synthetic
ugaauaauguaacaugaaua

SEQ ID NO: 495927 - RNA, 21 nt, Artificial Sequence
  Synthetic
cugaauaauguaacaugaaua

SEQ ID NO: 495928 - RNA, 22 nt, Artificial Sequence
  Synthetic
ucugaauaauguaacaugaaua

SEQ ID NO: 495929 - RNA, 23 nt, Artificial Sequence
  Synthetic
uucugaauaauguaacaugaaua

SEQ ID NO: 495930 - RNA, 24 nt, Artificial Sequence
  Synthetic
uuucugaauaauguaacaugaaua

SEQ ID NO: 495931 - RNA, 18 nt, Artificial Sequence
  Synthetic
auacauaccacaugaaua

SEQ ID NO: 495932 - RNA, 19 nt, Artificial Sequence
  Synthetic
cauacauaccacaugaaua

SEQ ID NO: 495933 - RNA, 20 nt, Artificial Sequence
  Synthetic
acauacauaccacaugaaua

SEQ ID NO: 495934 - RNA, 21 nt, Artificial Sequence
  Synthetic
uacauacauaccacaugaaua

SEQ ID NO: 495935 - RNA, 22 nt, Artificial Sequence
  Synthetic
auacauacauaccacaugaaua

SEQ ID NO: 495936 - RNA, 23 nt, Artificial Sequence
  Synthetic
uauacauacauaccacaugaaua

SEQ ID NO: 495937 - RNA, 24 nt, Artificial Sequence
  Synthetic
guauacauacauaccacaugaaua

SEQ ID NO: 495938 - RNA, 18 nt, Artificial Sequence
  Synthetic
aauuacaagacaugaaua

SEQ ID NO: 495939 - RNA, 19 nt, Artificial Sequence
  Synthetic
aaauuacaagacaugaaua

SEQ ID NO: 495940 - RNA, 20 nt, Artificial Sequence
  Synthetic
uaaauuacaagacaugaaua

SEQ ID NO: 495941 - RNA, 21 nt, Artificial Sequence
  Synthetic
auaaauuacaagacaugaaua

SEQ ID NO: 495942 - RNA, 22 nt, Artificial Sequence
  Synthetic
gauaaauuacaagacaugaaua

SEQ ID NO: 495943 - RNA, 23 nt, Artificial Sequence
  Synthetic
agauaaauuacaagacaugaaua

SEQ ID NO: 495944 - RNA, 24 nt, Artificial Sequence
  Synthetic
aagauaaauuacaagacaugaaua

SEQ ID NO: 495945 - RNA, 18 nt, Artificial Sequence
  Synthetic
uagaaaaauccaugaaua

SEQ ID NO: 495946 - RNA, 19 nt, Artificial Sequence
  Synthetic
guagaaaaauccaugaaua

SEQ ID NO: 495947 - RNA, 20 nt, Artificial Sequence
  Synthetic
aguagaaaaauccaugaaua

SEQ ID NO: 495948 - RNA, 21 nt, Artificial Sequence
  Synthetic
aaguagaaaaauccaugaaua

SEQ ID NO: 495949 - RNA, 22 nt, Artificial Sequence
  Synthetic
aaaguagaaaaauccaugaaua

SEQ ID NO: 495950 - RNA, 23 nt, Artificial Sequence
  Synthetic
uaaaguagaaaaauccaugaaua

SEQ ID NO: 495951 - RNA, 24 nt, Artificial Sequence
  Synthetic
uuaaaguagaaaaauccaugaaua

SEQ ID NO: 495952 - RNA, 18 nt, Artificial Sequence
  Synthetic
guauaagucagaugaaua

SEQ ID NO: 495953 - RNA, 19 nt, Artificial Sequence
  Synthetic
uguauaagucagaugaaua

SEQ ID NO: 495954 - RNA, 20 nt, Artificial Sequence
  Synthetic
uuguauaagucagaugaaua

SEQ ID NO: 495955 - RNA, 21 nt, Artificial Sequence
  Synthetic
cuuguauaagucagaugaaua

SEQ ID NO: 495956 - RNA, 22 nt, Artificial Sequence
  Synthetic
acuuguauaagucagaugaaua

SEQ ID NO: 495957 - RNA, 23 nt, Artificial Sequence
  Synthetic
cacuuguauaagucagaugaaua

SEQ ID NO: 495958 - RNA, 24 nt, Artificial Sequence
  Synthetic
ccacuuguauaagucagaugaaua

SEQ ID NO: 495959 - RNA, 18 nt, Artificial Sequence
  Synthetic
uuuaauaauggaugaaua

SEQ ID NO: 495960 - RNA, 19 nt, Artificial Sequence
  Synthetic
guuuaauaauggaugaaua

SEQ ID NO: 495961 - RNA, 20 nt, Artificial Sequence
  Synthetic
uguuuaauaauggaugaaua

SEQ ID NO: 495962 - RNA, 21 nt, Artificial Sequence
  Synthetic
guguuuaauaauggaugaaua

SEQ ID NO: 495963 - RNA, 22 nt, Artificial Sequence
  Synthetic
aguguuuaauaauggaugaaua

SEQ ID NO: 495964 - RNA, 23 nt, Artificial Sequence
  Synthetic
aaguguuuaauaauggaugaaua

SEQ ID NO: 495965 - RNA, 24 nt, Artificial Sequence
  Synthetic
uaaguguuuaauaauggaugaaua

SEQ ID NO: 495966 - RNA, 18 nt, Artificial Sequence
  Synthetic
gagaaaagcugaugaaua

SEQ ID NO: 495967 - RNA, 19 nt, Artificial Sequence
  Synthetic
ggagaaaagcugaugaaua

SEQ ID NO: 495968 - RNA, 20 nt, Artificial Sequence
  Synthetic
aggagaaaagcugaugaaua

SEQ ID NO: 495969 - RNA, 21 nt, Artificial Sequence
  Synthetic
uaggagaaaagcugaugaaua

SEQ ID NO: 495970 - RNA, 22 nt, Artificial Sequence
  Synthetic
auaggagaaaagcugaugaaua

SEQ ID NO: 495971 - RNA, 23 nt, Artificial Sequence
  Synthetic
aauaggagaaaagcugaugaaua

SEQ ID NO: 495972 - RNA, 24 nt, Artificial Sequence
  Synthetic
uaauaggagaaaagcugaugaaua

SEQ ID NO: 495973 - RNA, 18 nt, Artificial Sequence
  Synthetic
ucaagaaguauaugaaua

SEQ ID NO: 495974 - RNA, 19 nt, Artificial Sequence
  Synthetic
cucaagaaguauaugaaua

SEQ ID NO: 495975 - RNA, 20 nt, Artificial Sequence
  Synthetic
ccucaagaaguauaugaaua

SEQ ID NO: 495976 - RNA, 21 nt, Artificial Sequence
  Synthetic
cccucaagaaguauaugaaua

SEQ ID NO: 495977 - RNA, 22 nt, Artificial Sequence
  Synthetic
ccccucaagaaguauaugaaua

SEQ ID NO: 495978 - RNA, 23 nt, Artificial Sequence
  Synthetic
cccccucaagaaguauaugaaua

SEQ ID NO: 495979 - RNA, 24 nt, Artificial Sequence
  Synthetic
ucccccucaagaaguauaugaaua

SEQ ID NO: 495980 - RNA, 18 nt, Artificial Sequence
  Synthetic
cgcaugaaucuaugaaua

SEQ ID NO: 495981 - RNA, 19 nt, Artificial Sequence
  Synthetic
acgcaugaaucuaugaaua

SEQ ID NO: 495982 - RNA, 20 nt, Artificial Sequence
  Synthetic
aacgcaugaaucuaugaaua

SEQ ID NO: 495983 - RNA, 21 nt, Artificial Sequence
  Synthetic
gaacgcaugaaucuaugaaua

SEQ ID NO: 495984 - RNA, 22 nt, Artificial Sequence
  Synthetic
ugaacgcaugaaucuaugaaua

SEQ ID NO: 495985 - RNA, 23 nt, Artificial Sequence
  Synthetic
gugaacgcaugaaucuaugaaua

SEQ ID NO: 495986 - RNA, 24 nt, Artificial Sequence
  Synthetic
agugaacgcaugaaucuaugaaua

SEQ ID NO: 495987 - RNA, 18 nt, Artificial Sequence
  Synthetic
aucuaccaaaacugaaua

SEQ ID NO: 495988 - RNA, 19 nt, Artificial Sequence
  Synthetic
aaucuaccaaaacugaaua

SEQ ID NO: 495989 - RNA, 20 nt, Artificial Sequence
  Synthetic
uaaucuaccaaaacugaaua

SEQ ID NO: 495990 - RNA, 21 nt, Artificial Sequence
  Synthetic
auaaucuaccaaaacugaaua

SEQ ID NO: 495991 - RNA, 22 nt, Artificial Sequence
  Synthetic
cauaaucuaccaaaacugaaua

SEQ ID NO: 495992 - RNA, 23 nt, Artificial Sequence
  Synthetic
acauaaucuaccaaaacugaaua

SEQ ID NO: 495993 - RNA, 24 nt, Artificial Sequence
  Synthetic
uacauaaucuaccaaaacugaaua

SEQ ID NO: 495994 - RNA, 18 nt, Artificial Sequence
  Synthetic
agagauaacuccugaaua

SEQ ID NO: 495995 - RNA, 19 nt, Artificial Sequence
  Synthetic
cagagauaacuccugaaua

SEQ ID NO: 495996 - RNA, 20 nt, Artificial Sequence
  Synthetic
gcagagauaacuccugaaua

SEQ ID NO: 495997 - RNA, 21 nt, Artificial Sequence
  Synthetic
agcagagauaacuccugaaua

SEQ ID NO: 495998 - RNA, 22 nt, Artificial Sequence
  Synthetic
cagcagagauaacuccugaaua

SEQ ID NO: 495999 - RNA, 23 nt, Artificial Sequence
  Synthetic
acagcagagauaacuccugaaua

SEQ ID NO: 496000 - RNA, 24 nt, Artificial Sequence
  Synthetic
gacagcagagauaacuccugaaua

SEQ ID NO: 496001 - RNA, 18 nt, Artificial Sequence
  Synthetic
uuauacuuaggcugaaua

SEQ ID NO: 496002 - RNA, 19 nt, Artificial Sequence
  Synthetic
auuauacuuaggcugaaua

SEQ ID NO: 496003 - RNA, 20 nt, Artificial Sequence
  Synthetic
gauuauacuuaggcugaaua

SEQ ID NO: 496004 - RNA, 21 nt, Artificial Sequence
  Synthetic
ugauuauacuuaggcugaaua

SEQ ID NO: 496005 - RNA, 22 nt, Artificial Sequence
  Synthetic
uugauuauacuuaggcugaaua

SEQ ID NO: 496006 - RNA, 23 nt, Artificial Sequence
  Synthetic
cuugauuauacuuaggcugaaua

SEQ ID NO: 496007 - RNA, 24 nt, Artificial Sequence
  Synthetic
ccuugauuauacuuaggcugaaua

SEQ ID NO: 496008 - RNA, 18 nt, Artificial Sequence
  Synthetic
uucccuacugucugaaua

SEQ ID NO: 496009 - RNA, 19 nt, Artificial Sequence
  Synthetic
auucccuacugucugaaua

SEQ ID NO: 496010 - RNA, 20 nt, Artificial Sequence
  Synthetic
cauucccuacugucugaaua

SEQ ID NO: 496011 - RNA, 21 nt, Artificial Sequence
  Synthetic
ucauucccuacugucugaaua

SEQ ID NO: 496012 - RNA, 22 nt, Artificial Sequence
  Synthetic
cucauucccuacugucugaaua

SEQ ID NO: 496013 - RNA, 23 nt, Artificial Sequence
  Synthetic
gcucauucccuacugucugaaua

SEQ ID NO: 496014 - RNA, 24 nt, Artificial Sequence
  Synthetic
ugcucauucccuacugucugaaua

SEQ ID NO: 496015 - RNA, 18 nt, Artificial Sequence
  Synthetic
ggaaguacuuucugaaua

SEQ ID NO: 496016 - RNA, 19 nt, Artificial Sequence
  Synthetic
gggaaguacuuucugaaua

SEQ ID NO: 496017 - RNA, 20 nt, Artificial Sequence
  Synthetic
agggaaguacuuucugaaua

SEQ ID NO: 496018 - RNA, 21 nt, Artificial Sequence
  Synthetic
uagggaaguacuuucugaaua

SEQ ID NO: 496019 - RNA, 22 nt, Artificial Sequence
  Synthetic
auagggaaguacuuucugaaua

SEQ ID NO: 496020 - RNA, 23 nt, Artificial Sequence
  Synthetic
gauagggaaguacuuucugaaua

SEQ ID NO: 496021 - RNA, 24 nt, Artificial Sequence
  Synthetic
agauagggaaguacuuucugaaua

SEQ ID NO: 496022 - RNA, 18 nt, Artificial Sequence
  Synthetic
gauuaugcacugugaaua

SEQ ID NO: 496023 - RNA, 19 nt, Artificial Sequence
  Synthetic
ugauuaugcacugugaaua

SEQ ID NO: 496024 - RNA, 20 nt, Artificial Sequence
  Synthetic
cugauuaugcacugugaaua

SEQ ID NO: 496025 - RNA, 21 nt, Artificial Sequence
  Synthetic
ccugauuaugcacugugaaua

SEQ ID NO: 496026 - RNA, 22 nt, Artificial Sequence
  Synthetic
cccugauuaugcacugugaaua

SEQ ID NO: 496027 - RNA, 23 nt, Artificial Sequence
  Synthetic
acccugauuaugcacugugaaua

SEQ ID NO: 496028 - RNA, 24 nt, Artificial Sequence
  Synthetic
gacccugauuaugcacugugaaua

SEQ ID NO: 496029 - RNA, 18 nt, Artificial Sequence
  Synthetic
uuguauugucugugaaua

SEQ ID NO: 496030 - RNA, 19 nt, Artificial Sequence
  Synthetic
auuguauugucugugaaua

SEQ ID NO: 496031 - RNA, 20 nt, Artificial Sequence
  Synthetic
gauuguauugucugugaaua

SEQ ID NO: 496032 - RNA, 21 nt, Artificial Sequence
  Synthetic
ggauuguauugucugugaaua

SEQ ID NO: 496033 - RNA, 22 nt, Artificial Sequence
  Synthetic
aggauuguauugucugugaaua

SEQ ID NO: 496034 - RNA, 23 nt, Artificial Sequence
  Synthetic
caggauuguauugucugugaaua

SEQ ID NO: 496035 - RNA, 24 nt, Artificial Sequence
  Synthetic
acaggauuguauugucugugaaua

SEQ ID NO: 496036 - RNA, 18 nt, Artificial Sequence
  Synthetic
aaaauucuucugugaaua

SEQ ID NO: 496037 - RNA, 19 nt, Artificial Sequence
  Synthetic
gaaaauucuucugugaaua

SEQ ID NO: 496038 - RNA, 20 nt, Artificial Sequence
  Synthetic
ugaaaauucuucugugaaua

SEQ ID NO: 496039 - RNA, 21 nt, Artificial Sequence
  Synthetic
augaaaauucuucugugaaua

SEQ ID NO: 496040 - RNA, 22 nt, Artificial Sequence
  Synthetic
uaugaaaauucuucugugaaua

SEQ ID NO: 496041 - RNA, 23 nt, Artificial Sequence
  Synthetic
auaugaaaauucuucugugaaua

SEQ ID NO: 496042 - RNA, 24 nt, Artificial Sequence
  Synthetic
cauaugaaaauucuucugugaaua

SEQ ID NO: 496043 - RNA, 18 nt, Artificial Sequence
  Synthetic
ccuucacuaacuugaaua

SEQ ID NO: 496044 - RNA, 19 nt, Artificial Sequence
  Synthetic
uccuucacuaacuugaaua

SEQ ID NO: 496045 - RNA, 20 nt, Artificial Sequence
  Synthetic
uuccuucacuaacuugaaua

SEQ ID NO: 496046 - RNA, 21 nt, Artificial Sequence
  Synthetic
cuuccuucacuaacuugaaua

SEQ ID NO: 496047 - RNA, 22 nt, Artificial Sequence
  Synthetic
ccuuccuucacuaacuugaaua

SEQ ID NO: 496048 - RNA, 23 nt, Artificial Sequence
  Synthetic
uccuuccuucacuaacuugaaua

SEQ ID NO: 496049 - RNA, 24 nt, Artificial Sequence
  Synthetic
auccuuccuucacuaacuugaaua

SEQ ID NO: 496050 - RNA, 18 nt, Artificial Sequence
  Synthetic
aaaauugcuacuugaaua

SEQ ID NO: 496051 - RNA, 19 nt, Artificial Sequence
  Synthetic
gaaaauugcuacuugaaua

SEQ ID NO: 496052 - RNA, 20 nt, Artificial Sequence
  Synthetic
ugaaaauugcuacuugaaua

SEQ ID NO: 496053 - RNA, 21 nt, Artificial Sequence
  Synthetic
augaaaauugcuacuugaaua

SEQ ID NO: 496054 - RNA, 22 nt, Artificial Sequence
  Synthetic
aaugaaaauugcuacuugaaua

SEQ ID NO: 496055 - RNA, 23 nt, Artificial Sequence
  Synthetic
aaaugaaaauugcuacuugaaua

SEQ ID NO: 496056 - RNA, 24 nt, Artificial Sequence
  Synthetic
uaaaugaaaauugcuacuugaaua

SEQ ID NO: 496057 - RNA, 18 nt, Artificial Sequence
  Synthetic
ucucucauuuguugaaua

SEQ ID NO: 496058 - RNA, 19 nt, Artificial Sequence
  Synthetic
uucucucauuuguugaaua

SEQ ID NO: 496059 - RNA, 20 nt, Artificial Sequence
  Synthetic
cuucucucauuuguugaaua

SEQ ID NO: 496060 - RNA, 21 nt, Artificial Sequence
  Synthetic
acuucucucauuuguugaaua

SEQ ID NO: 496061 - RNA, 22 nt, Artificial Sequence
  Synthetic
aacuucucucauuuguugaaua

SEQ ID NO: 496062 - RNA, 23 nt, Artificial Sequence
  Synthetic
uaacuucucucauuuguugaaua

SEQ ID NO: 496063 - RNA, 24 nt, Artificial Sequence
  Synthetic
auaacuucucucauuuguugaaua

SEQ ID NO: 496064 - RNA, 18 nt, Artificial Sequence
  Synthetic
uaugaaauaaaaauaaua

SEQ ID NO: 496065 - RNA, 19 nt, Artificial Sequence
  Synthetic
uuaugaaauaaaaauaaua

SEQ ID NO: 496066 - RNA, 20 nt, Artificial Sequence
  Synthetic
uuuaugaaauaaaaauaaua

SEQ ID NO: 496067 - RNA, 21 nt, Artificial Sequence
  Synthetic
uuuuaugaaauaaaaauaaua

SEQ ID NO: 496068 - RNA, 22 nt, Artificial Sequence
  Synthetic
guuuuaugaaauaaaaauaaua

SEQ ID NO: 496069 - RNA, 23 nt, Artificial Sequence
  Synthetic
gguuuuaugaaauaaaaauaaua

SEQ ID NO: 496070 - RNA, 24 nt, Artificial Sequence
  Synthetic
ugguuuuaugaaauaaaaauaaua

SEQ ID NO: 496071 - RNA, 18 nt, Artificial Sequence
  Synthetic
gccacuuagaaaauaaua

SEQ ID NO: 496072 - RNA, 19 nt, Artificial Sequence
  Synthetic
ugccacuuagaaaauaaua

SEQ ID NO: 496073 - RNA, 20 nt, Artificial Sequence
  Synthetic
cugccacuuagaaaauaaua

SEQ ID NO: 496074 - RNA, 21 nt, Artificial Sequence
  Synthetic
acugccacuuagaaaauaaua

SEQ ID NO: 496075 - RNA, 22 nt, Artificial Sequence
  Synthetic
cacugccacuuagaaaauaaua

SEQ ID NO: 496076 - RNA, 23 nt, Artificial Sequence
  Synthetic
ccacugccacuuagaaaauaaua

SEQ ID NO: 496077 - RNA, 24 nt, Artificial Sequence
  Synthetic
uccacugccacuuagaaaauaaua

SEQ ID NO: 496078 - RNA, 18 nt, Artificial Sequence
  Synthetic
uuaaacaugaaaauaaua

SEQ ID NO: 496079 - RNA, 19 nt, Artificial Sequence
  Synthetic
uuuaaacaugaaaauaaua

SEQ ID NO: 496080 - RNA, 20 nt, Artificial Sequence
  Synthetic
uuuuaaacaugaaaauaaua

SEQ ID NO: 496081 - RNA, 21 nt, Artificial Sequence
  Synthetic
auuuuaaacaugaaaauaaua

SEQ ID NO: 496082 - RNA, 22 nt, Artificial Sequence
  Synthetic
gauuuuaaacaugaaaauaaua

SEQ ID NO: 496083 - RNA, 23 nt, Artificial Sequence
  Synthetic
ggauuuuaaacaugaaaauaaua

SEQ ID NO: 496084 - RNA, 24 nt, Artificial Sequence
  Synthetic
aggauuuuaaacaugaaaauaaua

SEQ ID NO: 496085 - RNA, 18 nt, Artificial Sequence
  Synthetic
aggaaugcagaaauaaua

SEQ ID NO: 496086 - RNA, 19 nt, Artificial Sequence
  Synthetic
gaggaaugcagaaauaaua

SEQ ID NO: 496087 - RNA, 20 nt, Artificial Sequence
  Synthetic
ggaggaaugcagaaauaaua

SEQ ID NO: 496088 - RNA, 21 nt, Artificial Sequence
  Synthetic
gggaggaaugcagaaauaaua

SEQ ID NO: 496089 - RNA, 22 nt, Artificial Sequence
  Synthetic
agggaggaaugcagaaauaaua

SEQ ID NO: 496090 - RNA, 23 nt, Artificial Sequence
  Synthetic
aagggaggaaugcagaaauaaua

SEQ ID NO: 496091 - RNA, 24 nt, Artificial Sequence
  Synthetic
aaagggaggaaugcagaaauaaua

SEQ ID NO: 496092 - RNA, 18 nt, Artificial Sequence
  Synthetic
uaguugugagaaauaaua

SEQ ID NO: 496093 - RNA, 19 nt, Artificial Sequence
  Synthetic
guaguugugagaaauaaua

SEQ ID NO: 496094 - RNA, 20 nt, Artificial Sequence
  Synthetic
uguaguugugagaaauaaua

SEQ ID NO: 496095 - RNA, 21 nt, Artificial Sequence
  Synthetic
auguaguugugagaaauaaua

SEQ ID NO: 496096 - RNA, 22 nt, Artificial Sequence
  Synthetic
cauguaguugugagaaauaaua

SEQ ID NO: 496097 - RNA, 23 nt, Artificial Sequence
  Synthetic
acauguaguugugagaaauaaua

SEQ ID NO: 496098 - RNA, 24 nt, Artificial Sequence
  Synthetic
cacauguaguugugagaaauaaua

SEQ ID NO: 496099 - RNA, 18 nt, Artificial Sequence
  Synthetic
cuauaguuagcaauaaua

SEQ ID NO: 496100 - RNA, 19 nt, Artificial Sequence
  Synthetic
acuauaguuagcaauaaua

SEQ ID NO: 496101 - RNA, 20 nt, Artificial Sequence
  Synthetic
gacuauaguuagcaauaaua

SEQ ID NO: 496102 - RNA, 21 nt, Artificial Sequence
  Synthetic
ugacuauaguuagcaauaaua

SEQ ID NO: 496103 - RNA, 22 nt, Artificial Sequence
  Synthetic
gugacuauaguuagcaauaaua

SEQ ID NO: 496104 - RNA, 23 nt, Artificial Sequence
  Synthetic
ggugacuauaguuagcaauaaua

SEQ ID NO: 496105 - RNA, 24 nt, Artificial Sequence
  Synthetic
uggugacuauaguuagcaauaaua

SEQ ID NO: 496106 - RNA, 18 nt, Artificial Sequence
  Synthetic
gacagcaaugcaauaaua

SEQ ID NO: 496107 - RNA, 19 nt, Artificial Sequence
  Synthetic
agacagcaaugcaauaaua

SEQ ID NO: 496108 - RNA, 20 nt, Artificial Sequence
  Synthetic
uagacagcaaugcaauaaua

SEQ ID NO: 496109 - RNA, 21 nt, Artificial Sequence
  Synthetic
auagacagcaaugcaauaaua

SEQ ID NO: 496110 - RNA, 22 nt, Artificial Sequence
  Synthetic
gauagacagcaaugcaauaaua

SEQ ID NO: 496111 - RNA, 23 nt, Artificial Sequence
  Synthetic
agauagacagcaaugcaauaaua

SEQ ID NO: 496112 - RNA, 24 nt, Artificial Sequence
  Synthetic
gagauagacagcaaugcaauaaua

SEQ ID NO: 496113 - RNA, 18 nt, Artificial Sequence
  Synthetic
agauuugaaagaauaaua

SEQ ID NO: 496114 - RNA, 19 nt, Artificial Sequence
  Synthetic
aagauuugaaagaauaaua

SEQ ID NO: 496115 - RNA, 20 nt, Artificial Sequence
  Synthetic
uaagauuugaaagaauaaua

SEQ ID NO: 496116 - RNA, 21 nt, Artificial Sequence
  Synthetic
uuaagauuugaaagaauaaua

SEQ ID NO: 496117 - RNA, 22 nt, Artificial Sequence
  Synthetic
auuaagauuugaaagaauaaua

SEQ ID NO: 496118 - RNA, 23 nt, Artificial Sequence
  Synthetic
aauuaagauuugaaagaauaaua

SEQ ID NO: 496119 - RNA, 24 nt, Artificial Sequence
  Synthetic
uaauuaagauuugaaagaauaaua

SEQ ID NO: 496120 - RNA, 18 nt, Artificial Sequence
  Synthetic
auauuaugaauaauaaua

SEQ ID NO: 496121 - RNA, 19 nt, Artificial Sequence
  Synthetic
uauauuaugaauaauaaua

SEQ ID NO: 496122 - RNA, 20 nt, Artificial Sequence
  Synthetic
auauauuaugaauaauaaua

SEQ ID NO: 496123 - RNA, 21 nt, Artificial Sequence
  Synthetic
aauauauuaugaauaauaaua

SEQ ID NO: 496124 - RNA, 22 nt, Artificial Sequence
  Synthetic
uaauauauuaugaauaauaaua

SEQ ID NO: 496125 - RNA, 23 nt, Artificial Sequence
  Synthetic
auaauauauuaugaauaauaaua

SEQ ID NO: 496126 - RNA, 24 nt, Artificial Sequence
  Synthetic
aauaauauauuaugaauaauaaua

SEQ ID NO: 496127 - RNA, 18 nt, Artificial Sequence
  Synthetic
auaauaauaauaauaaua

SEQ ID NO: 496128 - RNA, 19 nt, Artificial Sequence
  Synthetic
aauaauaauaauaauaaua

SEQ ID NO: 496129 - RNA, 20 nt, Artificial Sequence
  Synthetic
uaauaauaauaauaauaaua

SEQ ID NO: 496130 - RNA, 21 nt, Artificial Sequence
  Synthetic
auaauaauaauaauaauaaua

SEQ ID NO: 496131 - RNA, 22 nt, Artificial Sequence
  Synthetic
aauaauaauaauaauaauaaua

SEQ ID NO: 496132 - RNA, 23 nt, Artificial Sequence
  Synthetic
uaauaauaauaauaauaauaaua

SEQ ID NO: 496133 - RNA, 24 nt, Artificial Sequence
  Synthetic
auaauaauaauaauaauaauaaua

SEQ ID NO: 496134 - RNA, 18 nt, Artificial Sequence
  Synthetic
gcugaagagauaauaaua

SEQ ID NO: 496135 - RNA, 19 nt, Artificial Sequence
  Synthetic
ugcugaagagauaauaaua

SEQ ID NO: 496136 - RNA, 20 nt, Artificial Sequence
  Synthetic
gugcugaagagauaauaaua

SEQ ID NO: 496137 - RNA, 21 nt, Artificial Sequence
  Synthetic
ggugcugaagagauaauaaua

SEQ ID NO: 496138 - RNA, 22 nt, Artificial Sequence
  Synthetic
gggugcugaagagauaauaaua

SEQ ID NO: 496139 - RNA, 23 nt, Artificial Sequence
  Synthetic
ugggugcugaagagauaauaaua

SEQ ID NO: 496140 - RNA, 24 nt, Artificial Sequence
  Synthetic
uugggugcugaagagauaauaaua

SEQ ID NO: 496141 - RNA, 18 nt, Artificial Sequence
  Synthetic
uauagaaauguaauaaua

SEQ ID NO: 496142 - RNA, 19 nt, Artificial Sequence
  Synthetic
cuauagaaauguaauaaua

SEQ ID NO: 496143 - RNA, 20 nt, Artificial Sequence
  Synthetic
gcuauagaaauguaauaaua

SEQ ID NO: 496144 - RNA, 21 nt, Artificial Sequence
  Synthetic
ugcuauagaaauguaauaaua

SEQ ID NO: 496145 - RNA, 22 nt, Artificial Sequence
  Synthetic
uugcuauagaaauguaauaaua

SEQ ID NO: 496146 - RNA, 23 nt, Artificial Sequence
  Synthetic
uuugcuauagaaauguaauaaua

SEQ ID NO: 496147 - RNA, 24 nt, Artificial Sequence
  Synthetic
uuuugcuauagaaauguaauaaua

SEQ ID NO: 496148 - RNA, 18 nt, Artificial Sequence
  Synthetic
uuguugugaaacauaaua

SEQ ID NO: 496149 - RNA, 19 nt, Artificial Sequence
  Synthetic
uuuguugugaaacauaaua

SEQ ID NO: 496150 - RNA, 20 nt, Artificial Sequence
  Synthetic
uuuuguugugaaacauaaua

SEQ ID NO: 496151 - RNA, 21 nt, Artificial Sequence
  Synthetic
uuuuuguugugaaacauaaua

SEQ ID NO: 496152 - RNA, 22 nt, Artificial Sequence
  Synthetic
cuuuuuguugugaaacauaaua

SEQ ID NO: 496153 - RNA, 23 nt, Artificial Sequence
  Synthetic
gcuuuuuguugugaaacauaaua

SEQ ID NO: 496154 - RNA, 24 nt, Artificial Sequence
  Synthetic
ugcuuuuuguugugaaacauaaua

SEQ ID NO: 496155 - RNA, 18 nt, Artificial Sequence
  Synthetic
agaucacccaccauaaua

SEQ ID NO: 496156 - RNA, 19 nt, Artificial Sequence
  Synthetic
gagaucacccaccauaaua

SEQ ID NO: 496157 - RNA, 20 nt, Artificial Sequence
  Synthetic
ugagaucacccaccauaaua

SEQ ID NO: 496158 - RNA, 21 nt, Artificial Sequence
  Synthetic
cugagaucacccaccauaaua

SEQ ID NO: 496159 - RNA, 22 nt, Artificial Sequence
  Synthetic
ucugagaucacccaccauaaua

SEQ ID NO: 496160 - RNA, 23 nt, Artificial Sequence
  Synthetic
aucugagaucacccaccauaaua

SEQ ID NO: 496161 - RNA, 24 nt, Artificial Sequence
  Synthetic
aaucugagaucacccaccauaaua

SEQ ID NO: 496162 - RNA, 18 nt, Artificial Sequence
  Synthetic
auuagauuucccauaaua

SEQ ID NO: 496163 - RNA, 19 nt, Artificial Sequence
  Synthetic
aauuagauuucccauaaua

SEQ ID NO: 496164 - RNA, 20 nt, Artificial Sequence
  Synthetic
uaauuagauuucccauaaua

SEQ ID NO: 496165 - RNA, 21 nt, Artificial Sequence
  Synthetic
guaauuagauuucccauaaua

SEQ ID NO: 496166 - RNA, 22 nt, Artificial Sequence
  Synthetic
aguaauuagauuucccauaaua

SEQ ID NO: 496167 - RNA, 23 nt, Artificial Sequence
  Synthetic
caguaauuagauuucccauaaua

SEQ ID NO: 496168 - RNA, 24 nt, Artificial Sequence
  Synthetic
gcaguaauuagauuucccauaaua

SEQ ID NO: 496169 - RNA, 18 nt, Artificial Sequence
  Synthetic
gauuuaugacgcauaaua

SEQ ID NO: 496170 - RNA, 19 nt, Artificial Sequence
  Synthetic
ggauuuaugacgcauaaua

SEQ ID NO: 496171 - RNA, 20 nt, Artificial Sequence
  Synthetic
gggauuuaugacgcauaaua

SEQ ID NO: 496172 - RNA, 21 nt, Artificial Sequence
  Synthetic
ggggauuuaugacgcauaaua

SEQ ID NO: 496173 - RNA, 22 nt, Artificial Sequence
  Synthetic
gggggauuuaugacgcauaaua

SEQ ID NO: 496174 - RNA, 23 nt, Artificial Sequence
  Synthetic
agggggauuuaugacgcauaaua

SEQ ID NO: 496175 - RNA, 24 nt, Artificial Sequence
  Synthetic
cagggggauuuaugacgcauaaua

SEQ ID NO: 496176 - RNA, 18 nt, Artificial Sequence
  Synthetic
acaaacccguagauaaua

SEQ ID NO: 496177 - RNA, 19 nt, Artificial Sequence
  Synthetic
aacaaacccguagauaaua

SEQ ID NO: 496178 - RNA, 20 nt, Artificial Sequence
  Synthetic
uaacaaacccguagauaaua

SEQ ID NO: 496179 - RNA, 21 nt, Artificial Sequence
  Synthetic
guaacaaacccguagauaaua

SEQ ID NO: 496180 - RNA, 22 nt, Artificial Sequence
  Synthetic
gguaacaaacccguagauaaua

SEQ ID NO: 496181 - RNA, 23 nt, Artificial Sequence
  Synthetic
agguaacaaacccguagauaaua

SEQ ID NO: 496182 - RNA, 24 nt, Artificial Sequence
  Synthetic
cagguaacaaacccguagauaaua

SEQ ID NO: 496183 - RNA, 18 nt, Artificial Sequence
  Synthetic
acuuuaagguggauaaua

SEQ ID NO: 496184 - RNA, 19 nt, Artificial Sequence
  Synthetic
cacuuuaagguggauaaua

SEQ ID NO: 496185 - RNA, 20 nt, Artificial Sequence
  Synthetic
ucacuuuaagguggauaaua

SEQ ID NO: 496186 - RNA, 21 nt, Artificial Sequence
  Synthetic
aucacuuuaagguggauaaua

SEQ ID NO: 496187 - RNA, 22 nt, Artificial Sequence
  Synthetic
gaucacuuuaagguggauaaua

SEQ ID NO: 496188 - RNA, 23 nt, Artificial Sequence
  Synthetic
ugaucacuuuaagguggauaaua

SEQ ID NO: 496189 - RNA, 24 nt, Artificial Sequence
  Synthetic
augaucacuuuaagguggauaaua

SEQ ID NO: 496190 - RNA, 18 nt, Artificial Sequence
  Synthetic
aauuuuaaaaugauaaua

SEQ ID NO: 496191 - RNA, 19 nt, Artificial Sequence
  Synthetic
aaauuuuaaaaugauaaua

SEQ ID NO: 496192 - RNA, 20 nt, Artificial Sequence
  Synthetic
uaaauuuuaaaaugauaaua

SEQ ID NO: 496193 - RNA, 21 nt, Artificial Sequence
  Synthetic
guaaauuuuaaaaugauaaua

SEQ ID NO: 496194 - RNA, 22 nt, Artificial Sequence
  Synthetic
aguaaauuuuaaaaugauaaua

SEQ ID NO: 496195 - RNA, 23 nt, Artificial Sequence
  Synthetic
gaguaaauuuuaaaaugauaaua

SEQ ID NO: 496196 - RNA, 24 nt, Artificial Sequence
  Synthetic
ggaguaaauuuuaaaaugauaaua

SEQ ID NO: 496197 - RNA, 18 nt, Artificial Sequence
  Synthetic
acuaaguccaugauaaua

SEQ ID NO: 496198 - RNA, 19 nt, Artificial Sequence
  Synthetic
gacuaaguccaugauaaua

SEQ ID NO: 496199 - RNA, 20 nt, Artificial Sequence
  Synthetic
ugacuaaguccaugauaaua

SEQ ID NO: 496200 - RNA, 21 nt, Artificial Sequence
  Synthetic
cugacuaaguccaugauaaua

SEQ ID NO: 496201 - RNA, 22 nt, Artificial Sequence
  Synthetic
ucugacuaaguccaugauaaua

SEQ ID NO: 496202 - RNA, 23 nt, Artificial Sequence
  Synthetic
aucugacuaaguccaugauaaua

SEQ ID NO: 496203 - RNA, 24 nt, Artificial Sequence
  Synthetic
caucugacuaaguccaugauaaua

SEQ ID NO: 496204 - RNA, 18 nt, Artificial Sequence
  Synthetic
guacuguaccauauaaua

SEQ ID NO: 496205 - RNA, 19 nt, Artificial Sequence
  Synthetic
gguacuguaccauauaaua

SEQ ID NO: 496206 - RNA, 20 nt, Artificial Sequence
  Synthetic
ugguacuguaccauauaaua

SEQ ID NO: 496207 - RNA, 21 nt, Artificial Sequence
  Synthetic
uugguacuguaccauauaaua

SEQ ID NO: 496208 - RNA, 22 nt, Artificial Sequence
  Synthetic
uuugguacuguaccauauaaua

SEQ ID NO: 496209 - RNA, 23 nt, Artificial Sequence
  Synthetic
cuuugguacuguaccauauaaua

SEQ ID NO: 496210 - RNA, 24 nt, Artificial Sequence
  Synthetic
ccuuugguacuguaccauauaaua

SEQ ID NO: 496211 - RNA, 18 nt, Artificial Sequence
  Synthetic
cuaugagagcauauaaua

SEQ ID NO: 496212 - RNA, 19 nt, Artificial Sequence
  Synthetic
acuaugagagcauauaaua

SEQ ID NO: 496213 - RNA, 20 nt, Artificial Sequence
  Synthetic
aacuaugagagcauauaaua

SEQ ID NO: 496214 - RNA, 21 nt, Artificial Sequence
  Synthetic
aaacuaugagagcauauaaua

SEQ ID NO: 496215 - RNA, 22 nt, Artificial Sequence
  Synthetic
gaaacuaugagagcauauaaua

SEQ ID NO: 496216 - RNA, 23 nt, Artificial Sequence
  Synthetic
ugaaacuaugagagcauauaaua

SEQ ID NO: 496217 - RNA, 24 nt, Artificial Sequence
  Synthetic
cugaaacuaugagagcauauaaua

SEQ ID NO: 496218 - RNA, 18 nt, Artificial Sequence
  Synthetic
ugauaguaugauauaaua

SEQ ID NO: 496219 - RNA, 19 nt, Artificial Sequence
  Synthetic
augauaguaugauauaaua

SEQ ID NO: 496220 - RNA, 20 nt, Artificial Sequence
  Synthetic
uaugauaguaugauauaaua

SEQ ID NO: 496221 - RNA, 21 nt, Artificial Sequence
  Synthetic
auaugauaguaugauauaaua

SEQ ID NO: 496222 - RNA, 22 nt, Artificial Sequence
  Synthetic
uauaugauaguaugauauaaua

SEQ ID NO: 496223 - RNA, 23 nt, Artificial Sequence
  Synthetic
cuauaugauaguaugauauaaua

SEQ ID NO: 496224 - RNA, 24 nt, Artificial Sequence
  Synthetic
gcuauaugauaguaugauauaaua

SEQ ID NO: 496225 - RNA, 18 nt, Artificial Sequence
  Synthetic
agaacuuaaaguauaaua

SEQ ID NO: 496226 - RNA, 19 nt, Artificial Sequence
  Synthetic
cagaacuuaaaguauaaua

SEQ ID NO: 496227 - RNA, 20 nt, Artificial Sequence
  Synthetic
ccagaacuuaaaguauaaua

SEQ ID NO: 496228 - RNA, 21 nt, Artificial Sequence
  Synthetic
cccagaacuuaaaguauaaua

SEQ ID NO: 496229 - RNA, 22 nt, Artificial Sequence
  Synthetic
ucccagaacuuaaaguauaaua

SEQ ID NO: 496230 - RNA, 23 nt, Artificial Sequence
  Synthetic
gucccagaacuuaaaguauaaua

SEQ ID NO: 496231 - RNA, 24 nt, Artificial Sequence
  Synthetic
ugucccagaacuuaaaguauaaua

SEQ ID NO: 496232 - RNA, 18 nt, Artificial Sequence
  Synthetic
cuuccaaaguguauaaua

SEQ ID NO: 496233 - RNA, 19 nt, Artificial Sequence
  Synthetic
ccuuccaaaguguauaaua

SEQ ID NO: 496234 - RNA, 20 nt, Artificial Sequence
  Synthetic
accuuccaaaguguauaaua

SEQ ID NO: 496235 - RNA, 21 nt, Artificial Sequence
  Synthetic
caccuuccaaaguguauaaua

SEQ ID NO: 496236 - RNA, 22 nt, Artificial Sequence
  Synthetic
gcaccuuccaaaguguauaaua

SEQ ID NO: 496237 - RNA, 23 nt, Artificial Sequence
  Synthetic
ugcaccuuccaaaguguauaaua

SEQ ID NO: 496238 - RNA, 24 nt, Artificial Sequence
  Synthetic
cugcaccuuccaaaguguauaaua

SEQ ID NO: 496239 - RNA, 18 nt, Artificial Sequence
  Synthetic
uuuuaaacuauuauaaua

SEQ ID NO: 496240 - RNA, 19 nt, Artificial Sequence
  Synthetic
uuuuuaaacuauuauaaua

SEQ ID NO: 496241 - RNA, 20 nt, Artificial Sequence
  Synthetic
uuuuuuaaacuauuauaaua

SEQ ID NO: 496242 - RNA, 21 nt, Artificial Sequence
  Synthetic
auuuuuuaaacuauuauaaua

SEQ ID NO: 496243 - RNA, 22 nt, Artificial Sequence
  Synthetic
uauuuuuuaaacuauuauaaua

SEQ ID NO: 496244 - RNA, 23 nt, Artificial Sequence
  Synthetic
guauuuuuuaaacuauuauaaua

SEQ ID NO: 496245 - RNA, 24 nt, Artificial Sequence
  Synthetic
aguauuuuuuaaacuauuauaaua

SEQ ID NO: 496246 - RNA, 18 nt, Artificial Sequence
  Synthetic
auuuuucuauuuauaaua

SEQ ID NO: 496247 - RNA, 19 nt, Artificial Sequence
  Synthetic
aauuuuucuauuuauaaua

SEQ ID NO: 496248 - RNA, 20 nt, Artificial Sequence
  Synthetic
uaauuuuucuauuuauaaua

SEQ ID NO: 496249 - RNA, 21 nt, Artificial Sequence
  Synthetic
cuaauuuuucuauuuauaaua

SEQ ID NO: 496250 - RNA, 22 nt, Artificial Sequence
  Synthetic
ccuaauuuuucuauuuauaaua

SEQ ID NO: 496251 - RNA, 23 nt, Artificial Sequence
  Synthetic
accuaauuuuucuauuuauaaua

SEQ ID NO: 496252 - RNA, 24 nt, Artificial Sequence
  Synthetic
aaccuaauuuuucuauuuauaaua

SEQ ID NO: 496253 - RNA, 18 nt, Artificial Sequence
  Synthetic
uuacaccuuuuuauaaua

SEQ ID NO: 496254 - RNA, 19 nt, Artificial Sequence
  Synthetic
guuacaccuuuuuauaaua

SEQ ID NO: 496255 - RNA, 20 nt, Artificial Sequence
  Synthetic
aguuacaccuuuuuauaaua

SEQ ID NO: 496256 - RNA, 21 nt, Artificial Sequence
  Synthetic
gaguuacaccuuuuuauaaua

SEQ ID NO: 496257 - RNA, 22 nt, Artificial Sequence
  Synthetic
ugaguuacaccuuuuuauaaua

SEQ ID NO: 496258 - RNA, 23 nt, Artificial Sequence
  Synthetic
gugaguuacaccuuuuuauaaua

SEQ ID NO: 496259 - RNA, 24 nt, Artificial Sequence
  Synthetic
agugaguuacaccuuuuuauaaua

SEQ ID NO: 496260 - RNA, 18 nt, Artificial Sequence
  Synthetic
guccuuaucaaacuaaua

SEQ ID NO: 496261 - RNA, 19 nt, Artificial Sequence
  Synthetic
uguccuuaucaaacuaaua

SEQ ID NO: 496262 - RNA, 20 nt, Artificial Sequence
  Synthetic
uuguccuuaucaaacuaaua

SEQ ID NO: 496263 - RNA, 21 nt, Artificial Sequence
  Synthetic
auuguccuuaucaaacuaaua

SEQ ID NO: 496264 - RNA, 22 nt, Artificial Sequence
  Synthetic
cauuguccuuaucaaacuaaua

SEQ ID NO: 496265 - RNA, 23 nt, Artificial Sequence
  Synthetic
ccauuguccuuaucaaacuaaua

SEQ ID NO: 496266 - RNA, 24 nt, Artificial Sequence
  Synthetic
gccauuguccuuaucaaacuaaua

SEQ ID NO: 496267 - RNA, 18 nt, Artificial Sequence
  Synthetic
ccgcuagcaagacuaaua

SEQ ID NO: 496268 - RNA, 19 nt, Artificial Sequence
  Synthetic
accgcuagcaagacuaaua

SEQ ID NO: 496269 - RNA, 20 nt, Artificial Sequence
  Synthetic
gaccgcuagcaagacuaaua

SEQ ID NO: 496270 - RNA, 21 nt, Artificial Sequence
  Synthetic
agaccgcuagcaagacuaaua

SEQ ID NO: 496271 - RNA, 22 nt, Artificial Sequence
  Synthetic
uagaccgcuagcaagacuaaua

SEQ ID NO: 496272 - RNA, 23 nt, Artificial Sequence
  Synthetic
auagaccgcuagcaagacuaaua

SEQ ID NO: 496273 - RNA, 24 nt, Artificial Sequence
  Synthetic
gauagaccgcuagcaagacuaaua

SEQ ID NO: 496274 - RNA, 18 nt, Artificial Sequence
  Synthetic
ccgcuaguaagacuaaua

SEQ ID NO: 496275 - RNA, 19 nt, Artificial Sequence
  Synthetic
accgcuaguaagacuaaua

SEQ ID NO: 496276 - RNA, 20 nt, Artificial Sequence
  Synthetic
gaccgcuaguaagacuaaua

SEQ ID NO: 496277 - RNA, 21 nt, Artificial Sequence
  Synthetic
agaccgcuaguaagacuaaua

SEQ ID NO: 496278 - RNA, 22 nt, Artificial Sequence
  Synthetic
uagaccgcuaguaagacuaaua

SEQ ID NO: 496279 - RNA, 23 nt, Artificial Sequence
  Synthetic
auagaccgcuaguaagacuaaua

SEQ ID NO: 496280 - RNA, 24 nt, Artificial Sequence
  Synthetic
gauagaccgcuaguaagacuaaua

SEQ ID NO: 496281 - RNA, 18 nt, Artificial Sequence
  Synthetic
ccacuagccagacuaaua

SEQ ID NO: 496282 - RNA, 19 nt, Artificial Sequence
  Synthetic
accacuagccagacuaaua

SEQ ID NO: 496283 - RNA, 20 nt, Artificial Sequence
  Synthetic
gaccacuagccagacuaaua

SEQ ID NO: 496284 - RNA, 21 nt, Artificial Sequence
  Synthetic
agaccacuagccagacuaaua

SEQ ID NO: 496285 - RNA, 22 nt, Artificial Sequence
  Synthetic
uagaccacuagccagacuaaua

SEQ ID NO: 496286 - RNA, 23 nt, Artificial Sequence
  Synthetic
auagaccacuagccagacuaaua

SEQ ID NO: 496287 - RNA, 24 nt, Artificial Sequence
  Synthetic
gauagaccacuagccagacuaaua

SEQ ID NO: 496288 - RNA, 18 nt, Artificial Sequence
  Synthetic
guucuuuaacuacuaaua

SEQ ID NO: 496289 - RNA, 19 nt, Artificial Sequence
  Synthetic
aguucuuuaacuacuaaua

SEQ ID NO: 496290 - RNA, 20 nt, Artificial Sequence
  Synthetic
caguucuuuaacuacuaaua

SEQ ID NO: 496291 - RNA, 21 nt, Artificial Sequence
  Synthetic
acaguucuuuaacuacuaaua

SEQ ID NO: 496292 - RNA, 22 nt, Artificial Sequence
  Synthetic
gacaguucuuuaacuacuaaua

SEQ ID NO: 496293 - RNA, 23 nt, Artificial Sequence
  Synthetic
agacaguucuuuaacuacuaaua

SEQ ID NO: 496294 - RNA, 24 nt, Artificial Sequence
  Synthetic
gagacaguucuuuaacuacuaaua

SEQ ID NO: 496295 - RNA, 18 nt, Artificial Sequence
  Synthetic
uaaauggcauuacuaaua

SEQ ID NO: 496296 - RNA, 19 nt, Artificial Sequence
  Synthetic
uuaaauggcauuacuaaua

SEQ ID NO: 496297 - RNA, 20 nt, Artificial Sequence
  Synthetic
auuaaauggcauuacuaaua

SEQ ID NO: 496298 - RNA, 21 nt, Artificial Sequence
  Synthetic
uauuaaauggcauuacuaaua

SEQ ID NO: 496299 - RNA, 22 nt, Artificial Sequence
  Synthetic
uuauuaaauggcauuacuaaua

SEQ ID NO: 496300 - RNA, 23 nt, Artificial Sequence
  Synthetic
cuuauuaaauggcauuacuaaua

SEQ ID NO: 496301 - RNA, 24 nt, Artificial Sequence
  Synthetic
ucuuauuaaauggcauuacuaaua

SEQ ID NO: 496302 - RNA, 18 nt, Artificial Sequence
  Synthetic
auuagauguagccuaaua

SEQ ID NO: 496303 - RNA, 19 nt, Artificial Sequence
  Synthetic
gauuagauguagccuaaua

SEQ ID NO: 496304 - RNA, 20 nt, Artificial Sequence
  Synthetic
agauuagauguagccuaaua

SEQ ID NO: 496305 - RNA, 21 nt, Artificial Sequence
  Synthetic
uagauuagauguagccuaaua

SEQ ID NO: 496306 - RNA, 22 nt, Artificial Sequence
  Synthetic
auagauuagauguagccuaaua

SEQ ID NO: 496307 - RNA, 23 nt, Artificial Sequence
  Synthetic
cauagauuagauguagccuaaua

SEQ ID NO: 496308 - RNA, 24 nt, Artificial Sequence
  Synthetic
ucauagauuagauguagccuaaua

SEQ ID NO: 496309 - RNA, 18 nt, Artificial Sequence
  Synthetic
caucaaagaaggcuaaua

SEQ ID NO: 496310 - RNA, 19 nt, Artificial Sequence
  Synthetic
acaucaaagaaggcuaaua

SEQ ID NO: 496311 - RNA, 20 nt, Artificial Sequence
  Synthetic
aacaucaaagaaggcuaaua

SEQ ID NO: 496312 - RNA, 21 nt, Artificial Sequence
  Synthetic
gaacaucaaagaaggcuaaua

SEQ ID NO: 496313 - RNA, 22 nt, Artificial Sequence
  Synthetic
agaacaucaaagaaggcuaaua

SEQ ID NO: 496314 - RNA, 23 nt, Artificial Sequence
  Synthetic
gagaacaucaaagaaggcuaaua

SEQ ID NO: 496315 - RNA, 24 nt, Artificial Sequence
  Synthetic
agagaacaucaaagaaggcuaaua

SEQ ID NO: 496316 - RNA, 18 nt, Artificial Sequence
  Synthetic
ucugacaaagggcuaaua

SEQ ID NO: 496317 - RNA, 19 nt, Artificial Sequence
  Synthetic
aucugacaaagggcuaaua

SEQ ID NO: 496318 - RNA, 20 nt, Artificial Sequence
  Synthetic
caucugacaaagggcuaaua

SEQ ID NO: 496319 - RNA, 21 nt, Artificial Sequence
  Synthetic
ccaucugacaaagggcuaaua

SEQ ID NO: 496320 - RNA, 22 nt, Artificial Sequence
  Synthetic
cccaucugacaaagggcuaaua

SEQ ID NO: 496321 - RNA, 23 nt, Artificial Sequence
  Synthetic
acccaucugacaaagggcuaaua

SEQ ID NO: 496322 - RNA, 24 nt, Artificial Sequence
  Synthetic
uacccaucugacaaagggcuaaua

SEQ ID NO: 496323 - RNA, 18 nt, Artificial Sequence
  Synthetic
gagaaaaacaugcuaaua

SEQ ID NO: 496324 - RNA, 19 nt, Artificial Sequence
  Synthetic
ggagaaaaacaugcuaaua

SEQ ID NO: 496325 - RNA, 20 nt, Artificial Sequence
  Synthetic
aggagaaaaacaugcuaaua

SEQ ID NO: 496326 - RNA, 21 nt, Artificial Sequence
  Synthetic
caggagaaaaacaugcuaaua

SEQ ID NO: 496327 - RNA, 22 nt, Artificial Sequence
  Synthetic
acaggagaaaaacaugcuaaua

SEQ ID NO: 496328 - RNA, 23 nt, Artificial Sequence
  Synthetic
aacaggagaaaaacaugcuaaua

SEQ ID NO: 496329 - RNA, 24 nt, Artificial Sequence
  Synthetic
aaacaggagaaaaacaugcuaaua

SEQ ID NO: 496330 - RNA, 18 nt, Artificial Sequence
  Synthetic
uaggaccaagugcuaaua

SEQ ID NO: 496331 - RNA, 19 nt, Artificial Sequence
  Synthetic
auaggaccaagugcuaaua

SEQ ID NO: 496332 - RNA, 20 nt, Artificial Sequence
  Synthetic
gauaggaccaagugcuaaua

SEQ ID NO: 496333 - RNA, 21 nt, Artificial Sequence
  Synthetic
agauaggaccaagugcuaaua

SEQ ID NO: 496334 - RNA, 22 nt, Artificial Sequence
  Synthetic
aagauaggaccaagugcuaaua

SEQ ID NO: 496335 - RNA, 23 nt, Artificial Sequence
  Synthetic
uaagauaggaccaagugcuaaua

SEQ ID NO: 496336 - RNA, 24 nt, Artificial Sequence
  Synthetic
auaagauaggaccaagugcuaaua

SEQ ID NO: 496337 - RNA, 18 nt, Artificial Sequence
  Synthetic
aacaccuuugugcuaaua

SEQ ID NO: 496338 - RNA, 19 nt, Artificial Sequence
  Synthetic
aaacaccuuugugcuaaua

SEQ ID NO: 496339 - RNA, 20 nt, Artificial Sequence
  Synthetic
caaacaccuuugugcuaaua

SEQ ID NO: 496340 - RNA, 21 nt, Artificial Sequence
  Synthetic
gcaaacaccuuugugcuaaua

SEQ ID NO: 496341 - RNA, 22 nt, Artificial Sequence
  Synthetic
ggcaaacaccuuugugcuaaua

SEQ ID NO: 496342 - RNA, 23 nt, Artificial Sequence
  Synthetic
aggcaaacaccuuugugcuaaua

SEQ ID NO: 496343 - RNA, 24 nt, Artificial Sequence
  Synthetic
caggcaaacaccuuugugcuaaua

SEQ ID NO: 496344 - RNA, 18 nt, Artificial Sequence
  Synthetic
acuuguguuuaucuaaua

SEQ ID NO: 496345 - RNA, 19 nt, Artificial Sequence
  Synthetic
gacuuguguuuaucuaaua

SEQ ID NO: 496346 - RNA, 20 nt, Artificial Sequence
  Synthetic
ugacuuguguuuaucuaaua

SEQ ID NO: 496347 - RNA, 21 nt, Artificial Sequence
  Synthetic
augacuuguguuuaucuaaua

SEQ ID NO: 496348 - RNA, 22 nt, Artificial Sequence
  Synthetic
uaugacuuguguuuaucuaaua

SEQ ID NO: 496349 - RNA, 23 nt, Artificial Sequence
  Synthetic
guaugacuuguguuuaucuaaua

SEQ ID NO: 496350 - RNA, 24 nt, Artificial Sequence
  Synthetic
aguaugacuuguguuuaucuaaua

SEQ ID NO: 496351 - RNA, 18 nt, Artificial Sequence
  Synthetic
uuuguauauccucuaaua

SEQ ID NO: 496352 - RNA, 19 nt, Artificial Sequence
  Synthetic
auuuguauauccucuaaua

SEQ ID NO: 496353 - RNA, 20 nt, Artificial Sequence
  Synthetic
cauuuguauauccucuaaua

SEQ ID NO: 496354 - RNA, 21 nt, Artificial Sequence
  Synthetic
gcauuuguauauccucuaaua

SEQ ID NO: 496355 - RNA, 22 nt, Artificial Sequence
  Synthetic
ugcauuuguauauccucuaaua

SEQ ID NO: 496356 - RNA, 23 nt, Artificial Sequence
  Synthetic
gugcauuuguauauccucuaaua

SEQ ID NO: 496357 - RNA, 24 nt, Artificial Sequence
  Synthetic
agugcauuuguauauccucuaaua

SEQ ID NO: 496358 - RNA, 18 nt, Artificial Sequence
  Synthetic
augcugaauauucuaaua

SEQ ID NO: 496359 - RNA, 19 nt, Artificial Sequence
  Synthetic
uaugcugaauauucuaaua

SEQ ID NO: 496360 - RNA, 20 nt, Artificial Sequence
  Synthetic
guaugcugaauauucuaaua

SEQ ID NO: 496361 - RNA, 21 nt, Artificial Sequence
  Synthetic
aguaugcugaauauucuaaua

SEQ ID NO: 496362 - RNA, 22 nt, Artificial Sequence
  Synthetic
aaguaugcugaauauucuaaua

SEQ ID NO: 496363 - RNA, 23 nt, Artificial Sequence
  Synthetic
aaaguaugcugaauauucuaaua

SEQ ID NO: 496364 - RNA, 24 nt, Artificial Sequence
  Synthetic
aaaaguaugcugaauauucuaaua

SEQ ID NO: 496365 - RNA, 18 nt, Artificial Sequence
  Synthetic
gugugaagaaaaguaaua

SEQ ID NO: 496366 - RNA, 19 nt, Artificial Sequence
  Synthetic
agugugaagaaaaguaaua

SEQ ID NO: 496367 - RNA, 20 nt, Artificial Sequence
  Synthetic
aagugugaagaaaaguaaua

SEQ ID NO: 496368 - RNA, 21 nt, Artificial Sequence
  Synthetic
aaagugugaagaaaaguaaua

SEQ ID NO: 496369 - RNA, 22 nt, Artificial Sequence
  Synthetic
uaaagugugaagaaaaguaaua

SEQ ID NO: 496370 - RNA, 23 nt, Artificial Sequence
  Synthetic
uuaaagugugaagaaaaguaaua

SEQ ID NO: 496371 - RNA, 24 nt, Artificial Sequence
  Synthetic
guuaaagugugaagaaaaguaaua

SEQ ID NO: 496372 - RNA, 18 nt, Artificial Sequence
  Synthetic
aaauuccugaaaguaaua

SEQ ID NO: 496373 - RNA, 19 nt, Artificial Sequence
  Synthetic
aaaauuccugaaaguaaua

SEQ ID NO: 496374 - RNA, 20 nt, Artificial Sequence
  Synthetic
aaaaauuccugaaaguaaua

SEQ ID NO: 496375 - RNA, 21 nt, Artificial Sequence
  Synthetic
aaaaaauuccugaaaguaaua

SEQ ID NO: 496376 - RNA, 22 nt, Artificial Sequence
  Synthetic
uaaaaaauuccugaaaguaaua

SEQ ID NO: 496377 - RNA, 23 nt, Artificial Sequence
  Synthetic
uuaaaaaauuccugaaaguaaua

SEQ ID NO: 496378 - RNA, 24 nt, Artificial Sequence
  Synthetic
cuuaaaaaauuccugaaaguaaua

SEQ ID NO: 496379 - RNA, 18 nt, Artificial Sequence
  Synthetic
acauugcuugaaguaaua

SEQ ID NO: 496380 - RNA, 19 nt, Artificial Sequence
  Synthetic
aacauugcuugaaguaaua

SEQ ID NO: 496381 - RNA, 20 nt, Artificial Sequence
  Synthetic
caacauugcuugaaguaaua

SEQ ID NO: 496382 - RNA, 21 nt, Artificial Sequence
  Synthetic
ucaacauugcuugaaguaaua

SEQ ID NO: 496383 - RNA, 22 nt, Artificial Sequence
  Synthetic
uucaacauugcuugaaguaaua

SEQ ID NO: 496384 - RNA, 23 nt, Artificial Sequence
  Synthetic
guucaacauugcuugaaguaaua

SEQ ID NO: 496385 - RNA, 24 nt, Artificial Sequence
  Synthetic
uguucaacauugcuugaaguaaua

SEQ ID NO: 496386 - RNA, 18 nt, Artificial Sequence
  Synthetic
caaaugcuaacaguaaua

SEQ ID NO: 496387 - RNA, 19 nt, Artificial Sequence
  Synthetic
gcaaaugcuaacaguaaua

SEQ ID NO: 496388 - RNA, 20 nt, Artificial Sequence
  Synthetic
agcaaaugcuaacaguaaua

SEQ ID NO: 496389 - RNA, 21 nt, Artificial Sequence
  Synthetic
aagcaaaugcuaacaguaaua

SEQ ID NO: 496390 - RNA, 22 nt, Artificial Sequence
  Synthetic
aaagcaaaugcuaacaguaaua

SEQ ID NO: 496391 - RNA, 23 nt, Artificial Sequence
  Synthetic
gaaagcaaaugcuaacaguaaua

SEQ ID NO: 496392 - RNA, 24 nt, Artificial Sequence
  Synthetic
agaaagcaaaugcuaacaguaaua

SEQ ID NO: 496393 - RNA, 18 nt, Artificial Sequence
  Synthetic
uaauaaagauagguaaua

SEQ ID NO: 496394 - RNA, 19 nt, Artificial Sequence
  Synthetic
uuaauaaagauagguaaua

SEQ ID NO: 496395 - RNA, 20 nt, Artificial Sequence
  Synthetic
uuuaauaaagauagguaaua

SEQ ID NO: 496396 - RNA, 21 nt, Artificial Sequence
  Synthetic
cuuuaauaaagauagguaaua

SEQ ID NO: 496397 - RNA, 22 nt, Artificial Sequence
  Synthetic
gcuuuaauaaagauagguaaua

SEQ ID NO: 496398 - RNA, 23 nt, Artificial Sequence
  Synthetic
agcuuuaauaaagauagguaaua

SEQ ID NO: 496399 - RNA, 24 nt, Artificial Sequence
  Synthetic
cagcuuuaauaaagauagguaaua

SEQ ID NO: 496400 - RNA, 18 nt, Artificial Sequence
  Synthetic
aauagauguuggguaaua

SEQ ID NO: 496401 - RNA, 19 nt, Artificial Sequence
  Synthetic
aaauagauguuggguaaua

SEQ ID NO: 496402 - RNA, 20 nt, Artificial Sequence
  Synthetic
uaaauagauguuggguaaua

SEQ ID NO: 496403 - RNA, 21 nt, Artificial Sequence
  Synthetic
guaaauagauguuggguaaua

SEQ ID NO: 496404 - RNA, 22 nt, Artificial Sequence
  Synthetic
aguaaauagauguuggguaaua

SEQ ID NO: 496405 - RNA, 23 nt, Artificial Sequence
  Synthetic
caguaaauagauguuggguaaua

SEQ ID NO: 496406 - RNA, 24 nt, Artificial Sequence
  Synthetic
gcaguaaauagauguuggguaaua

SEQ ID NO: 496407 - RNA, 18 nt, Artificial Sequence
  Synthetic
agcuuagccuugguaaua

SEQ ID NO: 496408 - RNA, 19 nt, Artificial Sequence
  Synthetic
aagcuuagccuugguaaua

SEQ ID NO: 496409 - RNA, 20 nt, Artificial Sequence
  Synthetic
gaagcuuagccuugguaaua

SEQ ID NO: 496410 - RNA, 21 nt, Artificial Sequence
  Synthetic
agaagcuuagccuugguaaua

SEQ ID NO: 496411 - RNA, 22 nt, Artificial Sequence
  Synthetic
cagaagcuuagccuugguaaua

SEQ ID NO: 496412 - RNA, 23 nt, Artificial Sequence
  Synthetic
acagaagcuuagccuugguaaua

SEQ ID NO: 496413 - RNA, 24 nt, Artificial Sequence
  Synthetic
aacagaagcuuagccuugguaaua

SEQ ID NO: 496414 - RNA, 18 nt, Artificial Sequence
  Synthetic
auaaaugacuuuguaaua

SEQ ID NO: 496415 - RNA, 19 nt, Artificial Sequence
  Synthetic
aauaaaugacuuuguaaua

SEQ ID NO: 496416 - RNA, 20 nt, Artificial Sequence
  Synthetic
aaauaaaugacuuuguaaua

SEQ ID NO: 496417 - RNA, 21 nt, Artificial Sequence
  Synthetic
gaaauaaaugacuuuguaaua

SEQ ID NO: 496418 - RNA, 22 nt, Artificial Sequence
  Synthetic
agaaauaaaugacuuuguaaua

SEQ ID NO: 496419 - RNA, 23 nt, Artificial Sequence
  Synthetic
cagaaauaaaugacuuuguaaua

SEQ ID NO: 496420 - RNA, 24 nt, Artificial Sequence
  Synthetic
gcagaaauaaaugacuuuguaaua

SEQ ID NO: 496421 - RNA, 18 nt, Artificial Sequence
  Synthetic
uaacguuaaaaauuaaua

SEQ ID NO: 496422 - RNA, 19 nt, Artificial Sequence
  Synthetic
uuaacguuaaaaauuaaua

SEQ ID NO: 496423 - RNA, 20 nt, Artificial Sequence
  Synthetic
uuuaacguuaaaaauuaaua

SEQ ID NO: 496424 - RNA, 21 nt, Artificial Sequence
  Synthetic
uuuuaacguuaaaaauuaaua

SEQ ID NO: 496425 - RNA, 22 nt, Artificial Sequence
  Synthetic
uuuuuaacguuaaaaauuaaua

SEQ ID NO: 496426 - RNA, 23 nt, Artificial Sequence
  Synthetic
auuuuuaacguuaaaaauuaaua

SEQ ID NO: 496427 - RNA, 24 nt, Artificial Sequence
  Synthetic
uauuuuuaacguuaaaaauuaaua

SEQ ID NO: 496428 - RNA, 18 nt, Artificial Sequence
  Synthetic
aaaauaauaaaauuaaua

SEQ ID NO: 496429 - RNA, 19 nt, Artificial Sequence
  Synthetic
gaaaauaauaaaauuaaua

SEQ ID NO: 496430 - RNA, 20 nt, Artificial Sequence
  Synthetic
ggaaaauaauaaaauuaaua

SEQ ID NO: 496431 - RNA, 21 nt, Artificial Sequence
  Synthetic
uggaaaauaauaaaauuaaua

SEQ ID NO: 496432 - RNA, 22 nt, Artificial Sequence
  Synthetic
cuggaaaauaauaaaauuaaua

SEQ ID NO: 496433 - RNA, 23 nt, Artificial Sequence
  Synthetic
ccuggaaaauaauaaaauuaaua

SEQ ID NO: 496434 - RNA, 24 nt, Artificial Sequence
  Synthetic
accuggaaaauaauaaaauuaaua

SEQ ID NO: 496435 - RNA, 18 nt, Artificial Sequence
  Synthetic
uacauuuuaaaauuaaua

SEQ ID NO: 496436 - RNA, 19 nt, Artificial Sequence
  Synthetic
uuacauuuuaaaauuaaua

SEQ ID NO: 496437 - RNA, 20 nt, Artificial Sequence
  Synthetic
uuuacauuuuaaaauuaaua

SEQ ID NO: 496438 - RNA, 21 nt, Artificial Sequence
  Synthetic
auuuacauuuuaaaauuaaua

SEQ ID NO: 496439 - RNA, 22 nt, Artificial Sequence
  Synthetic
aauuuacauuuuaaaauuaaua

SEQ ID NO: 496440 - RNA, 23 nt, Artificial Sequence
  Synthetic
caauuuacauuuuaaaauuaaua

SEQ ID NO: 496441 - RNA, 24 nt, Artificial Sequence
  Synthetic
ucaauuuacauuuuaaaauuaaua

SEQ ID NO: 496442 - RNA, 18 nt, Artificial Sequence
  Synthetic
gacucccacacauuaaua

SEQ ID NO: 496443 - RNA, 19 nt, Artificial Sequence
  Synthetic
agacucccacacauuaaua

SEQ ID NO: 496444 - RNA, 20 nt, Artificial Sequence
  Synthetic
uagacucccacacauuaaua

SEQ ID NO: 496445 - RNA, 21 nt, Artificial Sequence
  Synthetic
uuagacucccacacauuaaua

SEQ ID NO: 496446 - RNA, 22 nt, Artificial Sequence
  Synthetic
cuuagacucccacacauuaaua

SEQ ID NO: 496447 - RNA, 23 nt, Artificial Sequence
  Synthetic
acuuagacucccacacauuaaua

SEQ ID NO: 496448 - RNA, 24 nt, Artificial Sequence
  Synthetic
gacuuagacucccacacauuaaua

SEQ ID NO: 496449 - RNA, 18 nt, Artificial Sequence
  Synthetic
aauaaacugacauuaaua

SEQ ID NO: 496450 - RNA, 19 nt, Artificial Sequence
  Synthetic
aaauaaacugacauuaaua

SEQ ID NO: 496451 - RNA, 20 nt, Artificial Sequence
  Synthetic
gaaauaaacugacauuaaua

SEQ ID NO: 496452 - RNA, 21 nt, Artificial Sequence
  Synthetic
agaaauaaacugacauuaaua

SEQ ID NO: 496453 - RNA, 22 nt, Artificial Sequence
  Synthetic
uagaaauaaacugacauuaaua

SEQ ID NO: 496454 - RNA, 23 nt, Artificial Sequence
  Synthetic
auagaaauaaacugacauuaaua

SEQ ID NO: 496455 - RNA, 24 nt, Artificial Sequence
  Synthetic
aauagaaauaaacugacauuaaua

SEQ ID NO: 496456 - RNA, 18 nt, Artificial Sequence
  Synthetic
ucugaauaaugauuaaua

SEQ ID NO: 496457 - RNA, 19 nt, Artificial Sequence
  Synthetic
gucugaauaaugauuaaua

SEQ ID NO: 496458 - RNA, 20 nt, Artificial Sequence
  Synthetic
ugucugaauaaugauuaaua

SEQ ID NO: 496459 - RNA, 21 nt, Artificial Sequence
  Synthetic
augucugaauaaugauuaaua

SEQ ID NO: 496460 - RNA, 22 nt, Artificial Sequence
  Synthetic
caugucugaauaaugauuaaua

SEQ ID NO: 496461 - RNA, 23 nt, Artificial Sequence
  Synthetic
gcaugucugaauaaugauuaaua

SEQ ID NO: 496462 - RNA, 24 nt, Artificial Sequence
  Synthetic
ugcaugucugaauaaugauuaaua

SEQ ID NO: 496463 - RNA, 18 nt, Artificial Sequence
  Synthetic
cuucucuuuugauuaaua

SEQ ID NO: 496464 - RNA, 19 nt, Artificial Sequence
  Synthetic
ccuucucuuuugauuaaua

SEQ ID NO: 496465 - RNA, 20 nt, Artificial Sequence
  Synthetic
accuucucuuuugauuaaua

SEQ ID NO: 496466 - RNA, 21 nt, Artificial Sequence
  Synthetic
aaccuucucuuuugauuaaua

SEQ ID NO: 496467 - RNA, 22 nt, Artificial Sequence
  Synthetic
aaaccuucucuuuugauuaaua

SEQ ID NO: 496468 - RNA, 23 nt, Artificial Sequence
  Synthetic
gaaaccuucucuuuugauuaaua

SEQ ID NO: 496469 - RNA, 24 nt, Artificial Sequence
  Synthetic
ugaaaccuucucuuuugauuaaua

SEQ ID NO: 496470 - RNA, 18 nt, Artificial Sequence
  Synthetic
aacucuucuuccuuaaua

SEQ ID NO: 496471 - RNA, 19 nt, Artificial Sequence
  Synthetic
aaacucuucuuccuuaaua

SEQ ID NO: 496472 - RNA, 20 nt, Artificial Sequence
  Synthetic
gaaacucuucuuccuuaaua

SEQ ID NO: 496473 - RNA, 21 nt, Artificial Sequence
  Synthetic
agaaacucuucuuccuuaaua

SEQ ID NO: 496474 - RNA, 22 nt, Artificial Sequence
  Synthetic
aagaaacucuucuuccuuaaua

SEQ ID NO: 496475 - RNA, 23 nt, Artificial Sequence
  Synthetic
uaagaaacucuucuuccuuaaua

SEQ ID NO: 496476 - RNA, 24 nt, Artificial Sequence
  Synthetic
uuaagaaacucuucuuccuuaaua

SEQ ID NO: 496477 - RNA, 18 nt, Artificial Sequence
  Synthetic
uuuugcuuuaucuuaaua

SEQ ID NO: 496478 - RNA, 19 nt, Artificial Sequence
  Synthetic
auuuugcuuuaucuuaaua

SEQ ID NO: 496479 - RNA, 20 nt, Artificial Sequence
  Synthetic
cauuuugcuuuaucuuaaua

SEQ ID NO: 496480 - RNA, 21 nt, Artificial Sequence
  Synthetic
acauuuugcuuuaucuuaaua

SEQ ID NO: 496481 - RNA, 22 nt, Artificial Sequence
  Synthetic
uacauuuugcuuuaucuuaaua

SEQ ID NO: 496482 - RNA, 23 nt, Artificial Sequence
  Synthetic
auacauuuugcuuuaucuuaaua

SEQ ID NO: 496483 - RNA, 24 nt, Artificial Sequence
  Synthetic
uauacauuuugcuuuaucuuaaua

SEQ ID NO: 496484 - RNA, 18 nt, Artificial Sequence
  Synthetic
acagccuuauuguuaaua

SEQ ID NO: 496485 - RNA, 19 nt, Artificial Sequence
  Synthetic
aacagccuuauuguuaaua

SEQ ID NO: 496486 - RNA, 20 nt, Artificial Sequence
  Synthetic
gaacagccuuauuguuaaua

SEQ ID NO: 496487 - RNA, 21 nt, Artificial Sequence
  Synthetic
agaacagccuuauuguuaaua

SEQ ID NO: 496488 - RNA, 22 nt, Artificial Sequence
  Synthetic
cagaacagccuuauuguuaaua

SEQ ID NO: 496489 - RNA, 23 nt, Artificial Sequence
  Synthetic
gcagaacagccuuauuguuaaua

SEQ ID NO: 496490 - RNA, 24 nt, Artificial Sequence
  Synthetic
agcagaacagccuuauuguuaaua

SEQ ID NO: 496491 - RNA, 18 nt, Artificial Sequence
  Synthetic
caaucaaucaauuuaaua

SEQ ID NO: 496492 - RNA, 19 nt, Artificial Sequence
  Synthetic
acaaucaaucaauuuaaua

SEQ ID NO: 496493 - RNA, 20 nt, Artificial Sequence
  Synthetic
cacaaucaaucaauuuaaua

SEQ ID NO: 496494 - RNA, 21 nt, Artificial Sequence
  Synthetic
ccacaaucaaucaauuuaaua

SEQ ID NO: 496495 - RNA, 22 nt, Artificial Sequence
  Synthetic
accacaaucaaucaauuuaaua

SEQ ID NO: 496496 - RNA, 23 nt, Artificial Sequence
  Synthetic
caccacaaucaaucaauuuaaua

SEQ ID NO: 496497 - RNA, 24 nt, Artificial Sequence
  Synthetic
ccaccacaaucaaucaauuuaaua

SEQ ID NO: 496498 - RNA, 18 nt, Artificial Sequence
  Synthetic
ugauuauguaauuuaaua

SEQ ID NO: 496499 - RNA, 19 nt, Artificial Sequence
  Synthetic
gugauuauguaauuuaaua

SEQ ID NO: 496500 - RNA, 20 nt, Artificial Sequence
  Synthetic
ugugauuauguaauuuaaua

SEQ ID NO: 496501 - RNA, 21 nt, Artificial Sequence
  Synthetic
uugugauuauguaauuuaaua

SEQ ID NO: 496502 - RNA, 22 nt, Artificial Sequence
  Synthetic
guugugauuauguaauuuaaua

SEQ ID NO: 496503 - RNA, 23 nt, Artificial Sequence
  Synthetic
uguugugauuauguaauuuaaua

SEQ ID NO: 496504 - RNA, 24 nt, Artificial Sequence
  Synthetic
cuguugugauuauguaauuuaaua

SEQ ID NO: 496505 - RNA, 18 nt, Artificial Sequence
  Synthetic
guaaaaaauuauuuaaua

SEQ ID NO: 496506 - RNA, 19 nt, Artificial Sequence
  Synthetic
uguaaaaaauuauuuaaua

SEQ ID NO: 496507 - RNA, 20 nt, Artificial Sequence
  Synthetic
uuguaaaaaauuauuuaaua

SEQ ID NO: 496508 - RNA, 21 nt, Artificial Sequence
  Synthetic
uuuguaaaaaauuauuuaaua

SEQ ID NO: 496509 - RNA, 22 nt, Artificial Sequence
  Synthetic
uuuuguaaaaaauuauuuaaua

SEQ ID NO: 496510 - RNA, 23 nt, Artificial Sequence
  Synthetic
cuuuuguaaaaaauuauuuaaua

SEQ ID NO: 496511 - RNA, 24 nt, Artificial Sequence
  Synthetic
acuuuuguaaaaaauuauuuaaua

SEQ ID NO: 496512 - RNA, 18 nt, Artificial Sequence
  Synthetic
ccugagugaacuuuaaua

SEQ ID NO: 496513 - RNA, 19 nt, Artificial Sequence
  Synthetic
uccugagugaacuuuaaua

SEQ ID NO: 496514 - RNA, 20 nt, Artificial Sequence
  Synthetic
cuccugagugaacuuuaaua

SEQ ID NO: 496515 - RNA, 21 nt, Artificial Sequence
  Synthetic
ucuccugagugaacuuuaaua

SEQ ID NO: 496516 - RNA, 22 nt, Artificial Sequence
  Synthetic
aucuccugagugaacuuuaaua

SEQ ID NO: 496517 - RNA, 23 nt, Artificial Sequence
  Synthetic
caucuccugagugaacuuuaaua

SEQ ID NO: 496518 - RNA, 24 nt, Artificial Sequence
  Synthetic
gcaucuccugagugaacuuuaaua

SEQ ID NO: 496519 - RNA, 18 nt, Artificial Sequence
  Synthetic
uguuucugaauuuuaaua

SEQ ID NO: 496520 - RNA, 19 nt, Artificial Sequence
  Synthetic
auguuucugaauuuuaaua

SEQ ID NO: 496521 - RNA, 20 nt, Artificial Sequence
  Synthetic
aauguuucugaauuuuaaua

SEQ ID NO: 496522 - RNA, 21 nt, Artificial Sequence
  Synthetic
aaauguuucugaauuuuaaua

SEQ ID NO: 496523 - RNA, 22 nt, Artificial Sequence
  Synthetic
uaaauguuucugaauuuuaaua

SEQ ID NO: 496524 - RNA, 23 nt, Artificial Sequence
  Synthetic
uuaaauguuucugaauuuuaaua

SEQ ID NO: 496525 - RNA, 24 nt, Artificial Sequence
  Synthetic
uuuaaauguuucugaauuuuaaua

SEQ ID NO: 496526 - RNA, 18 nt, Artificial Sequence
  Synthetic
uucuuccugcuuuuaaua

SEQ ID NO: 496527 - RNA, 19 nt, Artificial Sequence
  Synthetic
auucuuccugcuuuuaaua

SEQ ID NO: 496528 - RNA, 20 nt, Artificial Sequence
  Synthetic
uauucuuccugcuuuuaaua

SEQ ID NO: 496529 - RNA, 21 nt, Artificial Sequence
  Synthetic
auauucuuccugcuuuuaaua

SEQ ID NO: 496530 - RNA, 22 nt, Artificial Sequence
  Synthetic
uauauucuuccugcuuuuaaua

SEQ ID NO: 496531 - RNA, 23 nt, Artificial Sequence
  Synthetic
guauauucuuccugcuuuuaaua

SEQ ID NO: 496532 - RNA, 24 nt, Artificial Sequence
  Synthetic
uguauauucuuccugcuuuuaaua

SEQ ID NO: 496533 - RNA, 18 nt, Artificial Sequence
  Synthetic
gauuuguaaguuuuaaua

SEQ ID NO: 496534 - RNA, 19 nt, Artificial Sequence
  Synthetic
ugauuuguaaguuuuaaua

SEQ ID NO: 496535 - RNA, 20 nt, Artificial Sequence
  Synthetic
augauuuguaaguuuuaaua

SEQ ID NO: 496536 - RNA, 21 nt, Artificial Sequence
  Synthetic
caugauuuguaaguuuuaaua

SEQ ID NO: 496537 - RNA, 22 nt, Artificial Sequence
  Synthetic
ucaugauuuguaaguuuuaaua

SEQ ID NO: 496538 - RNA, 23 nt, Artificial Sequence
  Synthetic
cucaugauuuguaaguuuuaaua

SEQ ID NO: 496539 - RNA, 24 nt, Artificial Sequence
  Synthetic
ccucaugauuuguaaguuuuaaua

SEQ ID NO: 496540 - RNA, 18 nt, Artificial Sequence
  Synthetic
agauuuggaguuuuaaua

SEQ ID NO: 496541 - RNA, 19 nt, Artificial Sequence
  Synthetic
uagauuuggaguuuuaaua

SEQ ID NO: 496542 - RNA, 20 nt, Artificial Sequence
  Synthetic
cuagauuuggaguuuuaaua

SEQ ID NO: 496543 - RNA, 21 nt, Artificial Sequence
  Synthetic
ccuagauuuggaguuuuaaua

SEQ ID NO: 496544 - RNA, 22 nt, Artificial Sequence
  Synthetic
accuagauuuggaguuuuaaua

SEQ ID NO: 496545 - RNA, 23 nt, Artificial Sequence
  Synthetic
caccuagauuuggaguuuuaaua

SEQ ID NO: 496546 - RNA, 24 nt, Artificial Sequence
  Synthetic
ucaccuagauuuggaguuuuaaua

SEQ ID NO: 496547 - RNA, 18 nt, Artificial Sequence
  Synthetic
cacaaaauauuuuuaaua

SEQ ID NO: 496548 - RNA, 19 nt, Artificial Sequence
  Synthetic
gcacaaaauauuuuuaaua

SEQ ID NO: 496549 - RNA, 20 nt, Artificial Sequence
  Synthetic
agcacaaaauauuuuuaaua

SEQ ID NO: 496550 - RNA, 21 nt, Artificial Sequence
  Synthetic
aagcacaaaauauuuuuaaua

SEQ ID NO: 496551 - RNA, 22 nt, Artificial Sequence
  Synthetic
aaagcacaaaauauuuuuaaua

SEQ ID NO: 496552 - RNA, 23 nt, Artificial Sequence
  Synthetic
gaaagcacaaaauauuuuuaaua

SEQ ID NO: 496553 - RNA, 24 nt, Artificial Sequence
  Synthetic
agaaagcacaaaauauuuuuaaua

SEQ ID NO: 496554 - RNA, 18 nt, Artificial Sequence
  Synthetic
aguuccugguuuuuaaua

SEQ ID NO: 496555 - RNA, 19 nt, Artificial Sequence
  Synthetic
uaguuccugguuuuuaaua

SEQ ID NO: 496556 - RNA, 20 nt, Artificial Sequence
  Synthetic
uuaguuccugguuuuuaaua

SEQ ID NO: 496557 - RNA, 21 nt, Artificial Sequence
  Synthetic
uuuaguuccugguuuuuaaua

SEQ ID NO: 496558 - RNA, 22 nt, Artificial Sequence
  Synthetic
auuuaguuccugguuuuuaaua

SEQ ID NO: 496559 - RNA, 23 nt, Artificial Sequence
  Synthetic
aauuuaguuccugguuuuuaaua

SEQ ID NO: 496560 - RNA, 24 nt, Artificial Sequence
  Synthetic
uaauuuaguuccugguuuuuaaua

SEQ ID NO: 496561 - RNA, 18 nt, Artificial Sequence
  Synthetic
uacggggaaaaaaacaua

SEQ ID NO: 496562 - RNA, 19 nt, Artificial Sequence
  Synthetic
auacggggaaaaaaacaua

SEQ ID NO: 496563 - RNA, 20 nt, Artificial Sequence
  Synthetic
aauacggggaaaaaaacaua

SEQ ID NO: 496564 - RNA, 21 nt, Artificial Sequence
  Synthetic
uaauacggggaaaaaaacaua

SEQ ID NO: 496565 - RNA, 22 nt, Artificial Sequence
  Synthetic
cuaauacggggaaaaaaacaua

SEQ ID NO: 496566 - RNA, 23 nt, Artificial Sequence
  Synthetic
gcuaauacggggaaaaaaacaua

SEQ ID NO: 496567 - RNA, 24 nt, Artificial Sequence
  Synthetic
ugcuaauacggggaaaaaaacaua

SEQ ID NO: 496568 - RNA, 18 nt, Artificial Sequence
  Synthetic
cucauagaagaaaacaua

SEQ ID NO: 496569 - RNA, 19 nt, Artificial Sequence
  Synthetic
acucauagaagaaaacaua

SEQ ID NO: 496570 - RNA, 20 nt, Artificial Sequence
  Synthetic
aacucauagaagaaaacaua

SEQ ID NO: 496571 - RNA, 21 nt, Artificial Sequence
  Synthetic
aaacucauagaagaaaacaua

SEQ ID NO: 496572 - RNA, 22 nt, Artificial Sequence
  Synthetic
gaaacucauagaagaaaacaua

SEQ ID NO: 496573 - RNA, 23 nt, Artificial Sequence
  Synthetic
ugaaacucauagaagaaaacaua

SEQ ID NO: 496574 - RNA, 24 nt, Artificial Sequence
  Synthetic
augaaacucauagaagaaaacaua

SEQ ID NO: 496575 - RNA, 18 nt, Artificial Sequence
  Synthetic
uuuugguaauaaaacaua

SEQ ID NO: 496576 - RNA, 19 nt, Artificial Sequence
  Synthetic
guuuugguaauaaaacaua

SEQ ID NO: 496577 - RNA, 20 nt, Artificial Sequence
  Synthetic
uguuuugguaauaaaacaua

SEQ ID NO: 496578 - RNA, 21 nt, Artificial Sequence
  Synthetic
cuguuuugguaauaaaacaua

SEQ ID NO: 496579 - RNA, 22 nt, Artificial Sequence
  Synthetic
ccuguuuugguaauaaaacaua

SEQ ID NO: 496580 - RNA, 23 nt, Artificial Sequence
  Synthetic
uccuguuuugguaauaaaacaua

SEQ ID NO: 496581 - RNA, 24 nt, Artificial Sequence
  Synthetic
cuccuguuuugguaauaaaacaua

SEQ ID NO: 496582 - RNA, 18 nt, Artificial Sequence
  Synthetic
uuaaagucauaaaacaua

SEQ ID NO: 496583 - RNA, 19 nt, Artificial Sequence
  Synthetic
auuaaagucauaaaacaua

SEQ ID NO: 496584 - RNA, 20 nt, Artificial Sequence
  Synthetic
uauuaaagucauaaaacaua

SEQ ID NO: 496585 - RNA, 21 nt, Artificial Sequence
  Synthetic
uuauuaaagucauaaaacaua

SEQ ID NO: 496586 - RNA, 22 nt, Artificial Sequence
  Synthetic
auuauuaaagucauaaaacaua

SEQ ID NO: 496587 - RNA, 23 nt, Artificial Sequence
  Synthetic
aauuauuaaagucauaaaacaua

SEQ ID NO: 496588 - RNA, 24 nt, Artificial Sequence
  Synthetic
aaauuauuaaagucauaaaacaua

SEQ ID NO: 496589 - RNA, 18 nt, Artificial Sequence
  Synthetic
aauauacuuuaaaacaua

SEQ ID NO: 496590 - RNA, 19 nt, Artificial Sequence
  Synthetic
gaauauacuuuaaaacaua

SEQ ID NO: 496591 - RNA, 20 nt, Artificial Sequence
  Synthetic
ggaauauacuuuaaaacaua

SEQ ID NO: 496592 - RNA, 21 nt, Artificial Sequence
  Synthetic
aggaauauacuuuaaaacaua

SEQ ID NO: 496593 - RNA, 22 nt, Artificial Sequence
  Synthetic
aaggaauauacuuuaaaacaua

SEQ ID NO: 496594 - RNA, 23 nt, Artificial Sequence
  Synthetic
caaggaauauacuuuaaaacaua

SEQ ID NO: 496595 - RNA, 24 nt, Artificial Sequence
  Synthetic
ucaaggaauauacuuuaaaacaua

SEQ ID NO: 496596 - RNA, 18 nt, Artificial Sequence
  Synthetic
caaaaucuuccaaacaua

SEQ ID NO: 496597 - RNA, 19 nt, Artificial Sequence
  Synthetic
gcaaaaucuuccaaacaua

SEQ ID NO: 496598 - RNA, 20 nt, Artificial Sequence
  Synthetic
agcaaaaucuuccaaacaua

SEQ ID NO: 496599 - RNA, 21 nt, Artificial Sequence
  Synthetic
aagcaaaaucuuccaaacaua

SEQ ID NO: 496600 - RNA, 22 nt, Artificial Sequence
  Synthetic
aaagcaaaaucuuccaaacaua

SEQ ID NO: 496601 - RNA, 23 nt, Artificial Sequence
  Synthetic
uaaagcaaaaucuuccaaacaua

SEQ ID NO: 496602 - RNA, 24 nt, Artificial Sequence
  Synthetic
cuaaagcaaaaucuuccaaacaua

SEQ ID NO: 496603 - RNA, 18 nt, Artificial Sequence
  Synthetic
uuccuauaugcaaacaua

SEQ ID NO: 496604 - RNA, 19 nt, Artificial Sequence
  Synthetic
cuuccuauaugcaaacaua

SEQ ID NO: 496605 - RNA, 20 nt, Artificial Sequence
  Synthetic
gcuuccuauaugcaaacaua

SEQ ID NO: 496606 - RNA, 21 nt, Artificial Sequence
  Synthetic
ugcuuccuauaugcaaacaua

SEQ ID NO: 496607 - RNA, 22 nt, Artificial Sequence
  Synthetic
uugcuuccuauaugcaaacaua

SEQ ID NO: 496608 - RNA, 23 nt, Artificial Sequence
  Synthetic
cuugcuuccuauaugcaaacaua

SEQ ID NO: 496609 - RNA, 24 nt, Artificial Sequence
  Synthetic
ucuugcuuccuauaugcaaacaua

SEQ ID NO: 496610 - RNA, 18 nt, Artificial Sequence
  Synthetic
cccuuaaaaagaaacaua

SEQ ID NO: 496611 - RNA, 19 nt, Artificial Sequence
  Synthetic
ccccuuaaaaagaaacaua

SEQ ID NO: 496612 - RNA, 20 nt, Artificial Sequence
  Synthetic
uccccuuaaaaagaaacaua

SEQ ID NO: 496613 - RNA, 21 nt, Artificial Sequence
  Synthetic
uuccccuuaaaaagaaacaua

SEQ ID NO: 496614 - RNA, 22 nt, Artificial Sequence
  Synthetic
uuuccccuuaaaaagaaacaua

SEQ ID NO: 496615 - RNA, 23 nt, Artificial Sequence
  Synthetic
cuuuccccuuaaaaagaaacaua

SEQ ID NO: 496616 - RNA, 24 nt, Artificial Sequence
  Synthetic
ucuuuccccuuaaaaagaaacaua

SEQ ID NO: 496617 - RNA, 18 nt, Artificial Sequence
  Synthetic
ccagcaauguuaaacaua

SEQ ID NO: 496618 - RNA, 19 nt, Artificial Sequence
  Synthetic
accagcaauguuaaacaua

SEQ ID NO: 496619 - RNA, 20 nt, Artificial Sequence
  Synthetic
aaccagcaauguuaaacaua

SEQ ID NO: 496620 - RNA, 21 nt, Artificial Sequence
  Synthetic
aaaccagcaauguuaaacaua

SEQ ID NO: 496621 - RNA, 22 nt, Artificial Sequence
  Synthetic
aaaaccagcaauguuaaacaua

SEQ ID NO: 496622 - RNA, 23 nt, Artificial Sequence
  Synthetic
uaaaaccagcaauguuaaacaua

SEQ ID NO: 496623 - RNA, 24 nt, Artificial Sequence
  Synthetic
auaaaaccagcaauguuaaacaua

SEQ ID NO: 496624 - RNA, 18 nt, Artificial Sequence
  Synthetic
accagccuggccaacaua

SEQ ID NO: 496625 - RNA, 19 nt, Artificial Sequence
  Synthetic
gaccagccuggccaacaua

SEQ ID NO: 496626 - RNA, 20 nt, Artificial Sequence
  Synthetic
agaccagccuggccaacaua

SEQ ID NO: 496627 - RNA, 21 nt, Artificial Sequence
  Synthetic
gagaccagccuggccaacaua

SEQ ID NO: 496628 - RNA, 22 nt, Artificial Sequence
  Synthetic
ugagaccagccuggccaacaua

SEQ ID NO: 496629 - RNA, 23 nt, Artificial Sequence
  Synthetic
uugagaccagccuggccaacaua

SEQ ID NO: 496630 - RNA, 24 nt, Artificial Sequence
  Synthetic
uuugagaccagccuggccaacaua

SEQ ID NO: 496631 - RNA, 18 nt, Artificial Sequence
  Synthetic
agccugggaggcaacaua

SEQ ID NO: 496632 - RNA, 19 nt, Artificial Sequence
  Synthetic
cagccugggaggcaacaua

SEQ ID NO: 496633 - RNA, 20 nt, Artificial Sequence
  Synthetic
ccagccugggaggcaacaua

SEQ ID NO: 496634 - RNA, 21 nt, Artificial Sequence
  Synthetic
accagccugggaggcaacaua

SEQ ID NO: 496635 - RNA, 22 nt, Artificial Sequence
  Synthetic
uaccagccugggaggcaacaua

SEQ ID NO: 496636 - RNA, 23 nt, Artificial Sequence
  Synthetic
auaccagccugggaggcaacaua

SEQ ID NO: 496637 - RNA, 24 nt, Artificial Sequence
  Synthetic
gauaccagccugggaggcaacaua

SEQ ID NO: 496638 - RNA, 18 nt, Artificial Sequence
  Synthetic
uccagccuaggcaacaua

SEQ ID NO: 496639 - RNA, 19 nt, Artificial Sequence
  Synthetic
cuccagccuaggcaacaua

SEQ ID NO: 496640 - RNA, 20 nt, Artificial Sequence
  Synthetic
acuccagccuaggcaacaua

SEQ ID NO: 496641 - RNA, 21 nt, Artificial Sequence
  Synthetic
cacuccagccuaggcaacaua

SEQ ID NO: 496642 - RNA, 22 nt, Artificial Sequence
  Synthetic
gcacuccagccuaggcaacaua

SEQ ID NO: 496643 - RNA, 23 nt, Artificial Sequence
  Synthetic
ugcacuccagccuaggcaacaua

SEQ ID NO: 496644 - RNA, 24 nt, Artificial Sequence
  Synthetic
cugcacuccagccuaggcaacaua

SEQ ID NO: 496645 - RNA, 18 nt, Artificial Sequence
  Synthetic
augagucaugucaacaua

SEQ ID NO: 496646 - RNA, 19 nt, Artificial Sequence
  Synthetic
aaugagucaugucaacaua

SEQ ID NO: 496647 - RNA, 20 nt, Artificial Sequence
  Synthetic
aaaugagucaugucaacaua

SEQ ID NO: 496648 - RNA, 21 nt, Artificial Sequence
  Synthetic
gaaaugagucaugucaacaua

SEQ ID NO: 496649 - RNA, 22 nt, Artificial Sequence
  Synthetic
agaaaugagucaugucaacaua

SEQ ID NO: 496650 - RNA, 23 nt, Artificial Sequence
  Synthetic
aagaaaugagucaugucaacaua

SEQ ID NO: 496651 - RNA, 24 nt, Artificial Sequence
  Synthetic
gaagaaaugagucaugucaacaua

SEQ ID NO: 496652 - RNA, 18 nt, Artificial Sequence
  Synthetic
guggauauccagaacaua

SEQ ID NO: 496653 - RNA, 19 nt, Artificial Sequence
  Synthetic
aguggauauccagaacaua

SEQ ID NO: 496654 - RNA, 20 nt, Artificial Sequence
  Synthetic
uaguggauauccagaacaua

SEQ ID NO: 496655 - RNA, 21 nt, Artificial Sequence
  Synthetic
auaguggauauccagaacaua

SEQ ID NO: 496656 - RNA, 22 nt, Artificial Sequence
  Synthetic
aauaguggauauccagaacaua

SEQ ID NO: 496657 - RNA, 23 nt, Artificial Sequence
  Synthetic
aaauaguggauauccagaacaua

SEQ ID NO: 496658 - RNA, 24 nt, Artificial Sequence
  Synthetic
caaauaguggauauccagaacaua

SEQ ID NO: 496659 - RNA, 18 nt, Artificial Sequence
  Synthetic
ugcucuguuuugaacaua

SEQ ID NO: 496660 - RNA, 19 nt, Artificial Sequence
  Synthetic
augcucuguuuugaacaua

SEQ ID NO: 496661 - RNA, 20 nt, Artificial Sequence
  Synthetic
aaugcucuguuuugaacaua

SEQ ID NO: 496662 - RNA, 21 nt, Artificial Sequence
  Synthetic
uaaugcucuguuuugaacaua

SEQ ID NO: 496663 - RNA, 22 nt, Artificial Sequence
  Synthetic
uuaaugcucuguuuugaacaua

SEQ ID NO: 496664 - RNA, 23 nt, Artificial Sequence
  Synthetic
auuaaugcucuguuuugaacaua

SEQ ID NO: 496665 - RNA, 24 nt, Artificial Sequence
  Synthetic
uauuaaugcucuguuuugaacaua

SEQ ID NO: 496666 - RNA, 18 nt, Artificial Sequence
  Synthetic
cagguugucaauaacaua

SEQ ID NO: 496667 - RNA, 19 nt, Artificial Sequence
  Synthetic
gcagguugucaauaacaua

SEQ ID NO: 496668 - RNA, 20 nt, Artificial Sequence
  Synthetic
ugcagguugucaauaacaua

SEQ ID NO: 496669 - RNA, 21 nt, Artificial Sequence
  Synthetic
gugcagguugucaauaacaua

SEQ ID NO: 496670 - RNA, 22 nt, Artificial Sequence
  Synthetic
ugugcagguugucaauaacaua

SEQ ID NO: 496671 - RNA, 23 nt, Artificial Sequence
  Synthetic
uugugcagguugucaauaacaua

SEQ ID NO: 496672 - RNA, 24 nt, Artificial Sequence
  Synthetic
uuugugcagguugucaauaacaua

SEQ ID NO: 496673 - RNA, 18 nt, Artificial Sequence
  Synthetic
gaaugcaaggauaacaua

SEQ ID NO: 496674 - RNA, 19 nt, Artificial Sequence
  Synthetic
ugaaugcaaggauaacaua

SEQ ID NO: 496675 - RNA, 20 nt, Artificial Sequence
  Synthetic
cugaaugcaaggauaacaua

SEQ ID NO: 496676 - RNA, 21 nt, Artificial Sequence
  Synthetic
acugaaugcaaggauaacaua

SEQ ID NO: 496677 - RNA, 22 nt, Artificial Sequence
  Synthetic
gacugaaugcaaggauaacaua

SEQ ID NO: 496678 - RNA, 23 nt, Artificial Sequence
  Synthetic
ugacugaaugcaaggauaacaua

SEQ ID NO: 496679 - RNA, 24 nt, Artificial Sequence
  Synthetic
cugacugaaugcaaggauaacaua

SEQ ID NO: 496680 - RNA, 18 nt, Artificial Sequence
  Synthetic
uuagcaagggguaacaua

SEQ ID NO: 496681 - RNA, 19 nt, Artificial Sequence
  Synthetic
auuagcaagggguaacaua

SEQ ID NO: 496682 - RNA, 20 nt, Artificial Sequence
  Synthetic
gauuagcaagggguaacaua

SEQ ID NO: 496683 - RNA, 21 nt, Artificial Sequence
  Synthetic
ugauuagcaagggguaacaua

SEQ ID NO: 496684 - RNA, 22 nt, Artificial Sequence
  Synthetic
gugauuagcaagggguaacaua

SEQ ID NO: 496685 - RNA, 23 nt, Artificial Sequence
  Synthetic
ggugauuagcaagggguaacaua

SEQ ID NO: 496686 - RNA, 24 nt, Artificial Sequence
  Synthetic
aggugauuagcaagggguaacaua

SEQ ID NO: 496687 - RNA, 18 nt, Artificial Sequence
  Synthetic
ccuuugcaggaacacaua

SEQ ID NO: 496688 - RNA, 19 nt, Artificial Sequence
  Synthetic
uccuuugcaggaacacaua

SEQ ID NO: 496689 - RNA, 20 nt, Artificial Sequence
  Synthetic
guccuuugcaggaacacaua

SEQ ID NO: 496690 - RNA, 21 nt, Artificial Sequence
  Synthetic
uguccuuugcaggaacacaua

SEQ ID NO: 496691 - RNA, 22 nt, Artificial Sequence
  Synthetic
auguccuuugcaggaacacaua

SEQ ID NO: 496692 - RNA, 23 nt, Artificial Sequence
  Synthetic
cauguccuuugcaggaacacaua

SEQ ID NO: 496693 - RNA, 24 nt, Artificial Sequence
  Synthetic
ucauguccuuugcaggaacacaua

SEQ ID NO: 496694 - RNA, 18 nt, Artificial Sequence
  Synthetic
uuuuaaaggagacacaua

SEQ ID NO: 496695 - RNA, 19 nt, Artificial Sequence
  Synthetic
uuuuuaaaggagacacaua

SEQ ID NO: 496696 - RNA, 20 nt, Artificial Sequence
  Synthetic
guuuuuaaaggagacacaua

SEQ ID NO: 496697 - RNA, 21 nt, Artificial Sequence
  Synthetic
gguuuuuaaaggagacacaua

SEQ ID NO: 496698 - RNA, 22 nt, Artificial Sequence
  Synthetic
ugguuuuuaaaggagacacaua

SEQ ID NO: 496699 - RNA, 23 nt, Artificial Sequence
  Synthetic
uugguuuuuaaaggagacacaua

SEQ ID NO: 496700 - RNA, 24 nt, Artificial Sequence
  Synthetic
auugguuuuuaaaggagacacaua

SEQ ID NO: 496701 - RNA, 18 nt, Artificial Sequence
  Synthetic
cuaguauaaugacacaua

SEQ ID NO: 496702 - RNA, 19 nt, Artificial Sequence
  Synthetic
acuaguauaaugacacaua

SEQ ID NO: 496703 - RNA, 20 nt, Artificial Sequence
  Synthetic
aacuaguauaaugacacaua

SEQ ID NO: 496704 - RNA, 21 nt, Artificial Sequence
  Synthetic
aaacuaguauaaugacacaua

SEQ ID NO: 496705 - RNA, 22 nt, Artificial Sequence
  Synthetic
uaaacuaguauaaugacacaua

SEQ ID NO: 496706 - RNA, 23 nt, Artificial Sequence
  Synthetic
auaaacuaguauaaugacacaua

SEQ ID NO: 496707 - RNA, 24 nt, Artificial Sequence
  Synthetic
aauaaacuaguauaaugacacaua

SEQ ID NO: 496708 - RNA, 18 nt, Artificial Sequence
  Synthetic
uacaaauaccuacacaua

SEQ ID NO: 496709 - RNA, 19 nt, Artificial Sequence
  Synthetic
auacaaauaccuacacaua

SEQ ID NO: 496710 - RNA, 20 nt, Artificial Sequence
  Synthetic
cauacaaauaccuacacaua

SEQ ID NO: 496711 - RNA, 21 nt, Artificial Sequence
  Synthetic
acauacaaauaccuacacaua

SEQ ID NO: 496712 - RNA, 22 nt, Artificial Sequence
  Synthetic
aacauacaaauaccuacacaua

SEQ ID NO: 496713 - RNA, 23 nt, Artificial Sequence
  Synthetic
aaacauacaaauaccuacacaua

SEQ ID NO: 496714 - RNA, 24 nt, Artificial Sequence
  Synthetic
gaaacauacaaauaccuacacaua

SEQ ID NO: 496715 - RNA, 18 nt, Artificial Sequence
  Synthetic
gcuuaucauaaccacaua

SEQ ID NO: 496716 - RNA, 19 nt, Artificial Sequence
  Synthetic
ugcuuaucauaaccacaua

SEQ ID NO: 496717 - RNA, 20 nt, Artificial Sequence
  Synthetic
cugcuuaucauaaccacaua

SEQ ID NO: 496718 - RNA, 21 nt, Artificial Sequence
  Synthetic
acugcuuaucauaaccacaua

SEQ ID NO: 496719 - RNA, 22 nt, Artificial Sequence
  Synthetic
uacugcuuaucauaaccacaua

SEQ ID NO: 496720 - RNA, 23 nt, Artificial Sequence
  Synthetic
cuacugcuuaucauaaccacaua

SEQ ID NO: 496721 - RNA, 24 nt, Artificial Sequence
  Synthetic
ucuacugcuuaucauaaccacaua

SEQ ID NO: 496722 - RNA, 18 nt, Artificial Sequence
  Synthetic
gaaggaaaugaccacaua

SEQ ID NO: 496723 - RNA, 19 nt, Artificial Sequence
  Synthetic
ugaaggaaaugaccacaua

SEQ ID NO: 496724 - RNA, 20 nt, Artificial Sequence
  Synthetic
gugaaggaaaugaccacaua

SEQ ID NO: 496725 - RNA, 21 nt, Artificial Sequence
  Synthetic
agugaaggaaaugaccacaua

SEQ ID NO: 496726 - RNA, 22 nt, Artificial Sequence
  Synthetic
cagugaaggaaaugaccacaua

SEQ ID NO: 496727 - RNA, 23 nt, Artificial Sequence
  Synthetic
ucagugaaggaaaugaccacaua

SEQ ID NO: 496728 - RNA, 24 nt, Artificial Sequence
  Synthetic
aucagugaaggaaaugaccacaua

SEQ ID NO: 496729 - RNA, 18 nt, Artificial Sequence
  Synthetic
ugaagaucagagcacaua

SEQ ID NO: 496730 - RNA, 19 nt, Artificial Sequence
  Synthetic
gugaagaucagagcacaua

SEQ ID NO: 496731 - RNA, 20 nt, Artificial Sequence
  Synthetic
ggugaagaucagagcacaua

SEQ ID NO: 496732 - RNA, 21 nt, Artificial Sequence
  Synthetic
uggugaagaucagagcacaua

SEQ ID NO: 496733 - RNA, 22 nt, Artificial Sequence
  Synthetic
guggugaagaucagagcacaua

SEQ ID NO: 496734 - RNA, 23 nt, Artificial Sequence
  Synthetic
aguggugaagaucagagcacaua

SEQ ID NO: 496735 - RNA, 24 nt, Artificial Sequence
  Synthetic
caguggugaagaucagagcacaua

SEQ ID NO: 496736 - RNA, 18 nt, Artificial Sequence
  Synthetic
auuguuaccuaucacaua

SEQ ID NO: 496737 - RNA, 19 nt, Artificial Sequence
  Synthetic
gauuguuaccuaucacaua

SEQ ID NO: 496738 - RNA, 20 nt, Artificial Sequence
  Synthetic
ugauuguuaccuaucacaua

SEQ ID NO: 496739 - RNA, 21 nt, Artificial Sequence
  Synthetic
gugauuguuaccuaucacaua

SEQ ID NO: 496740 - RNA, 22 nt, Artificial Sequence
  Synthetic
agugauuguuaccuaucacaua

SEQ ID NO: 496741 - RNA, 23 nt, Artificial Sequence
  Synthetic
uagugauuguuaccuaucacaua

SEQ ID NO: 496742 - RNA, 24 nt, Artificial Sequence
  Synthetic
guagugauuguuaccuaucacaua

SEQ ID NO: 496743 - RNA, 18 nt, Artificial Sequence
  Synthetic
acucgcauuuaucacaua

SEQ ID NO: 496744 - RNA, 19 nt, Artificial Sequence
  Synthetic
cacucgcauuuaucacaua

SEQ ID NO: 496745 - RNA, 20 nt, Artificial Sequence
  Synthetic
acacucgcauuuaucacaua

SEQ ID NO: 496746 - RNA, 21 nt, Artificial Sequence
  Synthetic
aacacucgcauuuaucacaua

SEQ ID NO: 496747 - RNA, 22 nt, Artificial Sequence
  Synthetic
caacacucgcauuuaucacaua

SEQ ID NO: 496748 - RNA, 23 nt, Artificial Sequence
  Synthetic
ucaacacucgcauuuaucacaua

SEQ ID NO: 496749 - RNA, 24 nt, Artificial Sequence
  Synthetic
uucaacacucgcauuuaucacaua

SEQ ID NO: 496750 - RNA, 18 nt, Artificial Sequence
  Synthetic
aguacauugauucacaua

SEQ ID NO: 496751 - RNA, 19 nt, Artificial Sequence
  Synthetic
aaguacauugauucacaua

SEQ ID NO: 496752 - RNA, 20 nt, Artificial Sequence
  Synthetic
caaguacauugauucacaua

SEQ ID NO: 496753 - RNA, 21 nt, Artificial Sequence
  Synthetic
acaaguacauugauucacaua

SEQ ID NO: 496754 - RNA, 22 nt, Artificial Sequence
  Synthetic
aacaaguacauugauucacaua

SEQ ID NO: 496755 - RNA, 23 nt, Artificial Sequence
  Synthetic
uaacaaguacauugauucacaua

SEQ ID NO: 496756 - RNA, 24 nt, Artificial Sequence
  Synthetic
uuaacaaguacauugauucacaua

SEQ ID NO: 496757 - RNA, 18 nt, Artificial Sequence
  Synthetic
cacacacacaaagacaua

SEQ ID NO: 496758 - RNA, 19 nt, Artificial Sequence
  Synthetic
acacacacacaaagacaua

SEQ ID NO: 496759 - RNA, 20 nt, Artificial Sequence
  Synthetic
cacacacacacaaagacaua

SEQ ID NO: 496760 - RNA, 21 nt, Artificial Sequence
  Synthetic
acacacacacacaaagacaua

SEQ ID NO: 496761 - RNA, 22 nt, Artificial Sequence
  Synthetic
cacacacacacacaaagacaua

SEQ ID NO: 496762 - RNA, 23 nt, Artificial Sequence
  Synthetic
acacacacacacacaaagacaua

SEQ ID NO: 496763 - RNA, 24 nt, Artificial Sequence
  Synthetic
cacacacacacacacaaagacaua

SEQ ID NO: 496764 - RNA, 18 nt, Artificial Sequence
  Synthetic
guuaguaaugucgacaua

SEQ ID NO: 496765 - RNA, 19 nt, Artificial Sequence
  Synthetic
uguuaguaaugucgacaua

SEQ ID NO: 496766 - RNA, 20 nt, Artificial Sequence
  Synthetic
cuguuaguaaugucgacaua

SEQ ID NO: 496767 - RNA, 21 nt, Artificial Sequence
  Synthetic
gcuguuaguaaugucgacaua

SEQ ID NO: 496768 - RNA, 22 nt, Artificial Sequence
  Synthetic
ugcuguuaguaaugucgacaua

SEQ ID NO: 496769 - RNA, 23 nt, Artificial Sequence
  Synthetic
gugcuguuaguaaugucgacaua

SEQ ID NO: 496770 - RNA, 24 nt, Artificial Sequence
  Synthetic
ggugcuguuaguaaugucgacaua

SEQ ID NO: 496771 - RNA, 18 nt, Artificial Sequence
  Synthetic
gagaguaagaaggacaua

SEQ ID NO: 496772 - RNA, 19 nt, Artificial Sequence
  Synthetic
agagaguaagaaggacaua

SEQ ID NO: 496773 - RNA, 20 nt, Artificial Sequence
  Synthetic
uagagaguaagaaggacaua

SEQ ID NO: 496774 - RNA, 21 nt, Artificial Sequence
  Synthetic
uuagagaguaagaaggacaua

SEQ ID NO: 496775 - RNA, 22 nt, Artificial Sequence
  Synthetic
uuuagagaguaagaaggacaua

SEQ ID NO: 496776 - RNA, 23 nt, Artificial Sequence
  Synthetic
auuuagagaguaagaaggacaua

SEQ ID NO: 496777 - RNA, 24 nt, Artificial Sequence
  Synthetic
uauuuagagaguaagaaggacaua

SEQ ID NO: 496778 - RNA, 18 nt, Artificial Sequence
  Synthetic
gcugucaagcaggacaua

SEQ ID NO: 496779 - RNA, 19 nt, Artificial Sequence
  Synthetic
ggcugucaagcaggacaua

SEQ ID NO: 496780 - RNA, 20 nt, Artificial Sequence
  Synthetic
aggcugucaagcaggacaua

SEQ ID NO: 496781 - RNA, 21 nt, Artificial Sequence
  Synthetic
gaggcugucaagcaggacaua

SEQ ID NO: 496782 - RNA, 22 nt, Artificial Sequence
  Synthetic
agaggcugucaagcaggacaua

SEQ ID NO: 496783 - RNA, 23 nt, Artificial Sequence
  Synthetic
aagaggcugucaagcaggacaua

SEQ ID NO: 496784 - RNA, 24 nt, Artificial Sequence
  Synthetic
aaagaggcugucaagcaggacaua

SEQ ID NO: 496785 - RNA, 18 nt, Artificial Sequence
  Synthetic
cuuggcacuacugacaua

SEQ ID NO: 496786 - RNA, 19 nt, Artificial Sequence
  Synthetic
acuuggcacuacugacaua

SEQ ID NO: 496787 - RNA, 20 nt, Artificial Sequence
  Synthetic
aacuuggcacuacugacaua

SEQ ID NO: 496788 - RNA, 21 nt, Artificial Sequence
  Synthetic
aaacuuggcacuacugacaua

SEQ ID NO: 496789 - RNA, 22 nt, Artificial Sequence
  Synthetic
gaaacuuggcacuacugacaua

SEQ ID NO: 496790 - RNA, 23 nt, Artificial Sequence
  Synthetic
ugaaacuuggcacuacugacaua

SEQ ID NO: 496791 - RNA, 24 nt, Artificial Sequence
  Synthetic
cugaaacuuggcacuacugacaua

SEQ ID NO: 496792 - RNA, 18 nt, Artificial Sequence
  Synthetic
aggagaaugagugacaua

SEQ ID NO: 496793 - RNA, 19 nt, Artificial Sequence
  Synthetic
gaggagaaugagugacaua

SEQ ID NO: 496794 - RNA, 20 nt, Artificial Sequence
  Synthetic
ggaggagaaugagugacaua

SEQ ID NO: 496795 - RNA, 21 nt, Artificial Sequence
  Synthetic
aggaggagaaugagugacaua

SEQ ID NO: 496796 - RNA, 22 nt, Artificial Sequence
  Synthetic
caggaggagaaugagugacaua

SEQ ID NO: 496797 - RNA, 23 nt, Artificial Sequence
  Synthetic
ucaggaggagaaugagugacaua

SEQ ID NO: 496798 - RNA, 24 nt, Artificial Sequence
  Synthetic
cucaggaggagaaugagugacaua

SEQ ID NO: 496799 - RNA, 18 nt, Artificial Sequence
  Synthetic
gaaauagagaaauacaua

SEQ ID NO: 496800 - RNA, 19 nt, Artificial Sequence
  Synthetic
agaaauagagaaauacaua

SEQ ID NO: 496801 - RNA, 20 nt, Artificial Sequence
  Synthetic
gagaaauagagaaauacaua

SEQ ID NO: 496802 - RNA, 21 nt, Artificial Sequence
  Synthetic
ugagaaauagagaaauacaua

SEQ ID NO: 496803 - RNA, 22 nt, Artificial Sequence
  Synthetic
cugagaaauagagaaauacaua

SEQ ID NO: 496804 - RNA, 23 nt, Artificial Sequence
  Synthetic
gcugagaaauagagaaauacaua

SEQ ID NO: 496805 - RNA, 24 nt, Artificial Sequence
  Synthetic
ugcugagaaauagagaaauacaua

SEQ ID NO: 496806 - RNA, 18 nt, Artificial Sequence
  Synthetic
gguuucuagacauacaua

SEQ ID NO: 496807 - RNA, 19 nt, Artificial Sequence
  Synthetic
agguuucuagacauacaua

SEQ ID NO: 496808 - RNA, 20 nt, Artificial Sequence
  Synthetic
gagguuucuagacauacaua

SEQ ID NO: 496809 - RNA, 21 nt, Artificial Sequence
  Synthetic
ggagguuucuagacauacaua

SEQ ID NO: 496810 - RNA, 22 nt, Artificial Sequence
  Synthetic
aggagguuucuagacauacaua

SEQ ID NO: 496811 - RNA, 23 nt, Artificial Sequence
  Synthetic
caggagguuucuagacauacaua

SEQ ID NO: 496812 - RNA, 24 nt, Artificial Sequence
  Synthetic
acaggagguuucuagacauacaua

SEQ ID NO: 496813 - RNA, 18 nt, Artificial Sequence
  Synthetic
ccgaacaggccauacaua

SEQ ID NO: 496814 - RNA, 19 nt, Artificial Sequence
  Synthetic
gccgaacaggccauacaua

SEQ ID NO: 496815 - RNA, 20 nt, Artificial Sequence
  Synthetic
ugccgaacaggccauacaua

SEQ ID NO: 496816 - RNA, 21 nt, Artificial Sequence
  Synthetic
uugccgaacaggccauacaua

SEQ ID NO: 496817 - RNA, 22 nt, Artificial Sequence
  Synthetic
cuugccgaacaggccauacaua

SEQ ID NO: 496818 - RNA, 23 nt, Artificial Sequence
  Synthetic
gcuugccgaacaggccauacaua

SEQ ID NO: 496819 - RNA, 24 nt, Artificial Sequence
  Synthetic
ugcuugccgaacaggccauacaua

SEQ ID NO: 496820 - RNA, 18 nt, Artificial Sequence
  Synthetic
cccaacaucauauacaua

SEQ ID NO: 496821 - RNA, 19 nt, Artificial Sequence
  Synthetic
acccaacaucauauacaua

SEQ ID NO: 496822 - RNA, 20 nt, Artificial Sequence
  Synthetic
cacccaacaucauauacaua

SEQ ID NO: 496823 - RNA, 21 nt, Artificial Sequence
  Synthetic
ccacccaacaucauauacaua

SEQ ID NO: 496824 - RNA, 22 nt, Artificial Sequence
  Synthetic
cccacccaacaucauauacaua

SEQ ID NO: 496825 - RNA, 23 nt, Artificial Sequence
  Synthetic
acccacccaacaucauauacaua

SEQ ID NO: 496826 - RNA, 24 nt, Artificial Sequence
  Synthetic
aacccacccaacaucauauacaua

SEQ ID NO: 496827 - RNA, 18 nt, Artificial Sequence
  Synthetic
uauauguauguauacaua

SEQ ID NO: 496828 - RNA, 19 nt, Artificial Sequence
  Synthetic
auauauguauguauacaua

SEQ ID NO: 496829 - RNA, 20 nt, Artificial Sequence
  Synthetic
uauauauguauguauacaua

SEQ ID NO: 496830 - RNA, 21 nt, Artificial Sequence
  Synthetic
auauauauguauguauacaua

SEQ ID NO: 496831 - RNA, 22 nt, Artificial Sequence
  Synthetic
uauauauauguauguauacaua

SEQ ID NO: 496832 - RNA, 23 nt, Artificial Sequence
  Synthetic
auauauauauguauguauacaua

SEQ ID NO: 496833 - RNA, 24 nt, Artificial Sequence
  Synthetic
uauauauauauguauguauacaua

SEQ ID NO: 496834 - RNA, 18 nt, Artificial Sequence
  Synthetic
uggauuguuuuauacaua

SEQ ID NO: 496835 - RNA, 19 nt, Artificial Sequence
  Synthetic
uuggauuguuuuauacaua

SEQ ID NO: 496836 - RNA, 20 nt, Artificial Sequence
  Synthetic
uuuggauuguuuuauacaua

SEQ ID NO: 496837 - RNA, 21 nt, Artificial Sequence
  Synthetic
auuuggauuguuuuauacaua

SEQ ID NO: 496838 - RNA, 22 nt, Artificial Sequence
  Synthetic
cauuuggauuguuuuauacaua

SEQ ID NO: 496839 - RNA, 23 nt, Artificial Sequence
  Synthetic
gcauuuggauuguuuuauacaua

SEQ ID NO: 496840 - RNA, 24 nt, Artificial Sequence
  Synthetic
agcauuuggauuguuuuauacaua

SEQ ID NO: 496841 - RNA, 18 nt, Artificial Sequence
  Synthetic
guaauuauuaacuacaua

SEQ ID NO: 496842 - RNA, 19 nt, Artificial Sequence
  Synthetic
uguaauuauuaacuacaua

SEQ ID NO: 496843 - RNA, 20 nt, Artificial Sequence
  Synthetic
cuguaauuauuaacuacaua

SEQ ID NO: 496844 - RNA, 21 nt, Artificial Sequence
  Synthetic
gcuguaauuauuaacuacaua

SEQ ID NO: 496845 - RNA, 22 nt, Artificial Sequence
  Synthetic
ugcuguaauuauuaacuacaua

SEQ ID NO: 496846 - RNA, 23 nt, Artificial Sequence
  Synthetic
uugcuguaauuauuaacuacaua

SEQ ID NO: 496847 - RNA, 24 nt, Artificial Sequence
  Synthetic
uuugcuguaauuauuaacuacaua

SEQ ID NO: 496848 - RNA, 18 nt, Artificial Sequence
  Synthetic
gaacaagcaaccuacaua

SEQ ID NO: 496849 - RNA, 19 nt, Artificial Sequence
  Synthetic
ugaacaagcaaccuacaua

SEQ ID NO: 496850 - RNA, 20 nt, Artificial Sequence
  Synthetic
gugaacaagcaaccuacaua

SEQ ID NO: 496851 - RNA, 21 nt, Artificial Sequence
  Synthetic
agugaacaagcaaccuacaua

SEQ ID NO: 496852 - RNA, 22 nt, Artificial Sequence
  Synthetic
gagugaacaagcaaccuacaua

SEQ ID NO: 496853 - RNA, 23 nt, Artificial Sequence
  Synthetic
agagugaacaagcaaccuacaua

SEQ ID NO: 496854 - RNA, 24 nt, Artificial Sequence
  Synthetic
cagagugaacaagcaaccuacaua

SEQ ID NO: 496855 - RNA, 18 nt, Artificial Sequence
  Synthetic
cuauguggagucuacaua

SEQ ID NO: 496856 - RNA, 19 nt, Artificial Sequence
  Synthetic
ucuauguggagucuacaua

SEQ ID NO: 496857 - RNA, 20 nt, Artificial Sequence
  Synthetic
gucuauguggagucuacaua

SEQ ID NO: 496858 - RNA, 21 nt, Artificial Sequence
  Synthetic
agucuauguggagucuacaua

SEQ ID NO: 496859 - RNA, 22 nt, Artificial Sequence
  Synthetic
uagucuauguggagucuacaua

SEQ ID NO: 496860 - RNA, 23 nt, Artificial Sequence
  Synthetic
auagucuauguggagucuacaua

SEQ ID NO: 496861 - RNA, 24 nt, Artificial Sequence
  Synthetic
cauagucuauguggagucuacaua

SEQ ID NO: 496862 - RNA, 18 nt, Artificial Sequence
  Synthetic
aaaaacgaccaguacaua

SEQ ID NO: 496863 - RNA, 19 nt, Artificial Sequence
  Synthetic
caaaaacgaccaguacaua

SEQ ID NO: 496864 - RNA, 20 nt, Artificial Sequence
  Synthetic
acaaaaacgaccaguacaua

SEQ ID NO: 496865 - RNA, 21 nt, Artificial Sequence
  Synthetic
aacaaaaacgaccaguacaua

SEQ ID NO: 496866 - RNA, 22 nt, Artificial Sequence
  Synthetic
aaacaaaaacgaccaguacaua

SEQ ID NO: 496867 - RNA, 23 nt, Artificial Sequence
  Synthetic
aaaacaaaaacgaccaguacaua

SEQ ID NO: 496868 - RNA, 24 nt, Artificial Sequence
  Synthetic
caaaacaaaaacgaccaguacaua

SEQ ID NO: 496869 - RNA, 18 nt, Artificial Sequence
  Synthetic
augacuacuggguacaua

SEQ ID NO: 496870 - RNA, 19 nt, Artificial Sequence
  Synthetic
aaugacuacuggguacaua

SEQ ID NO: 496871 - RNA, 20 nt, Artificial Sequence
  Synthetic
gaaugacuacuggguacaua

SEQ ID NO: 496872 - RNA, 21 nt, Artificial Sequence
  Synthetic
ugaaugacuacuggguacaua

SEQ ID NO: 496873 - RNA, 22 nt, Artificial Sequence
  Synthetic
cugaaugacuacuggguacaua

SEQ ID NO: 496874 - RNA, 23 nt, Artificial Sequence
  Synthetic
ccugaaugacuacuggguacaua

SEQ ID NO: 496875 - RNA, 24 nt, Artificial Sequence
  Synthetic
uccugaaugacuacuggguacaua

SEQ ID NO: 496876 - RNA, 18 nt, Artificial Sequence
  Synthetic
uauucacugcuguacaua

SEQ ID NO: 496877 - RNA, 19 nt, Artificial Sequence
  Synthetic
auauucacugcuguacaua

SEQ ID NO: 496878 - RNA, 20 nt, Artificial Sequence
  Synthetic
aauauucacugcuguacaua

SEQ ID NO: 496879 - RNA, 21 nt, Artificial Sequence
  Synthetic
gaauauucacugcuguacaua

SEQ ID NO: 496880 - RNA, 22 nt, Artificial Sequence
  Synthetic
ggaauauucacugcuguacaua

SEQ ID NO: 496881 - RNA, 23 nt, Artificial Sequence
  Synthetic
uggaauauucacugcuguacaua

SEQ ID NO: 496882 - RNA, 24 nt, Artificial Sequence
  Synthetic
uuggaauauucacugcuguacaua

SEQ ID NO: 496883 - RNA, 18 nt, Artificial Sequence
  Synthetic
gacaucaaaaauuacaua

SEQ ID NO: 496884 - RNA, 19 nt, Artificial Sequence
  Synthetic
ggacaucaaaaauuacaua

SEQ ID NO: 496885 - RNA, 20 nt, Artificial Sequence
  Synthetic
gggacaucaaaaauuacaua

SEQ ID NO: 496886 - RNA, 21 nt, Artificial Sequence
  Synthetic
ugggacaucaaaaauuacaua

SEQ ID NO: 496887 - RNA, 22 nt, Artificial Sequence
  Synthetic
uugggacaucaaaaauuacaua

SEQ ID NO: 496888 - RNA, 23 nt, Artificial Sequence
  Synthetic
cuugggacaucaaaaauuacaua

SEQ ID NO: 496889 - RNA, 24 nt, Artificial Sequence
  Synthetic
acuugggacaucaaaaauuacaua

SEQ ID NO: 496890 - RNA, 18 nt, Artificial Sequence
  Synthetic
auaguaaggaauuacaua

SEQ ID NO: 496891 - RNA, 19 nt, Artificial Sequence
  Synthetic
uauaguaaggaauuacaua

SEQ ID NO: 496892 - RNA, 20 nt, Artificial Sequence
  Synthetic
auauaguaaggaauuacaua

SEQ ID NO: 496893 - RNA, 21 nt, Artificial Sequence
  Synthetic
aauauaguaaggaauuacaua

SEQ ID NO: 496894 - RNA, 22 nt, Artificial Sequence
  Synthetic
caauauaguaaggaauuacaua

SEQ ID NO: 496895 - RNA, 23 nt, Artificial Sequence
  Synthetic
ucaauauaguaaggaauuacaua

SEQ ID NO: 496896 - RNA, 24 nt, Artificial Sequence
  Synthetic
aucaauauaguaaggaauuacaua

SEQ ID NO: 496897 - RNA, 18 nt, Artificial Sequence
  Synthetic
cuuuuuauugauuacaua

SEQ ID NO: 496898 - RNA, 19 nt, Artificial Sequence
  Synthetic
acuuuuuauugauuacaua

SEQ ID NO: 496899 - RNA, 20 nt, Artificial Sequence
  Synthetic
uacuuuuuauugauuacaua

SEQ ID NO: 496900 - RNA, 21 nt, Artificial Sequence
  Synthetic
auacuuuuuauugauuacaua

SEQ ID NO: 496901 - RNA, 22 nt, Artificial Sequence
  Synthetic
aauacuuuuuauugauuacaua

SEQ ID NO: 496902 - RNA, 23 nt, Artificial Sequence
  Synthetic
uaauacuuuuuauugauuacaua

SEQ ID NO: 496903 - RNA, 24 nt, Artificial Sequence
  Synthetic
uuaauacuuuuuauugauuacaua

SEQ ID NO: 496904 - RNA, 18 nt, Artificial Sequence
  Synthetic
uuuccaggaacuuacaua

SEQ ID NO: 496905 - RNA, 19 nt, Artificial Sequence
  Synthetic
auuuccaggaacuuacaua

SEQ ID NO: 496906 - RNA, 20 nt, Artificial Sequence
  Synthetic
gauuuccaggaacuuacaua

SEQ ID NO: 496907 - RNA, 21 nt, Artificial Sequence
  Synthetic
ggauuuccaggaacuuacaua

SEQ ID NO: 496908 - RNA, 22 nt, Artificial Sequence
  Synthetic
uggauuuccaggaacuuacaua

SEQ ID NO: 496909 - RNA, 23 nt, Artificial Sequence
  Synthetic
auggauuuccaggaacuuacaua

SEQ ID NO: 496910 - RNA, 24 nt, Artificial Sequence
  Synthetic
aauggauuuccaggaacuuacaua

SEQ ID NO: 496911 - RNA, 18 nt, Artificial Sequence
  Synthetic
auaaacugcuuuuacaua

SEQ ID NO: 496912 - RNA, 19 nt, Artificial Sequence
  Synthetic
aauaaacugcuuuuacaua

SEQ ID NO: 496913 - RNA, 20 nt, Artificial Sequence
  Synthetic
gaauaaacugcuuuuacaua

SEQ ID NO: 496914 - RNA, 21 nt, Artificial Sequence
  Synthetic
agaauaaacugcuuuuacaua

SEQ ID NO: 496915 - RNA, 22 nt, Artificial Sequence
  Synthetic
uagaauaaacugcuuuuacaua

SEQ ID NO: 496916 - RNA, 23 nt, Artificial Sequence
  Synthetic
auagaauaaacugcuuuuacaua

SEQ ID NO: 496917 - RNA, 24 nt, Artificial Sequence
  Synthetic
aauagaauaaacugcuuuuacaua

SEQ ID NO: 496918 - RNA, 18 nt, Artificial Sequence
  Synthetic
uaccaagauuaaaccaua

SEQ ID NO: 496919 - RNA, 19 nt, Artificial Sequence
  Synthetic
cuaccaagauuaaaccaua

SEQ ID NO: 496920 - RNA, 20 nt, Artificial Sequence
  Synthetic
ccuaccaagauuaaaccaua

SEQ ID NO: 496921 - RNA, 21 nt, Artificial Sequence
  Synthetic
accuaccaagauuaaaccaua

SEQ ID NO: 496922 - RNA, 22 nt, Artificial Sequence
  Synthetic
aaccuaccaagauuaaaccaua

SEQ ID NO: 496923 - RNA, 23 nt, Artificial Sequence
  Synthetic
caaccuaccaagauuaaaccaua

SEQ ID NO: 496924 - RNA, 24 nt, Artificial Sequence
  Synthetic
acaaccuaccaagauuaaaccaua

SEQ ID NO: 496925 - RNA, 18 nt, Artificial Sequence
  Synthetic
gcagcuagaagaaccaua

SEQ ID NO: 496926 - RNA, 19 nt, Artificial Sequence
  Synthetic
ugcagcuagaagaaccaua

SEQ ID NO: 496927 - RNA, 20 nt, Artificial Sequence
  Synthetic
augcagcuagaagaaccaua

SEQ ID NO: 496928 - RNA, 21 nt, Artificial Sequence
  Synthetic
aaugcagcuagaagaaccaua

SEQ ID NO: 496929 - RNA, 22 nt, Artificial Sequence
  Synthetic
uaaugcagcuagaagaaccaua

SEQ ID NO: 496930 - RNA, 23 nt, Artificial Sequence
  Synthetic
auaaugcagcuagaagaaccaua

SEQ ID NO: 496931 - RNA, 24 nt, Artificial Sequence
  Synthetic
aauaaugcagcuagaagaaccaua

SEQ ID NO: 496932 - RNA, 18 nt, Artificial Sequence
  Synthetic
accagccuggccaccaua

SEQ ID NO: 496933 - RNA, 19 nt, Artificial Sequence
  Synthetic
gaccagccuggccaccaua

SEQ ID NO: 496934 - RNA, 20 nt, Artificial Sequence
  Synthetic
agaccagccuggccaccaua

SEQ ID NO: 496935 - RNA, 21 nt, Artificial Sequence
  Synthetic
gagaccagccuggccaccaua

SEQ ID NO: 496936 - RNA, 22 nt, Artificial Sequence
  Synthetic
ugagaccagccuggccaccaua

SEQ ID NO: 496937 - RNA, 23 nt, Artificial Sequence
  Synthetic
uugagaccagccuggccaccaua

SEQ ID NO: 496938 - RNA, 24 nt, Artificial Sequence
  Synthetic
uuugagaccagccuggccaccaua

SEQ ID NO: 496939 - RNA, 18 nt, Artificial Sequence
  Synthetic
uauccccgaggcaccaua

SEQ ID NO: 496940 - RNA, 19 nt, Artificial Sequence
  Synthetic
auauccccgaggcaccaua

SEQ ID NO: 496941 - RNA, 20 nt, Artificial Sequence
  Synthetic
cauauccccgaggcaccaua

SEQ ID NO: 496942 - RNA, 21 nt, Artificial Sequence
  Synthetic
acauauccccgaggcaccaua

SEQ ID NO: 496943 - RNA, 22 nt, Artificial Sequence
  Synthetic
uacauauccccgaggcaccaua

SEQ ID NO: 496944 - RNA, 23 nt, Artificial Sequence
  Synthetic
uuacauauccccgaggcaccaua

SEQ ID NO: 496945 - RNA, 24 nt, Artificial Sequence
  Synthetic
cuuacauauccccgaggcaccaua

SEQ ID NO: 496946 - RNA, 18 nt, Artificial Sequence
  Synthetic
gaaggaugagagaccaua

SEQ ID NO: 496947 - RNA, 19 nt, Artificial Sequence
  Synthetic
cgaaggaugagagaccaua

SEQ ID NO: 496948 - RNA, 20 nt, Artificial Sequence
  Synthetic
ccgaaggaugagagaccaua

SEQ ID NO: 496949 - RNA, 21 nt, Artificial Sequence
  Synthetic
gccgaaggaugagagaccaua

SEQ ID NO: 496950 - RNA, 22 nt, Artificial Sequence
  Synthetic
ugccgaaggaugagagaccaua

SEQ ID NO: 496951 - RNA, 23 nt, Artificial Sequence
  Synthetic
uugccgaaggaugagagaccaua

SEQ ID NO: 496952 - RNA, 24 nt, Artificial Sequence
  Synthetic
cuugccgaaggaugagagaccaua

SEQ ID NO: 496953 - RNA, 18 nt, Artificial Sequence
  Synthetic
ccuuaacauuauaccaua

SEQ ID NO: 496954 - RNA, 19 nt, Artificial Sequence
  Synthetic
uccuuaacauuauaccaua

SEQ ID NO: 496955 - RNA, 20 nt, Artificial Sequence
  Synthetic
uuccuuaacauuauaccaua

SEQ ID NO: 496956 - RNA, 21 nt, Artificial Sequence
  Synthetic
auuccuuaacauuauaccaua

SEQ ID NO: 496957 - RNA, 22 nt, Artificial Sequence
  Synthetic
cauuccuuaacauuauaccaua

SEQ ID NO: 496958 - RNA, 23 nt, Artificial Sequence
  Synthetic
ucauuccuuaacauuauaccaua

SEQ ID NO: 496959 - RNA, 24 nt, Artificial Sequence
  Synthetic
cucauuccuuaacauuauaccaua

SEQ ID NO: 496960 - RNA, 18 nt, Artificial Sequence
  Synthetic
ggaaaggcaguuaccaua

SEQ ID NO: 496961 - RNA, 19 nt, Artificial Sequence
  Synthetic
aggaaaggcaguuaccaua

SEQ ID NO: 496962 - RNA, 20 nt, Artificial Sequence
  Synthetic
aaggaaaggcaguuaccaua

SEQ ID NO: 496963 - RNA, 21 nt, Artificial Sequence
  Synthetic
caaggaaaggcaguuaccaua

SEQ ID NO: 496964 - RNA, 22 nt, Artificial Sequence
  Synthetic
acaaggaaaggcaguuaccaua

SEQ ID NO: 496965 - RNA, 23 nt, Artificial Sequence
  Synthetic
aacaaggaaaggcaguuaccaua

SEQ ID NO: 496966 - RNA, 24 nt, Artificial Sequence
  Synthetic
aaacaaggaaaggcaguuaccaua

SEQ ID NO: 496967 - RNA, 18 nt, Artificial Sequence
  Synthetic
uaaaucaagaaacccaua

SEQ ID NO: 496968 - RNA, 19 nt, Artificial Sequence
  Synthetic
uuaaaucaagaaacccaua

SEQ ID NO: 496969 - RNA, 20 nt, Artificial Sequence
  Synthetic
auuaaaucaagaaacccaua

SEQ ID NO: 496970 - RNA, 21 nt, Artificial Sequence
  Synthetic
aauuaaaucaagaaacccaua

SEQ ID NO: 496971 - RNA, 22 nt, Artificial Sequence
  Synthetic
caauuaaaucaagaaacccaua

SEQ ID NO: 496972 - RNA, 23 nt, Artificial Sequence
  Synthetic
acaauuaaaucaagaaacccaua

SEQ ID NO: 496973 - RNA, 24 nt, Artificial Sequence
  Synthetic
aacaauuaaaucaagaaacccaua

SEQ ID NO: 496974 - RNA, 18 nt, Artificial Sequence
  Synthetic
ucauuuacuuuacccaua

SEQ ID NO: 496975 - RNA, 19 nt, Artificial Sequence
  Synthetic
cucauuuacuuuacccaua

SEQ ID NO: 496976 - RNA, 20 nt, Artificial Sequence
  Synthetic
ucucauuuacuuuacccaua

SEQ ID NO: 496977 - RNA, 21 nt, Artificial Sequence
  Synthetic
uucucauuuacuuuacccaua

SEQ ID NO: 496978 - RNA, 22 nt, Artificial Sequence
  Synthetic
auucucauuuacuuuacccaua

SEQ ID NO: 496979 - RNA, 23 nt, Artificial Sequence
  Synthetic
aauucucauuuacuuuacccaua

SEQ ID NO: 496980 - RNA, 24 nt, Artificial Sequence
  Synthetic
aaauucucauuuacuuuacccaua

SEQ ID NO: 496981 - RNA, 18 nt, Artificial Sequence
  Synthetic
uguuguaccaggcccaua

SEQ ID NO: 496982 - RNA, 19 nt, Artificial Sequence
  Synthetic
uuguuguaccaggcccaua

SEQ ID NO: 496983 - RNA, 20 nt, Artificial Sequence
  Synthetic
auuguuguaccaggcccaua

SEQ ID NO: 496984 - RNA, 21 nt, Artificial Sequence
  Synthetic
uauuguuguaccaggcccaua

SEQ ID NO: 496985 - RNA, 22 nt, Artificial Sequence
  Synthetic
uuauuguuguaccaggcccaua

SEQ ID NO: 496986 - RNA, 23 nt, Artificial Sequence
  Synthetic
uuuauuguuguaccaggcccaua

SEQ ID NO: 496987 - RNA, 24 nt, Artificial Sequence
  Synthetic
cuuuauuguuguaccaggcccaua

SEQ ID NO: 496988 - RNA, 18 nt, Artificial Sequence
  Synthetic
gauuuuauuugucccaua

SEQ ID NO: 496989 - RNA, 19 nt, Artificial Sequence
  Synthetic
agauuuuauuugucccaua

SEQ ID NO: 496990 - RNA, 20 nt, Artificial Sequence
  Synthetic
uagauuuuauuugucccaua

SEQ ID NO: 496991 - RNA, 21 nt, Artificial Sequence
  Synthetic
uuagauuuuauuugucccaua

SEQ ID NO: 496992 - RNA, 22 nt, Artificial Sequence
  Synthetic
guuagauuuuauuugucccaua

SEQ ID NO: 496993 - RNA, 23 nt, Artificial Sequence
  Synthetic
aguuagauuuuauuugucccaua

SEQ ID NO: 496994 - RNA, 24 nt, Artificial Sequence
  Synthetic
aaguuagauuuuauuugucccaua

SEQ ID NO: 496995 - RNA, 18 nt, Artificial Sequence
  Synthetic
uauguauugcuucccaua

SEQ ID NO: 496996 - RNA, 19 nt, Artificial Sequence
  Synthetic
guauguauugcuucccaua

SEQ ID NO: 496997 - RNA, 20 nt, Artificial Sequence
  Synthetic
aguauguauugcuucccaua

SEQ ID NO: 496998 - RNA, 21 nt, Artificial Sequence
  Synthetic
aaguauguauugcuucccaua

SEQ ID NO: 496999 - RNA, 22 nt, Artificial Sequence
  Synthetic
gaaguauguauugcuucccaua

SEQ ID NO: 497000 - RNA, 23 nt, Artificial Sequence
  Synthetic
ggaaguauguauugcuucccaua

SEQ ID NO: 497001 - RNA, 24 nt, Artificial Sequence
  Synthetic
gggaaguauguauugcuucccaua

SEQ ID NO: 497002 - RNA, 18 nt, Artificial Sequence
  Synthetic
gagcugaaauuucccaua

SEQ ID NO: 497003 - RNA, 19 nt, Artificial Sequence
  Synthetic
ggagcugaaauuucccaua

SEQ ID NO: 497004 - RNA, 20 nt, Artificial Sequence
  Synthetic
gggagcugaaauuucccaua

SEQ ID NO: 497005 - RNA, 21 nt, Artificial Sequence
  Synthetic
agggagcugaaauuucccaua

SEQ ID NO: 497006 - RNA, 22 nt, Artificial Sequence
  Synthetic
uagggagcugaaauuucccaua

SEQ ID NO: 497007 - RNA, 23 nt, Artificial Sequence
  Synthetic
uuagggagcugaaauuucccaua

SEQ ID NO: 497008 - RNA, 24 nt, Artificial Sequence
  Synthetic
uuuagggagcugaaauuucccaua

SEQ ID NO: 497009 - RNA, 18 nt, Artificial Sequence
  Synthetic
caauucauguuucccaua

SEQ ID NO: 497010 - RNA, 19 nt, Artificial Sequence
  Synthetic
ucaauucauguuucccaua

SEQ ID NO: 497011 - RNA, 20 nt, Artificial Sequence
  Synthetic
uucaauucauguuucccaua

SEQ ID NO: 497012 - RNA, 21 nt, Artificial Sequence
  Synthetic
guucaauucauguuucccaua

SEQ ID NO: 497013 - RNA, 22 nt, Artificial Sequence
  Synthetic
uguucaauucauguuucccaua

SEQ ID NO: 497014 - RNA, 23 nt, Artificial Sequence
  Synthetic
cuguucaauucauguuucccaua

SEQ ID NO: 497015 - RNA, 24 nt, Artificial Sequence
  Synthetic
gcuguucaauucauguuucccaua

SEQ ID NO: 497016 - RNA, 18 nt, Artificial Sequence
  Synthetic
gaggccuccccagccaua

SEQ ID NO: 497017 - RNA, 19 nt, Artificial Sequence
  Synthetic
ugaggccuccccagccaua

SEQ ID NO: 497018 - RNA, 20 nt, Artificial Sequence
  Synthetic
cugaggccuccccagccaua

SEQ ID NO: 497019 - RNA, 21 nt, Artificial Sequence
  Synthetic
ccugaggccuccccagccaua

SEQ ID NO: 497020 - RNA, 22 nt, Artificial Sequence
  Synthetic
uccugaggccuccccagccaua

SEQ ID NO: 497021 - RNA, 23 nt, Artificial Sequence
  Synthetic
uuccugaggccuccccagccaua

SEQ ID NO: 497022 - RNA, 24 nt, Artificial Sequence
  Synthetic
uuuccugaggccuccccagccaua

SEQ ID NO: 497023 - RNA, 18 nt, Artificial Sequence
  Synthetic
caggcagucccagccaua

SEQ ID NO: 497024 - RNA, 19 nt, Artificial Sequence
  Synthetic
acaggcagucccagccaua

SEQ ID NO: 497025 - RNA, 20 nt, Artificial Sequence
  Synthetic
gacaggcagucccagccaua

SEQ ID NO: 497026 - RNA, 21 nt, Artificial Sequence
  Synthetic
ggacaggcagucccagccaua

SEQ ID NO: 497027 - RNA, 22 nt, Artificial Sequence
  Synthetic
uggacaggcagucccagccaua

SEQ ID NO: 497028 - RNA, 23 nt, Artificial Sequence
  Synthetic
guggacaggcagucccagccaua

SEQ ID NO: 497029 - RNA, 24 nt, Artificial Sequence
  Synthetic
aguggacaggcagucccagccaua

SEQ ID NO: 497030 - RNA, 18 nt, Artificial Sequence
  Synthetic
uaaaaagcauuagccaua

SEQ ID NO: 497031 - RNA, 19 nt, Artificial Sequence
  Synthetic
auaaaaagcauuagccaua

SEQ ID NO: 497032 - RNA, 20 nt, Artificial Sequence
  Synthetic
cauaaaaagcauuagccaua

SEQ ID NO: 497033 - RNA, 21 nt, Artificial Sequence
  Synthetic
acauaaaaagcauuagccaua

SEQ ID NO: 497034 - RNA, 22 nt, Artificial Sequence
  Synthetic
gacauaaaaagcauuagccaua

SEQ ID NO: 497035 - RNA, 23 nt, Artificial Sequence
  Synthetic
agacauaaaaagcauuagccaua

SEQ ID NO: 497036 - RNA, 24 nt, Artificial Sequence
  Synthetic
aagacauaaaaagcauuagccaua

SEQ ID NO: 497037 - RNA, 18 nt, Artificial Sequence
  Synthetic
uguugugcucuggccaua

SEQ ID NO: 497038 - RNA, 19 nt, Artificial Sequence
  Synthetic
auguugugcucuggccaua

SEQ ID NO: 497039 - RNA, 20 nt, Artificial Sequence
  Synthetic
aauguugugcucuggccaua

SEQ ID NO: 497040 - RNA, 21 nt, Artificial Sequence
  Synthetic
caauguugugcucuggccaua

SEQ ID NO: 497041 - RNA, 22 nt, Artificial Sequence
  Synthetic
acaauguugugcucuggccaua

SEQ ID NO: 497042 - RNA, 23 nt, Artificial Sequence
  Synthetic
gacaauguugugcucuggccaua

SEQ ID NO: 497043 - RNA, 24 nt, Artificial Sequence
  Synthetic
ugacaauguugugcucuggccaua

SEQ ID NO: 497044 - RNA, 18 nt, Artificial Sequence
  Synthetic
cugaaggcuuuggccaua

SEQ ID NO: 497045 - RNA, 19 nt, Artificial Sequence
  Synthetic
acugaaggcuuuggccaua

SEQ ID NO: 497046 - RNA, 20 nt, Artificial Sequence
  Synthetic
gacugaaggcuuuggccaua

SEQ ID NO: 497047 - RNA, 21 nt, Artificial Sequence
  Synthetic
ggacugaaggcuuuggccaua

SEQ ID NO: 497048 - RNA, 22 nt, Artificial Sequence
  Synthetic
uggacugaaggcuuuggccaua

SEQ ID NO: 497049 - RNA, 23 nt, Artificial Sequence
  Synthetic
cuggacugaaggcuuuggccaua

SEQ ID NO: 497050 - RNA, 24 nt, Artificial Sequence
  Synthetic
gcuggacugaaggcuuuggccaua

SEQ ID NO: 497051 - RNA, 18 nt, Artificial Sequence
  Synthetic
uucagggaaggugccaua

SEQ ID NO: 497052 - RNA, 19 nt, Artificial Sequence
  Synthetic
guucagggaaggugccaua

SEQ ID NO: 497053 - RNA, 20 nt, Artificial Sequence
  Synthetic
gguucagggaaggugccaua

SEQ ID NO: 497054 - RNA, 21 nt, Artificial Sequence
  Synthetic
agguucagggaaggugccaua

SEQ ID NO: 497055 - RNA, 22 nt, Artificial Sequence
  Synthetic
cagguucagggaaggugccaua

SEQ ID NO: 497056 - RNA, 23 nt, Artificial Sequence
  Synthetic
ccagguucagggaaggugccaua

SEQ ID NO: 497057 - RNA, 24 nt, Artificial Sequence
  Synthetic
accagguucagggaaggugccaua

SEQ ID NO: 497058 - RNA, 18 nt, Artificial Sequence
  Synthetic
aaacuauuauaauccaua

SEQ ID NO: 497059 - RNA, 19 nt, Artificial Sequence
  Synthetic
aaaacuauuauaauccaua

SEQ ID NO: 497060 - RNA, 20 nt, Artificial Sequence
  Synthetic
gaaaacuauuauaauccaua

SEQ ID NO: 497061 - RNA, 21 nt, Artificial Sequence
  Synthetic
agaaaacuauuauaauccaua

SEQ ID NO: 497062 - RNA, 22 nt, Artificial Sequence
  Synthetic
aagaaaacuauuauaauccaua

SEQ ID NO: 497063 - RNA, 23 nt, Artificial Sequence
  Synthetic
caagaaaacuauuauaauccaua

SEQ ID NO: 497064 - RNA, 24 nt, Artificial Sequence
  Synthetic
acaagaaaacuauuauaauccaua

SEQ ID NO: 497065 - RNA, 18 nt, Artificial Sequence
  Synthetic
caacugcucuacuccaua

SEQ ID NO: 497066 - RNA, 19 nt, Artificial Sequence
  Synthetic
acaacugcucuacuccaua

SEQ ID NO: 497067 - RNA, 20 nt, Artificial Sequence
  Synthetic
aacaacugcucuacuccaua

SEQ ID NO: 497068 - RNA, 21 nt, Artificial Sequence
  Synthetic
aaacaacugcucuacuccaua

SEQ ID NO: 497069 - RNA, 22 nt, Artificial Sequence
  Synthetic
aaaacaacugcucuacuccaua

SEQ ID NO: 497070 - RNA, 23 nt, Artificial Sequence
  Synthetic
gaaaacaacugcucuacuccaua

SEQ ID NO: 497071 - RNA, 24 nt, Artificial Sequence
  Synthetic
ugaaaacaacugcucuacuccaua

SEQ ID NO: 497072 - RNA, 18 nt, Artificial Sequence
  Synthetic
acaaaguccugcuccaua

SEQ ID NO: 497073 - RNA, 19 nt, Artificial Sequence
  Synthetic
aacaaaguccugcuccaua

SEQ ID NO: 497074 - RNA, 20 nt, Artificial Sequence
  Synthetic
aaacaaaguccugcuccaua

SEQ ID NO: 497075 - RNA, 21 nt, Artificial Sequence
  Synthetic
gaaacaaaguccugcuccaua

SEQ ID NO: 497076 - RNA, 22 nt, Artificial Sequence
  Synthetic
ggaaacaaaguccugcuccaua

SEQ ID NO: 497077 - RNA, 23 nt, Artificial Sequence
  Synthetic
aggaaacaaaguccugcuccaua

SEQ ID NO: 497078 - RNA, 24 nt, Artificial Sequence
  Synthetic
aaggaaacaaaguccugcuccaua

SEQ ID NO: 497079 - RNA, 18 nt, Artificial Sequence
  Synthetic
aaugcauugaauuccaua

SEQ ID NO: 497080 - RNA, 19 nt, Artificial Sequence
  Synthetic
uaaugcauugaauuccaua

SEQ ID NO: 497081 - RNA, 20 nt, Artificial Sequence
  Synthetic
uuaaugcauugaauuccaua

SEQ ID NO: 497082 - RNA, 21 nt, Artificial Sequence
  Synthetic
auuaaugcauugaauuccaua

SEQ ID NO: 497083 - RNA, 22 nt, Artificial Sequence
  Synthetic
cauuaaugcauugaauuccaua

SEQ ID NO: 497084 - RNA, 23 nt, Artificial Sequence
  Synthetic
acauuaaugcauugaauuccaua

SEQ ID NO: 497085 - RNA, 24 nt, Artificial Sequence
  Synthetic
aacauuaaugcauugaauuccaua

SEQ ID NO: 497086 - RNA, 18 nt, Artificial Sequence
  Synthetic
acuaucucucauuccaua

SEQ ID NO: 497087 - RNA, 19 nt, Artificial Sequence
  Synthetic
cacuaucucucauuccaua

SEQ ID NO: 497088 - RNA, 20 nt, Artificial Sequence
  Synthetic
gcacuaucucucauuccaua

SEQ ID NO: 497089 - RNA, 21 nt, Artificial Sequence
  Synthetic
ugcacuaucucucauuccaua

SEQ ID NO: 497090 - RNA, 22 nt, Artificial Sequence
  Synthetic
cugcacuaucucucauuccaua

SEQ ID NO: 497091 - RNA, 23 nt, Artificial Sequence
  Synthetic
acugcacuaucucucauuccaua

SEQ ID NO: 497092 - RNA, 24 nt, Artificial Sequence
  Synthetic
gacugcacuaucucucauuccaua

SEQ ID NO: 497093 - RNA, 18 nt, Artificial Sequence
  Synthetic
guagguggauuuuccaua

SEQ ID NO: 497094 - RNA, 19 nt, Artificial Sequence
  Synthetic
gguagguggauuuuccaua

SEQ ID NO: 497095 - RNA, 20 nt, Artificial Sequence
  Synthetic
ggguagguggauuuuccaua

SEQ ID NO: 497096 - RNA, 21 nt, Artificial Sequence
  Synthetic
aggguagguggauuuuccaua

SEQ ID NO: 497097 - RNA, 22 nt, Artificial Sequence
  Synthetic
gaggguagguggauuuuccaua

SEQ ID NO: 497098 - RNA, 23 nt, Artificial Sequence
  Synthetic
ggaggguagguggauuuuccaua

SEQ ID NO: 497099 - RNA, 24 nt, Artificial Sequence
  Synthetic
uggaggguagguggauuuuccaua

SEQ ID NO: 497100 - RNA, 18 nt, Artificial Sequence
  Synthetic
ucaacugaccaaagcaua

SEQ ID NO: 497101 - RNA, 19 nt, Artificial Sequence
  Synthetic
aucaacugaccaaagcaua

SEQ ID NO: 497102 - RNA, 20 nt, Artificial Sequence
  Synthetic
caucaacugaccaaagcaua

SEQ ID NO: 497103 - RNA, 21 nt, Artificial Sequence
  Synthetic
gcaucaacugaccaaagcaua

SEQ ID NO: 497104 - RNA, 22 nt, Artificial Sequence
  Synthetic
agcaucaacugaccaaagcaua

SEQ ID NO: 497105 - RNA, 23 nt, Artificial Sequence
  Synthetic
uagcaucaacugaccaaagcaua

SEQ ID NO: 497106 - RNA, 24 nt, Artificial Sequence
  Synthetic
uuagcaucaacugaccaaagcaua

SEQ ID NO: 497107 - RNA, 18 nt, Artificial Sequence
  Synthetic
cuuaaaaggcaaagcaua

SEQ ID NO: 497108 - RNA, 19 nt, Artificial Sequence
  Synthetic
acuuaaaaggcaaagcaua

SEQ ID NO: 497109 - RNA, 20 nt, Artificial Sequence
  Synthetic
gacuuaaaaggcaaagcaua

SEQ ID NO: 497110 - RNA, 21 nt, Artificial Sequence
  Synthetic
ugacuuaaaaggcaaagcaua

SEQ ID NO: 497111 - RNA, 22 nt, Artificial Sequence
  Synthetic
augacuuaaaaggcaaagcaua

SEQ ID NO: 497112 - RNA, 23 nt, Artificial Sequence
  Synthetic
uaugacuuaaaaggcaaagcaua

SEQ ID NO: 497113 - RNA, 24 nt, Artificial Sequence
  Synthetic
auaugacuuaaaaggcaaagcaua

SEQ ID NO: 497114 - RNA, 18 nt, Artificial Sequence
  Synthetic
gaugaugaauaaagcaua

SEQ ID NO: 497115 - RNA, 19 nt, Artificial Sequence
  Synthetic
cgaugaugaauaaagcaua

SEQ ID NO: 497116 - RNA, 20 nt, Artificial Sequence
  Synthetic
gcgaugaugaauaaagcaua

SEQ ID NO: 497117 - RNA, 21 nt, Artificial Sequence
  Synthetic
agcgaugaugaauaaagcaua

SEQ ID NO: 497118 - RNA, 22 nt, Artificial Sequence
  Synthetic
aagcgaugaugaauaaagcaua

SEQ ID NO: 497119 - RNA, 23 nt, Artificial Sequence
  Synthetic
caagcgaugaugaauaaagcaua

SEQ ID NO: 497120 - RNA, 24 nt, Artificial Sequence
  Synthetic
ucaagcgaugaugaauaaagcaua

SEQ ID NO: 497121 - RNA, 18 nt, Artificial Sequence
  Synthetic
gcaaaacggggcagcaua

SEQ ID NO: 497122 - RNA, 19 nt, Artificial Sequence
  Synthetic
cgcaaaacggggcagcaua

SEQ ID NO: 497123 - RNA, 20 nt, Artificial Sequence
  Synthetic
acgcaaaacggggcagcaua

SEQ ID NO: 497124 - RNA, 21 nt, Artificial Sequence
  Synthetic
gacgcaaaacggggcagcaua

SEQ ID NO: 497125 - RNA, 22 nt, Artificial Sequence
  Synthetic
agacgcaaaacggggcagcaua

SEQ ID NO: 497126 - RNA, 23 nt, Artificial Sequence
  Synthetic
gagacgcaaaacggggcagcaua

SEQ ID NO: 497127 - RNA, 24 nt, Artificial Sequence
  Synthetic
ggagacgcaaaacggggcagcaua

SEQ ID NO: 497128 - RNA, 18 nt, Artificial Sequence
  Synthetic
uggcacucuugcagcaua

SEQ ID NO: 497129 - RNA, 19 nt, Artificial Sequence
  Synthetic
cuggcacucuugcagcaua

SEQ ID NO: 497130 - RNA, 20 nt, Artificial Sequence
  Synthetic
gcuggcacucuugcagcaua

SEQ ID NO: 497131 - RNA, 21 nt, Artificial Sequence
  Synthetic
ugcuggcacucuugcagcaua

SEQ ID NO: 497132 - RNA, 22 nt, Artificial Sequence
  Synthetic
uugcuggcacucuugcagcaua

SEQ ID NO: 497133 - RNA, 23 nt, Artificial Sequence
  Synthetic
uuugcuggcacucuugcagcaua

SEQ ID NO: 497134 - RNA, 24 nt, Artificial Sequence
  Synthetic
guuugcuggcacucuugcagcaua

SEQ ID NO: 497135 - RNA, 18 nt, Artificial Sequence
  Synthetic
caguguuucuagagcaua

SEQ ID NO: 497136 - RNA, 19 nt, Artificial Sequence
  Synthetic
ccaguguuucuagagcaua

SEQ ID NO: 497137 - RNA, 20 nt, Artificial Sequence
  Synthetic
gccaguguuucuagagcaua

SEQ ID NO: 497138 - RNA, 21 nt, Artificial Sequence
  Synthetic
ggccaguguuucuagagcaua

SEQ ID NO: 497139 - RNA, 22 nt, Artificial Sequence
  Synthetic
aggccaguguuucuagagcaua

SEQ ID NO: 497140 - RNA, 23 nt, Artificial Sequence
  Synthetic
caggccaguguuucuagagcaua

SEQ ID NO: 497141 - RNA, 24 nt, Artificial Sequence
  Synthetic
gcaggccaguguuucuagagcaua

SEQ ID NO: 497142 - RNA, 18 nt, Artificial Sequence
  Synthetic
aaauaagucaggagcaua

SEQ ID NO: 497143 - RNA, 19 nt, Artificial Sequence
  Synthetic
aaaauaagucaggagcaua

SEQ ID NO: 497144 - RNA, 20 nt, Artificial Sequence
  Synthetic
gaaaauaagucaggagcaua

SEQ ID NO: 497145 - RNA, 21 nt, Artificial Sequence
  Synthetic
agaaaauaagucaggagcaua

SEQ ID NO: 497146 - RNA, 22 nt, Artificial Sequence
  Synthetic
aagaaaauaagucaggagcaua

SEQ ID NO: 497147 - RNA, 23 nt, Artificial Sequence
  Synthetic
aaagaaaauaagucaggagcaua

SEQ ID NO: 497148 - RNA, 24 nt, Artificial Sequence
  Synthetic
aaaagaaaauaagucaggagcaua

SEQ ID NO: 497149 - RNA, 18 nt, Artificial Sequence
  Synthetic
auuuuauaacauagcaua

SEQ ID NO: 497150 - RNA, 19 nt, Artificial Sequence
  Synthetic
aauuuuauaacauagcaua

SEQ ID NO: 497151 - RNA, 20 nt, Artificial Sequence
  Synthetic
aaauuuuauaacauagcaua

SEQ ID NO: 497152 - RNA, 21 nt, Artificial Sequence
  Synthetic
caaauuuuauaacauagcaua

SEQ ID NO: 497153 - RNA, 22 nt, Artificial Sequence
  Synthetic
ucaaauuuuauaacauagcaua

SEQ ID NO: 497154 - RNA, 23 nt, Artificial Sequence
  Synthetic
aucaaauuuuauaacauagcaua

SEQ ID NO: 497155 - RNA, 24 nt, Artificial Sequence
  Synthetic
aaucaaauuuuauaacauagcaua

SEQ ID NO: 497156 - RNA, 18 nt, Artificial Sequence
  Synthetic
caauuuguaaaccgcaua

SEQ ID NO: 497157 - RNA, 19 nt, Artificial Sequence
  Synthetic
ucaauuuguaaaccgcaua

SEQ ID NO: 497158 - RNA, 20 nt, Artificial Sequence
  Synthetic
gucaauuuguaaaccgcaua

SEQ ID NO: 497159 - RNA, 21 nt, Artificial Sequence
  Synthetic
agucaauuuguaaaccgcaua

SEQ ID NO: 497160 - RNA, 22 nt, Artificial Sequence
  Synthetic
aagucaauuuguaaaccgcaua

SEQ ID NO: 497161 - RNA, 23 nt, Artificial Sequence
  Synthetic
uaagucaauuuguaaaccgcaua

SEQ ID NO: 497162 - RNA, 24 nt, Artificial Sequence
  Synthetic
guaagucaauuuguaaaccgcaua

SEQ ID NO: 497163 - RNA, 18 nt, Artificial Sequence
  Synthetic
ucguagaacuuaggcaua

SEQ ID NO: 497164 - RNA, 19 nt, Artificial Sequence
  Synthetic
aucguagaacuuaggcaua

SEQ ID NO: 497165 - RNA, 20 nt, Artificial Sequence
  Synthetic
aaucguagaacuuaggcaua

SEQ ID NO: 497166 - RNA, 21 nt, Artificial Sequence
  Synthetic
gaaucguagaacuuaggcaua

SEQ ID NO: 497167 - RNA, 22 nt, Artificial Sequence
  Synthetic
agaaucguagaacuuaggcaua

SEQ ID NO: 497168 - RNA, 23 nt, Artificial Sequence
  Synthetic
aagaaucguagaacuuaggcaua

SEQ ID NO: 497169 - RNA, 24 nt, Artificial Sequence
  Synthetic
aaagaaucguagaacuuaggcaua

SEQ ID NO: 497170 - RNA, 18 nt, Artificial Sequence
  Synthetic
auauaaugaaagggcaua

SEQ ID NO: 497171 - RNA, 19 nt, Artificial Sequence
  Synthetic
cauauaaugaaagggcaua

SEQ ID NO: 497172 - RNA, 20 nt, Artificial Sequence
  Synthetic
acauauaaugaaagggcaua

SEQ ID NO: 497173 - RNA, 21 nt, Artificial Sequence
  Synthetic
aacauauaaugaaagggcaua

SEQ ID NO: 497174 - RNA, 22 nt, Artificial Sequence
  Synthetic
aaacauauaaugaaagggcaua

SEQ ID NO: 497175 - RNA, 23 nt, Artificial Sequence
  Synthetic
aaaacauauaaugaaagggcaua

SEQ ID NO: 497176 - RNA, 24 nt, Artificial Sequence
  Synthetic
uaaaacauauaaugaaagggcaua

SEQ ID NO: 497177 - RNA, 18 nt, Artificial Sequence
  Synthetic
uacaaggaaaugggcaua

SEQ ID NO: 497178 - RNA, 19 nt, Artificial Sequence
  Synthetic
cuacaaggaaaugggcaua

SEQ ID NO: 497179 - RNA, 20 nt, Artificial Sequence
  Synthetic
acuacaaggaaaugggcaua

SEQ ID NO: 497180 - RNA, 21 nt, Artificial Sequence
  Synthetic
aacuacaaggaaaugggcaua

SEQ ID NO: 497181 - RNA, 22 nt, Artificial Sequence
  Synthetic
caacuacaaggaaaugggcaua

SEQ ID NO: 497182 - RNA, 23 nt, Artificial Sequence
  Synthetic
gcaacuacaaggaaaugggcaua

SEQ ID NO: 497183 - RNA, 24 nt, Artificial Sequence
  Synthetic
cgcaacuacaaggaaaugggcaua

SEQ ID NO: 497184 - RNA, 18 nt, Artificial Sequence
  Synthetic
aggauacuaaugggcaua

SEQ ID NO: 497185 - RNA, 19 nt, Artificial Sequence
  Synthetic
uaggauacuaaugggcaua

SEQ ID NO: 497186 - RNA, 20 nt, Artificial Sequence
  Synthetic
cuaggauacuaaugggcaua

SEQ ID NO: 497187 - RNA, 21 nt, Artificial Sequence
  Synthetic
acuaggauacuaaugggcaua

SEQ ID NO: 497188 - RNA, 22 nt, Artificial Sequence
  Synthetic
cacuaggauacuaaugggcaua

SEQ ID NO: 497189 - RNA, 23 nt, Artificial Sequence
  Synthetic
gcacuaggauacuaaugggcaua

SEQ ID NO: 497190 - RNA, 24 nt, Artificial Sequence
  Synthetic
ugcacuaggauacuaaugggcaua

SEQ ID NO: 497191 - RNA, 18 nt, Artificial Sequence
  Synthetic
agaaaaacauuuggcaua

SEQ ID NO: 497192 - RNA, 19 nt, Artificial Sequence
  Synthetic
uagaaaaacauuuggcaua

SEQ ID NO: 497193 - RNA, 20 nt, Artificial Sequence
  Synthetic
cuagaaaaacauuuggcaua

SEQ ID NO: 497194 - RNA, 21 nt, Artificial Sequence
  Synthetic
ccuagaaaaacauuuggcaua

SEQ ID NO: 497195 - RNA, 22 nt, Artificial Sequence
  Synthetic
accuagaaaaacauuuggcaua

SEQ ID NO: 497196 - RNA, 23 nt, Artificial Sequence
  Synthetic
caccuagaaaaacauuuggcaua

SEQ ID NO: 497197 - RNA, 24 nt, Artificial Sequence
  Synthetic
gcaccuagaaaaacauuuggcaua

SEQ ID NO: 497198 - RNA, 18 nt, Artificial Sequence
  Synthetic
aagguucaugaaugcaua

SEQ ID NO: 497199 - RNA, 19 nt, Artificial Sequence
  Synthetic
gaagguucaugaaugcaua

SEQ ID NO: 497200 - RNA, 20 nt, Artificial Sequence
  Synthetic
agaagguucaugaaugcaua

SEQ ID NO: 497201 - RNA, 21 nt, Artificial Sequence
  Synthetic
cagaagguucaugaaugcaua

SEQ ID NO: 497202 - RNA, 22 nt, Artificial Sequence
  Synthetic
gcagaagguucaugaaugcaua

SEQ ID NO: 497203 - RNA, 23 nt, Artificial Sequence
  Synthetic
agcagaagguucaugaaugcaua

SEQ ID NO: 497204 - RNA, 24 nt, Artificial Sequence
  Synthetic
cagcagaagguucaugaaugcaua

SEQ ID NO: 497205 - RNA, 18 nt, Artificial Sequence
  Synthetic
auggguaaaguaugcaua

SEQ ID NO: 497206 - RNA, 19 nt, Artificial Sequence
  Synthetic
aauggguaaaguaugcaua

SEQ ID NO: 497207 - RNA, 20 nt, Artificial Sequence
  Synthetic
uaauggguaaaguaugcaua

SEQ ID NO: 497208 - RNA, 21 nt, Artificial Sequence
  Synthetic
uuaauggguaaaguaugcaua

SEQ ID NO: 497209 - RNA, 22 nt, Artificial Sequence
  Synthetic
uuuaauggguaaaguaugcaua

SEQ ID NO: 497210 - RNA, 23 nt, Artificial Sequence
  Synthetic
auuuaauggguaaaguaugcaua

SEQ ID NO: 497211 - RNA, 24 nt, Artificial Sequence
  Synthetic
uauuuaauggguaaaguaugcaua

SEQ ID NO: 497212 - RNA, 18 nt, Artificial Sequence
  Synthetic
uuucacuguuuaugcaua

SEQ ID NO: 497213 - RNA, 19 nt, Artificial Sequence
  Synthetic
uuuucacuguuuaugcaua

SEQ ID NO: 497214 - RNA, 20 nt, Artificial Sequence
  Synthetic
guuuucacuguuuaugcaua

SEQ ID NO: 497215 - RNA, 21 nt, Artificial Sequence
  Synthetic
uguuuucacuguuuaugcaua

SEQ ID NO: 497216 - RNA, 22 nt, Artificial Sequence
  Synthetic
cuguuuucacuguuuaugcaua

SEQ ID NO: 497217 - RNA, 23 nt, Artificial Sequence
  Synthetic
ucuguuuucacuguuuaugcaua

SEQ ID NO: 497218 - RNA, 24 nt, Artificial Sequence
  Synthetic
uucuguuuucacuguuuaugcaua

SEQ ID NO: 497219 - RNA, 18 nt, Artificial Sequence
  Synthetic
uucaacuaaaccugcaua

SEQ ID NO: 497220 - RNA, 19 nt, Artificial Sequence
  Synthetic
guucaacuaaaccugcaua

SEQ ID NO: 497221 - RNA, 20 nt, Artificial Sequence
  Synthetic
cguucaacuaaaccugcaua

SEQ ID NO: 497222 - RNA, 21 nt, Artificial Sequence
  Synthetic
gcguucaacuaaaccugcaua

SEQ ID NO: 497223 - RNA, 22 nt, Artificial Sequence
  Synthetic
ggcguucaacuaaaccugcaua

SEQ ID NO: 497224 - RNA, 23 nt, Artificial Sequence
  Synthetic
uggcguucaacuaaaccugcaua

SEQ ID NO: 497225 - RNA, 24 nt, Artificial Sequence
  Synthetic
cuggcguucaacuaaaccugcaua

SEQ ID NO: 497226 - RNA, 18 nt, Artificial Sequence
  Synthetic
caaaugcucuccugcaua

SEQ ID NO: 497227 - RNA, 19 nt, Artificial Sequence
  Synthetic
gcaaaugcucuccugcaua

SEQ ID NO: 497228 - RNA, 20 nt, Artificial Sequence
  Synthetic
cgcaaaugcucuccugcaua

SEQ ID NO: 497229 - RNA, 21 nt, Artificial Sequence
  Synthetic
gcgcaaaugcucuccugcaua

SEQ ID NO: 497230 - RNA, 22 nt, Artificial Sequence
  Synthetic
ugcgcaaaugcucuccugcaua

SEQ ID NO: 497231 - RNA, 23 nt, Artificial Sequence
  Synthetic
uugcgcaaaugcucuccugcaua

SEQ ID NO: 497232 - RNA, 24 nt, Artificial Sequence
  Synthetic
auugcgcaaaugcucuccugcaua

SEQ ID NO: 497233 - RNA, 18 nt, Artificial Sequence
  Synthetic
auuuguuguaugugcaua

SEQ ID NO: 497234 - RNA, 19 nt, Artificial Sequence
  Synthetic
uauuuguuguaugugcaua

SEQ ID NO: 497235 - RNA, 20 nt, Artificial Sequence
  Synthetic
guauuuguuguaugugcaua

SEQ ID NO: 497236 - RNA, 21 nt, Artificial Sequence
  Synthetic
aguauuuguuguaugugcaua

SEQ ID NO: 497237 - RNA, 22 nt, Artificial Sequence
  Synthetic
caguauuuguuguaugugcaua

SEQ ID NO: 497238 - RNA, 23 nt, Artificial Sequence
  Synthetic
ucaguauuuguuguaugugcaua

SEQ ID NO: 497239 - RNA, 24 nt, Artificial Sequence
  Synthetic
aucaguauuuguuguaugugcaua

SEQ ID NO: 497240 - RNA, 18 nt, Artificial Sequence
  Synthetic
aauauguaugugugcaua

SEQ ID NO: 497241 - RNA, 19 nt, Artificial Sequence
  Synthetic
caauauguaugugugcaua

SEQ ID NO: 497242 - RNA, 20 nt, Artificial Sequence
  Synthetic
acaauauguaugugugcaua

SEQ ID NO: 497243 - RNA, 21 nt, Artificial Sequence
  Synthetic
uacaauauguaugugugcaua

SEQ ID NO: 497244 - RNA, 22 nt, Artificial Sequence
  Synthetic
auacaauauguaugugugcaua

SEQ ID NO: 497245 - RNA, 23 nt, Artificial Sequence
  Synthetic
gauacaauauguaugugugcaua

SEQ ID NO: 497246 - RNA, 24 nt, Artificial Sequence
  Synthetic
ugauacaauauguaugugugcaua

SEQ ID NO: 497247 - RNA, 18 nt, Artificial Sequence
  Synthetic
uagcuuagccaaaucaua

SEQ ID NO: 497248 - RNA, 19 nt, Artificial Sequence
  Synthetic
cuagcuuagccaaaucaua

SEQ ID NO: 497249 - RNA, 20 nt, Artificial Sequence
  Synthetic
ucuagcuuagccaaaucaua

SEQ ID NO: 497250 - RNA, 21 nt, Artificial Sequence
  Synthetic
uucuagcuuagccaaaucaua

SEQ ID NO: 497251 - RNA, 22 nt, Artificial Sequence
  Synthetic
auucuagcuuagccaaaucaua

SEQ ID NO: 497252 - RNA, 23 nt, Artificial Sequence
  Synthetic
aauucuagcuuagccaaaucaua

SEQ ID NO: 497253 - RNA, 24 nt, Artificial Sequence
  Synthetic
aaauucuagcuuagccaaaucaua

SEQ ID NO: 497254 - RNA, 18 nt, Artificial Sequence
  Synthetic
guaaaaauaagaaucaua

SEQ ID NO: 497255 - RNA, 19 nt, Artificial Sequence
  Synthetic
uguaaaaauaagaaucaua

SEQ ID NO: 497256 - RNA, 20 nt, Artificial Sequence
  Synthetic
auguaaaaauaagaaucaua

SEQ ID NO: 497257 - RNA, 21 nt, Artificial Sequence
  Synthetic
aauguaaaaauaagaaucaua

SEQ ID NO: 497258 - RNA, 22 nt, Artificial Sequence
  Synthetic
aaauguaaaaauaagaaucaua

SEQ ID NO: 497259 - RNA, 23 nt, Artificial Sequence
  Synthetic
aaaauguaaaaauaagaaucaua

SEQ ID NO: 497260 - RNA, 24 nt, Artificial Sequence
  Synthetic
uaaaauguaaaaauaagaaucaua

SEQ ID NO: 497261 - RNA, 18 nt, Artificial Sequence
  Synthetic
aaaccauagagaaucaua

SEQ ID NO: 497262 - RNA, 19 nt, Artificial Sequence
  Synthetic
gaaaccauagagaaucaua

SEQ ID NO: 497263 - RNA, 20 nt, Artificial Sequence
  Synthetic
ugaaaccauagagaaucaua

SEQ ID NO: 497264 - RNA, 21 nt, Artificial Sequence
  Synthetic
cugaaaccauagagaaucaua

SEQ ID NO: 497265 - RNA, 22 nt, Artificial Sequence
  Synthetic
ccugaaaccauagagaaucaua

SEQ ID NO: 497266 - RNA, 23 nt, Artificial Sequence
  Synthetic
gccugaaaccauagagaaucaua

SEQ ID NO: 497267 - RNA, 24 nt, Artificial Sequence
  Synthetic
ggccugaaaccauagagaaucaua

SEQ ID NO: 497268 - RNA, 18 nt, Artificial Sequence
  Synthetic
caaaauuaauucaucaua

SEQ ID NO: 497269 - RNA, 19 nt, Artificial Sequence
  Synthetic
ccaaaauuaauucaucaua

SEQ ID NO: 497270 - RNA, 20 nt, Artificial Sequence
  Synthetic
accaaaauuaauucaucaua

SEQ ID NO: 497271 - RNA, 21 nt, Artificial Sequence
  Synthetic
uaccaaaauuaauucaucaua

SEQ ID NO: 497272 - RNA, 22 nt, Artificial Sequence
  Synthetic
auaccaaaauuaauucaucaua

SEQ ID NO: 497273 - RNA, 23 nt, Artificial Sequence
  Synthetic
uauaccaaaauuaauucaucaua

SEQ ID NO: 497274 - RNA, 24 nt, Artificial Sequence
  Synthetic
guauaccaaaauuaauucaucaua

SEQ ID NO: 497275 - RNA, 18 nt, Artificial Sequence
  Synthetic
ucaggaaccuucaucaua

SEQ ID NO: 497276 - RNA, 19 nt, Artificial Sequence
  Synthetic
cucaggaaccuucaucaua

SEQ ID NO: 497277 - RNA, 20 nt, Artificial Sequence
  Synthetic
ucucaggaaccuucaucaua

SEQ ID NO: 497278 - RNA, 21 nt, Artificial Sequence
  Synthetic
aucucaggaaccuucaucaua

SEQ ID NO: 497279 - RNA, 22 nt, Artificial Sequence
  Synthetic
gaucucaggaaccuucaucaua

SEQ ID NO: 497280 - RNA, 23 nt, Artificial Sequence
  Synthetic
ggaucucaggaaccuucaucaua

SEQ ID NO: 497281 - RNA, 24 nt, Artificial Sequence
  Synthetic
aggaucucaggaaccuucaucaua

SEQ ID NO: 497282 - RNA, 18 nt, Artificial Sequence
  Synthetic
aaaagcaacuggaucaua

SEQ ID NO: 497283 - RNA, 19 nt, Artificial Sequence
  Synthetic
caaaagcaacuggaucaua

SEQ ID NO: 497284 - RNA, 20 nt, Artificial Sequence
  Synthetic
ucaaaagcaacuggaucaua

SEQ ID NO: 497285 - RNA, 21 nt, Artificial Sequence
  Synthetic
uucaaaagcaacuggaucaua

SEQ ID NO: 497286 - RNA, 22 nt, Artificial Sequence
  Synthetic
uuucaaaagcaacuggaucaua

SEQ ID NO: 497287 - RNA, 23 nt, Artificial Sequence
  Synthetic
auuucaaaagcaacuggaucaua

SEQ ID NO: 497288 - RNA, 24 nt, Artificial Sequence
  Synthetic
uauuucaaaagcaacuggaucaua

SEQ ID NO: 497289 - RNA, 18 nt, Artificial Sequence
  Synthetic
aaguacauuccacucaua

SEQ ID NO: 497290 - RNA, 19 nt, Artificial Sequence
  Synthetic
gaaguacauuccacucaua

SEQ ID NO: 497291 - RNA, 20 nt, Artificial Sequence
  Synthetic
ggaaguacauuccacucaua

SEQ ID NO: 497292 - RNA, 21 nt, Artificial Sequence
  Synthetic
gggaaguacauuccacucaua

SEQ ID NO: 497293 - RNA, 22 nt, Artificial Sequence
  Synthetic
ugggaaguacauuccacucaua

SEQ ID NO: 497294 - RNA, 23 nt, Artificial Sequence
  Synthetic
uugggaaguacauuccacucaua

SEQ ID NO: 497295 - RNA, 24 nt, Artificial Sequence
  Synthetic
guugggaaguacauuccacucaua

SEQ ID NO: 497296 - RNA, 18 nt, Artificial Sequence
  Synthetic
aauuauauaauacucaua

SEQ ID NO: 497297 - RNA, 19 nt, Artificial Sequence
  Synthetic
gaauuauauaauacucaua

SEQ ID NO: 497298 - RNA, 20 nt, Artificial Sequence
  Synthetic
ugaauuauauaauacucaua

SEQ ID NO: 497299 - RNA, 21 nt, Artificial Sequence
  Synthetic
uugaauuauauaauacucaua

SEQ ID NO: 497300 - RNA, 22 nt, Artificial Sequence
  Synthetic
cuugaauuauauaauacucaua

SEQ ID NO: 497301 - RNA, 23 nt, Artificial Sequence
  Synthetic
ucuugaauuauauaauacucaua

SEQ ID NO: 497302 - RNA, 24 nt, Artificial Sequence
  Synthetic
uucuugaauuauauaauacucaua

SEQ ID NO: 497303 - RNA, 18 nt, Artificial Sequence
  Synthetic
caaggguacauacucaua

SEQ ID NO: 497304 - RNA, 19 nt, Artificial Sequence
  Synthetic
gcaaggguacauacucaua

SEQ ID NO: 497305 - RNA, 20 nt, Artificial Sequence
  Synthetic
agcaaggguacauacucaua

SEQ ID NO: 497306 - RNA, 21 nt, Artificial Sequence
  Synthetic
cagcaaggguacauacucaua

SEQ ID NO: 497307 - RNA, 22 nt, Artificial Sequence
  Synthetic
ccagcaaggguacauacucaua

SEQ ID NO: 497308 - RNA, 23 nt, Artificial Sequence
  Synthetic
accagcaaggguacauacucaua

SEQ ID NO: 497309 - RNA, 24 nt, Artificial Sequence
  Synthetic
aaccagcaaggguacauacucaua

SEQ ID NO: 497310 - RNA, 18 nt, Artificial Sequence
  Synthetic
ugagacugugagcucaua

SEQ ID NO: 497311 - RNA, 19 nt, Artificial Sequence
  Synthetic
augagacugugagcucaua

SEQ ID NO: 497312 - RNA, 20 nt, Artificial Sequence
  Synthetic
caugagacugugagcucaua

SEQ ID NO: 497313 - RNA, 21 nt, Artificial Sequence
  Synthetic
ucaugagacugugagcucaua

SEQ ID NO: 497314 - RNA, 22 nt, Artificial Sequence
  Synthetic
cucaugagacugugagcucaua

SEQ ID NO: 497315 - RNA, 23 nt, Artificial Sequence
  Synthetic
acucaugagacugugagcucaua

SEQ ID NO: 497316 - RNA, 24 nt, Artificial Sequence
  Synthetic
aacucaugagacugugagcucaua

SEQ ID NO: 497317 - RNA, 18 nt, Artificial Sequence
  Synthetic
aauggccgucaucucaua

SEQ ID NO: 497318 - RNA, 19 nt, Artificial Sequence
  Synthetic
gaauggccgucaucucaua

SEQ ID NO: 497319 - RNA, 20 nt, Artificial Sequence
  Synthetic
ugaauggccgucaucucaua

SEQ ID NO: 497320 - RNA, 21 nt, Artificial Sequence
  Synthetic
cugaauggccgucaucucaua

SEQ ID NO: 497321 - RNA, 22 nt, Artificial Sequence
  Synthetic
acugaauggccgucaucucaua

SEQ ID NO: 497322 - RNA, 23 nt, Artificial Sequence
  Synthetic
aacugaauggccgucaucucaua

SEQ ID NO: 497323 - RNA, 24 nt, Artificial Sequence
  Synthetic
uaacugaauggccgucaucucaua

SEQ ID NO: 497324 - RNA, 18 nt, Artificial Sequence
  Synthetic
aucccucagccucucaua

SEQ ID NO: 497325 - RNA, 19 nt, Artificial Sequence
  Synthetic
caucccucagccucucaua

SEQ ID NO: 497326 - RNA, 20 nt, Artificial Sequence
  Synthetic
acaucccucagccucucaua

SEQ ID NO: 497327 - RNA, 21 nt, Artificial Sequence
  Synthetic
aacaucccucagccucucaua

SEQ ID NO: 497328 - RNA, 22 nt, Artificial Sequence
  Synthetic
uaacaucccucagccucucaua

SEQ ID NO: 497329 - RNA, 23 nt, Artificial Sequence
  Synthetic
guaacaucccucagccucucaua

SEQ ID NO: 497330 - RNA, 24 nt, Artificial Sequence
  Synthetic
aguaacaucccucagccucucaua

SEQ ID NO: 497331 - RNA, 18 nt, Artificial Sequence
  Synthetic
cagcauuagauucucaua

SEQ ID NO: 497332 - RNA, 19 nt, Artificial Sequence
  Synthetic
gcagcauuagauucucaua

SEQ ID NO: 497333 - RNA, 20 nt, Artificial Sequence
  Synthetic
ugcagcauuagauucucaua

SEQ ID NO: 497334 - RNA, 21 nt, Artificial Sequence
  Synthetic
augcagcauuagauucucaua

SEQ ID NO: 497335 - RNA, 22 nt, Artificial Sequence
  Synthetic
caugcagcauuagauucucaua

SEQ ID NO: 497336 - RNA, 23 nt, Artificial Sequence
  Synthetic
ucaugcagcauuagauucucaua

SEQ ID NO: 497337 - RNA, 24 nt, Artificial Sequence
  Synthetic
aucaugcagcauuagauucucaua

SEQ ID NO: 497338 - RNA, 18 nt, Artificial Sequence
  Synthetic
aggcauuagauucucaua

SEQ ID NO: 497339 - RNA, 19 nt, Artificial Sequence
  Synthetic
caggcauuagauucucaua

SEQ ID NO: 497340 - RNA, 20 nt, Artificial Sequence
  Synthetic
ucaggcauuagauucucaua

SEQ ID NO: 497341 - RNA, 21 nt, Artificial Sequence
  Synthetic
uucaggcauuagauucucaua

SEQ ID NO: 497342 - RNA, 22 nt, Artificial Sequence
  Synthetic
cuucaggcauuagauucucaua

SEQ ID NO: 497343 - RNA, 23 nt, Artificial Sequence
  Synthetic
ucuucaggcauuagauucucaua

SEQ ID NO: 497344 - RNA, 24 nt, Artificial Sequence
  Synthetic
aucuucaggcauuagauucucaua

SEQ ID NO: 497345 - RNA, 18 nt, Artificial Sequence
  Synthetic
uuuuuuuuuauucucaua

SEQ ID NO: 497346 - RNA, 19 nt, Artificial Sequence
  Synthetic
guuuuuuuuuauucucaua

SEQ ID NO: 497347 - RNA, 20 nt, Artificial Sequence
  Synthetic
uguuuuuuuuuauucucaua

SEQ ID NO: 497348 - RNA, 21 nt, Artificial Sequence
  Synthetic
auguuuuuuuuuauucucaua

SEQ ID NO: 497349 - RNA, 22 nt, Artificial Sequence
  Synthetic
gauguuuuuuuuuauucucaua

SEQ ID NO: 497350 - RNA, 23 nt, Artificial Sequence
  Synthetic
agauguuuuuuuuuauucucaua

SEQ ID NO: 497351 - RNA, 24 nt, Artificial Sequence
  Synthetic
gagauguuuuuuuuuauucucaua

SEQ ID NO: 497352 - RNA, 18 nt, Artificial Sequence
  Synthetic
acuuccucauuucucaua

SEQ ID NO: 497353 - RNA, 19 nt, Artificial Sequence
  Synthetic
uacuuccucauuucucaua

SEQ ID NO: 497354 - RNA, 20 nt, Artificial Sequence
  Synthetic
cuacuuccucauuucucaua

SEQ ID NO: 497355 - RNA, 21 nt, Artificial Sequence
  Synthetic
ucuacuuccucauuucucaua

SEQ ID NO: 497356 - RNA, 22 nt, Artificial Sequence
  Synthetic
cucuacuuccucauuucucaua

SEQ ID NO: 497357 - RNA, 23 nt, Artificial Sequence
  Synthetic
ccucuacuuccucauuucucaua

SEQ ID NO: 497358 - RNA, 24 nt, Artificial Sequence
  Synthetic
accucuacuuccucauuucucaua

SEQ ID NO: 497359 - RNA, 18 nt, Artificial Sequence
  Synthetic
ugaauuugcaaagucaua

SEQ ID NO: 497360 - RNA, 19 nt, Artificial Sequence
  Synthetic
augaauuugcaaagucaua

SEQ ID NO: 497361 - RNA, 20 nt, Artificial Sequence
  Synthetic
gaugaauuugcaaagucaua

SEQ ID NO: 497362 - RNA, 21 nt, Artificial Sequence
  Synthetic
ggaugaauuugcaaagucaua

SEQ ID NO: 497363 - RNA, 22 nt, Artificial Sequence
  Synthetic
gggaugaauuugcaaagucaua

SEQ ID NO: 497364 - RNA, 23 nt, Artificial Sequence
  Synthetic
agggaugaauuugcaaagucaua

SEQ ID NO: 497365 - RNA, 24 nt, Artificial Sequence
  Synthetic
cagggaugaauuugcaaagucaua

SEQ ID NO: 497366 - RNA, 18 nt, Artificial Sequence
  Synthetic
aggacaaagaaagucaua

SEQ ID NO: 497367 - RNA, 19 nt, Artificial Sequence
  Synthetic
caggacaaagaaagucaua

SEQ ID NO: 497368 - RNA, 20 nt, Artificial Sequence
  Synthetic
ucaggacaaagaaagucaua

SEQ ID NO: 497369 - RNA, 21 nt, Artificial Sequence
  Synthetic
aucaggacaaagaaagucaua

SEQ ID NO: 497370 - RNA, 22 nt, Artificial Sequence
  Synthetic
aaucaggacaaagaaagucaua

SEQ ID NO: 497371 - RNA, 23 nt, Artificial Sequence
  Synthetic
aaaucaggacaaagaaagucaua

SEQ ID NO: 497372 - RNA, 24 nt, Artificial Sequence
  Synthetic
aaaaucaggacaaagaaagucaua

SEQ ID NO: 497373 - RNA, 18 nt, Artificial Sequence
  Synthetic
uaucaacauccagucaua

SEQ ID NO: 497374 - RNA, 19 nt, Artificial Sequence
  Synthetic
auaucaacauccagucaua

SEQ ID NO: 497375 - RNA, 20 nt, Artificial Sequence
  Synthetic
aauaucaacauccagucaua

SEQ ID NO: 497376 - RNA, 21 nt, Artificial Sequence
  Synthetic
aaauaucaacauccagucaua

SEQ ID NO: 497377 - RNA, 22 nt, Artificial Sequence
  Synthetic
aaaauaucaacauccagucaua

SEQ ID NO: 497378 - RNA, 23 nt, Artificial Sequence
  Synthetic
aaaaauaucaacauccagucaua

SEQ ID NO: 497379 - RNA, 24 nt, Artificial Sequence
  Synthetic
aaaaaauaucaacauccagucaua

SEQ ID NO: 497380 - RNA, 18 nt, Artificial Sequence
  Synthetic
ccccuuuguccagucaua

SEQ ID NO: 497381 - RNA, 19 nt, Artificial Sequence
  Synthetic
uccccuuuguccagucaua

SEQ ID NO: 497382 - RNA, 20 nt, Artificial Sequence
  Synthetic
uuccccuuuguccagucaua

SEQ ID NO: 497383 - RNA, 21 nt, Artificial Sequence
  Synthetic
auuccccuuuguccagucaua

SEQ ID NO: 497384 - RNA, 22 nt, Artificial Sequence
  Synthetic
cauuccccuuuguccagucaua

SEQ ID NO: 497385 - RNA, 23 nt, Artificial Sequence
  Synthetic
ccauuccccuuuguccagucaua

SEQ ID NO: 497386 - RNA, 24 nt, Artificial Sequence
  Synthetic
accauuccccuuuguccagucaua

SEQ ID NO: 497387 - RNA, 18 nt, Artificial Sequence
  Synthetic
auugucaaaaaggucaua

SEQ ID NO: 497388 - RNA, 19 nt, Artificial Sequence
  Synthetic
cauugucaaaaaggucaua

SEQ ID NO: 497389 - RNA, 20 nt, Artificial Sequence
  Synthetic
acauugucaaaaaggucaua

SEQ ID NO: 497390 - RNA, 21 nt, Artificial Sequence
  Synthetic
aacauugucaaaaaggucaua

SEQ ID NO: 497391 - RNA, 22 nt, Artificial Sequence
  Synthetic
aaacauugucaaaaaggucaua

SEQ ID NO: 497392 - RNA, 23 nt, Artificial Sequence
  Synthetic
uaaacauugucaaaaaggucaua

SEQ ID NO: 497393 - RNA, 24 nt, Artificial Sequence
  Synthetic
uuaaacauugucaaaaaggucaua

SEQ ID NO: 497394 - RNA, 18 nt, Artificial Sequence
  Synthetic
cacauucuuaaggucaua

SEQ ID NO: 497395 - RNA, 19 nt, Artificial Sequence
  Synthetic
ucacauucuuaaggucaua

SEQ ID NO: 497396 - RNA, 20 nt, Artificial Sequence
  Synthetic
cucacauucuuaaggucaua

SEQ ID NO: 497397 - RNA, 21 nt, Artificial Sequence
  Synthetic
ucucacauucuuaaggucaua

SEQ ID NO: 497398 - RNA, 22 nt, Artificial Sequence
  Synthetic
cucucacauucuuaaggucaua

SEQ ID NO: 497399 - RNA, 23 nt, Artificial Sequence
  Synthetic
ucucucacauucuuaaggucaua

SEQ ID NO: 497400 - RNA, 24 nt, Artificial Sequence
  Synthetic
uucucucacauucuuaaggucaua

SEQ ID NO: 497401 - RNA, 18 nt, Artificial Sequence
  Synthetic
uugcaguaacaggucaua

SEQ ID NO: 497402 - RNA, 19 nt, Artificial Sequence
  Synthetic
uuugcaguaacaggucaua

SEQ ID NO: 497403 - RNA, 20 nt, Artificial Sequence
  Synthetic
uuuugcaguaacaggucaua

SEQ ID NO: 497404 - RNA, 21 nt, Artificial Sequence
  Synthetic
uuuuugcaguaacaggucaua

SEQ ID NO: 497405 - RNA, 22 nt, Artificial Sequence
  Synthetic
guuuuugcaguaacaggucaua

SEQ ID NO: 497406 - RNA, 23 nt, Artificial Sequence
  Synthetic
uguuuuugcaguaacaggucaua

SEQ ID NO: 497407 - RNA, 24 nt, Artificial Sequence
  Synthetic
auguuuuugcaguaacaggucaua

SEQ ID NO: 497408 - RNA, 18 nt, Artificial Sequence
  Synthetic
aaagaccaugaggucaua

SEQ ID NO: 497409 - RNA, 19 nt, Artificial Sequence
  Synthetic
gaaagaccaugaggucaua

SEQ ID NO: 497410 - RNA, 20 nt, Artificial Sequence
  Synthetic
cgaaagaccaugaggucaua

SEQ ID NO: 497411 - RNA, 21 nt, Artificial Sequence
  Synthetic
acgaaagaccaugaggucaua

SEQ ID NO: 497412 - RNA, 22 nt, Artificial Sequence
  Synthetic
gacgaaagaccaugaggucaua

SEQ ID NO: 497413 - RNA, 23 nt, Artificial Sequence
  Synthetic
agacgaaagaccaugaggucaua

SEQ ID NO: 497414 - RNA, 24 nt, Artificial Sequence
  Synthetic
aagacgaaagaccaugaggucaua

SEQ ID NO: 497415 - RNA, 18 nt, Artificial Sequence
  Synthetic
auggaaacugcggucaua

SEQ ID NO: 497416 - RNA, 19 nt, Artificial Sequence
  Synthetic
uauggaaacugcggucaua

SEQ ID NO: 497417 - RNA, 20 nt, Artificial Sequence
  Synthetic
auauggaaacugcggucaua

SEQ ID NO: 497418 - RNA, 21 nt, Artificial Sequence
  Synthetic
cauauggaaacugcggucaua

SEQ ID NO: 497419 - RNA, 22 nt, Artificial Sequence
  Synthetic
ucauauggaaacugcggucaua

SEQ ID NO: 497420 - RNA, 23 nt, Artificial Sequence
  Synthetic
gucauauggaaacugcggucaua

SEQ ID NO: 497421 - RNA, 24 nt, Artificial Sequence
  Synthetic
agucauauggaaacugcggucaua

SEQ ID NO: 497422 - RNA, 18 nt, Artificial Sequence
  Synthetic
cgggaaaaaaaugucaua

SEQ ID NO: 497423 - RNA, 19 nt, Artificial Sequence
  Synthetic
ccgggaaaaaaaugucaua

SEQ ID NO: 497424 - RNA, 20 nt, Artificial Sequence
  Synthetic
gccgggaaaaaaaugucaua

SEQ ID NO: 497425 - RNA, 21 nt, Artificial Sequence
  Synthetic
ugccgggaaaaaaaugucaua

SEQ ID NO: 497426 - RNA, 22 nt, Artificial Sequence
  Synthetic
uugccgggaaaaaaaugucaua

SEQ ID NO: 497427 - RNA, 23 nt, Artificial Sequence
  Synthetic
uuugccgggaaaaaaaugucaua

SEQ ID NO: 497428 - RNA, 24 nt, Artificial Sequence
  Synthetic
auuugccgggaaaaaaaugucaua

SEQ ID NO: 497429 - RNA, 18 nt, Artificial Sequence
  Synthetic
ucaaaauaaaaauucaua

SEQ ID NO: 497430 - RNA, 19 nt, Artificial Sequence
  Synthetic
uucaaaauaaaaauucaua

SEQ ID NO: 497431 - RNA, 20 nt, Artificial Sequence
  Synthetic
guucaaaauaaaaauucaua

SEQ ID NO: 497432 - RNA, 21 nt, Artificial Sequence
  Synthetic
uguucaaaauaaaaauucaua

SEQ ID NO: 497433 - RNA, 22 nt, Artificial Sequence
  Synthetic
uuguucaaaauaaaaauucaua

SEQ ID NO: 497434 - RNA, 23 nt, Artificial Sequence
  Synthetic
uuuguucaaaauaaaaauucaua

SEQ ID NO: 497435 - RNA, 24 nt, Artificial Sequence
  Synthetic
uuuuguucaaaauaaaaauucaua

SEQ ID NO: 497436 - RNA, 18 nt, Artificial Sequence
  Synthetic
uauguagcaaaauucaua

SEQ ID NO: 497437 - RNA, 19 nt, Artificial Sequence
  Synthetic
auauguagcaaaauucaua

SEQ ID NO: 497438 - RNA, 20 nt, Artificial Sequence
  Synthetic
aauauguagcaaaauucaua

SEQ ID NO: 497439 - RNA, 21 nt, Artificial Sequence
  Synthetic
aaauauguagcaaaauucaua

SEQ ID NO: 497440 - RNA, 22 nt, Artificial Sequence
  Synthetic
gaaauauguagcaaaauucaua

SEQ ID NO: 497441 - RNA, 23 nt, Artificial Sequence
  Synthetic
ugaaauauguagcaaaauucaua

SEQ ID NO: 497442 - RNA, 24 nt, Artificial Sequence
  Synthetic
cugaaauauguagcaaaauucaua

SEQ ID NO: 497443 - RNA, 18 nt, Artificial Sequence
  Synthetic
uuaaugcuacuauucaua

SEQ ID NO: 497444 - RNA, 19 nt, Artificial Sequence
  Synthetic
guuaaugcuacuauucaua

SEQ ID NO: 497445 - RNA, 20 nt, Artificial Sequence
  Synthetic
aguuaaugcuacuauucaua

SEQ ID NO: 497446 - RNA, 21 nt, Artificial Sequence
  Synthetic
aaguuaaugcuacuauucaua

SEQ ID NO: 497447 - RNA, 22 nt, Artificial Sequence
  Synthetic
aaaguuaaugcuacuauucaua

SEQ ID NO: 497448 - RNA, 23 nt, Artificial Sequence
  Synthetic
caaaguuaaugcuacuauucaua

SEQ ID NO: 497449 - RNA, 24 nt, Artificial Sequence
  Synthetic
gcaaaguuaaugcuacuauucaua

SEQ ID NO: 497450 - RNA, 18 nt, Artificial Sequence
  Synthetic
auuuuaccuguauucaua

SEQ ID NO: 497451 - RNA, 19 nt, Artificial Sequence
  Synthetic
aauuuuaccuguauucaua

SEQ ID NO: 497452 - RNA, 20 nt, Artificial Sequence
  Synthetic
gaauuuuaccuguauucaua

SEQ ID NO: 497453 - RNA, 21 nt, Artificial Sequence
  Synthetic
ugaauuuuaccuguauucaua

SEQ ID NO: 497454 - RNA, 22 nt, Artificial Sequence
  Synthetic
cugaauuuuaccuguauucaua

SEQ ID NO: 497455 - RNA, 23 nt, Artificial Sequence
  Synthetic
gcugaauuuuaccuguauucaua

SEQ ID NO: 497456 - RNA, 24 nt, Artificial Sequence
  Synthetic
cgcugaauuuuaccuguauucaua

SEQ ID NO: 497457 - RNA, 18 nt, Artificial Sequence
  Synthetic
uuccugaaugacuucaua

SEQ ID NO: 497458 - RNA, 19 nt, Artificial Sequence
  Synthetic
guuccugaaugacuucaua

SEQ ID NO: 497459 - RNA, 20 nt, Artificial Sequence
  Synthetic
gguuccugaaugacuucaua

SEQ ID NO: 497460 - RNA, 21 nt, Artificial Sequence
  Synthetic
ggguuccugaaugacuucaua

SEQ ID NO: 497461 - RNA, 22 nt, Artificial Sequence
  Synthetic
uggguuccugaaugacuucaua

SEQ ID NO: 497462 - RNA, 23 nt, Artificial Sequence
  Synthetic
uuggguuccugaaugacuucaua

SEQ ID NO: 497463 - RNA, 24 nt, Artificial Sequence
  Synthetic
cuuggguuccugaaugacuucaua

SEQ ID NO: 497464 - RNA, 18 nt, Artificial Sequence
  Synthetic
aguuaauacuacuucaua

SEQ ID NO: 497465 - RNA, 19 nt, Artificial Sequence
  Synthetic
caguuaauacuacuucaua

SEQ ID NO: 497466 - RNA, 20 nt, Artificial Sequence
  Synthetic
gcaguuaauacuacuucaua

SEQ ID NO: 497467 - RNA, 21 nt, Artificial Sequence
  Synthetic
agcaguuaauacuacuucaua

SEQ ID NO: 497468 - RNA, 22 nt, Artificial Sequence
  Synthetic
aagcaguuaauacuacuucaua

SEQ ID NO: 497469 - RNA, 23 nt, Artificial Sequence
  Synthetic
caagcaguuaauacuacuucaua

SEQ ID NO: 497470 - RNA, 24 nt, Artificial Sequence
  Synthetic
ccaagcaguuaauacuacuucaua

SEQ ID NO: 497471 - RNA, 18 nt, Artificial Sequence
  Synthetic
cguauauauuucuucaua

SEQ ID NO: 497472 - RNA, 19 nt, Artificial Sequence
  Synthetic
acguauauauuucuucaua

SEQ ID NO: 497473 - RNA, 20 nt, Artificial Sequence
  Synthetic
aacguauauauuucuucaua

SEQ ID NO: 497474 - RNA, 21 nt, Artificial Sequence
  Synthetic
gaacguauauauuucuucaua

SEQ ID NO: 497475 - RNA, 22 nt, Artificial Sequence
  Synthetic
agaacguauauauuucuucaua

SEQ ID NO: 497476 - RNA, 23 nt, Artificial Sequence
  Synthetic
aagaacguauauauuucuucaua

SEQ ID NO: 497477 - RNA, 24 nt, Artificial Sequence
  Synthetic
aaagaacguauauauuucuucaua

SEQ ID NO: 497478 - RNA, 18 nt, Artificial Sequence
  Synthetic
agcugagcuuaguucaua

SEQ ID NO: 497479 - RNA, 19 nt, Artificial Sequence
  Synthetic
aagcugagcuuaguucaua

SEQ ID NO: 497480 - RNA, 20 nt, Artificial Sequence
  Synthetic
uaagcugagcuuaguucaua

SEQ ID NO: 497481 - RNA, 21 nt, Artificial Sequence
  Synthetic
cuaagcugagcuuaguucaua

SEQ ID NO: 497482 - RNA, 22 nt, Artificial Sequence
  Synthetic
gcuaagcugagcuuaguucaua

SEQ ID NO: 497483 - RNA, 23 nt, Artificial Sequence
  Synthetic
ugcuaagcugagcuuaguucaua

SEQ ID NO: 497484 - RNA, 24 nt, Artificial Sequence
  Synthetic
augcuaagcugagcuuaguucaua

SEQ ID NO: 497485 - RNA, 18 nt, Artificial Sequence
  Synthetic
ugguacccaguguucaua

SEQ ID NO: 497486 - RNA, 19 nt, Artificial Sequence
  Synthetic
augguacccaguguucaua

SEQ ID NO: 497487 - RNA, 20 nt, Artificial Sequence
  Synthetic
uaugguacccaguguucaua

SEQ ID NO: 497488 - RNA, 21 nt, Artificial Sequence
  Synthetic
uuaugguacccaguguucaua

SEQ ID NO: 497489 - RNA, 22 nt, Artificial Sequence
  Synthetic
auuaugguacccaguguucaua

SEQ ID NO: 497490 - RNA, 23 nt, Artificial Sequence
  Synthetic
gauuaugguacccaguguucaua

SEQ ID NO: 497491 - RNA, 24 nt, Artificial Sequence
  Synthetic
agauuaugguacccaguguucaua

SEQ ID NO: 497492 - RNA, 18 nt, Artificial Sequence
  Synthetic
aaaucaacacauuucaua

SEQ ID NO: 497493 - RNA, 19 nt, Artificial Sequence
  Synthetic
uaaaucaacacauuucaua

SEQ ID NO: 497494 - RNA, 20 nt, Artificial Sequence
  Synthetic
auaaaucaacacauuucaua

SEQ ID NO: 497495 - RNA, 21 nt, Artificial Sequence
  Synthetic
aauaaaucaacacauuucaua

SEQ ID NO: 497496 - RNA, 22 nt, Artificial Sequence
  Synthetic
aaauaaaucaacacauuucaua

SEQ ID NO: 497497 - RNA, 23 nt, Artificial Sequence
  Synthetic
aaaauaaaucaacacauuucaua

SEQ ID NO: 497498 - RNA, 24 nt, Artificial Sequence
  Synthetic
aaaaauaaaucaacacauuucaua

SEQ ID NO: 497499 - RNA, 18 nt, Artificial Sequence
  Synthetic
acuacuuuacauuucaua

SEQ ID NO: 497500 - RNA, 19 nt, Artificial Sequence
  Synthetic
aacuacuuuacauuucaua

SEQ ID NO: 497501 - RNA, 20 nt, Artificial Sequence
  Synthetic
aaacuacuuuacauuucaua

SEQ ID NO: 497502 - RNA, 21 nt, Artificial Sequence
  Synthetic
caaacuacuuuacauuucaua

SEQ ID NO: 497503 - RNA, 22 nt, Artificial Sequence
  Synthetic
acaaacuacuuuacauuucaua

SEQ ID NO: 497504 - RNA, 23 nt, Artificial Sequence
  Synthetic
aacaaacuacuuuacauuucaua

SEQ ID NO: 497505 - RNA, 24 nt, Artificial Sequence
  Synthetic
gaacaaacuacuuuacauuucaua

SEQ ID NO: 497506 - RNA, 18 nt, Artificial Sequence
  Synthetic
uuggaaauucauuucaua

SEQ ID NO: 497507 - RNA, 19 nt, Artificial Sequence
  Synthetic
uuuggaaauucauuucaua

SEQ ID NO: 497508 - RNA, 20 nt, Artificial Sequence
  Synthetic
auuuggaaauucauuucaua

SEQ ID NO: 497509 - RNA, 21 nt, Artificial Sequence
  Synthetic
gauuuggaaauucauuucaua

SEQ ID NO: 497510 - RNA, 22 nt, Artificial Sequence
  Synthetic
ggauuuggaaauucauuucaua

SEQ ID NO: 497511 - RNA, 23 nt, Artificial Sequence
  Synthetic
aggauuuggaaauucauuucaua

SEQ ID NO: 497512 - RNA, 24 nt, Artificial Sequence
  Synthetic
aaggauuuggaaauucauuucaua

SEQ ID NO: 497513 - RNA, 18 nt, Artificial Sequence
  Synthetic
aguuauggugauuucaua

SEQ ID NO: 497514 - RNA, 19 nt, Artificial Sequence
  Synthetic
uaguuauggugauuucaua

SEQ ID NO: 497515 - RNA, 20 nt, Artificial Sequence
  Synthetic
guaguuauggugauuucaua

SEQ ID NO: 497516 - RNA, 21 nt, Artificial Sequence
  Synthetic
gguaguuauggugauuucaua

SEQ ID NO: 497517 - RNA, 22 nt, Artificial Sequence
  Synthetic
ugguaguuauggugauuucaua

SEQ ID NO: 497518 - RNA, 23 nt, Artificial Sequence
  Synthetic
uugguaguuauggugauuucaua

SEQ ID NO: 497519 - RNA, 24 nt, Artificial Sequence
  Synthetic
uuugguaguuauggugauuucaua

SEQ ID NO: 497520 - RNA, 18 nt, Artificial Sequence
  Synthetic
uuagcaaaaucuuucaua

SEQ ID NO: 497521 - RNA, 19 nt, Artificial Sequence
  Synthetic
cuuagcaaaaucuuucaua

SEQ ID NO: 497522 - RNA, 20 nt, Artificial Sequence
  Synthetic
acuuagcaaaaucuuucaua

SEQ ID NO: 497523 - RNA, 21 nt, Artificial Sequence
  Synthetic
aacuuagcaaaaucuuucaua

SEQ ID NO: 497524 - RNA, 22 nt, Artificial Sequence
  Synthetic
caacuuagcaaaaucuuucaua

SEQ ID NO: 497525 - RNA, 23 nt, Artificial Sequence
  Synthetic
acaacuuagcaaaaucuuucaua

SEQ ID NO: 497526 - RNA, 24 nt, Artificial Sequence
  Synthetic
aacaacuuagcaaaaucuuucaua

SEQ ID NO: 497527 - RNA, 18 nt, Artificial Sequence
  Synthetic
gccaugcauucuuucaua

SEQ ID NO: 497528 - RNA, 19 nt, Artificial Sequence
  Synthetic
agccaugcauucuuucaua

SEQ ID NO: 497529 - RNA, 20 nt, Artificial Sequence
  Synthetic
uagccaugcauucuuucaua

SEQ ID NO: 497530 - RNA, 21 nt, Artificial Sequence
  Synthetic
guagccaugcauucuuucaua

SEQ ID NO: 497531 - RNA, 22 nt, Artificial Sequence
  Synthetic
gguagccaugcauucuuucaua

SEQ ID NO: 497532 - RNA, 23 nt, Artificial Sequence
  Synthetic
agguagccaugcauucuuucaua

SEQ ID NO: 497533 - RNA, 24 nt, Artificial Sequence
  Synthetic
uagguagccaugcauucuuucaua

SEQ ID NO: 497534 - RNA, 18 nt, Artificial Sequence
  Synthetic
agagcugaugguuucaua

SEQ ID NO: 497535 - RNA, 19 nt, Artificial Sequence
  Synthetic
gagagcugaugguuucaua

SEQ ID NO: 497536 - RNA, 20 nt, Artificial Sequence
  Synthetic
ugagagcugaugguuucaua

SEQ ID NO: 497537 - RNA, 21 nt, Artificial Sequence
  Synthetic
augagagcugaugguuucaua

SEQ ID NO: 497538 - RNA, 22 nt, Artificial Sequence
  Synthetic
caugagagcugaugguuucaua

SEQ ID NO: 497539 - RNA, 23 nt, Artificial Sequence
  Synthetic
ucaugagagcugaugguuucaua

SEQ ID NO: 497540 - RNA, 24 nt, Artificial Sequence
  Synthetic
cucaugagagcugaugguuucaua

SEQ ID NO: 497541 - RNA, 18 nt, Artificial Sequence
  Synthetic
uacaaugugcuuuucaua

SEQ ID NO: 497542 - RNA, 19 nt, Artificial Sequence
  Synthetic
cuacaaugugcuuuucaua

SEQ ID NO: 497543 - RNA, 20 nt, Artificial Sequence
  Synthetic
ucuacaaugugcuuuucaua

SEQ ID NO: 497544 - RNA, 21 nt, Artificial Sequence
  Synthetic
gucuacaaugugcuuuucaua

SEQ ID NO: 497545 - RNA, 22 nt, Artificial Sequence
  Synthetic
ugucuacaaugugcuuuucaua

SEQ ID NO: 497546 - RNA, 23 nt, Artificial Sequence
  Synthetic
uugucuacaaugugcuuuucaua

SEQ ID NO: 497547 - RNA, 24 nt, Artificial Sequence
  Synthetic
uuugucuacaaugugcuuuucaua

SEQ ID NO: 497548 - RNA, 18 nt, Artificial Sequence
  Synthetic
ugcagcaacaaaaagaua

SEQ ID NO: 497549 - RNA, 19 nt, Artificial Sequence
  Synthetic
uugcagcaacaaaaagaua

SEQ ID NO: 497550 - RNA, 20 nt, Artificial Sequence
  Synthetic
auugcagcaacaaaaagaua

SEQ ID NO: 497551 - RNA, 21 nt, Artificial Sequence
  Synthetic
gauugcagcaacaaaaagaua

SEQ ID NO: 497552 - RNA, 22 nt, Artificial Sequence
  Synthetic
agauugcagcaacaaaaagaua

SEQ ID NO: 497553 - RNA, 23 nt, Artificial Sequence
  Synthetic
uagauugcagcaacaaaaagaua

SEQ ID NO: 497554 - RNA, 24 nt, Artificial Sequence
  Synthetic
guagauugcagcaacaaaaagaua

SEQ ID NO: 497555 - RNA, 18 nt, Artificial Sequence
  Synthetic
aaacuauuucaaaagaua

SEQ ID NO: 497556 - RNA, 19 nt, Artificial Sequence
  Synthetic
gaaacuauuucaaaagaua

SEQ ID NO: 497557 - RNA, 20 nt, Artificial Sequence
  Synthetic
ugaaacuauuucaaaagaua

SEQ ID NO: 497558 - RNA, 21 nt, Artificial Sequence
  Synthetic
augaaacuauuucaaaagaua

SEQ ID NO: 497559 - RNA, 22 nt, Artificial Sequence
  Synthetic
aaugaaacuauuucaaaagaua

SEQ ID NO: 497560 - RNA, 23 nt, Artificial Sequence
  Synthetic
uaaugaaacuauuucaaaagaua

SEQ ID NO: 497561 - RNA, 24 nt, Artificial Sequence
  Synthetic
auaaugaaacuauuucaaaagaua

SEQ ID NO: 497562 - RNA, 18 nt, Artificial Sequence
  Synthetic
aaccguaaauaaaagaua

SEQ ID NO: 497563 - RNA, 19 nt, Artificial Sequence
  Synthetic
uaaccguaaauaaaagaua

SEQ ID NO: 497564 - RNA, 20 nt, Artificial Sequence
  Synthetic
auaaccguaaauaaaagaua

SEQ ID NO: 497565 - RNA, 21 nt, Artificial Sequence
  Synthetic
aauaaccguaaauaaaagaua

SEQ ID NO: 497566 - RNA, 22 nt, Artificial Sequence
  Synthetic
caauaaccguaaauaaaagaua

SEQ ID NO: 497567 - RNA, 23 nt, Artificial Sequence
  Synthetic
gcaauaaccguaaauaaaagaua

SEQ ID NO: 497568 - RNA, 24 nt, Artificial Sequence
  Synthetic
agcaauaaccguaaauaaaagaua

SEQ ID NO: 497569 - RNA, 18 nt, Artificial Sequence
  Synthetic
uccauaaauuaaaagaua

SEQ ID NO: 497570 - RNA, 19 nt, Artificial Sequence
  Synthetic
auccauaaauuaaaagaua

SEQ ID NO: 497571 - RNA, 20 nt, Artificial Sequence
  Synthetic
aauccauaaauuaaaagaua

SEQ ID NO: 497572 - RNA, 21 nt, Artificial Sequence
  Synthetic
aaauccauaaauuaaaagaua

SEQ ID NO: 497573 - RNA, 22 nt, Artificial Sequence
  Synthetic
aaaauccauaaauuaaaagaua

SEQ ID NO: 497574 - RNA, 23 nt, Artificial Sequence
  Synthetic
uaaaauccauaaauuaaaagaua

SEQ ID NO: 497575 - RNA, 24 nt, Artificial Sequence
  Synthetic
auaaaauccauaaauuaaaagaua

SEQ ID NO: 497576 - RNA, 18 nt, Artificial Sequence
  Synthetic
acaaaguuaggaaagaua

SEQ ID NO: 497577 - RNA, 19 nt, Artificial Sequence
  Synthetic
uacaaaguuaggaaagaua

SEQ ID NO: 497578 - RNA, 20 nt, Artificial Sequence
  Synthetic
guacaaaguuaggaaagaua

SEQ ID NO: 497579 - RNA, 21 nt, Artificial Sequence
  Synthetic
gguacaaaguuaggaaagaua

SEQ ID NO: 497580 - RNA, 22 nt, Artificial Sequence
  Synthetic
agguacaaaguuaggaaagaua

SEQ ID NO: 497581 - RNA, 23 nt, Artificial Sequence
  Synthetic
uagguacaaaguuaggaaagaua

SEQ ID NO: 497582 - RNA, 24 nt, Artificial Sequence
  Synthetic
uuagguacaaaguuaggaaagaua

SEQ ID NO: 497583 - RNA, 18 nt, Artificial Sequence
  Synthetic
auaugggauggaaagaua

SEQ ID NO: 497584 - RNA, 19 nt, Artificial Sequence
  Synthetic
aauaugggauggaaagaua

SEQ ID NO: 497585 - RNA, 20 nt, Artificial Sequence
  Synthetic
aaauaugggauggaaagaua

SEQ ID NO: 497586 - RNA, 21 nt, Artificial Sequence
  Synthetic
gaaauaugggauggaaagaua

SEQ ID NO: 497587 - RNA, 22 nt, Artificial Sequence
  Synthetic
agaaauaugggauggaaagaua

SEQ ID NO: 497588 - RNA, 23 nt, Artificial Sequence
  Synthetic
gagaaauaugggauggaaagaua

SEQ ID NO: 497589 - RNA, 24 nt, Artificial Sequence
  Synthetic
agagaaauaugggauggaaagaua

SEQ ID NO: 497590 - RNA, 18 nt, Artificial Sequence
  Synthetic
gaaacagggugaaagaua

SEQ ID NO: 497591 - RNA, 19 nt, Artificial Sequence
  Synthetic
agaaacagggugaaagaua

SEQ ID NO: 497592 - RNA, 20 nt, Artificial Sequence
  Synthetic
aagaaacagggugaaagaua

SEQ ID NO: 497593 - RNA, 21 nt, Artificial Sequence
  Synthetic
aaagaaacagggugaaagaua

SEQ ID NO: 497594 - RNA, 22 nt, Artificial Sequence
  Synthetic
aaaagaaacagggugaaagaua

SEQ ID NO: 497595 - RNA, 23 nt, Artificial Sequence
  Synthetic
gaaaagaaacagggugaaagaua

SEQ ID NO: 497596 - RNA, 24 nt, Artificial Sequence
  Synthetic
ugaaaagaaacagggugaaagaua

SEQ ID NO: 497597 - RNA, 18 nt, Artificial Sequence
  Synthetic
cagacaguaaacaagaua

SEQ ID NO: 497598 - RNA, 19 nt, Artificial Sequence
  Synthetic
gcagacaguaaacaagaua

SEQ ID NO: 497599 - RNA, 20 nt, Artificial Sequence
  Synthetic
ggcagacaguaaacaagaua

SEQ ID NO: 497600 - RNA, 21 nt, Artificial Sequence
  Synthetic
aggcagacaguaaacaagaua

SEQ ID NO: 497601 - RNA, 22 nt, Artificial Sequence
  Synthetic
gaggcagacaguaaacaagaua

SEQ ID NO: 497602 - RNA, 23 nt, Artificial Sequence
  Synthetic
ggaggcagacaguaaacaagaua

SEQ ID NO: 497603 - RNA, 24 nt, Artificial Sequence
  Synthetic
gggaggcagacaguaaacaagaua

SEQ ID NO: 497604 - RNA, 18 nt, Artificial Sequence
  Synthetic
uuucuucacagcaagaua

SEQ ID NO: 497605 - RNA, 19 nt, Artificial Sequence
  Synthetic
uuuucuucacagcaagaua

SEQ ID NO: 497606 - RNA, 20 nt, Artificial Sequence
  Synthetic
auuuucuucacagcaagaua

SEQ ID NO: 497607 - RNA, 21 nt, Artificial Sequence
  Synthetic
aauuuucuucacagcaagaua

SEQ ID NO: 497608 - RNA, 22 nt, Artificial Sequence
  Synthetic
uaauuuucuucacagcaagaua

SEQ ID NO: 497609 - RNA, 23 nt, Artificial Sequence
  Synthetic
uuaauuuucuucacagcaagaua

SEQ ID NO: 497610 - RNA, 24 nt, Artificial Sequence
  Synthetic
cuuaauuuucuucacagcaagaua

SEQ ID NO: 497611 - RNA, 18 nt, Artificial Sequence
  Synthetic
auuugcaauugcaagaua

SEQ ID NO: 497612 - RNA, 19 nt, Artificial Sequence
  Synthetic
aauuugcaauugcaagaua

SEQ ID NO: 497613 - RNA, 20 nt, Artificial Sequence
  Synthetic
caauuugcaauugcaagaua

SEQ ID NO: 497614 - RNA, 21 nt, Artificial Sequence
  Synthetic
acaauuugcaauugcaagaua

SEQ ID NO: 497615 - RNA, 22 nt, Artificial Sequence
  Synthetic
cacaauuugcaauugcaagaua

SEQ ID NO: 497616 - RNA, 23 nt, Artificial Sequence
  Synthetic
gcacaauuugcaauugcaagaua

SEQ ID NO: 497617 - RNA, 24 nt, Artificial Sequence
  Synthetic
agcacaauuugcaauugcaagaua

SEQ ID NO: 497618 - RNA, 18 nt, Artificial Sequence
  Synthetic
cagaauauuugcaagaua

SEQ ID NO: 497619 - RNA, 19 nt, Artificial Sequence
  Synthetic
gcagaauauuugcaagaua

SEQ ID NO: 497620 - RNA, 20 nt, Artificial Sequence
  Synthetic
ugcagaauauuugcaagaua

SEQ ID NO: 497621 - RNA, 21 nt, Artificial Sequence
  Synthetic
uugcagaauauuugcaagaua

SEQ ID NO: 497622 - RNA, 22 nt, Artificial Sequence
  Synthetic
cuugcagaauauuugcaagaua

SEQ ID NO: 497623 - RNA, 23 nt, Artificial Sequence
  Synthetic
gcuugcagaauauuugcaagaua

SEQ ID NO: 497624 - RNA, 24 nt, Artificial Sequence
  Synthetic
agcuugcagaauauuugcaagaua

SEQ ID NO: 497625 - RNA, 18 nt, Artificial Sequence
  Synthetic
guguauguucucaagaua

SEQ ID NO: 497626 - RNA, 19 nt, Artificial Sequence
  Synthetic
uguguauguucucaagaua

SEQ ID NO: 497627 - RNA, 20 nt, Artificial Sequence
  Synthetic
uuguguauguucucaagaua

SEQ ID NO: 497628 - RNA, 21 nt, Artificial Sequence
  Synthetic
uuuguguauguucucaagaua

SEQ ID NO: 497629 - RNA, 22 nt, Artificial Sequence
  Synthetic
auuuguguauguucucaagaua

SEQ ID NO: 497630 - RNA, 23 nt, Artificial Sequence
  Synthetic
aauuuguguauguucucaagaua

SEQ ID NO: 497631 - RNA, 24 nt, Artificial Sequence
  Synthetic
uaauuuguguauguucucaagaua

SEQ ID NO: 497632 - RNA, 18 nt, Artificial Sequence
  Synthetic
auuucuccaaagaagaua

SEQ ID NO: 497633 - RNA, 19 nt, Artificial Sequence
  Synthetic
cauuucuccaaagaagaua

SEQ ID NO: 497634 - RNA, 20 nt, Artificial Sequence
  Synthetic
acauuucuccaaagaagaua

SEQ ID NO: 497635 - RNA, 21 nt, Artificial Sequence
  Synthetic
gacauuucuccaaagaagaua

SEQ ID NO: 497636 - RNA, 22 nt, Artificial Sequence
  Synthetic
agacauuucuccaaagaagaua

SEQ ID NO: 497637 - RNA, 23 nt, Artificial Sequence
  Synthetic
uagacauuucuccaaagaagaua

SEQ ID NO: 497638 - RNA, 24 nt, Artificial Sequence
  Synthetic
auagacauuucuccaaagaagaua

SEQ ID NO: 497639 - RNA, 18 nt, Artificial Sequence
  Synthetic
uaaauacucaagaagaua

SEQ ID NO: 497640 - RNA, 19 nt, Artificial Sequence
  Synthetic
auaaauacucaagaagaua

SEQ ID NO: 497641 - RNA, 20 nt, Artificial Sequence
  Synthetic
aauaaauacucaagaagaua

SEQ ID NO: 497642 - RNA, 21 nt, Artificial Sequence
  Synthetic
aaauaaauacucaagaagaua

SEQ ID NO: 497643 - RNA, 22 nt, Artificial Sequence
  Synthetic
gaaauaaauacucaagaagaua

SEQ ID NO: 497644 - RNA, 23 nt, Artificial Sequence
  Synthetic
ggaaauaaauacucaagaagaua

SEQ ID NO: 497645 - RNA, 24 nt, Artificial Sequence
  Synthetic
gggaaauaaauacucaagaagaua

SEQ ID NO: 497646 - RNA, 18 nt, Artificial Sequence
  Synthetic
uauuuucacgagaagaua

SEQ ID NO: 497647 - RNA, 19 nt, Artificial Sequence
  Synthetic
cuauuuucacgagaagaua

SEQ ID NO: 497648 - RNA, 20 nt, Artificial Sequence
  Synthetic
gcuauuuucacgagaagaua

SEQ ID NO: 497649 - RNA, 21 nt, Artificial Sequence
  Synthetic
agcuauuuucacgagaagaua

SEQ ID NO: 497650 - RNA, 22 nt, Artificial Sequence
  Synthetic
uagcuauuuucacgagaagaua

SEQ ID NO: 497651 - RNA, 23 nt, Artificial Sequence
  Synthetic
uuagcuauuuucacgagaagaua

SEQ ID NO: 497652 - RNA, 24 nt, Artificial Sequence
  Synthetic
uuuagcuauuuucacgagaagaua

SEQ ID NO: 497653 - RNA, 18 nt, Artificial Sequence
  Synthetic
guaguauacuagaagaua

SEQ ID NO: 497654 - RNA, 19 nt, Artificial Sequence
  Synthetic
aguaguauacuagaagaua

SEQ ID NO: 497655 - RNA, 20 nt, Artificial Sequence
  Synthetic
aaguaguauacuagaagaua

SEQ ID NO: 497656 - RNA, 21 nt, Artificial Sequence
  Synthetic
caaguaguauacuagaagaua

SEQ ID NO: 497657 - RNA, 22 nt, Artificial Sequence
  Synthetic
acaaguaguauacuagaagaua

SEQ ID NO: 497658 - RNA, 23 nt, Artificial Sequence
  Synthetic
uacaaguaguauacuagaagaua

SEQ ID NO: 497659 - RNA, 24 nt, Artificial Sequence
  Synthetic
auacaaguaguauacuagaagaua

SEQ ID NO: 497660 - RNA, 18 nt, Artificial Sequence
  Synthetic
aaauaucaaaugaagaua

SEQ ID NO: 497661 - RNA, 19 nt, Artificial Sequence
  Synthetic
uaaauaucaaaugaagaua

SEQ ID NO: 497662 - RNA, 20 nt, Artificial Sequence
  Synthetic
cuaaauaucaaaugaagaua

SEQ ID NO: 497663 - RNA, 21 nt, Artificial Sequence
  Synthetic
acuaaauaucaaaugaagaua

SEQ ID NO: 497664 - RNA, 22 nt, Artificial Sequence
  Synthetic
gacuaaauaucaaaugaagaua

SEQ ID NO: 497665 - RNA, 23 nt, Artificial Sequence
  Synthetic
ugacuaaauaucaaaugaagaua

SEQ ID NO: 497666 - RNA, 24 nt, Artificial Sequence
  Synthetic
uugacuaaauaucaaaugaagaua

SEQ ID NO: 497667 - RNA, 18 nt, Artificial Sequence
  Synthetic
cuacuuaacgugaagaua

SEQ ID NO: 497668 - RNA, 19 nt, Artificial Sequence
  Synthetic
ccuacuuaacgugaagaua

SEQ ID NO: 497669 - RNA, 20 nt, Artificial Sequence
  Synthetic
gccuacuuaacgugaagaua

SEQ ID NO: 497670 - RNA, 21 nt, Artificial Sequence
  Synthetic
agccuacuuaacgugaagaua

SEQ ID NO: 497671 - RNA, 22 nt, Artificial Sequence
  Synthetic
cagccuacuuaacgugaagaua

SEQ ID NO: 497672 - RNA, 23 nt, Artificial Sequence
  Synthetic
ucagccuacuuaacgugaagaua

SEQ ID NO: 497673 - RNA, 24 nt, Artificial Sequence
  Synthetic
cucagccuacuuaacgugaagaua

SEQ ID NO: 497674 - RNA, 18 nt, Artificial Sequence
  Synthetic
cauuuuccauauaagaua

SEQ ID NO: 497675 - RNA, 19 nt, Artificial Sequence
  Synthetic
ucauuuuccauauaagaua

SEQ ID NO: 497676 - RNA, 20 nt, Artificial Sequence
  Synthetic
uucauuuuccauauaagaua

SEQ ID NO: 497677 - RNA, 21 nt, Artificial Sequence
  Synthetic
cuucauuuuccauauaagaua

SEQ ID NO: 497678 - RNA, 22 nt, Artificial Sequence
  Synthetic
ucuucauuuuccauauaagaua

SEQ ID NO: 497679 - RNA, 23 nt, Artificial Sequence
  Synthetic
aucuucauuuuccauauaagaua

SEQ ID NO: 497680 - RNA, 24 nt, Artificial Sequence
  Synthetic
uaucuucauuuuccauauaagaua

SEQ ID NO: 497681 - RNA, 18 nt, Artificial Sequence
  Synthetic
acauuguugacuaagaua

SEQ ID NO: 497682 - RNA, 19 nt, Artificial Sequence
  Synthetic
aacauuguugacuaagaua

SEQ ID NO: 497683 - RNA, 20 nt, Artificial Sequence
  Synthetic
aaacauuguugacuaagaua

SEQ ID NO: 497684 - RNA, 21 nt, Artificial Sequence
  Synthetic
uaaacauuguugacuaagaua

SEQ ID NO: 497685 - RNA, 22 nt, Artificial Sequence
  Synthetic
guaaacauuguugacuaagaua

SEQ ID NO: 497686 - RNA, 23 nt, Artificial Sequence
  Synthetic
aguaaacauuguugacuaagaua

SEQ ID NO: 497687 - RNA, 24 nt, Artificial Sequence
  Synthetic
caguaaacauuguugacuaagaua

SEQ ID NO: 497688 - RNA, 18 nt, Artificial Sequence
  Synthetic
uucuucucuauuaagaua

SEQ ID NO: 497689 - RNA, 19 nt, Artificial Sequence
  Synthetic
auucuucucuauuaagaua

SEQ ID NO: 497690 - RNA, 20 nt, Artificial Sequence
  Synthetic
cauucuucucuauuaagaua

SEQ ID NO: 497691 - RNA, 21 nt, Artificial Sequence
  Synthetic
acauucuucucuauuaagaua

SEQ ID NO: 497692 - RNA, 22 nt, Artificial Sequence
  Synthetic
aacauucuucucuauuaagaua

SEQ ID NO: 497693 - RNA, 23 nt, Artificial Sequence
  Synthetic
aaacauucuucucuauuaagaua

SEQ ID NO: 497694 - RNA, 24 nt, Artificial Sequence
  Synthetic
aaaacauucuucucuauuaagaua

SEQ ID NO: 497695 - RNA, 18 nt, Artificial Sequence
  Synthetic
gaacugaacaaacagaua

SEQ ID NO: 497696 - RNA, 19 nt, Artificial Sequence
  Synthetic
agaacugaacaaacagaua

SEQ ID NO: 497697 - RNA, 20 nt, Artificial Sequence
  Synthetic
aagaacugaacaaacagaua

SEQ ID NO: 497698 - RNA, 21 nt, Artificial Sequence
  Synthetic
aaagaacugaacaaacagaua

SEQ ID NO: 497699 - RNA, 22 nt, Artificial Sequence
  Synthetic
uaaagaacugaacaaacagaua

SEQ ID NO: 497700 - RNA, 23 nt, Artificial Sequence
  Synthetic
uuaaagaacugaacaaacagaua

SEQ ID NO: 497701 - RNA, 24 nt, Artificial Sequence
  Synthetic
uuuaaagaacugaacaaacagaua

SEQ ID NO: 497702 - RNA, 18 nt, Artificial Sequence
  Synthetic
uuugaggaucaacagaua

SEQ ID NO: 497703 - RNA, 19 nt, Artificial Sequence
  Synthetic
auuugaggaucaacagaua

SEQ ID NO: 497704 - RNA, 20 nt, Artificial Sequence
  Synthetic
cauuugaggaucaacagaua

SEQ ID NO: 497705 - RNA, 21 nt, Artificial Sequence
  Synthetic
ccauuugaggaucaacagaua

SEQ ID NO: 497706 - RNA, 22 nt, Artificial Sequence
  Synthetic
gccauuugaggaucaacagaua

SEQ ID NO: 497707 - RNA, 23 nt, Artificial Sequence
  Synthetic
agccauuugaggaucaacagaua

SEQ ID NO: 497708 - RNA, 24 nt, Artificial Sequence
  Synthetic
aagccauuugaggaucaacagaua

SEQ ID NO: 497709 - RNA, 18 nt, Artificial Sequence
  Synthetic
gcacuuccauaacagaua

SEQ ID NO: 497710 - RNA, 19 nt, Artificial Sequence
  Synthetic
agcacuuccauaacagaua

SEQ ID NO: 497711 - RNA, 20 nt, Artificial Sequence
  Synthetic
uagcacuuccauaacagaua

SEQ ID NO: 497712 - RNA, 21 nt, Artificial Sequence
  Synthetic
uuagcacuuccauaacagaua

SEQ ID NO: 497713 - RNA, 22 nt, Artificial Sequence
  Synthetic
auuagcacuuccauaacagaua

SEQ ID NO: 497714 - RNA, 23 nt, Artificial Sequence
  Synthetic
gauuagcacuuccauaacagaua

SEQ ID NO: 497715 - RNA, 24 nt, Artificial Sequence
  Synthetic
agauuagcacuuccauaacagaua

SEQ ID NO: 497716 - RNA, 18 nt, Artificial Sequence
  Synthetic
uaacucugaagacagaua

SEQ ID NO: 497717 - RNA, 19 nt, Artificial Sequence
  Synthetic
guaacucugaagacagaua

SEQ ID NO: 497718 - RNA, 20 nt, Artificial Sequence
  Synthetic
uguaacucugaagacagaua

SEQ ID NO: 497719 - RNA, 21 nt, Artificial Sequence
  Synthetic
uuguaacucugaagacagaua

SEQ ID NO: 497720 - RNA, 22 nt, Artificial Sequence
  Synthetic
uuuguaacucugaagacagaua

SEQ ID NO: 497721 - RNA, 23 nt, Artificial Sequence
  Synthetic
uuuuguaacucugaagacagaua

SEQ ID NO: 497722 - RNA, 24 nt, Artificial Sequence
  Synthetic
uuuuuguaacucugaagacagaua

SEQ ID NO: 497723 - RNA, 18 nt, Artificial Sequence
  Synthetic
ggauucagccuacagaua

SEQ ID NO: 497724 - RNA, 19 nt, Artificial Sequence
  Synthetic
aggauucagccuacagaua

SEQ ID NO: 497725 - RNA, 20 nt, Artificial Sequence
  Synthetic
uaggauucagccuacagaua

SEQ ID NO: 497726 - RNA, 21 nt, Artificial Sequence
  Synthetic
uuaggauucagccuacagaua

SEQ ID NO: 497727 - RNA, 22 nt, Artificial Sequence
  Synthetic
auuaggauucagccuacagaua

SEQ ID NO: 497728 - RNA, 23 nt, Artificial Sequence
  Synthetic
uauuaggauucagccuacagaua

SEQ ID NO: 497729 - RNA, 24 nt, Artificial Sequence
  Synthetic
auauuaggauucagccuacagaua

SEQ ID NO: 497730 - RNA, 18 nt, Artificial Sequence
  Synthetic
aaagacauuguacagaua

SEQ ID NO: 497731 - RNA, 19 nt, Artificial Sequence
  Synthetic
aaaagacauuguacagaua

SEQ ID NO: 497732 - RNA, 20 nt, Artificial Sequence
  Synthetic
gaaaagacauuguacagaua

SEQ ID NO: 497733 - RNA, 21 nt, Artificial Sequence
  Synthetic
ggaaaagacauuguacagaua

SEQ ID NO: 497734 - RNA, 22 nt, Artificial Sequence
  Synthetic
uggaaaagacauuguacagaua

SEQ ID NO: 497735 - RNA, 23 nt, Artificial Sequence
  Synthetic
cuggaaaagacauuguacagaua

SEQ ID NO: 497736 - RNA, 24 nt, Artificial Sequence
  Synthetic
gcuggaaaagacauuguacagaua

SEQ ID NO: 497737 - RNA, 18 nt, Artificial Sequence
  Synthetic
aucuugaagaaccagaua

SEQ ID NO: 497738 - RNA, 19 nt, Artificial Sequence
  Synthetic
aaucuugaagaaccagaua

SEQ ID NO: 497739 - RNA, 20 nt, Artificial Sequence
  Synthetic
uaaucuugaagaaccagaua

SEQ ID NO: 497740 - RNA, 21 nt, Artificial Sequence
  Synthetic
uuaaucuugaagaaccagaua

SEQ ID NO: 497741 - RNA, 22 nt, Artificial Sequence
  Synthetic
guuaaucuugaagaaccagaua

SEQ ID NO: 497742 - RNA, 23 nt, Artificial Sequence
  Synthetic
aguuaaucuugaagaaccagaua

SEQ ID NO: 497743 - RNA, 24 nt, Artificial Sequence
  Synthetic
aaguuaaucuugaagaaccagaua

SEQ ID NO: 497744 - RNA, 18 nt, Artificial Sequence
  Synthetic
uuggaaagacaccagaua

SEQ ID NO: 497745 - RNA, 19 nt, Artificial Sequence
  Synthetic
uuuggaaagacaccagaua

SEQ ID NO: 497746 - RNA, 20 nt, Artificial Sequence
  Synthetic
guuuggaaagacaccagaua

SEQ ID NO: 497747 - RNA, 21 nt, Artificial Sequence
  Synthetic
uguuuggaaagacaccagaua

SEQ ID NO: 497748 - RNA, 22 nt, Artificial Sequence
  Synthetic
cuguuuggaaagacaccagaua

SEQ ID NO: 497749 - RNA, 23 nt, Artificial Sequence
  Synthetic
gcuguuuggaaagacaccagaua

SEQ ID NO: 497750 - RNA, 24 nt, Artificial Sequence
  Synthetic
ugcuguuuggaaagacaccagaua

SEQ ID NO: 497751 - RNA, 18 nt, Artificial Sequence
  Synthetic
gauuccaucacccagaua

SEQ ID NO: 497752 - RNA, 19 nt, Artificial Sequence
  Synthetic
ugauuccaucacccagaua

SEQ ID NO: 497753 - RNA, 20 nt, Artificial Sequence
  Synthetic
uugauuccaucacccagaua

SEQ ID NO: 497754 - RNA, 21 nt, Artificial Sequence
  Synthetic
guugauuccaucacccagaua

SEQ ID NO: 497755 - RNA, 22 nt, Artificial Sequence
  Synthetic
uguugauuccaucacccagaua

SEQ ID NO: 497756 - RNA, 23 nt, Artificial Sequence
  Synthetic
cuguugauuccaucacccagaua

SEQ ID NO: 497757 - RNA, 24 nt, Artificial Sequence
  Synthetic
ucuguugauuccaucacccagaua

SEQ ID NO: 497758 - RNA, 18 nt, Artificial Sequence
  Synthetic
aagaacccuaugcagaua

SEQ ID NO: 497759 - RNA, 19 nt, Artificial Sequence
  Synthetic
gaagaacccuaugcagaua

SEQ ID NO: 497760 - RNA, 20 nt, Artificial Sequence
  Synthetic
agaagaacccuaugcagaua

SEQ ID NO: 497761 - RNA, 21 nt, Artificial Sequence
  Synthetic
cagaagaacccuaugcagaua

SEQ ID NO: 497762 - RNA, 22 nt, Artificial Sequence
  Synthetic
gcagaagaacccuaugcagaua

SEQ ID NO: 497763 - RNA, 23 nt, Artificial Sequence
  Synthetic
agcagaagaacccuaugcagaua

SEQ ID NO: 497764 - RNA, 24 nt, Artificial Sequence
  Synthetic
gagcagaagaacccuaugcagaua

SEQ ID NO: 497765 - RNA, 18 nt, Artificial Sequence
  Synthetic
ucaaugguagaucagaua

SEQ ID NO: 497766 - RNA, 19 nt, Artificial Sequence
  Synthetic
aucaaugguagaucagaua

SEQ ID NO: 497767 - RNA, 20 nt, Artificial Sequence
  Synthetic
caucaaugguagaucagaua

SEQ ID NO: 497768 - RNA, 21 nt, Artificial Sequence
  Synthetic
ccaucaaugguagaucagaua

SEQ ID NO: 497769 - RNA, 22 nt, Artificial Sequence
  Synthetic
cccaucaaugguagaucagaua

SEQ ID NO: 497770 - RNA, 23 nt, Artificial Sequence
  Synthetic
gcccaucaaugguagaucagaua

SEQ ID NO: 497771 - RNA, 24 nt, Artificial Sequence
  Synthetic
ugcccaucaaugguagaucagaua

SEQ ID NO: 497772 - RNA, 18 nt, Artificial Sequence
  Synthetic
ugcuauagcagagagaua

SEQ ID NO: 497773 - RNA, 19 nt, Artificial Sequence
  Synthetic
cugcuauagcagagagaua

SEQ ID NO: 497774 - RNA, 20 nt, Artificial Sequence
  Synthetic
acugcuauagcagagagaua

SEQ ID NO: 497775 - RNA, 21 nt, Artificial Sequence
  Synthetic
uacugcuauagcagagagaua

SEQ ID NO: 497776 - RNA, 22 nt, Artificial Sequence
  Synthetic
uuacugcuauagcagagagaua

SEQ ID NO: 497777 - RNA, 23 nt, Artificial Sequence
  Synthetic
uuuacugcuauagcagagagaua

SEQ ID NO: 497778 - RNA, 24 nt, Artificial Sequence
  Synthetic
auuuacugcuauagcagagagaua

SEQ ID NO: 497779 - RNA, 18 nt, Artificial Sequence
  Synthetic
aauggaaucagagagaua

SEQ ID NO: 497780 - RNA, 19 nt, Artificial Sequence
  Synthetic
aaauggaaucagagagaua

SEQ ID NO: 497781 - RNA, 20 nt, Artificial Sequence
  Synthetic
gaaauggaaucagagagaua

SEQ ID NO: 497782 - RNA, 21 nt, Artificial Sequence
  Synthetic
agaaauggaaucagagagaua

SEQ ID NO: 497783 - RNA, 22 nt, Artificial Sequence
  Synthetic
cagaaauggaaucagagagaua

SEQ ID NO: 497784 - RNA, 23 nt, Artificial Sequence
  Synthetic
acagaaauggaaucagagagaua

SEQ ID NO: 497785 - RNA, 24 nt, Artificial Sequence
  Synthetic
aacagaaauggaaucagagagaua

SEQ ID NO: 497786 - RNA, 18 nt, Artificial Sequence
  Synthetic
cccuauauaugagagaua

SEQ ID NO: 497787 - RNA, 19 nt, Artificial Sequence
  Synthetic
gcccuauauaugagagaua

SEQ ID NO: 497788 - RNA, 20 nt, Artificial Sequence
  Synthetic
ugcccuauauaugagagaua

SEQ ID NO: 497789 - RNA, 21 nt, Artificial Sequence
  Synthetic
augcccuauauaugagagaua

SEQ ID NO: 497790 - RNA, 22 nt, Artificial Sequence
  Synthetic
gaugcccuauauaugagagaua

SEQ ID NO: 497791 - RNA, 23 nt, Artificial Sequence
  Synthetic
ugaugcccuauauaugagagaua

SEQ ID NO: 497792 - RNA, 24 nt, Artificial Sequence
  Synthetic
gugaugcccuauauaugagagaua

SEQ ID NO: 497793 - RNA, 18 nt, Artificial Sequence
  Synthetic
cuacauuacugagagaua

SEQ ID NO: 497794 - RNA, 19 nt, Artificial Sequence
  Synthetic
ccuacauuacugagagaua

SEQ ID NO: 497795 - RNA, 20 nt, Artificial Sequence
  Synthetic
uccuacauuacugagagaua

SEQ ID NO: 497796 - RNA, 21 nt, Artificial Sequence
  Synthetic
cuccuacauuacugagagaua

SEQ ID NO: 497797 - RNA, 22 nt, Artificial Sequence
  Synthetic
acuccuacauuacugagagaua

SEQ ID NO: 497798 - RNA, 23 nt, Artificial Sequence
  Synthetic
cacuccuacauuacugagagaua

SEQ ID NO: 497799 - RNA, 24 nt, Artificial Sequence
  Synthetic
ucacuccuacauuacugagagaua

SEQ ID NO: 497800 - RNA, 18 nt, Artificial Sequence
  Synthetic
agaaaaacuguagagaua

SEQ ID NO: 497801 - RNA, 19 nt, Artificial Sequence
  Synthetic
aagaaaaacuguagagaua

SEQ ID NO: 497802 - RNA, 20 nt, Artificial Sequence
  Synthetic
aaagaaaaacuguagagaua

SEQ ID NO: 497803 - RNA, 21 nt, Artificial Sequence
  Synthetic
uaaagaaaaacuguagagaua

SEQ ID NO: 497804 - RNA, 22 nt, Artificial Sequence
  Synthetic
auaaagaaaaacuguagagaua

SEQ ID NO: 497805 - RNA, 23 nt, Artificial Sequence
  Synthetic
cauaaagaaaaacuguagagaua

SEQ ID NO: 497806 - RNA, 24 nt, Artificial Sequence
  Synthetic
gcauaaagaaaaacuguagagaua

SEQ ID NO: 497807 - RNA, 18 nt, Artificial Sequence
  Synthetic
caaaaaucagaggagaua

SEQ ID NO: 497808 - RNA, 19 nt, Artificial Sequence
  Synthetic
acaaaaaucagaggagaua

SEQ ID NO: 497809 - RNA, 20 nt, Artificial Sequence
  Synthetic
aacaaaaaucagaggagaua

SEQ ID NO: 497810 - RNA, 21 nt, Artificial Sequence
  Synthetic
gaacaaaaaucagaggagaua

SEQ ID NO: 497811 - RNA, 22 nt, Artificial Sequence
  Synthetic
ggaacaaaaaucagaggagaua

SEQ ID NO: 497812 - RNA, 23 nt, Artificial Sequence
  Synthetic
uggaacaaaaaucagaggagaua

SEQ ID NO: 497813 - RNA, 24 nt, Artificial Sequence
  Synthetic
cuggaacaaaaaucagaggagaua

SEQ ID NO: 497814 - RNA, 18 nt, Artificial Sequence
  Synthetic
aaaugaaugagggagaua

SEQ ID NO: 497815 - RNA, 19 nt, Artificial Sequence
  Synthetic
uaaaugaaugagggagaua

SEQ ID NO: 497816 - RNA, 20 nt, Artificial Sequence
  Synthetic
auaaaugaaugagggagaua

SEQ ID NO: 497817 - RNA, 21 nt, Artificial Sequence
  Synthetic
aauaaaugaaugagggagaua

SEQ ID NO: 497818 - RNA, 22 nt, Artificial Sequence
  Synthetic
aaauaaaugaaugagggagaua

SEQ ID NO: 497819 - RNA, 23 nt, Artificial Sequence
  Synthetic
caaauaaaugaaugagggagaua

SEQ ID NO: 497820 - RNA, 24 nt, Artificial Sequence
  Synthetic
acaaauaaaugaaugagggagaua

SEQ ID NO: 497821 - RNA, 18 nt, Artificial Sequence
  Synthetic
auacaaaauagggagaua

SEQ ID NO: 497822 - RNA, 19 nt, Artificial Sequence
  Synthetic
uauacaaaauagggagaua

SEQ ID NO: 497823 - RNA, 20 nt, Artificial Sequence
  Synthetic
auauacaaaauagggagaua

SEQ ID NO: 497824 - RNA, 21 nt, Artificial Sequence
  Synthetic
cauauacaaaauagggagaua

SEQ ID NO: 497825 - RNA, 22 nt, Artificial Sequence
  Synthetic
ucauauacaaaauagggagaua

SEQ ID NO: 497826 - RNA, 23 nt, Artificial Sequence
  Synthetic
uucauauacaaaauagggagaua

SEQ ID NO: 497827 - RNA, 24 nt, Artificial Sequence
  Synthetic
auucauauacaaaauagggagaua

SEQ ID NO: 497828 - RNA, 18 nt, Artificial Sequence
  Synthetic
ggauguggugaugagaua

SEQ ID NO: 497829 - RNA, 19 nt, Artificial Sequence
  Synthetic
uggauguggugaugagaua

SEQ ID NO: 497830 - RNA, 20 nt, Artificial Sequence
  Synthetic
uuggauguggugaugagaua

SEQ ID NO: 497831 - RNA, 21 nt, Artificial Sequence
  Synthetic
auuggauguggugaugagaua

SEQ ID NO: 497832 - RNA, 22 nt, Artificial Sequence
  Synthetic
uauuggauguggugaugagaua

SEQ ID NO: 497833 - RNA, 23 nt, Artificial Sequence
  Synthetic
auauuggauguggugaugagaua

SEQ ID NO: 497834 - RNA, 24 nt, Artificial Sequence
  Synthetic
aauauuggauguggugaugagaua

SEQ ID NO: 497835 - RNA, 18 nt, Artificial Sequence
  Synthetic
agagccuuuccugagaua

SEQ ID NO: 497836 - RNA, 19 nt, Artificial Sequence
  Synthetic
gagagccuuuccugagaua

SEQ ID NO: 497837 - RNA, 20 nt, Artificial Sequence
  Synthetic
ugagagccuuuccugagaua

SEQ ID NO: 497838 - RNA, 21 nt, Artificial Sequence
  Synthetic
augagagccuuuccugagaua

SEQ ID NO: 497839 - RNA, 22 nt, Artificial Sequence
  Synthetic
aaugagagccuuuccugagaua

SEQ ID NO: 497840 - RNA, 23 nt, Artificial Sequence
  Synthetic
gaaugagagccuuuccugagaua

SEQ ID NO: 497841 - RNA, 24 nt, Artificial Sequence
  Synthetic
agaaugagagccuuuccugagaua

SEQ ID NO: 497842 - RNA, 18 nt, Artificial Sequence
  Synthetic
ccuauaugugcugagaua

SEQ ID NO: 497843 - RNA, 19 nt, Artificial Sequence
  Synthetic
accuauaugugcugagaua

SEQ ID NO: 497844 - RNA, 20 nt, Artificial Sequence
  Synthetic
caccuauaugugcugagaua

SEQ ID NO: 497845 - RNA, 21 nt, Artificial Sequence
  Synthetic
ucaccuauaugugcugagaua

SEQ ID NO: 497846 - RNA, 22 nt, Artificial Sequence
  Synthetic
aucaccuauaugugcugagaua

SEQ ID NO: 497847 - RNA, 23 nt, Artificial Sequence
  Synthetic
aaucaccuauaugugcugagaua

SEQ ID NO: 497848 - RNA, 24 nt, Artificial Sequence
  Synthetic
aaaucaccuauaugugcugagaua

SEQ ID NO: 497849 - RNA, 18 nt, Artificial Sequence
  Synthetic
gucuuuaucugugagaua

SEQ ID NO: 497850 - RNA, 19 nt, Artificial Sequence
  Synthetic
agucuuuaucugugagaua

SEQ ID NO: 497851 - RNA, 20 nt, Artificial Sequence
  Synthetic
gagucuuuaucugugagaua

SEQ ID NO: 497852 - RNA, 21 nt, Artificial Sequence
  Synthetic
ugagucuuuaucugugagaua

SEQ ID NO: 497853 - RNA, 22 nt, Artificial Sequence
  Synthetic
cugagucuuuaucugugagaua

SEQ ID NO: 497854 - RNA, 23 nt, Artificial Sequence
  Synthetic
ucugagucuuuaucugugagaua

SEQ ID NO: 497855 - RNA, 24 nt, Artificial Sequence
  Synthetic
cucugagucuuuaucugugagaua

SEQ ID NO: 497856 - RNA, 18 nt, Artificial Sequence
  Synthetic
guguacuaaacauagaua

SEQ ID NO: 497857 - RNA, 19 nt, Artificial Sequence
  Synthetic
uguguacuaaacauagaua

SEQ ID NO: 497858 - RNA, 20 nt, Artificial Sequence
  Synthetic
guguguacuaaacauagaua

SEQ ID NO: 497859 - RNA, 21 nt, Artificial Sequence
  Synthetic
uguguguacuaaacauagaua

SEQ ID NO: 497860 - RNA, 22 nt, Artificial Sequence
  Synthetic
auguguguacuaaacauagaua

SEQ ID NO: 497861 - RNA, 23 nt, Artificial Sequence
  Synthetic
cauguguguacuaaacauagaua

SEQ ID NO: 497862 - RNA, 24 nt, Artificial Sequence
  Synthetic
gcauguguguacuaaacauagaua

SEQ ID NO: 497863 - RNA, 18 nt, Artificial Sequence
  Synthetic
gccaagucuucauagaua

SEQ ID NO: 497864 - RNA, 19 nt, Artificial Sequence
  Synthetic
ugccaagucuucauagaua

SEQ ID NO: 497865 - RNA, 20 nt, Artificial Sequence
  Synthetic
cugccaagucuucauagaua

SEQ ID NO: 497866 - RNA, 21 nt, Artificial Sequence
  Synthetic
ccugccaagucuucauagaua

SEQ ID NO: 497867 - RNA, 22 nt, Artificial Sequence
  Synthetic
uccugccaagucuucauagaua

SEQ ID NO: 497868 - RNA, 23 nt, Artificial Sequence
  Synthetic
uuccugccaagucuucauagaua

SEQ ID NO: 497869 - RNA, 24 nt, Artificial Sequence
  Synthetic
auuccugccaagucuucauagaua

SEQ ID NO: 497870 - RNA, 18 nt, Artificial Sequence
  Synthetic
aagcaguugugauagaua

SEQ ID NO: 497871 - RNA, 19 nt, Artificial Sequence
  Synthetic
aaagcaguugugauagaua

SEQ ID NO: 497872 - RNA, 20 nt, Artificial Sequence
  Synthetic
aaaagcaguugugauagaua

SEQ ID NO: 497873 - RNA, 21 nt, Artificial Sequence
  Synthetic
gaaaagcaguugugauagaua

SEQ ID NO: 497874 - RNA, 22 nt, Artificial Sequence
  Synthetic
ugaaaagcaguugugauagaua

SEQ ID NO: 497875 - RNA, 23 nt, Artificial Sequence
  Synthetic
uugaaaagcaguugugauagaua

SEQ ID NO: 497876 - RNA, 24 nt, Artificial Sequence
  Synthetic
uuugaaaagcaguugugauagaua

SEQ ID NO: 497877 - RNA, 18 nt, Artificial Sequence
  Synthetic
ucuauauauauauagaua

SEQ ID NO: 497878 - RNA, 19 nt, Artificial Sequence
  Synthetic
aucuauauauauauagaua

SEQ ID NO: 497879 - RNA, 20 nt, Artificial Sequence
  Synthetic
caucuauauauauauagaua

SEQ ID NO: 497880 - RNA, 21 nt, Artificial Sequence
  Synthetic
acaucuauauauauauagaua

SEQ ID NO: 497881 - RNA, 22 nt, Artificial Sequence
  Synthetic
uacaucuauauauauauagaua

SEQ ID NO: 497882 - RNA, 23 nt, Artificial Sequence
  Synthetic
auacaucuauauauauauagaua

SEQ ID NO: 497883 - RNA, 24 nt, Artificial Sequence
  Synthetic
uauacaucuauauauauauagaua

SEQ ID NO: 497884 - RNA, 18 nt, Artificial Sequence
  Synthetic
uuuacugucuacuagaua

SEQ ID NO: 497885 - RNA, 19 nt, Artificial Sequence
  Synthetic
guuuacugucuacuagaua

SEQ ID NO: 497886 - RNA, 20 nt, Artificial Sequence
  Synthetic
uguuuacugucuacuagaua

SEQ ID NO: 497887 - RNA, 21 nt, Artificial Sequence
  Synthetic
auguuuacugucuacuagaua

SEQ ID NO: 497888 - RNA, 22 nt, Artificial Sequence
  Synthetic
uauguuuacugucuacuagaua

SEQ ID NO: 497889 - RNA, 23 nt, Artificial Sequence
  Synthetic
auauguuuacugucuacuagaua

SEQ ID NO: 497890 - RNA, 24 nt, Artificial Sequence
  Synthetic
uauauguuuacugucuacuagaua

SEQ ID NO: 497891 - RNA, 18 nt, Artificial Sequence
  Synthetic
uggucauggugcuagaua

SEQ ID NO: 497892 - RNA, 19 nt, Artificial Sequence
  Synthetic
uuggucauggugcuagaua

SEQ ID NO: 497893 - RNA, 20 nt, Artificial Sequence
  Synthetic
auuggucauggugcuagaua

SEQ ID NO: 497894 - RNA, 21 nt, Artificial Sequence
  Synthetic
cauuggucauggugcuagaua

SEQ ID NO: 497895 - RNA, 22 nt, Artificial Sequence
  Synthetic
acauuggucauggugcuagaua

SEQ ID NO: 497896 - RNA, 23 nt, Artificial Sequence
  Synthetic
aacauuggucauggugcuagaua

SEQ ID NO: 497897 - RNA, 24 nt, Artificial Sequence
  Synthetic
uaacauuggucauggugcuagaua

SEQ ID NO: 497898 - RNA, 18 nt, Artificial Sequence
  Synthetic
ucaaucgacaaguagaua

SEQ ID NO: 497899 - RNA, 19 nt, Artificial Sequence
  Synthetic
aucaaucgacaaguagaua

SEQ ID NO: 497900 - RNA, 20 nt, Artificial Sequence
  Synthetic
caucaaucgacaaguagaua

SEQ ID NO: 497901 - RNA, 21 nt, Artificial Sequence
  Synthetic
ccaucaaucgacaaguagaua

SEQ ID NO: 497902 - RNA, 22 nt, Artificial Sequence
  Synthetic
cccaucaaucgacaaguagaua

SEQ ID NO: 497903 - RNA, 23 nt, Artificial Sequence
  Synthetic
gcccaucaaucgacaaguagaua

SEQ ID NO: 497904 - RNA, 24 nt, Artificial Sequence
  Synthetic
ugcccaucaaucgacaaguagaua

SEQ ID NO: 497905 - RNA, 18 nt, Artificial Sequence
  Synthetic
aaaucuuuugcguagaua

SEQ ID NO: 497906 - RNA, 19 nt, Artificial Sequence
  Synthetic
aaaaucuuuugcguagaua

SEQ ID NO: 497907 - RNA, 20 nt, Artificial Sequence
  Synthetic
aaaaaucuuuugcguagaua

SEQ ID NO: 497908 - RNA, 21 nt, Artificial Sequence
  Synthetic
caaaaaucuuuugcguagaua

SEQ ID NO: 497909 - RNA, 22 nt, Artificial Sequence
  Synthetic
ucaaaaaucuuuugcguagaua

SEQ ID NO: 497910 - RNA, 23 nt, Artificial Sequence
  Synthetic
aucaaaaaucuuuugcguagaua

SEQ ID NO: 497911 - RNA, 24 nt, Artificial Sequence
  Synthetic
aaucaaaaaucuuuugcguagaua

SEQ ID NO: 497912 - RNA, 18 nt, Artificial Sequence
  Synthetic
aguggguucauguagaua

SEQ ID NO: 497913 - RNA, 19 nt, Artificial Sequence
  Synthetic
aaguggguucauguagaua

SEQ ID NO: 497914 - RNA, 20 nt, Artificial Sequence
  Synthetic
gaaguggguucauguagaua

SEQ ID NO: 497915 - RNA, 21 nt, Artificial Sequence
  Synthetic
ggaaguggguucauguagaua

SEQ ID NO: 497916 - RNA, 22 nt, Artificial Sequence
  Synthetic
uggaaguggguucauguagaua

SEQ ID NO: 497917 - RNA, 23 nt, Artificial Sequence
  Synthetic
auggaaguggguucauguagaua

SEQ ID NO: 497918 - RNA, 24 nt, Artificial Sequence
  Synthetic
aauggaaguggguucauguagaua

SEQ ID NO: 497919 - RNA, 18 nt, Artificial Sequence
  Synthetic
uauuggacaguguagaua

SEQ ID NO: 497920 - RNA, 19 nt, Artificial Sequence
  Synthetic
uuauuggacaguguagaua

SEQ ID NO: 497921 - RNA, 20 nt, Artificial Sequence
  Synthetic
uuuauuggacaguguagaua

SEQ ID NO: 497922 - RNA, 21 nt, Artificial Sequence
  Synthetic
cuuuauuggacaguguagaua

SEQ ID NO: 497923 - RNA, 22 nt, Artificial Sequence
  Synthetic
acuuuauuggacaguguagaua

SEQ ID NO: 497924 - RNA, 23 nt, Artificial Sequence
  Synthetic
uacuuuauuggacaguguagaua

SEQ ID NO: 497925 - RNA, 24 nt, Artificial Sequence
  Synthetic
cuacuuuauuggacaguguagaua

SEQ ID NO: 497926 - RNA, 18 nt, Artificial Sequence
  Synthetic
auuugcuucuuguagaua

SEQ ID NO: 497927 - RNA, 19 nt, Artificial Sequence
  Synthetic
uauuugcuucuuguagaua

SEQ ID NO: 497928 - RNA, 20 nt, Artificial Sequence
  Synthetic
uuauuugcuucuuguagaua

SEQ ID NO: 497929 - RNA, 21 nt, Artificial Sequence
  Synthetic
uuuauuugcuucuuguagaua

SEQ ID NO: 497930 - RNA, 22 nt, Artificial Sequence
  Synthetic
uuuuauuugcuucuuguagaua

SEQ ID NO: 497931 - RNA, 23 nt, Artificial Sequence
  Synthetic
uuuuuauuugcuucuuguagaua

SEQ ID NO: 497932 - RNA, 24 nt, Artificial Sequence
  Synthetic
cuuuuuauuugcuucuuguagaua

SEQ ID NO: 497933 - RNA, 18 nt, Artificial Sequence
  Synthetic
uccaucugagauuagaua

SEQ ID NO: 497934 - RNA, 19 nt, Artificial Sequence
  Synthetic
uuccaucugagauuagaua

SEQ ID NO: 497935 - RNA, 20 nt, Artificial Sequence
  Synthetic
uuuccaucugagauuagaua

SEQ ID NO: 497936 - RNA, 21 nt, Artificial Sequence
  Synthetic
guuuccaucugagauuagaua

SEQ ID NO: 497937 - RNA, 22 nt, Artificial Sequence
  Synthetic
aguuuccaucugagauuagaua

SEQ ID NO: 497938 - RNA, 23 nt, Artificial Sequence
  Synthetic
uaguuuccaucugagauuagaua

SEQ ID NO: 497939 - RNA, 24 nt, Artificial Sequence
  Synthetic
cuaguuuccaucugagauuagaua

SEQ ID NO: 497940 - RNA, 18 nt, Artificial Sequence
  Synthetic
uuuuuuuucacuuagaua

SEQ ID NO: 497941 - RNA, 19 nt, Artificial Sequence
  Synthetic
auuuuuuuucacuuagaua

SEQ ID NO: 497942 - RNA, 20 nt, Artificial Sequence
  Synthetic
cauuuuuuuucacuuagaua

SEQ ID NO: 497943 - RNA, 21 nt, Artificial Sequence
  Synthetic
gcauuuuuuuucacuuagaua

SEQ ID NO: 497944 - RNA, 22 nt, Artificial Sequence
  Synthetic
ggcauuuuuuuucacuuagaua

SEQ ID NO: 497945 - RNA, 23 nt, Artificial Sequence
  Synthetic
gggcauuuuuuuucacuuagaua

SEQ ID NO: 497946 - RNA, 24 nt, Artificial Sequence
  Synthetic
cgggcauuuuuuuucacuuagaua

SEQ ID NO: 497947 - RNA, 18 nt, Artificial Sequence
  Synthetic
agcuguccuauuuagaua

SEQ ID NO: 497948 - RNA, 19 nt, Artificial Sequence
  Synthetic
gagcuguccuauuuagaua

SEQ ID NO: 497949 - RNA, 20 nt, Artificial Sequence
  Synthetic
ugagcuguccuauuuagaua

SEQ ID NO: 497950 - RNA, 21 nt, Artificial Sequence
  Synthetic
uugagcuguccuauuuagaua

SEQ ID NO: 497951 - RNA, 22 nt, Artificial Sequence
  Synthetic
cuugagcuguccuauuuagaua

SEQ ID NO: 497952 - RNA, 23 nt, Artificial Sequence
  Synthetic
acuugagcuguccuauuuagaua

SEQ ID NO: 497953 - RNA, 24 nt, Artificial Sequence
  Synthetic
aacuugagcuguccuauuuagaua

SEQ ID NO: 497954 - RNA, 18 nt, Artificial Sequence
  Synthetic
uaaguaagauuuuagaua

SEQ ID NO: 497955 - RNA, 19 nt, Artificial Sequence
  Synthetic
uuaaguaagauuuuagaua

SEQ ID NO: 497956 - RNA, 20 nt, Artificial Sequence
  Synthetic
guuaaguaagauuuuagaua

SEQ ID NO: 497957 - RNA, 21 nt, Artificial Sequence
  Synthetic
aguuaaguaagauuuuagaua

SEQ ID NO: 497958 - RNA, 22 nt, Artificial Sequence
  Synthetic
uaguuaaguaagauuuuagaua

SEQ ID NO: 497959 - RNA, 23 nt, Artificial Sequence
  Synthetic
cuaguuaaguaagauuuuagaua

SEQ ID NO: 497960 - RNA, 24 nt, Artificial Sequence
  Synthetic
gcuaguuaaguaagauuuuagaua

SEQ ID NO: 497961 - RNA, 18 nt, Artificial Sequence
  Synthetic
ucauucaauuuuuagaua

SEQ ID NO: 497962 - RNA, 19 nt, Artificial Sequence
  Synthetic
cucauucaauuuuuagaua

SEQ ID NO: 497963 - RNA, 20 nt, Artificial Sequence
  Synthetic
gcucauucaauuuuuagaua

SEQ ID NO: 497964 - RNA, 21 nt, Artificial Sequence
  Synthetic
ugcucauucaauuuuuagaua

SEQ ID NO: 497965 - RNA, 22 nt, Artificial Sequence
  Synthetic
cugcucauucaauuuuuagaua

SEQ ID NO: 497966 - RNA, 23 nt, Artificial Sequence
  Synthetic
acugcucauucaauuuuuagaua

SEQ ID NO: 497967 - RNA, 24 nt, Artificial Sequence
  Synthetic
aacugcucauucaauuuuuagaua

SEQ ID NO: 497968 - RNA, 18 nt, Artificial Sequence
  Synthetic
auaauaauaaaaacgaua

SEQ ID NO: 497969 - RNA, 19 nt, Artificial Sequence
  Synthetic
aauaauaauaaaaacgaua

SEQ ID NO: 497970 - RNA, 20 nt, Artificial Sequence
  Synthetic
aaauaauaauaaaaacgaua

SEQ ID NO: 497971 - RNA, 21 nt, Artificial Sequence
  Synthetic
gaaauaauaauaaaaacgaua

SEQ ID NO: 497972 - RNA, 22 nt, Artificial Sequence
  Synthetic
ugaaauaauaauaaaaacgaua

SEQ ID NO: 497973 - RNA, 23 nt, Artificial Sequence
  Synthetic
uugaaauaauaauaaaaacgaua

SEQ ID NO: 497974 - RNA, 24 nt, Artificial Sequence
  Synthetic
auugaaauaauaauaaaaacgaua

SEQ ID NO: 497975 - RNA, 18 nt, Artificial Sequence
  Synthetic
gaauccaaauaaacgaua

SEQ ID NO: 497976 - RNA, 19 nt, Artificial Sequence
  Synthetic
agaauccaaauaaacgaua

SEQ ID NO: 497977 - RNA, 20 nt, Artificial Sequence
  Synthetic
uagaauccaaauaaacgaua

SEQ ID NO: 497978 - RNA, 21 nt, Artificial Sequence
  Synthetic
guagaauccaaauaaacgaua

SEQ ID NO: 497979 - RNA, 22 nt, Artificial Sequence
  Synthetic
aguagaauccaaauaaacgaua

SEQ ID NO: 497980 - RNA, 23 nt, Artificial Sequence
  Synthetic
uaguagaauccaaauaaacgaua

SEQ ID NO: 497981 - RNA, 24 nt, Artificial Sequence
  Synthetic
uuaguagaauccaaauaaacgaua

SEQ ID NO: 497982 - RNA, 18 nt, Artificial Sequence
  Synthetic
guuugaggugagacgaua

SEQ ID NO: 497983 - RNA, 19 nt, Artificial Sequence
  Synthetic
gguuugaggugagacgaua

SEQ ID NO: 497984 - RNA, 20 nt, Artificial Sequence
  Synthetic
agguuugaggugagacgaua

SEQ ID NO: 497985 - RNA, 21 nt, Artificial Sequence
  Synthetic
aagguuugaggugagacgaua

SEQ ID NO: 497986 - RNA, 22 nt, Artificial Sequence
  Synthetic
uaagguuugaggugagacgaua

SEQ ID NO: 497987 - RNA, 23 nt, Artificial Sequence
  Synthetic
guaagguuugaggugagacgaua

SEQ ID NO: 497988 - RNA, 24 nt, Artificial Sequence
  Synthetic
uguaagguuugaggugagacgaua

SEQ ID NO: 497989 - RNA, 18 nt, Artificial Sequence
  Synthetic
gguuucuuuuggacgaua

SEQ ID NO: 497990 - RNA, 19 nt, Artificial Sequence
  Synthetic
ggguuucuuuuggacgaua

SEQ ID NO: 497991 - RNA, 20 nt, Artificial Sequence
  Synthetic
gggguuucuuuuggacgaua

SEQ ID NO: 497992 - RNA, 21 nt, Artificial Sequence
  Synthetic
ggggguuucuuuuggacgaua

SEQ ID NO: 497993 - RNA, 22 nt, Artificial Sequence
  Synthetic
aggggguuucuuuuggacgaua

SEQ ID NO: 497994 - RNA, 23 nt, Artificial Sequence
  Synthetic
caggggguuucuuuuggacgaua

SEQ ID NO: 497995 - RNA, 24 nt, Artificial Sequence
  Synthetic
ucaggggguuucuuuuggacgaua

SEQ ID NO: 497996 - RNA, 18 nt, Artificial Sequence
  Synthetic
aggccuagaaauacgaua

SEQ ID NO: 497997 - RNA, 19 nt, Artificial Sequence
  Synthetic
aaggccuagaaauacgaua

SEQ ID NO: 497998 - RNA, 20 nt, Artificial Sequence
  Synthetic
gaaggccuagaaauacgaua

SEQ ID NO: 497999 - RNA, 21 nt, Artificial Sequence
  Synthetic
ggaaggccuagaaauacgaua

SEQ ID NO: 498000 - RNA, 22 nt, Artificial Sequence
  Synthetic
gggaaggccuagaaauacgaua

SEQ ID NO: 498001 - RNA, 23 nt, Artificial Sequence
  Synthetic
ugggaaggccuagaaauacgaua

SEQ ID NO: 498002 - RNA, 24 nt, Artificial Sequence
  Synthetic
augggaaggccuagaaauacgaua

SEQ ID NO: 498003 - RNA, 18 nt, Artificial Sequence
  Synthetic
ucuguaaggacuacgaua

SEQ ID NO: 498004 - RNA, 19 nt, Artificial Sequence
  Synthetic
cucuguaaggacuacgaua

SEQ ID NO: 498005 - RNA, 20 nt, Artificial Sequence
  Synthetic
acucuguaaggacuacgaua

SEQ ID NO: 498006 - RNA, 21 nt, Artificial Sequence
  Synthetic
gacucuguaaggacuacgaua

SEQ ID NO: 498007 - RNA, 22 nt, Artificial Sequence
  Synthetic
ggacucuguaaggacuacgaua

SEQ ID NO: 498008 - RNA, 23 nt, Artificial Sequence
  Synthetic
uggacucuguaaggacuacgaua

SEQ ID NO: 498009 - RNA, 24 nt, Artificial Sequence
  Synthetic
auggacucuguaaggacuacgaua

SEQ ID NO: 498010 - RNA, 18 nt, Artificial Sequence
  Synthetic
guuugaaaaccaccgaua

SEQ ID NO: 498011 - RNA, 19 nt, Artificial Sequence
  Synthetic
aguuugaaaaccaccgaua

SEQ ID NO: 498012 - RNA, 20 nt, Artificial Sequence
  Synthetic
aaguuugaaaaccaccgaua

SEQ ID NO: 498013 - RNA, 21 nt, Artificial Sequence
  Synthetic
gaaguuugaaaaccaccgaua

SEQ ID NO: 498014 - RNA, 22 nt, Artificial Sequence
  Synthetic
agaaguuugaaaaccaccgaua

SEQ ID NO: 498015 - RNA, 23 nt, Artificial Sequence
  Synthetic
gagaaguuugaaaaccaccgaua

SEQ ID NO: 498016 - RNA, 24 nt, Artificial Sequence
  Synthetic
ugagaaguuugaaaaccaccgaua

SEQ ID NO: 498017 - RNA, 18 nt, Artificial Sequence
  Synthetic
acucaauuaaaaaggaua

SEQ ID NO: 498018 - RNA, 19 nt, Artificial Sequence
  Synthetic
uacucaauuaaaaaggaua

SEQ ID NO: 498019 - RNA, 20 nt, Artificial Sequence
  Synthetic
auacucaauuaaaaaggaua

SEQ ID NO: 498020 - RNA, 21 nt, Artificial Sequence
  Synthetic
aauacucaauuaaaaaggaua

SEQ ID NO: 498021 - RNA, 22 nt, Artificial Sequence
  Synthetic
aaauacucaauuaaaaaggaua

SEQ ID NO: 498022 - RNA, 23 nt, Artificial Sequence
  Synthetic
caaauacucaauuaaaaaggaua

SEQ ID NO: 498023 - RNA, 24 nt, Artificial Sequence
  Synthetic
acaaauacucaauuaaaaaggaua

SEQ ID NO: 498024 - RNA, 18 nt, Artificial Sequence
  Synthetic
ggcgauuccucaaggaua

SEQ ID NO: 498025 - RNA, 19 nt, Artificial Sequence
  Synthetic
uggcgauuccucaaggaua

SEQ ID NO: 498026 - RNA, 20 nt, Artificial Sequence
  Synthetic
guggcgauuccucaaggaua

SEQ ID NO: 498027 - RNA, 21 nt, Artificial Sequence
  Synthetic
uguggcgauuccucaaggaua

SEQ ID NO: 498028 - RNA, 22 nt, Artificial Sequence
  Synthetic
guguggcgauuccucaaggaua

SEQ ID NO: 498029 - RNA, 23 nt, Artificial Sequence
  Synthetic
aguguggcgauuccucaaggaua

SEQ ID NO: 498030 - RNA, 24 nt, Artificial Sequence
  Synthetic
caguguggcgauuccucaaggaua

SEQ ID NO: 498031 - RNA, 18 nt, Artificial Sequence
  Synthetic
cagaggcugggaaggaua

SEQ ID NO: 498032 - RNA, 19 nt, Artificial Sequence
  Synthetic
ccagaggcugggaaggaua

SEQ ID NO: 498033 - RNA, 20 nt, Artificial Sequence
  Synthetic
gccagaggcugggaaggaua

SEQ ID NO: 498034 - RNA, 21 nt, Artificial Sequence
  Synthetic
ugccagaggcugggaaggaua

SEQ ID NO: 498035 - RNA, 22 nt, Artificial Sequence
  Synthetic
uugccagaggcugggaaggaua

SEQ ID NO: 498036 - RNA, 23 nt, Artificial Sequence
  Synthetic
guugccagaggcugggaaggaua

SEQ ID NO: 498037 - RNA, 24 nt, Artificial Sequence
  Synthetic
aguugccagaggcugggaaggaua

SEQ ID NO: 498038 - RNA, 18 nt, Artificial Sequence
  Synthetic
uggugagauuuaaggaua

SEQ ID NO: 498039 - RNA, 19 nt, Artificial Sequence
  Synthetic
auggugagauuuaaggaua

SEQ ID NO: 498040 - RNA, 20 nt, Artificial Sequence
  Synthetic
cauggugagauuuaaggaua

SEQ ID NO: 498041 - RNA, 21 nt, Artificial Sequence
  Synthetic
ucauggugagauuuaaggaua

SEQ ID NO: 498042 - RNA, 22 nt, Artificial Sequence
  Synthetic
aucauggugagauuuaaggaua

SEQ ID NO: 498043 - RNA, 23 nt, Artificial Sequence
  Synthetic
uaucauggugagauuuaaggaua

SEQ ID NO: 498044 - RNA, 24 nt, Artificial Sequence
  Synthetic
auaucauggugagauuuaaggaua

SEQ ID NO: 498045 - RNA, 18 nt, Artificial Sequence
  Synthetic
ggcaagauuuuaaggaua

SEQ ID NO: 498046 - RNA, 19 nt, Artificial Sequence
  Synthetic
aggcaagauuuuaaggaua

SEQ ID NO: 498047 - RNA, 20 nt, Artificial Sequence
  Synthetic
gaggcaagauuuuaaggaua

SEQ ID NO: 498048 - RNA, 21 nt, Artificial Sequence
  Synthetic
ggaggcaagauuuuaaggaua

SEQ ID NO: 498049 - RNA, 22 nt, Artificial Sequence
  Synthetic
uggaggcaagauuuuaaggaua

SEQ ID NO: 498050 - RNA, 23 nt, Artificial Sequence
  Synthetic
uuggaggcaagauuuuaaggaua

SEQ ID NO: 498051 - RNA, 24 nt, Artificial Sequence
  Synthetic
auuggaggcaagauuuuaaggaua

SEQ ID NO: 498052 - RNA, 18 nt, Artificial Sequence
  Synthetic
aagaaugaaagcaggaua

SEQ ID NO: 498053 - RNA, 19 nt, Artificial Sequence
  Synthetic
gaagaaugaaagcaggaua

SEQ ID NO: 498054 - RNA, 20 nt, Artificial Sequence
  Synthetic
ugaagaaugaaagcaggaua

SEQ ID NO: 498055 - RNA, 21 nt, Artificial Sequence
  Synthetic
gugaagaaugaaagcaggaua

SEQ ID NO: 498056 - RNA, 22 nt, Artificial Sequence
  Synthetic
ugugaagaaugaaagcaggaua

SEQ ID NO: 498057 - RNA, 23 nt, Artificial Sequence
  Synthetic
augugaagaaugaaagcaggaua

SEQ ID NO: 498058 - RNA, 24 nt, Artificial Sequence
  Synthetic
aaugugaagaaugaaagcaggaua

SEQ ID NO: 498059 - RNA, 18 nt, Artificial Sequence
  Synthetic
aauaaucacaucaggaua

SEQ ID NO: 498060 - RNA, 19 nt, Artificial Sequence
  Synthetic
uaauaaucacaucaggaua

SEQ ID NO: 498061 - RNA, 20 nt, Artificial Sequence
  Synthetic
guaauaaucacaucaggaua

SEQ ID NO: 498062 - RNA, 21 nt, Artificial Sequence
  Synthetic
uguaauaaucacaucaggaua

SEQ ID NO: 498063 - RNA, 22 nt, Artificial Sequence
  Synthetic
guguaauaaucacaucaggaua

SEQ ID NO: 498064 - RNA, 23 nt, Artificial Sequence
  Synthetic
uguguaauaaucacaucaggaua

SEQ ID NO: 498065 - RNA, 24 nt, Artificial Sequence
  Synthetic
auguguaauaaucacaucaggaua

SEQ ID NO: 498066 - RNA, 18 nt, Artificial Sequence
  Synthetic
acaauaugcaucaggaua

SEQ ID NO: 498067 - RNA, 19 nt, Artificial Sequence
  Synthetic
gacaauaugcaucaggaua

SEQ ID NO: 498068 - RNA, 20 nt, Artificial Sequence
  Synthetic
agacaauaugcaucaggaua

SEQ ID NO: 498069 - RNA, 21 nt, Artificial Sequence
  Synthetic
aagacaauaugcaucaggaua

SEQ ID NO: 498070 - RNA, 22 nt, Artificial Sequence
  Synthetic
gaagacaauaugcaucaggaua

SEQ ID NO: 498071 - RNA, 23 nt, Artificial Sequence
  Synthetic
ggaagacaauaugcaucaggaua

SEQ ID NO: 498072 - RNA, 24 nt, Artificial Sequence
  Synthetic
aggaagacaauaugcaucaggaua

SEQ ID NO: 498073 - RNA, 18 nt, Artificial Sequence
  Synthetic
aucuucuccuucaggaua

SEQ ID NO: 498074 - RNA, 19 nt, Artificial Sequence
  Synthetic
caucuucuccuucaggaua

SEQ ID NO: 498075 - RNA, 20 nt, Artificial Sequence
  Synthetic
ucaucuucuccuucaggaua

SEQ ID NO: 498076 - RNA, 21 nt, Artificial Sequence
  Synthetic
uucaucuucuccuucaggaua

SEQ ID NO: 498077 - RNA, 22 nt, Artificial Sequence
  Synthetic
auucaucuucuccuucaggaua

SEQ ID NO: 498078 - RNA, 23 nt, Artificial Sequence
  Synthetic
cauucaucuucuccuucaggaua

SEQ ID NO: 498079 - RNA, 24 nt, Artificial Sequence
  Synthetic
gcauucaucuucuccuucaggaua

SEQ ID NO: 498080 - RNA, 18 nt, Artificial Sequence
  Synthetic
aucuauagagagaggaua

SEQ ID NO: 498081 - RNA, 19 nt, Artificial Sequence
  Synthetic
aaucuauagagagaggaua

SEQ ID NO: 498082 - RNA, 20 nt, Artificial Sequence
  Synthetic
aaaucuauagagagaggaua

SEQ ID NO: 498083 - RNA, 21 nt, Artificial Sequence
  Synthetic
caaaucuauagagagaggaua

SEQ ID NO: 498084 - RNA, 22 nt, Artificial Sequence
  Synthetic
ccaaaucuauagagagaggaua

SEQ ID NO: 498085 - RNA, 23 nt, Artificial Sequence
  Synthetic
accaaaucuauagagagaggaua

SEQ ID NO: 498086 - RNA, 24 nt, Artificial Sequence
  Synthetic
aaccaaaucuauagagagaggaua

SEQ ID NO: 498087 - RNA, 18 nt, Artificial Sequence
  Synthetic
uuuggugaaaugaggaua

SEQ ID NO: 498088 - RNA, 19 nt, Artificial Sequence
  Synthetic
auuuggugaaaugaggaua

SEQ ID NO: 498089 - RNA, 20 nt, Artificial Sequence
  Synthetic
uauuuggugaaaugaggaua

SEQ ID NO: 498090 - RNA, 21 nt, Artificial Sequence
  Synthetic
uuauuuggugaaaugaggaua

SEQ ID NO: 498091 - RNA, 22 nt, Artificial Sequence
  Synthetic
cuuauuuggugaaaugaggaua

SEQ ID NO: 498092 - RNA, 23 nt, Artificial Sequence
  Synthetic
ucuuauuuggugaaaugaggaua

SEQ ID NO: 498093 - RNA, 24 nt, Artificial Sequence
  Synthetic
uucuuauuuggugaaaugaggaua

SEQ ID NO: 498094 - RNA, 18 nt, Artificial Sequence
  Synthetic
ccccucagaaugaggaua

SEQ ID NO: 498095 - RNA, 19 nt, Artificial Sequence
  Synthetic
gccccucagaaugaggaua

SEQ ID NO: 498096 - RNA, 20 nt, Artificial Sequence
  Synthetic
ugccccucagaaugaggaua

SEQ ID NO: 498097 - RNA, 21 nt, Artificial Sequence
  Synthetic
uugccccucagaaugaggaua

SEQ ID NO: 498098 - RNA, 22 nt, Artificial Sequence
  Synthetic
auugccccucagaaugaggaua

SEQ ID NO: 498099 - RNA, 23 nt, Artificial Sequence
  Synthetic
uauugccccucagaaugaggaua

SEQ ID NO: 498100 - RNA, 24 nt, Artificial Sequence
  Synthetic
auauugccccucagaaugaggaua

SEQ ID NO: 498101 - RNA, 18 nt, Artificial Sequence
  Synthetic
caaguguucaugaggaua

SEQ ID NO: 498102 - RNA, 19 nt, Artificial Sequence
  Synthetic
acaaguguucaugaggaua

SEQ ID NO: 498103 - RNA, 20 nt, Artificial Sequence
  Synthetic
aacaaguguucaugaggaua

SEQ ID NO: 498104 - RNA, 21 nt, Artificial Sequence
  Synthetic
uaacaaguguucaugaggaua

SEQ ID NO: 498105 - RNA, 22 nt, Artificial Sequence
  Synthetic
auaacaaguguucaugaggaua

SEQ ID NO: 498106 - RNA, 23 nt, Artificial Sequence
  Synthetic
gauaacaaguguucaugaggaua

SEQ ID NO: 498107 - RNA, 24 nt, Artificial Sequence
  Synthetic
agauaacaaguguucaugaggaua

SEQ ID NO: 498108 - RNA, 18 nt, Artificial Sequence
  Synthetic
aaugacagggauaggaua

SEQ ID NO: 498109 - RNA, 19 nt, Artificial Sequence
  Synthetic
aaaugacagggauaggaua

SEQ ID NO: 498110 - RNA, 20 nt, Artificial Sequence
  Synthetic
aaaaugacagggauaggaua

SEQ ID NO: 498111 - RNA, 21 nt, Artificial Sequence
  Synthetic
aaaaaugacagggauaggaua

SEQ ID NO: 498112 - RNA, 22 nt, Artificial Sequence
  Synthetic
gaaaaaugacagggauaggaua

SEQ ID NO: 498113 - RNA, 23 nt, Artificial Sequence
  Synthetic
ggaaaaaugacagggauaggaua

SEQ ID NO: 498114 - RNA, 24 nt, Artificial Sequence
  Synthetic
aggaaaaaugacagggauaggaua

SEQ ID NO: 498115 - RNA, 18 nt, Artificial Sequence
  Synthetic
cucccagauucuaggaua

SEQ ID NO: 498116 - RNA, 19 nt, Artificial Sequence
  Synthetic
ucucccagauucuaggaua

SEQ ID NO: 498117 - RNA, 20 nt, Artificial Sequence
  Synthetic
cucucccagauucuaggaua

SEQ ID NO: 498118 - RNA, 21 nt, Artificial Sequence
  Synthetic
ccucucccagauucuaggaua

SEQ ID NO: 498119 - RNA, 22 nt, Artificial Sequence
  Synthetic
uccucucccagauucuaggaua

SEQ ID NO: 498120 - RNA, 23 nt, Artificial Sequence
  Synthetic
cuccucucccagauucuaggaua

SEQ ID NO: 498121 - RNA, 24 nt, Artificial Sequence
  Synthetic
ucuccucucccagauucuaggaua

SEQ ID NO: 498122 - RNA, 18 nt, Artificial Sequence
  Synthetic
cuguacacauguaggaua

SEQ ID NO: 498123 - RNA, 19 nt, Artificial Sequence
  Synthetic
ccuguacacauguaggaua

SEQ ID NO: 498124 - RNA, 20 nt, Artificial Sequence
  Synthetic
uccuguacacauguaggaua

SEQ ID NO: 498125 - RNA, 21 nt, Artificial Sequence
  Synthetic
uuccuguacacauguaggaua

SEQ ID NO: 498126 - RNA, 22 nt, Artificial Sequence
  Synthetic
uuuccuguacacauguaggaua

SEQ ID NO: 498127 - RNA, 23 nt, Artificial Sequence
  Synthetic
guuuccuguacacauguaggaua

SEQ ID NO: 498128 - RNA, 24 nt, Artificial Sequence
  Synthetic
uguuuccuguacacauguaggaua

SEQ ID NO: 498129 - RNA, 18 nt, Artificial Sequence
  Synthetic
uguuugaggugacggaua

SEQ ID NO: 498130 - RNA, 19 nt, Artificial Sequence
  Synthetic
auguuugaggugacggaua

SEQ ID NO: 498131 - RNA, 20 nt, Artificial Sequence
  Synthetic
aauguuugaggugacggaua

SEQ ID NO: 498132 - RNA, 21 nt, Artificial Sequence
  Synthetic
aaauguuugaggugacggaua

SEQ ID NO: 498133 - RNA, 22 nt, Artificial Sequence
  Synthetic
uaaauguuugaggugacggaua

SEQ ID NO: 498134 - RNA, 23 nt, Artificial Sequence
  Synthetic
guaaauguuugaggugacggaua

SEQ ID NO: 498135 - RNA, 24 nt, Artificial Sequence
  Synthetic
gguaaauguuugaggugacggaua

SEQ ID NO: 498136 - RNA, 18 nt, Artificial Sequence
  Synthetic
ucuaaacuaacagggaua

SEQ ID NO: 498137 - RNA, 19 nt, Artificial Sequence
  Synthetic
aucuaaacuaacagggaua

SEQ ID NO: 498138 - RNA, 20 nt, Artificial Sequence
  Synthetic
aaucuaaacuaacagggaua

SEQ ID NO: 498139 - RNA, 21 nt, Artificial Sequence
  Synthetic
aaaucuaaacuaacagggaua

SEQ ID NO: 498140 - RNA, 22 nt, Artificial Sequence
  Synthetic
uaaaucuaaacuaacagggaua

SEQ ID NO: 498141 - RNA, 23 nt, Artificial Sequence
  Synthetic
cuaaaucuaaacuaacagggaua

SEQ ID NO: 498142 - RNA, 24 nt, Artificial Sequence
  Synthetic
ccuaaaucuaaacuaacagggaua

SEQ ID NO: 498143 - RNA, 18 nt, Artificial Sequence
  Synthetic
uucaccugaucagggaua

SEQ ID NO: 498144 - RNA, 19 nt, Artificial Sequence
  Synthetic
auucaccugaucagggaua

SEQ ID NO: 498145 - RNA, 20 nt, Artificial Sequence
  Synthetic
cauucaccugaucagggaua

SEQ ID NO: 498146 - RNA, 21 nt, Artificial Sequence
  Synthetic
acauucaccugaucagggaua

SEQ ID NO: 498147 - RNA, 22 nt, Artificial Sequence
  Synthetic
aacauucaccugaucagggaua

SEQ ID NO: 498148 - RNA, 23 nt, Artificial Sequence
  Synthetic
aaacauucaccugaucagggaua

SEQ ID NO: 498149 - RNA, 24 nt, Artificial Sequence
  Synthetic
aaaacauucaccugaucagggaua

SEQ ID NO: 498150 - RNA, 18 nt, Artificial Sequence
  Synthetic
gaggugacaauagggaua

SEQ ID NO: 498151 - RNA, 19 nt, Artificial Sequence
  Synthetic
ugaggugacaauagggaua

SEQ ID NO: 498152 - RNA, 20 nt, Artificial Sequence
  Synthetic
augaggugacaauagggaua

SEQ ID NO: 498153 - RNA, 21 nt, Artificial Sequence
  Synthetic
gaugaggugacaauagggaua

SEQ ID NO: 498154 - RNA, 22 nt, Artificial Sequence
  Synthetic
ggaugaggugacaauagggaua

SEQ ID NO: 498155 - RNA, 23 nt, Artificial Sequence
  Synthetic
aggaugaggugacaauagggaua

SEQ ID NO: 498156 - RNA, 24 nt, Artificial Sequence
  Synthetic
uaggaugaggugacaauagggaua

SEQ ID NO: 498157 - RNA, 18 nt, Artificial Sequence
  Synthetic
cucacacauuuagggaua

SEQ ID NO: 498158 - RNA, 19 nt, Artificial Sequence
  Synthetic
gcucacacauuuagggaua

SEQ ID NO: 498159 - RNA, 20 nt, Artificial Sequence
  Synthetic
ggcucacacauuuagggaua

SEQ ID NO: 498160 - RNA, 21 nt, Artificial Sequence
  Synthetic
uggcucacacauuuagggaua

SEQ ID NO: 498161 - RNA, 22 nt, Artificial Sequence
  Synthetic
guggcucacacauuuagggaua

SEQ ID NO: 498162 - RNA, 23 nt, Artificial Sequence
  Synthetic
uguggcucacacauuuagggaua

SEQ ID NO: 498163 - RNA, 24 nt, Artificial Sequence
  Synthetic
cuguggcucacacauuuagggaua

SEQ ID NO: 498164 - RNA, 18 nt, Artificial Sequence
  Synthetic
aaaaaaaugcaggggaua

SEQ ID NO: 498165 - RNA, 19 nt, Artificial Sequence
  Synthetic
aaaaaaaaugcaggggaua

SEQ ID NO: 498166 - RNA, 20 nt, Artificial Sequence
  Synthetic
aaaaaaaaaugcaggggaua

SEQ ID NO: 498167 - RNA, 21 nt, Artificial Sequence
  Synthetic
gaaaaaaaaaugcaggggaua

SEQ ID NO: 498168 - RNA, 22 nt, Artificial Sequence
  Synthetic
ugaaaaaaaaaugcaggggaua

SEQ ID NO: 498169 - RNA, 23 nt, Artificial Sequence
  Synthetic
augaaaaaaaaaugcaggggaua

SEQ ID NO: 498170 - RNA, 24 nt, Artificial Sequence
  Synthetic
uaugaaaaaaaaaugcaggggaua

SEQ ID NO: 498171 - RNA, 18 nt, Artificial Sequence
  Synthetic
auauuaagggaggggaua

SEQ ID NO: 498172 - RNA, 19 nt, Artificial Sequence
  Synthetic
aauauuaagggaggggaua

SEQ ID NO: 498173 - RNA, 20 nt, Artificial Sequence
  Synthetic
uaauauuaagggaggggaua

SEQ ID NO: 498174 - RNA, 21 nt, Artificial Sequence
  Synthetic
uuaauauuaagggaggggaua

SEQ ID NO: 498175 - RNA, 22 nt, Artificial Sequence
  Synthetic
guuaauauuaagggaggggaua

SEQ ID NO: 498176 - RNA, 23 nt, Artificial Sequence
  Synthetic
uguuaauauuaagggaggggaua

SEQ ID NO: 498177 - RNA, 24 nt, Artificial Sequence
  Synthetic
auguuaauauuaagggaggggaua

SEQ ID NO: 498178 - RNA, 18 nt, Artificial Sequence
  Synthetic
cgacauuuugaugggaua

SEQ ID NO: 498179 - RNA, 19 nt, Artificial Sequence
  Synthetic
acgacauuuugaugggaua

SEQ ID NO: 498180 - RNA, 20 nt, Artificial Sequence
  Synthetic
cacgacauuuugaugggaua

SEQ ID NO: 498181 - RNA, 21 nt, Artificial Sequence
  Synthetic
ucacgacauuuugaugggaua

SEQ ID NO: 498182 - RNA, 22 nt, Artificial Sequence
  Synthetic
aucacgacauuuugaugggaua

SEQ ID NO: 498183 - RNA, 23 nt, Artificial Sequence
  Synthetic
aaucacgacauuuugaugggaua

SEQ ID NO: 498184 - RNA, 24 nt, Artificial Sequence
  Synthetic
caaucacgacauuuugaugggaua

SEQ ID NO: 498185 - RNA, 18 nt, Artificial Sequence
  Synthetic
aauaccaucugugggaua

SEQ ID NO: 498186 - RNA, 19 nt, Artificial Sequence
  Synthetic
aaauaccaucugugggaua

SEQ ID NO: 498187 - RNA, 20 nt, Artificial Sequence
  Synthetic
aaaauaccaucugugggaua

SEQ ID NO: 498188 - RNA, 21 nt, Artificial Sequence
  Synthetic
aaaaauaccaucugugggaua

SEQ ID NO: 498189 - RNA, 22 nt, Artificial Sequence
  Synthetic
aaaaaauaccaucugugggaua

SEQ ID NO: 498190 - RNA, 23 nt, Artificial Sequence
  Synthetic
aaaaaaauaccaucugugggaua

SEQ ID NO: 498191 - RNA, 24 nt, Artificial Sequence
  Synthetic
gaaaaaaauaccaucugugggaua

SEQ ID NO: 498192 - RNA, 18 nt, Artificial Sequence
  Synthetic
ucauucaacaaauggaua

SEQ ID NO: 498193 - RNA, 19 nt, Artificial Sequence
  Synthetic
uucauucaacaaauggaua

SEQ ID NO: 498194 - RNA, 20 nt, Artificial Sequence
  Synthetic
guucauucaacaaauggaua

SEQ ID NO: 498195 - RNA, 21 nt, Artificial Sequence
  Synthetic
uguucauucaacaaauggaua

SEQ ID NO: 498196 - RNA, 22 nt, Artificial Sequence
  Synthetic
cuguucauucaacaaauggaua

SEQ ID NO: 498197 - RNA, 23 nt, Artificial Sequence
  Synthetic
ucuguucauucaacaaauggaua

SEQ ID NO: 498198 - RNA, 24 nt, Artificial Sequence
  Synthetic
uucuguucauucaacaaauggaua

SEQ ID NO: 498199 - RNA, 18 nt, Artificial Sequence
  Synthetic
ucaacaugcgaauggaua

SEQ ID NO: 498200 - RNA, 19 nt, Artificial Sequence
  Synthetic
aucaacaugcgaauggaua

SEQ ID NO: 498201 - RNA, 20 nt, Artificial Sequence
  Synthetic
caucaacaugcgaauggaua

SEQ ID NO: 498202 - RNA, 21 nt, Artificial Sequence
  Synthetic
ccaucaacaugcgaauggaua

SEQ ID NO: 498203 - RNA, 22 nt, Artificial Sequence
  Synthetic
uccaucaacaugcgaauggaua

SEQ ID NO: 498204 - RNA, 23 nt, Artificial Sequence
  Synthetic
guccaucaacaugcgaauggaua

SEQ ID NO: 498205 - RNA, 24 nt, Artificial Sequence
  Synthetic
uguccaucaacaugcgaauggaua

SEQ ID NO: 498206 - RNA, 18 nt, Artificial Sequence
  Synthetic
auaauauaggaauggaua

SEQ ID NO: 498207 - RNA, 19 nt, Artificial Sequence
  Synthetic
uauaauauaggaauggaua

SEQ ID NO: 498208 - RNA, 20 nt, Artificial Sequence
  Synthetic
auauaauauaggaauggaua

SEQ ID NO: 498209 - RNA, 21 nt, Artificial Sequence
  Synthetic
gauauaauauaggaauggaua

SEQ ID NO: 498210 - RNA, 22 nt, Artificial Sequence
  Synthetic
ugauauaauauaggaauggaua

SEQ ID NO: 498211 - RNA, 23 nt, Artificial Sequence
  Synthetic
augauauaauauaggaauggaua

SEQ ID NO: 498212 - RNA, 24 nt, Artificial Sequence
  Synthetic
uaugauauaauauaggaauggaua

SEQ ID NO: 498213 - RNA, 18 nt, Artificial Sequence
  Synthetic
ucaacaaaugaauggaua

SEQ ID NO: 498214 - RNA, 19 nt, Artificial Sequence
  Synthetic
aucaacaaaugaauggaua

SEQ ID NO: 498215 - RNA, 20 nt, Artificial Sequence
  Synthetic
caucaacaaaugaauggaua

SEQ ID NO: 498216 - RNA, 21 nt, Artificial Sequence
  Synthetic
ccaucaacaaaugaauggaua

SEQ ID NO: 498217 - RNA, 22 nt, Artificial Sequence
  Synthetic
uccaucaacaaaugaauggaua

SEQ ID NO: 498218 - RNA, 23 nt, Artificial Sequence
  Synthetic
guccaucaacaaaugaauggaua

SEQ ID NO: 498219 - RNA, 24 nt, Artificial Sequence
  Synthetic
uguccaucaacaaaugaauggaua

SEQ ID NO: 498220 - RNA, 18 nt, Artificial Sequence
  Synthetic
ucgaccaaugaauggaua

SEQ ID NO: 498221 - RNA, 19 nt, Artificial Sequence
  Synthetic
aucgaccaaugaauggaua

SEQ ID NO: 498222 - RNA, 20 nt, Artificial Sequence
  Synthetic
caucgaccaaugaauggaua

SEQ ID NO: 498223 - RNA, 21 nt, Artificial Sequence
  Synthetic
ccaucgaccaaugaauggaua

SEQ ID NO: 498224 - RNA, 22 nt, Artificial Sequence
  Synthetic
uccaucgaccaaugaauggaua

SEQ ID NO: 498225 - RNA, 23 nt, Artificial Sequence
  Synthetic
guccaucgaccaaugaauggaua

SEQ ID NO: 498226 - RNA, 24 nt, Artificial Sequence
  Synthetic
uguccaucgaccaaugaauggaua

SEQ ID NO: 498227 - RNA, 18 nt, Artificial Sequence
  Synthetic
uuauaggaugaauggaua

SEQ ID NO: 498228 - RNA, 19 nt, Artificial Sequence
  Synthetic
uuuauaggaugaauggaua

SEQ ID NO: 498229 - RNA, 20 nt, Artificial Sequence
  Synthetic
auuuauaggaugaauggaua

SEQ ID NO: 498230 - RNA, 21 nt, Artificial Sequence
  Synthetic
aauuuauaggaugaauggaua

SEQ ID NO: 498231 - RNA, 22 nt, Artificial Sequence
  Synthetic
aaauuuauaggaugaauggaua

SEQ ID NO: 498232 - RNA, 23 nt, Artificial Sequence
  Synthetic
aaaauuuauaggaugaauggaua

SEQ ID NO: 498233 - RNA, 24 nt, Artificial Sequence
  Synthetic
uaaaauuuauaggaugaauggaua

SEQ ID NO: 498234 - RNA, 18 nt, Artificial Sequence
  Synthetic
uagacuucaacauggaua

SEQ ID NO: 498235 - RNA, 19 nt, Artificial Sequence
  Synthetic
cuagacuucaacauggaua

SEQ ID NO: 498236 - RNA, 20 nt, Artificial Sequence
  Synthetic
ccuagacuucaacauggaua

SEQ ID NO: 498237 - RNA, 21 nt, Artificial Sequence
  Synthetic
accuagacuucaacauggaua

SEQ ID NO: 498238 - RNA, 22 nt, Artificial Sequence
  Synthetic
gaccuagacuucaacauggaua

SEQ ID NO: 498239 - RNA, 23 nt, Artificial Sequence
  Synthetic
ugaccuagacuucaacauggaua

SEQ ID NO: 498240 - RNA, 24 nt, Artificial Sequence
  Synthetic
gugaccuagacuucaacauggaua

SEQ ID NO: 498241 - RNA, 18 nt, Artificial Sequence
  Synthetic
aaagggaaaauauggaua

SEQ ID NO: 498242 - RNA, 19 nt, Artificial Sequence
  Synthetic
aaaagggaaaauauggaua

SEQ ID NO: 498243 - RNA, 20 nt, Artificial Sequence
  Synthetic
aaaaagggaaaauauggaua

SEQ ID NO: 498244 - RNA, 21 nt, Artificial Sequence
  Synthetic
aaaaaagggaaaauauggaua

SEQ ID NO: 498245 - RNA, 22 nt, Artificial Sequence
  Synthetic
caaaaaagggaaaauauggaua

SEQ ID NO: 498246 - RNA, 23 nt, Artificial Sequence
  Synthetic
acaaaaaagggaaaauauggaua

SEQ ID NO: 498247 - RNA, 24 nt, Artificial Sequence
  Synthetic
uacaaaaaagggaaaauauggaua

SEQ ID NO: 498248 - RNA, 18 nt, Artificial Sequence
  Synthetic
gccaaauauuuauggaua

SEQ ID NO: 498249 - RNA, 19 nt, Artificial Sequence
  Synthetic
agccaaauauuuauggaua

SEQ ID NO: 498250 - RNA, 20 nt, Artificial Sequence
  Synthetic
uagccaaauauuuauggaua

SEQ ID NO: 498251 - RNA, 21 nt, Artificial Sequence
  Synthetic
auagccaaauauuuauggaua

SEQ ID NO: 498252 - RNA, 22 nt, Artificial Sequence
  Synthetic
cauagccaaauauuuauggaua

SEQ ID NO: 498253 - RNA, 23 nt, Artificial Sequence
  Synthetic
acauagccaaauauuuauggaua

SEQ ID NO: 498254 - RNA, 24 nt, Artificial Sequence
  Synthetic
gacauagccaaauauuuauggaua

SEQ ID NO: 498255 - RNA, 18 nt, Artificial Sequence
  Synthetic
cuacuggaaaacuggaua

SEQ ID NO: 498256 - RNA, 19 nt, Artificial Sequence
  Synthetic
ucuacuggaaaacuggaua

SEQ ID NO: 498257 - RNA, 20 nt, Artificial Sequence
  Synthetic
aucuacuggaaaacuggaua

SEQ ID NO: 498258 - RNA, 21 nt, Artificial Sequence
  Synthetic
aaucuacuggaaaacuggaua

SEQ ID NO: 498259 - RNA, 22 nt, Artificial Sequence
  Synthetic
aaaucuacuggaaaacuggaua

SEQ ID NO: 498260 - RNA, 23 nt, Artificial Sequence
  Synthetic
aaaaucuacuggaaaacuggaua

SEQ ID NO: 498261 - RNA, 24 nt, Artificial Sequence
  Synthetic
aaaaaucuacuggaaaacuggaua

SEQ ID NO: 498262 - RNA, 21 nt, Artificial Sequence
  Synthetic
ccaucaaugauagacuggaua

SEQ ID NO: 498263 - RNA, 22 nt, Artificial Sequence
  Synthetic
cccaucaaugauagacuggaua

SEQ ID NO: 498264 - RNA, 23 nt, Artificial Sequence
  Synthetic
gcccaucaaugauagacuggaua

SEQ ID NO: 498265 - RNA, 24 nt, Artificial Sequence
  Synthetic
ugcccaucaaugauagacuggaua

SEQ ID NO: 498266 - RNA, 18 nt, Artificial Sequence
  Synthetic
ccagugauagacuggaua

SEQ ID NO: 498267 - RNA, 19 nt, Artificial Sequence
  Synthetic
accagugauagacuggaua

SEQ ID NO: 498268 - RNA, 20 nt, Artificial Sequence
  Synthetic
caccagugauagacuggaua

SEQ ID NO: 498269 - RNA, 21 nt, Artificial Sequence
  Synthetic
ccaccagugauagacuggaua

SEQ ID NO: 498270 - RNA, 22 nt, Artificial Sequence
  Synthetic
cccaccagugauagacuggaua

SEQ ID NO: 498271 - RNA, 23 nt, Artificial Sequence
  Synthetic
gcccaccagugauagacuggaua

SEQ ID NO: 498272 - RNA, 24 nt, Artificial Sequence
  Synthetic
ugcccaccagugauagacuggaua

SEQ ID NO: 498273 - RNA, 18 nt, Artificial Sequence
  Synthetic
ucagugauagacuggaua

SEQ ID NO: 498274 - RNA, 19 nt, Artificial Sequence
  Synthetic
aucagugauagacuggaua

SEQ ID NO: 498275 - RNA, 20 nt, Artificial Sequence
  Synthetic
caucagugauagacuggaua

SEQ ID NO: 498276 - RNA, 21 nt, Artificial Sequence
  Synthetic
ccaucagugauagacuggaua

SEQ ID NO: 498277 - RNA, 22 nt, Artificial Sequence
  Synthetic
cccaucagugauagacuggaua

SEQ ID NO: 498278 - RNA, 23 nt, Artificial Sequence
  Synthetic
gcccaucagugauagacuggaua

SEQ ID NO: 498279 - RNA, 24 nt, Artificial Sequence
  Synthetic
ugcccaucagugauagacuggaua

SEQ ID NO: 498280 - RNA, 18 nt, Artificial Sequence
  Synthetic
agagugaccagcuggaua

SEQ ID NO: 498281 - RNA, 19 nt, Artificial Sequence
  Synthetic
aagagugaccagcuggaua

SEQ ID NO: 498282 - RNA, 20 nt, Artificial Sequence
  Synthetic
gaagagugaccagcuggaua

SEQ ID NO: 498283 - RNA, 21 nt, Artificial Sequence
  Synthetic
agaagagugaccagcuggaua

SEQ ID NO: 498284 - RNA, 22 nt, Artificial Sequence
  Synthetic
cagaagagugaccagcuggaua

SEQ ID NO: 498285 - RNA, 23 nt, Artificial Sequence
  Synthetic
gcagaagagugaccagcuggaua

SEQ ID NO: 498286 - RNA, 24 nt, Artificial Sequence
  Synthetic
cgcagaagagugaccagcuggaua

SEQ ID NO: 498287 - RNA, 18 nt, Artificial Sequence
  Synthetic
caacgauugagcuggaua

SEQ ID NO: 498288 - RNA, 19 nt, Artificial Sequence
  Synthetic
gcaacgauugagcuggaua

SEQ ID NO: 498289 - RNA, 20 nt, Artificial Sequence
  Synthetic
ggcaacgauugagcuggaua

SEQ ID NO: 498290 - RNA, 21 nt, Artificial Sequence
  Synthetic
gggcaacgauugagcuggaua

SEQ ID NO: 498291 - RNA, 22 nt, Artificial Sequence
  Synthetic
ggggcaacgauugagcuggaua

SEQ ID NO: 498292 - RNA, 23 nt, Artificial Sequence
  Synthetic
uggggcaacgauugagcuggaua

SEQ ID NO: 498293 - RNA, 24 nt, Artificial Sequence
  Synthetic
uuggggcaacgauugagcuggaua

SEQ ID NO: 498294 - RNA, 18 nt, Artificial Sequence
  Synthetic
ccuuaaauacaguggaua

SEQ ID NO: 498295 - RNA, 19 nt, Artificial Sequence
  Synthetic
accuuaaauacaguggaua

SEQ ID NO: 498296 - RNA, 20 nt, Artificial Sequence
  Synthetic
aaccuuaaauacaguggaua

SEQ ID NO: 498297 - RNA, 21 nt, Artificial Sequence
  Synthetic
aaaccuuaaauacaguggaua

SEQ ID NO: 498298 - RNA, 22 nt, Artificial Sequence
  Synthetic
uaaaccuuaaauacaguggaua

SEQ ID NO: 498299 - RNA, 23 nt, Artificial Sequence
  Synthetic
cuaaaccuuaaauacaguggaua

SEQ ID NO: 498300 - RNA, 24 nt, Artificial Sequence
  Synthetic
gcuaaaccuuaaauacaguggaua

SEQ ID NO: 498301 - RNA, 18 nt, Artificial Sequence
  Synthetic
accacucugguguggaua

SEQ ID NO: 498302 - RNA, 19 nt, Artificial Sequence
  Synthetic
uaccacucugguguggaua

SEQ ID NO: 498303 - RNA, 20 nt, Artificial Sequence
  Synthetic
auaccacucugguguggaua

SEQ ID NO: 498304 - RNA, 21 nt, Artificial Sequence
  Synthetic
cauaccacucugguguggaua

SEQ ID NO: 498305 - RNA, 22 nt, Artificial Sequence
  Synthetic
ucauaccacucugguguggaua

SEQ ID NO: 498306 - RNA, 23 nt, Artificial Sequence
  Synthetic
aucauaccacucugguguggaua

SEQ ID NO: 498307 - RNA, 24 nt, Artificial Sequence
  Synthetic
caucauaccacucugguguggaua

SEQ ID NO: 498308 - RNA, 18 nt, Artificial Sequence
  Synthetic
auuccuauguuguggaua

SEQ ID NO: 498309 - RNA, 19 nt, Artificial Sequence
  Synthetic
uauuccuauguuguggaua

SEQ ID NO: 498310 - RNA, 20 nt, Artificial Sequence
  Synthetic
uuauuccuauguuguggaua

SEQ ID NO: 498311 - RNA, 21 nt, Artificial Sequence
  Synthetic
auuauuccuauguuguggaua

SEQ ID NO: 498312 - RNA, 22 nt, Artificial Sequence
  Synthetic
uauuauuccuauguuguggaua

SEQ ID NO: 498313 - RNA, 23 nt, Artificial Sequence
  Synthetic
guauuauuccuauguuguggaua

SEQ ID NO: 498314 - RNA, 24 nt, Artificial Sequence
  Synthetic
aguauuauuccuauguuguggaua

SEQ ID NO: 498315 - RNA, 18 nt, Artificial Sequence
  Synthetic
acaaugguagauuggaua

SEQ ID NO: 498316 - RNA, 19 nt, Artificial Sequence
  Synthetic
aacaaugguagauuggaua

SEQ ID NO: 498317 - RNA, 20 nt, Artificial Sequence
  Synthetic
aaacaaugguagauuggaua

SEQ ID NO: 498318 - RNA, 21 nt, Artificial Sequence
  Synthetic
gaaacaaugguagauuggaua

SEQ ID NO: 498319 - RNA, 22 nt, Artificial Sequence
  Synthetic
ugaaacaaugguagauuggaua

SEQ ID NO: 498320 - RNA, 23 nt, Artificial Sequence
  Synthetic
gugaaacaaugguagauuggaua

SEQ ID NO: 498321 - RNA, 24 nt, Artificial Sequence
  Synthetic
ugugaaacaaugguagauuggaua

SEQ ID NO: 498322 - RNA, 18 nt, Artificial Sequence
  Synthetic
cagaaaauguuuuggaua

SEQ ID NO: 498323 - RNA, 19 nt, Artificial Sequence
  Synthetic
gcagaaaauguuuuggaua

SEQ ID NO: 498324 - RNA, 20 nt, Artificial Sequence
  Synthetic
agcagaaaauguuuuggaua

SEQ ID NO: 498325 - RNA, 21 nt, Artificial Sequence
  Synthetic
aagcagaaaauguuuuggaua

SEQ ID NO: 498326 - RNA, 22 nt, Artificial Sequence
  Synthetic
aaagcagaaaauguuuuggaua

SEQ ID NO: 498327 - RNA, 23 nt, Artificial Sequence
  Synthetic
caaagcagaaaauguuuuggaua

SEQ ID NO: 498328 - RNA, 24 nt, Artificial Sequence
  Synthetic
ccaaagcagaaaauguuuuggaua

SEQ ID NO: 498329 - RNA, 18 nt, Artificial Sequence
  Synthetic
acacaauaaaaaaugaua

SEQ ID NO: 498330 - RNA, 19 nt, Artificial Sequence
  Synthetic
gacacaauaaaaaaugaua

SEQ ID NO: 498331 - RNA, 20 nt, Artificial Sequence
  Synthetic
agacacaauaaaaaaugaua

SEQ ID NO: 498332 - RNA, 21 nt, Artificial Sequence
  Synthetic
uagacacaauaaaaaaugaua

SEQ ID NO: 498333 - RNA, 22 nt, Artificial Sequence
  Synthetic
auagacacaauaaaaaaugaua

SEQ ID NO: 498334 - RNA, 23 nt, Artificial Sequence
  Synthetic
aauagacacaauaaaaaaugaua

SEQ ID NO: 498335 - RNA, 24 nt, Artificial Sequence
  Synthetic
aaauagacacaauaaaaaaugaua

SEQ ID NO: 498336 - RNA, 18 nt, Artificial Sequence
  Synthetic
gcacaauaaaaaaugaua

SEQ ID NO: 498337 - RNA, 19 nt, Artificial Sequence
  Synthetic
ggcacaauaaaaaaugaua

SEQ ID NO: 498338 - RNA, 20 nt, Artificial Sequence
  Synthetic
aggcacaauaaaaaaugaua

SEQ ID NO: 498339 - RNA, 21 nt, Artificial Sequence
  Synthetic
gaggcacaauaaaaaaugaua

SEQ ID NO: 498340 - RNA, 22 nt, Artificial Sequence
  Synthetic
agaggcacaauaaaaaaugaua

SEQ ID NO: 498341 - RNA, 23 nt, Artificial Sequence
  Synthetic
aagaggcacaauaaaaaaugaua

SEQ ID NO: 498342 - RNA, 24 nt, Artificial Sequence
  Synthetic
aaagaggcacaauaaaaaaugaua

SEQ ID NO: 498343 - RNA, 18 nt, Artificial Sequence
  Synthetic
augcaauaaaaaaugaua

SEQ ID NO: 498344 - RNA, 19 nt, Artificial Sequence
  Synthetic
gaugcaauaaaaaaugaua

SEQ ID NO: 498345 - RNA, 20 nt, Artificial Sequence
  Synthetic
agaugcaauaaaaaaugaua

SEQ ID NO: 498346 - RNA, 21 nt, Artificial Sequence
  Synthetic
uagaugcaauaaaaaaugaua

SEQ ID NO: 498347 - RNA, 22 nt, Artificial Sequence
  Synthetic
auagaugcaauaaaaaaugaua

SEQ ID NO: 498348 - RNA, 23 nt, Artificial Sequence
  Synthetic
aauagaugcaauaaaaaaugaua

SEQ ID NO: 498349 - RNA, 24 nt, Artificial Sequence
  Synthetic
aaauagaugcaauaaaaaaugaua

SEQ ID NO: 498350 - RNA, 18 nt, Artificial Sequence
  Synthetic
ucauuuuuucaaaugaua

SEQ ID NO: 498351 - RNA, 19 nt, Artificial Sequence
  Synthetic
aucauuuuuucaaaugaua

SEQ ID NO: 498352 - RNA, 20 nt, Artificial Sequence
  Synthetic
caucauuuuuucaaaugaua

SEQ ID NO: 498353 - RNA, 21 nt, Artificial Sequence
  Synthetic
ucaucauuuuuucaaaugaua

SEQ ID NO: 498354 - RNA, 22 nt, Artificial Sequence
  Synthetic
cucaucauuuuuucaaaugaua

SEQ ID NO: 498355 - RNA, 23 nt, Artificial Sequence
  Synthetic
acucaucauuuuuucaaaugaua

SEQ ID NO: 498356 - RNA, 24 nt, Artificial Sequence
  Synthetic
uacucaucauuuuuucaaaugaua

SEQ ID NO: 498357 - RNA, 18 nt, Artificial Sequence
  Synthetic
ccauacaaagaaaugaua

SEQ ID NO: 498358 - RNA, 19 nt, Artificial Sequence
  Synthetic
gccauacaaagaaaugaua

SEQ ID NO: 498359 - RNA, 20 nt, Artificial Sequence
  Synthetic
ugccauacaaagaaaugaua

SEQ ID NO: 498360 - RNA, 21 nt, Artificial Sequence
  Synthetic
augccauacaaagaaaugaua

SEQ ID NO: 498361 - RNA, 22 nt, Artificial Sequence
  Synthetic
uaugccauacaaagaaaugaua

SEQ ID NO: 498362 - RNA, 23 nt, Artificial Sequence
  Synthetic
guaugccauacaaagaaaugaua

SEQ ID NO: 498363 - RNA, 24 nt, Artificial Sequence
  Synthetic
uguaugccauacaaagaaaugaua

SEQ ID NO: 498364 - RNA, 18 nt, Artificial Sequence
  Synthetic
uuaugaaaaacaaugaua

SEQ ID NO: 498365 - RNA, 19 nt, Artificial Sequence
  Synthetic
uuuaugaaaaacaaugaua

SEQ ID NO: 498366 - RNA, 20 nt, Artificial Sequence
  Synthetic
uuuuaugaaaaacaaugaua

SEQ ID NO: 498367 - RNA, 21 nt, Artificial Sequence
  Synthetic
uuuuuaugaaaaacaaugaua

SEQ ID NO: 498368 - RNA, 22 nt, Artificial Sequence
  Synthetic
guuuuuaugaaaaacaaugaua

SEQ ID NO: 498369 - RNA, 23 nt, Artificial Sequence
  Synthetic
uguuuuuaugaaaaacaaugaua

SEQ ID NO: 498370 - RNA, 24 nt, Artificial Sequence
  Synthetic
auguuuuuaugaaaaacaaugaua

SEQ ID NO: 498371 - RNA, 18 nt, Artificial Sequence
  Synthetic
uucuuucaagcaaugaua

SEQ ID NO: 498372 - RNA, 19 nt, Artificial Sequence
  Synthetic
cuucuuucaagcaaugaua

SEQ ID NO: 498373 - RNA, 20 nt, Artificial Sequence
  Synthetic
gcuucuuucaagcaaugaua

SEQ ID NO: 498374 - RNA, 21 nt, Artificial Sequence
  Synthetic
ugcuucuuucaagcaaugaua

SEQ ID NO: 498375 - RNA, 22 nt, Artificial Sequence
  Synthetic
uugcuucuuucaagcaaugaua

SEQ ID NO: 498376 - RNA, 23 nt, Artificial Sequence
  Synthetic
uuugcuucuuucaagcaaugaua

SEQ ID NO: 498377 - RNA, 24 nt, Artificial Sequence
  Synthetic
uuuugcuucuuucaagcaaugaua

SEQ ID NO: 498378 - RNA, 18 nt, Artificial Sequence
  Synthetic
aguuugucaagaaugaua

SEQ ID NO: 498379 - RNA, 19 nt, Artificial Sequence
  Synthetic
gaguuugucaagaaugaua

SEQ ID NO: 498380 - RNA, 20 nt, Artificial Sequence
  Synthetic
agaguuugucaagaaugaua

SEQ ID NO: 498381 - RNA, 21 nt, Artificial Sequence
  Synthetic
aagaguuugucaagaaugaua

SEQ ID NO: 498382 - RNA, 22 nt, Artificial Sequence
  Synthetic
gaagaguuugucaagaaugaua

SEQ ID NO: 498383 - RNA, 23 nt, Artificial Sequence
  Synthetic
ggaagaguuugucaagaaugaua

SEQ ID NO: 498384 - RNA, 24 nt, Artificial Sequence
  Synthetic
uggaagaguuugucaagaaugaua

SEQ ID NO: 498385 - RNA, 18 nt, Artificial Sequence
  Synthetic
uaauggagaauaaugaua

SEQ ID NO: 498386 - RNA, 19 nt, Artificial Sequence
  Synthetic
auaauggagaauaaugaua

SEQ ID NO: 498387 - RNA, 20 nt, Artificial Sequence
  Synthetic
aauaauggagaauaaugaua

SEQ ID NO: 498388 - RNA, 21 nt, Artificial Sequence
  Synthetic
gaauaauggagaauaaugaua

SEQ ID NO: 498389 - RNA, 22 nt, Artificial Sequence
  Synthetic
agaauaauggagaauaaugaua

SEQ ID NO: 498390 - RNA, 23 nt, Artificial Sequence
  Synthetic
gagaauaauggagaauaaugaua

SEQ ID NO: 498391 - RNA, 24 nt, Artificial Sequence
  Synthetic
agagaauaauggagaauaaugaua

SEQ ID NO: 498392 - RNA, 18 nt, Artificial Sequence
  Synthetic
uguuuacaaguaaugaua

SEQ ID NO: 498393 - RNA, 19 nt, Artificial Sequence
  Synthetic
guguuuacaaguaaugaua

SEQ ID NO: 498394 - RNA, 20 nt, Artificial Sequence
  Synthetic
aguguuuacaaguaaugaua

SEQ ID NO: 498395 - RNA, 21 nt, Artificial Sequence
  Synthetic
caguguuuacaaguaaugaua

SEQ ID NO: 498396 - RNA, 22 nt, Artificial Sequence
  Synthetic
acaguguuuacaaguaaugaua

SEQ ID NO: 498397 - RNA, 23 nt, Artificial Sequence
  Synthetic
uacaguguuuacaaguaaugaua

SEQ ID NO: 498398 - RNA, 24 nt, Artificial Sequence
  Synthetic
cuacaguguuuacaaguaaugaua

SEQ ID NO: 498399 - RNA, 18 nt, Artificial Sequence
  Synthetic
aaaaaugaguuaaugaua

SEQ ID NO: 498400 - RNA, 19 nt, Artificial Sequence
  Synthetic
gaaaaaugaguuaaugaua

SEQ ID NO: 498401 - RNA, 20 nt, Artificial Sequence
  Synthetic
agaaaaaugaguuaaugaua

SEQ ID NO: 498402 - RNA, 21 nt, Artificial Sequence
  Synthetic
cagaaaaaugaguuaaugaua

SEQ ID NO: 498403 - RNA, 22 nt, Artificial Sequence
  Synthetic
acagaaaaaugaguuaaugaua

SEQ ID NO: 498404 - RNA, 23 nt, Artificial Sequence
  Synthetic
uacagaaaaaugaguuaaugaua

SEQ ID NO: 498405 - RNA, 24 nt, Artificial Sequence
  Synthetic
uuacagaaaaaugaguuaaugaua

SEQ ID NO: 498406 - RNA, 18 nt, Artificial Sequence
  Synthetic
aaauguugguuaaugaua

SEQ ID NO: 498407 - RNA, 19 nt, Artificial Sequence
  Synthetic
uaaauguugguuaaugaua

SEQ ID NO: 498408 - RNA, 20 nt, Artificial Sequence
  Synthetic
guaaauguugguuaaugaua

SEQ ID NO: 498409 - RNA, 21 nt, Artificial Sequence
  Synthetic
aguaaauguugguuaaugaua

SEQ ID NO: 498410 - RNA, 22 nt, Artificial Sequence
  Synthetic
uaguaaauguugguuaaugaua

SEQ ID NO: 498411 - RNA, 23 nt, Artificial Sequence
  Synthetic
uuaguaaauguugguuaaugaua

SEQ ID NO: 498412 - RNA, 24 nt, Artificial Sequence
  Synthetic
guuaguaaauguugguuaaugaua

SEQ ID NO: 498413 - RNA, 18 nt, Artificial Sequence
  Synthetic
ucucuuuccaacaugaua

SEQ ID NO: 498414 - RNA, 19 nt, Artificial Sequence
  Synthetic
uucucuuuccaacaugaua

SEQ ID NO: 498415 - RNA, 20 nt, Artificial Sequence
  Synthetic
cuucucuuuccaacaugaua

SEQ ID NO: 498416 - RNA, 21 nt, Artificial Sequence
  Synthetic
gcuucucuuuccaacaugaua

SEQ ID NO: 498417 - RNA, 22 nt, Artificial Sequence
  Synthetic
ggcuucucuuuccaacaugaua

SEQ ID NO: 498418 - RNA, 23 nt, Artificial Sequence
  Synthetic
gggcuucucuuuccaacaugaua

SEQ ID NO: 498419 - RNA, 24 nt, Artificial Sequence
  Synthetic
agggcuucucuuuccaacaugaua

SEQ ID NO: 498420 - RNA, 18 nt, Artificial Sequence
  Synthetic
cacaguaaccacaugaua

SEQ ID NO: 498421 - RNA, 19 nt, Artificial Sequence
  Synthetic
ucacaguaaccacaugaua

SEQ ID NO: 498422 - RNA, 20 nt, Artificial Sequence
  Synthetic
uucacaguaaccacaugaua

SEQ ID NO: 498423 - RNA, 21 nt, Artificial Sequence
  Synthetic
cuucacaguaaccacaugaua

SEQ ID NO: 498424 - RNA, 22 nt, Artificial Sequence
  Synthetic
acuucacaguaaccacaugaua

SEQ ID NO: 498425 - RNA, 23 nt, Artificial Sequence
  Synthetic
uacuucacaguaaccacaugaua

SEQ ID NO: 498426 - RNA, 24 nt, Artificial Sequence
  Synthetic
cuacuucacaguaaccacaugaua

SEQ ID NO: 498427 - RNA, 18 nt, Artificial Sequence
  Synthetic
uaaacaaaaggcaugaua

SEQ ID NO: 498428 - RNA, 19 nt, Artificial Sequence
  Synthetic
auaaacaaaaggcaugaua

SEQ ID NO: 498429 - RNA, 20 nt, Artificial Sequence
  Synthetic
aauaaacaaaaggcaugaua

SEQ ID NO: 498430 - RNA, 21 nt, Artificial Sequence
  Synthetic
aaauaaacaaaaggcaugaua

SEQ ID NO: 498431 - RNA, 22 nt, Artificial Sequence
  Synthetic
gaaauaaacaaaaggcaugaua

SEQ ID NO: 498432 - RNA, 23 nt, Artificial Sequence
  Synthetic
agaaauaaacaaaaggcaugaua

SEQ ID NO: 498433 - RNA, 24 nt, Artificial Sequence
  Synthetic
aagaaauaaacaaaaggcaugaua

SEQ ID NO: 498434 - RNA, 21 nt, Artificial Sequence
  Synthetic
ucccaugcuguucucaugaua

SEQ ID NO: 498435 - RNA, 22 nt, Artificial Sequence
  Synthetic
cucccaugcuguucucaugaua

SEQ ID NO: 498436 - RNA, 23 nt, Artificial Sequence
  Synthetic
ucucccaugcuguucucaugaua

SEQ ID NO: 498437 - RNA, 24 nt, Artificial Sequence
  Synthetic
uucucccaugcuguucucaugaua

SEQ ID NO: 498438 - RNA, 18 nt, Artificial Sequence
  Synthetic
agacuguuuuagaugaua

SEQ ID NO: 498439 - RNA, 19 nt, Artificial Sequence
  Synthetic
gagacuguuuuagaugaua

SEQ ID NO: 498440 - RNA, 20 nt, Artificial Sequence
  Synthetic
agagacuguuuuagaugaua

SEQ ID NO: 498441 - RNA, 21 nt, Artificial Sequence
  Synthetic
cagagacuguuuuagaugaua

SEQ ID NO: 498442 - RNA, 22 nt, Artificial Sequence
  Synthetic
ccagagacuguuuuagaugaua

SEQ ID NO: 498443 - RNA, 23 nt, Artificial Sequence
  Synthetic
accagagacuguuuuagaugaua

SEQ ID NO: 498444 - RNA, 24 nt, Artificial Sequence
  Synthetic
gaccagagacuguuuuagaugaua

SEQ ID NO: 498445 - RNA, 18 nt, Artificial Sequence
  Synthetic
aguaucuucuugaugaua

SEQ ID NO: 498446 - RNA, 19 nt, Artificial Sequence
  Synthetic
caguaucuucuugaugaua

SEQ ID NO: 498447 - RNA, 20 nt, Artificial Sequence
  Synthetic
ucaguaucuucuugaugaua

SEQ ID NO: 498448 - RNA, 21 nt, Artificial Sequence
  Synthetic
uucaguaucuucuugaugaua

SEQ ID NO: 498449 - RNA, 22 nt, Artificial Sequence
  Synthetic
uuucaguaucuucuugaugaua

SEQ ID NO: 498450 - RNA, 23 nt, Artificial Sequence
  Synthetic
guuucaguaucuucuugaugaua

SEQ ID NO: 498451 - RNA, 24 nt, Artificial Sequence
  Synthetic
uguuucaguaucuucuugaugaua

SEQ ID NO: 498452 - RNA, 18 nt, Artificial Sequence
  Synthetic
aaauucugaauuaugaua

SEQ ID NO: 498453 - RNA, 19 nt, Artificial Sequence
  Synthetic
uaaauucugaauuaugaua

SEQ ID NO: 498454 - RNA, 20 nt, Artificial Sequence
  Synthetic
cuaaauucugaauuaugaua

SEQ ID NO: 498455 - RNA, 21 nt, Artificial Sequence
  Synthetic
ucuaaauucugaauuaugaua

SEQ ID NO: 498456 - RNA, 22 nt, Artificial Sequence
  Synthetic
aucuaaauucugaauuaugaua

SEQ ID NO: 498457 - RNA, 23 nt, Artificial Sequence
  Synthetic
gaucuaaauucugaauuaugaua

SEQ ID NO: 498458 - RNA, 24 nt, Artificial Sequence
  Synthetic
ugaucuaaauucugaauuaugaua

SEQ ID NO: 498459 - RNA, 18 nt, Artificial Sequence
  Synthetic
gcugcuguucuuaugaua

SEQ ID NO: 498460 - RNA, 19 nt, Artificial Sequence
  Synthetic
ugcugcuguucuuaugaua

SEQ ID NO: 498461 - RNA, 20 nt, Artificial Sequence
  Synthetic
gugcugcuguucuuaugaua

SEQ ID NO: 498462 - RNA, 21 nt, Artificial Sequence
  Synthetic
cgugcugcuguucuuaugaua

SEQ ID NO: 498463 - RNA, 22 nt, Artificial Sequence
  Synthetic
ccgugcugcuguucuuaugaua

SEQ ID NO: 498464 - RNA, 23 nt, Artificial Sequence
  Synthetic
cccgugcugcuguucuuaugaua

SEQ ID NO: 498465 - RNA, 24 nt, Artificial Sequence
  Synthetic
ucccgugcugcuguucuuaugaua

SEQ ID NO: 498466 - RNA, 18 nt, Artificial Sequence
  Synthetic
aaaugcauuuuuaugaua

SEQ ID NO: 498467 - RNA, 19 nt, Artificial Sequence
  Synthetic
aaaaugcauuuuuaugaua

SEQ ID NO: 498468 - RNA, 20 nt, Artificial Sequence
  Synthetic
caaaaugcauuuuuaugaua

SEQ ID NO: 498469 - RNA, 21 nt, Artificial Sequence
  Synthetic
acaaaaugcauuuuuaugaua

SEQ ID NO: 498470 - RNA, 22 nt, Artificial Sequence
  Synthetic
aacaaaaugcauuuuuaugaua

SEQ ID NO: 498471 - RNA, 23 nt, Artificial Sequence
  Synthetic
uaacaaaaugcauuuuuaugaua

SEQ ID NO: 498472 - RNA, 24 nt, Artificial Sequence
  Synthetic
uuaacaaaaugcauuuuuaugaua

SEQ ID NO: 498473 - RNA, 18 nt, Artificial Sequence
  Synthetic
agguacaugaaacugaua

SEQ ID NO: 498474 - RNA, 19 nt, Artificial Sequence
  Synthetic
uagguacaugaaacugaua

SEQ ID NO: 498475 - RNA, 20 nt, Artificial Sequence
  Synthetic
guagguacaugaaacugaua

SEQ ID NO: 498476 - RNA, 21 nt, Artificial Sequence
  Synthetic
aguagguacaugaaacugaua

SEQ ID NO: 498477 - RNA, 22 nt, Artificial Sequence
  Synthetic
aaguagguacaugaaacugaua

SEQ ID NO: 498478 - RNA, 23 nt, Artificial Sequence
  Synthetic
aaaguagguacaugaaacugaua

SEQ ID NO: 498479 - RNA, 24 nt, Artificial Sequence
  Synthetic
gaaaguagguacaugaaacugaua

SEQ ID NO: 498480 - RNA, 18 nt, Artificial Sequence
  Synthetic
ugcauguucucacugaua

SEQ ID NO: 498481 - RNA, 19 nt, Artificial Sequence
  Synthetic
cugcauguucucacugaua

SEQ ID NO: 498482 - RNA, 20 nt, Artificial Sequence
  Synthetic
acugcauguucucacugaua

SEQ ID NO: 498483 - RNA, 21 nt, Artificial Sequence
  Synthetic
cacugcauguucucacugaua

SEQ ID NO: 498484 - RNA, 22 nt, Artificial Sequence
  Synthetic
acacugcauguucucacugaua

SEQ ID NO: 498485 - RNA, 23 nt, Artificial Sequence
  Synthetic
aacacugcauguucucacugaua

SEQ ID NO: 498486 - RNA, 24 nt, Artificial Sequence
  Synthetic
aaacacugcauguucucacugaua

SEQ ID NO: 498487 - RNA, 18 nt, Artificial Sequence
  Synthetic
gauagugaaugacugaua

SEQ ID NO: 498488 - RNA, 19 nt, Artificial Sequence
  Synthetic
agauagugaaugacugaua

SEQ ID NO: 498489 - RNA, 20 nt, Artificial Sequence
  Synthetic
aagauagugaaugacugaua

SEQ ID NO: 498490 - RNA, 21 nt, Artificial Sequence
  Synthetic
aaagauagugaaugacugaua

SEQ ID NO: 498491 - RNA, 22 nt, Artificial Sequence
  Synthetic
caaagauagugaaugacugaua

SEQ ID NO: 498492 - RNA, 23 nt, Artificial Sequence
  Synthetic
acaaagauagugaaugacugaua

SEQ ID NO: 498493 - RNA, 24 nt, Artificial Sequence
  Synthetic
cacaaagauagugaaugacugaua

SEQ ID NO: 498494 - RNA, 18 nt, Artificial Sequence
  Synthetic
uguucaaagauacugaua

SEQ ID NO: 498495 - RNA, 19 nt, Artificial Sequence
  Synthetic
auguucaaagauacugaua

SEQ ID NO: 498496 - RNA, 20 nt, Artificial Sequence
  Synthetic
uauguucaaagauacugaua

SEQ ID NO: 498497 - RNA, 21 nt, Artificial Sequence
  Synthetic
auauguucaaagauacugaua

SEQ ID NO: 498498 - RNA, 22 nt, Artificial Sequence
  Synthetic
aauauguucaaagauacugaua

SEQ ID NO: 498499 - RNA, 23 nt, Artificial Sequence
  Synthetic
aaauauguucaaagauacugaua

SEQ ID NO: 498500 - RNA, 24 nt, Artificial Sequence
  Synthetic
aaaauauguucaaagauacugaua

SEQ ID NO: 498501 - RNA, 18 nt, Artificial Sequence
  Synthetic
auucuuuauguacugaua

SEQ ID NO: 498502 - RNA, 19 nt, Artificial Sequence
  Synthetic
cauucuuuauguacugaua

SEQ ID NO: 498503 - RNA, 20 nt, Artificial Sequence
  Synthetic
acauucuuuauguacugaua

SEQ ID NO: 498504 - RNA, 21 nt, Artificial Sequence
  Synthetic
uacauucuuuauguacugaua

SEQ ID NO: 498505 - RNA, 22 nt, Artificial Sequence
  Synthetic
auacauucuuuauguacugaua

SEQ ID NO: 498506 - RNA, 23 nt, Artificial Sequence
  Synthetic
aauacauucuuuauguacugaua

SEQ ID NO: 498507 - RNA, 24 nt, Artificial Sequence
  Synthetic
aaauacauucuuuauguacugaua

SEQ ID NO: 498508 - RNA, 18 nt, Artificial Sequence
  Synthetic
acaauuuagaggcugaua

SEQ ID NO: 498509 - RNA, 19 nt, Artificial Sequence
  Synthetic
gacaauuuagaggcugaua

SEQ ID NO: 498510 - RNA, 20 nt, Artificial Sequence
  Synthetic
ugacaauuuagaggcugaua

SEQ ID NO: 498511 - RNA, 21 nt, Artificial Sequence
  Synthetic
gugacaauuuagaggcugaua

SEQ ID NO: 498512 - RNA, 22 nt, Artificial Sequence
  Synthetic
agugacaauuuagaggcugaua

SEQ ID NO: 498513 - RNA, 23 nt, Artificial Sequence
  Synthetic
aagugacaauuuagaggcugaua

SEQ ID NO: 498514 - RNA, 24 nt, Artificial Sequence
  Synthetic
aaagugacaauuuagaggcugaua

SEQ ID NO: 498515 - RNA, 18 nt, Artificial Sequence
  Synthetic
gcaucagccuggcugaua

SEQ ID NO: 498516 - RNA, 19 nt, Artificial Sequence
  Synthetic
agcaucagccuggcugaua

SEQ ID NO: 498517 - RNA, 20 nt, Artificial Sequence
  Synthetic
uagcaucagccuggcugaua

SEQ ID NO: 498518 - RNA, 21 nt, Artificial Sequence
  Synthetic
uuagcaucagccuggcugaua

SEQ ID NO: 498519 - RNA, 22 nt, Artificial Sequence
  Synthetic
cuuagcaucagccuggcugaua

SEQ ID NO: 498520 - RNA, 23 nt, Artificial Sequence
  Synthetic
ccuuagcaucagccuggcugaua

SEQ ID NO: 498521 - RNA, 24 nt, Artificial Sequence
  Synthetic
accuuagcaucagccuggcugaua

SEQ ID NO: 498522 - RNA, 18 nt, Artificial Sequence
  Synthetic
uugagaagugcucugaua

SEQ ID NO: 498523 - RNA, 19 nt, Artificial Sequence
  Synthetic
cuugagaagugcucugaua

SEQ ID NO: 498524 - RNA, 20 nt, Artificial Sequence
  Synthetic
ccuugagaagugcucugaua

SEQ ID NO: 498525 - RNA, 21 nt, Artificial Sequence
  Synthetic
gccuugagaagugcucugaua

SEQ ID NO: 498526 - RNA, 22 nt, Artificial Sequence
  Synthetic
ugccuugagaagugcucugaua

SEQ ID NO: 498527 - RNA, 23 nt, Artificial Sequence
  Synthetic
uugccuugagaagugcucugaua

SEQ ID NO: 498528 - RNA, 24 nt, Artificial Sequence
  Synthetic
auugccuugagaagugcucugaua

SEQ ID NO: 498529 - RNA, 18 nt, Artificial Sequence
  Synthetic
gcuuuuuaaauucugaua

SEQ ID NO: 498530 - RNA, 19 nt, Artificial Sequence
  Synthetic
ugcuuuuuaaauucugaua

SEQ ID NO: 498531 - RNA, 20 nt, Artificial Sequence
  Synthetic
augcuuuuuaaauucugaua

SEQ ID NO: 498532 - RNA, 21 nt, Artificial Sequence
  Synthetic
caugcuuuuuaaauucugaua

SEQ ID NO: 498533 - RNA, 22 nt, Artificial Sequence
  Synthetic
acaugcuuuuuaaauucugaua

SEQ ID NO: 498534 - RNA, 23 nt, Artificial Sequence
  Synthetic
aacaugcuuuuuaaauucugaua

SEQ ID NO: 498535 - RNA, 24 nt, Artificial Sequence
  Synthetic
aaacaugcuuuuuaaauucugaua

SEQ ID NO: 498536 - RNA, 18 nt, Artificial Sequence
  Synthetic
auauacucuucagugaua

SEQ ID NO: 498537 - RNA, 19 nt, Artificial Sequence
  Synthetic
aauauacucuucagugaua

SEQ ID NO: 498538 - RNA, 20 nt, Artificial Sequence
  Synthetic
uaauauacucuucagugaua

SEQ ID NO: 498539 - RNA, 21 nt, Artificial Sequence
  Synthetic
auaauauacucuucagugaua

SEQ ID NO: 498540 - RNA, 22 nt, Artificial Sequence
  Synthetic
cauaauauacucuucagugaua

SEQ ID NO: 498541 - RNA, 23 nt, Artificial Sequence
  Synthetic
ucauaauauacucuucagugaua

SEQ ID NO: 498542 - RNA, 24 nt, Artificial Sequence
  Synthetic
aucauaauauacucuucagugaua

SEQ ID NO: 498543 - RNA, 18 nt, Artificial Sequence
  Synthetic
agcuaaacaaaggugaua

SEQ ID NO: 498544 - RNA, 19 nt, Artificial Sequence
  Synthetic
uagcuaaacaaaggugaua

SEQ ID NO: 498545 - RNA, 20 nt, Artificial Sequence
  Synthetic
cuagcuaaacaaaggugaua

SEQ ID NO: 498546 - RNA, 21 nt, Artificial Sequence
  Synthetic
acuagcuaaacaaaggugaua

SEQ ID NO: 498547 - RNA, 22 nt, Artificial Sequence
  Synthetic
aacuagcuaaacaaaggugaua

SEQ ID NO: 498548 - RNA, 23 nt, Artificial Sequence
  Synthetic
uaacuagcuaaacaaaggugaua

SEQ ID NO: 498549 - RNA, 24 nt, Artificial Sequence
  Synthetic
uuaacuagcuaaacaaaggugaua

SEQ ID NO: 498550 - RNA, 18 nt, Artificial Sequence
  Synthetic
ugugcucucaaggugaua

SEQ ID NO: 498551 - RNA, 19 nt, Artificial Sequence
  Synthetic
uugugcucucaaggugaua

SEQ ID NO: 498552 - RNA, 20 nt, Artificial Sequence
  Synthetic
auugugcucucaaggugaua

SEQ ID NO: 498553 - RNA, 21 nt, Artificial Sequence
  Synthetic
aauugugcucucaaggugaua

SEQ ID NO: 498554 - RNA, 22 nt, Artificial Sequence
  Synthetic
gaauugugcucucaaggugaua

SEQ ID NO: 498555 - RNA, 23 nt, Artificial Sequence
  Synthetic
agaauugugcucucaaggugaua

SEQ ID NO: 498556 - RNA, 24 nt, Artificial Sequence
  Synthetic
gagaauugugcucucaaggugaua

SEQ ID NO: 498557 - RNA, 18 nt, Artificial Sequence
  Synthetic
uguuuuucagaggugaua

SEQ ID NO: 498558 - RNA, 19 nt, Artificial Sequence
  Synthetic
uuguuuuucagaggugaua

SEQ ID NO: 498559 - RNA, 20 nt, Artificial Sequence
  Synthetic
guuguuuuucagaggugaua

SEQ ID NO: 498560 - RNA, 21 nt, Artificial Sequence
  Synthetic
gguuguuuuucagaggugaua

SEQ ID NO: 498561 - RNA, 22 nt, Artificial Sequence
  Synthetic
ugguuguuuuucagaggugaua

SEQ ID NO: 498562 - RNA, 23 nt, Artificial Sequence
  Synthetic
uugguuguuuuucagaggugaua

SEQ ID NO: 498563 - RNA, 24 nt, Artificial Sequence
  Synthetic
uuugguuguuuuucagaggugaua

SEQ ID NO: 498564 - RNA, 18 nt, Artificial Sequence
  Synthetic
ugagguaggagggugaua

SEQ ID NO: 498565 - RNA, 19 nt, Artificial Sequence
  Synthetic
cugagguaggagggugaua

SEQ ID NO: 498566 - RNA, 20 nt, Artificial Sequence
  Synthetic
gcugagguaggagggugaua

SEQ ID NO: 498567 - RNA, 21 nt, Artificial Sequence
  Synthetic
agcugagguaggagggugaua

SEQ ID NO: 498568 - RNA, 22 nt, Artificial Sequence
  Synthetic
aagcugagguaggagggugaua

SEQ ID NO: 498569 - RNA, 23 nt, Artificial Sequence
  Synthetic
gaagcugagguaggagggugaua

SEQ ID NO: 498570 - RNA, 24 nt, Artificial Sequence
  Synthetic
ggaagcugagguaggagggugaua

SEQ ID NO: 498571 - RNA, 18 nt, Artificial Sequence
  Synthetic
uauaagauaggggugaua

SEQ ID NO: 498572 - RNA, 19 nt, Artificial Sequence
  Synthetic
cuauaagauaggggugaua

SEQ ID NO: 498573 - RNA, 20 nt, Artificial Sequence
  Synthetic
ucuauaagauaggggugaua

SEQ ID NO: 498574 - RNA, 21 nt, Artificial Sequence
  Synthetic
uucuauaagauaggggugaua

SEQ ID NO: 498575 - RNA, 22 nt, Artificial Sequence
  Synthetic
guucuauaagauaggggugaua

SEQ ID NO: 498576 - RNA, 23 nt, Artificial Sequence
  Synthetic
uguucuauaagauaggggugaua

SEQ ID NO: 498577 - RNA, 24 nt, Artificial Sequence
  Synthetic
auguucuauaagauaggggugaua

SEQ ID NO: 498578 - RNA, 18 nt, Artificial Sequence
  Synthetic
uauauuuauugggugaua

SEQ ID NO: 498579 - RNA, 19 nt, Artificial Sequence
  Synthetic
auauauuuauugggugaua

SEQ ID NO: 498580 - RNA, 20 nt, Artificial Sequence
  Synthetic
uauauauuuauugggugaua

SEQ ID NO: 498581 - RNA, 21 nt, Artificial Sequence
  Synthetic
uuauauauuuauugggugaua

SEQ ID NO: 498582 - RNA, 22 nt, Artificial Sequence
  Synthetic
uuuauauauuuauugggugaua

SEQ ID NO: 498583 - RNA, 23 nt, Artificial Sequence
  Synthetic
auuuauauauuuauugggugaua

SEQ ID NO: 498584 - RNA, 24 nt, Artificial Sequence
  Synthetic
cauuuauauauuuauugggugaua

SEQ ID NO: 498585 - RNA, 18 nt, Artificial Sequence
  Synthetic
uaggucaugauggugaua

SEQ ID NO: 498586 - RNA, 19 nt, Artificial Sequence
  Synthetic
cuaggucaugauggugaua

SEQ ID NO: 498587 - RNA, 20 nt, Artificial Sequence
  Synthetic
ucuaggucaugauggugaua

SEQ ID NO: 498588 - RNA, 21 nt, Artificial Sequence
  Synthetic
uucuaggucaugauggugaua

SEQ ID NO: 498589 - RNA, 22 nt, Artificial Sequence
  Synthetic
uuucuaggucaugauggugaua

SEQ ID NO: 498590 - RNA, 23 nt, Artificial Sequence
  Synthetic
uuuucuaggucaugauggugaua

SEQ ID NO: 498591 - RNA, 24 nt, Artificial Sequence
  Synthetic
cuuuucuaggucaugauggugaua

SEQ ID NO: 498592 - RNA, 18 nt, Artificial Sequence
  Synthetic
ggaauuuauauugugaua

SEQ ID NO: 498593 - RNA, 19 nt, Artificial Sequence
  Synthetic
uggaauuuauauugugaua

SEQ ID NO: 498594 - RNA, 20 nt, Artificial Sequence
  Synthetic
auggaauuuauauugugaua

SEQ ID NO: 498595 - RNA, 21 nt, Artificial Sequence
  Synthetic
cauggaauuuauauugugaua

SEQ ID NO: 498596 - RNA, 22 nt, Artificial Sequence
  Synthetic
ucauggaauuuauauugugaua

SEQ ID NO: 498597 - RNA, 23 nt, Artificial Sequence
  Synthetic
cucauggaauuuauauugugaua

SEQ ID NO: 498598 - RNA, 24 nt, Artificial Sequence
  Synthetic
ccucauggaauuuauauugugaua

SEQ ID NO: 498599 - RNA, 18 nt, Artificial Sequence
  Synthetic
aaauauugacaauugaua

SEQ ID NO: 498600 - RNA, 19 nt, Artificial Sequence
  Synthetic
aaaauauugacaauugaua

SEQ ID NO: 498601 - RNA, 20 nt, Artificial Sequence
  Synthetic
aaaaauauugacaauugaua

SEQ ID NO: 498602 - RNA, 21 nt, Artificial Sequence
  Synthetic
aaaaaauauugacaauugaua

SEQ ID NO: 498603 - RNA, 22 nt, Artificial Sequence
  Synthetic
caaaaaauauugacaauugaua

SEQ ID NO: 498604 - RNA, 23 nt, Artificial Sequence
  Synthetic
ccaaaaaauauugacaauugaua

SEQ ID NO: 498605 - RNA, 24 nt, Artificial Sequence
  Synthetic
uccaaaaaauauugacaauugaua

SEQ ID NO: 498606 - RNA, 18 nt, Artificial Sequence
  Synthetic
gcaccugaaucauugaua

SEQ ID NO: 498607 - RNA, 19 nt, Artificial Sequence
  Synthetic
agcaccugaaucauugaua

SEQ ID NO: 498608 - RNA, 20 nt, Artificial Sequence
  Synthetic
aagcaccugaaucauugaua

SEQ ID NO: 498609 - RNA, 21 nt, Artificial Sequence
  Synthetic
aaagcaccugaaucauugaua

SEQ ID NO: 498610 - RNA, 22 nt, Artificial Sequence
  Synthetic
uaaagcaccugaaucauugaua

SEQ ID NO: 498611 - RNA, 23 nt, Artificial Sequence
  Synthetic
guaaagcaccugaaucauugaua

SEQ ID NO: 498612 - RNA, 24 nt, Artificial Sequence
  Synthetic
uguaaagcaccugaaucauugaua

SEQ ID NO: 498613 - RNA, 18 nt, Artificial Sequence
  Synthetic
aagagcaaaagauugaua

SEQ ID NO: 498614 - RNA, 19 nt, Artificial Sequence
  Synthetic
aaagagcaaaagauugaua

SEQ ID NO: 498615 - RNA, 20 nt, Artificial Sequence
  Synthetic
aaaagagcaaaagauugaua

SEQ ID NO: 498616 - RNA, 21 nt, Artificial Sequence
  Synthetic
caaaagagcaaaagauugaua

SEQ ID NO: 498617 - RNA, 22 nt, Artificial Sequence
  Synthetic
acaaaagagcaaaagauugaua

SEQ ID NO: 498618 - RNA, 23 nt, Artificial Sequence
  Synthetic
cacaaaagagcaaaagauugaua

SEQ ID NO: 498619 - RNA, 24 nt, Artificial Sequence
  Synthetic
gcacaaaagagcaaaagauugaua

SEQ ID NO: 498620 - RNA, 18 nt, Artificial Sequence
  Synthetic
acauagauuaacuugaua

SEQ ID NO: 498621 - RNA, 19 nt, Artificial Sequence
  Synthetic
aacauagauuaacuugaua

SEQ ID NO: 498622 - RNA, 20 nt, Artificial Sequence
  Synthetic
gaacauagauuaacuugaua

SEQ ID NO: 498623 - RNA, 21 nt, Artificial Sequence
  Synthetic
ugaacauagauuaacuugaua

SEQ ID NO: 498624 - RNA, 22 nt, Artificial Sequence
  Synthetic
uugaacauagauuaacuugaua

SEQ ID NO: 498625 - RNA, 23 nt, Artificial Sequence
  Synthetic
guugaacauagauuaacuugaua

SEQ ID NO: 498626 - RNA, 24 nt, Artificial Sequence
  Synthetic
aguugaacauagauuaacuugaua

SEQ ID NO: 498627 - RNA, 18 nt, Artificial Sequence
  Synthetic
ugaguuauuagcuugaua

SEQ ID NO: 498628 - RNA, 19 nt, Artificial Sequence
  Synthetic
gugaguuauuagcuugaua

SEQ ID NO: 498629 - RNA, 20 nt, Artificial Sequence
  Synthetic
ugugaguuauuagcuugaua

SEQ ID NO: 498630 - RNA, 21 nt, Artificial Sequence
  Synthetic
gugugaguuauuagcuugaua

SEQ ID NO: 498631 - RNA, 22 nt, Artificial Sequence
  Synthetic
ugugugaguuauuagcuugaua

SEQ ID NO: 498632 - RNA, 23 nt, Artificial Sequence
  Synthetic
uugugugaguuauuagcuugaua

SEQ ID NO: 498633 - RNA, 24 nt, Artificial Sequence
  Synthetic
uuugugugaguuauuagcuugaua

SEQ ID NO: 498634 - RNA, 18 nt, Artificial Sequence
  Synthetic
gaaaaaaauuaguugaua

SEQ ID NO: 498635 - RNA, 19 nt, Artificial Sequence
  Synthetic
ugaaaaaaauuaguugaua

SEQ ID NO: 498636 - RNA, 20 nt, Artificial Sequence
  Synthetic
cugaaaaaaauuaguugaua

SEQ ID NO: 498637 - RNA, 21 nt, Artificial Sequence
  Synthetic
acugaaaaaaauuaguugaua

SEQ ID NO: 498638 - RNA, 22 nt, Artificial Sequence
  Synthetic
cacugaaaaaaauuaguugaua

SEQ ID NO: 498639 - RNA, 23 nt, Artificial Sequence
  Synthetic
ucacugaaaaaaauuaguugaua

SEQ ID NO: 498640 - RNA, 24 nt, Artificial Sequence
  Synthetic
aucacugaaaaaaauuaguugaua

SEQ ID NO: 498641 - RNA, 18 nt, Artificial Sequence
  Synthetic
ggaacuugccauuugaua

SEQ ID NO: 498642 - RNA, 19 nt, Artificial Sequence
  Synthetic
uggaacuugccauuugaua

SEQ ID NO: 498643 - RNA, 20 nt, Artificial Sequence
  Synthetic
auggaacuugccauuugaua

SEQ ID NO: 498644 - RNA, 21 nt, Artificial Sequence
  Synthetic
cauggaacuugccauuugaua

SEQ ID NO: 498645 - RNA, 22 nt, Artificial Sequence
  Synthetic
ucauggaacuugccauuugaua

SEQ ID NO: 498646 - RNA, 23 nt, Artificial Sequence
  Synthetic
uucauggaacuugccauuugaua

SEQ ID NO: 498647 - RNA, 24 nt, Artificial Sequence
  Synthetic
auucauggaacuugccauuugaua

SEQ ID NO: 498648 - RNA, 18 nt, Artificial Sequence
  Synthetic
gaaugugaauauuugaua

SEQ ID NO: 498649 - RNA, 19 nt, Artificial Sequence
  Synthetic
agaaugugaauauuugaua

SEQ ID NO: 498650 - RNA, 20 nt, Artificial Sequence
  Synthetic
uagaaugugaauauuugaua

SEQ ID NO: 498651 - RNA, 21 nt, Artificial Sequence
  Synthetic
auagaaugugaauauuugaua

SEQ ID NO: 498652 - RNA, 22 nt, Artificial Sequence
  Synthetic
gauagaaugugaauauuugaua

SEQ ID NO: 498653 - RNA, 23 nt, Artificial Sequence
  Synthetic
ugauagaaugugaauauuugaua

SEQ ID NO: 498654 - RNA, 24 nt, Artificial Sequence
  Synthetic
augauagaaugugaauauuugaua

SEQ ID NO: 498655 - RNA, 18 nt, Artificial Sequence
  Synthetic
ugacuuguagcuuugaua

SEQ ID NO: 498656 - RNA, 19 nt, Artificial Sequence
  Synthetic
gugacuuguagcuuugaua

SEQ ID NO: 498657 - RNA, 20 nt, Artificial Sequence
  Synthetic
ggugacuuguagcuuugaua

SEQ ID NO: 498658 - RNA, 21 nt, Artificial Sequence
  Synthetic
uggugacuuguagcuuugaua

SEQ ID NO: 498659 - RNA, 22 nt, Artificial Sequence
  Synthetic
guggugacuuguagcuuugaua

SEQ ID NO: 498660 - RNA, 23 nt, Artificial Sequence
  Synthetic
aguggugacuuguagcuuugaua

SEQ ID NO: 498661 - RNA, 24 nt, Artificial Sequence
  Synthetic
gaguggugacuuguagcuuugaua

SEQ ID NO: 498662 - RNA, 18 nt, Artificial Sequence
  Synthetic
uuaaguagaucuuugaua

SEQ ID NO: 498663 - RNA, 19 nt, Artificial Sequence
  Synthetic
uuuaaguagaucuuugaua

SEQ ID NO: 498664 - RNA, 20 nt, Artificial Sequence
  Synthetic
uuuuaaguagaucuuugaua

SEQ ID NO: 498665 - RNA, 21 nt, Artificial Sequence
  Synthetic
cuuuuaaguagaucuuugaua

SEQ ID NO: 498666 - RNA, 22 nt, Artificial Sequence
  Synthetic
ccuuuuaaguagaucuuugaua

SEQ ID NO: 498667 - RNA, 23 nt, Artificial Sequence
  Synthetic
cccuuuuaaguagaucuuugaua

SEQ ID NO: 498668 - RNA, 24 nt, Artificial Sequence
  Synthetic
ucccuuuuaaguagaucuuugaua

SEQ ID NO: 498669 - RNA, 18 nt, Artificial Sequence
  Synthetic
uuuauguacuguuugaua

SEQ ID NO: 498670 - RNA, 19 nt, Artificial Sequence
  Synthetic
cuuuauguacuguuugaua

SEQ ID NO: 498671 - RNA, 20 nt, Artificial Sequence
  Synthetic
acuuuauguacuguuugaua

SEQ ID NO: 498672 - RNA, 21 nt, Artificial Sequence
  Synthetic
aacuuuauguacuguuugaua

SEQ ID NO: 498673 - RNA, 22 nt, Artificial Sequence
  Synthetic
aaacuuuauguacuguuugaua

SEQ ID NO: 498674 - RNA, 23 nt, Artificial Sequence
  Synthetic
gaaacuuuauguacuguuugaua

SEQ ID NO: 498675 - RNA, 24 nt, Artificial Sequence
  Synthetic
ggaaacuuuauguacuguuugaua

SEQ ID NO: 498676 - RNA, 18 nt, Artificial Sequence
  Synthetic
gucauaaauauuuugaua

SEQ ID NO: 498677 - RNA, 19 nt, Artificial Sequence
  Synthetic
ugucauaaauauuuugaua

SEQ ID NO: 498678 - RNA, 20 nt, Artificial Sequence
  Synthetic
cugucauaaauauuuugaua

SEQ ID NO: 498679 - RNA, 21 nt, Artificial Sequence
  Synthetic
ucugucauaaauauuuugaua

SEQ ID NO: 498680 - RNA, 22 nt, Artificial Sequence
  Synthetic
cucugucauaaauauuuugaua

SEQ ID NO: 498681 - RNA, 23 nt, Artificial Sequence
  Synthetic
ucucugucauaaauauuuugaua

SEQ ID NO: 498682 - RNA, 24 nt, Artificial Sequence
  Synthetic
uucucugucauaaauauuuugaua

SEQ ID NO: 498683 - RNA, 18 nt, Artificial Sequence
  Synthetic
auauuguuacuuuugaua

SEQ ID NO: 498684 - RNA, 19 nt, Artificial Sequence
  Synthetic
uauauuguuacuuuugaua

SEQ ID NO: 498685 - RNA, 20 nt, Artificial Sequence
  Synthetic
uuauauuguuacuuuugaua

SEQ ID NO: 498686 - RNA, 21 nt, Artificial Sequence
  Synthetic
auuauauuguuacuuuugaua

SEQ ID NO: 498687 - RNA, 22 nt, Artificial Sequence
  Synthetic
gauuauauuguuacuuuugaua

SEQ ID NO: 498688 - RNA, 23 nt, Artificial Sequence
  Synthetic
agauuauauuguuacuuuugaua

SEQ ID NO: 498689 - RNA, 24 nt, Artificial Sequence
  Synthetic
cagauuauauuguuacuuuugaua

SEQ ID NO: 498690 - RNA, 18 nt, Artificial Sequence
  Synthetic
agguguauaaaaaauaua

SEQ ID NO: 498691 - RNA, 19 nt, Artificial Sequence
  Synthetic
cagguguauaaaaaauaua

SEQ ID NO: 498692 - RNA, 20 nt, Artificial Sequence
  Synthetic
ucagguguauaaaaaauaua

SEQ ID NO: 498693 - RNA, 21 nt, Artificial Sequence
  Synthetic
uucagguguauaaaaaauaua

SEQ ID NO: 498694 - RNA, 22 nt, Artificial Sequence
  Synthetic
uuucagguguauaaaaaauaua

SEQ ID NO: 498695 - RNA, 23 nt, Artificial Sequence
  Synthetic
auuucagguguauaaaaaauaua

SEQ ID NO: 498696 - RNA, 24 nt, Artificial Sequence
  Synthetic
cauuucagguguauaaaaaauaua

SEQ ID NO: 498697 - RNA, 18 nt, Artificial Sequence
  Synthetic
uguugaaguuaaaauaua

SEQ ID NO: 498698 - RNA, 19 nt, Artificial Sequence
  Synthetic
uuguugaaguuaaaauaua

SEQ ID NO: 498699 - RNA, 20 nt, Artificial Sequence
  Synthetic
cuuguugaaguuaaaauaua

SEQ ID NO: 498700 - RNA, 21 nt, Artificial Sequence
  Synthetic
gcuuguugaaguuaaaauaua

SEQ ID NO: 498701 - RNA, 22 nt, Artificial Sequence
  Synthetic
agcuuguugaaguuaaaauaua

SEQ ID NO: 498702 - RNA, 23 nt, Artificial Sequence
  Synthetic
cagcuuguugaaguuaaaauaua

SEQ ID NO: 498703 - RNA, 24 nt, Artificial Sequence
  Synthetic
ucagcuuguugaaguuaaaauaua

SEQ ID NO: 498704 - RNA, 18 nt, Artificial Sequence
  Synthetic
gauuuacaugcaaauaua

SEQ ID NO: 498705 - RNA, 19 nt, Artificial Sequence
  Synthetic
ugauuuacaugcaaauaua

SEQ ID NO: 498706 - RNA, 20 nt, Artificial Sequence
  Synthetic
gugauuuacaugcaaauaua

SEQ ID NO: 498707 - RNA, 21 nt, Artificial Sequence
  Synthetic
agugauuuacaugcaaauaua

SEQ ID NO: 498708 - RNA, 22 nt, Artificial Sequence
  Synthetic
aagugauuuacaugcaaauaua

SEQ ID NO: 498709 - RNA, 23 nt, Artificial Sequence
  Synthetic
aaagugauuuacaugcaaauaua

SEQ ID NO: 498710 - RNA, 24 nt, Artificial Sequence
  Synthetic
aaaagugauuuacaugcaaauaua

SEQ ID NO: 498711 - RNA, 18 nt, Artificial Sequence
  Synthetic
gcuguauggucaaauaua

SEQ ID NO: 498712 - RNA, 19 nt, Artificial Sequence
  Synthetic
agcuguauggucaaauaua

SEQ ID NO: 498713 - RNA, 20 nt, Artificial Sequence
  Synthetic
uagcuguauggucaaauaua

SEQ ID NO: 498714 - RNA, 21 nt, Artificial Sequence
  Synthetic
uuagcuguauggucaaauaua

SEQ ID NO: 498715 - RNA, 22 nt, Artificial Sequence
  Synthetic
cuuagcuguauggucaaauaua

SEQ ID NO: 498716 - RNA, 23 nt, Artificial Sequence
  Synthetic
acuuagcuguauggucaaauaua

SEQ ID NO: 498717 - RNA, 24 nt, Artificial Sequence
  Synthetic
aacuuagcuguauggucaaauaua

SEQ ID NO: 498718 - RNA, 18 nt, Artificial Sequence
  Synthetic
uaaaauaauucaaauaua

SEQ ID NO: 498719 - RNA, 19 nt, Artificial Sequence
  Synthetic
uuaaaauaauucaaauaua

SEQ ID NO: 498720 - RNA, 20 nt, Artificial Sequence
  Synthetic
auuaaaauaauucaaauaua

SEQ ID NO: 498721 - RNA, 21 nt, Artificial Sequence
  Synthetic
aauuaaaauaauucaaauaua

SEQ ID NO: 498722 - RNA, 22 nt, Artificial Sequence
  Synthetic
gaauuaaaauaauucaaauaua

SEQ ID NO: 498723 - RNA, 23 nt, Artificial Sequence
  Synthetic
agaauuaaaauaauucaaauaua

SEQ ID NO: 498724 - RNA, 24 nt, Artificial Sequence
  Synthetic
uagaauuaaaauaauucaaauaua

SEQ ID NO: 498725 - RNA, 18 nt, Artificial Sequence
  Synthetic
gaaaugaaaggaaauaua

SEQ ID NO: 498726 - RNA, 19 nt, Artificial Sequence
  Synthetic
cgaaaugaaaggaaauaua

SEQ ID NO: 498727 - RNA, 20 nt, Artificial Sequence
  Synthetic
gcgaaaugaaaggaaauaua

SEQ ID NO: 498728 - RNA, 21 nt, Artificial Sequence
  Synthetic
agcgaaaugaaaggaaauaua

SEQ ID NO: 498729 - RNA, 22 nt, Artificial Sequence
  Synthetic
uagcgaaaugaaaggaaauaua

SEQ ID NO: 498730 - RNA, 23 nt, Artificial Sequence
  Synthetic
auagcgaaaugaaaggaaauaua

SEQ ID NO: 498731 - RNA, 24 nt, Artificial Sequence
  Synthetic
uauagcgaaaugaaaggaaauaua

SEQ ID NO: 498732 - RNA, 18 nt, Artificial Sequence
  Synthetic
uacugcuggggaaauaua

SEQ ID NO: 498733 - RNA, 19 nt, Artificial Sequence
  Synthetic
uuacugcuggggaaauaua

SEQ ID NO: 498734 - RNA, 20 nt, Artificial Sequence
  Synthetic
auuacugcuggggaaauaua

SEQ ID NO: 498735 - RNA, 21 nt, Artificial Sequence
  Synthetic
uauuacugcuggggaaauaua

SEQ ID NO: 498736 - RNA, 22 nt, Artificial Sequence
  Synthetic
uuauuacugcuggggaaauaua

SEQ ID NO: 498737 - RNA, 23 nt, Artificial Sequence
  Synthetic
uuuauuacugcuggggaaauaua

SEQ ID NO: 498738 - RNA, 24 nt, Artificial Sequence
  Synthetic
uuuuauuacugcuggggaaauaua

SEQ ID NO: 498739 - RNA, 18 nt, Artificial Sequence
  Synthetic
cauauaaagugaaauaua

SEQ ID NO: 498740 - RNA, 19 nt, Artificial Sequence
  Synthetic
acauauaaagugaaauaua

SEQ ID NO: 498741 - RNA, 20 nt, Artificial Sequence
  Synthetic
gacauauaaagugaaauaua

SEQ ID NO: 498742 - RNA, 21 nt, Artificial Sequence
  Synthetic
ggacauauaaagugaaauaua

SEQ ID NO: 498743 - RNA, 22 nt, Artificial Sequence
  Synthetic
gggacauauaaagugaaauaua

SEQ ID NO: 498744 - RNA, 23 nt, Artificial Sequence
  Synthetic
agggacauauaaagugaaauaua

SEQ ID NO: 498745 - RNA, 24 nt, Artificial Sequence
  Synthetic
aagggacauauaaagugaaauaua

SEQ ID NO: 498746 - RNA, 18 nt, Artificial Sequence
  Synthetic
auucugguuugaaauaua

SEQ ID NO: 498747 - RNA, 19 nt, Artificial Sequence
  Synthetic
uauucugguuugaaauaua

SEQ ID NO: 498748 - RNA, 20 nt, Artificial Sequence
  Synthetic
auauucugguuugaaauaua

SEQ ID NO: 498749 - RNA, 21 nt, Artificial Sequence
  Synthetic
gauauucugguuugaaauaua

SEQ ID NO: 498750 - RNA, 22 nt, Artificial Sequence
  Synthetic
ugauauucugguuugaaauaua

SEQ ID NO: 498751 - RNA, 23 nt, Artificial Sequence
  Synthetic
augauauucugguuugaaauaua

SEQ ID NO: 498752 - RNA, 24 nt, Artificial Sequence
  Synthetic
gaugauauucugguuugaaauaua

SEQ ID NO: 498753 - RNA, 18 nt, Artificial Sequence
  Synthetic
cauuuugacauaaauaua

SEQ ID NO: 498754 - RNA, 19 nt, Artificial Sequence
  Synthetic
ccauuuugacauaaauaua

SEQ ID NO: 498755 - RNA, 20 nt, Artificial Sequence
  Synthetic
uccauuuugacauaaauaua

SEQ ID NO: 498756 - RNA, 21 nt, Artificial Sequence
  Synthetic
guccauuuugacauaaauaua

SEQ ID NO: 498757 - RNA, 22 nt, Artificial Sequence
  Synthetic
aguccauuuugacauaaauaua

SEQ ID NO: 498758 - RNA, 23 nt, Artificial Sequence
  Synthetic
gaguccauuuugacauaaauaua

SEQ ID NO: 498759 - RNA, 24 nt, Artificial Sequence
  Synthetic
ugaguccauuuugacauaaauaua

SEQ ID NO: 498760 - RNA, 18 nt, Artificial Sequence
  Synthetic
aaaaaucauauaaauaua

SEQ ID NO: 498761 - RNA, 19 nt, Artificial Sequence
  Synthetic
uaaaaaucauauaaauaua

SEQ ID NO: 498762 - RNA, 20 nt, Artificial Sequence
  Synthetic
guaaaaaucauauaaauaua

SEQ ID NO: 498763 - RNA, 21 nt, Artificial Sequence
  Synthetic
uguaaaaaucauauaaauaua

SEQ ID NO: 498764 - RNA, 22 nt, Artificial Sequence
  Synthetic
auguaaaaaucauauaaauaua

SEQ ID NO: 498765 - RNA, 23 nt, Artificial Sequence
  Synthetic
uauguaaaaaucauauaaauaua

SEQ ID NO: 498766 - RNA, 24 nt, Artificial Sequence
  Synthetic
auauguaaaaaucauauaaauaua

SEQ ID NO: 498767 - RNA, 18 nt, Artificial Sequence
  Synthetic
cuucaauaucuaaauaua

SEQ ID NO: 498768 - RNA, 19 nt, Artificial Sequence
  Synthetic
acuucaauaucuaaauaua

SEQ ID NO: 498769 - RNA, 20 nt, Artificial Sequence
  Synthetic
uacuucaauaucuaaauaua

SEQ ID NO: 498770 - RNA, 21 nt, Artificial Sequence
  Synthetic
guacuucaauaucuaaauaua

SEQ ID NO: 498771 - RNA, 22 nt, Artificial Sequence
  Synthetic
gguacuucaauaucuaaauaua

SEQ ID NO: 498772 - RNA, 23 nt, Artificial Sequence
  Synthetic
ggguacuucaauaucuaaauaua

SEQ ID NO: 498773 - RNA, 24 nt, Artificial Sequence
  Synthetic
aggguacuucaauaucuaaauaua

SEQ ID NO: 498774 - RNA, 18 nt, Artificial Sequence
  Synthetic
ugaaauaaguuaaauaua

SEQ ID NO: 498775 - RNA, 19 nt, Artificial Sequence
  Synthetic
augaaauaaguuaaauaua

SEQ ID NO: 498776 - RNA, 20 nt, Artificial Sequence
  Synthetic
uaugaaauaaguuaaauaua

SEQ ID NO: 498777 - RNA, 21 nt, Artificial Sequence
  Synthetic
guaugaaauaaguuaaauaua

SEQ ID NO: 498778 - RNA, 22 nt, Artificial Sequence
  Synthetic
aguaugaaauaaguuaaauaua

SEQ ID NO: 498779 - RNA, 23 nt, Artificial Sequence
  Synthetic
aaguaugaaauaaguuaaauaua

SEQ ID NO: 498780 - RNA, 24 nt, Artificial Sequence
  Synthetic
aaaguaugaaauaaguuaaauaua

SEQ ID NO: 498781 - RNA, 18 nt, Artificial Sequence
  Synthetic
uuuagauauuuaaauaua

SEQ ID NO: 498782 - RNA, 19 nt, Artificial Sequence
  Synthetic
uuuuagauauuuaaauaua

SEQ ID NO: 498783 - RNA, 20 nt, Artificial Sequence
  Synthetic
auuuuagauauuuaaauaua

SEQ ID NO: 498784 - RNA, 21 nt, Artificial Sequence
  Synthetic
cauuuuagauauuuaaauaua

SEQ ID NO: 498785 - RNA, 22 nt, Artificial Sequence
  Synthetic
ucauuuuagauauuuaaauaua

SEQ ID NO: 498786 - RNA, 23 nt, Artificial Sequence
  Synthetic
uucauuuuagauauuuaaauaua

SEQ ID NO: 498787 - RNA, 24 nt, Artificial Sequence
  Synthetic
uuucauuuuagauauuuaaauaua

SEQ ID NO: 498788 - RNA, 18 nt, Artificial Sequence
  Synthetic
gagacaugaaacaauaua

SEQ ID NO: 498789 - RNA, 19 nt, Artificial Sequence
  Synthetic
agagacaugaaacaauaua

SEQ ID NO: 498790 - RNA, 20 nt, Artificial Sequence
  Synthetic
gagagacaugaaacaauaua

SEQ ID NO: 498791 - RNA, 21 nt, Artificial Sequence
  Synthetic
agagagacaugaaacaauaua

SEQ ID NO: 498792 - RNA, 22 nt, Artificial Sequence
  Synthetic
aagagagacaugaaacaauaua

SEQ ID NO: 498793 - RNA, 23 nt, Artificial Sequence
  Synthetic
aaagagagacaugaaacaauaua

SEQ ID NO: 498794 - RNA, 24 nt, Artificial Sequence
  Synthetic
gaaagagagacaugaaacaauaua

SEQ ID NO: 498795 - RNA, 18 nt, Artificial Sequence
  Synthetic
uuagagaaggagaauaua

SEQ ID NO: 498796 - RNA, 19 nt, Artificial Sequence
  Synthetic
auuagagaaggagaauaua

SEQ ID NO: 498797 - RNA, 20 nt, Artificial Sequence
  Synthetic
aauuagagaaggagaauaua

SEQ ID NO: 498798 - RNA, 21 nt, Artificial Sequence
  Synthetic
caauuagagaaggagaauaua

SEQ ID NO: 498799 - RNA, 22 nt, Artificial Sequence
  Synthetic
acaauuagagaaggagaauaua

SEQ ID NO: 498800 - RNA, 23 nt, Artificial Sequence
  Synthetic
aacaauuagagaaggagaauaua

SEQ ID NO: 498801 - RNA, 24 nt, Artificial Sequence
  Synthetic
aaacaauuagagaaggagaauaua

SEQ ID NO: 498802 - RNA, 18 nt, Artificial Sequence
  Synthetic
uuggagggggagaauaua

SEQ ID NO: 498803 - RNA, 19 nt, Artificial Sequence
  Synthetic
cuuggagggggagaauaua

SEQ ID NO: 498804 - RNA, 20 nt, Artificial Sequence
  Synthetic
ucuuggagggggagaauaua

SEQ ID NO: 498805 - RNA, 21 nt, Artificial Sequence
  Synthetic
uucuuggagggggagaauaua

SEQ ID NO: 498806 - RNA, 22 nt, Artificial Sequence
  Synthetic
cuucuuggagggggagaauaua

SEQ ID NO: 498807 - RNA, 23 nt, Artificial Sequence
  Synthetic
acuucuuggagggggagaauaua

SEQ ID NO: 498808 - RNA, 24 nt, Artificial Sequence
  Synthetic
aacuucuuggagggggagaauaua

SEQ ID NO: 498809 - RNA, 18 nt, Artificial Sequence
  Synthetic
uuuugucaauagaauaua

SEQ ID NO: 498810 - RNA, 19 nt, Artificial Sequence
  Synthetic
auuuugucaauagaauaua

SEQ ID NO: 498811 - RNA, 20 nt, Artificial Sequence
  Synthetic
cauuuugucaauagaauaua

SEQ ID NO: 498812 - RNA, 21 nt, Artificial Sequence
  Synthetic
gcauuuugucaauagaauaua

SEQ ID NO: 498813 - RNA, 22 nt, Artificial Sequence
  Synthetic
ggcauuuugucaauagaauaua

SEQ ID NO: 498814 - RNA, 23 nt, Artificial Sequence
  Synthetic
aggcauuuugucaauagaauaua

SEQ ID NO: 498815 - RNA, 24 nt, Artificial Sequence
  Synthetic
aaggcauuuugucaauagaauaua

SEQ ID NO: 498816 - RNA, 18 nt, Artificial Sequence
  Synthetic
acuuuuaaggggaauaua

SEQ ID NO: 498817 - RNA, 19 nt, Artificial Sequence
  Synthetic
uacuuuuaaggggaauaua

SEQ ID NO: 498818 - RNA, 20 nt, Artificial Sequence
  Synthetic
guacuuuuaaggggaauaua

SEQ ID NO: 498819 - RNA, 21 nt, Artificial Sequence
  Synthetic
gguacuuuuaaggggaauaua

SEQ ID NO: 498820 - RNA, 22 nt, Artificial Sequence
  Synthetic
ugguacuuuuaaggggaauaua

SEQ ID NO: 498821 - RNA, 23 nt, Artificial Sequence
  Synthetic
cugguacuuuuaaggggaauaua

SEQ ID NO: 498822 - RNA, 24 nt, Artificial Sequence
  Synthetic
ccugguacuuuuaaggggaauaua

SEQ ID NO: 498823 - RNA, 18 nt, Artificial Sequence
  Synthetic
gauauuacuuggaauaua

SEQ ID NO: 498824 - RNA, 19 nt, Artificial Sequence
  Synthetic
ggauauuacuuggaauaua

SEQ ID NO: 498825 - RNA, 20 nt, Artificial Sequence
  Synthetic
aggauauuacuuggaauaua

SEQ ID NO: 498826 - RNA, 21 nt, Artificial Sequence
  Synthetic
caggauauuacuuggaauaua

SEQ ID NO: 498827 - RNA, 22 nt, Artificial Sequence
  Synthetic
gcaggauauuacuuggaauaua

SEQ ID NO: 498828 - RNA, 23 nt, Artificial Sequence
  Synthetic
ugcaggauauuacuuggaauaua

SEQ ID NO: 498829 - RNA, 24 nt, Artificial Sequence
  Synthetic
gugcaggauauuacuuggaauaua

SEQ ID NO: 498830 - RNA, 18 nt, Artificial Sequence
  Synthetic
aauuaaugaaauaauaua

SEQ ID NO: 498831 - RNA, 19 nt, Artificial Sequence
  Synthetic
aaauuaaugaaauaauaua

SEQ ID NO: 498832 - RNA, 20 nt, Artificial Sequence
  Synthetic
gaaauuaaugaaauaauaua

SEQ ID NO: 498833 - RNA, 21 nt, Artificial Sequence
  Synthetic
ggaaauuaaugaaauaauaua

SEQ ID NO: 498834 - RNA, 22 nt, Artificial Sequence
  Synthetic
uggaaauuaaugaaauaauaua

SEQ ID NO: 498835 - RNA, 23 nt, Artificial Sequence
  Synthetic
auggaaauuaaugaaauaauaua

SEQ ID NO: 498836 - RNA, 24 nt, Artificial Sequence
  Synthetic
gauggaaauuaaugaaauaauaua

SEQ ID NO: 498837 - RNA, 18 nt, Artificial Sequence
  Synthetic
guugugaaacauaauaua

SEQ ID NO: 498838 - RNA, 19 nt, Artificial Sequence
  Synthetic
uguugugaaacauaauaua

SEQ ID NO: 498839 - RNA, 20 nt, Artificial Sequence
  Synthetic
uuguugugaaacauaauaua

SEQ ID NO: 498840 - RNA, 21 nt, Artificial Sequence
  Synthetic
uuuguugugaaacauaauaua

SEQ ID NO: 498841 - RNA, 22 nt, Artificial Sequence
  Synthetic
uuuuguugugaaacauaauaua

SEQ ID NO: 498842 - RNA, 23 nt, Artificial Sequence
  Synthetic
uuuuuguugugaaacauaauaua

SEQ ID NO: 498843 - RNA, 24 nt, Artificial Sequence
  Synthetic
cuuuuuguugugaaacauaauaua

SEQ ID NO: 498844 - RNA, 18 nt, Artificial Sequence
  Synthetic
aguacugcagauaauaua

SEQ ID NO: 498845 - RNA, 19 nt, Artificial Sequence
  Synthetic
caguacugcagauaauaua

SEQ ID NO: 498846 - RNA, 20 nt, Artificial Sequence
  Synthetic
ccaguacugcagauaauaua

SEQ ID NO: 498847 - RNA, 21 nt, Artificial Sequence
  Synthetic
uccaguacugcagauaauaua

SEQ ID NO: 498848 - RNA, 22 nt, Artificial Sequence
  Synthetic
uuccaguacugcagauaauaua

SEQ ID NO: 498849 - RNA, 23 nt, Artificial Sequence
  Synthetic
auuccaguacugcagauaauaua

SEQ ID NO: 498850 - RNA, 24 nt, Artificial Sequence
  Synthetic
cauuccaguacugcagauaauaua

SEQ ID NO: 498851 - RNA, 18 nt, Artificial Sequence
  Synthetic
uauauuucaacuaauaua

SEQ ID NO: 498852 - RNA, 19 nt, Artificial Sequence
  Synthetic
uuauauuucaacuaauaua

SEQ ID NO: 498853 - RNA, 20 nt, Artificial Sequence
  Synthetic
uuuauauuucaacuaauaua

SEQ ID NO: 498854 - RNA, 21 nt, Artificial Sequence
  Synthetic
uuuuauauuucaacuaauaua

SEQ ID NO: 498855 - RNA, 22 nt, Artificial Sequence
  Synthetic
cuuuuauauuucaacuaauaua

SEQ ID NO: 498856 - RNA, 23 nt, Artificial Sequence
  Synthetic
ccuuuuauauuucaacuaauaua

SEQ ID NO: 498857 - RNA, 24 nt, Artificial Sequence
  Synthetic
gccuuuuauauuucaacuaauaua

SEQ ID NO: 498858 - RNA, 18 nt, Artificial Sequence
  Synthetic
cauuuuaaaauuaauaua

SEQ ID NO: 498859 - RNA, 19 nt, Artificial Sequence
  Synthetic
acauuuuaaaauuaauaua

SEQ ID NO: 498860 - RNA, 20 nt, Artificial Sequence
  Synthetic
uacauuuuaaaauuaauaua

SEQ ID NO: 498861 - RNA, 21 nt, Artificial Sequence
  Synthetic
uuacauuuuaaaauuaauaua

SEQ ID NO: 498862 - RNA, 22 nt, Artificial Sequence
  Synthetic
uuuacauuuuaaaauuaauaua

SEQ ID NO: 498863 - RNA, 23 nt, Artificial Sequence
  Synthetic
auuuacauuuuaaaauuaauaua

SEQ ID NO: 498864 - RNA, 24 nt, Artificial Sequence
  Synthetic
aauuuacauuuuaaaauuaauaua

SEQ ID NO: 498865 - RNA, 18 nt, Artificial Sequence
  Synthetic
uuugguuugguuaauaua

SEQ ID NO: 498866 - RNA, 19 nt, Artificial Sequence
  Synthetic
auuugguuugguuaauaua

SEQ ID NO: 498867 - RNA, 20 nt, Artificial Sequence
  Synthetic
cauuugguuugguuaauaua

SEQ ID NO: 498868 - RNA, 21 nt, Artificial Sequence
  Synthetic
acauuugguuugguuaauaua

SEQ ID NO: 498869 - RNA, 22 nt, Artificial Sequence
  Synthetic
uacauuugguuugguuaauaua

SEQ ID NO: 498870 - RNA, 23 nt, Artificial Sequence
  Synthetic
uuacauuugguuugguuaauaua

SEQ ID NO: 498871 - RNA, 24 nt, Artificial Sequence
  Synthetic
auuacauuugguuugguuaauaua

SEQ ID NO: 498872 - RNA, 18 nt, Artificial Sequence
  Synthetic
ugaagacaaaaacauaua

SEQ ID NO: 498873 - RNA, 19 nt, Artificial Sequence
  Synthetic
cugaagacaaaaacauaua

SEQ ID NO: 498874 - RNA, 20 nt, Artificial Sequence
  Synthetic
ccugaagacaaaaacauaua

SEQ ID NO: 498875 - RNA, 21 nt, Artificial Sequence
  Synthetic
cccugaagacaaaaacauaua

SEQ ID NO: 498876 - RNA, 22 nt, Artificial Sequence
  Synthetic
acccugaagacaaaaacauaua

SEQ ID NO: 498877 - RNA, 23 nt, Artificial Sequence
  Synthetic
aacccugaagacaaaaacauaua

SEQ ID NO: 498878 - RNA, 24 nt, Artificial Sequence
  Synthetic
aaacccugaagacaaaaacauaua

SEQ ID NO: 498879 - RNA, 18 nt, Artificial Sequence
  Synthetic
gggcuacuaaaacauaua

SEQ ID NO: 498880 - RNA, 19 nt, Artificial Sequence
  Synthetic
ugggcuacuaaaacauaua

SEQ ID NO: 498881 - RNA, 20 nt, Artificial Sequence
  Synthetic
uugggcuacuaaaacauaua

SEQ ID NO: 498882 - RNA, 21 nt, Artificial Sequence
  Synthetic
auugggcuacuaaaacauaua

SEQ ID NO: 498883 - RNA, 22 nt, Artificial Sequence
  Synthetic
aauugggcuacuaaaacauaua

SEQ ID NO: 498884 - RNA, 23 nt, Artificial Sequence
  Synthetic
aaauugggcuacuaaaacauaua

SEQ ID NO: 498885 - RNA, 24 nt, Artificial Sequence
  Synthetic
uaaauugggcuacuaaaacauaua

SEQ ID NO: 498886 - RNA, 18 nt, Artificial Sequence
  Synthetic
augcaaggauaacauaua

SEQ ID NO: 498887 - RNA, 19 nt, Artificial Sequence
  Synthetic
aaugcaaggauaacauaua

SEQ ID NO: 498888 - RNA, 20 nt, Artificial Sequence
  Synthetic
gaaugcaaggauaacauaua

SEQ ID NO: 498889 - RNA, 21 nt, Artificial Sequence
  Synthetic
ugaaugcaaggauaacauaua

SEQ ID NO: 498890 - RNA, 22 nt, Artificial Sequence
  Synthetic
cugaaugcaaggauaacauaua

SEQ ID NO: 498891 - RNA, 23 nt, Artificial Sequence
  Synthetic
acugaaugcaaggauaacauaua

SEQ ID NO: 498892 - RNA, 24 nt, Artificial Sequence
  Synthetic
gacugaaugcaaggauaacauaua

SEQ ID NO: 498893 - RNA, 18 nt, Artificial Sequence
  Synthetic
ggauuaaucgcacauaua

SEQ ID NO: 498894 - RNA, 19 nt, Artificial Sequence
  Synthetic
cggauuaaucgcacauaua

SEQ ID NO: 498895 - RNA, 20 nt, Artificial Sequence
  Synthetic
ccggauuaaucgcacauaua

SEQ ID NO: 498896 - RNA, 21 nt, Artificial Sequence
  Synthetic
uccggauuaaucgcacauaua

SEQ ID NO: 498897 - RNA, 22 nt, Artificial Sequence
  Synthetic
cuccggauuaaucgcacauaua

SEQ ID NO: 498898 - RNA, 23 nt, Artificial Sequence
  Synthetic
acuccggauuaaucgcacauaua

SEQ ID NO: 498899 - RNA, 24 nt, Artificial Sequence
  Synthetic
cacuccggauuaaucgcacauaua

SEQ ID NO: 498900 - RNA, 18 nt, Artificial Sequence
  Synthetic
gacauacaaagacauaua

SEQ ID NO: 498901 - RNA, 19 nt, Artificial Sequence
  Synthetic
ugacauacaaagacauaua

SEQ ID NO: 498902 - RNA, 20 nt, Artificial Sequence
  Synthetic
uugacauacaaagacauaua

SEQ ID NO: 498903 - RNA, 21 nt, Artificial Sequence
  Synthetic
uuugacauacaaagacauaua

SEQ ID NO: 498904 - RNA, 22 nt, Artificial Sequence
  Synthetic
guuugacauacaaagacauaua

SEQ ID NO: 498905 - RNA, 23 nt, Artificial Sequence
  Synthetic
uguuugacauacaaagacauaua

SEQ ID NO: 498906 - RNA, 24 nt, Artificial Sequence
  Synthetic
auguuugacauacaaagacauaua

SEQ ID NO: 498907 - RNA, 18 nt, Artificial Sequence
  Synthetic
ggaccuaacagacauaua

SEQ ID NO: 498908 - RNA, 19 nt, Artificial Sequence
  Synthetic
uggaccuaacagacauaua

SEQ ID NO: 498909 - RNA, 20 nt, Artificial Sequence
  Synthetic
auggaccuaacagacauaua

SEQ ID NO: 498910 - RNA, 21 nt, Artificial Sequence
  Synthetic
aauggaccuaacagacauaua

SEQ ID NO: 498911 - RNA, 22 nt, Artificial Sequence
  Synthetic
aaauggaccuaacagacauaua

SEQ ID NO: 498912 - RNA, 23 nt, Artificial Sequence
  Synthetic
caaauggaccuaacagacauaua

SEQ ID NO: 498913 - RNA, 24 nt, Artificial Sequence
  Synthetic
ccaaauggaccuaacagacauaua

SEQ ID NO: 498914 - RNA, 18 nt, Artificial Sequence
  Synthetic
uaggcaaaaugacauaua

SEQ ID NO: 498915 - RNA, 19 nt, Artificial Sequence
  Synthetic
uuaggcaaaaugacauaua

SEQ ID NO: 498916 - RNA, 20 nt, Artificial Sequence
  Synthetic
cuuaggcaaaaugacauaua

SEQ ID NO: 498917 - RNA, 21 nt, Artificial Sequence
  Synthetic
acuuaggcaaaaugacauaua

SEQ ID NO: 498918 - RNA, 22 nt, Artificial Sequence
  Synthetic
gacuuaggcaaaaugacauaua

SEQ ID NO: 498919 - RNA, 23 nt, Artificial Sequence
  Synthetic
ugacuuaggcaaaaugacauaua

SEQ ID NO: 498920 - RNA, 24 nt, Artificial Sequence
  Synthetic
gugacuuaggcaaaaugacauaua

SEQ ID NO: 498921 - RNA, 18 nt, Artificial Sequence
  Synthetic
ccuuuggacguacauaua

SEQ ID NO: 498922 - RNA, 19 nt, Artificial Sequence
  Synthetic
accuuuggacguacauaua

SEQ ID NO: 498923 - RNA, 20 nt, Artificial Sequence
  Synthetic
uaccuuuggacguacauaua

SEQ ID NO: 498924 - RNA, 21 nt, Artificial Sequence
  Synthetic
uuaccuuuggacguacauaua

SEQ ID NO: 498925 - RNA, 22 nt, Artificial Sequence
  Synthetic
guuaccuuuggacguacauaua

SEQ ID NO: 498926 - RNA, 23 nt, Artificial Sequence
  Synthetic
gguuaccuuuggacguacauaua

SEQ ID NO: 498927 - RNA, 24 nt, Artificial Sequence
  Synthetic
ugguuaccuuuggacguacauaua

SEQ ID NO: 498928 - RNA, 18 nt, Artificial Sequence
  Synthetic
aaguuaugcauccauaua

SEQ ID NO: 498929 - RNA, 19 nt, Artificial Sequence
  Synthetic
gaaguuaugcauccauaua

SEQ ID NO: 498930 - RNA, 20 nt, Artificial Sequence
  Synthetic
agaaguuaugcauccauaua

SEQ ID NO: 498931 - RNA, 21 nt, Artificial Sequence
  Synthetic
aagaaguuaugcauccauaua

SEQ ID NO: 498932 - RNA, 22 nt, Artificial Sequence
  Synthetic
aaagaaguuaugcauccauaua

SEQ ID NO: 498933 - RNA, 23 nt, Artificial Sequence
  Synthetic
uaaagaaguuaugcauccauaua

SEQ ID NO: 498934 - RNA, 24 nt, Artificial Sequence
  Synthetic
uuaaagaaguuaugcauccauaua

SEQ ID NO: 498935 - RNA, 18 nt, Artificial Sequence
  Synthetic
uaaaaaucacuccauaua

SEQ ID NO: 498936 - RNA, 19 nt, Artificial Sequence
  Synthetic
auaaaaaucacuccauaua

SEQ ID NO: 498937 - RNA, 20 nt, Artificial Sequence
  Synthetic
aauaaaaaucacuccauaua

SEQ ID NO: 498938 - RNA, 21 nt, Artificial Sequence
  Synthetic
caauaaaaaucacuccauaua

SEQ ID NO: 498939 - RNA, 22 nt, Artificial Sequence
  Synthetic
acaauaaaaaucacuccauaua

SEQ ID NO: 498940 - RNA, 23 nt, Artificial Sequence
  Synthetic
aacaauaaaaaucacuccauaua

SEQ ID NO: 498941 - RNA, 24 nt, Artificial Sequence
  Synthetic
aaacaauaaaaaucacuccauaua

SEQ ID NO: 498942 - RNA, 18 nt, Artificial Sequence
  Synthetic
agcuggagucuccauaua

SEQ ID NO: 498943 - RNA, 19 nt, Artificial Sequence
  Synthetic
gagcuggagucuccauaua

SEQ ID NO: 498944 - RNA, 20 nt, Artificial Sequence
  Synthetic
agagcuggagucuccauaua

SEQ ID NO: 498945 - RNA, 21 nt, Artificial Sequence
  Synthetic
aagagcuggagucuccauaua

SEQ ID NO: 498946 - RNA, 22 nt, Artificial Sequence
  Synthetic
caagagcuggagucuccauaua

SEQ ID NO: 498947 - RNA, 23 nt, Artificial Sequence
  Synthetic
gcaagagcuggagucuccauaua

SEQ ID NO: 498948 - RNA, 24 nt, Artificial Sequence
  Synthetic
agcaagagcuggagucuccauaua

SEQ ID NO: 498949 - RNA, 18 nt, Artificial Sequence
  Synthetic
aaagaaaaauagcauaua

SEQ ID NO: 498950 - RNA, 19 nt, Artificial Sequence
  Synthetic
gaaagaaaaauagcauaua

SEQ ID NO: 498951 - RNA, 20 nt, Artificial Sequence
  Synthetic
agaaagaaaaauagcauaua

SEQ ID NO: 498952 - RNA, 21 nt, Artificial Sequence
  Synthetic
uagaaagaaaaauagcauaua

SEQ ID NO: 498953 - RNA, 22 nt, Artificial Sequence
  Synthetic
auagaaagaaaaauagcauaua

SEQ ID NO: 498954 - RNA, 23 nt, Artificial Sequence
  Synthetic
aauagaaagaaaaauagcauaua

SEQ ID NO: 498955 - RNA, 24 nt, Artificial Sequence
  Synthetic
aaauagaaagaaaaauagcauaua

SEQ ID NO: 498956 - RNA, 18 nt, Artificial Sequence
  Synthetic
auacaguccccucauaua

SEQ ID NO: 498957 - RNA, 19 nt, Artificial Sequence
  Synthetic
aauacaguccccucauaua

SEQ ID NO: 498958 - RNA, 20 nt, Artificial Sequence
  Synthetic
aaauacaguccccucauaua

SEQ ID NO: 498959 - RNA, 21 nt, Artificial Sequence
  Synthetic
caaauacaguccccucauaua

SEQ ID NO: 498960 - RNA, 22 nt, Artificial Sequence
  Synthetic
gcaaauacaguccccucauaua

SEQ ID NO: 498961 - RNA, 23 nt, Artificial Sequence
  Synthetic
ggcaaauacaguccccucauaua

SEQ ID NO: 498962 - RNA, 24 nt, Artificial Sequence
  Synthetic
aggcaaauacaguccccucauaua

SEQ ID NO: 498963 - RNA, 18 nt, Artificial Sequence
  Synthetic
auuuucauagcucauaua

SEQ ID NO: 498964 - RNA, 19 nt, Artificial Sequence
  Synthetic
uauuuucauagcucauaua

SEQ ID NO: 498965 - RNA, 20 nt, Artificial Sequence
  Synthetic
auauuuucauagcucauaua

SEQ ID NO: 498966 - RNA, 21 nt, Artificial Sequence
  Synthetic
aauauuuucauagcucauaua

SEQ ID NO: 498967 - RNA, 22 nt, Artificial Sequence
  Synthetic
uaauauuuucauagcucauaua

SEQ ID NO: 498968 - RNA, 23 nt, Artificial Sequence
  Synthetic
cuaauauuuucauagcucauaua

SEQ ID NO: 498969 - RNA, 24 nt, Artificial Sequence
  Synthetic
ucuaauauuuucauagcucauaua

SEQ ID NO: 498970 - RNA, 18 nt, Artificial Sequence
  Synthetic
uccuaguaauaagauaua

SEQ ID NO: 498971 - RNA, 19 nt, Artificial Sequence
  Synthetic
auccuaguaauaagauaua

SEQ ID NO: 498972 - RNA, 20 nt, Artificial Sequence
  Synthetic
gauccuaguaauaagauaua

SEQ ID NO: 498973 - RNA, 21 nt, Artificial Sequence
  Synthetic
agauccuaguaauaagauaua

SEQ ID NO: 498974 - RNA, 22 nt, Artificial Sequence
  Synthetic
aagauccuaguaauaagauaua

SEQ ID NO: 498975 - RNA, 23 nt, Artificial Sequence
  Synthetic
uaagauccuaguaauaagauaua

SEQ ID NO: 498976 - RNA, 24 nt, Artificial Sequence
  Synthetic
uuaagauccuaguaauaagauaua

SEQ ID NO: 498977 - RNA, 18 nt, Artificial Sequence
  Synthetic
cuauagcagagagauaua

SEQ ID NO: 498978 - RNA, 19 nt, Artificial Sequence
  Synthetic
gcuauagcagagagauaua

SEQ ID NO: 498979 - RNA, 20 nt, Artificial Sequence
  Synthetic
ugcuauagcagagagauaua

SEQ ID NO: 498980 - RNA, 21 nt, Artificial Sequence
  Synthetic
cugcuauagcagagagauaua

SEQ ID NO: 498981 - RNA, 22 nt, Artificial Sequence
  Synthetic
acugcuauagcagagagauaua

SEQ ID NO: 498982 - RNA, 23 nt, Artificial Sequence
  Synthetic
uacugcuauagcagagagauaua

SEQ ID NO: 498983 - RNA, 24 nt, Artificial Sequence
  Synthetic
uuacugcuauagcagagagauaua

SEQ ID NO: 498984 - RNA, 18 nt, Artificial Sequence
  Synthetic
uagauuucagaggauaua

SEQ ID NO: 498985 - RNA, 19 nt, Artificial Sequence
  Synthetic
cuagauuucagaggauaua

SEQ ID NO: 498986 - RNA, 20 nt, Artificial Sequence
  Synthetic
ccuagauuucagaggauaua

SEQ ID NO: 498987 - RNA, 21 nt, Artificial Sequence
  Synthetic
accuagauuucagaggauaua

SEQ ID NO: 498988 - RNA, 22 nt, Artificial Sequence
  Synthetic
uaccuagauuucagaggauaua

SEQ ID NO: 498989 - RNA, 23 nt, Artificial Sequence
  Synthetic
cuaccuagauuucagaggauaua

SEQ ID NO: 498990 - RNA, 24 nt, Artificial Sequence
  Synthetic
ucuaccuagauuucagaggauaua

SEQ ID NO: 498991 - RNA, 18 nt, Artificial Sequence
  Synthetic
ggucuagaggaggauaua

SEQ ID NO: 498992 - RNA, 19 nt, Artificial Sequence
  Synthetic
aggucuagaggaggauaua

SEQ ID NO: 498993 - RNA, 20 nt, Artificial Sequence
  Synthetic
gaggucuagaggaggauaua

SEQ ID NO: 498994 - RNA, 21 nt, Artificial Sequence
  Synthetic
agaggucuagaggaggauaua

SEQ ID NO: 498995 - RNA, 22 nt, Artificial Sequence
  Synthetic
gagaggucuagaggaggauaua

SEQ ID NO: 498996 - RNA, 23 nt, Artificial Sequence
  Synthetic
agagaggucuagaggaggauaua

SEQ ID NO: 498997 - RNA, 24 nt, Artificial Sequence
  Synthetic
cagagaggucuagaggaggauaua

SEQ ID NO: 498998 - RNA, 18 nt, Artificial Sequence
  Synthetic
uuuauaugccuggauaua

SEQ ID NO: 498999 - RNA, 19 nt, Artificial Sequence
  Synthetic
cuuuauaugccuggauaua

SEQ ID NO: 499000 - RNA, 20 nt, Artificial Sequence
  Synthetic
acuuuauaugccuggauaua

SEQ ID NO: 499001 - RNA, 21 nt, Artificial Sequence
  Synthetic
aacuuuauaugccuggauaua

SEQ ID NO: 499002 - RNA, 22 nt, Artificial Sequence
  Synthetic
gaacuuuauaugccuggauaua

SEQ ID NO: 499003 - RNA, 23 nt, Artificial Sequence
  Synthetic
ggaacuuuauaugccuggauaua

SEQ ID NO: 499004 - RNA, 24 nt, Artificial Sequence
  Synthetic
aggaacuuuauaugccuggauaua

SEQ ID NO: 499005 - RNA, 18 nt, Artificial Sequence
  Synthetic
auuuuugcaaaugauaua

SEQ ID NO: 499006 - RNA, 19 nt, Artificial Sequence
  Synthetic
cauuuuugcaaaugauaua

SEQ ID NO: 499007 - RNA, 20 nt, Artificial Sequence
  Synthetic
acauuuuugcaaaugauaua

SEQ ID NO: 499008 - RNA, 21 nt, Artificial Sequence
  Synthetic
uacauuuuugcaaaugauaua

SEQ ID NO: 499009 - RNA, 22 nt, Artificial Sequence
  Synthetic
auacauuuuugcaaaugauaua

SEQ ID NO: 499010 - RNA, 23 nt, Artificial Sequence
  Synthetic
gauacauuuuugcaaaugauaua

SEQ ID NO: 499011 - RNA, 24 nt, Artificial Sequence
  Synthetic
ggauacauuuuugcaaaugauaua

SEQ ID NO: 499012 - RNA, 18 nt, Artificial Sequence
  Synthetic
ccgcuuucuuaugauaua

SEQ ID NO: 499013 - RNA, 19 nt, Artificial Sequence
  Synthetic
uccgcuuucuuaugauaua

SEQ ID NO: 499014 - RNA, 20 nt, Artificial Sequence
  Synthetic
auccgcuuucuuaugauaua

SEQ ID NO: 499015 - RNA, 21 nt, Artificial Sequence
  Synthetic
aauccgcuuucuuaugauaua

SEQ ID NO: 499016 - RNA, 22 nt, Artificial Sequence
  Synthetic
gaauccgcuuucuuaugauaua

SEQ ID NO: 499017 - RNA, 23 nt, Artificial Sequence
  Synthetic
ugaauccgcuuucuuaugauaua

SEQ ID NO: 499018 - RNA, 24 nt, Artificial Sequence
  Synthetic
gugaauccgcuuucuuaugauaua

SEQ ID NO: 499019 - RNA, 18 nt, Artificial Sequence
  Synthetic
uauuacuuaacugauaua

SEQ ID NO: 499020 - RNA, 19 nt, Artificial Sequence
  Synthetic
uuauuacuuaacugauaua

SEQ ID NO: 499021 - RNA, 20 nt, Artificial Sequence
  Synthetic
guuauuacuuaacugauaua

SEQ ID NO: 499022 - RNA, 21 nt, Artificial Sequence
  Synthetic
aguuauuacuuaacugauaua

SEQ ID NO: 499023 - RNA, 22 nt, Artificial Sequence
  Synthetic
gaguuauuacuuaacugauaua

SEQ ID NO: 499024 - RNA, 23 nt, Artificial Sequence
  Synthetic
ggaguuauuacuuaacugauaua

SEQ ID NO: 499025 - RNA, 24 nt, Artificial Sequence
  Synthetic
uggaguuauuacuuaacugauaua

SEQ ID NO: 499026 - RNA, 18 nt, Artificial Sequence
  Synthetic
gcacagugcacugauaua

SEQ ID NO: 499027 - RNA, 19 nt, Artificial Sequence
  Synthetic
agcacagugcacugauaua

SEQ ID NO: 499028 - RNA, 20 nt, Artificial Sequence
  Synthetic
uagcacagugcacugauaua

SEQ ID NO: 499029 - RNA, 21 nt, Artificial Sequence
  Synthetic
uuagcacagugcacugauaua

SEQ ID NO: 499030 - RNA, 22 nt, Artificial Sequence
  Synthetic
auuagcacagugcacugauaua

SEQ ID NO: 499031 - RNA, 23 nt, Artificial Sequence
  Synthetic
uauuagcacagugcacugauaua

SEQ ID NO: 499032 - RNA, 24 nt, Artificial Sequence
  Synthetic
uuauuagcacagugcacugauaua

SEQ ID NO: 499033 - RNA, 18 nt, Artificial Sequence
  Synthetic
cauuucuaaagugauaua

SEQ ID NO: 499034 - RNA, 19 nt, Artificial Sequence
  Synthetic
gcauuucuaaagugauaua

SEQ ID NO: 499035 - RNA, 20 nt, Artificial Sequence
  Synthetic
cgcauuucuaaagugauaua

SEQ ID NO: 499036 - RNA, 21 nt, Artificial Sequence
  Synthetic
acgcauuucuaaagugauaua

SEQ ID NO: 499037 - RNA, 22 nt, Artificial Sequence
  Synthetic
aacgcauuucuaaagugauaua

SEQ ID NO: 499038 - RNA, 23 nt, Artificial Sequence
  Synthetic
aaacgcauuucuaaagugauaua

SEQ ID NO: 499039 - RNA, 24 nt, Artificial Sequence
  Synthetic
caaacgcauuucuaaagugauaua

SEQ ID NO: 499040 - RNA, 18 nt, Artificial Sequence
  Synthetic
gguuuggacaaauauaua

SEQ ID NO: 499041 - RNA, 19 nt, Artificial Sequence
  Synthetic
ggguuuggacaaauauaua

SEQ ID NO: 499042 - RNA, 20 nt, Artificial Sequence
  Synthetic
uggguuuggacaaauauaua

SEQ ID NO: 499043 - RNA, 21 nt, Artificial Sequence
  Synthetic
auggguuuggacaaauauaua

SEQ ID NO: 499044 - RNA, 22 nt, Artificial Sequence
  Synthetic
uauggguuuggacaaauauaua

SEQ ID NO: 499045 - RNA, 23 nt, Artificial Sequence
  Synthetic
cuauggguuuggacaaauauaua

SEQ ID NO: 499046 - RNA, 24 nt, Artificial Sequence
  Synthetic
ucuauggguuuggacaaauauaua

SEQ ID NO: 499047 - RNA, 18 nt, Artificial Sequence
  Synthetic
uuuuaaggggaauauaua

SEQ ID NO: 499048 - RNA, 19 nt, Artificial Sequence
  Synthetic
cuuuuaaggggaauauaua

SEQ ID NO: 499049 - RNA, 20 nt, Artificial Sequence
  Synthetic
acuuuuaaggggaauauaua

SEQ ID NO: 499050 - RNA, 21 nt, Artificial Sequence
  Synthetic
uacuuuuaaggggaauauaua

SEQ ID NO: 499051 - RNA, 22 nt, Artificial Sequence
  Synthetic
guacuuuuaaggggaauauaua

SEQ ID NO: 499052 - RNA, 23 nt, Artificial Sequence
  Synthetic
gguacuuuuaaggggaauauaua

SEQ ID NO: 499053 - RNA, 24 nt, Artificial Sequence
  Synthetic
ugguacuuuuaaggggaauauaua

SEQ ID NO: 499054 - RNA, 18 nt, Artificial Sequence
  Synthetic
aucacauuauaauauaua

SEQ ID NO: 499055 - RNA, 19 nt, Artificial Sequence
  Synthetic
uaucacauuauaauauaua

SEQ ID NO: 499056 - RNA, 20 nt, Artificial Sequence
  Synthetic
uuaucacauuauaauauaua

SEQ ID NO: 499057 - RNA, 21 nt, Artificial Sequence
  Synthetic
auuaucacauuauaauauaua

SEQ ID NO: 499058 - RNA, 22 nt, Artificial Sequence
  Synthetic
uauuaucacauuauaauauaua

SEQ ID NO: 499059 - RNA, 23 nt, Artificial Sequence
  Synthetic
uuauuaucacauuauaauauaua

SEQ ID NO: 499060 - RNA, 24 nt, Artificial Sequence
  Synthetic
auuauuaucacauuauaauauaua

SEQ ID NO: 499061 - RNA, 18 nt, Artificial Sequence
  Synthetic
auuaaucgcacauauaua

SEQ ID NO: 499062 - RNA, 19 nt, Artificial Sequence
  Synthetic
gauuaaucgcacauauaua

SEQ ID NO: 499063 - RNA, 20 nt, Artificial Sequence
  Synthetic
ggauuaaucgcacauauaua

SEQ ID NO: 499064 - RNA, 21 nt, Artificial Sequence
  Synthetic
cggauuaaucgcacauauaua

SEQ ID NO: 499065 - RNA, 22 nt, Artificial Sequence
  Synthetic
ccggauuaaucgcacauauaua

SEQ ID NO: 499066 - RNA, 23 nt, Artificial Sequence
  Synthetic
uccggauuaaucgcacauauaua

SEQ ID NO: 499067 - RNA, 24 nt, Artificial Sequence
  Synthetic
cuccggauuaaucgcacauauaua

SEQ ID NO: 499068 - RNA, 18 nt, Artificial Sequence
  Synthetic
gcaaaccauacauauaua

SEQ ID NO: 499069 - RNA, 19 nt, Artificial Sequence
  Synthetic
ugcaaaccauacauauaua

SEQ ID NO: 499070 - RNA, 20 nt, Artificial Sequence
  Synthetic
augcaaaccauacauauaua

SEQ ID NO: 499071 - RNA, 21 nt, Artificial Sequence
  Synthetic
aaugcaaaccauacauauaua

SEQ ID NO: 499072 - RNA, 22 nt, Artificial Sequence
  Synthetic
uaaugcaaaccauacauauaua

SEQ ID NO: 499073 - RNA, 23 nt, Artificial Sequence
  Synthetic
uuaaugcaaaccauacauauaua

SEQ ID NO: 499074 - RNA, 24 nt, Artificial Sequence
  Synthetic
uuuaaugcaaaccauacauauaua

SEQ ID NO: 499075 - RNA, 18 nt, Artificial Sequence
  Synthetic
uguaaagaugcauauaua

SEQ ID NO: 499076 - RNA, 19 nt, Artificial Sequence
  Synthetic
auguaaagaugcauauaua

SEQ ID NO: 499077 - RNA, 20 nt, Artificial Sequence
  Synthetic
aauguaaagaugcauauaua

SEQ ID NO: 499078 - RNA, 21 nt, Artificial Sequence
  Synthetic
uaauguaaagaugcauauaua

SEQ ID NO: 499079 - RNA, 22 nt, Artificial Sequence
  Synthetic
uuaauguaaagaugcauauaua

SEQ ID NO: 499080 - RNA, 23 nt, Artificial Sequence
  Synthetic
auuaauguaaagaugcauauaua

SEQ ID NO: 499081 - RNA, 24 nt, Artificial Sequence
  Synthetic
cauuaauguaaagaugcauauaua

SEQ ID NO: 499082 - RNA, 18 nt, Artificial Sequence
  Synthetic
aauuuccauucauauaua

SEQ ID NO: 499083 - RNA, 19 nt, Artificial Sequence
  Synthetic
uaauuuccauucauauaua

SEQ ID NO: 499084 - RNA, 20 nt, Artificial Sequence
  Synthetic
uuaauuuccauucauauaua

SEQ ID NO: 499085 - RNA, 21 nt, Artificial Sequence
  Synthetic
guuaauuuccauucauauaua

SEQ ID NO: 499086 - RNA, 22 nt, Artificial Sequence
  Synthetic
uguuaauuuccauucauauaua

SEQ ID NO: 499087 - RNA, 23 nt, Artificial Sequence
  Synthetic
cuguuaauuuccauucauauaua

SEQ ID NO: 499088 - RNA, 24 nt, Artificial Sequence
  Synthetic
gcuguuaauuuccauucauauaua

SEQ ID NO: 499089 - RNA, 18 nt, Artificial Sequence
  Synthetic
auauaugucagauauaua

SEQ ID NO: 499090 - RNA, 19 nt, Artificial Sequence
  Synthetic
aauauaugucagauauaua

SEQ ID NO: 499091 - RNA, 20 nt, Artificial Sequence
  Synthetic
aaauauaugucagauauaua

SEQ ID NO: 499092 - RNA, 21 nt, Artificial Sequence
  Synthetic
aaaauauaugucagauauaua

SEQ ID NO: 499093 - RNA, 22 nt, Artificial Sequence
  Synthetic
caaaauauaugucagauauaua

SEQ ID NO: 499094 - RNA, 23 nt, Artificial Sequence
  Synthetic
ucaaaauauaugucagauauaua

SEQ ID NO: 499095 - RNA, 24 nt, Artificial Sequence
  Synthetic
uucaaaauauaugucagauauaua

SEQ ID NO: 499096 - RNA, 18 nt, Artificial Sequence
  Synthetic
uuacuuaacugauauaua

SEQ ID NO: 499097 - RNA, 19 nt, Artificial Sequence
  Synthetic
auuacuuaacugauauaua

SEQ ID NO: 499098 - RNA, 20 nt, Artificial Sequence
  Synthetic
uauuacuuaacugauauaua

SEQ ID NO: 499099 - RNA, 21 nt, Artificial Sequence
  Synthetic
uuauuacuuaacugauauaua

SEQ ID NO: 499100 - RNA, 22 nt, Artificial Sequence
  Synthetic
guuauuacuuaacugauauaua

SEQ ID NO: 499101 - RNA, 23 nt, Artificial Sequence
  Synthetic
aguuauuacuuaacugauauaua

SEQ ID NO: 499102 - RNA, 24 nt, Artificial Sequence
  Synthetic
gaguuauuacuuaacugauauaua

SEQ ID NO: 499103 - RNA, 18 nt, Artificial Sequence
  Synthetic
agaauguccugauauaua

SEQ ID NO: 499104 - RNA, 19 nt, Artificial Sequence
  Synthetic
cagaauguccugauauaua

SEQ ID NO: 499105 - RNA, 20 nt, Artificial Sequence
  Synthetic
ccagaauguccugauauaua

SEQ ID NO: 499106 - RNA, 21 nt, Artificial Sequence
  Synthetic
uccagaauguccugauauaua

SEQ ID NO: 499107 - RNA, 22 nt, Artificial Sequence
  Synthetic
cuccagaauguccugauauaua

SEQ ID NO: 499108 - RNA, 23 nt, Artificial Sequence
  Synthetic
acuccagaauguccugauauaua

SEQ ID NO: 499109 - RNA, 24 nt, Artificial Sequence
  Synthetic
aacuccagaauguccugauauaua

SEQ ID NO: 499110 - RNA, 18 nt, Artificial Sequence
  Synthetic
agagcacaaauauauaua

SEQ ID NO: 499111 - RNA, 19 nt, Artificial Sequence
  Synthetic
uagagcacaaauauauaua

SEQ ID NO: 499112 - RNA, 20 nt, Artificial Sequence
  Synthetic
uuagagcacaaauauauaua

SEQ ID NO: 499113 - RNA, 21 nt, Artificial Sequence
  Synthetic
auuagagcacaaauauauaua

SEQ ID NO: 499114 - RNA, 22 nt, Artificial Sequence
  Synthetic
aauuagagcacaaauauauaua

SEQ ID NO: 499115 - RNA, 23 nt, Artificial Sequence
  Synthetic
aaauuagagcacaaauauauaua

SEQ ID NO: 499116 - RNA, 24 nt, Artificial Sequence
  Synthetic
aaaauuagagcacaaauauauaua

SEQ ID NO: 499117 - RNA, 18 nt, Artificial Sequence
  Synthetic
ccaauguuaauauauaua

SEQ ID NO: 499118 - RNA, 19 nt, Artificial Sequence
  Synthetic
uccaauguuaauauauaua

SEQ ID NO: 499119 - RNA, 20 nt, Artificial Sequence
  Synthetic
uuccaauguuaauauauaua

SEQ ID NO: 499120 - RNA, 21 nt, Artificial Sequence
  Synthetic
uuuccaauguuaauauauaua

SEQ ID NO: 499121 - RNA, 22 nt, Artificial Sequence
  Synthetic
uuuuccaauguuaauauauaua

SEQ ID NO: 499122 - RNA, 23 nt, Artificial Sequence
  Synthetic
auuuuccaauguuaauauauaua

SEQ ID NO: 499123 - RNA, 24 nt, Artificial Sequence
  Synthetic
uauuuuccaauguuaauauauaua

SEQ ID NO: 499124 - RNA, 18 nt, Artificial Sequence
  Synthetic
gaugacuuuauauauaua

SEQ ID NO: 499125 - RNA, 19 nt, Artificial Sequence
  Synthetic
ggaugacuuuauauauaua

SEQ ID NO: 499126 - RNA, 20 nt, Artificial Sequence
  Synthetic
uggaugacuuuauauauaua

SEQ ID NO: 499127 - RNA, 21 nt, Artificial Sequence
  Synthetic
auggaugacuuuauauauaua

SEQ ID NO: 499128 - RNA, 22 nt, Artificial Sequence
  Synthetic
cauggaugacuuuauauauaua

SEQ ID NO: 499129 - RNA, 23 nt, Artificial Sequence
  Synthetic
ccauggaugacuuuauauauaua

SEQ ID NO: 499130 - RNA, 24 nt, Artificial Sequence
  Synthetic
accauggaugacuuuauauauaua

SEQ ID NO: 499131 - RNA, 18 nt, Artificial Sequence
  Synthetic
uuaggaggaaacuauaua

SEQ ID NO: 499132 - RNA, 19 nt, Artificial Sequence
  Synthetic
cuuaggaggaaacuauaua

SEQ ID NO: 499133 - RNA, 20 nt, Artificial Sequence
  Synthetic
ccuuaggaggaaacuauaua

SEQ ID NO: 499134 - RNA, 21 nt, Artificial Sequence
  Synthetic
uccuuaggaggaaacuauaua

SEQ ID NO: 499135 - RNA, 22 nt, Artificial Sequence
  Synthetic
cuccuuaggaggaaacuauaua

SEQ ID NO: 499136 - RNA, 23 nt, Artificial Sequence
  Synthetic
acuccuuaggaggaaacuauaua

SEQ ID NO: 499137 - RNA, 24 nt, Artificial Sequence
  Synthetic
uacuccuuaggaggaaacuauaua

SEQ ID NO: 499138 - RNA, 18 nt, Artificial Sequence
  Synthetic
cuaaucugaaacuauaua

SEQ ID NO: 499139 - RNA, 19 nt, Artificial Sequence
  Synthetic
ucuaaucugaaacuauaua

SEQ ID NO: 499140 - RNA, 20 nt, Artificial Sequence
  Synthetic
gucuaaucugaaacuauaua

SEQ ID NO: 499141 - RNA, 21 nt, Artificial Sequence
  Synthetic
ggucuaaucugaaacuauaua

SEQ ID NO: 499142 - RNA, 22 nt, Artificial Sequence
  Synthetic
aggucuaaucugaaacuauaua

SEQ ID NO: 499143 - RNA, 23 nt, Artificial Sequence
  Synthetic
uaggucuaaucugaaacuauaua

SEQ ID NO: 499144 - RNA, 24 nt, Artificial Sequence
  Synthetic
guaggucuaaucugaaacuauaua

SEQ ID NO: 499145 - RNA, 18 nt, Artificial Sequence
  Synthetic
gaaacgucccucuauaua

SEQ ID NO: 499146 - RNA, 19 nt, Artificial Sequence
  Synthetic
agaaacgucccucuauaua

SEQ ID NO: 499147 - RNA, 20 nt, Artificial Sequence
  Synthetic
uagaaacgucccucuauaua

SEQ ID NO: 499148 - RNA, 21 nt, Artificial Sequence
  Synthetic
uuagaaacgucccucuauaua

SEQ ID NO: 499149 - RNA, 22 nt, Artificial Sequence
  Synthetic
uuuagaaacgucccucuauaua

SEQ ID NO: 499150 - RNA, 23 nt, Artificial Sequence
  Synthetic
auuuagaaacgucccucuauaua

SEQ ID NO: 499151 - RNA, 24 nt, Artificial Sequence
  Synthetic
aauuuagaaacgucccucuauaua

SEQ ID NO: 499152 - RNA, 18 nt, Artificial Sequence
  Synthetic
acacuaaagaaguauaua

SEQ ID NO: 499153 - RNA, 19 nt, Artificial Sequence
  Synthetic
aacacuaaagaaguauaua

SEQ ID NO: 499154 - RNA, 20 nt, Artificial Sequence
  Synthetic
caacacuaaagaaguauaua

SEQ ID NO: 499155 - RNA, 21 nt, Artificial Sequence
  Synthetic
ucaacacuaaagaaguauaua

SEQ ID NO: 499156 - RNA, 22 nt, Artificial Sequence
  Synthetic
uucaacacuaaagaaguauaua

SEQ ID NO: 499157 - RNA, 23 nt, Artificial Sequence
  Synthetic
uuucaacacuaaagaaguauaua

SEQ ID NO: 499158 - RNA, 24 nt, Artificial Sequence
  Synthetic
cuuucaacacuaaagaaguauaua

SEQ ID NO: 499159 - RNA, 18 nt, Artificial Sequence
  Synthetic
ugcuuaauugaguauaua

SEQ ID NO: 499160 - RNA, 19 nt, Artificial Sequence
  Synthetic
uugcuuaauugaguauaua

SEQ ID NO: 499161 - RNA, 20 nt, Artificial Sequence
  Synthetic
auugcuuaauugaguauaua

SEQ ID NO: 499162 - RNA, 21 nt, Artificial Sequence
  Synthetic
aauugcuuaauugaguauaua

SEQ ID NO: 499163 - RNA, 22 nt, Artificial Sequence
  Synthetic
caauugcuuaauugaguauaua

SEQ ID NO: 499164 - RNA, 23 nt, Artificial Sequence
  Synthetic
ucaauugcuuaauugaguauaua

SEQ ID NO: 499165 - RNA, 24 nt, Artificial Sequence
  Synthetic
uucaauugcuuaauugaguauaua

SEQ ID NO: 499166 - RNA, 18 nt, Artificial Sequence
  Synthetic
uucuguagaguguauaua

SEQ ID NO: 499167 - RNA, 19 nt, Artificial Sequence
  Synthetic
uuucuguagaguguauaua

SEQ ID NO: 499168 - RNA, 20 nt, Artificial Sequence
  Synthetic
auuucuguagaguguauaua

SEQ ID NO: 499169 - RNA, 21 nt, Artificial Sequence
  Synthetic
cauuucuguagaguguauaua

SEQ ID NO: 499170 - RNA, 22 nt, Artificial Sequence
  Synthetic
gcauuucuguagaguguauaua

SEQ ID NO: 499171 - RNA, 23 nt, Artificial Sequence
  Synthetic
ugcauuucuguagaguguauaua

SEQ ID NO: 499172 - RNA, 24 nt, Artificial Sequence
  Synthetic
augcauuucuguagaguguauaua

SEQ ID NO: 499173 - RNA, 18 nt, Artificial Sequence
  Synthetic
cuaggauauguguauaua

SEQ ID NO: 499174 - RNA, 19 nt, Artificial Sequence
  Synthetic
ccuaggauauguguauaua

SEQ ID NO: 499175 - RNA, 20 nt, Artificial Sequence
  Synthetic
uccuaggauauguguauaua

SEQ ID NO: 499176 - RNA, 21 nt, Artificial Sequence
  Synthetic
guccuaggauauguguauaua

SEQ ID NO: 499177 - RNA, 22 nt, Artificial Sequence
  Synthetic
aguccuaggauauguguauaua

SEQ ID NO: 499178 - RNA, 23 nt, Artificial Sequence
  Synthetic
caguccuaggauauguguauaua

SEQ ID NO: 499179 - RNA, 24 nt, Artificial Sequence
  Synthetic
acaguccuaggauauguguauaua

SEQ ID NO: 499180 - RNA, 18 nt, Artificial Sequence
  Synthetic
aguuaauuuuuguauaua

SEQ ID NO: 499181 - RNA, 19 nt, Artificial Sequence
  Synthetic
gaguuaauuuuuguauaua

SEQ ID NO: 499182 - RNA, 20 nt, Artificial Sequence
  Synthetic
ugaguuaauuuuuguauaua

SEQ ID NO: 499183 - RNA, 21 nt, Artificial Sequence
  Synthetic
uugaguuaauuuuuguauaua

SEQ ID NO: 499184 - RNA, 22 nt, Artificial Sequence
  Synthetic
cuugaguuaauuuuuguauaua

SEQ ID NO: 499185 - RNA, 23 nt, Artificial Sequence
  Synthetic
ucuugaguuaauuuuuguauaua

SEQ ID NO: 499186 - RNA, 24 nt, Artificial Sequence
  Synthetic
aucuugaguuaauuuuuguauaua

SEQ ID NO: 499187 - RNA, 18 nt, Artificial Sequence
  Synthetic
uacaaccuugcuuauaua

SEQ ID NO: 499188 - RNA, 19 nt, Artificial Sequence
  Synthetic
uuacaaccuugcuuauaua

SEQ ID NO: 499189 - RNA, 20 nt, Artificial Sequence
  Synthetic
cuuacaaccuugcuuauaua

SEQ ID NO: 499190 - RNA, 21 nt, Artificial Sequence
  Synthetic
ccuuacaaccuugcuuauaua

SEQ ID NO: 499191 - RNA, 22 nt, Artificial Sequence
  Synthetic
uccuuacaaccuugcuuauaua

SEQ ID NO: 499192 - RNA, 23 nt, Artificial Sequence
  Synthetic
uuccuuacaaccuugcuuauaua

SEQ ID NO: 499193 - RNA, 24 nt, Artificial Sequence
  Synthetic
guuccuuacaaccuugcuuauaua

SEQ ID NO: 499194 - RNA, 18 nt, Artificial Sequence
  Synthetic
aauuauguauuuuauaua

SEQ ID NO: 499195 - RNA, 19 nt, Artificial Sequence
  Synthetic
caauuauguauuuuauaua

SEQ ID NO: 499196 - RNA, 20 nt, Artificial Sequence
  Synthetic
ucaauuauguauuuuauaua

SEQ ID NO: 499197 - RNA, 21 nt, Artificial Sequence
  Synthetic
uucaauuauguauuuuauaua

SEQ ID NO: 499198 - RNA, 22 nt, Artificial Sequence
  Synthetic
uuucaauuauguauuuuauaua

SEQ ID NO: 499199 - RNA, 23 nt, Artificial Sequence
  Synthetic
auuucaauuauguauuuuauaua

SEQ ID NO: 499200 - RNA, 24 nt, Artificial Sequence
  Synthetic
aauuucaauuauguauuuuauaua

SEQ ID NO: 499201 - RNA, 18 nt, Artificial Sequence
  Synthetic
uccuauauaaaaacuaua

SEQ ID NO: 499202 - RNA, 19 nt, Artificial Sequence
  Synthetic
uuccuauauaaaaacuaua

SEQ ID NO: 499203 - RNA, 20 nt, Artificial Sequence
  Synthetic
uuuccuauauaaaaacuaua

SEQ ID NO: 499204 - RNA, 21 nt, Artificial Sequence
  Synthetic
guuuccuauauaaaaacuaua

SEQ ID NO: 499205 - RNA, 22 nt, Artificial Sequence
  Synthetic
aguuuccuauauaaaaacuaua

SEQ ID NO: 499206 - RNA, 23 nt, Artificial Sequence
  Synthetic
uaguuuccuauauaaaaacuaua

SEQ ID NO: 499207 - RNA, 24 nt, Artificial Sequence
  Synthetic
auaguuuccuauauaaaaacuaua

SEQ ID NO: 499208 - RNA, 18 nt, Artificial Sequence
  Synthetic
uccauggcagaaacuaua

SEQ ID NO: 499209 - RNA, 19 nt, Artificial Sequence
  Synthetic
cuccauggcagaaacuaua

SEQ ID NO: 499210 - RNA, 20 nt, Artificial Sequence
  Synthetic
ccuccauggcagaaacuaua

SEQ ID NO: 499211 - RNA, 21 nt, Artificial Sequence
  Synthetic
gccuccauggcagaaacuaua

SEQ ID NO: 499212 - RNA, 22 nt, Artificial Sequence
  Synthetic
ugccuccauggcagaaacuaua

SEQ ID NO: 499213 - RNA, 23 nt, Artificial Sequence
  Synthetic
cugccuccauggcagaaacuaua

SEQ ID NO: 499214 - RNA, 24 nt, Artificial Sequence
  Synthetic
gcugccuccauggcagaaacuaua

SEQ ID NO: 499215 - RNA, 18 nt, Artificial Sequence
  Synthetic
caaguuagaagaacuaua

SEQ ID NO: 499216 - RNA, 19 nt, Artificial Sequence
  Synthetic
acaaguuagaagaacuaua

SEQ ID NO: 499217 - RNA, 20 nt, Artificial Sequence
  Synthetic
gacaaguuagaagaacuaua

SEQ ID NO: 499218 - RNA, 21 nt, Artificial Sequence
  Synthetic
ggacaaguuagaagaacuaua

SEQ ID NO: 499219 - RNA, 22 nt, Artificial Sequence
  Synthetic
uggacaaguuagaagaacuaua

SEQ ID NO: 499220 - RNA, 23 nt, Artificial Sequence
  Synthetic
uuggacaaguuagaagaacuaua

SEQ ID NO: 499221 - RNA, 24 nt, Artificial Sequence
  Synthetic
uuuggacaaguuagaagaacuaua

SEQ ID NO: 499222 - RNA, 18 nt, Artificial Sequence
  Synthetic
gccacagcuggaacuaua

SEQ ID NO: 499223 - RNA, 19 nt, Artificial Sequence
  Synthetic
agccacagcuggaacuaua

SEQ ID NO: 499224 - RNA, 20 nt, Artificial Sequence
  Synthetic
aagccacagcuggaacuaua

SEQ ID NO: 499225 - RNA, 21 nt, Artificial Sequence
  Synthetic
aaagccacagcuggaacuaua

SEQ ID NO: 499226 - RNA, 22 nt, Artificial Sequence
  Synthetic
aaaagccacagcuggaacuaua

SEQ ID NO: 499227 - RNA, 23 nt, Artificial Sequence
  Synthetic
aaaaagccacagcuggaacuaua

SEQ ID NO: 499228 - RNA, 24 nt, Artificial Sequence
  Synthetic
aaaaaagccacagcuggaacuaua

SEQ ID NO: 499229 - RNA, 18 nt, Artificial Sequence
  Synthetic
auuaguacaaccacuaua

SEQ ID NO: 499230 - RNA, 19 nt, Artificial Sequence
  Synthetic
aauuaguacaaccacuaua

SEQ ID NO: 499231 - RNA, 20 nt, Artificial Sequence
  Synthetic
aaauuaguacaaccacuaua

SEQ ID NO: 499232 - RNA, 21 nt, Artificial Sequence
  Synthetic
uaaauuaguacaaccacuaua

SEQ ID NO: 499233 - RNA, 22 nt, Artificial Sequence
  Synthetic
auaaauuaguacaaccacuaua

SEQ ID NO: 499234 - RNA, 23 nt, Artificial Sequence
  Synthetic
uauaaauuaguacaaccacuaua

SEQ ID NO: 499235 - RNA, 24 nt, Artificial Sequence
  Synthetic
auauaaauuaguacaaccacuaua

SEQ ID NO: 499236 - RNA, 18 nt, Artificial Sequence
  Synthetic
aaaauaaccuccacuaua

SEQ ID NO: 499237 - RNA, 19 nt, Artificial Sequence
  Synthetic
uaaaauaaccuccacuaua

SEQ ID NO: 499238 - RNA, 20 nt, Artificial Sequence
  Synthetic
uuaaaauaaccuccacuaua

SEQ ID NO: 499239 - RNA, 21 nt, Artificial Sequence
  Synthetic
uuuaaaauaaccuccacuaua

SEQ ID NO: 499240 - RNA, 22 nt, Artificial Sequence
  Synthetic
uuuuaaaauaaccuccacuaua

SEQ ID NO: 499241 - RNA, 23 nt, Artificial Sequence
  Synthetic
auuuuaaaauaaccuccacuaua

SEQ ID NO: 499242 - RNA, 24 nt, Artificial Sequence
  Synthetic
aauuuuaaaauaaccuccacuaua

SEQ ID NO: 499243 - RNA, 18 nt, Artificial Sequence
  Synthetic
ugauguggccagacuaua

SEQ ID NO: 499244 - RNA, 19 nt, Artificial Sequence
  Synthetic
uugauguggccagacuaua

SEQ ID NO: 499245 - RNA, 20 nt, Artificial Sequence
  Synthetic
uuugauguggccagacuaua

SEQ ID NO: 499246 - RNA, 21 nt, Artificial Sequence
  Synthetic
auuugauguggccagacuaua

SEQ ID NO: 499247 - RNA, 22 nt, Artificial Sequence
  Synthetic
aauuugauguggccagacuaua

SEQ ID NO: 499248 - RNA, 23 nt, Artificial Sequence
  Synthetic
uaauuugauguggccagacuaua

SEQ ID NO: 499249 - RNA, 24 nt, Artificial Sequence
  Synthetic
guaauuugauguggccagacuaua

SEQ ID NO: 499250 - RNA, 18 nt, Artificial Sequence
  Synthetic
auguaaaaacugacuaua

SEQ ID NO: 499251 - RNA, 19 nt, Artificial Sequence
  Synthetic
aauguaaaaacugacuaua

SEQ ID NO: 499252 - RNA, 20 nt, Artificial Sequence
  Synthetic
caauguaaaaacugacuaua

SEQ ID NO: 499253 - RNA, 21 nt, Artificial Sequence
  Synthetic
acaauguaaaaacugacuaua

SEQ ID NO: 499254 - RNA, 22 nt, Artificial Sequence
  Synthetic
cacaauguaaaaacugacuaua

SEQ ID NO: 499255 - RNA, 23 nt, Artificial Sequence
  Synthetic
ucacaauguaaaaacugacuaua

SEQ ID NO: 499256 - RNA, 24 nt, Artificial Sequence
  Synthetic
aucacaauguaaaaacugacuaua

SEQ ID NO: 499257 - RNA, 18 nt, Artificial Sequence
  Synthetic
gagcuacucuugacuaua

SEQ ID NO: 499258 - RNA, 19 nt, Artificial Sequence
  Synthetic
ggagcuacucuugacuaua

SEQ ID NO: 499259 - RNA, 20 nt, Artificial Sequence
  Synthetic
aggagcuacucuugacuaua

SEQ ID NO: 499260 - RNA, 21 nt, Artificial Sequence
  Synthetic
aaggagcuacucuugacuaua

SEQ ID NO: 499261 - RNA, 22 nt, Artificial Sequence
  Synthetic
uaaggagcuacucuugacuaua

SEQ ID NO: 499262 - RNA, 23 nt, Artificial Sequence
  Synthetic
uuaaggagcuacucuugacuaua

SEQ ID NO: 499263 - RNA, 24 nt, Artificial Sequence
  Synthetic
uuuaaggagcuacucuugacuaua

SEQ ID NO: 499264 - RNA, 18 nt, Artificial Sequence
  Synthetic
ugaagagcauauacuaua

SEQ ID NO: 499265 - RNA, 19 nt, Artificial Sequence
  Synthetic
uugaagagcauauacuaua

SEQ ID NO: 499266 - RNA, 20 nt, Artificial Sequence
  Synthetic
cuugaagagcauauacuaua

SEQ ID NO: 499267 - RNA, 21 nt, Artificial Sequence
  Synthetic
acuugaagagcauauacuaua

SEQ ID NO: 499268 - RNA, 22 nt, Artificial Sequence
  Synthetic
uacuugaagagcauauacuaua

SEQ ID NO: 499269 - RNA, 23 nt, Artificial Sequence
  Synthetic
uuacuugaagagcauauacuaua

SEQ ID NO: 499270 - RNA, 24 nt, Artificial Sequence
  Synthetic
cuuacuugaagagcauauacuaua

SEQ ID NO: 499271 - RNA, 18 nt, Artificial Sequence
  Synthetic
agaggugcccuuacuaua

SEQ ID NO: 499272 - RNA, 19 nt, Artificial Sequence
  Synthetic
cagaggugcccuuacuaua

SEQ ID NO: 499273 - RNA, 20 nt, Artificial Sequence
  Synthetic
ccagaggugcccuuacuaua

SEQ ID NO: 499274 - RNA, 21 nt, Artificial Sequence
  Synthetic
accagaggugcccuuacuaua

SEQ ID NO: 499275 - RNA, 22 nt, Artificial Sequence
  Synthetic
uaccagaggugcccuuacuaua

SEQ ID NO: 499276 - RNA, 23 nt, Artificial Sequence
  Synthetic
auaccagaggugcccuuacuaua

SEQ ID NO: 499277 - RNA, 24 nt, Artificial Sequence
  Synthetic
cauaccagaggugcccuuacuaua

SEQ ID NO: 499278 - RNA, 18 nt, Artificial Sequence
  Synthetic
auauuauauuuuacuaua

SEQ ID NO: 499279 - RNA, 19 nt, Artificial Sequence
  Synthetic
aauauuauauuuuacuaua

SEQ ID NO: 499280 - RNA, 20 nt, Artificial Sequence
  Synthetic
uaauauuauauuuuacuaua

SEQ ID NO: 499281 - RNA, 21 nt, Artificial Sequence
  Synthetic
guaauauuauauuuuacuaua

SEQ ID NO: 499282 - RNA, 22 nt, Artificial Sequence
  Synthetic
uguaauauuauauuuuacuaua

SEQ ID NO: 499283 - RNA, 23 nt, Artificial Sequence
  Synthetic
uuguaauauuauauuuuacuaua

SEQ ID NO: 499284 - RNA, 24 nt, Artificial Sequence
  Synthetic
cuuguaauauuauauuuuacuaua

SEQ ID NO: 499285 - RNA, 18 nt, Artificial Sequence
  Synthetic
ucauacaaaucaccuaua

SEQ ID NO: 499286 - RNA, 19 nt, Artificial Sequence
  Synthetic
uucauacaaaucaccuaua

SEQ ID NO: 499287 - RNA, 20 nt, Artificial Sequence
  Synthetic
auucauacaaaucaccuaua

SEQ ID NO: 499288 - RNA, 21 nt, Artificial Sequence
  Synthetic
aauucauacaaaucaccuaua

SEQ ID NO: 499289 - RNA, 22 nt, Artificial Sequence
  Synthetic
aaauucauacaaaucaccuaua

SEQ ID NO: 499290 - RNA, 23 nt, Artificial Sequence
  Synthetic
uaaauucauacaaaucaccuaua

SEQ ID NO: 499291 - RNA, 24 nt, Artificial Sequence
  Synthetic
cuaaauucauacaaaucaccuaua

SEQ ID NO: 499292 - RNA, 18 nt, Artificial Sequence
  Synthetic
cagaauaaucuaccuaua

SEQ ID NO: 499293 - RNA, 19 nt, Artificial Sequence
  Synthetic
acagaauaaucuaccuaua

SEQ ID NO: 499294 - RNA, 20 nt, Artificial Sequence
  Synthetic
gacagaauaaucuaccuaua

SEQ ID NO: 499295 - RNA, 21 nt, Artificial Sequence
  Synthetic
agacagaauaaucuaccuaua

SEQ ID NO: 499296 - RNA, 22 nt, Artificial Sequence
  Synthetic
aagacagaauaaucuaccuaua

SEQ ID NO: 499297 - RNA, 23 nt, Artificial Sequence
  Synthetic
aaagacagaauaaucuaccuaua

SEQ ID NO: 499298 - RNA, 24 nt, Artificial Sequence
  Synthetic
uaaagacagaauaaucuaccuaua

SEQ ID NO: 499299 - RNA, 18 nt, Artificial Sequence
  Synthetic
gaggagccugucccuaua

SEQ ID NO: 499300 - RNA, 19 nt, Artificial Sequence
  Synthetic
agaggagccugucccuaua

SEQ ID NO: 499301 - RNA, 20 nt, Artificial Sequence
  Synthetic
cagaggagccugucccuaua

SEQ ID NO: 499302 - RNA, 21 nt, Artificial Sequence
  Synthetic
acagaggagccugucccuaua

SEQ ID NO: 499303 - RNA, 22 nt, Artificial Sequence
  Synthetic
gacagaggagccugucccuaua

SEQ ID NO: 499304 - RNA, 23 nt, Artificial Sequence
  Synthetic
agacagaggagccugucccuaua

SEQ ID NO: 499305 - RNA, 24 nt, Artificial Sequence
  Synthetic
aagacagaggagccugucccuaua

SEQ ID NO: 499306 - RNA, 18 nt, Artificial Sequence
  Synthetic
gaugccaaacauccuaua

SEQ ID NO: 499307 - RNA, 19 nt, Artificial Sequence
  Synthetic
ugaugccaaacauccuaua

SEQ ID NO: 499308 - RNA, 20 nt, Artificial Sequence
  Synthetic
gugaugccaaacauccuaua

SEQ ID NO: 499309 - RNA, 21 nt, Artificial Sequence
  Synthetic
ugugaugccaaacauccuaua

SEQ ID NO: 499310 - RNA, 22 nt, Artificial Sequence
  Synthetic
uugugaugccaaacauccuaua

SEQ ID NO: 499311 - RNA, 23 nt, Artificial Sequence
  Synthetic
guugugaugccaaacauccuaua

SEQ ID NO: 499312 - RNA, 24 nt, Artificial Sequence
  Synthetic
aguugugaugccaaacauccuaua

SEQ ID NO: 499313 - RNA, 18 nt, Artificial Sequence
  Synthetic
auaauuuuguaagcuaua

SEQ ID NO: 499314 - RNA, 19 nt, Artificial Sequence
  Synthetic
uauaauuuuguaagcuaua

SEQ ID NO: 499315 - RNA, 20 nt, Artificial Sequence
  Synthetic
auauaauuuuguaagcuaua

SEQ ID NO: 499316 - RNA, 21 nt, Artificial Sequence
  Synthetic
aauauaauuuuguaagcuaua

SEQ ID NO: 499317 - RNA, 22 nt, Artificial Sequence
  Synthetic
aaauauaauuuuguaagcuaua

SEQ ID NO: 499318 - RNA, 23 nt, Artificial Sequence
  Synthetic
aaaauauaauuuuguaagcuaua

SEQ ID NO: 499319 - RNA, 24 nt, Artificial Sequence
  Synthetic
aaaaauauaauuuuguaagcuaua

SEQ ID NO: 499320 - RNA, 18 nt, Artificial Sequence
  Synthetic
caaagcccugaggcuaua

SEQ ID NO: 499321 - RNA, 19 nt, Artificial Sequence
  Synthetic
ccaaagcccugaggcuaua

SEQ ID NO: 499322 - RNA, 20 nt, Artificial Sequence
  Synthetic
cccaaagcccugaggcuaua

SEQ ID NO: 499323 - RNA, 21 nt, Artificial Sequence
  Synthetic
acccaaagcccugaggcuaua

SEQ ID NO: 499324 - RNA, 22 nt, Artificial Sequence
  Synthetic
uacccaaagcccugaggcuaua

SEQ ID NO: 499325 - RNA, 23 nt, Artificial Sequence
  Synthetic
cuacccaaagcccugaggcuaua

SEQ ID NO: 499326 - RNA, 24 nt, Artificial Sequence
  Synthetic
ccuacccaaagcccugaggcuaua

SEQ ID NO: 499327 - RNA, 18 nt, Artificial Sequence
  Synthetic
auggguaucugggcuaua

SEQ ID NO: 499328 - RNA, 19 nt, Artificial Sequence
  Synthetic
cauggguaucugggcuaua

SEQ ID NO: 499329 - RNA, 20 nt, Artificial Sequence
  Synthetic
acauggguaucugggcuaua

SEQ ID NO: 499330 - RNA, 21 nt, Artificial Sequence
  Synthetic
aacauggguaucugggcuaua

SEQ ID NO: 499331 - RNA, 22 nt, Artificial Sequence
  Synthetic
gaacauggguaucugggcuaua

SEQ ID NO: 499332 - RNA, 23 nt, Artificial Sequence
  Synthetic
ugaacauggguaucugggcuaua

SEQ ID NO: 499333 - RNA, 24 nt, Artificial Sequence
  Synthetic
augaacauggguaucugggcuaua

SEQ ID NO: 499334 - RNA, 18 nt, Artificial Sequence
  Synthetic
acuucuuuauaugcuaua

SEQ ID NO: 499335 - RNA, 19 nt, Artificial Sequence
  Synthetic
uacuucuuuauaugcuaua

SEQ ID NO: 499336 - RNA, 20 nt, Artificial Sequence
  Synthetic
uuacuucuuuauaugcuaua

SEQ ID NO: 499337 - RNA, 21 nt, Artificial Sequence
  Synthetic
uuuacuucuuuauaugcuaua

SEQ ID NO: 499338 - RNA, 22 nt, Artificial Sequence
  Synthetic
uuuuacuucuuuauaugcuaua

SEQ ID NO: 499339 - RNA, 23 nt, Artificial Sequence
  Synthetic
auuuuacuucuuuauaugcuaua

SEQ ID NO: 499340 - RNA, 24 nt, Artificial Sequence
  Synthetic
uauuuuacuucuuuauaugcuaua

SEQ ID NO: 499341 - RNA, 18 nt, Artificial Sequence
  Synthetic
caaagaaaaacugcuaua

SEQ ID NO: 499342 - RNA, 19 nt, Artificial Sequence
  Synthetic
ccaaagaaaaacugcuaua

SEQ ID NO: 499343 - RNA, 20 nt, Artificial Sequence
  Synthetic
gccaaagaaaaacugcuaua

SEQ ID NO: 499344 - RNA, 21 nt, Artificial Sequence
  Synthetic
agccaaagaaaaacugcuaua

SEQ ID NO: 499345 - RNA, 22 nt, Artificial Sequence
  Synthetic
aagccaaagaaaaacugcuaua

SEQ ID NO: 499346 - RNA, 23 nt, Artificial Sequence
  Synthetic
aaagccaaagaaaaacugcuaua

SEQ ID NO: 499347 - RNA, 24 nt, Artificial Sequence
  Synthetic
aaaagccaaagaaaaacugcuaua

SEQ ID NO: 499348 - RNA, 21 nt, Artificial Sequence
  Synthetic
guccauuuucauacugcuaua

SEQ ID NO: 499349 - RNA, 22 nt, Artificial Sequence
  Synthetic
aguccauuuucauacugcuaua

SEQ ID NO: 499350 - RNA, 23 nt, Artificial Sequence
  Synthetic
uaguccauuuucauacugcuaua

SEQ ID NO: 499351 - RNA, 24 nt, Artificial Sequence
  Synthetic
uuaguccauuuucauacugcuaua

SEQ ID NO: 499352 - RNA, 18 nt, Artificial Sequence
  Synthetic
gagugggauacugcuaua

SEQ ID NO: 499353 - RNA, 19 nt, Artificial Sequence
  Synthetic
agagugggauacugcuaua

SEQ ID NO: 499354 - RNA, 20 nt, Artificial Sequence
  Synthetic
gagagugggauacugcuaua

SEQ ID NO: 499355 - RNA, 21 nt, Artificial Sequence
  Synthetic
agagagugggauacugcuaua

SEQ ID NO: 499356 - RNA, 22 nt, Artificial Sequence
  Synthetic
cagagagugggauacugcuaua

SEQ ID NO: 499357 - RNA, 23 nt, Artificial Sequence
  Synthetic
acagagagugggauacugcuaua

SEQ ID NO: 499358 - RNA, 24 nt, Artificial Sequence
  Synthetic
cacagagagugggauacugcuaua

SEQ ID NO: 499359 - RNA, 18 nt, Artificial Sequence
  Synthetic
ccuucuugcauugcuaua

SEQ ID NO: 499360 - RNA, 19 nt, Artificial Sequence
  Synthetic
cccuucuugcauugcuaua

SEQ ID NO: 499361 - RNA, 20 nt, Artificial Sequence
  Synthetic
ucccuucuugcauugcuaua

SEQ ID NO: 499362 - RNA, 21 nt, Artificial Sequence
  Synthetic
gucccuucuugcauugcuaua

SEQ ID NO: 499363 - RNA, 22 nt, Artificial Sequence
  Synthetic
agucccuucuugcauugcuaua

SEQ ID NO: 499364 - RNA, 23 nt, Artificial Sequence
  Synthetic
uagucccuucuugcauugcuaua

SEQ ID NO: 499365 - RNA, 24 nt, Artificial Sequence
  Synthetic
uuagucccuucuugcauugcuaua

SEQ ID NO: 499366 - RNA, 18 nt, Artificial Sequence
  Synthetic
aucaaaaccaaaucuaua

SEQ ID NO: 499367 - RNA, 19 nt, Artificial Sequence
  Synthetic
aaucaaaaccaaaucuaua

SEQ ID NO: 499368 - RNA, 20 nt, Artificial Sequence
  Synthetic
gaaucaaaaccaaaucuaua

SEQ ID NO: 499369 - RNA, 21 nt, Artificial Sequence
  Synthetic
ggaaucaaaaccaaaucuaua

SEQ ID NO: 499370 - RNA, 22 nt, Artificial Sequence
  Synthetic
aggaaucaaaaccaaaucuaua

SEQ ID NO: 499371 - RNA, 23 nt, Artificial Sequence
  Synthetic
gaggaaucaaaaccaaaucuaua

SEQ ID NO: 499372 - RNA, 24 nt, Artificial Sequence
  Synthetic
ggaggaaucaaaaccaaaucuaua

SEQ ID NO: 499373 - RNA, 18 nt, Artificial Sequence
  Synthetic
ccacugguuaaaucuaua

SEQ ID NO: 499374 - RNA, 19 nt, Artificial Sequence
  Synthetic
cccacugguuaaaucuaua

SEQ ID NO: 499375 - RNA, 20 nt, Artificial Sequence
  Synthetic
ucccacugguuaaaucuaua

SEQ ID NO: 499376 - RNA, 21 nt, Artificial Sequence
  Synthetic
cucccacugguuaaaucuaua

SEQ ID NO: 499377 - RNA, 22 nt, Artificial Sequence
  Synthetic
ccucccacugguuaaaucuaua

SEQ ID NO: 499378 - RNA, 23 nt, Artificial Sequence
  Synthetic
gccucccacugguuaaaucuaua

SEQ ID NO: 499379 - RNA, 24 nt, Artificial Sequence
  Synthetic
cgccucccacugguuaaaucuaua

SEQ ID NO: 499380 - RNA, 18 nt, Artificial Sequence
  Synthetic
uauuauccagaaucuaua

SEQ ID NO: 499381 - RNA, 19 nt, Artificial Sequence
  Synthetic
cuauuauccagaaucuaua

SEQ ID NO: 499382 - RNA, 20 nt, Artificial Sequence
  Synthetic
gcuauuauccagaaucuaua

SEQ ID NO: 499383 - RNA, 21 nt, Artificial Sequence
  Synthetic
ggcuauuauccagaaucuaua

SEQ ID NO: 499384 - RNA, 22 nt, Artificial Sequence
  Synthetic
gggcuauuauccagaaucuaua

SEQ ID NO: 499385 - RNA, 23 nt, Artificial Sequence
  Synthetic
agggcuauuauccagaaucuaua

SEQ ID NO: 499386 - RNA, 24 nt, Artificial Sequence
  Synthetic
aagggcuauuauccagaaucuaua

SEQ ID NO: 499387 - RNA, 18 nt, Artificial Sequence
  Synthetic
uaauauucagaaucuaua

SEQ ID NO: 499388 - RNA, 19 nt, Artificial Sequence
  Synthetic
cuaauauucagaaucuaua

SEQ ID NO: 499389 - RNA, 20 nt, Artificial Sequence
  Synthetic
ucuaauauucagaaucuaua

SEQ ID NO: 499390 - RNA, 21 nt, Artificial Sequence
  Synthetic
gucuaauauucagaaucuaua

SEQ ID NO: 499391 - RNA, 22 nt, Artificial Sequence
  Synthetic
ggucuaauauucagaaucuaua

SEQ ID NO: 499392 - RNA, 23 nt, Artificial Sequence
  Synthetic
aggucuaauauucagaaucuaua

SEQ ID NO: 499393 - RNA, 24 nt, Artificial Sequence
  Synthetic
aaggucuaauauucagaaucuaua

SEQ ID NO: 499394 - RNA, 18 nt, Artificial Sequence
  Synthetic
cagucaugcgaaucuaua

SEQ ID NO: 499395 - RNA, 19 nt, Artificial Sequence
  Synthetic
acagucaugcgaaucuaua

SEQ ID NO: 499396 - RNA, 20 nt, Artificial Sequence
  Synthetic
cacagucaugcgaaucuaua

SEQ ID NO: 499397 - RNA, 21 nt, Artificial Sequence
  Synthetic
acacagucaugcgaaucuaua

SEQ ID NO: 499398 - RNA, 22 nt, Artificial Sequence
  Synthetic
gacacagucaugcgaaucuaua

SEQ ID NO: 499399 - RNA, 23 nt, Artificial Sequence
  Synthetic
ugacacagucaugcgaaucuaua

SEQ ID NO: 499400 - RNA, 24 nt, Artificial Sequence
  Synthetic
uugacacagucaugcgaaucuaua

SEQ ID NO: 499401 - RNA, 18 nt, Artificial Sequence
  Synthetic
uaauacccggaaucuaua

SEQ ID NO: 499402 - RNA, 19 nt, Artificial Sequence
  Synthetic
cuaauacccggaaucuaua

SEQ ID NO: 499403 - RNA, 20 nt, Artificial Sequence
  Synthetic
gcuaauacccggaaucuaua

SEQ ID NO: 499404 - RNA, 21 nt, Artificial Sequence
  Synthetic
ggcuaauacccggaaucuaua

SEQ ID NO: 499405 - RNA, 22 nt, Artificial Sequence
  Synthetic
gggcuaauacccggaaucuaua

SEQ ID NO: 499406 - RNA, 23 nt, Artificial Sequence
  Synthetic
agggcuaauacccggaaucuaua

SEQ ID NO: 499407 - RNA, 24 nt, Artificial Sequence
  Synthetic
aagggcuaauacccggaaucuaua

SEQ ID NO: 499408 - RNA, 18 nt, Artificial Sequence
  Synthetic
agaagguaacacucuaua

SEQ ID NO: 499409 - RNA, 19 nt, Artificial Sequence
  Synthetic
cagaagguaacacucuaua

SEQ ID NO: 499410 - RNA, 20 nt, Artificial Sequence
  Synthetic
ucagaagguaacacucuaua

SEQ ID NO: 499411 - RNA, 21 nt, Artificial Sequence
  Synthetic
uucagaagguaacacucuaua

SEQ ID NO: 499412 - RNA, 22 nt, Artificial Sequence
  Synthetic
uuucagaagguaacacucuaua

SEQ ID NO: 499413 - RNA, 23 nt, Artificial Sequence
  Synthetic
guuucagaagguaacacucuaua

SEQ ID NO: 499414 - RNA, 24 nt, Artificial Sequence
  Synthetic
uguuucagaagguaacacucuaua

SEQ ID NO: 499415 - RNA, 18 nt, Artificial Sequence
  Synthetic
aaauguucacacucuaua

SEQ ID NO: 499416 - RNA, 19 nt, Artificial Sequence
  Synthetic
uaaauguucacacucuaua

SEQ ID NO: 499417 - RNA, 20 nt, Artificial Sequence
  Synthetic
uuaaauguucacacucuaua

SEQ ID NO: 499418 - RNA, 21 nt, Artificial Sequence
  Synthetic
auuaaauguucacacucuaua

SEQ ID NO: 499419 - RNA, 22 nt, Artificial Sequence
  Synthetic
aauuaaauguucacacucuaua

SEQ ID NO: 499420 - RNA, 23 nt, Artificial Sequence
  Synthetic
aaauuaaauguucacacucuaua

SEQ ID NO: 499421 - RNA, 24 nt, Artificial Sequence
  Synthetic
uaaauuaaauguucacacucuaua

SEQ ID NO: 499422 - RNA, 18 nt, Artificial Sequence
  Synthetic
cucugccuaugcucuaua

SEQ ID NO: 499423 - RNA, 19 nt, Artificial Sequence
  Synthetic
acucugccuaugcucuaua

SEQ ID NO: 499424 - RNA, 20 nt, Artificial Sequence
  Synthetic
gacucugccuaugcucuaua

SEQ ID NO: 499425 - RNA, 21 nt, Artificial Sequence
  Synthetic
agacucugccuaugcucuaua

SEQ ID NO: 499426 - RNA, 22 nt, Artificial Sequence
  Synthetic
uagacucugccuaugcucuaua

SEQ ID NO: 499427 - RNA, 23 nt, Artificial Sequence
  Synthetic
auagacucugccuaugcucuaua

SEQ ID NO: 499428 - RNA, 24 nt, Artificial Sequence
  Synthetic
aauagacucugccuaugcucuaua

SEQ ID NO: 499429 - RNA, 18 nt, Artificial Sequence
  Synthetic
aaggcuguuucgucuaua

SEQ ID NO: 499430 - RNA, 19 nt, Artificial Sequence
  Synthetic
gaaggcuguuucgucuaua

SEQ ID NO: 499431 - RNA, 20 nt, Artificial Sequence
  Synthetic
agaaggcuguuucgucuaua

SEQ ID NO: 499432 - RNA, 21 nt, Artificial Sequence
  Synthetic
uagaaggcuguuucgucuaua

SEQ ID NO: 499433 - RNA, 22 nt, Artificial Sequence
  Synthetic
auagaaggcuguuucgucuaua

SEQ ID NO: 499434 - RNA, 23 nt, Artificial Sequence
  Synthetic
aauagaaggcuguuucgucuaua

SEQ ID NO: 499435 - RNA, 24 nt, Artificial Sequence
  Synthetic
caauagaaggcuguuucgucuaua

SEQ ID NO: 499436 - RNA, 18 nt, Artificial Sequence
  Synthetic
uauuuuucaaauucuaua

SEQ ID NO: 499437 - RNA, 19 nt, Artificial Sequence
  Synthetic
auauuuuucaaauucuaua

SEQ ID NO: 499438 - RNA, 20 nt, Artificial Sequence
  Synthetic
uauauuuuucaaauucuaua

SEQ ID NO: 499439 - RNA, 21 nt, Artificial Sequence
  Synthetic
cuauauuuuucaaauucuaua

SEQ ID NO: 499440 - RNA, 22 nt, Artificial Sequence
  Synthetic
ccuauauuuuucaaauucuaua

SEQ ID NO: 499441 - RNA, 23 nt, Artificial Sequence
  Synthetic
uccuauauuuuucaaauucuaua

SEQ ID NO: 499442 - RNA, 24 nt, Artificial Sequence
  Synthetic
uuccuauauuuuucaaauucuaua

SEQ ID NO: 499443 - RNA, 18 nt, Artificial Sequence
  Synthetic
ugccuacuuaauucuaua

SEQ ID NO: 499444 - RNA, 19 nt, Artificial Sequence
  Synthetic
cugccuacuuaauucuaua

SEQ ID NO: 499445 - RNA, 20 nt, Artificial Sequence
  Synthetic
acugccuacuuaauucuaua

SEQ ID NO: 499446 - RNA, 21 nt, Artificial Sequence
  Synthetic
aacugccuacuuaauucuaua

SEQ ID NO: 499447 - RNA, 22 nt, Artificial Sequence
  Synthetic
aaacugccuacuuaauucuaua

SEQ ID NO: 499448 - RNA, 23 nt, Artificial Sequence
  Synthetic
gaaacugccuacuuaauucuaua

SEQ ID NO: 499449 - RNA, 24 nt, Artificial Sequence
  Synthetic
ggaaacugccuacuuaauucuaua

SEQ ID NO: 499450 - RNA, 18 nt, Artificial Sequence
  Synthetic
auuaagaauuguucuaua

SEQ ID NO: 499451 - RNA, 19 nt, Artificial Sequence
  Synthetic
uauuaagaauuguucuaua

SEQ ID NO: 499452 - RNA, 20 nt, Artificial Sequence
  Synthetic
uuauuaagaauuguucuaua

SEQ ID NO: 499453 - RNA, 21 nt, Artificial Sequence
  Synthetic
auuauuaagaauuguucuaua

SEQ ID NO: 499454 - RNA, 22 nt, Artificial Sequence
  Synthetic
uauuauuaagaauuguucuaua

SEQ ID NO: 499455 - RNA, 23 nt, Artificial Sequence
  Synthetic
auauuauuaagaauuguucuaua

SEQ ID NO: 499456 - RNA, 24 nt, Artificial Sequence
  Synthetic
uauauuauuaagaauuguucuaua

SEQ ID NO: 499457 - RNA, 18 nt, Artificial Sequence
  Synthetic
aacuucaggauuucuaua

SEQ ID NO: 499458 - RNA, 19 nt, Artificial Sequence
  Synthetic
uaacuucaggauuucuaua

SEQ ID NO: 499459 - RNA, 20 nt, Artificial Sequence
  Synthetic
guaacuucaggauuucuaua

SEQ ID NO: 499460 - RNA, 21 nt, Artificial Sequence
  Synthetic
uguaacuucaggauuucuaua

SEQ ID NO: 499461 - RNA, 22 nt, Artificial Sequence
  Synthetic
guguaacuucaggauuucuaua

SEQ ID NO: 499462 - RNA, 23 nt, Artificial Sequence
  Synthetic
uguguaacuucaggauuucuaua

SEQ ID NO: 499463 - RNA, 24 nt, Artificial Sequence
  Synthetic
uuguguaacuucaggauuucuaua

SEQ ID NO: 499464 - RNA, 18 nt, Artificial Sequence
  Synthetic
acauagcccuuuucuaua

SEQ ID NO: 499465 - RNA, 19 nt, Artificial Sequence
  Synthetic
aacauagcccuuuucuaua

SEQ ID NO: 499466 - RNA, 20 nt, Artificial Sequence
  Synthetic
aaacauagcccuuuucuaua

SEQ ID NO: 499467 - RNA, 21 nt, Artificial Sequence
  Synthetic
aaaacauagcccuuuucuaua

SEQ ID NO: 499468 - RNA, 22 nt, Artificial Sequence
  Synthetic
uaaaacauagcccuuuucuaua

SEQ ID NO: 499469 - RNA, 23 nt, Artificial Sequence
  Synthetic
auaaaacauagcccuuuucuaua

SEQ ID NO: 499470 - RNA, 24 nt, Artificial Sequence
  Synthetic
aauaaaacauagcccuuuucuaua

SEQ ID NO: 499471 - RNA, 18 nt, Artificial Sequence
  Synthetic
acugaacucaacaguaua

SEQ ID NO: 499472 - RNA, 19 nt, Artificial Sequence
  Synthetic
aacugaacucaacaguaua

SEQ ID NO: 499473 - RNA, 20 nt, Artificial Sequence
  Synthetic
aaacugaacucaacaguaua

SEQ ID NO: 499474 - RNA, 21 nt, Artificial Sequence
  Synthetic
caaacugaacucaacaguaua

SEQ ID NO: 499475 - RNA, 22 nt, Artificial Sequence
  Synthetic
gcaaacugaacucaacaguaua

SEQ ID NO: 499476 - RNA, 23 nt, Artificial Sequence
  Synthetic
agcaaacugaacucaacaguaua

SEQ ID NO: 499477 - RNA, 24 nt, Artificial Sequence
  Synthetic
uagcaaacugaacucaacaguaua

SEQ ID NO: 499478 - RNA, 18 nt, Artificial Sequence
  Synthetic
ggcaaaaaagacaguaua

SEQ ID NO: 499479 - RNA, 19 nt, Artificial Sequence
  Synthetic
uggcaaaaaagacaguaua

SEQ ID NO: 499480 - RNA, 20 nt, Artificial Sequence
  Synthetic
auggcaaaaaagacaguaua

SEQ ID NO: 499481 - RNA, 21 nt, Artificial Sequence
  Synthetic
uauggcaaaaaagacaguaua

SEQ ID NO: 499482 - RNA, 22 nt, Artificial Sequence
  Synthetic
auauggcaaaaaagacaguaua

SEQ ID NO: 499483 - RNA, 23 nt, Artificial Sequence
  Synthetic
cauauggcaaaaaagacaguaua

SEQ ID NO: 499484 - RNA, 24 nt, Artificial Sequence
  Synthetic
acauauggcaaaaaagacaguaua

SEQ ID NO: 499485 - RNA, 18 nt, Artificial Sequence
  Synthetic
agaaaauaaaucaguaua

SEQ ID NO: 499486 - RNA, 19 nt, Artificial Sequence
  Synthetic
aagaaaauaaaucaguaua

SEQ ID NO: 499487 - RNA, 20 nt, Artificial Sequence
  Synthetic
aaagaaaauaaaucaguaua

SEQ ID NO: 499488 - RNA, 21 nt, Artificial Sequence
  Synthetic
aaaagaaaauaaaucaguaua

SEQ ID NO: 499489 - RNA, 22 nt, Artificial Sequence
  Synthetic
caaaagaaaauaaaucaguaua

SEQ ID NO: 499490 - RNA, 23 nt, Artificial Sequence
  Synthetic
ccaaaagaaaauaaaucaguaua

SEQ ID NO: 499491 - RNA, 24 nt, Artificial Sequence
  Synthetic
cccaaaagaaaauaaaucaguaua

SEQ ID NO: 499492 - RNA, 18 nt, Artificial Sequence
  Synthetic
cuuauucacaagaguaua

SEQ ID NO: 499493 - RNA, 19 nt, Artificial Sequence
  Synthetic
acuuauucacaagaguaua

SEQ ID NO: 499494 - RNA, 20 nt, Artificial Sequence
  Synthetic
aacuuauucacaagaguaua

SEQ ID NO: 499495 - RNA, 21 nt, Artificial Sequence
  Synthetic
caacuuauucacaagaguaua

SEQ ID NO: 499496 - RNA, 22 nt, Artificial Sequence
  Synthetic
ccaacuuauucacaagaguaua

SEQ ID NO: 499497 - RNA, 23 nt, Artificial Sequence
  Synthetic
uccaacuuauucacaagaguaua

SEQ ID NO: 499498 - RNA, 24 nt, Artificial Sequence
  Synthetic
cuccaacuuauucacaagaguaua

SEQ ID NO: 499499 - RNA, 18 nt, Artificial Sequence
  Synthetic
ugcccauuugagaguaua

SEQ ID NO: 499500 - RNA, 19 nt, Artificial Sequence
  Synthetic
cugcccauuugagaguaua

SEQ ID NO: 499501 - RNA, 20 nt, Artificial Sequence
  Synthetic
acugcccauuugagaguaua

SEQ ID NO: 499502 - RNA, 21 nt, Artificial Sequence
  Synthetic
uacugcccauuugagaguaua

SEQ ID NO: 499503 - RNA, 22 nt, Artificial Sequence
  Synthetic
cuacugcccauuugagaguaua

SEQ ID NO: 499504 - RNA, 23 nt, Artificial Sequence
  Synthetic
gcuacugcccauuugagaguaua

SEQ ID NO: 499505 - RNA, 24 nt, Artificial Sequence
  Synthetic
ugcuacugcccauuugagaguaua

SEQ ID NO: 499506 - RNA, 18 nt, Artificial Sequence
  Synthetic
uuuucuucagugaguaua

SEQ ID NO: 499507 - RNA, 19 nt, Artificial Sequence
  Synthetic
auuuucuucagugaguaua

SEQ ID NO: 499508 - RNA, 20 nt, Artificial Sequence
  Synthetic
uauuuucuucagugaguaua

SEQ ID NO: 499509 - RNA, 21 nt, Artificial Sequence
  Synthetic
auauuuucuucagugaguaua

SEQ ID NO: 499510 - RNA, 22 nt, Artificial Sequence
  Synthetic
cauauuuucuucagugaguaua

SEQ ID NO: 499511 - RNA, 23 nt, Artificial Sequence
  Synthetic
acauauuuucuucagugaguaua

SEQ ID NO: 499512 - RNA, 24 nt, Artificial Sequence
  Synthetic
uacauauuuucuucagugaguaua

SEQ ID NO: 499513 - RNA, 18 nt, Artificial Sequence
  Synthetic
ugauuugaccuuaguaua

SEQ ID NO: 499514 - RNA, 19 nt, Artificial Sequence
  Synthetic
augauuugaccuuaguaua

SEQ ID NO: 499515 - RNA, 20 nt, Artificial Sequence
  Synthetic
caugauuugaccuuaguaua

SEQ ID NO: 499516 - RNA, 21 nt, Artificial Sequence
  Synthetic
ucaugauuugaccuuaguaua

SEQ ID NO: 499517 - RNA, 22 nt, Artificial Sequence
  Synthetic
gucaugauuugaccuuaguaua

SEQ ID NO: 499518 - RNA, 23 nt, Artificial Sequence
  Synthetic
agucaugauuugaccuuaguaua

SEQ ID NO: 499519 - RNA, 24 nt, Artificial Sequence
  Synthetic
aagucaugauuugaccuuaguaua

SEQ ID NO: 499520 - RNA, 18 nt, Artificial Sequence
  Synthetic
aaaaggcauaaccguaua

SEQ ID NO: 499521 - RNA, 19 nt, Artificial Sequence
  Synthetic
gaaaaggcauaaccguaua

SEQ ID NO: 499522 - RNA, 20 nt, Artificial Sequence
  Synthetic
ggaaaaggcauaaccguaua

SEQ ID NO: 499523 - RNA, 21 nt, Artificial Sequence
  Synthetic
uggaaaaggcauaaccguaua

SEQ ID NO: 499524 - RNA, 22 nt, Artificial Sequence
  Synthetic
cuggaaaaggcauaaccguaua

SEQ ID NO: 499525 - RNA, 23 nt, Artificial Sequence
  Synthetic
acuggaaaaggcauaaccguaua

SEQ ID NO: 499526 - RNA, 24 nt, Artificial Sequence
  Synthetic
gacuggaaaaggcauaaccguaua

SEQ ID NO: 499527 - RNA, 18 nt, Artificial Sequence
  Synthetic
caaagugccugccguaua

SEQ ID NO: 499528 - RNA, 19 nt, Artificial Sequence
  Synthetic
acaaagugccugccguaua

SEQ ID NO: 499529 - RNA, 20 nt, Artificial Sequence
  Synthetic
cacaaagugccugccguaua

SEQ ID NO: 499530 - RNA, 21 nt, Artificial Sequence
  Synthetic
ucacaaagugccugccguaua

SEQ ID NO: 499531 - RNA, 22 nt, Artificial Sequence
  Synthetic
aucacaaagugccugccguaua

SEQ ID NO: 499532 - RNA, 23 nt, Artificial Sequence
  Synthetic
uaucacaaagugccugccguaua

SEQ ID NO: 499533 - RNA, 24 nt, Artificial Sequence
  Synthetic
guaucacaaagugccugccguaua

SEQ ID NO: 499534 - RNA, 18 nt, Artificial Sequence
  Synthetic
auagauacacaagguaua

SEQ ID NO: 499535 - RNA, 19 nt, Artificial Sequence
  Synthetic
aauagauacacaagguaua

SEQ ID NO: 499536 - RNA, 20 nt, Artificial Sequence
  Synthetic
aaauagauacacaagguaua

SEQ ID NO: 499537 - RNA, 21 nt, Artificial Sequence
  Synthetic
aaaauagauacacaagguaua

SEQ ID NO: 499538 - RNA, 22 nt, Artificial Sequence
  Synthetic
uaaaauagauacacaagguaua

SEQ ID NO: 499539 - RNA, 23 nt, Artificial Sequence
  Synthetic
cuaaaauagauacacaagguaua

SEQ ID NO: 499540 - RNA, 24 nt, Artificial Sequence
  Synthetic
ccuaaaauagauacacaagguaua

SEQ ID NO: 499541 - RNA, 18 nt, Artificial Sequence
  Synthetic
aaagugcagggagguaua

SEQ ID NO: 499542 - RNA, 19 nt, Artificial Sequence
  Synthetic
uaaagugcagggagguaua

SEQ ID NO: 499543 - RNA, 20 nt, Artificial Sequence
  Synthetic
uuaaagugcagggagguaua

SEQ ID NO: 499544 - RNA, 21 nt, Artificial Sequence
  Synthetic
auuaaagugcagggagguaua

SEQ ID NO: 499545 - RNA, 22 nt, Artificial Sequence
  Synthetic
aauuaaagugcagggagguaua

SEQ ID NO: 499546 - RNA, 23 nt, Artificial Sequence
  Synthetic
caauuaaagugcagggagguaua

SEQ ID NO: 499547 - RNA, 24 nt, Artificial Sequence
  Synthetic
ucaauuaaagugcagggagguaua

SEQ ID NO: 499548 - RNA, 18 nt, Artificial Sequence
  Synthetic
caaagaaacugagguaua

SEQ ID NO: 499549 - RNA, 19 nt, Artificial Sequence
  Synthetic
acaaagaaacugagguaua

SEQ ID NO: 499550 - RNA, 20 nt, Artificial Sequence
  Synthetic
uacaaagaaacugagguaua

SEQ ID NO: 499551 - RNA, 21 nt, Artificial Sequence
  Synthetic
auacaaagaaacugagguaua

SEQ ID NO: 499552 - RNA, 22 nt, Artificial Sequence
  Synthetic
gauacaaagaaacugagguaua

SEQ ID NO: 499553 - RNA, 23 nt, Artificial Sequence
  Synthetic
ggauacaaagaaacugagguaua

SEQ ID NO: 499554 - RNA, 24 nt, Artificial Sequence
  Synthetic
cggauacaaagaaacugagguaua

SEQ ID NO: 499555 - RNA, 18 nt, Artificial Sequence
  Synthetic
gacgugaugugagguaua

SEQ ID NO: 499556 - RNA, 19 nt, Artificial Sequence
  Synthetic
agacgugaugugagguaua

SEQ ID NO: 499557 - RNA, 20 nt, Artificial Sequence
  Synthetic
uagacgugaugugagguaua

SEQ ID NO: 499558 - RNA, 21 nt, Artificial Sequence
  Synthetic
guagacgugaugugagguaua

SEQ ID NO: 499559 - RNA, 22 nt, Artificial Sequence
  Synthetic
aguagacgugaugugagguaua

SEQ ID NO: 499560 - RNA, 23 nt, Artificial Sequence
  Synthetic
uaguagacgugaugugagguaua

SEQ ID NO: 499561 - RNA, 24 nt, Artificial Sequence
  Synthetic
auaguagacgugaugugagguaua

SEQ ID NO: 499562 - RNA, 18 nt, Artificial Sequence
  Synthetic
uauuaugugguagguaua

SEQ ID NO: 499563 - RNA, 19 nt, Artificial Sequence
  Synthetic
uuauuaugugguagguaua

SEQ ID NO: 499564 - RNA, 20 nt, Artificial Sequence
  Synthetic
uuuauuaugugguagguaua

SEQ ID NO: 499565 - RNA, 21 nt, Artificial Sequence
  Synthetic
auuuauuaugugguagguaua

SEQ ID NO: 499566 - RNA, 22 nt, Artificial Sequence
  Synthetic
uauuuauuaugugguagguaua

SEQ ID NO: 499567 - RNA, 23 nt, Artificial Sequence
  Synthetic
auauuuauuaugugguagguaua

SEQ ID NO: 499568 - RNA, 24 nt, Artificial Sequence
  Synthetic
aauauuuauuaugugguagguaua

SEQ ID NO: 499569 - RNA, 18 nt, Artificial Sequence
  Synthetic
uaauaacauagcgguaua

SEQ ID NO: 499570 - RNA, 19 nt, Artificial Sequence
  Synthetic
uuaauaacauagcgguaua

SEQ ID NO: 499571 - RNA, 20 nt, Artificial Sequence
  Synthetic
auuaauaacauagcgguaua

SEQ ID NO: 499572 - RNA, 21 nt, Artificial Sequence
  Synthetic
gauuaauaacauagcgguaua

SEQ ID NO: 499573 - RNA, 22 nt, Artificial Sequence
  Synthetic
agauuaauaacauagcgguaua

SEQ ID NO: 499574 - RNA, 23 nt, Artificial Sequence
  Synthetic
aagauuaauaacauagcgguaua

SEQ ID NO: 499575 - RNA, 24 nt, Artificial Sequence
  Synthetic
gaagauuaauaacauagcgguaua

SEQ ID NO: 499576 - RNA, 18 nt, Artificial Sequence
  Synthetic
gcuaauuucccugguaua

SEQ ID NO: 499577 - RNA, 19 nt, Artificial Sequence
  Synthetic
ggcuaauuucccugguaua

SEQ ID NO: 499578 - RNA, 20 nt, Artificial Sequence
  Synthetic
uggcuaauuucccugguaua

SEQ ID NO: 499579 - RNA, 21 nt, Artificial Sequence
  Synthetic
auggcuaauuucccugguaua

SEQ ID NO: 499580 - RNA, 22 nt, Artificial Sequence
  Synthetic
aauggcuaauuucccugguaua

SEQ ID NO: 499581 - RNA, 23 nt, Artificial Sequence
  Synthetic
uaauggcuaauuucccugguaua

SEQ ID NO: 499582 - RNA, 24 nt, Artificial Sequence
  Synthetic
guaauggcuaauuucccugguaua

SEQ ID NO: 499583 - RNA, 18 nt, Artificial Sequence
  Synthetic
aguaaagugcaauguaua

SEQ ID NO: 499584 - RNA, 19 nt, Artificial Sequence
  Synthetic
uaguaaagugcaauguaua

SEQ ID NO: 499585 - RNA, 20 nt, Artificial Sequence
  Synthetic
cuaguaaagugcaauguaua

SEQ ID NO: 499586 - RNA, 21 nt, Artificial Sequence
  Synthetic
acuaguaaagugcaauguaua

SEQ ID NO: 499587 - RNA, 22 nt, Artificial Sequence
  Synthetic
aacuaguaaagugcaauguaua

SEQ ID NO: 499588 - RNA, 23 nt, Artificial Sequence
  Synthetic
caacuaguaaagugcaauguaua

SEQ ID NO: 499589 - RNA, 24 nt, Artificial Sequence
  Synthetic
acaacuaguaaagugcaauguaua

SEQ ID NO: 499590 - RNA, 18 nt, Artificial Sequence
  Synthetic
aguucaauuuaauguaua

SEQ ID NO: 499591 - RNA, 19 nt, Artificial Sequence
  Synthetic
aaguucaauuuaauguaua

SEQ ID NO: 499592 - RNA, 20 nt, Artificial Sequence
  Synthetic
caaguucaauuuaauguaua

SEQ ID NO: 499593 - RNA, 21 nt, Artificial Sequence
  Synthetic
acaaguucaauuuaauguaua

SEQ ID NO: 499594 - RNA, 22 nt, Artificial Sequence
  Synthetic
uacaaguucaauuuaauguaua

SEQ ID NO: 499595 - RNA, 23 nt, Artificial Sequence
  Synthetic
uuacaaguucaauuuaauguaua

SEQ ID NO: 499596 - RNA, 24 nt, Artificial Sequence
  Synthetic
uuuacaaguucaauuuaauguaua

SEQ ID NO: 499597 - RNA, 18 nt, Artificial Sequence
  Synthetic
cuaaauacaacauguaua

SEQ ID NO: 499598 - RNA, 19 nt, Artificial Sequence
  Synthetic
ucuaaauacaacauguaua

SEQ ID NO: 499599 - RNA, 20 nt, Artificial Sequence
  Synthetic
uucuaaauacaacauguaua

SEQ ID NO: 499600 - RNA, 21 nt, Artificial Sequence
  Synthetic
auucuaaauacaacauguaua

SEQ ID NO: 499601 - RNA, 22 nt, Artificial Sequence
  Synthetic
aauucuaaauacaacauguaua

SEQ ID NO: 499602 - RNA, 23 nt, Artificial Sequence
  Synthetic
gaauucuaaauacaacauguaua

SEQ ID NO: 499603 - RNA, 24 nt, Artificial Sequence
  Synthetic
ggaauucuaaauacaacauguaua

SEQ ID NO: 499604 - RNA, 18 nt, Artificial Sequence
  Synthetic
gacucauauauauguaua

SEQ ID NO: 499605 - RNA, 19 nt, Artificial Sequence
  Synthetic
ggacucauauauauguaua

SEQ ID NO: 499606 - RNA, 20 nt, Artificial Sequence
  Synthetic
uggacucauauauauguaua

SEQ ID NO: 499607 - RNA, 21 nt, Artificial Sequence
  Synthetic
guggacucauauauauguaua

SEQ ID NO: 499608 - RNA, 22 nt, Artificial Sequence
  Synthetic
uguggacucauauauauguaua

SEQ ID NO: 499609 - RNA, 23 nt, Artificial Sequence
  Synthetic
auguggacucauauauauguaua

SEQ ID NO: 499610 - RNA, 24 nt, Artificial Sequence
  Synthetic
aauguggacucauauauauguaua

SEQ ID NO: 499611 - RNA, 18 nt, Artificial Sequence
  Synthetic
aaggugacaguauguaua

SEQ ID NO: 499612 - RNA, 19 nt, Artificial Sequence
  Synthetic
caaggugacaguauguaua

SEQ ID NO: 499613 - RNA, 20 nt, Artificial Sequence
  Synthetic
gcaaggugacaguauguaua

SEQ ID NO: 499614 - RNA, 21 nt, Artificial Sequence
  Synthetic
ugcaaggugacaguauguaua

SEQ ID NO: 499615 - RNA, 22 nt, Artificial Sequence
  Synthetic
uugcaaggugacaguauguaua

SEQ ID NO: 499616 - RNA, 23 nt, Artificial Sequence
  Synthetic
uuugcaaggugacaguauguaua

SEQ ID NO: 499617 - RNA, 24 nt, Artificial Sequence
  Synthetic
auuugcaaggugacaguauguaua

SEQ ID NO: 499618 - RNA, 18 nt, Artificial Sequence
  Synthetic
gcuucagauguauguaua

SEQ ID NO: 499619 - RNA, 19 nt, Artificial Sequence
  Synthetic
ggcuucagauguauguaua

SEQ ID NO: 499620 - RNA, 20 nt, Artificial Sequence
  Synthetic
uggcuucagauguauguaua

SEQ ID NO: 499621 - RNA, 21 nt, Artificial Sequence
  Synthetic
uuggcuucagauguauguaua

SEQ ID NO: 499622 - RNA, 22 nt, Artificial Sequence
  Synthetic
auuggcuucagauguauguaua

SEQ ID NO: 499623 - RNA, 23 nt, Artificial Sequence
  Synthetic
gauuggcuucagauguauguaua

SEQ ID NO: 499624 - RNA, 24 nt, Artificial Sequence
  Synthetic
agauuggcuucagauguauguaua

SEQ ID NO: 499625 - RNA, 18 nt, Artificial Sequence
  Synthetic
auaacaguuguauguaua

SEQ ID NO: 499626 - RNA, 19 nt, Artificial Sequence
  Synthetic
uauaacaguuguauguaua

SEQ ID NO: 499627 - RNA, 20 nt, Artificial Sequence
  Synthetic
auauaacaguuguauguaua

SEQ ID NO: 499628 - RNA, 21 nt, Artificial Sequence
  Synthetic
uauauaacaguuguauguaua

SEQ ID NO: 499629 - RNA, 22 nt, Artificial Sequence
  Synthetic
auauauaacaguuguauguaua

SEQ ID NO: 499630 - RNA, 23 nt, Artificial Sequence
  Synthetic
gauauauaacaguuguauguaua

SEQ ID NO: 499631 - RNA, 24 nt, Artificial Sequence
  Synthetic
ugauauauaacaguuguauguaua

SEQ ID NO: 499632 - RNA, 18 nt, Artificial Sequence
  Synthetic
uaauuaguauucuguaua

SEQ ID NO: 499633 - RNA, 19 nt, Artificial Sequence
  Synthetic
auaauuaguauucuguaua

SEQ ID NO: 499634 - RNA, 20 nt, Artificial Sequence
  Synthetic
uauaauuaguauucuguaua

SEQ ID NO: 499635 - RNA, 21 nt, Artificial Sequence
  Synthetic
guauaauuaguauucuguaua

SEQ ID NO: 499636 - RNA, 22 nt, Artificial Sequence
  Synthetic
uguauaauuaguauucuguaua

SEQ ID NO: 499637 - RNA, 23 nt, Artificial Sequence
  Synthetic
guguauaauuaguauucuguaua

SEQ ID NO: 499638 - RNA, 24 nt, Artificial Sequence
  Synthetic
uguguauaauuaguauucuguaua

SEQ ID NO: 499639 - RNA, 18 nt, Artificial Sequence
  Synthetic
acaaacugguucuguaua

SEQ ID NO: 499640 - RNA, 19 nt, Artificial Sequence
  Synthetic
gacaaacugguucuguaua

SEQ ID NO: 499641 - RNA, 20 nt, Artificial Sequence
  Synthetic
ggacaaacugguucuguaua

SEQ ID NO: 499642 - RNA, 21 nt, Artificial Sequence
  Synthetic
aggacaaacugguucuguaua

SEQ ID NO: 499643 - RNA, 22 nt, Artificial Sequence
  Synthetic
aaggacaaacugguucuguaua

SEQ ID NO: 499644 - RNA, 23 nt, Artificial Sequence
  Synthetic
caaggacaaacugguucuguaua

SEQ ID NO: 499645 - RNA, 24 nt, Artificial Sequence
  Synthetic
gcaaggacaaacugguucuguaua

SEQ ID NO: 499646 - RNA, 18 nt, Artificial Sequence
  Synthetic
uucccucaccaguguaua

SEQ ID NO: 499647 - RNA, 19 nt, Artificial Sequence
  Synthetic
auucccucaccaguguaua

SEQ ID NO: 499648 - RNA, 20 nt, Artificial Sequence
  Synthetic
uauucccucaccaguguaua

SEQ ID NO: 499649 - RNA, 21 nt, Artificial Sequence
  Synthetic
auauucccucaccaguguaua

SEQ ID NO: 499650 - RNA, 22 nt, Artificial Sequence
  Synthetic
cauauucccucaccaguguaua

SEQ ID NO: 499651 - RNA, 23 nt, Artificial Sequence
  Synthetic
ucauauucccucaccaguguaua

SEQ ID NO: 499652 - RNA, 24 nt, Artificial Sequence
  Synthetic
aucauauucccucaccaguguaua

SEQ ID NO: 499653 - RNA, 18 nt, Artificial Sequence
  Synthetic
aacauuuuugaguguaua

SEQ ID NO: 499654 - RNA, 19 nt, Artificial Sequence
  Synthetic
aaacauuuuugaguguaua

SEQ ID NO: 499655 - RNA, 20 nt, Artificial Sequence
  Synthetic
aaaacauuuuugaguguaua

SEQ ID NO: 499656 - RNA, 21 nt, Artificial Sequence
  Synthetic
aaaaacauuuuugaguguaua

SEQ ID NO: 499657 - RNA, 22 nt, Artificial Sequence
  Synthetic
aaaaaacauuuuugaguguaua

SEQ ID NO: 499658 - RNA, 23 nt, Artificial Sequence
  Synthetic
gaaaaaacauuuuugaguguaua

SEQ ID NO: 499659 - RNA, 24 nt, Artificial Sequence
  Synthetic
ugaaaaaacauuuuugaguguaua

SEQ ID NO: 499660 - RNA, 18 nt, Artificial Sequence
  Synthetic
aaaacugguagguguaua

SEQ ID NO: 499661 - RNA, 19 nt, Artificial Sequence
  Synthetic
caaaacugguagguguaua

SEQ ID NO: 499662 - RNA, 20 nt, Artificial Sequence
  Synthetic
gcaaaacugguagguguaua

SEQ ID NO: 499663 - RNA, 21 nt, Artificial Sequence
  Synthetic
ugcaaaacugguagguguaua

SEQ ID NO: 499664 - RNA, 22 nt, Artificial Sequence
  Synthetic
gugcaaaacugguagguguaua

SEQ ID NO: 499665 - RNA, 23 nt, Artificial Sequence
  Synthetic
agugcaaaacugguagguguaua

SEQ ID NO: 499666 - RNA, 24 nt, Artificial Sequence
  Synthetic
uagugcaaaacugguagguguaua

SEQ ID NO: 499667 - RNA, 18 nt, Artificial Sequence
  Synthetic
uacagcccucgguguaua

SEQ ID NO: 499668 - RNA, 19 nt, Artificial Sequence
  Synthetic
guacagcccucgguguaua

SEQ ID NO: 499669 - RNA, 20 nt, Artificial Sequence
  Synthetic
aguacagcccucgguguaua

SEQ ID NO: 499670 - RNA, 21 nt, Artificial Sequence
  Synthetic
gaguacagcccucgguguaua

SEQ ID NO: 499671 - RNA, 22 nt, Artificial Sequence
  Synthetic
ggaguacagcccucgguguaua

SEQ ID NO: 499672 - RNA, 23 nt, Artificial Sequence
  Synthetic
aggaguacagcccucgguguaua

SEQ ID NO: 499673 - RNA, 24 nt, Artificial Sequence
  Synthetic
gaggaguacagcccucgguguaua

SEQ ID NO: 499674 - RNA, 18 nt, Artificial Sequence
  Synthetic
gaaaaguauacuuguaua

SEQ ID NO: 499675 - RNA, 19 nt, Artificial Sequence
  Synthetic
ggaaaaguauacuuguaua

SEQ ID NO: 499676 - RNA, 20 nt, Artificial Sequence
  Synthetic
aggaaaaguauacuuguaua

SEQ ID NO: 499677 - RNA, 21 nt, Artificial Sequence
  Synthetic
aaggaaaaguauacuuguaua

SEQ ID NO: 499678 - RNA, 22 nt, Artificial Sequence
  Synthetic
uaaggaaaaguauacuuguaua

SEQ ID NO: 499679 - RNA, 23 nt, Artificial Sequence
  Synthetic
cuaaggaaaaguauacuuguaua

SEQ ID NO: 499680 - RNA, 24 nt, Artificial Sequence
  Synthetic
ccuaaggaaaaguauacuuguaua

SEQ ID NO: 499681 - RNA, 18 nt, Artificial Sequence
  Synthetic
aaucaacaguguuguaua

SEQ ID NO: 499682 - RNA, 19 nt, Artificial Sequence
  Synthetic
aaaucaacaguguuguaua

SEQ ID NO: 499683 - RNA, 20 nt, Artificial Sequence
  Synthetic
aaaaucaacaguguuguaua

SEQ ID NO: 499684 - RNA, 21 nt, Artificial Sequence
  Synthetic
aaaaaucaacaguguuguaua

SEQ ID NO: 499685 - RNA, 22 nt, Artificial Sequence
  Synthetic
aaaaaaucaacaguguuguaua

SEQ ID NO: 499686 - RNA, 23 nt, Artificial Sequence
  Synthetic
aaaaaaaucaacaguguuguaua

SEQ ID NO: 499687 - RNA, 24 nt, Artificial Sequence
  Synthetic
aaaaaaaaucaacaguguuguaua

SEQ ID NO: 499688 - RNA, 18 nt, Artificial Sequence
  Synthetic
auguguuacuuuuguaua

SEQ ID NO: 499689 - RNA, 19 nt, Artificial Sequence
  Synthetic
cauguguuacuuuuguaua

SEQ ID NO: 499690 - RNA, 20 nt, Artificial Sequence
  Synthetic
gcauguguuacuuuuguaua

SEQ ID NO: 499691 - RNA, 21 nt, Artificial Sequence
  Synthetic
agcauguguuacuuuuguaua

SEQ ID NO: 499692 - RNA, 22 nt, Artificial Sequence
  Synthetic
gagcauguguuacuuuuguaua

SEQ ID NO: 499693 - RNA, 23 nt, Artificial Sequence
  Synthetic
ugagcauguguuacuuuuguaua

SEQ ID NO: 499694 - RNA, 24 nt, Artificial Sequence
  Synthetic
augagcauguguuacuuuuguaua

SEQ ID NO: 499695 - RNA, 18 nt, Artificial Sequence
  Synthetic
uucuagaaaaaaauuaua

SEQ ID NO: 499696 - RNA, 19 nt, Artificial Sequence
  Synthetic
cuucuagaaaaaaauuaua

SEQ ID NO: 499697 - RNA, 20 nt, Artificial Sequence
  Synthetic
acuucuagaaaaaaauuaua

SEQ ID NO: 499698 - RNA, 21 nt, Artificial Sequence
  Synthetic
aacuucuagaaaaaaauuaua

SEQ ID NO: 499699 - RNA, 22 nt, Artificial Sequence
  Synthetic
aaacuucuagaaaaaaauuaua

SEQ ID NO: 499700 - RNA, 23 nt, Artificial Sequence
  Synthetic
aaaacuucuagaaaaaaauuaua

SEQ ID NO: 499701 - RNA, 24 nt, Artificial Sequence
  Synthetic
gaaaacuucuagaaaaaaauuaua

SEQ ID NO: 499702 - RNA, 18 nt, Artificial Sequence
  Synthetic
uguauguuaaaaauuaua

SEQ ID NO: 499703 - RNA, 19 nt, Artificial Sequence
  Synthetic
cuguauguuaaaaauuaua

SEQ ID NO: 499704 - RNA, 20 nt, Artificial Sequence
  Synthetic
ccuguauguuaaaaauuaua

SEQ ID NO: 499705 - RNA, 21 nt, Artificial Sequence
  Synthetic
uccuguauguuaaaaauuaua

SEQ ID NO: 499706 - RNA, 22 nt, Artificial Sequence
  Synthetic
uuccuguauguuaaaaauuaua

SEQ ID NO: 499707 - RNA, 23 nt, Artificial Sequence
  Synthetic
uuuccuguauguuaaaaauuaua

SEQ ID NO: 499708 - RNA, 24 nt, Artificial Sequence
  Synthetic
auuuccuguauguuaaaaauuaua

SEQ ID NO: 499709 - RNA, 18 nt, Artificial Sequence
  Synthetic
acauccaauaaaauuaua

SEQ ID NO: 499710 - RNA, 19 nt, Artificial Sequence
  Synthetic
gacauccaauaaaauuaua

SEQ ID NO: 499711 - RNA, 20 nt, Artificial Sequence
  Synthetic
ugacauccaauaaaauuaua

SEQ ID NO: 499712 - RNA, 21 nt, Artificial Sequence
  Synthetic
augacauccaauaaaauuaua

SEQ ID NO: 499713 - RNA, 22 nt, Artificial Sequence
  Synthetic
aaugacauccaauaaaauuaua

SEQ ID NO: 499714 - RNA, 23 nt, Artificial Sequence
  Synthetic
caaugacauccaauaaaauuaua

SEQ ID NO: 499715 - RNA, 24 nt, Artificial Sequence
  Synthetic
acaaugacauccaauaaaauuaua

SEQ ID NO: 499716 - RNA, 18 nt, Artificial Sequence
  Synthetic
gaauugguaccaauuaua

SEQ ID NO: 499717 - RNA, 19 nt, Artificial Sequence
  Synthetic
agaauugguaccaauuaua

SEQ ID NO: 499718 - RNA, 20 nt, Artificial Sequence
  Synthetic
aagaauugguaccaauuaua

SEQ ID NO: 499719 - RNA, 21 nt, Artificial Sequence
  Synthetic
gaagaauugguaccaauuaua

SEQ ID NO: 499720 - RNA, 22 nt, Artificial Sequence
  Synthetic
agaagaauugguaccaauuaua

SEQ ID NO: 499721 - RNA, 23 nt, Artificial Sequence
  Synthetic
aagaagaauugguaccaauuaua

SEQ ID NO: 499722 - RNA, 24 nt, Artificial Sequence
  Synthetic
aaagaagaauugguaccaauuaua

SEQ ID NO: 499723 - RNA, 18 nt, Artificial Sequence
  Synthetic
ugaauaauacacauuaua

SEQ ID NO: 499724 - RNA, 19 nt, Artificial Sequence
  Synthetic
augaauaauacacauuaua

SEQ ID NO: 499725 - RNA, 20 nt, Artificial Sequence
  Synthetic
uaugaauaauacacauuaua

SEQ ID NO: 499726 - RNA, 21 nt, Artificial Sequence
  Synthetic
auaugaauaauacacauuaua

SEQ ID NO: 499727 - RNA, 22 nt, Artificial Sequence
  Synthetic
uauaugaauaauacacauuaua

SEQ ID NO: 499728 - RNA, 23 nt, Artificial Sequence
  Synthetic
auauaugaauaauacacauuaua

SEQ ID NO: 499729 - RNA, 24 nt, Artificial Sequence
  Synthetic
aauauaugaauaauacacauuaua

SEQ ID NO: 499730 - RNA, 18 nt, Artificial Sequence
  Synthetic
aucucaaagcacauuaua

SEQ ID NO: 499731 - RNA, 19 nt, Artificial Sequence
  Synthetic
uaucucaaagcacauuaua

SEQ ID NO: 499732 - RNA, 20 nt, Artificial Sequence
  Synthetic
auaucucaaagcacauuaua

SEQ ID NO: 499733 - RNA, 21 nt, Artificial Sequence
  Synthetic
uauaucucaaagcacauuaua

SEQ ID NO: 499734 - RNA, 22 nt, Artificial Sequence
  Synthetic
auauaucucaaagcacauuaua

SEQ ID NO: 499735 - RNA, 23 nt, Artificial Sequence
  Synthetic
uauauaucucaaagcacauuaua

SEQ ID NO: 499736 - RNA, 24 nt, Artificial Sequence
  Synthetic
auauauaucucaaagcacauuaua

SEQ ID NO: 499737 - RNA, 18 nt, Artificial Sequence
  Synthetic
gaauaugaauacauuaua

SEQ ID NO: 499738 - RNA, 19 nt, Artificial Sequence
  Synthetic
ggaauaugaauacauuaua

SEQ ID NO: 499739 - RNA, 20 nt, Artificial Sequence
  Synthetic
uggaauaugaauacauuaua

SEQ ID NO: 499740 - RNA, 21 nt, Artificial Sequence
  Synthetic
guggaauaugaauacauuaua

SEQ ID NO: 499741 - RNA, 22 nt, Artificial Sequence
  Synthetic
aguggaauaugaauacauuaua

SEQ ID NO: 499742 - RNA, 23 nt, Artificial Sequence
  Synthetic
caguggaauaugaauacauuaua

SEQ ID NO: 499743 - RNA, 24 nt, Artificial Sequence
  Synthetic
ccaguggaauaugaauacauuaua

SEQ ID NO: 499744 - RNA, 18 nt, Artificial Sequence
  Synthetic
cgagcuguuuacauuaua

SEQ ID NO: 499745 - RNA, 19 nt, Artificial Sequence
  Synthetic
ccgagcuguuuacauuaua

SEQ ID NO: 499746 - RNA, 20 nt, Artificial Sequence
  Synthetic
accgagcuguuuacauuaua

SEQ ID NO: 499747 - RNA, 21 nt, Artificial Sequence
  Synthetic
aaccgagcuguuuacauuaua

SEQ ID NO: 499748 - RNA, 22 nt, Artificial Sequence
  Synthetic
uaaccgagcuguuuacauuaua

SEQ ID NO: 499749 - RNA, 23 nt, Artificial Sequence
  Synthetic
cuaaccgagcuguuuacauuaua

SEQ ID NO: 499750 - RNA, 24 nt, Artificial Sequence
  Synthetic
ccuaaccgagcuguuuacauuaua

SEQ ID NO: 499751 - RNA, 18 nt, Artificial Sequence
  Synthetic
gaccucuuucccauuaua

SEQ ID NO: 499752 - RNA, 19 nt, Artificial Sequence
  Synthetic
ugaccucuuucccauuaua

SEQ ID NO: 499753 - RNA, 20 nt, Artificial Sequence
  Synthetic
gugaccucuuucccauuaua

SEQ ID NO: 499754 - RNA, 21 nt, Artificial Sequence
  Synthetic
agugaccucuuucccauuaua

SEQ ID NO: 499755 - RNA, 22 nt, Artificial Sequence
  Synthetic
aagugaccucuuucccauuaua

SEQ ID NO: 499756 - RNA, 23 nt, Artificial Sequence
  Synthetic
aaagugaccucuuucccauuaua

SEQ ID NO: 499757 - RNA, 24 nt, Artificial Sequence
  Synthetic
uaaagugaccucuuucccauuaua

SEQ ID NO: 499758 - RNA, 18 nt, Artificial Sequence
  Synthetic
aaauaucaguccauuaua

SEQ ID NO: 499759 - RNA, 19 nt, Artificial Sequence
  Synthetic
caaauaucaguccauuaua

SEQ ID NO: 499760 - RNA, 20 nt, Artificial Sequence
  Synthetic
ucaaauaucaguccauuaua

SEQ ID NO: 499761 - RNA, 21 nt, Artificial Sequence
  Synthetic
uucaaauaucaguccauuaua

SEQ ID NO: 499762 - RNA, 22 nt, Artificial Sequence
  Synthetic
auucaaauaucaguccauuaua

SEQ ID NO: 499763 - RNA, 23 nt, Artificial Sequence
  Synthetic
aauucaaauaucaguccauuaua

SEQ ID NO: 499764 - RNA, 24 nt, Artificial Sequence
  Synthetic
uaauucaaauaucaguccauuaua

SEQ ID NO: 499765 - RNA, 18 nt, Artificial Sequence
  Synthetic
aaugagaagagcauuaua

SEQ ID NO: 499766 - RNA, 19 nt, Artificial Sequence
  Synthetic
gaaugagaagagcauuaua

SEQ ID NO: 499767 - RNA, 20 nt, Artificial Sequence
  Synthetic
agaaugagaagagcauuaua

SEQ ID NO: 499768 - RNA, 21 nt, Artificial Sequence
  Synthetic
gagaaugagaagagcauuaua

SEQ ID NO: 499769 - RNA, 22 nt, Artificial Sequence
  Synthetic
agagaaugagaagagcauuaua

SEQ ID NO: 499770 - RNA, 23 nt, Artificial Sequence
  Synthetic
uagagaaugagaagagcauuaua

SEQ ID NO: 499771 - RNA, 24 nt, Artificial Sequence
  Synthetic
cuagagaaugagaagagcauuaua

SEQ ID NO: 499772 - RNA, 18 nt, Artificial Sequence
  Synthetic
cucaugcaccucauuaua

SEQ ID NO: 499773 - RNA, 19 nt, Artificial Sequence
  Synthetic
gcucaugcaccucauuaua

SEQ ID NO: 499774 - RNA, 20 nt, Artificial Sequence
  Synthetic
agcucaugcaccucauuaua

SEQ ID NO: 499775 - RNA, 21 nt, Artificial Sequence
  Synthetic
cagcucaugcaccucauuaua

SEQ ID NO: 499776 - RNA, 22 nt, Artificial Sequence
  Synthetic
acagcucaugcaccucauuaua

SEQ ID NO: 499777 - RNA, 23 nt, Artificial Sequence
  Synthetic
aacagcucaugcaccucauuaua

SEQ ID NO: 499778 - RNA, 24 nt, Artificial Sequence
  Synthetic
aaacagcucaugcaccucauuaua

SEQ ID NO: 499779 - RNA, 18 nt, Artificial Sequence
  Synthetic
acuuaucuuuucauuaua

SEQ ID NO: 499780 - RNA, 19 nt, Artificial Sequence
  Synthetic
cacuuaucuuuucauuaua

SEQ ID NO: 499781 - RNA, 20 nt, Artificial Sequence
  Synthetic
ucacuuaucuuuucauuaua

SEQ ID NO: 499782 - RNA, 21 nt, Artificial Sequence
  Synthetic
gucacuuaucuuuucauuaua

SEQ ID NO: 499783 - RNA, 22 nt, Artificial Sequence
  Synthetic
agucacuuaucuuuucauuaua

SEQ ID NO: 499784 - RNA, 23 nt, Artificial Sequence
  Synthetic
uagucacuuaucuuuucauuaua

SEQ ID NO: 499785 - RNA, 24 nt, Artificial Sequence
  Synthetic
auagucacuuaucuuuucauuaua

SEQ ID NO: 499786 - RNA, 18 nt, Artificial Sequence
  Synthetic
uuaugaaaaaugauuaua

SEQ ID NO: 499787 - RNA, 19 nt, Artificial Sequence
  Synthetic
cuuaugaaaaaugauuaua

SEQ ID NO: 499788 - RNA, 20 nt, Artificial Sequence
  Synthetic
gcuuaugaaaaaugauuaua

SEQ ID NO: 499789 - RNA, 21 nt, Artificial Sequence
  Synthetic
agcuuaugaaaaaugauuaua

SEQ ID NO: 499790 - RNA, 22 nt, Artificial Sequence
  Synthetic
uagcuuaugaaaaaugauuaua

SEQ ID NO: 499791 - RNA, 23 nt, Artificial Sequence
  Synthetic
uuagcuuaugaaaaaugauuaua

SEQ ID NO: 499792 - RNA, 24 nt, Artificial Sequence
  Synthetic
guuagcuuaugaaaaaugauuaua

SEQ ID NO: 499793 - RNA, 18 nt, Artificial Sequence
  Synthetic
cacuguggaaugauuaua

SEQ ID NO: 499794 - RNA, 19 nt, Artificial Sequence
  Synthetic
acacuguggaaugauuaua

SEQ ID NO: 499795 - RNA, 20 nt, Artificial Sequence
  Synthetic
uacacuguggaaugauuaua

SEQ ID NO: 499796 - RNA, 21 nt, Artificial Sequence
  Synthetic
auacacuguggaaugauuaua

SEQ ID NO: 499797 - RNA, 22 nt, Artificial Sequence
  Synthetic
uauacacuguggaaugauuaua

SEQ ID NO: 499798 - RNA, 23 nt, Artificial Sequence
  Synthetic
guauacacuguggaaugauuaua

SEQ ID NO: 499799 - RNA, 24 nt, Artificial Sequence
  Synthetic
uguauacacuguggaaugauuaua

SEQ ID NO: 499800 - RNA, 18 nt, Artificial Sequence
  Synthetic
uuugagaaauugauuaua

SEQ ID NO: 499801 - RNA, 19 nt, Artificial Sequence
  Synthetic
uuuugagaaauugauuaua

SEQ ID NO: 499802 - RNA, 20 nt, Artificial Sequence
  Synthetic
cuuuugagaaauugauuaua

SEQ ID NO: 499803 - RNA, 21 nt, Artificial Sequence
  Synthetic
acuuuugagaaauugauuaua

SEQ ID NO: 499804 - RNA, 22 nt, Artificial Sequence
  Synthetic
uacuuuugagaaauugauuaua

SEQ ID NO: 499805 - RNA, 23 nt, Artificial Sequence
  Synthetic
uuacuuuugagaaauugauuaua

SEQ ID NO: 499806 - RNA, 24 nt, Artificial Sequence
  Synthetic
uuuacuuuugagaaauugauuaua

SEQ ID NO: 499807 - RNA, 18 nt, Artificial Sequence
  Synthetic
guuuacuccucuauuaua

SEQ ID NO: 499808 - RNA, 19 nt, Artificial Sequence
  Synthetic
uguuuacuccucuauuaua

SEQ ID NO: 499809 - RNA, 20 nt, Artificial Sequence
  Synthetic
cuguuuacuccucuauuaua

SEQ ID NO: 499810 - RNA, 21 nt, Artificial Sequence
  Synthetic
acuguuuacuccucuauuaua

SEQ ID NO: 499811 - RNA, 22 nt, Artificial Sequence
  Synthetic
cacuguuuacuccucuauuaua

SEQ ID NO: 499812 - RNA, 23 nt, Artificial Sequence
  Synthetic
acacuguuuacuccucuauuaua

SEQ ID NO: 499813 - RNA, 24 nt, Artificial Sequence
  Synthetic
cacacuguuuacuccucuauuaua

SEQ ID NO: 499814 - RNA, 18 nt, Artificial Sequence
  Synthetic
ucauaaaauucuauuaua

SEQ ID NO: 499815 - RNA, 19 nt, Artificial Sequence
  Synthetic
uucauaaaauucuauuaua

SEQ ID NO: 499816 - RNA, 20 nt, Artificial Sequence
  Synthetic
uuucauaaaauucuauuaua

SEQ ID NO: 499817 - RNA, 21 nt, Artificial Sequence
  Synthetic
guuucauaaaauucuauuaua

SEQ ID NO: 499818 - RNA, 22 nt, Artificial Sequence
  Synthetic
uguuucauaaaauucuauuaua

SEQ ID NO: 499819 - RNA, 23 nt, Artificial Sequence
  Synthetic
uuguuucauaaaauucuauuaua

SEQ ID NO: 499820 - RNA, 24 nt, Artificial Sequence
  Synthetic
auuguuucauaaaauucuauuaua

SEQ ID NO: 499821 - RNA, 18 nt, Artificial Sequence
  Synthetic
auacaaaacaguauuaua

SEQ ID NO: 499822 - RNA, 19 nt, Artificial Sequence
  Synthetic
aauacaaaacaguauuaua

SEQ ID NO: 499823 - RNA, 20 nt, Artificial Sequence
  Synthetic
aaauacaaaacaguauuaua

SEQ ID NO: 499824 - RNA, 21 nt, Artificial Sequence
  Synthetic
aaaauacaaaacaguauuaua

SEQ ID NO: 499825 - RNA, 22 nt, Artificial Sequence
  Synthetic
uaaaauacaaaacaguauuaua

SEQ ID NO: 499826 - RNA, 23 nt, Artificial Sequence
  Synthetic
uuaaaauacaaaacaguauuaua

SEQ ID NO: 499827 - RNA, 24 nt, Artificial Sequence
  Synthetic
auuaaaauacaaaacaguauuaua

SEQ ID NO: 499828 - RNA, 18 nt, Artificial Sequence
  Synthetic
uugaaaugcaguauuaua

SEQ ID NO: 499829 - RNA, 19 nt, Artificial Sequence
  Synthetic
uuugaaaugcaguauuaua

SEQ ID NO: 499830 - RNA, 20 nt, Artificial Sequence
  Synthetic
uuuugaaaugcaguauuaua

SEQ ID NO: 499831 - RNA, 21 nt, Artificial Sequence
  Synthetic
auuuugaaaugcaguauuaua

SEQ ID NO: 499832 - RNA, 22 nt, Artificial Sequence
  Synthetic
gauuuugaaaugcaguauuaua

SEQ ID NO: 499833 - RNA, 23 nt, Artificial Sequence
  Synthetic
agauuuugaaaugcaguauuaua

SEQ ID NO: 499834 - RNA, 24 nt, Artificial Sequence
  Synthetic
gagauuuugaaaugcaguauuaua

SEQ ID NO: 499835 - RNA, 18 nt, Artificial Sequence
  Synthetic
uuuuaaaacauuauuaua

SEQ ID NO: 499836 - RNA, 19 nt, Artificial Sequence
  Synthetic
uuuuuaaaacauuauuaua

SEQ ID NO: 499837 - RNA, 20 nt, Artificial Sequence
  Synthetic
uuuuuuaaaacauuauuaua

SEQ ID NO: 499838 - RNA, 21 nt, Artificial Sequence
  Synthetic
auuuuuuaaaacauuauuaua

SEQ ID NO: 499839 - RNA, 22 nt, Artificial Sequence
  Synthetic
uauuuuuuaaaacauuauuaua

SEQ ID NO: 499840 - RNA, 23 nt, Artificial Sequence
  Synthetic
auauuuuuuaaaacauuauuaua

SEQ ID NO: 499841 - RNA, 24 nt, Artificial Sequence
  Synthetic
uauauuuuuuaaaacauuauuaua

SEQ ID NO: 499842 - RNA, 18 nt, Artificial Sequence
  Synthetic
caagccaggauuauuaua

SEQ ID NO: 499843 - RNA, 19 nt, Artificial Sequence
  Synthetic
ccaagccaggauuauuaua

SEQ ID NO: 499844 - RNA, 20 nt, Artificial Sequence
  Synthetic
accaagccaggauuauuaua

SEQ ID NO: 499845 - RNA, 21 nt, Artificial Sequence
  Synthetic
uaccaagccaggauuauuaua

SEQ ID NO: 499846 - RNA, 22 nt, Artificial Sequence
  Synthetic
cuaccaagccaggauuauuaua

SEQ ID NO: 499847 - RNA, 23 nt, Artificial Sequence
  Synthetic
ucuaccaagccaggauuauuaua

SEQ ID NO: 499848 - RNA, 24 nt, Artificial Sequence
  Synthetic
aucuaccaagccaggauuauuaua

SEQ ID NO: 499849 - RNA, 18 nt, Artificial Sequence
  Synthetic
acauuacaucuuauuaua

SEQ ID NO: 499850 - RNA, 19 nt, Artificial Sequence
  Synthetic
aacauuacaucuuauuaua

SEQ ID NO: 499851 - RNA, 20 nt, Artificial Sequence
  Synthetic
uaacauuacaucuuauuaua

SEQ ID NO: 499852 - RNA, 21 nt, Artificial Sequence
  Synthetic
auaacauuacaucuuauuaua

SEQ ID NO: 499853 - RNA, 22 nt, Artificial Sequence
  Synthetic
cauaacauuacaucuuauuaua

SEQ ID NO: 499854 - RNA, 23 nt, Artificial Sequence
  Synthetic
ccauaacauuacaucuuauuaua

SEQ ID NO: 499855 - RNA, 24 nt, Artificial Sequence
  Synthetic
uccauaacauuacaucuuauuaua

SEQ ID NO: 499856 - RNA, 18 nt, Artificial Sequence
  Synthetic
aggcuaggauuuauuaua

SEQ ID NO: 499857 - RNA, 19 nt, Artificial Sequence
  Synthetic
gaggcuaggauuuauuaua

SEQ ID NO: 499858 - RNA, 20 nt, Artificial Sequence
  Synthetic
agaggcuaggauuuauuaua

SEQ ID NO: 499859 - RNA, 21 nt, Artificial Sequence
  Synthetic
cagaggcuaggauuuauuaua

SEQ ID NO: 499860 - RNA, 22 nt, Artificial Sequence
  Synthetic
gcagaggcuaggauuuauuaua

SEQ ID NO: 499861 - RNA, 23 nt, Artificial Sequence
  Synthetic
agcagaggcuaggauuuauuaua

SEQ ID NO: 499862 - RNA, 24 nt, Artificial Sequence
  Synthetic
gagcagaggcuaggauuuauuaua

SEQ ID NO: 499863 - RNA, 18 nt, Artificial Sequence
  Synthetic
aagagaaaguuuauuaua

SEQ ID NO: 499864 - RNA, 19 nt, Artificial Sequence
  Synthetic
caagagaaaguuuauuaua

SEQ ID NO: 499865 - RNA, 20 nt, Artificial Sequence
  Synthetic
ucaagagaaaguuuauuaua

SEQ ID NO: 499866 - RNA, 21 nt, Artificial Sequence
  Synthetic
cucaagagaaaguuuauuaua

SEQ ID NO: 499867 - RNA, 22 nt, Artificial Sequence
  Synthetic
ucucaagagaaaguuuauuaua

SEQ ID NO: 499868 - RNA, 23 nt, Artificial Sequence
  Synthetic
aucucaagagaaaguuuauuaua

SEQ ID NO: 499869 - RNA, 24 nt, Artificial Sequence
  Synthetic
aaucucaagagaaaguuuauuaua

SEQ ID NO: 499870 - RNA, 18 nt, Artificial Sequence
  Synthetic
uaguauccgaaacuuaua

SEQ ID NO: 499871 - RNA, 19 nt, Artificial Sequence
  Synthetic
auaguauccgaaacuuaua

SEQ ID NO: 499872 - RNA, 20 nt, Artificial Sequence
  Synthetic
cauaguauccgaaacuuaua

SEQ ID NO: 499873 - RNA, 21 nt, Artificial Sequence
  Synthetic
ucauaguauccgaaacuuaua

SEQ ID NO: 499874 - RNA, 22 nt, Artificial Sequence
  Synthetic
uucauaguauccgaaacuuaua

SEQ ID NO: 499875 - RNA, 23 nt, Artificial Sequence
  Synthetic
auucauaguauccgaaacuuaua

SEQ ID NO: 499876 - RNA, 24 nt, Artificial Sequence
  Synthetic
gauucauaguauccgaaacuuaua

SEQ ID NO: 499877 - RNA, 18 nt, Artificial Sequence
  Synthetic
uacaaguucuaacuuaua

SEQ ID NO: 499878 - RNA, 19 nt, Artificial Sequence
  Synthetic
guacaaguucuaacuuaua

SEQ ID NO: 499879 - RNA, 20 nt, Artificial Sequence
  Synthetic
uguacaaguucuaacuuaua

SEQ ID NO: 499880 - RNA, 21 nt, Artificial Sequence
  Synthetic
auguacaaguucuaacuuaua

SEQ ID NO: 499881 - RNA, 22 nt, Artificial Sequence
  Synthetic
aauguacaaguucuaacuuaua

SEQ ID NO: 499882 - RNA, 23 nt, Artificial Sequence
  Synthetic
caauguacaaguucuaacuuaua

SEQ ID NO: 499883 - RNA, 24 nt, Artificial Sequence
  Synthetic
acaauguacaaguucuaacuuaua

SEQ ID NO: 499884 - RNA, 18 nt, Artificial Sequence
  Synthetic
uguuaaaauacgcuuaua

SEQ ID NO: 499885 - RNA, 19 nt, Artificial Sequence
  Synthetic
cuguuaaaauacgcuuaua

SEQ ID NO: 499886 - RNA, 20 nt, Artificial Sequence
  Synthetic
ccuguuaaaauacgcuuaua

SEQ ID NO: 499887 - RNA, 21 nt, Artificial Sequence
  Synthetic
uccuguuaaaauacgcuuaua

SEQ ID NO: 499888 - RNA, 22 nt, Artificial Sequence
  Synthetic
guccuguuaaaauacgcuuaua

SEQ ID NO: 499889 - RNA, 23 nt, Artificial Sequence
  Synthetic
uguccuguuaaaauacgcuuaua

SEQ ID NO: 499890 - RNA, 24 nt, Artificial Sequence
  Synthetic
auguccuguuaaaauacgcuuaua

SEQ ID NO: 499891 - RNA, 18 nt, Artificial Sequence
  Synthetic
uuaauaacuaggcuuaua

SEQ ID NO: 499892 - RNA, 19 nt, Artificial Sequence
  Synthetic
auuaauaacuaggcuuaua

SEQ ID NO: 499893 - RNA, 20 nt, Artificial Sequence
  Synthetic
uauuaauaacuaggcuuaua

SEQ ID NO: 499894 - RNA, 21 nt, Artificial Sequence
  Synthetic
cuauuaauaacuaggcuuaua

SEQ ID NO: 499895 - RNA, 22 nt, Artificial Sequence
  Synthetic
acuauuaauaacuaggcuuaua

SEQ ID NO: 499896 - RNA, 23 nt, Artificial Sequence
  Synthetic
gacuauuaauaacuaggcuuaua

SEQ ID NO: 499897 - RNA, 24 nt, Artificial Sequence
  Synthetic
ugacuauuaauaacuaggcuuaua

SEQ ID NO: 499898 - RNA, 18 nt, Artificial Sequence
  Synthetic
uuguaagacuggcuuaua

SEQ ID NO: 499899 - RNA, 19 nt, Artificial Sequence
  Synthetic
uuuguaagacuggcuuaua

SEQ ID NO: 499900 - RNA, 20 nt, Artificial Sequence
  Synthetic
uuuuguaagacuggcuuaua

SEQ ID NO: 499901 - RNA, 21 nt, Artificial Sequence
  Synthetic
auuuuguaagacuggcuuaua

SEQ ID NO: 499902 - RNA, 22 nt, Artificial Sequence
  Synthetic
cauuuuguaagacuggcuuaua

SEQ ID NO: 499903 - RNA, 23 nt, Artificial Sequence
  Synthetic
gcauuuuguaagacuggcuuaua

SEQ ID NO: 499904 - RNA, 24 nt, Artificial Sequence
  Synthetic
ugcauuuuguaagacuggcuuaua

SEQ ID NO: 499905 - RNA, 18 nt, Artificial Sequence
  Synthetic
uguguaacguggcuuaua

SEQ ID NO: 499906 - RNA, 19 nt, Artificial Sequence
  Synthetic
auguguaacguggcuuaua

SEQ ID NO: 499907 - RNA, 20 nt, Artificial Sequence
  Synthetic
cauguguaacguggcuuaua

SEQ ID NO: 499908 - RNA, 21 nt, Artificial Sequence
  Synthetic
ccauguguaacguggcuuaua

SEQ ID NO: 499909 - RNA, 22 nt, Artificial Sequence
  Synthetic
accauguguaacguggcuuaua

SEQ ID NO: 499910 - RNA, 23 nt, Artificial Sequence
  Synthetic
uaccauguguaacguggcuuaua

SEQ ID NO: 499911 - RNA, 24 nt, Artificial Sequence
  Synthetic
cuaccauguguaacguggcuuaua

SEQ ID NO: 499912 - RNA, 18 nt, Artificial Sequence
  Synthetic
aauaguaucauucuuaua

SEQ ID NO: 499913 - RNA, 19 nt, Artificial Sequence
  Synthetic
uaauaguaucauucuuaua

SEQ ID NO: 499914 - RNA, 20 nt, Artificial Sequence
  Synthetic
auaauaguaucauucuuaua

SEQ ID NO: 499915 - RNA, 21 nt, Artificial Sequence
  Synthetic
uauaauaguaucauucuuaua

SEQ ID NO: 499916 - RNA, 22 nt, Artificial Sequence
  Synthetic
uuauaauaguaucauucuuaua

SEQ ID NO: 499917 - RNA, 23 nt, Artificial Sequence
  Synthetic
uuuauaauaguaucauucuuaua

SEQ ID NO: 499918 - RNA, 24 nt, Artificial Sequence
  Synthetic
uuuuauaauaguaucauucuuaua

SEQ ID NO: 499919 - RNA, 18 nt, Artificial Sequence
  Synthetic
acucuucccuuucuuaua

SEQ ID NO: 499920 - RNA, 19 nt, Artificial Sequence
  Synthetic
uacucuucccuuucuuaua

SEQ ID NO: 499921 - RNA, 20 nt, Artificial Sequence
  Synthetic
uuacucuucccuuucuuaua

SEQ ID NO: 499922 - RNA, 21 nt, Artificial Sequence
  Synthetic
uuuacucuucccuuucuuaua

SEQ ID NO: 499923 - RNA, 22 nt, Artificial Sequence
  Synthetic
uuuuacucuucccuuucuuaua

SEQ ID NO: 499924 - RNA, 23 nt, Artificial Sequence
  Synthetic
auuuuacucuucccuuucuuaua

SEQ ID NO: 499925 - RNA, 24 nt, Artificial Sequence
  Synthetic
cauuuuacucuucccuuucuuaua

SEQ ID NO: 499926 - RNA, 18 nt, Artificial Sequence
  Synthetic
ucaucacacaaaguuaua

SEQ ID NO: 499927 - RNA, 19 nt, Artificial Sequence
  Synthetic
aucaucacacaaaguuaua

SEQ ID NO: 499928 - RNA, 20 nt, Artificial Sequence
  Synthetic
uaucaucacacaaaguuaua

SEQ ID NO: 499929 - RNA, 21 nt, Artificial Sequence
  Synthetic
uuaucaucacacaaaguuaua

SEQ ID NO: 499930 - RNA, 22 nt, Artificial Sequence
  Synthetic
uuuaucaucacacaaaguuaua

SEQ ID NO: 499931 - RNA, 23 nt, Artificial Sequence
  Synthetic
uuuuaucaucacacaaaguuaua

SEQ ID NO: 499932 - RNA, 24 nt, Artificial Sequence
  Synthetic
uuuuuaucaucacacaaaguuaua

SEQ ID NO: 499933 - RNA, 18 nt, Artificial Sequence
  Synthetic
guuuuauuccaaguuaua

SEQ ID NO: 499934 - RNA, 19 nt, Artificial Sequence
  Synthetic
gguuuuauuccaaguuaua

SEQ ID NO: 499935 - RNA, 20 nt, Artificial Sequence
  Synthetic
ugguuuuauuccaaguuaua

SEQ ID NO: 499936 - RNA, 21 nt, Artificial Sequence
  Synthetic
augguuuuauuccaaguuaua

SEQ ID NO: 499937 - RNA, 22 nt, Artificial Sequence
  Synthetic
aaugguuuuauuccaaguuaua

SEQ ID NO: 499938 - RNA, 23 nt, Artificial Sequence
  Synthetic
aaaugguuuuauuccaaguuaua

SEQ ID NO: 499939 - RNA, 24 nt, Artificial Sequence
  Synthetic
gaaaugguuuuauuccaaguuaua

SEQ ID NO: 499940 - RNA, 18 nt, Artificial Sequence
  Synthetic
cuuuaacuggcaguuaua

SEQ ID NO: 499941 - RNA, 19 nt, Artificial Sequence
  Synthetic
ccuuuaacuggcaguuaua

SEQ ID NO: 499942 - RNA, 20 nt, Artificial Sequence
  Synthetic
gccuuuaacuggcaguuaua

SEQ ID NO: 499943 - RNA, 21 nt, Artificial Sequence
  Synthetic
agccuuuaacuggcaguuaua

SEQ ID NO: 499944 - RNA, 22 nt, Artificial Sequence
  Synthetic
uagccuuuaacuggcaguuaua

SEQ ID NO: 499945 - RNA, 23 nt, Artificial Sequence
  Synthetic
guagccuuuaacuggcaguuaua

SEQ ID NO: 499946 - RNA, 24 nt, Artificial Sequence
  Synthetic
gguagccuuuaacuggcaguuaua

SEQ ID NO: 499947 - RNA, 18 nt, Artificial Sequence
  Synthetic
aagacuaaucagguuaua

SEQ ID NO: 499948 - RNA, 19 nt, Artificial Sequence
  Synthetic
gaagacuaaucagguuaua

SEQ ID NO: 499949 - RNA, 20 nt, Artificial Sequence
  Synthetic
agaagacuaaucagguuaua

SEQ ID NO: 499950 - RNA, 21 nt, Artificial Sequence
  Synthetic
cagaagacuaaucagguuaua

SEQ ID NO: 499951 - RNA, 22 nt, Artificial Sequence
  Synthetic
ucagaagacuaaucagguuaua

SEQ ID NO: 499952 - RNA, 23 nt, Artificial Sequence
  Synthetic
uucagaagacuaaucagguuaua

SEQ ID NO: 499953 - RNA, 24 nt, Artificial Sequence
  Synthetic
guucagaagacuaaucagguuaua

SEQ ID NO: 499954 - RNA, 18 nt, Artificial Sequence
  Synthetic
aaccacaaauggguuaua

SEQ ID NO: 499955 - RNA, 19 nt, Artificial Sequence
  Synthetic
aaaccacaaauggguuaua

SEQ ID NO: 499956 - RNA, 20 nt, Artificial Sequence
  Synthetic
caaaccacaaauggguuaua

SEQ ID NO: 499957 - RNA, 21 nt, Artificial Sequence
  Synthetic
acaaaccacaaauggguuaua

SEQ ID NO: 499958 - RNA, 22 nt, Artificial Sequence
  Synthetic
cacaaaccacaaauggguuaua

SEQ ID NO: 499959 - RNA, 23 nt, Artificial Sequence
  Synthetic
ucacaaaccacaaauggguuaua

SEQ ID NO: 499960 - RNA, 24 nt, Artificial Sequence
  Synthetic
aucacaaaccacaaauggguuaua

SEQ ID NO: 499961 - RNA, 18 nt, Artificial Sequence
  Synthetic
aaaugaaagcugguuaua

SEQ ID NO: 499962 - RNA, 19 nt, Artificial Sequence
  Synthetic
aaaaugaaagcugguuaua

SEQ ID NO: 499963 - RNA, 20 nt, Artificial Sequence
  Synthetic
aaaaaugaaagcugguuaua

SEQ ID NO: 499964 - RNA, 21 nt, Artificial Sequence
  Synthetic
uaaaaaugaaagcugguuaua

SEQ ID NO: 499965 - RNA, 22 nt, Artificial Sequence
  Synthetic
uuaaaaaugaaagcugguuaua

SEQ ID NO: 499966 - RNA, 23 nt, Artificial Sequence
  Synthetic
auuaaaaaugaaagcugguuaua

SEQ ID NO: 499967 - RNA, 24 nt, Artificial Sequence
  Synthetic
uauuaaaaaugaaagcugguuaua

SEQ ID NO: 499968 - RNA, 18 nt, Artificial Sequence
  Synthetic
cagucaagaaauguuaua

SEQ ID NO: 499969 - RNA, 19 nt, Artificial Sequence
  Synthetic
acagucaagaaauguuaua

SEQ ID NO: 499970 - RNA, 20 nt, Artificial Sequence
  Synthetic
uacagucaagaaauguuaua

SEQ ID NO: 499971 - RNA, 21 nt, Artificial Sequence
  Synthetic
uuacagucaagaaauguuaua

SEQ ID NO: 499972 - RNA, 22 nt, Artificial Sequence
  Synthetic
auuacagucaagaaauguuaua

SEQ ID NO: 499973 - RNA, 23 nt, Artificial Sequence
  Synthetic
uauuacagucaagaaauguuaua

SEQ ID NO: 499974 - RNA, 24 nt, Artificial Sequence
  Synthetic
uuauuacagucaagaaauguuaua

SEQ ID NO: 499975 - RNA, 18 nt, Artificial Sequence
  Synthetic
aaagauaaauauguuaua

SEQ ID NO: 499976 - RNA, 19 nt, Artificial Sequence
  Synthetic
uaaagauaaauauguuaua

SEQ ID NO: 499977 - RNA, 20 nt, Artificial Sequence
  Synthetic
cuaaagauaaauauguuaua

SEQ ID NO: 499978 - RNA, 21 nt, Artificial Sequence
  Synthetic
acuaaagauaaauauguuaua

SEQ ID NO: 499979 - RNA, 22 nt, Artificial Sequence
  Synthetic
gacuaaagauaaauauguuaua

SEQ ID NO: 499980 - RNA, 23 nt, Artificial Sequence
  Synthetic
ugacuaaagauaaauauguuaua

SEQ ID NO: 499981 - RNA, 24 nt, Artificial Sequence
  Synthetic
uugacuaaagauaaauauguuaua

SEQ ID NO: 499982 - RNA, 18 nt, Artificial Sequence
  Synthetic
uugcacuuuuauguuaua

SEQ ID NO: 499983 - RNA, 19 nt, Artificial Sequence
  Synthetic
cuugcacuuuuauguuaua

SEQ ID NO: 499984 - RNA, 20 nt, Artificial Sequence
  Synthetic
ccuugcacuuuuauguuaua

SEQ ID NO: 499985 - RNA, 21 nt, Artificial Sequence
  Synthetic
gccuugcacuuuuauguuaua

SEQ ID NO: 499986 - RNA, 22 nt, Artificial Sequence
  Synthetic
ugccuugcacuuuuauguuaua

SEQ ID NO: 499987 - RNA, 23 nt, Artificial Sequence
  Synthetic
cugccuugcacuuuuauguuaua

SEQ ID NO: 499988 - RNA, 24 nt, Artificial Sequence
  Synthetic
ucugccuugcacuuuuauguuaua

SEQ ID NO: 499989 - RNA, 18 nt, Artificial Sequence
  Synthetic
ucuuuaaagucuguuaua

SEQ ID NO: 499990 - RNA, 19 nt, Artificial Sequence
  Synthetic
aucuuuaaagucuguuaua

SEQ ID NO: 499991 - RNA, 20 nt, Artificial Sequence
  Synthetic
uaucuuuaaagucuguuaua

SEQ ID NO: 499992 - RNA, 21 nt, Artificial Sequence
  Synthetic
uuaucuuuaaagucuguuaua

SEQ ID NO: 499993 - RNA, 22 nt, Artificial Sequence
  Synthetic
auuaucuuuaaagucuguuaua

SEQ ID NO: 499994 - RNA, 23 nt, Artificial Sequence
  Synthetic
uauuaucuuuaaagucuguuaua

SEQ ID NO: 499995 - RNA, 24 nt, Artificial Sequence
  Synthetic
auauuaucuuuaaagucuguuaua

SEQ ID NO: 499996 - RNA, 18 nt, Artificial Sequence
  Synthetic
aaucauucagguguuaua

SEQ ID NO: 499997 - RNA, 19 nt, Artificial Sequence
  Synthetic
gaaucauucagguguuaua

SEQ ID NO: 499998 - RNA, 20 nt, Artificial Sequence
  Synthetic
agaaucauucagguguuaua

SEQ ID NO: 499999 - RNA, 21 nt, Artificial Sequence
  Synthetic
cagaaucauucagguguuaua

SEQ ID NO: 500000 - RNA, 22 nt, Artificial Sequence
  Synthetic
acagaaucauucagguguuaua

SEQ ID NO: 500001 - RNA, 23 nt, Artificial Sequence
  Synthetic
uacagaaucauucagguguuaua

SEQ ID NO: 500002 - RNA, 24 nt, Artificial Sequence
  Synthetic
guacagaaucauucagguguuaua

SEQ ID NO: 500003 - RNA, 18 nt, Artificial Sequence
  Synthetic
agugaaaauguuguuaua

SEQ ID NO: 500004 - RNA, 19 nt, Artificial Sequence
  Synthetic
uagugaaaauguuguuaua

SEQ ID NO: 500005 - RNA, 20 nt, Artificial Sequence
  Synthetic
guagugaaaauguuguuaua

SEQ ID NO: 500006 - RNA, 21 nt, Artificial Sequence
  Synthetic
aguagugaaaauguuguuaua

SEQ ID NO: 500007 - RNA, 22 nt, Artificial Sequence
  Synthetic
aaguagugaaaauguuguuaua

SEQ ID NO: 500008 - RNA, 23 nt, Artificial Sequence
  Synthetic
aaaguagugaaaauguuguuaua

SEQ ID NO: 500009 - RNA, 24 nt, Artificial Sequence
  Synthetic
aaaaguagugaaaauguuguuaua

SEQ ID NO: 500010 - RNA, 18 nt, Artificial Sequence
  Synthetic
gaucaauuaaaauuuaua

SEQ ID NO: 500011 - RNA, 19 nt, Artificial Sequence
  Synthetic
agaucaauuaaaauuuaua

SEQ ID NO: 500012 - RNA, 20 nt, Artificial Sequence
  Synthetic
aagaucaauuaaaauuuaua

SEQ ID NO: 500013 - RNA, 21 nt, Artificial Sequence
  Synthetic
uaagaucaauuaaaauuuaua

SEQ ID NO: 500014 - RNA, 22 nt, Artificial Sequence
  Synthetic
auaagaucaauuaaaauuuaua

SEQ ID NO: 500015 - RNA, 23 nt, Artificial Sequence
  Synthetic
uauaagaucaauuaaaauuuaua

SEQ ID NO: 500016 - RNA, 24 nt, Artificial Sequence
  Synthetic
uuauaagaucaauuaaaauuuaua

SEQ ID NO: 500017 - RNA, 18 nt, Artificial Sequence
  Synthetic
auuuauuuccaauuuaua

SEQ ID NO: 500018 - RNA, 19 nt, Artificial Sequence
  Synthetic
aauuuauuuccaauuuaua

SEQ ID NO: 500019 - RNA, 20 nt, Artificial Sequence
  Synthetic
caauuuauuuccaauuuaua

SEQ ID NO: 500020 - RNA, 21 nt, Artificial Sequence
  Synthetic
ccaauuuauuuccaauuuaua

SEQ ID NO: 500021 - RNA, 22 nt, Artificial Sequence
  Synthetic
uccaauuuauuuccaauuuaua

SEQ ID NO: 500022 - RNA, 23 nt, Artificial Sequence
  Synthetic
auccaauuuauuuccaauuuaua

SEQ ID NO: 500023 - RNA, 24 nt, Artificial Sequence
  Synthetic
uauccaauuuauuuccaauuuaua

SEQ ID NO: 500024 - RNA, 18 nt, Artificial Sequence
  Synthetic
aagaccggguaauuuaua

SEQ ID NO: 500025 - RNA, 19 nt, Artificial Sequence
  Synthetic
caagaccggguaauuuaua

SEQ ID NO: 500026 - RNA, 20 nt, Artificial Sequence
  Synthetic
ccaagaccggguaauuuaua

SEQ ID NO: 500027 - RNA, 21 nt, Artificial Sequence
  Synthetic
cccaagaccggguaauuuaua

SEQ ID NO: 500028 - RNA, 22 nt, Artificial Sequence
  Synthetic
acccaagaccggguaauuuaua

SEQ ID NO: 500029 - RNA, 23 nt, Artificial Sequence
  Synthetic
uacccaagaccggguaauuuaua

SEQ ID NO: 500030 - RNA, 24 nt, Artificial Sequence
  Synthetic
auacccaagaccggguaauuuaua

SEQ ID NO: 500031 - RNA, 22 nt, Artificial Sequence
  Synthetic
gccugagacuggguaauuuaua

SEQ ID NO: 500032 - RNA, 23 nt, Artificial Sequence
  Synthetic
ugccugagacuggguaauuuaua

SEQ ID NO: 500033 - RNA, 24 nt, Artificial Sequence
  Synthetic
cugccugagacuggguaauuuaua

SEQ ID NO: 500034 - RNA, 18 nt, Artificial Sequence
  Synthetic
gagacugggugauuuaua

SEQ ID NO: 500035 - RNA, 19 nt, Artificial Sequence
  Synthetic
ugagacugggugauuuaua

SEQ ID NO: 500036 - RNA, 20 nt, Artificial Sequence
  Synthetic
cugagacugggugauuuaua

SEQ ID NO: 500037 - RNA, 21 nt, Artificial Sequence
  Synthetic
ucugagacugggugauuuaua

SEQ ID NO: 500038 - RNA, 22 nt, Artificial Sequence
  Synthetic
aucugagacugggugauuuaua

SEQ ID NO: 500039 - RNA, 23 nt, Artificial Sequence
  Synthetic
uaucugagacugggugauuuaua

SEQ ID NO: 500040 - RNA, 24 nt, Artificial Sequence
  Synthetic
auaucugagacugggugauuuaua

SEQ ID NO: 500041 - RNA, 18 nt, Artificial Sequence
  Synthetic
ucuaucacuugauuuaua

SEQ ID NO: 500042 - RNA, 19 nt, Artificial Sequence
  Synthetic
aucuaucacuugauuuaua

SEQ ID NO: 500043 - RNA, 20 nt, Artificial Sequence
  Synthetic
uaucuaucacuugauuuaua

SEQ ID NO: 500044 - RNA, 21 nt, Artificial Sequence
  Synthetic
auaucuaucacuugauuuaua

SEQ ID NO: 500045 - RNA, 22 nt, Artificial Sequence
  Synthetic
uauaucuaucacuugauuuaua

SEQ ID NO: 500046 - RNA, 23 nt, Artificial Sequence
  Synthetic
uuauaucuaucacuugauuuaua

SEQ ID NO: 500047 - RNA, 24 nt, Artificial Sequence
  Synthetic
uuuauaucuaucacuugauuuaua

SEQ ID NO: 500048 - RNA, 18 nt, Artificial Sequence
  Synthetic
uauuuacuuuuauuuaua

SEQ ID NO: 500049 - RNA, 19 nt, Artificial Sequence
  Synthetic
auauuuacuuuuauuuaua

SEQ ID NO: 500050 - RNA, 20 nt, Artificial Sequence
  Synthetic
uauauuuacuuuuauuuaua

SEQ ID NO: 500051 - RNA, 21 nt, Artificial Sequence
  Synthetic
guauauuuacuuuuauuuaua

SEQ ID NO: 500052 - RNA, 22 nt, Artificial Sequence
  Synthetic
gguauauuuacuuuuauuuaua

SEQ ID NO: 500053 - RNA, 23 nt, Artificial Sequence
  Synthetic
agguauauuuacuuuuauuuaua

SEQ ID NO: 500054 - RNA, 24 nt, Artificial Sequence
  Synthetic
aagguauauuuacuuuuauuuaua

SEQ ID NO: 500055 - RNA, 18 nt, Artificial Sequence
  Synthetic
auuuaacaaaacuuuaua

SEQ ID NO: 500056 - RNA, 19 nt, Artificial Sequence
  Synthetic
aauuuaacaaaacuuuaua

SEQ ID NO: 500057 - RNA, 20 nt, Artificial Sequence
  Synthetic
caauuuaacaaaacuuuaua

SEQ ID NO: 500058 - RNA, 21 nt, Artificial Sequence
  Synthetic
ucaauuuaacaaaacuuuaua

SEQ ID NO: 500059 - RNA, 22 nt, Artificial Sequence
  Synthetic
uucaauuuaacaaaacuuuaua

SEQ ID NO: 500060 - RNA, 23 nt, Artificial Sequence
  Synthetic
auucaauuuaacaaaacuuuaua

SEQ ID NO: 500061 - RNA, 24 nt, Artificial Sequence
  Synthetic
uauucaauuuaacaaaacuuuaua

SEQ ID NO: 500062 - RNA, 18 nt, Artificial Sequence
  Synthetic
accaaaauugccuuuaua

SEQ ID NO: 500063 - RNA, 19 nt, Artificial Sequence
  Synthetic
aaccaaaauugccuuuaua

SEQ ID NO: 500064 - RNA, 20 nt, Artificial Sequence
  Synthetic
gaaccaaaauugccuuuaua

SEQ ID NO: 500065 - RNA, 21 nt, Artificial Sequence
  Synthetic
ugaaccaaaauugccuuuaua

SEQ ID NO: 500066 - RNA, 22 nt, Artificial Sequence
  Synthetic
uugaaccaaaauugccuuuaua

SEQ ID NO: 500067 - RNA, 23 nt, Artificial Sequence
  Synthetic
uuugaaccaaaauugccuuuaua

SEQ ID NO: 500068 - RNA, 24 nt, Artificial Sequence
  Synthetic
uuuugaaccaaaauugccuuuaua

SEQ ID NO: 500069 - RNA, 18 nt, Artificial Sequence
  Synthetic
uaccugguuugcuuuaua

SEQ ID NO: 500070 - RNA, 19 nt, Artificial Sequence
  Synthetic
guaccugguuugcuuuaua

SEQ ID NO: 500071 - RNA, 20 nt, Artificial Sequence
  Synthetic
uguaccugguuugcuuuaua

SEQ ID NO: 500072 - RNA, 21 nt, Artificial Sequence
  Synthetic
cuguaccugguuugcuuuaua

SEQ ID NO: 500073 - RNA, 22 nt, Artificial Sequence
  Synthetic
gcuguaccugguuugcuuuaua

SEQ ID NO: 500074 - RNA, 23 nt, Artificial Sequence
  Synthetic
ugcuguaccugguuugcuuuaua

SEQ ID NO: 500075 - RNA, 24 nt, Artificial Sequence
  Synthetic
augcuguaccugguuugcuuuaua

SEQ ID NO: 500076 - RNA, 18 nt, Artificial Sequence
  Synthetic
aauuaucuucauuuuaua

SEQ ID NO: 500077 - RNA, 19 nt, Artificial Sequence
  Synthetic
caauuaucuucauuuuaua

SEQ ID NO: 500078 - RNA, 20 nt, Artificial Sequence
  Synthetic
ccaauuaucuucauuuuaua

SEQ ID NO: 500079 - RNA, 21 nt, Artificial Sequence
  Synthetic
uccaauuaucuucauuuuaua

SEQ ID NO: 500080 - RNA, 22 nt, Artificial Sequence
  Synthetic
auccaauuaucuucauuuuaua

SEQ ID NO: 500081 - RNA, 23 nt, Artificial Sequence
  Synthetic
gauccaauuaucuucauuuuaua

SEQ ID NO: 500082 - RNA, 24 nt, Artificial Sequence
  Synthetic
agauccaauuaucuucauuuuaua

SEQ ID NO: 500083 - RNA, 18 nt, Artificial Sequence
  Synthetic
gagagaugggauuuuaua

SEQ ID NO: 500084 - RNA, 19 nt, Artificial Sequence
  Synthetic
ugagagaugggauuuuaua

SEQ ID NO: 500085 - RNA, 20 nt, Artificial Sequence
  Synthetic
cugagagaugggauuuuaua

SEQ ID NO: 500086 - RNA, 21 nt, Artificial Sequence
  Synthetic
ucugagagaugggauuuuaua

SEQ ID NO: 500087 - RNA, 22 nt, Artificial Sequence
  Synthetic
uucugagagaugggauuuuaua

SEQ ID NO: 500088 - RNA, 23 nt, Artificial Sequence
  Synthetic
auucugagagaugggauuuuaua

SEQ ID NO: 500089 - RNA, 24 nt, Artificial Sequence
  Synthetic
gauucugagagaugggauuuuaua

SEQ ID NO: 500090 - RNA, 18 nt, Artificial Sequence
  Synthetic
uuagcucuguauuuuaua

SEQ ID NO: 500091 - RNA, 19 nt, Artificial Sequence
  Synthetic
cuuagcucuguauuuuaua

SEQ ID NO: 500092 - RNA, 20 nt, Artificial Sequence
  Synthetic
ucuuagcucuguauuuuaua

SEQ ID NO: 500093 - RNA, 21 nt, Artificial Sequence
  Synthetic
gucuuagcucuguauuuuaua

SEQ ID NO: 500094 - RNA, 22 nt, Artificial Sequence
  Synthetic
ugucuuagcucuguauuuuaua

SEQ ID NO: 500095 - RNA, 23 nt, Artificial Sequence
  Synthetic
uugucuuagcucuguauuuuaua

SEQ ID NO: 500096 - RNA, 24 nt, Artificial Sequence
  Synthetic
cuugucuuagcucuguauuuuaua

SEQ ID NO: 500097 - RNA, 18 nt, Artificial Sequence
  Synthetic
gcaucaccucguuuuaua

SEQ ID NO: 500098 - RNA, 19 nt, Artificial Sequence
  Synthetic
ggcaucaccucguuuuaua

SEQ ID NO: 500099 - RNA, 20 nt, Artificial Sequence
  Synthetic
aggcaucaccucguuuuaua

SEQ ID NO: 500100 - RNA, 21 nt, Artificial Sequence
  Synthetic
aaggcaucaccucguuuuaua

SEQ ID NO: 500101 - RNA, 22 nt, Artificial Sequence
  Synthetic
gaaggcaucaccucguuuuaua

SEQ ID NO: 500102 - RNA, 23 nt, Artificial Sequence
  Synthetic
ugaaggcaucaccucguuuuaua

SEQ ID NO: 500103 - RNA, 24 nt, Artificial Sequence
  Synthetic
uugaaggcaucaccucguuuuaua

SEQ ID NO: 500104 - RNA, 18 nt, Artificial Sequence
  Synthetic
agauccaaugguuuuaua

SEQ ID NO: 500105 - RNA, 19 nt, Artificial Sequence
  Synthetic
gagauccaaugguuuuaua

SEQ ID NO: 500106 - RNA, 20 nt, Artificial Sequence
  Synthetic
ugagauccaaugguuuuaua

SEQ ID NO: 500107 - RNA, 21 nt, Artificial Sequence
  Synthetic
augagauccaaugguuuuaua

SEQ ID NO: 500108 - RNA, 22 nt, Artificial Sequence
  Synthetic
caugagauccaaugguuuuaua

SEQ ID NO: 500109 - RNA, 23 nt, Artificial Sequence
  Synthetic
ucaugagauccaaugguuuuaua

SEQ ID NO: 500110 - RNA, 24 nt, Artificial Sequence
  Synthetic
cucaugagauccaaugguuuuaua

SEQ ID NO: 500111 - RNA, 18 nt, Artificial Sequence
  Synthetic
agaucugaugguuuuaua

SEQ ID NO: 500112 - RNA, 19 nt, Artificial Sequence
  Synthetic
gagaucugaugguuuuaua

SEQ ID NO: 500113 - RNA, 20 nt, Artificial Sequence
  Synthetic
ggagaucugaugguuuuaua

SEQ ID NO: 500114 - RNA, 21 nt, Artificial Sequence
  Synthetic
aggagaucugaugguuuuaua

SEQ ID NO: 500115 - RNA, 22 nt, Artificial Sequence
  Synthetic
caggagaucugaugguuuuaua

SEQ ID NO: 500116 - RNA, 23 nt, Artificial Sequence
  Synthetic
ucaggagaucugaugguuuuaua

SEQ ID NO: 500117 - RNA, 24 nt, Artificial Sequence
  Synthetic
cucaggagaucugaugguuuuaua

SEQ ID NO: 500118 - RNA, 18 nt, Artificial Sequence
  Synthetic
ggaucugaugguuuuaua

SEQ ID NO: 500119 - RNA, 19 nt, Artificial Sequence
  Synthetic
gggaucugaugguuuuaua

SEQ ID NO: 500120 - RNA, 20 nt, Artificial Sequence
  Synthetic
cgggaucugaugguuuuaua

SEQ ID NO: 500121 - RNA, 21 nt, Artificial Sequence
  Synthetic
gcgggaucugaugguuuuaua

SEQ ID NO: 500122 - RNA, 22 nt, Artificial Sequence
  Synthetic
agcgggaucugaugguuuuaua

SEQ ID NO: 500123 - RNA, 23 nt, Artificial Sequence
  Synthetic
uagcgggaucugaugguuuuaua

SEQ ID NO: 500124 - RNA, 24 nt, Artificial Sequence
  Synthetic
auagcgggaucugaugguuuuaua

SEQ ID NO: 500125 - RNA, 18 nt, Artificial Sequence
  Synthetic
aggucugaugguuuuaua

SEQ ID NO: 500126 - RNA, 19 nt, Artificial Sequence
  Synthetic
gaggucugaugguuuuaua

SEQ ID NO: 500127 - RNA, 20 nt, Artificial Sequence
  Synthetic
cgaggucugaugguuuuaua

SEQ ID NO: 500128 - RNA, 21 nt, Artificial Sequence
  Synthetic
acgaggucugaugguuuuaua

SEQ ID NO: 500129 - RNA, 22 nt, Artificial Sequence
  Synthetic
cacgaggucugaugguuuuaua

SEQ ID NO: 500130 - RNA, 23 nt, Artificial Sequence
  Synthetic
ucacgaggucugaugguuuuaua

SEQ ID NO: 500131 - RNA, 24 nt, Artificial Sequence
  Synthetic
cucacgaggucugaugguuuuaua

SEQ ID NO: 500132 - RNA, 18 nt, Artificial Sequence
  Synthetic
agauuugaugguuuuaua

SEQ ID NO: 500133 - RNA, 19 nt, Artificial Sequence
  Synthetic
gagauuugaugguuuuaua

SEQ ID NO: 500134 - RNA, 20 nt, Artificial Sequence
  Synthetic
ugagauuugaugguuuuaua

SEQ ID NO: 500135 - RNA, 21 nt, Artificial Sequence
  Synthetic
augagauuugaugguuuuaua

SEQ ID NO: 500136 - RNA, 22 nt, Artificial Sequence
  Synthetic
caugagauuugaugguuuuaua

SEQ ID NO: 500137 - RNA, 23 nt, Artificial Sequence
  Synthetic
ucaugagauuugaugguuuuaua

SEQ ID NO: 500138 - RNA, 24 nt, Artificial Sequence
  Synthetic
cucaugagauuugaugguuuuaua

SEQ ID NO: 500139 - RNA, 18 nt, Artificial Sequence
  Synthetic
cagaagacaauuuuuaua

SEQ ID NO: 500140 - RNA, 19 nt, Artificial Sequence
  Synthetic
ucagaagacaauuuuuaua

SEQ ID NO: 500141 - RNA, 20 nt, Artificial Sequence
  Synthetic
aucagaagacaauuuuuaua

SEQ ID NO: 500142 - RNA, 21 nt, Artificial Sequence
  Synthetic
caucagaagacaauuuuuaua

SEQ ID NO: 500143 - RNA, 22 nt, Artificial Sequence
  Synthetic
ucaucagaagacaauuuuuaua

SEQ ID NO: 500144 - RNA, 23 nt, Artificial Sequence
  Synthetic
uucaucagaagacaauuuuuaua

SEQ ID NO: 500145 - RNA, 24 nt, Artificial Sequence
  Synthetic
auucaucagaagacaauuuuuaua

SEQ ID NO: 500146 - RNA, 18 nt, Artificial Sequence
  Synthetic
uuuuaguggauuuuuaua

SEQ ID NO: 500147 - RNA, 19 nt, Artificial Sequence
  Synthetic
cuuuuaguggauuuuuaua

SEQ ID NO: 500148 - RNA, 20 nt, Artificial Sequence
  Synthetic
acuuuuaguggauuuuuaua

SEQ ID NO: 500149 - RNA, 21 nt, Artificial Sequence
  Synthetic
cacuuuuaguggauuuuuaua

SEQ ID NO: 500150 - RNA, 22 nt, Artificial Sequence
  Synthetic
ucacuuuuaguggauuuuuaua

SEQ ID NO: 500151 - RNA, 23 nt, Artificial Sequence
  Synthetic
aucacuuuuaguggauuuuuaua

SEQ ID NO: 500152 - RNA, 24 nt, Artificial Sequence
  Synthetic
uaucacuuuuaguggauuuuuaua

SEQ ID NO: 500153 - RNA, 18 nt, Artificial Sequence
  Synthetic
uacauuuuuauuuuuaua

SEQ ID NO: 500154 - RNA, 19 nt, Artificial Sequence
  Synthetic
cuacauuuuuauuuuuaua

SEQ ID NO: 500155 - RNA, 20 nt, Artificial Sequence
  Synthetic
gcuacauuuuuauuuuuaua

SEQ ID NO: 500156 - RNA, 21 nt, Artificial Sequence
  Synthetic
ugcuacauuuuuauuuuuaua

SEQ ID NO: 500157 - RNA, 22 nt, Artificial Sequence
  Synthetic
cugcuacauuuuuauuuuuaua

SEQ ID NO: 500158 - RNA, 23 nt, Artificial Sequence
  Synthetic
acugcuacauuuuuauuuuuaua

SEQ ID NO: 500159 - RNA, 24 nt, Artificial Sequence
  Synthetic
aacugcuacauuuuuauuuuuaua

SEQ ID NO: 500160 - RNA, 18 nt, Artificial Sequence
  Synthetic
uaacagagccuuuuuaua

SEQ ID NO: 500161 - RNA, 19 nt, Artificial Sequence
  Synthetic
uuaacagagccuuuuuaua

SEQ ID NO: 500162 - RNA, 20 nt, Artificial Sequence
  Synthetic
cuuaacagagccuuuuuaua

SEQ ID NO: 500163 - RNA, 21 nt, Artificial Sequence
  Synthetic
gcuuaacagagccuuuuuaua

SEQ ID NO: 500164 - RNA, 22 nt, Artificial Sequence
  Synthetic
ugcuuaacagagccuuuuuaua

SEQ ID NO: 500165 - RNA, 23 nt, Artificial Sequence
  Synthetic
uugcuuaacagagccuuuuuaua

SEQ ID NO: 500166 - RNA, 24 nt, Artificial Sequence
  Synthetic
cuugcuuaacagagccuuuuuaua

SEQ ID NO: 500167 - RNA, 18 nt, Artificial Sequence
  Synthetic
uucuuuccuuuuuuuaua

SEQ ID NO: 500168 - RNA, 19 nt, Artificial Sequence
  Synthetic
uuucuuuccuuuuuuuaua

SEQ ID NO: 500169 - RNA, 20 nt, Artificial Sequence
  Synthetic
cuuucuuuccuuuuuuuaua

SEQ ID NO: 500170 - RNA, 21 nt, Artificial Sequence
  Synthetic
ucuuucuuuccuuuuuuuaua

SEQ ID NO: 500171 - RNA, 22 nt, Artificial Sequence
  Synthetic
uucuuucuuuccuuuuuuuaua

SEQ ID NO: 500172 - RNA, 23 nt, Artificial Sequence
  Synthetic
uuucuuucuuuccuuuuuuuaua

SEQ ID NO: 500173 - RNA, 24 nt, Artificial Sequence
  Synthetic
uuuucuuucuuuccuuuuuuuaua

SEQ ID NO: 500174 - RNA, 18 nt, Artificial Sequence
  Synthetic
ugagagacagaaaaacua

SEQ ID NO: 500175 - RNA, 19 nt, Artificial Sequence
  Synthetic
cugagagacagaaaaacua

SEQ ID NO: 500176 - RNA, 20 nt, Artificial Sequence
  Synthetic
gcugagagacagaaaaacua

SEQ ID NO: 500177 - RNA, 21 nt, Artificial Sequence
  Synthetic
agcugagagacagaaaaacua

SEQ ID NO: 500178 - RNA, 22 nt, Artificial Sequence
  Synthetic
gagcugagagacagaaaaacua

SEQ ID NO: 500179 - RNA, 23 nt, Artificial Sequence
  Synthetic
ugagcugagagacagaaaaacua

SEQ ID NO: 500180 - RNA, 24 nt, Artificial Sequence
  Synthetic
augagcugagagacagaaaaacua

SEQ ID NO: 500181 - RNA, 18 nt, Artificial Sequence
  Synthetic
aaauaaaaguaaaaacua

SEQ ID NO: 500182 - RNA, 19 nt, Artificial Sequence
  Synthetic
gaaauaaaaguaaaaacua

SEQ ID NO: 500183 - RNA, 20 nt, Artificial Sequence
  Synthetic
agaaauaaaaguaaaaacua

SEQ ID NO: 500184 - RNA, 21 nt, Artificial Sequence
  Synthetic
uagaaauaaaaguaaaaacua

SEQ ID NO: 500185 - RNA, 22 nt, Artificial Sequence
  Synthetic
uuagaaauaaaaguaaaaacua

SEQ ID NO: 500186 - RNA, 23 nt, Artificial Sequence
  Synthetic
cuuagaaauaaaaguaaaaacua

SEQ ID NO: 500187 - RNA, 24 nt, Artificial Sequence
  Synthetic
gcuuagaaauaaaaguaaaaacua

SEQ ID NO: 500188 - RNA, 18 nt, Artificial Sequence
  Synthetic
ccuauacccccaaaacua

SEQ ID NO: 500189 - RNA, 19 nt, Artificial Sequence
  Synthetic
accuauacccccaaaacua

SEQ ID NO: 500190 - RNA, 20 nt, Artificial Sequence
  Synthetic
caccuauacccccaaaacua

SEQ ID NO: 500191 - RNA, 21 nt, Artificial Sequence
  Synthetic
ccaccuauacccccaaaacua

SEQ ID NO: 500192 - RNA, 22 nt, Artificial Sequence
  Synthetic
accaccuauacccccaaaacua

SEQ ID NO: 500193 - RNA, 23 nt, Artificial Sequence
  Synthetic
aaccaccuauacccccaaaacua

SEQ ID NO: 500194 - RNA, 24 nt, Artificial Sequence
  Synthetic
aaaccaccuauacccccaaaacua

SEQ ID NO: 500195 - RNA, 18 nt, Artificial Sequence
  Synthetic
aacucuuuuggaaaacua

SEQ ID NO: 500196 - RNA, 19 nt, Artificial Sequence
  Synthetic
aaacucuuuuggaaaacua

SEQ ID NO: 500197 - RNA, 20 nt, Artificial Sequence
  Synthetic
caaacucuuuuggaaaacua

SEQ ID NO: 500198 - RNA, 21 nt, Artificial Sequence
  Synthetic
ucaaacucuuuuggaaaacua

SEQ ID NO: 500199 - RNA, 22 nt, Artificial Sequence
  Synthetic
cucaaacucuuuuggaaaacua

SEQ ID NO: 500200 - RNA, 23 nt, Artificial Sequence
  Synthetic
ucucaaacucuuuuggaaaacua

SEQ ID NO: 500201 - RNA, 24 nt, Artificial Sequence
  Synthetic
uucucaaacucuuuuggaaaacua

SEQ ID NO: 500202 - RNA, 18 nt, Artificial Sequence
  Synthetic
caucaguuuauaaaacua

SEQ ID NO: 500203 - RNA, 19 nt, Artificial Sequence
  Synthetic
ucaucaguuuauaaaacua

SEQ ID NO: 500204 - RNA, 20 nt, Artificial Sequence
  Synthetic
uucaucaguuuauaaaacua

SEQ ID NO: 500205 - RNA, 21 nt, Artificial Sequence
  Synthetic
guucaucaguuuauaaaacua

SEQ ID NO: 500206 - RNA, 22 nt, Artificial Sequence
  Synthetic
aguucaucaguuuauaaaacua

SEQ ID NO: 500207 - RNA, 23 nt, Artificial Sequence
  Synthetic
uaguucaucaguuuauaaaacua

SEQ ID NO: 500208 - RNA, 24 nt, Artificial Sequence
  Synthetic
guaguucaucaguuuauaaaacua

SEQ ID NO: 500209 - RNA, 18 nt, Artificial Sequence
  Synthetic
aucuaaaaauuaaaacua

SEQ ID NO: 500210 - RNA, 19 nt, Artificial Sequence
  Synthetic
gaucuaaaaauuaaaacua

SEQ ID NO: 500211 - RNA, 20 nt, Artificial Sequence
  Synthetic
ggaucuaaaaauuaaaacua

SEQ ID NO: 500212 - RNA, 21 nt, Artificial Sequence
  Synthetic
gggaucuaaaaauuaaaacua

SEQ ID NO: 500213 - RNA, 22 nt, Artificial Sequence
  Synthetic
ugggaucuaaaaauuaaaacua

SEQ ID NO: 500214 - RNA, 23 nt, Artificial Sequence
  Synthetic
gugggaucuaaaaauuaaaacua

SEQ ID NO: 500215 - RNA, 24 nt, Artificial Sequence
  Synthetic
ugugggaucuaaaaauuaaaacua

SEQ ID NO: 500216 - RNA, 18 nt, Artificial Sequence
  Synthetic
cuuagcauaaacaaacua

SEQ ID NO: 500217 - RNA, 19 nt, Artificial Sequence
  Synthetic
acuuagcauaaacaaacua

SEQ ID NO: 500218 - RNA, 20 nt, Artificial Sequence
  Synthetic
aacuuagcauaaacaaacua

SEQ ID NO: 500219 - RNA, 21 nt, Artificial Sequence
  Synthetic
caacuuagcauaaacaaacua

SEQ ID NO: 500220 - RNA, 22 nt, Artificial Sequence
  Synthetic
acaacuuagcauaaacaaacua

SEQ ID NO: 500221 - RNA, 23 nt, Artificial Sequence
  Synthetic
aacaacuuagcauaaacaaacua

SEQ ID NO: 500222 - RNA, 24 nt, Artificial Sequence
  Synthetic
aaacaacuuagcauaaacaaacua

SEQ ID NO: 500223 - RNA, 18 nt, Artificial Sequence
  Synthetic
aucaaccugaacaaacua

SEQ ID NO: 500224 - RNA, 19 nt, Artificial Sequence
  Synthetic
uaucaaccugaacaaacua

SEQ ID NO: 500225 - RNA, 20 nt, Artificial Sequence
  Synthetic
auaucaaccugaacaaacua

SEQ ID NO: 500226 - RNA, 21 nt, Artificial Sequence
  Synthetic
aauaucaaccugaacaaacua

SEQ ID NO: 500227 - RNA, 22 nt, Artificial Sequence
  Synthetic
aaauaucaaccugaacaaacua

SEQ ID NO: 500228 - RNA, 23 nt, Artificial Sequence
  Synthetic
caaauaucaaccugaacaaacua

SEQ ID NO: 500229 - RNA, 24 nt, Artificial Sequence
  Synthetic
acaaauaucaaccugaacaaacua

SEQ ID NO: 500230 - RNA, 18 nt, Artificial Sequence
  Synthetic
gcaaaaaaucacaaacua

SEQ ID NO: 500231 - RNA, 19 nt, Artificial Sequence
  Synthetic
ggcaaaaaaucacaaacua

SEQ ID NO: 500232 - RNA, 20 nt, Artificial Sequence
  Synthetic
uggcaaaaaaucacaaacua

SEQ ID NO: 500233 - RNA, 21 nt, Artificial Sequence
  Synthetic
uuggcaaaaaaucacaaacua

SEQ ID NO: 500234 - RNA, 22 nt, Artificial Sequence
  Synthetic
auuggcaaaaaaucacaaacua

SEQ ID NO: 500235 - RNA, 23 nt, Artificial Sequence
  Synthetic
aauuggcaaaaaaucacaaacua

SEQ ID NO: 500236 - RNA, 24 nt, Artificial Sequence
  Synthetic
aaauuggcaaaaaaucacaaacua

SEQ ID NO: 500237 - RNA, 18 nt, Artificial Sequence
  Synthetic
auugugaaaagcaaacua

SEQ ID NO: 500238 - RNA, 19 nt, Artificial Sequence
  Synthetic
aauugugaaaagcaaacua

SEQ ID NO: 500239 - RNA, 20 nt, Artificial Sequence
  Synthetic
aaauugugaaaagcaaacua

SEQ ID NO: 500240 - RNA, 21 nt, Artificial Sequence
  Synthetic
uaaauugugaaaagcaaacua

SEQ ID NO: 500241 - RNA, 22 nt, Artificial Sequence
  Synthetic
uuaaauugugaaaagcaaacua

SEQ ID NO: 500242 - RNA, 23 nt, Artificial Sequence
  Synthetic
guuaaauugugaaaagcaaacua

SEQ ID NO: 500243 - RNA, 24 nt, Artificial Sequence
  Synthetic
aguuaaauugugaaaagcaaacua

SEQ ID NO: 500244 - RNA, 18 nt, Artificial Sequence
  Synthetic
ccaaauacaaucaaacua

SEQ ID NO: 500245 - RNA, 19 nt, Artificial Sequence
  Synthetic
cccaaauacaaucaaacua

SEQ ID NO: 500246 - RNA, 20 nt, Artificial Sequence
  Synthetic
acccaaauacaaucaaacua

SEQ ID NO: 500247 - RNA, 21 nt, Artificial Sequence
  Synthetic
aacccaaauacaaucaaacua

SEQ ID NO: 500248 - RNA, 22 nt, Artificial Sequence
  Synthetic
aaacccaaauacaaucaaacua

SEQ ID NO: 500249 - RNA, 23 nt, Artificial Sequence
  Synthetic
caaacccaaauacaaucaaacua

SEQ ID NO: 500250 - RNA, 24 nt, Artificial Sequence
  Synthetic
ccaaacccaaauacaaucaaacua

SEQ ID NO: 500251 - RNA, 18 nt, Artificial Sequence
  Synthetic
cuaggguuuaucaaacua

SEQ ID NO: 500252 - RNA, 19 nt, Artificial Sequence
  Synthetic
ucuaggguuuaucaaacua

SEQ ID NO: 500253 - RNA, 20 nt, Artificial Sequence
  Synthetic
aucuaggguuuaucaaacua

SEQ ID NO: 500254 - RNA, 21 nt, Artificial Sequence
  Synthetic
uaucuaggguuuaucaaacua

SEQ ID NO: 500255 - RNA, 22 nt, Artificial Sequence
  Synthetic
cuaucuaggguuuaucaaacua

SEQ ID NO: 500256 - RNA, 23 nt, Artificial Sequence
  Synthetic
ccuaucuaggguuuaucaaacua

SEQ ID NO: 500257 - RNA, 24 nt, Artificial Sequence
  Synthetic
uccuaucuaggguuuaucaaacua

SEQ ID NO: 500258 - RNA, 18 nt, Artificial Sequence
  Synthetic
uacgaugacaagaaacua

SEQ ID NO: 500259 - RNA, 19 nt, Artificial Sequence
  Synthetic
guacgaugacaagaaacua

SEQ ID NO: 500260 - RNA, 20 nt, Artificial Sequence
  Synthetic
aguacgaugacaagaaacua

SEQ ID NO: 500261 - RNA, 21 nt, Artificial Sequence
  Synthetic
caguacgaugacaagaaacua

SEQ ID NO: 500262 - RNA, 22 nt, Artificial Sequence
  Synthetic
ucaguacgaugacaagaaacua

SEQ ID NO: 500263 - RNA, 23 nt, Artificial Sequence
  Synthetic
cucaguacgaugacaagaaacua

SEQ ID NO: 500264 - RNA, 24 nt, Artificial Sequence
  Synthetic
ucucaguacgaugacaagaaacua

SEQ ID NO: 500265 - RNA, 18 nt, Artificial Sequence
  Synthetic
acaaaccaucagaaacua

SEQ ID NO: 500266 - RNA, 19 nt, Artificial Sequence
  Synthetic
aacaaaccaucagaaacua

SEQ ID NO: 500267 - RNA, 20 nt, Artificial Sequence
  Synthetic
caacaaaccaucagaaacua

SEQ ID NO: 500268 - RNA, 21 nt, Artificial Sequence
  Synthetic
ccaacaaaccaucagaaacua

SEQ ID NO: 500269 - RNA, 22 nt, Artificial Sequence
  Synthetic
gccaacaaaccaucagaaacua

SEQ ID NO: 500270 - RNA, 23 nt, Artificial Sequence
  Synthetic
ugccaacaaaccaucagaaacua

SEQ ID NO: 500271 - RNA, 24 nt, Artificial Sequence
  Synthetic
uugccaacaaaccaucagaaacua

SEQ ID NO: 500272 - RNA, 18 nt, Artificial Sequence
  Synthetic
caucugagguagaaacua

SEQ ID NO: 500273 - RNA, 19 nt, Artificial Sequence
  Synthetic
acaucugagguagaaacua

SEQ ID NO: 500274 - RNA, 20 nt, Artificial Sequence
  Synthetic
cacaucugagguagaaacua

SEQ ID NO: 500275 - RNA, 21 nt, Artificial Sequence
  Synthetic
acacaucugagguagaaacua

SEQ ID NO: 500276 - RNA, 22 nt, Artificial Sequence
  Synthetic
gacacaucugagguagaaacua

SEQ ID NO: 500277 - RNA, 23 nt, Artificial Sequence
  Synthetic
ugacacaucugagguagaaacua

SEQ ID NO: 500278 - RNA, 24 nt, Artificial Sequence
  Synthetic
cugacacaucugagguagaaacua

SEQ ID NO: 500279 - RNA, 18 nt, Artificial Sequence
  Synthetic
ugggaucuaaugaaacua

SEQ ID NO: 500280 - RNA, 19 nt, Artificial Sequence
  Synthetic
augggaucuaaugaaacua

SEQ ID NO: 500281 - RNA, 20 nt, Artificial Sequence
  Synthetic
aaugggaucuaaugaaacua

SEQ ID NO: 500282 - RNA, 21 nt, Artificial Sequence
  Synthetic
aaaugggaucuaaugaaacua

SEQ ID NO: 500283 - RNA, 22 nt, Artificial Sequence
  Synthetic
caaaugggaucuaaugaaacua

SEQ ID NO: 500284 - RNA, 23 nt, Artificial Sequence
  Synthetic
acaaaugggaucuaaugaaacua

SEQ ID NO: 500285 - RNA, 24 nt, Artificial Sequence
  Synthetic
gacaaaugggaucuaaugaaacua

SEQ ID NO: 500286 - RNA, 18 nt, Artificial Sequence
  Synthetic
aggaaaaagaugaaacua

SEQ ID NO: 500287 - RNA, 19 nt, Artificial Sequence
  Synthetic
caggaaaaagaugaaacua

SEQ ID NO: 500288 - RNA, 20 nt, Artificial Sequence
  Synthetic
gcaggaaaaagaugaaacua

SEQ ID NO: 500289 - RNA, 21 nt, Artificial Sequence
  Synthetic
ugcaggaaaaagaugaaacua

SEQ ID NO: 500290 - RNA, 22 nt, Artificial Sequence
  Synthetic
uugcaggaaaaagaugaaacua

SEQ ID NO: 500291 - RNA, 23 nt, Artificial Sequence
  Synthetic
cuugcaggaaaaagaugaaacua

SEQ ID NO: 500292 - RNA, 24 nt, Artificial Sequence
  Synthetic
ucuugcaggaaaaagaugaaacua

SEQ ID NO: 500293 - RNA, 18 nt, Artificial Sequence
  Synthetic
aacuauaugaauaaacua

SEQ ID NO: 500294 - RNA, 19 nt, Artificial Sequence
  Synthetic
uaacuauaugaauaaacua

SEQ ID NO: 500295 - RNA, 20 nt, Artificial Sequence
  Synthetic
cuaacuauaugaauaaacua

SEQ ID NO: 500296 - RNA, 21 nt, Artificial Sequence
  Synthetic
ccuaacuauaugaauaaacua

SEQ ID NO: 500297 - RNA, 22 nt, Artificial Sequence
  Synthetic
accuaacuauaugaauaaacua

SEQ ID NO: 500298 - RNA, 23 nt, Artificial Sequence
  Synthetic
uaccuaacuauaugaauaaacua

SEQ ID NO: 500299 - RNA, 24 nt, Artificial Sequence
  Synthetic
uuaccuaacuauaugaauaaacua

SEQ ID NO: 500300 - RNA, 18 nt, Artificial Sequence
  Synthetic
acaagacuccauaaacua

SEQ ID NO: 500301 - RNA, 19 nt, Artificial Sequence
  Synthetic
cacaagacuccauaaacua

SEQ ID NO: 500302 - RNA, 20 nt, Artificial Sequence
  Synthetic
ccacaagacuccauaaacua

SEQ ID NO: 500303 - RNA, 21 nt, Artificial Sequence
  Synthetic
uccacaagacuccauaaacua

SEQ ID NO: 500304 - RNA, 22 nt, Artificial Sequence
  Synthetic
cuccacaagacuccauaaacua

SEQ ID NO: 500305 - RNA, 23 nt, Artificial Sequence
  Synthetic
ccuccacaagacuccauaaacua

SEQ ID NO: 500306 - RNA, 24 nt, Artificial Sequence
  Synthetic
cccuccacaagacuccauaaacua

SEQ ID NO: 500307 - RNA, 18 nt, Artificial Sequence
  Synthetic
uaauuaauggguaaacua

SEQ ID NO: 500308 - RNA, 19 nt, Artificial Sequence
  Synthetic
uuaauuaauggguaaacua

SEQ ID NO: 500309 - RNA, 20 nt, Artificial Sequence
  Synthetic
guuaauuaauggguaaacua

SEQ ID NO: 500310 - RNA, 21 nt, Artificial Sequence
  Synthetic
uguuaauuaauggguaaacua

SEQ ID NO: 500311 - RNA, 22 nt, Artificial Sequence
  Synthetic
cuguuaauuaauggguaaacua

SEQ ID NO: 500312 - RNA, 23 nt, Artificial Sequence
  Synthetic
ucuguuaauuaauggguaaacua

SEQ ID NO: 500313 - RNA, 24 nt, Artificial Sequence
  Synthetic
uucuguuaauuaauggguaaacua

SEQ ID NO: 500314 - RNA, 18 nt, Artificial Sequence
  Synthetic
uggaacuuaauuaaacua

SEQ ID NO: 500315 - RNA, 19 nt, Artificial Sequence
  Synthetic
guggaacuuaauuaaacua

SEQ ID NO: 500316 - RNA, 20 nt, Artificial Sequence
  Synthetic
aguggaacuuaauuaaacua

SEQ ID NO: 500317 - RNA, 21 nt, Artificial Sequence
  Synthetic
aaguggaacuuaauuaaacua

SEQ ID NO: 500318 - RNA, 22 nt, Artificial Sequence
  Synthetic
caaguggaacuuaauuaaacua

SEQ ID NO: 500319 - RNA, 23 nt, Artificial Sequence
  Synthetic
acaaguggaacuuaauuaaacua

SEQ ID NO: 500320 - RNA, 24 nt, Artificial Sequence
  Synthetic
gacaaguggaacuuaauuaaacua

SEQ ID NO: 500321 - RNA, 18 nt, Artificial Sequence
  Synthetic
uaauaauggcaacaacua

SEQ ID NO: 500322 - RNA, 19 nt, Artificial Sequence
  Synthetic
auaauaauggcaacaacua

SEQ ID NO: 500323 - RNA, 20 nt, Artificial Sequence
  Synthetic
aauaauaauggcaacaacua

SEQ ID NO: 500324 - RNA, 21 nt, Artificial Sequence
  Synthetic
uaauaauaauggcaacaacua

SEQ ID NO: 500325 - RNA, 22 nt, Artificial Sequence
  Synthetic
auaauaauaauggcaacaacua

SEQ ID NO: 500326 - RNA, 23 nt, Artificial Sequence
  Synthetic
aauaauaauaauggcaacaacua

SEQ ID NO: 500327 - RNA, 24 nt, Artificial Sequence
  Synthetic
aaauaauaauaauggcaacaacua

SEQ ID NO: 500328 - RNA, 18 nt, Artificial Sequence
  Synthetic
uaaaguacuccacaacua

SEQ ID NO: 500329 - RNA, 19 nt, Artificial Sequence
  Synthetic
cuaaaguacuccacaacua

SEQ ID NO: 500330 - RNA, 20 nt, Artificial Sequence
  Synthetic
gcuaaaguacuccacaacua

SEQ ID NO: 500331 - RNA, 21 nt, Artificial Sequence
  Synthetic
ugcuaaaguacuccacaacua

SEQ ID NO: 500332 - RNA, 22 nt, Artificial Sequence
  Synthetic
uugcuaaaguacuccacaacua

SEQ ID NO: 500333 - RNA, 23 nt, Artificial Sequence
  Synthetic
uuugcuaaaguacuccacaacua

SEQ ID NO: 500334 - RNA, 24 nt, Artificial Sequence
  Synthetic
uuuugcuaaaguacuccacaacua

SEQ ID NO: 500335 - RNA, 18 nt, Artificial Sequence
  Synthetic
cagcccagaugacaacua

SEQ ID NO: 500336 - RNA, 19 nt, Artificial Sequence
  Synthetic
ccagcccagaugacaacua

SEQ ID NO: 500337 - RNA, 20 nt, Artificial Sequence
  Synthetic
gccagcccagaugacaacua

SEQ ID NO: 500338 - RNA, 21 nt, Artificial Sequence
  Synthetic
ugccagcccagaugacaacua

SEQ ID NO: 500339 - RNA, 22 nt, Artificial Sequence
  Synthetic
augccagcccagaugacaacua

SEQ ID NO: 500340 - RNA, 23 nt, Artificial Sequence
  Synthetic
gaugccagcccagaugacaacua

SEQ ID NO: 500341 - RNA, 24 nt, Artificial Sequence
  Synthetic
ggaugccagcccagaugacaacua

SEQ ID NO: 500342 - RNA, 18 nt, Artificial Sequence
  Synthetic
uucaauacccaccaacua

SEQ ID NO: 500343 - RNA, 19 nt, Artificial Sequence
  Synthetic
cuucaauacccaccaacua

SEQ ID NO: 500344 - RNA, 20 nt, Artificial Sequence
  Synthetic
ccuucaauacccaccaacua

SEQ ID NO: 500345 - RNA, 21 nt, Artificial Sequence
  Synthetic
cccuucaauacccaccaacua

SEQ ID NO: 500346 - RNA, 22 nt, Artificial Sequence
  Synthetic
ucccuucaauacccaccaacua

SEQ ID NO: 500347 - RNA, 23 nt, Artificial Sequence
  Synthetic
cucccuucaauacccaccaacua

SEQ ID NO: 500348 - RNA, 24 nt, Artificial Sequence
  Synthetic
acucccuucaauacccaccaacua

SEQ ID NO: 500349 - RNA, 18 nt, Artificial Sequence
  Synthetic
caauuauggaggcaacua

SEQ ID NO: 500350 - RNA, 19 nt, Artificial Sequence
  Synthetic
gcaauuauggaggcaacua

SEQ ID NO: 500351 - RNA, 20 nt, Artificial Sequence
  Synthetic
ugcaauuauggaggcaacua

SEQ ID NO: 500352 - RNA, 21 nt, Artificial Sequence
  Synthetic
augcaauuauggaggcaacua

SEQ ID NO: 500353 - RNA, 22 nt, Artificial Sequence
  Synthetic
caugcaauuauggaggcaacua

SEQ ID NO: 500354 - RNA, 23 nt, Artificial Sequence
  Synthetic
ucaugcaauuauggaggcaacua

SEQ ID NO: 500355 - RNA, 24 nt, Artificial Sequence
  Synthetic
cucaugcaauuauggaggcaacua

SEQ ID NO: 500356 - RNA, 18 nt, Artificial Sequence
  Synthetic
gaaccuggagggcaacua

SEQ ID NO: 500357 - RNA, 19 nt, Artificial Sequence
  Synthetic
ggaaccuggagggcaacua

SEQ ID NO: 500358 - RNA, 20 nt, Artificial Sequence
  Synthetic
uggaaccuggagggcaacua

SEQ ID NO: 500359 - RNA, 21 nt, Artificial Sequence
  Synthetic
uuggaaccuggagggcaacua

SEQ ID NO: 500360 - RNA, 22 nt, Artificial Sequence
  Synthetic
cuuggaaccuggagggcaacua

SEQ ID NO: 500361 - RNA, 23 nt, Artificial Sequence
  Synthetic
ucuuggaaccuggagggcaacua

SEQ ID NO: 500362 - RNA, 24 nt, Artificial Sequence
  Synthetic
aucuuggaaccuggagggcaacua

SEQ ID NO: 500363 - RNA, 18 nt, Artificial Sequence
  Synthetic
cuuaaaguuuugcaacua

SEQ ID NO: 500364 - RNA, 19 nt, Artificial Sequence
  Synthetic
acuuaaaguuuugcaacua

SEQ ID NO: 500365 - RNA, 20 nt, Artificial Sequence
  Synthetic
gacuuaaaguuuugcaacua

SEQ ID NO: 500366 - RNA, 21 nt, Artificial Sequence
  Synthetic
agacuuaaaguuuugcaacua

SEQ ID NO: 500367 - RNA, 22 nt, Artificial Sequence
  Synthetic
aagacuuaaaguuuugcaacua

SEQ ID NO: 500368 - RNA, 23 nt, Artificial Sequence
  Synthetic
gaagacuuaaaguuuugcaacua

SEQ ID NO: 500369 - RNA, 24 nt, Artificial Sequence
  Synthetic
agaagacuuaaaguuuugcaacua

SEQ ID NO: 500370 - RNA, 20 nt, Artificial Sequence
  Synthetic
ggaagaaacugcaucaacua

SEQ ID NO: 500371 - RNA, 21 nt, Artificial Sequence
  Synthetic
aggaagaaacugcaucaacua

SEQ ID NO: 500372 - RNA, 22 nt, Artificial Sequence
  Synthetic
uaggaagaaacugcaucaacua

SEQ ID NO: 500373 - RNA, 23 nt, Artificial Sequence
  Synthetic
cuaggaagaaacugcaucaacua

SEQ ID NO: 500374 - RNA, 24 nt, Artificial Sequence
  Synthetic
acuaggaagaaacugcaucaacua

SEQ ID NO: 500375 - RNA, 18 nt, Artificial Sequence
  Synthetic
uuugcagacugucaacua

SEQ ID NO: 500376 - RNA, 19 nt, Artificial Sequence
  Synthetic
uuuugcagacugucaacua

SEQ ID NO: 500377 - RNA, 20 nt, Artificial Sequence
  Synthetic
auuuugcagacugucaacua

SEQ ID NO: 500378 - RNA, 21 nt, Artificial Sequence
  Synthetic
uauuuugcagacugucaacua

SEQ ID NO: 500379 - RNA, 22 nt, Artificial Sequence
  Synthetic
auauuuugcagacugucaacua

SEQ ID NO: 500380 - RNA, 23 nt, Artificial Sequence
  Synthetic
aauauuuugcagacugucaacua

SEQ ID NO: 500381 - RNA, 24 nt, Artificial Sequence
  Synthetic
gaauauuuugcagacugucaacua

SEQ ID NO: 500382 - RNA, 18 nt, Artificial Sequence
  Synthetic
gaggguguuagagaacua

SEQ ID NO: 500383 - RNA, 19 nt, Artificial Sequence
  Synthetic
agaggguguuagagaacua

SEQ ID NO: 500384 - RNA, 20 nt, Artificial Sequence
  Synthetic
aagaggguguuagagaacua

SEQ ID NO: 500385 - RNA, 21 nt, Artificial Sequence
  Synthetic
gaagaggguguuagagaacua

SEQ ID NO: 500386 - RNA, 22 nt, Artificial Sequence
  Synthetic
ggaagaggguguuagagaacua

SEQ ID NO: 500387 - RNA, 23 nt, Artificial Sequence
  Synthetic
gggaagaggguguuagagaacua

SEQ ID NO: 500388 - RNA, 24 nt, Artificial Sequence
  Synthetic
ggggaagaggguguuagagaacua

SEQ ID NO: 500389 - RNA, 18 nt, Artificial Sequence
  Synthetic
gacaccagaggagaacua

SEQ ID NO: 500390 - RNA, 19 nt, Artificial Sequence
  Synthetic
ggacaccagaggagaacua

SEQ ID NO: 500391 - RNA, 20 nt, Artificial Sequence
  Synthetic
gggacaccagaggagaacua

SEQ ID NO: 500392 - RNA, 21 nt, Artificial Sequence
  Synthetic
ggggacaccagaggagaacua

SEQ ID NO: 500393 - RNA, 22 nt, Artificial Sequence
  Synthetic
uggggacaccagaggagaacua

SEQ ID NO: 500394 - RNA, 23 nt, Artificial Sequence
  Synthetic
cuggggacaccagaggagaacua

SEQ ID NO: 500395 - RNA, 24 nt, Artificial Sequence
  Synthetic
ccuggggacaccagaggagaacua

SEQ ID NO: 500396 - RNA, 18 nt, Artificial Sequence
  Synthetic
uagguguaucuagaacua

SEQ ID NO: 500397 - RNA, 19 nt, Artificial Sequence
  Synthetic
auagguguaucuagaacua

SEQ ID NO: 500398 - RNA, 20 nt, Artificial Sequence
  Synthetic
gauagguguaucuagaacua

SEQ ID NO: 500399 - RNA, 21 nt, Artificial Sequence
  Synthetic
cgauagguguaucuagaacua

SEQ ID NO: 500400 - RNA, 22 nt, Artificial Sequence
  Synthetic
ucgauagguguaucuagaacua

SEQ ID NO: 500401 - RNA, 23 nt, Artificial Sequence
  Synthetic
uucgauagguguaucuagaacua

SEQ ID NO: 500402 - RNA, 24 nt, Artificial Sequence
  Synthetic
uuucgauagguguaucuagaacua

SEQ ID NO: 500403 - RNA, 18 nt, Artificial Sequence
  Synthetic
ucacauuucaaggaacua

SEQ ID NO: 500404 - RNA, 19 nt, Artificial Sequence
  Synthetic
gucacauuucaaggaacua

SEQ ID NO: 500405 - RNA, 20 nt, Artificial Sequence
  Synthetic
ugucacauuucaaggaacua

SEQ ID NO: 500406 - RNA, 21 nt, Artificial Sequence
  Synthetic
augucacauuucaaggaacua

SEQ ID NO: 500407 - RNA, 22 nt, Artificial Sequence
  Synthetic
aaugucacauuucaaggaacua

SEQ ID NO: 500408 - RNA, 23 nt, Artificial Sequence
  Synthetic
uaaugucacauuucaaggaacua

SEQ ID NO: 500409 - RNA, 24 nt, Artificial Sequence
  Synthetic
cuaaugucacauuucaaggaacua

SEQ ID NO: 500410 - RNA, 18 nt, Artificial Sequence
  Synthetic
augaggcaaaaugaacua

SEQ ID NO: 500411 - RNA, 19 nt, Artificial Sequence
  Synthetic
caugaggcaaaaugaacua

SEQ ID NO: 500412 - RNA, 20 nt, Artificial Sequence
  Synthetic
ucaugaggcaaaaugaacua

SEQ ID NO: 500413 - RNA, 21 nt, Artificial Sequence
  Synthetic
aucaugaggcaaaaugaacua

SEQ ID NO: 500414 - RNA, 22 nt, Artificial Sequence
  Synthetic
gaucaugaggcaaaaugaacua

SEQ ID NO: 500415 - RNA, 23 nt, Artificial Sequence
  Synthetic
ugaucaugaggcaaaaugaacua

SEQ ID NO: 500416 - RNA, 24 nt, Artificial Sequence
  Synthetic
cugaucaugaggcaaaaugaacua

SEQ ID NO: 500417 - RNA, 18 nt, Artificial Sequence
  Synthetic
ggccauaucuaugaacua

SEQ ID NO: 500418 - RNA, 19 nt, Artificial Sequence
  Synthetic
uggccauaucuaugaacua

SEQ ID NO: 500419 - RNA, 20 nt, Artificial Sequence
  Synthetic
uuggccauaucuaugaacua

SEQ ID NO: 500420 - RNA, 21 nt, Artificial Sequence
  Synthetic
uuuggccauaucuaugaacua

SEQ ID NO: 500421 - RNA, 22 nt, Artificial Sequence
  Synthetic
auuuggccauaucuaugaacua

SEQ ID NO: 500422 - RNA, 23 nt, Artificial Sequence
  Synthetic
cauuuggccauaucuaugaacua

SEQ ID NO: 500423 - RNA, 24 nt, Artificial Sequence
  Synthetic
acauuuggccauaucuaugaacua

SEQ ID NO: 500424 - RNA, 18 nt, Artificial Sequence
  Synthetic
gcaaaauuacuugaacua

SEQ ID NO: 500425 - RNA, 19 nt, Artificial Sequence
  Synthetic
ugcaaaauuacuugaacua

SEQ ID NO: 500426 - RNA, 20 nt, Artificial Sequence
  Synthetic
uugcaaaauuacuugaacua

SEQ ID NO: 500427 - RNA, 21 nt, Artificial Sequence
  Synthetic
auugcaaaauuacuugaacua

SEQ ID NO: 500428 - RNA, 22 nt, Artificial Sequence
  Synthetic
aauugcaaaauuacuugaacua

SEQ ID NO: 500429 - RNA, 23 nt, Artificial Sequence
  Synthetic
uaauugcaaaauuacuugaacua

SEQ ID NO: 500430 - RNA, 24 nt, Artificial Sequence
  Synthetic
uuaauugcaaaauuacuugaacua

SEQ ID NO: 500431 - RNA, 18 nt, Artificial Sequence
  Synthetic
uucaucagcuacuaacua

SEQ ID NO: 500432 - RNA, 19 nt, Artificial Sequence
  Synthetic
auucaucagcuacuaacua

SEQ ID NO: 500433 - RNA, 20 nt, Artificial Sequence
  Synthetic
gauucaucagcuacuaacua

SEQ ID NO: 500434 - RNA, 21 nt, Artificial Sequence
  Synthetic
ggauucaucagcuacuaacua

SEQ ID NO: 500435 - RNA, 22 nt, Artificial Sequence
  Synthetic
aggauucaucagcuacuaacua

SEQ ID NO: 500436 - RNA, 23 nt, Artificial Sequence
  Synthetic
caggauucaucagcuacuaacua

SEQ ID NO: 500437 - RNA, 24 nt, Artificial Sequence
  Synthetic
ucaggauucaucagcuacuaacua

SEQ ID NO: 500438 - RNA, 18 nt, Artificial Sequence
  Synthetic
uggaaacuacaaacacua

SEQ ID NO: 500439 - RNA, 19 nt, Artificial Sequence
  Synthetic
cuggaaacuacaaacacua

SEQ ID NO: 500440 - RNA, 20 nt, Artificial Sequence
  Synthetic
ccuggaaacuacaaacacua

SEQ ID NO: 500441 - RNA, 21 nt, Artificial Sequence
  Synthetic
cccuggaaacuacaaacacua

SEQ ID NO: 500442 - RNA, 22 nt, Artificial Sequence
  Synthetic
acccuggaaacuacaaacacua

SEQ ID NO: 500443 - RNA, 23 nt, Artificial Sequence
  Synthetic
uacccuggaaacuacaaacacua

SEQ ID NO: 500444 - RNA, 24 nt, Artificial Sequence
  Synthetic
cuacccuggaaacuacaaacacua

SEQ ID NO: 500445 - RNA, 18 nt, Artificial Sequence
  Synthetic
ucagcugcugaaacacua

SEQ ID NO: 500446 - RNA, 19 nt, Artificial Sequence
  Synthetic
uucagcugcugaaacacua

SEQ ID NO: 500447 - RNA, 20 nt, Artificial Sequence
  Synthetic
auucagcugcugaaacacua

SEQ ID NO: 500448 - RNA, 21 nt, Artificial Sequence
  Synthetic
uauucagcugcugaaacacua

SEQ ID NO: 500449 - RNA, 22 nt, Artificial Sequence
  Synthetic
guauucagcugcugaaacacua

SEQ ID NO: 500450 - RNA, 23 nt, Artificial Sequence
  Synthetic
uguauucagcugcugaaacacua

SEQ ID NO: 500451 - RNA, 24 nt, Artificial Sequence
  Synthetic
uuguauucagcugcugaaacacua

SEQ ID NO: 500452 - RNA, 18 nt, Artificial Sequence
  Synthetic
acuauaagauaaacacua

SEQ ID NO: 500453 - RNA, 19 nt, Artificial Sequence
  Synthetic
cacuauaagauaaacacua

SEQ ID NO: 500454 - RNA, 20 nt, Artificial Sequence
  Synthetic
ucacuauaagauaaacacua

SEQ ID NO: 500455 - RNA, 21 nt, Artificial Sequence
  Synthetic
uucacuauaagauaaacacua

SEQ ID NO: 500456 - RNA, 22 nt, Artificial Sequence
  Synthetic
auucacuauaagauaaacacua

SEQ ID NO: 500457 - RNA, 23 nt, Artificial Sequence
  Synthetic
uauucacuauaagauaaacacua

SEQ ID NO: 500458 - RNA, 24 nt, Artificial Sequence
  Synthetic
auauucacuauaagauaaacacua

SEQ ID NO: 500459 - RNA, 18 nt, Artificial Sequence
  Synthetic
aauuuuggcgcaacacua

SEQ ID NO: 500460 - RNA, 19 nt, Artificial Sequence
  Synthetic
uaauuuuggcgcaacacua

SEQ ID NO: 500461 - RNA, 20 nt, Artificial Sequence
  Synthetic
uuaauuuuggcgcaacacua

SEQ ID NO: 500462 - RNA, 21 nt, Artificial Sequence
  Synthetic
uuuaauuuuggcgcaacacua

SEQ ID NO: 500463 - RNA, 22 nt, Artificial Sequence
  Synthetic
auuuaauuuuggcgcaacacua

SEQ ID NO: 500464 - RNA, 23 nt, Artificial Sequence
  Synthetic
uauuuaauuuuggcgcaacacua

SEQ ID NO: 500465 - RNA, 24 nt, Artificial Sequence
  Synthetic
uuauuuaauuuuggcgcaacacua

SEQ ID NO: 500466 - RNA, 18 nt, Artificial Sequence
  Synthetic
uuugagcuuucaacacua

SEQ ID NO: 500467 - RNA, 19 nt, Artificial Sequence
  Synthetic
uuuugagcuuucaacacua

SEQ ID NO: 500468 - RNA, 20 nt, Artificial Sequence
  Synthetic
auuuugagcuuucaacacua

SEQ ID NO: 500469 - RNA, 21 nt, Artificial Sequence
  Synthetic
aauuuugagcuuucaacacua

SEQ ID NO: 500470 - RNA, 22 nt, Artificial Sequence
  Synthetic
uaauuuugagcuuucaacacua

SEQ ID NO: 500471 - RNA, 23 nt, Artificial Sequence
  Synthetic
uuaauuuugagcuuucaacacua

SEQ ID NO: 500472 - RNA, 24 nt, Artificial Sequence
  Synthetic
cuuaauuuugagcuuucaacacua

SEQ ID NO: 500473 - RNA, 18 nt, Artificial Sequence
  Synthetic
uuuucauuacuaacacua

SEQ ID NO: 500474 - RNA, 19 nt, Artificial Sequence
  Synthetic
auuuucauuacuaacacua

SEQ ID NO: 500475 - RNA, 20 nt, Artificial Sequence
  Synthetic
aauuuucauuacuaacacua

SEQ ID NO: 500476 - RNA, 21 nt, Artificial Sequence
  Synthetic
gaauuuucauuacuaacacua

SEQ ID NO: 500477 - RNA, 22 nt, Artificial Sequence
  Synthetic
ugaauuuucauuacuaacacua

SEQ ID NO: 500478 - RNA, 23 nt, Artificial Sequence
  Synthetic
gugaauuuucauuacuaacacua

SEQ ID NO: 500479 - RNA, 24 nt, Artificial Sequence
  Synthetic
agugaauuuucauuacuaacacua

SEQ ID NO: 500480 - RNA, 18 nt, Artificial Sequence
  Synthetic
ggcaguuugcacacacua

SEQ ID NO: 500481 - RNA, 19 nt, Artificial Sequence
  Synthetic
gggcaguuugcacacacua

SEQ ID NO: 500482 - RNA, 20 nt, Artificial Sequence
  Synthetic
agggcaguuugcacacacua

SEQ ID NO: 500483 - RNA, 21 nt, Artificial Sequence
  Synthetic
cagggcaguuugcacacacua

SEQ ID NO: 500484 - RNA, 22 nt, Artificial Sequence
  Synthetic
ucagggcaguuugcacacacua

SEQ ID NO: 500485 - RNA, 23 nt, Artificial Sequence
  Synthetic
aucagggcaguuugcacacacua

SEQ ID NO: 500486 - RNA, 24 nt, Artificial Sequence
  Synthetic
gaucagggcaguuugcacacacua

SEQ ID NO: 500487 - RNA, 18 nt, Artificial Sequence
  Synthetic
aagucaugagacacacua

SEQ ID NO: 500488 - RNA, 19 nt, Artificial Sequence
  Synthetic
uaagucaugagacacacua

SEQ ID NO: 500489 - RNA, 20 nt, Artificial Sequence
  Synthetic
uuaagucaugagacacacua

SEQ ID NO: 500490 - RNA, 21 nt, Artificial Sequence
  Synthetic
guuaagucaugagacacacua

SEQ ID NO: 500491 - RNA, 22 nt, Artificial Sequence
  Synthetic
gguuaagucaugagacacacua

SEQ ID NO: 500492 - RNA, 23 nt, Artificial Sequence
  Synthetic
agguuaagucaugagacacacua

SEQ ID NO: 500493 - RNA, 24 nt, Artificial Sequence
  Synthetic
uagguuaagucaugagacacacua

SEQ ID NO: 500494 - RNA, 18 nt, Artificial Sequence
  Synthetic
ucaauuaaaaauacacua

SEQ ID NO: 500495 - RNA, 19 nt, Artificial Sequence
  Synthetic
uucaauuaaaaauacacua

SEQ ID NO: 500496 - RNA, 20 nt, Artificial Sequence
  Synthetic
cuucaauuaaaaauacacua

SEQ ID NO: 500497 - RNA, 21 nt, Artificial Sequence
  Synthetic
ucuucaauuaaaaauacacua

SEQ ID NO: 500498 - RNA, 22 nt, Artificial Sequence
  Synthetic
gucuucaauuaaaaauacacua

SEQ ID NO: 500499 - RNA, 23 nt, Artificial Sequence
  Synthetic
ugucuucaauuaaaaauacacua

SEQ ID NO: 500500 - RNA, 24 nt, Artificial Sequence
  Synthetic
uugucuucaauuaaaaauacacua

SEQ ID NO: 500501 - RNA, 18 nt, Artificial Sequence
  Synthetic
acauggcuagcuacacua

SEQ ID NO: 500502 - RNA, 19 nt, Artificial Sequence
  Synthetic
cacauggcuagcuacacua

SEQ ID NO: 500503 - RNA, 20 nt, Artificial Sequence
  Synthetic
ccacauggcuagcuacacua

SEQ ID NO: 500504 - RNA, 21 nt, Artificial Sequence
  Synthetic
uccacauggcuagcuacacua

SEQ ID NO: 500505 - RNA, 22 nt, Artificial Sequence
  Synthetic
uuccacauggcuagcuacacua

SEQ ID NO: 500506 - RNA, 23 nt, Artificial Sequence
  Synthetic
guuccacauggcuagcuacacua

SEQ ID NO: 500507 - RNA, 24 nt, Artificial Sequence
  Synthetic
aguuccacauggcuagcuacacua

SEQ ID NO: 500508 - RNA, 18 nt, Artificial Sequence
  Synthetic
auugcaaauuuuacacua

SEQ ID NO: 500509 - RNA, 19 nt, Artificial Sequence
  Synthetic
uauugcaaauuuuacacua

SEQ ID NO: 500510 - RNA, 20 nt, Artificial Sequence
  Synthetic
cuauugcaaauuuuacacua

SEQ ID NO: 500511 - RNA, 21 nt, Artificial Sequence
  Synthetic
acuauugcaaauuuuacacua

SEQ ID NO: 500512 - RNA, 22 nt, Artificial Sequence
  Synthetic
cacuauugcaaauuuuacacua

SEQ ID NO: 500513 - RNA, 23 nt, Artificial Sequence
  Synthetic
acacuauugcaaauuuuacacua

SEQ ID NO: 500514 - RNA, 24 nt, Artificial Sequence
  Synthetic
aacacuauugcaaauuuuacacua

SEQ ID NO: 500515 - RNA, 18 nt, Artificial Sequence
  Synthetic
aaauuagcacaaccacua

SEQ ID NO: 500516 - RNA, 19 nt, Artificial Sequence
  Synthetic
uaaauuagcacaaccacua

SEQ ID NO: 500517 - RNA, 20 nt, Artificial Sequence
  Synthetic
guaaauuagcacaaccacua

SEQ ID NO: 500518 - RNA, 21 nt, Artificial Sequence
  Synthetic
uguaaauuagcacaaccacua

SEQ ID NO: 500519 - RNA, 22 nt, Artificial Sequence
  Synthetic
auguaaauuagcacaaccacua

SEQ ID NO: 500520 - RNA, 23 nt, Artificial Sequence
  Synthetic
aauguaaauuagcacaaccacua

SEQ ID NO: 500521 - RNA, 24 nt, Artificial Sequence
  Synthetic
aaauguaaauuagcacaaccacua

SEQ ID NO: 500522 - RNA, 18 nt, Artificial Sequence
  Synthetic
aaauuaguacaaccacua

SEQ ID NO: 500523 - RNA, 19 nt, Artificial Sequence
  Synthetic
uaaauuaguacaaccacua

SEQ ID NO: 500524 - RNA, 20 nt, Artificial Sequence
  Synthetic
auaaauuaguacaaccacua

SEQ ID NO: 500525 - RNA, 21 nt, Artificial Sequence
  Synthetic
uauaaauuaguacaaccacua

SEQ ID NO: 500526 - RNA, 22 nt, Artificial Sequence
  Synthetic
auauaaauuaguacaaccacua

SEQ ID NO: 500527 - RNA, 23 nt, Artificial Sequence
  Synthetic
aauauaaauuaguacaaccacua

SEQ ID NO: 500528 - RNA, 24 nt, Artificial Sequence
  Synthetic
gaauauaaauuaguacaaccacua

SEQ ID NO: 500529 - RNA, 18 nt, Artificial Sequence
  Synthetic
ucucacaaauuaccacua

SEQ ID NO: 500530 - RNA, 19 nt, Artificial Sequence
  Synthetic
aucucacaaauuaccacua

SEQ ID NO: 500531 - RNA, 20 nt, Artificial Sequence
  Synthetic
gaucucacaaauuaccacua

SEQ ID NO: 500532 - RNA, 21 nt, Artificial Sequence
  Synthetic
ggaucucacaaauuaccacua

SEQ ID NO: 500533 - RNA, 22 nt, Artificial Sequence
  Synthetic
aggaucucacaaauuaccacua

SEQ ID NO: 500534 - RNA, 23 nt, Artificial Sequence
  Synthetic
caggaucucacaaauuaccacua

SEQ ID NO: 500535 - RNA, 24 nt, Artificial Sequence
  Synthetic
ccaggaucucacaaauuaccacua

SEQ ID NO: 500536 - RNA, 18 nt, Artificial Sequence
  Synthetic
uugcccuaaaucccacua

SEQ ID NO: 500537 - RNA, 19 nt, Artificial Sequence
  Synthetic
cuugcccuaaaucccacua

SEQ ID NO: 500538 - RNA, 20 nt, Artificial Sequence
  Synthetic
acuugcccuaaaucccacua

SEQ ID NO: 500539 - RNA, 21 nt, Artificial Sequence
  Synthetic
gacuugcccuaaaucccacua

SEQ ID NO: 500540 - RNA, 22 nt, Artificial Sequence
  Synthetic
agacuugcccuaaaucccacua

SEQ ID NO: 500541 - RNA, 23 nt, Artificial Sequence
  Synthetic
gagacuugcccuaaaucccacua

SEQ ID NO: 500542 - RNA, 24 nt, Artificial Sequence
  Synthetic
agagacuugcccuaaaucccacua

SEQ ID NO: 500543 - RNA, 18 nt, Artificial Sequence
  Synthetic
cuguagucccagccacua

SEQ ID NO: 500544 - RNA, 19 nt, Artificial Sequence
  Synthetic
ccuguagucccagccacua

SEQ ID NO: 500545 - RNA, 20 nt, Artificial Sequence
  Synthetic
gccuguagucccagccacua

SEQ ID NO: 500546 - RNA, 21 nt, Artificial Sequence
  Synthetic
ggccuguagucccagccacua

SEQ ID NO: 500547 - RNA, 22 nt, Artificial Sequence
  Synthetic
uggccuguagucccagccacua

SEQ ID NO: 500548 - RNA, 23 nt, Artificial Sequence
  Synthetic
auggccuguagucccagccacua

SEQ ID NO: 500549 - RNA, 24 nt, Artificial Sequence
  Synthetic
gauggccuguagucccagccacua

SEQ ID NO: 500550 - RNA, 18 nt, Artificial Sequence
  Synthetic
gaaaagguguagccacua

SEQ ID NO: 500551 - RNA, 19 nt, Artificial Sequence
  Synthetic
ugaaaagguguagccacua

SEQ ID NO: 500552 - RNA, 20 nt, Artificial Sequence
  Synthetic
gugaaaagguguagccacua

SEQ ID NO: 500553 - RNA, 21 nt, Artificial Sequence
  Synthetic
ugugaaaagguguagccacua

SEQ ID NO: 500554 - RNA, 22 nt, Artificial Sequence
  Synthetic
augugaaaagguguagccacua

SEQ ID NO: 500555 - RNA, 23 nt, Artificial Sequence
  Synthetic
aaugugaaaagguguagccacua

SEQ ID NO: 500556 - RNA, 24 nt, Artificial Sequence
  Synthetic
gaaugugaaaagguguagccacua

SEQ ID NO: 500557 - RNA, 18 nt, Artificial Sequence
  Synthetic
uuucagaauucgccacua

SEQ ID NO: 500558 - RNA, 19 nt, Artificial Sequence
  Synthetic
auuucagaauucgccacua

SEQ ID NO: 500559 - RNA, 20 nt, Artificial Sequence
  Synthetic
aauuucagaauucgccacua

SEQ ID NO: 500560 - RNA, 21 nt, Artificial Sequence
  Synthetic
aaauuucagaauucgccacua

SEQ ID NO: 500561 - RNA, 22 nt, Artificial Sequence
  Synthetic
aaaauuucagaauucgccacua

SEQ ID NO: 500562 - RNA, 23 nt, Artificial Sequence
  Synthetic
aaaaauuucagaauucgccacua

SEQ ID NO: 500563 - RNA, 24 nt, Artificial Sequence
  Synthetic
aaaaaauuucagaauucgccacua

SEQ ID NO: 500564 - RNA, 18 nt, Artificial Sequence
  Synthetic
uuaugcucccugccacua

SEQ ID NO: 500565 - RNA, 19 nt, Artificial Sequence
  Synthetic
guuaugcucccugccacua

SEQ ID NO: 500566 - RNA, 20 nt, Artificial Sequence
  Synthetic
cguuaugcucccugccacua

SEQ ID NO: 500567 - RNA, 21 nt, Artificial Sequence
  Synthetic
gcguuaugcucccugccacua

SEQ ID NO: 500568 - RNA, 22 nt, Artificial Sequence
  Synthetic
agcguuaugcucccugccacua

SEQ ID NO: 500569 - RNA, 23 nt, Artificial Sequence
  Synthetic
aagcguuaugcucccugccacua

SEQ ID NO: 500570 - RNA, 24 nt, Artificial Sequence
  Synthetic
aaagcguuaugcucccugccacua

SEQ ID NO: 500571 - RNA, 18 nt, Artificial Sequence
  Synthetic
acuacacuuuugccacua

SEQ ID NO: 500572 - RNA, 19 nt, Artificial Sequence
  Synthetic
cacuacacuuuugccacua

SEQ ID NO: 500573 - RNA, 20 nt, Artificial Sequence
  Synthetic
ucacuacacuuuugccacua

SEQ ID NO: 500574 - RNA, 21 nt, Artificial Sequence
  Synthetic
cucacuacacuuuugccacua

SEQ ID NO: 500575 - RNA, 22 nt, Artificial Sequence
  Synthetic
ucucacuacacuuuugccacua

SEQ ID NO: 500576 - RNA, 23 nt, Artificial Sequence
  Synthetic
gucucacuacacuuuugccacua

SEQ ID NO: 500577 - RNA, 24 nt, Artificial Sequence
  Synthetic
ugucucacuacacuuuugccacua

SEQ ID NO: 500578 - RNA, 18 nt, Artificial Sequence
  Synthetic
gauacagcaauuccacua

SEQ ID NO: 500579 - RNA, 19 nt, Artificial Sequence
  Synthetic
cgauacagcaauuccacua

SEQ ID NO: 500580 - RNA, 20 nt, Artificial Sequence
  Synthetic
acgauacagcaauuccacua

SEQ ID NO: 500581 - RNA, 21 nt, Artificial Sequence
  Synthetic
uacgauacagcaauuccacua

SEQ ID NO: 500582 - RNA, 22 nt, Artificial Sequence
  Synthetic
auacgauacagcaauuccacua

SEQ ID NO: 500583 - RNA, 23 nt, Artificial Sequence
  Synthetic
cauacgauacagcaauuccacua

SEQ ID NO: 500584 - RNA, 24 nt, Artificial Sequence
  Synthetic
ccauacgauacagcaauuccacua

SEQ ID NO: 500585 - RNA, 18 nt, Artificial Sequence
  Synthetic
uuuugggcuuuuccacua

SEQ ID NO: 500586 - RNA, 19 nt, Artificial Sequence
  Synthetic
uuuuugggcuuuuccacua

SEQ ID NO: 500587 - RNA, 20 nt, Artificial Sequence
  Synthetic
auuuuugggcuuuuccacua

SEQ ID NO: 500588 - RNA, 21 nt, Artificial Sequence
  Synthetic
aauuuuugggcuuuuccacua

SEQ ID NO: 500589 - RNA, 22 nt, Artificial Sequence
  Synthetic
uaauuuuugggcuuuuccacua

SEQ ID NO: 500590 - RNA, 23 nt, Artificial Sequence
  Synthetic
cuaauuuuugggcuuuuccacua

SEQ ID NO: 500591 - RNA, 24 nt, Artificial Sequence
  Synthetic
ccuaauuuuugggcuuuuccacua

SEQ ID NO: 500592 - RNA, 18 nt, Artificial Sequence
  Synthetic
ccuguaaucccagcacua

SEQ ID NO: 500593 - RNA, 19 nt, Artificial Sequence
  Synthetic
gccuguaaucccagcacua

SEQ ID NO: 500594 - RNA, 20 nt, Artificial Sequence
  Synthetic
cgccuguaaucccagcacua

SEQ ID NO: 500595 - RNA, 21 nt, Artificial Sequence
  Synthetic
acgccuguaaucccagcacua

SEQ ID NO: 500596 - RNA, 22 nt, Artificial Sequence
  Synthetic
cacgccuguaaucccagcacua

SEQ ID NO: 500597 - RNA, 23 nt, Artificial Sequence
  Synthetic
ucacgccuguaaucccagcacua

SEQ ID NO: 500598 - RNA, 24 nt, Artificial Sequence
  Synthetic
cucacgccuguaaucccagcacua

SEQ ID NO: 500599 - RNA, 18 nt, Artificial Sequence
  Synthetic
uauuaguaacgugcacua

SEQ ID NO: 500600 - RNA, 19 nt, Artificial Sequence
  Synthetic
cuauuaguaacgugcacua

SEQ ID NO: 500601 - RNA, 20 nt, Artificial Sequence
  Synthetic
ucuauuaguaacgugcacua

SEQ ID NO: 500602 - RNA, 21 nt, Artificial Sequence
  Synthetic
uucuauuaguaacgugcacua

SEQ ID NO: 500603 - RNA, 22 nt, Artificial Sequence
  Synthetic
auucuauuaguaacgugcacua

SEQ ID NO: 500604 - RNA, 23 nt, Artificial Sequence
  Synthetic
aauucuauuaguaacgugcacua

SEQ ID NO: 500605 - RNA, 24 nt, Artificial Sequence
  Synthetic
caauucuauuaguaacgugcacua

SEQ ID NO: 500606 - RNA, 18 nt, Artificial Sequence
  Synthetic
ggcacacuagaaucacua

SEQ ID NO: 500607 - RNA, 19 nt, Artificial Sequence
  Synthetic
uggcacacuagaaucacua

SEQ ID NO: 500608 - RNA, 20 nt, Artificial Sequence
  Synthetic
guggcacacuagaaucacua

SEQ ID NO: 500609 - RNA, 21 nt, Artificial Sequence
  Synthetic
gguggcacacuagaaucacua

SEQ ID NO: 500610 - RNA, 22 nt, Artificial Sequence
  Synthetic
agguggcacacuagaaucacua

SEQ ID NO: 500611 - RNA, 23 nt, Artificial Sequence
  Synthetic
uagguggcacacuagaaucacua

SEQ ID NO: 500612 - RNA, 24 nt, Artificial Sequence
  Synthetic
cuagguggcacacuagaaucacua

SEQ ID NO: 500613 - RNA, 18 nt, Artificial Sequence
  Synthetic
auuaaauaaguaucacua

SEQ ID NO: 500614 - RNA, 19 nt, Artificial Sequence
  Synthetic
aauuaaauaaguaucacua

SEQ ID NO: 500615 - RNA, 20 nt, Artificial Sequence
  Synthetic
uaauuaaauaaguaucacua

SEQ ID NO: 500616 - RNA, 21 nt, Artificial Sequence
  Synthetic
cuaauuaaauaaguaucacua

SEQ ID NO: 500617 - RNA, 22 nt, Artificial Sequence
  Synthetic
acuaauuaaauaaguaucacua

SEQ ID NO: 500618 - RNA, 23 nt, Artificial Sequence
  Synthetic
aacuaauuaaauaaguaucacua

SEQ ID NO: 500619 - RNA, 24 nt, Artificial Sequence
  Synthetic
caacuaauuaaauaaguaucacua

SEQ ID NO: 500620 - RNA, 18 nt, Artificial Sequence
  Synthetic
gggggaaggcacucacua

SEQ ID NO: 500621 - RNA, 19 nt, Artificial Sequence
  Synthetic
agggggaaggcacucacua

SEQ ID NO: 500622 - RNA, 20 nt, Artificial Sequence
  Synthetic
uagggggaaggcacucacua

SEQ ID NO: 500623 - RNA, 21 nt, Artificial Sequence
  Synthetic
cuagggggaaggcacucacua

SEQ ID NO: 500624 - RNA, 22 nt, Artificial Sequence
  Synthetic
ucuagggggaaggcacucacua

SEQ ID NO: 500625 - RNA, 23 nt, Artificial Sequence
  Synthetic
uucuagggggaaggcacucacua

SEQ ID NO: 500626 - RNA, 24 nt, Artificial Sequence
  Synthetic
guucuagggggaaggcacucacua

SEQ ID NO: 500627 - RNA, 18 nt, Artificial Sequence
  Synthetic
ggagaacaaaagucacua

SEQ ID NO: 500628 - RNA, 19 nt, Artificial Sequence
  Synthetic
uggagaacaaaagucacua

SEQ ID NO: 500629 - RNA, 20 nt, Artificial Sequence
  Synthetic
uuggagaacaaaagucacua

SEQ ID NO: 500630 - RNA, 21 nt, Artificial Sequence
  Synthetic
auuggagaacaaaagucacua

SEQ ID NO: 500631 - RNA, 22 nt, Artificial Sequence
  Synthetic
uauuggagaacaaaagucacua

SEQ ID NO: 500632 - RNA, 23 nt, Artificial Sequence
  Synthetic
uuauuggagaacaaaagucacua

SEQ ID NO: 500633 - RNA, 24 nt, Artificial Sequence
  Synthetic
guuauuggagaacaaaagucacua

SEQ ID NO: 500634 - RNA, 18 nt, Artificial Sequence
  Synthetic
uuuuaaaauaagucacua

SEQ ID NO: 500635 - RNA, 19 nt, Artificial Sequence
  Synthetic
cuuuuaaaauaagucacua

SEQ ID NO: 500636 - RNA, 20 nt, Artificial Sequence
  Synthetic
acuuuuaaaauaagucacua

SEQ ID NO: 500637 - RNA, 21 nt, Artificial Sequence
  Synthetic
uacuuuuaaaauaagucacua

SEQ ID NO: 500638 - RNA, 22 nt, Artificial Sequence
  Synthetic
auacuuuuaaaauaagucacua

SEQ ID NO: 500639 - RNA, 23 nt, Artificial Sequence
  Synthetic
gauacuuuuaaaauaagucacua

SEQ ID NO: 500640 - RNA, 24 nt, Artificial Sequence
  Synthetic
agauacuuuuaaaauaagucacua

SEQ ID NO: 500641 - RNA, 18 nt, Artificial Sequence
  Synthetic
ugggauuggccgucacua

SEQ ID NO: 500642 - RNA, 19 nt, Artificial Sequence
  Synthetic
cugggauuggccgucacua

SEQ ID NO: 500643 - RNA, 20 nt, Artificial Sequence
  Synthetic
ucugggauuggccgucacua

SEQ ID NO: 500644 - RNA, 21 nt, Artificial Sequence
  Synthetic
aucugggauuggccgucacua

SEQ ID NO: 500645 - RNA, 22 nt, Artificial Sequence
  Synthetic
aaucugggauuggccgucacua

SEQ ID NO: 500646 - RNA, 23 nt, Artificial Sequence
  Synthetic
aaaucugggauuggccgucacua

SEQ ID NO: 500647 - RNA, 24 nt, Artificial Sequence
  Synthetic
gaaaucugggauuggccgucacua

SEQ ID NO: 500648 - RNA, 18 nt, Artificial Sequence
  Synthetic
ugggucccacugucacua

SEQ ID NO: 500649 - RNA, 19 nt, Artificial Sequence
  Synthetic
augggucccacugucacua

SEQ ID NO: 500650 - RNA, 20 nt, Artificial Sequence
  Synthetic
caugggucccacugucacua

SEQ ID NO: 500651 - RNA, 21 nt, Artificial Sequence
  Synthetic
ccaugggucccacugucacua

SEQ ID NO: 500652 - RNA, 22 nt, Artificial Sequence
  Synthetic
gccaugggucccacugucacua

SEQ ID NO: 500653 - RNA, 23 nt, Artificial Sequence
  Synthetic
ugccaugggucccacugucacua

SEQ ID NO: 500654 - RNA, 24 nt, Artificial Sequence
  Synthetic
uugccaugggucccacugucacua

SEQ ID NO: 500655 - RNA, 18 nt, Artificial Sequence
  Synthetic
aacaaugaaguuucacua

SEQ ID NO: 500656 - RNA, 19 nt, Artificial Sequence
  Synthetic
caacaaugaaguuucacua

SEQ ID NO: 500657 - RNA, 20 nt, Artificial Sequence
  Synthetic
gcaacaaugaaguuucacua

SEQ ID NO: 500658 - RNA, 21 nt, Artificial Sequence
  Synthetic
ggcaacaaugaaguuucacua

SEQ ID NO: 500659 - RNA, 22 nt, Artificial Sequence
  Synthetic
uggcaacaaugaaguuucacua

SEQ ID NO: 500660 - RNA, 23 nt, Artificial Sequence
  Synthetic
guggcaacaaugaaguuucacua

SEQ ID NO: 500661 - RNA, 24 nt, Artificial Sequence
  Synthetic
aguggcaacaaugaaguuucacua

SEQ ID NO: 500662 - RNA, 18 nt, Artificial Sequence
  Synthetic
aucaaaaggaaaagacua

SEQ ID NO: 500663 - RNA, 19 nt, Artificial Sequence
  Synthetic
aaucaaaaggaaaagacua

SEQ ID NO: 500664 - RNA, 20 nt, Artificial Sequence
  Synthetic
gaaucaaaaggaaaagacua

SEQ ID NO: 500665 - RNA, 21 nt, Artificial Sequence
  Synthetic
agaaucaaaaggaaaagacua

SEQ ID NO: 500666 - RNA, 22 nt, Artificial Sequence
  Synthetic
uagaaucaaaaggaaaagacua

SEQ ID NO: 500667 - RNA, 23 nt, Artificial Sequence
  Synthetic
cuagaaucaaaaggaaaagacua

SEQ ID NO: 500668 - RNA, 24 nt, Artificial Sequence
  Synthetic
ccuagaaucaaaaggaaaagacua

SEQ ID NO: 500669 - RNA, 18 nt, Artificial Sequence
  Synthetic
gacccauggaaaagacua

SEQ ID NO: 500670 - RNA, 19 nt, Artificial Sequence
  Synthetic
agacccauggaaaagacua

SEQ ID NO: 500671 - RNA, 20 nt, Artificial Sequence
  Synthetic
aagacccauggaaaagacua

SEQ ID NO: 500672 - RNA, 21 nt, Artificial Sequence
  Synthetic
aaagacccauggaaaagacua

SEQ ID NO: 500673 - RNA, 22 nt, Artificial Sequence
  Synthetic
caaagacccauggaaaagacua

SEQ ID NO: 500674 - RNA, 23 nt, Artificial Sequence
  Synthetic
acaaagacccauggaaaagacua

SEQ ID NO: 500675 - RNA, 24 nt, Artificial Sequence
  Synthetic
cacaaagacccauggaaaagacua

SEQ ID NO: 500676 - RNA, 18 nt, Artificial Sequence
  Synthetic
aaugugcuucaaagacua

SEQ ID NO: 500677 - RNA, 19 nt, Artificial Sequence
  Synthetic
uaaugugcuucaaagacua

SEQ ID NO: 500678 - RNA, 20 nt, Artificial Sequence
  Synthetic
auaaugugcuucaaagacua

SEQ ID NO: 500679 - RNA, 21 nt, Artificial Sequence
  Synthetic
gauaaugugcuucaaagacua

SEQ ID NO: 500680 - RNA, 22 nt, Artificial Sequence
  Synthetic
agauaaugugcuucaaagacua

SEQ ID NO: 500681 - RNA, 23 nt, Artificial Sequence
  Synthetic
gagauaaugugcuucaaagacua

SEQ ID NO: 500682 - RNA, 24 nt, Artificial Sequence
  Synthetic
ugagauaaugugcuucaaagacua

SEQ ID NO: 500683 - RNA, 18 nt, Artificial Sequence
  Synthetic
aagaugaaugaaagacua

SEQ ID NO: 500684 - RNA, 19 nt, Artificial Sequence
  Synthetic
uaagaugaaugaaagacua

SEQ ID NO: 500685 - RNA, 20 nt, Artificial Sequence
  Synthetic
auaagaugaaugaaagacua

SEQ ID NO: 500686 - RNA, 21 nt, Artificial Sequence
  Synthetic
aauaagaugaaugaaagacua

SEQ ID NO: 500687 - RNA, 22 nt, Artificial Sequence
  Synthetic
aaauaagaugaaugaaagacua

SEQ ID NO: 500688 - RNA, 23 nt, Artificial Sequence
  Synthetic
caaauaagaugaaugaaagacua

SEQ ID NO: 500689 - RNA, 24 nt, Artificial Sequence
  Synthetic
gcaaauaagaugaaugaaagacua

SEQ ID NO: 500690 - RNA, 18 nt, Artificial Sequence
  Synthetic
ucaaaauagguaagacua

SEQ ID NO: 500691 - RNA, 19 nt, Artificial Sequence
  Synthetic
cucaaaauagguaagacua

SEQ ID NO: 500692 - RNA, 20 nt, Artificial Sequence
  Synthetic
acucaaaauagguaagacua

SEQ ID NO: 500693 - RNA, 21 nt, Artificial Sequence
  Synthetic
uacucaaaauagguaagacua

SEQ ID NO: 500694 - RNA, 22 nt, Artificial Sequence
  Synthetic
auacucaaaauagguaagacua

SEQ ID NO: 500695 - RNA, 23 nt, Artificial Sequence
  Synthetic
cauacucaaaauagguaagacua

SEQ ID NO: 500696 - RNA, 24 nt, Artificial Sequence
  Synthetic
gcauacucaaaauagguaagacua

SEQ ID NO: 500697 - RNA, 18 nt, Artificial Sequence
  Synthetic
aaaucuugagccagacua

SEQ ID NO: 500698 - RNA, 19 nt, Artificial Sequence
  Synthetic
caaaucuugagccagacua

SEQ ID NO: 500699 - RNA, 20 nt, Artificial Sequence
  Synthetic
acaaaucuugagccagacua

SEQ ID NO: 500700 - RNA, 21 nt, Artificial Sequence
  Synthetic
gacaaaucuugagccagacua

SEQ ID NO: 500701 - RNA, 22 nt, Artificial Sequence
  Synthetic
ugacaaaucuugagccagacua

SEQ ID NO: 500702 - RNA, 23 nt, Artificial Sequence
  Synthetic
uugacaaaucuugagccagacua

SEQ ID NO: 500703 - RNA, 24 nt, Artificial Sequence
  Synthetic
auugacaaaucuugagccagacua

SEQ ID NO: 500704 - RNA, 18 nt, Artificial Sequence
  Synthetic
augggguugagcagacua

SEQ ID NO: 500705 - RNA, 19 nt, Artificial Sequence
  Synthetic
gaugggguugagcagacua

SEQ ID NO: 500706 - RNA, 20 nt, Artificial Sequence
  Synthetic
agaugggguugagcagacua

SEQ ID NO: 500707 - RNA, 21 nt, Artificial Sequence
  Synthetic
uagaugggguugagcagacua

SEQ ID NO: 500708 - RNA, 22 nt, Artificial Sequence
  Synthetic
cuagaugggguugagcagacua

SEQ ID NO: 500709 - RNA, 23 nt, Artificial Sequence
  Synthetic
ucuagaugggguugagcagacua

SEQ ID NO: 500710 - RNA, 24 nt, Artificial Sequence
  Synthetic
cucuagaugggguugagcagacua

SEQ ID NO: 500711 - RNA, 18 nt, Artificial Sequence
  Synthetic
cuagaaauucagagacua

SEQ ID NO: 500712 - RNA, 19 nt, Artificial Sequence
  Synthetic
acuagaaauucagagacua

SEQ ID NO: 500713 - RNA, 20 nt, Artificial Sequence
  Synthetic
uacuagaaauucagagacua

SEQ ID NO: 500714 - RNA, 21 nt, Artificial Sequence
  Synthetic
uuacuagaaauucagagacua

SEQ ID NO: 500715 - RNA, 22 nt, Artificial Sequence
  Synthetic
uuuacuagaaauucagagacua

SEQ ID NO: 500716 - RNA, 23 nt, Artificial Sequence
  Synthetic
guuuacuagaaauucagagacua

SEQ ID NO: 500717 - RNA, 24 nt, Artificial Sequence
  Synthetic
aguuuacuagaaauucagagacua

SEQ ID NO: 500718 - RNA, 18 nt, Artificial Sequence
  Synthetic
uaaaugaaauagagacua

SEQ ID NO: 500719 - RNA, 19 nt, Artificial Sequence
  Synthetic
auaaaugaaauagagacua

SEQ ID NO: 500720 - RNA, 20 nt, Artificial Sequence
  Synthetic
aauaaaugaaauagagacua

SEQ ID NO: 500721 - RNA, 21 nt, Artificial Sequence
  Synthetic
aaauaaaugaaauagagacua

SEQ ID NO: 500722 - RNA, 22 nt, Artificial Sequence
  Synthetic
gaaauaaaugaaauagagacua

SEQ ID NO: 500723 - RNA, 23 nt, Artificial Sequence
  Synthetic
agaaauaaaugaaauagagacua

SEQ ID NO: 500724 - RNA, 24 nt, Artificial Sequence
  Synthetic
cagaaauaaaugaaauagagacua

SEQ ID NO: 500725 - RNA, 18 nt, Artificial Sequence
  Synthetic
agagaacucuggagacua

SEQ ID NO: 500726 - RNA, 19 nt, Artificial Sequence
  Synthetic
uagagaacucuggagacua

SEQ ID NO: 500727 - RNA, 20 nt, Artificial Sequence
  Synthetic
uuagagaacucuggagacua

SEQ ID NO: 500728 - RNA, 21 nt, Artificial Sequence
  Synthetic
uuuagagaacucuggagacua

SEQ ID NO: 500729 - RNA, 22 nt, Artificial Sequence
  Synthetic
auuuagagaacucuggagacua

SEQ ID NO: 500730 - RNA, 23 nt, Artificial Sequence
  Synthetic
uauuuagagaacucuggagacua

SEQ ID NO: 500731 - RNA, 24 nt, Artificial Sequence
  Synthetic
uuauuuagagaacucuggagacua

SEQ ID NO: 500732 - RNA, 18 nt, Artificial Sequence
  Synthetic
uauguuuauuuuagacua

SEQ ID NO: 500733 - RNA, 19 nt, Artificial Sequence
  Synthetic
uuauguuuauuuuagacua

SEQ ID NO: 500734 - RNA, 20 nt, Artificial Sequence
  Synthetic
uuuauguuuauuuuagacua

SEQ ID NO: 500735 - RNA, 21 nt, Artificial Sequence
  Synthetic
uuuuauguuuauuuuagacua

SEQ ID NO: 500736 - RNA, 22 nt, Artificial Sequence
  Synthetic
auuuuauguuuauuuuagacua

SEQ ID NO: 500737 - RNA, 23 nt, Artificial Sequence
  Synthetic
uauuuuauguuuauuuuagacua

SEQ ID NO: 500738 - RNA, 24 nt, Artificial Sequence
  Synthetic
uuauuuuauguuuauuuuagacua

SEQ ID NO: 500739 - RNA, 18 nt, Artificial Sequence
  Synthetic
aauagacacuggggacua

SEQ ID NO: 500740 - RNA, 19 nt, Artificial Sequence
  Synthetic
caauagacacuggggacua

SEQ ID NO: 500741 - RNA, 20 nt, Artificial Sequence
  Synthetic
acaauagacacuggggacua

SEQ ID NO: 500742 - RNA, 21 nt, Artificial Sequence
  Synthetic
aacaauagacacuggggacua

SEQ ID NO: 500743 - RNA, 22 nt, Artificial Sequence
  Synthetic
gaacaauagacacuggggacua

SEQ ID NO: 500744 - RNA, 23 nt, Artificial Sequence
  Synthetic
ggaacaauagacacuggggacua

SEQ ID NO: 500745 - RNA, 24 nt, Artificial Sequence
  Synthetic
aggaacaauagacacuggggacua

SEQ ID NO: 500746 - RNA, 18 nt, Artificial Sequence
  Synthetic
uacuuggcggcuggacua

SEQ ID NO: 500747 - RNA, 19 nt, Artificial Sequence
  Synthetic
uuacuuggcggcuggacua

SEQ ID NO: 500748 - RNA, 20 nt, Artificial Sequence
  Synthetic
guuacuuggcggcuggacua

SEQ ID NO: 500749 - RNA, 21 nt, Artificial Sequence
  Synthetic
uguuacuuggcggcuggacua

SEQ ID NO: 500750 - RNA, 22 nt, Artificial Sequence
  Synthetic
guguuacuuggcggcuggacua

SEQ ID NO: 500751 - RNA, 23 nt, Artificial Sequence
  Synthetic
gguguuacuuggcggcuggacua

SEQ ID NO: 500752 - RNA, 24 nt, Artificial Sequence
  Synthetic
agguguuacuuggcggcuggacua

SEQ ID NO: 500753 - RNA, 18 nt, Artificial Sequence
  Synthetic
agccaugauguuggacua

SEQ ID NO: 500754 - RNA, 19 nt, Artificial Sequence
  Synthetic
aagccaugauguuggacua

SEQ ID NO: 500755 - RNA, 20 nt, Artificial Sequence
  Synthetic
uaagccaugauguuggacua

SEQ ID NO: 500756 - RNA, 21 nt, Artificial Sequence
  Synthetic
uuaagccaugauguuggacua

SEQ ID NO: 500757 - RNA, 22 nt, Artificial Sequence
  Synthetic
cuuaagccaugauguuggacua

SEQ ID NO: 500758 - RNA, 23 nt, Artificial Sequence
  Synthetic
ccuuaagccaugauguuggacua

SEQ ID NO: 500759 - RNA, 24 nt, Artificial Sequence
  Synthetic
gccuuaagccaugauguuggacua

SEQ ID NO: 500760 - RNA, 18 nt, Artificial Sequence
  Synthetic
auuggacagcaaugacua

SEQ ID NO: 500761 - RNA, 19 nt, Artificial Sequence
  Synthetic
cauuggacagcaaugacua

SEQ ID NO: 500762 - RNA, 20 nt, Artificial Sequence
  Synthetic
ucauuggacagcaaugacua

SEQ ID NO: 500763 - RNA, 21 nt, Artificial Sequence
  Synthetic
aucauuggacagcaaugacua

SEQ ID NO: 500764 - RNA, 22 nt, Artificial Sequence
  Synthetic
caucauuggacagcaaugacua

SEQ ID NO: 500765 - RNA, 23 nt, Artificial Sequence
  Synthetic
ucaucauuggacagcaaugacua

SEQ ID NO: 500766 - RNA, 24 nt, Artificial Sequence
  Synthetic
uucaucauuggacagcaaugacua

SEQ ID NO: 500767 - RNA, 18 nt, Artificial Sequence
  Synthetic
ccuuccuuucaaugacua

SEQ ID NO: 500768 - RNA, 19 nt, Artificial Sequence
  Synthetic
accuuccuuucaaugacua

SEQ ID NO: 500769 - RNA, 20 nt, Artificial Sequence
  Synthetic
aaccuuccuuucaaugacua

SEQ ID NO: 500770 - RNA, 21 nt, Artificial Sequence
  Synthetic
uaaccuuccuuucaaugacua

SEQ ID NO: 500771 - RNA, 22 nt, Artificial Sequence
  Synthetic
uuaaccuuccuuucaaugacua

SEQ ID NO: 500772 - RNA, 23 nt, Artificial Sequence
  Synthetic
uuuaaccuuccuuucaaugacua

SEQ ID NO: 500773 - RNA, 24 nt, Artificial Sequence
  Synthetic
uuuuaaccuuccuuucaaugacua

SEQ ID NO: 500774 - RNA, 18 nt, Artificial Sequence
  Synthetic
agcaaaaaugaaugacua

SEQ ID NO: 500775 - RNA, 19 nt, Artificial Sequence
  Synthetic
gagcaaaaaugaaugacua

SEQ ID NO: 500776 - RNA, 20 nt, Artificial Sequence
  Synthetic
agagcaaaaaugaaugacua

SEQ ID NO: 500777 - RNA, 21 nt, Artificial Sequence
  Synthetic
aagagcaaaaaugaaugacua

SEQ ID NO: 500778 - RNA, 22 nt, Artificial Sequence
  Synthetic
uaagagcaaaaaugaaugacua

SEQ ID NO: 500779 - RNA, 23 nt, Artificial Sequence
  Synthetic
auaagagcaaaaaugaaugacua

SEQ ID NO: 500780 - RNA, 24 nt, Artificial Sequence
  Synthetic
aauaagagcaaaaaugaaugacua

SEQ ID NO: 500781 - RNA, 18 nt, Artificial Sequence
  Synthetic
ccuucucuuggaugacua

SEQ ID NO: 500782 - RNA, 19 nt, Artificial Sequence
  Synthetic
cccuucucuuggaugacua

SEQ ID NO: 500783 - RNA, 20 nt, Artificial Sequence
  Synthetic
ccccuucucuuggaugacua

SEQ ID NO: 500784 - RNA, 21 nt, Artificial Sequence
  Synthetic
gccccuucucuuggaugacua

SEQ ID NO: 500785 - RNA, 22 nt, Artificial Sequence
  Synthetic
ugccccuucucuuggaugacua

SEQ ID NO: 500786 - RNA, 23 nt, Artificial Sequence
  Synthetic
gugccccuucucuuggaugacua

SEQ ID NO: 500787 - RNA, 24 nt, Artificial Sequence
  Synthetic
ggugccccuucucuuggaugacua

SEQ ID NO: 500788 - RNA, 18 nt, Artificial Sequence
  Synthetic
auuugaaaucuaugacua

SEQ ID NO: 500789 - RNA, 19 nt, Artificial Sequence
  Synthetic
aauuugaaaucuaugacua

SEQ ID NO: 500790 - RNA, 20 nt, Artificial Sequence
  Synthetic
uaauuugaaaucuaugacua

SEQ ID NO: 500791 - RNA, 21 nt, Artificial Sequence
  Synthetic
cuaauuugaaaucuaugacua

SEQ ID NO: 500792 - RNA, 22 nt, Artificial Sequence
  Synthetic
acuaauuugaaaucuaugacua

SEQ ID NO: 500793 - RNA, 23 nt, Artificial Sequence
  Synthetic
cacuaauuugaaaucuaugacua

SEQ ID NO: 500794 - RNA, 24 nt, Artificial Sequence
  Synthetic
ccacuaauuugaaaucuaugacua

SEQ ID NO: 500795 - RNA, 18 nt, Artificial Sequence
  Synthetic
aaagccaaucuaugacua

SEQ ID NO: 500796 - RNA, 19 nt, Artificial Sequence
  Synthetic
aaaagccaaucuaugacua

SEQ ID NO: 500797 - RNA, 20 nt, Artificial Sequence
  Synthetic
uaaaagccaaucuaugacua

SEQ ID NO: 500798 - RNA, 21 nt, Artificial Sequence
  Synthetic
uuaaaagccaaucuaugacua

SEQ ID NO: 500799 - RNA, 22 nt, Artificial Sequence
  Synthetic
cuuaaaagccaaucuaugacua

SEQ ID NO: 500800 - RNA, 23 nt, Artificial Sequence
  Synthetic
gcuuaaaagccaaucuaugacua

SEQ ID NO: 500801 - RNA, 24 nt, Artificial Sequence
  Synthetic
agcuuaaaagccaaucuaugacua

SEQ ID NO: 500802 - RNA, 18 nt, Artificial Sequence
  Synthetic
guacagaucagcugacua

SEQ ID NO: 500803 - RNA, 19 nt, Artificial Sequence
  Synthetic
gguacagaucagcugacua

SEQ ID NO: 500804 - RNA, 20 nt, Artificial Sequence
  Synthetic
ugguacagaucagcugacua

SEQ ID NO: 500805 - RNA, 21 nt, Artificial Sequence
  Synthetic
gugguacagaucagcugacua

SEQ ID NO: 500806 - RNA, 22 nt, Artificial Sequence
  Synthetic
agugguacagaucagcugacua

SEQ ID NO: 500807 - RNA, 23 nt, Artificial Sequence
  Synthetic
aagugguacagaucagcugacua

SEQ ID NO: 500808 - RNA, 24 nt, Artificial Sequence
  Synthetic
uaagugguacagaucagcugacua

SEQ ID NO: 500809 - RNA, 18 nt, Artificial Sequence
  Synthetic
agaaauucaaucugacua

SEQ ID NO: 500810 - RNA, 19 nt, Artificial Sequence
  Synthetic
gagaaauucaaucugacua

SEQ ID NO: 500811 - RNA, 20 nt, Artificial Sequence
  Synthetic
ggagaaauucaaucugacua

SEQ ID NO: 500812 - RNA, 21 nt, Artificial Sequence
  Synthetic
aggagaaauucaaucugacua

SEQ ID NO: 500813 - RNA, 22 nt, Artificial Sequence
  Synthetic
gaggagaaauucaaucugacua

SEQ ID NO: 500814 - RNA, 23 nt, Artificial Sequence
  Synthetic
ugaggagaaauucaaucugacua

SEQ ID NO: 500815 - RNA, 24 nt, Artificial Sequence
  Synthetic
cugaggagaaauucaaucugacua

SEQ ID NO: 500816 - RNA, 18 nt, Artificial Sequence
  Synthetic
aauuggaugcagugacua

SEQ ID NO: 500817 - RNA, 19 nt, Artificial Sequence
  Synthetic
aaauuggaugcagugacua

SEQ ID NO: 500818 - RNA, 20 nt, Artificial Sequence
  Synthetic
aaaauuggaugcagugacua

SEQ ID NO: 500819 - RNA, 21 nt, Artificial Sequence
  Synthetic
aaaaauuggaugcagugacua

SEQ ID NO: 500820 - RNA, 22 nt, Artificial Sequence
  Synthetic
aaaaaauuggaugcagugacua

SEQ ID NO: 500821 - RNA, 23 nt, Artificial Sequence
  Synthetic
gaaaaaauuggaugcagugacua

SEQ ID NO: 500822 - RNA, 24 nt, Artificial Sequence
  Synthetic
agaaaaaauuggaugcagugacua

SEQ ID NO: 500823 - RNA, 18 nt, Artificial Sequence
  Synthetic
ugcaagcaucagugacua

SEQ ID NO: 500824 - RNA, 19 nt, Artificial Sequence
  Synthetic
gugcaagcaucagugacua

SEQ ID NO: 500825 - RNA, 20 nt, Artificial Sequence
  Synthetic
cgugcaagcaucagugacua

SEQ ID NO: 500826 - RNA, 21 nt, Artificial Sequence
  Synthetic
ucgugcaagcaucagugacua

SEQ ID NO: 500827 - RNA, 22 nt, Artificial Sequence
  Synthetic
aucgugcaagcaucagugacua

SEQ ID NO: 500828 - RNA, 23 nt, Artificial Sequence
  Synthetic
caucgugcaagcaucagugacua

SEQ ID NO: 500829 - RNA, 24 nt, Artificial Sequence
  Synthetic
gcaucgugcaagcaucagugacua

SEQ ID NO: 500830 - RNA, 18 nt, Artificial Sequence
  Synthetic
ugcugagaaauuugacua

SEQ ID NO: 500831 - RNA, 19 nt, Artificial Sequence
  Synthetic
cugcugagaaauuugacua

SEQ ID NO: 500832 - RNA, 20 nt, Artificial Sequence
  Synthetic
acugcugagaaauuugacua

SEQ ID NO: 500833 - RNA, 21 nt, Artificial Sequence
  Synthetic
uacugcugagaaauuugacua

SEQ ID NO: 500834 - RNA, 22 nt, Artificial Sequence
  Synthetic
uuacugcugagaaauuugacua

SEQ ID NO: 500835 - RNA, 23 nt, Artificial Sequence
  Synthetic
uuuacugcugagaaauuugacua

SEQ ID NO: 500836 - RNA, 24 nt, Artificial Sequence
  Synthetic
uuuuacugcugagaaauuugacua

SEQ ID NO: 500837 - RNA, 18 nt, Artificial Sequence
  Synthetic
gugcucagaguuugacua

SEQ ID NO: 500838 - RNA, 19 nt, Artificial Sequence
  Synthetic
ugugcucagaguuugacua

SEQ ID NO: 500839 - RNA, 20 nt, Artificial Sequence
  Synthetic
gugugcucagaguuugacua

SEQ ID NO: 500840 - RNA, 21 nt, Artificial Sequence
  Synthetic
ggugugcucagaguuugacua

SEQ ID NO: 500841 - RNA, 22 nt, Artificial Sequence
  Synthetic
aggugugcucagaguuugacua

SEQ ID NO: 500842 - RNA, 23 nt, Artificial Sequence
  Synthetic
caggugugcucagaguuugacua

SEQ ID NO: 500843 - RNA, 24 nt, Artificial Sequence
  Synthetic
acaggugugcucagaguuugacua

SEQ ID NO: 500844 - RNA, 18 nt, Artificial Sequence
  Synthetic
gugaugcucaaaauacua

SEQ ID NO: 500845 - RNA, 19 nt, Artificial Sequence
  Synthetic
ugugaugcucaaaauacua

SEQ ID NO: 500846 - RNA, 20 nt, Artificial Sequence
  Synthetic
uugugaugcucaaaauacua

SEQ ID NO: 500847 - RNA, 21 nt, Artificial Sequence
  Synthetic
uuugugaugcucaaaauacua

SEQ ID NO: 500848 - RNA, 22 nt, Artificial Sequence
  Synthetic
cuuugugaugcucaaaauacua

SEQ ID NO: 500849 - RNA, 23 nt, Artificial Sequence
  Synthetic
gcuuugugaugcucaaaauacua

SEQ ID NO: 500850 - RNA, 24 nt, Artificial Sequence
  Synthetic
ugcuuugugaugcucaaaauacua

SEQ ID NO: 500851 - RNA, 18 nt, Artificial Sequence
  Synthetic
auucucaaugaaauacua

SEQ ID NO: 500852 - RNA, 19 nt, Artificial Sequence
  Synthetic
aauucucaaugaaauacua

SEQ ID NO: 500853 - RNA, 20 nt, Artificial Sequence
  Synthetic
aaauucucaaugaaauacua

SEQ ID NO: 500854 - RNA, 21 nt, Artificial Sequence
  Synthetic
aaaauucucaaugaaauacua

SEQ ID NO: 500855 - RNA, 22 nt, Artificial Sequence
  Synthetic
aaaaauucucaaugaaauacua

SEQ ID NO: 500856 - RNA, 23 nt, Artificial Sequence
  Synthetic
caaaaauucucaaugaaauacua

SEQ ID NO: 500857 - RNA, 24 nt, Artificial Sequence
  Synthetic
gcaaaaauucucaaugaaauacua

SEQ ID NO: 500858 - RNA, 18 nt, Artificial Sequence
  Synthetic
ugacuguacugaauacua

SEQ ID NO: 500859 - RNA, 19 nt, Artificial Sequence
  Synthetic
gugacuguacugaauacua

SEQ ID NO: 500860 - RNA, 20 nt, Artificial Sequence
  Synthetic
cgugacuguacugaauacua

SEQ ID NO: 500861 - RNA, 21 nt, Artificial Sequence
  Synthetic
acgugacuguacugaauacua

SEQ ID NO: 500862 - RNA, 22 nt, Artificial Sequence
  Synthetic
cacgugacuguacugaauacua

SEQ ID NO: 500863 - RNA, 23 nt, Artificial Sequence
  Synthetic
gcacgugacuguacugaauacua

SEQ ID NO: 500864 - RNA, 24 nt, Artificial Sequence
  Synthetic
agcacgugacuguacugaauacua

SEQ ID NO: 500865 - RNA, 18 nt, Artificial Sequence
  Synthetic
aucaagcaauacauacua

SEQ ID NO: 500866 - RNA, 19 nt, Artificial Sequence
  Synthetic
aaucaagcaauacauacua

SEQ ID NO: 500867 - RNA, 20 nt, Artificial Sequence
  Synthetic
uaaucaagcaauacauacua

SEQ ID NO: 500868 - RNA, 21 nt, Artificial Sequence
  Synthetic
uuaaucaagcaauacauacua

SEQ ID NO: 500869 - RNA, 22 nt, Artificial Sequence
  Synthetic
uuuaaucaagcaauacauacua

SEQ ID NO: 500870 - RNA, 23 nt, Artificial Sequence
  Synthetic
cuuuaaucaagcaauacauacua

SEQ ID NO: 500871 - RNA, 24 nt, Artificial Sequence
  Synthetic
acuuuaaucaagcaauacauacua

SEQ ID NO: 500872 - RNA, 18 nt, Artificial Sequence
  Synthetic
gcuugcacuaggauacua

SEQ ID NO: 500873 - RNA, 19 nt, Artificial Sequence
  Synthetic
agcuugcacuaggauacua

SEQ ID NO: 500874 - RNA, 20 nt, Artificial Sequence
  Synthetic
uagcuugcacuaggauacua

SEQ ID NO: 500875 - RNA, 21 nt, Artificial Sequence
  Synthetic
guagcuugcacuaggauacua

SEQ ID NO: 500876 - RNA, 22 nt, Artificial Sequence
  Synthetic
gguagcuugcacuaggauacua

SEQ ID NO: 500877 - RNA, 23 nt, Artificial Sequence
  Synthetic
ugguagcuugcacuaggauacua

SEQ ID NO: 500878 - RNA, 24 nt, Artificial Sequence
  Synthetic
augguagcuugcacuaggauacua

SEQ ID NO: 500879 - RNA, 18 nt, Artificial Sequence
  Synthetic
agggguggagggauacua

SEQ ID NO: 500880 - RNA, 19 nt, Artificial Sequence
  Synthetic
gagggguggagggauacua

SEQ ID NO: 500881 - RNA, 20 nt, Artificial Sequence
  Synthetic
ggagggguggagggauacua

SEQ ID NO: 500882 - RNA, 21 nt, Artificial Sequence
  Synthetic
uggagggguggagggauacua

SEQ ID NO: 500883 - RNA, 22 nt, Artificial Sequence
  Synthetic
auggagggguggagggauacua

SEQ ID NO: 500884 - RNA, 23 nt, Artificial Sequence
  Synthetic
cauggagggguggagggauacua

SEQ ID NO: 500885 - RNA, 24 nt, Artificial Sequence
  Synthetic
acauggagggguggagggauacua

SEQ ID NO: 500886 - RNA, 18 nt, Artificial Sequence
  Synthetic
aggacauugcugauacua

SEQ ID NO: 500887 - RNA, 19 nt, Artificial Sequence
  Synthetic
caggacauugcugauacua

SEQ ID NO: 500888 - RNA, 20 nt, Artificial Sequence
  Synthetic
acaggacauugcugauacua

SEQ ID NO: 500889 - RNA, 21 nt, Artificial Sequence
  Synthetic
uacaggacauugcugauacua

SEQ ID NO: 500890 - RNA, 22 nt, Artificial Sequence
  Synthetic
auacaggacauugcugauacua

SEQ ID NO: 500891 - RNA, 23 nt, Artificial Sequence
  Synthetic
cauacaggacauugcugauacua

SEQ ID NO: 500892 - RNA, 24 nt, Artificial Sequence
  Synthetic
ccauacaggacauugcugauacua

SEQ ID NO: 500893 - RNA, 18 nt, Artificial Sequence
  Synthetic
ugcaggucugugauacua

SEQ ID NO: 500894 - RNA, 19 nt, Artificial Sequence
  Synthetic
uugcaggucugugauacua

SEQ ID NO: 500895 - RNA, 20 nt, Artificial Sequence
  Synthetic
cuugcaggucugugauacua

SEQ ID NO: 500896 - RNA, 21 nt, Artificial Sequence
  Synthetic
gcuugcaggucugugauacua

SEQ ID NO: 500897 - RNA, 22 nt, Artificial Sequence
  Synthetic
ugcuugcaggucugugauacua

SEQ ID NO: 500898 - RNA, 23 nt, Artificial Sequence
  Synthetic
cugcuugcaggucugugauacua

SEQ ID NO: 500899 - RNA, 24 nt, Artificial Sequence
  Synthetic
ccugcuugcaggucugugauacua

SEQ ID NO: 500900 - RNA, 18 nt, Artificial Sequence
  Synthetic
agacccuggggacuacua

SEQ ID NO: 500901 - RNA, 19 nt, Artificial Sequence
  Synthetic
uagacccuggggacuacua

SEQ ID NO: 500902 - RNA, 20 nt, Artificial Sequence
  Synthetic
auagacccuggggacuacua

SEQ ID NO: 500903 - RNA, 21 nt, Artificial Sequence
  Synthetic
aauagacccuggggacuacua

SEQ ID NO: 500904 - RNA, 22 nt, Artificial Sequence
  Synthetic
caauagacccuggggacuacua

SEQ ID NO: 500905 - RNA, 23 nt, Artificial Sequence
  Synthetic
acaauagacccuggggacuacua

SEQ ID NO: 500906 - RNA, 24 nt, Artificial Sequence
  Synthetic
aacaauagacccuggggacuacua

SEQ ID NO: 500907 - RNA, 18 nt, Artificial Sequence
  Synthetic
gcugucaaaugccuacua

SEQ ID NO: 500908 - RNA, 19 nt, Artificial Sequence
  Synthetic
ugcugucaaaugccuacua

SEQ ID NO: 500909 - RNA, 20 nt, Artificial Sequence
  Synthetic
gugcugucaaaugccuacua

SEQ ID NO: 500910 - RNA, 21 nt, Artificial Sequence
  Synthetic
agugcugucaaaugccuacua

SEQ ID NO: 500911 - RNA, 22 nt, Artificial Sequence
  Synthetic
gagugcugucaaaugccuacua

SEQ ID NO: 500912 - RNA, 23 nt, Artificial Sequence
  Synthetic
cgagugcugucaaaugccuacua

SEQ ID NO: 500913 - RNA, 24 nt, Artificial Sequence
  Synthetic
gcgagugcugucaaaugccuacua

SEQ ID NO: 500914 - RNA, 18 nt, Artificial Sequence
  Synthetic
uuuucagugugccuacua

SEQ ID NO: 500915 - RNA, 19 nt, Artificial Sequence
  Synthetic
uuuuucagugugccuacua

SEQ ID NO: 500916 - RNA, 20 nt, Artificial Sequence
  Synthetic
uuuuuucagugugccuacua

SEQ ID NO: 500917 - RNA, 21 nt, Artificial Sequence
  Synthetic
auuuuuucagugugccuacua

SEQ ID NO: 500918 - RNA, 22 nt, Artificial Sequence
  Synthetic
uauuuuuucagugugccuacua

SEQ ID NO: 500919 - RNA, 23 nt, Artificial Sequence
  Synthetic
uuauuuuuucagugugccuacua

SEQ ID NO: 500920 - RNA, 24 nt, Artificial Sequence
  Synthetic
uuuauuuuuucagugugccuacua

SEQ ID NO: 500921 - RNA, 18 nt, Artificial Sequence
  Synthetic
cgcauacucauccuacua

SEQ ID NO: 500922 - RNA, 19 nt, Artificial Sequence
  Synthetic
acgcauacucauccuacua

SEQ ID NO: 500923 - RNA, 20 nt, Artificial Sequence
  Synthetic
uacgcauacucauccuacua

SEQ ID NO: 500924 - RNA, 21 nt, Artificial Sequence
  Synthetic
cuacgcauacucauccuacua

SEQ ID NO: 500925 - RNA, 22 nt, Artificial Sequence
  Synthetic
gcuacgcauacucauccuacua

SEQ ID NO: 500926 - RNA, 23 nt, Artificial Sequence
  Synthetic
ugcuacgcauacucauccuacua

SEQ ID NO: 500927 - RNA, 24 nt, Artificial Sequence
  Synthetic
uugcuacgcauacucauccuacua

SEQ ID NO: 500928 - RNA, 18 nt, Artificial Sequence
  Synthetic
cuguaaucccagcuacua

SEQ ID NO: 500929 - RNA, 19 nt, Artificial Sequence
  Synthetic
ccuguaaucccagcuacua

SEQ ID NO: 500930 - RNA, 20 nt, Artificial Sequence
  Synthetic
gccuguaaucccagcuacua

SEQ ID NO: 500931 - RNA, 21 nt, Artificial Sequence
  Synthetic
cgccuguaaucccagcuacua

SEQ ID NO: 500932 - RNA, 22 nt, Artificial Sequence
  Synthetic
gcgccuguaaucccagcuacua

SEQ ID NO: 500933 - RNA, 23 nt, Artificial Sequence
  Synthetic
ggcgccuguaaucccagcuacua

SEQ ID NO: 500934 - RNA, 24 nt, Artificial Sequence
  Synthetic
aggcgccuguaaucccagcuacua

SEQ ID NO: 500935 - RNA, 21 nt, Artificial Sequence
  Synthetic
ugccuguaaucccagcuacua

SEQ ID NO: 500936 - RNA, 22 nt, Artificial Sequence
  Synthetic
gugccuguaaucccagcuacua

SEQ ID NO: 500937 - RNA, 23 nt, Artificial Sequence
  Synthetic
ggugccuguaaucccagcuacua

SEQ ID NO: 500938 - RNA, 24 nt, Artificial Sequence
  Synthetic
aggugccuguaaucccagcuacua

SEQ ID NO: 500939 - RNA, 19 nt, Artificial Sequence
  Synthetic
ucuguaaucccagcuacua

SEQ ID NO: 500940 - RNA, 20 nt, Artificial Sequence
  Synthetic
aucuguaaucccagcuacua

SEQ ID NO: 500941 - RNA, 21 nt, Artificial Sequence
  Synthetic
caucuguaaucccagcuacua

SEQ ID NO: 500942 - RNA, 22 nt, Artificial Sequence
  Synthetic
acaucuguaaucccagcuacua

SEQ ID NO: 500943 - RNA, 23 nt, Artificial Sequence
  Synthetic
cacaucuguaaucccagcuacua

SEQ ID NO: 500944 - RNA, 24 nt, Artificial Sequence
  Synthetic
gcacaucuguaaucccagcuacua

SEQ ID NO: 500945 - RNA, 18 nt, Artificial Sequence
  Synthetic
uaguagucccagcuacua

SEQ ID NO: 500946 - RNA, 19 nt, Artificial Sequence
  Synthetic
cuaguagucccagcuacua

SEQ ID NO: 500947 - RNA, 20 nt, Artificial Sequence
  Synthetic
gcuaguagucccagcuacua

SEQ ID NO: 500948 - RNA, 21 nt, Artificial Sequence
  Synthetic
ggcuaguagucccagcuacua

SEQ ID NO: 500949 - RNA, 22 nt, Artificial Sequence
  Synthetic
uggcuaguagucccagcuacua

SEQ ID NO: 500950 - RNA, 23 nt, Artificial Sequence
  Synthetic
cuggcuaguagucccagcuacua

SEQ ID NO: 500951 - RNA, 24 nt, Artificial Sequence
  Synthetic
ccuggcuaguagucccagcuacua

SEQ ID NO: 500952 - RNA, 18 nt, Artificial Sequence
  Synthetic
uauauauauuagcuacua

SEQ ID NO: 500953 - RNA, 19 nt, Artificial Sequence
  Synthetic
auauauauauuagcuacua

SEQ ID NO: 500954 - RNA, 20 nt, Artificial Sequence
  Synthetic
uauauauauauuagcuacua

SEQ ID NO: 500955 - RNA, 21 nt, Artificial Sequence
  Synthetic
auauauauauauuagcuacua

SEQ ID NO: 500956 - RNA, 22 nt, Artificial Sequence
  Synthetic
uauauauauauauuagcuacua

SEQ ID NO: 500957 - RNA, 23 nt, Artificial Sequence
  Synthetic
auauauauauauauuagcuacua

SEQ ID NO: 500958 - RNA, 24 nt, Artificial Sequence
  Synthetic
uauauauauauauauuagcuacua

SEQ ID NO: 500959 - RNA, 18 nt, Artificial Sequence
  Synthetic
aaggagauucugguacua

SEQ ID NO: 500960 - RNA, 19 nt, Artificial Sequence
  Synthetic
caaggagauucugguacua

SEQ ID NO: 500961 - RNA, 20 nt, Artificial Sequence
  Synthetic
acaaggagauucugguacua

SEQ ID NO: 500962 - RNA, 21 nt, Artificial Sequence
  Synthetic
aacaaggagauucugguacua

SEQ ID NO: 500963 - RNA, 22 nt, Artificial Sequence
  Synthetic
caacaaggagauucugguacua

SEQ ID NO: 500964 - RNA, 23 nt, Artificial Sequence
  Synthetic
ucaacaaggagauucugguacua

SEQ ID NO: 500965 - RNA, 24 nt, Artificial Sequence
  Synthetic
uucaacaaggagauucugguacua

SEQ ID NO: 500966 - RNA, 18 nt, Artificial Sequence
  Synthetic
augaaaaauaauguacua

SEQ ID NO: 500967 - RNA, 19 nt, Artificial Sequence
  Synthetic
aaugaaaaauaauguacua

SEQ ID NO: 500968 - RNA, 20 nt, Artificial Sequence
  Synthetic
aaaugaaaaauaauguacua

SEQ ID NO: 500969 - RNA, 21 nt, Artificial Sequence
  Synthetic
caaaugaaaaauaauguacua

SEQ ID NO: 500970 - RNA, 22 nt, Artificial Sequence
  Synthetic
acaaaugaaaaauaauguacua

SEQ ID NO: 500971 - RNA, 23 nt, Artificial Sequence
  Synthetic
uacaaaugaaaaauaauguacua

SEQ ID NO: 500972 - RNA, 24 nt, Artificial Sequence
  Synthetic
auacaaaugaaaaauaauguacua

SEQ ID NO: 500973 - RNA, 18 nt, Artificial Sequence
  Synthetic
aaugggggcccuguacua

SEQ ID NO: 500974 - RNA, 19 nt, Artificial Sequence
  Synthetic
gaaugggggcccuguacua

SEQ ID NO: 500975 - RNA, 20 nt, Artificial Sequence
  Synthetic
agaaugggggcccuguacua

SEQ ID NO: 500976 - RNA, 21 nt, Artificial Sequence
  Synthetic
aagaaugggggcccuguacua

SEQ ID NO: 500977 - RNA, 22 nt, Artificial Sequence
  Synthetic
aaagaaugggggcccuguacua

SEQ ID NO: 500978 - RNA, 23 nt, Artificial Sequence
  Synthetic
caaagaaugggggcccuguacua

SEQ ID NO: 500979 - RNA, 24 nt, Artificial Sequence
  Synthetic
ucaaagaaugggggcccuguacua

SEQ ID NO: 500980 - RNA, 18 nt, Artificial Sequence
  Synthetic
uaagaaucacuuguacua

SEQ ID NO: 500981 - RNA, 19 nt, Artificial Sequence
  Synthetic
auaagaaucacuuguacua

SEQ ID NO: 500982 - RNA, 20 nt, Artificial Sequence
  Synthetic
aauaagaaucacuuguacua

SEQ ID NO: 500983 - RNA, 21 nt, Artificial Sequence
  Synthetic
caauaagaaucacuuguacua

SEQ ID NO: 500984 - RNA, 22 nt, Artificial Sequence
  Synthetic
acaauaagaaucacuuguacua

SEQ ID NO: 500985 - RNA, 23 nt, Artificial Sequence
  Synthetic
uacaauaagaaucacuuguacua

SEQ ID NO: 500986 - RNA, 24 nt, Artificial Sequence
  Synthetic
cuacaauaagaaucacuuguacua

SEQ ID NO: 500987 - RNA, 18 nt, Artificial Sequence
  Synthetic
uacuguagccuuguacua

SEQ ID NO: 500988 - RNA, 19 nt, Artificial Sequence
  Synthetic
uuacuguagccuuguacua

SEQ ID NO: 500989 - RNA, 20 nt, Artificial Sequence
  Synthetic
guuacuguagccuuguacua

SEQ ID NO: 500990 - RNA, 21 nt, Artificial Sequence
  Synthetic
gguuacuguagccuuguacua

SEQ ID NO: 500991 - RNA, 22 nt, Artificial Sequence
  Synthetic
ugguuacuguagccuuguacua

SEQ ID NO: 500992 - RNA, 23 nt, Artificial Sequence
  Synthetic
uugguuacuguagccuuguacua

SEQ ID NO: 500993 - RNA, 24 nt, Artificial Sequence
  Synthetic
uuugguuacuguagccuuguacua

SEQ ID NO: 500994 - RNA, 18 nt, Artificial Sequence
  Synthetic
gacacucaggcauuacua

SEQ ID NO: 500995 - RNA, 19 nt, Artificial Sequence
  Synthetic
ugacacucaggcauuacua

SEQ ID NO: 500996 - RNA, 20 nt, Artificial Sequence
  Synthetic
gugacacucaggcauuacua

SEQ ID NO: 500997 - RNA, 21 nt, Artificial Sequence
  Synthetic
ugugacacucaggcauuacua

SEQ ID NO: 500998 - RNA, 22 nt, Artificial Sequence
  Synthetic
uugugacacucaggcauuacua

SEQ ID NO: 500999 - RNA, 23 nt, Artificial Sequence
  Synthetic
uuugugacacucaggcauuacua

SEQ ID NO: 501000 - RNA, 24 nt, Artificial Sequence
  Synthetic
uuuugugacacucaggcauuacua

SEQ ID NO: 501001 - RNA, 18 nt, Artificial Sequence
  Synthetic
gcaaaauacagauuacua

SEQ ID NO: 501002 - RNA, 19 nt, Artificial Sequence
  Synthetic
ugcaaaauacagauuacua

SEQ ID NO: 501003 - RNA, 20 nt, Artificial Sequence
  Synthetic
uugcaaaauacagauuacua

SEQ ID NO: 501004 - RNA, 21 nt, Artificial Sequence
  Synthetic
uuugcaaaauacagauuacua

SEQ ID NO: 501005 - RNA, 22 nt, Artificial Sequence
  Synthetic
uuuugcaaaauacagauuacua

SEQ ID NO: 501006 - RNA, 23 nt, Artificial Sequence
  Synthetic
cuuuugcaaaauacagauuacua

SEQ ID NO: 501007 - RNA, 24 nt, Artificial Sequence
  Synthetic
ccuuuugcaaaauacagauuacua

SEQ ID NO: 501008 - RNA, 18 nt, Artificial Sequence
  Synthetic
uaaaccagaugauuacua

SEQ ID NO: 501009 - RNA, 19 nt, Artificial Sequence
  Synthetic
cuaaaccagaugauuacua

SEQ ID NO: 501010 - RNA, 20 nt, Artificial Sequence
  Synthetic
acuaaaccagaugauuacua

SEQ ID NO: 501011 - RNA, 21 nt, Artificial Sequence
  Synthetic
gacuaaaccagaugauuacua

SEQ ID NO: 501012 - RNA, 22 nt, Artificial Sequence
  Synthetic
ugacuaaaccagaugauuacua

SEQ ID NO: 501013 - RNA, 23 nt, Artificial Sequence
  Synthetic
gugacuaaaccagaugauuacua

SEQ ID NO: 501014 - RNA, 24 nt, Artificial Sequence
  Synthetic
agugacuaaaccagaugauuacua

SEQ ID NO: 501015 - RNA, 18 nt, Artificial Sequence
  Synthetic
caugagcuuugauuacua

SEQ ID NO: 501016 - RNA, 19 nt, Artificial Sequence
  Synthetic
ucaugagcuuugauuacua

SEQ ID NO: 501017 - RNA, 20 nt, Artificial Sequence
  Synthetic
cucaugagcuuugauuacua

SEQ ID NO: 501018 - RNA, 21 nt, Artificial Sequence
  Synthetic
acucaugagcuuugauuacua

SEQ ID NO: 501019 - RNA, 22 nt, Artificial Sequence
  Synthetic
cacucaugagcuuugauuacua

SEQ ID NO: 501020 - RNA, 23 nt, Artificial Sequence
  Synthetic
acacucaugagcuuugauuacua

SEQ ID NO: 501021 - RNA, 24 nt, Artificial Sequence
  Synthetic
gacacucaugagcuuugauuacua

SEQ ID NO: 501022 - RNA, 18 nt, Artificial Sequence
  Synthetic
guuacuacuauauuacua

SEQ ID NO: 501023 - RNA, 19 nt, Artificial Sequence
  Synthetic
uguuacuacuauauuacua

SEQ ID NO: 501024 - RNA, 20 nt, Artificial Sequence
  Synthetic
cuguuacuacuauauuacua

SEQ ID NO: 501025 - RNA, 21 nt, Artificial Sequence
  Synthetic
gcuguuacuacuauauuacua

SEQ ID NO: 501026 - RNA, 22 nt, Artificial Sequence
  Synthetic
ugcuguuacuacuauauuacua

SEQ ID NO: 501027 - RNA, 23 nt, Artificial Sequence
  Synthetic
gugcuguuacuacuauauuacua

SEQ ID NO: 501028 - RNA, 24 nt, Artificial Sequence
  Synthetic
agugcuguuacuacuauauuacua

SEQ ID NO: 501029 - RNA, 18 nt, Artificial Sequence
  Synthetic
uguguguaguuauuacua

SEQ ID NO: 501030 - RNA, 19 nt, Artificial Sequence
  Synthetic
auguguguaguuauuacua

SEQ ID NO: 501031 - RNA, 20 nt, Artificial Sequence
  Synthetic
gauguguguaguuauuacua

SEQ ID NO: 501032 - RNA, 21 nt, Artificial Sequence
  Synthetic
agauguguguaguuauuacua

SEQ ID NO: 501033 - RNA, 22 nt, Artificial Sequence
  Synthetic
uagauguguguaguuauuacua

SEQ ID NO: 501034 - RNA, 23 nt, Artificial Sequence
  Synthetic
guagauguguguaguuauuacua

SEQ ID NO: 501035 - RNA, 24 nt, Artificial Sequence
  Synthetic
uguagauguguguaguuauuacua

SEQ ID NO: 501036 - RNA, 18 nt, Artificial Sequence
  Synthetic
augaauaguuuauuacua

SEQ ID NO: 501037 - RNA, 19 nt, Artificial Sequence
  Synthetic
uaugaauaguuuauuacua

SEQ ID NO: 501038 - RNA, 20 nt, Artificial Sequence
  Synthetic
uuaugaauaguuuauuacua

SEQ ID NO: 501039 - RNA, 21 nt, Artificial Sequence
  Synthetic
cuuaugaauaguuuauuacua

SEQ ID NO: 501040 - RNA, 22 nt, Artificial Sequence
  Synthetic
acuuaugaauaguuuauuacua

SEQ ID NO: 501041 - RNA, 23 nt, Artificial Sequence
  Synthetic
uacuuaugaauaguuuauuacua

SEQ ID NO: 501042 - RNA, 24 nt, Artificial Sequence
  Synthetic
auacuuaugaauaguuuauuacua

SEQ ID NO: 501043 - RNA, 18 nt, Artificial Sequence
  Synthetic
gauuucagagacuuacua

SEQ ID NO: 501044 - RNA, 19 nt, Artificial Sequence
  Synthetic
agauuucagagacuuacua

SEQ ID NO: 501045 - RNA, 20 nt, Artificial Sequence
  Synthetic
uagauuucagagacuuacua

SEQ ID NO: 501046 - RNA, 21 nt, Artificial Sequence
  Synthetic
cuagauuucagagacuuacua

SEQ ID NO: 501047 - RNA, 22 nt, Artificial Sequence
  Synthetic
acuagauuucagagacuuacua

SEQ ID NO: 501048 - RNA, 23 nt, Artificial Sequence
  Synthetic
cacuagauuucagagacuuacua

SEQ ID NO: 501049 - RNA, 24 nt, Artificial Sequence
  Synthetic
acacuagauuucagagacuuacua

SEQ ID NO: 501050 - RNA, 18 nt, Artificial Sequence
  Synthetic
uuuucagugaccuuacua

SEQ ID NO: 501051 - RNA, 19 nt, Artificial Sequence
  Synthetic
cuuuucagugaccuuacua

SEQ ID NO: 501052 - RNA, 20 nt, Artificial Sequence
  Synthetic
acuuuucagugaccuuacua

SEQ ID NO: 501053 - RNA, 21 nt, Artificial Sequence
  Synthetic
gacuuuucagugaccuuacua

SEQ ID NO: 501054 - RNA, 22 nt, Artificial Sequence
  Synthetic
agacuuuucagugaccuuacua

SEQ ID NO: 501055 - RNA, 23 nt, Artificial Sequence
  Synthetic
aagacuuuucagugaccuuacua

SEQ ID NO: 501056 - RNA, 24 nt, Artificial Sequence
  Synthetic
aaagacuuuucagugaccuuacua

SEQ ID NO: 501057 - RNA, 18 nt, Artificial Sequence
  Synthetic
aaaaaauagggcuuacua

SEQ ID NO: 501058 - RNA, 19 nt, Artificial Sequence
  Synthetic
aaaaaaauagggcuuacua

SEQ ID NO: 501059 - RNA, 20 nt, Artificial Sequence
  Synthetic
uaaaaaaauagggcuuacua

SEQ ID NO: 501060 - RNA, 21 nt, Artificial Sequence
  Synthetic
uuaaaaaaauagggcuuacua

SEQ ID NO: 501061 - RNA, 22 nt, Artificial Sequence
  Synthetic
cuuaaaaaaauagggcuuacua

SEQ ID NO: 501062 - RNA, 23 nt, Artificial Sequence
  Synthetic
ucuuaaaaaaauagggcuuacua

SEQ ID NO: 501063 - RNA, 24 nt, Artificial Sequence
  Synthetic
aucuuaaaaaaauagggcuuacua

SEQ ID NO: 501064 - RNA, 18 nt, Artificial Sequence
  Synthetic
acuaauccaaauuuacua

SEQ ID NO: 501065 - RNA, 19 nt, Artificial Sequence
  Synthetic
gacuaauccaaauuuacua

SEQ ID NO: 501066 - RNA, 20 nt, Artificial Sequence
  Synthetic
agacuaauccaaauuuacua

SEQ ID NO: 501067 - RNA, 21 nt, Artificial Sequence
  Synthetic
cagacuaauccaaauuuacua

SEQ ID NO: 501068 - RNA, 22 nt, Artificial Sequence
  Synthetic
ccagacuaauccaaauuuacua

SEQ ID NO: 501069 - RNA, 23 nt, Artificial Sequence
  Synthetic
gccagacuaauccaaauuuacua

SEQ ID NO: 501070 - RNA, 24 nt, Artificial Sequence
  Synthetic
ugccagacuaauccaaauuuacua

SEQ ID NO: 501071 - RNA, 18 nt, Artificial Sequence
  Synthetic
cugcugugaaauuuacua

SEQ ID NO: 501072 - RNA, 19 nt, Artificial Sequence
  Synthetic
acugcugugaaauuuacua

SEQ ID NO: 501073 - RNA, 20 nt, Artificial Sequence
  Synthetic
uacugcugugaaauuuacua

SEQ ID NO: 501074 - RNA, 21 nt, Artificial Sequence
  Synthetic
cuacugcugugaaauuuacua

SEQ ID NO: 501075 - RNA, 22 nt, Artificial Sequence
  Synthetic
ccuacugcugugaaauuuacua

SEQ ID NO: 501076 - RNA, 23 nt, Artificial Sequence
  Synthetic
gccuacugcugugaaauuuacua

SEQ ID NO: 501077 - RNA, 24 nt, Artificial Sequence
  Synthetic
ugccuacugcugugaaauuuacua

SEQ ID NO: 501078 - RNA, 18 nt, Artificial Sequence
  Synthetic
uaaagggcauauuuacua

SEQ ID NO: 501079 - RNA, 19 nt, Artificial Sequence
  Synthetic
uuaaagggcauauuuacua

SEQ ID NO: 501080 - RNA, 20 nt, Artificial Sequence
  Synthetic
auuaaagggcauauuuacua

SEQ ID NO: 501081 - RNA, 21 nt, Artificial Sequence
  Synthetic
uauuaaagggcauauuuacua

SEQ ID NO: 501082 - RNA, 22 nt, Artificial Sequence
  Synthetic
auauuaaagggcauauuuacua

SEQ ID NO: 501083 - RNA, 23 nt, Artificial Sequence
  Synthetic
aauauuaaagggcauauuuacua

SEQ ID NO: 501084 - RNA, 24 nt, Artificial Sequence
  Synthetic
uaauauuaaagggcauauuuacua

SEQ ID NO: 501085 - RNA, 18 nt, Artificial Sequence
  Synthetic
aguaggguuaguuuacua

SEQ ID NO: 501086 - RNA, 19 nt, Artificial Sequence
  Synthetic
aaguaggguuaguuuacua

SEQ ID NO: 501087 - RNA, 20 nt, Artificial Sequence
  Synthetic
aaaguaggguuaguuuacua

SEQ ID NO: 501088 - RNA, 21 nt, Artificial Sequence
  Synthetic
gaaaguaggguuaguuuacua

SEQ ID NO: 501089 - RNA, 22 nt, Artificial Sequence
  Synthetic
agaaaguaggguuaguuuacua

SEQ ID NO: 501090 - RNA, 23 nt, Artificial Sequence
  Synthetic
gagaaaguaggguuaguuuacua

SEQ ID NO: 501091 - RNA, 24 nt, Artificial Sequence
  Synthetic
agagaaaguaggguuaguuuacua

SEQ ID NO: 501092 - RNA, 18 nt, Artificial Sequence
  Synthetic
gauccuuuccuuuuacua

SEQ ID NO: 501093 - RNA, 19 nt, Artificial Sequence
  Synthetic
ugauccuuuccuuuuacua

SEQ ID NO: 501094 - RNA, 20 nt, Artificial Sequence
  Synthetic
uugauccuuuccuuuuacua

SEQ ID NO: 501095 - RNA, 21 nt, Artificial Sequence
  Synthetic
cuugauccuuuccuuuuacua

SEQ ID NO: 501096 - RNA, 22 nt, Artificial Sequence
  Synthetic
ccuugauccuuuccuuuuacua

SEQ ID NO: 501097 - RNA, 23 nt, Artificial Sequence
  Synthetic
gccuugauccuuuccuuuuacua

SEQ ID NO: 501098 - RNA, 24 nt, Artificial Sequence
  Synthetic
ggccuugauccuuuccuuuuacua

SEQ ID NO: 501099 - RNA, 18 nt, Artificial Sequence
  Synthetic
agcaaguauuaaaaccua

SEQ ID NO: 501100 - RNA, 19 nt, Artificial Sequence
  Synthetic
aagcaaguauuaaaaccua

SEQ ID NO: 501101 - RNA, 20 nt, Artificial Sequence
  Synthetic
aaagcaaguauuaaaaccua

SEQ ID NO: 501102 - RNA, 21 nt, Artificial Sequence
  Synthetic
uaaagcaaguauuaaaaccua

SEQ ID NO: 501103 - RNA, 22 nt, Artificial Sequence
  Synthetic
guaaagcaaguauuaaaaccua

SEQ ID NO: 501104 - RNA, 23 nt, Artificial Sequence
  Synthetic
gguaaagcaaguauuaaaaccua

SEQ ID NO: 501105 - RNA, 24 nt, Artificial Sequence
  Synthetic
ugguaaagcaaguauuaaaaccua

SEQ ID NO: 501106 - RNA, 18 nt, Artificial Sequence
  Synthetic
uuuuuaaaauuaaaccua

SEQ ID NO: 501107 - RNA, 19 nt, Artificial Sequence
  Synthetic
uuuuuuaaaauuaaaccua

SEQ ID NO: 501108 - RNA, 20 nt, Artificial Sequence
  Synthetic
guuuuuuaaaauuaaaccua

SEQ ID NO: 501109 - RNA, 21 nt, Artificial Sequence
  Synthetic
uguuuuuuaaaauuaaaccua

SEQ ID NO: 501110 - RNA, 22 nt, Artificial Sequence
  Synthetic
uuguuuuuuaaaauuaaaccua

SEQ ID NO: 501111 - RNA, 23 nt, Artificial Sequence
  Synthetic
cuuguuuuuuaaaauuaaaccua

SEQ ID NO: 501112 - RNA, 24 nt, Artificial Sequence
  Synthetic
ucuuguuuuuuaaaauuaaaccua

SEQ ID NO: 501113 - RNA, 18 nt, Artificial Sequence
  Synthetic
cauuaagaaggcaaccua

SEQ ID NO: 501114 - RNA, 19 nt, Artificial Sequence
  Synthetic
ccauuaagaaggcaaccua

SEQ ID NO: 501115 - RNA, 20 nt, Artificial Sequence
  Synthetic
cccauuaagaaggcaaccua

SEQ ID NO: 501116 - RNA, 21 nt, Artificial Sequence
  Synthetic
acccauuaagaaggcaaccua

SEQ ID NO: 501117 - RNA, 22 nt, Artificial Sequence
  Synthetic
aacccauuaagaaggcaaccua

SEQ ID NO: 501118 - RNA, 23 nt, Artificial Sequence
  Synthetic
aaacccauuaagaaggcaaccua

SEQ ID NO: 501119 - RNA, 24 nt, Artificial Sequence
  Synthetic
aaaacccauuaagaaggcaaccua

SEQ ID NO: 501120 - RNA, 18 nt, Artificial Sequence
  Synthetic
aaucuuucuuagaaccua

SEQ ID NO: 501121 - RNA, 19 nt, Artificial Sequence
  Synthetic
gaaucuuucuuagaaccua

SEQ ID NO: 501122 - RNA, 20 nt, Artificial Sequence
  Synthetic
ugaaucuuucuuagaaccua

SEQ ID NO: 501123 - RNA, 21 nt, Artificial Sequence
  Synthetic
cugaaucuuucuuagaaccua

SEQ ID NO: 501124 - RNA, 22 nt, Artificial Sequence
  Synthetic
gcugaaucuuucuuagaaccua

SEQ ID NO: 501125 - RNA, 23 nt, Artificial Sequence
  Synthetic
ugcugaaucuuucuuagaaccua

SEQ ID NO: 501126 - RNA, 24 nt, Artificial Sequence
  Synthetic
augcugaaucuuucuuagaaccua

SEQ ID NO: 501127 - RNA, 18 nt, Artificial Sequence
  Synthetic
accguuauuuggaaccua

SEQ ID NO: 501128 - RNA, 19 nt, Artificial Sequence
  Synthetic
aaccguuauuuggaaccua

SEQ ID NO: 501129 - RNA, 20 nt, Artificial Sequence
  Synthetic
uaaccguuauuuggaaccua

SEQ ID NO: 501130 - RNA, 21 nt, Artificial Sequence
  Synthetic
cuaaccguuauuuggaaccua

SEQ ID NO: 501131 - RNA, 22 nt, Artificial Sequence
  Synthetic
gcuaaccguuauuuggaaccua

SEQ ID NO: 501132 - RNA, 23 nt, Artificial Sequence
  Synthetic
agcuaaccguuauuuggaaccua

SEQ ID NO: 501133 - RNA, 24 nt, Artificial Sequence
  Synthetic
aagcuaaccguuauuuggaaccua

SEQ ID NO: 501134 - RNA, 18 nt, Artificial Sequence
  Synthetic
ggaacuaugaauaaccua

SEQ ID NO: 501135 - RNA, 19 nt, Artificial Sequence
  Synthetic
aggaacuaugaauaaccua

SEQ ID NO: 501136 - RNA, 20 nt, Artificial Sequence
  Synthetic
aaggaacuaugaauaaccua

SEQ ID NO: 501137 - RNA, 21 nt, Artificial Sequence
  Synthetic
caaggaacuaugaauaaccua

SEQ ID NO: 501138 - RNA, 22 nt, Artificial Sequence
  Synthetic
gcaaggaacuaugaauaaccua

SEQ ID NO: 501139 - RNA, 23 nt, Artificial Sequence
  Synthetic
agcaaggaacuaugaauaaccua

SEQ ID NO: 501140 - RNA, 24 nt, Artificial Sequence
  Synthetic
uagcaaggaacuaugaauaaccua

SEQ ID NO: 501141 - RNA, 18 nt, Artificial Sequence
  Synthetic
acaauuguucauaaccua

SEQ ID NO: 501142 - RNA, 19 nt, Artificial Sequence
  Synthetic
gacaauuguucauaaccua

SEQ ID NO: 501143 - RNA, 20 nt, Artificial Sequence
  Synthetic
agacaauuguucauaaccua

SEQ ID NO: 501144 - RNA, 21 nt, Artificial Sequence
  Synthetic
aagacaauuguucauaaccua

SEQ ID NO: 501145 - RNA, 22 nt, Artificial Sequence
  Synthetic
gaagacaauuguucauaaccua

SEQ ID NO: 501146 - RNA, 23 nt, Artificial Sequence
  Synthetic
ggaagacaauuguucauaaccua

SEQ ID NO: 501147 - RNA, 24 nt, Artificial Sequence
  Synthetic
uggaagacaauuguucauaaccua

SEQ ID NO: 501148 - RNA, 18 nt, Artificial Sequence
  Synthetic
uuuaauaaaccuaaccua

SEQ ID NO: 501149 - RNA, 19 nt, Artificial Sequence
  Synthetic
auuuaauaaaccuaaccua

SEQ ID NO: 501150 - RNA, 20 nt, Artificial Sequence
  Synthetic
cauuuaauaaaccuaaccua

SEQ ID NO: 501151 - RNA, 21 nt, Artificial Sequence
  Synthetic
gcauuuaauaaaccuaaccua

SEQ ID NO: 501152 - RNA, 22 nt, Artificial Sequence
  Synthetic
ugcauuuaauaaaccuaaccua

SEQ ID NO: 501153 - RNA, 23 nt, Artificial Sequence
  Synthetic
augcauuuaauaaaccuaaccua

SEQ ID NO: 501154 - RNA, 24 nt, Artificial Sequence
  Synthetic
aaugcauuuaauaaaccuaaccua

SEQ ID NO: 501155 - RNA, 18 nt, Artificial Sequence
  Synthetic
ucguaggacagccaccua

SEQ ID NO: 501156 - RNA, 19 nt, Artificial Sequence
  Synthetic
uucguaggacagccaccua

SEQ ID NO: 501157 - RNA, 20 nt, Artificial Sequence
  Synthetic
auucguaggacagccaccua

SEQ ID NO: 501158 - RNA, 21 nt, Artificial Sequence
  Synthetic
uauucguaggacagccaccua

SEQ ID NO: 501159 - RNA, 22 nt, Artificial Sequence
  Synthetic
uuauucguaggacagccaccua

SEQ ID NO: 501160 - RNA, 23 nt, Artificial Sequence
  Synthetic
cuuauucguaggacagccaccua

SEQ ID NO: 501161 - RNA, 24 nt, Artificial Sequence
  Synthetic
ucuuauucguaggacagccaccua

SEQ ID NO: 501162 - RNA, 18 nt, Artificial Sequence
  Synthetic
aucagaauggugcaccua

SEQ ID NO: 501163 - RNA, 19 nt, Artificial Sequence
  Synthetic
uaucagaauggugcaccua

SEQ ID NO: 501164 - RNA, 20 nt, Artificial Sequence
  Synthetic
auaucagaauggugcaccua

SEQ ID NO: 501165 - RNA, 21 nt, Artificial Sequence
  Synthetic
aauaucagaauggugcaccua

SEQ ID NO: 501166 - RNA, 22 nt, Artificial Sequence
  Synthetic
aaauaucagaauggugcaccua

SEQ ID NO: 501167 - RNA, 23 nt, Artificial Sequence
  Synthetic
uaaauaucagaauggugcaccua

SEQ ID NO: 501168 - RNA, 24 nt, Artificial Sequence
  Synthetic
uuaaauaucagaauggugcaccua

SEQ ID NO: 501169 - RNA, 18 nt, Artificial Sequence
  Synthetic
caucaaaaugaucaccua

SEQ ID NO: 501170 - RNA, 19 nt, Artificial Sequence
  Synthetic
ucaucaaaaugaucaccua

SEQ ID NO: 501171 - RNA, 20 nt, Artificial Sequence
  Synthetic
aucaucaaaaugaucaccua

SEQ ID NO: 501172 - RNA, 21 nt, Artificial Sequence
  Synthetic
aaucaucaaaaugaucaccua

SEQ ID NO: 501173 - RNA, 22 nt, Artificial Sequence
  Synthetic
gaaucaucaaaaugaucaccua

SEQ ID NO: 501174 - RNA, 23 nt, Artificial Sequence
  Synthetic
ugaaucaucaaaaugaucaccua

SEQ ID NO: 501175 - RNA, 24 nt, Artificial Sequence
  Synthetic
uugaaucaucaaaaugaucaccua

SEQ ID NO: 501176 - RNA, 18 nt, Artificial Sequence
  Synthetic
gaugucucaguucaccua

SEQ ID NO: 501177 - RNA, 19 nt, Artificial Sequence
  Synthetic
ggaugucucaguucaccua

SEQ ID NO: 501178 - RNA, 20 nt, Artificial Sequence
  Synthetic
uggaugucucaguucaccua

SEQ ID NO: 501179 - RNA, 21 nt, Artificial Sequence
  Synthetic
cuggaugucucaguucaccua

SEQ ID NO: 501180 - RNA, 22 nt, Artificial Sequence
  Synthetic
ccuggaugucucaguucaccua

SEQ ID NO: 501181 - RNA, 23 nt, Artificial Sequence
  Synthetic
uccuggaugucucaguucaccua

SEQ ID NO: 501182 - RNA, 24 nt, Artificial Sequence
  Synthetic
uuccuggaugucucaguucaccua

SEQ ID NO: 501183 - RNA, 18 nt, Artificial Sequence
  Synthetic
gccacaccagaagaccua

SEQ ID NO: 501184 - RNA, 19 nt, Artificial Sequence
  Synthetic
ggccacaccagaagaccua

SEQ ID NO: 501185 - RNA, 20 nt, Artificial Sequence
  Synthetic
uggccacaccagaagaccua

SEQ ID NO: 501186 - RNA, 21 nt, Artificial Sequence
  Synthetic
auggccacaccagaagaccua

SEQ ID NO: 501187 - RNA, 22 nt, Artificial Sequence
  Synthetic
cauggccacaccagaagaccua

SEQ ID NO: 501188 - RNA, 23 nt, Artificial Sequence
  Synthetic
ucauggccacaccagaagaccua

SEQ ID NO: 501189 - RNA, 24 nt, Artificial Sequence
  Synthetic
uucauggccacaccagaagaccua

SEQ ID NO: 501190 - RNA, 18 nt, Artificial Sequence
  Synthetic
uaguauugggaagaccua

SEQ ID NO: 501191 - RNA, 19 nt, Artificial Sequence
  Synthetic
auaguauugggaagaccua

SEQ ID NO: 501192 - RNA, 20 nt, Artificial Sequence
  Synthetic
aauaguauugggaagaccua

SEQ ID NO: 501193 - RNA, 21 nt, Artificial Sequence
  Synthetic
gaauaguauugggaagaccua

SEQ ID NO: 501194 - RNA, 22 nt, Artificial Sequence
  Synthetic
agaauaguauugggaagaccua

SEQ ID NO: 501195 - RNA, 23 nt, Artificial Sequence
  Synthetic
uagaauaguauugggaagaccua

SEQ ID NO: 501196 - RNA, 24 nt, Artificial Sequence
  Synthetic
uuagaauaguauugggaagaccua

SEQ ID NO: 501197 - RNA, 18 nt, Artificial Sequence
  Synthetic
ucuaucugaggagaccua

SEQ ID NO: 501198 - RNA, 19 nt, Artificial Sequence
  Synthetic
gucuaucugaggagaccua

SEQ ID NO: 501199 - RNA, 20 nt, Artificial Sequence
  Synthetic
ugucuaucugaggagaccua

SEQ ID NO: 501200 - RNA, 21 nt, Artificial Sequence
  Synthetic
augucuaucugaggagaccua

SEQ ID NO: 501201 - RNA, 22 nt, Artificial Sequence
  Synthetic
uaugucuaucugaggagaccua

SEQ ID NO: 501202 - RNA, 23 nt, Artificial Sequence
  Synthetic
auaugucuaucugaggagaccua

SEQ ID NO: 501203 - RNA, 24 nt, Artificial Sequence
  Synthetic
cauaugucuaucugaggagaccua

SEQ ID NO: 501204 - RNA, 18 nt, Artificial Sequence
  Synthetic
aaauaaggcugagaccua

SEQ ID NO: 501205 - RNA, 19 nt, Artificial Sequence
  Synthetic
aaaauaaggcugagaccua

SEQ ID NO: 501206 - RNA, 20 nt, Artificial Sequence
  Synthetic
uaaaauaaggcugagaccua

SEQ ID NO: 501207 - RNA, 21 nt, Artificial Sequence
  Synthetic
guaaaauaaggcugagaccua

SEQ ID NO: 501208 - RNA, 22 nt, Artificial Sequence
  Synthetic
gguaaaauaaggcugagaccua

SEQ ID NO: 501209 - RNA, 23 nt, Artificial Sequence
  Synthetic
ggguaaaauaaggcugagaccua

SEQ ID NO: 501210 - RNA, 24 nt, Artificial Sequence
  Synthetic
uggguaaaauaaggcugagaccua

SEQ ID NO: 501211 - RNA, 18 nt, Artificial Sequence
  Synthetic
uacuauggaaaugaccua

SEQ ID NO: 501212 - RNA, 19 nt, Artificial Sequence
  Synthetic
auacuauggaaaugaccua

SEQ ID NO: 501213 - RNA, 20 nt, Artificial Sequence
  Synthetic
gauacuauggaaaugaccua

SEQ ID NO: 501214 - RNA, 21 nt, Artificial Sequence
  Synthetic
ugauacuauggaaaugaccua

SEQ ID NO: 501215 - RNA, 22 nt, Artificial Sequence
  Synthetic
cugauacuauggaaaugaccua

SEQ ID NO: 501216 - RNA, 23 nt, Artificial Sequence
  Synthetic
gcugauacuauggaaaugaccua

SEQ ID NO: 501217 - RNA, 24 nt, Artificial Sequence
  Synthetic
ugcugauacuauggaaaugaccua

SEQ ID NO: 501218 - RNA, 18 nt, Artificial Sequence
  Synthetic
ucaauuaauaaugaccua

SEQ ID NO: 501219 - RNA, 19 nt, Artificial Sequence
  Synthetic
cucaauuaauaaugaccua

SEQ ID NO: 501220 - RNA, 20 nt, Artificial Sequence
  Synthetic
acucaauuaauaaugaccua

SEQ ID NO: 501221 - RNA, 21 nt, Artificial Sequence
  Synthetic
aacucaauuaauaaugaccua

SEQ ID NO: 501222 - RNA, 22 nt, Artificial Sequence
  Synthetic
gaacucaauuaauaaugaccua

SEQ ID NO: 501223 - RNA, 23 nt, Artificial Sequence
  Synthetic
ugaacucaauuaauaaugaccua

SEQ ID NO: 501224 - RNA, 24 nt, Artificial Sequence
  Synthetic
augaacucaauuaauaaugaccua

SEQ ID NO: 501225 - RNA, 18 nt, Artificial Sequence
  Synthetic
ggucucccacaugaccua

SEQ ID NO: 501226 - RNA, 19 nt, Artificial Sequence
  Synthetic
gggucucccacaugaccua

SEQ ID NO: 501227 - RNA, 20 nt, Artificial Sequence
  Synthetic
agggucucccacaugaccua

SEQ ID NO: 501228 - RNA, 21 nt, Artificial Sequence
  Synthetic
uagggucucccacaugaccua

SEQ ID NO: 501229 - RNA, 22 nt, Artificial Sequence
  Synthetic
uuagggucucccacaugaccua

SEQ ID NO: 501230 - RNA, 23 nt, Artificial Sequence
  Synthetic
auuagggucucccacaugaccua

SEQ ID NO: 501231 - RNA, 24 nt, Artificial Sequence
  Synthetic
gauuagggucucccacaugaccua

SEQ ID NO: 501232 - RNA, 18 nt, Artificial Sequence
  Synthetic
ugcaugaauccugaccua

SEQ ID NO: 501233 - RNA, 19 nt, Artificial Sequence
  Synthetic
augcaugaauccugaccua

SEQ ID NO: 501234 - RNA, 20 nt, Artificial Sequence
  Synthetic
aaugcaugaauccugaccua

SEQ ID NO: 501235 - RNA, 21 nt, Artificial Sequence
  Synthetic
caaugcaugaauccugaccua

SEQ ID NO: 501236 - RNA, 22 nt, Artificial Sequence
  Synthetic
gcaaugcaugaauccugaccua

SEQ ID NO: 501237 - RNA, 23 nt, Artificial Sequence
  Synthetic
agcaaugcaugaauccugaccua

SEQ ID NO: 501238 - RNA, 24 nt, Artificial Sequence
  Synthetic
aagcaaugcaugaauccugaccua

SEQ ID NO: 501239 - RNA, 18 nt, Artificial Sequence
  Synthetic
aggguggcaugugaccua

SEQ ID NO: 501240 - RNA, 19 nt, Artificial Sequence
  Synthetic
uaggguggcaugugaccua

SEQ ID NO: 501241 - RNA, 20 nt, Artificial Sequence
  Synthetic
cuaggguggcaugugaccua

SEQ ID NO: 501242 - RNA, 21 nt, Artificial Sequence
  Synthetic
acuaggguggcaugugaccua

SEQ ID NO: 501243 - RNA, 22 nt, Artificial Sequence
  Synthetic
gacuaggguggcaugugaccua

SEQ ID NO: 501244 - RNA, 23 nt, Artificial Sequence
  Synthetic
ggacuaggguggcaugugaccua

SEQ ID NO: 501245 - RNA, 24 nt, Artificial Sequence
  Synthetic
aggacuaggguggcaugugaccua

SEQ ID NO: 501246 - RNA, 18 nt, Artificial Sequence
  Synthetic
augaacuauaaauaccua

SEQ ID NO: 501247 - RNA, 19 nt, Artificial Sequence
  Synthetic
uaugaacuauaaauaccua

SEQ ID NO: 501248 - RNA, 20 nt, Artificial Sequence
  Synthetic
auaugaacuauaaauaccua

SEQ ID NO: 501249 - RNA, 21 nt, Artificial Sequence
  Synthetic
cauaugaacuauaaauaccua

SEQ ID NO: 501250 - RNA, 22 nt, Artificial Sequence
  Synthetic
acauaugaacuauaaauaccua

SEQ ID NO: 501251 - RNA, 23 nt, Artificial Sequence
  Synthetic
uacauaugaacuauaaauaccua

SEQ ID NO: 501252 - RNA, 24 nt, Artificial Sequence
  Synthetic
cuacauaugaacuauaaauaccua

SEQ ID NO: 501253 - RNA, 18 nt, Artificial Sequence
  Synthetic
guuugcucuagauaccua

SEQ ID NO: 501254 - RNA, 19 nt, Artificial Sequence
  Synthetic
aguuugcucuagauaccua

SEQ ID NO: 501255 - RNA, 20 nt, Artificial Sequence
  Synthetic
caguuugcucuagauaccua

SEQ ID NO: 501256 - RNA, 21 nt, Artificial Sequence
  Synthetic
acaguuugcucuagauaccua

SEQ ID NO: 501257 - RNA, 22 nt, Artificial Sequence
  Synthetic
uacaguuugcucuagauaccua

SEQ ID NO: 501258 - RNA, 23 nt, Artificial Sequence
  Synthetic
uuacaguuugcucuagauaccua

SEQ ID NO: 501259 - RNA, 24 nt, Artificial Sequence
  Synthetic
guuacaguuugcucuagauaccua

SEQ ID NO: 501260 - RNA, 18 nt, Artificial Sequence
  Synthetic
uuaggacuguuauaccua

SEQ ID NO: 501261 - RNA, 19 nt, Artificial Sequence
  Synthetic
guuaggacuguuauaccua

SEQ ID NO: 501262 - RNA, 20 nt, Artificial Sequence
  Synthetic
aguuaggacuguuauaccua

SEQ ID NO: 501263 - RNA, 21 nt, Artificial Sequence
  Synthetic
aaguuaggacuguuauaccua

SEQ ID NO: 501264 - RNA, 22 nt, Artificial Sequence
  Synthetic
aaaguuaggacuguuauaccua

SEQ ID NO: 501265 - RNA, 23 nt, Artificial Sequence
  Synthetic
gaaaguuaggacuguuauaccua

SEQ ID NO: 501266 - RNA, 24 nt, Artificial Sequence
  Synthetic
cgaaaguuaggacuguuauaccua

SEQ ID NO: 501267 - RNA, 18 nt, Artificial Sequence
  Synthetic
agaaguagguacuaccua

SEQ ID NO: 501268 - RNA, 19 nt, Artificial Sequence
  Synthetic
gagaaguagguacuaccua

SEQ ID NO: 501269 - RNA, 20 nt, Artificial Sequence
  Synthetic
agagaaguagguacuaccua

SEQ ID NO: 501270 - RNA, 21 nt, Artificial Sequence
  Synthetic
uagagaaguagguacuaccua

SEQ ID NO: 501271 - RNA, 22 nt, Artificial Sequence
  Synthetic
uuagagaaguagguacuaccua

SEQ ID NO: 501272 - RNA, 23 nt, Artificial Sequence
  Synthetic
auuagagaaguagguacuaccua

SEQ ID NO: 501273 - RNA, 24 nt, Artificial Sequence
  Synthetic
cauuagagaaguagguacuaccua

SEQ ID NO: 501274 - RNA, 18 nt, Artificial Sequence
  Synthetic
aaacuucaacucuaccua

SEQ ID NO: 501275 - RNA, 19 nt, Artificial Sequence
  Synthetic
caaacuucaacucuaccua

SEQ ID NO: 501276 - RNA, 20 nt, Artificial Sequence
  Synthetic
gcaaacuucaacucuaccua

SEQ ID NO: 501277 - RNA, 21 nt, Artificial Sequence
  Synthetic
ugcaaacuucaacucuaccua

SEQ ID NO: 501278 - RNA, 22 nt, Artificial Sequence
  Synthetic
gugcaaacuucaacucuaccua

SEQ ID NO: 501279 - RNA, 23 nt, Artificial Sequence
  Synthetic
ggugcaaacuucaacucuaccua

SEQ ID NO: 501280 - RNA, 24 nt, Artificial Sequence
  Synthetic
aggugcaaacuucaacucuaccua

SEQ ID NO: 501281 - RNA, 18 nt, Artificial Sequence
  Synthetic
ccaugaaagaaguaccua

SEQ ID NO: 501282 - RNA, 19 nt, Artificial Sequence
  Synthetic
accaugaaagaaguaccua

SEQ ID NO: 501283 - RNA, 20 nt, Artificial Sequence
  Synthetic
gaccaugaaagaaguaccua

SEQ ID NO: 501284 - RNA, 21 nt, Artificial Sequence
  Synthetic
ugaccaugaaagaaguaccua

SEQ ID NO: 501285 - RNA, 22 nt, Artificial Sequence
  Synthetic
cugaccaugaaagaaguaccua

SEQ ID NO: 501286 - RNA, 23 nt, Artificial Sequence
  Synthetic
ucugaccaugaaagaaguaccua

SEQ ID NO: 501287 - RNA, 24 nt, Artificial Sequence
  Synthetic
uucugaccaugaaagaaguaccua

SEQ ID NO: 501288 - RNA, 18 nt, Artificial Sequence
  Synthetic
aauaaaugaagguaccua

SEQ ID NO: 501289 - RNA, 19 nt, Artificial Sequence
  Synthetic
gaauaaaugaagguaccua

SEQ ID NO: 501290 - RNA, 20 nt, Artificial Sequence
  Synthetic
ugaauaaaugaagguaccua

SEQ ID NO: 501291 - RNA, 21 nt, Artificial Sequence
  Synthetic
gugaauaaaugaagguaccua

SEQ ID NO: 501292 - RNA, 22 nt, Artificial Sequence
  Synthetic
agugaauaaaugaagguaccua

SEQ ID NO: 501293 - RNA, 23 nt, Artificial Sequence
  Synthetic
gagugaauaaaugaagguaccua

SEQ ID NO: 501294 - RNA, 24 nt, Artificial Sequence
  Synthetic
ugagugaauaaaugaagguaccua

SEQ ID NO: 501295 - RNA, 18 nt, Artificial Sequence
  Synthetic
cagaagaguagguaccua

SEQ ID NO: 501296 - RNA, 19 nt, Artificial Sequence
  Synthetic
acagaagaguagguaccua

SEQ ID NO: 501297 - RNA, 20 nt, Artificial Sequence
  Synthetic
aacagaagaguagguaccua

SEQ ID NO: 501298 - RNA, 21 nt, Artificial Sequence
  Synthetic
aaacagaagaguagguaccua

SEQ ID NO: 501299 - RNA, 22 nt, Artificial Sequence
  Synthetic
gaaacagaagaguagguaccua

SEQ ID NO: 501300 - RNA, 23 nt, Artificial Sequence
  Synthetic
agaaacagaagaguagguaccua

SEQ ID NO: 501301 - RNA, 24 nt, Artificial Sequence
  Synthetic
gagaaacagaagaguagguaccua

SEQ ID NO: 501302 - RNA, 18 nt, Artificial Sequence
  Synthetic
uacugcuaaguguaccua

SEQ ID NO: 501303 - RNA, 19 nt, Artificial Sequence
  Synthetic
auacugcuaaguguaccua

SEQ ID NO: 501304 - RNA, 20 nt, Artificial Sequence
  Synthetic
cauacugcuaaguguaccua

SEQ ID NO: 501305 - RNA, 21 nt, Artificial Sequence
  Synthetic
ucauacugcuaaguguaccua

SEQ ID NO: 501306 - RNA, 22 nt, Artificial Sequence
  Synthetic
uucauacugcuaaguguaccua

SEQ ID NO: 501307 - RNA, 23 nt, Artificial Sequence
  Synthetic
uuucauacugcuaaguguaccua

SEQ ID NO: 501308 - RNA, 24 nt, Artificial Sequence
  Synthetic
uuuucauacugcuaaguguaccua

SEQ ID NO: 501309 - RNA, 18 nt, Artificial Sequence
  Synthetic
caaguggauuuguaccua

SEQ ID NO: 501310 - RNA, 19 nt, Artificial Sequence
  Synthetic
gcaaguggauuuguaccua

SEQ ID NO: 501311 - RNA, 20 nt, Artificial Sequence
  Synthetic
ggcaaguggauuuguaccua

SEQ ID NO: 501312 - RNA, 21 nt, Artificial Sequence
  Synthetic
aggcaaguggauuuguaccua

SEQ ID NO: 501313 - RNA, 22 nt, Artificial Sequence
  Synthetic
aaggcaaguggauuuguaccua

SEQ ID NO: 501314 - RNA, 23 nt, Artificial Sequence
  Synthetic
gaaggcaaguggauuuguaccua

SEQ ID NO: 501315 - RNA, 24 nt, Artificial Sequence
  Synthetic
ggaaggcaaguggauuuguaccua

SEQ ID NO: 501316 - RNA, 18 nt, Artificial Sequence
  Synthetic
ugugcaucaaauuaccua

SEQ ID NO: 501317 - RNA, 19 nt, Artificial Sequence
  Synthetic
gugugcaucaaauuaccua

SEQ ID NO: 501318 - RNA, 20 nt, Artificial Sequence
  Synthetic
agugugcaucaaauuaccua

SEQ ID NO: 501319 - RNA, 21 nt, Artificial Sequence
  Synthetic
uagugugcaucaaauuaccua

SEQ ID NO: 501320 - RNA, 22 nt, Artificial Sequence
  Synthetic
uuagugugcaucaaauuaccua

SEQ ID NO: 501321 - RNA, 23 nt, Artificial Sequence
  Synthetic
uuuagugugcaucaaauuaccua

SEQ ID NO: 501322 - RNA, 24 nt, Artificial Sequence
  Synthetic
cuuuagugugcaucaaauuaccua

SEQ ID NO: 501323 - RNA, 18 nt, Artificial Sequence
  Synthetic
aaguauaugacuuaccua

SEQ ID NO: 501324 - RNA, 19 nt, Artificial Sequence
  Synthetic
aaaguauaugacuuaccua

SEQ ID NO: 501325 - RNA, 20 nt, Artificial Sequence
  Synthetic
aaaaguauaugacuuaccua

SEQ ID NO: 501326 - RNA, 21 nt, Artificial Sequence
  Synthetic
aaaaaguauaugacuuaccua

SEQ ID NO: 501327 - RNA, 22 nt, Artificial Sequence
  Synthetic
aaaaaaguauaugacuuaccua

SEQ ID NO: 501328 - RNA, 23 nt, Artificial Sequence
  Synthetic
gaaaaaaguauaugacuuaccua

SEQ ID NO: 501329 - RNA, 24 nt, Artificial Sequence
  Synthetic
ggaaaaaaguauaugacuuaccua

SEQ ID NO: 501330 - RNA, 18 nt, Artificial Sequence
  Synthetic
ugugguuaaaguuaccua

SEQ ID NO: 501331 - RNA, 19 nt, Artificial Sequence
  Synthetic
augugguuaaaguuaccua

SEQ ID NO: 501332 - RNA, 20 nt, Artificial Sequence
  Synthetic
aaugugguuaaaguuaccua

SEQ ID NO: 501333 - RNA, 21 nt, Artificial Sequence
  Synthetic
uaaugugguuaaaguuaccua

SEQ ID NO: 501334 - RNA, 22 nt, Artificial Sequence
  Synthetic
uuaaugugguuaaaguuaccua

SEQ ID NO: 501335 - RNA, 23 nt, Artificial Sequence
  Synthetic
cuuaaugugguuaaaguuaccua

SEQ ID NO: 501336 - RNA, 24 nt, Artificial Sequence
  Synthetic
acuuaaugugguuaaaguuaccua

SEQ ID NO: 501337 - RNA, 18 nt, Artificial Sequence
  Synthetic
aucuuggaauuuuaccua

SEQ ID NO: 501338 - RNA, 19 nt, Artificial Sequence
  Synthetic
uaucuuggaauuuuaccua

SEQ ID NO: 501339 - RNA, 20 nt, Artificial Sequence
  Synthetic
guaucuuggaauuuuaccua

SEQ ID NO: 501340 - RNA, 21 nt, Artificial Sequence
  Synthetic
aguaucuuggaauuuuaccua

SEQ ID NO: 501341 - RNA, 22 nt, Artificial Sequence
  Synthetic
gaguaucuuggaauuuuaccua

SEQ ID NO: 501342 - RNA, 23 nt, Artificial Sequence
  Synthetic
ggaguaucuuggaauuuuaccua

SEQ ID NO: 501343 - RNA, 24 nt, Artificial Sequence
  Synthetic
uggaguaucuuggaauuuuaccua

SEQ ID NO: 501344 - RNA, 18 nt, Artificial Sequence
  Synthetic
ggcaaaaaauaaacccua

SEQ ID NO: 501345 - RNA, 19 nt, Artificial Sequence
  Synthetic
aggcaaaaaauaaacccua

SEQ ID NO: 501346 - RNA, 20 nt, Artificial Sequence
  Synthetic
uaggcaaaaaauaaacccua

SEQ ID NO: 501347 - RNA, 21 nt, Artificial Sequence
  Synthetic
uuaggcaaaaaauaaacccua

SEQ ID NO: 501348 - RNA, 22 nt, Artificial Sequence
  Synthetic
guuaggcaaaaaauaaacccua

SEQ ID NO: 501349 - RNA, 23 nt, Artificial Sequence
  Synthetic
uguuaggcaaaaaauaaacccua

SEQ ID NO: 501350 - RNA, 24 nt, Artificial Sequence
  Synthetic
uuguuaggcaaaaaauaaacccua

SEQ ID NO: 501351 - RNA, 18 nt, Artificial Sequence
  Synthetic
gcuuuagaguaaacccua

SEQ ID NO: 501352 - RNA, 19 nt, Artificial Sequence
  Synthetic
ugcuuuagaguaaacccua

SEQ ID NO: 501353 - RNA, 20 nt, Artificial Sequence
  Synthetic
uugcuuuagaguaaacccua

SEQ ID NO: 501354 - RNA, 21 nt, Artificial Sequence
  Synthetic
guugcuuuagaguaaacccua

SEQ ID NO: 501355 - RNA, 22 nt, Artificial Sequence
  Synthetic
uguugcuuuagaguaaacccua

SEQ ID NO: 501356 - RNA, 23 nt, Artificial Sequence
  Synthetic
cuguugcuuuagaguaaacccua

SEQ ID NO: 501357 - RNA, 24 nt, Artificial Sequence
  Synthetic
ccuguugcuuuagaguaaacccua

SEQ ID NO: 501358 - RNA, 18 nt, Artificial Sequence
  Synthetic
ugaacugggugaacccua

SEQ ID NO: 501359 - RNA, 19 nt, Artificial Sequence
  Synthetic
cugaacugggugaacccua

SEQ ID NO: 501360 - RNA, 20 nt, Artificial Sequence
  Synthetic
ccugaacugggugaacccua

SEQ ID NO: 501361 - RNA, 21 nt, Artificial Sequence
  Synthetic
gccugaacugggugaacccua

SEQ ID NO: 501362 - RNA, 22 nt, Artificial Sequence
  Synthetic
ugccugaacugggugaacccua

SEQ ID NO: 501363 - RNA, 23 nt, Artificial Sequence
  Synthetic
gugccugaacugggugaacccua

SEQ ID NO: 501364 - RNA, 24 nt, Artificial Sequence
  Synthetic
ggugccugaacugggugaacccua

SEQ ID NO: 501365 - RNA, 18 nt, Artificial Sequence
  Synthetic
uugauaaaauucacccua

SEQ ID NO: 501366 - RNA, 19 nt, Artificial Sequence
  Synthetic
auugauaaaauucacccua

SEQ ID NO: 501367 - RNA, 20 nt, Artificial Sequence
  Synthetic
uauugauaaaauucacccua

SEQ ID NO: 501368 - RNA, 21 nt, Artificial Sequence
  Synthetic
auauugauaaaauucacccua

SEQ ID NO: 501369 - RNA, 22 nt, Artificial Sequence
  Synthetic
aauauugauaaaauucacccua

SEQ ID NO: 501370 - RNA, 23 nt, Artificial Sequence
  Synthetic
caauauugauaaaauucacccua

SEQ ID NO: 501371 - RNA, 24 nt, Artificial Sequence
  Synthetic
acaauauugauaaaauucacccua

SEQ ID NO: 501372 - RNA, 18 nt, Artificial Sequence
  Synthetic
auuugaagcuggacccua

SEQ ID NO: 501373 - RNA, 19 nt, Artificial Sequence
  Synthetic
aauuugaagcuggacccua

SEQ ID NO: 501374 - RNA, 20 nt, Artificial Sequence
  Synthetic
uaauuugaagcuggacccua

SEQ ID NO: 501375 - RNA, 21 nt, Artificial Sequence
  Synthetic
uuaauuugaagcuggacccua

SEQ ID NO: 501376 - RNA, 22 nt, Artificial Sequence
  Synthetic
auuaauuugaagcuggacccua

SEQ ID NO: 501377 - RNA, 23 nt, Artificial Sequence
  Synthetic
aauuaauuugaagcuggacccua

SEQ ID NO: 501378 - RNA, 24 nt, Artificial Sequence
  Synthetic
aaauuaauuugaagcuggacccua

SEQ ID NO: 501379 - RNA, 18 nt, Artificial Sequence
  Synthetic
acuugcuaagugacccua

SEQ ID NO: 501380 - RNA, 19 nt, Artificial Sequence
  Synthetic
cacuugcuaagugacccua

SEQ ID NO: 501381 - RNA, 20 nt, Artificial Sequence
  Synthetic
ccacuugcuaagugacccua

SEQ ID NO: 501382 - RNA, 21 nt, Artificial Sequence
  Synthetic
uccacuugcuaagugacccua

SEQ ID NO: 501383 - RNA, 22 nt, Artificial Sequence
  Synthetic
uuccacuugcuaagugacccua

SEQ ID NO: 501384 - RNA, 23 nt, Artificial Sequence
  Synthetic
cuuccacuugcuaagugacccua

SEQ ID NO: 501385 - RNA, 24 nt, Artificial Sequence
  Synthetic
ucuuccacuugcuaagugacccua

SEQ ID NO: 501386 - RNA, 18 nt, Artificial Sequence
  Synthetic
accacauauccuacccua

SEQ ID NO: 501387 - RNA, 19 nt, Artificial Sequence
  Synthetic
gaccacauauccuacccua

SEQ ID NO: 501388 - RNA, 20 nt, Artificial Sequence
  Synthetic
agaccacauauccuacccua

SEQ ID NO: 501389 - RNA, 21 nt, Artificial Sequence
  Synthetic
cagaccacauauccuacccua

SEQ ID NO: 501390 - RNA, 22 nt, Artificial Sequence
  Synthetic
acagaccacauauccuacccua

SEQ ID NO: 501391 - RNA, 23 nt, Artificial Sequence
  Synthetic
uacagaccacauauccuacccua

SEQ ID NO: 501392 - RNA, 24 nt, Artificial Sequence
  Synthetic
cuacagaccacauauccuacccua

SEQ ID NO: 501393 - RNA, 18 nt, Artificial Sequence
  Synthetic
cgccucauaucuacccua

SEQ ID NO: 501394 - RNA, 19 nt, Artificial Sequence
  Synthetic
acgccucauaucuacccua

SEQ ID NO: 501395 - RNA, 20 nt, Artificial Sequence
  Synthetic
cacgccucauaucuacccua

SEQ ID NO: 501396 - RNA, 21 nt, Artificial Sequence
  Synthetic
ccacgccucauaucuacccua

SEQ ID NO: 501397 - RNA, 22 nt, Artificial Sequence
  Synthetic
accacgccucauaucuacccua

SEQ ID NO: 501398 - RNA, 23 nt, Artificial Sequence
  Synthetic
uaccacgccucauaucuacccua

SEQ ID NO: 501399 - RNA, 24 nt, Artificial Sequence
  Synthetic
uuaccacgccucauaucuacccua

SEQ ID NO: 501400 - RNA, 18 nt, Artificial Sequence
  Synthetic
cucaaauacugcccccua

SEQ ID NO: 501401 - RNA, 19 nt, Artificial Sequence
  Synthetic
gcucaaauacugcccccua

SEQ ID NO: 501402 - RNA, 20 nt, Artificial Sequence
  Synthetic
ugcucaaauacugcccccua

SEQ ID NO: 501403 - RNA, 21 nt, Artificial Sequence
  Synthetic
cugcucaaauacugcccccua

SEQ ID NO: 501404 - RNA, 22 nt, Artificial Sequence
  Synthetic
ucugcucaaauacugcccccua

SEQ ID NO: 501405 - RNA, 23 nt, Artificial Sequence
  Synthetic
aucugcucaaauacugcccccua

SEQ ID NO: 501406 - RNA, 24 nt, Artificial Sequence
  Synthetic
uaucugcucaaauacugcccccua

SEQ ID NO: 501407 - RNA, 18 nt, Artificial Sequence
  Synthetic
ggccuucuuuauccccua

SEQ ID NO: 501408 - RNA, 19 nt, Artificial Sequence
  Synthetic
aggccuucuuuauccccua

SEQ ID NO: 501409 - RNA, 20 nt, Artificial Sequence
  Synthetic
uaggccuucuuuauccccua

SEQ ID NO: 501410 - RNA, 21 nt, Artificial Sequence
  Synthetic
auaggccuucuuuauccccua

SEQ ID NO: 501411 - RNA, 22 nt, Artificial Sequence
  Synthetic
aauaggccuucuuuauccccua

SEQ ID NO: 501412 - RNA, 23 nt, Artificial Sequence
  Synthetic
aaauaggccuucuuuauccccua

SEQ ID NO: 501413 - RNA, 24 nt, Artificial Sequence
  Synthetic
gaaauaggccuucuuuauccccua

SEQ ID NO: 501414 - RNA, 18 nt, Artificial Sequence
  Synthetic
cugucaucgacagcccua

SEQ ID NO: 501415 - RNA, 19 nt, Artificial Sequence
  Synthetic
ccugucaucgacagcccua

SEQ ID NO: 501416 - RNA, 20 nt, Artificial Sequence
  Synthetic
uccugucaucgacagcccua

SEQ ID NO: 501417 - RNA, 21 nt, Artificial Sequence
  Synthetic
cuccugucaucgacagcccua

SEQ ID NO: 501418 - RNA, 22 nt, Artificial Sequence
  Synthetic
ucuccugucaucgacagcccua

SEQ ID NO: 501419 - RNA, 23 nt, Artificial Sequence
  Synthetic
gucuccugucaucgacagcccua

SEQ ID NO: 501420 - RNA, 24 nt, Artificial Sequence
  Synthetic
ggucuccugucaucgacagcccua

SEQ ID NO: 501421 - RNA, 18 nt, Artificial Sequence
  Synthetic
aacucacuugcggcccua

SEQ ID NO: 501422 - RNA, 19 nt, Artificial Sequence
  Synthetic
caacucacuugcggcccua

SEQ ID NO: 501423 - RNA, 20 nt, Artificial Sequence
  Synthetic
ucaacucacuugcggcccua

SEQ ID NO: 501424 - RNA, 21 nt, Artificial Sequence
  Synthetic
aucaacucacuugcggcccua

SEQ ID NO: 501425 - RNA, 22 nt, Artificial Sequence
  Synthetic
uaucaacucacuugcggcccua

SEQ ID NO: 501426 - RNA, 23 nt, Artificial Sequence
  Synthetic
uuaucaacucacuugcggcccua

SEQ ID NO: 501427 - RNA, 24 nt, Artificial Sequence
  Synthetic
cuuaucaacucacuugcggcccua

SEQ ID NO: 501428 - RNA, 18 nt, Artificial Sequence
  Synthetic
cuccuguugucaucccua

SEQ ID NO: 501429 - RNA, 19 nt, Artificial Sequence
  Synthetic
ucuccuguugucaucccua

SEQ ID NO: 501430 - RNA, 20 nt, Artificial Sequence
  Synthetic
gucuccuguugucaucccua

SEQ ID NO: 501431 - RNA, 21 nt, Artificial Sequence
  Synthetic
ggucuccuguugucaucccua

SEQ ID NO: 501432 - RNA, 22 nt, Artificial Sequence
  Synthetic
gggucuccuguugucaucccua

SEQ ID NO: 501433 - RNA, 23 nt, Artificial Sequence
  Synthetic
ugggucuccuguugucaucccua

SEQ ID NO: 501434 - RNA, 24 nt, Artificial Sequence
  Synthetic
cugggucuccuguugucaucccua

SEQ ID NO: 501435 - RNA, 18 nt, Artificial Sequence
  Synthetic
ugggaaagaaggucccua

SEQ ID NO: 501436 - RNA, 19 nt, Artificial Sequence
  Synthetic
uugggaaagaaggucccua

SEQ ID NO: 501437 - RNA, 20 nt, Artificial Sequence
  Synthetic
uuugggaaagaaggucccua

SEQ ID NO: 501438 - RNA, 21 nt, Artificial Sequence
  Synthetic
cuuugggaaagaaggucccua

SEQ ID NO: 501439 - RNA, 22 nt, Artificial Sequence
  Synthetic
gcuuugggaaagaaggucccua

SEQ ID NO: 501440 - RNA, 23 nt, Artificial Sequence
  Synthetic
ugcuuugggaaagaaggucccua

SEQ ID NO: 501441 - RNA, 24 nt, Artificial Sequence
  Synthetic
augcuuugggaaagaaggucccua

SEQ ID NO: 501442 - RNA, 18 nt, Artificial Sequence
  Synthetic
cacaaauucaggucccua

SEQ ID NO: 501443 - RNA, 19 nt, Artificial Sequence
  Synthetic
ucacaaauucaggucccua

SEQ ID NO: 501444 - RNA, 20 nt, Artificial Sequence
  Synthetic
gucacaaauucaggucccua

SEQ ID NO: 501445 - RNA, 21 nt, Artificial Sequence
  Synthetic
ggucacaaauucaggucccua

SEQ ID NO: 501446 - RNA, 22 nt, Artificial Sequence
  Synthetic
gggucacaaauucaggucccua

SEQ ID NO: 501447 - RNA, 23 nt, Artificial Sequence
  Synthetic
agggucacaaauucaggucccua

SEQ ID NO: 501448 - RNA, 24 nt, Artificial Sequence
  Synthetic
uagggucacaaauucaggucccua

SEQ ID NO: 501449 - RNA, 18 nt, Artificial Sequence
  Synthetic
guuccauaaacuucccua

SEQ ID NO: 501450 - RNA, 19 nt, Artificial Sequence
  Synthetic
gguuccauaaacuucccua

SEQ ID NO: 501451 - RNA, 20 nt, Artificial Sequence
  Synthetic
ugguuccauaaacuucccua

SEQ ID NO: 501452 - RNA, 21 nt, Artificial Sequence
  Synthetic
augguuccauaaacuucccua

SEQ ID NO: 501453 - RNA, 22 nt, Artificial Sequence
  Synthetic
uaugguuccauaaacuucccua

SEQ ID NO: 501454 - RNA, 23 nt, Artificial Sequence
  Synthetic
guaugguuccauaaacuucccua

SEQ ID NO: 501455 - RNA, 24 nt, Artificial Sequence
  Synthetic
uguaugguuccauaaacuucccua

SEQ ID NO: 501456 - RNA, 18 nt, Artificial Sequence
  Synthetic
auagaauauauuucccua

SEQ ID NO: 501457 - RNA, 19 nt, Artificial Sequence
  Synthetic
aauagaauauauuucccua

SEQ ID NO: 501458 - RNA, 20 nt, Artificial Sequence
  Synthetic
caauagaauauauuucccua

SEQ ID NO: 501459 - RNA, 21 nt, Artificial Sequence
  Synthetic
acaauagaauauauuucccua

SEQ ID NO: 501460 - RNA, 22 nt, Artificial Sequence
  Synthetic
uacaauagaauauauuucccua

SEQ ID NO: 501461 - RNA, 23 nt, Artificial Sequence
  Synthetic
uuacaauagaauauauuucccua

SEQ ID NO: 501462 - RNA, 24 nt, Artificial Sequence
  Synthetic
auuacaauagaauauauuucccua

SEQ ID NO: 501463 - RNA, 18 nt, Artificial Sequence
  Synthetic
accaaucuuaaaagccua

SEQ ID NO: 501464 - RNA, 19 nt, Artificial Sequence
  Synthetic
gaccaaucuuaaaagccua

SEQ ID NO: 501465 - RNA, 20 nt, Artificial Sequence
  Synthetic
ggaccaaucuuaaaagccua

SEQ ID NO: 501466 - RNA, 21 nt, Artificial Sequence
  Synthetic
uggaccaaucuuaaaagccua

SEQ ID NO: 501467 - RNA, 22 nt, Artificial Sequence
  Synthetic
uuggaccaaucuuaaaagccua

SEQ ID NO: 501468 - RNA, 23 nt, Artificial Sequence
  Synthetic
uuuggaccaaucuuaaaagccua

SEQ ID NO: 501469 - RNA, 24 nt, Artificial Sequence
  Synthetic
guuuggaccaaucuuaaaagccua

SEQ ID NO: 501470 - RNA, 18 nt, Artificial Sequence
  Synthetic
aacagacguggaagccua

SEQ ID NO: 501471 - RNA, 19 nt, Artificial Sequence
  Synthetic
caacagacguggaagccua

SEQ ID NO: 501472 - RNA, 20 nt, Artificial Sequence
  Synthetic
acaacagacguggaagccua

SEQ ID NO: 501473 - RNA, 21 nt, Artificial Sequence
  Synthetic
aacaacagacguggaagccua

SEQ ID NO: 501474 - RNA, 22 nt, Artificial Sequence
  Synthetic
gaacaacagacguggaagccua

SEQ ID NO: 501475 - RNA, 23 nt, Artificial Sequence
  Synthetic
ggaacaacagacguggaagccua

SEQ ID NO: 501476 - RNA, 24 nt, Artificial Sequence
  Synthetic
aggaacaacagacguggaagccua

SEQ ID NO: 501477 - RNA, 18 nt, Artificial Sequence
  Synthetic
cuuuccgggguaagccua

SEQ ID NO: 501478 - RNA, 19 nt, Artificial Sequence
  Synthetic
gcuuuccgggguaagccua

SEQ ID NO: 501479 - RNA, 20 nt, Artificial Sequence
  Synthetic
ugcuuuccgggguaagccua

SEQ ID NO: 501480 - RNA, 21 nt, Artificial Sequence
  Synthetic
uugcuuuccgggguaagccua

SEQ ID NO: 501481 - RNA, 22 nt, Artificial Sequence
  Synthetic
guugcuuuccgggguaagccua

SEQ ID NO: 501482 - RNA, 23 nt, Artificial Sequence
  Synthetic
uguugcuuuccgggguaagccua

SEQ ID NO: 501483 - RNA, 24 nt, Artificial Sequence
  Synthetic
uuguugcuuuccgggguaagccua

SEQ ID NO: 501484 - RNA, 18 nt, Artificial Sequence
  Synthetic
guugcaacuuugagccua

SEQ ID NO: 501485 - RNA, 19 nt, Artificial Sequence
  Synthetic
uguugcaacuuugagccua

SEQ ID NO: 501486 - RNA, 20 nt, Artificial Sequence
  Synthetic
cuguugcaacuuugagccua

SEQ ID NO: 501487 - RNA, 21 nt, Artificial Sequence
  Synthetic
acuguugcaacuuugagccua

SEQ ID NO: 501488 - RNA, 22 nt, Artificial Sequence
  Synthetic
uacuguugcaacuuugagccua

SEQ ID NO: 501489 - RNA, 23 nt, Artificial Sequence
  Synthetic
auacuguugcaacuuugagccua

SEQ ID NO: 501490 - RNA, 24 nt, Artificial Sequence
  Synthetic
aauacuguugcaacuuugagccua

SEQ ID NO: 501491 - RNA, 18 nt, Artificial Sequence
  Synthetic
caccuuuguuuuagccua

SEQ ID NO: 501492 - RNA, 19 nt, Artificial Sequence
  Synthetic
acaccuuuguuuuagccua

SEQ ID NO: 501493 - RNA, 20 nt, Artificial Sequence
  Synthetic
aacaccuuuguuuuagccua

SEQ ID NO: 501494 - RNA, 21 nt, Artificial Sequence
  Synthetic
aaacaccuuuguuuuagccua

SEQ ID NO: 501495 - RNA, 22 nt, Artificial Sequence
  Synthetic
aaaacaccuuuguuuuagccua

SEQ ID NO: 501496 - RNA, 23 nt, Artificial Sequence
  Synthetic
gaaaacaccuuuguuuuagccua

SEQ ID NO: 501497 - RNA, 24 nt, Artificial Sequence
  Synthetic
agaaaacaccuuuguuuuagccua

SEQ ID NO: 501498 - RNA, 18 nt, Artificial Sequence
  Synthetic
aacccuugagaaggccua

SEQ ID NO: 501499 - RNA, 19 nt, Artificial Sequence
  Synthetic
caacccuugagaaggccua

SEQ ID NO: 501500 - RNA, 20 nt, Artificial Sequence
  Synthetic
ucaacccuugagaaggccua

SEQ ID NO: 501501 - RNA, 21 nt, Artificial Sequence
  Synthetic
gucaacccuugagaaggccua

SEQ ID NO: 501502 - RNA, 22 nt, Artificial Sequence
  Synthetic
ugucaacccuugagaaggccua

SEQ ID NO: 501503 - RNA, 23 nt, Artificial Sequence
  Synthetic
uugucaacccuugagaaggccua

SEQ ID NO: 501504 - RNA, 24 nt, Artificial Sequence
  Synthetic
auugucaacccuugagaaggccua

SEQ ID NO: 501505 - RNA, 18 nt, Artificial Sequence
  Synthetic
ggacuuuuaagaggccua

SEQ ID NO: 501506 - RNA, 19 nt, Artificial Sequence
  Synthetic
aggacuuuuaagaggccua

SEQ ID NO: 501507 - RNA, 20 nt, Artificial Sequence
  Synthetic
gaggacuuuuaagaggccua

SEQ ID NO: 501508 - RNA, 21 nt, Artificial Sequence
  Synthetic
agaggacuuuuaagaggccua

SEQ ID NO: 501509 - RNA, 22 nt, Artificial Sequence
  Synthetic
uagaggacuuuuaagaggccua

SEQ ID NO: 501510 - RNA, 23 nt, Artificial Sequence
  Synthetic
cuagaggacuuuuaagaggccua

SEQ ID NO: 501511 - RNA, 24 nt, Artificial Sequence
  Synthetic
ucuagaggacuuuuaagaggccua

SEQ ID NO: 501512 - RNA, 18 nt, Artificial Sequence
  Synthetic
cagaggaucagaggccua

SEQ ID NO: 501513 - RNA, 19 nt, Artificial Sequence
  Synthetic
ccagaggaucagaggccua

SEQ ID NO: 501514 - RNA, 20 nt, Artificial Sequence
  Synthetic
uccagaggaucagaggccua

SEQ ID NO: 501515 - RNA, 21 nt, Artificial Sequence
  Synthetic
uuccagaggaucagaggccua

SEQ ID NO: 501516 - RNA, 22 nt, Artificial Sequence
  Synthetic
uuuccagaggaucagaggccua

SEQ ID NO: 501517 - RNA, 23 nt, Artificial Sequence
  Synthetic
uuuuccagaggaucagaggccua

SEQ ID NO: 501518 - RNA, 24 nt, Artificial Sequence
  Synthetic
uuuuuccagaggaucagaggccua

SEQ ID NO: 501519 - RNA, 18 nt, Artificial Sequence
  Synthetic
agugcagagaaaugccua

SEQ ID NO: 501520 - RNA, 19 nt, Artificial Sequence
  Synthetic
aagugcagagaaaugccua

SEQ ID NO: 501521 - RNA, 20 nt, Artificial Sequence
  Synthetic
aaagugcagagaaaugccua

SEQ ID NO: 501522 - RNA, 21 nt, Artificial Sequence
  Synthetic
uaaagugcagagaaaugccua

SEQ ID NO: 501523 - RNA, 22 nt, Artificial Sequence
  Synthetic
uuaaagugcagagaaaugccua

SEQ ID NO: 501524 - RNA, 23 nt, Artificial Sequence
  Synthetic
uuuaaagugcagagaaaugccua

SEQ ID NO: 501525 - RNA, 24 nt, Artificial Sequence
  Synthetic
auuuaaagugcagagaaaugccua

SEQ ID NO: 501526 - RNA, 18 nt, Artificial Sequence
  Synthetic
accaaaagccaaugccua

SEQ ID NO: 501527 - RNA, 19 nt, Artificial Sequence
  Synthetic
uaccaaaagccaaugccua

SEQ ID NO: 501528 - RNA, 20 nt, Artificial Sequence
  Synthetic
uuaccaaaagccaaugccua

SEQ ID NO: 501529 - RNA, 21 nt, Artificial Sequence
  Synthetic
guuaccaaaagccaaugccua

SEQ ID NO: 501530 - RNA, 22 nt, Artificial Sequence
  Synthetic
aguuaccaaaagccaaugccua

SEQ ID NO: 501531 - RNA, 23 nt, Artificial Sequence
  Synthetic
caguuaccaaaagccaaugccua

SEQ ID NO: 501532 - RNA, 24 nt, Artificial Sequence
  Synthetic
ucaguuaccaaaagccaaugccua

SEQ ID NO: 501533 - RNA, 18 nt, Artificial Sequence
  Synthetic
caaguaauuugaugccua

SEQ ID NO: 501534 - RNA, 19 nt, Artificial Sequence
  Synthetic
acaaguaauuugaugccua

SEQ ID NO: 501535 - RNA, 20 nt, Artificial Sequence
  Synthetic
gacaaguaauuugaugccua

SEQ ID NO: 501536 - RNA, 21 nt, Artificial Sequence
  Synthetic
ugacaaguaauuugaugccua

SEQ ID NO: 501537 - RNA, 22 nt, Artificial Sequence
  Synthetic
cugacaaguaauuugaugccua

SEQ ID NO: 501538 - RNA, 23 nt, Artificial Sequence
  Synthetic
acugacaaguaauuugaugccua

SEQ ID NO: 501539 - RNA, 24 nt, Artificial Sequence
  Synthetic
cacugacaaguaauuugaugccua

SEQ ID NO: 501540 - RNA, 24 nt, Artificial Sequence
  Synthetic
gaguccccacuggggcacugccua

SEQ ID NO: 501541 - RNA, 18 nt, Artificial Sequence
  Synthetic
agagaggaagccugccua

SEQ ID NO: 501542 - RNA, 19 nt, Artificial Sequence
  Synthetic
cagagaggaagccugccua

SEQ ID NO: 501543 - RNA, 20 nt, Artificial Sequence
  Synthetic
ucagagaggaagccugccua

SEQ ID NO: 501544 - RNA, 21 nt, Artificial Sequence
  Synthetic
aucagagaggaagccugccua

SEQ ID NO: 501545 - RNA, 22 nt, Artificial Sequence
  Synthetic
aaucagagaggaagccugccua

SEQ ID NO: 501546 - RNA, 23 nt, Artificial Sequence
  Synthetic
aaaucagagaggaagccugccua

SEQ ID NO: 501547 - RNA, 24 nt, Artificial Sequence
  Synthetic
caaaucagagaggaagccugccua

SEQ ID NO: 501548 - RNA, 18 nt, Artificial Sequence
  Synthetic
cagaagaauaggugccua

SEQ ID NO: 501549 - RNA, 19 nt, Artificial Sequence
  Synthetic
ucagaagaauaggugccua

SEQ ID NO: 501550 - RNA, 20 nt, Artificial Sequence
  Synthetic
aucagaagaauaggugccua

SEQ ID NO: 501551 - RNA, 21 nt, Artificial Sequence
  Synthetic
aaucagaagaauaggugccua

SEQ ID NO: 501552 - RNA, 22 nt, Artificial Sequence
  Synthetic
aaaucagaagaauaggugccua

SEQ ID NO: 501553 - RNA, 23 nt, Artificial Sequence
  Synthetic
uaaaucagaagaauaggugccua

SEQ ID NO: 501554 - RNA, 24 nt, Artificial Sequence
  Synthetic
auaaaucagaagaauaggugccua

SEQ ID NO: 501555 - RNA, 18 nt, Artificial Sequence
  Synthetic
ggcacaggugugugccua

SEQ ID NO: 501556 - RNA, 19 nt, Artificial Sequence
  Synthetic
aggcacaggugugugccua

SEQ ID NO: 501557 - RNA, 20 nt, Artificial Sequence
  Synthetic
caggcacaggugugugccua

SEQ ID NO: 501558 - RNA, 21 nt, Artificial Sequence
  Synthetic
acaggcacaggugugugccua

SEQ ID NO: 501559 - RNA, 22 nt, Artificial Sequence
  Synthetic
uacaggcacaggugugugccua

SEQ ID NO: 501560 - RNA, 23 nt, Artificial Sequence
  Synthetic
uuacaggcacaggugugugccua

SEQ ID NO: 501561 - RNA, 24 nt, Artificial Sequence
  Synthetic
uuuacaggcacaggugugugccua

SEQ ID NO: 501562 - RNA, 18 nt, Artificial Sequence
  Synthetic
gugcguuagaauugccua

SEQ ID NO: 501563 - RNA, 19 nt, Artificial Sequence
  Synthetic
ugugcguuagaauugccua

SEQ ID NO: 501564 - RNA, 20 nt, Artificial Sequence
  Synthetic
gugugcguuagaauugccua

SEQ ID NO: 501565 - RNA, 21 nt, Artificial Sequence
  Synthetic
agugugcguuagaauugccua

SEQ ID NO: 501566 - RNA, 22 nt, Artificial Sequence
  Synthetic
gagugugcguuagaauugccua

SEQ ID NO: 501567 - RNA, 23 nt, Artificial Sequence
  Synthetic
ugagugugcguuagaauugccua

SEQ ID NO: 501568 - RNA, 24 nt, Artificial Sequence
  Synthetic
uugagugugcguuagaauugccua

SEQ ID NO: 501569 - RNA, 18 nt, Artificial Sequence
  Synthetic
acauuuaaaauuugccua

SEQ ID NO: 501570 - RNA, 19 nt, Artificial Sequence
  Synthetic
aacauuuaaaauuugccua

SEQ ID NO: 501571 - RNA, 20 nt, Artificial Sequence
  Synthetic
caacauuuaaaauuugccua

SEQ ID NO: 501572 - RNA, 21 nt, Artificial Sequence
  Synthetic
ucaacauuuaaaauuugccua

SEQ ID NO: 501573 - RNA, 22 nt, Artificial Sequence
  Synthetic
uucaacauuuaaaauuugccua

SEQ ID NO: 501574 - RNA, 23 nt, Artificial Sequence
  Synthetic
uuucaacauuuaaaauuugccua

SEQ ID NO: 501575 - RNA, 24 nt, Artificial Sequence
  Synthetic
auuucaacauuuaaaauuugccua

SEQ ID NO: 501576 - RNA, 18 nt, Artificial Sequence
  Synthetic
uaaauccacaacauccua

SEQ ID NO: 501577 - RNA, 19 nt, Artificial Sequence
  Synthetic
uuaaauccacaacauccua

SEQ ID NO: 501578 - RNA, 20 nt, Artificial Sequence
  Synthetic
uuuaaauccacaacauccua

SEQ ID NO: 501579 - RNA, 21 nt, Artificial Sequence
  Synthetic
auuuaaauccacaacauccua

SEQ ID NO: 501580 - RNA, 22 nt, Artificial Sequence
  Synthetic
cauuuaaauccacaacauccua

SEQ ID NO: 501581 - RNA, 23 nt, Artificial Sequence
  Synthetic
acauuuaaauccacaacauccua

SEQ ID NO: 501582 - RNA, 24 nt, Artificial Sequence
  Synthetic
cacauuuaaauccacaacauccua

SEQ ID NO: 501583 - RNA, 18 nt, Artificial Sequence
  Synthetic
cugugauaguacauccua

SEQ ID NO: 501584 - RNA, 19 nt, Artificial Sequence
  Synthetic
gcugugauaguacauccua

SEQ ID NO: 501585 - RNA, 20 nt, Artificial Sequence
  Synthetic
ugcugugauaguacauccua

SEQ ID NO: 501586 - RNA, 21 nt, Artificial Sequence
  Synthetic
cugcugugauaguacauccua

SEQ ID NO: 501587 - RNA, 22 nt, Artificial Sequence
  Synthetic
acugcugugauaguacauccua

SEQ ID NO: 501588 - RNA, 23 nt, Artificial Sequence
  Synthetic
cacugcugugauaguacauccua

SEQ ID NO: 501589 - RNA, 24 nt, Artificial Sequence
  Synthetic
acacugcugugauaguacauccua

SEQ ID NO: 501590 - RNA, 18 nt, Artificial Sequence
  Synthetic
gaaucacuggguauccua

SEQ ID NO: 501591 - RNA, 19 nt, Artificial Sequence
  Synthetic
ugaaucacuggguauccua

SEQ ID NO: 501592 - RNA, 20 nt, Artificial Sequence
  Synthetic
uugaaucacuggguauccua

SEQ ID NO: 501593 - RNA, 21 nt, Artificial Sequence
  Synthetic
uuugaaucacuggguauccua

SEQ ID NO: 501594 - RNA, 22 nt, Artificial Sequence
  Synthetic
cuuugaaucacuggguauccua

SEQ ID NO: 501595 - RNA, 23 nt, Artificial Sequence
  Synthetic
acuuugaaucacuggguauccua

SEQ ID NO: 501596 - RNA, 24 nt, Artificial Sequence
  Synthetic
cacuuugaaucacuggguauccua

SEQ ID NO: 501597 - RNA, 18 nt, Artificial Sequence
  Synthetic
gaucacuuucuuauccua

SEQ ID NO: 501598 - RNA, 19 nt, Artificial Sequence
  Synthetic
agaucacuuucuuauccua

SEQ ID NO: 501599 - RNA, 20 nt, Artificial Sequence
  Synthetic
aagaucacuuucuuauccua

SEQ ID NO: 501600 - RNA, 21 nt, Artificial Sequence
  Synthetic
aaagaucacuuucuuauccua

SEQ ID NO: 501601 - RNA, 22 nt, Artificial Sequence
  Synthetic
uaaagaucacuuucuuauccua

SEQ ID NO: 501602 - RNA, 23 nt, Artificial Sequence
  Synthetic
auaaagaucacuuucuuauccua

SEQ ID NO: 501603 - RNA, 24 nt, Artificial Sequence
  Synthetic
uauaaagaucacuuucuuauccua

SEQ ID NO: 501604 - RNA, 18 nt, Artificial Sequence
  Synthetic
uaaguuauaguuauccua

SEQ ID NO: 501605 - RNA, 19 nt, Artificial Sequence
  Synthetic
cuaaguuauaguuauccua

SEQ ID NO: 501606 - RNA, 20 nt, Artificial Sequence
  Synthetic
acuaaguuauaguuauccua

SEQ ID NO: 501607 - RNA, 21 nt, Artificial Sequence
  Synthetic
uacuaaguuauaguuauccua

SEQ ID NO: 501608 - RNA, 22 nt, Artificial Sequence
  Synthetic
cuacuaaguuauaguuauccua

SEQ ID NO: 501609 - RNA, 23 nt, Artificial Sequence
  Synthetic
ccuacuaaguuauaguuauccua

SEQ ID NO: 501610 - RNA, 24 nt, Artificial Sequence
  Synthetic
accuacuaaguuauaguuauccua

SEQ ID NO: 501611 - RNA, 18 nt, Artificial Sequence
  Synthetic
cuuccucgauuuauccua

SEQ ID NO: 501612 - RNA, 19 nt, Artificial Sequence
  Synthetic
ucuuccucgauuuauccua

SEQ ID NO: 501613 - RNA, 20 nt, Artificial Sequence
  Synthetic
aucuuccucgauuuauccua

SEQ ID NO: 501614 - RNA, 21 nt, Artificial Sequence
  Synthetic
aaucuuccucgauuuauccua

SEQ ID NO: 501615 - RNA, 22 nt, Artificial Sequence
  Synthetic
aaaucuuccucgauuuauccua

SEQ ID NO: 501616 - RNA, 23 nt, Artificial Sequence
  Synthetic
aaaaucuuccucgauuuauccua

SEQ ID NO: 501617 - RNA, 24 nt, Artificial Sequence
  Synthetic
uaaaaucuuccucgauuuauccua

SEQ ID NO: 501618 - RNA, 18 nt, Artificial Sequence
  Synthetic
guguuuggugaacuccua

SEQ ID NO: 501619 - RNA, 19 nt, Artificial Sequence
  Synthetic
cguguuuggugaacuccua

SEQ ID NO: 501620 - RNA, 20 nt, Artificial Sequence
  Synthetic
gcguguuuggugaacuccua

SEQ ID NO: 501621 - RNA, 21 nt, Artificial Sequence
  Synthetic
agcguguuuggugaacuccua

SEQ ID NO: 501622 - RNA, 22 nt, Artificial Sequence
  Synthetic
cagcguguuuggugaacuccua

SEQ ID NO: 501623 - RNA, 23 nt, Artificial Sequence
  Synthetic
ucagcguguuuggugaacuccua

SEQ ID NO: 501624 - RNA, 24 nt, Artificial Sequence
  Synthetic
uucagcguguuuggugaacuccua

SEQ ID NO: 501625 - RNA, 18 nt, Artificial Sequence
  Synthetic
agggucugauuacuccua

SEQ ID NO: 501626 - RNA, 19 nt, Artificial Sequence
  Synthetic
aagggucugauuacuccua

SEQ ID NO: 501627 - RNA, 20 nt, Artificial Sequence
  Synthetic
uaagggucugauuacuccua

SEQ ID NO: 501628 - RNA, 21 nt, Artificial Sequence
  Synthetic
auaagggucugauuacuccua

SEQ ID NO: 501629 - RNA, 22 nt, Artificial Sequence
  Synthetic
aauaagggucugauuacuccua

SEQ ID NO: 501630 - RNA, 23 nt, Artificial Sequence
  Synthetic
uaauaagggucugauuacuccua

SEQ ID NO: 501631 - RNA, 24 nt, Artificial Sequence
  Synthetic
guaauaagggucugauuacuccua

SEQ ID NO: 501632 - RNA, 18 nt, Artificial Sequence
  Synthetic
aauuuuaacaaccuccua

SEQ ID NO: 501633 - RNA, 19 nt, Artificial Sequence
  Synthetic
caauuuuaacaaccuccua

SEQ ID NO: 501634 - RNA, 20 nt, Artificial Sequence
  Synthetic
ccaauuuuaacaaccuccua

SEQ ID NO: 501635 - RNA, 21 nt, Artificial Sequence
  Synthetic
gccaauuuuaacaaccuccua

SEQ ID NO: 501636 - RNA, 22 nt, Artificial Sequence
  Synthetic
ggccaauuuuaacaaccuccua

SEQ ID NO: 501637 - RNA, 23 nt, Artificial Sequence
  Synthetic
uggccaauuuuaacaaccuccua

SEQ ID NO: 501638 - RNA, 24 nt, Artificial Sequence
  Synthetic
cuggccaauuuuaacaaccuccua

SEQ ID NO: 501639 - RNA, 18 nt, Artificial Sequence
  Synthetic
ccaccugcuuagcuccua

SEQ ID NO: 501640 - RNA, 19 nt, Artificial Sequence
  Synthetic
gccaccugcuuagcuccua

SEQ ID NO: 501641 - RNA, 20 nt, Artificial Sequence
  Synthetic
ggccaccugcuuagcuccua

SEQ ID NO: 501642 - RNA, 21 nt, Artificial Sequence
  Synthetic
uggccaccugcuuagcuccua

SEQ ID NO: 501643 - RNA, 22 nt, Artificial Sequence
  Synthetic
cuggccaccugcuuagcuccua

SEQ ID NO: 501644 - RNA, 23 nt, Artificial Sequence
  Synthetic
ucuggccaccugcuuagcuccua

SEQ ID NO: 501645 - RNA, 24 nt, Artificial Sequence
  Synthetic
uucuggccaccugcuuagcuccua

SEQ ID NO: 501646 - RNA, 18 nt, Artificial Sequence
  Synthetic
auaggguuugugcuccua

SEQ ID NO: 501647 - RNA, 19 nt, Artificial Sequence
  Synthetic
aauaggguuugugcuccua

SEQ ID NO: 501648 - RNA, 20 nt, Artificial Sequence
  Synthetic
caauaggguuugugcuccua

SEQ ID NO: 501649 - RNA, 21 nt, Artificial Sequence
  Synthetic
acaauaggguuugugcuccua

SEQ ID NO: 501650 - RNA, 22 nt, Artificial Sequence
  Synthetic
cacaauaggguuugugcuccua

SEQ ID NO: 501651 - RNA, 23 nt, Artificial Sequence
  Synthetic
ucacaauaggguuugugcuccua

SEQ ID NO: 501652 - RNA, 24 nt, Artificial Sequence
  Synthetic
uucacaauaggguuugugcuccua

SEQ ID NO: 501653 - RNA, 18 nt, Artificial Sequence
  Synthetic
uaggcaguaacaguccua

SEQ ID NO: 501654 - RNA, 19 nt, Artificial Sequence
  Synthetic
uuaggcaguaacaguccua

SEQ ID NO: 501655 - RNA, 20 nt, Artificial Sequence
  Synthetic
cuuaggcaguaacaguccua

SEQ ID NO: 501656 - RNA, 21 nt, Artificial Sequence
  Synthetic
ccuuaggcaguaacaguccua

SEQ ID NO: 501657 - RNA, 22 nt, Artificial Sequence
  Synthetic
gccuuaggcaguaacaguccua

SEQ ID NO: 501658 - RNA, 23 nt, Artificial Sequence
  Synthetic
ugccuuaggcaguaacaguccua

SEQ ID NO: 501659 - RNA, 24 nt, Artificial Sequence
  Synthetic
uugccuuaggcaguaacaguccua

SEQ ID NO: 501660 - RNA, 18 nt, Artificial Sequence
  Synthetic
uucauuggagagguccua

SEQ ID NO: 501661 - RNA, 19 nt, Artificial Sequence
  Synthetic
guucauuggagagguccua

SEQ ID NO: 501662 - RNA, 20 nt, Artificial Sequence
  Synthetic
uguucauuggagagguccua

SEQ ID NO: 501663 - RNA, 21 nt, Artificial Sequence
  Synthetic
cuguucauuggagagguccua

SEQ ID NO: 501664 - RNA, 22 nt, Artificial Sequence
  Synthetic
ccuguucauuggagagguccua

SEQ ID NO: 501665 - RNA, 23 nt, Artificial Sequence
  Synthetic
uccuguucauuggagagguccua

SEQ ID NO: 501666 - RNA, 24 nt, Artificial Sequence
  Synthetic
auccuguucauuggagagguccua

SEQ ID NO: 501667 - RNA, 18 nt, Artificial Sequence
  Synthetic
uucaccuuggagguccua

SEQ ID NO: 501668 - RNA, 19 nt, Artificial Sequence
  Synthetic
uuucaccuuggagguccua

SEQ ID NO: 501669 - RNA, 20 nt, Artificial Sequence
  Synthetic
auuucaccuuggagguccua

SEQ ID NO: 501670 - RNA, 21 nt, Artificial Sequence
  Synthetic
aauuucaccuuggagguccua

SEQ ID NO: 501671 - RNA, 22 nt, Artificial Sequence
  Synthetic
caauuucaccuuggagguccua

SEQ ID NO: 501672 - RNA, 23 nt, Artificial Sequence
  Synthetic
ucaauuucaccuuggagguccua

SEQ ID NO: 501673 - RNA, 24 nt, Artificial Sequence
  Synthetic
uucaauuucaccuuggagguccua

SEQ ID NO: 501674 - RNA, 18 nt, Artificial Sequence
  Synthetic
aagccuugccugguccua

SEQ ID NO: 501675 - RNA, 19 nt, Artificial Sequence
  Synthetic
aaagccuugccugguccua

SEQ ID NO: 501676 - RNA, 20 nt, Artificial Sequence
  Synthetic
aaaagccuugccugguccua

SEQ ID NO: 501677 - RNA, 21 nt, Artificial Sequence
  Synthetic
aaaaagccuugccugguccua

SEQ ID NO: 501678 - RNA, 22 nt, Artificial Sequence
  Synthetic
uaaaaagccuugccugguccua

SEQ ID NO: 501679 - RNA, 23 nt, Artificial Sequence
  Synthetic
cuaaaaagccuugccugguccua

SEQ ID NO: 501680 - RNA, 24 nt, Artificial Sequence
  Synthetic
ucuaaaaagccuugccugguccua

SEQ ID NO: 501681 - RNA, 18 nt, Artificial Sequence
  Synthetic
caagccuuucugguccua

SEQ ID NO: 501682 - RNA, 19 nt, Artificial Sequence
  Synthetic
ucaagccuuucugguccua

SEQ ID NO: 501683 - RNA, 20 nt, Artificial Sequence
  Synthetic
cucaagccuuucugguccua

SEQ ID NO: 501684 - RNA, 21 nt, Artificial Sequence
  Synthetic
ucucaagccuuucugguccua

SEQ ID NO: 501685 - RNA, 22 nt, Artificial Sequence
  Synthetic
uucucaagccuuucugguccua

SEQ ID NO: 501686 - RNA, 23 nt, Artificial Sequence
  Synthetic
uuucucaagccuuucugguccua

SEQ ID NO: 501687 - RNA, 24 nt, Artificial Sequence
  Synthetic
cuuucucaagccuuucugguccua

SEQ ID NO: 501688 - RNA, 18 nt, Artificial Sequence
  Synthetic
agagacucaaauguccua

SEQ ID NO: 501689 - RNA, 19 nt, Artificial Sequence
  Synthetic
aagagacucaaauguccua

SEQ ID NO: 501690 - RNA, 20 nt, Artificial Sequence
  Synthetic
aaagagacucaaauguccua

SEQ ID NO: 501691 - RNA, 21 nt, Artificial Sequence
  Synthetic
gaaagagacucaaauguccua

SEQ ID NO: 501692 - RNA, 22 nt, Artificial Sequence
  Synthetic
ggaaagagacucaaauguccua

SEQ ID NO: 501693 - RNA, 23 nt, Artificial Sequence
  Synthetic
aggaaagagacucaaauguccua

SEQ ID NO: 501694 - RNA, 24 nt, Artificial Sequence
  Synthetic
caggaaagagacucaaauguccua

SEQ ID NO: 501695 - RNA, 18 nt, Artificial Sequence
  Synthetic
gguucagaacauguccua

SEQ ID NO: 501696 - RNA, 19 nt, Artificial Sequence
  Synthetic
ggguucagaacauguccua

SEQ ID NO: 501697 - RNA, 20 nt, Artificial Sequence
  Synthetic
aggguucagaacauguccua

SEQ ID NO: 501698 - RNA, 21 nt, Artificial Sequence
  Synthetic
gaggguucagaacauguccua

SEQ ID NO: 501699 - RNA, 22 nt, Artificial Sequence
  Synthetic
ggaggguucagaacauguccua

SEQ ID NO: 501700 - RNA, 23 nt, Artificial Sequence
  Synthetic
gggaggguucagaacauguccua

SEQ ID NO: 501701 - RNA, 24 nt, Artificial Sequence
  Synthetic
agggaggguucagaacauguccua

SEQ ID NO: 501702 - RNA, 18 nt, Artificial Sequence
  Synthetic
uaccauaccacuguccua

SEQ ID NO: 501703 - RNA, 19 nt, Artificial Sequence
  Synthetic
uuaccauaccacuguccua

SEQ ID NO: 501704 - RNA, 20 nt, Artificial Sequence
  Synthetic
uuuaccauaccacuguccua

SEQ ID NO: 501705 - RNA, 21 nt, Artificial Sequence
  Synthetic
cuuuaccauaccacuguccua

SEQ ID NO: 501706 - RNA, 22 nt, Artificial Sequence
  Synthetic
gcuuuaccauaccacuguccua

SEQ ID NO: 501707 - RNA, 23 nt, Artificial Sequence
  Synthetic
ugcuuuaccauaccacuguccua

SEQ ID NO: 501708 - RNA, 24 nt, Artificial Sequence
  Synthetic
uugcuuuaccauaccacuguccua

SEQ ID NO: 501709 - RNA, 18 nt, Artificial Sequence
  Synthetic
ucagcuccuucauuccua

SEQ ID NO: 501710 - RNA, 19 nt, Artificial Sequence
  Synthetic
gucagcuccuucauuccua

SEQ ID NO: 501711 - RNA, 20 nt, Artificial Sequence
  Synthetic
ugucagcuccuucauuccua

SEQ ID NO: 501712 - RNA, 21 nt, Artificial Sequence
  Synthetic
uugucagcuccuucauuccua

SEQ ID NO: 501713 - RNA, 22 nt, Artificial Sequence
  Synthetic
uuugucagcuccuucauuccua

SEQ ID NO: 501714 - RNA, 23 nt, Artificial Sequence
  Synthetic
guuugucagcuccuucauuccua

SEQ ID NO: 501715 - RNA, 24 nt, Artificial Sequence
  Synthetic
gguuugucagcuccuucauuccua

SEQ ID NO: 501716 - RNA, 18 nt, Artificial Sequence
  Synthetic
uuuuaaaagugcuuccua

SEQ ID NO: 501717 - RNA, 19 nt, Artificial Sequence
  Synthetic
uuuuuaaaagugcuuccua

SEQ ID NO: 501718 - RNA, 20 nt, Artificial Sequence
  Synthetic
auuuuuaaaagugcuuccua

SEQ ID NO: 501719 - RNA, 21 nt, Artificial Sequence
  Synthetic
uauuuuuaaaagugcuuccua

SEQ ID NO: 501720 - RNA, 22 nt, Artificial Sequence
  Synthetic
cuauuuuuaaaagugcuuccua

SEQ ID NO: 501721 - RNA, 23 nt, Artificial Sequence
  Synthetic
gcuauuuuuaaaagugcuuccua

SEQ ID NO: 501722 - RNA, 24 nt, Artificial Sequence
  Synthetic
ugcuauuuuuaaaagugcuuccua

SEQ ID NO: 501723 - RNA, 18 nt, Artificial Sequence
  Synthetic
aaauuaauuaucuuccua

SEQ ID NO: 501724 - RNA, 19 nt, Artificial Sequence
  Synthetic
aaaauuaauuaucuuccua

SEQ ID NO: 501725 - RNA, 20 nt, Artificial Sequence
  Synthetic
aaaaauuaauuaucuuccua

SEQ ID NO: 501726 - RNA, 21 nt, Artificial Sequence
  Synthetic
aaaaaauuaauuaucuuccua

SEQ ID NO: 501727 - RNA, 22 nt, Artificial Sequence
  Synthetic
uaaaaaauuaauuaucuuccua

SEQ ID NO: 501728 - RNA, 23 nt, Artificial Sequence
  Synthetic
cuaaaaaauuaauuaucuuccua

SEQ ID NO: 501729 - RNA, 24 nt, Artificial Sequence
  Synthetic
acuaaaaaauuaauuaucuuccua

SEQ ID NO: 501730 - RNA, 18 nt, Artificial Sequence
  Synthetic
aggaauugguaguuccua

SEQ ID NO: 501731 - RNA, 19 nt, Artificial Sequence
  Synthetic
uaggaauugguaguuccua

SEQ ID NO: 501732 - RNA, 20 nt, Artificial Sequence
  Synthetic
auaggaauugguaguuccua

SEQ ID NO: 501733 - RNA, 21 nt, Artificial Sequence
  Synthetic
gauaggaauugguaguuccua

SEQ ID NO: 501734 - RNA, 22 nt, Artificial Sequence
  Synthetic
agauaggaauugguaguuccua

SEQ ID NO: 501735 - RNA, 23 nt, Artificial Sequence
  Synthetic
uagauaggaauugguaguuccua

SEQ ID NO: 501736 - RNA, 24 nt, Artificial Sequence
  Synthetic
auagauaggaauugguaguuccua

SEQ ID NO: 501737 - RNA, 18 nt, Artificial Sequence
  Synthetic
uucccgaucaauuuccua

SEQ ID NO: 501738 - RNA, 19 nt, Artificial Sequence
  Synthetic
auucccgaucaauuuccua

SEQ ID NO: 501739 - RNA, 20 nt, Artificial Sequence
  Synthetic
aauucccgaucaauuuccua

SEQ ID NO: 501740 - RNA, 21 nt, Artificial Sequence
  Synthetic
caauucccgaucaauuuccua

SEQ ID NO: 501741 - RNA, 22 nt, Artificial Sequence
  Synthetic
gcaauucccgaucaauuuccua

SEQ ID NO: 501742 - RNA, 23 nt, Artificial Sequence
  Synthetic
ugcaauucccgaucaauuuccua

SEQ ID NO: 501743 - RNA, 24 nt, Artificial Sequence
  Synthetic
cugcaauucccgaucaauuuccua

SEQ ID NO: 501744 - RNA, 18 nt, Artificial Sequence
  Synthetic
cuucuaugaauuuuccua

SEQ ID NO: 501745 - RNA, 19 nt, Artificial Sequence
  Synthetic
acuucuaugaauuuuccua

SEQ ID NO: 501746 - RNA, 20 nt, Artificial Sequence
  Synthetic
uacuucuaugaauuuuccua

SEQ ID NO: 501747 - RNA, 21 nt, Artificial Sequence
  Synthetic
cuacuucuaugaauuuuccua

SEQ ID NO: 501748 - RNA, 22 nt, Artificial Sequence
  Synthetic
gcuacuucuaugaauuuuccua

SEQ ID NO: 501749 - RNA, 23 nt, Artificial Sequence
  Synthetic
ugcuacuucuaugaauuuuccua

SEQ ID NO: 501750 - RNA, 24 nt, Artificial Sequence
  Synthetic
augcuacuucuaugaauuuuccua

SEQ ID NO: 501751 - RNA, 18 nt, Artificial Sequence
  Synthetic
uucuacuguuuuuuccua

SEQ ID NO: 501752 - RNA, 19 nt, Artificial Sequence
  Synthetic
auucuacuguuuuuuccua

SEQ ID NO: 501753 - RNA, 20 nt, Artificial Sequence
  Synthetic
gauucuacuguuuuuuccua

SEQ ID NO: 501754 - RNA, 21 nt, Artificial Sequence
  Synthetic
ugauucuacuguuuuuuccua

SEQ ID NO: 501755 - RNA, 22 nt, Artificial Sequence
  Synthetic
uugauucuacuguuuuuuccua

SEQ ID NO: 501756 - RNA, 23 nt, Artificial Sequence
  Synthetic
uuugauucuacuguuuuuuccua

SEQ ID NO: 501757 - RNA, 24 nt, Artificial Sequence
  Synthetic
auuugauucuacuguuuuuuccua

SEQ ID NO: 501758 - RNA, 18 nt, Artificial Sequence
  Synthetic
cauacauuuuuuuuccua

SEQ ID NO: 501759 - RNA, 19 nt, Artificial Sequence
  Synthetic
acauacauuuuuuuuccua

SEQ ID NO: 501760 - RNA, 20 nt, Artificial Sequence
  Synthetic
cacauacauuuuuuuuccua

SEQ ID NO: 501761 - RNA, 21 nt, Artificial Sequence
  Synthetic
acacauacauuuuuuuuccua

SEQ ID NO: 501762 - RNA, 22 nt, Artificial Sequence
  Synthetic
cacacauacauuuuuuuuccua

SEQ ID NO: 501763 - RNA, 23 nt, Artificial Sequence
  Synthetic
acacacauacauuuuuuuuccua

SEQ ID NO: 501764 - RNA, 24 nt, Artificial Sequence
  Synthetic
cacacacauacauuuuuuuuccua

SEQ ID NO: 501765 - RNA, 18 nt, Artificial Sequence
  Synthetic
aguacaaauaaaaagcua

SEQ ID NO: 501766 - RNA, 19 nt, Artificial Sequence
  Synthetic
aaguacaaauaaaaagcua

SEQ ID NO: 501767 - RNA, 20 nt, Artificial Sequence
  Synthetic
aaaguacaaauaaaaagcua

SEQ ID NO: 501768 - RNA, 21 nt, Artificial Sequence
  Synthetic
uaaaguacaaauaaaaagcua

SEQ ID NO: 501769 - RNA, 22 nt, Artificial Sequence
  Synthetic
auaaaguacaaauaaaaagcua

SEQ ID NO: 501770 - RNA, 23 nt, Artificial Sequence
  Synthetic
aauaaaguacaaauaaaaagcua

SEQ ID NO: 501771 - RNA, 24 nt, Artificial Sequence
  Synthetic
aaauaaaguacaaauaaaaagcua

SEQ ID NO: 501772 - RNA, 18 nt, Artificial Sequence
  Synthetic
gggucaaugcaaaagcua

SEQ ID NO: 501773 - RNA, 19 nt, Artificial Sequence
  Synthetic
cgggucaaugcaaaagcua

SEQ ID NO: 501774 - RNA, 20 nt, Artificial Sequence
  Synthetic
ucgggucaaugcaaaagcua

SEQ ID NO: 501775 - RNA, 21 nt, Artificial Sequence
  Synthetic
uucgggucaaugcaaaagcua

SEQ ID NO: 501776 - RNA, 22 nt, Artificial Sequence
  Synthetic
guucgggucaaugcaaaagcua

SEQ ID NO: 501777 - RNA, 23 nt, Artificial Sequence
  Synthetic
uguucgggucaaugcaaaagcua

SEQ ID NO: 501778 - RNA, 24 nt, Artificial Sequence
  Synthetic
auguucgggucaaugcaaaagcua

SEQ ID NO: 501779 - RNA, 18 nt, Artificial Sequence
  Synthetic
uauucuauugaaaagcua

SEQ ID NO: 501780 - RNA, 19 nt, Artificial Sequence
  Synthetic
auauucuauugaaaagcua

SEQ ID NO: 501781 - RNA, 20 nt, Artificial Sequence
  Synthetic
gauauucuauugaaaagcua

SEQ ID NO: 501782 - RNA, 21 nt, Artificial Sequence
  Synthetic
agauauucuauugaaaagcua

SEQ ID NO: 501783 - RNA, 22 nt, Artificial Sequence
  Synthetic
uagauauucuauugaaaagcua

SEQ ID NO: 501784 - RNA, 23 nt, Artificial Sequence
  Synthetic
cuagauauucuauugaaaagcua

SEQ ID NO: 501785 - RNA, 24 nt, Artificial Sequence
  Synthetic
ccuagauauucuauugaaaagcua

SEQ ID NO: 501786 - RNA, 18 nt, Artificial Sequence
  Synthetic
gaaaaccacucaaagcua

SEQ ID NO: 501787 - RNA, 19 nt, Artificial Sequence
  Synthetic
agaaaaccacucaaagcua

SEQ ID NO: 501788 - RNA, 20 nt, Artificial Sequence
  Synthetic
aagaaaaccacucaaagcua

SEQ ID NO: 501789 - RNA, 21 nt, Artificial Sequence
  Synthetic
caagaaaaccacucaaagcua

SEQ ID NO: 501790 - RNA, 22 nt, Artificial Sequence
  Synthetic
gcaagaaaaccacucaaagcua

SEQ ID NO: 501791 - RNA, 23 nt, Artificial Sequence
  Synthetic
ugcaagaaaaccacucaaagcua

SEQ ID NO: 501792 - RNA, 24 nt, Artificial Sequence
  Synthetic
augcaagaaaaccacucaaagcua

SEQ ID NO: 501793 - RNA, 18 nt, Artificial Sequence
  Synthetic
guaaauaauucaaagcua

SEQ ID NO: 501794 - RNA, 19 nt, Artificial Sequence
  Synthetic
aguaaauaauucaaagcua

SEQ ID NO: 501795 - RNA, 20 nt, Artificial Sequence
  Synthetic
caguaaauaauucaaagcua

SEQ ID NO: 501796 - RNA, 21 nt, Artificial Sequence
  Synthetic
acaguaaauaauucaaagcua

SEQ ID NO: 501797 - RNA, 22 nt, Artificial Sequence
  Synthetic
gacaguaaauaauucaaagcua

SEQ ID NO: 501798 - RNA, 23 nt, Artificial Sequence
  Synthetic
ggacaguaaauaauucaaagcua

SEQ ID NO: 501799 - RNA, 24 nt, Artificial Sequence
  Synthetic
uggacaguaaauaauucaaagcua

SEQ ID NO: 501800 - RNA, 18 nt, Artificial Sequence
  Synthetic
guucaaagucuaaagcua

SEQ ID NO: 501801 - RNA, 19 nt, Artificial Sequence
  Synthetic
aguucaaagucuaaagcua

SEQ ID NO: 501802 - RNA, 20 nt, Artificial Sequence
  Synthetic
gaguucaaagucuaaagcua

SEQ ID NO: 501803 - RNA, 21 nt, Artificial Sequence
  Synthetic
ugaguucaaagucuaaagcua

SEQ ID NO: 501804 - RNA, 22 nt, Artificial Sequence
  Synthetic
cugaguucaaagucuaaagcua

SEQ ID NO: 501805 - RNA, 23 nt, Artificial Sequence
  Synthetic
ucugaguucaaagucuaaagcua

SEQ ID NO: 501806 - RNA, 24 nt, Artificial Sequence
  Synthetic
uucugaguucaaagucuaaagcua

SEQ ID NO: 501807 - RNA, 18 nt, Artificial Sequence
  Synthetic
aauuagaaacacaagcua

SEQ ID NO: 501808 - RNA, 19 nt, Artificial Sequence
  Synthetic
aaauuagaaacacaagcua

SEQ ID NO: 501809 - RNA, 20 nt, Artificial Sequence
  Synthetic
aaaauuagaaacacaagcua

SEQ ID NO: 501810 - RNA, 21 nt, Artificial Sequence
  Synthetic
aaaaauuagaaacacaagcua

SEQ ID NO: 501811 - RNA, 22 nt, Artificial Sequence
  Synthetic
gaaaaauuagaaacacaagcua

SEQ ID NO: 501812 - RNA, 23 nt, Artificial Sequence
  Synthetic
agaaaaauuagaaacacaagcua

SEQ ID NO: 501813 - RNA, 24 nt, Artificial Sequence
  Synthetic
aagaaaaauuagaaacacaagcua

SEQ ID NO: 501814 - RNA, 18 nt, Artificial Sequence
  Synthetic
uaccaaaauaccaagcua

SEQ ID NO: 501815 - RNA, 19 nt, Artificial Sequence
  Synthetic
uuaccaaaauaccaagcua

SEQ ID NO: 501816 - RNA, 20 nt, Artificial Sequence
  Synthetic
guuaccaaaauaccaagcua

SEQ ID NO: 501817 - RNA, 21 nt, Artificial Sequence
  Synthetic
aguuaccaaaauaccaagcua

SEQ ID NO: 501818 - RNA, 22 nt, Artificial Sequence
  Synthetic
uaguuaccaaaauaccaagcua

SEQ ID NO: 501819 - RNA, 23 nt, Artificial Sequence
  Synthetic
uuaguuaccaaaauaccaagcua

SEQ ID NO: 501820 - RNA, 24 nt, Artificial Sequence
  Synthetic
uuuaguuaccaaaauaccaagcua

SEQ ID NO: 501821 - RNA, 18 nt, Artificial Sequence
  Synthetic
aggaaaucuuucaagcua

SEQ ID NO: 501822 - RNA, 19 nt, Artificial Sequence
  Synthetic
uaggaaaucuuucaagcua

SEQ ID NO: 501823 - RNA, 20 nt, Artificial Sequence
  Synthetic
guaggaaaucuuucaagcua

SEQ ID NO: 501824 - RNA, 21 nt, Artificial Sequence
  Synthetic
gguaggaaaucuuucaagcua

SEQ ID NO: 501825 - RNA, 22 nt, Artificial Sequence
  Synthetic
ugguaggaaaucuuucaagcua

SEQ ID NO: 501826 - RNA, 23 nt, Artificial Sequence
  Synthetic
cugguaggaaaucuuucaagcua

SEQ ID NO: 501827 - RNA, 24 nt, Artificial Sequence
  Synthetic
gcugguaggaaaucuuucaagcua

SEQ ID NO: 501828 - RNA, 18 nt, Artificial Sequence
  Synthetic
uuacggagggagaagcua

SEQ ID NO: 501829 - RNA, 19 nt, Artificial Sequence
  Synthetic
guuacggagggagaagcua

SEQ ID NO: 501830 - RNA, 20 nt, Artificial Sequence
  Synthetic
gguuacggagggagaagcua

SEQ ID NO: 501831 - RNA, 21 nt, Artificial Sequence
  Synthetic
ggguuacggagggagaagcua

SEQ ID NO: 501832 - RNA, 22 nt, Artificial Sequence
  Synthetic
gggguuacggagggagaagcua

SEQ ID NO: 501833 - RNA, 23 nt, Artificial Sequence
  Synthetic
ggggguuacggagggagaagcua

SEQ ID NO: 501834 - RNA, 24 nt, Artificial Sequence
  Synthetic
uggggguuacggagggagaagcua

SEQ ID NO: 501835 - RNA, 18 nt, Artificial Sequence
  Synthetic
uucauuaaagcgaagcua

SEQ ID NO: 501836 - RNA, 19 nt, Artificial Sequence
  Synthetic
guucauuaaagcgaagcua

SEQ ID NO: 501837 - RNA, 20 nt, Artificial Sequence
  Synthetic
aguucauuaaagcgaagcua

SEQ ID NO: 501838 - RNA, 21 nt, Artificial Sequence
  Synthetic
gaguucauuaaagcgaagcua

SEQ ID NO: 501839 - RNA, 22 nt, Artificial Sequence
  Synthetic
agaguucauuaaagcgaagcua

SEQ ID NO: 501840 - RNA, 23 nt, Artificial Sequence
  Synthetic
aagaguucauuaaagcgaagcua

SEQ ID NO: 501841 - RNA, 24 nt, Artificial Sequence
  Synthetic
caagaguucauuaaagcgaagcua

SEQ ID NO: 501842 - RNA, 18 nt, Artificial Sequence
  Synthetic
ggaggcuacgggaagcua

SEQ ID NO: 501843 - RNA, 19 nt, Artificial Sequence
  Synthetic
uggaggcuacgggaagcua

SEQ ID NO: 501844 - RNA, 20 nt, Artificial Sequence
  Synthetic
cuggaggcuacgggaagcua

SEQ ID NO: 501845 - RNA, 21 nt, Artificial Sequence
  Synthetic
gcuggaggcuacgggaagcua

SEQ ID NO: 501846 - RNA, 22 nt, Artificial Sequence
  Synthetic
ugcuggaggcuacgggaagcua

SEQ ID NO: 501847 - RNA, 23 nt, Artificial Sequence
  Synthetic
augcuggaggcuacgggaagcua

SEQ ID NO: 501848 - RNA, 24 nt, Artificial Sequence
  Synthetic
uaugcuggaggcuacgggaagcua

SEQ ID NO: 501849 - RNA, 18 nt, Artificial Sequence
  Synthetic
gguuaauuccugaagcua

SEQ ID NO: 501850 - RNA, 19 nt, Artificial Sequence
  Synthetic
agguuaauuccugaagcua

SEQ ID NO: 501851 - RNA, 20 nt, Artificial Sequence
  Synthetic
gagguuaauuccugaagcua

SEQ ID NO: 501852 - RNA, 21 nt, Artificial Sequence
  Synthetic
agagguuaauuccugaagcua

SEQ ID NO: 501853 - RNA, 22 nt, Artificial Sequence
  Synthetic
cagagguuaauuccugaagcua

SEQ ID NO: 501854 - RNA, 23 nt, Artificial Sequence
  Synthetic
ccagagguuaauuccugaagcua

SEQ ID NO: 501855 - RNA, 24 nt, Artificial Sequence
  Synthetic
cccagagguuaauuccugaagcua

SEQ ID NO: 501856 - RNA, 18 nt, Artificial Sequence
  Synthetic
cucuagacucugaagcua

SEQ ID NO: 501857 - RNA, 19 nt, Artificial Sequence
  Synthetic
ccucuagacucugaagcua

SEQ ID NO: 501858 - RNA, 20 nt, Artificial Sequence
  Synthetic
gccucuagacucugaagcua

SEQ ID NO: 501859 - RNA, 21 nt, Artificial Sequence
  Synthetic
ugccucuagacucugaagcua

SEQ ID NO: 501860 - RNA, 22 nt, Artificial Sequence
  Synthetic
augccucuagacucugaagcua

SEQ ID NO: 501861 - RNA, 23 nt, Artificial Sequence
  Synthetic
aaugccucuagacucugaagcua

SEQ ID NO: 501862 - RNA, 24 nt, Artificial Sequence
  Synthetic
aaaugccucuagacucugaagcua

SEQ ID NO: 501863 - RNA, 18 nt, Artificial Sequence
  Synthetic
auaauaauaaguaagcua

SEQ ID NO: 501864 - RNA, 19 nt, Artificial Sequence
  Synthetic
gauaauaauaaguaagcua

SEQ ID NO: 501865 - RNA, 20 nt, Artificial Sequence
  Synthetic
ugauaauaauaaguaagcua

SEQ ID NO: 501866 - RNA, 21 nt, Artificial Sequence
  Synthetic
uugauaauaauaaguaagcua

SEQ ID NO: 501867 - RNA, 22 nt, Artificial Sequence
  Synthetic
auugauaauaauaaguaagcua

SEQ ID NO: 501868 - RNA, 23 nt, Artificial Sequence
  Synthetic
gauugauaauaauaaguaagcua

SEQ ID NO: 501869 - RNA, 24 nt, Artificial Sequence
  Synthetic
ggauugauaauaauaaguaagcua

SEQ ID NO: 501870 - RNA, 18 nt, Artificial Sequence
  Synthetic
ucuacaacuauuaagcua

SEQ ID NO: 501871 - RNA, 19 nt, Artificial Sequence
  Synthetic
uucuacaacuauuaagcua

SEQ ID NO: 501872 - RNA, 20 nt, Artificial Sequence
  Synthetic
auucuacaacuauuaagcua

SEQ ID NO: 501873 - RNA, 21 nt, Artificial Sequence
  Synthetic
gauucuacaacuauuaagcua

SEQ ID NO: 501874 - RNA, 22 nt, Artificial Sequence
  Synthetic
agauucuacaacuauuaagcua

SEQ ID NO: 501875 - RNA, 23 nt, Artificial Sequence
  Synthetic
aagauucuacaacuauuaagcua

SEQ ID NO: 501876 - RNA, 24 nt, Artificial Sequence
  Synthetic
caagauucuacaacuauuaagcua

SEQ ID NO: 501877 - RNA, 18 nt, Artificial Sequence
  Synthetic
uaagauucacuuaagcua

SEQ ID NO: 501878 - RNA, 19 nt, Artificial Sequence
  Synthetic
uuaagauucacuuaagcua

SEQ ID NO: 501879 - RNA, 20 nt, Artificial Sequence
  Synthetic
uuuaagauucacuuaagcua

SEQ ID NO: 501880 - RNA, 21 nt, Artificial Sequence
  Synthetic
auuuaagauucacuuaagcua

SEQ ID NO: 501881 - RNA, 22 nt, Artificial Sequence
  Synthetic
aauuuaagauucacuuaagcua

SEQ ID NO: 501882 - RNA, 23 nt, Artificial Sequence
  Synthetic
caauuuaagauucacuuaagcua

SEQ ID NO: 501883 - RNA, 24 nt, Artificial Sequence
  Synthetic
acaauuuaagauucacuuaagcua

SEQ ID NO: 501884 - RNA, 18 nt, Artificial Sequence
  Synthetic
cuuuauuguguuaagcua

SEQ ID NO: 501885 - RNA, 19 nt, Artificial Sequence
  Synthetic
ucuuuauuguguuaagcua

SEQ ID NO: 501886 - RNA, 20 nt, Artificial Sequence
  Synthetic
gucuuuauuguguuaagcua

SEQ ID NO: 501887 - RNA, 21 nt, Artificial Sequence
  Synthetic
agucuuuauuguguuaagcua

SEQ ID NO: 501888 - RNA, 22 nt, Artificial Sequence
  Synthetic
cagucuuuauuguguuaagcua

SEQ ID NO: 501889 - RNA, 23 nt, Artificial Sequence
  Synthetic
gcagucuuuauuguguuaagcua

SEQ ID NO: 501890 - RNA, 24 nt, Artificial Sequence
  Synthetic
agcagucuuuauuguguuaagcua

SEQ ID NO: 501891 - RNA, 18 nt, Artificial Sequence
  Synthetic
aaagaccaguaacagcua

SEQ ID NO: 501892 - RNA, 19 nt, Artificial Sequence
  Synthetic
aaaagaccaguaacagcua

SEQ ID NO: 501893 - RNA, 20 nt, Artificial Sequence
  Synthetic
gaaaagaccaguaacagcua

SEQ ID NO: 501894 - RNA, 21 nt, Artificial Sequence
  Synthetic
ugaaaagaccaguaacagcua

SEQ ID NO: 501895 - RNA, 22 nt, Artificial Sequence
  Synthetic
cugaaaagaccaguaacagcua

SEQ ID NO: 501896 - RNA, 23 nt, Artificial Sequence
  Synthetic
ucugaaaagaccaguaacagcua

SEQ ID NO: 501897 - RNA, 24 nt, Artificial Sequence
  Synthetic
aucugaaaagaccaguaacagcua

SEQ ID NO: 501898 - RNA, 18 nt, Artificial Sequence
  Synthetic
aaagauauaucacagcua

SEQ ID NO: 501899 - RNA, 19 nt, Artificial Sequence
  Synthetic
aaaagauauaucacagcua

SEQ ID NO: 501900 - RNA, 20 nt, Artificial Sequence
  Synthetic
gaaaagauauaucacagcua

SEQ ID NO: 501901 - RNA, 21 nt, Artificial Sequence
  Synthetic
ggaaaagauauaucacagcua

SEQ ID NO: 501902 - RNA, 22 nt, Artificial Sequence
  Synthetic
uggaaaagauauaucacagcua

SEQ ID NO: 501903 - RNA, 23 nt, Artificial Sequence
  Synthetic
guggaaaagauauaucacagcua

SEQ ID NO: 501904 - RNA, 24 nt, Artificial Sequence
  Synthetic
gguggaaaagauauaucacagcua

SEQ ID NO: 501905 - RNA, 18 nt, Artificial Sequence
  Synthetic
aagcuagacucacagcua

SEQ ID NO: 501906 - RNA, 19 nt, Artificial Sequence
  Synthetic
aaagcuagacucacagcua

SEQ ID NO: 501907 - RNA, 20 nt, Artificial Sequence
  Synthetic
aaaagcuagacucacagcua

SEQ ID NO: 501908 - RNA, 21 nt, Artificial Sequence
  Synthetic
caaaagcuagacucacagcua

SEQ ID NO: 501909 - RNA, 22 nt, Artificial Sequence
  Synthetic
ucaaaagcuagacucacagcua

SEQ ID NO: 501910 - RNA, 23 nt, Artificial Sequence
  Synthetic
gucaaaagcuagacucacagcua

SEQ ID NO: 501911 - RNA, 24 nt, Artificial Sequence
  Synthetic
ggucaaaagcuagacucacagcua

SEQ ID NO: 501912 - RNA, 18 nt, Artificial Sequence
  Synthetic
aauugccaaagacagcua

SEQ ID NO: 501913 - RNA, 19 nt, Artificial Sequence
  Synthetic
aaauugccaaagacagcua

SEQ ID NO: 501914 - RNA, 20 nt, Artificial Sequence
  Synthetic
caaauugccaaagacagcua

SEQ ID NO: 501915 - RNA, 21 nt, Artificial Sequence
  Synthetic
acaaauugccaaagacagcua

SEQ ID NO: 501916 - RNA, 22 nt, Artificial Sequence
  Synthetic
aacaaauugccaaagacagcua

SEQ ID NO: 501917 - RNA, 23 nt, Artificial Sequence
  Synthetic
gaacaaauugccaaagacagcua

SEQ ID NO: 501918 - RNA, 24 nt, Artificial Sequence
  Synthetic
ggaacaaauugccaaagacagcua

SEQ ID NO: 501919 - RNA, 18 nt, Artificial Sequence
  Synthetic
caauaccuucuacagcua

SEQ ID NO: 501920 - RNA, 19 nt, Artificial Sequence
  Synthetic
ccaauaccuucuacagcua

SEQ ID NO: 501921 - RNA, 20 nt, Artificial Sequence
  Synthetic
accaauaccuucuacagcua

SEQ ID NO: 501922 - RNA, 21 nt, Artificial Sequence
  Synthetic
aaccaauaccuucuacagcua

SEQ ID NO: 501923 - RNA, 22 nt, Artificial Sequence
  Synthetic
aaaccaauaccuucuacagcua

SEQ ID NO: 501924 - RNA, 23 nt, Artificial Sequence
  Synthetic
aaaaccaauaccuucuacagcua

SEQ ID NO: 501925 - RNA, 24 nt, Artificial Sequence
  Synthetic
gaaaaccaauaccuucuacagcua

SEQ ID NO: 501926 - RNA, 18 nt, Artificial Sequence
  Synthetic
gaagggacaguacagcua

SEQ ID NO: 501927 - RNA, 19 nt, Artificial Sequence
  Synthetic
ggaagggacaguacagcua

SEQ ID NO: 501928 - RNA, 20 nt, Artificial Sequence
  Synthetic
uggaagggacaguacagcua

SEQ ID NO: 501929 - RNA, 21 nt, Artificial Sequence
  Synthetic
uuggaagggacaguacagcua

SEQ ID NO: 501930 - RNA, 22 nt, Artificial Sequence
  Synthetic
uuuggaagggacaguacagcua

SEQ ID NO: 501931 - RNA, 23 nt, Artificial Sequence
  Synthetic
uuuuggaagggacaguacagcua

SEQ ID NO: 501932 - RNA, 24 nt, Artificial Sequence
  Synthetic
cuuuuggaagggacaguacagcua

SEQ ID NO: 501933 - RNA, 18 nt, Artificial Sequence
  Synthetic
uuugaguauaaccagcua

SEQ ID NO: 501934 - RNA, 19 nt, Artificial Sequence
  Synthetic
auuugaguauaaccagcua

SEQ ID NO: 501935 - RNA, 20 nt, Artificial Sequence
  Synthetic
cauuugaguauaaccagcua

SEQ ID NO: 501936 - RNA, 21 nt, Artificial Sequence
  Synthetic
ccauuugaguauaaccagcua

SEQ ID NO: 501937 - RNA, 22 nt, Artificial Sequence
  Synthetic
accauuugaguauaaccagcua

SEQ ID NO: 501938 - RNA, 23 nt, Artificial Sequence
  Synthetic
aaccauuugaguauaaccagcua

SEQ ID NO: 501939 - RNA, 24 nt, Artificial Sequence
  Synthetic
uaaccauuugaguauaaccagcua

SEQ ID NO: 501940 - RNA, 18 nt, Artificial Sequence
  Synthetic
cacuuauaaucccagcua

SEQ ID NO: 501941 - RNA, 19 nt, Artificial Sequence
  Synthetic
acacuuauaaucccagcua

SEQ ID NO: 501942 - RNA, 20 nt, Artificial Sequence
  Synthetic
gacacuuauaaucccagcua

SEQ ID NO: 501943 - RNA, 21 nt, Artificial Sequence
  Synthetic
agacacuuauaaucccagcua

SEQ ID NO: 501944 - RNA, 22 nt, Artificial Sequence
  Synthetic
cagacacuuauaaucccagcua

SEQ ID NO: 501945 - RNA, 23 nt, Artificial Sequence
  Synthetic
gcagacacuuauaaucccagcua

SEQ ID NO: 501946 - RNA, 24 nt, Artificial Sequence
  Synthetic
ggcagacacuuauaaucccagcua

SEQ ID NO: 501947 - RNA, 18 nt, Artificial Sequence
  Synthetic
cgccuguagucccagcua

SEQ ID NO: 501948 - RNA, 19 nt, Artificial Sequence
  Synthetic
gcgccuguagucccagcua

SEQ ID NO: 501949 - RNA, 20 nt, Artificial Sequence
  Synthetic
ggcgccuguagucccagcua

SEQ ID NO: 501950 - RNA, 21 nt, Artificial Sequence
  Synthetic
gggcgccuguagucccagcua

SEQ ID NO: 501951 - RNA, 22 nt, Artificial Sequence
  Synthetic
cgggcgccuguagucccagcua

SEQ ID NO: 501952 - RNA, 23 nt, Artificial Sequence
  Synthetic
gcgggcgccuguagucccagcua

SEQ ID NO: 501953 - RNA, 24 nt, Artificial Sequence
  Synthetic
ggcgggcgccuguagucccagcua

SEQ ID NO: 501954 - RNA, 18 nt, Artificial Sequence
  Synthetic
uaauuggccugccagcua

SEQ ID NO: 501955 - RNA, 19 nt, Artificial Sequence
  Synthetic
cuaauuggccugccagcua

SEQ ID NO: 501956 - RNA, 20 nt, Artificial Sequence
  Synthetic
ucuaauuggccugccagcua

SEQ ID NO: 501957 - RNA, 21 nt, Artificial Sequence
  Synthetic
gucuaauuggccugccagcua

SEQ ID NO: 501958 - RNA, 22 nt, Artificial Sequence
  Synthetic
ugucuaauuggccugccagcua

SEQ ID NO: 501959 - RNA, 23 nt, Artificial Sequence
  Synthetic
cugucuaauuggccugccagcua

SEQ ID NO: 501960 - RNA, 24 nt, Artificial Sequence
  Synthetic
ucugucuaauuggccugccagcua

SEQ ID NO: 501961 - RNA, 18 nt, Artificial Sequence
  Synthetic
ugcuaagacuuccagcua

SEQ ID NO: 501962 - RNA, 19 nt, Artificial Sequence
  Synthetic
cugcuaagacuuccagcua

SEQ ID NO: 501963 - RNA, 20 nt, Artificial Sequence
  Synthetic
ccugcuaagacuuccagcua

SEQ ID NO: 501964 - RNA, 21 nt, Artificial Sequence
  Synthetic
cccugcuaagacuuccagcua

SEQ ID NO: 501965 - RNA, 22 nt, Artificial Sequence
  Synthetic
ucccugcuaagacuuccagcua

SEQ ID NO: 501966 - RNA, 23 nt, Artificial Sequence
  Synthetic
gucccugcuaagacuuccagcua

SEQ ID NO: 501967 - RNA, 24 nt, Artificial Sequence
  Synthetic
ggucccugcuaagacuuccagcua

SEQ ID NO: 501968 - RNA, 18 nt, Artificial Sequence
  Synthetic
ucuuuuuuuuuccagcua

SEQ ID NO: 501969 - RNA, 19 nt, Artificial Sequence
  Synthetic
uucuuuuuuuuuccagcua

SEQ ID NO: 501970 - RNA, 20 nt, Artificial Sequence
  Synthetic
cuucuuuuuuuuuccagcua

SEQ ID NO: 501971 - RNA, 21 nt, Artificial Sequence
  Synthetic
acuucuuuuuuuuuccagcua

SEQ ID NO: 501972 - RNA, 22 nt, Artificial Sequence
  Synthetic
cacuucuuuuuuuuuccagcua

SEQ ID NO: 501973 - RNA, 23 nt, Artificial Sequence
  Synthetic
ccacuucuuuuuuuuuccagcua

SEQ ID NO: 501974 - RNA, 24 nt, Artificial Sequence
  Synthetic
accacuucuuuuuuuuuccagcua

SEQ ID NO: 501975 - RNA, 18 nt, Artificial Sequence
  Synthetic
aaagcugaagagcagcua

SEQ ID NO: 501976 - RNA, 19 nt, Artificial Sequence
  Synthetic
uaaagcugaagagcagcua

SEQ ID NO: 501977 - RNA, 20 nt, Artificial Sequence
  Synthetic
guaaagcugaagagcagcua

SEQ ID NO: 501978 - RNA, 21 nt, Artificial Sequence
  Synthetic
gguaaagcugaagagcagcua

SEQ ID NO: 501979 - RNA, 22 nt, Artificial Sequence
  Synthetic
agguaaagcugaagagcagcua

SEQ ID NO: 501980 - RNA, 23 nt, Artificial Sequence
  Synthetic
aagguaaagcugaagagcagcua

SEQ ID NO: 501981 - RNA, 24 nt, Artificial Sequence
  Synthetic
uaagguaaagcugaagagcagcua

SEQ ID NO: 501982 - RNA, 18 nt, Artificial Sequence
  Synthetic
uuuuggagaaaucagcua

SEQ ID NO: 501983 - RNA, 19 nt, Artificial Sequence
  Synthetic
cuuuuggagaaaucagcua

SEQ ID NO: 501984 - RNA, 20 nt, Artificial Sequence
  Synthetic
ccuuuuggagaaaucagcua

SEQ ID NO: 501985 - RNA, 21 nt, Artificial Sequence
  Synthetic
accuuuuggagaaaucagcua

SEQ ID NO: 501986 - RNA, 22 nt, Artificial Sequence
  Synthetic
gaccuuuuggagaaaucagcua

SEQ ID NO: 501987 - RNA, 23 nt, Artificial Sequence
  Synthetic
agaccuuuuggagaaaucagcua

SEQ ID NO: 501988 - RNA, 24 nt, Artificial Sequence
  Synthetic
aagaccuuuuggagaaaucagcua

SEQ ID NO: 501989 - RNA, 18 nt, Artificial Sequence
  Synthetic
gagagcuggacucagcua

SEQ ID NO: 501990 - RNA, 19 nt, Artificial Sequence
  Synthetic
ugagagcuggacucagcua

SEQ ID NO: 501991 - RNA, 20 nt, Artificial Sequence
  Synthetic
cugagagcuggacucagcua

SEQ ID NO: 501992 - RNA, 21 nt, Artificial Sequence
  Synthetic
ucugagagcuggacucagcua

SEQ ID NO: 501993 - RNA, 22 nt, Artificial Sequence
  Synthetic
gucugagagcuggacucagcua

SEQ ID NO: 501994 - RNA, 23 nt, Artificial Sequence
  Synthetic
ugucugagagcuggacucagcua

SEQ ID NO: 501995 - RNA, 24 nt, Artificial Sequence
  Synthetic
cugucugagagcuggacucagcua

SEQ ID NO: 501996 - RNA, 18 nt, Artificial Sequence
  Synthetic
ggagucauaagucagcua

SEQ ID NO: 501997 - RNA, 19 nt, Artificial Sequence
  Synthetic
aggagucauaagucagcua

SEQ ID NO: 501998 - RNA, 20 nt, Artificial Sequence
  Synthetic
aaggagucauaagucagcua

SEQ ID NO: 501999 - RNA, 21 nt, Artificial Sequence
  Synthetic
uaaggagucauaagucagcua

SEQ ID NO: 502000 - RNA, 22 nt, Artificial Sequence
  Synthetic
cuaaggagucauaagucagcua

SEQ ID NO: 502001 - RNA, 23 nt, Artificial Sequence
  Synthetic
ucuaaggagucauaagucagcua

SEQ ID NO: 502002 - RNA, 24 nt, Artificial Sequence
  Synthetic
uucuaaggagucauaagucagcua

SEQ ID NO: 502003 - RNA, 18 nt, Artificial Sequence
  Synthetic
cguagaauucaagagcua

SEQ ID NO: 502004 - RNA, 19 nt, Artificial Sequence
  Synthetic
acguagaauucaagagcua

SEQ ID NO: 502005 - RNA, 20 nt, Artificial Sequence
  Synthetic
aacguagaauucaagagcua

SEQ ID NO: 502006 - RNA, 21 nt, Artificial Sequence
  Synthetic
aaacguagaauucaagagcua

SEQ ID NO: 502007 - RNA, 22 nt, Artificial Sequence
  Synthetic
aaaacguagaauucaagagcua

SEQ ID NO: 502008 - RNA, 23 nt, Artificial Sequence
  Synthetic
aaaaacguagaauucaagagcua

SEQ ID NO: 502009 - RNA, 24 nt, Artificial Sequence
  Synthetic
uaaaaacguagaauucaagagcua

SEQ ID NO: 502010 - RNA, 18 nt, Artificial Sequence
  Synthetic
aaaauuaaagaagagcua

SEQ ID NO: 502011 - RNA, 19 nt, Artificial Sequence
  Synthetic
caaaauuaaagaagagcua

SEQ ID NO: 502012 - RNA, 20 nt, Artificial Sequence
  Synthetic
gcaaaauuaaagaagagcua

SEQ ID NO: 502013 - RNA, 21 nt, Artificial Sequence
  Synthetic
ugcaaaauuaaagaagagcua

SEQ ID NO: 502014 - RNA, 22 nt, Artificial Sequence
  Synthetic
cugcaaaauuaaagaagagcua

SEQ ID NO: 502015 - RNA, 23 nt, Artificial Sequence
  Synthetic
acugcaaaauuaaagaagagcua

SEQ ID NO: 502016 - RNA, 24 nt, Artificial Sequence
  Synthetic
cacugcaaaauuaaagaagagcua

SEQ ID NO: 502017 - RNA, 18 nt, Artificial Sequence
  Synthetic
agccugggcuaagagcua

SEQ ID NO: 502018 - RNA, 19 nt, Artificial Sequence
  Synthetic
uagccugggcuaagagcua

SEQ ID NO: 502019 - RNA, 20 nt, Artificial Sequence
  Synthetic
auagccugggcuaagagcua

SEQ ID NO: 502020 - RNA, 21 nt, Artificial Sequence
  Synthetic
cauagccugggcuaagagcua

SEQ ID NO: 502021 - RNA, 22 nt, Artificial Sequence
  Synthetic
ucauagccugggcuaagagcua

SEQ ID NO: 502022 - RNA, 23 nt, Artificial Sequence
  Synthetic
gucauagccugggcuaagagcua

SEQ ID NO: 502023 - RNA, 24 nt, Artificial Sequence
  Synthetic
agucauagccugggcuaagagcua

SEQ ID NO: 502024 - RNA, 18 nt, Artificial Sequence
  Synthetic
gaaaauuuuccagagcua

SEQ ID NO: 502025 - RNA, 19 nt, Artificial Sequence
  Synthetic
agaaaauuuuccagagcua

SEQ ID NO: 502026 - RNA, 20 nt, Artificial Sequence
  Synthetic
uagaaaauuuuccagagcua

SEQ ID NO: 502027 - RNA, 21 nt, Artificial Sequence
  Synthetic
auagaaaauuuuccagagcua

SEQ ID NO: 502028 - RNA, 22 nt, Artificial Sequence
  Synthetic
aauagaaaauuuuccagagcua

SEQ ID NO: 502029 - RNA, 23 nt, Artificial Sequence
  Synthetic
uaauagaaaauuuuccagagcua

SEQ ID NO: 502030 - RNA, 24 nt, Artificial Sequence
  Synthetic
auaauagaaaauuuuccagagcua

SEQ ID NO: 502031 - RNA, 18 nt, Artificial Sequence
  Synthetic
uggguauauggugagcua

SEQ ID NO: 502032 - RNA, 19 nt, Artificial Sequence
  Synthetic
guggguauauggugagcua

SEQ ID NO: 502033 - RNA, 20 nt, Artificial Sequence
  Synthetic
uguggguauauggugagcua

SEQ ID NO: 502034 - RNA, 21 nt, Artificial Sequence
  Synthetic
guguggguauauggugagcua

SEQ ID NO: 502035 - RNA, 22 nt, Artificial Sequence
  Synthetic
uguguggguauauggugagcua

SEQ ID NO: 502036 - RNA, 23 nt, Artificial Sequence
  Synthetic
guguguggguauauggugagcua

SEQ ID NO: 502037 - RNA, 24 nt, Artificial Sequence
  Synthetic
uguguguggguauauggugagcua

SEQ ID NO: 502038 - RNA, 18 nt, Artificial Sequence
  Synthetic
ccuguacuucaguagcua

SEQ ID NO: 502039 - RNA, 19 nt, Artificial Sequence
  Synthetic
gccuguacuucaguagcua

SEQ ID NO: 502040 - RNA, 20 nt, Artificial Sequence
  Synthetic
ugccuguacuucaguagcua

SEQ ID NO: 502041 - RNA, 21 nt, Artificial Sequence
  Synthetic
cugccuguacuucaguagcua

SEQ ID NO: 502042 - RNA, 22 nt, Artificial Sequence
  Synthetic
ucugccuguacuucaguagcua

SEQ ID NO: 502043 - RNA, 23 nt, Artificial Sequence
  Synthetic
uucugccuguacuucaguagcua

SEQ ID NO: 502044 - RNA, 24 nt, Artificial Sequence
  Synthetic
auucugccuguacuucaguagcua

SEQ ID NO: 502045 - RNA, 18 nt, Artificial Sequence
  Synthetic
aaguacaacuaguagcua

SEQ ID NO: 502046 - RNA, 19 nt, Artificial Sequence
  Synthetic
aaaguacaacuaguagcua

SEQ ID NO: 502047 - RNA, 20 nt, Artificial Sequence
  Synthetic
caaaguacaacuaguagcua

SEQ ID NO: 502048 - RNA, 21 nt, Artificial Sequence
  Synthetic
ucaaaguacaacuaguagcua

SEQ ID NO: 502049 - RNA, 22 nt, Artificial Sequence
  Synthetic
gucaaaguacaacuaguagcua

SEQ ID NO: 502050 - RNA, 23 nt, Artificial Sequence
  Synthetic
ggucaaaguacaacuaguagcua

SEQ ID NO: 502051 - RNA, 24 nt, Artificial Sequence
  Synthetic
gggucaaaguacaacuaguagcua

SEQ ID NO: 502052 - RNA, 18 nt, Artificial Sequence
  Synthetic
acuggcuguagguagcua

SEQ ID NO: 502053 - RNA, 19 nt, Artificial Sequence
  Synthetic
cacuggcuguagguagcua

SEQ ID NO: 502054 - RNA, 20 nt, Artificial Sequence
  Synthetic
ccacuggcuguagguagcua

SEQ ID NO: 502055 - RNA, 21 nt, Artificial Sequence
  Synthetic
gccacuggcuguagguagcua

SEQ ID NO: 502056 - RNA, 22 nt, Artificial Sequence
  Synthetic
agccacuggcuguagguagcua

SEQ ID NO: 502057 - RNA, 23 nt, Artificial Sequence
  Synthetic
gagccacuggcuguagguagcua

SEQ ID NO: 502058 - RNA, 24 nt, Artificial Sequence
  Synthetic
ggagccacuggcuguagguagcua

SEQ ID NO: 502059 - RNA, 18 nt, Artificial Sequence
  Synthetic
acuaaccacauguagcua

SEQ ID NO: 502060 - RNA, 19 nt, Artificial Sequence
  Synthetic
cacuaaccacauguagcua

SEQ ID NO: 502061 - RNA, 20 nt, Artificial Sequence
  Synthetic
ccacuaaccacauguagcua

SEQ ID NO: 502062 - RNA, 21 nt, Artificial Sequence
  Synthetic
gccacuaaccacauguagcua

SEQ ID NO: 502063 - RNA, 22 nt, Artificial Sequence
  Synthetic
agccacuaaccacauguagcua

SEQ ID NO: 502064 - RNA, 23 nt, Artificial Sequence
  Synthetic
uagccacuaaccacauguagcua

SEQ ID NO: 502065 - RNA, 24 nt, Artificial Sequence
  Synthetic
guagccacuaaccacauguagcua

SEQ ID NO: 502066 - RNA, 18 nt, Artificial Sequence
  Synthetic
uuuaugaggauguagcua

SEQ ID NO: 502067 - RNA, 19 nt, Artificial Sequence
  Synthetic
guuuaugaggauguagcua

SEQ ID NO: 502068 - RNA, 20 nt, Artificial Sequence
  Synthetic
gguuuaugaggauguagcua

SEQ ID NO: 502069 - RNA, 21 nt, Artificial Sequence
  Synthetic
agguuuaugaggauguagcua

SEQ ID NO: 502070 - RNA, 22 nt, Artificial Sequence
  Synthetic
uagguuuaugaggauguagcua

SEQ ID NO: 502071 - RNA, 23 nt, Artificial Sequence
  Synthetic
auagguuuaugaggauguagcua

SEQ ID NO: 502072 - RNA, 24 nt, Artificial Sequence
  Synthetic
aauagguuuaugaggauguagcua

SEQ ID NO: 502073 - RNA, 18 nt, Artificial Sequence
  Synthetic
uaucugggagcuuagcua

SEQ ID NO: 502074 - RNA, 19 nt, Artificial Sequence
  Synthetic
guaucugggagcuuagcua

SEQ ID NO: 502075 - RNA, 20 nt, Artificial Sequence
  Synthetic
aguaucugggagcuuagcua

SEQ ID NO: 502076 - RNA, 21 nt, Artificial Sequence
  Synthetic
uaguaucugggagcuuagcua

SEQ ID NO: 502077 - RNA, 22 nt, Artificial Sequence
  Synthetic
uuaguaucugggagcuuagcua

SEQ ID NO: 502078 - RNA, 23 nt, Artificial Sequence
  Synthetic
uuuaguaucugggagcuuagcua

SEQ ID NO: 502079 - RNA, 24 nt, Artificial Sequence
  Synthetic
uuuuaguaucugggagcuuagcua

SEQ ID NO: 502080 - RNA, 18 nt, Artificial Sequence
  Synthetic
auagucacaaguuagcua

SEQ ID NO: 502081 - RNA, 19 nt, Artificial Sequence
  Synthetic
gauagucacaaguuagcua

SEQ ID NO: 502082 - RNA, 20 nt, Artificial Sequence
  Synthetic
agauagucacaaguuagcua

SEQ ID NO: 502083 - RNA, 21 nt, Artificial Sequence
  Synthetic
uagauagucacaaguuagcua

SEQ ID NO: 502084 - RNA, 22 nt, Artificial Sequence
  Synthetic
uuagauagucacaaguuagcua

SEQ ID NO: 502085 - RNA, 23 nt, Artificial Sequence
  Synthetic
cuuagauagucacaaguuagcua

SEQ ID NO: 502086 - RNA, 24 nt, Artificial Sequence
  Synthetic
acuuagauagucacaaguuagcua

SEQ ID NO: 502087 - RNA, 18 nt, Artificial Sequence
  Synthetic
auaauuuaaauuuagcua

SEQ ID NO: 502088 - RNA, 19 nt, Artificial Sequence
  Synthetic
gauaauuuaaauuuagcua

SEQ ID NO: 502089 - RNA, 20 nt, Artificial Sequence
  Synthetic
ugauaauuuaaauuuagcua

SEQ ID NO: 502090 - RNA, 21 nt, Artificial Sequence
  Synthetic
gugauaauuuaaauuuagcua

SEQ ID NO: 502091 - RNA, 22 nt, Artificial Sequence
  Synthetic
ugugauaauuuaaauuuagcua

SEQ ID NO: 502092 - RNA, 23 nt, Artificial Sequence
  Synthetic
uugugauaauuuaaauuuagcua

SEQ ID NO: 502093 - RNA, 24 nt, Artificial Sequence
  Synthetic
uuugugauaauuuaaauuuagcua

SEQ ID NO: 502094 - RNA, 18 nt, Artificial Sequence
  Synthetic
ggaaugcaaaggacgcua

SEQ ID NO: 502095 - RNA, 19 nt, Artificial Sequence
  Synthetic
aggaaugcaaaggacgcua

SEQ ID NO: 502096 - RNA, 20 nt, Artificial Sequence
  Synthetic
gaggaaugcaaaggacgcua

SEQ ID NO: 502097 - RNA, 21 nt, Artificial Sequence
  Synthetic
agaggaaugcaaaggacgcua

SEQ ID NO: 502098 - RNA, 22 nt, Artificial Sequence
  Synthetic
uagaggaaugcaaaggacgcua

SEQ ID NO: 502099 - RNA, 23 nt, Artificial Sequence
  Synthetic
auagaggaaugcaaaggacgcua

SEQ ID NO: 502100 - RNA, 24 nt, Artificial Sequence
  Synthetic
uauagaggaaugcaaaggacgcua

SEQ ID NO: 502101 - RNA, 18 nt, Artificial Sequence
  Synthetic
caaaaaaugaauacgcua

SEQ ID NO: 502102 - RNA, 19 nt, Artificial Sequence
  Synthetic
acaaaaaaugaauacgcua

SEQ ID NO: 502103 - RNA, 20 nt, Artificial Sequence
  Synthetic
gacaaaaaaugaauacgcua

SEQ ID NO: 502104 - RNA, 21 nt, Artificial Sequence
  Synthetic
agacaaaaaaugaauacgcua

SEQ ID NO: 502105 - RNA, 22 nt, Artificial Sequence
  Synthetic
aagacaaaaaaugaauacgcua

SEQ ID NO: 502106 - RNA, 23 nt, Artificial Sequence
  Synthetic
aaagacaaaaaaugaauacgcua

SEQ ID NO: 502107 - RNA, 24 nt, Artificial Sequence
  Synthetic
gaaagacaaaaaaugaauacgcua

SEQ ID NO: 502108 - RNA, 18 nt, Artificial Sequence
  Synthetic
ggaacucuuccaccgcua

SEQ ID NO: 502109 - RNA, 19 nt, Artificial Sequence
  Synthetic
uggaacucuuccaccgcua

SEQ ID NO: 502110 - RNA, 20 nt, Artificial Sequence
  Synthetic
uuggaacucuuccaccgcua

SEQ ID NO: 502111 - RNA, 21 nt, Artificial Sequence
  Synthetic
cuuggaacucuuccaccgcua

SEQ ID NO: 502112 - RNA, 22 nt, Artificial Sequence
  Synthetic
gcuuggaacucuuccaccgcua

SEQ ID NO: 502113 - RNA, 23 nt, Artificial Sequence
  Synthetic
ugcuuggaacucuuccaccgcua

SEQ ID NO: 502114 - RNA, 24 nt, Artificial Sequence
  Synthetic
augcuuggaacucuuccaccgcua

SEQ ID NO: 502115 - RNA, 18 nt, Artificial Sequence
  Synthetic
gugcgcgcgcgugcgcua

SEQ ID NO: 502116 - RNA, 19 nt, Artificial Sequence
  Synthetic
ugugcgcgcgcgugcgcua

SEQ ID NO: 502117 - RNA, 20 nt, Artificial Sequence
  Synthetic
gugugcgcgcgcgugcgcua

SEQ ID NO: 502118 - RNA, 21 nt, Artificial Sequence
  Synthetic
ugugugcgcgcgcgugcgcua

SEQ ID NO: 502119 - RNA, 22 nt, Artificial Sequence
  Synthetic
gugugugcgcgcgcgugcgcua

SEQ ID NO: 502120 - RNA, 23 nt, Artificial Sequence
  Synthetic
ugugugugcgcgcgcgugcgcua

SEQ ID NO: 502121 - RNA, 24 nt, Artificial Sequence
  Synthetic
gugugugugcgcgcgcgugcgcua

SEQ ID NO: 502122 - RNA, 18 nt, Artificial Sequence
  Synthetic
cacuuaagcaaaaggcua

SEQ ID NO: 502123 - RNA, 19 nt, Artificial Sequence
  Synthetic
gcacuuaagcaaaaggcua

SEQ ID NO: 502124 - RNA, 20 nt, Artificial Sequence
  Synthetic
agcacuuaagcaaaaggcua

SEQ ID NO: 502125 - RNA, 21 nt, Artificial Sequence
  Synthetic
aagcacuuaagcaaaaggcua

SEQ ID NO: 502126 - RNA, 22 nt, Artificial Sequence
  Synthetic
aaagcacuuaagcaaaaggcua

SEQ ID NO: 502127 - RNA, 23 nt, Artificial Sequence
  Synthetic
gaaagcacuuaagcaaaaggcua

SEQ ID NO: 502128 - RNA, 24 nt, Artificial Sequence
  Synthetic
ggaaagcacuuaagcaaaaggcua

SEQ ID NO: 502129 - RNA, 18 nt, Artificial Sequence
  Synthetic
ucaaggccugaaaggcua

SEQ ID NO: 502130 - RNA, 19 nt, Artificial Sequence
  Synthetic
cucaaggccugaaaggcua

SEQ ID NO: 502131 - RNA, 20 nt, Artificial Sequence
  Synthetic
ccucaaggccugaaaggcua

SEQ ID NO: 502132 - RNA, 21 nt, Artificial Sequence
  Synthetic
uccucaaggccugaaaggcua

SEQ ID NO: 502133 - RNA, 22 nt, Artificial Sequence
  Synthetic
cuccucaaggccugaaaggcua

SEQ ID NO: 502134 - RNA, 23 nt, Artificial Sequence
  Synthetic
ccuccucaaggccugaaaggcua

SEQ ID NO: 502135 - RNA, 24 nt, Artificial Sequence
  Synthetic
uccuccucaaggccugaaaggcua

SEQ ID NO: 502136 - RNA, 18 nt, Artificial Sequence
  Synthetic
cgugacgagccaaggcua

SEQ ID NO: 502137 - RNA, 19 nt, Artificial Sequence
  Synthetic
ucgugacgagccaaggcua

SEQ ID NO: 502138 - RNA, 20 nt, Artificial Sequence
  Synthetic
cucgugacgagccaaggcua

SEQ ID NO: 502139 - RNA, 21 nt, Artificial Sequence
  Synthetic
ucucgugacgagccaaggcua

SEQ ID NO: 502140 - RNA, 22 nt, Artificial Sequence
  Synthetic
uucucgugacgagccaaggcua

SEQ ID NO: 502141 - RNA, 23 nt, Artificial Sequence
  Synthetic
uuucucgugacgagccaaggcua

SEQ ID NO: 502142 - RNA, 24 nt, Artificial Sequence
  Synthetic
uuuucucgugacgagccaaggcua

SEQ ID NO: 502143 - RNA, 18 nt, Artificial Sequence
  Synthetic
gcaauugaaaucaggcua

SEQ ID NO: 502144 - RNA, 19 nt, Artificial Sequence
  Synthetic
agcaauugaaaucaggcua

SEQ ID NO: 502145 - RNA, 20 nt, Artificial Sequence
  Synthetic
gagcaauugaaaucaggcua

SEQ ID NO: 502146 - RNA, 21 nt, Artificial Sequence
  Synthetic
cgagcaauugaaaucaggcua

SEQ ID NO: 502147 - RNA, 22 nt, Artificial Sequence
  Synthetic
ccgagcaauugaaaucaggcua

SEQ ID NO: 502148 - RNA, 23 nt, Artificial Sequence
  Synthetic
accgagcaauugaaaucaggcua

SEQ ID NO: 502149 - RNA, 24 nt, Artificial Sequence
  Synthetic
uaccgagcaauugaaaucaggcua

SEQ ID NO: 502150 - RNA, 18 nt, Artificial Sequence
  Synthetic
auaauaugcuggaggcua

SEQ ID NO: 502151 - RNA, 19 nt, Artificial Sequence
  Synthetic
aauaauaugcuggaggcua

SEQ ID NO: 502152 - RNA, 20 nt, Artificial Sequence
  Synthetic
aaauaauaugcuggaggcua

SEQ ID NO: 502153 - RNA, 21 nt, Artificial Sequence
  Synthetic
aaaauaauaugcuggaggcua

SEQ ID NO: 502154 - RNA, 22 nt, Artificial Sequence
  Synthetic
caaaauaauaugcuggaggcua

SEQ ID NO: 502155 - RNA, 23 nt, Artificial Sequence
  Synthetic
ucaaaauaauaugcuggaggcua

SEQ ID NO: 502156 - RNA, 24 nt, Artificial Sequence
  Synthetic
uucaaaauaauaugcuggaggcua

SEQ ID NO: 502157 - RNA, 18 nt, Artificial Sequence
  Synthetic
aauagcuugaugaggcua

SEQ ID NO: 502158 - RNA, 19 nt, Artificial Sequence
  Synthetic
aaauagcuugaugaggcua

SEQ ID NO: 502159 - RNA, 20 nt, Artificial Sequence
  Synthetic
uaaauagcuugaugaggcua

SEQ ID NO: 502160 - RNA, 21 nt, Artificial Sequence
  Synthetic
uuaaauagcuugaugaggcua

SEQ ID NO: 502161 - RNA, 22 nt, Artificial Sequence
  Synthetic
uuuaaauagcuugaugaggcua

SEQ ID NO: 502162 - RNA, 23 nt, Artificial Sequence
  Synthetic
uuuuaaauagcuugaugaggcua

SEQ ID NO: 502163 - RNA, 24 nt, Artificial Sequence
  Synthetic
auuuuaaauagcuugaugaggcua

SEQ ID NO: 502164 - RNA, 18 nt, Artificial Sequence
  Synthetic
agaaaaaaacugaggcua

SEQ ID NO: 502165 - RNA, 19 nt, Artificial Sequence
  Synthetic
cagaaaaaaacugaggcua

SEQ ID NO: 502166 - RNA, 20 nt, Artificial Sequence
  Synthetic
gcagaaaaaaacugaggcua

SEQ ID NO: 502167 - RNA, 21 nt, Artificial Sequence
  Synthetic
ugcagaaaaaaacugaggcua

SEQ ID NO: 502168 - RNA, 22 nt, Artificial Sequence
  Synthetic
uugcagaaaaaaacugaggcua

SEQ ID NO: 502169 - RNA, 23 nt, Artificial Sequence
  Synthetic
cuugcagaaaaaaacugaggcua

SEQ ID NO: 502170 - RNA, 24 nt, Artificial Sequence
  Synthetic
acuugcagaaaaaaacugaggcua

SEQ ID NO: 502171 - RNA, 18 nt, Artificial Sequence
  Synthetic
uuguguagagauaggcua

SEQ ID NO: 502172 - RNA, 19 nt, Artificial Sequence
  Synthetic
auuguguagagauaggcua

SEQ ID NO: 502173 - RNA, 20 nt, Artificial Sequence
  Synthetic
uauuguguagagauaggcua

SEQ ID NO: 502174 - RNA, 21 nt, Artificial Sequence
  Synthetic
guauuguguagagauaggcua

SEQ ID NO: 502175 - RNA, 22 nt, Artificial Sequence
  Synthetic
uguauuguguagagauaggcua

SEQ ID NO: 502176 - RNA, 23 nt, Artificial Sequence
  Synthetic
guguauuguguagagauaggcua

SEQ ID NO: 502177 - RNA, 24 nt, Artificial Sequence
  Synthetic
uguguauuguguagagauaggcua

SEQ ID NO: 502178 - RNA, 18 nt, Artificial Sequence
  Synthetic
caaugguagacuaggcua

SEQ ID NO: 502179 - RNA, 19 nt, Artificial Sequence
  Synthetic
ucaaugguagacuaggcua

SEQ ID NO: 502180 - RNA, 20 nt, Artificial Sequence
  Synthetic
gucaaugguagacuaggcua

SEQ ID NO: 502181 - RNA, 21 nt, Artificial Sequence
  Synthetic
ugucaaugguagacuaggcua

SEQ ID NO: 502182 - RNA, 22 nt, Artificial Sequence
  Synthetic
augucaaugguagacuaggcua

SEQ ID NO: 502183 - RNA, 23 nt, Artificial Sequence
  Synthetic
uaugucaaugguagacuaggcua

SEQ ID NO: 502184 - RNA, 24 nt, Artificial Sequence
  Synthetic
cuaugucaaugguagacuaggcua

SEQ ID NO: 502185 - RNA, 18 nt, Artificial Sequence
  Synthetic
agaaugaaugaacggcua

SEQ ID NO: 502186 - RNA, 19 nt, Artificial Sequence
  Synthetic
aagaaugaaugaacggcua

SEQ ID NO: 502187 - RNA, 20 nt, Artificial Sequence
  Synthetic
gaagaaugaaugaacggcua

SEQ ID NO: 502188 - RNA, 21 nt, Artificial Sequence
  Synthetic
ugaagaaugaaugaacggcua

SEQ ID NO: 502189 - RNA, 22 nt, Artificial Sequence
  Synthetic
augaagaaugaaugaacggcua

SEQ ID NO: 502190 - RNA, 23 nt, Artificial Sequence
  Synthetic
aaugaagaaugaaugaacggcua

SEQ ID NO: 502191 - RNA, 24 nt, Artificial Sequence
  Synthetic
gaaugaagaaugaaugaacggcua

SEQ ID NO: 502192 - RNA, 18 nt, Artificial Sequence
  Synthetic
ucuugcuuuugacggcua

SEQ ID NO: 502193 - RNA, 19 nt, Artificial Sequence
  Synthetic
uucuugcuuuugacggcua

SEQ ID NO: 502194 - RNA, 20 nt, Artificial Sequence
  Synthetic
uuucuugcuuuugacggcua

SEQ ID NO: 502195 - RNA, 21 nt, Artificial Sequence
  Synthetic
uuuucuugcuuuugacggcua

SEQ ID NO: 502196 - RNA, 22 nt, Artificial Sequence
  Synthetic
auuuucuugcuuuugacggcua

SEQ ID NO: 502197 - RNA, 23 nt, Artificial Sequence
  Synthetic
uauuuucuugcuuuugacggcua

SEQ ID NO: 502198 - RNA, 24 nt, Artificial Sequence
  Synthetic
uuauuuucuugcuuuugacggcua

SEQ ID NO: 502199 - RNA, 18 nt, Artificial Sequence
  Synthetic
agucacuuguuucggcua

SEQ ID NO: 502200 - RNA, 19 nt, Artificial Sequence
  Synthetic
aagucacuuguuucggcua

SEQ ID NO: 502201 - RNA, 20 nt, Artificial Sequence
  Synthetic
caagucacuuguuucggcua

SEQ ID NO: 502202 - RNA, 21 nt, Artificial Sequence
  Synthetic
ucaagucacuuguuucggcua

SEQ ID NO: 502203 - RNA, 22 nt, Artificial Sequence
  Synthetic
gucaagucacuuguuucggcua

SEQ ID NO: 502204 - RNA, 23 nt, Artificial Sequence
  Synthetic
ggucaagucacuuguuucggcua

SEQ ID NO: 502205 - RNA, 24 nt, Artificial Sequence
  Synthetic
uggucaagucacuuguuucggcua

SEQ ID NO: 502206 - RNA, 18 nt, Artificial Sequence
  Synthetic
guuggaaacccagggcua

SEQ ID NO: 502207 - RNA, 19 nt, Artificial Sequence
  Synthetic
gguuggaaacccagggcua

SEQ ID NO: 502208 - RNA, 20 nt, Artificial Sequence
  Synthetic
ggguuggaaacccagggcua

SEQ ID NO: 502209 - RNA, 21 nt, Artificial Sequence
  Synthetic
gggguuggaaacccagggcua

SEQ ID NO: 502210 - RNA, 22 nt, Artificial Sequence
  Synthetic
agggguuggaaacccagggcua

SEQ ID NO: 502211 - RNA, 23 nt, Artificial Sequence
  Synthetic
cagggguuggaaacccagggcua

SEQ ID NO: 502212 - RNA, 24 nt, Artificial Sequence
  Synthetic
acagggguuggaaacccagggcua

SEQ ID NO: 502213 - RNA, 18 nt, Artificial Sequence
  Synthetic
aguggagguaaggggcua

SEQ ID NO: 502214 - RNA, 19 nt, Artificial Sequence
  Synthetic
gaguggagguaaggggcua

SEQ ID NO: 502215 - RNA, 20 nt, Artificial Sequence
  Synthetic
agaguggagguaaggggcua

SEQ ID NO: 502216 - RNA, 21 nt, Artificial Sequence
  Synthetic
gagaguggagguaaggggcua

SEQ ID NO: 502217 - RNA, 22 nt, Artificial Sequence
  Synthetic
ugagaguggagguaaggggcua

SEQ ID NO: 502218 - RNA, 23 nt, Artificial Sequence
  Synthetic
augagaguggagguaaggggcua

SEQ ID NO: 502219 - RNA, 24 nt, Artificial Sequence
  Synthetic
aaugagaguggagguaaggggcua

SEQ ID NO: 502220 - RNA, 18 nt, Artificial Sequence
  Synthetic
gugauuuuuagggggcua

SEQ ID NO: 502221 - RNA, 19 nt, Artificial Sequence
  Synthetic
agugauuuuuagggggcua

SEQ ID NO: 502222 - RNA, 20 nt, Artificial Sequence
  Synthetic
gagugauuuuuagggggcua

SEQ ID NO: 502223 - RNA, 21 nt, Artificial Sequence
  Synthetic
ugagugauuuuuagggggcua

SEQ ID NO: 502224 - RNA, 22 nt, Artificial Sequence
  Synthetic
cugagugauuuuuagggggcua

SEQ ID NO: 502225 - RNA, 23 nt, Artificial Sequence
  Synthetic
ccugagugauuuuuagggggcua

SEQ ID NO: 502226 - RNA, 24 nt, Artificial Sequence
  Synthetic
gccugagugauuuuuagggggcua

SEQ ID NO: 502227 - RNA, 18 nt, Artificial Sequence
  Synthetic
ucaggggguggggggcua

SEQ ID NO: 502228 - RNA, 19 nt, Artificial Sequence
  Synthetic
gucaggggguggggggcua

SEQ ID NO: 502229 - RNA, 20 nt, Artificial Sequence
  Synthetic
ugucaggggguggggggcua

SEQ ID NO: 502230 - RNA, 21 nt, Artificial Sequence
  Synthetic
cugucaggggguggggggcua

SEQ ID NO: 502231 - RNA, 22 nt, Artificial Sequence
  Synthetic
ccugucaggggguggggggcua

SEQ ID NO: 502232 - RNA, 23 nt, Artificial Sequence
  Synthetic
gccugucaggggguggggggcua

SEQ ID NO: 502233 - RNA, 24 nt, Artificial Sequence
  Synthetic
ggccugucaggggguggggggcua

SEQ ID NO: 502234 - RNA, 18 nt, Artificial Sequence
  Synthetic
ucagggaagauggggcua

SEQ ID NO: 502235 - RNA, 19 nt, Artificial Sequence
  Synthetic
gucagggaagauggggcua

SEQ ID NO: 502236 - RNA, 20 nt, Artificial Sequence
  Synthetic
ugucagggaagauggggcua

SEQ ID NO: 502237 - RNA, 21 nt, Artificial Sequence
  Synthetic
gugucagggaagauggggcua

SEQ ID NO: 502238 - RNA, 22 nt, Artificial Sequence
  Synthetic
agugucagggaagauggggcua

SEQ ID NO: 502239 - RNA, 23 nt, Artificial Sequence
  Synthetic
aagugucagggaagauggggcua

SEQ ID NO: 502240 - RNA, 24 nt, Artificial Sequence
  Synthetic
aaagugucagggaagauggggcua

SEQ ID NO: 502241 - RNA, 18 nt, Artificial Sequence
  Synthetic
ccugaguagcuggggcua

SEQ ID NO: 502242 - RNA, 19 nt, Artificial Sequence
  Synthetic
uccugaguagcuggggcua

SEQ ID NO: 502243 - RNA, 20 nt, Artificial Sequence
  Synthetic
cuccugaguagcuggggcua

SEQ ID NO: 502244 - RNA, 21 nt, Artificial Sequence
  Synthetic
ccuccugaguagcuggggcua

SEQ ID NO: 502245 - RNA, 22 nt, Artificial Sequence
  Synthetic
gccuccugaguagcuggggcua

SEQ ID NO: 502246 - RNA, 23 nt, Artificial Sequence
  Synthetic
agccuccugaguagcuggggcua

SEQ ID NO: 502247 - RNA, 24 nt, Artificial Sequence
  Synthetic
cagccuccugaguagcuggggcua

SEQ ID NO: 502248 - RNA, 18 nt, Artificial Sequence
  Synthetic
guggaucuauuggggcua

SEQ ID NO: 502249 - RNA, 19 nt, Artificial Sequence
  Synthetic
gguggaucuauuggggcua

SEQ ID NO: 502250 - RNA, 20 nt, Artificial Sequence
  Synthetic
ggguggaucuauuggggcua

SEQ ID NO: 502251 - RNA, 21 nt, Artificial Sequence
  Synthetic
aggguggaucuauuggggcua

SEQ ID NO: 502252 - RNA, 22 nt, Artificial Sequence
  Synthetic
caggguggaucuauuggggcua

SEQ ID NO: 502253 - RNA, 23 nt, Artificial Sequence
  Synthetic
acaggguggaucuauuggggcua

SEQ ID NO: 502254 - RNA, 24 nt, Artificial Sequence
  Synthetic
gacaggguggaucuauuggggcua

SEQ ID NO: 502255 - RNA, 18 nt, Artificial Sequence
  Synthetic
uaugaaggcaaauggcua

SEQ ID NO: 502256 - RNA, 19 nt, Artificial Sequence
  Synthetic
auaugaaggcaaauggcua

SEQ ID NO: 502257 - RNA, 20 nt, Artificial Sequence
  Synthetic
uauaugaaggcaaauggcua

SEQ ID NO: 502258 - RNA, 21 nt, Artificial Sequence
  Synthetic
auauaugaaggcaaauggcua

SEQ ID NO: 502259 - RNA, 22 nt, Artificial Sequence
  Synthetic
aauauaugaaggcaaauggcua

SEQ ID NO: 502260 - RNA, 23 nt, Artificial Sequence
  Synthetic
aaauauaugaaggcaaauggcua

SEQ ID NO: 502261 - RNA, 24 nt, Artificial Sequence
  Synthetic
gaaauauaugaaggcaaauggcua

SEQ ID NO: 502262 - RNA, 18 nt, Artificial Sequence
  Synthetic
gagcucagcccauggcua

SEQ ID NO: 502263 - RNA, 19 nt, Artificial Sequence
  Synthetic
agagcucagcccauggcua

SEQ ID NO: 502264 - RNA, 20 nt, Artificial Sequence
  Synthetic
uagagcucagcccauggcua

SEQ ID NO: 502265 - RNA, 21 nt, Artificial Sequence
  Synthetic
auagagcucagcccauggcua

SEQ ID NO: 502266 - RNA, 22 nt, Artificial Sequence
  Synthetic
gauagagcucagcccauggcua

SEQ ID NO: 502267 - RNA, 23 nt, Artificial Sequence
  Synthetic
agauagagcucagcccauggcua

SEQ ID NO: 502268 - RNA, 24 nt, Artificial Sequence
  Synthetic
aagauagagcucagcccauggcua

SEQ ID NO: 502269 - RNA, 18 nt, Artificial Sequence
  Synthetic
aaaacucuagcauggcua

SEQ ID NO: 502270 - RNA, 19 nt, Artificial Sequence
  Synthetic
caaaacucuagcauggcua

SEQ ID NO: 502271 - RNA, 20 nt, Artificial Sequence
  Synthetic
gcaaaacucuagcauggcua

SEQ ID NO: 502272 - RNA, 21 nt, Artificial Sequence
  Synthetic
ugcaaaacucuagcauggcua

SEQ ID NO: 502273 - RNA, 22 nt, Artificial Sequence
  Synthetic
uugcaaaacucuagcauggcua

SEQ ID NO: 502274 - RNA, 23 nt, Artificial Sequence
  Synthetic
auugcaaaacucuagcauggcua

SEQ ID NO: 502275 - RNA, 24 nt, Artificial Sequence
  Synthetic
uauugcaaaacucuagcauggcua

SEQ ID NO: 502276 - RNA, 18 nt, Artificial Sequence
  Synthetic
caccagcuggcauggcua

SEQ ID NO: 502277 - RNA, 19 nt, Artificial Sequence
  Synthetic
acaccagcuggcauggcua

SEQ ID NO: 502278 - RNA, 20 nt, Artificial Sequence
  Synthetic
gacaccagcuggcauggcua

SEQ ID NO: 502279 - RNA, 21 nt, Artificial Sequence
  Synthetic
agacaccagcuggcauggcua

SEQ ID NO: 502280 - RNA, 22 nt, Artificial Sequence
  Synthetic
gagacaccagcuggcauggcua

SEQ ID NO: 502281 - RNA, 23 nt, Artificial Sequence
  Synthetic
ggagacaccagcuggcauggcua

SEQ ID NO: 502282 - RNA, 24 nt, Artificial Sequence
  Synthetic
gggagacaccagcuggcauggcua

SEQ ID NO: 502283 - RNA, 18 nt, Artificial Sequence
  Synthetic
acuagacacauauggcua

SEQ ID NO: 502284 - RNA, 19 nt, Artificial Sequence
  Synthetic
cacuagacacauauggcua

SEQ ID NO: 502285 - RNA, 20 nt, Artificial Sequence
  Synthetic
ccacuagacacauauggcua

SEQ ID NO: 502286 - RNA, 21 nt, Artificial Sequence
  Synthetic
accacuagacacauauggcua

SEQ ID NO: 502287 - RNA, 22 nt, Artificial Sequence
  Synthetic
aaccacuagacacauauggcua

SEQ ID NO: 502288 - RNA, 23 nt, Artificial Sequence
  Synthetic
uaaccacuagacacauauggcua

SEQ ID NO: 502289 - RNA, 24 nt, Artificial Sequence
  Synthetic
guaaccacuagacacauauggcua

SEQ ID NO: 502290 - RNA, 18 nt, Artificial Sequence
  Synthetic
acaacaaccuuauggcua

SEQ ID NO: 502291 - RNA, 19 nt, Artificial Sequence
  Synthetic
uacaacaaccuuauggcua

SEQ ID NO: 502292 - RNA, 20 nt, Artificial Sequence
  Synthetic
uuacaacaaccuuauggcua

SEQ ID NO: 502293 - RNA, 21 nt, Artificial Sequence
  Synthetic
cuuacaacaaccuuauggcua

SEQ ID NO: 502294 - RNA, 22 nt, Artificial Sequence
  Synthetic
ucuuacaacaaccuuauggcua

SEQ ID NO: 502295 - RNA, 23 nt, Artificial Sequence
  Synthetic
uucuuacaacaaccuuauggcua

SEQ ID NO: 502296 - RNA, 24 nt, Artificial Sequence
  Synthetic
auucuuacaacaaccuuauggcua

SEQ ID NO: 502297 - RNA, 18 nt, Artificial Sequence
  Synthetic
uaagugggacacuggcua

SEQ ID NO: 502298 - RNA, 19 nt, Artificial Sequence
  Synthetic
uuaagugggacacuggcua

SEQ ID NO: 502299 - RNA, 20 nt, Artificial Sequence
  Synthetic
cuuaagugggacacuggcua

SEQ ID NO: 502300 - RNA, 21 nt, Artificial Sequence
  Synthetic
gcuuaagugggacacuggcua

SEQ ID NO: 502301 - RNA, 22 nt, Artificial Sequence
  Synthetic
ugcuuaagugggacacuggcua

SEQ ID NO: 502302 - RNA, 23 nt, Artificial Sequence
  Synthetic
augcuuaagugggacacuggcua

SEQ ID NO: 502303 - RNA, 24 nt, Artificial Sequence
  Synthetic
caugcuuaagugggacacuggcua

SEQ ID NO: 502304 - RNA, 18 nt, Artificial Sequence
  Synthetic
uggaaauucccguggcua

SEQ ID NO: 502305 - RNA, 19 nt, Artificial Sequence
  Synthetic
auggaaauucccguggcua

SEQ ID NO: 502306 - RNA, 20 nt, Artificial Sequence
  Synthetic
uauggaaauucccguggcua

SEQ ID NO: 502307 - RNA, 21 nt, Artificial Sequence
  Synthetic
uuauggaaauucccguggcua

SEQ ID NO: 502308 - RNA, 22 nt, Artificial Sequence
  Synthetic
cuuauggaaauucccguggcua

SEQ ID NO: 502309 - RNA, 23 nt, Artificial Sequence
  Synthetic
ccuuauggaaauucccguggcua

SEQ ID NO: 502310 - RNA, 24 nt, Artificial Sequence
  Synthetic
cccuuauggaaauucccguggcua

SEQ ID NO: 502311 - RNA, 18 nt, Artificial Sequence
  Synthetic
caguaucuuauguggcua

SEQ ID NO: 502312 - RNA, 19 nt, Artificial Sequence
  Synthetic
ucaguaucuuauguggcua

SEQ ID NO: 502313 - RNA, 20 nt, Artificial Sequence
  Synthetic
cucaguaucuuauguggcua

SEQ ID NO: 502314 - RNA, 21 nt, Artificial Sequence
  Synthetic
gcucaguaucuuauguggcua

SEQ ID NO: 502315 - RNA, 22 nt, Artificial Sequence
  Synthetic
agcucaguaucuuauguggcua

SEQ ID NO: 502316 - RNA, 23 nt, Artificial Sequence
  Synthetic
gagcucaguaucuuauguggcua

SEQ ID NO: 502317 - RNA, 24 nt, Artificial Sequence
  Synthetic
agagcucaguaucuuauguggcua

SEQ ID NO: 502318 - RNA, 18 nt, Artificial Sequence
  Synthetic
auuagccaccuguggcua

SEQ ID NO: 502319 - RNA, 19 nt, Artificial Sequence
  Synthetic
cauuagccaccuguggcua

SEQ ID NO: 502320 - RNA, 20 nt, Artificial Sequence
  Synthetic
ccauuagccaccuguggcua

SEQ ID NO: 502321 - RNA, 21 nt, Artificial Sequence
  Synthetic
gccauuagccaccuguggcua

SEQ ID NO: 502322 - RNA, 22 nt, Artificial Sequence
  Synthetic
agccauuagccaccuguggcua

SEQ ID NO: 502323 - RNA, 23 nt, Artificial Sequence
  Synthetic
uagccauuagccaccuguggcua

SEQ ID NO: 502324 - RNA, 24 nt, Artificial Sequence
  Synthetic
guagccauuagccaccuguggcua

SEQ ID NO: 502325 - RNA, 18 nt, Artificial Sequence
  Synthetic
cacggcuucuguuggcua

SEQ ID NO: 502326 - RNA, 19 nt, Artificial Sequence
  Synthetic
ucacggcuucuguuggcua

SEQ ID NO: 502327 - RNA, 20 nt, Artificial Sequence
  Synthetic
cucacggcuucuguuggcua

SEQ ID NO: 502328 - RNA, 21 nt, Artificial Sequence
  Synthetic
ccucacggcuucuguuggcua

SEQ ID NO: 502329 - RNA, 22 nt, Artificial Sequence
  Synthetic
cccucacggcuucuguuggcua

SEQ ID NO: 502330 - RNA, 23 nt, Artificial Sequence
  Synthetic
ucccucacggcuucuguuggcua

SEQ ID NO: 502331 - RNA, 24 nt, Artificial Sequence
  Synthetic
gucccucacggcuucuguuggcua

SEQ ID NO: 502332 - RNA, 18 nt, Artificial Sequence
  Synthetic
gcuuucauuuguuggcua

SEQ ID NO: 502333 - RNA, 19 nt, Artificial Sequence
  Synthetic
agcuuucauuuguuggcua

SEQ ID NO: 502334 - RNA, 20 nt, Artificial Sequence
  Synthetic
uagcuuucauuuguuggcua

SEQ ID NO: 502335 - RNA, 21 nt, Artificial Sequence
  Synthetic
uuagcuuucauuuguuggcua

SEQ ID NO: 502336 - RNA, 22 nt, Artificial Sequence
  Synthetic
cuuagcuuucauuuguuggcua

SEQ ID NO: 502337 - RNA, 23 nt, Artificial Sequence
  Synthetic
ucuuagcuuucauuuguuggcua

SEQ ID NO: 502338 - RNA, 24 nt, Artificial Sequence
  Synthetic
gucuuagcuuucauuuguuggcua

SEQ ID NO: 502339 - RNA, 18 nt, Artificial Sequence
  Synthetic
ugauuggaauaaaugcua

SEQ ID NO: 502340 - RNA, 19 nt, Artificial Sequence
  Synthetic
augauuggaauaaaugcua

SEQ ID NO: 502341 - RNA, 20 nt, Artificial Sequence
  Synthetic
uaugauuggaauaaaugcua

SEQ ID NO: 502342 - RNA, 21 nt, Artificial Sequence
  Synthetic
uuaugauuggaauaaaugcua

SEQ ID NO: 502343 - RNA, 22 nt, Artificial Sequence
  Synthetic
uuuaugauuggaauaaaugcua

SEQ ID NO: 502344 - RNA, 23 nt, Artificial Sequence
  Synthetic
auuuaugauuggaauaaaugcua

SEQ ID NO: 502345 - RNA, 24 nt, Artificial Sequence
  Synthetic
uauuuaugauuggaauaaaugcua

SEQ ID NO: 502346 - RNA, 18 nt, Artificial Sequence
  Synthetic
uaucaucaaauaaugcua

SEQ ID NO: 502347 - RNA, 19 nt, Artificial Sequence
  Synthetic
uuaucaucaaauaaugcua

SEQ ID NO: 502348 - RNA, 20 nt, Artificial Sequence
  Synthetic
uuuaucaucaaauaaugcua

SEQ ID NO: 502349 - RNA, 21 nt, Artificial Sequence
  Synthetic
guuuaucaucaaauaaugcua

SEQ ID NO: 502350 - RNA, 22 nt, Artificial Sequence
  Synthetic
aguuuaucaucaaauaaugcua

SEQ ID NO: 502351 - RNA, 23 nt, Artificial Sequence
  Synthetic
uaguuuaucaucaaauaaugcua

SEQ ID NO: 502352 - RNA, 24 nt, Artificial Sequence
  Synthetic
uuaguuuaucaucaaauaaugcua

SEQ ID NO: 502353 - RNA, 18 nt, Artificial Sequence
  Synthetic
acuauauucuuaaugcua

SEQ ID NO: 502354 - RNA, 19 nt, Artificial Sequence
  Synthetic
aacuauauucuuaaugcua

SEQ ID NO: 502355 - RNA, 20 nt, Artificial Sequence
  Synthetic
aaacuauauucuuaaugcua

SEQ ID NO: 502356 - RNA, 21 nt, Artificial Sequence
  Synthetic
gaaacuauauucuuaaugcua

SEQ ID NO: 502357 - RNA, 22 nt, Artificial Sequence
  Synthetic
ugaaacuauauucuuaaugcua

SEQ ID NO: 502358 - RNA, 23 nt, Artificial Sequence
  Synthetic
gugaaacuauauucuuaaugcua

SEQ ID NO: 502359 - RNA, 24 nt, Artificial Sequence
  Synthetic
cgugaaacuauauucuuaaugcua

SEQ ID NO: 502360 - RNA, 18 nt, Artificial Sequence
  Synthetic
aagaagaaucucaugcua

SEQ ID NO: 502361 - RNA, 19 nt, Artificial Sequence
  Synthetic
aaagaagaaucucaugcua

SEQ ID NO: 502362 - RNA, 20 nt, Artificial Sequence
  Synthetic
caaagaagaaucucaugcua

SEQ ID NO: 502363 - RNA, 21 nt, Artificial Sequence
  Synthetic
gcaaagaagaaucucaugcua

SEQ ID NO: 502364 - RNA, 22 nt, Artificial Sequence
  Synthetic
agcaaagaagaaucucaugcua

SEQ ID NO: 502365 - RNA, 23 nt, Artificial Sequence
  Synthetic
gagcaaagaagaaucucaugcua

SEQ ID NO: 502366 - RNA, 24 nt, Artificial Sequence
  Synthetic
agagcaaagaagaaucucaugcua

SEQ ID NO: 502367 - RNA, 18 nt, Artificial Sequence
  Synthetic
caucguuggaggaugcua

SEQ ID NO: 502368 - RNA, 19 nt, Artificial Sequence
  Synthetic
ucaucguuggaggaugcua

SEQ ID NO: 502369 - RNA, 20 nt, Artificial Sequence
  Synthetic
gucaucguuggaggaugcua

SEQ ID NO: 502370 - RNA, 21 nt, Artificial Sequence
  Synthetic
ggucaucguuggaggaugcua

SEQ ID NO: 502371 - RNA, 22 nt, Artificial Sequence
  Synthetic
uggucaucguuggaggaugcua

SEQ ID NO: 502372 - RNA, 23 nt, Artificial Sequence
  Synthetic
uuggucaucguuggaggaugcua

SEQ ID NO: 502373 - RNA, 24 nt, Artificial Sequence
  Synthetic
auuggucaucguuggaggaugcua

SEQ ID NO: 502374 - RNA, 18 nt, Artificial Sequence
  Synthetic
ugaucaaaauugaugcua

SEQ ID NO: 502375 - RNA, 19 nt, Artificial Sequence
  Synthetic
augaucaaaauugaugcua

SEQ ID NO: 502376 - RNA, 20 nt, Artificial Sequence
  Synthetic
aaugaucaaaauugaugcua

SEQ ID NO: 502377 - RNA, 21 nt, Artificial Sequence
  Synthetic
aaaugaucaaaauugaugcua

SEQ ID NO: 502378 - RNA, 22 nt, Artificial Sequence
  Synthetic
uaaaugaucaaaauugaugcua

SEQ ID NO: 502379 - RNA, 23 nt, Artificial Sequence
  Synthetic
auaaaugaucaaaauugaugcua

SEQ ID NO: 502380 - RNA, 24 nt, Artificial Sequence
  Synthetic
uauaaaugaucaaaauugaugcua

SEQ ID NO: 502381 - RNA, 18 nt, Artificial Sequence
  Synthetic
ccacguauauugaugcua

SEQ ID NO: 502382 - RNA, 19 nt, Artificial Sequence
  Synthetic
accacguauauugaugcua

SEQ ID NO: 502383 - RNA, 20 nt, Artificial Sequence
  Synthetic
uaccacguauauugaugcua

SEQ ID NO: 502384 - RNA, 21 nt, Artificial Sequence
  Synthetic
auaccacguauauugaugcua

SEQ ID NO: 502385 - RNA, 22 nt, Artificial Sequence
  Synthetic
aauaccacguauauugaugcua

SEQ ID NO: 502386 - RNA, 23 nt, Artificial Sequence
  Synthetic
uaauaccacguauauugaugcua

SEQ ID NO: 502387 - RNA, 24 nt, Artificial Sequence
  Synthetic
cuaauaccacguauauugaugcua

SEQ ID NO: 502388 - RNA, 18 nt, Artificial Sequence
  Synthetic
cuagcucccuugaugcua

SEQ ID NO: 502389 - RNA, 19 nt, Artificial Sequence
  Synthetic
acuagcucccuugaugcua

SEQ ID NO: 502390 - RNA, 20 nt, Artificial Sequence
  Synthetic
cacuagcucccuugaugcua

SEQ ID NO: 502391 - RNA, 21 nt, Artificial Sequence
  Synthetic
acacuagcucccuugaugcua

SEQ ID NO: 502392 - RNA, 22 nt, Artificial Sequence
  Synthetic
uacacuagcucccuugaugcua

SEQ ID NO: 502393 - RNA, 23 nt, Artificial Sequence
  Synthetic
uuacacuagcucccuugaugcua

SEQ ID NO: 502394 - RNA, 24 nt, Artificial Sequence
  Synthetic
guuacacuagcucccuugaugcua

SEQ ID NO: 502395 - RNA, 18 nt, Artificial Sequence
  Synthetic
ucaaggaagaguaugcua

SEQ ID NO: 502396 - RNA, 19 nt, Artificial Sequence
  Synthetic
uucaaggaagaguaugcua

SEQ ID NO: 502397 - RNA, 20 nt, Artificial Sequence
  Synthetic
auucaaggaagaguaugcua

SEQ ID NO: 502398 - RNA, 21 nt, Artificial Sequence
  Synthetic
uauucaaggaagaguaugcua

SEQ ID NO: 502399 - RNA, 22 nt, Artificial Sequence
  Synthetic
uuauucaaggaagaguaugcua

SEQ ID NO: 502400 - RNA, 23 nt, Artificial Sequence
  Synthetic
cuuauucaaggaagaguaugcua

SEQ ID NO: 502401 - RNA, 24 nt, Artificial Sequence
  Synthetic
acuuauucaaggaagaguaugcua

SEQ ID NO: 502402 - RNA, 18 nt, Artificial Sequence
  Synthetic
ugguuuuaaauuaugcua

SEQ ID NO: 502403 - RNA, 19 nt, Artificial Sequence
  Synthetic
gugguuuuaaauuaugcua

SEQ ID NO: 502404 - RNA, 20 nt, Artificial Sequence
  Synthetic
agugguuuuaaauuaugcua

SEQ ID NO: 502405 - RNA, 21 nt, Artificial Sequence
  Synthetic
cagugguuuuaaauuaugcua

SEQ ID NO: 502406 - RNA, 22 nt, Artificial Sequence
  Synthetic
ucagugguuuuaaauuaugcua

SEQ ID NO: 502407 - RNA, 23 nt, Artificial Sequence
  Synthetic
uucagugguuuuaaauuaugcua

SEQ ID NO: 502408 - RNA, 24 nt, Artificial Sequence
  Synthetic
uuucagugguuuuaaauuaugcua

SEQ ID NO: 502409 - RNA, 18 nt, Artificial Sequence
  Synthetic
gcaugaauuuuuaugcua

SEQ ID NO: 502410 - RNA, 19 nt, Artificial Sequence
  Synthetic
agcaugaauuuuuaugcua

SEQ ID NO: 502411 - RNA, 20 nt, Artificial Sequence
  Synthetic
aagcaugaauuuuuaugcua

SEQ ID NO: 502412 - RNA, 21 nt, Artificial Sequence
  Synthetic
aaagcaugaauuuuuaugcua

SEQ ID NO: 502413 - RNA, 22 nt, Artificial Sequence
  Synthetic
caaagcaugaauuuuuaugcua

SEQ ID NO: 502414 - RNA, 23 nt, Artificial Sequence
  Synthetic
ccaaagcaugaauuuuuaugcua

SEQ ID NO: 502415 - RNA, 24 nt, Artificial Sequence
  Synthetic
cccaaagcaugaauuuuuaugcua

SEQ ID NO: 502416 - RNA, 18 nt, Artificial Sequence
  Synthetic
uuguccuuccaacugcua

SEQ ID NO: 502417 - RNA, 19 nt, Artificial Sequence
  Synthetic
auuguccuuccaacugcua

SEQ ID NO: 502418 - RNA, 20 nt, Artificial Sequence
  Synthetic
cauuguccuuccaacugcua

SEQ ID NO: 502419 - RNA, 21 nt, Artificial Sequence
  Synthetic
gcauuguccuuccaacugcua

SEQ ID NO: 502420 - RNA, 22 nt, Artificial Sequence
  Synthetic
agcauuguccuuccaacugcua

SEQ ID NO: 502421 - RNA, 23 nt, Artificial Sequence
  Synthetic
cagcauuguccuuccaacugcua

SEQ ID NO: 502422 - RNA, 24 nt, Artificial Sequence
  Synthetic
acagcauuguccuuccaacugcua

SEQ ID NO: 502423 - RNA, 18 nt, Artificial Sequence
  Synthetic
aggacaacagaccugcua

SEQ ID NO: 502424 - RNA, 19 nt, Artificial Sequence
  Synthetic
gaggacaacagaccugcua

SEQ ID NO: 502425 - RNA, 20 nt, Artificial Sequence
  Synthetic
ugaggacaacagaccugcua

SEQ ID NO: 502426 - RNA, 21 nt, Artificial Sequence
  Synthetic
augaggacaacagaccugcua

SEQ ID NO: 502427 - RNA, 22 nt, Artificial Sequence
  Synthetic
aaugaggacaacagaccugcua

SEQ ID NO: 502428 - RNA, 23 nt, Artificial Sequence
  Synthetic
uaaugaggacaacagaccugcua

SEQ ID NO: 502429 - RNA, 24 nt, Artificial Sequence
  Synthetic
cuaaugaggacaacagaccugcua

SEQ ID NO: 502430 - RNA, 18 nt, Artificial Sequence
  Synthetic
gaguauguuggccugcua

SEQ ID NO: 502431 - RNA, 19 nt, Artificial Sequence
  Synthetic
ugaguauguuggccugcua

SEQ ID NO: 502432 - RNA, 20 nt, Artificial Sequence
  Synthetic
uugaguauguuggccugcua

SEQ ID NO: 502433 - RNA, 21 nt, Artificial Sequence
  Synthetic
cuugaguauguuggccugcua

SEQ ID NO: 502434 - RNA, 22 nt, Artificial Sequence
  Synthetic
acuugaguauguuggccugcua

SEQ ID NO: 502435 - RNA, 23 nt, Artificial Sequence
  Synthetic
gacuugaguauguuggccugcua

SEQ ID NO: 502436 - RNA, 24 nt, Artificial Sequence
  Synthetic
agacuugaguauguuggccugcua

SEQ ID NO: 502437 - RNA, 18 nt, Artificial Sequence
  Synthetic
uuccaucaauuccugcua

SEQ ID NO: 502438 - RNA, 19 nt, Artificial Sequence
  Synthetic
guuccaucaauuccugcua

SEQ ID NO: 502439 - RNA, 20 nt, Artificial Sequence
  Synthetic
uguuccaucaauuccugcua

SEQ ID NO: 502440 - RNA, 21 nt, Artificial Sequence
  Synthetic
guguuccaucaauuccugcua

SEQ ID NO: 502441 - RNA, 22 nt, Artificial Sequence
  Synthetic
uguguuccaucaauuccugcua

SEQ ID NO: 502442 - RNA, 23 nt, Artificial Sequence
  Synthetic
cuguguuccaucaauuccugcua

SEQ ID NO: 502443 - RNA, 24 nt, Artificial Sequence
  Synthetic
acuguguuccaucaauuccugcua

SEQ ID NO: 502444 - RNA, 18 nt, Artificial Sequence
  Synthetic
ugcuaaguuaagcugcua

SEQ ID NO: 502445 - RNA, 19 nt, Artificial Sequence
  Synthetic
uugcuaaguuaagcugcua

SEQ ID NO: 502446 - RNA, 20 nt, Artificial Sequence
  Synthetic
cuugcuaaguuaagcugcua

SEQ ID NO: 502447 - RNA, 21 nt, Artificial Sequence
  Synthetic
ucuugcuaaguuaagcugcua

SEQ ID NO: 502448 - RNA, 22 nt, Artificial Sequence
  Synthetic
cucuugcuaaguuaagcugcua

SEQ ID NO: 502449 - RNA, 23 nt, Artificial Sequence
  Synthetic
ucucuugcuaaguuaagcugcua

SEQ ID NO: 502450 - RNA, 24 nt, Artificial Sequence
  Synthetic
gucucuugcuaaguuaagcugcua

SEQ ID NO: 502451 - RNA, 18 nt, Artificial Sequence
  Synthetic
gcacugugcuggcugcua

SEQ ID NO: 502452 - RNA, 19 nt, Artificial Sequence
  Synthetic
ggcacugugcuggcugcua

SEQ ID NO: 502453 - RNA, 20 nt, Artificial Sequence
  Synthetic
aggcacugugcuggcugcua

SEQ ID NO: 502454 - RNA, 21 nt, Artificial Sequence
  Synthetic
aaggcacugugcuggcugcua

SEQ ID NO: 502455 - RNA, 22 nt, Artificial Sequence
  Synthetic
caaggcacugugcuggcugcua

SEQ ID NO: 502456 - RNA, 23 nt, Artificial Sequence
  Synthetic
gcaaggcacugugcuggcugcua

SEQ ID NO: 502457 - RNA, 24 nt, Artificial Sequence
  Synthetic
ugcaaggcacugugcuggcugcua

SEQ ID NO: 502458 - RNA, 18 nt, Artificial Sequence
  Synthetic
acucuuugcuuucugcua

SEQ ID NO: 502459 - RNA, 19 nt, Artificial Sequence
  Synthetic
aacucuuugcuuucugcua

SEQ ID NO: 502460 - RNA, 20 nt, Artificial Sequence
  Synthetic
aaacucuuugcuuucugcua

SEQ ID NO: 502461 - RNA, 21 nt, Artificial Sequence
  Synthetic
aaaacucuuugcuuucugcua

SEQ ID NO: 502462 - RNA, 22 nt, Artificial Sequence
  Synthetic
caaaacucuuugcuuucugcua

SEQ ID NO: 502463 - RNA, 23 nt, Artificial Sequence
  Synthetic
ucaaaacucuuugcuuucugcua

SEQ ID NO: 502464 - RNA, 24 nt, Artificial Sequence
  Synthetic
uucaaaacucuuugcuuucugcua

SEQ ID NO: 502465 - RNA, 18 nt, Artificial Sequence
  Synthetic
ccaaguuaguuucugcua

SEQ ID NO: 502466 - RNA, 19 nt, Artificial Sequence
  Synthetic
accaaguuaguuucugcua

SEQ ID NO: 502467 - RNA, 20 nt, Artificial Sequence
  Synthetic
aaccaaguuaguuucugcua

SEQ ID NO: 502468 - RNA, 21 nt, Artificial Sequence
  Synthetic
caaccaaguuaguuucugcua

SEQ ID NO: 502469 - RNA, 22 nt, Artificial Sequence
  Synthetic
gcaaccaaguuaguuucugcua

SEQ ID NO: 502470 - RNA, 23 nt, Artificial Sequence
  Synthetic
ugcaaccaaguuaguuucugcua

SEQ ID NO: 502471 - RNA, 24 nt, Artificial Sequence
  Synthetic
cugcaaccaaguuaguuucugcua

SEQ ID NO: 502472 - RNA, 18 nt, Artificial Sequence
  Synthetic
gaggcgacuuuucugcua

SEQ ID NO: 502473 - RNA, 19 nt, Artificial Sequence
  Synthetic
agaggcgacuuuucugcua

SEQ ID NO: 502474 - RNA, 20 nt, Artificial Sequence
  Synthetic
aagaggcgacuuuucugcua

SEQ ID NO: 502475 - RNA, 21 nt, Artificial Sequence
  Synthetic
gaagaggcgacuuuucugcua

SEQ ID NO: 502476 - RNA, 22 nt, Artificial Sequence
  Synthetic
ggaagaggcgacuuuucugcua

SEQ ID NO: 502477 - RNA, 23 nt, Artificial Sequence
  Synthetic
aggaagaggcgacuuuucugcua

SEQ ID NO: 502478 - RNA, 24 nt, Artificial Sequence
  Synthetic
gaggaagaggcgacuuuucugcua

SEQ ID NO: 502479 - RNA, 18 nt, Artificial Sequence
  Synthetic
aguccuaguuuucugcua

SEQ ID NO: 502480 - RNA, 19 nt, Artificial Sequence
  Synthetic
aaguccuaguuuucugcua

SEQ ID NO: 502481 - RNA, 20 nt, Artificial Sequence
  Synthetic
uaaguccuaguuuucugcua

SEQ ID NO: 502482 - RNA, 21 nt, Artificial Sequence
  Synthetic
uuaaguccuaguuuucugcua

SEQ ID NO: 502483 - RNA, 22 nt, Artificial Sequence
  Synthetic
auuaaguccuaguuuucugcua

SEQ ID NO: 502484 - RNA, 23 nt, Artificial Sequence
  Synthetic
uauuaaguccuaguuuucugcua

SEQ ID NO: 502485 - RNA, 24 nt, Artificial Sequence
  Synthetic
cuauuaaguccuaguuuucugcua

SEQ ID NO: 502486 - RNA, 18 nt, Artificial Sequence
  Synthetic
acuuacuuuuuucugcua

SEQ ID NO: 502487 - RNA, 19 nt, Artificial Sequence
  Synthetic
aacuuacuuuuuucugcua

SEQ ID NO: 502488 - RNA, 20 nt, Artificial Sequence
  Synthetic
uaacuuacuuuuuucugcua

SEQ ID NO: 502489 - RNA, 21 nt, Artificial Sequence
  Synthetic
uuaacuuacuuuuuucugcua

SEQ ID NO: 502490 - RNA, 22 nt, Artificial Sequence
  Synthetic
uuuaacuuacuuuuuucugcua

SEQ ID NO: 502491 - RNA, 23 nt, Artificial Sequence
  Synthetic
auuuaacuuacuuuuuucugcua

SEQ ID NO: 502492 - RNA, 24 nt, Artificial Sequence
  Synthetic
aauuuaacuuacuuuuuucugcua

SEQ ID NO: 502493 - RNA, 18 nt, Artificial Sequence
  Synthetic
ggagagugaaaagugcua

SEQ ID NO: 502494 - RNA, 19 nt, Artificial Sequence
  Synthetic
uggagagugaaaagugcua

SEQ ID NO: 502495 - RNA, 20 nt, Artificial Sequence
  Synthetic
uuggagagugaaaagugcua

SEQ ID NO: 502496 - RNA, 21 nt, Artificial Sequence
  Synthetic
uuuggagagugaaaagugcua

SEQ ID NO: 502497 - RNA, 22 nt, Artificial Sequence
  Synthetic
cuuuggagagugaaaagugcua

SEQ ID NO: 502498 - RNA, 23 nt, Artificial Sequence
  Synthetic
gcuuuggagagugaaaagugcua

SEQ ID NO: 502499 - RNA, 24 nt, Artificial Sequence
  Synthetic
ugcuuuggagagugaaaagugcua

SEQ ID NO: 502500 - RNA, 18 nt, Artificial Sequence
  Synthetic
caugaaaaauaagugcua

SEQ ID NO: 502501 - RNA, 19 nt, Artificial Sequence
  Synthetic
gcaugaaaaauaagugcua

SEQ ID NO: 502502 - RNA, 20 nt, Artificial Sequence
  Synthetic
ugcaugaaaaauaagugcua

SEQ ID NO: 502503 - RNA, 21 nt, Artificial Sequence
  Synthetic
cugcaugaaaaauaagugcua

SEQ ID NO: 502504 - RNA, 22 nt, Artificial Sequence
  Synthetic
gcugcaugaaaaauaagugcua

SEQ ID NO: 502505 - RNA, 23 nt, Artificial Sequence
  Synthetic
ugcugcaugaaaaauaagugcua

SEQ ID NO: 502506 - RNA, 24 nt, Artificial Sequence
  Synthetic
augcugcaugaaaaauaagugcua

SEQ ID NO: 502507 - RNA, 18 nt, Artificial Sequence
  Synthetic
uaaaaaugguaagugcua

SEQ ID NO: 502508 - RNA, 19 nt, Artificial Sequence
  Synthetic
auaaaaaugguaagugcua

SEQ ID NO: 502509 - RNA, 20 nt, Artificial Sequence
  Synthetic
uauaaaaaugguaagugcua

SEQ ID NO: 502510 - RNA, 21 nt, Artificial Sequence
  Synthetic
guauaaaaaugguaagugcua

SEQ ID NO: 502511 - RNA, 22 nt, Artificial Sequence
  Synthetic
cguauaaaaaugguaagugcua

SEQ ID NO: 502512 - RNA, 23 nt, Artificial Sequence
  Synthetic
acguauaaaaaugguaagugcua

SEQ ID NO: 502513 - RNA, 24 nt, Artificial Sequence
  Synthetic
cacguauaaaaaugguaagugcua

SEQ ID NO: 502514 - RNA, 18 nt, Artificial Sequence
  Synthetic
uaggaaggcugagugcua

SEQ ID NO: 502515 - RNA, 19 nt, Artificial Sequence
  Synthetic
auaggaaggcugagugcua

SEQ ID NO: 502516 - RNA, 20 nt, Artificial Sequence
  Synthetic
uauaggaaggcugagugcua

SEQ ID NO: 502517 - RNA, 21 nt, Artificial Sequence
  Synthetic
uuauaggaaggcugagugcua

SEQ ID NO: 502518 - RNA, 22 nt, Artificial Sequence
  Synthetic
uuuauaggaaggcugagugcua

SEQ ID NO: 502519 - RNA, 23 nt, Artificial Sequence
  Synthetic
guuuauaggaaggcugagugcua

SEQ ID NO: 502520 - RNA, 24 nt, Artificial Sequence
  Synthetic
gguuuauaggaaggcugagugcua

SEQ ID NO: 502521 - RNA, 18 nt, Artificial Sequence
  Synthetic
cugcuaaauggggugcua

SEQ ID NO: 502522 - RNA, 19 nt, Artificial Sequence
  Synthetic
acugcuaaauggggugcua

SEQ ID NO: 502523 - RNA, 20 nt, Artificial Sequence
  Synthetic
aacugcuaaauggggugcua

SEQ ID NO: 502524 - RNA, 21 nt, Artificial Sequence
  Synthetic
aaacugcuaaauggggugcua

SEQ ID NO: 502525 - RNA, 22 nt, Artificial Sequence
  Synthetic
uaaacugcuaaauggggugcua

SEQ ID NO: 502526 - RNA, 23 nt, Artificial Sequence
  Synthetic
uuaaacugcuaaauggggugcua

SEQ ID NO: 502527 - RNA, 24 nt, Artificial Sequence
  Synthetic
uuuaaacugcuaaauggggugcua

SEQ ID NO: 502528 - RNA, 18 nt, Artificial Sequence
  Synthetic
cacauaaaauuggugcua

SEQ ID NO: 502529 - RNA, 19 nt, Artificial Sequence
  Synthetic
ucacauaaaauuggugcua

SEQ ID NO: 502530 - RNA, 20 nt, Artificial Sequence
  Synthetic
uucacauaaaauuggugcua

SEQ ID NO: 502531 - RNA, 21 nt, Artificial Sequence
  Synthetic
uuucacauaaaauuggugcua

SEQ ID NO: 502532 - RNA, 22 nt, Artificial Sequence
  Synthetic
uuuucacauaaaauuggugcua

SEQ ID NO: 502533 - RNA, 23 nt, Artificial Sequence
  Synthetic
uuuuucacauaaaauuggugcua

SEQ ID NO: 502534 - RNA, 24 nt, Artificial Sequence
  Synthetic
uuuuuucacauaaaauuggugcua

SEQ ID NO: 502535 - RNA, 18 nt, Artificial Sequence
  Synthetic
cucacaguacaugugcua

SEQ ID NO: 502536 - RNA, 19 nt, Artificial Sequence
  Synthetic
acucacaguacaugugcua

SEQ ID NO: 502537 - RNA, 20 nt, Artificial Sequence
  Synthetic
aacucacaguacaugugcua

SEQ ID NO: 502538 - RNA, 21 nt, Artificial Sequence
  Synthetic
aaacucacaguacaugugcua

SEQ ID NO: 502539 - RNA, 22 nt, Artificial Sequence
  Synthetic
caaacucacaguacaugugcua

SEQ ID NO: 502540 - RNA, 23 nt, Artificial Sequence
  Synthetic
acaaacucacaguacaugugcua

SEQ ID NO: 502541 - RNA, 24 nt, Artificial Sequence
  Synthetic
aacaaacucacaguacaugugcua

SEQ ID NO: 502542 - RNA, 18 nt, Artificial Sequence
  Synthetic
aggcugaguuuugugcua

SEQ ID NO: 502543 - RNA, 19 nt, Artificial Sequence
  Synthetic
caggcugaguuuugugcua

SEQ ID NO: 502544 - RNA, 20 nt, Artificial Sequence
  Synthetic
gcaggcugaguuuugugcua

SEQ ID NO: 502545 - RNA, 21 nt, Artificial Sequence
  Synthetic
agcaggcugaguuuugugcua

SEQ ID NO: 502546 - RNA, 22 nt, Artificial Sequence
  Synthetic
gagcaggcugaguuuugugcua

SEQ ID NO: 502547 - RNA, 23 nt, Artificial Sequence
  Synthetic
ugagcaggcugaguuuugugcua

SEQ ID NO: 502548 - RNA, 24 nt, Artificial Sequence
  Synthetic
cugagcaggcugaguuuugugcua

SEQ ID NO: 502549 - RNA, 18 nt, Artificial Sequence
  Synthetic
gagcaauaugaauugcua

SEQ ID NO: 502550 - RNA, 19 nt, Artificial Sequence
  Synthetic
agagcaauaugaauugcua

SEQ ID NO: 502551 - RNA, 20 nt, Artificial Sequence
  Synthetic
uagagcaauaugaauugcua

SEQ ID NO: 502552 - RNA, 21 nt, Artificial Sequence
  Synthetic
auagagcaauaugaauugcua

SEQ ID NO: 502553 - RNA, 22 nt, Artificial Sequence
  Synthetic
cauagagcaauaugaauugcua

SEQ ID NO: 502554 - RNA, 23 nt, Artificial Sequence
  Synthetic
gcauagagcaauaugaauugcua

SEQ ID NO: 502555 - RNA, 24 nt, Artificial Sequence
  Synthetic
cgcauagagcaauaugaauugcua

SEQ ID NO: 502556 - RNA, 18 nt, Artificial Sequence
  Synthetic
auugugccugaauugcua

SEQ ID NO: 502557 - RNA, 19 nt, Artificial Sequence
  Synthetic
aauugugccugaauugcua

SEQ ID NO: 502558 - RNA, 20 nt, Artificial Sequence
  Synthetic
uaauugugccugaauugcua

SEQ ID NO: 502559 - RNA, 21 nt, Artificial Sequence
  Synthetic
guaauugugccugaauugcua

SEQ ID NO: 502560 - RNA, 22 nt, Artificial Sequence
  Synthetic
aguaauugugccugaauugcua

SEQ ID NO: 502561 - RNA, 23 nt, Artificial Sequence
  Synthetic
caguaauugugccugaauugcua

SEQ ID NO: 502562 - RNA, 24 nt, Artificial Sequence
  Synthetic
gcaguaauugugccugaauugcua

SEQ ID NO: 502563 - RNA, 18 nt, Artificial Sequence
  Synthetic
uuugaauacacauugcua

SEQ ID NO: 502564 - RNA, 19 nt, Artificial Sequence
  Synthetic
uuuugaauacacauugcua

SEQ ID NO: 502565 - RNA, 20 nt, Artificial Sequence
  Synthetic
cuuuugaauacacauugcua

SEQ ID NO: 502566 - RNA, 21 nt, Artificial Sequence
  Synthetic
ccuuuugaauacacauugcua

SEQ ID NO: 502567 - RNA, 22 nt, Artificial Sequence
  Synthetic
accuuuugaauacacauugcua

SEQ ID NO: 502568 - RNA, 23 nt, Artificial Sequence
  Synthetic
uaccuuuugaauacacauugcua

SEQ ID NO: 502569 - RNA, 24 nt, Artificial Sequence
  Synthetic
uuaccuuuugaauacacauugcua

SEQ ID NO: 502570 - RNA, 18 nt, Artificial Sequence
  Synthetic
gagauauaaauauugcua

SEQ ID NO: 502571 - RNA, 19 nt, Artificial Sequence
  Synthetic
ugagauauaaauauugcua

SEQ ID NO: 502572 - RNA, 20 nt, Artificial Sequence
  Synthetic
augagauauaaauauugcua

SEQ ID NO: 502573 - RNA, 21 nt, Artificial Sequence
  Synthetic
aaugagauauaaauauugcua

SEQ ID NO: 502574 - RNA, 22 nt, Artificial Sequence
  Synthetic
gaaugagauauaaauauugcua

SEQ ID NO: 502575 - RNA, 23 nt, Artificial Sequence
  Synthetic
ugaaugagauauaaauauugcua

SEQ ID NO: 502576 - RNA, 24 nt, Artificial Sequence
  Synthetic
cugaaugagauauaaauauugcua

SEQ ID NO: 502577 - RNA, 18 nt, Artificial Sequence
  Synthetic
aaaaaaacccuauugcua

SEQ ID NO: 502578 - RNA, 19 nt, Artificial Sequence
  Synthetic
uaaaaaaacccuauugcua

SEQ ID NO: 502579 - RNA, 20 nt, Artificial Sequence
  Synthetic
uuaaaaaaacccuauugcua

SEQ ID NO: 502580 - RNA, 21 nt, Artificial Sequence
  Synthetic
guuaaaaaaacccuauugcua

SEQ ID NO: 502581 - RNA, 22 nt, Artificial Sequence
  Synthetic
cguuaaaaaaacccuauugcua

SEQ ID NO: 502582 - RNA, 23 nt, Artificial Sequence
  Synthetic
ccguuaaaaaaacccuauugcua

SEQ ID NO: 502583 - RNA, 24 nt, Artificial Sequence
  Synthetic
uccguuaaaaaaacccuauugcua

SEQ ID NO: 502584 - RNA, 18 nt, Artificial Sequence
  Synthetic
uguuggaguuuauugcua

SEQ ID NO: 502585 - RNA, 19 nt, Artificial Sequence
  Synthetic
guguuggaguuuauugcua

SEQ ID NO: 502586 - RNA, 20 nt, Artificial Sequence
  Synthetic
aguguuggaguuuauugcua

SEQ ID NO: 502587 - RNA, 21 nt, Artificial Sequence
  Synthetic
aaguguuggaguuuauugcua

SEQ ID NO: 502588 - RNA, 22 nt, Artificial Sequence
  Synthetic
aaaguguuggaguuuauugcua

SEQ ID NO: 502589 - RNA, 23 nt, Artificial Sequence
  Synthetic
gaaaguguuggaguuuauugcua

SEQ ID NO: 502590 - RNA, 24 nt, Artificial Sequence
  Synthetic
ggaaaguguuggaguuuauugcua

SEQ ID NO: 502591 - RNA, 18 nt, Artificial Sequence
  Synthetic
guacaauacuacuugcua

SEQ ID NO: 502592 - RNA, 19 nt, Artificial Sequence
  Synthetic
uguacaauacuacuugcua

SEQ ID NO: 502593 - RNA, 20 nt, Artificial Sequence
  Synthetic
uuguacaauacuacuugcua

SEQ ID NO: 502594 - RNA, 21 nt, Artificial Sequence
  Synthetic
uuuguacaauacuacuugcua

SEQ ID NO: 502595 - RNA, 22 nt, Artificial Sequence
  Synthetic
uuuuguacaauacuacuugcua

SEQ ID NO: 502596 - RNA, 23 nt, Artificial Sequence
  Synthetic
uuuuuguacaauacuacuugcua

SEQ ID NO: 502597 - RNA, 24 nt, Artificial Sequence
  Synthetic
uuuuuuguacaauacuacuugcua

SEQ ID NO: 502598 - RNA, 18 nt, Artificial Sequence
  Synthetic
acacuagaggccuugcua

SEQ ID NO: 502599 - RNA, 19 nt, Artificial Sequence
  Synthetic
aacacuagaggccuugcua

SEQ ID NO: 502600 - RNA, 20 nt, Artificial Sequence
  Synthetic
caacacuagaggccuugcua

SEQ ID NO: 502601 - RNA, 21 nt, Artificial Sequence
  Synthetic
ucaacacuagaggccuugcua

SEQ ID NO: 502602 - RNA, 22 nt, Artificial Sequence
  Synthetic
gucaacacuagaggccuugcua

SEQ ID NO: 502603 - RNA, 23 nt, Artificial Sequence
  Synthetic
agucaacacuagaggccuugcua

SEQ ID NO: 502604 - RNA, 24 nt, Artificial Sequence
  Synthetic
cagucaacacuagaggccuugcua

SEQ ID NO: 502605 - RNA, 18 nt, Artificial Sequence
  Synthetic
aauuggaggggcuugcua

SEQ ID NO: 502606 - RNA, 19 nt, Artificial Sequence
  Synthetic
uaauuggaggggcuugcua

SEQ ID NO: 502607 - RNA, 20 nt, Artificial Sequence
  Synthetic
auaauuggaggggcuugcua

SEQ ID NO: 502608 - RNA, 21 nt, Artificial Sequence
  Synthetic
cauaauuggaggggcuugcua

SEQ ID NO: 502609 - RNA, 22 nt, Artificial Sequence
  Synthetic
acauaauuggaggggcuugcua

SEQ ID NO: 502610 - RNA, 23 nt, Artificial Sequence
  Synthetic
aacauaauuggaggggcuugcua

SEQ ID NO: 502611 - RNA, 24 nt, Artificial Sequence
  Synthetic
gaacauaauuggaggggcuugcua

SEQ ID NO: 502612 - RNA, 18 nt, Artificial Sequence
  Synthetic
ucaugcuuuagguugcua

SEQ ID NO: 502613 - RNA, 19 nt, Artificial Sequence
  Synthetic
gucaugcuuuagguugcua

SEQ ID NO: 502614 - RNA, 20 nt, Artificial Sequence
  Synthetic
ggucaugcuuuagguugcua

SEQ ID NO: 502615 - RNA, 21 nt, Artificial Sequence
  Synthetic
aggucaugcuuuagguugcua

SEQ ID NO: 502616 - RNA, 22 nt, Artificial Sequence
  Synthetic
caggucaugcuuuagguugcua

SEQ ID NO: 502617 - RNA, 23 nt, Artificial Sequence
  Synthetic
gcaggucaugcuuuagguugcua

SEQ ID NO: 502618 - RNA, 24 nt, Artificial Sequence
  Synthetic
agcaggucaugcuuuagguugcua

SEQ ID NO: 502619 - RNA, 18 nt, Artificial Sequence
  Synthetic
aggaagagucuguugcua

SEQ ID NO: 502620 - RNA, 19 nt, Artificial Sequence
  Synthetic
aaggaagagucuguugcua

SEQ ID NO: 502621 - RNA, 20 nt, Artificial Sequence
  Synthetic
uaaggaagagucuguugcua

SEQ ID NO: 502622 - RNA, 21 nt, Artificial Sequence
  Synthetic
uuaaggaagagucuguugcua

SEQ ID NO: 502623 - RNA, 22 nt, Artificial Sequence
  Synthetic
auuaaggaagagucuguugcua

SEQ ID NO: 502624 - RNA, 23 nt, Artificial Sequence
  Synthetic
uauuaaggaagagucuguugcua

SEQ ID NO: 502625 - RNA, 24 nt, Artificial Sequence
  Synthetic
uuauuaaggaagagucuguugcua

SEQ ID NO: 502626 - RNA, 18 nt, Artificial Sequence
  Synthetic
guguguaggaauuugcua

SEQ ID NO: 502627 - RNA, 19 nt, Artificial Sequence
  Synthetic
gguguguaggaauuugcua

SEQ ID NO: 502628 - RNA, 20 nt, Artificial Sequence
  Synthetic
ugguguguaggaauuugcua

SEQ ID NO: 502629 - RNA, 21 nt, Artificial Sequence
  Synthetic
augguguguaggaauuugcua

SEQ ID NO: 502630 - RNA, 22 nt, Artificial Sequence
  Synthetic
aaugguguguaggaauuugcua

SEQ ID NO: 502631 - RNA, 23 nt, Artificial Sequence
  Synthetic
gaaugguguguaggaauuugcua

SEQ ID NO: 502632 - RNA, 24 nt, Artificial Sequence
  Synthetic
ugaaugguguguaggaauuugcua

SEQ ID NO: 502633 - RNA, 18 nt, Artificial Sequence
  Synthetic
uuacaauuccauuugcua

SEQ ID NO: 502634 - RNA, 19 nt, Artificial Sequence
  Synthetic
uuuacaauuccauuugcua

SEQ ID NO: 502635 - RNA, 20 nt, Artificial Sequence
  Synthetic
auuuacaauuccauuugcua

SEQ ID NO: 502636 - RNA, 21 nt, Artificial Sequence
  Synthetic
uauuuacaauuccauuugcua

SEQ ID NO: 502637 - RNA, 22 nt, Artificial Sequence
  Synthetic
guauuuacaauuccauuugcua

SEQ ID NO: 502638 - RNA, 23 nt, Artificial Sequence
  Synthetic
uguauuuacaauuccauuugcua

SEQ ID NO: 502639 - RNA, 24 nt, Artificial Sequence
  Synthetic
uuguauuuacaauuccauuugcua

SEQ ID NO: 502640 - RNA, 18 nt, Artificial Sequence
  Synthetic
aucuguuucgguuugcua

SEQ ID NO: 502641 - RNA, 19 nt, Artificial Sequence
  Synthetic
gaucuguuucgguuugcua

SEQ ID NO: 502642 - RNA, 20 nt, Artificial Sequence
  Synthetic
agaucuguuucgguuugcua

SEQ ID NO: 502643 - RNA, 21 nt, Artificial Sequence
  Synthetic
cagaucuguuucgguuugcua

SEQ ID NO: 502644 - RNA, 22 nt, Artificial Sequence
  Synthetic
ucagaucuguuucgguuugcua

SEQ ID NO: 502645 - RNA, 23 nt, Artificial Sequence
  Synthetic
cucagaucuguuucgguuugcua

SEQ ID NO: 502646 - RNA, 24 nt, Artificial Sequence
  Synthetic
gcucagaucuguuucgguuugcua

SEQ ID NO: 502647 - RNA, 18 nt, Artificial Sequence
  Synthetic
cuucgguucuguuugcua

SEQ ID NO: 502648 - RNA, 19 nt, Artificial Sequence
  Synthetic
ccuucgguucuguuugcua

SEQ ID NO: 502649 - RNA, 20 nt, Artificial Sequence
  Synthetic
accuucgguucuguuugcua

SEQ ID NO: 502650 - RNA, 21 nt, Artificial Sequence
  Synthetic
caccuucgguucuguuugcua

SEQ ID NO: 502651 - RNA, 22 nt, Artificial Sequence
  Synthetic
acaccuucgguucuguuugcua

SEQ ID NO: 502652 - RNA, 23 nt, Artificial Sequence
  Synthetic
aacaccuucgguucuguuugcua

SEQ ID NO: 502653 - RNA, 24 nt, Artificial Sequence
  Synthetic
aaacaccuucgguucuguuugcua

SEQ ID NO: 502654 - RNA, 18 nt, Artificial Sequence
  Synthetic
agguuucuuuuuuugcua

SEQ ID NO: 502655 - RNA, 19 nt, Artificial Sequence
  Synthetic
gagguuucuuuuuuugcua

SEQ ID NO: 502656 - RNA, 20 nt, Artificial Sequence
  Synthetic
agagguuucuuuuuuugcua

SEQ ID NO: 502657 - RNA, 21 nt, Artificial Sequence
  Synthetic
uagagguuucuuuuuuugcua

SEQ ID NO: 502658 - RNA, 22 nt, Artificial Sequence
  Synthetic
uuagagguuucuuuuuuugcua

SEQ ID NO: 502659 - RNA, 23 nt, Artificial Sequence
  Synthetic
uuuagagguuucuuuuuuugcua

SEQ ID NO: 502660 - RNA, 24 nt, Artificial Sequence
  Synthetic
uuuuagagguuucuuuuuuugcua

SEQ ID NO: 502661 - RNA, 18 nt, Artificial Sequence
  Synthetic
aaaaaaaggaaaaaucua

SEQ ID NO: 502662 - RNA, 19 nt, Artificial Sequence
  Synthetic
uaaaaaaaggaaaaaucua

SEQ ID NO: 502663 - RNA, 20 nt, Artificial Sequence
  Synthetic
guaaaaaaaggaaaaaucua

SEQ ID NO: 502664 - RNA, 21 nt, Artificial Sequence
  Synthetic
aguaaaaaaaggaaaaaucua

SEQ ID NO: 502665 - RNA, 22 nt, Artificial Sequence
  Synthetic
gaguaaaaaaaggaaaaaucua

SEQ ID NO: 502666 - RNA, 23 nt, Artificial Sequence
  Synthetic
ugaguaaaaaaaggaaaaaucua

SEQ ID NO: 502667 - RNA, 24 nt, Artificial Sequence
  Synthetic
augaguaaaaaaaggaaaaaucua

SEQ ID NO: 502668 - RNA, 18 nt, Artificial Sequence
  Synthetic
agccuccuuaaaaaucua

SEQ ID NO: 502669 - RNA, 19 nt, Artificial Sequence
  Synthetic
cagccuccuuaaaaaucua

SEQ ID NO: 502670 - RNA, 20 nt, Artificial Sequence
  Synthetic
gcagccuccuuaaaaaucua

SEQ ID NO: 502671 - RNA, 21 nt, Artificial Sequence
  Synthetic
agcagccuccuuaaaaaucua

SEQ ID NO: 502672 - RNA, 22 nt, Artificial Sequence
  Synthetic
aagcagccuccuuaaaaaucua

SEQ ID NO: 502673 - RNA, 23 nt, Artificial Sequence
  Synthetic
gaagcagccuccuuaaaaaucua

SEQ ID NO: 502674 - RNA, 24 nt, Artificial Sequence
  Synthetic
ugaagcagccuccuuaaaaaucua

SEQ ID NO: 502675 - RNA, 18 nt, Artificial Sequence
  Synthetic
cacaaacuagaaaaucua

SEQ ID NO: 502676 - RNA, 19 nt, Artificial Sequence
  Synthetic
acacaaacuagaaaaucua

SEQ ID NO: 502677 - RNA, 20 nt, Artificial Sequence
  Synthetic
cacacaaacuagaaaaucua

SEQ ID NO: 502678 - RNA, 21 nt, Artificial Sequence
  Synthetic
gcacacaaacuagaaaaucua

SEQ ID NO: 502679 - RNA, 22 nt, Artificial Sequence
  Synthetic
ugcacacaaacuagaaaaucua

SEQ ID NO: 502680 - RNA, 23 nt, Artificial Sequence
  Synthetic
augcacacaaacuagaaaaucua

SEQ ID NO: 502681 - RNA, 24 nt, Artificial Sequence
  Synthetic
uaugcacacaaacuagaaaaucua

SEQ ID NO: 502682 - RNA, 18 nt, Artificial Sequence
  Synthetic
gaaucaaaaccaaaucua

SEQ ID NO: 502683 - RNA, 19 nt, Artificial Sequence
  Synthetic
ggaaucaaaaccaaaucua

SEQ ID NO: 502684 - RNA, 20 nt, Artificial Sequence
  Synthetic
aggaaucaaaaccaaaucua

SEQ ID NO: 502685 - RNA, 21 nt, Artificial Sequence
  Synthetic
gaggaaucaaaaccaaaucua

SEQ ID NO: 502686 - RNA, 22 nt, Artificial Sequence
  Synthetic
ggaggaaucaaaaccaaaucua

SEQ ID NO: 502687 - RNA, 23 nt, Artificial Sequence
  Synthetic
aggaggaaucaaaaccaaaucua

SEQ ID NO: 502688 - RNA, 24 nt, Artificial Sequence
  Synthetic
caggaggaaucaaaaccaaaucua

SEQ ID NO: 502689 - RNA, 18 nt, Artificial Sequence
  Synthetic
aacauuacuccaaaucua

SEQ ID NO: 502690 - RNA, 19 nt, Artificial Sequence
  Synthetic
gaacauuacuccaaaucua

SEQ ID NO: 502691 - RNA, 20 nt, Artificial Sequence
  Synthetic
ugaacauuacuccaaaucua

SEQ ID NO: 502692 - RNA, 21 nt, Artificial Sequence
  Synthetic
cugaacauuacuccaaaucua

SEQ ID NO: 502693 - RNA, 22 nt, Artificial Sequence
  Synthetic
ccugaacauuacuccaaaucua

SEQ ID NO: 502694 - RNA, 23 nt, Artificial Sequence
  Synthetic
uccugaacauuacuccaaaucua

SEQ ID NO: 502695 - RNA, 24 nt, Artificial Sequence
  Synthetic
uuccugaacauuacuccaaaucua

SEQ ID NO: 502696 - RNA, 18 nt, Artificial Sequence
  Synthetic
cucucuagggcaaaucua

SEQ ID NO: 502697 - RNA, 19 nt, Artificial Sequence
  Synthetic
gcucucuagggcaaaucua

SEQ ID NO: 502698 - RNA, 20 nt, Artificial Sequence
  Synthetic
ugcucucuagggcaaaucua

SEQ ID NO: 502699 - RNA, 21 nt, Artificial Sequence
  Synthetic
uugcucucuagggcaaaucua

SEQ ID NO: 502700 - RNA, 22 nt, Artificial Sequence
  Synthetic
auugcucucuagggcaaaucua

SEQ ID NO: 502701 - RNA, 23 nt, Artificial Sequence
  Synthetic
cauugcucucuagggcaaaucua

SEQ ID NO: 502702 - RNA, 24 nt, Artificial Sequence
  Synthetic
ucauugcucucuagggcaaaucua

SEQ ID NO: 502703 - RNA, 18 nt, Artificial Sequence
  Synthetic
caucacuggugaaaucua

SEQ ID NO: 502704 - RNA, 19 nt, Artificial Sequence
  Synthetic
ucaucacuggugaaaucua

SEQ ID NO: 502705 - RNA, 20 nt, Artificial Sequence
  Synthetic
gucaucacuggugaaaucua

SEQ ID NO: 502706 - RNA, 21 nt, Artificial Sequence
  Synthetic
ugucaucacuggugaaaucua

SEQ ID NO: 502707 - RNA, 22 nt, Artificial Sequence
  Synthetic
augucaucacuggugaaaucua

SEQ ID NO: 502708 - RNA, 23 nt, Artificial Sequence
  Synthetic
aaugucaucacuggugaaaucua

SEQ ID NO: 502709 - RNA, 24 nt, Artificial Sequence
  Synthetic
aaaugucaucacuggugaaaucua

SEQ ID NO: 502710 - RNA, 18 nt, Artificial Sequence
  Synthetic
aauaugcaaauaaaucua

SEQ ID NO: 502711 - RNA, 19 nt, Artificial Sequence
  Synthetic
caauaugcaaauaaaucua

SEQ ID NO: 502712 - RNA, 20 nt, Artificial Sequence
  Synthetic
acaauaugcaaauaaaucua

SEQ ID NO: 502713 - RNA, 21 nt, Artificial Sequence
  Synthetic
gacaauaugcaaauaaaucua

SEQ ID NO: 502714 - RNA, 22 nt, Artificial Sequence
  Synthetic
agacaauaugcaaauaaaucua

SEQ ID NO: 502715 - RNA, 23 nt, Artificial Sequence
  Synthetic
uagacaauaugcaaauaaaucua

SEQ ID NO: 502716 - RNA, 24 nt, Artificial Sequence
  Synthetic
uuagacaauaugcaaauaaaucua

SEQ ID NO: 502717 - RNA, 18 nt, Artificial Sequence
  Synthetic
gagauugcauuaaaucua

SEQ ID NO: 502718 - RNA, 19 nt, Artificial Sequence
  Synthetic
ggagauugcauuaaaucua

SEQ ID NO: 502719 - RNA, 20 nt, Artificial Sequence
  Synthetic
uggagauugcauuaaaucua

SEQ ID NO: 502720 - RNA, 21 nt, Artificial Sequence
  Synthetic
auggagauugcauuaaaucua

SEQ ID NO: 502721 - RNA, 22 nt, Artificial Sequence
  Synthetic
gauggagauugcauuaaaucua

SEQ ID NO: 502722 - RNA, 23 nt, Artificial Sequence
  Synthetic
cgauggagauugcauuaaaucua

SEQ ID NO: 502723 - RNA, 24 nt, Artificial Sequence
  Synthetic
ucgauggagauugcauuaaaucua

SEQ ID NO: 502724 - RNA, 18 nt, Artificial Sequence
  Synthetic
ugugacgcuuacaaucua

SEQ ID NO: 502725 - RNA, 19 nt, Artificial Sequence
  Synthetic
uugugacgcuuacaaucua

SEQ ID NO: 502726 - RNA, 20 nt, Artificial Sequence
  Synthetic
uuugugacgcuuacaaucua

SEQ ID NO: 502727 - RNA, 21 nt, Artificial Sequence
  Synthetic
uuuugugacgcuuacaaucua

SEQ ID NO: 502728 - RNA, 22 nt, Artificial Sequence
  Synthetic
cuuuugugacgcuuacaaucua

SEQ ID NO: 502729 - RNA, 23 nt, Artificial Sequence
  Synthetic
gcuuuugugacgcuuacaaucua

SEQ ID NO: 502730 - RNA, 24 nt, Artificial Sequence
  Synthetic
ugcuuuugugacgcuuacaaucua

SEQ ID NO: 502731 - RNA, 18 nt, Artificial Sequence
  Synthetic
gaaaacaguaccaaucua

SEQ ID NO: 502732 - RNA, 19 nt, Artificial Sequence
  Synthetic
ugaaaacaguaccaaucua

SEQ ID NO: 502733 - RNA, 20 nt, Artificial Sequence
  Synthetic
augaaaacaguaccaaucua

SEQ ID NO: 502734 - RNA, 21 nt, Artificial Sequence
  Synthetic
uaugaaaacaguaccaaucua

SEQ ID NO: 502735 - RNA, 22 nt, Artificial Sequence
  Synthetic
cuaugaaaacaguaccaaucua

SEQ ID NO: 502736 - RNA, 23 nt, Artificial Sequence
  Synthetic
acuaugaaaacaguaccaaucua

SEQ ID NO: 502737 - RNA, 24 nt, Artificial Sequence
  Synthetic
aacuaugaaaacaguaccaaucua

SEQ ID NO: 502738 - RNA, 18 nt, Artificial Sequence
  Synthetic
cauuaacauugcaaucua

SEQ ID NO: 502739 - RNA, 19 nt, Artificial Sequence
  Synthetic
gcauuaacauugcaaucua

SEQ ID NO: 502740 - RNA, 20 nt, Artificial Sequence
  Synthetic
cgcauuaacauugcaaucua

SEQ ID NO: 502741 - RNA, 21 nt, Artificial Sequence
  Synthetic
acgcauuaacauugcaaucua

SEQ ID NO: 502742 - RNA, 22 nt, Artificial Sequence
  Synthetic
uacgcauuaacauugcaaucua

SEQ ID NO: 502743 - RNA, 23 nt, Artificial Sequence
  Synthetic
auacgcauuaacauugcaaucua

SEQ ID NO: 502744 - RNA, 24 nt, Artificial Sequence
  Synthetic
gauacgcauuaacauugcaaucua

SEQ ID NO: 502745 - RNA, 18 nt, Artificial Sequence
  Synthetic
guuacaagcaagaaucua

SEQ ID NO: 502746 - RNA, 19 nt, Artificial Sequence
  Synthetic
aguuacaagcaagaaucua

SEQ ID NO: 502747 - RNA, 20 nt, Artificial Sequence
  Synthetic
caguuacaagcaagaaucua

SEQ ID NO: 502748 - RNA, 21 nt, Artificial Sequence
  Synthetic
ucaguuacaagcaagaaucua

SEQ ID NO: 502749 - RNA, 22 nt, Artificial Sequence
  Synthetic
aucaguuacaagcaagaaucua

SEQ ID NO: 502750 - RNA, 23 nt, Artificial Sequence
  Synthetic
caucaguuacaagcaagaaucua

SEQ ID NO: 502751 - RNA, 24 nt, Artificial Sequence
  Synthetic
ucaucaguuacaagcaagaaucua

SEQ ID NO: 502752 - RNA, 18 nt, Artificial Sequence
  Synthetic
ucuaauauucagaaucua

SEQ ID NO: 502753 - RNA, 19 nt, Artificial Sequence
  Synthetic
gucuaauauucagaaucua

SEQ ID NO: 502754 - RNA, 20 nt, Artificial Sequence
  Synthetic
ggucuaauauucagaaucua

SEQ ID NO: 502755 - RNA, 21 nt, Artificial Sequence
  Synthetic
aggucuaauauucagaaucua

SEQ ID NO: 502756 - RNA, 22 nt, Artificial Sequence
  Synthetic
aaggucuaauauucagaaucua

SEQ ID NO: 502757 - RNA, 23 nt, Artificial Sequence
  Synthetic
aaaggucuaauauucagaaucua

SEQ ID NO: 502758 - RNA, 24 nt, Artificial Sequence
  Synthetic
caaaggucuaauauucagaaucua

SEQ ID NO: 502759 - RNA, 18 nt, Artificial Sequence
  Synthetic
ccagagagaaggaaucua

SEQ ID NO: 502760 - RNA, 19 nt, Artificial Sequence
  Synthetic
cccagagagaaggaaucua

SEQ ID NO: 502761 - RNA, 20 nt, Artificial Sequence
  Synthetic
gcccagagagaaggaaucua

SEQ ID NO: 502762 - RNA, 21 nt, Artificial Sequence
  Synthetic
ugcccagagagaaggaaucua

SEQ ID NO: 502763 - RNA, 22 nt, Artificial Sequence
  Synthetic
cugcccagagagaaggaaucua

SEQ ID NO: 502764 - RNA, 23 nt, Artificial Sequence
  Synthetic
ccugcccagagagaaggaaucua

SEQ ID NO: 502765 - RNA, 24 nt, Artificial Sequence
  Synthetic
cccugcccagagagaaggaaucua

SEQ ID NO: 502766 - RNA, 18 nt, Artificial Sequence
  Synthetic
gaaggaggaaggaaucua

SEQ ID NO: 502767 - RNA, 19 nt, Artificial Sequence
  Synthetic
ggaaggaggaaggaaucua

SEQ ID NO: 502768 - RNA, 20 nt, Artificial Sequence
  Synthetic
aggaaggaggaaggaaucua

SEQ ID NO: 502769 - RNA, 21 nt, Artificial Sequence
  Synthetic
aaggaaggaggaaggaaucua

SEQ ID NO: 502770 - RNA, 22 nt, Artificial Sequence
  Synthetic
gaaggaaggaggaaggaaucua

SEQ ID NO: 502771 - RNA, 23 nt, Artificial Sequence
  Synthetic
ggaaggaaggaggaaggaaucua

SEQ ID NO: 502772 - RNA, 24 nt, Artificial Sequence
  Synthetic
gggaaggaaggaggaaggaaucua

SEQ ID NO: 502773 - RNA, 18 nt, Artificial Sequence
  Synthetic
agggagggagggaaucua

SEQ ID NO: 502774 - RNA, 19 nt, Artificial Sequence
  Synthetic
gagggagggagggaaucua

SEQ ID NO: 502775 - RNA, 20 nt, Artificial Sequence
  Synthetic
ggagggagggagggaaucua

SEQ ID NO: 502776 - RNA, 21 nt, Artificial Sequence
  Synthetic
gggagggagggagggaaucua

SEQ ID NO: 502777 - RNA, 22 nt, Artificial Sequence
  Synthetic
agggagggagggagggaaucua

SEQ ID NO: 502778 - RNA, 23 nt, Artificial Sequence
  Synthetic
gagggagggagggagggaaucua

SEQ ID NO: 502779 - RNA, 24 nt, Artificial Sequence
  Synthetic
ggagggagggagggagggaaucua

SEQ ID NO: 502780 - RNA, 18 nt, Artificial Sequence
  Synthetic
cagggugaguggaaucua

SEQ ID NO: 502781 - RNA, 19 nt, Artificial Sequence
  Synthetic
ccagggugaguggaaucua

SEQ ID NO: 502782 - RNA, 20 nt, Artificial Sequence
  Synthetic
accagggugaguggaaucua

SEQ ID NO: 502783 - RNA, 21 nt, Artificial Sequence
  Synthetic
caccagggugaguggaaucua

SEQ ID NO: 502784 - RNA, 22 nt, Artificial Sequence
  Synthetic
acaccagggugaguggaaucua

SEQ ID NO: 502785 - RNA, 23 nt, Artificial Sequence
  Synthetic
gacaccagggugaguggaaucua

SEQ ID NO: 502786 - RNA, 24 nt, Artificial Sequence
  Synthetic
ggacaccagggugaguggaaucua

SEQ ID NO: 502787 - RNA, 18 nt, Artificial Sequence
  Synthetic
guuuauucugugaaucua

SEQ ID NO: 502788 - RNA, 19 nt, Artificial Sequence
  Synthetic
uguuuauucugugaaucua

SEQ ID NO: 502789 - RNA, 20 nt, Artificial Sequence
  Synthetic
guguuuauucugugaaucua

SEQ ID NO: 502790 - RNA, 21 nt, Artificial Sequence
  Synthetic
uguguuuauucugugaaucua

SEQ ID NO: 502791 - RNA, 22 nt, Artificial Sequence
  Synthetic
cuguguuuauucugugaaucua

SEQ ID NO: 502792 - RNA, 23 nt, Artificial Sequence
  Synthetic
ccuguguuuauucugugaaucua

SEQ ID NO: 502793 - RNA, 24 nt, Artificial Sequence
  Synthetic
uccuguguuuauucugugaaucua

SEQ ID NO: 502794 - RNA, 18 nt, Artificial Sequence
  Synthetic
ugauucccuuugaaucua

SEQ ID NO: 502795 - RNA, 19 nt, Artificial Sequence
  Synthetic
uugauucccuuugaaucua

SEQ ID NO: 502796 - RNA, 20 nt, Artificial Sequence
  Synthetic
auugauucccuuugaaucua

SEQ ID NO: 502797 - RNA, 21 nt, Artificial Sequence
  Synthetic
aauugauucccuuugaaucua

SEQ ID NO: 502798 - RNA, 22 nt, Artificial Sequence
  Synthetic
caauugauucccuuugaaucua

SEQ ID NO: 502799 - RNA, 23 nt, Artificial Sequence
  Synthetic
ucaauugauucccuuugaaucua

SEQ ID NO: 502800 - RNA, 24 nt, Artificial Sequence
  Synthetic
cucaauugauucccuuugaaucua

SEQ ID NO: 502801 - RNA, 18 nt, Artificial Sequence
  Synthetic
gugccccauaauaaucua

SEQ ID NO: 502802 - RNA, 19 nt, Artificial Sequence
  Synthetic
agugccccauaauaaucua

SEQ ID NO: 502803 - RNA, 20 nt, Artificial Sequence
  Synthetic
gagugccccauaauaaucua

SEQ ID NO: 502804 - RNA, 21 nt, Artificial Sequence
  Synthetic
ggagugccccauaauaaucua

SEQ ID NO: 502805 - RNA, 22 nt, Artificial Sequence
  Synthetic
aggagugccccauaauaaucua

SEQ ID NO: 502806 - RNA, 23 nt, Artificial Sequence
  Synthetic
caggagugccccauaauaaucua

SEQ ID NO: 502807 - RNA, 24 nt, Artificial Sequence
  Synthetic
gcaggagugccccauaauaaucua

SEQ ID NO: 502808 - RNA, 18 nt, Artificial Sequence
  Synthetic
uuauucacuguuaaucua

SEQ ID NO: 502809 - RNA, 19 nt, Artificial Sequence
  Synthetic
auuauucacuguuaaucua

SEQ ID NO: 502810 - RNA, 20 nt, Artificial Sequence
  Synthetic
gauuauucacuguuaaucua

SEQ ID NO: 502811 - RNA, 21 nt, Artificial Sequence
  Synthetic
ugauuauucacuguuaaucua

SEQ ID NO: 502812 - RNA, 22 nt, Artificial Sequence
  Synthetic
cugauuauucacuguuaaucua

SEQ ID NO: 502813 - RNA, 23 nt, Artificial Sequence
  Synthetic
ucugauuauucacuguuaaucua

SEQ ID NO: 502814 - RNA, 24 nt, Artificial Sequence
  Synthetic
aucugauuauucacuguuaaucua

SEQ ID NO: 502815 - RNA, 18 nt, Artificial Sequence
  Synthetic
aaugaaggcagacaucua

SEQ ID NO: 502816 - RNA, 19 nt, Artificial Sequence
  Synthetic
aaaugaaggcagacaucua

SEQ ID NO: 502817 - RNA, 20 nt, Artificial Sequence
  Synthetic
aaaaugaaggcagacaucua

SEQ ID NO: 502818 - RNA, 21 nt, Artificial Sequence
  Synthetic
gaaaaugaaggcagacaucua

SEQ ID NO: 502819 - RNA, 22 nt, Artificial Sequence
  Synthetic
ugaaaaugaaggcagacaucua

SEQ ID NO: 502820 - RNA, 23 nt, Artificial Sequence
  Synthetic
gugaaaaugaaggcagacaucua

SEQ ID NO: 502821 - RNA, 24 nt, Artificial Sequence
  Synthetic
ugugaaaaugaaggcagacaucua

SEQ ID NO: 502822 - RNA, 18 nt, Artificial Sequence
  Synthetic
agaccuaauagacaucua

SEQ ID NO: 502823 - RNA, 19 nt, Artificial Sequence
  Synthetic
gagaccuaauagacaucua

SEQ ID NO: 502824 - RNA, 20 nt, Artificial Sequence
  Synthetic
ggagaccuaauagacaucua

SEQ ID NO: 502825 - RNA, 21 nt, Artificial Sequence
  Synthetic
aggagaccuaauagacaucua

SEQ ID NO: 502826 - RNA, 22 nt, Artificial Sequence
  Synthetic
aaggagaccuaauagacaucua

SEQ ID NO: 502827 - RNA, 23 nt, Artificial Sequence
  Synthetic
caaggagaccuaauagacaucua

SEQ ID NO: 502828 - RNA, 24 nt, Artificial Sequence
  Synthetic
ccaaggagaccuaauagacaucua

SEQ ID NO: 502829 - RNA, 18 nt, Artificial Sequence
  Synthetic
uccaauucaauacaucua

SEQ ID NO: 502830 - RNA, 19 nt, Artificial Sequence
  Synthetic
uuccaauucaauacaucua

SEQ ID NO: 502831 - RNA, 20 nt, Artificial Sequence
  Synthetic
uuuccaauucaauacaucua

SEQ ID NO: 502832 - RNA, 21 nt, Artificial Sequence
  Synthetic
cuuuccaauucaauacaucua

SEQ ID NO: 502833 - RNA, 22 nt, Artificial Sequence
  Synthetic
gcuuuccaauucaauacaucua

SEQ ID NO: 502834 - RNA, 23 nt, Artificial Sequence
  Synthetic
agcuuuccaauucaauacaucua

SEQ ID NO: 502835 - RNA, 24 nt, Artificial Sequence
  Synthetic
uagcuuuccaauucaauacaucua

SEQ ID NO: 502836 - RNA, 18 nt, Artificial Sequence
  Synthetic
agccaggcgcuacaucua

SEQ ID NO: 502837 - RNA, 19 nt, Artificial Sequence
  Synthetic
aagccaggcgcuacaucua

SEQ ID NO: 502838 - RNA, 20 nt, Artificial Sequence
  Synthetic
caagccaggcgcuacaucua

SEQ ID NO: 502839 - RNA, 21 nt, Artificial Sequence
  Synthetic
acaagccaggcgcuacaucua

SEQ ID NO: 502840 - RNA, 22 nt, Artificial Sequence
  Synthetic
uacaagccaggcgcuacaucua

SEQ ID NO: 502841 - RNA, 23 nt, Artificial Sequence
  Synthetic
auacaagccaggcgcuacaucua

SEQ ID NO: 502842 - RNA, 24 nt, Artificial Sequence
  Synthetic
cauacaagccaggcgcuacaucua

SEQ ID NO: 502843 - RNA, 18 nt, Artificial Sequence
  Synthetic
gcucuuguccagcaucua

SEQ ID NO: 502844 - RNA, 19 nt, Artificial Sequence
  Synthetic
agcucuuguccagcaucua

SEQ ID NO: 502845 - RNA, 20 nt, Artificial Sequence
  Synthetic
gagcucuuguccagcaucua

SEQ ID NO: 502846 - RNA, 21 nt, Artificial Sequence
  Synthetic
ugagcucuuguccagcaucua

SEQ ID NO: 502847 - RNA, 22 nt, Artificial Sequence
  Synthetic
cugagcucuuguccagcaucua

SEQ ID NO: 502848 - RNA, 23 nt, Artificial Sequence
  Synthetic
ccugagcucuuguccagcaucua

SEQ ID NO: 502849 - RNA, 24 nt, Artificial Sequence
  Synthetic
uccugagcucuuguccagcaucua

SEQ ID NO: 502850 - RNA, 18 nt, Artificial Sequence
  Synthetic
agcaguuagaggcaucua

SEQ ID NO: 502851 - RNA, 19 nt, Artificial Sequence
  Synthetic
cagcaguuagaggcaucua

SEQ ID NO: 502852 - RNA, 20 nt, Artificial Sequence
  Synthetic
ccagcaguuagaggcaucua

SEQ ID NO: 502853 - RNA, 21 nt, Artificial Sequence
  Synthetic
gccagcaguuagaggcaucua

SEQ ID NO: 502854 - RNA, 22 nt, Artificial Sequence
  Synthetic
agccagcaguuagaggcaucua

SEQ ID NO: 502855 - RNA, 23 nt, Artificial Sequence
  Synthetic
gagccagcaguuagaggcaucua

SEQ ID NO: 502856 - RNA, 24 nt, Artificial Sequence
  Synthetic
ggagccagcaguuagaggcaucua

SEQ ID NO: 502857 - RNA, 18 nt, Artificial Sequence
  Synthetic
gaguacuauuggcaucua

SEQ ID NO: 502858 - RNA, 19 nt, Artificial Sequence
  Synthetic
agaguacuauuggcaucua

SEQ ID NO: 502859 - RNA, 20 nt, Artificial Sequence
  Synthetic
gagaguacuauuggcaucua

SEQ ID NO: 502860 - RNA, 21 nt, Artificial Sequence
  Synthetic
agagaguacuauuggcaucua

SEQ ID NO: 502861 - RNA, 22 nt, Artificial Sequence
  Synthetic
aagagaguacuauuggcaucua

SEQ ID NO: 502862 - RNA, 23 nt, Artificial Sequence
  Synthetic
gaagagaguacuauuggcaucua

SEQ ID NO: 502863 - RNA, 24 nt, Artificial Sequence
  Synthetic
agaagagaguacuauuggcaucua

SEQ ID NO: 502864 - RNA, 18 nt, Artificial Sequence
  Synthetic
augcaaugaugucaucua

SEQ ID NO: 502865 - RNA, 19 nt, Artificial Sequence
  Synthetic
aaugcaaugaugucaucua

SEQ ID NO: 502866 - RNA, 20 nt, Artificial Sequence
  Synthetic
caaugcaaugaugucaucua

SEQ ID NO: 502867 - RNA, 21 nt, Artificial Sequence
  Synthetic
ccaaugcaaugaugucaucua

SEQ ID NO: 502868 - RNA, 22 nt, Artificial Sequence
  Synthetic
accaaugcaaugaugucaucua

SEQ ID NO: 502869 - RNA, 23 nt, Artificial Sequence
  Synthetic
caccaaugcaaugaugucaucua

SEQ ID NO: 502870 - RNA, 24 nt, Artificial Sequence
  Synthetic
acaccaaugcaaugaugucaucua

SEQ ID NO: 502871 - RNA, 18 nt, Artificial Sequence
  Synthetic
auuacuuuauuucaucua

SEQ ID NO: 502872 - RNA, 19 nt, Artificial Sequence
  Synthetic
uauuacuuuauuucaucua

SEQ ID NO: 502873 - RNA, 20 nt, Artificial Sequence
  Synthetic
uuauuacuuuauuucaucua

SEQ ID NO: 502874 - RNA, 21 nt, Artificial Sequence
  Synthetic
uuuauuacuuuauuucaucua

SEQ ID NO: 502875 - RNA, 22 nt, Artificial Sequence
  Synthetic
auuuauuacuuuauuucaucua

SEQ ID NO: 502876 - RNA, 23 nt, Artificial Sequence
  Synthetic
cauuuauuacuuuauuucaucua

SEQ ID NO: 502877 - RNA, 24 nt, Artificial Sequence
  Synthetic
ucauuuauuacuuuauuucaucua

SEQ ID NO: 502878 - RNA, 18 nt, Artificial Sequence
  Synthetic
gaguguccguuucaucua

SEQ ID NO: 502879 - RNA, 19 nt, Artificial Sequence
  Synthetic
agaguguccguuucaucua

SEQ ID NO: 502880 - RNA, 20 nt, Artificial Sequence
  Synthetic
uagaguguccguuucaucua

SEQ ID NO: 502881 - RNA, 21 nt, Artificial Sequence
  Synthetic
uuagaguguccguuucaucua

SEQ ID NO: 502882 - RNA, 22 nt, Artificial Sequence
  Synthetic
cuuagaguguccguuucaucua

SEQ ID NO: 502883 - RNA, 23 nt, Artificial Sequence
  Synthetic
ccuuagaguguccguuucaucua

SEQ ID NO: 502884 - RNA, 24 nt, Artificial Sequence
  Synthetic
cccuuagaguguccguuucaucua

SEQ ID NO: 502885 - RNA, 18 nt, Artificial Sequence
  Synthetic
gauuuucucugagaucua

SEQ ID NO: 502886 - RNA, 19 nt, Artificial Sequence
  Synthetic
ggauuuucucugagaucua

SEQ ID NO: 502887 - RNA, 20 nt, Artificial Sequence
  Synthetic
cggauuuucucugagaucua

SEQ ID NO: 502888 - RNA, 21 nt, Artificial Sequence
  Synthetic
ucggauuuucucugagaucua

SEQ ID NO: 502889 - RNA, 22 nt, Artificial Sequence
  Synthetic
uucggauuuucucugagaucua

SEQ ID NO: 502890 - RNA, 23 nt, Artificial Sequence
  Synthetic
uuucggauuuucucugagaucua

SEQ ID NO: 502891 - RNA, 24 nt, Artificial Sequence
  Synthetic
auuucggauuuucucugagaucua

SEQ ID NO: 502892 - RNA, 18 nt, Artificial Sequence
  Synthetic
uuaaugaagacggaucua

SEQ ID NO: 502893 - RNA, 19 nt, Artificial Sequence
  Synthetic
uuuaaugaagacggaucua

SEQ ID NO: 502894 - RNA, 20 nt, Artificial Sequence
  Synthetic
auuuaaugaagacggaucua

SEQ ID NO: 502895 - RNA, 21 nt, Artificial Sequence
  Synthetic
uauuuaaugaagacggaucua

SEQ ID NO: 502896 - RNA, 22 nt, Artificial Sequence
  Synthetic
auauuuaaugaagacggaucua

SEQ ID NO: 502897 - RNA, 23 nt, Artificial Sequence
  Synthetic
uauauuuaaugaagacggaucua

SEQ ID NO: 502898 - RNA, 24 nt, Artificial Sequence
  Synthetic
auauauuuaaugaagacggaucua

SEQ ID NO: 502899 - RNA, 18 nt, Artificial Sequence
  Synthetic
ugugcaugaagggaucua

SEQ ID NO: 502900 - RNA, 19 nt, Artificial Sequence
  Synthetic
uugugcaugaagggaucua

SEQ ID NO: 502901 - RNA, 20 nt, Artificial Sequence
  Synthetic
uuugugcaugaagggaucua

SEQ ID NO: 502902 - RNA, 21 nt, Artificial Sequence
  Synthetic
cuuugugcaugaagggaucua

SEQ ID NO: 502903 - RNA, 22 nt, Artificial Sequence
  Synthetic
ucuuugugcaugaagggaucua

SEQ ID NO: 502904 - RNA, 23 nt, Artificial Sequence
  Synthetic
aucuuugugcaugaagggaucua

SEQ ID NO: 502905 - RNA, 24 nt, Artificial Sequence
  Synthetic
caucuuugugcaugaagggaucua

SEQ ID NO: 502906 - RNA, 18 nt, Artificial Sequence
  Synthetic
acggacaaaugggaucua

SEQ ID NO: 502907 - RNA, 19 nt, Artificial Sequence
  Synthetic
aacggacaaaugggaucua

SEQ ID NO: 502908 - RNA, 20 nt, Artificial Sequence
  Synthetic
aaacggacaaaugggaucua

SEQ ID NO: 502909 - RNA, 21 nt, Artificial Sequence
  Synthetic
aaaacggacaaaugggaucua

SEQ ID NO: 502910 - RNA, 22 nt, Artificial Sequence
  Synthetic
caaaacggacaaaugggaucua

SEQ ID NO: 502911 - RNA, 23 nt, Artificial Sequence
  Synthetic
ccaaaacggacaaaugggaucua

SEQ ID NO: 502912 - RNA, 24 nt, Artificial Sequence
  Synthetic
gccaaaacggacaaaugggaucua

SEQ ID NO: 502913 - RNA, 18 nt, Artificial Sequence
  Synthetic
auugacaaaugggaucua

SEQ ID NO: 502914 - RNA, 19 nt, Artificial Sequence
  Synthetic
aauugacaaaugggaucua

SEQ ID NO: 502915 - RNA, 20 nt, Artificial Sequence
  Synthetic
aaauugacaaaugggaucua

SEQ ID NO: 502916 - RNA, 21 nt, Artificial Sequence
  Synthetic
aaaauugacaaaugggaucua

SEQ ID NO: 502917 - RNA, 22 nt, Artificial Sequence
  Synthetic
caaaauugacaaaugggaucua

SEQ ID NO: 502918 - RNA, 23 nt, Artificial Sequence
  Synthetic
ccaaaauugacaaaugggaucua

SEQ ID NO: 502919 - RNA, 24 nt, Artificial Sequence
  Synthetic
gccaaaauugacaaaugggaucua

SEQ ID NO: 502920 - RNA, 18 nt, Artificial Sequence
  Synthetic
aaggacaggguggaucua

SEQ ID NO: 502921 - RNA, 19 nt, Artificial Sequence
  Synthetic
uaaggacaggguggaucua

SEQ ID NO: 502922 - RNA, 20 nt, Artificial Sequence
  Synthetic
auaaggacaggguggaucua

SEQ ID NO: 502923 - RNA, 21 nt, Artificial Sequence
  Synthetic
gauaaggacaggguggaucua

SEQ ID NO: 502924 - RNA, 22 nt, Artificial Sequence
  Synthetic
ggauaaggacaggguggaucua

SEQ ID NO: 502925 - RNA, 23 nt, Artificial Sequence
  Synthetic
uggauaaggacaggguggaucua

SEQ ID NO: 502926 - RNA, 24 nt, Artificial Sequence
  Synthetic
cuggauaaggacaggguggaucua

SEQ ID NO: 502927 - RNA, 18 nt, Artificial Sequence
  Synthetic
ucaugcaaaaaugaucua

SEQ ID NO: 502928 - RNA, 19 nt, Artificial Sequence
  Synthetic
uucaugcaaaaaugaucua

SEQ ID NO: 502929 - RNA, 20 nt, Artificial Sequence
  Synthetic
cuucaugcaaaaaugaucua

SEQ ID NO: 502930 - RNA, 21 nt, Artificial Sequence
  Synthetic
gcuucaugcaaaaaugaucua

SEQ ID NO: 502931 - RNA, 22 nt, Artificial Sequence
  Synthetic
agcuucaugcaaaaaugaucua

SEQ ID NO: 502932 - RNA, 23 nt, Artificial Sequence
  Synthetic
aagcuucaugcaaaaaugaucua

SEQ ID NO: 502933 - RNA, 24 nt, Artificial Sequence
  Synthetic
gaagcuucaugcaaaaaugaucua

SEQ ID NO: 502934 - RNA, 18 nt, Artificial Sequence
  Synthetic
cucccuauaagugaucua

SEQ ID NO: 502935 - RNA, 19 nt, Artificial Sequence
  Synthetic
acucccuauaagugaucua

SEQ ID NO: 502936 - RNA, 20 nt, Artificial Sequence
  Synthetic
aacucccuauaagugaucua

SEQ ID NO: 502937 - RNA, 21 nt, Artificial Sequence
  Synthetic
gaacucccuauaagugaucua

SEQ ID NO: 502938 - RNA, 22 nt, Artificial Sequence
  Synthetic
agaacucccuauaagugaucua

SEQ ID NO: 502939 - RNA, 23 nt, Artificial Sequence
  Synthetic
cagaacucccuauaagugaucua

SEQ ID NO: 502940 - RNA, 24 nt, Artificial Sequence
  Synthetic
ccagaacucccuauaagugaucua

SEQ ID NO: 502941 - RNA, 18 nt, Artificial Sequence
  Synthetic
ugucagauaaaauaucua

SEQ ID NO: 502942 - RNA, 19 nt, Artificial Sequence
  Synthetic
cugucagauaaaauaucua

SEQ ID NO: 502943 - RNA, 20 nt, Artificial Sequence
  Synthetic
ucugucagauaaaauaucua

SEQ ID NO: 502944 - RNA, 21 nt, Artificial Sequence
  Synthetic
uucugucagauaaaauaucua

SEQ ID NO: 502945 - RNA, 22 nt, Artificial Sequence
  Synthetic
uuucugucagauaaaauaucua

SEQ ID NO: 502946 - RNA, 23 nt, Artificial Sequence
  Synthetic
uuuucugucagauaaaauaucua

SEQ ID NO: 502947 - RNA, 24 nt, Artificial Sequence
  Synthetic
cuuuucugucagauaaaauaucua

SEQ ID NO: 502948 - RNA, 18 nt, Artificial Sequence
  Synthetic
uauaaaaucaaauaucua

SEQ ID NO: 502949 - RNA, 19 nt, Artificial Sequence
  Synthetic
cuauaaaaucaaauaucua

SEQ ID NO: 502950 - RNA, 20 nt, Artificial Sequence
  Synthetic
acuauaaaaucaaauaucua

SEQ ID NO: 502951 - RNA, 21 nt, Artificial Sequence
  Synthetic
uacuauaaaaucaaauaucua

SEQ ID NO: 502952 - RNA, 22 nt, Artificial Sequence
  Synthetic
guacuauaaaaucaaauaucua

SEQ ID NO: 502953 - RNA, 23 nt, Artificial Sequence
  Synthetic
gguacuauaaaaucaaauaucua

SEQ ID NO: 502954 - RNA, 24 nt, Artificial Sequence
  Synthetic
agguacuauaaaaucaaauaucua

SEQ ID NO: 502955 - RNA, 18 nt, Artificial Sequence
  Synthetic
auuuccccacaauaucua

SEQ ID NO: 502956 - RNA, 19 nt, Artificial Sequence
  Synthetic
cauuuccccacaauaucua

SEQ ID NO: 502957 - RNA, 20 nt, Artificial Sequence
  Synthetic
ccauuuccccacaauaucua

SEQ ID NO: 502958 - RNA, 21 nt, Artificial Sequence
  Synthetic
gccauuuccccacaauaucua

SEQ ID NO: 502959 - RNA, 22 nt, Artificial Sequence
  Synthetic
ugccauuuccccacaauaucua

SEQ ID NO: 502960 - RNA, 23 nt, Artificial Sequence
  Synthetic
cugccauuuccccacaauaucua

SEQ ID NO: 502961 - RNA, 24 nt, Artificial Sequence
  Synthetic
gcugccauuuccccacaauaucua

SEQ ID NO: 502962 - RNA, 18 nt, Artificial Sequence
  Synthetic
uuuccacuuggauaucua

SEQ ID NO: 502963 - RNA, 19 nt, Artificial Sequence
  Synthetic
auuuccacuuggauaucua

SEQ ID NO: 502964 - RNA, 20 nt, Artificial Sequence
  Synthetic
cauuuccacuuggauaucua

SEQ ID NO: 502965 - RNA, 21 nt, Artificial Sequence
  Synthetic
gcauuuccacuuggauaucua

SEQ ID NO: 502966 - RNA, 22 nt, Artificial Sequence
  Synthetic
agcauuuccacuuggauaucua

SEQ ID NO: 502967 - RNA, 23 nt, Artificial Sequence
  Synthetic
cagcauuuccacuuggauaucua

SEQ ID NO: 502968 - RNA, 24 nt, Artificial Sequence
  Synthetic
ccagcauuuccacuuggauaucua

SEQ ID NO: 502969 - RNA, 18 nt, Artificial Sequence
  Synthetic
aaaguauguugauaucua

SEQ ID NO: 502970 - RNA, 19 nt, Artificial Sequence
  Synthetic
aaaaguauguugauaucua

SEQ ID NO: 502971 - RNA, 20 nt, Artificial Sequence
  Synthetic
uaaaaguauguugauaucua

SEQ ID NO: 502972 - RNA, 21 nt, Artificial Sequence
  Synthetic
auaaaaguauguugauaucua

SEQ ID NO: 502973 - RNA, 22 nt, Artificial Sequence
  Synthetic
aauaaaaguauguugauaucua

SEQ ID NO: 502974 - RNA, 23 nt, Artificial Sequence
  Synthetic
gaauaaaaguauguugauaucua

SEQ ID NO: 502975 - RNA, 24 nt, Artificial Sequence
  Synthetic
ugaauaaaaguauguugauaucua

SEQ ID NO: 502976 - RNA, 18 nt, Artificial Sequence
  Synthetic
cauugcuugcuauaucua

SEQ ID NO: 502977 - RNA, 19 nt, Artificial Sequence
  Synthetic
acauugcuugcuauaucua

SEQ ID NO: 502978 - RNA, 20 nt, Artificial Sequence
  Synthetic
aacauugcuugcuauaucua

SEQ ID NO: 502979 - RNA, 21 nt, Artificial Sequence
  Synthetic
gaacauugcuugcuauaucua

SEQ ID NO: 502980 - RNA, 22 nt, Artificial Sequence
  Synthetic
agaacauugcuugcuauaucua

SEQ ID NO: 502981 - RNA, 23 nt, Artificial Sequence
  Synthetic
aagaacauugcuugcuauaucua

SEQ ID NO: 502982 - RNA, 24 nt, Artificial Sequence
  Synthetic
uaagaacauugcuugcuauaucua

SEQ ID NO: 502983 - RNA, 18 nt, Artificial Sequence
  Synthetic
ucuaccaugaacuaucua

SEQ ID NO: 502984 - RNA, 19 nt, Artificial Sequence
  Synthetic
gucuaccaugaacuaucua

SEQ ID NO: 502985 - RNA, 20 nt, Artificial Sequence
  Synthetic
ugucuaccaugaacuaucua

SEQ ID NO: 502986 - RNA, 21 nt, Artificial Sequence
  Synthetic
augucuaccaugaacuaucua

SEQ ID NO: 502987 - RNA, 22 nt, Artificial Sequence
  Synthetic
caugucuaccaugaacuaucua

SEQ ID NO: 502988 - RNA, 23 nt, Artificial Sequence
  Synthetic
ucaugucuaccaugaacuaucua

SEQ ID NO: 502989 - RNA, 24 nt, Artificial Sequence
  Synthetic
uucaugucuaccaugaacuaucua

SEQ ID NO: 502990 - RNA, 18 nt, Artificial Sequence
  Synthetic
gugaaauuuaacuaucua

SEQ ID NO: 502991 - RNA, 19 nt, Artificial Sequence
  Synthetic
agugaaauuuaacuaucua

SEQ ID NO: 502992 - RNA, 20 nt, Artificial Sequence
  Synthetic
aagugaaauuuaacuaucua

SEQ ID NO: 502993 - RNA, 21 nt, Artificial Sequence
  Synthetic
aaagugaaauuuaacuaucua

SEQ ID NO: 502994 - RNA, 22 nt, Artificial Sequence
  Synthetic
aaaagugaaauuuaacuaucua

SEQ ID NO: 502995 - RNA, 23 nt, Artificial Sequence
  Synthetic
gaaaagugaaauuuaacuaucua

SEQ ID NO: 502996 - RNA, 24 nt, Artificial Sequence
  Synthetic
ggaaaagugaaauuuaacuaucua

SEQ ID NO: 502997 - RNA, 18 nt, Artificial Sequence
  Synthetic
ugcucuacagccuaucua

SEQ ID NO: 502998 - RNA, 19 nt, Artificial Sequence
  Synthetic
cugcucuacagccuaucua

SEQ ID NO: 502999 - RNA, 20 nt, Artificial Sequence
  Synthetic
ucugcucuacagccuaucua

SEQ ID NO: 503000 - RNA, 21 nt, Artificial Sequence
  Synthetic
gucugcucuacagccuaucua

SEQ ID NO: 503001 - RNA, 22 nt, Artificial Sequence
  Synthetic
ugucugcucuacagccuaucua

SEQ ID NO: 503002 - RNA, 23 nt, Artificial Sequence
  Synthetic
augucugcucuacagccuaucua

SEQ ID NO: 503003 - RNA, 24 nt, Artificial Sequence
  Synthetic
uaugucugcucuacagccuaucua

SEQ ID NO: 503004 - RNA, 18 nt, Artificial Sequence
  Synthetic
uagucugucuccuaucua

SEQ ID NO: 503005 - RNA, 19 nt, Artificial Sequence
  Synthetic
cuagucugucuccuaucua

SEQ ID NO: 503006 - RNA, 20 nt, Artificial Sequence
  Synthetic
ccuagucugucuccuaucua

SEQ ID NO: 503007 - RNA, 21 nt, Artificial Sequence
  Synthetic
accuagucugucuccuaucua

SEQ ID NO: 503008 - RNA, 22 nt, Artificial Sequence
  Synthetic
aaccuagucugucuccuaucua

SEQ ID NO: 503009 - RNA, 23 nt, Artificial Sequence
  Synthetic
gaaccuagucugucuccuaucua

SEQ ID NO: 503010 - RNA, 24 nt, Artificial Sequence
  Synthetic
cgaaccuagucugucuccuaucua

SEQ ID NO: 503011 - RNA, 18 nt, Artificial Sequence
  Synthetic
ucuaacuuaagcuaucua

SEQ ID NO: 503012 - RNA, 19 nt, Artificial Sequence
  Synthetic
cucuaacuuaagcuaucua

SEQ ID NO: 503013 - RNA, 20 nt, Artificial Sequence
  Synthetic
acucuaacuuaagcuaucua

SEQ ID NO: 503014 - RNA, 21 nt, Artificial Sequence
  Synthetic
gacucuaacuuaagcuaucua

SEQ ID NO: 503015 - RNA, 22 nt, Artificial Sequence
  Synthetic
cgacucuaacuuaagcuaucua

SEQ ID NO: 503016 - RNA, 23 nt, Artificial Sequence
  Synthetic
ccgacucuaacuuaagcuaucua

SEQ ID NO: 503017 - RNA, 24 nt, Artificial Sequence
  Synthetic
gccgacucuaacuuaagcuaucua

SEQ ID NO: 503018 - RNA, 18 nt, Artificial Sequence
  Synthetic
cuaguacacaucuaucua

SEQ ID NO: 503019 - RNA, 19 nt, Artificial Sequence
  Synthetic
gcuaguacacaucuaucua

SEQ ID NO: 503020 - RNA, 20 nt, Artificial Sequence
  Synthetic
agcuaguacacaucuaucua

SEQ ID NO: 503021 - RNA, 21 nt, Artificial Sequence
  Synthetic
gagcuaguacacaucuaucua

SEQ ID NO: 503022 - RNA, 22 nt, Artificial Sequence
  Synthetic
ugagcuaguacacaucuaucua

SEQ ID NO: 503023 - RNA, 23 nt, Artificial Sequence
  Synthetic
uugagcuaguacacaucuaucua

SEQ ID NO: 503024 - RNA, 24 nt, Artificial Sequence
  Synthetic
cuugagcuaguacacaucuaucua

SEQ ID NO: 503025 - RNA, 18 nt, Artificial Sequence
  Synthetic
caauugaacugguaucua

SEQ ID NO: 503026 - RNA, 19 nt, Artificial Sequence
  Synthetic
ucaauugaacugguaucua

SEQ ID NO: 503027 - RNA, 20 nt, Artificial Sequence
  Synthetic
uucaauugaacugguaucua

SEQ ID NO: 503028 - RNA, 21 nt, Artificial Sequence
  Synthetic
guucaauugaacugguaucua

SEQ ID NO: 503029 - RNA, 22 nt, Artificial Sequence
  Synthetic
cguucaauugaacugguaucua

SEQ ID NO: 503030 - RNA, 23 nt, Artificial Sequence
  Synthetic
acguucaauugaacugguaucua

SEQ ID NO: 503031 - RNA, 24 nt, Artificial Sequence
  Synthetic
uacguucaauugaacugguaucua

SEQ ID NO: 503032 - RNA, 18 nt, Artificial Sequence
  Synthetic
cauuucuaacuguaucua

SEQ ID NO: 503033 - RNA, 19 nt, Artificial Sequence
  Synthetic
acauuucuaacuguaucua

SEQ ID NO: 503034 - RNA, 20 nt, Artificial Sequence
  Synthetic
gacauuucuaacuguaucua

SEQ ID NO: 503035 - RNA, 21 nt, Artificial Sequence
  Synthetic
agacauuucuaacuguaucua

SEQ ID NO: 503036 - RNA, 22 nt, Artificial Sequence
  Synthetic
uagacauuucuaacuguaucua

SEQ ID NO: 503037 - RNA, 23 nt, Artificial Sequence
  Synthetic
cuagacauuucuaacuguaucua

SEQ ID NO: 503038 - RNA, 24 nt, Artificial Sequence
  Synthetic
ccuagacauuucuaacuguaucua

SEQ ID NO: 503039 - RNA, 18 nt, Artificial Sequence
  Synthetic
gcaacuuuccuguaucua

SEQ ID NO: 503040 - RNA, 19 nt, Artificial Sequence
  Synthetic
ggcaacuuuccuguaucua

SEQ ID NO: 503041 - RNA, 20 nt, Artificial Sequence
  Synthetic
aggcaacuuuccuguaucua

SEQ ID NO: 503042 - RNA, 21 nt, Artificial Sequence
  Synthetic
caggcaacuuuccuguaucua

SEQ ID NO: 503043 - RNA, 22 nt, Artificial Sequence
  Synthetic
acaggcaacuuuccuguaucua

SEQ ID NO: 503044 - RNA, 23 nt, Artificial Sequence
  Synthetic
cacaggcaacuuuccuguaucua

SEQ ID NO: 503045 - RNA, 24 nt, Artificial Sequence
  Synthetic
acacaggcaacuuuccuguaucua

SEQ ID NO: 503046 - RNA, 18 nt, Artificial Sequence
  Synthetic
ugcugcauugauuaucua

SEQ ID NO: 503047 - RNA, 19 nt, Artificial Sequence
  Synthetic
augcugcauugauuaucua

SEQ ID NO: 503048 - RNA, 20 nt, Artificial Sequence
  Synthetic
gaugcugcauugauuaucua

SEQ ID NO: 503049 - RNA, 21 nt, Artificial Sequence
  Synthetic
ugaugcugcauugauuaucua

SEQ ID NO: 503050 - RNA, 22 nt, Artificial Sequence
  Synthetic
gugaugcugcauugauuaucua

SEQ ID NO: 503051 - RNA, 23 nt, Artificial Sequence
  Synthetic
ggugaugcugcauugauuaucua

SEQ ID NO: 503052 - RNA, 24 nt, Artificial Sequence
  Synthetic
gggugaugcugcauugauuaucua

SEQ ID NO: 503053 - RNA, 18 nt, Artificial Sequence
  Synthetic
ccaaagaauacuuaucua

SEQ ID NO: 503054 - RNA, 19 nt, Artificial Sequence
  Synthetic
accaaagaauacuuaucua

SEQ ID NO: 503055 - RNA, 20 nt, Artificial Sequence
  Synthetic
caccaaagaauacuuaucua

SEQ ID NO: 503056 - RNA, 21 nt, Artificial Sequence
  Synthetic
ucaccaaagaauacuuaucua

SEQ ID NO: 503057 - RNA, 22 nt, Artificial Sequence
  Synthetic
aucaccaaagaauacuuaucua

SEQ ID NO: 503058 - RNA, 23 nt, Artificial Sequence
  Synthetic
aaucaccaaagaauacuuaucua

SEQ ID NO: 503059 - RNA, 24 nt, Artificial Sequence
  Synthetic
gaaucaccaaagaauacuuaucua

SEQ ID NO: 503060 - RNA, 18 nt, Artificial Sequence
  Synthetic
ggaguuaaaacaacucua

SEQ ID NO: 503061 - RNA, 19 nt, Artificial Sequence
  Synthetic
aggaguuaaaacaacucua

SEQ ID NO: 503062 - RNA, 20 nt, Artificial Sequence
  Synthetic
aaggaguuaaaacaacucua

SEQ ID NO: 503063 - RNA, 21 nt, Artificial Sequence
  Synthetic
uaaggaguuaaaacaacucua

SEQ ID NO: 503064 - RNA, 22 nt, Artificial Sequence
  Synthetic
auaaggaguuaaaacaacucua

SEQ ID NO: 503065 - RNA, 23 nt, Artificial Sequence
  Synthetic
uauaaggaguuaaaacaacucua

SEQ ID NO: 503066 - RNA, 24 nt, Artificial Sequence
  Synthetic
auauaaggaguuaaaacaacucua

SEQ ID NO: 503067 - RNA, 18 nt, Artificial Sequence
  Synthetic
uaacugugggcaacucua

SEQ ID NO: 503068 - RNA, 19 nt, Artificial Sequence
  Synthetic
cuaacugugggcaacucua

SEQ ID NO: 503069 - RNA, 20 nt, Artificial Sequence
  Synthetic
acuaacugugggcaacucua

SEQ ID NO: 503070 - RNA, 21 nt, Artificial Sequence
  Synthetic
gacuaacugugggcaacucua

SEQ ID NO: 503071 - RNA, 22 nt, Artificial Sequence
  Synthetic
ugacuaacugugggcaacucua

SEQ ID NO: 503072 - RNA, 23 nt, Artificial Sequence
  Synthetic
augacuaacugugggcaacucua

SEQ ID NO: 503073 - RNA, 24 nt, Artificial Sequence
  Synthetic
caugacuaacugugggcaacucua

SEQ ID NO: 503074 - RNA, 18 nt, Artificial Sequence
  Synthetic
uuaccaaugugcacucua

SEQ ID NO: 503075 - RNA, 19 nt, Artificial Sequence
  Synthetic
auuaccaaugugcacucua

SEQ ID NO: 503076 - RNA, 20 nt, Artificial Sequence
  Synthetic
gauuaccaaugugcacucua

SEQ ID NO: 503077 - RNA, 21 nt, Artificial Sequence
  Synthetic
ugauuaccaaugugcacucua

SEQ ID NO: 503078 - RNA, 22 nt, Artificial Sequence
  Synthetic
uugauuaccaaugugcacucua

SEQ ID NO: 503079 - RNA, 23 nt, Artificial Sequence
  Synthetic
auugauuaccaaugugcacucua

SEQ ID NO: 503080 - RNA, 24 nt, Artificial Sequence
  Synthetic
uauugauuaccaaugugcacucua

SEQ ID NO: 503081 - RNA, 18 nt, Artificial Sequence
  Synthetic
caucacugauggacucua

SEQ ID NO: 503082 - RNA, 19 nt, Artificial Sequence
  Synthetic
gcaucacugauggacucua

SEQ ID NO: 503083 - RNA, 20 nt, Artificial Sequence
  Synthetic
agcaucacugauggacucua

SEQ ID NO: 503084 - RNA, 21 nt, Artificial Sequence
  Synthetic
aagcaucacugauggacucua

SEQ ID NO: 503085 - RNA, 22 nt, Artificial Sequence
  Synthetic
aaagcaucacugauggacucua

SEQ ID NO: 503086 - RNA, 23 nt, Artificial Sequence
  Synthetic
uaaagcaucacugauggacucua

SEQ ID NO: 503087 - RNA, 24 nt, Artificial Sequence
  Synthetic
cuaaagcaucacugauggacucua

SEQ ID NO: 503088 - RNA, 18 nt, Artificial Sequence
  Synthetic
aaaaaugugaauacucua

SEQ ID NO: 503089 - RNA, 19 nt, Artificial Sequence
  Synthetic
uaaaaaugugaauacucua

SEQ ID NO: 503090 - RNA, 20 nt, Artificial Sequence
  Synthetic
uuaaaaaugugaauacucua

SEQ ID NO: 503091 - RNA, 21 nt, Artificial Sequence
  Synthetic
auuaaaaaugugaauacucua

SEQ ID NO: 503092 - RNA, 22 nt, Artificial Sequence
  Synthetic
aauuaaaaaugugaauacucua

SEQ ID NO: 503093 - RNA, 23 nt, Artificial Sequence
  Synthetic
aaauuaaaaaugugaauacucua

SEQ ID NO: 503094 - RNA, 24 nt, Artificial Sequence
  Synthetic
aaaauuaaaaaugugaauacucua

SEQ ID NO: 503095 - RNA, 18 nt, Artificial Sequence
  Synthetic
auggcuugucaaccucua

SEQ ID NO: 503096 - RNA, 19 nt, Artificial Sequence
  Synthetic
aauggcuugucaaccucua

SEQ ID NO: 503097 - RNA, 20 nt, Artificial Sequence
  Synthetic
gaauggcuugucaaccucua

SEQ ID NO: 503098 - RNA, 21 nt, Artificial Sequence
  Synthetic
agaauggcuugucaaccucua

SEQ ID NO: 503099 - RNA, 22 nt, Artificial Sequence
  Synthetic
aagaauggcuugucaaccucua

SEQ ID NO: 503100 - RNA, 23 nt, Artificial Sequence
  Synthetic
uaagaauggcuugucaaccucua

SEQ ID NO: 503101 - RNA, 24 nt, Artificial Sequence
  Synthetic
cuaagaauggcuugucaaccucua

SEQ ID NO: 503102 - RNA, 18 nt, Artificial Sequence
  Synthetic
aaggagauguuaccucua

SEQ ID NO: 503103 - RNA, 19 nt, Artificial Sequence
  Synthetic
gaaggagauguuaccucua

SEQ ID NO: 503104 - RNA, 20 nt, Artificial Sequence
  Synthetic
ggaaggagauguuaccucua

SEQ ID NO: 503105 - RNA, 21 nt, Artificial Sequence
  Synthetic
gggaaggagauguuaccucua

SEQ ID NO: 503106 - RNA, 22 nt, Artificial Sequence
  Synthetic
ggggaaggagauguuaccucua

SEQ ID NO: 503107 - RNA, 23 nt, Artificial Sequence
  Synthetic
aggggaaggagauguuaccucua

SEQ ID NO: 503108 - RNA, 24 nt, Artificial Sequence
  Synthetic
caggggaaggagauguuaccucua

SEQ ID NO: 503109 - RNA, 18 nt, Artificial Sequence
  Synthetic
uaauaauggcucccucua

SEQ ID NO: 503110 - RNA, 19 nt, Artificial Sequence
  Synthetic
auaauaauggcucccucua

SEQ ID NO: 503111 - RNA, 20 nt, Artificial Sequence
  Synthetic
aauaauaauggcucccucua

SEQ ID NO: 503112 - RNA, 21 nt, Artificial Sequence
  Synthetic
aaauaauaauggcucccucua

SEQ ID NO: 503113 - RNA, 22 nt, Artificial Sequence
  Synthetic
aaaauaauaauggcucccucua

SEQ ID NO: 503114 - RNA, 23 nt, Artificial Sequence
  Synthetic
aaaaauaauaauggcucccucua

SEQ ID NO: 503115 - RNA, 24 nt, Artificial Sequence
  Synthetic
uaaaaauaauaauggcucccucua

SEQ ID NO: 503116 - RNA, 18 nt, Artificial Sequence
  Synthetic
ucacaucauuucccucua

SEQ ID NO: 503117 - RNA, 19 nt, Artificial Sequence
  Synthetic
cucacaucauuucccucua

SEQ ID NO: 503118 - RNA, 20 nt, Artificial Sequence
  Synthetic
acucacaucauuucccucua

SEQ ID NO: 503119 - RNA, 21 nt, Artificial Sequence
  Synthetic
uacucacaucauuucccucua

SEQ ID NO: 503120 - RNA, 22 nt, Artificial Sequence
  Synthetic
auacucacaucauuucccucua

SEQ ID NO: 503121 - RNA, 23 nt, Artificial Sequence
  Synthetic
cauacucacaucauuucccucua

SEQ ID NO: 503122 - RNA, 24 nt, Artificial Sequence
  Synthetic
gcauacucacaucauuucccucua

SEQ ID NO: 503123 - RNA, 18 nt, Artificial Sequence
  Synthetic
aacauccagaagccucua

SEQ ID NO: 503124 - RNA, 19 nt, Artificial Sequence
  Synthetic
uaacauccagaagccucua

SEQ ID NO: 503125 - RNA, 20 nt, Artificial Sequence
  Synthetic
guaacauccagaagccucua

SEQ ID NO: 503126 - RNA, 21 nt, Artificial Sequence
  Synthetic
aguaacauccagaagccucua

SEQ ID NO: 503127 - RNA, 22 nt, Artificial Sequence
  Synthetic
aaguaacauccagaagccucua

SEQ ID NO: 503128 - RNA, 23 nt, Artificial Sequence
  Synthetic
caaguaacauccagaagccucua

SEQ ID NO: 503129 - RNA, 24 nt, Artificial Sequence
  Synthetic
ucaaguaacauccagaagccucua

SEQ ID NO: 503130 - RNA, 18 nt, Artificial Sequence
  Synthetic
aguuuguaagauccucua

SEQ ID NO: 503131 - RNA, 19 nt, Artificial Sequence
  Synthetic
aaguuuguaagauccucua

SEQ ID NO: 503132 - RNA, 20 nt, Artificial Sequence
  Synthetic
aaaguuuguaagauccucua

SEQ ID NO: 503133 - RNA, 21 nt, Artificial Sequence
  Synthetic
aaaaguuuguaagauccucua

SEQ ID NO: 503134 - RNA, 22 nt, Artificial Sequence
  Synthetic
caaaaguuuguaagauccucua

SEQ ID NO: 503135 - RNA, 23 nt, Artificial Sequence
  Synthetic
ucaaaaguuuguaagauccucua

SEQ ID NO: 503136 - RNA, 24 nt, Artificial Sequence
  Synthetic
aucaaaaguuuguaagauccucua

SEQ ID NO: 503137 - RNA, 18 nt, Artificial Sequence
  Synthetic
aacuucucaccuccucua

SEQ ID NO: 503138 - RNA, 19 nt, Artificial Sequence
  Synthetic
caacuucucaccuccucua

SEQ ID NO: 503139 - RNA, 20 nt, Artificial Sequence
  Synthetic
gcaacuucucaccuccucua

SEQ ID NO: 503140 - RNA, 21 nt, Artificial Sequence
  Synthetic
agcaacuucucaccuccucua

SEQ ID NO: 503141 - RNA, 22 nt, Artificial Sequence
  Synthetic
uagcaacuucucaccuccucua

SEQ ID NO: 503142 - RNA, 23 nt, Artificial Sequence
  Synthetic
auagcaacuucucaccuccucua

SEQ ID NO: 503143 - RNA, 24 nt, Artificial Sequence
  Synthetic
aauagcaacuucucaccuccucua

SEQ ID NO: 503144 - RNA, 18 nt, Artificial Sequence
  Synthetic
cucuuuacuccuccucua

SEQ ID NO: 503145 - RNA, 19 nt, Artificial Sequence
  Synthetic
acucuuuacuccuccucua

SEQ ID NO: 503146 - RNA, 20 nt, Artificial Sequence
  Synthetic
cacucuuuacuccuccucua

SEQ ID NO: 503147 - RNA, 21 nt, Artificial Sequence
  Synthetic
ccacucuuuacuccuccucua

SEQ ID NO: 503148 - RNA, 22 nt, Artificial Sequence
  Synthetic
cccacucuuuacuccuccucua

SEQ ID NO: 503149 - RNA, 23 nt, Artificial Sequence
  Synthetic
ucccacucuuuacuccuccucua

SEQ ID NO: 503150 - RNA, 24 nt, Artificial Sequence
  Synthetic
uucccacucuuuacuccuccucua

SEQ ID NO: 503151 - RNA, 18 nt, Artificial Sequence
  Synthetic
caaucuugacguccucua

SEQ ID NO: 503152 - RNA, 19 nt, Artificial Sequence
  Synthetic
ccaaucuugacguccucua

SEQ ID NO: 503153 - RNA, 20 nt, Artificial Sequence
  Synthetic
accaaucuugacguccucua

SEQ ID NO: 503154 - RNA, 21 nt, Artificial Sequence
  Synthetic
gaccaaucuugacguccucua

SEQ ID NO: 503155 - RNA, 22 nt, Artificial Sequence
  Synthetic
agaccaaucuugacguccucua

SEQ ID NO: 503156 - RNA, 23 nt, Artificial Sequence
  Synthetic
aagaccaaucuugacguccucua

SEQ ID NO: 503157 - RNA, 24 nt, Artificial Sequence
  Synthetic
aaagaccaaucuugacguccucua

SEQ ID NO: 503158 - RNA, 18 nt, Artificial Sequence
  Synthetic
agaugaaaauguccucua

SEQ ID NO: 503159 - RNA, 19 nt, Artificial Sequence
  Synthetic
aagaugaaaauguccucua

SEQ ID NO: 503160 - RNA, 20 nt, Artificial Sequence
  Synthetic
gaagaugaaaauguccucua

SEQ ID NO: 503161 - RNA, 21 nt, Artificial Sequence
  Synthetic
agaagaugaaaauguccucua

SEQ ID NO: 503162 - RNA, 22 nt, Artificial Sequence
  Synthetic
aagaagaugaaaauguccucua

SEQ ID NO: 503163 - RNA, 23 nt, Artificial Sequence
  Synthetic
aaagaagaugaaaauguccucua

SEQ ID NO: 503164 - RNA, 24 nt, Artificial Sequence
  Synthetic
aaaagaagaugaaaauguccucua

SEQ ID NO: 503165 - RNA, 18 nt, Artificial Sequence
  Synthetic
aauugggaaacagcucua

SEQ ID NO: 503166 - RNA, 19 nt, Artificial Sequence
  Synthetic
caauugggaaacagcucua

SEQ ID NO: 503167 - RNA, 20 nt, Artificial Sequence
  Synthetic
ucaauugggaaacagcucua

SEQ ID NO: 503168 - RNA, 21 nt, Artificial Sequence
  Synthetic
gucaauugggaaacagcucua

SEQ ID NO: 503169 - RNA, 22 nt, Artificial Sequence
  Synthetic
ggucaauugggaaacagcucua

SEQ ID NO: 503170 - RNA, 23 nt, Artificial Sequence
  Synthetic
uggucaauugggaaacagcucua

SEQ ID NO: 503171 - RNA, 24 nt, Artificial Sequence
  Synthetic
uuggucaauugggaaacagcucua

SEQ ID NO: 503172 - RNA, 18 nt, Artificial Sequence
  Synthetic
uuggacuuugcagcucua

SEQ ID NO: 503173 - RNA, 19 nt, Artificial Sequence
  Synthetic
auuggacuuugcagcucua

SEQ ID NO: 503174 - RNA, 20 nt, Artificial Sequence
  Synthetic
aauuggacuuugcagcucua

SEQ ID NO: 503175 - RNA, 21 nt, Artificial Sequence
  Synthetic
gaauuggacuuugcagcucua

SEQ ID NO: 503176 - RNA, 22 nt, Artificial Sequence
  Synthetic
ugaauuggacuuugcagcucua

SEQ ID NO: 503177 - RNA, 23 nt, Artificial Sequence
  Synthetic
cugaauuggacuuugcagcucua

SEQ ID NO: 503178 - RNA, 24 nt, Artificial Sequence
  Synthetic
acugaauuggacuuugcagcucua

SEQ ID NO: 503179 - RNA, 18 nt, Artificial Sequence
  Synthetic
auaaaaagaggagcucua

SEQ ID NO: 503180 - RNA, 19 nt, Artificial Sequence
  Synthetic
aauaaaaagaggagcucua

SEQ ID NO: 503181 - RNA, 20 nt, Artificial Sequence
  Synthetic
aaauaaaaagaggagcucua

SEQ ID NO: 503182 - RNA, 21 nt, Artificial Sequence
  Synthetic
aaaauaaaaagaggagcucua

SEQ ID NO: 503183 - RNA, 22 nt, Artificial Sequence
  Synthetic
caaaauaaaaagaggagcucua

SEQ ID NO: 503184 - RNA, 23 nt, Artificial Sequence
  Synthetic
acaaaauaaaaagaggagcucua

SEQ ID NO: 503185 - RNA, 24 nt, Artificial Sequence
  Synthetic
uacaaaauaaaaagaggagcucua

SEQ ID NO: 503186 - RNA, 18 nt, Artificial Sequence
  Synthetic
uguguagcaaaggcucua

SEQ ID NO: 503187 - RNA, 19 nt, Artificial Sequence
  Synthetic
guguguagcaaaggcucua

SEQ ID NO: 503188 - RNA, 20 nt, Artificial Sequence
  Synthetic
uguguguagcaaaggcucua

SEQ ID NO: 503189 - RNA, 21 nt, Artificial Sequence
  Synthetic
uuguguguagcaaaggcucua

SEQ ID NO: 503190 - RNA, 22 nt, Artificial Sequence
  Synthetic
uuuguguguagcaaaggcucua

SEQ ID NO: 503191 - RNA, 23 nt, Artificial Sequence
  Synthetic
cuuuguguguagcaaaggcucua

SEQ ID NO: 503192 - RNA, 24 nt, Artificial Sequence
  Synthetic
acuuuguguguagcaaaggcucua

SEQ ID NO: 503193 - RNA, 18 nt, Artificial Sequence
  Synthetic
agguuuucagaggcucua

SEQ ID NO: 503194 - RNA, 19 nt, Artificial Sequence
  Synthetic
gagguuuucagaggcucua

SEQ ID NO: 503195 - RNA, 20 nt, Artificial Sequence
  Synthetic
ugagguuuucagaggcucua

SEQ ID NO: 503196 - RNA, 21 nt, Artificial Sequence
  Synthetic
uugagguuuucagaggcucua

SEQ ID NO: 503197 - RNA, 22 nt, Artificial Sequence
  Synthetic
guugagguuuucagaggcucua

SEQ ID NO: 503198 - RNA, 23 nt, Artificial Sequence
  Synthetic
uguugagguuuucagaggcucua

SEQ ID NO: 503199 - RNA, 24 nt, Artificial Sequence
  Synthetic
auguugagguuuucagaggcucua

SEQ ID NO: 503200 - RNA, 18 nt, Artificial Sequence
  Synthetic
gucaaauaacuggcucua

SEQ ID NO: 503201 - RNA, 19 nt, Artificial Sequence
  Synthetic
ugucaaauaacuggcucua

SEQ ID NO: 503202 - RNA, 20 nt, Artificial Sequence
  Synthetic
augucaaauaacuggcucua

SEQ ID NO: 503203 - RNA, 21 nt, Artificial Sequence
  Synthetic
aaugucaaauaacuggcucua

SEQ ID NO: 503204 - RNA, 22 nt, Artificial Sequence
  Synthetic
aaaugucaaauaacuggcucua

SEQ ID NO: 503205 - RNA, 23 nt, Artificial Sequence
  Synthetic
uaaaugucaaauaacuggcucua

SEQ ID NO: 503206 - RNA, 24 nt, Artificial Sequence
  Synthetic
guaaaugucaaauaacuggcucua

SEQ ID NO: 503207 - RNA, 18 nt, Artificial Sequence
  Synthetic
uugagaagcacugcucua

SEQ ID NO: 503208 - RNA, 19 nt, Artificial Sequence
  Synthetic
uuugagaagcacugcucua

SEQ ID NO: 503209 - RNA, 20 nt, Artificial Sequence
  Synthetic
uuuugagaagcacugcucua

SEQ ID NO: 503210 - RNA, 21 nt, Artificial Sequence
  Synthetic
cuuuugagaagcacugcucua

SEQ ID NO: 503211 - RNA, 22 nt, Artificial Sequence
  Synthetic
acuuuugagaagcacugcucua

SEQ ID NO: 503212 - RNA, 23 nt, Artificial Sequence
  Synthetic
aacuuuugagaagcacugcucua

SEQ ID NO: 503213 - RNA, 24 nt, Artificial Sequence
  Synthetic
caacuuuugagaagcacugcucua

SEQ ID NO: 503214 - RNA, 18 nt, Artificial Sequence
  Synthetic
uuuuguaauacugcucua

SEQ ID NO: 503215 - RNA, 19 nt, Artificial Sequence
  Synthetic
auuuuguaauacugcucua

SEQ ID NO: 503216 - RNA, 20 nt, Artificial Sequence
  Synthetic
cauuuuguaauacugcucua

SEQ ID NO: 503217 - RNA, 21 nt, Artificial Sequence
  Synthetic
acauuuuguaauacugcucua

SEQ ID NO: 503218 - RNA, 22 nt, Artificial Sequence
  Synthetic
aacauuuuguaauacugcucua

SEQ ID NO: 503219 - RNA, 23 nt, Artificial Sequence
  Synthetic
caacauuuuguaauacugcucua

SEQ ID NO: 503220 - RNA, 24 nt, Artificial Sequence
  Synthetic
ucaacauuuuguaauacugcucua

SEQ ID NO: 503221 - RNA, 18 nt, Artificial Sequence
  Synthetic
cuaucaacugcugcucua

SEQ ID NO: 503222 - RNA, 19 nt, Artificial Sequence
  Synthetic
ucuaucaacugcugcucua

SEQ ID NO: 503223 - RNA, 20 nt, Artificial Sequence
  Synthetic
aucuaucaacugcugcucua

SEQ ID NO: 503224 - RNA, 21 nt, Artificial Sequence
  Synthetic
gaucuaucaacugcugcucua

SEQ ID NO: 503225 - RNA, 22 nt, Artificial Sequence
  Synthetic
ugaucuaucaacugcugcucua

SEQ ID NO: 503226 - RNA, 23 nt, Artificial Sequence
  Synthetic
uugaucuaucaacugcugcucua

SEQ ID NO: 503227 - RNA, 24 nt, Artificial Sequence
  Synthetic
auugaucuaucaacugcugcucua

SEQ ID NO: 503228 - RNA, 18 nt, Artificial Sequence
  Synthetic
ccucagacaguugcucua

SEQ ID NO: 503229 - RNA, 19 nt, Artificial Sequence
  Synthetic
cccucagacaguugcucua

SEQ ID NO: 503230 - RNA, 20 nt, Artificial Sequence
  Synthetic
ucccucagacaguugcucua

SEQ ID NO: 503231 - RNA, 21 nt, Artificial Sequence
  Synthetic
uucccucagacaguugcucua

SEQ ID NO: 503232 - RNA, 22 nt, Artificial Sequence
  Synthetic
uuucccucagacaguugcucua

SEQ ID NO: 503233 - RNA, 23 nt, Artificial Sequence
  Synthetic
cuuucccucagacaguugcucua

SEQ ID NO: 503234 - RNA, 24 nt, Artificial Sequence
  Synthetic
ucuuucccucagacaguugcucua

SEQ ID NO: 503235 - RNA, 18 nt, Artificial Sequence
  Synthetic
augauuuauuuugcucua

SEQ ID NO: 503236 - RNA, 19 nt, Artificial Sequence
  Synthetic
uaugauuuauuuugcucua

SEQ ID NO: 503237 - RNA, 20 nt, Artificial Sequence
  Synthetic
uuaugauuuauuuugcucua

SEQ ID NO: 503238 - RNA, 21 nt, Artificial Sequence
  Synthetic
uuuaugauuuauuuugcucua

SEQ ID NO: 503239 - RNA, 22 nt, Artificial Sequence
  Synthetic
guuuaugauuuauuuugcucua

SEQ ID NO: 503240 - RNA, 23 nt, Artificial Sequence
  Synthetic
gguuuaugauuuauuuugcucua

SEQ ID NO: 503241 - RNA, 24 nt, Artificial Sequence
  Synthetic
ugguuuaugauuuauuuugcucua

SEQ ID NO: 503242 - RNA, 18 nt, Artificial Sequence
  Synthetic
cauaucuuugaaucucua

SEQ ID NO: 503243 - RNA, 19 nt, Artificial Sequence
  Synthetic
acauaucuuugaaucucua

SEQ ID NO: 503244 - RNA, 20 nt, Artificial Sequence
  Synthetic
cacauaucuuugaaucucua

SEQ ID NO: 503245 - RNA, 21 nt, Artificial Sequence
  Synthetic
ucacauaucuuugaaucucua

SEQ ID NO: 503246 - RNA, 22 nt, Artificial Sequence
  Synthetic
uucacauaucuuugaaucucua

SEQ ID NO: 503247 - RNA, 23 nt, Artificial Sequence
  Synthetic
auucacauaucuuugaaucucua

SEQ ID NO: 503248 - RNA, 24 nt, Artificial Sequence
  Synthetic
cauucacauaucuuugaaucucua

SEQ ID NO: 503249 - RNA, 18 nt, Artificial Sequence
  Synthetic
uucaagaacccaucucua

SEQ ID NO: 503250 - RNA, 19 nt, Artificial Sequence
  Synthetic
guucaagaacccaucucua

SEQ ID NO: 503251 - RNA, 20 nt, Artificial Sequence
  Synthetic
aguucaagaacccaucucua

SEQ ID NO: 503252 - RNA, 21 nt, Artificial Sequence
  Synthetic
gaguucaagaacccaucucua

SEQ ID NO: 503253 - RNA, 22 nt, Artificial Sequence
  Synthetic
agaguucaagaacccaucucua

SEQ ID NO: 503254 - RNA, 23 nt, Artificial Sequence
  Synthetic
aagaguucaagaacccaucucua

SEQ ID NO: 503255 - RNA, 24 nt, Artificial Sequence
  Synthetic
caagaguucaagaacccaucucua

SEQ ID NO: 503256 - RNA, 18 nt, Artificial Sequence
  Synthetic
ucaaugacagcaucucua

SEQ ID NO: 503257 - RNA, 19 nt, Artificial Sequence
  Synthetic
aucaaugacagcaucucua

SEQ ID NO: 503258 - RNA, 20 nt, Artificial Sequence
  Synthetic
gaucaaugacagcaucucua

SEQ ID NO: 503259 - RNA, 21 nt, Artificial Sequence
  Synthetic
ggaucaaugacagcaucucua

SEQ ID NO: 503260 - RNA, 22 nt, Artificial Sequence
  Synthetic
uggaucaaugacagcaucucua

SEQ ID NO: 503261 - RNA, 23 nt, Artificial Sequence
  Synthetic
guggaucaaugacagcaucucua

SEQ ID NO: 503262 - RNA, 24 nt, Artificial Sequence
  Synthetic
aguggaucaaugacagcaucucua

SEQ ID NO: 503263 - RNA, 18 nt, Artificial Sequence
  Synthetic
uauccuuaaugaucucua

SEQ ID NO: 503264 - RNA, 19 nt, Artificial Sequence
  Synthetic
guauccuuaaugaucucua

SEQ ID NO: 503265 - RNA, 20 nt, Artificial Sequence
  Synthetic
gguauccuuaaugaucucua

SEQ ID NO: 503266 - RNA, 21 nt, Artificial Sequence
  Synthetic
agguauccuuaaugaucucua

SEQ ID NO: 503267 - RNA, 22 nt, Artificial Sequence
  Synthetic
aagguauccuuaaugaucucua

SEQ ID NO: 503268 - RNA, 23 nt, Artificial Sequence
  Synthetic
gaagguauccuuaaugaucucua

SEQ ID NO: 503269 - RNA, 24 nt, Artificial Sequence
  Synthetic
ugaagguauccuuaaugaucucua

SEQ ID NO: 503270 - RNA, 18 nt, Artificial Sequence
  Synthetic
caugaaagagacucucua

SEQ ID NO: 503271 - RNA, 19 nt, Artificial Sequence
  Synthetic
acaugaaagagacucucua

SEQ ID NO: 503272 - RNA, 20 nt, Artificial Sequence
  Synthetic
gacaugaaagagacucucua

SEQ ID NO: 503273 - RNA, 21 nt, Artificial Sequence
  Synthetic
ugacaugaaagagacucucua

SEQ ID NO: 503274 - RNA, 22 nt, Artificial Sequence
  Synthetic
augacaugaaagagacucucua

SEQ ID NO: 503275 - RNA, 23 nt, Artificial Sequence
  Synthetic
gaugacaugaaagagacucucua

SEQ ID NO: 503276 - RNA, 24 nt, Artificial Sequence
  Synthetic
ggaugacaugaaagagacucucua

SEQ ID NO: 503277 - RNA, 18 nt, Artificial Sequence
  Synthetic
aagccauuuuccucucua

SEQ ID NO: 503278 - RNA, 19 nt, Artificial Sequence
  Synthetic
caagccauuuuccucucua

SEQ ID NO: 503279 - RNA, 20 nt, Artificial Sequence
  Synthetic
acaagccauuuuccucucua

SEQ ID NO: 503280 - RNA, 21 nt, Artificial Sequence
  Synthetic
aacaagccauuuuccucucua

SEQ ID NO: 503281 - RNA, 22 nt, Artificial Sequence
  Synthetic
aaacaagccauuuuccucucua

SEQ ID NO: 503282 - RNA, 23 nt, Artificial Sequence
  Synthetic
aaaacaagccauuuuccucucua

SEQ ID NO: 503283 - RNA, 24 nt, Artificial Sequence
  Synthetic
caaaacaagccauuuuccucucua

SEQ ID NO: 503284 - RNA, 18 nt, Artificial Sequence
  Synthetic
ugauugugaaagucucua

SEQ ID NO: 503285 - RNA, 19 nt, Artificial Sequence
  Synthetic
augauugugaaagucucua

SEQ ID NO: 503286 - RNA, 20 nt, Artificial Sequence
  Synthetic
aaugauugugaaagucucua

SEQ ID NO: 503287 - RNA, 21 nt, Artificial Sequence
  Synthetic
aaaugauugugaaagucucua

SEQ ID NO: 503288 - RNA, 22 nt, Artificial Sequence
  Synthetic
uaaaugauugugaaagucucua

SEQ ID NO: 503289 - RNA, 23 nt, Artificial Sequence
  Synthetic
cuaaaugauugugaaagucucua

SEQ ID NO: 503290 - RNA, 24 nt, Artificial Sequence
  Synthetic
ccuaaaugauugugaaagucucua

SEQ ID NO: 503291 - RNA, 18 nt, Artificial Sequence
  Synthetic
ggugaagcccugucucua

SEQ ID NO: 503292 - RNA, 19 nt, Artificial Sequence
  Synthetic
uggugaagcccugucucua

SEQ ID NO: 503293 - RNA, 20 nt, Artificial Sequence
  Synthetic
auggugaagcccugucucua

SEQ ID NO: 503294 - RNA, 21 nt, Artificial Sequence
  Synthetic
cauggugaagcccugucucua

SEQ ID NO: 503295 - RNA, 22 nt, Artificial Sequence
  Synthetic
acauggugaagcccugucucua

SEQ ID NO: 503296 - RNA, 23 nt, Artificial Sequence
  Synthetic
aacauggugaagcccugucucua

SEQ ID NO: 503297 - RNA, 24 nt, Artificial Sequence
  Synthetic
caacauggugaagcccugucucua

SEQ ID NO: 503298 - RNA, 18 nt, Artificial Sequence
  Synthetic
caauucagcgugucucua

SEQ ID NO: 503299 - RNA, 19 nt, Artificial Sequence
  Synthetic
ucaauucagcgugucucua

SEQ ID NO: 503300 - RNA, 20 nt, Artificial Sequence
  Synthetic
uucaauucagcgugucucua

SEQ ID NO: 503301 - RNA, 21 nt, Artificial Sequence
  Synthetic
cuucaauucagcgugucucua

SEQ ID NO: 503302 - RNA, 22 nt, Artificial Sequence
  Synthetic
gcuucaauucagcgugucucua

SEQ ID NO: 503303 - RNA, 23 nt, Artificial Sequence
  Synthetic
ugcuucaauucagcgugucucua

SEQ ID NO: 503304 - RNA, 24 nt, Artificial Sequence
  Synthetic
uugcuucaauucagcgugucucua

SEQ ID NO: 503305 - RNA, 18 nt, Artificial Sequence
  Synthetic
uuacuucauuauucucua

SEQ ID NO: 503306 - RNA, 19 nt, Artificial Sequence
  Synthetic
auuacuucauuauucucua

SEQ ID NO: 503307 - RNA, 20 nt, Artificial Sequence
  Synthetic
aauuacuucauuauucucua

SEQ ID NO: 503308 - RNA, 21 nt, Artificial Sequence
  Synthetic
aaauuacuucauuauucucua

SEQ ID NO: 503309 - RNA, 22 nt, Artificial Sequence
  Synthetic
aaaauuacuucauuauucucua

SEQ ID NO: 503310 - RNA, 23 nt, Artificial Sequence
  Synthetic
gaaaauuacuucauuauucucua

SEQ ID NO: 503311 - RNA, 24 nt, Artificial Sequence
  Synthetic
ugaaaauuacuucauuauucucua

SEQ ID NO: 503312 - RNA, 18 nt, Artificial Sequence
  Synthetic
uggaauaguuauucucua

SEQ ID NO: 503313 - RNA, 19 nt, Artificial Sequence
  Synthetic
uuggaauaguuauucucua

SEQ ID NO: 503314 - RNA, 20 nt, Artificial Sequence
  Synthetic
guuggaauaguuauucucua

SEQ ID NO: 503315 - RNA, 21 nt, Artificial Sequence
  Synthetic
aguuggaauaguuauucucua

SEQ ID NO: 503316 - RNA, 22 nt, Artificial Sequence
  Synthetic
uaguuggaauaguuauucucua

SEQ ID NO: 503317 - RNA, 23 nt, Artificial Sequence
  Synthetic
auaguuggaauaguuauucucua

SEQ ID NO: 503318 - RNA, 24 nt, Artificial Sequence
  Synthetic
gauaguuggaauaguuauucucua

SEQ ID NO: 503319 - RNA, 18 nt, Artificial Sequence
  Synthetic
gugaaggcaggaagucua

SEQ ID NO: 503320 - RNA, 19 nt, Artificial Sequence
  Synthetic
agugaaggcaggaagucua

SEQ ID NO: 503321 - RNA, 20 nt, Artificial Sequence
  Synthetic
gagugaaggcaggaagucua

SEQ ID NO: 503322 - RNA, 21 nt, Artificial Sequence
  Synthetic
agagugaaggcaggaagucua

SEQ ID NO: 503323 - RNA, 22 nt, Artificial Sequence
  Synthetic
cagagugaaggcaggaagucua

SEQ ID NO: 503324 - RNA, 23 nt, Artificial Sequence
  Synthetic
ucagagugaaggcaggaagucua

SEQ ID NO: 503325 - RNA, 24 nt, Artificial Sequence
  Synthetic
gucagagugaaggcaggaagucua

SEQ ID NO: 503326 - RNA, 18 nt, Artificial Sequence
  Synthetic
gaaucuauuggaagucua

SEQ ID NO: 503327 - RNA, 19 nt, Artificial Sequence
  Synthetic
ggaaucuauuggaagucua

SEQ ID NO: 503328 - RNA, 20 nt, Artificial Sequence
  Synthetic
aggaaucuauuggaagucua

SEQ ID NO: 503329 - RNA, 21 nt, Artificial Sequence
  Synthetic
aaggaaucuauuggaagucua

SEQ ID NO: 503330 - RNA, 22 nt, Artificial Sequence
  Synthetic
gaaggaaucuauuggaagucua

SEQ ID NO: 503331 - RNA, 23 nt, Artificial Sequence
  Synthetic
ggaaggaaucuauuggaagucua

SEQ ID NO: 503332 - RNA, 24 nt, Artificial Sequence
  Synthetic
aggaaggaaucuauuggaagucua

SEQ ID NO: 503333 - RNA, 18 nt, Artificial Sequence
  Synthetic
agggaguuauuaagucua

SEQ ID NO: 503334 - RNA, 19 nt, Artificial Sequence
  Synthetic
uagggaguuauuaagucua

SEQ ID NO: 503335 - RNA, 20 nt, Artificial Sequence
  Synthetic
uuagggaguuauuaagucua

SEQ ID NO: 503336 - RNA, 21 nt, Artificial Sequence
  Synthetic
uuuagggaguuauuaagucua

SEQ ID NO: 503337 - RNA, 22 nt, Artificial Sequence
  Synthetic
uuuuagggaguuauuaagucua

SEQ ID NO: 503338 - RNA, 23 nt, Artificial Sequence
  Synthetic
uuuuuagggaguuauuaagucua

SEQ ID NO: 503339 - RNA, 24 nt, Artificial Sequence
  Synthetic
guuuuuagggaguuauuaagucua

SEQ ID NO: 503340 - RNA, 18 nt, Artificial Sequence
  Synthetic
aaaaaucucaacagucua

SEQ ID NO: 503341 - RNA, 19 nt, Artificial Sequence
  Synthetic
aaaaaaucucaacagucua

SEQ ID NO: 503342 - RNA, 20 nt, Artificial Sequence
  Synthetic
aaaaaaaucucaacagucua

SEQ ID NO: 503343 - RNA, 21 nt, Artificial Sequence
  Synthetic
aaaaaaaaucucaacagucua

SEQ ID NO: 503344 - RNA, 22 nt, Artificial Sequence
  Synthetic
gaaaaaaaaucucaacagucua

SEQ ID NO: 503345 - RNA, 23 nt, Artificial Sequence
  Synthetic
ggaaaaaaaaucucaacagucua

SEQ ID NO: 503346 - RNA, 24 nt, Artificial Sequence
  Synthetic
aggaaaaaaaaucucaacagucua

SEQ ID NO: 503347 - RNA, 18 nt, Artificial Sequence
  Synthetic
auuaaaagugccagucua

SEQ ID NO: 503348 - RNA, 19 nt, Artificial Sequence
  Synthetic
aauuaaaagugccagucua

SEQ ID NO: 503349 - RNA, 20 nt, Artificial Sequence
  Synthetic
aaauuaaaagugccagucua

SEQ ID NO: 503350 - RNA, 21 nt, Artificial Sequence
  Synthetic
aaaauuaaaagugccagucua

SEQ ID NO: 503351 - RNA, 22 nt, Artificial Sequence
  Synthetic
gaaaauuaaaagugccagucua

SEQ ID NO: 503352 - RNA, 23 nt, Artificial Sequence
  Synthetic
agaaaauuaaaagugccagucua

SEQ ID NO: 503353 - RNA, 24 nt, Artificial Sequence
  Synthetic
aagaaaauuaaaagugccagucua

SEQ ID NO: 503354 - RNA, 18 nt, Artificial Sequence
  Synthetic
ugaaaacgagucagucua

SEQ ID NO: 503355 - RNA, 19 nt, Artificial Sequence
  Synthetic
uugaaaacgagucagucua

SEQ ID NO: 503356 - RNA, 20 nt, Artificial Sequence
  Synthetic
auugaaaacgagucagucua

SEQ ID NO: 503357 - RNA, 21 nt, Artificial Sequence
  Synthetic
aauugaaaacgagucagucua

SEQ ID NO: 503358 - RNA, 22 nt, Artificial Sequence
  Synthetic
uaauugaaaacgagucagucua

SEQ ID NO: 503359 - RNA, 23 nt, Artificial Sequence
  Synthetic
cuaauugaaaacgagucagucua

SEQ ID NO: 503360 - RNA, 24 nt, Artificial Sequence
  Synthetic
acuaauugaaaacgagucagucua

SEQ ID NO: 503361 - RNA, 18 nt, Artificial Sequence
  Synthetic
uauugacaguagagucua

SEQ ID NO: 503362 - RNA, 19 nt, Artificial Sequence
  Synthetic
auauugacaguagagucua

SEQ ID NO: 503363 - RNA, 20 nt, Artificial Sequence
  Synthetic
uauauugacaguagagucua

SEQ ID NO: 503364 - RNA, 21 nt, Artificial Sequence
  Synthetic
guauauugacaguagagucua

SEQ ID NO: 503365 - RNA, 22 nt, Artificial Sequence
  Synthetic
aguauauugacaguagagucua

SEQ ID NO: 503366 - RNA, 23 nt, Artificial Sequence
  Synthetic
uaguauauugacaguagagucua

SEQ ID NO: 503367 - RNA, 24 nt, Artificial Sequence
  Synthetic
cuaguauauugacaguagagucua

SEQ ID NO: 503368 - RNA, 18 nt, Artificial Sequence
  Synthetic
gaugcaaugucuagucua

SEQ ID NO: 503369 - RNA, 19 nt, Artificial Sequence
  Synthetic
ugaugcaaugucuagucua

SEQ ID NO: 503370 - RNA, 20 nt, Artificial Sequence
  Synthetic
cugaugcaaugucuagucua

SEQ ID NO: 503371 - RNA, 21 nt, Artificial Sequence
  Synthetic
acugaugcaaugucuagucua

SEQ ID NO: 503372 - RNA, 22 nt, Artificial Sequence
  Synthetic
gacugaugcaaugucuagucua

SEQ ID NO: 503373 - RNA, 23 nt, Artificial Sequence
  Synthetic
agacugaugcaaugucuagucua

SEQ ID NO: 503374 - RNA, 24 nt, Artificial Sequence
  Synthetic
cagacugaugcaaugucuagucua

SEQ ID NO: 503375 - RNA, 18 nt, Artificial Sequence
  Synthetic
aaagaauauguuagucua

SEQ ID NO: 503376 - RNA, 19 nt, Artificial Sequence
  Synthetic
gaaagaauauguuagucua

SEQ ID NO: 503377 - RNA, 20 nt, Artificial Sequence
  Synthetic
agaaagaauauguuagucua

SEQ ID NO: 503378 - RNA, 21 nt, Artificial Sequence
  Synthetic
cagaaagaauauguuagucua

SEQ ID NO: 503379 - RNA, 22 nt, Artificial Sequence
  Synthetic
gcagaaagaauauguuagucua

SEQ ID NO: 503380 - RNA, 23 nt, Artificial Sequence
  Synthetic
agcagaaagaauauguuagucua

SEQ ID NO: 503381 - RNA, 24 nt, Artificial Sequence
  Synthetic
aagcagaaagaauauguuagucua

SEQ ID NO: 503382 - RNA, 18 nt, Artificial Sequence
  Synthetic
aaaaacaucacaggucua

SEQ ID NO: 503383 - RNA, 19 nt, Artificial Sequence
  Synthetic
caaaaacaucacaggucua

SEQ ID NO: 503384 - RNA, 20 nt, Artificial Sequence
  Synthetic
ucaaaaacaucacaggucua

SEQ ID NO: 503385 - RNA, 21 nt, Artificial Sequence
  Synthetic
uucaaaaacaucacaggucua

SEQ ID NO: 503386 - RNA, 22 nt, Artificial Sequence
  Synthetic
uuucaaaaacaucacaggucua

SEQ ID NO: 503387 - RNA, 23 nt, Artificial Sequence
  Synthetic
auuucaaaaacaucacaggucua

SEQ ID NO: 503388 - RNA, 24 nt, Artificial Sequence
  Synthetic
aauuucaaaaacaucacaggucua

SEQ ID NO: 503389 - RNA, 18 nt, Artificial Sequence
  Synthetic
uuguggcagagaggucua

SEQ ID NO: 503390 - RNA, 19 nt, Artificial Sequence
  Synthetic
cuuguggcagagaggucua

SEQ ID NO: 503391 - RNA, 20 nt, Artificial Sequence
  Synthetic
ccuuguggcagagaggucua

SEQ ID NO: 503392 - RNA, 21 nt, Artificial Sequence
  Synthetic
uccuuguggcagagaggucua

SEQ ID NO: 503393 - RNA, 22 nt, Artificial Sequence
  Synthetic
auccuuguggcagagaggucua

SEQ ID NO: 503394 - RNA, 23 nt, Artificial Sequence
  Synthetic
uauccuuguggcagagaggucua

SEQ ID NO: 503395 - RNA, 24 nt, Artificial Sequence
  Synthetic
auauccuuguggcagagaggucua

SEQ ID NO: 503396 - RNA, 18 nt, Artificial Sequence
  Synthetic
gcuugugacucaugucua

SEQ ID NO: 503397 - RNA, 19 nt, Artificial Sequence
  Synthetic
ugcuugugacucaugucua

SEQ ID NO: 503398 - RNA, 20 nt, Artificial Sequence
  Synthetic
augcuugugacucaugucua

SEQ ID NO: 503399 - RNA, 21 nt, Artificial Sequence
  Synthetic
aaugcuugugacucaugucua

SEQ ID NO: 503400 - RNA, 22 nt, Artificial Sequence
  Synthetic
aaaugcuugugacucaugucua

SEQ ID NO: 503401 - RNA, 23 nt, Artificial Sequence
  Synthetic
uaaaugcuugugacucaugucua

SEQ ID NO: 503402 - RNA, 24 nt, Artificial Sequence
  Synthetic
auaaaugcuugugacucaugucua

SEQ ID NO: 503403 - RNA, 18 nt, Artificial Sequence
  Synthetic
aaaugaauuagcugucua

SEQ ID NO: 503404 - RNA, 19 nt, Artificial Sequence
  Synthetic
aaaaugaauuagcugucua

SEQ ID NO: 503405 - RNA, 20 nt, Artificial Sequence
  Synthetic
aaaaaugaauuagcugucua

SEQ ID NO: 503406 - RNA, 21 nt, Artificial Sequence
  Synthetic
aaaaaaugaauuagcugucua

SEQ ID NO: 503407 - RNA, 22 nt, Artificial Sequence
  Synthetic
aaaaaaaugaauuagcugucua

SEQ ID NO: 503408 - RNA, 23 nt, Artificial Sequence
  Synthetic
uaaaaaaaugaauuagcugucua

SEQ ID NO: 503409 - RNA, 24 nt, Artificial Sequence
  Synthetic
guaaaaaaaugaauuagcugucua

SEQ ID NO: 503410 - RNA, 18 nt, Artificial Sequence
  Synthetic
cauuugugggagugucua

SEQ ID NO: 503411 - RNA, 19 nt, Artificial Sequence
  Synthetic
acauuugugggagugucua

SEQ ID NO: 503412 - RNA, 20 nt, Artificial Sequence
  Synthetic
gacauuugugggagugucua

SEQ ID NO: 503413 - RNA, 21 nt, Artificial Sequence
  Synthetic
ugacauuugugggagugucua

SEQ ID NO: 503414 - RNA, 22 nt, Artificial Sequence
  Synthetic
uugacauuugugggagugucua

SEQ ID NO: 503415 - RNA, 23 nt, Artificial Sequence
  Synthetic
auugacauuugugggagugucua

SEQ ID NO: 503416 - RNA, 24 nt, Artificial Sequence
  Synthetic
gauugacauuugugggagugucua

SEQ ID NO: 503417 - RNA, 18 nt, Artificial Sequence
  Synthetic
acagccaaagauugucua

SEQ ID NO: 503418 - RNA, 19 nt, Artificial Sequence
  Synthetic
cacagccaaagauugucua

SEQ ID NO: 503419 - RNA, 20 nt, Artificial Sequence
  Synthetic
acacagccaaagauugucua

SEQ ID NO: 503420 - RNA, 21 nt, Artificial Sequence
  Synthetic
aacacagccaaagauugucua

SEQ ID NO: 503421 - RNA, 22 nt, Artificial Sequence
  Synthetic
aaacacagccaaagauugucua

SEQ ID NO: 503422 - RNA, 23 nt, Artificial Sequence
  Synthetic
caaacacagccaaagauugucua

SEQ ID NO: 503423 - RNA, 24 nt, Artificial Sequence
  Synthetic
gcaaacacagccaaagauugucua

SEQ ID NO: 503424 - RNA, 18 nt, Artificial Sequence
  Synthetic
uauuuuacuucuugucua

SEQ ID NO: 503425 - RNA, 19 nt, Artificial Sequence
  Synthetic
guauuuuacuucuugucua

SEQ ID NO: 503426 - RNA, 20 nt, Artificial Sequence
  Synthetic
aguauuuuacuucuugucua

SEQ ID NO: 503427 - RNA, 21 nt, Artificial Sequence
  Synthetic
aaguauuuuacuucuugucua

SEQ ID NO: 503428 - RNA, 22 nt, Artificial Sequence
  Synthetic
caaguauuuuacuucuugucua

SEQ ID NO: 503429 - RNA, 23 nt, Artificial Sequence
  Synthetic
acaaguauuuuacuucuugucua

SEQ ID NO: 503430 - RNA, 24 nt, Artificial Sequence
  Synthetic
gacaaguauuuuacuucuugucua

SEQ ID NO: 503431 - RNA, 18 nt, Artificial Sequence
  Synthetic
accuagauuguuugucua

SEQ ID NO: 503432 - RNA, 19 nt, Artificial Sequence
  Synthetic
uaccuagauuguuugucua

SEQ ID NO: 503433 - RNA, 20 nt, Artificial Sequence
  Synthetic
auaccuagauuguuugucua

SEQ ID NO: 503434 - RNA, 21 nt, Artificial Sequence
  Synthetic
gauaccuagauuguuugucua

SEQ ID NO: 503435 - RNA, 22 nt, Artificial Sequence
  Synthetic
ggauaccuagauuguuugucua

SEQ ID NO: 503436 - RNA, 23 nt, Artificial Sequence
  Synthetic
aggauaccuagauuguuugucua

SEQ ID NO: 503437 - RNA, 24 nt, Artificial Sequence
  Synthetic
uaggauaccuagauuguuugucua

SEQ ID NO: 503438 - RNA, 18 nt, Artificial Sequence
  Synthetic
caagacauguuuugucua

SEQ ID NO: 503439 - RNA, 19 nt, Artificial Sequence
  Synthetic
acaagacauguuuugucua

SEQ ID NO: 503440 - RNA, 20 nt, Artificial Sequence
  Synthetic
cacaagacauguuuugucua

SEQ ID NO: 503441 - RNA, 21 nt, Artificial Sequence
  Synthetic
ccacaagacauguuuugucua

SEQ ID NO: 503442 - RNA, 22 nt, Artificial Sequence
  Synthetic
gccacaagacauguuuugucua

SEQ ID NO: 503443 - RNA, 23 nt, Artificial Sequence
  Synthetic
ggccacaagacauguuuugucua

SEQ ID NO: 503444 - RNA, 24 nt, Artificial Sequence
  Synthetic
uggccacaagacauguuuugucua

SEQ ID NO: 503445 - RNA, 18 nt, Artificial Sequence
  Synthetic
agaaaauugguaauucua

SEQ ID NO: 503446 - RNA, 19 nt, Artificial Sequence
  Synthetic
gagaaaauugguaauucua

SEQ ID NO: 503447 - RNA, 20 nt, Artificial Sequence
  Synthetic
agagaaaauugguaauucua

SEQ ID NO: 503448 - RNA, 21 nt, Artificial Sequence
  Synthetic
gagagaaaauugguaauucua

SEQ ID NO: 503449 - RNA, 22 nt, Artificial Sequence
  Synthetic
agagagaaaauugguaauucua

SEQ ID NO: 503450 - RNA, 23 nt, Artificial Sequence
  Synthetic
gagagagaaaauugguaauucua

SEQ ID NO: 503451 - RNA, 24 nt, Artificial Sequence
  Synthetic
agagagagaaaauugguaauucua

SEQ ID NO: 503452 - RNA, 18 nt, Artificial Sequence
  Synthetic
ggaaaauaagacauucua

SEQ ID NO: 503453 - RNA, 19 nt, Artificial Sequence
  Synthetic
gggaaaauaagacauucua

SEQ ID NO: 503454 - RNA, 20 nt, Artificial Sequence
  Synthetic
ggggaaaauaagacauucua

SEQ ID NO: 503455 - RNA, 21 nt, Artificial Sequence
  Synthetic
uggggaaaauaagacauucua

SEQ ID NO: 503456 - RNA, 22 nt, Artificial Sequence
  Synthetic
auggggaaaauaagacauucua

SEQ ID NO: 503457 - RNA, 23 nt, Artificial Sequence
  Synthetic
gauggggaaaauaagacauucua

SEQ ID NO: 503458 - RNA, 24 nt, Artificial Sequence
  Synthetic
agauggggaaaauaagacauucua

SEQ ID NO: 503459 - RNA, 18 nt, Artificial Sequence
  Synthetic
gugucauaguacauucua

SEQ ID NO: 503460 - RNA, 19 nt, Artificial Sequence
  Synthetic
ugugucauaguacauucua

SEQ ID NO: 503461 - RNA, 20 nt, Artificial Sequence
  Synthetic
augugucauaguacauucua

SEQ ID NO: 503462 - RNA, 21 nt, Artificial Sequence
  Synthetic
gaugugucauaguacauucua

SEQ ID NO: 503463 - RNA, 22 nt, Artificial Sequence
  Synthetic
ggaugugucauaguacauucua

SEQ ID NO: 503464 - RNA, 23 nt, Artificial Sequence
  Synthetic
uggaugugucauaguacauucua

SEQ ID NO: 503465 - RNA, 24 nt, Artificial Sequence
  Synthetic
auggaugugucauaguacauucua

SEQ ID NO: 503466 - RNA, 18 nt, Artificial Sequence
  Synthetic
aaauggauuuacauucua

SEQ ID NO: 503467 - RNA, 19 nt, Artificial Sequence
  Synthetic
uaaauggauuuacauucua

SEQ ID NO: 503468 - RNA, 20 nt, Artificial Sequence
  Synthetic
uuaaauggauuuacauucua

SEQ ID NO: 503469 - RNA, 21 nt, Artificial Sequence
  Synthetic
guuaaauggauuuacauucua

SEQ ID NO: 503470 - RNA, 22 nt, Artificial Sequence
  Synthetic
uguuaaauggauuuacauucua

SEQ ID NO: 503471 - RNA, 23 nt, Artificial Sequence
  Synthetic
auguuaaauggauuuacauucua

SEQ ID NO: 503472 - RNA, 24 nt, Artificial Sequence
  Synthetic
uauguuaaauggauuuacauucua

SEQ ID NO: 503473 - RNA, 18 nt, Artificial Sequence
  Synthetic
guagaaacaagcauucua

SEQ ID NO: 503474 - RNA, 19 nt, Artificial Sequence
  Synthetic
gguagaaacaagcauucua

SEQ ID NO: 503475 - RNA, 20 nt, Artificial Sequence
  Synthetic
agguagaaacaagcauucua

SEQ ID NO: 503476 - RNA, 21 nt, Artificial Sequence
  Synthetic
aagguagaaacaagcauucua

SEQ ID NO: 503477 - RNA, 22 nt, Artificial Sequence
  Synthetic
aaagguagaaacaagcauucua

SEQ ID NO: 503478 - RNA, 23 nt, Artificial Sequence
  Synthetic
uaaagguagaaacaagcauucua

SEQ ID NO: 503479 - RNA, 24 nt, Artificial Sequence
  Synthetic
uuaaagguagaaacaagcauucua

SEQ ID NO: 503480 - RNA, 18 nt, Artificial Sequence
  Synthetic
auuuuucagaucauucua

SEQ ID NO: 503481 - RNA, 19 nt, Artificial Sequence
  Synthetic
cauuuuucagaucauucua

SEQ ID NO: 503482 - RNA, 20 nt, Artificial Sequence
  Synthetic
acauuuuucagaucauucua

SEQ ID NO: 503483 - RNA, 21 nt, Artificial Sequence
  Synthetic
aacauuuuucagaucauucua

SEQ ID NO: 503484 - RNA, 22 nt, Artificial Sequence
  Synthetic
aaacauuuuucagaucauucua

SEQ ID NO: 503485 - RNA, 23 nt, Artificial Sequence
  Synthetic
aaaacauuuuucagaucauucua

SEQ ID NO: 503486 - RNA, 24 nt, Artificial Sequence
  Synthetic
uaaaacauuuuucagaucauucua

SEQ ID NO: 503487 - RNA, 18 nt, Artificial Sequence
  Synthetic
auggauucuaucauucua

SEQ ID NO: 503488 - RNA, 19 nt, Artificial Sequence
  Synthetic
cauggauucuaucauucua

SEQ ID NO: 503489 - RNA, 20 nt, Artificial Sequence
  Synthetic
acauggauucuaucauucua

SEQ ID NO: 503490 - RNA, 21 nt, Artificial Sequence
  Synthetic
uacauggauucuaucauucua

SEQ ID NO: 503491 - RNA, 22 nt, Artificial Sequence
  Synthetic
cuacauggauucuaucauucua

SEQ ID NO: 503492 - RNA, 23 nt, Artificial Sequence
  Synthetic
ucuacauggauucuaucauucua

SEQ ID NO: 503493 - RNA, 24 nt, Artificial Sequence
  Synthetic
gucuacauggauucuaucauucua

SEQ ID NO: 503494 - RNA, 18 nt, Artificial Sequence
  Synthetic
aauguaacugucauucua

SEQ ID NO: 503495 - RNA, 19 nt, Artificial Sequence
  Synthetic
aaauguaacugucauucua

SEQ ID NO: 503496 - RNA, 20 nt, Artificial Sequence
  Synthetic
aaaauguaacugucauucua

SEQ ID NO: 503497 - RNA, 21 nt, Artificial Sequence
  Synthetic
gaaaauguaacugucauucua

SEQ ID NO: 503498 - RNA, 22 nt, Artificial Sequence
  Synthetic
cgaaaauguaacugucauucua

SEQ ID NO: 503499 - RNA, 23 nt, Artificial Sequence
  Synthetic
acgaaaauguaacugucauucua

SEQ ID NO: 503500 - RNA, 24 nt, Artificial Sequence
  Synthetic
aacgaaaauguaacugucauucua

SEQ ID NO: 503501 - RNA, 18 nt, Artificial Sequence
  Synthetic
caaaauauguucauucua

SEQ ID NO: 503502 - RNA, 19 nt, Artificial Sequence
  Synthetic
ccaaaauauguucauucua

SEQ ID NO: 503503 - RNA, 20 nt, Artificial Sequence
  Synthetic
cccaaaauauguucauucua

SEQ ID NO: 503504 - RNA, 21 nt, Artificial Sequence
  Synthetic
acccaaaauauguucauucua

SEQ ID NO: 503505 - RNA, 22 nt, Artificial Sequence
  Synthetic
uacccaaaauauguucauucua

SEQ ID NO: 503506 - RNA, 23 nt, Artificial Sequence
  Synthetic
guacccaaaauauguucauucua

SEQ ID NO: 503507 - RNA, 24 nt, Artificial Sequence
  Synthetic
aguacccaaaauauguucauucua

SEQ ID NO: 503508 - RNA, 18 nt, Artificial Sequence
  Synthetic
aggaagggacauauucua

SEQ ID NO: 503509 - RNA, 19 nt, Artificial Sequence
  Synthetic
aaggaagggacauauucua

SEQ ID NO: 503510 - RNA, 20 nt, Artificial Sequence
  Synthetic
aaaggaagggacauauucua

SEQ ID NO: 503511 - RNA, 21 nt, Artificial Sequence
  Synthetic
uaaaggaagggacauauucua

SEQ ID NO: 503512 - RNA, 22 nt, Artificial Sequence
  Synthetic
uuaaaggaagggacauauucua

SEQ ID NO: 503513 - RNA, 23 nt, Artificial Sequence
  Synthetic
uuuaaaggaagggacauauucua

SEQ ID NO: 503514 - RNA, 24 nt, Artificial Sequence
  Synthetic
uuuuaaaggaagggacauauucua

SEQ ID NO: 503515 - RNA, 18 nt, Artificial Sequence
  Synthetic
uaaacccuagauauucua

SEQ ID NO: 503516 - RNA, 19 nt, Artificial Sequence
  Synthetic
uuaaacccuagauauucua

SEQ ID NO: 503517 - RNA, 20 nt, Artificial Sequence
  Synthetic
auuaaacccuagauauucua

SEQ ID NO: 503518 - RNA, 21 nt, Artificial Sequence
  Synthetic
uauuaaacccuagauauucua

SEQ ID NO: 503519 - RNA, 22 nt, Artificial Sequence
  Synthetic
guauuaaacccuagauauucua

SEQ ID NO: 503520 - RNA, 23 nt, Artificial Sequence
  Synthetic
uguauuaaacccuagauauucua

SEQ ID NO: 503521 - RNA, 24 nt, Artificial Sequence
  Synthetic
cuguauuaaacccuagauauucua

SEQ ID NO: 503522 - RNA, 18 nt, Artificial Sequence
  Synthetic
aucucagaauauauucua

SEQ ID NO: 503523 - RNA, 19 nt, Artificial Sequence
  Synthetic
caucucagaauauauucua

SEQ ID NO: 503524 - RNA, 20 nt, Artificial Sequence
  Synthetic
acaucucagaauauauucua

SEQ ID NO: 503525 - RNA, 21 nt, Artificial Sequence
  Synthetic
aacaucucagaauauauucua

SEQ ID NO: 503526 - RNA, 22 nt, Artificial Sequence
  Synthetic
uaacaucucagaauauauucua

SEQ ID NO: 503527 - RNA, 23 nt, Artificial Sequence
  Synthetic
guaacaucucagaauauauucua

SEQ ID NO: 503528 - RNA, 24 nt, Artificial Sequence
  Synthetic
gguaacaucucagaauauauucua

SEQ ID NO: 503529 - RNA, 18 nt, Artificial Sequence
  Synthetic
uggaccaauuauauucua

SEQ ID NO: 503530 - RNA, 19 nt, Artificial Sequence
  Synthetic
cuggaccaauuauauucua

SEQ ID NO: 503531 - RNA, 20 nt, Artificial Sequence
  Synthetic
ccuggaccaauuauauucua

SEQ ID NO: 503532 - RNA, 21 nt, Artificial Sequence
  Synthetic
cccuggaccaauuauauucua

SEQ ID NO: 503533 - RNA, 22 nt, Artificial Sequence
  Synthetic
gcccuggaccaauuauauucua

SEQ ID NO: 503534 - RNA, 23 nt, Artificial Sequence
  Synthetic
ggcccuggaccaauuauauucua

SEQ ID NO: 503535 - RNA, 24 nt, Artificial Sequence
  Synthetic
uggcccuggaccaauuauauucua

SEQ ID NO: 503536 - RNA, 18 nt, Artificial Sequence
  Synthetic
ugauugccuucuauucua

SEQ ID NO: 503537 - RNA, 19 nt, Artificial Sequence
  Synthetic
cugauugccuucuauucua

SEQ ID NO: 503538 - RNA, 20 nt, Artificial Sequence
  Synthetic
ccugauugccuucuauucua

SEQ ID NO: 503539 - RNA, 21 nt, Artificial Sequence
  Synthetic
uccugauugccuucuauucua

SEQ ID NO: 503540 - RNA, 22 nt, Artificial Sequence
  Synthetic
cuccugauugccuucuauucua

SEQ ID NO: 503541 - RNA, 23 nt, Artificial Sequence
  Synthetic
ucuccugauugccuucuauucua

SEQ ID NO: 503542 - RNA, 24 nt, Artificial Sequence
  Synthetic
cucuccugauugccuucuauucua

SEQ ID NO: 503543 - RNA, 18 nt, Artificial Sequence
  Synthetic
uaaaaagaaaguauucua

SEQ ID NO: 503544 - RNA, 19 nt, Artificial Sequence
  Synthetic
uuaaaaagaaaguauucua

SEQ ID NO: 503545 - RNA, 20 nt, Artificial Sequence
  Synthetic
cuuaaaaagaaaguauucua

SEQ ID NO: 503546 - RNA, 21 nt, Artificial Sequence
  Synthetic
ccuuaaaaagaaaguauucua

SEQ ID NO: 503547 - RNA, 22 nt, Artificial Sequence
  Synthetic
gccuuaaaaagaaaguauucua

SEQ ID NO: 503548 - RNA, 23 nt, Artificial Sequence
  Synthetic
ugccuuaaaaagaaaguauucua

SEQ ID NO: 503549 - RNA, 24 nt, Artificial Sequence
  Synthetic
uugccuuaaaaagaaaguauucua

SEQ ID NO: 503550 - RNA, 18 nt, Artificial Sequence
  Synthetic
auaaaauauauuauucua

SEQ ID NO: 503551 - RNA, 19 nt, Artificial Sequence
  Synthetic
aauaaaauauauuauucua

SEQ ID NO: 503552 - RNA, 20 nt, Artificial Sequence
  Synthetic
aaauaaaauauauuauucua

SEQ ID NO: 503553 - RNA, 21 nt, Artificial Sequence
  Synthetic
aaaauaaaauauauuauucua

SEQ ID NO: 503554 - RNA, 22 nt, Artificial Sequence
  Synthetic
gaaaauaaaauauauuauucua

SEQ ID NO: 503555 - RNA, 23 nt, Artificial Sequence
  Synthetic
agaaaauaaaauauauuauucua

SEQ ID NO: 503556 - RNA, 24 nt, Artificial Sequence
  Synthetic
gagaaaauaaaauauauuauucua

SEQ ID NO: 503557 - RNA, 18 nt, Artificial Sequence
  Synthetic
aguuuugaacuuauucua

SEQ ID NO: 503558 - RNA, 19 nt, Artificial Sequence
  Synthetic
gaguuuugaacuuauucua

SEQ ID NO: 503559 - RNA, 20 nt, Artificial Sequence
  Synthetic
ggaguuuugaacuuauucua

SEQ ID NO: 503560 - RNA, 21 nt, Artificial Sequence
  Synthetic
uggaguuuugaacuuauucua

SEQ ID NO: 503561 - RNA, 22 nt, Artificial Sequence
  Synthetic
auggaguuuugaacuuauucua

SEQ ID NO: 503562 - RNA, 23 nt, Artificial Sequence
  Synthetic
cauggaguuuugaacuuauucua

SEQ ID NO: 503563 - RNA, 24 nt, Artificial Sequence
  Synthetic
acauggaguuuugaacuuauucua

SEQ ID NO: 503564 - RNA, 18 nt, Artificial Sequence
  Synthetic
uacacauguauacuucua

SEQ ID NO: 503565 - RNA, 19 nt, Artificial Sequence
  Synthetic
guacacauguauacuucua

SEQ ID NO: 503566 - RNA, 20 nt, Artificial Sequence
  Synthetic
gguacacauguauacuucua

SEQ ID NO: 503567 - RNA, 21 nt, Artificial Sequence
  Synthetic
agguacacauguauacuucua

SEQ ID NO: 503568 - RNA, 22 nt, Artificial Sequence
  Synthetic
uagguacacauguauacuucua

SEQ ID NO: 503569 - RNA, 23 nt, Artificial Sequence
  Synthetic
auagguacacauguauacuucua

SEQ ID NO: 503570 - RNA, 24 nt, Artificial Sequence
  Synthetic
uauagguacacauguauacuucua

SEQ ID NO: 503571 - RNA, 18 nt, Artificial Sequence
  Synthetic
cuacaaauuauacuucua

SEQ ID NO: 503572 - RNA, 19 nt, Artificial Sequence
  Synthetic
ucuacaaauuauacuucua

SEQ ID NO: 503573 - RNA, 20 nt, Artificial Sequence
  Synthetic
aucuacaaauuauacuucua

SEQ ID NO: 503574 - RNA, 21 nt, Artificial Sequence
  Synthetic
uaucuacaaauuauacuucua

SEQ ID NO: 503575 - RNA, 22 nt, Artificial Sequence
  Synthetic
auaucuacaaauuauacuucua

SEQ ID NO: 503576 - RNA, 23 nt, Artificial Sequence
  Synthetic
aauaucuacaaauuauacuucua

SEQ ID NO: 503577 - RNA, 24 nt, Artificial Sequence
  Synthetic
aaauaucuacaaauuauacuucua

SEQ ID NO: 503578 - RNA, 18 nt, Artificial Sequence
  Synthetic
aaaugaguuaaccuucua

SEQ ID NO: 503579 - RNA, 19 nt, Artificial Sequence
  Synthetic
aaaaugaguuaaccuucua

SEQ ID NO: 503580 - RNA, 20 nt, Artificial Sequence
  Synthetic
gaaaaugaguuaaccuucua

SEQ ID NO: 503581 - RNA, 21 nt, Artificial Sequence
  Synthetic
agaaaaugaguuaaccuucua

SEQ ID NO: 503582 - RNA, 22 nt, Artificial Sequence
  Synthetic
gagaaaaugaguuaaccuucua

SEQ ID NO: 503583 - RNA, 23 nt, Artificial Sequence
  Synthetic
agagaaaaugaguuaaccuucua

SEQ ID NO: 503584 - RNA, 24 nt, Artificial Sequence
  Synthetic
uagagaaaaugaguuaaccuucua

SEQ ID NO: 503585 - RNA, 18 nt, Artificial Sequence
  Synthetic
cuggaaucucaccuucua

SEQ ID NO: 503586 - RNA, 19 nt, Artificial Sequence
  Synthetic
ucuggaaucucaccuucua

SEQ ID NO: 503587 - RNA, 20 nt, Artificial Sequence
  Synthetic
cucuggaaucucaccuucua

SEQ ID NO: 503588 - RNA, 21 nt, Artificial Sequence
  Synthetic
ucucuggaaucucaccuucua

SEQ ID NO: 503589 - RNA, 22 nt, Artificial Sequence
  Synthetic
cucucuggaaucucaccuucua

SEQ ID NO: 503590 - RNA, 23 nt, Artificial Sequence
  Synthetic
gcucucuggaaucucaccuucua

SEQ ID NO: 503591 - RNA, 24 nt, Artificial Sequence
  Synthetic
cgcucucuggaaucucaccuucua

SEQ ID NO: 503592 - RNA, 18 nt, Artificial Sequence
  Synthetic
ucaaaggcaugccuucua

SEQ ID NO: 503593 - RNA, 19 nt, Artificial Sequence
  Synthetic
uucaaaggcaugccuucua

SEQ ID NO: 503594 - RNA, 20 nt, Artificial Sequence
  Synthetic
auucaaaggcaugccuucua

SEQ ID NO: 503595 - RNA, 21 nt, Artificial Sequence
  Synthetic
aauucaaaggcaugccuucua

SEQ ID NO: 503596 - RNA, 22 nt, Artificial Sequence
  Synthetic
aaauucaaaggcaugccuucua

SEQ ID NO: 503597 - RNA, 23 nt, Artificial Sequence
  Synthetic
aaaauucaaaggcaugccuucua

SEQ ID NO: 503598 - RNA, 24 nt, Artificial Sequence
  Synthetic
caaaauucaaaggcaugccuucua

SEQ ID NO: 503599 - RNA, 18 nt, Artificial Sequence
  Synthetic
uaucuaaauuuccuucua

SEQ ID NO: 503600 - RNA, 19 nt, Artificial Sequence
  Synthetic
uuaucuaaauuuccuucua

SEQ ID NO: 503601 - RNA, 20 nt, Artificial Sequence
  Synthetic
auuaucuaaauuuccuucua

SEQ ID NO: 503602 - RNA, 21 nt, Artificial Sequence
  Synthetic
uauuaucuaaauuuccuucua

SEQ ID NO: 503603 - RNA, 22 nt, Artificial Sequence
  Synthetic
guauuaucuaaauuuccuucua

SEQ ID NO: 503604 - RNA, 23 nt, Artificial Sequence
  Synthetic
aguauuaucuaaauuuccuucua

SEQ ID NO: 503605 - RNA, 24 nt, Artificial Sequence
  Synthetic
aaguauuaucuaaauuuccuucua

SEQ ID NO: 503606 - RNA, 18 nt, Artificial Sequence
  Synthetic
cccccacuuuagcuucua

SEQ ID NO: 503607 - RNA, 19 nt, Artificial Sequence
  Synthetic
ccccccacuuuagcuucua

SEQ ID NO: 503608 - RNA, 20 nt, Artificial Sequence
  Synthetic
accccccacuuuagcuucua

SEQ ID NO: 503609 - RNA, 21 nt, Artificial Sequence
  Synthetic
caccccccacuuuagcuucua

SEQ ID NO: 503610 - RNA, 22 nt, Artificial Sequence
  Synthetic
ucaccccccacuuuagcuucua

SEQ ID NO: 503611 - RNA, 23 nt, Artificial Sequence
  Synthetic
gucaccccccacuuuagcuucua

SEQ ID NO: 503612 - RNA, 24 nt, Artificial Sequence
  Synthetic
ugucaccccccacuuuagcuucua

SEQ ID NO: 503613 - RNA, 18 nt, Artificial Sequence
  Synthetic
aggccuuuuccgcuucua

SEQ ID NO: 503614 - RNA, 19 nt, Artificial Sequence
  Synthetic
aaggccuuuuccgcuucua

SEQ ID NO: 503615 - RNA, 20 nt, Artificial Sequence
  Synthetic
gaaggccuuuuccgcuucua

SEQ ID NO: 503616 - RNA, 21 nt, Artificial Sequence
  Synthetic
ugaaggccuuuuccgcuucua

SEQ ID NO: 503617 - RNA, 22 nt, Artificial Sequence
  Synthetic
uugaaggccuuuuccgcuucua

SEQ ID NO: 503618 - RNA, 23 nt, Artificial Sequence
  Synthetic
auugaaggccuuuuccgcuucua

SEQ ID NO: 503619 - RNA, 24 nt, Artificial Sequence
  Synthetic
uauugaaggccuuuuccgcuucua

SEQ ID NO: 503620 - RNA, 18 nt, Artificial Sequence
  Synthetic
uucuguaucuugcuucua

SEQ ID NO: 503621 - RNA, 19 nt, Artificial Sequence
  Synthetic
uuucuguaucuugcuucua

SEQ ID NO: 503622 - RNA, 20 nt, Artificial Sequence
  Synthetic
guuucuguaucuugcuucua

SEQ ID NO: 503623 - RNA, 21 nt, Artificial Sequence
  Synthetic
aguuucuguaucuugcuucua

SEQ ID NO: 503624 - RNA, 22 nt, Artificial Sequence
  Synthetic
gaguuucuguaucuugcuucua

SEQ ID NO: 503625 - RNA, 23 nt, Artificial Sequence
  Synthetic
agaguuucuguaucuugcuucua

SEQ ID NO: 503626 - RNA, 24 nt, Artificial Sequence
  Synthetic
uagaguuucuguaucuugcuucua

SEQ ID NO: 503627 - RNA, 18 nt, Artificial Sequence
  Synthetic
agaugaagcagucuucua

SEQ ID NO: 503628 - RNA, 19 nt, Artificial Sequence
  Synthetic
uagaugaagcagucuucua

SEQ ID NO: 503629 - RNA, 20 nt, Artificial Sequence
  Synthetic
guagaugaagcagucuucua

SEQ ID NO: 503630 - RNA, 21 nt, Artificial Sequence
  Synthetic
uguagaugaagcagucuucua

SEQ ID NO: 503631 - RNA, 22 nt, Artificial Sequence
  Synthetic
guguagaugaagcagucuucua

SEQ ID NO: 503632 - RNA, 23 nt, Artificial Sequence
  Synthetic
aguguagaugaagcagucuucua

SEQ ID NO: 503633 - RNA, 24 nt, Artificial Sequence
  Synthetic
caguguagaugaagcagucuucua

SEQ ID NO: 503634 - RNA, 18 nt, Artificial Sequence
  Synthetic
ucaugaaauauucuucua

SEQ ID NO: 503635 - RNA, 19 nt, Artificial Sequence
  Synthetic
cucaugaaauauucuucua

SEQ ID NO: 503636 - RNA, 20 nt, Artificial Sequence
  Synthetic
ucucaugaaauauucuucua

SEQ ID NO: 503637 - RNA, 21 nt, Artificial Sequence
  Synthetic
cucucaugaaauauucuucua

SEQ ID NO: 503638 - RNA, 22 nt, Artificial Sequence
  Synthetic
ucucucaugaaauauucuucua

SEQ ID NO: 503639 - RNA, 23 nt, Artificial Sequence
  Synthetic
aucucucaugaaauauucuucua

SEQ ID NO: 503640 - RNA, 24 nt, Artificial Sequence
  Synthetic
aaucucucaugaaauauucuucua

SEQ ID NO: 503641 - RNA, 18 nt, Artificial Sequence
  Synthetic
cugcagugacuucuucua

SEQ ID NO: 503642 - RNA, 19 nt, Artificial Sequence
  Synthetic
ucugcagugacuucuucua

SEQ ID NO: 503643 - RNA, 20 nt, Artificial Sequence
  Synthetic
aucugcagugacuucuucua

SEQ ID NO: 503644 - RNA, 21 nt, Artificial Sequence
  Synthetic
caucugcagugacuucuucua

SEQ ID NO: 503645 - RNA, 22 nt, Artificial Sequence
  Synthetic
acaucugcagugacuucuucua

SEQ ID NO: 503646 - RNA, 23 nt, Artificial Sequence
  Synthetic
cacaucugcagugacuucuucua

SEQ ID NO: 503647 - RNA, 24 nt, Artificial Sequence
  Synthetic
ccacaucugcagugacuucuucua

SEQ ID NO: 503648 - RNA, 18 nt, Artificial Sequence
  Synthetic
ucaucucagaaaguucua

SEQ ID NO: 503649 - RNA, 19 nt, Artificial Sequence
  Synthetic
aucaucucagaaaguucua

SEQ ID NO: 503650 - RNA, 20 nt, Artificial Sequence
  Synthetic
caucaucucagaaaguucua

SEQ ID NO: 503651 - RNA, 21 nt, Artificial Sequence
  Synthetic
ccaucaucucagaaaguucua

SEQ ID NO: 503652 - RNA, 22 nt, Artificial Sequence
  Synthetic
gccaucaucucagaaaguucua

SEQ ID NO: 503653 - RNA, 23 nt, Artificial Sequence
  Synthetic
ugccaucaucucagaaaguucua

SEQ ID NO: 503654 - RNA, 24 nt, Artificial Sequence
  Synthetic
uugccaucaucucagaaaguucua

SEQ ID NO: 503655 - RNA, 18 nt, Artificial Sequence
  Synthetic
auaugggugccaguucua

SEQ ID NO: 503656 - RNA, 19 nt, Artificial Sequence
  Synthetic
uauaugggugccaguucua

SEQ ID NO: 503657 - RNA, 20 nt, Artificial Sequence
  Synthetic
cuauaugggugccaguucua

SEQ ID NO: 503658 - RNA, 21 nt, Artificial Sequence
  Synthetic
acuauaugggugccaguucua

SEQ ID NO: 503659 - RNA, 22 nt, Artificial Sequence
  Synthetic
aacuauaugggugccaguucua

SEQ ID NO: 503660 - RNA, 23 nt, Artificial Sequence
  Synthetic
aaacuauaugggugccaguucua

SEQ ID NO: 503661 - RNA, 24 nt, Artificial Sequence
  Synthetic
uaaacuauaugggugccaguucua

SEQ ID NO: 503662 - RNA, 18 nt, Artificial Sequence
  Synthetic
ccuacuuuugcaguucua

SEQ ID NO: 503663 - RNA, 19 nt, Artificial Sequence
  Synthetic
uccuacuuuugcaguucua

SEQ ID NO: 503664 - RNA, 20 nt, Artificial Sequence
  Synthetic
uuccuacuuuugcaguucua

SEQ ID NO: 503665 - RNA, 21 nt, Artificial Sequence
  Synthetic
auuccuacuuuugcaguucua

SEQ ID NO: 503666 - RNA, 22 nt, Artificial Sequence
  Synthetic
gauuccuacuuuugcaguucua

SEQ ID NO: 503667 - RNA, 23 nt, Artificial Sequence
  Synthetic
agauuccuacuuuugcaguucua

SEQ ID NO: 503668 - RNA, 24 nt, Artificial Sequence
  Synthetic
uagauuccuacuuuugcaguucua

SEQ ID NO: 503669 - RNA, 18 nt, Artificial Sequence
  Synthetic
gauuuauucucaguucua

SEQ ID NO: 503670 - RNA, 19 nt, Artificial Sequence
  Synthetic
agauuuauucucaguucua

SEQ ID NO: 503671 - RNA, 20 nt, Artificial Sequence
  Synthetic
gagauuuauucucaguucua

SEQ ID NO: 503672 - RNA, 21 nt, Artificial Sequence
  Synthetic
ugagauuuauucucaguucua

SEQ ID NO: 503673 - RNA, 22 nt, Artificial Sequence
  Synthetic
augagauuuauucucaguucua

SEQ ID NO: 503674 - RNA, 23 nt, Artificial Sequence
  Synthetic
uaugagauuuauucucaguucua

SEQ ID NO: 503675 - RNA, 24 nt, Artificial Sequence
  Synthetic
auaugagauuuauucucaguucua

SEQ ID NO: 503676 - RNA, 18 nt, Artificial Sequence
  Synthetic
ucagaugaaagaguucua

SEQ ID NO: 503677 - RNA, 19 nt, Artificial Sequence
  Synthetic
aucagaugaaagaguucua

SEQ ID NO: 503678 - RNA, 20 nt, Artificial Sequence
  Synthetic
aaucagaugaaagaguucua

SEQ ID NO: 503679 - RNA, 21 nt, Artificial Sequence
  Synthetic
aaaucagaugaaagaguucua

SEQ ID NO: 503680 - RNA, 22 nt, Artificial Sequence
  Synthetic
uaaaucagaugaaagaguucua

SEQ ID NO: 503681 - RNA, 23 nt, Artificial Sequence
  Synthetic
auaaaucagaugaaagaguucua

SEQ ID NO: 503682 - RNA, 24 nt, Artificial Sequence
  Synthetic
cauaaaucagaugaaagaguucua

SEQ ID NO: 503683 - RNA, 18 nt, Artificial Sequence
  Synthetic
gaucuuguccagguucua

SEQ ID NO: 503684 - RNA, 19 nt, Artificial Sequence
  Synthetic
ggaucuuguccagguucua

SEQ ID NO: 503685 - RNA, 20 nt, Artificial Sequence
  Synthetic
uggaucuuguccagguucua

SEQ ID NO: 503686 - RNA, 21 nt, Artificial Sequence
  Synthetic
guggaucuuguccagguucua

SEQ ID NO: 503687 - RNA, 22 nt, Artificial Sequence
  Synthetic
uguggaucuuguccagguucua

SEQ ID NO: 503688 - RNA, 23 nt, Artificial Sequence
  Synthetic
auguggaucuuguccagguucua

SEQ ID NO: 503689 - RNA, 24 nt, Artificial Sequence
  Synthetic
uauguggaucuuguccagguucua

SEQ ID NO: 503690 - RNA, 18 nt, Artificial Sequence
  Synthetic
uauuuaguuuugguucua

SEQ ID NO: 503691 - RNA, 19 nt, Artificial Sequence
  Synthetic
uuauuuaguuuugguucua

SEQ ID NO: 503692 - RNA, 20 nt, Artificial Sequence
  Synthetic
uuuauuuaguuuugguucua

SEQ ID NO: 503693 - RNA, 21 nt, Artificial Sequence
  Synthetic
auuuauuuaguuuugguucua

SEQ ID NO: 503694 - RNA, 22 nt, Artificial Sequence
  Synthetic
cauuuauuuaguuuugguucua

SEQ ID NO: 503695 - RNA, 23 nt, Artificial Sequence
  Synthetic
acauuuauuuaguuuugguucua

SEQ ID NO: 503696 - RNA, 24 nt, Artificial Sequence
  Synthetic
cacauuuauuuaguuuugguucua

SEQ ID NO: 503697 - RNA, 18 nt, Artificial Sequence
  Synthetic
ugaggucacaauguucua

SEQ ID NO: 503698 - RNA, 19 nt, Artificial Sequence
  Synthetic
uugaggucacaauguucua

SEQ ID NO: 503699 - RNA, 20 nt, Artificial Sequence
  Synthetic
uuugaggucacaauguucua

SEQ ID NO: 503700 - RNA, 21 nt, Artificial Sequence
  Synthetic
auuugaggucacaauguucua

SEQ ID NO: 503701 - RNA, 22 nt, Artificial Sequence
  Synthetic
cauuugaggucacaauguucua

SEQ ID NO: 503702 - RNA, 23 nt, Artificial Sequence
  Synthetic
gcauuugaggucacaauguucua

SEQ ID NO: 503703 - RNA, 24 nt, Artificial Sequence
  Synthetic
agcauuugaggucacaauguucua

SEQ ID NO: 503704 - RNA, 18 nt, Artificial Sequence
  Synthetic
augagaagacauguucua

SEQ ID NO: 503705 - RNA, 19 nt, Artificial Sequence
  Synthetic
aaugagaagacauguucua

SEQ ID NO: 503706 - RNA, 20 nt, Artificial Sequence
  Synthetic
caaugagaagacauguucua

SEQ ID NO: 503707 - RNA, 21 nt, Artificial Sequence
  Synthetic
ccaaugagaagacauguucua

SEQ ID NO: 503708 - RNA, 22 nt, Artificial Sequence
  Synthetic
uccaaugagaagacauguucua

SEQ ID NO: 503709 - RNA, 23 nt, Artificial Sequence
  Synthetic
cuccaaugagaagacauguucua

SEQ ID NO: 503710 - RNA, 24 nt, Artificial Sequence
  Synthetic
ccuccaaugagaagacauguucua

SEQ ID NO: 503711 - RNA, 18 nt, Artificial Sequence
  Synthetic
uugcugacauauguucua

SEQ ID NO: 503712 - RNA, 19 nt, Artificial Sequence
  Synthetic
cuugcugacauauguucua

SEQ ID NO: 503713 - RNA, 20 nt, Artificial Sequence
  Synthetic
ccuugcugacauauguucua

SEQ ID NO: 503714 - RNA, 21 nt, Artificial Sequence
  Synthetic
uccuugcugacauauguucua

SEQ ID NO: 503715 - RNA, 22 nt, Artificial Sequence
  Synthetic
uuccuugcugacauauguucua

SEQ ID NO: 503716 - RNA, 23 nt, Artificial Sequence
  Synthetic
cuuccuugcugacauauguucua

SEQ ID NO: 503717 - RNA, 24 nt, Artificial Sequence
  Synthetic
ucuuccuugcugacauauguucua

SEQ ID NO: 503718 - RNA, 18 nt, Artificial Sequence
  Synthetic
uacaaauuuaaauuucua

SEQ ID NO: 503719 - RNA, 19 nt, Artificial Sequence
  Synthetic
cuacaaauuuaaauuucua

SEQ ID NO: 503720 - RNA, 20 nt, Artificial Sequence
  Synthetic
ccuacaaauuuaaauuucua

SEQ ID NO: 503721 - RNA, 21 nt, Artificial Sequence
  Synthetic
accuacaaauuuaaauuucua

SEQ ID NO: 503722 - RNA, 22 nt, Artificial Sequence
  Synthetic
gaccuacaaauuuaaauuucua

SEQ ID NO: 503723 - RNA, 23 nt, Artificial Sequence
  Synthetic
ggaccuacaaauuuaaauuucua

SEQ ID NO: 503724 - RNA, 24 nt, Artificial Sequence
  Synthetic
aggaccuacaaauuuaaauuucua

SEQ ID NO: 503725 - RNA, 18 nt, Artificial Sequence
  Synthetic
uccaauaagcaauuucua

SEQ ID NO: 503726 - RNA, 19 nt, Artificial Sequence
  Synthetic
uuccaauaagcaauuucua

SEQ ID NO: 503727 - RNA, 20 nt, Artificial Sequence
  Synthetic
guuccaauaagcaauuucua

SEQ ID NO: 503728 - RNA, 21 nt, Artificial Sequence
  Synthetic
uguuccaauaagcaauuucua

SEQ ID NO: 503729 - RNA, 22 nt, Artificial Sequence
  Synthetic
auguuccaauaagcaauuucua

SEQ ID NO: 503730 - RNA, 23 nt, Artificial Sequence
  Synthetic
aauguuccaauaagcaauuucua

SEQ ID NO: 503731 - RNA, 24 nt, Artificial Sequence
  Synthetic
aaauguuccaauaagcaauuucua

SEQ ID NO: 503732 - RNA, 18 nt, Artificial Sequence
  Synthetic
ucaaaauauuaauuucua

SEQ ID NO: 503733 - RNA, 19 nt, Artificial Sequence
  Synthetic
aucaaaauauuaauuucua

SEQ ID NO: 503734 - RNA, 20 nt, Artificial Sequence
  Synthetic
aaucaaaauauuaauuucua

SEQ ID NO: 503735 - RNA, 21 nt, Artificial Sequence
  Synthetic
caaucaaaauauuaauuucua

SEQ ID NO: 503736 - RNA, 22 nt, Artificial Sequence
  Synthetic
acaaucaaaauauuaauuucua

SEQ ID NO: 503737 - RNA, 23 nt, Artificial Sequence
  Synthetic
uacaaucaaaauauuaauuucua

SEQ ID NO: 503738 - RNA, 24 nt, Artificial Sequence
  Synthetic
auacaaucaaaauauuaauuucua

SEQ ID NO: 503739 - RNA, 18 nt, Artificial Sequence
  Synthetic
agguggcucucauuucua

SEQ ID NO: 503740 - RNA, 19 nt, Artificial Sequence
  Synthetic
uagguggcucucauuucua

SEQ ID NO: 503741 - RNA, 20 nt, Artificial Sequence
  Synthetic
auagguggcucucauuucua

SEQ ID NO: 503742 - RNA, 21 nt, Artificial Sequence
  Synthetic
cauagguggcucucauuucua

SEQ ID NO: 503743 - RNA, 22 nt, Artificial Sequence
  Synthetic
acauagguggcucucauuucua

SEQ ID NO: 503744 - RNA, 23 nt, Artificial Sequence
  Synthetic
uacauagguggcucucauuucua

SEQ ID NO: 503745 - RNA, 24 nt, Artificial Sequence
  Synthetic
uuacauagguggcucucauuucua

SEQ ID NO: 503746 - RNA, 18 nt, Artificial Sequence
  Synthetic
uuucgauugucauuucua

SEQ ID NO: 503747 - RNA, 19 nt, Artificial Sequence
  Synthetic
uuuucgauugucauuucua

SEQ ID NO: 503748 - RNA, 20 nt, Artificial Sequence
  Synthetic
guuuucgauugucauuucua

SEQ ID NO: 503749 - RNA, 21 nt, Artificial Sequence
  Synthetic
uguuuucgauugucauuucua

SEQ ID NO: 503750 - RNA, 22 nt, Artificial Sequence
  Synthetic
auguuuucgauugucauuucua

SEQ ID NO: 503751 - RNA, 23 nt, Artificial Sequence
  Synthetic
uauguuuucgauugucauuucua

SEQ ID NO: 503752 - RNA, 24 nt, Artificial Sequence
  Synthetic
guauguuuucgauugucauuucua

SEQ ID NO: 503753 - RNA, 18 nt, Artificial Sequence
  Synthetic
aauuugucuucauuucua

SEQ ID NO: 503754 - RNA, 19 nt, Artificial Sequence
  Synthetic
aaauuugucuucauuucua

SEQ ID NO: 503755 - RNA, 20 nt, Artificial Sequence
  Synthetic
aaaauuugucuucauuucua

SEQ ID NO: 503756 - RNA, 21 nt, Artificial Sequence
  Synthetic
aaaaauuugucuucauuucua

SEQ ID NO: 503757 - RNA, 22 nt, Artificial Sequence
  Synthetic
gaaaaauuugucuucauuucua

SEQ ID NO: 503758 - RNA, 23 nt, Artificial Sequence
  Synthetic
agaaaaauuugucuucauuucua

SEQ ID NO: 503759 - RNA, 24 nt, Artificial Sequence
  Synthetic
gagaaaaauuugucuucauuucua

SEQ ID NO: 503760 - RNA, 18 nt, Artificial Sequence
  Synthetic
gcucacauuuuauuucua

SEQ ID NO: 503761 - RNA, 19 nt, Artificial Sequence
  Synthetic
ggcucacauuuuauuucua

SEQ ID NO: 503762 - RNA, 20 nt, Artificial Sequence
  Synthetic
uggcucacauuuuauuucua

SEQ ID NO: 503763 - RNA, 21 nt, Artificial Sequence
  Synthetic
guggcucacauuuuauuucua

SEQ ID NO: 503764 - RNA, 22 nt, Artificial Sequence
  Synthetic
uguggcucacauuuuauuucua

SEQ ID NO: 503765 - RNA, 23 nt, Artificial Sequence
  Synthetic
auguggcucacauuuuauuucua

SEQ ID NO: 503766 - RNA, 24 nt, Artificial Sequence
  Synthetic
uauguggcucacauuuuauuucua

SEQ ID NO: 503767 - RNA, 18 nt, Artificial Sequence
  Synthetic
uuauuuauuuuauuucua

SEQ ID NO: 503768 - RNA, 19 nt, Artificial Sequence
  Synthetic
uuuauuuauuuuauuucua

SEQ ID NO: 503769 - RNA, 20 nt, Artificial Sequence
  Synthetic
uuuuauuuauuuuauuucua

SEQ ID NO: 503770 - RNA, 21 nt, Artificial Sequence
  Synthetic
guuuuauuuauuuuauuucua

SEQ ID NO: 503771 - RNA, 22 nt, Artificial Sequence
  Synthetic
uguuuuauuuauuuuauuucua

SEQ ID NO: 503772 - RNA, 23 nt, Artificial Sequence
  Synthetic
uuguuuuauuuauuuuauuucua

SEQ ID NO: 503773 - RNA, 24 nt, Artificial Sequence
  Synthetic
cuuguuuuauuuauuuuauuucua

SEQ ID NO: 503774 - RNA, 18 nt, Artificial Sequence
  Synthetic
aagugucacuacuuucua

SEQ ID NO: 503775 - RNA, 19 nt, Artificial Sequence
  Synthetic
uaagugucacuacuuucua

SEQ ID NO: 503776 - RNA, 20 nt, Artificial Sequence
  Synthetic
uuaagugucacuacuuucua

SEQ ID NO: 503777 - RNA, 21 nt, Artificial Sequence
  Synthetic
uuuaagugucacuacuuucua

SEQ ID NO: 503778 - RNA, 22 nt, Artificial Sequence
  Synthetic
uuuuaagugucacuacuuucua

SEQ ID NO: 503779 - RNA, 23 nt, Artificial Sequence
  Synthetic
auuuuaagugucacuacuuucua

SEQ ID NO: 503780 - RNA, 24 nt, Artificial Sequence
  Synthetic
cauuuuaagugucacuacuuucua

SEQ ID NO: 503781 - RNA, 18 nt, Artificial Sequence
  Synthetic
uuaaauugaaucuuucua

SEQ ID NO: 503782 - RNA, 19 nt, Artificial Sequence
  Synthetic
guuaaauugaaucuuucua

SEQ ID NO: 503783 - RNA, 20 nt, Artificial Sequence
  Synthetic
uguuaaauugaaucuuucua

SEQ ID NO: 503784 - RNA, 21 nt, Artificial Sequence
  Synthetic
guguuaaauugaaucuuucua

SEQ ID NO: 503785 - RNA, 22 nt, Artificial Sequence
  Synthetic
uguguuaaauugaaucuuucua

SEQ ID NO: 503786 - RNA, 23 nt, Artificial Sequence
  Synthetic
auguguuaaauugaaucuuucua

SEQ ID NO: 503787 - RNA, 24 nt, Artificial Sequence
  Synthetic
uauguguuaaauugaaucuuucua

SEQ ID NO: 503788 - RNA, 18 nt, Artificial Sequence
  Synthetic
aaaaguacccucuuucua

SEQ ID NO: 503789 - RNA, 19 nt, Artificial Sequence
  Synthetic
uaaaaguacccucuuucua

SEQ ID NO: 503790 - RNA, 20 nt, Artificial Sequence
  Synthetic
auaaaaguacccucuuucua

SEQ ID NO: 503791 - RNA, 21 nt, Artificial Sequence
  Synthetic
cauaaaaguacccucuuucua

SEQ ID NO: 503792 - RNA, 22 nt, Artificial Sequence
  Synthetic
gcauaaaaguacccucuuucua

SEQ ID NO: 503793 - RNA, 23 nt, Artificial Sequence
  Synthetic
agcauaaaaguacccucuuucua

SEQ ID NO: 503794 - RNA, 24 nt, Artificial Sequence
  Synthetic
uagcauaaaaguacccucuuucua

SEQ ID NO: 503795 - RNA, 18 nt, Artificial Sequence
  Synthetic
ggcgaaacucuguuucua

SEQ ID NO: 503796 - RNA, 19 nt, Artificial Sequence
  Synthetic
uggcgaaacucuguuucua

SEQ ID NO: 503797 - RNA, 20 nt, Artificial Sequence
  Synthetic
guggcgaaacucuguuucua

SEQ ID NO: 503798 - RNA, 21 nt, Artificial Sequence
  Synthetic
uguggcgaaacucuguuucua

SEQ ID NO: 503799 - RNA, 22 nt, Artificial Sequence
  Synthetic
auguggcgaaacucuguuucua

SEQ ID NO: 503800 - RNA, 23 nt, Artificial Sequence
  Synthetic
aauguggcgaaacucuguuucua

SEQ ID NO: 503801 - RNA, 24 nt, Artificial Sequence
  Synthetic
caauguggcgaaacucuguuucua

SEQ ID NO: 503802 - RNA, 18 nt, Artificial Sequence
  Synthetic
auuaggcaugcuuuucua

SEQ ID NO: 503803 - RNA, 19 nt, Artificial Sequence
  Synthetic
uauuaggcaugcuuuucua

SEQ ID NO: 503804 - RNA, 20 nt, Artificial Sequence
  Synthetic
auauuaggcaugcuuuucua

SEQ ID NO: 503805 - RNA, 21 nt, Artificial Sequence
  Synthetic
uauauuaggcaugcuuuucua

SEQ ID NO: 503806 - RNA, 22 nt, Artificial Sequence
  Synthetic
uuauauuaggcaugcuuuucua

SEQ ID NO: 503807 - RNA, 23 nt, Artificial Sequence
  Synthetic
uuuauauuaggcaugcuuuucua

SEQ ID NO: 503808 - RNA, 24 nt, Artificial Sequence
  Synthetic
cuuuauauuaggcaugcuuuucua

SEQ ID NO: 503809 - RNA, 18 nt, Artificial Sequence
  Synthetic
cagaaaauacaaaaagua

SEQ ID NO: 503810 - RNA, 19 nt, Artificial Sequence
  Synthetic
acagaaaauacaaaaagua

SEQ ID NO: 503811 - RNA, 20 nt, Artificial Sequence
  Synthetic
uacagaaaauacaaaaagua

SEQ ID NO: 503812 - RNA, 21 nt, Artificial Sequence
  Synthetic
cuacagaaaauacaaaaagua

SEQ ID NO: 503813 - RNA, 22 nt, Artificial Sequence
  Synthetic
ucuacagaaaauacaaaaagua

SEQ ID NO: 503814 - RNA, 23 nt, Artificial Sequence
  Synthetic
uucuacagaaaauacaaaaagua

SEQ ID NO: 503815 - RNA, 24 nt, Artificial Sequence
  Synthetic
uuucuacagaaaauacaaaaagua

SEQ ID NO: 503816 - RNA, 18 nt, Artificial Sequence
  Synthetic
aaggugacuuaaaaagua

SEQ ID NO: 503817 - RNA, 19 nt, Artificial Sequence
  Synthetic
gaaggugacuuaaaaagua

SEQ ID NO: 503818 - RNA, 20 nt, Artificial Sequence
  Synthetic
ggaaggugacuuaaaaagua

SEQ ID NO: 503819 - RNA, 21 nt, Artificial Sequence
  Synthetic
aggaaggugacuuaaaaagua

SEQ ID NO: 503820 - RNA, 22 nt, Artificial Sequence
  Synthetic
uaggaaggugacuuaaaaagua

SEQ ID NO: 503821 - RNA, 23 nt, Artificial Sequence
  Synthetic
guaggaaggugacuuaaaaagua

SEQ ID NO: 503822 - RNA, 24 nt, Artificial Sequence
  Synthetic
aguaggaaggugacuuaaaaagua

SEQ ID NO: 503823 - RNA, 18 nt, Artificial Sequence
  Synthetic
cucccaagcucaaaagua

SEQ ID NO: 503824 - RNA, 19 nt, Artificial Sequence
  Synthetic
acucccaagcucaaaagua

SEQ ID NO: 503825 - RNA, 20 nt, Artificial Sequence
  Synthetic
aacucccaagcucaaaagua

SEQ ID NO: 503826 - RNA, 21 nt, Artificial Sequence
  Synthetic
caacucccaagcucaaaagua

SEQ ID NO: 503827 - RNA, 22 nt, Artificial Sequence
  Synthetic
ucaacucccaagcucaaaagua

SEQ ID NO: 503828 - RNA, 23 nt, Artificial Sequence
  Synthetic
cucaacucccaagcucaaaagua

SEQ ID NO: 503829 - RNA, 24 nt, Artificial Sequence
  Synthetic
ccucaacucccaagcucaaaagua

SEQ ID NO: 503830 - RNA, 18 nt, Artificial Sequence
  Synthetic
uccuaaaacagaaaagua

SEQ ID NO: 503831 - RNA, 19 nt, Artificial Sequence
  Synthetic
auccuaaaacagaaaagua

SEQ ID NO: 503832 - RNA, 20 nt, Artificial Sequence
  Synthetic
aauccuaaaacagaaaagua

SEQ ID NO: 503833 - RNA, 21 nt, Artificial Sequence
  Synthetic
caauccuaaaacagaaaagua

SEQ ID NO: 503834 - RNA, 22 nt, Artificial Sequence
  Synthetic
ucaauccuaaaacagaaaagua

SEQ ID NO: 503835 - RNA, 23 nt, Artificial Sequence
  Synthetic
cucaauccuaaaacagaaaagua

SEQ ID NO: 503836 - RNA, 24 nt, Artificial Sequence
  Synthetic
ccucaauccuaaaacagaaaagua

SEQ ID NO: 503837 - RNA, 18 nt, Artificial Sequence
  Synthetic
aaaguagacagaaaagua

SEQ ID NO: 503838 - RNA, 19 nt, Artificial Sequence
  Synthetic
aaaaguagacagaaaagua

SEQ ID NO: 503839 - RNA, 20 nt, Artificial Sequence
  Synthetic
gaaaaguagacagaaaagua

SEQ ID NO: 503840 - RNA, 21 nt, Artificial Sequence
  Synthetic
agaaaaguagacagaaaagua

SEQ ID NO: 503841 - RNA, 22 nt, Artificial Sequence
  Synthetic
gagaaaaguagacagaaaagua

SEQ ID NO: 503842 - RNA, 23 nt, Artificial Sequence
  Synthetic
ugagaaaaguagacagaaaagua

SEQ ID NO: 503843 - RNA, 24 nt, Artificial Sequence
  Synthetic
uugagaaaaguagacagaaaagua

SEQ ID NO: 503844 - RNA, 18 nt, Artificial Sequence
  Synthetic
gacacuaggagaaaagua

SEQ ID NO: 503845 - RNA, 19 nt, Artificial Sequence
  Synthetic
agacacuaggagaaaagua

SEQ ID NO: 503846 - RNA, 20 nt, Artificial Sequence
  Synthetic
aagacacuaggagaaaagua

SEQ ID NO: 503847 - RNA, 21 nt, Artificial Sequence
  Synthetic
aaagacacuaggagaaaagua

SEQ ID NO: 503848 - RNA, 22 nt, Artificial Sequence
  Synthetic
aaaagacacuaggagaaaagua

SEQ ID NO: 503849 - RNA, 23 nt, Artificial Sequence
  Synthetic
uaaaagacacuaggagaaaagua

SEQ ID NO: 503850 - RNA, 24 nt, Artificial Sequence
  Synthetic
auaaaagacacuaggagaaaagua

SEQ ID NO: 503851 - RNA, 18 nt, Artificial Sequence
  Synthetic
agaagagagcgaaaagua

SEQ ID NO: 503852 - RNA, 19 nt, Artificial Sequence
  Synthetic
gagaagagagcgaaaagua

SEQ ID NO: 503853 - RNA, 20 nt, Artificial Sequence
  Synthetic
ggagaagagagcgaaaagua

SEQ ID NO: 503854 - RNA, 21 nt, Artificial Sequence
  Synthetic
aggagaagagagcgaaaagua

SEQ ID NO: 503855 - RNA, 22 nt, Artificial Sequence
  Synthetic
aaggagaagagagcgaaaagua

SEQ ID NO: 503856 - RNA, 23 nt, Artificial Sequence
  Synthetic
uaaggagaagagagcgaaaagua

SEQ ID NO: 503857 - RNA, 24 nt, Artificial Sequence
  Synthetic
uuaaggagaagagagcgaaaagua

SEQ ID NO: 503858 - RNA, 18 nt, Artificial Sequence
  Synthetic
uauguggaaggaaaagua

SEQ ID NO: 503859 - RNA, 19 nt, Artificial Sequence
  Synthetic
cuauguggaaggaaaagua

SEQ ID NO: 503860 - RNA, 20 nt, Artificial Sequence
  Synthetic
ucuauguggaaggaaaagua

SEQ ID NO: 503861 - RNA, 21 nt, Artificial Sequence
  Synthetic
uucuauguggaaggaaaagua

SEQ ID NO: 503862 - RNA, 22 nt, Artificial Sequence
  Synthetic
auucuauguggaaggaaaagua

SEQ ID NO: 503863 - RNA, 23 nt, Artificial Sequence
  Synthetic
aauucuauguggaaggaaaagua

SEQ ID NO: 503864 - RNA, 24 nt, Artificial Sequence
  Synthetic
uaauucuauguggaaggaaaagua

SEQ ID NO: 503865 - RNA, 18 nt, Artificial Sequence
  Synthetic
agaggagagugaaaagua

SEQ ID NO: 503866 - RNA, 19 nt, Artificial Sequence
  Synthetic
gagaggagagugaaaagua

SEQ ID NO: 503867 - RNA, 20 nt, Artificial Sequence
  Synthetic
ggagaggagagugaaaagua

SEQ ID NO: 503868 - RNA, 21 nt, Artificial Sequence
  Synthetic
aggagaggagagugaaaagua

SEQ ID NO: 503869 - RNA, 22 nt, Artificial Sequence
  Synthetic
aaggagaggagagugaaaagua

SEQ ID NO: 503870 - RNA, 23 nt, Artificial Sequence
  Synthetic
uaaggagaggagagugaaaagua

SEQ ID NO: 503871 - RNA, 24 nt, Artificial Sequence
  Synthetic
uuaaggagaggagagugaaaagua

SEQ ID NO: 503872 - RNA, 18 nt, Artificial Sequence
  Synthetic
aauugaacuauaaaagua

SEQ ID NO: 503873 - RNA, 19 nt, Artificial Sequence
  Synthetic
aaauugaacuauaaaagua

SEQ ID NO: 503874 - RNA, 20 nt, Artificial Sequence
  Synthetic
aaaauugaacuauaaaagua

SEQ ID NO: 503875 - RNA, 21 nt, Artificial Sequence
  Synthetic
aaaaauugaacuauaaaagua

SEQ ID NO: 503876 - RNA, 22 nt, Artificial Sequence
  Synthetic
aaaaaauugaacuauaaaagua

SEQ ID NO: 503877 - RNA, 23 nt, Artificial Sequence
  Synthetic
aaaaaaauugaacuauaaaagua

SEQ ID NO: 503878 - RNA, 24 nt, Artificial Sequence
  Synthetic
uaaaaaaauugaacuauaaaagua

SEQ ID NO: 503879 - RNA, 18 nt, Artificial Sequence
  Synthetic
ucaugaauuuuaaaagua

SEQ ID NO: 503880 - RNA, 19 nt, Artificial Sequence
  Synthetic
aucaugaauuuuaaaagua

SEQ ID NO: 503881 - RNA, 20 nt, Artificial Sequence
  Synthetic
aaucaugaauuuuaaaagua

SEQ ID NO: 503882 - RNA, 21 nt, Artificial Sequence
  Synthetic
aaaucaugaauuuuaaaagua

SEQ ID NO: 503883 - RNA, 22 nt, Artificial Sequence
  Synthetic
uaaaucaugaauuuuaaaagua

SEQ ID NO: 503884 - RNA, 23 nt, Artificial Sequence
  Synthetic
auaaaucaugaauuuuaaaagua

SEQ ID NO: 503885 - RNA, 24 nt, Artificial Sequence
  Synthetic
uauaaaucaugaauuuuaaaagua

SEQ ID NO: 503886 - RNA, 18 nt, Artificial Sequence
  Synthetic
aacuguuguuacaaagua

SEQ ID NO: 503887 - RNA, 19 nt, Artificial Sequence
  Synthetic
aaacuguuguuacaaagua

SEQ ID NO: 503888 - RNA, 20 nt, Artificial Sequence
  Synthetic
aaaacuguuguuacaaagua

SEQ ID NO: 503889 - RNA, 21 nt, Artificial Sequence
  Synthetic
gaaaacuguuguuacaaagua

SEQ ID NO: 503890 - RNA, 22 nt, Artificial Sequence
  Synthetic
agaaaacuguuguuacaaagua

SEQ ID NO: 503891 - RNA, 23 nt, Artificial Sequence
  Synthetic
aagaaaacuguuguuacaaagua

SEQ ID NO: 503892 - RNA, 24 nt, Artificial Sequence
  Synthetic
aaagaaaacuguuguuacaaagua

SEQ ID NO: 503893 - RNA, 18 nt, Artificial Sequence
  Synthetic
ccucagccucccaaagua

SEQ ID NO: 503894 - RNA, 19 nt, Artificial Sequence
  Synthetic
uccucagccucccaaagua

SEQ ID NO: 503895 - RNA, 20 nt, Artificial Sequence
  Synthetic
cuccucagccucccaaagua

SEQ ID NO: 503896 - RNA, 21 nt, Artificial Sequence
  Synthetic
ccuccucagccucccaaagua

SEQ ID NO: 503897 - RNA, 22 nt, Artificial Sequence
  Synthetic
cccuccucagccucccaaagua

SEQ ID NO: 503898 - RNA, 23 nt, Artificial Sequence
  Synthetic
gcccuccucagccucccaaagua

SEQ ID NO: 503899 - RNA, 24 nt, Artificial Sequence
  Synthetic
ugcccuccucagccucccaaagua

SEQ ID NO: 503900 - RNA, 18 nt, Artificial Sequence
  Synthetic
caaaaacgaugcaaagua

SEQ ID NO: 503901 - RNA, 19 nt, Artificial Sequence
  Synthetic
ucaaaaacgaugcaaagua

SEQ ID NO: 503902 - RNA, 20 nt, Artificial Sequence
  Synthetic
uucaaaaacgaugcaaagua

SEQ ID NO: 503903 - RNA, 21 nt, Artificial Sequence
  Synthetic
guucaaaaacgaugcaaagua

SEQ ID NO: 503904 - RNA, 22 nt, Artificial Sequence
  Synthetic
uguucaaaaacgaugcaaagua

SEQ ID NO: 503905 - RNA, 23 nt, Artificial Sequence
  Synthetic
uuguucaaaaacgaugcaaagua

SEQ ID NO: 503906 - RNA, 24 nt, Artificial Sequence
  Synthetic
uuuguucaaaaacgaugcaaagua

SEQ ID NO: 503907 - RNA, 18 nt, Artificial Sequence
  Synthetic
aaugggggcaucaaagua

SEQ ID NO: 503908 - RNA, 19 nt, Artificial Sequence
  Synthetic
aaaugggggcaucaaagua

SEQ ID NO: 503909 - RNA, 20 nt, Artificial Sequence
  Synthetic
aaaaugggggcaucaaagua

SEQ ID NO: 503910 - RNA, 21 nt, Artificial Sequence
  Synthetic
caaaaugggggcaucaaagua

SEQ ID NO: 503911 - RNA, 22 nt, Artificial Sequence
  Synthetic
acaaaaugggggcaucaaagua

SEQ ID NO: 503912 - RNA, 23 nt, Artificial Sequence
  Synthetic
uacaaaaugggggcaucaaagua

SEQ ID NO: 503913 - RNA, 24 nt, Artificial Sequence
  Synthetic
uuacaaaaugggggcaucaaagua

SEQ ID NO: 503914 - RNA, 18 nt, Artificial Sequence
  Synthetic
agaagcuagaagaaagua

SEQ ID NO: 503915 - RNA, 19 nt, Artificial Sequence
  Synthetic
aagaagcuagaagaaagua

SEQ ID NO: 503916 - RNA, 20 nt, Artificial Sequence
  Synthetic
gaagaagcuagaagaaagua

SEQ ID NO: 503917 - RNA, 21 nt, Artificial Sequence
  Synthetic
cgaagaagcuagaagaaagua

SEQ ID NO: 503918 - RNA, 22 nt, Artificial Sequence
  Synthetic
ucgaagaagcuagaagaaagua

SEQ ID NO: 503919 - RNA, 23 nt, Artificial Sequence
  Synthetic
aucgaagaagcuagaagaaagua

SEQ ID NO: 503920 - RNA, 24 nt, Artificial Sequence
  Synthetic
aaucgaagaagcuagaagaaagua

SEQ ID NO: 503921 - RNA, 18 nt, Artificial Sequence
  Synthetic
guagauggagagaaagua

SEQ ID NO: 503922 - RNA, 19 nt, Artificial Sequence
  Synthetic
uguagauggagagaaagua

SEQ ID NO: 503923 - RNA, 20 nt, Artificial Sequence
  Synthetic
uuguagauggagagaaagua

SEQ ID NO: 503924 - RNA, 21 nt, Artificial Sequence
  Synthetic
cuuguagauggagagaaagua

SEQ ID NO: 503925 - RNA, 22 nt, Artificial Sequence
  Synthetic
gcuuguagauggagagaaagua

SEQ ID NO: 503926 - RNA, 23 nt, Artificial Sequence
  Synthetic
agcuuguagauggagagaaagua

SEQ ID NO: 503927 - RNA, 24 nt, Artificial Sequence
  Synthetic
aagcuuguagauggagagaaagua

SEQ ID NO: 503928 - RNA, 18 nt, Artificial Sequence
  Synthetic
aaaaaugcaucgaaagua

SEQ ID NO: 503929 - RNA, 19 nt, Artificial Sequence
  Synthetic
gaaaaaugcaucgaaagua

SEQ ID NO: 503930 - RNA, 20 nt, Artificial Sequence
  Synthetic
agaaaaaugcaucgaaagua

SEQ ID NO: 503931 - RNA, 21 nt, Artificial Sequence
  Synthetic
aagaaaaaugcaucgaaagua

SEQ ID NO: 503932 - RNA, 22 nt, Artificial Sequence
  Synthetic
aaagaaaaaugcaucgaaagua

SEQ ID NO: 503933 - RNA, 23 nt, Artificial Sequence
  Synthetic
uaaagaaaaaugcaucgaaagua

SEQ ID NO: 503934 - RNA, 24 nt, Artificial Sequence
  Synthetic
auaaagaaaaaugcaucgaaagua

SEQ ID NO: 503935 - RNA, 18 nt, Artificial Sequence
  Synthetic
agagaaaacaggaaagua

SEQ ID NO: 503936 - RNA, 19 nt, Artificial Sequence
  Synthetic
cagagaaaacaggaaagua

SEQ ID NO: 503937 - RNA, 20 nt, Artificial Sequence
  Synthetic
ucagagaaaacaggaaagua

SEQ ID NO: 503938 - RNA, 21 nt, Artificial Sequence
  Synthetic
cucagagaaaacaggaaagua

SEQ ID NO: 503939 - RNA, 22 nt, Artificial Sequence
  Synthetic
ccucagagaaaacaggaaagua

SEQ ID NO: 503940 - RNA, 23 nt, Artificial Sequence
  Synthetic
cccucagagaaaacaggaaagua

SEQ ID NO: 503941 - RNA, 24 nt, Artificial Sequence
  Synthetic
ucccucagagaaaacaggaaagua

SEQ ID NO: 503942 - RNA, 18 nt, Artificial Sequence
  Synthetic
gaagaagacaggaaagua

SEQ ID NO: 503943 - RNA, 19 nt, Artificial Sequence
  Synthetic
agaagaagacaggaaagua

SEQ ID NO: 503944 - RNA, 20 nt, Artificial Sequence
  Synthetic
cagaagaagacaggaaagua

SEQ ID NO: 503945 - RNA, 21 nt, Artificial Sequence
  Synthetic
ucagaagaagacaggaaagua

SEQ ID NO: 503946 - RNA, 22 nt, Artificial Sequence
  Synthetic
cucagaagaagacaggaaagua

SEQ ID NO: 503947 - RNA, 23 nt, Artificial Sequence
  Synthetic
acucagaagaagacaggaaagua

SEQ ID NO: 503948 - RNA, 24 nt, Artificial Sequence
  Synthetic
gacucagaagaagacaggaaagua

SEQ ID NO: 503949 - RNA, 18 nt, Artificial Sequence
  Synthetic
aaaaucgaggggaaagua

SEQ ID NO: 503950 - RNA, 19 nt, Artificial Sequence
  Synthetic
caaaaucgaggggaaagua

SEQ ID NO: 503951 - RNA, 20 nt, Artificial Sequence
  Synthetic
gcaaaaucgaggggaaagua

SEQ ID NO: 503952 - RNA, 21 nt, Artificial Sequence
  Synthetic
agcaaaaucgaggggaaagua

SEQ ID NO: 503953 - RNA, 22 nt, Artificial Sequence
  Synthetic
uagcaaaaucgaggggaaagua

SEQ ID NO: 503954 - RNA, 23 nt, Artificial Sequence
  Synthetic
auagcaaaaucgaggggaaagua

SEQ ID NO: 503955 - RNA, 24 nt, Artificial Sequence
  Synthetic
uauagcaaaaucgaggggaaagua

SEQ ID NO: 503956 - RNA, 18 nt, Artificial Sequence
  Synthetic
gucuaauuggggaaagua

SEQ ID NO: 503957 - RNA, 19 nt, Artificial Sequence
  Synthetic
agucuaauuggggaaagua

SEQ ID NO: 503958 - RNA, 20 nt, Artificial Sequence
  Synthetic
aagucuaauuggggaaagua

SEQ ID NO: 503959 - RNA, 21 nt, Artificial Sequence
  Synthetic
caagucuaauuggggaaagua

SEQ ID NO: 503960 - RNA, 22 nt, Artificial Sequence
  Synthetic
acaagucuaauuggggaaagua

SEQ ID NO: 503961 - RNA, 23 nt, Artificial Sequence
  Synthetic
uacaagucuaauuggggaaagua

SEQ ID NO: 503962 - RNA, 24 nt, Artificial Sequence
  Synthetic
uuacaagucuaauuggggaaagua

SEQ ID NO: 503963 - RNA, 18 nt, Artificial Sequence
  Synthetic
acuaauaaaaugaaagua

SEQ ID NO: 503964 - RNA, 19 nt, Artificial Sequence
  Synthetic
uacuaauaaaaugaaagua

SEQ ID NO: 503965 - RNA, 20 nt, Artificial Sequence
  Synthetic
auacuaauaaaaugaaagua

SEQ ID NO: 503966 - RNA, 21 nt, Artificial Sequence
  Synthetic
cauacuaauaaaaugaaagua

SEQ ID NO: 503967 - RNA, 22 nt, Artificial Sequence
  Synthetic
acauacuaauaaaaugaaagua

SEQ ID NO: 503968 - RNA, 23 nt, Artificial Sequence
  Synthetic
cacauacuaauaaaaugaaagua

SEQ ID NO: 503969 - RNA, 24 nt, Artificial Sequence
  Synthetic
ucacauacuaauaaaaugaaagua

SEQ ID NO: 503970 - RNA, 18 nt, Artificial Sequence
  Synthetic
augcauagacugaaagua

SEQ ID NO: 503971 - RNA, 19 nt, Artificial Sequence
  Synthetic
caugcauagacugaaagua

SEQ ID NO: 503972 - RNA, 20 nt, Artificial Sequence
  Synthetic
acaugcauagacugaaagua

SEQ ID NO: 503973 - RNA, 21 nt, Artificial Sequence
  Synthetic
gacaugcauagacugaaagua

SEQ ID NO: 503974 - RNA, 22 nt, Artificial Sequence
  Synthetic
ggacaugcauagacugaaagua

SEQ ID NO: 503975 - RNA, 23 nt, Artificial Sequence
  Synthetic
aggacaugcauagacugaaagua

SEQ ID NO: 503976 - RNA, 24 nt, Artificial Sequence
  Synthetic
aaggacaugcauagacugaaagua

SEQ ID NO: 503977 - RNA, 18 nt, Artificial Sequence
  Synthetic
cugaugaaggugaaagua

SEQ ID NO: 503978 - RNA, 19 nt, Artificial Sequence
  Synthetic
acugaugaaggugaaagua

SEQ ID NO: 503979 - RNA, 20 nt, Artificial Sequence
  Synthetic
gacugaugaaggugaaagua

SEQ ID NO: 503980 - RNA, 21 nt, Artificial Sequence
  Synthetic
ugacugaugaaggugaaagua

SEQ ID NO: 503981 - RNA, 22 nt, Artificial Sequence
  Synthetic
gugacugaugaaggugaaagua

SEQ ID NO: 503982 - RNA, 23 nt, Artificial Sequence
  Synthetic
agugacugaugaaggugaaagua

SEQ ID NO: 503983 - RNA, 24 nt, Artificial Sequence
  Synthetic
cagugacugaugaaggugaaagua

SEQ ID NO: 503984 - RNA, 18 nt, Artificial Sequence
  Synthetic
aaaacauauuugaaagua

SEQ ID NO: 503985 - RNA, 19 nt, Artificial Sequence
  Synthetic
caaaacauauuugaaagua

SEQ ID NO: 503986 - RNA, 20 nt, Artificial Sequence
  Synthetic
ucaaaacauauuugaaagua

SEQ ID NO: 503987 - RNA, 21 nt, Artificial Sequence
  Synthetic
uucaaaacauauuugaaagua

SEQ ID NO: 503988 - RNA, 22 nt, Artificial Sequence
  Synthetic
uuucaaaacauauuugaaagua

SEQ ID NO: 503989 - RNA, 23 nt, Artificial Sequence
  Synthetic
auuucaaaacauauuugaaagua

SEQ ID NO: 503990 - RNA, 24 nt, Artificial Sequence
  Synthetic
cauuucaaaacauauuugaaagua

SEQ ID NO: 503991 - RNA, 18 nt, Artificial Sequence
  Synthetic
acugcaacugauaaagua

SEQ ID NO: 503992 - RNA, 19 nt, Artificial Sequence
  Synthetic
aacugcaacugauaaagua

SEQ ID NO: 503993 - RNA, 20 nt, Artificial Sequence
  Synthetic
caacugcaacugauaaagua

SEQ ID NO: 503994 - RNA, 21 nt, Artificial Sequence
  Synthetic
ccaacugcaacugauaaagua

SEQ ID NO: 503995 - RNA, 22 nt, Artificial Sequence
  Synthetic
gccaacugcaacugauaaagua

SEQ ID NO: 503996 - RNA, 23 nt, Artificial Sequence
  Synthetic
agccaacugcaacugauaaagua

SEQ ID NO: 503997 - RNA, 24 nt, Artificial Sequence
  Synthetic
uagccaacugcaacugauaaagua

SEQ ID NO: 503998 - RNA, 18 nt, Artificial Sequence
  Synthetic
auccagauaccuaaagua

SEQ ID NO: 503999 - RNA, 19 nt, Artificial Sequence
  Synthetic
aauccagauaccuaaagua

SEQ ID NO: 504000 - RNA, 20 nt, Artificial Sequence
  Synthetic
aaauccagauaccuaaagua

SEQ ID NO: 504001 - RNA, 21 nt, Artificial Sequence
  Synthetic
gaaauccagauaccuaaagua

SEQ ID NO: 504002 - RNA, 22 nt, Artificial Sequence
  Synthetic
ugaaauccagauaccuaaagua

SEQ ID NO: 504003 - RNA, 23 nt, Artificial Sequence
  Synthetic
augaaauccagauaccuaaagua

SEQ ID NO: 504004 - RNA, 24 nt, Artificial Sequence
  Synthetic
gaugaaauccagauaccuaaagua

SEQ ID NO: 504005 - RNA, 18 nt, Artificial Sequence
  Synthetic
aauuacucugcuaaagua

SEQ ID NO: 504006 - RNA, 19 nt, Artificial Sequence
  Synthetic
aaauuacucugcuaaagua

SEQ ID NO: 504007 - RNA, 20 nt, Artificial Sequence
  Synthetic
uaaauuacucugcuaaagua

SEQ ID NO: 504008 - RNA, 21 nt, Artificial Sequence
  Synthetic
uuaaauuacucugcuaaagua

SEQ ID NO: 504009 - RNA, 22 nt, Artificial Sequence
  Synthetic
auuaaauuacucugcuaaagua

SEQ ID NO: 504010 - RNA, 23 nt, Artificial Sequence
  Synthetic
aauuaaauuacucugcuaaagua

SEQ ID NO: 504011 - RNA, 24 nt, Artificial Sequence
  Synthetic
gaauuaaauuacucugcuaaagua

SEQ ID NO: 504012 - RNA, 18 nt, Artificial Sequence
  Synthetic
caauuuucucaacaagua

SEQ ID NO: 504013 - RNA, 19 nt, Artificial Sequence
  Synthetic
gcaauuuucucaacaagua

SEQ ID NO: 504014 - RNA, 20 nt, Artificial Sequence
  Synthetic
ggcaauuuucucaacaagua

SEQ ID NO: 504015 - RNA, 21 nt, Artificial Sequence
  Synthetic
gggcaauuuucucaacaagua

SEQ ID NO: 504016 - RNA, 22 nt, Artificial Sequence
  Synthetic
agggcaauuuucucaacaagua

SEQ ID NO: 504017 - RNA, 23 nt, Artificial Sequence
  Synthetic
gagggcaauuuucucaacaagua

SEQ ID NO: 504018 - RNA, 24 nt, Artificial Sequence
  Synthetic
agagggcaauuuucucaacaagua

SEQ ID NO: 504019 - RNA, 18 nt, Artificial Sequence
  Synthetic
agaaagacuuaacaagua

SEQ ID NO: 504020 - RNA, 19 nt, Artificial Sequence
  Synthetic
aagaaagacuuaacaagua

SEQ ID NO: 504021 - RNA, 20 nt, Artificial Sequence
  Synthetic
gaagaaagacuuaacaagua

SEQ ID NO: 504022 - RNA, 21 nt, Artificial Sequence
  Synthetic
ggaagaaagacuuaacaagua

SEQ ID NO: 504023 - RNA, 22 nt, Artificial Sequence
  Synthetic
aggaagaaagacuuaacaagua

SEQ ID NO: 504024 - RNA, 23 nt, Artificial Sequence
  Synthetic
aaggaagaaagacuuaacaagua

SEQ ID NO: 504025 - RNA, 24 nt, Artificial Sequence
  Synthetic
aaaggaagaaagacuuaacaagua

SEQ ID NO: 504026 - RNA, 18 nt, Artificial Sequence
  Synthetic
ccauucaggacacaagua

SEQ ID NO: 504027 - RNA, 19 nt, Artificial Sequence
  Synthetic
accauucaggacacaagua

SEQ ID NO: 504028 - RNA, 20 nt, Artificial Sequence
  Synthetic
uaccauucaggacacaagua

SEQ ID NO: 504029 - RNA, 21 nt, Artificial Sequence
  Synthetic
auaccauucaggacacaagua

SEQ ID NO: 504030 - RNA, 22 nt, Artificial Sequence
  Synthetic
aauaccauucaggacacaagua

SEQ ID NO: 504031 - RNA, 23 nt, Artificial Sequence
  Synthetic
caauaccauucaggacacaagua

SEQ ID NO: 504032 - RNA, 24 nt, Artificial Sequence
  Synthetic
gcaauaccauucaggacacaagua

SEQ ID NO: 504033 - RNA, 18 nt, Artificial Sequence
  Synthetic
uuaaauauauaccaagua

SEQ ID NO: 504034 - RNA, 19 nt, Artificial Sequence
  Synthetic
uuuaaauauauaccaagua

SEQ ID NO: 504035 - RNA, 20 nt, Artificial Sequence
  Synthetic
uuuuaaauauauaccaagua

SEQ ID NO: 504036 - RNA, 21 nt, Artificial Sequence
  Synthetic
cuuuuaaauauauaccaagua

SEQ ID NO: 504037 - RNA, 22 nt, Artificial Sequence
  Synthetic
ucuuuuaaauauauaccaagua

SEQ ID NO: 504038 - RNA, 23 nt, Artificial Sequence
  Synthetic
uucuuuuaaauauauaccaagua

SEQ ID NO: 504039 - RNA, 24 nt, Artificial Sequence
  Synthetic
guucuuuuaaauauauaccaagua

SEQ ID NO: 504040 - RNA, 18 nt, Artificial Sequence
  Synthetic
uuugcagccccccaagua

SEQ ID NO: 504041 - RNA, 19 nt, Artificial Sequence
  Synthetic
auuugcagccccccaagua

SEQ ID NO: 504042 - RNA, 20 nt, Artificial Sequence
  Synthetic
aauuugcagccccccaagua

SEQ ID NO: 504043 - RNA, 21 nt, Artificial Sequence
  Synthetic
uaauuugcagccccccaagua

SEQ ID NO: 504044 - RNA, 22 nt, Artificial Sequence
  Synthetic
uuaauuugcagccccccaagua

SEQ ID NO: 504045 - RNA, 23 nt, Artificial Sequence
  Synthetic
uuuaauuugcagccccccaagua

SEQ ID NO: 504046 - RNA, 24 nt, Artificial Sequence
  Synthetic
guuuaauuugcagccccccaagua

SEQ ID NO: 504047 - RNA, 18 nt, Artificial Sequence
  Synthetic
aagaaaaaaauccaagua

SEQ ID NO: 504048 - RNA, 19 nt, Artificial Sequence
  Synthetic
gaagaaaaaaauccaagua

SEQ ID NO: 504049 - RNA, 20 nt, Artificial Sequence
  Synthetic
ugaagaaaaaaauccaagua

SEQ ID NO: 504050 - RNA, 21 nt, Artificial Sequence
  Synthetic
uugaagaaaaaaauccaagua

SEQ ID NO: 504051 - RNA, 22 nt, Artificial Sequence
  Synthetic
auugaagaaaaaaauccaagua

SEQ ID NO: 504052 - RNA, 23 nt, Artificial Sequence
  Synthetic
aauugaagaaaaaaauccaagua

SEQ ID NO: 504053 - RNA, 24 nt, Artificial Sequence
  Synthetic
gaauugaagaaaaaaauccaagua

SEQ ID NO: 504054 - RNA, 18 nt, Artificial Sequence
  Synthetic
caaaaaugcaagcaagua

SEQ ID NO: 504055 - RNA, 19 nt, Artificial Sequence
  Synthetic
gcaaaaaugcaagcaagua

SEQ ID NO: 504056 - RNA, 20 nt, Artificial Sequence
  Synthetic
agcaaaaaugcaagcaagua

SEQ ID NO: 504057 - RNA, 21 nt, Artificial Sequence
  Synthetic
aagcaaaaaugcaagcaagua

SEQ ID NO: 504058 - RNA, 22 nt, Artificial Sequence
  Synthetic
aaagcaaaaaugcaagcaagua

SEQ ID NO: 504059 - RNA, 23 nt, Artificial Sequence
  Synthetic
uaaagcaaaaaugcaagcaagua

SEQ ID NO: 504060 - RNA, 24 nt, Artificial Sequence
  Synthetic
uuaaagcaaaaaugcaagcaagua

SEQ ID NO: 504061 - RNA, 18 nt, Artificial Sequence
  Synthetic
agucuagugaggcaagua

SEQ ID NO: 504062 - RNA, 19 nt, Artificial Sequence
  Synthetic
cagucuagugaggcaagua

SEQ ID NO: 504063 - RNA, 20 nt, Artificial Sequence
  Synthetic
ucagucuagugaggcaagua

SEQ ID NO: 504064 - RNA, 21 nt, Artificial Sequence
  Synthetic
gucagucuagugaggcaagua

SEQ ID NO: 504065 - RNA, 22 nt, Artificial Sequence
  Synthetic
agucagucuagugaggcaagua

SEQ ID NO: 504066 - RNA, 23 nt, Artificial Sequence
  Synthetic
gagucagucuagugaggcaagua

SEQ ID NO: 504067 - RNA, 24 nt, Artificial Sequence
  Synthetic
cgagucagucuagugaggcaagua

SEQ ID NO: 504068 - RNA, 18 nt, Artificial Sequence
  Synthetic
agcaaagagaugcaagua

SEQ ID NO: 504069 - RNA, 19 nt, Artificial Sequence
  Synthetic
aagcaaagagaugcaagua

SEQ ID NO: 504070 - RNA, 20 nt, Artificial Sequence
  Synthetic
caagcaaagagaugcaagua

SEQ ID NO: 504071 - RNA, 21 nt, Artificial Sequence
  Synthetic
ccaagcaaagagaugcaagua

SEQ ID NO: 504072 - RNA, 22 nt, Artificial Sequence
  Synthetic
cccaagcaaagagaugcaagua

SEQ ID NO: 504073 - RNA, 23 nt, Artificial Sequence
  Synthetic
ccccaagcaaagagaugcaagua

SEQ ID NO: 504074 - RNA, 24 nt, Artificial Sequence
  Synthetic
gccccaagcaaagagaugcaagua

SEQ ID NO: 504075 - RNA, 18 nt, Artificial Sequence
  Synthetic
caaacaaugaaucaagua

SEQ ID NO: 504076 - RNA, 19 nt, Artificial Sequence
  Synthetic
ccaaacaaugaaucaagua

SEQ ID NO: 504077 - RNA, 20 nt, Artificial Sequence
  Synthetic
gccaaacaaugaaucaagua

SEQ ID NO: 504078 - RNA, 21 nt, Artificial Sequence
  Synthetic
ggccaaacaaugaaucaagua

SEQ ID NO: 504079 - RNA, 22 nt, Artificial Sequence
  Synthetic
uggccaaacaaugaaucaagua

SEQ ID NO: 504080 - RNA, 23 nt, Artificial Sequence
  Synthetic
uuggccaaacaaugaaucaagua

SEQ ID NO: 504081 - RNA, 24 nt, Artificial Sequence
  Synthetic
cuuggccaaacaaugaaucaagua

SEQ ID NO: 504082 - RNA, 18 nt, Artificial Sequence
  Synthetic
aaucuuacacuucaagua

SEQ ID NO: 504083 - RNA, 19 nt, Artificial Sequence
  Synthetic
gaaucuuacacuucaagua

SEQ ID NO: 504084 - RNA, 20 nt, Artificial Sequence
  Synthetic
ugaaucuuacacuucaagua

SEQ ID NO: 504085 - RNA, 21 nt, Artificial Sequence
  Synthetic
gugaaucuuacacuucaagua

SEQ ID NO: 504086 - RNA, 22 nt, Artificial Sequence
  Synthetic
ugugaaucuuacacuucaagua

SEQ ID NO: 504087 - RNA, 23 nt, Artificial Sequence
  Synthetic
augugaaucuuacacuucaagua

SEQ ID NO: 504088 - RNA, 24 nt, Artificial Sequence
  Synthetic
caugugaaucuuacacuucaagua

SEQ ID NO: 504089 - RNA, 18 nt, Artificial Sequence
  Synthetic
guuaacauaaaagaagua

SEQ ID NO: 504090 - RNA, 19 nt, Artificial Sequence
  Synthetic
uguuaacauaaaagaagua

SEQ ID NO: 504091 - RNA, 20 nt, Artificial Sequence
  Synthetic
auguuaacauaaaagaagua

SEQ ID NO: 504092 - RNA, 21 nt, Artificial Sequence
  Synthetic
gauguuaacauaaaagaagua

SEQ ID NO: 504093 - RNA, 22 nt, Artificial Sequence
  Synthetic
ugauguuaacauaaaagaagua

SEQ ID NO: 504094 - RNA, 23 nt, Artificial Sequence
  Synthetic
gugauguuaacauaaaagaagua

SEQ ID NO: 504095 - RNA, 24 nt, Artificial Sequence
  Synthetic
ugugauguuaacauaaaagaagua

SEQ ID NO: 504096 - RNA, 18 nt, Artificial Sequence
  Synthetic
ugaaagauucaagaagua

SEQ ID NO: 504097 - RNA, 19 nt, Artificial Sequence
  Synthetic
augaaagauucaagaagua

SEQ ID NO: 504098 - RNA, 20 nt, Artificial Sequence
  Synthetic
uaugaaagauucaagaagua

SEQ ID NO: 504099 - RNA, 21 nt, Artificial Sequence
  Synthetic
auaugaaagauucaagaagua

SEQ ID NO: 504100 - RNA, 22 nt, Artificial Sequence
  Synthetic
gauaugaaagauucaagaagua

SEQ ID NO: 504101 - RNA, 23 nt, Artificial Sequence
  Synthetic
ggauaugaaagauucaagaagua

SEQ ID NO: 504102 - RNA, 24 nt, Artificial Sequence
  Synthetic
gggauaugaaagauucaagaagua

SEQ ID NO: 504103 - RNA, 18 nt, Artificial Sequence
  Synthetic
caggaagcagaagaagua

SEQ ID NO: 504104 - RNA, 19 nt, Artificial Sequence
  Synthetic
acaggaagcagaagaagua

SEQ ID NO: 504105 - RNA, 20 nt, Artificial Sequence
  Synthetic
gacaggaagcagaagaagua

SEQ ID NO: 504106 - RNA, 21 nt, Artificial Sequence
  Synthetic
agacaggaagcagaagaagua

SEQ ID NO: 504107 - RNA, 22 nt, Artificial Sequence
  Synthetic
aagacaggaagcagaagaagua

SEQ ID NO: 504108 - RNA, 23 nt, Artificial Sequence
  Synthetic
aaagacaggaagcagaagaagua

SEQ ID NO: 504109 - RNA, 24 nt, Artificial Sequence
  Synthetic
caaagacaggaagcagaagaagua

SEQ ID NO: 504110 - RNA, 18 nt, Artificial Sequence
  Synthetic
aaagacucagaagaagua

SEQ ID NO: 504111 - RNA, 19 nt, Artificial Sequence
  Synthetic
caaagacucagaagaagua

SEQ ID NO: 504112 - RNA, 20 nt, Artificial Sequence
  Synthetic
gcaaagacucagaagaagua

SEQ ID NO: 504113 - RNA, 21 nt, Artificial Sequence
  Synthetic
agcaaagacucagaagaagua

SEQ ID NO: 504114 - RNA, 22 nt, Artificial Sequence
  Synthetic
aagcaaagacucagaagaagua

SEQ ID NO: 504115 - RNA, 23 nt, Artificial Sequence
  Synthetic
gaagcaaagacucagaagaagua

SEQ ID NO: 504116 - RNA, 24 nt, Artificial Sequence
  Synthetic
ggaagcaaagacucagaagaagua

SEQ ID NO: 504117 - RNA, 18 nt, Artificial Sequence
  Synthetic
uaagaggggacagaagua

SEQ ID NO: 504118 - RNA, 19 nt, Artificial Sequence
  Synthetic
auaagaggggacagaagua

SEQ ID NO: 504119 - RNA, 20 nt, Artificial Sequence
  Synthetic
gauaagaggggacagaagua

SEQ ID NO: 504120 - RNA, 21 nt, Artificial Sequence
  Synthetic
agauaagaggggacagaagua

SEQ ID NO: 504121 - RNA, 22 nt, Artificial Sequence
  Synthetic
cagauaagaggggacagaagua

SEQ ID NO: 504122 - RNA, 23 nt, Artificial Sequence
  Synthetic
ucagauaagaggggacagaagua

SEQ ID NO: 504123 - RNA, 24 nt, Artificial Sequence
  Synthetic
gucagauaagaggggacagaagua

SEQ ID NO: 504124 - RNA, 18 nt, Artificial Sequence
  Synthetic
gaaaggaaagcagaagua

SEQ ID NO: 504125 - RNA, 19 nt, Artificial Sequence
  Synthetic
ggaaaggaaagcagaagua

SEQ ID NO: 504126 - RNA, 20 nt, Artificial Sequence
  Synthetic
aggaaaggaaagcagaagua

SEQ ID NO: 504127 - RNA, 21 nt, Artificial Sequence
  Synthetic
aaggaaaggaaagcagaagua

SEQ ID NO: 504128 - RNA, 22 nt, Artificial Sequence
  Synthetic
aaaggaaaggaaagcagaagua

SEQ ID NO: 504129 - RNA, 23 nt, Artificial Sequence
  Synthetic
gaaaggaaaggaaagcagaagua

SEQ ID NO: 504130 - RNA, 24 nt, Artificial Sequence
  Synthetic
agaaaggaaaggaaagcagaagua

SEQ ID NO: 504131 - RNA, 18 nt, Artificial Sequence
  Synthetic
uuuaagaauucagaagua

SEQ ID NO: 504132 - RNA, 19 nt, Artificial Sequence
  Synthetic
guuuaagaauucagaagua

SEQ ID NO: 504133 - RNA, 20 nt, Artificial Sequence
  Synthetic
gguuuaagaauucagaagua

SEQ ID NO: 504134 - RNA, 21 nt, Artificial Sequence
  Synthetic
ugguuuaagaauucagaagua

SEQ ID NO: 504135 - RNA, 22 nt, Artificial Sequence
  Synthetic
uugguuuaagaauucagaagua

SEQ ID NO: 504136 - RNA, 23 nt, Artificial Sequence
  Synthetic
uuugguuuaagaauucagaagua

SEQ ID NO: 504137 - RNA, 24 nt, Artificial Sequence
  Synthetic
uuuugguuuaagaauucagaagua

SEQ ID NO: 504138 - RNA, 18 nt, Artificial Sequence
  Synthetic
uaauauagcugagaagua

SEQ ID NO: 504139 - RNA, 19 nt, Artificial Sequence
  Synthetic
uuaauauagcugagaagua

SEQ ID NO: 504140 - RNA, 20 nt, Artificial Sequence
  Synthetic
uuuaauauagcugagaagua

SEQ ID NO: 504141 - RNA, 21 nt, Artificial Sequence
  Synthetic
uuuuaauauagcugagaagua

SEQ ID NO: 504142 - RNA, 22 nt, Artificial Sequence
  Synthetic
auuuuaauauagcugagaagua

SEQ ID NO: 504143 - RNA, 23 nt, Artificial Sequence
  Synthetic
cauuuuaauauagcugagaagua

SEQ ID NO: 504144 - RNA, 24 nt, Artificial Sequence
  Synthetic
ccauuuuaauauagcugagaagua

SEQ ID NO: 504145 - RNA, 18 nt, Artificial Sequence
  Synthetic
agcccgggaauagaagua

SEQ ID NO: 504146 - RNA, 19 nt, Artificial Sequence
  Synthetic
gagcccgggaauagaagua

SEQ ID NO: 504147 - RNA, 20 nt, Artificial Sequence
  Synthetic
ggagcccgggaauagaagua

SEQ ID NO: 504148 - RNA, 21 nt, Artificial Sequence
  Synthetic
aggagcccgggaauagaagua

SEQ ID NO: 504149 - RNA, 22 nt, Artificial Sequence
  Synthetic
gaggagcccgggaauagaagua

SEQ ID NO: 504150 - RNA, 23 nt, Artificial Sequence
  Synthetic
ggaggagcccgggaauagaagua

SEQ ID NO: 504151 - RNA, 24 nt, Artificial Sequence
  Synthetic
uggaggagcccgggaauagaagua

SEQ ID NO: 504152 - RNA, 18 nt, Artificial Sequence
  Synthetic
uauuauucuaaggaagua

SEQ ID NO: 504153 - RNA, 19 nt, Artificial Sequence
  Synthetic
auauuauucuaaggaagua

SEQ ID NO: 504154 - RNA, 20 nt, Artificial Sequence
  Synthetic
uauauuauucuaaggaagua

SEQ ID NO: 504155 - RNA, 21 nt, Artificial Sequence
  Synthetic
auauauuauucuaaggaagua

SEQ ID NO: 504156 - RNA, 22 nt, Artificial Sequence
  Synthetic
aauauauuauucuaaggaagua

SEQ ID NO: 504157 - RNA, 23 nt, Artificial Sequence
  Synthetic
aaauauauuauucuaaggaagua

SEQ ID NO: 504158 - RNA, 24 nt, Artificial Sequence
  Synthetic
aaaauauauuauucuaaggaagua

SEQ ID NO: 504159 - RNA, 18 nt, Artificial Sequence
  Synthetic
guaggggaaugggaagua

SEQ ID NO: 504160 - RNA, 19 nt, Artificial Sequence
  Synthetic
cguaggggaaugggaagua

SEQ ID NO: 504161 - RNA, 20 nt, Artificial Sequence
  Synthetic
acguaggggaaugggaagua

SEQ ID NO: 504162 - RNA, 21 nt, Artificial Sequence
  Synthetic
cacguaggggaaugggaagua

SEQ ID NO: 504163 - RNA, 22 nt, Artificial Sequence
  Synthetic
ucacguaggggaaugggaagua

SEQ ID NO: 504164 - RNA, 23 nt, Artificial Sequence
  Synthetic
aucacguaggggaaugggaagua

SEQ ID NO: 504165 - RNA, 24 nt, Artificial Sequence
  Synthetic
uaucacguaggggaaugggaagua

SEQ ID NO: 504166 - RNA, 18 nt, Artificial Sequence
  Synthetic
uugcggcagauggaagua

SEQ ID NO: 504167 - RNA, 19 nt, Artificial Sequence
  Synthetic
uuugcggcagauggaagua

SEQ ID NO: 504168 - RNA, 20 nt, Artificial Sequence
  Synthetic
cuuugcggcagauggaagua

SEQ ID NO: 504169 - RNA, 21 nt, Artificial Sequence
  Synthetic
ucuuugcggcagauggaagua

SEQ ID NO: 504170 - RNA, 22 nt, Artificial Sequence
  Synthetic
gucuuugcggcagauggaagua

SEQ ID NO: 504171 - RNA, 23 nt, Artificial Sequence
  Synthetic
ggucuuugcggcagauggaagua

SEQ ID NO: 504172 - RNA, 24 nt, Artificial Sequence
  Synthetic
aggucuuugcggcagauggaagua

SEQ ID NO: 504173 - RNA, 18 nt, Artificial Sequence
  Synthetic
uauaggaaaaaugaagua

SEQ ID NO: 504174 - RNA, 19 nt, Artificial Sequence
  Synthetic
cuauaggaaaaaugaagua

SEQ ID NO: 504175 - RNA, 20 nt, Artificial Sequence
  Synthetic
acuauaggaaaaaugaagua

SEQ ID NO: 504176 - RNA, 21 nt, Artificial Sequence
  Synthetic
cacuauaggaaaaaugaagua

SEQ ID NO: 504177 - RNA, 22 nt, Artificial Sequence
  Synthetic
ucacuauaggaaaaaugaagua

SEQ ID NO: 504178 - RNA, 23 nt, Artificial Sequence
  Synthetic
gucacuauaggaaaaaugaagua

SEQ ID NO: 504179 - RNA, 24 nt, Artificial Sequence
  Synthetic
agucacuauaggaaaaaugaagua

SEQ ID NO: 504180 - RNA, 18 nt, Artificial Sequence
  Synthetic
guauuauuaaaugaagua

SEQ ID NO: 504181 - RNA, 19 nt, Artificial Sequence
  Synthetic
aguauuauuaaaugaagua

SEQ ID NO: 504182 - RNA, 20 nt, Artificial Sequence
  Synthetic
aaguauuauuaaaugaagua

SEQ ID NO: 504183 - RNA, 21 nt, Artificial Sequence
  Synthetic
aaaguauuauuaaaugaagua

SEQ ID NO: 504184 - RNA, 22 nt, Artificial Sequence
  Synthetic
uaaaguauuauuaaaugaagua

SEQ ID NO: 504185 - RNA, 23 nt, Artificial Sequence
  Synthetic
cuaaaguauuauuaaaugaagua

SEQ ID NO: 504186 - RNA, 24 nt, Artificial Sequence
  Synthetic
acuaaaguauuauuaaaugaagua

SEQ ID NO: 504187 - RNA, 18 nt, Artificial Sequence
  Synthetic
gcuguugcccaugaagua

SEQ ID NO: 504188 - RNA, 19 nt, Artificial Sequence
  Synthetic
ugcuguugcccaugaagua

SEQ ID NO: 504189 - RNA, 20 nt, Artificial Sequence
  Synthetic
cugcuguugcccaugaagua

SEQ ID NO: 504190 - RNA, 21 nt, Artificial Sequence
  Synthetic
gcugcuguugcccaugaagua

SEQ ID NO: 504191 - RNA, 22 nt, Artificial Sequence
  Synthetic
ggcugcuguugcccaugaagua

SEQ ID NO: 504192 - RNA, 23 nt, Artificial Sequence
  Synthetic
uggcugcuguugcccaugaagua

SEQ ID NO: 504193 - RNA, 24 nt, Artificial Sequence
  Synthetic
guggcugcuguugcccaugaagua

SEQ ID NO: 504194 - RNA, 18 nt, Artificial Sequence
  Synthetic
aacuuaaaauaugaagua

SEQ ID NO: 504195 - RNA, 19 nt, Artificial Sequence
  Synthetic
uaacuuaaaauaugaagua

SEQ ID NO: 504196 - RNA, 20 nt, Artificial Sequence
  Synthetic
auaacuuaaaauaugaagua

SEQ ID NO: 504197 - RNA, 21 nt, Artificial Sequence
  Synthetic
aauaacuuaaaauaugaagua

SEQ ID NO: 504198 - RNA, 22 nt, Artificial Sequence
  Synthetic
uaauaacuuaaaauaugaagua

SEQ ID NO: 504199 - RNA, 23 nt, Artificial Sequence
  Synthetic
uuaauaacuuaaaauaugaagua

SEQ ID NO: 504200 - RNA, 24 nt, Artificial Sequence
  Synthetic
uuuaauaacuuaaaauaugaagua

SEQ ID NO: 504201 - RNA, 18 nt, Artificial Sequence
  Synthetic
ugagagcucuuugaagua

SEQ ID NO: 504202 - RNA, 19 nt, Artificial Sequence
  Synthetic
cugagagcucuuugaagua

SEQ ID NO: 504203 - RNA, 20 nt, Artificial Sequence
  Synthetic
ccugagagcucuuugaagua

SEQ ID NO: 504204 - RNA, 21 nt, Artificial Sequence
  Synthetic
cccugagagcucuuugaagua

SEQ ID NO: 504205 - RNA, 22 nt, Artificial Sequence
  Synthetic
ccccugagagcucuuugaagua

SEQ ID NO: 504206 - RNA, 23 nt, Artificial Sequence
  Synthetic
uccccugagagcucuuugaagua

SEQ ID NO: 504207 - RNA, 24 nt, Artificial Sequence
  Synthetic
cuccccugagagcucuuugaagua

SEQ ID NO: 504208 - RNA, 18 nt, Artificial Sequence
  Synthetic
guacacagguuugaagua

SEQ ID NO: 504209 - RNA, 19 nt, Artificial Sequence
  Synthetic
gguacacagguuugaagua

SEQ ID NO: 504210 - RNA, 20 nt, Artificial Sequence
  Synthetic
ggguacacagguuugaagua

SEQ ID NO: 504211 - RNA, 21 nt, Artificial Sequence
  Synthetic
gggguacacagguuugaagua

SEQ ID NO: 504212 - RNA, 22 nt, Artificial Sequence
  Synthetic
agggguacacagguuugaagua

SEQ ID NO: 504213 - RNA, 23 nt, Artificial Sequence
  Synthetic
cagggguacacagguuugaagua

SEQ ID NO: 504214 - RNA, 24 nt, Artificial Sequence
  Synthetic
acagggguacacagguuugaagua

SEQ ID NO: 504215 - RNA, 18 nt, Artificial Sequence
  Synthetic
cacaagaaaaaauaagua

SEQ ID NO: 504216 - RNA, 19 nt, Artificial Sequence
  Synthetic
acacaagaaaaaauaagua

SEQ ID NO: 504217 - RNA, 20 nt, Artificial Sequence
  Synthetic
aacacaagaaaaaauaagua

SEQ ID NO: 504218 - RNA, 21 nt, Artificial Sequence
  Synthetic
uaacacaagaaaaaauaagua

SEQ ID NO: 504219 - RNA, 22 nt, Artificial Sequence
  Synthetic
guaacacaagaaaaaauaagua

SEQ ID NO: 504220 - RNA, 23 nt, Artificial Sequence
  Synthetic
aguaacacaagaaaaaauaagua

SEQ ID NO: 504221 - RNA, 24 nt, Artificial Sequence
  Synthetic
aaguaacacaagaaaaaauaagua

SEQ ID NO: 504222 - RNA, 18 nt, Artificial Sequence
  Synthetic
aucuuaugaaaauaagua

SEQ ID NO: 504223 - RNA, 19 nt, Artificial Sequence
  Synthetic
caucuuaugaaaauaagua

SEQ ID NO: 504224 - RNA, 20 nt, Artificial Sequence
  Synthetic
ccaucuuaugaaaauaagua

SEQ ID NO: 504225 - RNA, 21 nt, Artificial Sequence
  Synthetic
gccaucuuaugaaaauaagua

SEQ ID NO: 504226 - RNA, 22 nt, Artificial Sequence
  Synthetic
ugccaucuuaugaaaauaagua

SEQ ID NO: 504227 - RNA, 23 nt, Artificial Sequence
  Synthetic
uugccaucuuaugaaaauaagua

SEQ ID NO: 504228 - RNA, 24 nt, Artificial Sequence
  Synthetic
uuugccaucuuaugaaaauaagua

SEQ ID NO: 504229 - RNA, 18 nt, Artificial Sequence
  Synthetic
uuugauguagaauaagua

SEQ ID NO: 504230 - RNA, 19 nt, Artificial Sequence
  Synthetic
auuugauguagaauaagua

SEQ ID NO: 504231 - RNA, 20 nt, Artificial Sequence
  Synthetic
uauuugauguagaauaagua

SEQ ID NO: 504232 - RNA, 21 nt, Artificial Sequence
  Synthetic
uuauuugauguagaauaagua

SEQ ID NO: 504233 - RNA, 22 nt, Artificial Sequence
  Synthetic
auuauuugauguagaauaagua

SEQ ID NO: 504234 - RNA, 23 nt, Artificial Sequence
  Synthetic
uauuauuugauguagaauaagua

SEQ ID NO: 504235 - RNA, 24 nt, Artificial Sequence
  Synthetic
auauuauuugauguagaauaagua

SEQ ID NO: 504236 - RNA, 18 nt, Artificial Sequence
  Synthetic
guuuaagcaacauaagua

SEQ ID NO: 504237 - RNA, 19 nt, Artificial Sequence
  Synthetic
uguuuaagcaacauaagua

SEQ ID NO: 504238 - RNA, 20 nt, Artificial Sequence
  Synthetic
uuguuuaagcaacauaagua

SEQ ID NO: 504239 - RNA, 21 nt, Artificial Sequence
  Synthetic
uuuguuuaagcaacauaagua

SEQ ID NO: 504240 - RNA, 22 nt, Artificial Sequence
  Synthetic
cuuuguuuaagcaacauaagua

SEQ ID NO: 504241 - RNA, 23 nt, Artificial Sequence
  Synthetic
gcuuuguuuaagcaacauaagua

SEQ ID NO: 504242 - RNA, 24 nt, Artificial Sequence
  Synthetic
agcuuuguuuaagcaacauaagua

SEQ ID NO: 504243 - RNA, 18 nt, Artificial Sequence
  Synthetic
aauuugcauacauaagua

SEQ ID NO: 504244 - RNA, 19 nt, Artificial Sequence
  Synthetic
gaauuugcauacauaagua

SEQ ID NO: 504245 - RNA, 20 nt, Artificial Sequence
  Synthetic
cgaauuugcauacauaagua

SEQ ID NO: 504246 - RNA, 21 nt, Artificial Sequence
  Synthetic
ccgaauuugcauacauaagua

SEQ ID NO: 504247 - RNA, 22 nt, Artificial Sequence
  Synthetic
uccgaauuugcauacauaagua

SEQ ID NO: 504248 - RNA, 23 nt, Artificial Sequence
  Synthetic
cuccgaauuugcauacauaagua

SEQ ID NO: 504249 - RNA, 24 nt, Artificial Sequence
  Synthetic
acuccgaauuugcauacauaagua

SEQ ID NO: 504250 - RNA, 18 nt, Artificial Sequence
  Synthetic
ucgauagauagauaagua

SEQ ID NO: 504251 - RNA, 19 nt, Artificial Sequence
  Synthetic
aucgauagauagauaagua

SEQ ID NO: 504252 - RNA, 20 nt, Artificial Sequence
  Synthetic
caucgauagauagauaagua

SEQ ID NO: 504253 - RNA, 21 nt, Artificial Sequence
  Synthetic
ccaucgauagauagauaagua

SEQ ID NO: 504254 - RNA, 22 nt, Artificial Sequence
  Synthetic
uccaucgauagauagauaagua

SEQ ID NO: 504255 - RNA, 23 nt, Artificial Sequence
  Synthetic
auccaucgauagauagauaagua

SEQ ID NO: 504256 - RNA, 24 nt, Artificial Sequence
  Synthetic
gauccaucgauagauagauaagua

SEQ ID NO: 504257 - RNA, 18 nt, Artificial Sequence
  Synthetic
acuagcaacugauaagua

SEQ ID NO: 504258 - RNA, 19 nt, Artificial Sequence
  Synthetic
aacuagcaacugauaagua

SEQ ID NO: 504259 - RNA, 20 nt, Artificial Sequence
  Synthetic
caacuagcaacugauaagua

SEQ ID NO: 504260 - RNA, 21 nt, Artificial Sequence
  Synthetic
ucaacuagcaacugauaagua

SEQ ID NO: 504261 - RNA, 22 nt, Artificial Sequence
  Synthetic
gucaacuagcaacugauaagua

SEQ ID NO: 504262 - RNA, 23 nt, Artificial Sequence
  Synthetic
ugucaacuagcaacugauaagua

SEQ ID NO: 504263 - RNA, 24 nt, Artificial Sequence
  Synthetic
uugucaacuagcaacugauaagua

SEQ ID NO: 504264 - RNA, 18 nt, Artificial Sequence
  Synthetic
caaagacauauauaagua

SEQ ID NO: 504265 - RNA, 19 nt, Artificial Sequence
  Synthetic
ucaaagacauauauaagua

SEQ ID NO: 504266 - RNA, 20 nt, Artificial Sequence
  Synthetic
uucaaagacauauauaagua

SEQ ID NO: 504267 - RNA, 21 nt, Artificial Sequence
  Synthetic
cuucaaagacauauauaagua

SEQ ID NO: 504268 - RNA, 22 nt, Artificial Sequence
  Synthetic
ucuucaaagacauauauaagua

SEQ ID NO: 504269 - RNA, 23 nt, Artificial Sequence
  Synthetic
aucuucaaagacauauauaagua

SEQ ID NO: 504270 - RNA, 24 nt, Artificial Sequence
  Synthetic
aaucuucaaagacauauauaagua

SEQ ID NO: 504271 - RNA, 18 nt, Artificial Sequence
  Synthetic
auagaguuguuauaagua

SEQ ID NO: 504272 - RNA, 19 nt, Artificial Sequence
  Synthetic
cauagaguuguuauaagua

SEQ ID NO: 504273 - RNA, 20 nt, Artificial Sequence
  Synthetic
ucauagaguuguuauaagua

SEQ ID NO: 504274 - RNA, 21 nt, Artificial Sequence
  Synthetic
uucauagaguuguuauaagua

SEQ ID NO: 504275 - RNA, 22 nt, Artificial Sequence
  Synthetic
uuucauagaguuguuauaagua

SEQ ID NO: 504276 - RNA, 23 nt, Artificial Sequence
  Synthetic
auuucauagaguuguuauaagua

SEQ ID NO: 504277 - RNA, 24 nt, Artificial Sequence
  Synthetic
uauuucauagaguuguuauaagua

SEQ ID NO: 504278 - RNA, 18 nt, Artificial Sequence
  Synthetic
cuaaaaggaagguaagua

SEQ ID NO: 504279 - RNA, 19 nt, Artificial Sequence
  Synthetic
ccuaaaaggaagguaagua

SEQ ID NO: 504280 - RNA, 20 nt, Artificial Sequence
  Synthetic
cccuaaaaggaagguaagua

SEQ ID NO: 504281 - RNA, 21 nt, Artificial Sequence
  Synthetic
gcccuaaaaggaagguaagua

SEQ ID NO: 504282 - RNA, 22 nt, Artificial Sequence
  Synthetic
ugcccuaaaaggaagguaagua

SEQ ID NO: 504283 - RNA, 23 nt, Artificial Sequence
  Synthetic
uugcccuaaaaggaagguaagua

SEQ ID NO: 504284 - RNA, 24 nt, Artificial Sequence
  Synthetic
guugcccuaaaaggaagguaagua

SEQ ID NO: 504285 - RNA, 18 nt, Artificial Sequence
  Synthetic
ugaagggccauguaagua

SEQ ID NO: 504286 - RNA, 19 nt, Artificial Sequence
  Synthetic
augaagggccauguaagua

SEQ ID NO: 504287 - RNA, 20 nt, Artificial Sequence
  Synthetic
caugaagggccauguaagua

SEQ ID NO: 504288 - RNA, 21 nt, Artificial Sequence
  Synthetic
gcaugaagggccauguaagua

SEQ ID NO: 504289 - RNA, 22 nt, Artificial Sequence
  Synthetic
agcaugaagggccauguaagua

SEQ ID NO: 504290 - RNA, 23 nt, Artificial Sequence
  Synthetic
gagcaugaagggccauguaagua

SEQ ID NO: 504291 - RNA, 24 nt, Artificial Sequence
  Synthetic
agagcaugaagggccauguaagua

SEQ ID NO: 504292 - RNA, 18 nt, Artificial Sequence
  Synthetic
ugagucaaggguuaagua

SEQ ID NO: 504293 - RNA, 19 nt, Artificial Sequence
  Synthetic
augagucaaggguuaagua

SEQ ID NO: 504294 - RNA, 20 nt, Artificial Sequence
  Synthetic
caugagucaaggguuaagua

SEQ ID NO: 504295 - RNA, 21 nt, Artificial Sequence
  Synthetic
gcaugagucaaggguuaagua

SEQ ID NO: 504296 - RNA, 22 nt, Artificial Sequence
  Synthetic
ugcaugagucaaggguuaagua

SEQ ID NO: 504297 - RNA, 23 nt, Artificial Sequence
  Synthetic
uugcaugagucaaggguuaagua

SEQ ID NO: 504298 - RNA, 24 nt, Artificial Sequence
  Synthetic
guugcaugagucaaggguuaagua

SEQ ID NO: 504299 - RNA, 18 nt, Artificial Sequence
  Synthetic
auauuauucauuuaagua

SEQ ID NO: 504300 - RNA, 19 nt, Artificial Sequence
  Synthetic
gauauuauucauuuaagua

SEQ ID NO: 504301 - RNA, 20 nt, Artificial Sequence
  Synthetic
agauauuauucauuuaagua

SEQ ID NO: 504302 - RNA, 21 nt, Artificial Sequence
  Synthetic
aagauauuauucauuuaagua

SEQ ID NO: 504303 - RNA, 22 nt, Artificial Sequence
  Synthetic
gaagauauuauucauuuaagua

SEQ ID NO: 504304 - RNA, 23 nt, Artificial Sequence
  Synthetic
ugaagauauuauucauuuaagua

SEQ ID NO: 504305 - RNA, 24 nt, Artificial Sequence
  Synthetic
uugaagauauuauucauuuaagua

SEQ ID NO: 504306 - RNA, 18 nt, Artificial Sequence
  Synthetic
auugguuguguuuaagua

SEQ ID NO: 504307 - RNA, 19 nt, Artificial Sequence
  Synthetic
aauugguuguguuuaagua

SEQ ID NO: 504308 - RNA, 20 nt, Artificial Sequence
  Synthetic
aaauugguuguguuuaagua

SEQ ID NO: 504309 - RNA, 21 nt, Artificial Sequence
  Synthetic
gaaauugguuguguuuaagua

SEQ ID NO: 504310 - RNA, 22 nt, Artificial Sequence
  Synthetic
ugaaauugguuguguuuaagua

SEQ ID NO: 504311 - RNA, 23 nt, Artificial Sequence
  Synthetic
augaaauugguuguguuuaagua

SEQ ID NO: 504312 - RNA, 24 nt, Artificial Sequence
  Synthetic
aaugaaauugguuguguuuaagua

SEQ ID NO: 504313 - RNA, 18 nt, Artificial Sequence
  Synthetic
aauuuuguauuuuaagua

SEQ ID NO: 504314 - RNA, 19 nt, Artificial Sequence
  Synthetic
uaauuuuguauuuuaagua

SEQ ID NO: 504315 - RNA, 20 nt, Artificial Sequence
  Synthetic
cuaauuuuguauuuuaagua

SEQ ID NO: 504316 - RNA, 21 nt, Artificial Sequence
  Synthetic
gcuaauuuuguauuuuaagua

SEQ ID NO: 504317 - RNA, 22 nt, Artificial Sequence
  Synthetic
ggcuaauuuuguauuuuaagua

SEQ ID NO: 504318 - RNA, 23 nt, Artificial Sequence
  Synthetic
uggcuaauuuuguauuuuaagua

SEQ ID NO: 504319 - RNA, 24 nt, Artificial Sequence
  Synthetic
cuggcuaauuuuguauuuuaagua

SEQ ID NO: 504320 - RNA, 18 nt, Artificial Sequence
  Synthetic
uuauuguggaaaacagua

SEQ ID NO: 504321 - RNA, 19 nt, Artificial Sequence
  Synthetic
auuauuguggaaaacagua

SEQ ID NO: 504322 - RNA, 20 nt, Artificial Sequence
  Synthetic
aauuauuguggaaaacagua

SEQ ID NO: 504323 - RNA, 21 nt, Artificial Sequence
  Synthetic
uaauuauuguggaaaacagua

SEQ ID NO: 504324 - RNA, 22 nt, Artificial Sequence
  Synthetic
auaauuauuguggaaaacagua

SEQ ID NO: 504325 - RNA, 23 nt, Artificial Sequence
  Synthetic
uauaauuauuguggaaaacagua

SEQ ID NO: 504326 - RNA, 24 nt, Artificial Sequence
  Synthetic
guauaauuauuguggaaaacagua

SEQ ID NO: 504327 - RNA, 18 nt, Artificial Sequence
  Synthetic
auuaucaggagaacagua

SEQ ID NO: 504328 - RNA, 19 nt, Artificial Sequence
  Synthetic
gauuaucaggagaacagua

SEQ ID NO: 504329 - RNA, 20 nt, Artificial Sequence
  Synthetic
ugauuaucaggagaacagua

SEQ ID NO: 504330 - RNA, 21 nt, Artificial Sequence
  Synthetic
cugauuaucaggagaacagua

SEQ ID NO: 504331 - RNA, 22 nt, Artificial Sequence
  Synthetic
acugauuaucaggagaacagua

SEQ ID NO: 504332 - RNA, 23 nt, Artificial Sequence
  Synthetic
uacugauuaucaggagaacagua

SEQ ID NO: 504333 - RNA, 24 nt, Artificial Sequence
  Synthetic
uuacugauuaucaggagaacagua

SEQ ID NO: 504334 - RNA, 18 nt, Artificial Sequence
  Synthetic
aguaccaugagaacagua

SEQ ID NO: 504335 - RNA, 19 nt, Artificial Sequence
  Synthetic
caguaccaugagaacagua

SEQ ID NO: 504336 - RNA, 20 nt, Artificial Sequence
  Synthetic
ucaguaccaugagaacagua

SEQ ID NO: 504337 - RNA, 21 nt, Artificial Sequence
  Synthetic
uucaguaccaugagaacagua

SEQ ID NO: 504338 - RNA, 22 nt, Artificial Sequence
  Synthetic
auucaguaccaugagaacagua

SEQ ID NO: 504339 - RNA, 23 nt, Artificial Sequence
  Synthetic
uauucaguaccaugagaacagua

SEQ ID NO: 504340 - RNA, 24 nt, Artificial Sequence
  Synthetic
uuauucaguaccaugagaacagua

SEQ ID NO: 504341 - RNA, 18 nt, Artificial Sequence
  Synthetic
aaacccauuugaacagua

SEQ ID NO: 504342 - RNA, 19 nt, Artificial Sequence
  Synthetic
uaaacccauuugaacagua

SEQ ID NO: 504343 - RNA, 20 nt, Artificial Sequence
  Synthetic
uuaaacccauuugaacagua

SEQ ID NO: 504344 - RNA, 21 nt, Artificial Sequence
  Synthetic
cuuaaacccauuugaacagua

SEQ ID NO: 504345 - RNA, 22 nt, Artificial Sequence
  Synthetic
ucuuaaacccauuugaacagua

SEQ ID NO: 504346 - RNA, 23 nt, Artificial Sequence
  Synthetic
aucuuaaacccauuugaacagua

SEQ ID NO: 504347 - RNA, 24 nt, Artificial Sequence
  Synthetic
aaucuuaaacccauuugaacagua

SEQ ID NO: 504348 - RNA, 18 nt, Artificial Sequence
  Synthetic
cucagauaaaacacagua

SEQ ID NO: 504349 - RNA, 19 nt, Artificial Sequence
  Synthetic
ucucagauaaaacacagua

SEQ ID NO: 504350 - RNA, 20 nt, Artificial Sequence
  Synthetic
uucucagauaaaacacagua

SEQ ID NO: 504351 - RNA, 21 nt, Artificial Sequence
  Synthetic
uuucucagauaaaacacagua

SEQ ID NO: 504352 - RNA, 22 nt, Artificial Sequence
  Synthetic
uuuucucagauaaaacacagua

SEQ ID NO: 504353 - RNA, 23 nt, Artificial Sequence
  Synthetic
uuuuucucagauaaaacacagua

SEQ ID NO: 504354 - RNA, 24 nt, Artificial Sequence
  Synthetic
auuuuucucagauaaaacacagua

SEQ ID NO: 504355 - RNA, 18 nt, Artificial Sequence
  Synthetic
auuugaacuaccacagua

SEQ ID NO: 504356 - RNA, 19 nt, Artificial Sequence
  Synthetic
uauuugaacuaccacagua

SEQ ID NO: 504357 - RNA, 20 nt, Artificial Sequence
  Synthetic
auauuugaacuaccacagua

SEQ ID NO: 504358 - RNA, 21 nt, Artificial Sequence
  Synthetic
gauauuugaacuaccacagua

SEQ ID NO: 504359 - RNA, 22 nt, Artificial Sequence
  Synthetic
ugauauuugaacuaccacagua

SEQ ID NO: 504360 - RNA, 23 nt, Artificial Sequence
  Synthetic
cugauauuugaacuaccacagua

SEQ ID NO: 504361 - RNA, 24 nt, Artificial Sequence
  Synthetic
ucugauauuugaacuaccacagua

SEQ ID NO: 504362 - RNA, 18 nt, Artificial Sequence
  Synthetic
ugcugugcugucacagua

SEQ ID NO: 504363 - RNA, 19 nt, Artificial Sequence
  Synthetic
cugcugugcugucacagua

SEQ ID NO: 504364 - RNA, 20 nt, Artificial Sequence
  Synthetic
acugcugugcugucacagua

SEQ ID NO: 504365 - RNA, 21 nt, Artificial Sequence
  Synthetic
aacugcugugcugucacagua

SEQ ID NO: 504366 - RNA, 22 nt, Artificial Sequence
  Synthetic
uaacugcugugcugucacagua

SEQ ID NO: 504367 - RNA, 23 nt, Artificial Sequence
  Synthetic
cuaacugcugugcugucacagua

SEQ ID NO: 504368 - RNA, 24 nt, Artificial Sequence
  Synthetic
acuaacugcugugcugucacagua

SEQ ID NO: 504369 - RNA, 18 nt, Artificial Sequence
  Synthetic
acaugggaggggacagua

SEQ ID NO: 504370 - RNA, 19 nt, Artificial Sequence
  Synthetic
aacaugggaggggacagua

SEQ ID NO: 504371 - RNA, 20 nt, Artificial Sequence
  Synthetic
gaacaugggaggggacagua

SEQ ID NO: 504372 - RNA, 21 nt, Artificial Sequence
  Synthetic
ggaacaugggaggggacagua

SEQ ID NO: 504373 - RNA, 22 nt, Artificial Sequence
  Synthetic
uggaacaugggaggggacagua

SEQ ID NO: 504374 - RNA, 23 nt, Artificial Sequence
  Synthetic
auggaacaugggaggggacagua

SEQ ID NO: 504375 - RNA, 24 nt, Artificial Sequence
  Synthetic
aauggaacaugggaggggacagua

SEQ ID NO: 504376 - RNA, 18 nt, Artificial Sequence
  Synthetic
aaugacacguguacagua

SEQ ID NO: 504377 - RNA, 19 nt, Artificial Sequence
  Synthetic
aaaugacacguguacagua

SEQ ID NO: 504378 - RNA, 20 nt, Artificial Sequence
  Synthetic
uaaaugacacguguacagua

SEQ ID NO: 504379 - RNA, 21 nt, Artificial Sequence
  Synthetic
guaaaugacacguguacagua

SEQ ID NO: 504380 - RNA, 22 nt, Artificial Sequence
  Synthetic
uguaaaugacacguguacagua

SEQ ID NO: 504381 - RNA, 23 nt, Artificial Sequence
  Synthetic
cuguaaaugacacguguacagua

SEQ ID NO: 504382 - RNA, 24 nt, Artificial Sequence
  Synthetic
gcuguaaaugacacguguacagua

SEQ ID NO: 504383 - RNA, 18 nt, Artificial Sequence
  Synthetic
uuggguauauaaccagua

SEQ ID NO: 504384 - RNA, 19 nt, Artificial Sequence
  Synthetic
uuuggguauauaaccagua

SEQ ID NO: 504385 - RNA, 20 nt, Artificial Sequence
  Synthetic
cuuuggguauauaaccagua

SEQ ID NO: 504386 - RNA, 21 nt, Artificial Sequence
  Synthetic
ccuuuggguauauaaccagua

SEQ ID NO: 504387 - RNA, 22 nt, Artificial Sequence
  Synthetic
uccuuuggguauauaaccagua

SEQ ID NO: 504388 - RNA, 23 nt, Artificial Sequence
  Synthetic
auccuuuggguauauaaccagua

SEQ ID NO: 504389 - RNA, 24 nt, Artificial Sequence
  Synthetic
aauccuuuggguauauaaccagua

SEQ ID NO: 504390 - RNA, 18 nt, Artificial Sequence
  Synthetic
acccugaacauaccagua

SEQ ID NO: 504391 - RNA, 19 nt, Artificial Sequence
  Synthetic
aacccugaacauaccagua

SEQ ID NO: 504392 - RNA, 20 nt, Artificial Sequence
  Synthetic
aaacccugaacauaccagua

SEQ ID NO: 504393 - RNA, 21 nt, Artificial Sequence
  Synthetic
gaaacccugaacauaccagua

SEQ ID NO: 504394 - RNA, 22 nt, Artificial Sequence
  Synthetic
agaaacccugaacauaccagua

SEQ ID NO: 504395 - RNA, 23 nt, Artificial Sequence
  Synthetic
aagaaacccugaacauaccagua

SEQ ID NO: 504396 - RNA, 24 nt, Artificial Sequence
  Synthetic
aaagaaacccugaacauaccagua

SEQ ID NO: 504397 - RNA, 21 nt, Artificial Sequence
  Synthetic
ccuuuggguauauacccagua

SEQ ID NO: 504398 - RNA, 22 nt, Artificial Sequence
  Synthetic
uccuuuggguauauacccagua

SEQ ID NO: 504399 - RNA, 23 nt, Artificial Sequence
  Synthetic
auccuuuggguauauacccagua

SEQ ID NO: 504400 - RNA, 24 nt, Artificial Sequence
  Synthetic
aauccuuuggguauauacccagua

SEQ ID NO: 504401 - RNA, 23 nt, Artificial Sequence
  Synthetic
guccuuuggguauauacccagua

SEQ ID NO: 504402 - RNA, 24 nt, Artificial Sequence
  Synthetic
aguccuuuggguauauacccagua

SEQ ID NO: 504403 - RNA, 18 nt, Artificial Sequence
  Synthetic
uuggauaaaugcccagua

SEQ ID NO: 504404 - RNA, 19 nt, Artificial Sequence
  Synthetic
uuuggauaaaugcccagua

SEQ ID NO: 504405 - RNA, 20 nt, Artificial Sequence
  Synthetic
cuuuggauaaaugcccagua

SEQ ID NO: 504406 - RNA, 21 nt, Artificial Sequence
  Synthetic
ucuuuggauaaaugcccagua

SEQ ID NO: 504407 - RNA, 22 nt, Artificial Sequence
  Synthetic
uucuuuggauaaaugcccagua

SEQ ID NO: 504408 - RNA, 23 nt, Artificial Sequence
  Synthetic
uuucuuuggauaaaugcccagua

SEQ ID NO: 504409 - RNA, 24 nt, Artificial Sequence
  Synthetic
uuuucuuuggauaaaugcccagua

SEQ ID NO: 504410 - RNA, 18 nt, Artificial Sequence
  Synthetic
uuuucucacugcccagua

SEQ ID NO: 504411 - RNA, 19 nt, Artificial Sequence
  Synthetic
uuuuucucacugcccagua

SEQ ID NO: 504412 - RNA, 20 nt, Artificial Sequence
  Synthetic
uuuuuucucacugcccagua

SEQ ID NO: 504413 - RNA, 21 nt, Artificial Sequence
  Synthetic
auuuuuucucacugcccagua

SEQ ID NO: 504414 - RNA, 22 nt, Artificial Sequence
  Synthetic
aauuuuuucucacugcccagua

SEQ ID NO: 504415 - RNA, 23 nt, Artificial Sequence
  Synthetic
uaauuuuuucucacugcccagua

SEQ ID NO: 504416 - RNA, 24 nt, Artificial Sequence
  Synthetic
auaauuuuuucucacugcccagua

SEQ ID NO: 504417 - RNA, 18 nt, Artificial Sequence
  Synthetic
uaguaaacucucccagua

SEQ ID NO: 504418 - RNA, 19 nt, Artificial Sequence
  Synthetic
uuaguaaacucucccagua

SEQ ID NO: 504419 - RNA, 20 nt, Artificial Sequence
  Synthetic
cuuaguaaacucucccagua

SEQ ID NO: 504420 - RNA, 21 nt, Artificial Sequence
  Synthetic
ccuuaguaaacucucccagua

SEQ ID NO: 504421 - RNA, 22 nt, Artificial Sequence
  Synthetic
gccuuaguaaacucucccagua

SEQ ID NO: 504422 - RNA, 23 nt, Artificial Sequence
  Synthetic
agccuuaguaaacucucccagua

SEQ ID NO: 504423 - RNA, 24 nt, Artificial Sequence
  Synthetic
aagccuuaguaaacucucccagua

SEQ ID NO: 504424 - RNA, 18 nt, Artificial Sequence
  Synthetic
uaucaagaauauccagua

SEQ ID NO: 504425 - RNA, 19 nt, Artificial Sequence
  Synthetic
cuaucaagaauauccagua

SEQ ID NO: 504426 - RNA, 20 nt, Artificial Sequence
  Synthetic
ucuaucaagaauauccagua

SEQ ID NO: 504427 - RNA, 21 nt, Artificial Sequence
  Synthetic
uucuaucaagaauauccagua

SEQ ID NO: 504428 - RNA, 22 nt, Artificial Sequence
  Synthetic
uuucuaucaagaauauccagua

SEQ ID NO: 504429 - RNA, 23 nt, Artificial Sequence
  Synthetic
uuuucuaucaagaauauccagua

SEQ ID NO: 504430 - RNA, 24 nt, Artificial Sequence
  Synthetic
uuuuucuaucaagaauauccagua

SEQ ID NO: 504431 - RNA, 18 nt, Artificial Sequence
  Synthetic
ucaggaagccaggcagua

SEQ ID NO: 504432 - RNA, 19 nt, Artificial Sequence
  Synthetic
gucaggaagccaggcagua

SEQ ID NO: 504433 - RNA, 20 nt, Artificial Sequence
  Synthetic
agucaggaagccaggcagua

SEQ ID NO: 504434 - RNA, 21 nt, Artificial Sequence
  Synthetic
aagucaggaagccaggcagua

SEQ ID NO: 504435 - RNA, 22 nt, Artificial Sequence
  Synthetic
gaagucaggaagccaggcagua

SEQ ID NO: 504436 - RNA, 23 nt, Artificial Sequence
  Synthetic
ggaagucaggaagccaggcagua

SEQ ID NO: 504437 - RNA, 24 nt, Artificial Sequence
  Synthetic
aggaagucaggaagccaggcagua

SEQ ID NO: 504438 - RNA, 18 nt, Artificial Sequence
  Synthetic
cucaugaagcaggcagua

SEQ ID NO: 504439 - RNA, 19 nt, Artificial Sequence
  Synthetic
ccucaugaagcaggcagua

SEQ ID NO: 504440 - RNA, 20 nt, Artificial Sequence
  Synthetic
cccucaugaagcaggcagua

SEQ ID NO: 504441 - RNA, 21 nt, Artificial Sequence
  Synthetic
acccucaugaagcaggcagua

SEQ ID NO: 504442 - RNA, 22 nt, Artificial Sequence
  Synthetic
cacccucaugaagcaggcagua

SEQ ID NO: 504443 - RNA, 23 nt, Artificial Sequence
  Synthetic
ucacccucaugaagcaggcagua

SEQ ID NO: 504444 - RNA, 24 nt, Artificial Sequence
  Synthetic
uucacccucaugaagcaggcagua

SEQ ID NO: 504445 - RNA, 18 nt, Artificial Sequence
  Synthetic
gaguuggugagugcagua

SEQ ID NO: 504446 - RNA, 19 nt, Artificial Sequence
  Synthetic
ugaguuggugagugcagua

SEQ ID NO: 504447 - RNA, 20 nt, Artificial Sequence
  Synthetic
gugaguuggugagugcagua

SEQ ID NO: 504448 - RNA, 21 nt, Artificial Sequence
  Synthetic
ggugaguuggugagugcagua

SEQ ID NO: 504449 - RNA, 22 nt, Artificial Sequence
  Synthetic
gggugaguuggugagugcagua

SEQ ID NO: 504450 - RNA, 23 nt, Artificial Sequence
  Synthetic
cgggugaguuggugagugcagua

SEQ ID NO: 504451 - RNA, 24 nt, Artificial Sequence
  Synthetic
acgggugaguuggugagugcagua

SEQ ID NO: 504452 - RNA, 18 nt, Artificial Sequence
  Synthetic
accuauaaaucaucagua

SEQ ID NO: 504453 - RNA, 19 nt, Artificial Sequence
  Synthetic
caccuauaaaucaucagua

SEQ ID NO: 504454 - RNA, 20 nt, Artificial Sequence
  Synthetic
acaccuauaaaucaucagua

SEQ ID NO: 504455 - RNA, 21 nt, Artificial Sequence
  Synthetic
aacaccuauaaaucaucagua

SEQ ID NO: 504456 - RNA, 22 nt, Artificial Sequence
  Synthetic
aaacaccuauaaaucaucagua

SEQ ID NO: 504457 - RNA, 23 nt, Artificial Sequence
  Synthetic
aaaacaccuauaaaucaucagua

SEQ ID NO: 504458 - RNA, 24 nt, Artificial Sequence
  Synthetic
aaaaacaccuauaaaucaucagua

SEQ ID NO: 504459 - RNA, 18 nt, Artificial Sequence
  Synthetic
uuccuacuccacucagua

SEQ ID NO: 504460 - RNA, 19 nt, Artificial Sequence
  Synthetic
uuuccuacuccacucagua

SEQ ID NO: 504461 - RNA, 20 nt, Artificial Sequence
  Synthetic
auuuccuacuccacucagua

SEQ ID NO: 504462 - RNA, 21 nt, Artificial Sequence
  Synthetic
cauuuccuacuccacucagua

SEQ ID NO: 504463 - RNA, 22 nt, Artificial Sequence
  Synthetic
ccauuuccuacuccacucagua

SEQ ID NO: 504464 - RNA, 23 nt, Artificial Sequence
  Synthetic
cccauuuccuacuccacucagua

SEQ ID NO: 504465 - RNA, 24 nt, Artificial Sequence
  Synthetic
acccauuuccuacuccacucagua

SEQ ID NO: 504466 - RNA, 18 nt, Artificial Sequence
  Synthetic
uuggauauauacucagua

SEQ ID NO: 504467 - RNA, 19 nt, Artificial Sequence
  Synthetic
uuuggauauauacucagua

SEQ ID NO: 504468 - RNA, 20 nt, Artificial Sequence
  Synthetic
uuuuggauauauacucagua

SEQ ID NO: 504469 - RNA, 21 nt, Artificial Sequence
  Synthetic
cuuuuggauauauacucagua

SEQ ID NO: 504470 - RNA, 22 nt, Artificial Sequence
  Synthetic
acuuuuggauauauacucagua

SEQ ID NO: 504471 - RNA, 23 nt, Artificial Sequence
  Synthetic
uacuuuuggauauauacucagua

SEQ ID NO: 504472 - RNA, 24 nt, Artificial Sequence
  Synthetic
uuacuuuuggauauauacucagua

SEQ ID NO: 504473 - RNA, 18 nt, Artificial Sequence
  Synthetic
uuggauaucuacucagua

SEQ ID NO: 504474 - RNA, 19 nt, Artificial Sequence
  Synthetic
uuuggauaucuacucagua

SEQ ID NO: 504475 - RNA, 20 nt, Artificial Sequence
  Synthetic
uuuuggauaucuacucagua

SEQ ID NO: 504476 - RNA, 21 nt, Artificial Sequence
  Synthetic
cuuuuggauaucuacucagua

SEQ ID NO: 504477 - RNA, 22 nt, Artificial Sequence
  Synthetic
ucuuuuggauaucuacucagua

SEQ ID NO: 504478 - RNA, 23 nt, Artificial Sequence
  Synthetic
uucuuuuggauaucuacucagua

SEQ ID NO: 504479 - RNA, 24 nt, Artificial Sequence
  Synthetic
uuucuuuuggauaucuacucagua

SEQ ID NO: 504480 - RNA, 18 nt, Artificial Sequence
  Synthetic
aaggguuuugccucagua

SEQ ID NO: 504481 - RNA, 19 nt, Artificial Sequence
  Synthetic
gaaggguuuugccucagua

SEQ ID NO: 504482 - RNA, 20 nt, Artificial Sequence
  Synthetic
agaaggguuuugccucagua

SEQ ID NO: 504483 - RNA, 21 nt, Artificial Sequence
  Synthetic
cagaaggguuuugccucagua

SEQ ID NO: 504484 - RNA, 22 nt, Artificial Sequence
  Synthetic
ucagaaggguuuugccucagua

SEQ ID NO: 504485 - RNA, 23 nt, Artificial Sequence
  Synthetic
cucagaaggguuuugccucagua

SEQ ID NO: 504486 - RNA, 24 nt, Artificial Sequence
  Synthetic
acucagaaggguuuugccucagua

SEQ ID NO: 504487 - RNA, 18 nt, Artificial Sequence
  Synthetic
uuucauuguugcucagua

SEQ ID NO: 504488 - RNA, 19 nt, Artificial Sequence
  Synthetic
auuucauuguugcucagua

SEQ ID NO: 504489 - RNA, 20 nt, Artificial Sequence
  Synthetic
cauuucauuguugcucagua

SEQ ID NO: 504490 - RNA, 21 nt, Artificial Sequence
  Synthetic
acauuucauuguugcucagua

SEQ ID NO: 504491 - RNA, 22 nt, Artificial Sequence
  Synthetic
aacauuucauuguugcucagua

SEQ ID NO: 504492 - RNA, 23 nt, Artificial Sequence
  Synthetic
aaacauuucauuguugcucagua

SEQ ID NO: 504493 - RNA, 24 nt, Artificial Sequence
  Synthetic
gaaacauuucauuguugcucagua

SEQ ID NO: 504494 - RNA, 18 nt, Artificial Sequence
  Synthetic
uucucuuucuucucagua

SEQ ID NO: 504495 - RNA, 19 nt, Artificial Sequence
  Synthetic
guucucuuucuucucagua

SEQ ID NO: 504496 - RNA, 20 nt, Artificial Sequence
  Synthetic
aguucucuuucuucucagua

SEQ ID NO: 504497 - RNA, 21 nt, Artificial Sequence
  Synthetic
gaguucucuuucuucucagua

SEQ ID NO: 504498 - RNA, 22 nt, Artificial Sequence
  Synthetic
ugaguucucuuucuucucagua

SEQ ID NO: 504499 - RNA, 23 nt, Artificial Sequence
  Synthetic
uugaguucucuuucuucucagua

SEQ ID NO: 504500 - RNA, 24 nt, Artificial Sequence
  Synthetic
uuugaguucucuuucuucucagua

SEQ ID NO: 504501 - RNA, 18 nt, Artificial Sequence
  Synthetic
uaaaugggugggucagua

SEQ ID NO: 504502 - RNA, 19 nt, Artificial Sequence
  Synthetic
auaaaugggugggucagua

SEQ ID NO: 504503 - RNA, 20 nt, Artificial Sequence
  Synthetic
cauaaaugggugggucagua

SEQ ID NO: 504504 - RNA, 21 nt, Artificial Sequence
  Synthetic
gcauaaaugggugggucagua

SEQ ID NO: 504505 - RNA, 22 nt, Artificial Sequence
  Synthetic
ugcauaaaugggugggucagua

SEQ ID NO: 504506 - RNA, 23 nt, Artificial Sequence
  Synthetic
uugcauaaaugggugggucagua

SEQ ID NO: 504507 - RNA, 24 nt, Artificial Sequence
  Synthetic
guugcauaaaugggugggucagua

SEQ ID NO: 504508 - RNA, 18 nt, Artificial Sequence
  Synthetic
uguuuucucucuucagua

SEQ ID NO: 504509 - RNA, 19 nt, Artificial Sequence
  Synthetic
cuguuuucucucuucagua

SEQ ID NO: 504510 - RNA, 20 nt, Artificial Sequence
  Synthetic
gcuguuuucucucuucagua

SEQ ID NO: 504511 - RNA, 21 nt, Artificial Sequence
  Synthetic
ugcuguuuucucucuucagua

SEQ ID NO: 504512 - RNA, 22 nt, Artificial Sequence
  Synthetic
cugcuguuuucucucuucagua

SEQ ID NO: 504513 - RNA, 23 nt, Artificial Sequence
  Synthetic
ccugcuguuuucucucuucagua

SEQ ID NO: 504514 - RNA, 24 nt, Artificial Sequence
  Synthetic
accugcuguuuucucucuucagua

SEQ ID NO: 504515 - RNA, 18 nt, Artificial Sequence
  Synthetic
ugauuguagaguucagua

SEQ ID NO: 504516 - RNA, 19 nt, Artificial Sequence
  Synthetic
uugauuguagaguucagua

SEQ ID NO: 504517 - RNA, 20 nt, Artificial Sequence
  Synthetic
uuugauuguagaguucagua

SEQ ID NO: 504518 - RNA, 21 nt, Artificial Sequence
  Synthetic
auuugauuguagaguucagua

SEQ ID NO: 504519 - RNA, 22 nt, Artificial Sequence
  Synthetic
uauuugauuguagaguucagua

SEQ ID NO: 504520 - RNA, 23 nt, Artificial Sequence
  Synthetic
uuauuugauuguagaguucagua

SEQ ID NO: 504521 - RNA, 24 nt, Artificial Sequence
  Synthetic
uuuauuugauuguagaguucagua

SEQ ID NO: 504522 - RNA, 18 nt, Artificial Sequence
  Synthetic
uaguuucauguuucagua

SEQ ID NO: 504523 - RNA, 19 nt, Artificial Sequence
  Synthetic
guaguuucauguuucagua

SEQ ID NO: 504524 - RNA, 20 nt, Artificial Sequence
  Synthetic
uguaguuucauguuucagua

SEQ ID NO: 504525 - RNA, 21 nt, Artificial Sequence
  Synthetic
uuguaguuucauguuucagua

SEQ ID NO: 504526 - RNA, 22 nt, Artificial Sequence
  Synthetic
uuuguaguuucauguuucagua

SEQ ID NO: 504527 - RNA, 23 nt, Artificial Sequence
  Synthetic
cuuuguaguuucauguuucagua

SEQ ID NO: 504528 - RNA, 24 nt, Artificial Sequence
  Synthetic
gcuuuguaguuucauguuucagua

SEQ ID NO: 504529 - RNA, 18 nt, Artificial Sequence
  Synthetic
guuguaggguuuucagua

SEQ ID NO: 504530 - RNA, 19 nt, Artificial Sequence
  Synthetic
aguuguaggguuuucagua

SEQ ID NO: 504531 - RNA, 20 nt, Artificial Sequence
  Synthetic
aaguuguaggguuuucagua

SEQ ID NO: 504532 - RNA, 21 nt, Artificial Sequence
  Synthetic
gaaguuguaggguuuucagua

SEQ ID NO: 504533 - RNA, 22 nt, Artificial Sequence
  Synthetic
ugaaguuguaggguuuucagua

SEQ ID NO: 504534 - RNA, 23 nt, Artificial Sequence
  Synthetic
gugaaguuguaggguuuucagua

SEQ ID NO: 504535 - RNA, 24 nt, Artificial Sequence
  Synthetic
ggugaaguuguaggguuuucagua

SEQ ID NO: 504536 - RNA, 18 nt, Artificial Sequence
  Synthetic
cuauguuaaaaaagagua

SEQ ID NO: 504537 - RNA, 19 nt, Artificial Sequence
  Synthetic
acuauguuaaaaaagagua

SEQ ID NO: 504538 - RNA, 20 nt, Artificial Sequence
  Synthetic
aacuauguuaaaaaagagua

SEQ ID NO: 504539 - RNA, 21 nt, Artificial Sequence
  Synthetic
gaacuauguuaaaaaagagua

SEQ ID NO: 504540 - RNA, 22 nt, Artificial Sequence
  Synthetic
agaacuauguuaaaaaagagua

SEQ ID NO: 504541 - RNA, 23 nt, Artificial Sequence
  Synthetic
cagaacuauguuaaaaaagagua

SEQ ID NO: 504542 - RNA, 24 nt, Artificial Sequence
  Synthetic
ccagaacuauguuaaaaaagagua

SEQ ID NO: 504543 - RNA, 18 nt, Artificial Sequence
  Synthetic
gauuucauuuaaagagua

SEQ ID NO: 504544 - RNA, 19 nt, Artificial Sequence
  Synthetic
ggauuucauuuaaagagua

SEQ ID NO: 504545 - RNA, 20 nt, Artificial Sequence
  Synthetic
aggauuucauuuaaagagua

SEQ ID NO: 504546 - RNA, 21 nt, Artificial Sequence
  Synthetic
caggauuucauuuaaagagua

SEQ ID NO: 504547 - RNA, 22 nt, Artificial Sequence
  Synthetic
acaggauuucauuuaaagagua

SEQ ID NO: 504548 - RNA, 23 nt, Artificial Sequence
  Synthetic
cacaggauuucauuuaaagagua

SEQ ID NO: 504549 - RNA, 24 nt, Artificial Sequence
  Synthetic
ucacaggauuucauuuaaagagua

SEQ ID NO: 504550 - RNA, 18 nt, Artificial Sequence
  Synthetic
aauaguugcaacagagua

SEQ ID NO: 504551 - RNA, 19 nt, Artificial Sequence
  Synthetic
gaauaguugcaacagagua

SEQ ID NO: 504552 - RNA, 20 nt, Artificial Sequence
  Synthetic
ugaauaguugcaacagagua

SEQ ID NO: 504553 - RNA, 21 nt, Artificial Sequence
  Synthetic
uugaauaguugcaacagagua

SEQ ID NO: 504554 - RNA, 22 nt, Artificial Sequence
  Synthetic
guugaauaguugcaacagagua

SEQ ID NO: 504555 - RNA, 23 nt, Artificial Sequence
  Synthetic
aguugaauaguugcaacagagua

SEQ ID NO: 504556 - RNA, 24 nt, Artificial Sequence
  Synthetic
gaguugaauaguugcaacagagua

SEQ ID NO: 504557 - RNA, 18 nt, Artificial Sequence
  Synthetic
ugcaugggggacagagua

SEQ ID NO: 504558 - RNA, 19 nt, Artificial Sequence
  Synthetic
gugcaugggggacagagua

SEQ ID NO: 504559 - RNA, 20 nt, Artificial Sequence
  Synthetic
ugugcaugggggacagagua

SEQ ID NO: 504560 - RNA, 21 nt, Artificial Sequence
  Synthetic
cugugcaugggggacagagua

SEQ ID NO: 504561 - RNA, 22 nt, Artificial Sequence
  Synthetic
ucugugcaugggggacagagua

SEQ ID NO: 504562 - RNA, 23 nt, Artificial Sequence
  Synthetic
uucugugcaugggggacagagua

SEQ ID NO: 504563 - RNA, 24 nt, Artificial Sequence
  Synthetic
guucugugcaugggggacagagua

SEQ ID NO: 504564 - RNA, 18 nt, Artificial Sequence
  Synthetic
ccaggccagggcagagua

SEQ ID NO: 504565 - RNA, 19 nt, Artificial Sequence
  Synthetic
cccaggccagggcagagua

SEQ ID NO: 504566 - RNA, 20 nt, Artificial Sequence
  Synthetic
ccccaggccagggcagagua

SEQ ID NO: 504567 - RNA, 21 nt, Artificial Sequence
  Synthetic
accccaggccagggcagagua

SEQ ID NO: 504568 - RNA, 22 nt, Artificial Sequence
  Synthetic
aaccccaggccagggcagagua

SEQ ID NO: 504569 - RNA, 23 nt, Artificial Sequence
  Synthetic
uaaccccaggccagggcagagua

SEQ ID NO: 504570 - RNA, 24 nt, Artificial Sequence
  Synthetic
auaaccccaggccagggcagagua

SEQ ID NO: 504571 - RNA, 18 nt, Artificial Sequence
  Synthetic
gaaaggcagugcagagua

SEQ ID NO: 504572 - RNA, 19 nt, Artificial Sequence
  Synthetic
agaaaggcagugcagagua

SEQ ID NO: 504573 - RNA, 20 nt, Artificial Sequence
  Synthetic
aagaaaggcagugcagagua

SEQ ID NO: 504574 - RNA, 21 nt, Artificial Sequence
  Synthetic
caagaaaggcagugcagagua

SEQ ID NO: 504575 - RNA, 22 nt, Artificial Sequence
  Synthetic
ucaagaaaggcagugcagagua

SEQ ID NO: 504576 - RNA, 23 nt, Artificial Sequence
  Synthetic
uucaagaaaggcagugcagagua

SEQ ID NO: 504577 - RNA, 24 nt, Artificial Sequence
  Synthetic
cuucaagaaaggcagugcagagua

SEQ ID NO: 504578 - RNA, 18 nt, Artificial Sequence
  Synthetic
uggugcugccucagagua

SEQ ID NO: 504579 - RNA, 19 nt, Artificial Sequence
  Synthetic
auggugcugccucagagua

SEQ ID NO: 504580 - RNA, 20 nt, Artificial Sequence
  Synthetic
uauggugcugccucagagua

SEQ ID NO: 504581 - RNA, 21 nt, Artificial Sequence
  Synthetic
cuauggugcugccucagagua

SEQ ID NO: 504582 - RNA, 22 nt, Artificial Sequence
  Synthetic
gcuauggugcugccucagagua

SEQ ID NO: 504583 - RNA, 23 nt, Artificial Sequence
  Synthetic
ggcuauggugcugccucagagua

SEQ ID NO: 504584 - RNA, 24 nt, Artificial Sequence
  Synthetic
cggcuauggugcugccucagagua

SEQ ID NO: 504585 - RNA, 18 nt, Artificial Sequence
  Synthetic
cagguggggaagagagua

SEQ ID NO: 504586 - RNA, 19 nt, Artificial Sequence
  Synthetic
gcagguggggaagagagua

SEQ ID NO: 504587 - RNA, 20 nt, Artificial Sequence
  Synthetic
ggcagguggggaagagagua

SEQ ID NO: 504588 - RNA, 21 nt, Artificial Sequence
  Synthetic
uggcagguggggaagagagua

SEQ ID NO: 504589 - RNA, 22 nt, Artificial Sequence
  Synthetic
cuggcagguggggaagagagua

SEQ ID NO: 504590 - RNA, 23 nt, Artificial Sequence
  Synthetic
ucuggcagguggggaagagagua

SEQ ID NO: 504591 - RNA, 24 nt, Artificial Sequence
  Synthetic
uucuggcagguggggaagagagua

SEQ ID NO: 504592 - RNA, 18 nt, Artificial Sequence
  Synthetic
uaagucagcuggagagua

SEQ ID NO: 504593 - RNA, 19 nt, Artificial Sequence
  Synthetic
auaagucagcuggagagua

SEQ ID NO: 504594 - RNA, 20 nt, Artificial Sequence
  Synthetic
cauaagucagcuggagagua

SEQ ID NO: 504595 - RNA, 21 nt, Artificial Sequence
  Synthetic
gcauaagucagcuggagagua

SEQ ID NO: 504596 - RNA, 22 nt, Artificial Sequence
  Synthetic
ggcauaagucagcuggagagua

SEQ ID NO: 504597 - RNA, 23 nt, Artificial Sequence
  Synthetic
uggcauaagucagcuggagagua

SEQ ID NO: 504598 - RNA, 24 nt, Artificial Sequence
  Synthetic
guggcauaagucagcuggagagua

SEQ ID NO: 504599 - RNA, 18 nt, Artificial Sequence
  Synthetic
uguuacgauuugagagua

SEQ ID NO: 504600 - RNA, 19 nt, Artificial Sequence
  Synthetic
uuguuacgauuugagagua

SEQ ID NO: 504601 - RNA, 20 nt, Artificial Sequence
  Synthetic
auuguuacgauuugagagua

SEQ ID NO: 504602 - RNA, 21 nt, Artificial Sequence
  Synthetic
gauuguuacgauuugagagua

SEQ ID NO: 504603 - RNA, 22 nt, Artificial Sequence
  Synthetic
cgauuguuacgauuugagagua

SEQ ID NO: 504604 - RNA, 23 nt, Artificial Sequence
  Synthetic
acgauuguuacgauuugagagua

SEQ ID NO: 504605 - RNA, 24 nt, Artificial Sequence
  Synthetic
gacgauuguuacgauuugagagua

SEQ ID NO: 504606 - RNA, 18 nt, Artificial Sequence
  Synthetic
cuaccaagaaauagagua

SEQ ID NO: 504607 - RNA, 19 nt, Artificial Sequence
  Synthetic
ucuaccaagaaauagagua

SEQ ID NO: 504608 - RNA, 20 nt, Artificial Sequence
  Synthetic
aucuaccaagaaauagagua

SEQ ID NO: 504609 - RNA, 21 nt, Artificial Sequence
  Synthetic
uaucuaccaagaaauagagua

SEQ ID NO: 504610 - RNA, 22 nt, Artificial Sequence
  Synthetic
auaucuaccaagaaauagagua

SEQ ID NO: 504611 - RNA, 23 nt, Artificial Sequence
  Synthetic
aauaucuaccaagaaauagagua

SEQ ID NO: 504612 - RNA, 24 nt, Artificial Sequence
  Synthetic
gaauaucuaccaagaaauagagua

SEQ ID NO: 504613 - RNA, 18 nt, Artificial Sequence
  Synthetic
cuagaaaguuauagagua

SEQ ID NO: 504614 - RNA, 19 nt, Artificial Sequence
  Synthetic
acuagaaaguuauagagua

SEQ ID NO: 504615 - RNA, 20 nt, Artificial Sequence
  Synthetic
cacuagaaaguuauagagua

SEQ ID NO: 504616 - RNA, 21 nt, Artificial Sequence
  Synthetic
gcacuagaaaguuauagagua

SEQ ID NO: 504617 - RNA, 22 nt, Artificial Sequence
  Synthetic
cgcacuagaaaguuauagagua

SEQ ID NO: 504618 - RNA, 23 nt, Artificial Sequence
  Synthetic
acgcacuagaaaguuauagagua

SEQ ID NO: 504619 - RNA, 24 nt, Artificial Sequence
  Synthetic
aacgcacuagaaaguuauagagua

SEQ ID NO: 504620 - RNA, 18 nt, Artificial Sequence
  Synthetic
cugaagagaacuagagua

SEQ ID NO: 504621 - RNA, 19 nt, Artificial Sequence
  Synthetic
ccugaagagaacuagagua

SEQ ID NO: 504622 - RNA, 20 nt, Artificial Sequence
  Synthetic
accugaagagaacuagagua

SEQ ID NO: 504623 - RNA, 21 nt, Artificial Sequence
  Synthetic
aaccugaagagaacuagagua

SEQ ID NO: 504624 - RNA, 22 nt, Artificial Sequence
  Synthetic
gaaccugaagagaacuagagua

SEQ ID NO: 504625 - RNA, 23 nt, Artificial Sequence
  Synthetic
agaaccugaagagaacuagagua

SEQ ID NO: 504626 - RNA, 24 nt, Artificial Sequence
  Synthetic
cagaaccugaagagaacuagagua

SEQ ID NO: 504627 - RNA, 18 nt, Artificial Sequence
  Synthetic
auuucuaggaaaggagua

SEQ ID NO: 504628 - RNA, 19 nt, Artificial Sequence
  Synthetic
uauuucuaggaaaggagua

SEQ ID NO: 504629 - RNA, 20 nt, Artificial Sequence
  Synthetic
cuauuucuaggaaaggagua

SEQ ID NO: 504630 - RNA, 21 nt, Artificial Sequence
  Synthetic
ccuauuucuaggaaaggagua

SEQ ID NO: 504631 - RNA, 22 nt, Artificial Sequence
  Synthetic
uccuauuucuaggaaaggagua

SEQ ID NO: 504632 - RNA, 23 nt, Artificial Sequence
  Synthetic
cuccuauuucuaggaaaggagua

SEQ ID NO: 504633 - RNA, 24 nt, Artificial Sequence
  Synthetic
acuccuauuucuaggaaaggagua

SEQ ID NO: 504634 - RNA, 18 nt, Artificial Sequence
  Synthetic
uuuccuucuaaaggagua

SEQ ID NO: 504635 - RNA, 19 nt, Artificial Sequence
  Synthetic
auuuccuucuaaaggagua

SEQ ID NO: 504636 - RNA, 20 nt, Artificial Sequence
  Synthetic
aauuuccuucuaaaggagua

SEQ ID NO: 504637 - RNA, 21 nt, Artificial Sequence
  Synthetic
aaauuuccuucuaaaggagua

SEQ ID NO: 504638 - RNA, 22 nt, Artificial Sequence
  Synthetic
uaaauuuccuucuaaaggagua

SEQ ID NO: 504639 - RNA, 23 nt, Artificial Sequence
  Synthetic
cuaaauuuccuucuaaaggagua

SEQ ID NO: 504640 - RNA, 24 nt, Artificial Sequence
  Synthetic
ucuaaauuuccuucuaaaggagua

SEQ ID NO: 504641 - RNA, 18 nt, Artificial Sequence
  Synthetic
agaucagaaauaggagua

SEQ ID NO: 504642 - RNA, 19 nt, Artificial Sequence
  Synthetic
gagaucagaaauaggagua

SEQ ID NO: 504643 - RNA, 20 nt, Artificial Sequence
  Synthetic
agagaucagaaauaggagua

SEQ ID NO: 504644 - RNA, 21 nt, Artificial Sequence
  Synthetic
cagagaucagaaauaggagua

SEQ ID NO: 504645 - RNA, 22 nt, Artificial Sequence
  Synthetic
ccagagaucagaaauaggagua

SEQ ID NO: 504646 - RNA, 23 nt, Artificial Sequence
  Synthetic
accagagaucagaaauaggagua

SEQ ID NO: 504647 - RNA, 24 nt, Artificial Sequence
  Synthetic
uaccagagaucagaaauaggagua

SEQ ID NO: 504648 - RNA, 18 nt, Artificial Sequence
  Synthetic
auagcaguuuuaggagua

SEQ ID NO: 504649 - RNA, 19 nt, Artificial Sequence
  Synthetic
uauagcaguuuuaggagua

SEQ ID NO: 504650 - RNA, 20 nt, Artificial Sequence
  Synthetic
guauagcaguuuuaggagua

SEQ ID NO: 504651 - RNA, 21 nt, Artificial Sequence
  Synthetic
aguauagcaguuuuaggagua

SEQ ID NO: 504652 - RNA, 22 nt, Artificial Sequence
  Synthetic
caguauagcaguuuuaggagua

SEQ ID NO: 504653 - RNA, 23 nt, Artificial Sequence
  Synthetic
acaguauagcaguuuuaggagua

SEQ ID NO: 504654 - RNA, 24 nt, Artificial Sequence
  Synthetic
cacaguauagcaguuuuaggagua

SEQ ID NO: 504655 - RNA, 18 nt, Artificial Sequence
  Synthetic
ugccugggacacggagua

SEQ ID NO: 504656 - RNA, 19 nt, Artificial Sequence
  Synthetic
uugccugggacacggagua

SEQ ID NO: 504657 - RNA, 20 nt, Artificial Sequence
  Synthetic
cuugccugggacacggagua

SEQ ID NO: 504658 - RNA, 21 nt, Artificial Sequence
  Synthetic
ucuugccugggacacggagua

SEQ ID NO: 504659 - RNA, 22 nt, Artificial Sequence
  Synthetic
aucuugccugggacacggagua

SEQ ID NO: 504660 - RNA, 23 nt, Artificial Sequence
  Synthetic
aaucuugccugggacacggagua

SEQ ID NO: 504661 - RNA, 24 nt, Artificial Sequence
  Synthetic
uaaucuugccugggacacggagua

SEQ ID NO: 504662 - RNA, 18 nt, Artificial Sequence
  Synthetic
auaggcaaggccggagua

SEQ ID NO: 504663 - RNA, 19 nt, Artificial Sequence
  Synthetic
cauaggcaaggccggagua

SEQ ID NO: 504664 - RNA, 20 nt, Artificial Sequence
  Synthetic
acauaggcaaggccggagua

SEQ ID NO: 504665 - RNA, 21 nt, Artificial Sequence
  Synthetic
uacauaggcaaggccggagua

SEQ ID NO: 504666 - RNA, 22 nt, Artificial Sequence
  Synthetic
cuacauaggcaaggccggagua

SEQ ID NO: 504667 - RNA, 23 nt, Artificial Sequence
  Synthetic
ucuacauaggcaaggccggagua

SEQ ID NO: 504668 - RNA, 24 nt, Artificial Sequence
  Synthetic
cucuacauaggcaaggccggagua

SEQ ID NO: 504669 - RNA, 18 nt, Artificial Sequence
  Synthetic
aguuucccaaucggagua

SEQ ID NO: 504670 - RNA, 19 nt, Artificial Sequence
  Synthetic
caguuucccaaucggagua

SEQ ID NO: 504671 - RNA, 20 nt, Artificial Sequence
  Synthetic
ucaguuucccaaucggagua

SEQ ID NO: 504672 - RNA, 21 nt, Artificial Sequence
  Synthetic
cucaguuucccaaucggagua

SEQ ID NO: 504673 - RNA, 22 nt, Artificial Sequence
  Synthetic
gcucaguuucccaaucggagua

SEQ ID NO: 504674 - RNA, 23 nt, Artificial Sequence
  Synthetic
ugcucaguuucccaaucggagua

SEQ ID NO: 504675 - RNA, 24 nt, Artificial Sequence
  Synthetic
uugcucaguuucccaaucggagua

SEQ ID NO: 504676 - RNA, 18 nt, Artificial Sequence
  Synthetic
aggauacauuggggagua

SEQ ID NO: 504677 - RNA, 19 nt, Artificial Sequence
  Synthetic
uaggauacauuggggagua

SEQ ID NO: 504678 - RNA, 20 nt, Artificial Sequence
  Synthetic
cuaggauacauuggggagua

SEQ ID NO: 504679 - RNA, 21 nt, Artificial Sequence
  Synthetic
ucuaggauacauuggggagua

SEQ ID NO: 504680 - RNA, 22 nt, Artificial Sequence
  Synthetic
cucuaggauacauuggggagua

SEQ ID NO: 504681 - RNA, 23 nt, Artificial Sequence
  Synthetic
ucucuaggauacauuggggagua

SEQ ID NO: 504682 - RNA, 24 nt, Artificial Sequence
  Synthetic
gucucuaggauacauuggggagua

SEQ ID NO: 504683 - RNA, 18 nt, Artificial Sequence
  Synthetic
uauaucucagugggagua

SEQ ID NO: 504684 - RNA, 19 nt, Artificial Sequence
  Synthetic
auauaucucagugggagua

SEQ ID NO: 504685 - RNA, 20 nt, Artificial Sequence
  Synthetic
cauauaucucagugggagua

SEQ ID NO: 504686 - RNA, 21 nt, Artificial Sequence
  Synthetic
gcauauaucucagugggagua

SEQ ID NO: 504687 - RNA, 22 nt, Artificial Sequence
  Synthetic
ugcauauaucucagugggagua

SEQ ID NO: 504688 - RNA, 23 nt, Artificial Sequence
  Synthetic
uugcauauaucucagugggagua

SEQ ID NO: 504689 - RNA, 24 nt, Artificial Sequence
  Synthetic
auugcauauaucucagugggagua

SEQ ID NO: 504690 - RNA, 18 nt, Artificial Sequence
  Synthetic
acagugcaggauggagua

SEQ ID NO: 504691 - RNA, 19 nt, Artificial Sequence
  Synthetic
cacagugcaggauggagua

SEQ ID NO: 504692 - RNA, 20 nt, Artificial Sequence
  Synthetic
ucacagugcaggauggagua

SEQ ID NO: 504693 - RNA, 21 nt, Artificial Sequence
  Synthetic
cucacagugcaggauggagua

SEQ ID NO: 504694 - RNA, 22 nt, Artificial Sequence
  Synthetic
ccucacagugcaggauggagua

SEQ ID NO: 504695 - RNA, 23 nt, Artificial Sequence
  Synthetic
uccucacagugcaggauggagua

SEQ ID NO: 504696 - RNA, 24 nt, Artificial Sequence
  Synthetic
uuccucacagugcaggauggagua

SEQ ID NO: 504697 - RNA, 18 nt, Artificial Sequence
  Synthetic
uuguucccugauggagua

SEQ ID NO: 504698 - RNA, 19 nt, Artificial Sequence
  Synthetic
auuguucccugauggagua

SEQ ID NO: 504699 - RNA, 20 nt, Artificial Sequence
  Synthetic
uauuguucccugauggagua

SEQ ID NO: 504700 - RNA, 21 nt, Artificial Sequence
  Synthetic
cuauuguucccugauggagua

SEQ ID NO: 504701 - RNA, 22 nt, Artificial Sequence
  Synthetic
ucuauuguucccugauggagua

SEQ ID NO: 504702 - RNA, 23 nt, Artificial Sequence
  Synthetic
cucuauuguucccugauggagua

SEQ ID NO: 504703 - RNA, 24 nt, Artificial Sequence
  Synthetic
acucuauuguucccugauggagua

SEQ ID NO: 504704 - RNA, 18 nt, Artificial Sequence
  Synthetic
ugcacauguccuggagua

SEQ ID NO: 504705 - RNA, 19 nt, Artificial Sequence
  Synthetic
uugcacauguccuggagua

SEQ ID NO: 504706 - RNA, 20 nt, Artificial Sequence
  Synthetic
cuugcacauguccuggagua

SEQ ID NO: 504707 - RNA, 21 nt, Artificial Sequence
  Synthetic
ucuugcacauguccuggagua

SEQ ID NO: 504708 - RNA, 22 nt, Artificial Sequence
  Synthetic
aucuugcacauguccuggagua

SEQ ID NO: 504709 - RNA, 23 nt, Artificial Sequence
  Synthetic
caucuugcacauguccuggagua

SEQ ID NO: 504710 - RNA, 24 nt, Artificial Sequence
  Synthetic
gcaucuugcacauguccuggagua

SEQ ID NO: 504711 - RNA, 18 nt, Artificial Sequence
  Synthetic
uguuuucaaguuggagua

SEQ ID NO: 504712 - RNA, 19 nt, Artificial Sequence
  Synthetic
uuguuuucaaguuggagua

SEQ ID NO: 504713 - RNA, 20 nt, Artificial Sequence
  Synthetic
cuuguuuucaaguuggagua

SEQ ID NO: 504714 - RNA, 21 nt, Artificial Sequence
  Synthetic
acuuguuuucaaguuggagua

SEQ ID NO: 504715 - RNA, 22 nt, Artificial Sequence
  Synthetic
gacuuguuuucaaguuggagua

SEQ ID NO: 504716 - RNA, 23 nt, Artificial Sequence
  Synthetic
ggacuuguuuucaaguuggagua

SEQ ID NO: 504717 - RNA, 24 nt, Artificial Sequence
  Synthetic
uggacuuguuuucaaguuggagua

SEQ ID NO: 504718 - RNA, 18 nt, Artificial Sequence
  Synthetic
guuaguguaguuggagua

SEQ ID NO: 504719 - RNA, 19 nt, Artificial Sequence
  Synthetic
aguuaguguaguuggagua

SEQ ID NO: 504720 - RNA, 20 nt, Artificial Sequence
  Synthetic
aaguuaguguaguuggagua

SEQ ID NO: 504721 - RNA, 21 nt, Artificial Sequence
  Synthetic
aaaguuaguguaguuggagua

SEQ ID NO: 504722 - RNA, 22 nt, Artificial Sequence
  Synthetic
caaaguuaguguaguuggagua

SEQ ID NO: 504723 - RNA, 23 nt, Artificial Sequence
  Synthetic
acaaaguuaguguaguuggagua

SEQ ID NO: 504724 - RNA, 24 nt, Artificial Sequence
  Synthetic
aacaaaguuaguguaguuggagua

SEQ ID NO: 504725 - RNA, 18 nt, Artificial Sequence
  Synthetic
cucccacagguuggagua

SEQ ID NO: 504726 - RNA, 19 nt, Artificial Sequence
  Synthetic
acucccacagguuggagua

SEQ ID NO: 504727 - RNA, 20 nt, Artificial Sequence
  Synthetic
uacucccacagguuggagua

SEQ ID NO: 504728 - RNA, 21 nt, Artificial Sequence
  Synthetic
auacucccacagguuggagua

SEQ ID NO: 504729 - RNA, 22 nt, Artificial Sequence
  Synthetic
aauacucccacagguuggagua

SEQ ID NO: 504730 - RNA, 23 nt, Artificial Sequence
  Synthetic
aaauacucccacagguuggagua

SEQ ID NO: 504731 - RNA, 24 nt, Artificial Sequence
  Synthetic
aaaauacucccacagguuggagua

SEQ ID NO: 504732 - RNA, 18 nt, Artificial Sequence
  Synthetic
ugcuauuggaaaugagua

SEQ ID NO: 504733 - RNA, 19 nt, Artificial Sequence
  Synthetic
uugcuauuggaaaugagua

SEQ ID NO: 504734 - RNA, 20 nt, Artificial Sequence
  Synthetic
auugcuauuggaaaugagua

SEQ ID NO: 504735 - RNA, 21 nt, Artificial Sequence
  Synthetic
uauugcuauuggaaaugagua

SEQ ID NO: 504736 - RNA, 22 nt, Artificial Sequence
  Synthetic
cuauugcuauuggaaaugagua

SEQ ID NO: 504737 - RNA, 23 nt, Artificial Sequence
  Synthetic
ccuauugcuauuggaaaugagua

SEQ ID NO: 504738 - RNA, 24 nt, Artificial Sequence
  Synthetic
cccuauugcuauuggaaaugagua

SEQ ID NO: 504739 - RNA, 18 nt, Artificial Sequence
  Synthetic
aaaacugcugaaugagua

SEQ ID NO: 504740 - RNA, 19 nt, Artificial Sequence
  Synthetic
gaaaacugcugaaugagua

SEQ ID NO: 504741 - RNA, 20 nt, Artificial Sequence
  Synthetic
ugaaaacugcugaaugagua

SEQ ID NO: 504742 - RNA, 21 nt, Artificial Sequence
  Synthetic
cugaaaacugcugaaugagua

SEQ ID NO: 504743 - RNA, 22 nt, Artificial Sequence
  Synthetic
ccugaaaacugcugaaugagua

SEQ ID NO: 504744 - RNA, 23 nt, Artificial Sequence
  Synthetic
cccugaaaacugcugaaugagua

SEQ ID NO: 504745 - RNA, 24 nt, Artificial Sequence
  Synthetic
ucccugaaaacugcugaaugagua

SEQ ID NO: 504746 - RNA, 18 nt, Artificial Sequence
  Synthetic
gaauuucaaacaugagua

SEQ ID NO: 504747 - RNA, 19 nt, Artificial Sequence
  Synthetic
agaauuucaaacaugagua

SEQ ID NO: 504748 - RNA, 20 nt, Artificial Sequence
  Synthetic
aagaauuucaaacaugagua

SEQ ID NO: 504749 - RNA, 21 nt, Artificial Sequence
  Synthetic
gaagaauuucaaacaugagua

SEQ ID NO: 504750 - RNA, 22 nt, Artificial Sequence
  Synthetic
ugaagaauuucaaacaugagua

SEQ ID NO: 504751 - RNA, 23 nt, Artificial Sequence
  Synthetic
uugaagaauuucaaacaugagua

SEQ ID NO: 504752 - RNA, 24 nt, Artificial Sequence
  Synthetic
auugaagaauuucaaacaugagua

SEQ ID NO: 504753 - RNA, 18 nt, Artificial Sequence
  Synthetic
caaucuuacaacugagua

SEQ ID NO: 504754 - RNA, 19 nt, Artificial Sequence
  Synthetic
ccaaucuuacaacugagua

SEQ ID NO: 504755 - RNA, 20 nt, Artificial Sequence
  Synthetic
cccaaucuuacaacugagua

SEQ ID NO: 504756 - RNA, 21 nt, Artificial Sequence
  Synthetic
ucccaaucuuacaacugagua

SEQ ID NO: 504757 - RNA, 22 nt, Artificial Sequence
  Synthetic
uucccaaucuuacaacugagua

SEQ ID NO: 504758 - RNA, 23 nt, Artificial Sequence
  Synthetic
auucccaaucuuacaacugagua

SEQ ID NO: 504759 - RNA, 24 nt, Artificial Sequence
  Synthetic
aauucccaaucuuacaacugagua

SEQ ID NO: 504760 - RNA, 18 nt, Artificial Sequence
  Synthetic
cuuguaaguaccugagua

SEQ ID NO: 504761 - RNA, 19 nt, Artificial Sequence
  Synthetic
ccuuguaaguaccugagua

SEQ ID NO: 504762 - RNA, 20 nt, Artificial Sequence
  Synthetic
uccuuguaaguaccugagua

SEQ ID NO: 504763 - RNA, 21 nt, Artificial Sequence
  Synthetic
cuccuuguaaguaccugagua

SEQ ID NO: 504764 - RNA, 22 nt, Artificial Sequence
  Synthetic
ucuccuuguaaguaccugagua

SEQ ID NO: 504765 - RNA, 23 nt, Artificial Sequence
  Synthetic
aucuccuuguaaguaccugagua

SEQ ID NO: 504766 - RNA, 24 nt, Artificial Sequence
  Synthetic
gaucuccuuguaaguaccugagua

SEQ ID NO: 504767 - RNA, 18 nt, Artificial Sequence
  Synthetic
aagaauaagcccugagua

SEQ ID NO: 504768 - RNA, 19 nt, Artificial Sequence
  Synthetic
aaagaauaagcccugagua

SEQ ID NO: 504769 - RNA, 20 nt, Artificial Sequence
  Synthetic
uaaagaauaagcccugagua

SEQ ID NO: 504770 - RNA, 21 nt, Artificial Sequence
  Synthetic
auaaagaauaagcccugagua

SEQ ID NO: 504771 - RNA, 22 nt, Artificial Sequence
  Synthetic
uauaaagaauaagcccugagua

SEQ ID NO: 504772 - RNA, 23 nt, Artificial Sequence
  Synthetic
uuauaaagaauaagcccugagua

SEQ ID NO: 504773 - RNA, 24 nt, Artificial Sequence
  Synthetic
guuauaaagaauaagcccugagua

SEQ ID NO: 504774 - RNA, 18 nt, Artificial Sequence
  Synthetic
agcucugccuccugagua

SEQ ID NO: 504775 - RNA, 19 nt, Artificial Sequence
  Synthetic
aagcucugccuccugagua

SEQ ID NO: 504776 - RNA, 20 nt, Artificial Sequence
  Synthetic
caagcucugccuccugagua

SEQ ID NO: 504777 - RNA, 21 nt, Artificial Sequence
  Synthetic
gcaagcucugccuccugagua

SEQ ID NO: 504778 - RNA, 22 nt, Artificial Sequence
  Synthetic
ugcaagcucugccuccugagua

SEQ ID NO: 504779 - RNA, 23 nt, Artificial Sequence
  Synthetic
cugcaagcucugccuccugagua

SEQ ID NO: 504780 - RNA, 24 nt, Artificial Sequence
  Synthetic
acugcaagcucugccuccugagua

SEQ ID NO: 504781 - RNA, 18 nt, Artificial Sequence
  Synthetic
ugacauuuuagcugagua

SEQ ID NO: 504782 - RNA, 19 nt, Artificial Sequence
  Synthetic
gugacauuuuagcugagua

SEQ ID NO: 504783 - RNA, 20 nt, Artificial Sequence
  Synthetic
ggugacauuuuagcugagua

SEQ ID NO: 504784 - RNA, 21 nt, Artificial Sequence
  Synthetic
aggugacauuuuagcugagua

SEQ ID NO: 504785 - RNA, 22 nt, Artificial Sequence
  Synthetic
uaggugacauuuuagcugagua

SEQ ID NO: 504786 - RNA, 23 nt, Artificial Sequence
  Synthetic
guaggugacauuuuagcugagua

SEQ ID NO: 504787 - RNA, 24 nt, Artificial Sequence
  Synthetic
uguaggugacauuuuagcugagua

SEQ ID NO: 504788 - RNA, 18 nt, Artificial Sequence
  Synthetic
ggagaggcugucugagua

SEQ ID NO: 504789 - RNA, 19 nt, Artificial Sequence
  Synthetic
aggagaggcugucugagua

SEQ ID NO: 504790 - RNA, 20 nt, Artificial Sequence
  Synthetic
aaggagaggcugucugagua

SEQ ID NO: 504791 - RNA, 21 nt, Artificial Sequence
  Synthetic
gaaggagaggcugucugagua

SEQ ID NO: 504792 - RNA, 22 nt, Artificial Sequence
  Synthetic
ugaaggagaggcugucugagua

SEQ ID NO: 504793 - RNA, 23 nt, Artificial Sequence
  Synthetic
cugaaggagaggcugucugagua

SEQ ID NO: 504794 - RNA, 24 nt, Artificial Sequence
  Synthetic
ucugaaggagaggcugucugagua

SEQ ID NO: 504795 - RNA, 18 nt, Artificial Sequence
  Synthetic
acauaacaucagugagua

SEQ ID NO: 504796 - RNA, 19 nt, Artificial Sequence
  Synthetic
aacauaacaucagugagua

SEQ ID NO: 504797 - RNA, 20 nt, Artificial Sequence
  Synthetic
gaacauaacaucagugagua

SEQ ID NO: 504798 - RNA, 21 nt, Artificial Sequence
  Synthetic
ugaacauaacaucagugagua

SEQ ID NO: 504799 - RNA, 22 nt, Artificial Sequence
  Synthetic
augaacauaacaucagugagua

SEQ ID NO: 504800 - RNA, 23 nt, Artificial Sequence
  Synthetic
aaugaacauaacaucagugagua

SEQ ID NO: 504801 - RNA, 24 nt, Artificial Sequence
  Synthetic
caaugaacauaacaucagugagua

SEQ ID NO: 504802 - RNA, 18 nt, Artificial Sequence
  Synthetic
gagcuggggcugugagua

SEQ ID NO: 504803 - RNA, 19 nt, Artificial Sequence
  Synthetic
ggagcuggggcugugagua

SEQ ID NO: 504804 - RNA, 20 nt, Artificial Sequence
  Synthetic
aggagcuggggcugugagua

SEQ ID NO: 504805 - RNA, 21 nt, Artificial Sequence
  Synthetic
caggagcuggggcugugagua

SEQ ID NO: 504806 - RNA, 22 nt, Artificial Sequence
  Synthetic
acaggagcuggggcugugagua

SEQ ID NO: 504807 - RNA, 23 nt, Artificial Sequence
  Synthetic
gacaggagcuggggcugugagua

SEQ ID NO: 504808 - RNA, 24 nt, Artificial Sequence
  Synthetic
ugacaggagcuggggcugugagua

SEQ ID NO: 504809 - RNA, 18 nt, Artificial Sequence
  Synthetic
gaagcucacaauugagua

SEQ ID NO: 504810 - RNA, 19 nt, Artificial Sequence
  Synthetic
agaagcucacaauugagua

SEQ ID NO: 504811 - RNA, 20 nt, Artificial Sequence
  Synthetic
aagaagcucacaauugagua

SEQ ID NO: 504812 - RNA, 21 nt, Artificial Sequence
  Synthetic
caagaagcucacaauugagua

SEQ ID NO: 504813 - RNA, 22 nt, Artificial Sequence
  Synthetic
ucaagaagcucacaauugagua

SEQ ID NO: 504814 - RNA, 23 nt, Artificial Sequence
  Synthetic
cucaagaagcucacaauugagua

SEQ ID NO: 504815 - RNA, 24 nt, Artificial Sequence
  Synthetic
ccucaagaagcucacaauugagua

SEQ ID NO: 504816 - RNA, 18 nt, Artificial Sequence
  Synthetic
uuuuaccuuuauugagua

SEQ ID NO: 504817 - RNA, 19 nt, Artificial Sequence
  Synthetic
cuuuuaccuuuauugagua

SEQ ID NO: 504818 - RNA, 20 nt, Artificial Sequence
  Synthetic
ucuuuuaccuuuauugagua

SEQ ID NO: 504819 - RNA, 21 nt, Artificial Sequence
  Synthetic
uucuuuuaccuuuauugagua

SEQ ID NO: 504820 - RNA, 22 nt, Artificial Sequence
  Synthetic
auucuuuuaccuuuauugagua

SEQ ID NO: 504821 - RNA, 23 nt, Artificial Sequence
  Synthetic
uauucuuuuaccuuuauugagua

SEQ ID NO: 504822 - RNA, 24 nt, Artificial Sequence
  Synthetic
uuauucuuuuaccuuuauugagua

SEQ ID NO: 504823 - RNA, 18 nt, Artificial Sequence
  Synthetic
aaaaaggaaguuugagua

SEQ ID NO: 504824 - RNA, 19 nt, Artificial Sequence
  Synthetic
aaaaaaggaaguuugagua

SEQ ID NO: 504825 - RNA, 20 nt, Artificial Sequence
  Synthetic
aaaaaaaggaaguuugagua

SEQ ID NO: 504826 - RNA, 21 nt, Artificial Sequence
  Synthetic
gaaaaaaaggaaguuugagua

SEQ ID NO: 504827 - RNA, 22 nt, Artificial Sequence
  Synthetic
agaaaaaaaggaaguuugagua

SEQ ID NO: 504828 - RNA, 23 nt, Artificial Sequence
  Synthetic
gagaaaaaaaggaaguuugagua

SEQ ID NO: 504829 - RNA, 24 nt, Artificial Sequence
  Synthetic
ugagaaaaaaaggaaguuugagua

SEQ ID NO: 504830 - RNA, 18 nt, Artificial Sequence
  Synthetic
aaaaaacacuuuugagua

SEQ ID NO: 504831 - RNA, 19 nt, Artificial Sequence
  Synthetic
aaaaaaacacuuuugagua

SEQ ID NO: 504832 - RNA, 20 nt, Artificial Sequence
  Synthetic
gaaaaaaacacuuuugagua

SEQ ID NO: 504833 - RNA, 21 nt, Artificial Sequence
  Synthetic
ugaaaaaaacacuuuugagua

SEQ ID NO: 504834 - RNA, 22 nt, Artificial Sequence
  Synthetic
uugaaaaaaacacuuuugagua

SEQ ID NO: 504835 - RNA, 23 nt, Artificial Sequence
  Synthetic
auugaaaaaaacacuuuugagua

SEQ ID NO: 504836 - RNA, 24 nt, Artificial Sequence
  Synthetic
cauugaaaaaaacacuuuugagua

SEQ ID NO: 504837 - RNA, 18 nt, Artificial Sequence
  Synthetic
ugaaacacuuuuugagua

SEQ ID NO: 504838 - RNA, 19 nt, Artificial Sequence
  Synthetic
cugaaacacuuuuugagua

SEQ ID NO: 504839 - RNA, 20 nt, Artificial Sequence
  Synthetic
gcugaaacacuuuuugagua

SEQ ID NO: 504840 - RNA, 21 nt, Artificial Sequence
  Synthetic
agcugaaacacuuuuugagua

SEQ ID NO: 504841 - RNA, 22 nt, Artificial Sequence
  Synthetic
gagcugaaacacuuuuugagua

SEQ ID NO: 504842 - RNA, 23 nt, Artificial Sequence
  Synthetic
ggagcugaaacacuuuuugagua

SEQ ID NO: 504843 - RNA, 24 nt, Artificial Sequence
  Synthetic
uggagcugaaacacuuuuugagua

SEQ ID NO: 504844 - RNA, 18 nt, Artificial Sequence
  Synthetic
auggccuuuuuuugagua

SEQ ID NO: 504845 - RNA, 19 nt, Artificial Sequence
  Synthetic
aauggccuuuuuuugagua

SEQ ID NO: 504846 - RNA, 20 nt, Artificial Sequence
  Synthetic
aaauggccuuuuuuugagua

SEQ ID NO: 504847 - RNA, 21 nt, Artificial Sequence
  Synthetic
uaaauggccuuuuuuugagua

SEQ ID NO: 504848 - RNA, 22 nt, Artificial Sequence
  Synthetic
auaaauggccuuuuuuugagua

SEQ ID NO: 504849 - RNA, 23 nt, Artificial Sequence
  Synthetic
aauaaauggccuuuuuuugagua

SEQ ID NO: 504850 - RNA, 24 nt, Artificial Sequence
  Synthetic
aaauaaauggccuuuuuuugagua

SEQ ID NO: 504851 - RNA, 18 nt, Artificial Sequence
  Synthetic
cacaacagaaaaauagua

SEQ ID NO: 504852 - RNA, 19 nt, Artificial Sequence
  Synthetic
ccacaacagaaaaauagua

SEQ ID NO: 504853 - RNA, 20 nt, Artificial Sequence
  Synthetic
cccacaacagaaaaauagua

SEQ ID NO: 504854 - RNA, 21 nt, Artificial Sequence
  Synthetic
gcccacaacagaaaaauagua

SEQ ID NO: 504855 - RNA, 22 nt, Artificial Sequence
  Synthetic
agcccacaacagaaaaauagua

SEQ ID NO: 504856 - RNA, 23 nt, Artificial Sequence
  Synthetic
aagcccacaacagaaaaauagua

SEQ ID NO: 504857 - RNA, 24 nt, Artificial Sequence
  Synthetic
gaagcccacaacagaaaaauagua

SEQ ID NO: 504858 - RNA, 18 nt, Artificial Sequence
  Synthetic
aagaguggaaaaauagua

SEQ ID NO: 504859 - RNA, 19 nt, Artificial Sequence
  Synthetic
aaagaguggaaaaauagua

SEQ ID NO: 504860 - RNA, 20 nt, Artificial Sequence
  Synthetic
aaaagaguggaaaaauagua

SEQ ID NO: 504861 - RNA, 21 nt, Artificial Sequence
  Synthetic
aaaaagaguggaaaaauagua

SEQ ID NO: 504862 - RNA, 22 nt, Artificial Sequence
  Synthetic
aaaaaagaguggaaaaauagua

SEQ ID NO: 504863 - RNA, 23 nt, Artificial Sequence
  Synthetic
aaaaaaagaguggaaaaauagua

SEQ ID NO: 504864 - RNA, 24 nt, Artificial Sequence
  Synthetic
aaaaaaaagaguggaaaaauagua

SEQ ID NO: 504865 - RNA, 18 nt, Artificial Sequence
  Synthetic
gagaagggcaaaauagua

SEQ ID NO: 504866 - RNA, 19 nt, Artificial Sequence
  Synthetic
agagaagggcaaaauagua

SEQ ID NO: 504867 - RNA, 20 nt, Artificial Sequence
  Synthetic
gagagaagggcaaaauagua

SEQ ID NO: 504868 - RNA, 21 nt, Artificial Sequence
  Synthetic
ggagagaagggcaaaauagua

SEQ ID NO: 504869 - RNA, 22 nt, Artificial Sequence
  Synthetic
uggagagaagggcaaaauagua

SEQ ID NO: 504870 - RNA, 23 nt, Artificial Sequence
  Synthetic
auggagagaagggcaaaauagua

SEQ ID NO: 504871 - RNA, 24 nt, Artificial Sequence
  Synthetic
aauggagagaagggcaaaauagua

SEQ ID NO: 504872 - RNA, 18 nt, Artificial Sequence
  Synthetic
auacaauucaaaauagua

SEQ ID NO: 504873 - RNA, 19 nt, Artificial Sequence
  Synthetic
cauacaauucaaaauagua

SEQ ID NO: 504874 - RNA, 20 nt, Artificial Sequence
  Synthetic
acauacaauucaaaauagua

SEQ ID NO: 504875 - RNA, 21 nt, Artificial Sequence
  Synthetic
aacauacaauucaaaauagua

SEQ ID NO: 504876 - RNA, 22 nt, Artificial Sequence
  Synthetic
gaacauacaauucaaaauagua

SEQ ID NO: 504877 - RNA, 23 nt, Artificial Sequence
  Synthetic
ggaacauacaauucaaaauagua

SEQ ID NO: 504878 - RNA, 24 nt, Artificial Sequence
  Synthetic
aggaacauacaauucaaaauagua

SEQ ID NO: 504879 - RNA, 18 nt, Artificial Sequence
  Synthetic
ugccuauaucaaauagua

SEQ ID NO: 504880 - RNA, 19 nt, Artificial Sequence
  Synthetic
cugccuauaucaaauagua

SEQ ID NO: 504881 - RNA, 20 nt, Artificial Sequence
  Synthetic
ucugccuauaucaaauagua

SEQ ID NO: 504882 - RNA, 21 nt, Artificial Sequence
  Synthetic
uucugccuauaucaaauagua

SEQ ID NO: 504883 - RNA, 22 nt, Artificial Sequence
  Synthetic
uuucugccuauaucaaauagua

SEQ ID NO: 504884 - RNA, 23 nt, Artificial Sequence
  Synthetic
uuuucugccuauaucaaauagua

SEQ ID NO: 504885 - RNA, 24 nt, Artificial Sequence
  Synthetic
uuuuucugccuauaucaaauagua

SEQ ID NO: 504886 - RNA, 18 nt, Artificial Sequence
  Synthetic
aaaugguauuaaauagua

SEQ ID NO: 504887 - RNA, 19 nt, Artificial Sequence
  Synthetic
aaaaugguauuaaauagua

SEQ ID NO: 504888 - RNA, 20 nt, Artificial Sequence
  Synthetic
gaaaaugguauuaaauagua

SEQ ID NO: 504889 - RNA, 21 nt, Artificial Sequence
  Synthetic
ugaaaaugguauuaaauagua

SEQ ID NO: 504890 - RNA, 22 nt, Artificial Sequence
  Synthetic
gugaaaaugguauuaaauagua

SEQ ID NO: 504891 - RNA, 23 nt, Artificial Sequence
  Synthetic
ggugaaaaugguauuaaauagua

SEQ ID NO: 504892 - RNA, 24 nt, Artificial Sequence
  Synthetic
aggugaaaaugguauuaaauagua

SEQ ID NO: 504893 - RNA, 18 nt, Artificial Sequence
  Synthetic
guguaaauuagaauagua

SEQ ID NO: 504894 - RNA, 19 nt, Artificial Sequence
  Synthetic
aguguaaauuagaauagua

SEQ ID NO: 504895 - RNA, 20 nt, Artificial Sequence
  Synthetic
aaguguaaauuagaauagua

SEQ ID NO: 504896 - RNA, 21 nt, Artificial Sequence
  Synthetic
caaguguaaauuagaauagua

SEQ ID NO: 504897 - RNA, 22 nt, Artificial Sequence
  Synthetic
ucaaguguaaauuagaauagua

SEQ ID NO: 504898 - RNA, 23 nt, Artificial Sequence
  Synthetic
aucaaguguaaauuagaauagua

SEQ ID NO: 504899 - RNA, 24 nt, Artificial Sequence
  Synthetic
uaucaaguguaaauuagaauagua

SEQ ID NO: 504900 - RNA, 18 nt, Artificial Sequence
  Synthetic
aauauguaaaacauagua

SEQ ID NO: 504901 - RNA, 19 nt, Artificial Sequence
  Synthetic
aaauauguaaaacauagua

SEQ ID NO: 504902 - RNA, 20 nt, Artificial Sequence
  Synthetic
uaaauauguaaaacauagua

SEQ ID NO: 504903 - RNA, 21 nt, Artificial Sequence
  Synthetic
guaaauauguaaaacauagua

SEQ ID NO: 504904 - RNA, 22 nt, Artificial Sequence
  Synthetic
cguaaauauguaaaacauagua

SEQ ID NO: 504905 - RNA, 23 nt, Artificial Sequence
  Synthetic
acguaaauauguaaaacauagua

SEQ ID NO: 504906 - RNA, 24 nt, Artificial Sequence
  Synthetic
aacguaaauauguaaaacauagua

SEQ ID NO: 504907 - RNA, 18 nt, Artificial Sequence
  Synthetic
cuccuauucaacauagua

SEQ ID NO: 504908 - RNA, 19 nt, Artificial Sequence
  Synthetic
acuccuauucaacauagua

SEQ ID NO: 504909 - RNA, 20 nt, Artificial Sequence
  Synthetic
cacuccuauucaacauagua

SEQ ID NO: 504910 - RNA, 21 nt, Artificial Sequence
  Synthetic
ccacuccuauucaacauagua

SEQ ID NO: 504911 - RNA, 22 nt, Artificial Sequence
  Synthetic
accacuccuauucaacauagua

SEQ ID NO: 504912 - RNA, 23 nt, Artificial Sequence
  Synthetic
caccacuccuauucaacauagua

SEQ ID NO: 504913 - RNA, 24 nt, Artificial Sequence
  Synthetic
ucaccacuccuauucaacauagua

SEQ ID NO: 504914 - RNA, 18 nt, Artificial Sequence
  Synthetic
gauuccgaaggcauagua

SEQ ID NO: 504915 - RNA, 19 nt, Artificial Sequence
  Synthetic
ggauuccgaaggcauagua

SEQ ID NO: 504916 - RNA, 20 nt, Artificial Sequence
  Synthetic
uggauuccgaaggcauagua

SEQ ID NO: 504917 - RNA, 21 nt, Artificial Sequence
  Synthetic
uuggauuccgaaggcauagua

SEQ ID NO: 504918 - RNA, 22 nt, Artificial Sequence
  Synthetic
auuggauuccgaaggcauagua

SEQ ID NO: 504919 - RNA, 23 nt, Artificial Sequence
  Synthetic
uauuggauuccgaaggcauagua

SEQ ID NO: 504920 - RNA, 24 nt, Artificial Sequence
  Synthetic
auauuggauuccgaaggcauagua

SEQ ID NO: 504921 - RNA, 18 nt, Artificial Sequence
  Synthetic
cauguucuaugcauagua

SEQ ID NO: 504922 - RNA, 19 nt, Artificial Sequence
  Synthetic
gcauguucuaugcauagua

SEQ ID NO: 504923 - RNA, 20 nt, Artificial Sequence
  Synthetic
ugcauguucuaugcauagua

SEQ ID NO: 504924 - RNA, 21 nt, Artificial Sequence
  Synthetic
gugcauguucuaugcauagua

SEQ ID NO: 504925 - RNA, 22 nt, Artificial Sequence
  Synthetic
agugcauguucuaugcauagua

SEQ ID NO: 504926 - RNA, 23 nt, Artificial Sequence
  Synthetic
gagugcauguucuaugcauagua

SEQ ID NO: 504927 - RNA, 24 nt, Artificial Sequence
  Synthetic
ugagugcauguucuaugcauagua

SEQ ID NO: 504928 - RNA, 18 nt, Artificial Sequence
  Synthetic
aaaacauuuaucauagua

SEQ ID NO: 504929 - RNA, 19 nt, Artificial Sequence
  Synthetic
aaaaacauuuaucauagua

SEQ ID NO: 504930 - RNA, 20 nt, Artificial Sequence
  Synthetic
uaaaaacauuuaucauagua

SEQ ID NO: 504931 - RNA, 21 nt, Artificial Sequence
  Synthetic
uuaaaaacauuuaucauagua

SEQ ID NO: 504932 - RNA, 22 nt, Artificial Sequence
  Synthetic
uuuaaaaacauuuaucauagua

SEQ ID NO: 504933 - RNA, 23 nt, Artificial Sequence
  Synthetic
uuuuaaaaacauuuaucauagua

SEQ ID NO: 504934 - RNA, 24 nt, Artificial Sequence
  Synthetic
uuuuuaaaaacauuuaucauagua

SEQ ID NO: 504935 - RNA, 18 nt, Artificial Sequence
  Synthetic
cucaucacuuucauagua

SEQ ID NO: 504936 - RNA, 19 nt, Artificial Sequence
  Synthetic
ucucaucacuuucauagua

SEQ ID NO: 504937 - RNA, 20 nt, Artificial Sequence
  Synthetic
aucucaucacuuucauagua

SEQ ID NO: 504938 - RNA, 21 nt, Artificial Sequence
  Synthetic
caucucaucacuuucauagua

SEQ ID NO: 504939 - RNA, 22 nt, Artificial Sequence
  Synthetic
ucaucucaucacuuucauagua

SEQ ID NO: 504940 - RNA, 23 nt, Artificial Sequence
  Synthetic
uucaucucaucacuuucauagua

SEQ ID NO: 504941 - RNA, 24 nt, Artificial Sequence
  Synthetic
auucaucucaucacuuucauagua

SEQ ID NO: 504942 - RNA, 18 nt, Artificial Sequence
  Synthetic
cugaaacugcagauagua

SEQ ID NO: 504943 - RNA, 19 nt, Artificial Sequence
  Synthetic
ucugaaacugcagauagua

SEQ ID NO: 504944 - RNA, 20 nt, Artificial Sequence
  Synthetic
gucugaaacugcagauagua

SEQ ID NO: 504945 - RNA, 21 nt, Artificial Sequence
  Synthetic
ugucugaaacugcagauagua

SEQ ID NO: 504946 - RNA, 22 nt, Artificial Sequence
  Synthetic
augucugaaacugcagauagua

SEQ ID NO: 504947 - RNA, 23 nt, Artificial Sequence
  Synthetic
gaugucugaaacugcagauagua

SEQ ID NO: 504948 - RNA, 24 nt, Artificial Sequence
  Synthetic
ggaugucugaaacugcagauagua

SEQ ID NO: 504949 - RNA, 18 nt, Artificial Sequence
  Synthetic
aaacuugcaaauauagua

SEQ ID NO: 504950 - RNA, 19 nt, Artificial Sequence
  Synthetic
aaaacuugcaaauauagua

SEQ ID NO: 504951 - RNA, 20 nt, Artificial Sequence
  Synthetic
caaaacuugcaaauauagua

SEQ ID NO: 504952 - RNA, 21 nt, Artificial Sequence
  Synthetic
acaaaacuugcaaauauagua

SEQ ID NO: 504953 - RNA, 22 nt, Artificial Sequence
  Synthetic
cacaaaacuugcaaauauagua

SEQ ID NO: 504954 - RNA, 23 nt, Artificial Sequence
  Synthetic
ccacaaaacuugcaaauauagua

SEQ ID NO: 504955 - RNA, 24 nt, Artificial Sequence
  Synthetic
accacaaaacuugcaaauauagua

SEQ ID NO: 504956 - RNA, 18 nt, Artificial Sequence
  Synthetic
ccuaacaccaaacuagua

SEQ ID NO: 504957 - RNA, 19 nt, Artificial Sequence
  Synthetic
uccuaacaccaaacuagua

SEQ ID NO: 504958 - RNA, 20 nt, Artificial Sequence
  Synthetic
auccuaacaccaaacuagua

SEQ ID NO: 504959 - RNA, 21 nt, Artificial Sequence
  Synthetic
aauccuaacaccaaacuagua

SEQ ID NO: 504960 - RNA, 22 nt, Artificial Sequence
  Synthetic
gaauccuaacaccaaacuagua

SEQ ID NO: 504961 - RNA, 23 nt, Artificial Sequence
  Synthetic
ugaauccuaacaccaaacuagua

SEQ ID NO: 504962 - RNA, 24 nt, Artificial Sequence
  Synthetic
uugaauccuaacaccaaacuagua

SEQ ID NO: 504963 - RNA, 18 nt, Artificial Sequence
  Synthetic
aguaggccgaaacuagua

SEQ ID NO: 504964 - RNA, 19 nt, Artificial Sequence
  Synthetic
gaguaggccgaaacuagua

SEQ ID NO: 504965 - RNA, 20 nt, Artificial Sequence
  Synthetic
ugaguaggccgaaacuagua

SEQ ID NO: 504966 - RNA, 21 nt, Artificial Sequence
  Synthetic
cugaguaggccgaaacuagua

SEQ ID NO: 504967 - RNA, 22 nt, Artificial Sequence
  Synthetic
ucugaguaggccgaaacuagua

SEQ ID NO: 504968 - RNA, 23 nt, Artificial Sequence
  Synthetic
aucugaguaggccgaaacuagua

SEQ ID NO: 504969 - RNA, 24 nt, Artificial Sequence
  Synthetic
aaucugaguaggccgaaacuagua

SEQ ID NO: 504970 - RNA, 18 nt, Artificial Sequence
  Synthetic
uagacccauaaacuagua

SEQ ID NO: 504971 - RNA, 19 nt, Artificial Sequence
  Synthetic
guagacccauaaacuagua

SEQ ID NO: 504972 - RNA, 20 nt, Artificial Sequence
  Synthetic
uguagacccauaaacuagua

SEQ ID NO: 504973 - RNA, 21 nt, Artificial Sequence
  Synthetic
auguagacccauaaacuagua

SEQ ID NO: 504974 - RNA, 22 nt, Artificial Sequence
  Synthetic
aauguagacccauaaacuagua

SEQ ID NO: 504975 - RNA, 23 nt, Artificial Sequence
  Synthetic
uaauguagacccauaaacuagua

SEQ ID NO: 504976 - RNA, 24 nt, Artificial Sequence
  Synthetic
auaauguagacccauaaacuagua

SEQ ID NO: 504977 - RNA, 18 nt, Artificial Sequence
  Synthetic
gccccuauuuuacuagua

SEQ ID NO: 504978 - RNA, 19 nt, Artificial Sequence
  Synthetic
ugccccuauuuuacuagua

SEQ ID NO: 504979 - RNA, 20 nt, Artificial Sequence
  Synthetic
uugccccuauuuuacuagua

SEQ ID NO: 504980 - RNA, 21 nt, Artificial Sequence
  Synthetic
auugccccuauuuuacuagua

SEQ ID NO: 504981 - RNA, 22 nt, Artificial Sequence
  Synthetic
uauugccccuauuuuacuagua

SEQ ID NO: 504982 - RNA, 23 nt, Artificial Sequence
  Synthetic
auauugccccuauuuuacuagua

SEQ ID NO: 504983 - RNA, 24 nt, Artificial Sequence
  Synthetic
aauauugccccuauuuuacuagua

SEQ ID NO: 504984 - RNA, 18 nt, Artificial Sequence
  Synthetic
aauuucucauagcuagua

SEQ ID NO: 504985 - RNA, 19 nt, Artificial Sequence
  Synthetic
gaauuucucauagcuagua

SEQ ID NO: 504986 - RNA, 20 nt, Artificial Sequence
  Synthetic
agaauuucucauagcuagua

SEQ ID NO: 504987 - RNA, 21 nt, Artificial Sequence
  Synthetic
aagaauuucucauagcuagua

SEQ ID NO: 504988 - RNA, 22 nt, Artificial Sequence
  Synthetic
caagaauuucucauagcuagua

SEQ ID NO: 504989 - RNA, 23 nt, Artificial Sequence
  Synthetic
ucaagaauuucucauagcuagua

SEQ ID NO: 504990 - RNA, 24 nt, Artificial Sequence
  Synthetic
uucaagaauuucucauagcuagua

SEQ ID NO: 504991 - RNA, 18 nt, Artificial Sequence
  Synthetic
augugacucaugcuagua

SEQ ID NO: 504992 - RNA, 19 nt, Artificial Sequence
  Synthetic
caugugacucaugcuagua

SEQ ID NO: 504993 - RNA, 20 nt, Artificial Sequence
  Synthetic
ucaugugacucaugcuagua

SEQ ID NO: 504994 - RNA, 21 nt, Artificial Sequence
  Synthetic
uucaugugacucaugcuagua

SEQ ID NO: 504995 - RNA, 22 nt, Artificial Sequence
  Synthetic
uuucaugugacucaugcuagua

SEQ ID NO: 504996 - RNA, 23 nt, Artificial Sequence
  Synthetic
uuuucaugugacucaugcuagua

SEQ ID NO: 504997 - RNA, 24 nt, Artificial Sequence
  Synthetic
guuuucaugugacucaugcuagua

SEQ ID NO: 504998 - RNA, 18 nt, Artificial Sequence
  Synthetic
ccuuuacuuuuucuagua

SEQ ID NO: 504999 - RNA, 19 nt, Artificial Sequence
  Synthetic
cccuuuacuuuuucuagua

SEQ ID NO: 505000 - RNA, 20 nt, Artificial Sequence
  Synthetic
gcccuuuacuuuuucuagua

SEQ ID NO: 505001 - RNA, 21 nt, Artificial Sequence
  Synthetic
ugcccuuuacuuuuucuagua

SEQ ID NO: 505002 - RNA, 22 nt, Artificial Sequence
  Synthetic
cugcccuuuacuuuuucuagua

SEQ ID NO: 505003 - RNA, 23 nt, Artificial Sequence
  Synthetic
ucugcccuuuacuuuuucuagua

SEQ ID NO: 505004 - RNA, 24 nt, Artificial Sequence
  Synthetic
uucugcccuuuacuuuuucuagua

SEQ ID NO: 505005 - RNA, 18 nt, Artificial Sequence
  Synthetic
aagaggucauaaguagua

SEQ ID NO: 505006 - RNA, 19 nt, Artificial Sequence
  Synthetic
uaagaggucauaaguagua

SEQ ID NO: 505007 - RNA, 20 nt, Artificial Sequence
  Synthetic
auaagaggucauaaguagua

SEQ ID NO: 505008 - RNA, 21 nt, Artificial Sequence
  Synthetic
uauaagaggucauaaguagua

SEQ ID NO: 505009 - RNA, 22 nt, Artificial Sequence
  Synthetic
cuauaagaggucauaaguagua

SEQ ID NO: 505010 - RNA, 23 nt, Artificial Sequence
  Synthetic
gcuauaagaggucauaaguagua

SEQ ID NO: 505011 - RNA, 24 nt, Artificial Sequence
  Synthetic
ggcuauaagaggucauaaguagua

SEQ ID NO: 505012 - RNA, 18 nt, Artificial Sequence
  Synthetic
gugguaguaguaguagua

SEQ ID NO: 505013 - RNA, 19 nt, Artificial Sequence
  Synthetic
agugguaguaguaguagua

SEQ ID NO: 505014 - RNA, 20 nt, Artificial Sequence
  Synthetic
uagugguaguaguaguagua

SEQ ID NO: 505015 - RNA, 21 nt, Artificial Sequence
  Synthetic
guagugguaguaguaguagua

SEQ ID NO: 505016 - RNA, 22 nt, Artificial Sequence
  Synthetic
aguagugguaguaguaguagua

SEQ ID NO: 505017 - RNA, 23 nt, Artificial Sequence
  Synthetic
uaguagugguaguaguaguagua

SEQ ID NO: 505018 - RNA, 24 nt, Artificial Sequence
  Synthetic
guaguagugguaguaguaguagua

SEQ ID NO: 505019 - RNA, 18 nt, Artificial Sequence
  Synthetic
cagaugauaaaauuagua

SEQ ID NO: 505020 - RNA, 19 nt, Artificial Sequence
  Synthetic
acagaugauaaaauuagua

SEQ ID NO: 505021 - RNA, 20 nt, Artificial Sequence
  Synthetic
cacagaugauaaaauuagua

SEQ ID NO: 505022 - RNA, 21 nt, Artificial Sequence
  Synthetic
acacagaugauaaaauuagua

SEQ ID NO: 505023 - RNA, 22 nt, Artificial Sequence
  Synthetic
gacacagaugauaaaauuagua

SEQ ID NO: 505024 - RNA, 23 nt, Artificial Sequence
  Synthetic
agacacagaugauaaaauuagua

SEQ ID NO: 505025 - RNA, 24 nt, Artificial Sequence
  Synthetic
uagacacagaugauaaaauuagua

SEQ ID NO: 505026 - RNA, 18 nt, Artificial Sequence
  Synthetic
gaacuuuuaaaauuagua

SEQ ID NO: 505027 - RNA, 19 nt, Artificial Sequence
  Synthetic
ugaacuuuuaaaauuagua

SEQ ID NO: 505028 - RNA, 20 nt, Artificial Sequence
  Synthetic
augaacuuuuaaaauuagua

SEQ ID NO: 505029 - RNA, 21 nt, Artificial Sequence
  Synthetic
aaugaacuuuuaaaauuagua

SEQ ID NO: 505030 - RNA, 22 nt, Artificial Sequence
  Synthetic
aaaugaacuuuuaaaauuagua

SEQ ID NO: 505031 - RNA, 23 nt, Artificial Sequence
  Synthetic
uaaaugaacuuuuaaaauuagua

SEQ ID NO: 505032 - RNA, 24 nt, Artificial Sequence
  Synthetic
guaaaugaacuuuuaaaauuagua

SEQ ID NO: 505033 - RNA, 18 nt, Artificial Sequence
  Synthetic
caguacaugaaauuagua

SEQ ID NO: 505034 - RNA, 19 nt, Artificial Sequence
  Synthetic
ccaguacaugaaauuagua

SEQ ID NO: 505035 - RNA, 20 nt, Artificial Sequence
  Synthetic
cccaguacaugaaauuagua

SEQ ID NO: 505036 - RNA, 21 nt, Artificial Sequence
  Synthetic
ucccaguacaugaaauuagua

SEQ ID NO: 505037 - RNA, 22 nt, Artificial Sequence
  Synthetic
uucccaguacaugaaauuagua

SEQ ID NO: 505038 - RNA, 23 nt, Artificial Sequence
  Synthetic
uuucccaguacaugaaauuagua

SEQ ID NO: 505039 - RNA, 24 nt, Artificial Sequence
  Synthetic
guuucccaguacaugaaauuagua

SEQ ID NO: 505040 - RNA, 18 nt, Artificial Sequence
  Synthetic
auugaggcauuauuagua

SEQ ID NO: 505041 - RNA, 19 nt, Artificial Sequence
  Synthetic
gauugaggcauuauuagua

SEQ ID NO: 505042 - RNA, 20 nt, Artificial Sequence
  Synthetic
ugauugaggcauuauuagua

SEQ ID NO: 505043 - RNA, 21 nt, Artificial Sequence
  Synthetic
cugauugaggcauuauuagua

SEQ ID NO: 505044 - RNA, 22 nt, Artificial Sequence
  Synthetic
ccugauugaggcauuauuagua

SEQ ID NO: 505045 - RNA, 23 nt, Artificial Sequence
  Synthetic
accugauugaggcauuauuagua

SEQ ID NO: 505046 - RNA, 24 nt, Artificial Sequence
  Synthetic
aaccugauugaggcauuauuagua

SEQ ID NO: 505047 - RNA, 18 nt, Artificial Sequence
  Synthetic
cccuuguuuaacuuagua

SEQ ID NO: 505048 - RNA, 19 nt, Artificial Sequence
  Synthetic
acccuuguuuaacuuagua

SEQ ID NO: 505049 - RNA, 20 nt, Artificial Sequence
  Synthetic
cacccuuguuuaacuuagua

SEQ ID NO: 505050 - RNA, 21 nt, Artificial Sequence
  Synthetic
ccacccuuguuuaacuuagua

SEQ ID NO: 505051 - RNA, 22 nt, Artificial Sequence
  Synthetic
cccacccuuguuuaacuuagua

SEQ ID NO: 505052 - RNA, 23 nt, Artificial Sequence
  Synthetic
ccccacccuuguuuaacuuagua

SEQ ID NO: 505053 - RNA, 24 nt, Artificial Sequence
  Synthetic
uccccacccuuguuuaacuuagua

SEQ ID NO: 505054 - RNA, 18 nt, Artificial Sequence
  Synthetic
guuuauaccuacuuagua

SEQ ID NO: 505055 - RNA, 19 nt, Artificial Sequence
  Synthetic
gguuuauaccuacuuagua

SEQ ID NO: 505056 - RNA, 20 nt, Artificial Sequence
  Synthetic
ggguuuauaccuacuuagua

SEQ ID NO: 505057 - RNA, 21 nt, Artificial Sequence
  Synthetic
aggguuuauaccuacuuagua

SEQ ID NO: 505058 - RNA, 22 nt, Artificial Sequence
  Synthetic
aaggguuuauaccuacuuagua

SEQ ID NO: 505059 - RNA, 23 nt, Artificial Sequence
  Synthetic
aaaggguuuauaccuacuuagua

SEQ ID NO: 505060 - RNA, 24 nt, Artificial Sequence
  Synthetic
uaaaggguuuauaccuacuuagua

SEQ ID NO: 505061 - RNA, 18 nt, Artificial Sequence
  Synthetic
uucacucagagcuuagua

SEQ ID NO: 505062 - RNA, 19 nt, Artificial Sequence
  Synthetic
uuucacucagagcuuagua

SEQ ID NO: 505063 - RNA, 20 nt, Artificial Sequence
  Synthetic
uuuucacucagagcuuagua

SEQ ID NO: 505064 - RNA, 21 nt, Artificial Sequence
  Synthetic
uuuuucacucagagcuuagua

SEQ ID NO: 505065 - RNA, 22 nt, Artificial Sequence
  Synthetic
cuuuuucacucagagcuuagua

SEQ ID NO: 505066 - RNA, 23 nt, Artificial Sequence
  Synthetic
ccuuuuucacucagagcuuagua

SEQ ID NO: 505067 - RNA, 24 nt, Artificial Sequence
  Synthetic
gccuuuuucacucagagcuuagua

SEQ ID NO: 505068 - RNA, 18 nt, Artificial Sequence
  Synthetic
uaugguagaagguuagua

SEQ ID NO: 505069 - RNA, 19 nt, Artificial Sequence
  Synthetic
auaugguagaagguuagua

SEQ ID NO: 505070 - RNA, 20 nt, Artificial Sequence
  Synthetic
uauaugguagaagguuagua

SEQ ID NO: 505071 - RNA, 21 nt, Artificial Sequence
  Synthetic
uuauaugguagaagguuagua

SEQ ID NO: 505072 - RNA, 22 nt, Artificial Sequence
  Synthetic
uuuauaugguagaagguuagua

SEQ ID NO: 505073 - RNA, 23 nt, Artificial Sequence
  Synthetic
guuuauaugguagaagguuagua

SEQ ID NO: 505074 - RNA, 24 nt, Artificial Sequence
  Synthetic
aguuuauaugguagaagguuagua

SEQ ID NO: 505075 - RNA, 18 nt, Artificial Sequence
  Synthetic
guuuuccaaaauuuagua

SEQ ID NO: 505076 - RNA, 19 nt, Artificial Sequence
  Synthetic
uguuuuccaaaauuuagua

SEQ ID NO: 505077 - RNA, 20 nt, Artificial Sequence
  Synthetic
auguuuuccaaaauuuagua

SEQ ID NO: 505078 - RNA, 21 nt, Artificial Sequence
  Synthetic
uauguuuuccaaaauuuagua

SEQ ID NO: 505079 - RNA, 22 nt, Artificial Sequence
  Synthetic
auauguuuuccaaaauuuagua

SEQ ID NO: 505080 - RNA, 23 nt, Artificial Sequence
  Synthetic
aauauguuuuccaaaauuuagua

SEQ ID NO: 505081 - RNA, 24 nt, Artificial Sequence
  Synthetic
uaauauguuuuccaaaauuuagua

SEQ ID NO: 505082 - RNA, 18 nt, Artificial Sequence
  Synthetic
gugaggugugauuuagua

SEQ ID NO: 505083 - RNA, 19 nt, Artificial Sequence
  Synthetic
agugaggugugauuuagua

SEQ ID NO: 505084 - RNA, 20 nt, Artificial Sequence
  Synthetic
aagugaggugugauuuagua

SEQ ID NO: 505085 - RNA, 21 nt, Artificial Sequence
  Synthetic
gaagugaggugugauuuagua

SEQ ID NO: 505086 - RNA, 22 nt, Artificial Sequence
  Synthetic
agaagugaggugugauuuagua

SEQ ID NO: 505087 - RNA, 23 nt, Artificial Sequence
  Synthetic
uagaagugaggugugauuuagua

SEQ ID NO: 505088 - RNA, 24 nt, Artificial Sequence
  Synthetic
guagaagugaggugugauuuagua

SEQ ID NO: 505089 - RNA, 18 nt, Artificial Sequence
  Synthetic
agugcuggguauuuagua

SEQ ID NO: 505090 - RNA, 19 nt, Artificial Sequence
  Synthetic
uagugcuggguauuuagua

SEQ ID NO: 505091 - RNA, 20 nt, Artificial Sequence
  Synthetic
auagugcuggguauuuagua

SEQ ID NO: 505092 - RNA, 21 nt, Artificial Sequence
  Synthetic
uauagugcuggguauuuagua

SEQ ID NO: 505093 - RNA, 22 nt, Artificial Sequence
  Synthetic
auauagugcuggguauuuagua

SEQ ID NO: 505094 - RNA, 23 nt, Artificial Sequence
  Synthetic
uauauagugcuggguauuuagua

SEQ ID NO: 505095 - RNA, 24 nt, Artificial Sequence
  Synthetic
auauauagugcuggguauuuagua

SEQ ID NO: 505096 - RNA, 18 nt, Artificial Sequence
  Synthetic
ggguccaagacuuuagua

SEQ ID NO: 505097 - RNA, 19 nt, Artificial Sequence
  Synthetic
aggguccaagacuuuagua

SEQ ID NO: 505098 - RNA, 20 nt, Artificial Sequence
  Synthetic
gaggguccaagacuuuagua

SEQ ID NO: 505099 - RNA, 21 nt, Artificial Sequence
  Synthetic
ugaggguccaagacuuuagua

SEQ ID NO: 505100 - RNA, 22 nt, Artificial Sequence
  Synthetic
augaggguccaagacuuuagua

SEQ ID NO: 505101 - RNA, 23 nt, Artificial Sequence
  Synthetic
uaugaggguccaagacuuuagua

SEQ ID NO: 505102 - RNA, 24 nt, Artificial Sequence
  Synthetic
cuaugaggguccaagacuuuagua

SEQ ID NO: 505103 - RNA, 18 nt, Artificial Sequence
  Synthetic
guuuuucuuccuuuagua

SEQ ID NO: 505104 - RNA, 19 nt, Artificial Sequence
  Synthetic
uguuuuucuuccuuuagua

SEQ ID NO: 505105 - RNA, 20 nt, Artificial Sequence
  Synthetic
cuguuuuucuuccuuuagua

SEQ ID NO: 505106 - RNA, 21 nt, Artificial Sequence
  Synthetic
acuguuuuucuuccuuuagua

SEQ ID NO: 505107 - RNA, 22 nt, Artificial Sequence
  Synthetic
aacuguuuuucuuccuuuagua

SEQ ID NO: 505108 - RNA, 23 nt, Artificial Sequence
  Synthetic
aaacuguuuuucuuccuuuagua

SEQ ID NO: 505109 - RNA, 24 nt, Artificial Sequence
  Synthetic
gaaacuguuuuucuuccuuuagua

SEQ ID NO: 505110 - RNA, 18 nt, Artificial Sequence
  Synthetic
ucuggagacauuuuagua

SEQ ID NO: 505111 - RNA, 19 nt, Artificial Sequence
  Synthetic
uucuggagacauuuuagua

SEQ ID NO: 505112 - RNA, 20 nt, Artificial Sequence
  Synthetic
auucuggagacauuuuagua

SEQ ID NO: 505113 - RNA, 21 nt, Artificial Sequence
  Synthetic
uauucuggagacauuuuagua

SEQ ID NO: 505114 - RNA, 22 nt, Artificial Sequence
  Synthetic
cuauucuggagacauuuuagua

SEQ ID NO: 505115 - RNA, 23 nt, Artificial Sequence
  Synthetic
ucuauucuggagacauuuuagua

SEQ ID NO: 505116 - RNA, 24 nt, Artificial Sequence
  Synthetic
uucuauucuggagacauuuuagua

SEQ ID NO: 505117 - RNA, 18 nt, Artificial Sequence
  Synthetic
guugguuacauuuuagua

SEQ ID NO: 505118 - RNA, 19 nt, Artificial Sequence
  Synthetic
gguugguuacauuuuagua

SEQ ID NO: 505119 - RNA, 20 nt, Artificial Sequence
  Synthetic
ugguugguuacauuuuagua

SEQ ID NO: 505120 - RNA, 21 nt, Artificial Sequence
  Synthetic
gugguugguuacauuuuagua

SEQ ID NO: 505121 - RNA, 22 nt, Artificial Sequence
  Synthetic
ugugguugguuacauuuuagua

SEQ ID NO: 505122 - RNA, 23 nt, Artificial Sequence
  Synthetic
uugugguugguuacauuuuagua

SEQ ID NO: 505123 - RNA, 24 nt, Artificial Sequence
  Synthetic
uuugugguugguuacauuuuagua

SEQ ID NO: 505124 - RNA, 18 nt, Artificial Sequence
  Synthetic
aaguucuugauuuuagua

SEQ ID NO: 505125 - RNA, 19 nt, Artificial Sequence
  Synthetic
aaaguucuugauuuuagua

SEQ ID NO: 505126 - RNA, 20 nt, Artificial Sequence
  Synthetic
uaaaguucuugauuuuagua

SEQ ID NO: 505127 - RNA, 21 nt, Artificial Sequence
  Synthetic
guaaaguucuugauuuuagua

SEQ ID NO: 505128 - RNA, 22 nt, Artificial Sequence
  Synthetic
gguaaaguucuugauuuuagua

SEQ ID NO: 505129 - RNA, 23 nt, Artificial Sequence
  Synthetic
cgguaaaguucuugauuuuagua

SEQ ID NO: 505130 - RNA, 24 nt, Artificial Sequence
  Synthetic
acgguaaaguucuugauuuuagua

SEQ ID NO: 505131 - RNA, 18 nt, Artificial Sequence
  Synthetic
ugaggaagauaaaacgua

SEQ ID NO: 505132 - RNA, 19 nt, Artificial Sequence
  Synthetic
augaggaagauaaaacgua

SEQ ID NO: 505133 - RNA, 20 nt, Artificial Sequence
  Synthetic
aaugaggaagauaaaacgua

SEQ ID NO: 505134 - RNA, 21 nt, Artificial Sequence
  Synthetic
aaaugaggaagauaaaacgua

SEQ ID NO: 505135 - RNA, 22 nt, Artificial Sequence
  Synthetic
aaaaugaggaagauaaaacgua

SEQ ID NO: 505136 - RNA, 23 nt, Artificial Sequence
  Synthetic
aaaaaugaggaagauaaaacgua

SEQ ID NO: 505137 - RNA, 24 nt, Artificial Sequence
  Synthetic
uaaaaaugaggaagauaaaacgua

SEQ ID NO: 505138 - RNA, 18 nt, Artificial Sequence
  Synthetic
uuaauuuaacacaacgua

SEQ ID NO: 505139 - RNA, 19 nt, Artificial Sequence
  Synthetic
auuaauuuaacacaacgua

SEQ ID NO: 505140 - RNA, 20 nt, Artificial Sequence
  Synthetic
uauuaauuuaacacaacgua

SEQ ID NO: 505141 - RNA, 21 nt, Artificial Sequence
  Synthetic
guauuaauuuaacacaacgua

SEQ ID NO: 505142 - RNA, 22 nt, Artificial Sequence
  Synthetic
aguauuaauuuaacacaacgua

SEQ ID NO: 505143 - RNA, 23 nt, Artificial Sequence
  Synthetic
uaguauuaauuuaacacaacgua

SEQ ID NO: 505144 - RNA, 24 nt, Artificial Sequence
  Synthetic
uuaguauuaauuuaacacaacgua

SEQ ID NO: 505145 - RNA, 18 nt, Artificial Sequence
  Synthetic
cgccaaguagacaacgua

SEQ ID NO: 505146 - RNA, 19 nt, Artificial Sequence
  Synthetic
ucgccaaguagacaacgua

SEQ ID NO: 505147 - RNA, 20 nt, Artificial Sequence
  Synthetic
uucgccaaguagacaacgua

SEQ ID NO: 505148 - RNA, 21 nt, Artificial Sequence
  Synthetic
auucgccaaguagacaacgua

SEQ ID NO: 505149 - RNA, 22 nt, Artificial Sequence
  Synthetic
aauucgccaaguagacaacgua

SEQ ID NO: 505150 - RNA, 23 nt, Artificial Sequence
  Synthetic
gaauucgccaaguagacaacgua

SEQ ID NO: 505151 - RNA, 24 nt, Artificial Sequence
  Synthetic
agaauucgccaaguagacaacgua

SEQ ID NO: 505152 - RNA, 18 nt, Artificial Sequence
  Synthetic
uauuggauuucacacgua

SEQ ID NO: 505153 - RNA, 19 nt, Artificial Sequence
  Synthetic
cuauuggauuucacacgua

SEQ ID NO: 505154 - RNA, 20 nt, Artificial Sequence
  Synthetic
ccuauuggauuucacacgua

SEQ ID NO: 505155 - RNA, 21 nt, Artificial Sequence
  Synthetic
gccuauuggauuucacacgua

SEQ ID NO: 505156 - RNA, 22 nt, Artificial Sequence
  Synthetic
ugccuauuggauuucacacgua

SEQ ID NO: 505157 - RNA, 23 nt, Artificial Sequence
  Synthetic
uugccuauuggauuucacacgua

SEQ ID NO: 505158 - RNA, 24 nt, Artificial Sequence
  Synthetic
uuugccuauuggauuucacacgua

SEQ ID NO: 505159 - RNA, 18 nt, Artificial Sequence
  Synthetic
agaacacauggacacgua

SEQ ID NO: 505160 - RNA, 19 nt, Artificial Sequence
  Synthetic
gagaacacauggacacgua

SEQ ID NO: 505161 - RNA, 20 nt, Artificial Sequence
  Synthetic
ugagaacacauggacacgua

SEQ ID NO: 505162 - RNA, 21 nt, Artificial Sequence
  Synthetic
augagaacacauggacacgua

SEQ ID NO: 505163 - RNA, 22 nt, Artificial Sequence
  Synthetic
gaugagaacacauggacacgua

SEQ ID NO: 505164 - RNA, 23 nt, Artificial Sequence
  Synthetic
ugaugagaacacauggacacgua

SEQ ID NO: 505165 - RNA, 24 nt, Artificial Sequence
  Synthetic
augaugagaacacauggacacgua

SEQ ID NO: 505166 - RNA, 18 nt, Artificial Sequence
  Synthetic
guagcucagaaccacgua

SEQ ID NO: 505167 - RNA, 19 nt, Artificial Sequence
  Synthetic
aguagcucagaaccacgua

SEQ ID NO: 505168 - RNA, 20 nt, Artificial Sequence
  Synthetic
aaguagcucagaaccacgua

SEQ ID NO: 505169 - RNA, 21 nt, Artificial Sequence
  Synthetic
gaaguagcucagaaccacgua

SEQ ID NO: 505170 - RNA, 22 nt, Artificial Sequence
  Synthetic
agaaguagcucagaaccacgua

SEQ ID NO: 505171 - RNA, 23 nt, Artificial Sequence
  Synthetic
uagaaguagcucagaaccacgua

SEQ ID NO: 505172 - RNA, 24 nt, Artificial Sequence
  Synthetic
auagaaguagcucagaaccacgua

SEQ ID NO: 505173 - RNA, 18 nt, Artificial Sequence
  Synthetic
guacggagcuaucacgua

SEQ ID NO: 505174 - RNA, 19 nt, Artificial Sequence
  Synthetic
aguacggagcuaucacgua

SEQ ID NO: 505175 - RNA, 20 nt, Artificial Sequence
  Synthetic
aaguacggagcuaucacgua

SEQ ID NO: 505176 - RNA, 21 nt, Artificial Sequence
  Synthetic
gaaguacggagcuaucacgua

SEQ ID NO: 505177 - RNA, 22 nt, Artificial Sequence
  Synthetic
agaaguacggagcuaucacgua

SEQ ID NO: 505178 - RNA, 23 nt, Artificial Sequence
  Synthetic
aagaaguacggagcuaucacgua

SEQ ID NO: 505179 - RNA, 24 nt, Artificial Sequence
  Synthetic
gaagaaguacggagcuaucacgua

SEQ ID NO: 505180 - RNA, 18 nt, Artificial Sequence
  Synthetic
ugaaguguaauauacgua

SEQ ID NO: 505181 - RNA, 19 nt, Artificial Sequence
  Synthetic
cugaaguguaauauacgua

SEQ ID NO: 505182 - RNA, 20 nt, Artificial Sequence
  Synthetic
acugaaguguaauauacgua

SEQ ID NO: 505183 - RNA, 21 nt, Artificial Sequence
  Synthetic
aacugaaguguaauauacgua

SEQ ID NO: 505184 - RNA, 22 nt, Artificial Sequence
  Synthetic
uaacugaaguguaauauacgua

SEQ ID NO: 505185 - RNA, 23 nt, Artificial Sequence
  Synthetic
uuaacugaaguguaauauacgua

SEQ ID NO: 505186 - RNA, 24 nt, Artificial Sequence
  Synthetic
uuuaacugaaguguaauauacgua

SEQ ID NO: 505187 - RNA, 18 nt, Artificial Sequence
  Synthetic
aaucaauuuuucuacgua

SEQ ID NO: 505188 - RNA, 19 nt, Artificial Sequence
  Synthetic
gaaucaauuuuucuacgua

SEQ ID NO: 505189 - RNA, 20 nt, Artificial Sequence
  Synthetic
ugaaucaauuuuucuacgua

SEQ ID NO: 505190 - RNA, 21 nt, Artificial Sequence
  Synthetic
augaaucaauuuuucuacgua

SEQ ID NO: 505191 - RNA, 22 nt, Artificial Sequence
  Synthetic
uaugaaucaauuuuucuacgua

SEQ ID NO: 505192 - RNA, 23 nt, Artificial Sequence
  Synthetic
auaugaaucaauuuuucuacgua

SEQ ID NO: 505193 - RNA, 24 nt, Artificial Sequence
  Synthetic
uauaugaaucaauuuuucuacgua

SEQ ID NO: 505194 - RNA, 18 nt, Artificial Sequence
  Synthetic
ccacuauggaaaaccgua

SEQ ID NO: 505195 - RNA, 19 nt, Artificial Sequence
  Synthetic
gccacuauggaaaaccgua

SEQ ID NO: 505196 - RNA, 20 nt, Artificial Sequence
  Synthetic
agccacuauggaaaaccgua

SEQ ID NO: 505197 - RNA, 21 nt, Artificial Sequence
  Synthetic
uagccacuauggaaaaccgua

SEQ ID NO: 505198 - RNA, 22 nt, Artificial Sequence
  Synthetic
guagccacuauggaaaaccgua

SEQ ID NO: 505199 - RNA, 23 nt, Artificial Sequence
  Synthetic
uguagccacuauggaaaaccgua

SEQ ID NO: 505200 - RNA, 24 nt, Artificial Sequence
  Synthetic
guguagccacuauggaaaaccgua

SEQ ID NO: 505201 - RNA, 18 nt, Artificial Sequence
  Synthetic
aguauaaagauuaccgua

SEQ ID NO: 505202 - RNA, 19 nt, Artificial Sequence
  Synthetic
aaguauaaagauuaccgua

SEQ ID NO: 505203 - RNA, 20 nt, Artificial Sequence
  Synthetic
uaaguauaaagauuaccgua

SEQ ID NO: 505204 - RNA, 21 nt, Artificial Sequence
  Synthetic
auaaguauaaagauuaccgua

SEQ ID NO: 505205 - RNA, 22 nt, Artificial Sequence
  Synthetic
aauaaguauaaagauuaccgua

SEQ ID NO: 505206 - RNA, 23 nt, Artificial Sequence
  Synthetic
caauaaguauaaagauuaccgua

SEQ ID NO: 505207 - RNA, 24 nt, Artificial Sequence
  Synthetic
ucaauaaguauaaagauuaccgua

SEQ ID NO: 505208 - RNA, 18 nt, Artificial Sequence
  Synthetic
cacaaagugccugccgua

SEQ ID NO: 505209 - RNA, 19 nt, Artificial Sequence
  Synthetic
ucacaaagugccugccgua

SEQ ID NO: 505210 - RNA, 20 nt, Artificial Sequence
  Synthetic
aucacaaagugccugccgua

SEQ ID NO: 505211 - RNA, 21 nt, Artificial Sequence
  Synthetic
uaucacaaagugccugccgua

SEQ ID NO: 505212 - RNA, 22 nt, Artificial Sequence
  Synthetic
guaucacaaagugccugccgua

SEQ ID NO: 505213 - RNA, 23 nt, Artificial Sequence
  Synthetic
aguaucacaaagugccugccgua

SEQ ID NO: 505214 - RNA, 24 nt, Artificial Sequence
  Synthetic
uaguaucacaaagugccugccgua

SEQ ID NO: 505215 - RNA, 18 nt, Artificial Sequence
  Synthetic
uuauaucauaagagcgua

SEQ ID NO: 505216 - RNA, 19 nt, Artificial Sequence
  Synthetic
uuuauaucauaagagcgua

SEQ ID NO: 505217 - RNA, 20 nt, Artificial Sequence
  Synthetic
guuuauaucauaagagcgua

SEQ ID NO: 505218 - RNA, 21 nt, Artificial Sequence
  Synthetic
gguuuauaucauaagagcgua

SEQ ID NO: 505219 - RNA, 22 nt, Artificial Sequence
  Synthetic
ugguuuauaucauaagagcgua

SEQ ID NO: 505220 - RNA, 23 nt, Artificial Sequence
  Synthetic
augguuuauaucauaagagcgua

SEQ ID NO: 505221 - RNA, 24 nt, Artificial Sequence
  Synthetic
aaugguuuauaucauaagagcgua

SEQ ID NO: 505222 - RNA, 18 nt, Artificial Sequence
  Synthetic
uugucuauuauuggcgua

SEQ ID NO: 505223 - RNA, 19 nt, Artificial Sequence
  Synthetic
uuugucuauuauuggcgua

SEQ ID NO: 505224 - RNA, 20 nt, Artificial Sequence
  Synthetic
cuuugucuauuauuggcgua

SEQ ID NO: 505225 - RNA, 21 nt, Artificial Sequence
  Synthetic
ucuuugucuauuauuggcgua

SEQ ID NO: 505226 - RNA, 22 nt, Artificial Sequence
  Synthetic
cucuuugucuauuauuggcgua

SEQ ID NO: 505227 - RNA, 23 nt, Artificial Sequence
  Synthetic
ucucuuugucuauuauuggcgua

SEQ ID NO: 505228 - RNA, 24 nt, Artificial Sequence
  Synthetic
cucucuuugucuauuauuggcgua

SEQ ID NO: 505229 - RNA, 18 nt, Artificial Sequence
  Synthetic
uuuuggcuuauaaucgua

SEQ ID NO: 505230 - RNA, 19 nt, Artificial Sequence
  Synthetic
auuuuggcuuauaaucgua

SEQ ID NO: 505231 - RNA, 20 nt, Artificial Sequence
  Synthetic
uauuuuggcuuauaaucgua

SEQ ID NO: 505232 - RNA, 21 nt, Artificial Sequence
  Synthetic
auauuuuggcuuauaaucgua

SEQ ID NO: 505233 - RNA, 22 nt, Artificial Sequence
  Synthetic
cauauuuuggcuuauaaucgua

SEQ ID NO: 505234 - RNA, 23 nt, Artificial Sequence
  Synthetic
acauauuuuggcuuauaaucgua

SEQ ID NO: 505235 - RNA, 24 nt, Artificial Sequence
  Synthetic
uacauauuuuggcuuauaaucgua

SEQ ID NO: 505236 - RNA, 18 nt, Artificial Sequence
  Synthetic
agcauaagugaccucgua

SEQ ID NO: 505237 - RNA, 19 nt, Artificial Sequence
  Synthetic
uagcauaagugaccucgua

SEQ ID NO: 505238 - RNA, 20 nt, Artificial Sequence
  Synthetic
guagcauaagugaccucgua

SEQ ID NO: 505239 - RNA, 21 nt, Artificial Sequence
  Synthetic
uguagcauaagugaccucgua

SEQ ID NO: 505240 - RNA, 22 nt, Artificial Sequence
  Synthetic
auguagcauaagugaccucgua

SEQ ID NO: 505241 - RNA, 23 nt, Artificial Sequence
  Synthetic
gauguagcauaagugaccucgua

SEQ ID NO: 505242 - RNA, 24 nt, Artificial Sequence
  Synthetic
agauguagcauaagugaccucgua

SEQ ID NO: 505243 - RNA, 18 nt, Artificial Sequence
  Synthetic
aguuaacacuacuucgua

SEQ ID NO: 505244 - RNA, 19 nt, Artificial Sequence
  Synthetic
caguuaacacuacuucgua

SEQ ID NO: 505245 - RNA, 20 nt, Artificial Sequence
  Synthetic
gcaguuaacacuacuucgua

SEQ ID NO: 505246 - RNA, 21 nt, Artificial Sequence
  Synthetic
agcaguuaacacuacuucgua

SEQ ID NO: 505247 - RNA, 22 nt, Artificial Sequence
  Synthetic
aagcaguuaacacuacuucgua

SEQ ID NO: 505248 - RNA, 23 nt, Artificial Sequence
  Synthetic
caagcaguuaacacuacuucgua

SEQ ID NO: 505249 - RNA, 24 nt, Artificial Sequence
  Synthetic
ccaagcaguuaacacuacuucgua

SEQ ID NO: 505250 - RNA, 18 nt, Artificial Sequence
  Synthetic
guguggccaucaaaggua

SEQ ID NO: 505251 - RNA, 19 nt, Artificial Sequence
  Synthetic
cguguggccaucaaaggua

SEQ ID NO: 505252 - RNA, 20 nt, Artificial Sequence
  Synthetic
acguguggccaucaaaggua

SEQ ID NO: 505253 - RNA, 21 nt, Artificial Sequence
  Synthetic
uacguguggccaucaaaggua

SEQ ID NO: 505254 - RNA, 22 nt, Artificial Sequence
  Synthetic
cuacguguggccaucaaaggua

SEQ ID NO: 505255 - RNA, 23 nt, Artificial Sequence
  Synthetic
acuacguguggccaucaaaggua

SEQ ID NO: 505256 - RNA, 24 nt, Artificial Sequence
  Synthetic
uacuacguguggccaucaaaggua

SEQ ID NO: 505257 - RNA, 18 nt, Artificial Sequence
  Synthetic
augucaaaaauaaaggua

SEQ ID NO: 505258 - RNA, 19 nt, Artificial Sequence
  Synthetic
gaugucaaaaauaaaggua

SEQ ID NO: 505259 - RNA, 20 nt, Artificial Sequence
  Synthetic
ugaugucaaaaauaaaggua

SEQ ID NO: 505260 - RNA, 21 nt, Artificial Sequence
  Synthetic
cugaugucaaaaauaaaggua

SEQ ID NO: 505261 - RNA, 22 nt, Artificial Sequence
  Synthetic
acugaugucaaaaauaaaggua

SEQ ID NO: 505262 - RNA, 23 nt, Artificial Sequence
  Synthetic
aacugaugucaaaaauaaaggua

SEQ ID NO: 505263 - RNA, 24 nt, Artificial Sequence
  Synthetic
aaacugaugucaaaaauaaaggua

SEQ ID NO: 505264 - RNA, 18 nt, Artificial Sequence
  Synthetic
auauaaaauauaaaggua

SEQ ID NO: 505265 - RNA, 19 nt, Artificial Sequence
  Synthetic
aauauaaaauauaaaggua

SEQ ID NO: 505266 - RNA, 20 nt, Artificial Sequence
  Synthetic
gaauauaaaauauaaaggua

SEQ ID NO: 505267 - RNA, 21 nt, Artificial Sequence
  Synthetic
agaauauaaaauauaaaggua

SEQ ID NO: 505268 - RNA, 22 nt, Artificial Sequence
  Synthetic
cagaauauaaaauauaaaggua

SEQ ID NO: 505269 - RNA, 23 nt, Artificial Sequence
  Synthetic
acagaauauaaaauauaaaggua

SEQ ID NO: 505270 - RNA, 24 nt, Artificial Sequence
  Synthetic
cacagaauauaaaauauaaaggua

SEQ ID NO: 505271 - RNA, 18 nt, Artificial Sequence
  Synthetic
gaauuuaucuuaaaggua

SEQ ID NO: 505272 - RNA, 19 nt, Artificial Sequence
  Synthetic
ggaauuuaucuuaaaggua

SEQ ID NO: 505273 - RNA, 20 nt, Artificial Sequence
  Synthetic
gggaauuuaucuuaaaggua

SEQ ID NO: 505274 - RNA, 21 nt, Artificial Sequence
  Synthetic
ugggaauuuaucuuaaaggua

SEQ ID NO: 505275 - RNA, 22 nt, Artificial Sequence
  Synthetic
gugggaauuuaucuuaaaggua

SEQ ID NO: 505276 - RNA, 23 nt, Artificial Sequence
  Synthetic
ggugggaauuuaucuuaaaggua

SEQ ID NO: 505277 - RNA, 24 nt, Artificial Sequence
  Synthetic
aggugggaauuuaucuuaaaggua

SEQ ID NO: 505278 - RNA, 18 nt, Artificial Sequence
  Synthetic
cccccuuuuaccaaggua

SEQ ID NO: 505279 - RNA, 19 nt, Artificial Sequence
  Synthetic
ucccccuuuuaccaaggua

SEQ ID NO: 505280 - RNA, 20 nt, Artificial Sequence
  Synthetic
aucccccuuuuaccaaggua

SEQ ID NO: 505281 - RNA, 21 nt, Artificial Sequence
  Synthetic
caucccccuuuuaccaaggua

SEQ ID NO: 505282 - RNA, 22 nt, Artificial Sequence
  Synthetic
ucaucccccuuuuaccaaggua

SEQ ID NO: 505283 - RNA, 23 nt, Artificial Sequence
  Synthetic
aucaucccccuuuuaccaaggua

SEQ ID NO: 505284 - RNA, 24 nt, Artificial Sequence
  Synthetic
uaucaucccccuuuuaccaaggua

SEQ ID NO: 505285 - RNA, 18 nt, Artificial Sequence
  Synthetic
caaaaaggggccaaggua

SEQ ID NO: 505286 - RNA, 19 nt, Artificial Sequence
  Synthetic
ucaaaaaggggccaaggua

SEQ ID NO: 505287 - RNA, 20 nt, Artificial Sequence
  Synthetic
uucaaaaaggggccaaggua

SEQ ID NO: 505288 - RNA, 21 nt, Artificial Sequence
  Synthetic
cuucaaaaaggggccaaggua

SEQ ID NO: 505289 - RNA, 22 nt, Artificial Sequence
  Synthetic
ccuucaaaaaggggccaaggua

SEQ ID NO: 505290 - RNA, 23 nt, Artificial Sequence
  Synthetic
gccuucaaaaaggggccaaggua

SEQ ID NO: 505291 - RNA, 24 nt, Artificial Sequence
  Synthetic
ugccuucaaaaaggggccaaggua

SEQ ID NO: 505292 - RNA, 18 nt, Artificial Sequence
  Synthetic
auugacacaaucaaggua

SEQ ID NO: 505293 - RNA, 19 nt, Artificial Sequence
  Synthetic
cauugacacaaucaaggua

SEQ ID NO: 505294 - RNA, 20 nt, Artificial Sequence
  Synthetic
acauugacacaaucaaggua

SEQ ID NO: 505295 - RNA, 21 nt, Artificial Sequence
  Synthetic
gacauugacacaaucaaggua

SEQ ID NO: 505296 - RNA, 22 nt, Artificial Sequence
  Synthetic
ugacauugacacaaucaaggua

SEQ ID NO: 505297 - RNA, 23 nt, Artificial Sequence
  Synthetic
uugacauugacacaaucaaggua

SEQ ID NO: 505298 - RNA, 24 nt, Artificial Sequence
  Synthetic
auugacauugacacaaucaaggua

SEQ ID NO: 505299 - RNA, 18 nt, Artificial Sequence
  Synthetic
agaaucagagagaaggua

SEQ ID NO: 505300 - RNA, 19 nt, Artificial Sequence
  Synthetic
cagaaucagagagaaggua

SEQ ID NO: 505301 - RNA, 20 nt, Artificial Sequence
  Synthetic
ucagaaucagagagaaggua

SEQ ID NO: 505302 - RNA, 21 nt, Artificial Sequence
  Synthetic
uucagaaucagagagaaggua

SEQ ID NO: 505303 - RNA, 22 nt, Artificial Sequence
  Synthetic
cuucagaaucagagagaaggua

SEQ ID NO: 505304 - RNA, 23 nt, Artificial Sequence
  Synthetic
gcuucagaaucagagagaaggua

SEQ ID NO: 505305 - RNA, 24 nt, Artificial Sequence
  Synthetic
ggcuucagaaucagagagaaggua

SEQ ID NO: 505306 - RNA, 18 nt, Artificial Sequence
  Synthetic
cuggagggaaggaaggua

SEQ ID NO: 505307 - RNA, 19 nt, Artificial Sequence
  Synthetic
ccuggagggaaggaaggua

SEQ ID NO: 505308 - RNA, 20 nt, Artificial Sequence
  Synthetic
cccuggagggaaggaaggua

SEQ ID NO: 505309 - RNA, 21 nt, Artificial Sequence
  Synthetic
ucccuggagggaaggaaggua

SEQ ID NO: 505310 - RNA, 22 nt, Artificial Sequence
  Synthetic
gucccuggagggaaggaaggua

SEQ ID NO: 505311 - RNA, 23 nt, Artificial Sequence
  Synthetic
ugucccuggagggaaggaaggua

SEQ ID NO: 505312 - RNA, 24 nt, Artificial Sequence
  Synthetic
gugucccuggagggaaggaaggua

SEQ ID NO: 505313 - RNA, 18 nt, Artificial Sequence
  Synthetic
augaggaagaggaaggua

SEQ ID NO: 505314 - RNA, 19 nt, Artificial Sequence
  Synthetic
aaugaggaagaggaaggua

SEQ ID NO: 505315 - RNA, 20 nt, Artificial Sequence
  Synthetic
aaaugaggaagaggaaggua

SEQ ID NO: 505316 - RNA, 21 nt, Artificial Sequence
  Synthetic
aaaaugaggaagaggaaggua

SEQ ID NO: 505317 - RNA, 22 nt, Artificial Sequence
  Synthetic
gaaaaugaggaagaggaaggua

SEQ ID NO: 505318 - RNA, 23 nt, Artificial Sequence
  Synthetic
ugaaaaugaggaagaggaaggua

SEQ ID NO: 505319 - RNA, 24 nt, Artificial Sequence
  Synthetic
gugaaaaugaggaagaggaaggua

SEQ ID NO: 505320 - RNA, 18 nt, Artificial Sequence
  Synthetic
ggucugagggggaaggua

SEQ ID NO: 505321 - RNA, 19 nt, Artificial Sequence
  Synthetic
uggucugagggggaaggua

SEQ ID NO: 505322 - RNA, 20 nt, Artificial Sequence
  Synthetic
cuggucugagggggaaggua

SEQ ID NO: 505323 - RNA, 21 nt, Artificial Sequence
  Synthetic
ucuggucugagggggaaggua

SEQ ID NO: 505324 - RNA, 22 nt, Artificial Sequence
  Synthetic
uucuggucugagggggaaggua

SEQ ID NO: 505325 - RNA, 23 nt, Artificial Sequence
  Synthetic
cuucuggucugagggggaaggua

SEQ ID NO: 505326 - RNA, 24 nt, Artificial Sequence
  Synthetic
acuucuggucugagggggaaggua

SEQ ID NO: 505327 - RNA, 18 nt, Artificial Sequence
  Synthetic
gagauaaaugguaaggua

SEQ ID NO: 505328 - RNA, 19 nt, Artificial Sequence
  Synthetic
ugagauaaaugguaaggua

SEQ ID NO: 505329 - RNA, 20 nt, Artificial Sequence
  Synthetic
uugagauaaaugguaaggua

SEQ ID NO: 505330 - RNA, 21 nt, Artificial Sequence
  Synthetic
uuugagauaaaugguaaggua

SEQ ID NO: 505331 - RNA, 22 nt, Artificial Sequence
  Synthetic
uuuugagauaaaugguaaggua

SEQ ID NO: 505332 - RNA, 23 nt, Artificial Sequence
  Synthetic
auuuugagauaaaugguaaggua

SEQ ID NO: 505333 - RNA, 24 nt, Artificial Sequence
  Synthetic
uauuuugagauaaaugguaaggua

SEQ ID NO: 505334 - RNA, 18 nt, Artificial Sequence
  Synthetic
ucuuugaguuguaaggua

SEQ ID NO: 505335 - RNA, 19 nt, Artificial Sequence
  Synthetic
cucuuugaguuguaaggua

SEQ ID NO: 505336 - RNA, 20 nt, Artificial Sequence
  Synthetic
ccucuuugaguuguaaggua

SEQ ID NO: 505337 - RNA, 21 nt, Artificial Sequence
  Synthetic
accucuuugaguuguaaggua

SEQ ID NO: 505338 - RNA, 22 nt, Artificial Sequence
  Synthetic
uaccucuuugaguuguaaggua

SEQ ID NO: 505339 - RNA, 23 nt, Artificial Sequence
  Synthetic
auaccucuuugaguuguaaggua

SEQ ID NO: 505340 - RNA, 24 nt, Artificial Sequence
  Synthetic
aauaccucuuugaguuguaaggua

SEQ ID NO: 505341 - RNA, 18 nt, Artificial Sequence
  Synthetic
ucccaccacacacaggua

SEQ ID NO: 505342 - RNA, 19 nt, Artificial Sequence
  Synthetic
aucccaccacacacaggua

SEQ ID NO: 505343 - RNA, 20 nt, Artificial Sequence
  Synthetic
gaucccaccacacacaggua

SEQ ID NO: 505344 - RNA, 21 nt, Artificial Sequence
  Synthetic
ugaucccaccacacacaggua

SEQ ID NO: 505345 - RNA, 22 nt, Artificial Sequence
  Synthetic
augaucccaccacacacaggua

SEQ ID NO: 505346 - RNA, 23 nt, Artificial Sequence
  Synthetic
aaugaucccaccacacacaggua

SEQ ID NO: 505347 - RNA, 24 nt, Artificial Sequence
  Synthetic
aaaugaucccaccacacacaggua

SEQ ID NO: 505348 - RNA, 18 nt, Artificial Sequence
  Synthetic
aaaguguggauacaggua

SEQ ID NO: 505349 - RNA, 19 nt, Artificial Sequence
  Synthetic
aaaaguguggauacaggua

SEQ ID NO: 505350 - RNA, 20 nt, Artificial Sequence
  Synthetic
uaaaaguguggauacaggua

SEQ ID NO: 505351 - RNA, 21 nt, Artificial Sequence
  Synthetic
auaaaaguguggauacaggua

SEQ ID NO: 505352 - RNA, 22 nt, Artificial Sequence
  Synthetic
cauaaaaguguggauacaggua

SEQ ID NO: 505353 - RNA, 23 nt, Artificial Sequence
  Synthetic
acauaaaaguguggauacaggua

SEQ ID NO: 505354 - RNA, 24 nt, Artificial Sequence
  Synthetic
uacauaaaaguguggauacaggua

SEQ ID NO: 505355 - RNA, 18 nt, Artificial Sequence
  Synthetic
gugcaggcuacccaggua

SEQ ID NO: 505356 - RNA, 19 nt, Artificial Sequence
  Synthetic
ggugcaggcuacccaggua

SEQ ID NO: 505357 - RNA, 20 nt, Artificial Sequence
  Synthetic
aggugcaggcuacccaggua

SEQ ID NO: 505358 - RNA, 21 nt, Artificial Sequence
  Synthetic
aaggugcaggcuacccaggua

SEQ ID NO: 505359 - RNA, 22 nt, Artificial Sequence
  Synthetic
gaaggugcaggcuacccaggua

SEQ ID NO: 505360 - RNA, 23 nt, Artificial Sequence
  Synthetic
agaaggugcaggcuacccaggua

SEQ ID NO: 505361 - RNA, 24 nt, Artificial Sequence
  Synthetic
uagaaggugcaggcuacccaggua

SEQ ID NO: 505362 - RNA, 18 nt, Artificial Sequence
  Synthetic
cugacauucucccaggua

SEQ ID NO: 505363 - RNA, 19 nt, Artificial Sequence
  Synthetic
ucugacauucucccaggua

SEQ ID NO: 505364 - RNA, 20 nt, Artificial Sequence
  Synthetic
aucugacauucucccaggua

SEQ ID NO: 505365 - RNA, 21 nt, Artificial Sequence
  Synthetic
aaucugacauucucccaggua

SEQ ID NO: 505366 - RNA, 22 nt, Artificial Sequence
  Synthetic
uaaucugacauucucccaggua

SEQ ID NO: 505367 - RNA, 23 nt, Artificial Sequence
  Synthetic
auaaucugacauucucccaggua

SEQ ID NO: 505368 - RNA, 24 nt, Artificial Sequence
  Synthetic
aauaaucugacauucucccaggua

SEQ ID NO: 505369 - RNA, 18 nt, Artificial Sequence
  Synthetic
cucauucauucccaggua

SEQ ID NO: 505370 - RNA, 19 nt, Artificial Sequence
  Synthetic
ccucauucauucccaggua

SEQ ID NO: 505371 - RNA, 20 nt, Artificial Sequence
  Synthetic
uccucauucauucccaggua

SEQ ID NO: 505372 - RNA, 21 nt, Artificial Sequence
  Synthetic
uuccucauucauucccaggua

SEQ ID NO: 505373 - RNA, 22 nt, Artificial Sequence
  Synthetic
cuuccucauucauucccaggua

SEQ ID NO: 505374 - RNA, 23 nt, Artificial Sequence
  Synthetic
ccuuccucauucauucccaggua

SEQ ID NO: 505375 - RNA, 24 nt, Artificial Sequence
  Synthetic
gccuuccucauucauucccaggua

SEQ ID NO: 505376 - RNA, 18 nt, Artificial Sequence
  Synthetic
acucaucuauuccaggua

SEQ ID NO: 505377 - RNA, 19 nt, Artificial Sequence
  Synthetic
aacucaucuauuccaggua

SEQ ID NO: 505378 - RNA, 20 nt, Artificial Sequence
  Synthetic
aaacucaucuauuccaggua

SEQ ID NO: 505379 - RNA, 21 nt, Artificial Sequence
  Synthetic
aaaacucaucuauuccaggua

SEQ ID NO: 505380 - RNA, 22 nt, Artificial Sequence
  Synthetic
uaaaacucaucuauuccaggua

SEQ ID NO: 505381 - RNA, 23 nt, Artificial Sequence
  Synthetic
uuaaaacucaucuauuccaggua

SEQ ID NO: 505382 - RNA, 24 nt, Artificial Sequence
  Synthetic
uuuaaaacucaucuauuccaggua

SEQ ID NO: 505383 - RNA, 18 nt, Artificial Sequence
  Synthetic
uguuaugaauugcaggua

SEQ ID NO: 505384 - RNA, 19 nt, Artificial Sequence
  Synthetic
auguuaugaauugcaggua

SEQ ID NO: 505385 - RNA, 20 nt, Artificial Sequence
  Synthetic
cauguuaugaauugcaggua

SEQ ID NO: 505386 - RNA, 21 nt, Artificial Sequence
  Synthetic
acauguuaugaauugcaggua

SEQ ID NO: 505387 - RNA, 22 nt, Artificial Sequence
  Synthetic
aacauguuaugaauugcaggua

SEQ ID NO: 505388 - RNA, 23 nt, Artificial Sequence
  Synthetic
aaacauguuaugaauugcaggua

SEQ ID NO: 505389 - RNA, 24 nt, Artificial Sequence
  Synthetic
uaaacauguuaugaauugcaggua

SEQ ID NO: 505390 - RNA, 18 nt, Artificial Sequence
  Synthetic
ggaaaauuauaucaggua

SEQ ID NO: 505391 - RNA, 19 nt, Artificial Sequence
  Synthetic
aggaaaauuauaucaggua

SEQ ID NO: 505392 - RNA, 20 nt, Artificial Sequence
  Synthetic
caggaaaauuauaucaggua

SEQ ID NO: 505393 - RNA, 21 nt, Artificial Sequence
  Synthetic
ucaggaaaauuauaucaggua

SEQ ID NO: 505394 - RNA, 22 nt, Artificial Sequence
  Synthetic
uucaggaaaauuauaucaggua

SEQ ID NO: 505395 - RNA, 23 nt, Artificial Sequence
  Synthetic
guucaggaaaauuauaucaggua

SEQ ID NO: 505396 - RNA, 24 nt, Artificial Sequence
  Synthetic
aguucaggaaaauuauaucaggua

SEQ ID NO: 505397 - RNA, 18 nt, Artificial Sequence
  Synthetic
uauaauucuggucaggua

SEQ ID NO: 505398 - RNA, 19 nt, Artificial Sequence
  Synthetic
uuauaauucuggucaggua

SEQ ID NO: 505399 - RNA, 20 nt, Artificial Sequence
  Synthetic
auuauaauucuggucaggua

SEQ ID NO: 505400 - RNA, 21 nt, Artificial Sequence
  Synthetic
cauuauaauucuggucaggua

SEQ ID NO: 505401 - RNA, 22 nt, Artificial Sequence
  Synthetic
ccauuauaauucuggucaggua

SEQ ID NO: 505402 - RNA, 23 nt, Artificial Sequence
  Synthetic
gccauuauaauucuggucaggua

SEQ ID NO: 505403 - RNA, 24 nt, Artificial Sequence
  Synthetic
agccauuauaauucuggucaggua

SEQ ID NO: 505404 - RNA, 18 nt, Artificial Sequence
  Synthetic
uuggaaaaaaaagaggua

SEQ ID NO: 505405 - RNA, 19 nt, Artificial Sequence
  Synthetic
cuuggaaaaaaaagaggua

SEQ ID NO: 505406 - RNA, 20 nt, Artificial Sequence
  Synthetic
acuuggaaaaaaaagaggua

SEQ ID NO: 505407 - RNA, 21 nt, Artificial Sequence
  Synthetic
aacuuggaaaaaaaagaggua

SEQ ID NO: 505408 - RNA, 22 nt, Artificial Sequence
  Synthetic
gaacuuggaaaaaaaagaggua

SEQ ID NO: 505409 - RNA, 23 nt, Artificial Sequence
  Synthetic
agaacuuggaaaaaaaagaggua

SEQ ID NO: 505410 - RNA, 24 nt, Artificial Sequence
  Synthetic
aagaacuuggaaaaaaaagaggua

SEQ ID NO: 505411 - RNA, 18 nt, Artificial Sequence
  Synthetic
gcaaaauggcaagaggua

SEQ ID NO: 505412 - RNA, 19 nt, Artificial Sequence
  Synthetic
ugcaaaauggcaagaggua

SEQ ID NO: 505413 - RNA, 20 nt, Artificial Sequence
  Synthetic
gugcaaaauggcaagaggua

SEQ ID NO: 505414 - RNA, 21 nt, Artificial Sequence
  Synthetic
cgugcaaaauggcaagaggua

SEQ ID NO: 505415 - RNA, 22 nt, Artificial Sequence
  Synthetic
acgugcaaaauggcaagaggua

SEQ ID NO: 505416 - RNA, 23 nt, Artificial Sequence
  Synthetic
uacgugcaaaauggcaagaggua

SEQ ID NO: 505417 - RNA, 24 nt, Artificial Sequence
  Synthetic
cuacgugcaaaauggcaagaggua

SEQ ID NO: 505418 - RNA, 18 nt, Artificial Sequence
  Synthetic
uucuucugugaagaggua

SEQ ID NO: 505419 - RNA, 19 nt, Artificial Sequence
  Synthetic
uuucuucugugaagaggua

SEQ ID NO: 505420 - RNA, 20 nt, Artificial Sequence
  Synthetic
guuucuucugugaagaggua

SEQ ID NO: 505421 - RNA, 21 nt, Artificial Sequence
  Synthetic
uguuucuucugugaagaggua

SEQ ID NO: 505422 - RNA, 22 nt, Artificial Sequence
  Synthetic
guguuucuucugugaagaggua

SEQ ID NO: 505423 - RNA, 23 nt, Artificial Sequence
  Synthetic
aguguuucuucugugaagaggua

SEQ ID NO: 505424 - RNA, 24 nt, Artificial Sequence
  Synthetic
uaguguuucuucugugaagaggua

SEQ ID NO: 505425 - RNA, 18 nt, Artificial Sequence
  Synthetic
augccaggcuaagaggua

SEQ ID NO: 505426 - RNA, 19 nt, Artificial Sequence
  Synthetic
uaugccaggcuaagaggua

SEQ ID NO: 505427 - RNA, 20 nt, Artificial Sequence
  Synthetic
guaugccaggcuaagaggua

SEQ ID NO: 505428 - RNA, 21 nt, Artificial Sequence
  Synthetic
aguaugccaggcuaagaggua

SEQ ID NO: 505429 - RNA, 22 nt, Artificial Sequence
  Synthetic
gaguaugccaggcuaagaggua

SEQ ID NO: 505430 - RNA, 23 nt, Artificial Sequence
  Synthetic
ugaguaugccaggcuaagaggua

SEQ ID NO: 505431 - RNA, 24 nt, Artificial Sequence
  Synthetic
cugaguaugccaggcuaagaggua

SEQ ID NO: 505432 - RNA, 18 nt, Artificial Sequence
  Synthetic
aauaaaagguaagaggua

SEQ ID NO: 505433 - RNA, 19 nt, Artificial Sequence
  Synthetic
uaauaaaagguaagaggua

SEQ ID NO: 505434 - RNA, 20 nt, Artificial Sequence
  Synthetic
uuaauaaaagguaagaggua

SEQ ID NO: 505435 - RNA, 21 nt, Artificial Sequence
  Synthetic
uuuaauaaaagguaagaggua

SEQ ID NO: 505436 - RNA, 22 nt, Artificial Sequence
  Synthetic
uuuuaauaaaagguaagaggua

SEQ ID NO: 505437 - RNA, 23 nt, Artificial Sequence
  Synthetic
auuuuaauaaaagguaagaggua

SEQ ID NO: 505438 - RNA, 24 nt, Artificial Sequence
  Synthetic
uauuuuaauaaaagguaagaggua

SEQ ID NO: 505439 - RNA, 18 nt, Artificial Sequence
  Synthetic
acacucuacauagaggua

SEQ ID NO: 505440 - RNA, 19 nt, Artificial Sequence
  Synthetic
gacacucuacauagaggua

SEQ ID NO: 505441 - RNA, 20 nt, Artificial Sequence
  Synthetic
ugacacucuacauagaggua

SEQ ID NO: 505442 - RNA, 21 nt, Artificial Sequence
  Synthetic
uugacacucuacauagaggua

SEQ ID NO: 505443 - RNA, 22 nt, Artificial Sequence
  Synthetic
uuugacacucuacauagaggua

SEQ ID NO: 505444 - RNA, 23 nt, Artificial Sequence
  Synthetic
guuugacacucuacauagaggua

SEQ ID NO: 505445 - RNA, 24 nt, Artificial Sequence
  Synthetic
aguuugacacucuacauagaggua

SEQ ID NO: 505446 - RNA, 18 nt, Artificial Sequence
  Synthetic
caaagacacaacgaggua

SEQ ID NO: 505447 - RNA, 19 nt, Artificial Sequence
  Synthetic
gcaaagacacaacgaggua

SEQ ID NO: 505448 - RNA, 20 nt, Artificial Sequence
  Synthetic
ugcaaagacacaacgaggua

SEQ ID NO: 505449 - RNA, 21 nt, Artificial Sequence
  Synthetic
augcaaagacacaacgaggua

SEQ ID NO: 505450 - RNA, 22 nt, Artificial Sequence
  Synthetic
aaugcaaagacacaacgaggua

SEQ ID NO: 505451 - RNA, 23 nt, Artificial Sequence
  Synthetic
caaugcaaagacacaacgaggua

SEQ ID NO: 505452 - RNA, 24 nt, Artificial Sequence
  Synthetic
gcaaugcaaagacacaacgaggua

SEQ ID NO: 505453 - RNA, 18 nt, Artificial Sequence
  Synthetic
gauggaguaaaggaggua

SEQ ID NO: 505454 - RNA, 19 nt, Artificial Sequence
  Synthetic
ggauggaguaaaggaggua

SEQ ID NO: 505455 - RNA, 20 nt, Artificial Sequence
  Synthetic
aggauggaguaaaggaggua

SEQ ID NO: 505456 - RNA, 21 nt, Artificial Sequence
  Synthetic
caggauggaguaaaggaggua

SEQ ID NO: 505457 - RNA, 22 nt, Artificial Sequence
  Synthetic
gcaggauggaguaaaggaggua

SEQ ID NO: 505458 - RNA, 23 nt, Artificial Sequence
  Synthetic
ugcaggauggaguaaaggaggua

SEQ ID NO: 505459 - RNA, 24 nt, Artificial Sequence
  Synthetic
gugcaggauggaguaaaggaggua

SEQ ID NO: 505460 - RNA, 18 nt, Artificial Sequence
  Synthetic
aaccuaguuugggaggua

SEQ ID NO: 505461 - RNA, 19 nt, Artificial Sequence
  Synthetic
uaaccuaguuugggaggua

SEQ ID NO: 505462 - RNA, 20 nt, Artificial Sequence
  Synthetic
cuaaccuaguuugggaggua

SEQ ID NO: 505463 - RNA, 21 nt, Artificial Sequence
  Synthetic
acuaaccuaguuugggaggua

SEQ ID NO: 505464 - RNA, 22 nt, Artificial Sequence
  Synthetic
cacuaaccuaguuugggaggua

SEQ ID NO: 505465 - RNA, 23 nt, Artificial Sequence
  Synthetic
acacuaaccuaguuugggaggua

SEQ ID NO: 505466 - RNA, 24 nt, Artificial Sequence
  Synthetic
uacacuaaccuaguuugggaggua

SEQ ID NO: 505467 - RNA, 18 nt, Artificial Sequence
  Synthetic
ugaaugagaguggaggua

SEQ ID NO: 505468 - RNA, 19 nt, Artificial Sequence
  Synthetic
gugaaugagaguggaggua

SEQ ID NO: 505469 - RNA, 20 nt, Artificial Sequence
  Synthetic
ugugaaugagaguggaggua

SEQ ID NO: 505470 - RNA, 21 nt, Artificial Sequence
  Synthetic
gugugaaugagaguggaggua

SEQ ID NO: 505471 - RNA, 22 nt, Artificial Sequence
  Synthetic
agugugaaugagaguggaggua

SEQ ID NO: 505472 - RNA, 23 nt, Artificial Sequence
  Synthetic
gagugugaaugagaguggaggua

SEQ ID NO: 505473 - RNA, 24 nt, Artificial Sequence
  Synthetic
agagugugaaugagaguggaggua

SEQ ID NO: 505474 - RNA, 18 nt, Artificial Sequence
  Synthetic
agagaccagguggaggua

SEQ ID NO: 505475 - RNA, 19 nt, Artificial Sequence
  Synthetic
gagagaccagguggaggua

SEQ ID NO: 505476 - RNA, 20 nt, Artificial Sequence
  Synthetic
ggagagaccagguggaggua

SEQ ID NO: 505477 - RNA, 21 nt, Artificial Sequence
  Synthetic
gggagagaccagguggaggua

SEQ ID NO: 505478 - RNA, 22 nt, Artificial Sequence
  Synthetic
agggagagaccagguggaggua

SEQ ID NO: 505479 - RNA, 23 nt, Artificial Sequence
  Synthetic
aagggagagaccagguggaggua

SEQ ID NO: 505480 - RNA, 24 nt, Artificial Sequence
  Synthetic
caagggagagaccagguggaggua

SEQ ID NO: 505481 - RNA, 18 nt, Artificial Sequence
  Synthetic
auucacauccaugaggua

SEQ ID NO: 505482 - RNA, 19 nt, Artificial Sequence
  Synthetic
cauucacauccaugaggua

SEQ ID NO: 505483 - RNA, 20 nt, Artificial Sequence
  Synthetic
ccauucacauccaugaggua

SEQ ID NO: 505484 - RNA, 21 nt, Artificial Sequence
  Synthetic
accauucacauccaugaggua

SEQ ID NO: 505485 - RNA, 22 nt, Artificial Sequence
  Synthetic
aaccauucacauccaugaggua

SEQ ID NO: 505486 - RNA, 23 nt, Artificial Sequence
  Synthetic
uaaccauucacauccaugaggua

SEQ ID NO: 505487 - RNA, 24 nt, Artificial Sequence
  Synthetic
cuaaccauucacauccaugaggua

SEQ ID NO: 505488 - RNA, 18 nt, Artificial Sequence
  Synthetic
accagugguacugaggua

SEQ ID NO: 505489 - RNA, 19 nt, Artificial Sequence
  Synthetic
gaccagugguacugaggua

SEQ ID NO: 505490 - RNA, 20 nt, Artificial Sequence
  Synthetic
agaccagugguacugaggua

SEQ ID NO: 505491 - RNA, 21 nt, Artificial Sequence
  Synthetic
aagaccagugguacugaggua

SEQ ID NO: 505492 - RNA, 22 nt, Artificial Sequence
  Synthetic
uaagaccagugguacugaggua

SEQ ID NO: 505493 - RNA, 23 nt, Artificial Sequence
  Synthetic
uuaagaccagugguacugaggua

SEQ ID NO: 505494 - RNA, 24 nt, Artificial Sequence
  Synthetic
guuaagaccagugguacugaggua

SEQ ID NO: 505495 - RNA, 18 nt, Artificial Sequence
  Synthetic
aaaaagcuuucugaggua

SEQ ID NO: 505496 - RNA, 19 nt, Artificial Sequence
  Synthetic
gaaaaagcuuucugaggua

SEQ ID NO: 505497 - RNA, 20 nt, Artificial Sequence
  Synthetic
ugaaaaagcuuucugaggua

SEQ ID NO: 505498 - RNA, 21 nt, Artificial Sequence
  Synthetic
augaaaaagcuuucugaggua

SEQ ID NO: 505499 - RNA, 22 nt, Artificial Sequence
  Synthetic
caugaaaaagcuuucugaggua

SEQ ID NO: 505500 - RNA, 23 nt, Artificial Sequence
  Synthetic
gcaugaaaaagcuuucugaggua

SEQ ID NO: 505501 - RNA, 24 nt, Artificial Sequence
  Synthetic
agcaugaaaaagcuuucugaggua

SEQ ID NO: 505502 - RNA, 18 nt, Artificial Sequence
  Synthetic
caccuuccaagugaggua

SEQ ID NO: 505503 - RNA, 19 nt, Artificial Sequence
  Synthetic
ucaccuuccaagugaggua

SEQ ID NO: 505504 - RNA, 20 nt, Artificial Sequence
  Synthetic
aucaccuuccaagugaggua

SEQ ID NO: 505505 - RNA, 21 nt, Artificial Sequence
  Synthetic
aaucaccuuccaagugaggua

SEQ ID NO: 505506 - RNA, 22 nt, Artificial Sequence
  Synthetic
aaaucaccuuccaagugaggua

SEQ ID NO: 505507 - RNA, 23 nt, Artificial Sequence
  Synthetic
aaaaucaccuuccaagugaggua

SEQ ID NO: 505508 - RNA, 24 nt, Artificial Sequence
  Synthetic
caaaaucaccuuccaagugaggua

SEQ ID NO: 505509 - RNA, 18 nt, Artificial Sequence
  Synthetic
caacauccuagugaggua

SEQ ID NO: 505510 - RNA, 19 nt, Artificial Sequence
  Synthetic
acaacauccuagugaggua

SEQ ID NO: 505511 - RNA, 20 nt, Artificial Sequence
  Synthetic
cacaacauccuagugaggua

SEQ ID NO: 505512 - RNA, 21 nt, Artificial Sequence
  Synthetic
ccacaacauccuagugaggua

SEQ ID NO: 505513 - RNA, 22 nt, Artificial Sequence
  Synthetic
uccacaacauccuagugaggua

SEQ ID NO: 505514 - RNA, 23 nt, Artificial Sequence
  Synthetic
auccacaacauccuagugaggua

SEQ ID NO: 505515 - RNA, 24 nt, Artificial Sequence
  Synthetic
aauccacaacauccuagugaggua

SEQ ID NO: 505516 - RNA, 18 nt, Artificial Sequence
  Synthetic
ucaacuuuuugugaggua

SEQ ID NO: 505517 - RNA, 19 nt, Artificial Sequence
  Synthetic
aucaacuuuuugugaggua

SEQ ID NO: 505518 - RNA, 20 nt, Artificial Sequence
  Synthetic
caucaacuuuuugugaggua

SEQ ID NO: 505519 - RNA, 21 nt, Artificial Sequence
  Synthetic
gcaucaacuuuuugugaggua

SEQ ID NO: 505520 - RNA, 22 nt, Artificial Sequence
  Synthetic
ggcaucaacuuuuugugaggua

SEQ ID NO: 505521 - RNA, 23 nt, Artificial Sequence
  Synthetic
aggcaucaacuuuuugugaggua

SEQ ID NO: 505522 - RNA, 24 nt, Artificial Sequence
  Synthetic
gaggcaucaacuuuuugugaggua

SEQ ID NO: 505523 - RNA, 18 nt, Artificial Sequence
  Synthetic
caucgacugaaauaggua

SEQ ID NO: 505524 - RNA, 19 nt, Artificial Sequence
  Synthetic
gcaucgacugaaauaggua

SEQ ID NO: 505525 - RNA, 20 nt, Artificial Sequence
  Synthetic
ugcaucgacugaaauaggua

SEQ ID NO: 505526 - RNA, 21 nt, Artificial Sequence
  Synthetic
augcaucgacugaaauaggua

SEQ ID NO: 505527 - RNA, 22 nt, Artificial Sequence
  Synthetic
aaugcaucgacugaaauaggua

SEQ ID NO: 505528 - RNA, 23 nt, Artificial Sequence
  Synthetic
aaaugcaucgacugaaauaggua

SEQ ID NO: 505529 - RNA, 24 nt, Artificial Sequence
  Synthetic
caaaugcaucgacugaaauaggua

SEQ ID NO: 505530 - RNA, 18 nt, Artificial Sequence
  Synthetic
cugcaaucgcuauaggua

SEQ ID NO: 505531 - RNA, 19 nt, Artificial Sequence
  Synthetic
gcugcaaucgcuauaggua

SEQ ID NO: 505532 - RNA, 20 nt, Artificial Sequence
  Synthetic
ggcugcaaucgcuauaggua

SEQ ID NO: 505533 - RNA, 21 nt, Artificial Sequence
  Synthetic
uggcugcaaucgcuauaggua

SEQ ID NO: 505534 - RNA, 22 nt, Artificial Sequence
  Synthetic
auggcugcaaucgcuauaggua

SEQ ID NO: 505535 - RNA, 23 nt, Artificial Sequence
  Synthetic
uauggcugcaaucgcuauaggua

SEQ ID NO: 505536 - RNA, 24 nt, Artificial Sequence
  Synthetic
uuauggcugcaaucgcuauaggua

SEQ ID NO: 505537 - RNA, 18 nt, Artificial Sequence
  Synthetic
uuguuguuccacuaggua

SEQ ID NO: 505538 - RNA, 19 nt, Artificial Sequence
  Synthetic
guuguuguuccacuaggua

SEQ ID NO: 505539 - RNA, 20 nt, Artificial Sequence
  Synthetic
uguuguuguuccacuaggua

SEQ ID NO: 505540 - RNA, 21 nt, Artificial Sequence
  Synthetic
uuguuguuguuccacuaggua

SEQ ID NO: 505541 - RNA, 22 nt, Artificial Sequence
  Synthetic
auuguuguuguuccacuaggua

SEQ ID NO: 505542 - RNA, 23 nt, Artificial Sequence
  Synthetic
cauuguuguuguuccacuaggua

SEQ ID NO: 505543 - RNA, 24 nt, Artificial Sequence
  Synthetic
ucauuguuguuguuccacuaggua

SEQ ID NO: 505544 - RNA, 18 nt, Artificial Sequence
  Synthetic
cuucaauaaagcuaggua

SEQ ID NO: 505545 - RNA, 19 nt, Artificial Sequence
  Synthetic
acuucaauaaagcuaggua

SEQ ID NO: 505546 - RNA, 20 nt, Artificial Sequence
  Synthetic
uacuucaauaaagcuaggua

SEQ ID NO: 505547 - RNA, 21 nt, Artificial Sequence
  Synthetic
auacuucaauaaagcuaggua

SEQ ID NO: 505548 - RNA, 22 nt, Artificial Sequence
  Synthetic
uauacuucaauaaagcuaggua

SEQ ID NO: 505549 - RNA, 23 nt, Artificial Sequence
  Synthetic
uuauacuucaauaaagcuaggua

SEQ ID NO: 505550 - RNA, 24 nt, Artificial Sequence
  Synthetic
auuauacuucaauaaagcuaggua

SEQ ID NO: 505551 - RNA, 18 nt, Artificial Sequence
  Synthetic
gagcucuacuucuaggua

SEQ ID NO: 505552 - RNA, 19 nt, Artificial Sequence
  Synthetic
ggagcucuacuucuaggua

SEQ ID NO: 505553 - RNA, 20 nt, Artificial Sequence
  Synthetic
uggagcucuacuucuaggua

SEQ ID NO: 505554 - RNA, 21 nt, Artificial Sequence
  Synthetic
uuggagcucuacuucuaggua

SEQ ID NO: 505555 - RNA, 22 nt, Artificial Sequence
  Synthetic
guuggagcucuacuucuaggua

SEQ ID NO: 505556 - RNA, 23 nt, Artificial Sequence
  Synthetic
gguuggagcucuacuucuaggua

SEQ ID NO: 505557 - RNA, 24 nt, Artificial Sequence
  Synthetic
ggguuggagcucuacuucuaggua

SEQ ID NO: 505558 - RNA, 18 nt, Artificial Sequence
  Synthetic
caaucuauuguguaggua

SEQ ID NO: 505559 - RNA, 19 nt, Artificial Sequence
  Synthetic
acaaucuauuguguaggua

SEQ ID NO: 505560 - RNA, 20 nt, Artificial Sequence
  Synthetic
gacaaucuauuguguaggua

SEQ ID NO: 505561 - RNA, 21 nt, Artificial Sequence
  Synthetic
agacaaucuauuguguaggua

SEQ ID NO: 505562 - RNA, 22 nt, Artificial Sequence
  Synthetic
aagacaaucuauuguguaggua

SEQ ID NO: 505563 - RNA, 23 nt, Artificial Sequence
  Synthetic
aaagacaaucuauuguguaggua

SEQ ID NO: 505564 - RNA, 24 nt, Artificial Sequence
  Synthetic
gaaagacaaucuauuguguaggua

SEQ ID NO: 505565 - RNA, 18 nt, Artificial Sequence
  Synthetic
cucuuagcaaauuaggua

SEQ ID NO: 505566 - RNA, 19 nt, Artificial Sequence
  Synthetic
acucuuagcaaauuaggua

SEQ ID NO: 505567 - RNA, 20 nt, Artificial Sequence
  Synthetic
aacucuuagcaaauuaggua

SEQ ID NO: 505568 - RNA, 21 nt, Artificial Sequence
  Synthetic
aaacucuuagcaaauuaggua

SEQ ID NO: 505569 - RNA, 22 nt, Artificial Sequence
  Synthetic
aaaacucuuagcaaauuaggua

SEQ ID NO: 505570 - RNA, 23 nt, Artificial Sequence
  Synthetic
aaaaacucuuagcaaauuaggua

SEQ ID NO: 505571 - RNA, 24 nt, Artificial Sequence
  Synthetic
gaaaaacucuuagcaaauuaggua

SEQ ID NO: 505572 - RNA, 18 nt, Artificial Sequence
  Synthetic
auuuggucucauuaggua

SEQ ID NO: 505573 - RNA, 19 nt, Artificial Sequence
  Synthetic
gauuuggucucauuaggua

SEQ ID NO: 505574 - RNA, 20 nt, Artificial Sequence
  Synthetic
ggauuuggucucauuaggua

SEQ ID NO: 505575 - RNA, 21 nt, Artificial Sequence
  Synthetic
uggauuuggucucauuaggua

SEQ ID NO: 505576 - RNA, 22 nt, Artificial Sequence
  Synthetic
guggauuuggucucauuaggua

SEQ ID NO: 505577 - RNA, 23 nt, Artificial Sequence
  Synthetic
aguggauuuggucucauuaggua

SEQ ID NO: 505578 - RNA, 24 nt, Artificial Sequence
  Synthetic
uaguggauuuggucucauuaggua

SEQ ID NO: 505579 - RNA, 18 nt, Artificial Sequence
  Synthetic
gaauaagagacuuaggua

SEQ ID NO: 505580 - RNA, 19 nt, Artificial Sequence
  Synthetic
ggaauaagagacuuaggua

SEQ ID NO: 505581 - RNA, 20 nt, Artificial Sequence
  Synthetic
aggaauaagagacuuaggua

SEQ ID NO: 505582 - RNA, 21 nt, Artificial Sequence
  Synthetic
uaggaauaagagacuuaggua

SEQ ID NO: 505583 - RNA, 22 nt, Artificial Sequence
  Synthetic
auaggaauaagagacuuaggua

SEQ ID NO: 505584 - RNA, 23 nt, Artificial Sequence
  Synthetic
gauaggaauaagagacuuaggua

SEQ ID NO: 505585 - RNA, 24 nt, Artificial Sequence
  Synthetic
ggauaggaauaagagacuuaggua

SEQ ID NO: 505586 - RNA, 18 nt, Artificial Sequence
  Synthetic
ccauuauggaggacggua

SEQ ID NO: 505587 - RNA, 19 nt, Artificial Sequence
  Synthetic
uccauuauggaggacggua

SEQ ID NO: 505588 - RNA, 20 nt, Artificial Sequence
  Synthetic
auccauuauggaggacggua

SEQ ID NO: 505589 - RNA, 21 nt, Artificial Sequence
  Synthetic
cauccauuauggaggacggua

SEQ ID NO: 505590 - RNA, 22 nt, Artificial Sequence
  Synthetic
acauccauuauggaggacggua

SEQ ID NO: 505591 - RNA, 23 nt, Artificial Sequence
  Synthetic
uacauccauuauggaggacggua

SEQ ID NO: 505592 - RNA, 24 nt, Artificial Sequence
  Synthetic
guacauccauuauggaggacggua

SEQ ID NO: 505593 - RNA, 18 nt, Artificial Sequence
  Synthetic
ccugaaauaggggcggua

SEQ ID NO: 505594 - RNA, 19 nt, Artificial Sequence
  Synthetic
gccugaaauaggggcggua

SEQ ID NO: 505595 - RNA, 20 nt, Artificial Sequence
  Synthetic
agccugaaauaggggcggua

SEQ ID NO: 505596 - RNA, 21 nt, Artificial Sequence
  Synthetic
uagccugaaauaggggcggua

SEQ ID NO: 505597 - RNA, 22 nt, Artificial Sequence
  Synthetic
guagccugaaauaggggcggua

SEQ ID NO: 505598 - RNA, 23 nt, Artificial Sequence
  Synthetic
gguagccugaaauaggggcggua

SEQ ID NO: 505599 - RNA, 24 nt, Artificial Sequence
  Synthetic
ugguagccugaaauaggggcggua

SEQ ID NO: 505600 - RNA, 18 nt, Artificial Sequence
  Synthetic
cuagguacauaaucggua

SEQ ID NO: 505601 - RNA, 19 nt, Artificial Sequence
  Synthetic
ucuagguacauaaucggua

SEQ ID NO: 505602 - RNA, 20 nt, Artificial Sequence
  Synthetic
cucuagguacauaaucggua

SEQ ID NO: 505603 - RNA, 21 nt, Artificial Sequence
  Synthetic
ccucuagguacauaaucggua

SEQ ID NO: 505604 - RNA, 22 nt, Artificial Sequence
  Synthetic
uccucuagguacauaaucggua

SEQ ID NO: 505605 - RNA, 23 nt, Artificial Sequence
  Synthetic
uuccucuagguacauaaucggua

SEQ ID NO: 505606 - RNA, 24 nt, Artificial Sequence
  Synthetic
cuuccucuagguacauaaucggua

SEQ ID NO: 505607 - RNA, 18 nt, Artificial Sequence
  Synthetic
aggaggcagaccucggua

SEQ ID NO: 505608 - RNA, 19 nt, Artificial Sequence
  Synthetic
gaggaggcagaccucggua

SEQ ID NO: 505609 - RNA, 20 nt, Artificial Sequence
  Synthetic
agaggaggcagaccucggua

SEQ ID NO: 505610 - RNA, 21 nt, Artificial Sequence
  Synthetic
cagaggaggcagaccucggua

SEQ ID NO: 505611 - RNA, 22 nt, Artificial Sequence
  Synthetic
gcagaggaggcagaccucggua

SEQ ID NO: 505612 - RNA, 23 nt, Artificial Sequence
  Synthetic
ugcagaggaggcagaccucggua

SEQ ID NO: 505613 - RNA, 24 nt, Artificial Sequence
  Synthetic
gugcagaggaggcagaccucggua

SEQ ID NO: 505614 - RNA, 18 nt, Artificial Sequence
  Synthetic
cuacuucuuuccucggua

SEQ ID NO: 505615 - RNA, 19 nt, Artificial Sequence
  Synthetic
ucuacuucuuuccucggua

SEQ ID NO: 505616 - RNA, 20 nt, Artificial Sequence
  Synthetic
uucuacuucuuuccucggua

SEQ ID NO: 505617 - RNA, 21 nt, Artificial Sequence
  Synthetic
uuucuacuucuuuccucggua

SEQ ID NO: 505618 - RNA, 22 nt, Artificial Sequence
  Synthetic
auuucuacuucuuuccucggua

SEQ ID NO: 505619 - RNA, 23 nt, Artificial Sequence
  Synthetic
uauuucuacuucuuuccucggua

SEQ ID NO: 505620 - RNA, 24 nt, Artificial Sequence
  Synthetic
uuauuucuacuucuuuccucggua

SEQ ID NO: 505621 - RNA, 18 nt, Artificial Sequence
  Synthetic
caauggggggaaagggua

SEQ ID NO: 505622 - RNA, 19 nt, Artificial Sequence
  Synthetic
ccaauggggggaaagggua

SEQ ID NO: 505623 - RNA, 20 nt, Artificial Sequence
  Synthetic
gccaauggggggaaagggua

SEQ ID NO: 505624 - RNA, 21 nt, Artificial Sequence
  Synthetic
agccaauggggggaaagggua

SEQ ID NO: 505625 - RNA, 22 nt, Artificial Sequence
  Synthetic
cagccaauggggggaaagggua

SEQ ID NO: 505626 - RNA, 23 nt, Artificial Sequence
  Synthetic
ccagccaauggggggaaagggua

SEQ ID NO: 505627 - RNA, 24 nt, Artificial Sequence
  Synthetic
cccagccaauggggggaaagggua

SEQ ID NO: 505628 - RNA, 18 nt, Artificial Sequence
  Synthetic
cagaggcugugaagggua

SEQ ID NO: 505629 - RNA, 19 nt, Artificial Sequence
  Synthetic
ccagaggcugugaagggua

SEQ ID NO: 505630 - RNA, 20 nt, Artificial Sequence
  Synthetic
accagaggcugugaagggua

SEQ ID NO: 505631 - RNA, 21 nt, Artificial Sequence
  Synthetic
uaccagaggcugugaagggua

SEQ ID NO: 505632 - RNA, 22 nt, Artificial Sequence
  Synthetic
uuaccagaggcugugaagggua

SEQ ID NO: 505633 - RNA, 23 nt, Artificial Sequence
  Synthetic
guuaccagaggcugugaagggua

SEQ ID NO: 505634 - RNA, 24 nt, Artificial Sequence
  Synthetic
gguuaccagaggcugugaagggua

SEQ ID NO: 505635 - RNA, 18 nt, Artificial Sequence
  Synthetic
guuuuaccaaucagggua

SEQ ID NO: 505636 - RNA, 19 nt, Artificial Sequence
  Synthetic
aguuuuaccaaucagggua

SEQ ID NO: 505637 - RNA, 20 nt, Artificial Sequence
  Synthetic
gaguuuuaccaaucagggua

SEQ ID NO: 505638 - RNA, 21 nt, Artificial Sequence
  Synthetic
agaguuuuaccaaucagggua

SEQ ID NO: 505639 - RNA, 22 nt, Artificial Sequence
  Synthetic
gagaguuuuaccaaucagggua

SEQ ID NO: 505640 - RNA, 23 nt, Artificial Sequence
  Synthetic
ugagaguuuuaccaaucagggua

SEQ ID NO: 505641 - RNA, 24 nt, Artificial Sequence
  Synthetic
augagaguuuuaccaaucagggua

SEQ ID NO: 505642 - RNA, 18 nt, Artificial Sequence
  Synthetic
agauacagaaagagggua

SEQ ID NO: 505643 - RNA, 19 nt, Artificial Sequence
  Synthetic
gagauacagaaagagggua

SEQ ID NO: 505644 - RNA, 20 nt, Artificial Sequence
  Synthetic
agagauacagaaagagggua

SEQ ID NO: 505645 - RNA, 21 nt, Artificial Sequence
  Synthetic
gagagauacagaaagagggua

SEQ ID NO: 505646 - RNA, 22 nt, Artificial Sequence
  Synthetic
ugagagauacagaaagagggua

SEQ ID NO: 505647 - RNA, 23 nt, Artificial Sequence
  Synthetic
augagagauacagaaagagggua

SEQ ID NO: 505648 - RNA, 24 nt, Artificial Sequence
  Synthetic
uaugagagauacagaaagagggua

SEQ ID NO: 505649 - RNA, 18 nt, Artificial Sequence
  Synthetic
uuuuuuccauggagggua

SEQ ID NO: 505650 - RNA, 19 nt, Artificial Sequence
  Synthetic
cuuuuuuccauggagggua

SEQ ID NO: 505651 - RNA, 20 nt, Artificial Sequence
  Synthetic
ucuuuuuuccauggagggua

SEQ ID NO: 505652 - RNA, 21 nt, Artificial Sequence
  Synthetic
gucuuuuuuccauggagggua

SEQ ID NO: 505653 - RNA, 22 nt, Artificial Sequence
  Synthetic
ugucuuuuuuccauggagggua

SEQ ID NO: 505654 - RNA, 23 nt, Artificial Sequence
  Synthetic
cugucuuuuuuccauggagggua

SEQ ID NO: 505655 - RNA, 24 nt, Artificial Sequence
  Synthetic
ccugucuuuuuuccauggagggua

SEQ ID NO: 505656 - RNA, 18 nt, Artificial Sequence
  Synthetic
acugaagccaugagggua

SEQ ID NO: 505657 - RNA, 19 nt, Artificial Sequence
  Synthetic
aacugaagccaugagggua

SEQ ID NO: 505658 - RNA, 20 nt, Artificial Sequence
  Synthetic
uaacugaagccaugagggua

SEQ ID NO: 505659 - RNA, 21 nt, Artificial Sequence
  Synthetic
auaacugaagccaugagggua

SEQ ID NO: 505660 - RNA, 22 nt, Artificial Sequence
  Synthetic
aauaacugaagccaugagggua

SEQ ID NO: 505661 - RNA, 23 nt, Artificial Sequence
  Synthetic
gaauaacugaagccaugagggua

SEQ ID NO: 505662 - RNA, 24 nt, Artificial Sequence
  Synthetic
ugaauaacugaagccaugagggua

SEQ ID NO: 505663 - RNA, 18 nt, Artificial Sequence
  Synthetic
caccugagagugagggua

SEQ ID NO: 505664 - RNA, 19 nt, Artificial Sequence
  Synthetic
acaccugagagugagggua

SEQ ID NO: 505665 - RNA, 20 nt, Artificial Sequence
  Synthetic
aacaccugagagugagggua

SEQ ID NO: 505666 - RNA, 21 nt, Artificial Sequence
  Synthetic
caacaccugagagugagggua

SEQ ID NO: 505667 - RNA, 22 nt, Artificial Sequence
  Synthetic
acaacaccugagagugagggua

SEQ ID NO: 505668 - RNA, 23 nt, Artificial Sequence
  Synthetic
gacaacaccugagagugagggua

SEQ ID NO: 505669 - RNA, 24 nt, Artificial Sequence
  Synthetic
ugacaacaccugagagugagggua

SEQ ID NO: 505670 - RNA, 18 nt, Artificial Sequence
  Synthetic
uagacuaaaacuagggua

SEQ ID NO: 505671 - RNA, 19 nt, Artificial Sequence
  Synthetic
uuagacuaaaacuagggua

SEQ ID NO: 505672 - RNA, 20 nt, Artificial Sequence
  Synthetic
uuuagacuaaaacuagggua

SEQ ID NO: 505673 - RNA, 21 nt, Artificial Sequence
  Synthetic
guuuagacuaaaacuagggua

SEQ ID NO: 505674 - RNA, 22 nt, Artificial Sequence
  Synthetic
gguuuagacuaaaacuagggua

SEQ ID NO: 505675 - RNA, 23 nt, Artificial Sequence
  Synthetic
ugguuuagacuaaaacuagggua

SEQ ID NO: 505676 - RNA, 24 nt, Artificial Sequence
  Synthetic
cugguuuagacuaaaacuagggua

SEQ ID NO: 505677 - RNA, 18 nt, Artificial Sequence
  Synthetic
gauccuagggcuagggua

SEQ ID NO: 505678 - RNA, 19 nt, Artificial Sequence
  Synthetic
ugauccuagggcuagggua

SEQ ID NO: 505679 - RNA, 20 nt, Artificial Sequence
  Synthetic
augauccuagggcuagggua

SEQ ID NO: 505680 - RNA, 21 nt, Artificial Sequence
  Synthetic
uaugauccuagggcuagggua

SEQ ID NO: 505681 - RNA, 22 nt, Artificial Sequence
  Synthetic
auaugauccuagggcuagggua

SEQ ID NO: 505682 - RNA, 23 nt, Artificial Sequence
  Synthetic
uauaugauccuagggcuagggua

SEQ ID NO: 505683 - RNA, 24 nt, Artificial Sequence
  Synthetic
uuauaugauccuagggcuagggua

SEQ ID NO: 505684 - RNA, 18 nt, Artificial Sequence
  Synthetic
agggguggggguagggua

SEQ ID NO: 505685 - RNA, 19 nt, Artificial Sequence
  Synthetic
gagggguggggguagggua

SEQ ID NO: 505686 - RNA, 20 nt, Artificial Sequence
  Synthetic
ugagggguggggguagggua

SEQ ID NO: 505687 - RNA, 21 nt, Artificial Sequence
  Synthetic
augagggguggggguagggua

SEQ ID NO: 505688 - RNA, 22 nt, Artificial Sequence
  Synthetic
gaugagggguggggguagggua

SEQ ID NO: 505689 - RNA, 23 nt, Artificial Sequence
  Synthetic
ugaugagggguggggguagggua

SEQ ID NO: 505690 - RNA, 24 nt, Artificial Sequence
  Synthetic
augaugagggguggggguagggua

SEQ ID NO: 505691 - RNA, 18 nt, Artificial Sequence
  Synthetic
acugagugggcacgggua

SEQ ID NO: 505692 - RNA, 19 nt, Artificial Sequence
  Synthetic
cacugagugggcacgggua

SEQ ID NO: 505693 - RNA, 20 nt, Artificial Sequence
  Synthetic
acacugagugggcacgggua

SEQ ID NO: 505694 - RNA, 21 nt, Artificial Sequence
  Synthetic
cacacugagugggcacgggua

SEQ ID NO: 505695 - RNA, 22 nt, Artificial Sequence
  Synthetic
acacacugagugggcacgggua

SEQ ID NO: 505696 - RNA, 23 nt, Artificial Sequence
  Synthetic
aacacacugagugggcacgggua

SEQ ID NO: 505697 - RNA, 24 nt, Artificial Sequence
  Synthetic
uaacacacugagugggcacgggua

SEQ ID NO: 505698 - RNA, 18 nt, Artificial Sequence
  Synthetic
gguucacacuuacgggua

SEQ ID NO: 505699 - RNA, 19 nt, Artificial Sequence
  Synthetic
ggguucacacuuacgggua

SEQ ID NO: 505700 - RNA, 20 nt, Artificial Sequence
  Synthetic
uggguucacacuuacgggua

SEQ ID NO: 505701 - RNA, 21 nt, Artificial Sequence
  Synthetic
auggguucacacuuacgggua

SEQ ID NO: 505702 - RNA, 22 nt, Artificial Sequence
  Synthetic
gauggguucacacuuacgggua

SEQ ID NO: 505703 - RNA, 23 nt, Artificial Sequence
  Synthetic
ugauggguucacacuuacgggua

SEQ ID NO: 505704 - RNA, 24 nt, Artificial Sequence
  Synthetic
gugauggguucacacuuacgggua

SEQ ID NO: 505705 - RNA, 18 nt, Artificial Sequence
  Synthetic
aauagggguuggcgggua

SEQ ID NO: 505706 - RNA, 19 nt, Artificial Sequence
  Synthetic
uaauagggguuggcgggua

SEQ ID NO: 505707 - RNA, 20 nt, Artificial Sequence
  Synthetic
auaauagggguuggcgggua

SEQ ID NO: 505708 - RNA, 21 nt, Artificial Sequence
  Synthetic
aauaauagggguuggcgggua

SEQ ID NO: 505709 - RNA, 22 nt, Artificial Sequence
  Synthetic
aaauaauagggguuggcgggua

SEQ ID NO: 505710 - RNA, 23 nt, Artificial Sequence
  Synthetic
aaaauaauagggguuggcgggua

SEQ ID NO: 505711 - RNA, 24 nt, Artificial Sequence
  Synthetic
gaaaauaauagggguuggcgggua

SEQ ID NO: 505712 - RNA, 18 nt, Artificial Sequence
  Synthetic
aaaaaucaaaaaggggua

SEQ ID NO: 505713 - RNA, 19 nt, Artificial Sequence
  Synthetic
aaaaaaucaaaaaggggua

SEQ ID NO: 505714 - RNA, 20 nt, Artificial Sequence
  Synthetic
aaaaaaaucaaaaaggggua

SEQ ID NO: 505715 - RNA, 21 nt, Artificial Sequence
  Synthetic
gaaaaaaaucaaaaaggggua

SEQ ID NO: 505716 - RNA, 22 nt, Artificial Sequence
  Synthetic
ggaaaaaaaucaaaaaggggua

SEQ ID NO: 505717 - RNA, 23 nt, Artificial Sequence
  Synthetic
aggaaaaaaaucaaaaaggggua

SEQ ID NO: 505718 - RNA, 24 nt, Artificial Sequence
  Synthetic
aaggaaaaaaaucaaaaaggggua

SEQ ID NO: 505719 - RNA, 18 nt, Artificial Sequence
  Synthetic
agaaacugucuaggggua

SEQ ID NO: 505720 - RNA, 19 nt, Artificial Sequence
  Synthetic
gagaaacugucuaggggua

SEQ ID NO: 505721 - RNA, 20 nt, Artificial Sequence
  Synthetic
ggagaaacugucuaggggua

SEQ ID NO: 505722 - RNA, 21 nt, Artificial Sequence
  Synthetic
gggagaaacugucuaggggua

SEQ ID NO: 505723 - RNA, 22 nt, Artificial Sequence
  Synthetic
ugggagaaacugucuaggggua

SEQ ID NO: 505724 - RNA, 23 nt, Artificial Sequence
  Synthetic
uugggagaaacugucuaggggua

SEQ ID NO: 505725 - RNA, 24 nt, Artificial Sequence
  Synthetic
cuugggagaaacugucuaggggua

SEQ ID NO: 505726 - RNA, 18 nt, Artificial Sequence
  Synthetic
auagagugucuaggggua

SEQ ID NO: 505727 - RNA, 19 nt, Artificial Sequence
  Synthetic
gauagagugucuaggggua

SEQ ID NO: 505728 - RNA, 20 nt, Artificial Sequence
  Synthetic
ugauagagugucuaggggua

SEQ ID NO: 505729 - RNA, 21 nt, Artificial Sequence
  Synthetic
augauagagugucuaggggua

SEQ ID NO: 505730 - RNA, 22 nt, Artificial Sequence
  Synthetic
uaugauagagugucuaggggua

SEQ ID NO: 505731 - RNA, 23 nt, Artificial Sequence
  Synthetic
cuaugauagagugucuaggggua

SEQ ID NO: 505732 - RNA, 24 nt, Artificial Sequence
  Synthetic
acuaugauagagugucuaggggua

SEQ ID NO: 505733 - RNA, 18 nt, Artificial Sequence
  Synthetic
ccagaaacauuaggggua

SEQ ID NO: 505734 - RNA, 19 nt, Artificial Sequence
  Synthetic
uccagaaacauuaggggua

SEQ ID NO: 505735 - RNA, 20 nt, Artificial Sequence
  Synthetic
uuccagaaacauuaggggua

SEQ ID NO: 505736 - RNA, 21 nt, Artificial Sequence
  Synthetic
cuuccagaaacauuaggggua

SEQ ID NO: 505737 - RNA, 22 nt, Artificial Sequence
  Synthetic
acuuccagaaacauuaggggua

SEQ ID NO: 505738 - RNA, 23 nt, Artificial Sequence
  Synthetic
aacuuccagaaacauuaggggua

SEQ ID NO: 505739 - RNA, 24 nt, Artificial Sequence
  Synthetic
aaacuuccagaaacauuaggggua

SEQ ID NO: 505740 - RNA, 18 nt, Artificial Sequence
  Synthetic
uugaagaacuuaggggua

SEQ ID NO: 505741 - RNA, 19 nt, Artificial Sequence
  Synthetic
guugaagaacuuaggggua

SEQ ID NO: 505742 - RNA, 20 nt, Artificial Sequence
  Synthetic
uguugaagaacuuaggggua

SEQ ID NO: 505743 - RNA, 21 nt, Artificial Sequence
  Synthetic
auguugaagaacuuaggggua

SEQ ID NO: 505744 - RNA, 22 nt, Artificial Sequence
  Synthetic
cauguugaagaacuuaggggua

SEQ ID NO: 505745 - RNA, 23 nt, Artificial Sequence
  Synthetic
gcauguugaagaacuuaggggua

SEQ ID NO: 505746 - RNA, 24 nt, Artificial Sequence
  Synthetic
ugcauguugaagaacuuaggggua

SEQ ID NO: 505747 - RNA, 18 nt, Artificial Sequence
  Synthetic
ccuuuacuaccuggggua

SEQ ID NO: 505748 - RNA, 19 nt, Artificial Sequence
  Synthetic
uccuuuacuaccuggggua

SEQ ID NO: 505749 - RNA, 20 nt, Artificial Sequence
  Synthetic
guccuuuacuaccuggggua

SEQ ID NO: 505750 - RNA, 21 nt, Artificial Sequence
  Synthetic
gguccuuuacuaccuggggua

SEQ ID NO: 505751 - RNA, 22 nt, Artificial Sequence
  Synthetic
agguccuuuacuaccuggggua

SEQ ID NO: 505752 - RNA, 23 nt, Artificial Sequence
  Synthetic
cagguccuuuacuaccuggggua

SEQ ID NO: 505753 - RNA, 24 nt, Artificial Sequence
  Synthetic
acagguccuuuacuaccuggggua

SEQ ID NO: 505754 - RNA, 18 nt, Artificial Sequence
  Synthetic
auugccagugcuggggua

SEQ ID NO: 505755 - RNA, 19 nt, Artificial Sequence
  Synthetic
uauugccagugcuggggua

SEQ ID NO: 505756 - RNA, 20 nt, Artificial Sequence
  Synthetic
auauugccagugcuggggua

SEQ ID NO: 505757 - RNA, 21 nt, Artificial Sequence
  Synthetic
cauauugccagugcuggggua

SEQ ID NO: 505758 - RNA, 22 nt, Artificial Sequence
  Synthetic
ucauauugccagugcuggggua

SEQ ID NO: 505759 - RNA, 23 nt, Artificial Sequence
  Synthetic
gucauauugccagugcuggggua

SEQ ID NO: 505760 - RNA, 24 nt, Artificial Sequence
  Synthetic
ggucauauugccagugcuggggua

SEQ ID NO: 505761 - RNA, 18 nt, Artificial Sequence
  Synthetic
cuaacucuacuuggggua

SEQ ID NO: 505762 - RNA, 19 nt, Artificial Sequence
  Synthetic
ucuaacucuacuuggggua

SEQ ID NO: 505763 - RNA, 20 nt, Artificial Sequence
  Synthetic
uucuaacucuacuuggggua

SEQ ID NO: 505764 - RNA, 21 nt, Artificial Sequence
  Synthetic
auucuaacucuacuuggggua

SEQ ID NO: 505765 - RNA, 22 nt, Artificial Sequence
  Synthetic
gauucuaacucuacuuggggua

SEQ ID NO: 505766 - RNA, 23 nt, Artificial Sequence
  Synthetic
ggauucuaacucuacuuggggua

SEQ ID NO: 505767 - RNA, 24 nt, Artificial Sequence
  Synthetic
gggauucuaacucuacuuggggua

SEQ ID NO: 505768 - RNA, 18 nt, Artificial Sequence
  Synthetic
aggacuugccaaugggua

SEQ ID NO: 505769 - RNA, 19 nt, Artificial Sequence
  Synthetic
uaggacuugccaaugggua

SEQ ID NO: 505770 - RNA, 20 nt, Artificial Sequence
  Synthetic
cuaggacuugccaaugggua

SEQ ID NO: 505771 - RNA, 21 nt, Artificial Sequence
  Synthetic
gcuaggacuugccaaugggua

SEQ ID NO: 505772 - RNA, 22 nt, Artificial Sequence
  Synthetic
ggcuaggacuugccaaugggua

SEQ ID NO: 505773 - RNA, 23 nt, Artificial Sequence
  Synthetic
uggcuaggacuugccaaugggua

SEQ ID NO: 505774 - RNA, 24 nt, Artificial Sequence
  Synthetic
auggcuaggacuugccaaugggua

SEQ ID NO: 505775 - RNA, 18 nt, Artificial Sequence
  Synthetic
auauuuugugaaugggua

SEQ ID NO: 505776 - RNA, 19 nt, Artificial Sequence
  Synthetic
aauauuuugugaaugggua

SEQ ID NO: 505777 - RNA, 20 nt, Artificial Sequence
  Synthetic
uaauauuuugugaaugggua

SEQ ID NO: 505778 - RNA, 21 nt, Artificial Sequence
  Synthetic
cuaauauuuugugaaugggua

SEQ ID NO: 505779 - RNA, 22 nt, Artificial Sequence
  Synthetic
ccuaauauuuugugaaugggua

SEQ ID NO: 505780 - RNA, 23 nt, Artificial Sequence
  Synthetic
uccuaauauuuugugaaugggua

SEQ ID NO: 505781 - RNA, 24 nt, Artificial Sequence
  Synthetic
uuccuaauauuuugugaaugggua

SEQ ID NO: 505782 - RNA, 18 nt, Artificial Sequence
  Synthetic
ggggauggcuaaugggua

SEQ ID NO: 505783 - RNA, 19 nt, Artificial Sequence
  Synthetic
gggggauggcuaaugggua

SEQ ID NO: 505784 - RNA, 20 nt, Artificial Sequence
  Synthetic
ggggggauggcuaaugggua

SEQ ID NO: 505785 - RNA, 21 nt, Artificial Sequence
  Synthetic
gggggggauggcuaaugggua

SEQ ID NO: 505786 - RNA, 22 nt, Artificial Sequence
  Synthetic
agggggggauggcuaaugggua

SEQ ID NO: 505787 - RNA, 23 nt, Artificial Sequence
  Synthetic
aagggggggauggcuaaugggua

SEQ ID NO: 505788 - RNA, 24 nt, Artificial Sequence
  Synthetic
aaagggggggauggcuaaugggua

SEQ ID NO: 505789 - RNA, 18 nt, Artificial Sequence
  Synthetic
ugguguccaagaugggua

SEQ ID NO: 505790 - RNA, 19 nt, Artificial Sequence
  Synthetic
cugguguccaagaugggua

SEQ ID NO: 505791 - RNA, 20 nt, Artificial Sequence
  Synthetic
acugguguccaagaugggua

SEQ ID NO: 505792 - RNA, 21 nt, Artificial Sequence
  Synthetic
aacugguguccaagaugggua

SEQ ID NO: 505793 - RNA, 22 nt, Artificial Sequence
  Synthetic
gaacugguguccaagaugggua

SEQ ID NO: 505794 - RNA, 23 nt, Artificial Sequence
  Synthetic
ggaacugguguccaagaugggua

SEQ ID NO: 505795 - RNA, 24 nt, Artificial Sequence
  Synthetic
gggaacugguguccaagaugggua

SEQ ID NO: 505796 - RNA, 18 nt, Artificial Sequence
  Synthetic
gaaagaagacccugggua

SEQ ID NO: 505797 - RNA, 19 nt, Artificial Sequence
  Synthetic
agaaagaagacccugggua

SEQ ID NO: 505798 - RNA, 20 nt, Artificial Sequence
  Synthetic
uagaaagaagacccugggua

SEQ ID NO: 505799 - RNA, 21 nt, Artificial Sequence
  Synthetic
guagaaagaagacccugggua

SEQ ID NO: 505800 - RNA, 22 nt, Artificial Sequence
  Synthetic
gguagaaagaagacccugggua

SEQ ID NO: 505801 - RNA, 23 nt, Artificial Sequence
  Synthetic
agguagaaagaagacccugggua

SEQ ID NO: 505802 - RNA, 24 nt, Artificial Sequence
  Synthetic
gagguagaaagaagacccugggua

SEQ ID NO: 505803 - RNA, 18 nt, Artificial Sequence
  Synthetic
gcagcagacagcugggua

SEQ ID NO: 505804 - RNA, 19 nt, Artificial Sequence
  Synthetic
agcagcagacagcugggua

SEQ ID NO: 505805 - RNA, 20 nt, Artificial Sequence
  Synthetic
gagcagcagacagcugggua

SEQ ID NO: 505806 - RNA, 21 nt, Artificial Sequence
  Synthetic
ugagcagcagacagcugggua

SEQ ID NO: 505807 - RNA, 22 nt, Artificial Sequence
  Synthetic
uugagcagcagacagcugggua

SEQ ID NO: 505808 - RNA, 23 nt, Artificial Sequence
  Synthetic
uuugagcagcagacagcugggua

SEQ ID NO: 505809 - RNA, 24 nt, Artificial Sequence
  Synthetic
uuuugagcagcagacagcugggua

SEQ ID NO: 505810 - RNA, 18 nt, Artificial Sequence
  Synthetic
cucucacauaucugggua

SEQ ID NO: 505811 - RNA, 19 nt, Artificial Sequence
  Synthetic
gcucucacauaucugggua

SEQ ID NO: 505812 - RNA, 20 nt, Artificial Sequence
  Synthetic
agcucucacauaucugggua

SEQ ID NO: 505813 - RNA, 21 nt, Artificial Sequence
  Synthetic
aagcucucacauaucugggua

SEQ ID NO: 505814 - RNA, 22 nt, Artificial Sequence
  Synthetic
aaagcucucacauaucugggua

SEQ ID NO: 505815 - RNA, 23 nt, Artificial Sequence
  Synthetic
aaaagcucucacauaucugggua

SEQ ID NO: 505816 - RNA, 24 nt, Artificial Sequence
  Synthetic
gaaaagcucucacauaucugggua

SEQ ID NO: 505817 - RNA, 18 nt, Artificial Sequence
  Synthetic
aucuauuauaucugggua

SEQ ID NO: 505818 - RNA, 19 nt, Artificial Sequence
  Synthetic
uaucuauuauaucugggua

SEQ ID NO: 505819 - RNA, 20 nt, Artificial Sequence
  Synthetic
uuaucuauuauaucugggua

SEQ ID NO: 505820 - RNA, 21 nt, Artificial Sequence
  Synthetic
uuuaucuauuauaucugggua

SEQ ID NO: 505821 - RNA, 22 nt, Artificial Sequence
  Synthetic
uuuuaucuauuauaucugggua

SEQ ID NO: 505822 - RNA, 23 nt, Artificial Sequence
  Synthetic
auuuuaucuauuauaucugggua

SEQ ID NO: 505823 - RNA, 24 nt, Artificial Sequence
  Synthetic
uauuuuaucuauuauaucugggua

SEQ ID NO: 505824 - RNA, 18 nt, Artificial Sequence
  Synthetic
agaacagucuggugggua

SEQ ID NO: 505825 - RNA, 19 nt, Artificial Sequence
  Synthetic
cagaacagucuggugggua

SEQ ID NO: 505826 - RNA, 20 nt, Artificial Sequence
  Synthetic
gcagaacagucuggugggua

SEQ ID NO: 505827 - RNA, 21 nt, Artificial Sequence
  Synthetic
ggcagaacagucuggugggua

SEQ ID NO: 505828 - RNA, 22 nt, Artificial Sequence
  Synthetic
aggcagaacagucuggugggua

SEQ ID NO: 505829 - RNA, 23 nt, Artificial Sequence
  Synthetic
uaggcagaacagucuggugggua

SEQ ID NO: 505830 - RNA, 24 nt, Artificial Sequence
  Synthetic
guaggcagaacagucuggugggua

SEQ ID NO: 505831 - RNA, 18 nt, Artificial Sequence
  Synthetic
agaauggaguggugggua

SEQ ID NO: 505832 - RNA, 19 nt, Artificial Sequence
  Synthetic
cagaauggaguggugggua

SEQ ID NO: 505833 - RNA, 20 nt, Artificial Sequence
  Synthetic
ucagaauggaguggugggua

SEQ ID NO: 505834 - RNA, 21 nt, Artificial Sequence
  Synthetic
cucagaauggaguggugggua

SEQ ID NO: 505835 - RNA, 22 nt, Artificial Sequence
  Synthetic
acucagaauggaguggugggua

SEQ ID NO: 505836 - RNA, 23 nt, Artificial Sequence
  Synthetic
aacucagaauggaguggugggua

SEQ ID NO: 505837 - RNA, 24 nt, Artificial Sequence
  Synthetic
aaacucagaauggaguggugggua

SEQ ID NO: 505838 - RNA, 18 nt, Artificial Sequence
  Synthetic
acugauugguggugggua

SEQ ID NO: 505839 - RNA, 19 nt, Artificial Sequence
  Synthetic
uacugauugguggugggua

SEQ ID NO: 505840 - RNA, 20 nt, Artificial Sequence
  Synthetic
auacugauugguggugggua

SEQ ID NO: 505841 - RNA, 21 nt, Artificial Sequence
  Synthetic
aauacugauugguggugggua

SEQ ID NO: 505842 - RNA, 22 nt, Artificial Sequence
  Synthetic
caauacugauugguggugggua

SEQ ID NO: 505843 - RNA, 23 nt, Artificial Sequence
  Synthetic
acaauacugauugguggugggua

SEQ ID NO: 505844 - RNA, 24 nt, Artificial Sequence
  Synthetic
gacaauacugauugguggugggua

SEQ ID NO: 505845 - RNA, 18 nt, Artificial Sequence
  Synthetic
aaaagugagcugugggua

SEQ ID NO: 505846 - RNA, 19 nt, Artificial Sequence
  Synthetic
gaaaagugagcugugggua

SEQ ID NO: 505847 - RNA, 20 nt, Artificial Sequence
  Synthetic
ugaaaagugagcugugggua

SEQ ID NO: 505848 - RNA, 21 nt, Artificial Sequence
  Synthetic
cugaaaagugagcugugggua

SEQ ID NO: 505849 - RNA, 22 nt, Artificial Sequence
  Synthetic
acugaaaagugagcugugggua

SEQ ID NO: 505850 - RNA, 23 nt, Artificial Sequence
  Synthetic
gacugaaaagugagcugugggua

SEQ ID NO: 505851 - RNA, 24 nt, Artificial Sequence
  Synthetic
ggacugaaaagugagcugugggua

SEQ ID NO: 505852 - RNA, 18 nt, Artificial Sequence
  Synthetic
uagccauaauauugggua

SEQ ID NO: 505853 - RNA, 19 nt, Artificial Sequence
  Synthetic
uuagccauaauauugggua

SEQ ID NO: 505854 - RNA, 20 nt, Artificial Sequence
  Synthetic
guuagccauaauauugggua

SEQ ID NO: 505855 - RNA, 21 nt, Artificial Sequence
  Synthetic
uguuagccauaauauugggua

SEQ ID NO: 505856 - RNA, 22 nt, Artificial Sequence
  Synthetic
uuguuagccauaauauugggua

SEQ ID NO: 505857 - RNA, 23 nt, Artificial Sequence
  Synthetic
auuguuagccauaauauugggua

SEQ ID NO: 505858 - RNA, 24 nt, Artificial Sequence
  Synthetic
uauuguuagccauaauauugggua

SEQ ID NO: 505859 - RNA, 18 nt, Artificial Sequence
  Synthetic
acugagugcuguugggua

SEQ ID NO: 505860 - RNA, 19 nt, Artificial Sequence
  Synthetic
cacugagugcuguugggua

SEQ ID NO: 505861 - RNA, 20 nt, Artificial Sequence
  Synthetic
ucacugagugcuguugggua

SEQ ID NO: 505862 - RNA, 21 nt, Artificial Sequence
  Synthetic
uucacugagugcuguugggua

SEQ ID NO: 505863 - RNA, 22 nt, Artificial Sequence
  Synthetic
uuucacugagugcuguugggua

SEQ ID NO: 505864 - RNA, 23 nt, Artificial Sequence
  Synthetic
uuuucacugagugcuguugggua

SEQ ID NO: 505865 - RNA, 24 nt, Artificial Sequence
  Synthetic
guuuucacugagugcuguugggua

SEQ ID NO: 505866 - RNA, 18 nt, Artificial Sequence
  Synthetic
cacucaaaaaaaauggua

SEQ ID NO: 505867 - RNA, 19 nt, Artificial Sequence
  Synthetic
gcacucaaaaaaaauggua

SEQ ID NO: 505868 - RNA, 20 nt, Artificial Sequence
  Synthetic
agcacucaaaaaaaauggua

SEQ ID NO: 505869 - RNA, 21 nt, Artificial Sequence
  Synthetic
cagcacucaaaaaaaauggua

SEQ ID NO: 505870 - RNA, 22 nt, Artificial Sequence
  Synthetic
acagcacucaaaaaaaauggua

SEQ ID NO: 505871 - RNA, 23 nt, Artificial Sequence
  Synthetic
aacagcacucaaaaaaaauggua

SEQ ID NO: 505872 - RNA, 24 nt, Artificial Sequence
  Synthetic
uaacagcacucaaaaaaaauggua

SEQ ID NO: 505873 - RNA, 18 nt, Artificial Sequence
  Synthetic
aaaaacaugaaaauggua

SEQ ID NO: 505874 - RNA, 19 nt, Artificial Sequence
  Synthetic
gaaaaacaugaaaauggua

SEQ ID NO: 505875 - RNA, 20 nt, Artificial Sequence
  Synthetic
ggaaaaacaugaaaauggua

SEQ ID NO: 505876 - RNA, 21 nt, Artificial Sequence
  Synthetic
gggaaaaacaugaaaauggua

SEQ ID NO: 505877 - RNA, 22 nt, Artificial Sequence
  Synthetic
agggaaaaacaugaaaauggua

SEQ ID NO: 505878 - RNA, 23 nt, Artificial Sequence
  Synthetic
aagggaaaaacaugaaaauggua

SEQ ID NO: 505879 - RNA, 24 nt, Artificial Sequence
  Synthetic
aaagggaaaaacaugaaaauggua

SEQ ID NO: 505880 - RNA, 18 nt, Artificial Sequence
  Synthetic
gaauuuggcgaaauggua

SEQ ID NO: 505881 - RNA, 19 nt, Artificial Sequence
  Synthetic
ugaauuuggcgaaauggua

SEQ ID NO: 505882 - RNA, 20 nt, Artificial Sequence
  Synthetic
augaauuuggcgaaauggua

SEQ ID NO: 505883 - RNA, 21 nt, Artificial Sequence
  Synthetic
aaugaauuuggcgaaauggua

SEQ ID NO: 505884 - RNA, 22 nt, Artificial Sequence
  Synthetic
caaugaauuuggcgaaauggua

SEQ ID NO: 505885 - RNA, 23 nt, Artificial Sequence
  Synthetic
ucaaugaauuuggcgaaauggua

SEQ ID NO: 505886 - RNA, 24 nt, Artificial Sequence
  Synthetic
aucaaugaauuuggcgaaauggua

SEQ ID NO: 505887 - RNA, 18 nt, Artificial Sequence
  Synthetic
ucucuucaauaaauggua

SEQ ID NO: 505888 - RNA, 19 nt, Artificial Sequence
  Synthetic
gucucuucaauaaauggua

SEQ ID NO: 505889 - RNA, 20 nt, Artificial Sequence
  Synthetic
agucucuucaauaaauggua

SEQ ID NO: 505890 - RNA, 21 nt, Artificial Sequence
  Synthetic
cagucucuucaauaaauggua

SEQ ID NO: 505891 - RNA, 22 nt, Artificial Sequence
  Synthetic
acagucucuucaauaaauggua

SEQ ID NO: 505892 - RNA, 23 nt, Artificial Sequence
  Synthetic
gacagucucuucaauaaauggua

SEQ ID NO: 505893 - RNA, 24 nt, Artificial Sequence
  Synthetic
ggacagucucuucaauaaauggua

SEQ ID NO: 505894 - RNA, 18 nt, Artificial Sequence
  Synthetic
ggccauuacauaauggua

SEQ ID NO: 505895 - RNA, 19 nt, Artificial Sequence
  Synthetic
aggccauuacauaauggua

SEQ ID NO: 505896 - RNA, 20 nt, Artificial Sequence
  Synthetic
aaggccauuacauaauggua

SEQ ID NO: 505897 - RNA, 21 nt, Artificial Sequence
  Synthetic
gaaggccauuacauaauggua

SEQ ID NO: 505898 - RNA, 22 nt, Artificial Sequence
  Synthetic
agaaggccauuacauaauggua

SEQ ID NO: 505899 - RNA, 23 nt, Artificial Sequence
  Synthetic
aagaaggccauuacauaauggua

SEQ ID NO: 505900 - RNA, 24 nt, Artificial Sequence
  Synthetic
aaagaaggccauuacauaauggua

SEQ ID NO: 505901 - RNA, 18 nt, Artificial Sequence
  Synthetic
acaucccaaaagauggua

SEQ ID NO: 505902 - RNA, 19 nt, Artificial Sequence
  Synthetic
aacaucccaaaagauggua

SEQ ID NO: 505903 - RNA, 20 nt, Artificial Sequence
  Synthetic
gaacaucccaaaagauggua

SEQ ID NO: 505904 - RNA, 21 nt, Artificial Sequence
  Synthetic
ugaacaucccaaaagauggua

SEQ ID NO: 505905 - RNA, 22 nt, Artificial Sequence
  Synthetic
augaacaucccaaaagauggua

SEQ ID NO: 505906 - RNA, 23 nt, Artificial Sequence
  Synthetic
aaugaacaucccaaaagauggua

SEQ ID NO: 505907 - RNA, 24 nt, Artificial Sequence
  Synthetic
gaaugaacaucccaaaagauggua

SEQ ID NO: 505908 - RNA, 18 nt, Artificial Sequence
  Synthetic
cugacugaaaagauggua

SEQ ID NO: 505909 - RNA, 19 nt, Artificial Sequence
  Synthetic
ucugacugaaaagauggua

SEQ ID NO: 505910 - RNA, 20 nt, Artificial Sequence
  Synthetic
cucugacugaaaagauggua

SEQ ID NO: 505911 - RNA, 21 nt, Artificial Sequence
  Synthetic
ucucugacugaaaagauggua

SEQ ID NO: 505912 - RNA, 22 nt, Artificial Sequence
  Synthetic
cucucugacugaaaagauggua

SEQ ID NO: 505913 - RNA, 23 nt, Artificial Sequence
  Synthetic
acucucugacugaaaagauggua

SEQ ID NO: 505914 - RNA, 24 nt, Artificial Sequence
  Synthetic
aacucucugacugaaaagauggua

SEQ ID NO: 505915 - RNA, 18 nt, Artificial Sequence
  Synthetic
gaaccccgcucgauggua

SEQ ID NO: 505916 - RNA, 19 nt, Artificial Sequence
  Synthetic
agaaccccgcucgauggua

SEQ ID NO: 505917 - RNA, 20 nt, Artificial Sequence
  Synthetic
aagaaccccgcucgauggua

SEQ ID NO: 505918 - RNA, 21 nt, Artificial Sequence
  Synthetic
gaagaaccccgcucgauggua

SEQ ID NO: 505919 - RNA, 22 nt, Artificial Sequence
  Synthetic
agaagaaccccgcucgauggua

SEQ ID NO: 505920 - RNA, 23 nt, Artificial Sequence
  Synthetic
aagaagaaccccgcucgauggua

SEQ ID NO: 505921 - RNA, 24 nt, Artificial Sequence
  Synthetic
aaagaagaaccccgcucgauggua

SEQ ID NO: 505922 - RNA, 18 nt, Artificial Sequence
  Synthetic
accugagguauuauggua

SEQ ID NO: 505923 - RNA, 19 nt, Artificial Sequence
  Synthetic
aaccugagguauuauggua

SEQ ID NO: 505924 - RNA, 20 nt, Artificial Sequence
  Synthetic
caaccugagguauuauggua

SEQ ID NO: 505925 - RNA, 21 nt, Artificial Sequence
  Synthetic
acaaccugagguauuauggua

SEQ ID NO: 505926 - RNA, 22 nt, Artificial Sequence
  Synthetic
aacaaccugagguauuauggua

SEQ ID NO: 505927 - RNA, 23 nt, Artificial Sequence
  Synthetic
caacaaccugagguauuauggua

SEQ ID NO: 505928 - RNA, 24 nt, Artificial Sequence
  Synthetic
gcaacaaccugagguauuauggua

SEQ ID NO: 505929 - RNA, 18 nt, Artificial Sequence
  Synthetic
uuucaagaaacacuggua

SEQ ID NO: 505930 - RNA, 19 nt, Artificial Sequence
  Synthetic
uuuucaagaaacacuggua

SEQ ID NO: 505931 - RNA, 20 nt, Artificial Sequence
  Synthetic
guuuucaagaaacacuggua

SEQ ID NO: 505932 - RNA, 21 nt, Artificial Sequence
  Synthetic
uguuuucaagaaacacuggua

SEQ ID NO: 505933 - RNA, 22 nt, Artificial Sequence
  Synthetic
guguuuucaagaaacacuggua

SEQ ID NO: 505934 - RNA, 23 nt, Artificial Sequence
  Synthetic
uguguuuucaagaaacacuggua

SEQ ID NO: 505935 - RNA, 24 nt, Artificial Sequence
  Synthetic
auguguuuucaagaaacacuggua

SEQ ID NO: 505936 - RNA, 18 nt, Artificial Sequence
  Synthetic
ugagagagaagacuggua

SEQ ID NO: 505937 - RNA, 19 nt, Artificial Sequence
  Synthetic
gugagagagaagacuggua

SEQ ID NO: 505938 - RNA, 20 nt, Artificial Sequence
  Synthetic
agugagagagaagacuggua

SEQ ID NO: 505939 - RNA, 21 nt, Artificial Sequence
  Synthetic
aagugagagagaagacuggua

SEQ ID NO: 505940 - RNA, 22 nt, Artificial Sequence
  Synthetic
aaagugagagagaagacuggua

SEQ ID NO: 505941 - RNA, 23 nt, Artificial Sequence
  Synthetic
caaagugagagagaagacuggua

SEQ ID NO: 505942 - RNA, 24 nt, Artificial Sequence
  Synthetic
acaaagugagagagaagacuggua

SEQ ID NO: 505943 - RNA, 18 nt, Artificial Sequence
  Synthetic
ggaaacacuugacuggua

SEQ ID NO: 505944 - RNA, 19 nt, Artificial Sequence
  Synthetic
uggaaacacuugacuggua

SEQ ID NO: 505945 - RNA, 20 nt, Artificial Sequence
  Synthetic
cuggaaacacuugacuggua

SEQ ID NO: 505946 - RNA, 21 nt, Artificial Sequence
  Synthetic
ucuggaaacacuugacuggua

SEQ ID NO: 505947 - RNA, 22 nt, Artificial Sequence
  Synthetic
cucuggaaacacuugacuggua

SEQ ID NO: 505948 - RNA, 23 nt, Artificial Sequence
  Synthetic
ccucuggaaacacuugacuggua

SEQ ID NO: 505949 - RNA, 24 nt, Artificial Sequence
  Synthetic
uccucuggaaacacuugacuggua

SEQ ID NO: 505950 - RNA, 18 nt, Artificial Sequence
  Synthetic
uuggcaaaaugccuggua

SEQ ID NO: 505951 - RNA, 19 nt, Artificial Sequence
  Synthetic
cuuggcaaaaugccuggua

SEQ ID NO: 505952 - RNA, 20 nt, Artificial Sequence
  Synthetic
acuuggcaaaaugccuggua

SEQ ID NO: 505953 - RNA, 21 nt, Artificial Sequence
  Synthetic
uacuuggcaaaaugccuggua

SEQ ID NO: 505954 - RNA, 22 nt, Artificial Sequence
  Synthetic
auacuuggcaaaaugccuggua

SEQ ID NO: 505955 - RNA, 23 nt, Artificial Sequence
  Synthetic
aauacuuggcaaaaugccuggua

SEQ ID NO: 505956 - RNA, 24 nt, Artificial Sequence
  Synthetic
gaauacuuggcaaaaugccuggua

SEQ ID NO: 505957 - RNA, 18 nt, Artificial Sequence
  Synthetic
gccucugucugccuggua

SEQ ID NO: 505958 - RNA, 19 nt, Artificial Sequence
  Synthetic
ggccucugucugccuggua

SEQ ID NO: 505959 - RNA, 20 nt, Artificial Sequence
  Synthetic
uggccucugucugccuggua

SEQ ID NO: 505960 - RNA, 21 nt, Artificial Sequence
  Synthetic
uuggccucugucugccuggua

SEQ ID NO: 505961 - RNA, 22 nt, Artificial Sequence
  Synthetic
uuuggccucugucugccuggua

SEQ ID NO: 505962 - RNA, 23 nt, Artificial Sequence
  Synthetic
guuuggccucugucugccuggua

SEQ ID NO: 505963 - RNA, 24 nt, Artificial Sequence
  Synthetic
uguuuggccucugucugccuggua

SEQ ID NO: 505964 - RNA, 18 nt, Artificial Sequence
  Synthetic
acguuggccaggcuggua

SEQ ID NO: 505965 - RNA, 19 nt, Artificial Sequence
  Synthetic
uacguuggccaggcuggua

SEQ ID NO: 505966 - RNA, 20 nt, Artificial Sequence
  Synthetic
uuacguuggccaggcuggua

SEQ ID NO: 505967 - RNA, 21 nt, Artificial Sequence
  Synthetic
auuacguuggccaggcuggua

SEQ ID NO: 505968 - RNA, 22 nt, Artificial Sequence
  Synthetic
cauuacguuggccaggcuggua

SEQ ID NO: 505969 - RNA, 23 nt, Artificial Sequence
  Synthetic
ccauuacguuggccaggcuggua

SEQ ID NO: 505970 - RNA, 24 nt, Artificial Sequence
  Synthetic
uccauuacguuggccaggcuggua

SEQ ID NO: 505971 - RNA, 18 nt, Artificial Sequence
  Synthetic
ggguagagcccucuggua

SEQ ID NO: 505972 - RNA, 19 nt, Artificial Sequence
  Synthetic
aggguagagcccucuggua

SEQ ID NO: 505973 - RNA, 20 nt, Artificial Sequence
  Synthetic
uaggguagagcccucuggua

SEQ ID NO: 505974 - RNA, 21 nt, Artificial Sequence
  Synthetic
auaggguagagcccucuggua

SEQ ID NO: 505975 - RNA, 22 nt, Artificial Sequence
  Synthetic
gauaggguagagcccucuggua

SEQ ID NO: 505976 - RNA, 23 nt, Artificial Sequence
  Synthetic
agauaggguagagcccucuggua

SEQ ID NO: 505977 - RNA, 24 nt, Artificial Sequence
  Synthetic
gagauaggguagagcccucuggua

SEQ ID NO: 505978 - RNA, 18 nt, Artificial Sequence
  Synthetic
aauguaaauguucuggua

SEQ ID NO: 505979 - RNA, 19 nt, Artificial Sequence
  Synthetic
aaauguaaauguucuggua

SEQ ID NO: 505980 - RNA, 20 nt, Artificial Sequence
  Synthetic
aaaauguaaauguucuggua

SEQ ID NO: 505981 - RNA, 21 nt, Artificial Sequence
  Synthetic
caaaauguaaauguucuggua

SEQ ID NO: 505982 - RNA, 22 nt, Artificial Sequence
  Synthetic
ccaaaauguaaauguucuggua

SEQ ID NO: 505983 - RNA, 23 nt, Artificial Sequence
  Synthetic
cccaaaauguaaauguucuggua

SEQ ID NO: 505984 - RNA, 24 nt, Artificial Sequence
  Synthetic
gcccaaaauguaaauguucuggua

SEQ ID NO: 505985 - RNA, 18 nt, Artificial Sequence
  Synthetic
uacauuguggaaguggua

SEQ ID NO: 505986 - RNA, 19 nt, Artificial Sequence
  Synthetic
auacauuguggaaguggua

SEQ ID NO: 505987 - RNA, 20 nt, Artificial Sequence
  Synthetic
uauacauuguggaaguggua

SEQ ID NO: 505988 - RNA, 21 nt, Artificial Sequence
  Synthetic
auauacauuguggaaguggua

SEQ ID NO: 505989 - RNA, 22 nt, Artificial Sequence
  Synthetic
cauauacauuguggaaguggua

SEQ ID NO: 505990 - RNA, 23 nt, Artificial Sequence
  Synthetic
ucauauacauuguggaaguggua

SEQ ID NO: 505991 - RNA, 24 nt, Artificial Sequence
  Synthetic
aucauauacauuguggaaguggua

SEQ ID NO: 505992 - RNA, 18 nt, Artificial Sequence
  Synthetic
gaguuaagaccaguggua

SEQ ID NO: 505993 - RNA, 19 nt, Artificial Sequence
  Synthetic
ggaguuaagaccaguggua

SEQ ID NO: 505994 - RNA, 20 nt, Artificial Sequence
  Synthetic
aggaguuaagaccaguggua

SEQ ID NO: 505995 - RNA, 21 nt, Artificial Sequence
  Synthetic
caggaguuaagaccaguggua

SEQ ID NO: 505996 - RNA, 22 nt, Artificial Sequence
  Synthetic
gcaggaguuaagaccaguggua

SEQ ID NO: 505997 - RNA, 23 nt, Artificial Sequence
  Synthetic
cgcaggaguuaagaccaguggua

SEQ ID NO: 505998 - RNA, 24 nt, Artificial Sequence
  Synthetic
gcgcaggaguuaagaccaguggua

SEQ ID NO: 505999 - RNA, 18 nt, Artificial Sequence
  Synthetic
gggaauaucgcaguggua

SEQ ID NO: 506000 - RNA, 19 nt, Artificial Sequence
  Synthetic
ggggaauaucgcaguggua

SEQ ID NO: 506001 - RNA, 20 nt, Artificial Sequence
  Synthetic
aggggaauaucgcaguggua

SEQ ID NO: 506002 - RNA, 21 nt, Artificial Sequence
  Synthetic
aaggggaauaucgcaguggua

SEQ ID NO: 506003 - RNA, 22 nt, Artificial Sequence
  Synthetic
gaaggggaauaucgcaguggua

SEQ ID NO: 506004 - RNA, 23 nt, Artificial Sequence
  Synthetic
ggaaggggaauaucgcaguggua

SEQ ID NO: 506005 - RNA, 24 nt, Artificial Sequence
  Synthetic
aggaaggggaauaucgcaguggua

SEQ ID NO: 506006 - RNA, 18 nt, Artificial Sequence
  Synthetic
agcuggagaucaguggua

SEQ ID NO: 506007 - RNA, 19 nt, Artificial Sequence
  Synthetic
uagcuggagaucaguggua

SEQ ID NO: 506008 - RNA, 20 nt, Artificial Sequence
  Synthetic
guagcuggagaucaguggua

SEQ ID NO: 506009 - RNA, 21 nt, Artificial Sequence
  Synthetic
gguagcuggagaucaguggua

SEQ ID NO: 506010 - RNA, 22 nt, Artificial Sequence
  Synthetic
cgguagcuggagaucaguggua

SEQ ID NO: 506011 - RNA, 23 nt, Artificial Sequence
  Synthetic
ucgguagcuggagaucaguggua

SEQ ID NO: 506012 - RNA, 24 nt, Artificial Sequence
  Synthetic
gucgguagcuggagaucaguggua

SEQ ID NO: 506013 - RNA, 18 nt, Artificial Sequence
  Synthetic
ugcugaacaguaguggua

SEQ ID NO: 506014 - RNA, 19 nt, Artificial Sequence
  Synthetic
uugcugaacaguaguggua

SEQ ID NO: 506015 - RNA, 20 nt, Artificial Sequence
  Synthetic
uuugcugaacaguaguggua

SEQ ID NO: 506016 - RNA, 21 nt, Artificial Sequence
  Synthetic
guuugcugaacaguaguggua

SEQ ID NO: 506017 - RNA, 22 nt, Artificial Sequence
  Synthetic
gguuugcugaacaguaguggua

SEQ ID NO: 506018 - RNA, 23 nt, Artificial Sequence
  Synthetic
ugguuugcugaacaguaguggua

SEQ ID NO: 506019 - RNA, 24 nt, Artificial Sequence
  Synthetic
gugguuugcugaacaguaguggua

SEQ ID NO: 506020 - RNA, 18 nt, Artificial Sequence
  Synthetic
cugggaaggguaguggua

SEQ ID NO: 506021 - RNA, 19 nt, Artificial Sequence
  Synthetic
acugggaaggguaguggua

SEQ ID NO: 506022 - RNA, 20 nt, Artificial Sequence
  Synthetic
gacugggaaggguaguggua

SEQ ID NO: 506023 - RNA, 21 nt, Artificial Sequence
  Synthetic
agacugggaaggguaguggua

SEQ ID NO: 506024 - RNA, 22 nt, Artificial Sequence
  Synthetic
gagacugggaaggguaguggua

SEQ ID NO: 506025 - RNA, 23 nt, Artificial Sequence
  Synthetic
ggagacugggaaggguaguggua

SEQ ID NO: 506026 - RNA, 24 nt, Artificial Sequence
  Synthetic
aggagacugggaaggguaguggua

SEQ ID NO: 506027 - RNA, 18 nt, Artificial Sequence
  Synthetic
ggauuaaaaaauguggua

SEQ ID NO: 506028 - RNA, 19 nt, Artificial Sequence
  Synthetic
cggauuaaaaaauguggua

SEQ ID NO: 506029 - RNA, 20 nt, Artificial Sequence
  Synthetic
acggauuaaaaaauguggua

SEQ ID NO: 506030 - RNA, 21 nt, Artificial Sequence
  Synthetic
aacggauuaaaaaauguggua

SEQ ID NO: 506031 - RNA, 22 nt, Artificial Sequence
  Synthetic
aaacggauuaaaaaauguggua

SEQ ID NO: 506032 - RNA, 23 nt, Artificial Sequence
  Synthetic
uaaacggauuaaaaaauguggua

SEQ ID NO: 506033 - RNA, 24 nt, Artificial Sequence
  Synthetic
auaaacggauuaaaaaauguggua

SEQ ID NO: 506034 - RNA, 18 nt, Artificial Sequence
  Synthetic
ccauauuauacuguggua

SEQ ID NO: 506035 - RNA, 19 nt, Artificial Sequence
  Synthetic
uccauauuauacuguggua

SEQ ID NO: 506036 - RNA, 20 nt, Artificial Sequence
  Synthetic
uuccauauuauacuguggua

SEQ ID NO: 506037 - RNA, 21 nt, Artificial Sequence
  Synthetic
guuccauauuauacuguggua

SEQ ID NO: 506038 - RNA, 22 nt, Artificial Sequence
  Synthetic
uguuccauauuauacuguggua

SEQ ID NO: 506039 - RNA, 23 nt, Artificial Sequence
  Synthetic
guguuccauauuauacuguggua

SEQ ID NO: 506040 - RNA, 24 nt, Artificial Sequence
  Synthetic
gguguuccauauuauacuguggua

SEQ ID NO: 506041 - RNA, 18 nt, Artificial Sequence
  Synthetic
cuggaaucaucuguggua

SEQ ID NO: 506042 - RNA, 19 nt, Artificial Sequence
  Synthetic
ccuggaaucaucuguggua

SEQ ID NO: 506043 - RNA, 20 nt, Artificial Sequence
  Synthetic
cccuggaaucaucuguggua

SEQ ID NO: 506044 - RNA, 21 nt, Artificial Sequence
  Synthetic
ccccuggaaucaucuguggua

SEQ ID NO: 506045 - RNA, 22 nt, Artificial Sequence
  Synthetic
uccccuggaaucaucuguggua

SEQ ID NO: 506046 - RNA, 23 nt, Artificial Sequence
  Synthetic
uuccccuggaaucaucuguggua

SEQ ID NO: 506047 - RNA, 24 nt, Artificial Sequence
  Synthetic
auuccccuggaaucaucuguggua

SEQ ID NO: 506048 - RNA, 18 nt, Artificial Sequence
  Synthetic
uaucucauauuuguggua

SEQ ID NO: 506049 - RNA, 19 nt, Artificial Sequence
  Synthetic
uuaucucauauuuguggua

SEQ ID NO: 506050 - RNA, 20 nt, Artificial Sequence
  Synthetic
uuuaucucauauuuguggua

SEQ ID NO: 506051 - RNA, 21 nt, Artificial Sequence
  Synthetic
auuuaucucauauuuguggua

SEQ ID NO: 506052 - RNA, 22 nt, Artificial Sequence
  Synthetic
aauuuaucucauauuuguggua

SEQ ID NO: 506053 - RNA, 23 nt, Artificial Sequence
  Synthetic
aaauuuaucucauauuuguggua

SEQ ID NO: 506054 - RNA, 24 nt, Artificial Sequence
  Synthetic
uaaauuuaucucauauuuguggua

SEQ ID NO: 506055 - RNA, 18 nt, Artificial Sequence
  Synthetic
guuaguuuuuuuguggua

SEQ ID NO: 506056 - RNA, 19 nt, Artificial Sequence
  Synthetic
uguuaguuuuuuuguggua

SEQ ID NO: 506057 - RNA, 20 nt, Artificial Sequence
  Synthetic
uuguuaguuuuuuuguggua

SEQ ID NO: 506058 - RNA, 21 nt, Artificial Sequence
  Synthetic
auuguuaguuuuuuuguggua

SEQ ID NO: 506059 - RNA, 22 nt, Artificial Sequence
  Synthetic
uauuguuaguuuuuuuguggua

SEQ ID NO: 506060 - RNA, 23 nt, Artificial Sequence
  Synthetic
uuauuguuaguuuuuuuguggua

SEQ ID NO: 506061 - RNA, 24 nt, Artificial Sequence
  Synthetic
guuauuguuaguuuuuuuguggua

SEQ ID NO: 506062 - RNA, 18 nt, Artificial Sequence
  Synthetic
agaaaggcaacauuggua

SEQ ID NO: 506063 - RNA, 19 nt, Artificial Sequence
  Synthetic
aagaaaggcaacauuggua

SEQ ID NO: 506064 - RNA, 20 nt, Artificial Sequence
  Synthetic
caagaaaggcaacauuggua

SEQ ID NO: 506065 - RNA, 21 nt, Artificial Sequence
  Synthetic
acaagaaaggcaacauuggua

SEQ ID NO: 506066 - RNA, 22 nt, Artificial Sequence
  Synthetic
uacaagaaaggcaacauuggua

SEQ ID NO: 506067 - RNA, 23 nt, Artificial Sequence
  Synthetic
uuacaagaaaggcaacauuggua

SEQ ID NO: 506068 - RNA, 24 nt, Artificial Sequence
  Synthetic
guuacaagaaaggcaacauuggua

SEQ ID NO: 506069 - RNA, 18 nt, Artificial Sequence
  Synthetic
uauagugagagauuggua

SEQ ID NO: 506070 - RNA, 19 nt, Artificial Sequence
  Synthetic
guauagugagagauuggua

SEQ ID NO: 506071 - RNA, 20 nt, Artificial Sequence
  Synthetic
gguauagugagagauuggua

SEQ ID NO: 506072 - RNA, 21 nt, Artificial Sequence
  Synthetic
cgguauagugagagauuggua

SEQ ID NO: 506073 - RNA, 22 nt, Artificial Sequence
  Synthetic
gcgguauagugagagauuggua

SEQ ID NO: 506074 - RNA, 23 nt, Artificial Sequence
  Synthetic
agcgguauagugagagauuggua

SEQ ID NO: 506075 - RNA, 24 nt, Artificial Sequence
  Synthetic
uagcgguauagugagagauuggua

SEQ ID NO: 506076 - RNA, 18 nt, Artificial Sequence
  Synthetic
uccuccguuuuauuggua

SEQ ID NO: 506077 - RNA, 19 nt, Artificial Sequence
  Synthetic
auccuccguuuuauuggua

SEQ ID NO: 506078 - RNA, 20 nt, Artificial Sequence
  Synthetic
aauccuccguuuuauuggua

SEQ ID NO: 506079 - RNA, 21 nt, Artificial Sequence
  Synthetic
aaauccuccguuuuauuggua

SEQ ID NO: 506080 - RNA, 22 nt, Artificial Sequence
  Synthetic
gaaauccuccguuuuauuggua

SEQ ID NO: 506081 - RNA, 23 nt, Artificial Sequence
  Synthetic
ggaaauccuccguuuuauuggua

SEQ ID NO: 506082 - RNA, 24 nt, Artificial Sequence
  Synthetic
uggaaauccuccguuuuauuggua

SEQ ID NO: 506083 - RNA, 18 nt, Artificial Sequence
  Synthetic
cccagugaugucuuggua

SEQ ID NO: 506084 - RNA, 19 nt, Artificial Sequence
  Synthetic
acccagugaugucuuggua

SEQ ID NO: 506085 - RNA, 20 nt, Artificial Sequence
  Synthetic
gacccagugaugucuuggua

SEQ ID NO: 506086 - RNA, 21 nt, Artificial Sequence
  Synthetic
ugacccagugaugucuuggua

SEQ ID NO: 506087 - RNA, 22 nt, Artificial Sequence
  Synthetic
uugacccagugaugucuuggua

SEQ ID NO: 506088 - RNA, 23 nt, Artificial Sequence
  Synthetic
auugacccagugaugucuuggua

SEQ ID NO: 506089 - RNA, 24 nt, Artificial Sequence
  Synthetic
aauugacccagugaugucuuggua

SEQ ID NO: 506090 - RNA, 18 nt, Artificial Sequence
  Synthetic
auuacauguguguuggua

SEQ ID NO: 506091 - RNA, 19 nt, Artificial Sequence
  Synthetic
aauuacauguguguuggua

SEQ ID NO: 506092 - RNA, 20 nt, Artificial Sequence
  Synthetic
caauuacauguguguuggua

SEQ ID NO: 506093 - RNA, 21 nt, Artificial Sequence
  Synthetic
ccaauuacauguguguuggua

SEQ ID NO: 506094 - RNA, 22 nt, Artificial Sequence
  Synthetic
gccaauuacauguguguuggua

SEQ ID NO: 506095 - RNA, 23 nt, Artificial Sequence
  Synthetic
ggccaauuacauguguguuggua

SEQ ID NO: 506096 - RNA, 24 nt, Artificial Sequence
  Synthetic
uggccaauuacauguguguuggua

SEQ ID NO: 506097 - RNA, 18 nt, Artificial Sequence
  Synthetic
uuuugaggcgguuuggua

SEQ ID NO: 506098 - RNA, 19 nt, Artificial Sequence
  Synthetic
guuuugaggcgguuuggua

SEQ ID NO: 506099 - RNA, 20 nt, Artificial Sequence
  Synthetic
aguuuugaggcgguuuggua

SEQ ID NO: 506100 - RNA, 21 nt, Artificial Sequence
  Synthetic
gaguuuugaggcgguuuggua

SEQ ID NO: 506101 - RNA, 22 nt, Artificial Sequence
  Synthetic
ugaguuuugaggcgguuuggua

SEQ ID NO: 506102 - RNA, 23 nt, Artificial Sequence
  Synthetic
cugaguuuugaggcgguuuggua

SEQ ID NO: 506103 - RNA, 24 nt, Artificial Sequence
  Synthetic
acugaguuuugaggcgguuuggua

SEQ ID NO: 506104 - RNA, 18 nt, Artificial Sequence
  Synthetic
uauaaguaaauuuuggua

SEQ ID NO: 506105 - RNA, 19 nt, Artificial Sequence
  Synthetic
guauaaguaaauuuuggua

SEQ ID NO: 506106 - RNA, 20 nt, Artificial Sequence
  Synthetic
uguauaaguaaauuuuggua

SEQ ID NO: 506107 - RNA, 21 nt, Artificial Sequence
  Synthetic
auguauaaguaaauuuuggua

SEQ ID NO: 506108 - RNA, 22 nt, Artificial Sequence
  Synthetic
cauguauaaguaaauuuuggua

SEQ ID NO: 506109 - RNA, 23 nt, Artificial Sequence
  Synthetic
ucauguauaaguaaauuuuggua

SEQ ID NO: 506110 - RNA, 24 nt, Artificial Sequence
  Synthetic
aucauguauaaguaaauuuuggua

SEQ ID NO: 506111 - RNA, 18 nt, Artificial Sequence
  Synthetic
gaauaaugaauuuuggua

SEQ ID NO: 506112 - RNA, 19 nt, Artificial Sequence
  Synthetic
agaauaaugaauuuuggua

SEQ ID NO: 506113 - RNA, 20 nt, Artificial Sequence
  Synthetic
gagaauaaugaauuuuggua

SEQ ID NO: 506114 - RNA, 21 nt, Artificial Sequence
  Synthetic
ggagaauaaugaauuuuggua

SEQ ID NO: 506115 - RNA, 22 nt, Artificial Sequence
  Synthetic
aggagaauaaugaauuuuggua

SEQ ID NO: 506116 - RNA, 23 nt, Artificial Sequence
  Synthetic
caggagaauaaugaauuuuggua

SEQ ID NO: 506117 - RNA, 24 nt, Artificial Sequence
  Synthetic
ucaggagaauaaugaauuuuggua

SEQ ID NO: 506118 - RNA, 18 nt, Artificial Sequence
  Synthetic
gacauaccacuuuuggua

SEQ ID NO: 506119 - RNA, 19 nt, Artificial Sequence
  Synthetic
ggacauaccacuuuuggua

SEQ ID NO: 506120 - RNA, 20 nt, Artificial Sequence
  Synthetic
aggacauaccacuuuuggua

SEQ ID NO: 506121 - RNA, 21 nt, Artificial Sequence
  Synthetic
aaggacauaccacuuuuggua

SEQ ID NO: 506122 - RNA, 22 nt, Artificial Sequence
  Synthetic
gaaggacauaccacuuuuggua

SEQ ID NO: 506123 - RNA, 23 nt, Artificial Sequence
  Synthetic
agaaggacauaccacuuuuggua

SEQ ID NO: 506124 - RNA, 24 nt, Artificial Sequence
  Synthetic
aagaaggacauaccacuuuuggua

SEQ ID NO: 506125 - RNA, 18 nt, Artificial Sequence
  Synthetic
uuuagaagauaaaaugua

SEQ ID NO: 506126 - RNA, 19 nt, Artificial Sequence
  Synthetic
auuuagaagauaaaaugua

SEQ ID NO: 506127 - RNA, 20 nt, Artificial Sequence
  Synthetic
gauuuagaagauaaaaugua

SEQ ID NO: 506128 - RNA, 21 nt, Artificial Sequence
  Synthetic
agauuuagaagauaaaaugua

SEQ ID NO: 506129 - RNA, 22 nt, Artificial Sequence
  Synthetic
aagauuuagaagauaaaaugua

SEQ ID NO: 506130 - RNA, 23 nt, Artificial Sequence
  Synthetic
uaagauuuagaagauaaaaugua

SEQ ID NO: 506131 - RNA, 24 nt, Artificial Sequence
  Synthetic
guaagauuuagaagauaaaaugua

SEQ ID NO: 506132 - RNA, 18 nt, Artificial Sequence
  Synthetic
acuugacuuuaaaaugua

SEQ ID NO: 506133 - RNA, 19 nt, Artificial Sequence
  Synthetic
aacuugacuuuaaaaugua

SEQ ID NO: 506134 - RNA, 20 nt, Artificial Sequence
  Synthetic
aaacuugacuuuaaaaugua

SEQ ID NO: 506135 - RNA, 21 nt, Artificial Sequence
  Synthetic
gaaacuugacuuuaaaaugua

SEQ ID NO: 506136 - RNA, 22 nt, Artificial Sequence
  Synthetic
agaaacuugacuuuaaaaugua

SEQ ID NO: 506137 - RNA, 23 nt, Artificial Sequence
  Synthetic
uagaaacuugacuuuaaaaugua

SEQ ID NO: 506138 - RNA, 24 nt, Artificial Sequence
  Synthetic
guagaaacuugacuuuaaaaugua

SEQ ID NO: 506139 - RNA, 18 nt, Artificial Sequence
  Synthetic
aauucaaucacaaaugua

SEQ ID NO: 506140 - RNA, 19 nt, Artificial Sequence
  Synthetic
caauucaaucacaaaugua

SEQ ID NO: 506141 - RNA, 20 nt, Artificial Sequence
  Synthetic
ucaauucaaucacaaaugua

SEQ ID NO: 506142 - RNA, 21 nt, Artificial Sequence
  Synthetic
uucaauucaaucacaaaugua

SEQ ID NO: 506143 - RNA, 22 nt, Artificial Sequence
  Synthetic
guucaauucaaucacaaaugua

SEQ ID NO: 506144 - RNA, 23 nt, Artificial Sequence
  Synthetic
aguucaauucaaucacaaaugua

SEQ ID NO: 506145 - RNA, 24 nt, Artificial Sequence
  Synthetic
aaguucaauucaaucacaaaugua

SEQ ID NO: 506146 - RNA, 18 nt, Artificial Sequence
  Synthetic
aaggguaagacaaaugua

SEQ ID NO: 506147 - RNA, 19 nt, Artificial Sequence
  Synthetic
aaaggguaagacaaaugua

SEQ ID NO: 506148 - RNA, 20 nt, Artificial Sequence
  Synthetic
caaaggguaagacaaaugua

SEQ ID NO: 506149 - RNA, 21 nt, Artificial Sequence
  Synthetic
gcaaaggguaagacaaaugua

SEQ ID NO: 506150 - RNA, 22 nt, Artificial Sequence
  Synthetic
ggcaaaggguaagacaaaugua

SEQ ID NO: 506151 - RNA, 23 nt, Artificial Sequence
  Synthetic
uggcaaaggguaagacaaaugua

SEQ ID NO: 506152 - RNA, 24 nt, Artificial Sequence
  Synthetic
auggcaaaggguaagacaaaugua

SEQ ID NO: 506153 - RNA, 18 nt, Artificial Sequence
  Synthetic
aacacugaugcaaaugua

SEQ ID NO: 506154 - RNA, 19 nt, Artificial Sequence
  Synthetic
uaacacugaugcaaaugua

SEQ ID NO: 506155 - RNA, 20 nt, Artificial Sequence
  Synthetic
uuaacacugaugcaaaugua

SEQ ID NO: 506156 - RNA, 21 nt, Artificial Sequence
  Synthetic
auuaacacugaugcaaaugua

SEQ ID NO: 506157 - RNA, 22 nt, Artificial Sequence
  Synthetic
gauuaacacugaugcaaaugua

SEQ ID NO: 506158 - RNA, 23 nt, Artificial Sequence
  Synthetic
ugauuaacacugaugcaaaugua

SEQ ID NO: 506159 - RNA, 24 nt, Artificial Sequence
  Synthetic
gugauuaacacugaugcaaaugua

SEQ ID NO: 506160 - RNA, 18 nt, Artificial Sequence
  Synthetic
ugauuguuuucaaaugua

SEQ ID NO: 506161 - RNA, 19 nt, Artificial Sequence
  Synthetic
cugauuguuuucaaaugua

SEQ ID NO: 506162 - RNA, 20 nt, Artificial Sequence
  Synthetic
acugauuguuuucaaaugua

SEQ ID NO: 506163 - RNA, 21 nt, Artificial Sequence
  Synthetic
uacugauuguuuucaaaugua

SEQ ID NO: 506164 - RNA, 22 nt, Artificial Sequence
  Synthetic
cuacugauuguuuucaaaugua

SEQ ID NO: 506165 - RNA, 23 nt, Artificial Sequence
  Synthetic
ccuacugauuguuuucaaaugua

SEQ ID NO: 506166 - RNA, 24 nt, Artificial Sequence
  Synthetic
accuacugauuguuuucaaaugua

SEQ ID NO: 506167 - RNA, 18 nt, Artificial Sequence
  Synthetic
uuauacaucagaaaugua

SEQ ID NO: 506168 - RNA, 19 nt, Artificial Sequence
  Synthetic
uuuauacaucagaaaugua

SEQ ID NO: 506169 - RNA, 20 nt, Artificial Sequence
  Synthetic
uuuuauacaucagaaaugua

SEQ ID NO: 506170 - RNA, 21 nt, Artificial Sequence
  Synthetic
auuuuauacaucagaaaugua

SEQ ID NO: 506171 - RNA, 22 nt, Artificial Sequence
  Synthetic
uauuuuauacaucagaaaugua

SEQ ID NO: 506172 - RNA, 23 nt, Artificial Sequence
  Synthetic
cuauuuuauacaucagaaaugua

SEQ ID NO: 506173 - RNA, 24 nt, Artificial Sequence
  Synthetic
ccuauuuuauacaucagaaaugua

SEQ ID NO: 506174 - RNA, 18 nt, Artificial Sequence
  Synthetic
ccuaaauucagaaaugua

SEQ ID NO: 506175 - RNA, 19 nt, Artificial Sequence
  Synthetic
cccuaaauucagaaaugua

SEQ ID NO: 506176 - RNA, 20 nt, Artificial Sequence
  Synthetic
ucccuaaauucagaaaugua

SEQ ID NO: 506177 - RNA, 21 nt, Artificial Sequence
  Synthetic
uucccuaaauucagaaaugua

SEQ ID NO: 506178 - RNA, 22 nt, Artificial Sequence
  Synthetic
uuucccuaaauucagaaaugua

SEQ ID NO: 506179 - RNA, 23 nt, Artificial Sequence
  Synthetic
auuucccuaaauucagaaaugua

SEQ ID NO: 506180 - RNA, 24 nt, Artificial Sequence
  Synthetic
cauuucccuaaauucagaaaugua

SEQ ID NO: 506181 - RNA, 18 nt, Artificial Sequence
  Synthetic
aagguuaggugaaaugua

SEQ ID NO: 506182 - RNA, 19 nt, Artificial Sequence
  Synthetic
aaagguuaggugaaaugua

SEQ ID NO: 506183 - RNA, 20 nt, Artificial Sequence
  Synthetic
uaaagguuaggugaaaugua

SEQ ID NO: 506184 - RNA, 21 nt, Artificial Sequence
  Synthetic
uuaaagguuaggugaaaugua

SEQ ID NO: 506185 - RNA, 22 nt, Artificial Sequence
  Synthetic
guuaaagguuaggugaaaugua

SEQ ID NO: 506186 - RNA, 23 nt, Artificial Sequence
  Synthetic
uguuaaagguuaggugaaaugua

SEQ ID NO: 506187 - RNA, 24 nt, Artificial Sequence
  Synthetic
auguuaaagguuaggugaaaugua

SEQ ID NO: 506188 - RNA, 18 nt, Artificial Sequence
  Synthetic
caaauaaucauaaaugua

SEQ ID NO: 506189 - RNA, 19 nt, Artificial Sequence
  Synthetic
gcaaauaaucauaaaugua

SEQ ID NO: 506190 - RNA, 20 nt, Artificial Sequence
  Synthetic
ggcaaauaaucauaaaugua

SEQ ID NO: 506191 - RNA, 21 nt, Artificial Sequence
  Synthetic
uggcaaauaaucauaaaugua

SEQ ID NO: 506192 - RNA, 22 nt, Artificial Sequence
  Synthetic
cuggcaaauaaucauaaaugua

SEQ ID NO: 506193 - RNA, 23 nt, Artificial Sequence
  Synthetic
acuggcaaauaaucauaaaugua

SEQ ID NO: 506194 - RNA, 24 nt, Artificial Sequence
  Synthetic
aacuggcaaauaaucauaaaugua

SEQ ID NO: 506195 - RNA, 18 nt, Artificial Sequence
  Synthetic
uacuuuguacuaaaugua

SEQ ID NO: 506196 - RNA, 19 nt, Artificial Sequence
  Synthetic
uuacuuuguacuaaaugua

SEQ ID NO: 506197 - RNA, 20 nt, Artificial Sequence
  Synthetic
uuuacuuuguacuaaaugua

SEQ ID NO: 506198 - RNA, 21 nt, Artificial Sequence
  Synthetic
auuuacuuuguacuaaaugua

SEQ ID NO: 506199 - RNA, 22 nt, Artificial Sequence
  Synthetic
uauuuacuuuguacuaaaugua

SEQ ID NO: 506200 - RNA, 23 nt, Artificial Sequence
  Synthetic
auauuuacuuuguacuaaaugua

SEQ ID NO: 506201 - RNA, 24 nt, Artificial Sequence
  Synthetic
uauauuuacuuuguacuaaaugua

SEQ ID NO: 506202 - RNA, 18 nt, Artificial Sequence
  Synthetic
uuugaagaucuaaaugua

SEQ ID NO: 506203 - RNA, 19 nt, Artificial Sequence
  Synthetic
uuuugaagaucuaaaugua

SEQ ID NO: 506204 - RNA, 20 nt, Artificial Sequence
  Synthetic
auuuugaagaucuaaaugua

SEQ ID NO: 506205 - RNA, 21 nt, Artificial Sequence
  Synthetic
gauuuugaagaucuaaaugua

SEQ ID NO: 506206 - RNA, 22 nt, Artificial Sequence
  Synthetic
ugauuuugaagaucuaaaugua

SEQ ID NO: 506207 - RNA, 23 nt, Artificial Sequence
  Synthetic
uugauuuugaagaucuaaaugua

SEQ ID NO: 506208 - RNA, 24 nt, Artificial Sequence
  Synthetic
cuugauuuugaagaucuaaaugua

SEQ ID NO: 506209 - RNA, 18 nt, Artificial Sequence
  Synthetic
uugcugaaagacaaugua

SEQ ID NO: 506210 - RNA, 19 nt, Artificial Sequence
  Synthetic
uuugcugaaagacaaugua

SEQ ID NO: 506211 - RNA, 20 nt, Artificial Sequence
  Synthetic
auuugcugaaagacaaugua

SEQ ID NO: 506212 - RNA, 21 nt, Artificial Sequence
  Synthetic
uauuugcugaaagacaaugua

SEQ ID NO: 506213 - RNA, 22 nt, Artificial Sequence
  Synthetic
cuauuugcugaaagacaaugua

SEQ ID NO: 506214 - RNA, 23 nt, Artificial Sequence
  Synthetic
ucuauuugcugaaagacaaugua

SEQ ID NO: 506215 - RNA, 24 nt, Artificial Sequence
  Synthetic
uucuauuugcugaaagacaaugua

SEQ ID NO: 506216 - RNA, 18 nt, Artificial Sequence
  Synthetic
agcuaagaaaccaaugua

SEQ ID NO: 506217 - RNA, 19 nt, Artificial Sequence
  Synthetic
uagcuaagaaaccaaugua

SEQ ID NO: 506218 - RNA, 20 nt, Artificial Sequence
  Synthetic
auagcuaagaaaccaaugua

SEQ ID NO: 506219 - RNA, 21 nt, Artificial Sequence
  Synthetic
uauagcuaagaaaccaaugua

SEQ ID NO: 506220 - RNA, 22 nt, Artificial Sequence
  Synthetic
cuauagcuaagaaaccaaugua

SEQ ID NO: 506221 - RNA, 23 nt, Artificial Sequence
  Synthetic
ccuauagcuaagaaaccaaugua

SEQ ID NO: 506222 - RNA, 24 nt, Artificial Sequence
  Synthetic
uccuauagcuaagaaaccaaugua

SEQ ID NO: 506223 - RNA, 18 nt, Artificial Sequence
  Synthetic
uaauggcaauccaaugua

SEQ ID NO: 506224 - RNA, 19 nt, Artificial Sequence
  Synthetic
auaauggcaauccaaugua

SEQ ID NO: 506225 - RNA, 20 nt, Artificial Sequence
  Synthetic
aauaauggcaauccaaugua

SEQ ID NO: 506226 - RNA, 21 nt, Artificial Sequence
  Synthetic
gaauaauggcaauccaaugua

SEQ ID NO: 506227 - RNA, 22 nt, Artificial Sequence
  Synthetic
ugaauaauggcaauccaaugua

SEQ ID NO: 506228 - RNA, 23 nt, Artificial Sequence
  Synthetic
gugaauaauggcaauccaaugua

SEQ ID NO: 506229 - RNA, 24 nt, Artificial Sequence
  Synthetic
ggugaauaauggcaauccaaugua

SEQ ID NO: 506230 - RNA, 18 nt, Artificial Sequence
  Synthetic
uguucuaucagcaaugua

SEQ ID NO: 506231 - RNA, 19 nt, Artificial Sequence
  Synthetic
guguucuaucagcaaugua

SEQ ID NO: 506232 - RNA, 20 nt, Artificial Sequence
  Synthetic
uguguucuaucagcaaugua

SEQ ID NO: 506233 - RNA, 21 nt, Artificial Sequence
  Synthetic
cuguguucuaucagcaaugua

SEQ ID NO: 506234 - RNA, 22 nt, Artificial Sequence
  Synthetic
ccuguguucuaucagcaaugua

SEQ ID NO: 506235 - RNA, 23 nt, Artificial Sequence
  Synthetic
accuguguucuaucagcaaugua

SEQ ID NO: 506236 - RNA, 24 nt, Artificial Sequence
  Synthetic
uaccuguguucuaucagcaaugua

SEQ ID NO: 506237 - RNA, 18 nt, Artificial Sequence
  Synthetic
cugaguacuuggaaugua

SEQ ID NO: 506238 - RNA, 19 nt, Artificial Sequence
  Synthetic
acugaguacuuggaaugua

SEQ ID NO: 506239 - RNA, 20 nt, Artificial Sequence
  Synthetic
uacugaguacuuggaaugua

SEQ ID NO: 506240 - RNA, 21 nt, Artificial Sequence
  Synthetic
cuacugaguacuuggaaugua

SEQ ID NO: 506241 - RNA, 22 nt, Artificial Sequence
  Synthetic
gcuacugaguacuuggaaugua

SEQ ID NO: 506242 - RNA, 23 nt, Artificial Sequence
  Synthetic
ggcuacugaguacuuggaaugua

SEQ ID NO: 506243 - RNA, 24 nt, Artificial Sequence
  Synthetic
uggcuacugaguacuuggaaugua

SEQ ID NO: 506244 - RNA, 18 nt, Artificial Sequence
  Synthetic
uuaaucccuuugaaugua

SEQ ID NO: 506245 - RNA, 19 nt, Artificial Sequence
  Synthetic
uuuaaucccuuugaaugua

SEQ ID NO: 506246 - RNA, 20 nt, Artificial Sequence
  Synthetic
uuuuaaucccuuugaaugua

SEQ ID NO: 506247 - RNA, 21 nt, Artificial Sequence
  Synthetic
auuuuaaucccuuugaaugua

SEQ ID NO: 506248 - RNA, 22 nt, Artificial Sequence
  Synthetic
gauuuuaaucccuuugaaugua

SEQ ID NO: 506249 - RNA, 23 nt, Artificial Sequence
  Synthetic
ugauuuuaaucccuuugaaugua

SEQ ID NO: 506250 - RNA, 24 nt, Artificial Sequence
  Synthetic
augauuuuaaucccuuugaaugua

SEQ ID NO: 506251 - RNA, 18 nt, Artificial Sequence
  Synthetic
aaagagacaaauaaugua

SEQ ID NO: 506252 - RNA, 19 nt, Artificial Sequence
  Synthetic
aaaagagacaaauaaugua

SEQ ID NO: 506253 - RNA, 20 nt, Artificial Sequence
  Synthetic
aaaaagagacaaauaaugua

SEQ ID NO: 506254 - RNA, 21 nt, Artificial Sequence
  Synthetic
gaaaaagagacaaauaaugua

SEQ ID NO: 506255 - RNA, 22 nt, Artificial Sequence
  Synthetic
ugaaaaagagacaaauaaugua

SEQ ID NO: 506256 - RNA, 23 nt, Artificial Sequence
  Synthetic
uugaaaaagagacaaauaaugua

SEQ ID NO: 506257 - RNA, 24 nt, Artificial Sequence
  Synthetic
uuugaaaaagagacaaauaaugua

SEQ ID NO: 506258 - RNA, 18 nt, Artificial Sequence
  Synthetic
gagcugguaacuaaugua

SEQ ID NO: 506259 - RNA, 19 nt, Artificial Sequence
  Synthetic
ugagcugguaacuaaugua

SEQ ID NO: 506260 - RNA, 20 nt, Artificial Sequence
  Synthetic
uugagcugguaacuaaugua

SEQ ID NO: 506261 - RNA, 21 nt, Artificial Sequence
  Synthetic
uuugagcugguaacuaaugua

SEQ ID NO: 506262 - RNA, 22 nt, Artificial Sequence
  Synthetic
uuuugagcugguaacuaaugua

SEQ ID NO: 506263 - RNA, 23 nt, Artificial Sequence
  Synthetic
guuuugagcugguaacuaaugua

SEQ ID NO: 506264 - RNA, 24 nt, Artificial Sequence
  Synthetic
cguuuugagcugguaacuaaugua

SEQ ID NO: 506265 - RNA, 18 nt, Artificial Sequence
  Synthetic
cucaaaugagcuaaugua

SEQ ID NO: 506266 - RNA, 19 nt, Artificial Sequence
  Synthetic
acucaaaugagcuaaugua

SEQ ID NO: 506267 - RNA, 20 nt, Artificial Sequence
  Synthetic
gacucaaaugagcuaaugua

SEQ ID NO: 506268 - RNA, 21 nt, Artificial Sequence
  Synthetic
ugacucaaaugagcuaaugua

SEQ ID NO: 506269 - RNA, 22 nt, Artificial Sequence
  Synthetic
gugacucaaaugagcuaaugua

SEQ ID NO: 506270 - RNA, 23 nt, Artificial Sequence
  Synthetic
ugugacucaaaugagcuaaugua

SEQ ID NO: 506271 - RNA, 24 nt, Artificial Sequence
  Synthetic
cugugacucaaaugagcuaaugua

SEQ ID NO: 506272 - RNA, 18 nt, Artificial Sequence
  Synthetic
uuucacuucaguaaugua

SEQ ID NO: 506273 - RNA, 19 nt, Artificial Sequence
  Synthetic
cuuucacuucaguaaugua

SEQ ID NO: 506274 - RNA, 20 nt, Artificial Sequence
  Synthetic
ucuuucacuucaguaaugua

SEQ ID NO: 506275 - RNA, 21 nt, Artificial Sequence
  Synthetic
gucuuucacuucaguaaugua

SEQ ID NO: 506276 - RNA, 22 nt, Artificial Sequence
  Synthetic
ugucuuucacuucaguaaugua

SEQ ID NO: 506277 - RNA, 23 nt, Artificial Sequence
  Synthetic
cugucuuucacuucaguaaugua

SEQ ID NO: 506278 - RNA, 24 nt, Artificial Sequence
  Synthetic
gcugucuuucacuucaguaaugua

SEQ ID NO: 506279 - RNA, 18 nt, Artificial Sequence
  Synthetic
agaauuaaauguaaugua

SEQ ID NO: 506280 - RNA, 19 nt, Artificial Sequence
  Synthetic
aagaauuaaauguaaugua

SEQ ID NO: 506281 - RNA, 20 nt, Artificial Sequence
  Synthetic
aaagaauuaaauguaaugua

SEQ ID NO: 506282 - RNA, 21 nt, Artificial Sequence
  Synthetic
gaaagaauuaaauguaaugua

SEQ ID NO: 506283 - RNA, 22 nt, Artificial Sequence
  Synthetic
agaaagaauuaaauguaaugua

SEQ ID NO: 506284 - RNA, 23 nt, Artificial Sequence
  Synthetic
uagaaagaauuaaauguaaugua

SEQ ID NO: 506285 - RNA, 24 nt, Artificial Sequence
  Synthetic
cuagaaagaauuaaauguaaugua

SEQ ID NO: 506286 - RNA, 18 nt, Artificial Sequence
  Synthetic
aaaaaaucaauuaaugua

SEQ ID NO: 506287 - RNA, 19 nt, Artificial Sequence
  Synthetic
aaaaaaaucaauuaaugua

SEQ ID NO: 506288 - RNA, 20 nt, Artificial Sequence
  Synthetic
gaaaaaaaucaauuaaugua

SEQ ID NO: 506289 - RNA, 21 nt, Artificial Sequence
  Synthetic
agaaaaaaaucaauuaaugua

SEQ ID NO: 506290 - RNA, 22 nt, Artificial Sequence
  Synthetic
gagaaaaaaaucaauuaaugua

SEQ ID NO: 506291 - RNA, 23 nt, Artificial Sequence
  Synthetic
cgagaaaaaaaucaauuaaugua

SEQ ID NO: 506292 - RNA, 24 nt, Artificial Sequence
  Synthetic
ucgagaaaaaaaucaauuaaugua

SEQ ID NO: 506293 - RNA, 18 nt, Artificial Sequence
  Synthetic
auugccugaauuaaugua

SEQ ID NO: 506294 - RNA, 19 nt, Artificial Sequence
  Synthetic
gauugccugaauuaaugua

SEQ ID NO: 506295 - RNA, 20 nt, Artificial Sequence
  Synthetic
ugauugccugaauuaaugua

SEQ ID NO: 506296 - RNA, 21 nt, Artificial Sequence
  Synthetic
augauugccugaauuaaugua

SEQ ID NO: 506297 - RNA, 22 nt, Artificial Sequence
  Synthetic
gaugauugccugaauuaaugua

SEQ ID NO: 506298 - RNA, 23 nt, Artificial Sequence
  Synthetic
ugaugauugccugaauuaaugua

SEQ ID NO: 506299 - RNA, 24 nt, Artificial Sequence
  Synthetic
gugaugauugccugaauuaaugua

SEQ ID NO: 506300 - RNA, 18 nt, Artificial Sequence
  Synthetic
acucuuccuaaacaugua

SEQ ID NO: 506301 - RNA, 19 nt, Artificial Sequence
  Synthetic
uacucuuccuaaacaugua

SEQ ID NO: 506302 - RNA, 20 nt, Artificial Sequence
  Synthetic
auacucuuccuaaacaugua

SEQ ID NO: 506303 - RNA, 21 nt, Artificial Sequence
  Synthetic
aauacucuuccuaaacaugua

SEQ ID NO: 506304 - RNA, 22 nt, Artificial Sequence
  Synthetic
gaauacucuuccuaaacaugua

SEQ ID NO: 506305 - RNA, 23 nt, Artificial Sequence
  Synthetic
ugaauacucuuccuaaacaugua

SEQ ID NO: 506306 - RNA, 24 nt, Artificial Sequence
  Synthetic
cugaauacucuuccuaaacaugua

SEQ ID NO: 506307 - RNA, 18 nt, Artificial Sequence
  Synthetic
auaaaauauuaacaugua

SEQ ID NO: 506308 - RNA, 19 nt, Artificial Sequence
  Synthetic
aauaaaauauuaacaugua

SEQ ID NO: 506309 - RNA, 20 nt, Artificial Sequence
  Synthetic
caauaaaauauuaacaugua

SEQ ID NO: 506310 - RNA, 21 nt, Artificial Sequence
  Synthetic
ucaauaaaauauuaacaugua

SEQ ID NO: 506311 - RNA, 22 nt, Artificial Sequence
  Synthetic
aucaauaaaauauuaacaugua

SEQ ID NO: 506312 - RNA, 23 nt, Artificial Sequence
  Synthetic
caucaauaaaauauuaacaugua

SEQ ID NO: 506313 - RNA, 24 nt, Artificial Sequence
  Synthetic
ucaucaauaaaauauuaacaugua

SEQ ID NO: 506314 - RNA, 18 nt, Artificial Sequence
  Synthetic
guuucaaucaaccaugua

SEQ ID NO: 506315 - RNA, 19 nt, Artificial Sequence
  Synthetic
gguuucaaucaaccaugua

SEQ ID NO: 506316 - RNA, 20 nt, Artificial Sequence
  Synthetic
ugguuucaaucaaccaugua

SEQ ID NO: 506317 - RNA, 21 nt, Artificial Sequence
  Synthetic
cugguuucaaucaaccaugua

SEQ ID NO: 506318 - RNA, 22 nt, Artificial Sequence
  Synthetic
ucugguuucaaucaaccaugua

SEQ ID NO: 506319 - RNA, 23 nt, Artificial Sequence
  Synthetic
cucugguuucaaucaaccaugua

SEQ ID NO: 506320 - RNA, 24 nt, Artificial Sequence
  Synthetic
gcucugguuucaaucaaccaugua

SEQ ID NO: 506321 - RNA, 18 nt, Artificial Sequence
  Synthetic
cccugagaauaccaugua

SEQ ID NO: 506322 - RNA, 19 nt, Artificial Sequence
  Synthetic
gcccugagaauaccaugua

SEQ ID NO: 506323 - RNA, 20 nt, Artificial Sequence
  Synthetic
ugcccugagaauaccaugua

SEQ ID NO: 506324 - RNA, 21 nt, Artificial Sequence
  Synthetic
cugcccugagaauaccaugua

SEQ ID NO: 506325 - RNA, 22 nt, Artificial Sequence
  Synthetic
acugcccugagaauaccaugua

SEQ ID NO: 506326 - RNA, 23 nt, Artificial Sequence
  Synthetic
aacugcccugagaauaccaugua

SEQ ID NO: 506327 - RNA, 24 nt, Artificial Sequence
  Synthetic
aaacugcccugagaauaccaugua

SEQ ID NO: 506328 - RNA, 18 nt, Artificial Sequence
  Synthetic
ucuaauucugggcaugua

SEQ ID NO: 506329 - RNA, 19 nt, Artificial Sequence
  Synthetic
uucuaauucugggcaugua

SEQ ID NO: 506330 - RNA, 20 nt, Artificial Sequence
  Synthetic
auucuaauucugggcaugua

SEQ ID NO: 506331 - RNA, 21 nt, Artificial Sequence
  Synthetic
uauucuaauucugggcaugua

SEQ ID NO: 506332 - RNA, 22 nt, Artificial Sequence
  Synthetic
guauucuaauucugggcaugua

SEQ ID NO: 506333 - RNA, 23 nt, Artificial Sequence
  Synthetic
aguauucuaauucugggcaugua

SEQ ID NO: 506334 - RNA, 24 nt, Artificial Sequence
  Synthetic
caguauucuaauucugggcaugua

SEQ ID NO: 506335 - RNA, 18 nt, Artificial Sequence
  Synthetic
acagggaaaagucaugua

SEQ ID NO: 506336 - RNA, 19 nt, Artificial Sequence
  Synthetic
cacagggaaaagucaugua

SEQ ID NO: 506337 - RNA, 20 nt, Artificial Sequence
  Synthetic
acacagggaaaagucaugua

SEQ ID NO: 506338 - RNA, 21 nt, Artificial Sequence
  Synthetic
cacacagggaaaagucaugua

SEQ ID NO: 506339 - RNA, 22 nt, Artificial Sequence
  Synthetic
ucacacagggaaaagucaugua

SEQ ID NO: 506340 - RNA, 23 nt, Artificial Sequence
  Synthetic
cucacacagggaaaagucaugua

SEQ ID NO: 506341 - RNA, 24 nt, Artificial Sequence
  Synthetic
ccucacacagggaaaagucaugua

SEQ ID NO: 506342 - RNA, 18 nt, Artificial Sequence
  Synthetic
uuuuugucauaagaugua

SEQ ID NO: 506343 - RNA, 19 nt, Artificial Sequence
  Synthetic
cuuuuugucauaagaugua

SEQ ID NO: 506344 - RNA, 20 nt, Artificial Sequence
  Synthetic
ucuuuuugucauaagaugua

SEQ ID NO: 506345 - RNA, 21 nt, Artificial Sequence
  Synthetic
uucuuuuugucauaagaugua

SEQ ID NO: 506346 - RNA, 22 nt, Artificial Sequence
  Synthetic
cuucuuuuugucauaagaugua

SEQ ID NO: 506347 - RNA, 23 nt, Artificial Sequence
  Synthetic
ucuucuuuuugucauaagaugua

SEQ ID NO: 506348 - RNA, 24 nt, Artificial Sequence
  Synthetic
uucuucuuuuugucauaagaugua

SEQ ID NO: 506349 - RNA, 18 nt, Artificial Sequence
  Synthetic
aaucugcugccagaugua

SEQ ID NO: 506350 - RNA, 19 nt, Artificial Sequence
  Synthetic
aaaucugcugccagaugua

SEQ ID NO: 506351 - RNA, 20 nt, Artificial Sequence
  Synthetic
aaaaucugcugccagaugua

SEQ ID NO: 506352 - RNA, 21 nt, Artificial Sequence
  Synthetic
aaaaaucugcugccagaugua

SEQ ID NO: 506353 - RNA, 22 nt, Artificial Sequence
  Synthetic
gaaaaaucugcugccagaugua

SEQ ID NO: 506354 - RNA, 23 nt, Artificial Sequence
  Synthetic
cgaaaaaucugcugccagaugua

SEQ ID NO: 506355 - RNA, 24 nt, Artificial Sequence
  Synthetic
ccgaaaaaucugcugccagaugua

SEQ ID NO: 506356 - RNA, 18 nt, Artificial Sequence
  Synthetic
guugaccuaagagaugua

SEQ ID NO: 506357 - RNA, 19 nt, Artificial Sequence
  Synthetic
aguugaccuaagagaugua

SEQ ID NO: 506358 - RNA, 20 nt, Artificial Sequence
  Synthetic
gaguugaccuaagagaugua

SEQ ID NO: 506359 - RNA, 21 nt, Artificial Sequence
  Synthetic
ggaguugaccuaagagaugua

SEQ ID NO: 506360 - RNA, 22 nt, Artificial Sequence
  Synthetic
gggaguugaccuaagagaugua

SEQ ID NO: 506361 - RNA, 23 nt, Artificial Sequence
  Synthetic
agggaguugaccuaagagaugua

SEQ ID NO: 506362 - RNA, 24 nt, Artificial Sequence
  Synthetic
gagggaguugaccuaagagaugua

SEQ ID NO: 506363 - RNA, 18 nt, Artificial Sequence
  Synthetic
agagauuuaugcgaugua

SEQ ID NO: 506364 - RNA, 19 nt, Artificial Sequence
  Synthetic
aagagauuuaugcgaugua

SEQ ID NO: 506365 - RNA, 20 nt, Artificial Sequence
  Synthetic
gaagagauuuaugcgaugua

SEQ ID NO: 506366 - RNA, 21 nt, Artificial Sequence
  Synthetic
agaagagauuuaugcgaugua

SEQ ID NO: 506367 - RNA, 22 nt, Artificial Sequence
  Synthetic
aagaagagauuuaugcgaugua

SEQ ID NO: 506368 - RNA, 23 nt, Artificial Sequence
  Synthetic
aaagaagagauuuaugcgaugua

SEQ ID NO: 506369 - RNA, 24 nt, Artificial Sequence
  Synthetic
aaaagaagagauuuaugcgaugua

SEQ ID NO: 506370 - RNA, 18 nt, Artificial Sequence
  Synthetic
gagaaacaucaggaugua

SEQ ID NO: 506371 - RNA, 19 nt, Artificial Sequence
  Synthetic
agagaaacaucaggaugua

SEQ ID NO: 506372 - RNA, 20 nt, Artificial Sequence
  Synthetic
uagagaaacaucaggaugua

SEQ ID NO: 506373 - RNA, 21 nt, Artificial Sequence
  Synthetic
cuagagaaacaucaggaugua

SEQ ID NO: 506374 - RNA, 22 nt, Artificial Sequence
  Synthetic
ccuagagaaacaucaggaugua

SEQ ID NO: 506375 - RNA, 23 nt, Artificial Sequence
  Synthetic
uccuagagaaacaucaggaugua

SEQ ID NO: 506376 - RNA, 24 nt, Artificial Sequence
  Synthetic
guccuagagaaacaucaggaugua

SEQ ID NO: 506377 - RNA, 18 nt, Artificial Sequence
  Synthetic
uagauuucagaggaugua

SEQ ID NO: 506378 - RNA, 19 nt, Artificial Sequence
  Synthetic
cuagauuucagaggaugua

SEQ ID NO: 506379 - RNA, 20 nt, Artificial Sequence
  Synthetic
ccuagauuucagaggaugua

SEQ ID NO: 506380 - RNA, 21 nt, Artificial Sequence
  Synthetic
gccuagauuucagaggaugua

SEQ ID NO: 506381 - RNA, 22 nt, Artificial Sequence
  Synthetic
ugccuagauuucagaggaugua

SEQ ID NO: 506382 - RNA, 23 nt, Artificial Sequence
  Synthetic
cugccuagauuucagaggaugua

SEQ ID NO: 506383 - RNA, 24 nt, Artificial Sequence
  Synthetic
ucugccuagauuucagaggaugua

SEQ ID NO: 506384 - RNA, 18 nt, Artificial Sequence
  Synthetic
uucccucuaagggaugua

SEQ ID NO: 506385 - RNA, 19 nt, Artificial Sequence
  Synthetic
auucccucuaagggaugua

SEQ ID NO: 506386 - RNA, 20 nt, Artificial Sequence
  Synthetic
cauucccucuaagggaugua

SEQ ID NO: 506387 - RNA, 21 nt, Artificial Sequence
  Synthetic
gcauucccucuaagggaugua

SEQ ID NO: 506388 - RNA, 22 nt, Artificial Sequence
  Synthetic
ugcauucccucuaagggaugua

SEQ ID NO: 506389 - RNA, 23 nt, Artificial Sequence
  Synthetic
uugcauucccucuaagggaugua

SEQ ID NO: 506390 - RNA, 24 nt, Artificial Sequence
  Synthetic
cuugcauucccucuaagggaugua

SEQ ID NO: 506391 - RNA, 18 nt, Artificial Sequence
  Synthetic
aauaaacggauggaugua

SEQ ID NO: 506392 - RNA, 19 nt, Artificial Sequence
  Synthetic
gaauaaacggauggaugua

SEQ ID NO: 506393 - RNA, 20 nt, Artificial Sequence
  Synthetic
ugaauaaacggauggaugua

SEQ ID NO: 506394 - RNA, 21 nt, Artificial Sequence
  Synthetic
augaauaaacggauggaugua

SEQ ID NO: 506395 - RNA, 22 nt, Artificial Sequence
  Synthetic
aaugaauaaacggauggaugua

SEQ ID NO: 506396 - RNA, 23 nt, Artificial Sequence
  Synthetic
caaugaauaaacggauggaugua

SEQ ID NO: 506397 - RNA, 24 nt, Artificial Sequence
  Synthetic
acaaugaauaaacggauggaugua

SEQ ID NO: 506398 - RNA, 18 nt, Artificial Sequence
  Synthetic
gacaagagauuggaugua

SEQ ID NO: 506399 - RNA, 19 nt, Artificial Sequence
  Synthetic
ugacaagagauuggaugua

SEQ ID NO: 506400 - RNA, 20 nt, Artificial Sequence
  Synthetic
cugacaagagauuggaugua

SEQ ID NO: 506401 - RNA, 21 nt, Artificial Sequence
  Synthetic
gcugacaagagauuggaugua

SEQ ID NO: 506402 - RNA, 22 nt, Artificial Sequence
  Synthetic
ggcugacaagagauuggaugua

SEQ ID NO: 506403 - RNA, 23 nt, Artificial Sequence
  Synthetic
uggcugacaagagauuggaugua

SEQ ID NO: 506404 - RNA, 24 nt, Artificial Sequence
  Synthetic
auggcugacaagagauuggaugua

SEQ ID NO: 506405 - RNA, 18 nt, Artificial Sequence
  Synthetic
auuccauuuuuggaugua

SEQ ID NO: 506406 - RNA, 19 nt, Artificial Sequence
  Synthetic
uauuccauuuuuggaugua

SEQ ID NO: 506407 - RNA, 20 nt, Artificial Sequence
  Synthetic
auauuccauuuuuggaugua

SEQ ID NO: 506408 - RNA, 21 nt, Artificial Sequence
  Synthetic
aauauuccauuuuuggaugua

SEQ ID NO: 506409 - RNA, 22 nt, Artificial Sequence
  Synthetic
uaauauuccauuuuuggaugua

SEQ ID NO: 506410 - RNA, 23 nt, Artificial Sequence
  Synthetic
auaauauuccauuuuuggaugua

SEQ ID NO: 506411 - RNA, 24 nt, Artificial Sequence
  Synthetic
aauaauauuccauuuuuggaugua

SEQ ID NO: 506412 - RNA, 18 nt, Artificial Sequence
  Synthetic
uuggccaacacugaugua

SEQ ID NO: 506413 - RNA, 19 nt, Artificial Sequence
  Synthetic
guuggccaacacugaugua

SEQ ID NO: 506414 - RNA, 20 nt, Artificial Sequence
  Synthetic
aguuggccaacacugaugua

SEQ ID NO: 506415 - RNA, 21 nt, Artificial Sequence
  Synthetic
aaguuggccaacacugaugua

SEQ ID NO: 506416 - RNA, 22 nt, Artificial Sequence
  Synthetic
aaaguuggccaacacugaugua

SEQ ID NO: 506417 - RNA, 23 nt, Artificial Sequence
  Synthetic
aaaaguuggccaacacugaugua

SEQ ID NO: 506418 - RNA, 24 nt, Artificial Sequence
  Synthetic
aaaaaguuggccaacacugaugua

SEQ ID NO: 506419 - RNA, 18 nt, Artificial Sequence
  Synthetic
acuagauagaaauaugua

SEQ ID NO: 506420 - RNA, 19 nt, Artificial Sequence
  Synthetic
aacuagauagaaauaugua

SEQ ID NO: 506421 - RNA, 20 nt, Artificial Sequence
  Synthetic
uaacuagauagaaauaugua

SEQ ID NO: 506422 - RNA, 21 nt, Artificial Sequence
  Synthetic
uuaacuagauagaaauaugua

SEQ ID NO: 506423 - RNA, 22 nt, Artificial Sequence
  Synthetic
uuuaacuagauagaaauaugua

SEQ ID NO: 506424 - RNA, 23 nt, Artificial Sequence
  Synthetic
auuuaacuagauagaaauaugua

SEQ ID NO: 506425 - RNA, 24 nt, Artificial Sequence
  Synthetic
uauuuaacuagauagaaauaugua

SEQ ID NO: 506426 - RNA, 18 nt, Artificial Sequence
  Synthetic
agaacuaaugaauaugua

SEQ ID NO: 506427 - RNA, 19 nt, Artificial Sequence
  Synthetic
cagaacuaaugaauaugua

SEQ ID NO: 506428 - RNA, 20 nt, Artificial Sequence
  Synthetic
ccagaacuaaugaauaugua

SEQ ID NO: 506429 - RNA, 21 nt, Artificial Sequence
  Synthetic
uccagaacuaaugaauaugua

SEQ ID NO: 506430 - RNA, 22 nt, Artificial Sequence
  Synthetic
cuccagaacuaaugaauaugua

SEQ ID NO: 506431 - RNA, 23 nt, Artificial Sequence
  Synthetic
ccuccagaacuaaugaauaugua

SEQ ID NO: 506432 - RNA, 24 nt, Artificial Sequence
  Synthetic
cccuccagaacuaaugaauaugua

SEQ ID NO: 506433 - RNA, 18 nt, Artificial Sequence
  Synthetic
aaguaaaugacauaugua

SEQ ID NO: 506434 - RNA, 19 nt, Artificial Sequence
  Synthetic
gaaguaaaugacauaugua

SEQ ID NO: 506435 - RNA, 20 nt, Artificial Sequence
  Synthetic
ggaaguaaaugacauaugua

SEQ ID NO: 506436 - RNA, 21 nt, Artificial Sequence
  Synthetic
gggaaguaaaugacauaugua

SEQ ID NO: 506437 - RNA, 22 nt, Artificial Sequence
  Synthetic
ugggaaguaaaugacauaugua

SEQ ID NO: 506438 - RNA, 23 nt, Artificial Sequence
  Synthetic
gugggaaguaaaugacauaugua

SEQ ID NO: 506439 - RNA, 24 nt, Artificial Sequence
  Synthetic
ugugggaaguaaaugacauaugua

SEQ ID NO: 506440 - RNA, 18 nt, Artificial Sequence
  Synthetic
acuggcuagccauaugua

SEQ ID NO: 506441 - RNA, 19 nt, Artificial Sequence
  Synthetic
aacuggcuagccauaugua

SEQ ID NO: 506442 - RNA, 20 nt, Artificial Sequence
  Synthetic
aaacuggcuagccauaugua

SEQ ID NO: 506443 - RNA, 21 nt, Artificial Sequence
  Synthetic
aaaacuggcuagccauaugua

SEQ ID NO: 506444 - RNA, 22 nt, Artificial Sequence
  Synthetic
gaaaacuggcuagccauaugua

SEQ ID NO: 506445 - RNA, 23 nt, Artificial Sequence
  Synthetic
ggaaaacuggcuagccauaugua

SEQ ID NO: 506446 - RNA, 24 nt, Artificial Sequence
  Synthetic
gggaaaacuggcuagccauaugua

SEQ ID NO: 506447 - RNA, 18 nt, Artificial Sequence
  Synthetic
uugguaaaagcauaugua

SEQ ID NO: 506448 - RNA, 19 nt, Artificial Sequence
  Synthetic
uuugguaaaagcauaugua

SEQ ID NO: 506449 - RNA, 20 nt, Artificial Sequence
  Synthetic
auuugguaaaagcauaugua

SEQ ID NO: 506450 - RNA, 21 nt, Artificial Sequence
  Synthetic
aauuugguaaaagcauaugua

SEQ ID NO: 506451 - RNA, 22 nt, Artificial Sequence
  Synthetic
uaauuugguaaaagcauaugua

SEQ ID NO: 506452 - RNA, 23 nt, Artificial Sequence
  Synthetic
uuaauuugguaaaagcauaugua

SEQ ID NO: 506453 - RNA, 24 nt, Artificial Sequence
  Synthetic
auuaauuugguaaaagcauaugua

SEQ ID NO: 506454 - RNA, 18 nt, Artificial Sequence
  Synthetic
cagaaauuugcauaugua

SEQ ID NO: 506455 - RNA, 19 nt, Artificial Sequence
  Synthetic
acagaaauuugcauaugua

SEQ ID NO: 506456 - RNA, 20 nt, Artificial Sequence
  Synthetic
uacagaaauuugcauaugua

SEQ ID NO: 506457 - RNA, 21 nt, Artificial Sequence
  Synthetic
cuacagaaauuugcauaugua

SEQ ID NO: 506458 - RNA, 22 nt, Artificial Sequence
  Synthetic
acuacagaaauuugcauaugua

SEQ ID NO: 506459 - RNA, 23 nt, Artificial Sequence
  Synthetic
gacuacagaaauuugcauaugua

SEQ ID NO: 506460 - RNA, 24 nt, Artificial Sequence
  Synthetic
ugacuacagaaauuugcauaugua

SEQ ID NO: 506461 - RNA, 18 nt, Artificial Sequence
  Synthetic
auggaggcaggcuaugua

SEQ ID NO: 506462 - RNA, 19 nt, Artificial Sequence
  Synthetic
cauggaggcaggcuaugua

SEQ ID NO: 506463 - RNA, 20 nt, Artificial Sequence
  Synthetic
ccauggaggcaggcuaugua

SEQ ID NO: 506464 - RNA, 21 nt, Artificial Sequence
  Synthetic
gccauggaggcaggcuaugua

SEQ ID NO: 506465 - RNA, 22 nt, Artificial Sequence
  Synthetic
ugccauggaggcaggcuaugua

SEQ ID NO: 506466 - RNA, 23 nt, Artificial Sequence
  Synthetic
augccauggaggcaggcuaugua

SEQ ID NO: 506467 - RNA, 24 nt, Artificial Sequence
  Synthetic
aaugccauggaggcaggcuaugua

SEQ ID NO: 506468 - RNA, 18 nt, Artificial Sequence
  Synthetic
uucgaagacugcuaugua

SEQ ID NO: 506469 - RNA, 19 nt, Artificial Sequence
  Synthetic
cuucgaagacugcuaugua

SEQ ID NO: 506470 - RNA, 20 nt, Artificial Sequence
  Synthetic
gcuucgaagacugcuaugua

SEQ ID NO: 506471 - RNA, 21 nt, Artificial Sequence
  Synthetic
ggcuucgaagacugcuaugua

SEQ ID NO: 506472 - RNA, 22 nt, Artificial Sequence
  Synthetic
uggcuucgaagacugcuaugua

SEQ ID NO: 506473 - RNA, 23 nt, Artificial Sequence
  Synthetic
cuggcuucgaagacugcuaugua

SEQ ID NO: 506474 - RNA, 24 nt, Artificial Sequence
  Synthetic
ucuggcuucgaagacugcuaugua

SEQ ID NO: 506475 - RNA, 18 nt, Artificial Sequence
  Synthetic
uguuucaagugcuaugua

SEQ ID NO: 506476 - RNA, 19 nt, Artificial Sequence
  Synthetic
cuguuucaagugcuaugua

SEQ ID NO: 506477 - RNA, 20 nt, Artificial Sequence
  Synthetic
ccuguuucaagugcuaugua

SEQ ID NO: 506478 - RNA, 21 nt, Artificial Sequence
  Synthetic
accuguuucaagugcuaugua

SEQ ID NO: 506479 - RNA, 22 nt, Artificial Sequence
  Synthetic
uaccuguuucaagugcuaugua

SEQ ID NO: 506480 - RNA, 23 nt, Artificial Sequence
  Synthetic
guaccuguuucaagugcuaugua

SEQ ID NO: 506481 - RNA, 24 nt, Artificial Sequence
  Synthetic
aguaccuguuucaagugcuaugua

SEQ ID NO: 506482 - RNA, 18 nt, Artificial Sequence
  Synthetic
agugcaguaugguaugua

SEQ ID NO: 506483 - RNA, 19 nt, Artificial Sequence
  Synthetic
uagugcaguaugguaugua

SEQ ID NO: 506484 - RNA, 20 nt, Artificial Sequence
  Synthetic
auagugcaguaugguaugua

SEQ ID NO: 506485 - RNA, 21 nt, Artificial Sequence
  Synthetic
cauagugcaguaugguaugua

SEQ ID NO: 506486 - RNA, 22 nt, Artificial Sequence
  Synthetic
acauagugcaguaugguaugua

SEQ ID NO: 506487 - RNA, 23 nt, Artificial Sequence
  Synthetic
gacauagugcaguaugguaugua

SEQ ID NO: 506488 - RNA, 24 nt, Artificial Sequence
  Synthetic
ggacauagugcaguaugguaugua

SEQ ID NO: 506489 - RNA, 18 nt, Artificial Sequence
  Synthetic
agaaauauaauuuaugua

SEQ ID NO: 506490 - RNA, 19 nt, Artificial Sequence
  Synthetic
uagaaauauaauuuaugua

SEQ ID NO: 506491 - RNA, 20 nt, Artificial Sequence
  Synthetic
auagaaauauaauuuaugua

SEQ ID NO: 506492 - RNA, 21 nt, Artificial Sequence
  Synthetic
cauagaaauauaauuuaugua

SEQ ID NO: 506493 - RNA, 22 nt, Artificial Sequence
  Synthetic
acauagaaauauaauuuaugua

SEQ ID NO: 506494 - RNA, 23 nt, Artificial Sequence
  Synthetic
uacauagaaauauaauuuaugua

SEQ ID NO: 506495 - RNA, 24 nt, Artificial Sequence
  Synthetic
uuacauagaaauauaauuuaugua

SEQ ID NO: 506496 - RNA, 18 nt, Artificial Sequence
  Synthetic
auuugguuaauuuaugua

SEQ ID NO: 506497 - RNA, 19 nt, Artificial Sequence
  Synthetic
uauuugguuaauuuaugua

SEQ ID NO: 506498 - RNA, 20 nt, Artificial Sequence
  Synthetic
auauuugguuaauuuaugua

SEQ ID NO: 506499 - RNA, 21 nt, Artificial Sequence
  Synthetic
aauauuugguuaauuuaugua

SEQ ID NO: 506500 - RNA, 22 nt, Artificial Sequence
  Synthetic
aaauauuugguuaauuuaugua

SEQ ID NO: 506501 - RNA, 23 nt, Artificial Sequence
  Synthetic
caaauauuugguuaauuuaugua

SEQ ID NO: 506502 - RNA, 24 nt, Artificial Sequence
  Synthetic
acaaauauuugguuaauuuaugua

SEQ ID NO: 506503 - RNA, 18 nt, Artificial Sequence
  Synthetic
ugcggcuuuguuuaugua

SEQ ID NO: 506504 - RNA, 19 nt, Artificial Sequence
  Synthetic
cugcggcuuuguuuaugua

SEQ ID NO: 506505 - RNA, 20 nt, Artificial Sequence
  Synthetic
gcugcggcuuuguuuaugua

SEQ ID NO: 506506 - RNA, 21 nt, Artificial Sequence
  Synthetic
agcugcggcuuuguuuaugua

SEQ ID NO: 506507 - RNA, 22 nt, Artificial Sequence
  Synthetic
aagcugcggcuuuguuuaugua

SEQ ID NO: 506508 - RNA, 23 nt, Artificial Sequence
  Synthetic
caagcugcggcuuuguuuaugua

SEQ ID NO: 506509 - RNA, 24 nt, Artificial Sequence
  Synthetic
ucaagcugcggcuuuguuuaugua

SEQ ID NO: 506510 - RNA, 18 nt, Artificial Sequence
  Synthetic
acggaaccauuuuaugua

SEQ ID NO: 506511 - RNA, 19 nt, Artificial Sequence
  Synthetic
uacggaaccauuuuaugua

SEQ ID NO: 506512 - RNA, 20 nt, Artificial Sequence
  Synthetic
uuacggaaccauuuuaugua

SEQ ID NO: 506513 - RNA, 21 nt, Artificial Sequence
  Synthetic
uuuacggaaccauuuuaugua

SEQ ID NO: 506514 - RNA, 22 nt, Artificial Sequence
  Synthetic
guuuacggaaccauuuuaugua

SEQ ID NO: 506515 - RNA, 23 nt, Artificial Sequence
  Synthetic
aguuuacggaaccauuuuaugua

SEQ ID NO: 506516 - RNA, 24 nt, Artificial Sequence
  Synthetic
gaguuuacggaaccauuuuaugua

SEQ ID NO: 506517 - RNA, 18 nt, Artificial Sequence
  Synthetic
auauaaaagaaaacugua

SEQ ID NO: 506518 - RNA, 19 nt, Artificial Sequence
  Synthetic
aauauaaaagaaaacugua

SEQ ID NO: 506519 - RNA, 20 nt, Artificial Sequence
  Synthetic
aaauauaaaagaaaacugua

SEQ ID NO: 506520 - RNA, 21 nt, Artificial Sequence
  Synthetic
aaaauauaaaagaaaacugua

SEQ ID NO: 506521 - RNA, 22 nt, Artificial Sequence
  Synthetic
uaaaauauaaaagaaaacugua

SEQ ID NO: 506522 - RNA, 23 nt, Artificial Sequence
  Synthetic
auaaaauauaaaagaaaacugua

SEQ ID NO: 506523 - RNA, 24 nt, Artificial Sequence
  Synthetic
uauaaaauauaaaagaaaacugua

SEQ ID NO: 506524 - RNA, 18 nt, Artificial Sequence
  Synthetic
accacccucagaacugua

SEQ ID NO: 506525 - RNA, 19 nt, Artificial Sequence
  Synthetic
uaccacccucagaacugua

SEQ ID NO: 506526 - RNA, 20 nt, Artificial Sequence
  Synthetic
auaccacccucagaacugua

SEQ ID NO: 506527 - RNA, 21 nt, Artificial Sequence
  Synthetic
uauaccacccucagaacugua

SEQ ID NO: 506528 - RNA, 22 nt, Artificial Sequence
  Synthetic
guauaccacccucagaacugua

SEQ ID NO: 506529 - RNA, 23 nt, Artificial Sequence
  Synthetic
uguauaccacccucagaacugua

SEQ ID NO: 506530 - RNA, 24 nt, Artificial Sequence
  Synthetic
uuguauaccacccucagaacugua

SEQ ID NO: 506531 - RNA, 18 nt, Artificial Sequence
  Synthetic
auauuuauuauaacugua

SEQ ID NO: 506532 - RNA, 19 nt, Artificial Sequence
  Synthetic
uauauuuauuauaacugua

SEQ ID NO: 506533 - RNA, 20 nt, Artificial Sequence
  Synthetic
auauauuuauuauaacugua

SEQ ID NO: 506534 - RNA, 21 nt, Artificial Sequence
  Synthetic
gauauauuuauuauaacugua

SEQ ID NO: 506535 - RNA, 22 nt, Artificial Sequence
  Synthetic
ugauauauuuauuauaacugua

SEQ ID NO: 506536 - RNA, 23 nt, Artificial Sequence
  Synthetic
uugauauauuuauuauaacugua

SEQ ID NO: 506537 - RNA, 24 nt, Artificial Sequence
  Synthetic
uuugauauauuuauuauaacugua

SEQ ID NO: 506538 - RNA, 18 nt, Artificial Sequence
  Synthetic
auccuaggaaacacugua

SEQ ID NO: 506539 - RNA, 19 nt, Artificial Sequence
  Synthetic
gauccuaggaaacacugua

SEQ ID NO: 506540 - RNA, 20 nt, Artificial Sequence
  Synthetic
ugauccuaggaaacacugua

SEQ ID NO: 506541 - RNA, 21 nt, Artificial Sequence
  Synthetic
gugauccuaggaaacacugua

SEQ ID NO: 506542 - RNA, 22 nt, Artificial Sequence
  Synthetic
ggugauccuaggaaacacugua

SEQ ID NO: 506543 - RNA, 23 nt, Artificial Sequence
  Synthetic
aggugauccuaggaaacacugua

SEQ ID NO: 506544 - RNA, 24 nt, Artificial Sequence
  Synthetic
gaggugauccuaggaaacacugua

SEQ ID NO: 506545 - RNA, 18 nt, Artificial Sequence
  Synthetic
cuaauaauaaacacugua

SEQ ID NO: 506546 - RNA, 19 nt, Artificial Sequence
  Synthetic
ccuaauaauaaacacugua

SEQ ID NO: 506547 - RNA, 20 nt, Artificial Sequence
  Synthetic
accuaauaauaaacacugua

SEQ ID NO: 506548 - RNA, 21 nt, Artificial Sequence
  Synthetic
uaccuaauaauaaacacugua

SEQ ID NO: 506549 - RNA, 22 nt, Artificial Sequence
  Synthetic
cuaccuaauaauaaacacugua

SEQ ID NO: 506550 - RNA, 23 nt, Artificial Sequence
  Synthetic
ucuaccuaauaauaaacacugua

SEQ ID NO: 506551 - RNA, 24 nt, Artificial Sequence
  Synthetic
uucuaccuaauaauaaacacugua

SEQ ID NO: 506552 - RNA, 18 nt, Artificial Sequence
  Synthetic
cauauugcacacacugua

SEQ ID NO: 506553 - RNA, 19 nt, Artificial Sequence
  Synthetic
acauauugcacacacugua

SEQ ID NO: 506554 - RNA, 20 nt, Artificial Sequence
  Synthetic
aacauauugcacacacugua

SEQ ID NO: 506555 - RNA, 21 nt, Artificial Sequence
  Synthetic
uaacauauugcacacacugua

SEQ ID NO: 506556 - RNA, 22 nt, Artificial Sequence
  Synthetic
uuaacauauugcacacacugua

SEQ ID NO: 506557 - RNA, 23 nt, Artificial Sequence
  Synthetic
uuuaacauauugcacacacugua

SEQ ID NO: 506558 - RNA, 24 nt, Artificial Sequence
  Synthetic
auuuaacauauugcacacacugua

SEQ ID NO: 506559 - RNA, 18 nt, Artificial Sequence
  Synthetic
aauuauuuacacacugua

SEQ ID NO: 506560 - RNA, 19 nt, Artificial Sequence
  Synthetic
aaauuauuuacacacugua

SEQ ID NO: 506561 - RNA, 20 nt, Artificial Sequence
  Synthetic
uaaauuauuuacacacugua

SEQ ID NO: 506562 - RNA, 21 nt, Artificial Sequence
  Synthetic
cuaaauuauuuacacacugua

SEQ ID NO: 506563 - RNA, 22 nt, Artificial Sequence
  Synthetic
gcuaaauuauuuacacacugua

SEQ ID NO: 506564 - RNA, 23 nt, Artificial Sequence
  Synthetic
ugcuaaauuauuuacacacugua

SEQ ID NO: 506565 - RNA, 24 nt, Artificial Sequence
  Synthetic
uugcuaaauuauuuacacacugua

SEQ ID NO: 506566 - RNA, 18 nt, Artificial Sequence
  Synthetic
ucuggauaagccacugua

SEQ ID NO: 506567 - RNA, 19 nt, Artificial Sequence
  Synthetic
aucuggauaagccacugua

SEQ ID NO: 506568 - RNA, 20 nt, Artificial Sequence
  Synthetic
uaucuggauaagccacugua

SEQ ID NO: 506569 - RNA, 21 nt, Artificial Sequence
  Synthetic
cuaucuggauaagccacugua

SEQ ID NO: 506570 - RNA, 22 nt, Artificial Sequence
  Synthetic
acuaucuggauaagccacugua

SEQ ID NO: 506571 - RNA, 23 nt, Artificial Sequence
  Synthetic
aacuaucuggauaagccacugua

SEQ ID NO: 506572 - RNA, 24 nt, Artificial Sequence
  Synthetic
aaacuaucuggauaagccacugua

SEQ ID NO: 506573 - RNA, 18 nt, Artificial Sequence
  Synthetic
auuacuguggucacugua

SEQ ID NO: 506574 - RNA, 19 nt, Artificial Sequence
  Synthetic
uauuacuguggucacugua

SEQ ID NO: 506575 - RNA, 20 nt, Artificial Sequence
  Synthetic
auauuacuguggucacugua

SEQ ID NO: 506576 - RNA, 21 nt, Artificial Sequence
  Synthetic
uauauuacuguggucacugua

SEQ ID NO: 506577 - RNA, 22 nt, Artificial Sequence
  Synthetic
cuauauuacuguggucacugua

SEQ ID NO: 506578 - RNA, 23 nt, Artificial Sequence
  Synthetic
acuauauuacuguggucacugua

SEQ ID NO: 506579 - RNA, 24 nt, Artificial Sequence
  Synthetic
uacuauauuacuguggucacugua

SEQ ID NO: 506580 - RNA, 18 nt, Artificial Sequence
  Synthetic
acuaggauaaagacugua

SEQ ID NO: 506581 - RNA, 19 nt, Artificial Sequence
  Synthetic
aacuaggauaaagacugua

SEQ ID NO: 506582 - RNA, 20 nt, Artificial Sequence
  Synthetic
gaacuaggauaaagacugua

SEQ ID NO: 506583 - RNA, 21 nt, Artificial Sequence
  Synthetic
ugaacuaggauaaagacugua

SEQ ID NO: 506584 - RNA, 22 nt, Artificial Sequence
  Synthetic
gugaacuaggauaaagacugua

SEQ ID NO: 506585 - RNA, 23 nt, Artificial Sequence
  Synthetic
ggugaacuaggauaaagacugua

SEQ ID NO: 506586 - RNA, 24 nt, Artificial Sequence
  Synthetic
aggugaacuaggauaaagacugua

SEQ ID NO: 506587 - RNA, 18 nt, Artificial Sequence
  Synthetic
gccuucaaagagacugua

SEQ ID NO: 506588 - RNA, 19 nt, Artificial Sequence
  Synthetic
ugccuucaaagagacugua

SEQ ID NO: 506589 - RNA, 20 nt, Artificial Sequence
  Synthetic
cugccuucaaagagacugua

SEQ ID NO: 506590 - RNA, 21 nt, Artificial Sequence
  Synthetic
ccugccuucaaagagacugua

SEQ ID NO: 506591 - RNA, 22 nt, Artificial Sequence
  Synthetic
gccugccuucaaagagacugua

SEQ ID NO: 506592 - RNA, 23 nt, Artificial Sequence
  Synthetic
ugccugccuucaaagagacugua

SEQ ID NO: 506593 - RNA, 24 nt, Artificial Sequence
  Synthetic
uugccugccuucaaagagacugua

SEQ ID NO: 506594 - RNA, 18 nt, Artificial Sequence
  Synthetic
aucaaauauuagacugua

SEQ ID NO: 506595 - RNA, 19 nt, Artificial Sequence
  Synthetic
caucaaauauuagacugua

SEQ ID NO: 506596 - RNA, 20 nt, Artificial Sequence
  Synthetic
ucaucaaauauuagacugua

SEQ ID NO: 506597 - RNA, 21 nt, Artificial Sequence
  Synthetic
gucaucaaauauuagacugua

SEQ ID NO: 506598 - RNA, 22 nt, Artificial Sequence
  Synthetic
agucaucaaauauuagacugua

SEQ ID NO: 506599 - RNA, 23 nt, Artificial Sequence
  Synthetic
aagucaucaaauauuagacugua

SEQ ID NO: 506600 - RNA, 24 nt, Artificial Sequence
  Synthetic
gaagucaucaaauauuagacugua

SEQ ID NO: 506601 - RNA, 18 nt, Artificial Sequence
  Synthetic
guuguauuuuggacugua

SEQ ID NO: 506602 - RNA, 19 nt, Artificial Sequence
  Synthetic
uguuguauuuuggacugua

SEQ ID NO: 506603 - RNA, 20 nt, Artificial Sequence
  Synthetic
guguuguauuuuggacugua

SEQ ID NO: 506604 - RNA, 21 nt, Artificial Sequence
  Synthetic
aguguuguauuuuggacugua

SEQ ID NO: 506605 - RNA, 22 nt, Artificial Sequence
  Synthetic
aaguguuguauuuuggacugua

SEQ ID NO: 506606 - RNA, 23 nt, Artificial Sequence
  Synthetic
uaaguguuguauuuuggacugua

SEQ ID NO: 506607 - RNA, 24 nt, Artificial Sequence
  Synthetic
guaaguguuguauuuuggacugua

SEQ ID NO: 506608 - RNA, 18 nt, Artificial Sequence
  Synthetic
ugguuugaagugacugua

SEQ ID NO: 506609 - RNA, 19 nt, Artificial Sequence
  Synthetic
uugguuugaagugacugua

SEQ ID NO: 506610 - RNA, 20 nt, Artificial Sequence
  Synthetic
guugguuugaagugacugua

SEQ ID NO: 506611 - RNA, 21 nt, Artificial Sequence
  Synthetic
aguugguuugaagugacugua

SEQ ID NO: 506612 - RNA, 22 nt, Artificial Sequence
  Synthetic
aaguugguuugaagugacugua

SEQ ID NO: 506613 - RNA, 23 nt, Artificial Sequence
  Synthetic
uaaguugguuugaagugacugua

SEQ ID NO: 506614 - RNA, 24 nt, Artificial Sequence
  Synthetic
uuaaguugguuugaagugacugua

SEQ ID NO: 506615 - RNA, 18 nt, Artificial Sequence
  Synthetic
aauuuauugaauacugua

SEQ ID NO: 506616 - RNA, 19 nt, Artificial Sequence
  Synthetic
uaauuuauugaauacugua

SEQ ID NO: 506617 - RNA, 20 nt, Artificial Sequence
  Synthetic
guaauuuauugaauacugua

SEQ ID NO: 506618 - RNA, 21 nt, Artificial Sequence
  Synthetic
uguaauuuauugaauacugua

SEQ ID NO: 506619 - RNA, 22 nt, Artificial Sequence
  Synthetic
auguaauuuauugaauacugua

SEQ ID NO: 506620 - RNA, 23 nt, Artificial Sequence
  Synthetic
cauguaauuuauugaauacugua

SEQ ID NO: 506621 - RNA, 24 nt, Artificial Sequence
  Synthetic
ucauguaauuuauugaauacugua

SEQ ID NO: 506622 - RNA, 18 nt, Artificial Sequence
  Synthetic
cccaccauguauacugua

SEQ ID NO: 506623 - RNA, 19 nt, Artificial Sequence
  Synthetic
gcccaccauguauacugua

SEQ ID NO: 506624 - RNA, 20 nt, Artificial Sequence
  Synthetic
agcccaccauguauacugua

SEQ ID NO: 506625 - RNA, 21 nt, Artificial Sequence
  Synthetic
uagcccaccauguauacugua

SEQ ID NO: 506626 - RNA, 22 nt, Artificial Sequence
  Synthetic
auagcccaccauguauacugua

SEQ ID NO: 506627 - RNA, 23 nt, Artificial Sequence
  Synthetic
cauagcccaccauguauacugua

SEQ ID NO: 506628 - RNA, 24 nt, Artificial Sequence
  Synthetic
acauagcccaccauguauacugua

SEQ ID NO: 506629 - RNA, 18 nt, Artificial Sequence
  Synthetic
uggauugcaucuacugua

SEQ ID NO: 506630 - RNA, 19 nt, Artificial Sequence
  Synthetic
uuggauugcaucuacugua

SEQ ID NO: 506631 - RNA, 20 nt, Artificial Sequence
  Synthetic
uuuggauugcaucuacugua

SEQ ID NO: 506632 - RNA, 21 nt, Artificial Sequence
  Synthetic
uuuuggauugcaucuacugua

SEQ ID NO: 506633 - RNA, 22 nt, Artificial Sequence
  Synthetic
cuuuuggauugcaucuacugua

SEQ ID NO: 506634 - RNA, 23 nt, Artificial Sequence
  Synthetic
ucuuuuggauugcaucuacugua

SEQ ID NO: 506635 - RNA, 24 nt, Artificial Sequence
  Synthetic
uucuuuuggauugcaucuacugua

SEQ ID NO: 506636 - RNA, 18 nt, Artificial Sequence
  Synthetic
agagucuuuuuuacugua

SEQ ID NO: 506637 - RNA, 19 nt, Artificial Sequence
  Synthetic
cagagucuuuuuuacugua

SEQ ID NO: 506638 - RNA, 20 nt, Artificial Sequence
  Synthetic
ucagagucuuuuuuacugua

SEQ ID NO: 506639 - RNA, 21 nt, Artificial Sequence
  Synthetic
aucagagucuuuuuuacugua

SEQ ID NO: 506640 - RNA, 22 nt, Artificial Sequence
  Synthetic
uaucagagucuuuuuuacugua

SEQ ID NO: 506641 - RNA, 23 nt, Artificial Sequence
  Synthetic
cuaucagagucuuuuuuacugua

SEQ ID NO: 506642 - RNA, 24 nt, Artificial Sequence
  Synthetic
gcuaucagagucuuuuuuacugua

SEQ ID NO: 506643 - RNA, 18 nt, Artificial Sequence
  Synthetic
cuccugcugaaaccugua

SEQ ID NO: 506644 - RNA, 19 nt, Artificial Sequence
  Synthetic
acuccugcugaaaccugua

SEQ ID NO: 506645 - RNA, 20 nt, Artificial Sequence
  Synthetic
uacuccugcugaaaccugua

SEQ ID NO: 506646 - RNA, 21 nt, Artificial Sequence
  Synthetic
auacuccugcugaaaccugua

SEQ ID NO: 506647 - RNA, 22 nt, Artificial Sequence
  Synthetic
cauacuccugcugaaaccugua

SEQ ID NO: 506648 - RNA, 23 nt, Artificial Sequence
  Synthetic
ccauacuccugcugaaaccugua

SEQ ID NO: 506649 - RNA, 24 nt, Artificial Sequence
  Synthetic
cccauacuccugcugaaaccugua

SEQ ID NO: 506650 - RNA, 18 nt, Artificial Sequence
  Synthetic
uauuaucuuggaccugua

SEQ ID NO: 506651 - RNA, 19 nt, Artificial Sequence
  Synthetic
cuauuaucuuggaccugua

SEQ ID NO: 506652 - RNA, 20 nt, Artificial Sequence
  Synthetic
gcuauuaucuuggaccugua

SEQ ID NO: 506653 - RNA, 21 nt, Artificial Sequence
  Synthetic
agcuauuaucuuggaccugua

SEQ ID NO: 506654 - RNA, 22 nt, Artificial Sequence
  Synthetic
cagcuauuaucuuggaccugua

SEQ ID NO: 506655 - RNA, 23 nt, Artificial Sequence
  Synthetic
gcagcuauuaucuuggaccugua

SEQ ID NO: 506656 - RNA, 24 nt, Artificial Sequence
  Synthetic
agcagcuauuaucuuggaccugua

SEQ ID NO: 506657 - RNA, 18 nt, Artificial Sequence
  Synthetic
ugggaaaagaacccugua

SEQ ID NO: 506658 - RNA, 19 nt, Artificial Sequence
  Synthetic
augggaaaagaacccugua

SEQ ID NO: 506659 - RNA, 20 nt, Artificial Sequence
  Synthetic
gaugggaaaagaacccugua

SEQ ID NO: 506660 - RNA, 21 nt, Artificial Sequence
  Synthetic
ggaugggaaaagaacccugua

SEQ ID NO: 506661 - RNA, 22 nt, Artificial Sequence
  Synthetic
gggaugggaaaagaacccugua

SEQ ID NO: 506662 - RNA, 23 nt, Artificial Sequence
  Synthetic
ggggaugggaaaagaacccugua

SEQ ID NO: 506663 - RNA, 24 nt, Artificial Sequence
  Synthetic
gggggaugggaaaagaacccugua

SEQ ID NO: 506664 - RNA, 18 nt, Artificial Sequence
  Synthetic
cacuugugacagccugua

SEQ ID NO: 506665 - RNA, 19 nt, Artificial Sequence
  Synthetic
ucacuugugacagccugua

SEQ ID NO: 506666 - RNA, 20 nt, Artificial Sequence
  Synthetic
cucacuugugacagccugua

SEQ ID NO: 506667 - RNA, 21 nt, Artificial Sequence
  Synthetic
acucacuugugacagccugua

SEQ ID NO: 506668 - RNA, 22 nt, Artificial Sequence
  Synthetic
cacucacuugugacagccugua

SEQ ID NO: 506669 - RNA, 23 nt, Artificial Sequence
  Synthetic
ccacucacuugugacagccugua

SEQ ID NO: 506670 - RNA, 24 nt, Artificial Sequence
  Synthetic
uccacucacuugugacagccugua

SEQ ID NO: 506671 - RNA, 18 nt, Artificial Sequence
  Synthetic
aaagcaguuuugccugua

SEQ ID NO: 506672 - RNA, 19 nt, Artificial Sequence
  Synthetic
aaaagcaguuuugccugua

SEQ ID NO: 506673 - RNA, 20 nt, Artificial Sequence
  Synthetic
gaaaagcaguuuugccugua

SEQ ID NO: 506674 - RNA, 21 nt, Artificial Sequence
  Synthetic
ggaaaagcaguuuugccugua

SEQ ID NO: 506675 - RNA, 22 nt, Artificial Sequence
  Synthetic
aggaaaagcaguuuugccugua

SEQ ID NO: 506676 - RNA, 23 nt, Artificial Sequence
  Synthetic
aaggaaaagcaguuuugccugua

SEQ ID NO: 506677 - RNA, 24 nt, Artificial Sequence
  Synthetic
uaaggaaaagcaguuuugccugua

SEQ ID NO: 506678 - RNA, 18 nt, Artificial Sequence
  Synthetic
agucucuuguaagcugua

SEQ ID NO: 506679 - RNA, 19 nt, Artificial Sequence
  Synthetic
aagucucuuguaagcugua

SEQ ID NO: 506680 - RNA, 20 nt, Artificial Sequence
  Synthetic
aaagucucuuguaagcugua

SEQ ID NO: 506681 - RNA, 21 nt, Artificial Sequence
  Synthetic
aaaagucucuuguaagcugua

SEQ ID NO: 506682 - RNA, 22 nt, Artificial Sequence
  Synthetic
gaaaagucucuuguaagcugua

SEQ ID NO: 506683 - RNA, 23 nt, Artificial Sequence
  Synthetic
ggaaaagucucuuguaagcugua

SEQ ID NO: 506684 - RNA, 24 nt, Artificial Sequence
  Synthetic
aggaaaagucucuuguaagcugua

SEQ ID NO: 506685 - RNA, 18 nt, Artificial Sequence
  Synthetic
aauaccaaaugagcugua

SEQ ID NO: 506686 - RNA, 19 nt, Artificial Sequence
  Synthetic
aaauaccaaaugagcugua

SEQ ID NO: 506687 - RNA, 20 nt, Artificial Sequence
  Synthetic
uaaauaccaaaugagcugua

SEQ ID NO: 506688 - RNA, 21 nt, Artificial Sequence
  Synthetic
guaaauaccaaaugagcugua

SEQ ID NO: 506689 - RNA, 22 nt, Artificial Sequence
  Synthetic
uguaaauaccaaaugagcugua

SEQ ID NO: 506690 - RNA, 23 nt, Artificial Sequence
  Synthetic
cuguaaauaccaaaugagcugua

SEQ ID NO: 506691 - RNA, 24 nt, Artificial Sequence
  Synthetic
acuguaaauaccaaaugagcugua

SEQ ID NO: 506692 - RNA, 18 nt, Artificial Sequence
  Synthetic
gaugcugcugacgcugua

SEQ ID NO: 506693 - RNA, 19 nt, Artificial Sequence
  Synthetic
agaugcugcugacgcugua

SEQ ID NO: 506694 - RNA, 20 nt, Artificial Sequence
  Synthetic
cagaugcugcugacgcugua

SEQ ID NO: 506695 - RNA, 21 nt, Artificial Sequence
  Synthetic
acagaugcugcugacgcugua

SEQ ID NO: 506696 - RNA, 22 nt, Artificial Sequence
  Synthetic
gacagaugcugcugacgcugua

SEQ ID NO: 506697 - RNA, 23 nt, Artificial Sequence
  Synthetic
ugacagaugcugcugacgcugua

SEQ ID NO: 506698 - RNA, 24 nt, Artificial Sequence
  Synthetic
augacagaugcugcugacgcugua

SEQ ID NO: 506699 - RNA, 18 nt, Artificial Sequence
  Synthetic
caccacaugaaggcugua

SEQ ID NO: 506700 - RNA, 19 nt, Artificial Sequence
  Synthetic
acaccacaugaaggcugua

SEQ ID NO: 506701 - RNA, 20 nt, Artificial Sequence
  Synthetic
aacaccacaugaaggcugua

SEQ ID NO: 506702 - RNA, 21 nt, Artificial Sequence
  Synthetic
gaacaccacaugaaggcugua

SEQ ID NO: 506703 - RNA, 22 nt, Artificial Sequence
  Synthetic
agaacaccacaugaaggcugua

SEQ ID NO: 506704 - RNA, 23 nt, Artificial Sequence
  Synthetic
gagaacaccacaugaaggcugua

SEQ ID NO: 506705 - RNA, 24 nt, Artificial Sequence
  Synthetic
ugagaacaccacaugaaggcugua

SEQ ID NO: 506706 - RNA, 18 nt, Artificial Sequence
  Synthetic
uuuaucugacaggcugua

SEQ ID NO: 506707 - RNA, 19 nt, Artificial Sequence
  Synthetic
auuuaucugacaggcugua

SEQ ID NO: 506708 - RNA, 20 nt, Artificial Sequence
  Synthetic
uauuuaucugacaggcugua

SEQ ID NO: 506709 - RNA, 21 nt, Artificial Sequence
  Synthetic
auauuuaucugacaggcugua

SEQ ID NO: 506710 - RNA, 22 nt, Artificial Sequence
  Synthetic
cauauuuaucugacaggcugua

SEQ ID NO: 506711 - RNA, 23 nt, Artificial Sequence
  Synthetic
acauauuuaucugacaggcugua

SEQ ID NO: 506712 - RNA, 24 nt, Artificial Sequence
  Synthetic
cacauauuuaucugacaggcugua

SEQ ID NO: 506713 - RNA, 18 nt, Artificial Sequence
  Synthetic
acgguucugcaggcugua

SEQ ID NO: 506714 - RNA, 19 nt, Artificial Sequence
  Synthetic
uacgguucugcaggcugua

SEQ ID NO: 506715 - RNA, 20 nt, Artificial Sequence
  Synthetic
uuacgguucugcaggcugua

SEQ ID NO: 506716 - RNA, 21 nt, Artificial Sequence
  Synthetic
cuuacgguucugcaggcugua

SEQ ID NO: 506717 - RNA, 22 nt, Artificial Sequence
  Synthetic
acuuacgguucugcaggcugua

SEQ ID NO: 506718 - RNA, 23 nt, Artificial Sequence
  Synthetic
gacuuacgguucugcaggcugua

SEQ ID NO: 506719 - RNA, 24 nt, Artificial Sequence
  Synthetic
ugacuuacgguucugcaggcugua

SEQ ID NO: 506720 - RNA, 18 nt, Artificial Sequence
  Synthetic
auuuuucaguaggcugua

SEQ ID NO: 506721 - RNA, 19 nt, Artificial Sequence
  Synthetic
cauuuuucaguaggcugua

SEQ ID NO: 506722 - RNA, 20 nt, Artificial Sequence
  Synthetic
acauuuuucaguaggcugua

SEQ ID NO: 506723 - RNA, 21 nt, Artificial Sequence
  Synthetic
gacauuuuucaguaggcugua

SEQ ID NO: 506724 - RNA, 22 nt, Artificial Sequence
  Synthetic
agacauuuuucaguaggcugua

SEQ ID NO: 506725 - RNA, 23 nt, Artificial Sequence
  Synthetic
gagacauuuuucaguaggcugua

SEQ ID NO: 506726 - RNA, 24 nt, Artificial Sequence
  Synthetic
ugagacauuuuucaguaggcugua

SEQ ID NO: 506727 - RNA, 18 nt, Artificial Sequence
  Synthetic
ucaucaaaccaugcugua

SEQ ID NO: 506728 - RNA, 19 nt, Artificial Sequence
  Synthetic
uucaucaaaccaugcugua

SEQ ID NO: 506729 - RNA, 20 nt, Artificial Sequence
  Synthetic
guucaucaaaccaugcugua

SEQ ID NO: 506730 - RNA, 21 nt, Artificial Sequence
  Synthetic
uguucaucaaaccaugcugua

SEQ ID NO: 506731 - RNA, 22 nt, Artificial Sequence
  Synthetic
auguucaucaaaccaugcugua

SEQ ID NO: 506732 - RNA, 23 nt, Artificial Sequence
  Synthetic
aauguucaucaaaccaugcugua

SEQ ID NO: 506733 - RNA, 24 nt, Artificial Sequence
  Synthetic
aaauguucaucaaaccaugcugua

SEQ ID NO: 506734 - RNA, 18 nt, Artificial Sequence
  Synthetic
aaaagcuggcaugcugua

SEQ ID NO: 506735 - RNA, 19 nt, Artificial Sequence
  Synthetic
caaaagcuggcaugcugua

SEQ ID NO: 506736 - RNA, 20 nt, Artificial Sequence
  Synthetic
ucaaaagcuggcaugcugua

SEQ ID NO: 506737 - RNA, 21 nt, Artificial Sequence
  Synthetic
uucaaaagcuggcaugcugua

SEQ ID NO: 506738 - RNA, 22 nt, Artificial Sequence
  Synthetic
uuucaaaagcuggcaugcugua

SEQ ID NO: 506739 - RNA, 23 nt, Artificial Sequence
  Synthetic
cuuucaaaagcuggcaugcugua

SEQ ID NO: 506740 - RNA, 24 nt, Artificial Sequence
  Synthetic
ucuuucaaaagcuggcaugcugua

SEQ ID NO: 506741 - RNA, 18 nt, Artificial Sequence
  Synthetic
guaaaccguggugcugua

SEQ ID NO: 506742 - RNA, 19 nt, Artificial Sequence
  Synthetic
aguaaaccguggugcugua

SEQ ID NO: 506743 - RNA, 20 nt, Artificial Sequence
  Synthetic
caguaaaccguggugcugua

SEQ ID NO: 506744 - RNA, 21 nt, Artificial Sequence
  Synthetic
ucaguaaaccguggugcugua

SEQ ID NO: 506745 - RNA, 22 nt, Artificial Sequence
  Synthetic
aucaguaaaccguggugcugua

SEQ ID NO: 506746 - RNA, 23 nt, Artificial Sequence
  Synthetic
caucaguaaaccguggugcugua

SEQ ID NO: 506747 - RNA, 24 nt, Artificial Sequence
  Synthetic
ucaucaguaaaccguggugcugua

SEQ ID NO: 506748 - RNA, 18 nt, Artificial Sequence
  Synthetic
gcaaugguauuugcugua

SEQ ID NO: 506749 - RNA, 19 nt, Artificial Sequence
  Synthetic
ugcaaugguauuugcugua

SEQ ID NO: 506750 - RNA, 20 nt, Artificial Sequence
  Synthetic
uugcaaugguauuugcugua

SEQ ID NO: 506751 - RNA, 21 nt, Artificial Sequence
  Synthetic
auugcaaugguauuugcugua

SEQ ID NO: 506752 - RNA, 22 nt, Artificial Sequence
  Synthetic
uauugcaaugguauuugcugua

SEQ ID NO: 506753 - RNA, 23 nt, Artificial Sequence
  Synthetic
uuauugcaaugguauuugcugua

SEQ ID NO: 506754 - RNA, 24 nt, Artificial Sequence
  Synthetic
guuauugcaaugguauuugcugua

SEQ ID NO: 506755 - RNA, 18 nt, Artificial Sequence
  Synthetic
uauuuuggguaaucugua

SEQ ID NO: 506756 - RNA, 19 nt, Artificial Sequence
  Synthetic
auauuuuggguaaucugua

SEQ ID NO: 506757 - RNA, 20 nt, Artificial Sequence
  Synthetic
uauauuuuggguaaucugua

SEQ ID NO: 506758 - RNA, 21 nt, Artificial Sequence
  Synthetic
uuauauuuuggguaaucugua

SEQ ID NO: 506759 - RNA, 22 nt, Artificial Sequence
  Synthetic
uuuauauuuuggguaaucugua

SEQ ID NO: 506760 - RNA, 23 nt, Artificial Sequence
  Synthetic
uuuuauauuuuggguaaucugua

SEQ ID NO: 506761 - RNA, 24 nt, Artificial Sequence
  Synthetic
uuuuuauauuuuggguaaucugua

SEQ ID NO: 506762 - RNA, 18 nt, Artificial Sequence
  Synthetic
gcaaugcgaauaucugua

SEQ ID NO: 506763 - RNA, 19 nt, Artificial Sequence
  Synthetic
agcaaugcgaauaucugua

SEQ ID NO: 506764 - RNA, 20 nt, Artificial Sequence
  Synthetic
uagcaaugcgaauaucugua

SEQ ID NO: 506765 - RNA, 21 nt, Artificial Sequence
  Synthetic
uuagcaaugcgaauaucugua

SEQ ID NO: 506766 - RNA, 22 nt, Artificial Sequence
  Synthetic
guuagcaaugcgaauaucugua

SEQ ID NO: 506767 - RNA, 23 nt, Artificial Sequence
  Synthetic
gguuagcaaugcgaauaucugua

SEQ ID NO: 506768 - RNA, 24 nt, Artificial Sequence
  Synthetic
agguuagcaaugcgaauaucugua

SEQ ID NO: 506769 - RNA, 18 nt, Artificial Sequence
  Synthetic
auaaugagcuuaucugua

SEQ ID NO: 506770 - RNA, 19 nt, Artificial Sequence
  Synthetic
aauaaugagcuuaucugua

SEQ ID NO: 506771 - RNA, 20 nt, Artificial Sequence
  Synthetic
aaauaaugagcuuaucugua

SEQ ID NO: 506772 - RNA, 21 nt, Artificial Sequence
  Synthetic
gaaauaaugagcuuaucugua

SEQ ID NO: 506773 - RNA, 22 nt, Artificial Sequence
  Synthetic
ugaaauaaugagcuuaucugua

SEQ ID NO: 506774 - RNA, 23 nt, Artificial Sequence
  Synthetic
uugaaauaaugagcuuaucugua

SEQ ID NO: 506775 - RNA, 24 nt, Artificial Sequence
  Synthetic
uuugaaauaaugagcuuaucugua

SEQ ID NO: 506776 - RNA, 18 nt, Artificial Sequence
  Synthetic
gauagaggguuaucugua

SEQ ID NO: 506777 - RNA, 19 nt, Artificial Sequence
  Synthetic
ugauagaggguuaucugua

SEQ ID NO: 506778 - RNA, 20 nt, Artificial Sequence
  Synthetic
augauagaggguuaucugua

SEQ ID NO: 506779 - RNA, 21 nt, Artificial Sequence
  Synthetic
uaugauagaggguuaucugua

SEQ ID NO: 506780 - RNA, 22 nt, Artificial Sequence
  Synthetic
uuaugauagaggguuaucugua

SEQ ID NO: 506781 - RNA, 23 nt, Artificial Sequence
  Synthetic
uuuaugauagaggguuaucugua

SEQ ID NO: 506782 - RNA, 24 nt, Artificial Sequence
  Synthetic
guuuaugauagaggguuaucugua

SEQ ID NO: 506783 - RNA, 18 nt, Artificial Sequence
  Synthetic
uggccaucuuuaucugua

SEQ ID NO: 506784 - RNA, 19 nt, Artificial Sequence
  Synthetic
uuggccaucuuuaucugua

SEQ ID NO: 506785 - RNA, 20 nt, Artificial Sequence
  Synthetic
uuuggccaucuuuaucugua

SEQ ID NO: 506786 - RNA, 21 nt, Artificial Sequence
  Synthetic
cuuuggccaucuuuaucugua

SEQ ID NO: 506787 - RNA, 22 nt, Artificial Sequence
  Synthetic
gcuuuggccaucuuuaucugua

SEQ ID NO: 506788 - RNA, 23 nt, Artificial Sequence
  Synthetic
agcuuuggccaucuuuaucugua

SEQ ID NO: 506789 - RNA, 24 nt, Artificial Sequence
  Synthetic
cagcuuuggccaucuuuaucugua

SEQ ID NO: 506790 - RNA, 18 nt, Artificial Sequence
  Synthetic
aacauuuuaaccucugua

SEQ ID NO: 506791 - RNA, 19 nt, Artificial Sequence
  Synthetic
aaacauuuuaaccucugua

SEQ ID NO: 506792 - RNA, 20 nt, Artificial Sequence
  Synthetic
aaaacauuuuaaccucugua

SEQ ID NO: 506793 - RNA, 21 nt, Artificial Sequence
  Synthetic
aaaaacauuuuaaccucugua

SEQ ID NO: 506794 - RNA, 22 nt, Artificial Sequence
  Synthetic
caaaaacauuuuaaccucugua

SEQ ID NO: 506795 - RNA, 23 nt, Artificial Sequence
  Synthetic
gcaaaaacauuuuaaccucugua

SEQ ID NO: 506796 - RNA, 24 nt, Artificial Sequence
  Synthetic
ugcaaaaacauuuuaaccucugua

SEQ ID NO: 506797 - RNA, 18 nt, Artificial Sequence
  Synthetic
cacuuucuccucucugua

SEQ ID NO: 506798 - RNA, 19 nt, Artificial Sequence
  Synthetic
gcacuuucuccucucugua

SEQ ID NO: 506799 - RNA, 20 nt, Artificial Sequence
  Synthetic
ggcacuuucuccucucugua

SEQ ID NO: 506800 - RNA, 21 nt, Artificial Sequence
  Synthetic
aggcacuuucuccucucugua

SEQ ID NO: 506801 - RNA, 22 nt, Artificial Sequence
  Synthetic
uaggcacuuucuccucucugua

SEQ ID NO: 506802 - RNA, 23 nt, Artificial Sequence
  Synthetic
uuaggcacuuucuccucucugua

SEQ ID NO: 506803 - RNA, 24 nt, Artificial Sequence
  Synthetic
uuuaggcacuuucuccucucugua

SEQ ID NO: 506804 - RNA, 18 nt, Artificial Sequence
  Synthetic
auacauugucauucugua

SEQ ID NO: 506805 - RNA, 19 nt, Artificial Sequence
  Synthetic
uauacauugucauucugua

SEQ ID NO: 506806 - RNA, 20 nt, Artificial Sequence
  Synthetic
auauacauugucauucugua

SEQ ID NO: 506807 - RNA, 21 nt, Artificial Sequence
  Synthetic
uauauacauugucauucugua

SEQ ID NO: 506808 - RNA, 22 nt, Artificial Sequence
  Synthetic
cuauauacauugucauucugua

SEQ ID NO: 506809 - RNA, 23 nt, Artificial Sequence
  Synthetic
gcuauauacauugucauucugua

SEQ ID NO: 506810 - RNA, 24 nt, Artificial Sequence
  Synthetic
agcuauauacauugucauucugua

SEQ ID NO: 506811 - RNA, 18 nt, Artificial Sequence
  Synthetic
guuugguagaaaagugua

SEQ ID NO: 506812 - RNA, 19 nt, Artificial Sequence
  Synthetic
uguuugguagaaaagugua

SEQ ID NO: 506813 - RNA, 20 nt, Artificial Sequence
  Synthetic
auguuugguagaaaagugua

SEQ ID NO: 506814 - RNA, 21 nt, Artificial Sequence
  Synthetic
uauguuugguagaaaagugua

SEQ ID NO: 506815 - RNA, 22 nt, Artificial Sequence
  Synthetic
guauguuugguagaaaagugua

SEQ ID NO: 506816 - RNA, 23 nt, Artificial Sequence
  Synthetic
aguauguuugguagaaaagugua

SEQ ID NO: 506817 - RNA, 24 nt, Artificial Sequence
  Synthetic
caguauguuugguagaaaagugua

SEQ ID NO: 506818 - RNA, 18 nt, Artificial Sequence
  Synthetic
cucuacaugagaagugua

SEQ ID NO: 506819 - RNA, 19 nt, Artificial Sequence
  Synthetic
acucuacaugagaagugua

SEQ ID NO: 506820 - RNA, 20 nt, Artificial Sequence
  Synthetic
uacucuacaugagaagugua

SEQ ID NO: 506821 - RNA, 21 nt, Artificial Sequence
  Synthetic
uuacucuacaugagaagugua

SEQ ID NO: 506822 - RNA, 22 nt, Artificial Sequence
  Synthetic
guuacucuacaugagaagugua

SEQ ID NO: 506823 - RNA, 23 nt, Artificial Sequence
  Synthetic
gguuacucuacaugagaagugua

SEQ ID NO: 506824 - RNA, 24 nt, Artificial Sequence
  Synthetic
ggguuacucuacaugagaagugua

SEQ ID NO: 506825 - RNA, 18 nt, Artificial Sequence
  Synthetic
gacuuaaaacgcagugua

SEQ ID NO: 506826 - RNA, 19 nt, Artificial Sequence
  Synthetic
agacuuaaaacgcagugua

SEQ ID NO: 506827 - RNA, 20 nt, Artificial Sequence
  Synthetic
gagacuuaaaacgcagugua

SEQ ID NO: 506828 - RNA, 21 nt, Artificial Sequence
  Synthetic
agagacuuaaaacgcagugua

SEQ ID NO: 506829 - RNA, 22 nt, Artificial Sequence
  Synthetic
aagagacuuaaaacgcagugua

SEQ ID NO: 506830 - RNA, 23 nt, Artificial Sequence
  Synthetic
gaagagacuuaaaacgcagugua

SEQ ID NO: 506831 - RNA, 24 nt, Artificial Sequence
  Synthetic
ugaagagacuuaaaacgcagugua

SEQ ID NO: 506832 - RNA, 18 nt, Artificial Sequence
  Synthetic
aagaguguaaagagugua

SEQ ID NO: 506833 - RNA, 19 nt, Artificial Sequence
  Synthetic
uaagaguguaaagagugua

SEQ ID NO: 506834 - RNA, 20 nt, Artificial Sequence
  Synthetic
uuaagaguguaaagagugua

SEQ ID NO: 506835 - RNA, 21 nt, Artificial Sequence
  Synthetic
auuaagaguguaaagagugua

SEQ ID NO: 506836 - RNA, 22 nt, Artificial Sequence
  Synthetic
aauuaagaguguaaagagugua

SEQ ID NO: 506837 - RNA, 23 nt, Artificial Sequence
  Synthetic
aaauuaagaguguaaagagugua

SEQ ID NO: 506838 - RNA, 24 nt, Artificial Sequence
  Synthetic
aaaauuaagaguguaaagagugua

SEQ ID NO: 506839 - RNA, 18 nt, Artificial Sequence
  Synthetic
agaaaaggagggagugua

SEQ ID NO: 506840 - RNA, 19 nt, Artificial Sequence
  Synthetic
aagaaaaggagggagugua

SEQ ID NO: 506841 - RNA, 20 nt, Artificial Sequence
  Synthetic
aaagaaaaggagggagugua

SEQ ID NO: 506842 - RNA, 21 nt, Artificial Sequence
  Synthetic
aaaagaaaaggagggagugua

SEQ ID NO: 506843 - RNA, 22 nt, Artificial Sequence
  Synthetic
caaaagaaaaggagggagugua

SEQ ID NO: 506844 - RNA, 23 nt, Artificial Sequence
  Synthetic
ucaaaagaaaaggagggagugua

SEQ ID NO: 506845 - RNA, 24 nt, Artificial Sequence
  Synthetic
cucaaaagaaaaggagggagugua

SEQ ID NO: 506846 - RNA, 18 nt, Artificial Sequence
  Synthetic
uaauagagagugagugua

SEQ ID NO: 506847 - RNA, 19 nt, Artificial Sequence
  Synthetic
guaauagagagugagugua

SEQ ID NO: 506848 - RNA, 20 nt, Artificial Sequence
  Synthetic
uguaauagagagugagugua

SEQ ID NO: 506849 - RNA, 21 nt, Artificial Sequence
  Synthetic
uuguaauagagagugagugua

SEQ ID NO: 506850 - RNA, 22 nt, Artificial Sequence
  Synthetic
uuuguaauagagagugagugua

SEQ ID NO: 506851 - RNA, 23 nt, Artificial Sequence
  Synthetic
uuuuguaauagagagugagugua

SEQ ID NO: 506852 - RNA, 24 nt, Artificial Sequence
  Synthetic
uuuuuguaauagagagugagugua

SEQ ID NO: 506853 - RNA, 18 nt, Artificial Sequence
  Synthetic
ucaagccuguugagugua

SEQ ID NO: 506854 - RNA, 19 nt, Artificial Sequence
  Synthetic
uucaagccuguugagugua

SEQ ID NO: 506855 - RNA, 20 nt, Artificial Sequence
  Synthetic
auucaagccuguugagugua

SEQ ID NO: 506856 - RNA, 21 nt, Artificial Sequence
  Synthetic
aauucaagccuguugagugua

SEQ ID NO: 506857 - RNA, 22 nt, Artificial Sequence
  Synthetic
gaauucaagccuguugagugua

SEQ ID NO: 506858 - RNA, 23 nt, Artificial Sequence
  Synthetic
ugaauucaagccuguugagugua

SEQ ID NO: 506859 - RNA, 24 nt, Artificial Sequence
  Synthetic
augaauucaagccuguugagugua

SEQ ID NO: 506860 - RNA, 18 nt, Artificial Sequence
  Synthetic
guuaagucaaauagugua

SEQ ID NO: 506861 - RNA, 19 nt, Artificial Sequence
  Synthetic
aguuaagucaaauagugua

SEQ ID NO: 506862 - RNA, 20 nt, Artificial Sequence
  Synthetic
caguuaagucaaauagugua

SEQ ID NO: 506863 - RNA, 21 nt, Artificial Sequence
  Synthetic
ccaguuaagucaaauagugua

SEQ ID NO: 506864 - RNA, 22 nt, Artificial Sequence
  Synthetic
accaguuaagucaaauagugua

SEQ ID NO: 506865 - RNA, 23 nt, Artificial Sequence
  Synthetic
caccaguuaagucaaauagugua

SEQ ID NO: 506866 - RNA, 24 nt, Artificial Sequence
  Synthetic
gcaccaguuaagucaaauagugua

SEQ ID NO: 506867 - RNA, 18 nt, Artificial Sequence
  Synthetic
acguuuacaucuagugua

SEQ ID NO: 506868 - RNA, 19 nt, Artificial Sequence
  Synthetic
aacguuuacaucuagugua

SEQ ID NO: 506869 - RNA, 20 nt, Artificial Sequence
  Synthetic
caacguuuacaucuagugua

SEQ ID NO: 506870 - RNA, 21 nt, Artificial Sequence
  Synthetic
gcaacguuuacaucuagugua

SEQ ID NO: 506871 - RNA, 22 nt, Artificial Sequence
  Synthetic
ggcaacguuuacaucuagugua

SEQ ID NO: 506872 - RNA, 23 nt, Artificial Sequence
  Synthetic
uggcaacguuuacaucuagugua

SEQ ID NO: 506873 - RNA, 24 nt, Artificial Sequence
  Synthetic
auggcaacguuuacaucuagugua

SEQ ID NO: 506874 - RNA, 18 nt, Artificial Sequence
  Synthetic
ccugagaaggugcgugua

SEQ ID NO: 506875 - RNA, 19 nt, Artificial Sequence
  Synthetic
cccugagaaggugcgugua

SEQ ID NO: 506876 - RNA, 20 nt, Artificial Sequence
  Synthetic
ucccugagaaggugcgugua

SEQ ID NO: 506877 - RNA, 21 nt, Artificial Sequence
  Synthetic
gucccugagaaggugcgugua

SEQ ID NO: 506878 - RNA, 22 nt, Artificial Sequence
  Synthetic
agucccugagaaggugcgugua

SEQ ID NO: 506879 - RNA, 23 nt, Artificial Sequence
  Synthetic
aagucccugagaaggugcgugua

SEQ ID NO: 506880 - RNA, 24 nt, Artificial Sequence
  Synthetic
aaagucccugagaaggugcgugua

SEQ ID NO: 506881 - RNA, 18 nt, Artificial Sequence
  Synthetic
ucacauuuucaaggugua

SEQ ID NO: 506882 - RNA, 19 nt, Artificial Sequence
  Synthetic
uucacauuuucaaggugua

SEQ ID NO: 506883 - RNA, 20 nt, Artificial Sequence
  Synthetic
auucacauuuucaaggugua

SEQ ID NO: 506884 - RNA, 21 nt, Artificial Sequence
  Synthetic
uauucacauuuucaaggugua

SEQ ID NO: 506885 - RNA, 22 nt, Artificial Sequence
  Synthetic
guauucacauuuucaaggugua

SEQ ID NO: 506886 - RNA, 23 nt, Artificial Sequence
  Synthetic
uguauucacauuuucaaggugua

SEQ ID NO: 506887 - RNA, 24 nt, Artificial Sequence
  Synthetic
uuguauucacauuuucaaggugua

SEQ ID NO: 506888 - RNA, 21 nt, Artificial Sequence
  Synthetic
uuaauuuuuguauaaggugua

SEQ ID NO: 506889 - RNA, 22 nt, Artificial Sequence
  Synthetic
guuaauuuuuguauaaggugua

SEQ ID NO: 506890 - RNA, 23 nt, Artificial Sequence
  Synthetic
aguuaauuuuuguauaaggugua

SEQ ID NO: 506891 - RNA, 24 nt, Artificial Sequence
  Synthetic
gaguuaauuuuuguauaaggugua

SEQ ID NO: 506892 - RNA, 21 nt, Artificial Sequence
  Synthetic
uugauuuuuguauaaggugua

SEQ ID NO: 506893 - RNA, 22 nt, Artificial Sequence
  Synthetic
auugauuuuuguauaaggugua

SEQ ID NO: 506894 - RNA, 23 nt, Artificial Sequence
  Synthetic
aauugauuuuuguauaaggugua

SEQ ID NO: 506895 - RNA, 24 nt, Artificial Sequence
  Synthetic
gaauugauuuuuguauaaggugua

SEQ ID NO: 506896 - RNA, 18 nt, Artificial Sequence
  Synthetic
agguaucccagaggugua

SEQ ID NO: 506897 - RNA, 19 nt, Artificial Sequence
  Synthetic
uagguaucccagaggugua

SEQ ID NO: 506898 - RNA, 20 nt, Artificial Sequence
  Synthetic
cuagguaucccagaggugua

SEQ ID NO: 506899 - RNA, 21 nt, Artificial Sequence
  Synthetic
acuagguaucccagaggugua

SEQ ID NO: 506900 - RNA, 22 nt, Artificial Sequence
  Synthetic
gacuagguaucccagaggugua

SEQ ID NO: 506901 - RNA, 23 nt, Artificial Sequence
  Synthetic
agacuagguaucccagaggugua

SEQ ID NO: 506902 - RNA, 24 nt, Artificial Sequence
  Synthetic
cagacuagguaucccagaggugua

SEQ ID NO: 506903 - RNA, 18 nt, Artificial Sequence
  Synthetic
gaaaaaaagcuuggugua

SEQ ID NO: 506904 - RNA, 19 nt, Artificial Sequence
  Synthetic
agaaaaaaagcuuggugua

SEQ ID NO: 506905 - RNA, 20 nt, Artificial Sequence
  Synthetic
gagaaaaaaagcuuggugua

SEQ ID NO: 506906 - RNA, 21 nt, Artificial Sequence
  Synthetic
agagaaaaaaagcuuggugua

SEQ ID NO: 506907 - RNA, 22 nt, Artificial Sequence
  Synthetic
cagagaaaaaaagcuuggugua

SEQ ID NO: 506908 - RNA, 23 nt, Artificial Sequence
  Synthetic
gcagagaaaaaaagcuuggugua

SEQ ID NO: 506909 - RNA, 24 nt, Artificial Sequence
  Synthetic
ggcagagaaaaaaagcuuggugua

SEQ ID NO: 506910 - RNA, 18 nt, Artificial Sequence
  Synthetic
ugccugcuguuuggugua

SEQ ID NO: 506911 - RNA, 19 nt, Artificial Sequence
  Synthetic
gugccugcuguuuggugua

SEQ ID NO: 506912 - RNA, 20 nt, Artificial Sequence
  Synthetic
ggugccugcuguuuggugua

SEQ ID NO: 506913 - RNA, 21 nt, Artificial Sequence
  Synthetic
uggugccugcuguuuggugua

SEQ ID NO: 506914 - RNA, 22 nt, Artificial Sequence
  Synthetic
cuggugccugcuguuuggugua

SEQ ID NO: 506915 - RNA, 23 nt, Artificial Sequence
  Synthetic
gcuggugccugcuguuuggugua

SEQ ID NO: 506916 - RNA, 24 nt, Artificial Sequence
  Synthetic
agcuggugccugcuguuuggugua

SEQ ID NO: 506917 - RNA, 18 nt, Artificial Sequence
  Synthetic
caaauuaacaaaugugua

SEQ ID NO: 506918 - RNA, 19 nt, Artificial Sequence
  Synthetic
ucaaauuaacaaaugugua

SEQ ID NO: 506919 - RNA, 20 nt, Artificial Sequence
  Synthetic
uucaaauuaacaaaugugua

SEQ ID NO: 506920 - RNA, 21 nt, Artificial Sequence
  Synthetic
cuucaaauuaacaaaugugua

SEQ ID NO: 506921 - RNA, 22 nt, Artificial Sequence
  Synthetic
gcuucaaauuaacaaaugugua

SEQ ID NO: 506922 - RNA, 23 nt, Artificial Sequence
  Synthetic
ugcuucaaauuaacaaaugugua

SEQ ID NO: 506923 - RNA, 24 nt, Artificial Sequence
  Synthetic
uugcuucaaauuaacaaaugugua

SEQ ID NO: 506924 - RNA, 18 nt, Artificial Sequence
  Synthetic
ucaaagucacaaugugua

SEQ ID NO: 506925 - RNA, 19 nt, Artificial Sequence
  Synthetic
cucaaagucacaaugugua

SEQ ID NO: 506926 - RNA, 20 nt, Artificial Sequence
  Synthetic
gcucaaagucacaaugugua

SEQ ID NO: 506927 - RNA, 21 nt, Artificial Sequence
  Synthetic
ugcucaaagucacaaugugua

SEQ ID NO: 506928 - RNA, 22 nt, Artificial Sequence
  Synthetic
uugcucaaagucacaaugugua

SEQ ID NO: 506929 - RNA, 23 nt, Artificial Sequence
  Synthetic
uuugcucaaagucacaaugugua

SEQ ID NO: 506930 - RNA, 24 nt, Artificial Sequence
  Synthetic
uuuugcucaaagucacaaugugua

SEQ ID NO: 506931 - RNA, 18 nt, Artificial Sequence
  Synthetic
gaguucuucccaugugua

SEQ ID NO: 506932 - RNA, 19 nt, Artificial Sequence
  Synthetic
ugaguucuucccaugugua

SEQ ID NO: 506933 - RNA, 20 nt, Artificial Sequence
  Synthetic
uugaguucuucccaugugua

SEQ ID NO: 506934 - RNA, 21 nt, Artificial Sequence
  Synthetic
auugaguucuucccaugugua

SEQ ID NO: 506935 - RNA, 22 nt, Artificial Sequence
  Synthetic
uauugaguucuucccaugugua

SEQ ID NO: 506936 - RNA, 23 nt, Artificial Sequence
  Synthetic
uuauugaguucuucccaugugua

SEQ ID NO: 506937 - RNA, 24 nt, Artificial Sequence
  Synthetic
uuuauugaguucuucccaugugua

SEQ ID NO: 506938 - RNA, 18 nt, Artificial Sequence
  Synthetic
gaacagugcagaugugua

SEQ ID NO: 506939 - RNA, 19 nt, Artificial Sequence
  Synthetic
agaacagugcagaugugua

SEQ ID NO: 506940 - RNA, 20 nt, Artificial Sequence
  Synthetic
aagaacagugcagaugugua

SEQ ID NO: 506941 - RNA, 21 nt, Artificial Sequence
  Synthetic
aaagaacagugcagaugugua

SEQ ID NO: 506942 - RNA, 22 nt, Artificial Sequence
  Synthetic
caaagaacagugcagaugugua

SEQ ID NO: 506943 - RNA, 23 nt, Artificial Sequence
  Synthetic
ucaaagaacagugcagaugugua

SEQ ID NO: 506944 - RNA, 24 nt, Artificial Sequence
  Synthetic
cucaaagaacagugcagaugugua

SEQ ID NO: 506945 - RNA, 18 nt, Artificial Sequence
  Synthetic
uauuucucuggaugugua

SEQ ID NO: 506946 - RNA, 19 nt, Artificial Sequence
  Synthetic
cuauuucucuggaugugua

SEQ ID NO: 506947 - RNA, 20 nt, Artificial Sequence
  Synthetic
ucuauuucucuggaugugua

SEQ ID NO: 506948 - RNA, 21 nt, Artificial Sequence
  Synthetic
uucuauuucucuggaugugua

SEQ ID NO: 506949 - RNA, 22 nt, Artificial Sequence
  Synthetic
auucuauuucucuggaugugua

SEQ ID NO: 506950 - RNA, 23 nt, Artificial Sequence
  Synthetic
cauucuauuucucuggaugugua

SEQ ID NO: 506951 - RNA, 24 nt, Artificial Sequence
  Synthetic
ccauucuauuucucuggaugugua

SEQ ID NO: 506952 - RNA, 18 nt, Artificial Sequence
  Synthetic
uaugcuugucuaugugua

SEQ ID NO: 506953 - RNA, 19 nt, Artificial Sequence
  Synthetic
guaugcuugucuaugugua

SEQ ID NO: 506954 - RNA, 20 nt, Artificial Sequence
  Synthetic
aguaugcuugucuaugugua

SEQ ID NO: 506955 - RNA, 21 nt, Artificial Sequence
  Synthetic
gaguaugcuugucuaugugua

SEQ ID NO: 506956 - RNA, 22 nt, Artificial Sequence
  Synthetic
agaguaugcuugucuaugugua

SEQ ID NO: 506957 - RNA, 23 nt, Artificial Sequence
  Synthetic
uagaguaugcuugucuaugugua

SEQ ID NO: 506958 - RNA, 24 nt, Artificial Sequence
  Synthetic
uuagaguaugcuugucuaugugua

SEQ ID NO: 506959 - RNA, 18 nt, Artificial Sequence
  Synthetic
auaaaaauguuaugugua

SEQ ID NO: 506960 - RNA, 19 nt, Artificial Sequence
  Synthetic
aauaaaaauguuaugugua

SEQ ID NO: 506961 - RNA, 20 nt, Artificial Sequence
  Synthetic
aaauaaaaauguuaugugua

SEQ ID NO: 506962 - RNA, 21 nt, Artificial Sequence
  Synthetic
aaaauaaaaauguuaugugua

SEQ ID NO: 506963 - RNA, 22 nt, Artificial Sequence
  Synthetic
caaaauaaaaauguuaugugua

SEQ ID NO: 506964 - RNA, 23 nt, Artificial Sequence
  Synthetic
ccaaaauaaaaauguuaugugua

SEQ ID NO: 506965 - RNA, 24 nt, Artificial Sequence
  Synthetic
uccaaaauaaaaauguuaugugua

SEQ ID NO: 506966 - RNA, 18 nt, Artificial Sequence
  Synthetic
ugccagauaaccugugua

SEQ ID NO: 506967 - RNA, 19 nt, Artificial Sequence
  Synthetic
cugccagauaaccugugua

SEQ ID NO: 506968 - RNA, 20 nt, Artificial Sequence
  Synthetic
ccugccagauaaccugugua

SEQ ID NO: 506969 - RNA, 21 nt, Artificial Sequence
  Synthetic
uccugccagauaaccugugua

SEQ ID NO: 506970 - RNA, 22 nt, Artificial Sequence
  Synthetic
cuccugccagauaaccugugua

SEQ ID NO: 506971 - RNA, 23 nt, Artificial Sequence
  Synthetic
acuccugccagauaaccugugua

SEQ ID NO: 506972 - RNA, 24 nt, Artificial Sequence
  Synthetic
gacuccugccagauaaccugugua

SEQ ID NO: 506973 - RNA, 18 nt, Artificial Sequence
  Synthetic
ugaucacuuaccugugua

SEQ ID NO: 506974 - RNA, 19 nt, Artificial Sequence
  Synthetic
cugaucacuuaccugugua

SEQ ID NO: 506975 - RNA, 20 nt, Artificial Sequence
  Synthetic
acugaucacuuaccugugua

SEQ ID NO: 506976 - RNA, 21 nt, Artificial Sequence
  Synthetic
aacugaucacuuaccugugua

SEQ ID NO: 506977 - RNA, 22 nt, Artificial Sequence
  Synthetic
aaacugaucacuuaccugugua

SEQ ID NO: 506978 - RNA, 23 nt, Artificial Sequence
  Synthetic
gaaacugaucacuuaccugugua

SEQ ID NO: 506979 - RNA, 24 nt, Artificial Sequence
  Synthetic
agaaacugaucacuuaccugugua

SEQ ID NO: 506980 - RNA, 18 nt, Artificial Sequence
  Synthetic
caauuuuagaagugugua

SEQ ID NO: 506981 - RNA, 19 nt, Artificial Sequence
  Synthetic
acaauuuuagaagugugua

SEQ ID NO: 506982 - RNA, 20 nt, Artificial Sequence
  Synthetic
gacaauuuuagaagugugua

SEQ ID NO: 506983 - RNA, 21 nt, Artificial Sequence
  Synthetic
agacaauuuuagaagugugua

SEQ ID NO: 506984 - RNA, 22 nt, Artificial Sequence
  Synthetic
uagacaauuuuagaagugugua

SEQ ID NO: 506985 - RNA, 23 nt, Artificial Sequence
  Synthetic
guagacaauuuuagaagugugua

SEQ ID NO: 506986 - RNA, 24 nt, Artificial Sequence
  Synthetic
aguagacaauuuuagaagugugua

SEQ ID NO: 506987 - RNA, 18 nt, Artificial Sequence
  Synthetic
cauucaaagcagugugua

SEQ ID NO: 506988 - RNA, 19 nt, Artificial Sequence
  Synthetic
gcauucaaagcagugugua

SEQ ID NO: 506989 - RNA, 20 nt, Artificial Sequence
  Synthetic
cgcauucaaagcagugugua

SEQ ID NO: 506990 - RNA, 21 nt, Artificial Sequence
  Synthetic
acgcauucaaagcagugugua

SEQ ID NO: 506991 - RNA, 22 nt, Artificial Sequence
  Synthetic
gacgcauucaaagcagugugua

SEQ ID NO: 506992 - RNA, 23 nt, Artificial Sequence
  Synthetic
ggacgcauucaaagcagugugua

SEQ ID NO: 506993 - RNA, 24 nt, Artificial Sequence
  Synthetic
gggacgcauucaaagcagugugua

SEQ ID NO: 506994 - RNA, 18 nt, Artificial Sequence
  Synthetic
aaagugccacugugugua

SEQ ID NO: 506995 - RNA, 19 nt, Artificial Sequence
  Synthetic
uaaagugccacugugugua

SEQ ID NO: 506996 - RNA, 20 nt, Artificial Sequence
  Synthetic
auaaagugccacugugugua

SEQ ID NO: 506997 - RNA, 21 nt, Artificial Sequence
  Synthetic
aauaaagugccacugugugua

SEQ ID NO: 506998 - RNA, 22 nt, Artificial Sequence
  Synthetic
aaauaaagugccacugugugua

SEQ ID NO: 506999 - RNA, 23 nt, Artificial Sequence
  Synthetic
uaaauaaagugccacugugugua

SEQ ID NO: 507000 - RNA, 24 nt, Artificial Sequence
  Synthetic
auaaauaaagugccacugugugua

SEQ ID NO: 507001 - RNA, 18 nt, Artificial Sequence
  Synthetic
gaacaaagugugugugua

SEQ ID NO: 507002 - RNA, 19 nt, Artificial Sequence
  Synthetic
agaacaaagugugugugua

SEQ ID NO: 507003 - RNA, 20 nt, Artificial Sequence
  Synthetic
aagaacaaagugugugugua

SEQ ID NO: 507004 - RNA, 21 nt, Artificial Sequence
  Synthetic
gaagaacaaagugugugugua

SEQ ID NO: 507005 - RNA, 22 nt, Artificial Sequence
  Synthetic
ugaagaacaaagugugugugua

SEQ ID NO: 507006 - RNA, 23 nt, Artificial Sequence
  Synthetic
augaagaacaaagugugugugua

SEQ ID NO: 507007 - RNA, 24 nt, Artificial Sequence
  Synthetic
caugaagaacaaagugugugugua

SEQ ID NO: 507008 - RNA, 18 nt, Artificial Sequence
  Synthetic
ggcuaagguuauugugua

SEQ ID NO: 507009 - RNA, 19 nt, Artificial Sequence
  Synthetic
uggcuaagguuauugugua

SEQ ID NO: 507010 - RNA, 20 nt, Artificial Sequence
  Synthetic
uuggcuaagguuauugugua

SEQ ID NO: 507011 - RNA, 21 nt, Artificial Sequence
  Synthetic
uuuggcuaagguuauugugua

SEQ ID NO: 507012 - RNA, 22 nt, Artificial Sequence
  Synthetic
auuuggcuaagguuauugugua

SEQ ID NO: 507013 - RNA, 23 nt, Artificial Sequence
  Synthetic
aauuuggcuaagguuauugugua

SEQ ID NO: 507014 - RNA, 24 nt, Artificial Sequence
  Synthetic
gaauuuggcuaagguuauugugua

SEQ ID NO: 507015 - RNA, 18 nt, Artificial Sequence
  Synthetic
uaguggccggcuugugua

SEQ ID NO: 507016 - RNA, 19 nt, Artificial Sequence
  Synthetic
auaguggccggcuugugua

SEQ ID NO: 507017 - RNA, 20 nt, Artificial Sequence
  Synthetic
uauaguggccggcuugugua

SEQ ID NO: 507018 - RNA, 21 nt, Artificial Sequence
  Synthetic
uuauaguggccggcuugugua

SEQ ID NO: 507019 - RNA, 22 nt, Artificial Sequence
  Synthetic
auuauaguggccggcuugugua

SEQ ID NO: 507020 - RNA, 23 nt, Artificial Sequence
  Synthetic
aauuauaguggccggcuugugua

SEQ ID NO: 507021 - RNA, 24 nt, Artificial Sequence
  Synthetic
uaauuauaguggccggcuugugua

SEQ ID NO: 507022 - RNA, 18 nt, Artificial Sequence
  Synthetic
uaaaaaacauuuugugua

SEQ ID NO: 507023 - RNA, 19 nt, Artificial Sequence
  Synthetic
uuaaaaaacauuuugugua

SEQ ID NO: 507024 - RNA, 20 nt, Artificial Sequence
  Synthetic
uuuaaaaaacauuuugugua

SEQ ID NO: 507025 - RNA, 21 nt, Artificial Sequence
  Synthetic
cuuuaaaaaacauuuugugua

SEQ ID NO: 507026 - RNA, 22 nt, Artificial Sequence
  Synthetic
acuuuaaaaaacauuuugugua

SEQ ID NO: 507027 - RNA, 23 nt, Artificial Sequence
  Synthetic
aacuuuaaaaaacauuuugugua

SEQ ID NO: 507028 - RNA, 24 nt, Artificial Sequence
  Synthetic
aaacuuuaaaaaacauuuugugua

SEQ ID NO: 507029 - RNA, 18 nt, Artificial Sequence
  Synthetic
accuaauaucaaauugua

SEQ ID NO: 507030 - RNA, 19 nt, Artificial Sequence
  Synthetic
uaccuaauaucaaauugua

SEQ ID NO: 507031 - RNA, 20 nt, Artificial Sequence
  Synthetic
uuaccuaauaucaaauugua

SEQ ID NO: 507032 - RNA, 21 nt, Artificial Sequence
  Synthetic
uuuaccuaauaucaaauugua

SEQ ID NO: 507033 - RNA, 22 nt, Artificial Sequence
  Synthetic
auuuaccuaauaucaaauugua

SEQ ID NO: 507034 - RNA, 23 nt, Artificial Sequence
  Synthetic
cauuuaccuaauaucaaauugua

SEQ ID NO: 507035 - RNA, 24 nt, Artificial Sequence
  Synthetic
acauuuaccuaauaucaaauugua

SEQ ID NO: 507036 - RNA, 18 nt, Artificial Sequence
  Synthetic
uuacaugaaugaauugua

SEQ ID NO: 507037 - RNA, 19 nt, Artificial Sequence
  Synthetic
guuacaugaaugaauugua

SEQ ID NO: 507038 - RNA, 20 nt, Artificial Sequence
  Synthetic
gguuacaugaaugaauugua

SEQ ID NO: 507039 - RNA, 21 nt, Artificial Sequence
  Synthetic
ugguuacaugaaugaauugua

SEQ ID NO: 507040 - RNA, 22 nt, Artificial Sequence
  Synthetic
uugguuacaugaaugaauugua

SEQ ID NO: 507041 - RNA, 23 nt, Artificial Sequence
  Synthetic
uuugguuacaugaaugaauugua

SEQ ID NO: 507042 - RNA, 24 nt, Artificial Sequence
  Synthetic
uuuugguuacaugaaugaauugua

SEQ ID NO: 507043 - RNA, 18 nt, Artificial Sequence
  Synthetic
auuauacaacacauugua

SEQ ID NO: 507044 - RNA, 19 nt, Artificial Sequence
  Synthetic
uauuauacaacacauugua

SEQ ID NO: 507045 - RNA, 20 nt, Artificial Sequence
  Synthetic
guauuauacaacacauugua

SEQ ID NO: 507046 - RNA, 21 nt, Artificial Sequence
  Synthetic
cguauuauacaacacauugua

SEQ ID NO: 507047 - RNA, 22 nt, Artificial Sequence
  Synthetic
acguauuauacaacacauugua

SEQ ID NO: 507048 - RNA, 23 nt, Artificial Sequence
  Synthetic
cacguauuauacaacacauugua

SEQ ID NO: 507049 - RNA, 24 nt, Artificial Sequence
  Synthetic
ucacguauuauacaacacauugua

SEQ ID NO: 507050 - RNA, 18 nt, Artificial Sequence
  Synthetic
uuauaacaauacauugua

SEQ ID NO: 507051 - RNA, 19 nt, Artificial Sequence
  Synthetic
auuauaacaauacauugua

SEQ ID NO: 507052 - RNA, 20 nt, Artificial Sequence
  Synthetic
aauuauaacaauacauugua

SEQ ID NO: 507053 - RNA, 21 nt, Artificial Sequence
  Synthetic
caauuauaacaauacauugua

SEQ ID NO: 507054 - RNA, 22 nt, Artificial Sequence
  Synthetic
acaauuauaacaauacauugua

SEQ ID NO: 507055 - RNA, 23 nt, Artificial Sequence
  Synthetic
aacaauuauaacaauacauugua

SEQ ID NO: 507056 - RNA, 24 nt, Artificial Sequence
  Synthetic
gaacaauuauaacaauacauugua

SEQ ID NO: 507057 - RNA, 18 nt, Artificial Sequence
  Synthetic
caagaaucuaccauugua

SEQ ID NO: 507058 - RNA, 19 nt, Artificial Sequence
  Synthetic
ucaagaaucuaccauugua

SEQ ID NO: 507059 - RNA, 20 nt, Artificial Sequence
  Synthetic
uucaagaaucuaccauugua

SEQ ID NO: 507060 - RNA, 21 nt, Artificial Sequence
  Synthetic
auucaagaaucuaccauugua

SEQ ID NO: 507061 - RNA, 22 nt, Artificial Sequence
  Synthetic
gauucaagaaucuaccauugua

SEQ ID NO: 507062 - RNA, 23 nt, Artificial Sequence
  Synthetic
ggauucaagaaucuaccauugua

SEQ ID NO: 507063 - RNA, 24 nt, Artificial Sequence
  Synthetic
aggauucaagaaucuaccauugua

SEQ ID NO: 507064 - RNA, 18 nt, Artificial Sequence
  Synthetic
ggccaccuguccauugua

SEQ ID NO: 507065 - RNA, 19 nt, Artificial Sequence
  Synthetic
aggccaccuguccauugua

SEQ ID NO: 507066 - RNA, 20 nt, Artificial Sequence
  Synthetic
aaggccaccuguccauugua

SEQ ID NO: 507067 - RNA, 21 nt, Artificial Sequence
  Synthetic
uaaggccaccuguccauugua

SEQ ID NO: 507068 - RNA, 22 nt, Artificial Sequence
  Synthetic
auaaggccaccuguccauugua

SEQ ID NO: 507069 - RNA, 23 nt, Artificial Sequence
  Synthetic
aauaaggccaccuguccauugua

SEQ ID NO: 507070 - RNA, 24 nt, Artificial Sequence
  Synthetic
caauaaggccaccuguccauugua

SEQ ID NO: 507071 - RNA, 18 nt, Artificial Sequence
  Synthetic
ugugauguacucauugua

SEQ ID NO: 507072 - RNA, 19 nt, Artificial Sequence
  Synthetic
cugugauguacucauugua

SEQ ID NO: 507073 - RNA, 20 nt, Artificial Sequence
  Synthetic
ccugugauguacucauugua

SEQ ID NO: 507074 - RNA, 21 nt, Artificial Sequence
  Synthetic
uccugugauguacucauugua

SEQ ID NO: 507075 - RNA, 22 nt, Artificial Sequence
  Synthetic
auccugugauguacucauugua

SEQ ID NO: 507076 - RNA, 23 nt, Artificial Sequence
  Synthetic
aauccugugauguacucauugua

SEQ ID NO: 507077 - RNA, 24 nt, Artificial Sequence
  Synthetic
aaauccugugauguacucauugua

SEQ ID NO: 507078 - RNA, 18 nt, Artificial Sequence
  Synthetic
agagaugaugagauugua

SEQ ID NO: 507079 - RNA, 19 nt, Artificial Sequence
  Synthetic
aagagaugaugagauugua

SEQ ID NO: 507080 - RNA, 20 nt, Artificial Sequence
  Synthetic
aaagagaugaugagauugua

SEQ ID NO: 507081 - RNA, 21 nt, Artificial Sequence
  Synthetic
gaaagagaugaugagauugua

SEQ ID NO: 507082 - RNA, 22 nt, Artificial Sequence
  Synthetic
ggaaagagaugaugagauugua

SEQ ID NO: 507083 - RNA, 23 nt, Artificial Sequence
  Synthetic
aggaaagagaugaugagauugua

SEQ ID NO: 507084 - RNA, 24 nt, Artificial Sequence
  Synthetic
caggaaagagaugaugagauugua

SEQ ID NO: 507085 - RNA, 18 nt, Artificial Sequence
  Synthetic
aguucaaaauggauugua

SEQ ID NO: 507086 - RNA, 19 nt, Artificial Sequence
  Synthetic
gaguucaaaauggauugua

SEQ ID NO: 507087 - RNA, 20 nt, Artificial Sequence
  Synthetic
cgaguucaaaauggauugua

SEQ ID NO: 507088 - RNA, 21 nt, Artificial Sequence
  Synthetic
ucgaguucaaaauggauugua

SEQ ID NO: 507089 - RNA, 22 nt, Artificial Sequence
  Synthetic
uucgaguucaaaauggauugua

SEQ ID NO: 507090 - RNA, 23 nt, Artificial Sequence
  Synthetic
auucgaguucaaaauggauugua

SEQ ID NO: 507091 - RNA, 24 nt, Artificial Sequence
  Synthetic
uauucgaguucaaaauggauugua

SEQ ID NO: 507092 - RNA, 18 nt, Artificial Sequence
  Synthetic
ucauauuaucauauugua

SEQ ID NO: 507093 - RNA, 19 nt, Artificial Sequence
  Synthetic
aucauauuaucauauugua

SEQ ID NO: 507094 - RNA, 20 nt, Artificial Sequence
  Synthetic
uaucauauuaucauauugua

SEQ ID NO: 507095 - RNA, 21 nt, Artificial Sequence
  Synthetic
guaucauauuaucauauugua

SEQ ID NO: 507096 - RNA, 22 nt, Artificial Sequence
  Synthetic
uguaucauauuaucauauugua

SEQ ID NO: 507097 - RNA, 23 nt, Artificial Sequence
  Synthetic
auguaucauauuaucauauugua

SEQ ID NO: 507098 - RNA, 24 nt, Artificial Sequence
  Synthetic
aauguaucauauuaucauauugua

SEQ ID NO: 507099 - RNA, 18 nt, Artificial Sequence
  Synthetic
uaagacagacguauugua

SEQ ID NO: 507100 - RNA, 19 nt, Artificial Sequence
  Synthetic
uuaagacagacguauugua

SEQ ID NO: 507101 - RNA, 20 nt, Artificial Sequence
  Synthetic
auuaagacagacguauugua

SEQ ID NO: 507102 - RNA, 21 nt, Artificial Sequence
  Synthetic
uauuaagacagacguauugua

SEQ ID NO: 507103 - RNA, 22 nt, Artificial Sequence
  Synthetic
uuauuaagacagacguauugua

SEQ ID NO: 507104 - RNA, 23 nt, Artificial Sequence
  Synthetic
auuauuaagacagacguauugua

SEQ ID NO: 507105 - RNA, 24 nt, Artificial Sequence
  Synthetic
aauuauuaagacagacguauugua

SEQ ID NO: 507106 - RNA, 18 nt, Artificial Sequence
  Synthetic
acucugugguguauugua

SEQ ID NO: 507107 - RNA, 19 nt, Artificial Sequence
  Synthetic
uacucugugguguauugua

SEQ ID NO: 507108 - RNA, 20 nt, Artificial Sequence
  Synthetic
cuacucugugguguauugua

SEQ ID NO: 507109 - RNA, 21 nt, Artificial Sequence
  Synthetic
ucuacucugugguguauugua

SEQ ID NO: 507110 - RNA, 22 nt, Artificial Sequence
  Synthetic
uucuacucugugguguauugua

SEQ ID NO: 507111 - RNA, 23 nt, Artificial Sequence
  Synthetic
cuucuacucugugguguauugua

SEQ ID NO: 507112 - RNA, 24 nt, Artificial Sequence
  Synthetic
ccuucuacucugugguguauugua

SEQ ID NO: 507113 - RNA, 18 nt, Artificial Sequence
  Synthetic
ccacaucuguggcuugua

SEQ ID NO: 507114 - RNA, 19 nt, Artificial Sequence
  Synthetic
accacaucuguggcuugua

SEQ ID NO: 507115 - RNA, 20 nt, Artificial Sequence
  Synthetic
aaccacaucuguggcuugua

SEQ ID NO: 507116 - RNA, 21 nt, Artificial Sequence
  Synthetic
aaaccacaucuguggcuugua

SEQ ID NO: 507117 - RNA, 22 nt, Artificial Sequence
  Synthetic
aaaaccacaucuguggcuugua

SEQ ID NO: 507118 - RNA, 23 nt, Artificial Sequence
  Synthetic
aaaaaccacaucuguggcuugua

SEQ ID NO: 507119 - RNA, 24 nt, Artificial Sequence
  Synthetic
aaaaaaccacaucuguggcuugua

SEQ ID NO: 507120 - RNA, 18 nt, Artificial Sequence
  Synthetic
auuuguggcaaucuugua

SEQ ID NO: 507121 - RNA, 19 nt, Artificial Sequence
  Synthetic
aauuuguggcaaucuugua

SEQ ID NO: 507122 - RNA, 20 nt, Artificial Sequence
  Synthetic
gaauuuguggcaaucuugua

SEQ ID NO: 507123 - RNA, 21 nt, Artificial Sequence
  Synthetic
ugaauuuguggcaaucuugua

SEQ ID NO: 507124 - RNA, 22 nt, Artificial Sequence
  Synthetic
augaauuuguggcaaucuugua

SEQ ID NO: 507125 - RNA, 23 nt, Artificial Sequence
  Synthetic
caugaauuuguggcaaucuugua

SEQ ID NO: 507126 - RNA, 24 nt, Artificial Sequence
  Synthetic
gcaugaauuuguggcaaucuugua

SEQ ID NO: 507127 - RNA, 18 nt, Artificial Sequence
  Synthetic
ugugaaagacuucuugua

SEQ ID NO: 507128 - RNA, 19 nt, Artificial Sequence
  Synthetic
augugaaagacuucuugua

SEQ ID NO: 507129 - RNA, 20 nt, Artificial Sequence
  Synthetic
aaugugaaagacuucuugua

SEQ ID NO: 507130 - RNA, 21 nt, Artificial Sequence
  Synthetic
uaaugugaaagacuucuugua

SEQ ID NO: 507131 - RNA, 22 nt, Artificial Sequence
  Synthetic
cuaaugugaaagacuucuugua

SEQ ID NO: 507132 - RNA, 23 nt, Artificial Sequence
  Synthetic
acuaaugugaaagacuucuugua

SEQ ID NO: 507133 - RNA, 24 nt, Artificial Sequence
  Synthetic
uacuaaugugaaagacuucuugua

SEQ ID NO: 507134 - RNA, 18 nt, Artificial Sequence
  Synthetic
cgauacuguuaaguugua

SEQ ID NO: 507135 - RNA, 19 nt, Artificial Sequence
  Synthetic
acgauacuguuaaguugua

SEQ ID NO: 507136 - RNA, 20 nt, Artificial Sequence
  Synthetic
gacgauacuguuaaguugua

SEQ ID NO: 507137 - RNA, 21 nt, Artificial Sequence
  Synthetic
ugacgauacuguuaaguugua

SEQ ID NO: 507138 - RNA, 22 nt, Artificial Sequence
  Synthetic
uugacgauacuguuaaguugua

SEQ ID NO: 507139 - RNA, 23 nt, Artificial Sequence
  Synthetic
cuugacgauacuguuaaguugua

SEQ ID NO: 507140 - RNA, 24 nt, Artificial Sequence
  Synthetic
ccuugacgauacuguuaaguugua

SEQ ID NO: 507141 - RNA, 18 nt, Artificial Sequence
  Synthetic
gaguggaugucaguugua

SEQ ID NO: 507142 - RNA, 19 nt, Artificial Sequence
  Synthetic
ggaguggaugucaguugua

SEQ ID NO: 507143 - RNA, 20 nt, Artificial Sequence
  Synthetic
gggaguggaugucaguugua

SEQ ID NO: 507144 - RNA, 21 nt, Artificial Sequence
  Synthetic
ugggaguggaugucaguugua

SEQ ID NO: 507145 - RNA, 22 nt, Artificial Sequence
  Synthetic
gugggaguggaugucaguugua

SEQ ID NO: 507146 - RNA, 23 nt, Artificial Sequence
  Synthetic
ggugggaguggaugucaguugua

SEQ ID NO: 507147 - RNA, 24 nt, Artificial Sequence
  Synthetic
uggugggaguggaugucaguugua

SEQ ID NO: 507148 - RNA, 18 nt, Artificial Sequence
  Synthetic
gaauauaggugaguugua

SEQ ID NO: 507149 - RNA, 19 nt, Artificial Sequence
  Synthetic
ugaauauaggugaguugua

SEQ ID NO: 507150 - RNA, 20 nt, Artificial Sequence
  Synthetic
cugaauauaggugaguugua

SEQ ID NO: 507151 - RNA, 21 nt, Artificial Sequence
  Synthetic
ccugaauauaggugaguugua

SEQ ID NO: 507152 - RNA, 22 nt, Artificial Sequence
  Synthetic
cccugaauauaggugaguugua

SEQ ID NO: 507153 - RNA, 23 nt, Artificial Sequence
  Synthetic
ccccugaauauaggugaguugua

SEQ ID NO: 507154 - RNA, 24 nt, Artificial Sequence
  Synthetic
uccccugaauauaggugaguugua

SEQ ID NO: 507155 - RNA, 18 nt, Artificial Sequence
  Synthetic
auaugguuaauaguugua

SEQ ID NO: 507156 - RNA, 19 nt, Artificial Sequence
  Synthetic
cauaugguuaauaguugua

SEQ ID NO: 507157 - RNA, 20 nt, Artificial Sequence
  Synthetic
ccauaugguuaauaguugua

SEQ ID NO: 507158 - RNA, 21 nt, Artificial Sequence
  Synthetic
gccauaugguuaauaguugua

SEQ ID NO: 507159 - RNA, 22 nt, Artificial Sequence
  Synthetic
agccauaugguuaauaguugua

SEQ ID NO: 507160 - RNA, 23 nt, Artificial Sequence
  Synthetic
cagccauaugguuaauaguugua

SEQ ID NO: 507161 - RNA, 24 nt, Artificial Sequence
  Synthetic
acagccauaugguuaauaguugua

SEQ ID NO: 507162 - RNA, 18 nt, Artificial Sequence
  Synthetic
ugggagguggagguugua

SEQ ID NO: 507163 - RNA, 19 nt, Artificial Sequence
  Synthetic
uugggagguggagguugua

SEQ ID NO: 507164 - RNA, 20 nt, Artificial Sequence
  Synthetic
cuugggagguggagguugua

SEQ ID NO: 507165 - RNA, 21 nt, Artificial Sequence
  Synthetic
acuugggagguggagguugua

SEQ ID NO: 507166 - RNA, 22 nt, Artificial Sequence
  Synthetic
aacuugggagguggagguugua

SEQ ID NO: 507167 - RNA, 23 nt, Artificial Sequence
  Synthetic
gaacuugggagguggagguugua

SEQ ID NO: 507168 - RNA, 24 nt, Artificial Sequence
  Synthetic
ugaacuugggagguggagguugua

SEQ ID NO: 507169 - RNA, 18 nt, Artificial Sequence
  Synthetic
gagacaaugccuguugua

SEQ ID NO: 507170 - RNA, 19 nt, Artificial Sequence
  Synthetic
ugagacaaugccuguugua

SEQ ID NO: 507171 - RNA, 20 nt, Artificial Sequence
  Synthetic
augagacaaugccuguugua

SEQ ID NO: 507172 - RNA, 21 nt, Artificial Sequence
  Synthetic
uaugagacaaugccuguugua

SEQ ID NO: 507173 - RNA, 22 nt, Artificial Sequence
  Synthetic
auaugagacaaugccuguugua

SEQ ID NO: 507174 - RNA, 23 nt, Artificial Sequence
  Synthetic
gauaugagacaaugccuguugua

SEQ ID NO: 507175 - RNA, 24 nt, Artificial Sequence
  Synthetic
agauaugagacaaugccuguugua

SEQ ID NO: 507176 - RNA, 18 nt, Artificial Sequence
  Synthetic
uaucuaguggcuguugua

SEQ ID NO: 507177 - RNA, 19 nt, Artificial Sequence
  Synthetic
guaucuaguggcuguugua

SEQ ID NO: 507178 - RNA, 20 nt, Artificial Sequence
  Synthetic
uguaucuaguggcuguugua

SEQ ID NO: 507179 - RNA, 21 nt, Artificial Sequence
  Synthetic
guguaucuaguggcuguugua

SEQ ID NO: 507180 - RNA, 22 nt, Artificial Sequence
  Synthetic
uguguaucuaguggcuguugua

SEQ ID NO: 507181 - RNA, 23 nt, Artificial Sequence
  Synthetic
auguguaucuaguggcuguugua

SEQ ID NO: 507182 - RNA, 24 nt, Artificial Sequence
  Synthetic
cauguguaucuaguggcuguugua

SEQ ID NO: 507183 - RNA, 18 nt, Artificial Sequence
  Synthetic
auugaagaauguguugua

SEQ ID NO: 507184 - RNA, 19 nt, Artificial Sequence
  Synthetic
gauugaagaauguguugua

SEQ ID NO: 507185 - RNA, 20 nt, Artificial Sequence
  Synthetic
agauugaagaauguguugua

SEQ ID NO: 507186 - RNA, 21 nt, Artificial Sequence
  Synthetic
aagauugaagaauguguugua

SEQ ID NO: 507187 - RNA, 22 nt, Artificial Sequence
  Synthetic
aaagauugaagaauguguugua

SEQ ID NO: 507188 - RNA, 23 nt, Artificial Sequence
  Synthetic
uaaagauugaagaauguguugua

SEQ ID NO: 507189 - RNA, 24 nt, Artificial Sequence
  Synthetic
cuaaagauugaagaauguguugua

SEQ ID NO: 507190 - RNA, 18 nt, Artificial Sequence
  Synthetic
gauaauugguuuguugua

SEQ ID NO: 507191 - RNA, 19 nt, Artificial Sequence
  Synthetic
ugauaauugguuuguugua

SEQ ID NO: 507192 - RNA, 20 nt, Artificial Sequence
  Synthetic
uugauaauugguuuguugua

SEQ ID NO: 507193 - RNA, 21 nt, Artificial Sequence
  Synthetic
auugauaauugguuuguugua

SEQ ID NO: 507194 - RNA, 22 nt, Artificial Sequence
  Synthetic
cauugauaauugguuuguugua

SEQ ID NO: 507195 - RNA, 23 nt, Artificial Sequence
  Synthetic
ucauugauaauugguuuguugua

SEQ ID NO: 507196 - RNA, 24 nt, Artificial Sequence
  Synthetic
uucauugauaauugguuuguugua

SEQ ID NO: 507197 - RNA, 18 nt, Artificial Sequence
  Synthetic
ugugaaaagaaauuugua

SEQ ID NO: 507198 - RNA, 19 nt, Artificial Sequence
  Synthetic
augugaaaagaaauuugua

SEQ ID NO: 507199 - RNA, 20 nt, Artificial Sequence
  Synthetic
aaugugaaaagaaauuugua

SEQ ID NO: 507200 - RNA, 21 nt, Artificial Sequence
  Synthetic
caaugugaaaagaaauuugua

SEQ ID NO: 507201 - RNA, 22 nt, Artificial Sequence
  Synthetic
ucaaugugaaaagaaauuugua

SEQ ID NO: 507202 - RNA, 23 nt, Artificial Sequence
  Synthetic
gucaaugugaaaagaaauuugua

SEQ ID NO: 507203 - RNA, 24 nt, Artificial Sequence
  Synthetic
ugucaaugugaaaagaaauuugua

SEQ ID NO: 507204 - RNA, 18 nt, Artificial Sequence
  Synthetic
ugccuuguauccuuugua

SEQ ID NO: 507205 - RNA, 19 nt, Artificial Sequence
  Synthetic
cugccuuguauccuuugua

SEQ ID NO: 507206 - RNA, 20 nt, Artificial Sequence
  Synthetic
acugccuuguauccuuugua

SEQ ID NO: 507207 - RNA, 21 nt, Artificial Sequence
  Synthetic
cacugccuuguauccuuugua

SEQ ID NO: 507208 - RNA, 22 nt, Artificial Sequence
  Synthetic
ccacugccuuguauccuuugua

SEQ ID NO: 507209 - RNA, 23 nt, Artificial Sequence
  Synthetic
accacugccuuguauccuuugua

SEQ ID NO: 507210 - RNA, 24 nt, Artificial Sequence
  Synthetic
uaccacugccuuguauccuuugua

SEQ ID NO: 507211 - RNA, 18 nt, Artificial Sequence
  Synthetic
gacauaaauagcuuugua

SEQ ID NO: 507212 - RNA, 19 nt, Artificial Sequence
  Synthetic
agacauaaauagcuuugua

SEQ ID NO: 507213 - RNA, 20 nt, Artificial Sequence
  Synthetic
uagacauaaauagcuuugua

SEQ ID NO: 507214 - RNA, 21 nt, Artificial Sequence
  Synthetic
guagacauaaauagcuuugua

SEQ ID NO: 507215 - RNA, 22 nt, Artificial Sequence
  Synthetic
aguagacauaaauagcuuugua

SEQ ID NO: 507216 - RNA, 23 nt, Artificial Sequence
  Synthetic
uaguagacauaaauagcuuugua

SEQ ID NO: 507217 - RNA, 24 nt, Artificial Sequence
  Synthetic
cuaguagacauaaauagcuuugua

SEQ ID NO: 507218 - RNA, 18 nt, Artificial Sequence
  Synthetic
uaauuccauaaguuugua

SEQ ID NO: 507219 - RNA, 19 nt, Artificial Sequence
  Synthetic
cuaauuccauaaguuugua

SEQ ID NO: 507220 - RNA, 20 nt, Artificial Sequence
  Synthetic
ucuaauuccauaaguuugua

SEQ ID NO: 507221 - RNA, 21 nt, Artificial Sequence
  Synthetic
aucuaauuccauaaguuugua

SEQ ID NO: 507222 - RNA, 22 nt, Artificial Sequence
  Synthetic
aaucuaauuccauaaguuugua

SEQ ID NO: 507223 - RNA, 23 nt, Artificial Sequence
  Synthetic
gaaucuaauuccauaaguuugua

SEQ ID NO: 507224 - RNA, 24 nt, Artificial Sequence
  Synthetic
agaaucuaauuccauaaguuugua

SEQ ID NO: 507225 - RNA, 18 nt, Artificial Sequence
  Synthetic
aacuuaaaggcguuugua

SEQ ID NO: 507226 - RNA, 19 nt, Artificial Sequence
  Synthetic
uaacuuaaaggcguuugua

SEQ ID NO: 507227 - RNA, 20 nt, Artificial Sequence
  Synthetic
uuaacuuaaaggcguuugua

SEQ ID NO: 507228 - RNA, 21 nt, Artificial Sequence
  Synthetic
uuuaacuuaaaggcguuugua

SEQ ID NO: 507229 - RNA, 22 nt, Artificial Sequence
  Synthetic
auuuaacuuaaaggcguuugua

SEQ ID NO: 507230 - RNA, 23 nt, Artificial Sequence
  Synthetic
uauuuaacuuaaaggcguuugua

SEQ ID NO: 507231 - RNA, 24 nt, Artificial Sequence
  Synthetic
uuauuuaacuuaaaggcguuugua

SEQ ID NO: 507232 - RNA, 18 nt, Artificial Sequence
  Synthetic
guacaaaccagguuugua

SEQ ID NO: 507233 - RNA, 19 nt, Artificial Sequence
  Synthetic
aguacaaaccagguuugua

SEQ ID NO: 507234 - RNA, 20 nt, Artificial Sequence
  Synthetic
uaguacaaaccagguuugua

SEQ ID NO: 507235 - RNA, 21 nt, Artificial Sequence
  Synthetic
guaguacaaaccagguuugua

SEQ ID NO: 507236 - RNA, 22 nt, Artificial Sequence
  Synthetic
aguaguacaaaccagguuugua

SEQ ID NO: 507237 - RNA, 23 nt, Artificial Sequence
  Synthetic
gaguaguacaaaccagguuugua

SEQ ID NO: 507238 - RNA, 24 nt, Artificial Sequence
  Synthetic
ugaguaguacaaaccagguuugua

SEQ ID NO: 507239 - RNA, 18 nt, Artificial Sequence
  Synthetic
augcuuuugaauuuugua

SEQ ID NO: 507240 - RNA, 19 nt, Artificial Sequence
  Synthetic
aaugcuuuugaauuuugua

SEQ ID NO: 507241 - RNA, 20 nt, Artificial Sequence
  Synthetic
caaugcuuuugaauuuugua

SEQ ID NO: 507242 - RNA, 21 nt, Artificial Sequence
  Synthetic
ucaaugcuuuugaauuuugua

SEQ ID NO: 507243 - RNA, 22 nt, Artificial Sequence
  Synthetic
uucaaugcuuuugaauuuugua

SEQ ID NO: 507244 - RNA, 23 nt, Artificial Sequence
  Synthetic
uuucaaugcuuuugaauuuugua

SEQ ID NO: 507245 - RNA, 24 nt, Artificial Sequence
  Synthetic
auuucaaugcuuuugaauuuugua

SEQ ID NO: 507246 - RNA, 18 nt, Artificial Sequence
  Synthetic
gauuuaaguccuuuugua

SEQ ID NO: 507247 - RNA, 19 nt, Artificial Sequence
  Synthetic
ggauuuaaguccuuuugua

SEQ ID NO: 507248 - RNA, 20 nt, Artificial Sequence
  Synthetic
aggauuuaaguccuuuugua

SEQ ID NO: 507249 - RNA, 21 nt, Artificial Sequence
  Synthetic
aaggauuuaaguccuuuugua

SEQ ID NO: 507250 - RNA, 22 nt, Artificial Sequence
  Synthetic
aaaggauuuaaguccuuuugua

SEQ ID NO: 507251 - RNA, 23 nt, Artificial Sequence
  Synthetic
gaaaggauuuaaguccuuuugua

SEQ ID NO: 507252 - RNA, 24 nt, Artificial Sequence
  Synthetic
agaaaggauuuaaguccuuuugua

SEQ ID NO: 507253 - RNA, 18 nt, Artificial Sequence
  Synthetic
ggaugauggauuuuugua

SEQ ID NO: 507254 - RNA, 19 nt, Artificial Sequence
  Synthetic
cggaugauggauuuuugua

SEQ ID NO: 507255 - RNA, 20 nt, Artificial Sequence
  Synthetic
ucggaugauggauuuuugua

SEQ ID NO: 507256 - RNA, 21 nt, Artificial Sequence
  Synthetic
aucggaugauggauuuuugua

SEQ ID NO: 507257 - RNA, 22 nt, Artificial Sequence
  Synthetic
uaucggaugauggauuuuugua

SEQ ID NO: 507258 - RNA, 23 nt, Artificial Sequence
  Synthetic
cuaucggaugauggauuuuugua

SEQ ID NO: 507259 - RNA, 24 nt, Artificial Sequence
  Synthetic
ucuaucggaugauggauuuuugua

SEQ ID NO: 507260 - RNA, 18 nt, Artificial Sequence
  Synthetic
uucuguuugauuuuugua

SEQ ID NO: 507261 - RNA, 19 nt, Artificial Sequence
  Synthetic
cuucuguuugauuuuugua

SEQ ID NO: 507262 - RNA, 20 nt, Artificial Sequence
  Synthetic
ccuucuguuugauuuuugua

SEQ ID NO: 507263 - RNA, 21 nt, Artificial Sequence
  Synthetic
uccuucuguuugauuuuugua

SEQ ID NO: 507264 - RNA, 22 nt, Artificial Sequence
  Synthetic
uuccuucuguuugauuuuugua

SEQ ID NO: 507265 - RNA, 23 nt, Artificial Sequence
  Synthetic
uuuccuucuguuugauuuuugua

SEQ ID NO: 507266 - RNA, 24 nt, Artificial Sequence
  Synthetic
auuuccuucuguuugauuuuugua

SEQ ID NO: 507267 - RNA, 18 nt, Artificial Sequence
  Synthetic
gcuguuuuacuuuuugua

SEQ ID NO: 507268 - RNA, 19 nt, Artificial Sequence
  Synthetic
ugcuguuuuacuuuuugua

SEQ ID NO: 507269 - RNA, 20 nt, Artificial Sequence
  Synthetic
uugcuguuuuacuuuuugua

SEQ ID NO: 507270 - RNA, 21 nt, Artificial Sequence
  Synthetic
uuugcuguuuuacuuuuugua

SEQ ID NO: 507271 - RNA, 22 nt, Artificial Sequence
  Synthetic
auuugcuguuuuacuuuuugua

SEQ ID NO: 507272 - RNA, 23 nt, Artificial Sequence
  Synthetic
uauuugcuguuuuacuuuuugua

SEQ ID NO: 507273 - RNA, 24 nt, Artificial Sequence
  Synthetic
auauuugcuguuuuacuuuuugua

SEQ ID NO: 507274 - RNA, 18 nt, Artificial Sequence
  Synthetic
uuguuaagaguuuuugua

SEQ ID NO: 507275 - RNA, 19 nt, Artificial Sequence
  Synthetic
auuguuaagaguuuuugua

SEQ ID NO: 507276 - RNA, 20 nt, Artificial Sequence
  Synthetic
uauuguuaagaguuuuugua

SEQ ID NO: 507277 - RNA, 21 nt, Artificial Sequence
  Synthetic
uuauuguuaagaguuuuugua

SEQ ID NO: 507278 - RNA, 22 nt, Artificial Sequence
  Synthetic
auuauuguuaagaguuuuugua

SEQ ID NO: 507279 - RNA, 23 nt, Artificial Sequence
  Synthetic
aauuauuguuaagaguuuuugua

SEQ ID NO: 507280 - RNA, 24 nt, Artificial Sequence
  Synthetic
caauuauuguuaagaguuuuugua

SEQ ID NO: 507281 - RNA, 18 nt, Artificial Sequence
  Synthetic
caucucaaaaaaaaauua

SEQ ID NO: 507282 - RNA, 19 nt, Artificial Sequence
  Synthetic
ccaucucaaaaaaaaauua

SEQ ID NO: 507283 - RNA, 20 nt, Artificial Sequence
  Synthetic
uccaucucaaaaaaaaauua

SEQ ID NO: 507284 - RNA, 21 nt, Artificial Sequence
  Synthetic
cuccaucucaaaaaaaaauua

SEQ ID NO: 507285 - RNA, 22 nt, Artificial Sequence
  Synthetic
acuccaucucaaaaaaaaauua

SEQ ID NO: 507286 - RNA, 23 nt, Artificial Sequence
  Synthetic
gacuccaucucaaaaaaaaauua

SEQ ID NO: 507287 - RNA, 24 nt, Artificial Sequence
  Synthetic
agacuccaucucaaaaaaaaauua

SEQ ID NO: 507288 - RNA, 18 nt, Artificial Sequence
  Synthetic
cagaaacaaaaaaaauua

SEQ ID NO: 507289 - RNA, 19 nt, Artificial Sequence
  Synthetic
ucagaaacaaaaaaaauua

SEQ ID NO: 507290 - RNA, 20 nt, Artificial Sequence
  Synthetic
uucagaaacaaaaaaaauua

SEQ ID NO: 507291 - RNA, 21 nt, Artificial Sequence
  Synthetic
cuucagaaacaaaaaaaauua

SEQ ID NO: 507292 - RNA, 22 nt, Artificial Sequence
  Synthetic
acuucagaaacaaaaaaaauua

SEQ ID NO: 507293 - RNA, 23 nt, Artificial Sequence
  Synthetic
uacuucagaaacaaaaaaaauua

SEQ ID NO: 507294 - RNA, 24 nt, Artificial Sequence
  Synthetic
guacuucagaaacaaaaaaaauua

SEQ ID NO: 507295 - RNA, 18 nt, Artificial Sequence
  Synthetic
aaaaauacaaaaaaauua

SEQ ID NO: 507296 - RNA, 19 nt, Artificial Sequence
  Synthetic
uaaaaauacaaaaaaauua

SEQ ID NO: 507297 - RNA, 20 nt, Artificial Sequence
  Synthetic
cuaaaaauacaaaaaaauua

SEQ ID NO: 507298 - RNA, 21 nt, Artificial Sequence
  Synthetic
acuaaaaauacaaaaaaauua

SEQ ID NO: 507299 - RNA, 22 nt, Artificial Sequence
  Synthetic
uacuaaaaauacaaaaaaauua

SEQ ID NO: 507300 - RNA, 23 nt, Artificial Sequence
  Synthetic
cuacuaaaaauacaaaaaaauua

SEQ ID NO: 507301 - RNA, 24 nt, Artificial Sequence
  Synthetic
ucuacuaaaaauacaaaaaaauua

SEQ ID NO: 507302 - RNA, 18 nt, Artificial Sequence
  Synthetic
acuucuagaaaaaaauua

SEQ ID NO: 507303 - RNA, 19 nt, Artificial Sequence
  Synthetic
aacuucuagaaaaaaauua

SEQ ID NO: 507304 - RNA, 20 nt, Artificial Sequence
  Synthetic
aaacuucuagaaaaaaauua

SEQ ID NO: 507305 - RNA, 21 nt, Artificial Sequence
  Synthetic
aaaacuucuagaaaaaaauua

SEQ ID NO: 507306 - RNA, 22 nt, Artificial Sequence
  Synthetic
gaaaacuucuagaaaaaaauua

SEQ ID NO: 507307 - RNA, 23 nt, Artificial Sequence
  Synthetic
ugaaaacuucuagaaaaaaauua

SEQ ID NO: 507308 - RNA, 24 nt, Artificial Sequence
  Synthetic
gugaaaacuucuagaaaaaaauua

SEQ ID NO: 507309 - RNA, 18 nt, Artificial Sequence
  Synthetic
aauucuucagaaaaauua

SEQ ID NO: 507310 - RNA, 19 nt, Artificial Sequence
  Synthetic
aaauucuucagaaaaauua

SEQ ID NO: 507311 - RNA, 20 nt, Artificial Sequence
  Synthetic
caaauucuucagaaaaauua

SEQ ID NO: 507312 - RNA, 21 nt, Artificial Sequence
  Synthetic
ucaaauucuucagaaaaauua

SEQ ID NO: 507313 - RNA, 22 nt, Artificial Sequence
  Synthetic
cucaaauucuucagaaaaauua

SEQ ID NO: 507314 - RNA, 23 nt, Artificial Sequence
  Synthetic
ucucaaauucuucagaaaaauua

SEQ ID NO: 507315 - RNA, 24 nt, Artificial Sequence
  Synthetic
uucucaaauucuucagaaaaauua

SEQ ID NO: 507316 - RNA, 18 nt, Artificial Sequence
  Synthetic
ccuguauguuaaaaauua

SEQ ID NO: 507317 - RNA, 19 nt, Artificial Sequence
  Synthetic
uccuguauguuaaaaauua

SEQ ID NO: 507318 - RNA, 20 nt, Artificial Sequence
  Synthetic
uuccuguauguuaaaaauua

SEQ ID NO: 507319 - RNA, 21 nt, Artificial Sequence
  Synthetic
uuuccuguauguuaaaaauua

SEQ ID NO: 507320 - RNA, 22 nt, Artificial Sequence
  Synthetic
auuuccuguauguuaaaaauua

SEQ ID NO: 507321 - RNA, 23 nt, Artificial Sequence
  Synthetic
gauuuccuguauguuaaaaauua

SEQ ID NO: 507322 - RNA, 24 nt, Artificial Sequence
  Synthetic
ugauuuccuguauguuaaaaauua

SEQ ID NO: 507323 - RNA, 18 nt, Artificial Sequence
  Synthetic
aaaucgaacccaaaauua

SEQ ID NO: 507324 - RNA, 19 nt, Artificial Sequence
  Synthetic
caaaucgaacccaaaauua

SEQ ID NO: 507325 - RNA, 20 nt, Artificial Sequence
  Synthetic
gcaaaucgaacccaaaauua

SEQ ID NO: 507326 - RNA, 21 nt, Artificial Sequence
  Synthetic
agcaaaucgaacccaaaauua

SEQ ID NO: 507327 - RNA, 22 nt, Artificial Sequence
  Synthetic
gagcaaaucgaacccaaaauua

SEQ ID NO: 507328 - RNA, 23 nt, Artificial Sequence
  Synthetic
ggagcaaaucgaacccaaaauua

SEQ ID NO: 507329 - RNA, 24 nt, Artificial Sequence
  Synthetic
aggagcaaaucgaacccaaaauua

SEQ ID NO: 507330 - RNA, 18 nt, Artificial Sequence
  Synthetic
agauugguggcaaaauua

SEQ ID NO: 507331 - RNA, 19 nt, Artificial Sequence
  Synthetic
aagauugguggcaaaauua

SEQ ID NO: 507332 - RNA, 20 nt, Artificial Sequence
  Synthetic
gaagauugguggcaaaauua

SEQ ID NO: 507333 - RNA, 21 nt, Artificial Sequence
  Synthetic
agaagauugguggcaaaauua

SEQ ID NO: 507334 - RNA, 22 nt, Artificial Sequence
  Synthetic
cagaagauugguggcaaaauua

SEQ ID NO: 507335 - RNA, 23 nt, Artificial Sequence
  Synthetic
ccagaagauugguggcaaaauua

SEQ ID NO: 507336 - RNA, 24 nt, Artificial Sequence
  Synthetic
accagaagauugguggcaaaauua

SEQ ID NO: 507337 - RNA, 18 nt, Artificial Sequence
  Synthetic
auuuccacugcaaaauua

SEQ ID NO: 507338 - RNA, 19 nt, Artificial Sequence
  Synthetic
uauuuccacugcaaaauua

SEQ ID NO: 507339 - RNA, 20 nt, Artificial Sequence
  Synthetic
uuauuuccacugcaaaauua

SEQ ID NO: 507340 - RNA, 21 nt, Artificial Sequence
  Synthetic
uuuauuuccacugcaaaauua

SEQ ID NO: 507341 - RNA, 22 nt, Artificial Sequence
  Synthetic
auuuauuuccacugcaaaauua

SEQ ID NO: 507342 - RNA, 23 nt, Artificial Sequence
  Synthetic
gauuuauuuccacugcaaaauua

SEQ ID NO: 507343 - RNA, 24 nt, Artificial Sequence
  Synthetic
ugauuuauuuccacugcaaaauua

SEQ ID NO: 507344 - RNA, 18 nt, Artificial Sequence
  Synthetic
cuaaaguagucaaaauua

SEQ ID NO: 507345 - RNA, 19 nt, Artificial Sequence
  Synthetic
ucuaaaguagucaaaauua

SEQ ID NO: 507346 - RNA, 20 nt, Artificial Sequence
  Synthetic
aucuaaaguagucaaaauua

SEQ ID NO: 507347 - RNA, 21 nt, Artificial Sequence
  Synthetic
uaucuaaaguagucaaaauua

SEQ ID NO: 507348 - RNA, 22 nt, Artificial Sequence
  Synthetic
guaucuaaaguagucaaaauua

SEQ ID NO: 507349 - RNA, 23 nt, Artificial Sequence
  Synthetic
gguaucuaaaguagucaaaauua

SEQ ID NO: 507350 - RNA, 24 nt, Artificial Sequence
  Synthetic
agguaucuaaaguagucaaaauua

SEQ ID NO: 507351 - RNA, 18 nt, Artificial Sequence
  Synthetic
gaacauccuucaaaauua

SEQ ID NO: 507352 - RNA, 19 nt, Artificial Sequence
  Synthetic
agaacauccuucaaaauua

SEQ ID NO: 507353 - RNA, 20 nt, Artificial Sequence
  Synthetic
aagaacauccuucaaaauua

SEQ ID NO: 507354 - RNA, 21 nt, Artificial Sequence
  Synthetic
aaagaacauccuucaaaauua

SEQ ID NO: 507355 - RNA, 22 nt, Artificial Sequence
  Synthetic
gaaagaacauccuucaaaauua

SEQ ID NO: 507356 - RNA, 23 nt, Artificial Sequence
  Synthetic
agaaagaacauccuucaaaauua

SEQ ID NO: 507357 - RNA, 24 nt, Artificial Sequence
  Synthetic
uagaaagaacauccuucaaaauua

SEQ ID NO: 507358 - RNA, 18 nt, Artificial Sequence
  Synthetic
ccuuugcaaugaaaauua

SEQ ID NO: 507359 - RNA, 19 nt, Artificial Sequence
  Synthetic
gccuuugcaaugaaaauua

SEQ ID NO: 507360 - RNA, 20 nt, Artificial Sequence
  Synthetic
ggccuuugcaaugaaaauua

SEQ ID NO: 507361 - RNA, 21 nt, Artificial Sequence
  Synthetic
aggccuuugcaaugaaaauua

SEQ ID NO: 507362 - RNA, 22 nt, Artificial Sequence
  Synthetic
uaggccuuugcaaugaaaauua

SEQ ID NO: 507363 - RNA, 23 nt, Artificial Sequence
  Synthetic
uuaggccuuugcaaugaaaauua

SEQ ID NO: 507364 - RNA, 24 nt, Artificial Sequence
  Synthetic
uuuaggccuuugcaaugaaaauua

SEQ ID NO: 507365 - RNA, 18 nt, Artificial Sequence
  Synthetic
ccauacuuaauaaaauua

SEQ ID NO: 507366 - RNA, 19 nt, Artificial Sequence
  Synthetic
accauacuuaauaaaauua

SEQ ID NO: 507367 - RNA, 20 nt, Artificial Sequence
  Synthetic
caccauacuuaauaaaauua

SEQ ID NO: 507368 - RNA, 21 nt, Artificial Sequence
  Synthetic
ucaccauacuuaauaaaauua

SEQ ID NO: 507369 - RNA, 22 nt, Artificial Sequence
  Synthetic
uucaccauacuuaauaaaauua

SEQ ID NO: 507370 - RNA, 23 nt, Artificial Sequence
  Synthetic
uuucaccauacuuaauaaaauua

SEQ ID NO: 507371 - RNA, 24 nt, Artificial Sequence
  Synthetic
uuuucaccauacuuaauaaaauua

SEQ ID NO: 507372 - RNA, 18 nt, Artificial Sequence
  Synthetic
ucauucaggauaaaauua

SEQ ID NO: 507373 - RNA, 19 nt, Artificial Sequence
  Synthetic
cucauucaggauaaaauua

SEQ ID NO: 507374 - RNA, 20 nt, Artificial Sequence
  Synthetic
gcucauucaggauaaaauua

SEQ ID NO: 507375 - RNA, 21 nt, Artificial Sequence
  Synthetic
ugcucauucaggauaaaauua

SEQ ID NO: 507376 - RNA, 22 nt, Artificial Sequence
  Synthetic
augcucauucaggauaaaauua

SEQ ID NO: 507377 - RNA, 23 nt, Artificial Sequence
  Synthetic
caugcucauucaggauaaaauua

SEQ ID NO: 507378 - RNA, 24 nt, Artificial Sequence
  Synthetic
ucaugcucauucaggauaaaauua

SEQ ID NO: 507379 - RNA, 18 nt, Artificial Sequence
  Synthetic
acccuaaguauaaaauua

SEQ ID NO: 507380 - RNA, 19 nt, Artificial Sequence
  Synthetic
aacccuaaguauaaaauua

SEQ ID NO: 507381 - RNA, 20 nt, Artificial Sequence
  Synthetic
caacccuaaguauaaaauua

SEQ ID NO: 507382 - RNA, 21 nt, Artificial Sequence
  Synthetic
ucaacccuaaguauaaaauua

SEQ ID NO: 507383 - RNA, 22 nt, Artificial Sequence
  Synthetic
aucaacccuaaguauaaaauua

SEQ ID NO: 507384 - RNA, 23 nt, Artificial Sequence
  Synthetic
aaucaacccuaaguauaaaauua

SEQ ID NO: 507385 - RNA, 24 nt, Artificial Sequence
  Synthetic
aaaucaacccuaaguauaaaauua

SEQ ID NO: 507386 - RNA, 18 nt, Artificial Sequence
  Synthetic
agguucuguauaaaauua

SEQ ID NO: 507387 - RNA, 19 nt, Artificial Sequence
  Synthetic
cagguucuguauaaaauua

SEQ ID NO: 507388 - RNA, 20 nt, Artificial Sequence
  Synthetic
gcagguucuguauaaaauua

SEQ ID NO: 507389 - RNA, 21 nt, Artificial Sequence
  Synthetic
ggcagguucuguauaaaauua

SEQ ID NO: 507390 - RNA, 22 nt, Artificial Sequence
  Synthetic
aggcagguucuguauaaaauua

SEQ ID NO: 507391 - RNA, 23 nt, Artificial Sequence
  Synthetic
gaggcagguucuguauaaaauua

SEQ ID NO: 507392 - RNA, 24 nt, Artificial Sequence
  Synthetic
ggaggcagguucuguauaaaauua

SEQ ID NO: 507393 - RNA, 18 nt, Artificial Sequence
  Synthetic
auuauauaaaacaaauua

SEQ ID NO: 507394 - RNA, 19 nt, Artificial Sequence
  Synthetic
gauuauauaaaacaaauua

SEQ ID NO: 507395 - RNA, 20 nt, Artificial Sequence
  Synthetic
agauuauauaaaacaaauua

SEQ ID NO: 507396 - RNA, 21 nt, Artificial Sequence
  Synthetic
gagauuauauaaaacaaauua

SEQ ID NO: 507397 - RNA, 22 nt, Artificial Sequence
  Synthetic
agagauuauauaaaacaaauua

SEQ ID NO: 507398 - RNA, 23 nt, Artificial Sequence
  Synthetic
uagagauuauauaaaacaaauua

SEQ ID NO: 507399 - RNA, 24 nt, Artificial Sequence
  Synthetic
auagagauuauauaaaacaaauua

SEQ ID NO: 507400 - RNA, 18 nt, Artificial Sequence
  Synthetic
ccaucagcccacaaauua

SEQ ID NO: 507401 - RNA, 19 nt, Artificial Sequence
  Synthetic
accaucagcccacaaauua

SEQ ID NO: 507402 - RNA, 20 nt, Artificial Sequence
  Synthetic
aaccaucagcccacaaauua

SEQ ID NO: 507403 - RNA, 21 nt, Artificial Sequence
  Synthetic
aaaccaucagcccacaaauua

SEQ ID NO: 507404 - RNA, 22 nt, Artificial Sequence
  Synthetic
uaaaccaucagcccacaaauua

SEQ ID NO: 507405 - RNA, 23 nt, Artificial Sequence
  Synthetic
guaaaccaucagcccacaaauua

SEQ ID NO: 507406 - RNA, 24 nt, Artificial Sequence
  Synthetic
uguaaaccaucagcccacaaauua

SEQ ID NO: 507407 - RNA, 18 nt, Artificial Sequence
  Synthetic
uaucaggaccucaaauua

SEQ ID NO: 507408 - RNA, 19 nt, Artificial Sequence
  Synthetic
guaucaggaccucaaauua

SEQ ID NO: 507409 - RNA, 20 nt, Artificial Sequence
  Synthetic
uguaucaggaccucaaauua

SEQ ID NO: 507410 - RNA, 21 nt, Artificial Sequence
  Synthetic
auguaucaggaccucaaauua

SEQ ID NO: 507411 - RNA, 22 nt, Artificial Sequence
  Synthetic
uauguaucaggaccucaaauua

SEQ ID NO: 507412 - RNA, 23 nt, Artificial Sequence
  Synthetic
auauguaucaggaccucaaauua

SEQ ID NO: 507413 - RNA, 24 nt, Artificial Sequence
  Synthetic
uauauguaucaggaccucaaauua

SEQ ID NO: 507414 - RNA, 18 nt, Artificial Sequence
  Synthetic
ucuccaguauucaaauua

SEQ ID NO: 507415 - RNA, 19 nt, Artificial Sequence
  Synthetic
gucuccaguauucaaauua

SEQ ID NO: 507416 - RNA, 20 nt, Artificial Sequence
  Synthetic
agucuccaguauucaaauua

SEQ ID NO: 507417 - RNA, 21 nt, Artificial Sequence
  Synthetic
cagucuccaguauucaaauua

SEQ ID NO: 507418 - RNA, 22 nt, Artificial Sequence
  Synthetic
ucagucuccaguauucaaauua

SEQ ID NO: 507419 - RNA, 23 nt, Artificial Sequence
  Synthetic
uucagucuccaguauucaaauua

SEQ ID NO: 507420 - RNA, 24 nt, Artificial Sequence
  Synthetic
uuucagucuccaguauucaaauua

SEQ ID NO: 507421 - RNA, 18 nt, Artificial Sequence
  Synthetic
uaacaaugacagaaauua

SEQ ID NO: 507422 - RNA, 19 nt, Artificial Sequence
  Synthetic
auaacaaugacagaaauua

SEQ ID NO: 507423 - RNA, 20 nt, Artificial Sequence
  Synthetic
uauaacaaugacagaaauua

SEQ ID NO: 507424 - RNA, 21 nt, Artificial Sequence
  Synthetic
uuauaacaaugacagaaauua

SEQ ID NO: 507425 - RNA, 22 nt, Artificial Sequence
  Synthetic
cuuauaacaaugacagaaauua

SEQ ID NO: 507426 - RNA, 23 nt, Artificial Sequence
  Synthetic
gcuuauaacaaugacagaaauua

SEQ ID NO: 507427 - RNA, 24 nt, Artificial Sequence
  Synthetic
cgcuuauaacaaugacagaaauua

SEQ ID NO: 507428 - RNA, 18 nt, Artificial Sequence
  Synthetic
ugucuaaaauagaaauua

SEQ ID NO: 507429 - RNA, 19 nt, Artificial Sequence
  Synthetic
cugucuaaaauagaaauua

SEQ ID NO: 507430 - RNA, 20 nt, Artificial Sequence
  Synthetic
acugucuaaaauagaaauua

SEQ ID NO: 507431 - RNA, 21 nt, Artificial Sequence
  Synthetic
aacugucuaaaauagaaauua

SEQ ID NO: 507432 - RNA, 22 nt, Artificial Sequence
  Synthetic
aaacugucuaaaauagaaauua

SEQ ID NO: 507433 - RNA, 23 nt, Artificial Sequence
  Synthetic
caaacugucuaaaauagaaauua

SEQ ID NO: 507434 - RNA, 24 nt, Artificial Sequence
  Synthetic
acaaacugucuaaaauagaaauua

SEQ ID NO: 507435 - RNA, 18 nt, Artificial Sequence
  Synthetic
cuuuaaauuuagaaauua

SEQ ID NO: 507436 - RNA, 19 nt, Artificial Sequence
  Synthetic
gcuuuaaauuuagaaauua

SEQ ID NO: 507437 - RNA, 20 nt, Artificial Sequence
  Synthetic
ugcuuuaaauuuagaaauua

SEQ ID NO: 507438 - RNA, 21 nt, Artificial Sequence
  Synthetic
augcuuuaaauuuagaaauua

SEQ ID NO: 507439 - RNA, 22 nt, Artificial Sequence
  Synthetic
uaugcuuuaaauuuagaaauua

SEQ ID NO: 507440 - RNA, 23 nt, Artificial Sequence
  Synthetic
auaugcuuuaaauuuagaaauua

SEQ ID NO: 507441 - RNA, 24 nt, Artificial Sequence
  Synthetic
uauaugcuuuaaauuuagaaauua

SEQ ID NO: 507442 - RNA, 18 nt, Artificial Sequence
  Synthetic
cgggucaaaaggaaauua

SEQ ID NO: 507443 - RNA, 19 nt, Artificial Sequence
  Synthetic
gcgggucaaaaggaaauua

SEQ ID NO: 507444 - RNA, 20 nt, Artificial Sequence
  Synthetic
ugcgggucaaaaggaaauua

SEQ ID NO: 507445 - RNA, 21 nt, Artificial Sequence
  Synthetic
augcgggucaaaaggaaauua

SEQ ID NO: 507446 - RNA, 22 nt, Artificial Sequence
  Synthetic
caugcgggucaaaaggaaauua

SEQ ID NO: 507447 - RNA, 23 nt, Artificial Sequence
  Synthetic
ccaugcgggucaaaaggaaauua

SEQ ID NO: 507448 - RNA, 24 nt, Artificial Sequence
  Synthetic
uccaugcgggucaaaaggaaauua

SEQ ID NO: 507449 - RNA, 18 nt, Artificial Sequence
  Synthetic
acaauuggaaggaaauua

SEQ ID NO: 507450 - RNA, 19 nt, Artificial Sequence
  Synthetic
uacaauuggaaggaaauua

SEQ ID NO: 507451 - RNA, 20 nt, Artificial Sequence
  Synthetic
cuacaauuggaaggaaauua

SEQ ID NO: 507452 - RNA, 21 nt, Artificial Sequence
  Synthetic
ucuacaauuggaaggaaauua

SEQ ID NO: 507453 - RNA, 22 nt, Artificial Sequence
  Synthetic
uucuacaauuggaaggaaauua

SEQ ID NO: 507454 - RNA, 23 nt, Artificial Sequence
  Synthetic
auucuacaauuggaaggaaauua

SEQ ID NO: 507455 - RNA, 24 nt, Artificial Sequence
  Synthetic
aauucuacaauuggaaggaaauua

SEQ ID NO: 507456 - RNA, 18 nt, Artificial Sequence
  Synthetic
acauaaagauggaaauua

SEQ ID NO: 507457 - RNA, 19 nt, Artificial Sequence
  Synthetic
gacauaaagauggaaauua

SEQ ID NO: 507458 - RNA, 20 nt, Artificial Sequence
  Synthetic
ggacauaaagauggaaauua

SEQ ID NO: 507459 - RNA, 21 nt, Artificial Sequence
  Synthetic
aggacauaaagauggaaauua

SEQ ID NO: 507460 - RNA, 22 nt, Artificial Sequence
  Synthetic
aaggacauaaagauggaaauua

SEQ ID NO: 507461 - RNA, 23 nt, Artificial Sequence
  Synthetic
caaggacauaaagauggaaauua

SEQ ID NO: 507462 - RNA, 24 nt, Artificial Sequence
  Synthetic
gcaaggacauaaagauggaaauua

SEQ ID NO: 507463 - RNA, 18 nt, Artificial Sequence
  Synthetic
auguucccaaugaaauua

SEQ ID NO: 507464 - RNA, 19 nt, Artificial Sequence
  Synthetic
aauguucccaaugaaauua

SEQ ID NO: 507465 - RNA, 20 nt, Artificial Sequence
  Synthetic
aaauguucccaaugaaauua

SEQ ID NO: 507466 - RNA, 21 nt, Artificial Sequence
  Synthetic
caaauguucccaaugaaauua

SEQ ID NO: 507467 - RNA, 22 nt, Artificial Sequence
  Synthetic
acaaauguucccaaugaaauua

SEQ ID NO: 507468 - RNA, 23 nt, Artificial Sequence
  Synthetic
uacaaauguucccaaugaaauua

SEQ ID NO: 507469 - RNA, 24 nt, Artificial Sequence
  Synthetic
uuacaaauguucccaaugaaauua

SEQ ID NO: 507470 - RNA, 18 nt, Artificial Sequence
  Synthetic
aauuaaggaaugaaauua

SEQ ID NO: 507471 - RNA, 19 nt, Artificial Sequence
  Synthetic
aaauuaaggaaugaaauua

SEQ ID NO: 507472 - RNA, 20 nt, Artificial Sequence
  Synthetic
gaaauuaaggaaugaaauua

SEQ ID NO: 507473 - RNA, 21 nt, Artificial Sequence
  Synthetic
ggaaauuaaggaaugaaauua

SEQ ID NO: 507474 - RNA, 22 nt, Artificial Sequence
  Synthetic
aggaaauuaaggaaugaaauua

SEQ ID NO: 507475 - RNA, 23 nt, Artificial Sequence
  Synthetic
aaggaaauuaaggaaugaaauua

SEQ ID NO: 507476 - RNA, 24 nt, Artificial Sequence
  Synthetic
uaaggaaauuaaggaaugaaauua

SEQ ID NO: 507477 - RNA, 18 nt, Artificial Sequence
  Synthetic
ucacauggccugaaauua

SEQ ID NO: 507478 - RNA, 19 nt, Artificial Sequence
  Synthetic
gucacauggccugaaauua

SEQ ID NO: 507479 - RNA, 20 nt, Artificial Sequence
  Synthetic
agucacauggccugaaauua

SEQ ID NO: 507480 - RNA, 21 nt, Artificial Sequence
  Synthetic
uagucacauggccugaaauua

SEQ ID NO: 507481 - RNA, 22 nt, Artificial Sequence
  Synthetic
cuagucacauggccugaaauua

SEQ ID NO: 507482 - RNA, 23 nt, Artificial Sequence
  Synthetic
acuagucacauggccugaaauua

SEQ ID NO: 507483 - RNA, 24 nt, Artificial Sequence
  Synthetic
gacuagucacauggccugaaauua

SEQ ID NO: 507484 - RNA, 18 nt, Artificial Sequence
  Synthetic
caugucagugugaaauua

SEQ ID NO: 507485 - RNA, 19 nt, Artificial Sequence
  Synthetic
ucaugucagugugaaauua

SEQ ID NO: 507486 - RNA, 20 nt, Artificial Sequence
  Synthetic
cucaugucagugugaaauua

SEQ ID NO: 507487 - RNA, 21 nt, Artificial Sequence
  Synthetic
ccucaugucagugugaaauua

SEQ ID NO: 507488 - RNA, 22 nt, Artificial Sequence
  Synthetic
accucaugucagugugaaauua

SEQ ID NO: 507489 - RNA, 23 nt, Artificial Sequence
  Synthetic
aaccucaugucagugugaaauua

SEQ ID NO: 507490 - RNA, 24 nt, Artificial Sequence
  Synthetic
aaaccucaugucagugugaaauua

SEQ ID NO: 507491 - RNA, 18 nt, Artificial Sequence
  Synthetic
accagcaucuugaaauua

SEQ ID NO: 507492 - RNA, 19 nt, Artificial Sequence
  Synthetic
aaccagcaucuugaaauua

SEQ ID NO: 507493 - RNA, 20 nt, Artificial Sequence
  Synthetic
gaaccagcaucuugaaauua

SEQ ID NO: 507494 - RNA, 21 nt, Artificial Sequence
  Synthetic
ggaaccagcaucuugaaauua

SEQ ID NO: 507495 - RNA, 22 nt, Artificial Sequence
  Synthetic
gggaaccagcaucuugaaauua

SEQ ID NO: 507496 - RNA, 23 nt, Artificial Sequence
  Synthetic
agggaaccagcaucuugaaauua

SEQ ID NO: 507497 - RNA, 24 nt, Artificial Sequence
  Synthetic
cagggaaccagcaucuugaaauua

SEQ ID NO: 507498 - RNA, 18 nt, Artificial Sequence
  Synthetic
uguaucauuuugaaauua

SEQ ID NO: 507499 - RNA, 19 nt, Artificial Sequence
  Synthetic
auguaucauuuugaaauua

SEQ ID NO: 507500 - RNA, 20 nt, Artificial Sequence
  Synthetic
uauguaucauuuugaaauua

SEQ ID NO: 507501 - RNA, 21 nt, Artificial Sequence
  Synthetic
auauguaucauuuugaaauua

SEQ ID NO: 507502 - RNA, 22 nt, Artificial Sequence
  Synthetic
uauauguaucauuuugaaauua

SEQ ID NO: 507503 - RNA, 23 nt, Artificial Sequence
  Synthetic
uuauauguaucauuuugaaauua

SEQ ID NO: 507504 - RNA, 24 nt, Artificial Sequence
  Synthetic
uuuauauguaucauuuugaaauua

SEQ ID NO: 507505 - RNA, 18 nt, Artificial Sequence
  Synthetic
augauauuuuugaaauua

SEQ ID NO: 507506 - RNA, 19 nt, Artificial Sequence
  Synthetic
aaugauauuuuugaaauua

SEQ ID NO: 507507 - RNA, 20 nt, Artificial Sequence
  Synthetic
caaugauauuuuugaaauua

SEQ ID NO: 507508 - RNA, 21 nt, Artificial Sequence
  Synthetic
ucaaugauauuuuugaaauua

SEQ ID NO: 507509 - RNA, 22 nt, Artificial Sequence
  Synthetic
uucaaugauauuuuugaaauua

SEQ ID NO: 507510 - RNA, 23 nt, Artificial Sequence
  Synthetic
cuucaaugauauuuuugaaauua

SEQ ID NO: 507511 - RNA, 24 nt, Artificial Sequence
  Synthetic
ucuucaaugauauuuuugaaauua

SEQ ID NO: 507512 - RNA, 18 nt, Artificial Sequence
  Synthetic
cuggguaaaaauaaauua

SEQ ID NO: 507513 - RNA, 19 nt, Artificial Sequence
  Synthetic
ucuggguaaaaauaaauua

SEQ ID NO: 507514 - RNA, 20 nt, Artificial Sequence
  Synthetic
uucuggguaaaaauaaauua

SEQ ID NO: 507515 - RNA, 21 nt, Artificial Sequence
  Synthetic
uuucuggguaaaaauaaauua

SEQ ID NO: 507516 - RNA, 22 nt, Artificial Sequence
  Synthetic
guuucuggguaaaaauaaauua

SEQ ID NO: 507517 - RNA, 23 nt, Artificial Sequence
  Synthetic
aguuucuggguaaaaauaaauua

SEQ ID NO: 507518 - RNA, 24 nt, Artificial Sequence
  Synthetic
caguuucuggguaaaaauaaauua

SEQ ID NO: 507519 - RNA, 18 nt, Artificial Sequence
  Synthetic
uaauugcugaauaaauua

SEQ ID NO: 507520 - RNA, 19 nt, Artificial Sequence
  Synthetic
auaauugcugaauaaauua

SEQ ID NO: 507521 - RNA, 20 nt, Artificial Sequence
  Synthetic
aauaauugcugaauaaauua

SEQ ID NO: 507522 - RNA, 21 nt, Artificial Sequence
  Synthetic
aaauaauugcugaauaaauua

SEQ ID NO: 507523 - RNA, 22 nt, Artificial Sequence
  Synthetic
uaaauaauugcugaauaaauua

SEQ ID NO: 507524 - RNA, 23 nt, Artificial Sequence
  Synthetic
guaaauaauugcugaauaaauua

SEQ ID NO: 507525 - RNA, 24 nt, Artificial Sequence
  Synthetic
gguaaauaauugcugaauaaauua

SEQ ID NO: 507526 - RNA, 18 nt, Artificial Sequence
  Synthetic
uauuuguuggauaaauua

SEQ ID NO: 507527 - RNA, 19 nt, Artificial Sequence
  Synthetic
auauuuguuggauaaauua

SEQ ID NO: 507528 - RNA, 20 nt, Artificial Sequence
  Synthetic
aauauuuguuggauaaauua

SEQ ID NO: 507529 - RNA, 21 nt, Artificial Sequence
  Synthetic
aaauauuuguuggauaaauua

SEQ ID NO: 507530 - RNA, 22 nt, Artificial Sequence
  Synthetic
aaaauauuuguuggauaaauua

SEQ ID NO: 507531 - RNA, 23 nt, Artificial Sequence
  Synthetic
aaaaauauuuguuggauaaauua

SEQ ID NO: 507532 - RNA, 24 nt, Artificial Sequence
  Synthetic
caaaaauauuuguuggauaaauua

SEQ ID NO: 507533 - RNA, 18 nt, Artificial Sequence
  Synthetic
aaagcuguuccuaaauua

SEQ ID NO: 507534 - RNA, 19 nt, Artificial Sequence
  Synthetic
aaaagcuguuccuaaauua

SEQ ID NO: 507535 - RNA, 20 nt, Artificial Sequence
  Synthetic
caaaagcuguuccuaaauua

SEQ ID NO: 507536 - RNA, 21 nt, Artificial Sequence
  Synthetic
ucaaaagcuguuccuaaauua

SEQ ID NO: 507537 - RNA, 22 nt, Artificial Sequence
  Synthetic
gucaaaagcuguuccuaaauua

SEQ ID NO: 507538 - RNA, 23 nt, Artificial Sequence
  Synthetic
agucaaaagcuguuccuaaauua

SEQ ID NO: 507539 - RNA, 24 nt, Artificial Sequence
  Synthetic
aagucaaaagcuguuccuaaauua

SEQ ID NO: 507540 - RNA, 18 nt, Artificial Sequence
  Synthetic
aucaauauuauuaaauua

SEQ ID NO: 507541 - RNA, 19 nt, Artificial Sequence
  Synthetic
uaucaauauuauuaaauua

SEQ ID NO: 507542 - RNA, 20 nt, Artificial Sequence
  Synthetic
uuaucaauauuauuaaauua

SEQ ID NO: 507543 - RNA, 21 nt, Artificial Sequence
  Synthetic
auuaucaauauuauuaaauua

SEQ ID NO: 507544 - RNA, 22 nt, Artificial Sequence
  Synthetic
uauuaucaauauuauuaaauua

SEQ ID NO: 507545 - RNA, 23 nt, Artificial Sequence
  Synthetic
auauuaucaauauuauuaaauua

SEQ ID NO: 507546 - RNA, 24 nt, Artificial Sequence
  Synthetic
aauauuaucaauauuauuaaauua

SEQ ID NO: 507547 - RNA, 18 nt, Artificial Sequence
  Synthetic
guaaaaaucaaacaauua

SEQ ID NO: 507548 - RNA, 19 nt, Artificial Sequence
  Synthetic
aguaaaaaucaaacaauua

SEQ ID NO: 507549 - RNA, 20 nt, Artificial Sequence
  Synthetic
aaguaaaaaucaaacaauua

SEQ ID NO: 507550 - RNA, 21 nt, Artificial Sequence
  Synthetic
aaaguaaaaaucaaacaauua

SEQ ID NO: 507551 - RNA, 22 nt, Artificial Sequence
  Synthetic
aaaaguaaaaaucaaacaauua

SEQ ID NO: 507552 - RNA, 23 nt, Artificial Sequence
  Synthetic
gaaaaguaaaaaucaaacaauua

SEQ ID NO: 507553 - RNA, 24 nt, Artificial Sequence
  Synthetic
ggaaaaguaaaaaucaaacaauua

SEQ ID NO: 507554 - RNA, 18 nt, Artificial Sequence
  Synthetic
cagcaaaggaaacaauua

SEQ ID NO: 507555 - RNA, 19 nt, Artificial Sequence
  Synthetic
acagcaaaggaaacaauua

SEQ ID NO: 507556 - RNA, 20 nt, Artificial Sequence
  Synthetic
cacagcaaaggaaacaauua

SEQ ID NO: 507557 - RNA, 21 nt, Artificial Sequence
  Synthetic
gcacagcaaaggaaacaauua

SEQ ID NO: 507558 - RNA, 22 nt, Artificial Sequence
  Synthetic
ugcacagcaaaggaaacaauua

SEQ ID NO: 507559 - RNA, 23 nt, Artificial Sequence
  Synthetic
uugcacagcaaaggaaacaauua

SEQ ID NO: 507560 - RNA, 24 nt, Artificial Sequence
  Synthetic
uuugcacagcaaaggaaacaauua

SEQ ID NO: 507561 - RNA, 18 nt, Artificial Sequence
  Synthetic
aucuaggugacacaauua

SEQ ID NO: 507562 - RNA, 19 nt, Artificial Sequence
  Synthetic
aaucuaggugacacaauua

SEQ ID NO: 507563 - RNA, 20 nt, Artificial Sequence
  Synthetic
aaaucuaggugacacaauua

SEQ ID NO: 507564 - RNA, 21 nt, Artificial Sequence
  Synthetic
aaaaucuaggugacacaauua

SEQ ID NO: 507565 - RNA, 22 nt, Artificial Sequence
  Synthetic
caaaaucuaggugacacaauua

SEQ ID NO: 507566 - RNA, 23 nt, Artificial Sequence
  Synthetic
gcaaaaucuaggugacacaauua

SEQ ID NO: 507567 - RNA, 24 nt, Artificial Sequence
  Synthetic
ggcaaaaucuaggugacacaauua

SEQ ID NO: 507568 - RNA, 18 nt, Artificial Sequence
  Synthetic
uaaaguucuguacaauua

SEQ ID NO: 507569 - RNA, 19 nt, Artificial Sequence
  Synthetic
cuaaaguucuguacaauua

SEQ ID NO: 507570 - RNA, 20 nt, Artificial Sequence
  Synthetic
ccuaaaguucuguacaauua

SEQ ID NO: 507571 - RNA, 21 nt, Artificial Sequence
  Synthetic
gccuaaaguucuguacaauua

SEQ ID NO: 507572 - RNA, 22 nt, Artificial Sequence
  Synthetic
ggccuaaaguucuguacaauua

SEQ ID NO: 507573 - RNA, 23 nt, Artificial Sequence
  Synthetic
uggccuaaaguucuguacaauua

SEQ ID NO: 507574 - RNA, 24 nt, Artificial Sequence
  Synthetic
uuggccuaaaguucuguacaauua

SEQ ID NO: 507575 - RNA, 18 nt, Artificial Sequence
  Synthetic
uauaccaaguaccaauua

SEQ ID NO: 507576 - RNA, 19 nt, Artificial Sequence
  Synthetic
cuauaccaaguaccaauua

SEQ ID NO: 507577 - RNA, 20 nt, Artificial Sequence
  Synthetic
ucuauaccaaguaccaauua

SEQ ID NO: 507578 - RNA, 21 nt, Artificial Sequence
  Synthetic
cucuauaccaaguaccaauua

SEQ ID NO: 507579 - RNA, 22 nt, Artificial Sequence
  Synthetic
gcucuauaccaaguaccaauua

SEQ ID NO: 507580 - RNA, 23 nt, Artificial Sequence
  Synthetic
ugcucuauaccaaguaccaauua

SEQ ID NO: 507581 - RNA, 24 nt, Artificial Sequence
  Synthetic
uugcucuauaccaaguaccaauua

SEQ ID NO: 507582 - RNA, 18 nt, Artificial Sequence
  Synthetic
aauuggcucaugcaauua

SEQ ID NO: 507583 - RNA, 19 nt, Artificial Sequence
  Synthetic
aaauuggcucaugcaauua

SEQ ID NO: 507584 - RNA, 20 nt, Artificial Sequence
  Synthetic
gaaauuggcucaugcaauua

SEQ ID NO: 507585 - RNA, 21 nt, Artificial Sequence
  Synthetic
agaaauuggcucaugcaauua

SEQ ID NO: 507586 - RNA, 22 nt, Artificial Sequence
  Synthetic
aagaaauuggcucaugcaauua

SEQ ID NO: 507587 - RNA, 23 nt, Artificial Sequence
  Synthetic
uaagaaauuggcucaugcaauua

SEQ ID NO: 507588 - RNA, 24 nt, Artificial Sequence
  Synthetic
guaagaaauuggcucaugcaauua

SEQ ID NO: 507589 - RNA, 18 nt, Artificial Sequence
  Synthetic
cuagacagcucucaauua

SEQ ID NO: 507590 - RNA, 19 nt, Artificial Sequence
  Synthetic
ccuagacagcucucaauua

SEQ ID NO: 507591 - RNA, 20 nt, Artificial Sequence
  Synthetic
cccuagacagcucucaauua

SEQ ID NO: 507592 - RNA, 21 nt, Artificial Sequence
  Synthetic
ccccuagacagcucucaauua

SEQ ID NO: 507593 - RNA, 22 nt, Artificial Sequence
  Synthetic
accccuagacagcucucaauua

SEQ ID NO: 507594 - RNA, 23 nt, Artificial Sequence
  Synthetic
gaccccuagacagcucucaauua

SEQ ID NO: 507595 - RNA, 24 nt, Artificial Sequence
  Synthetic
ugaccccuagacagcucucaauua

SEQ ID NO: 507596 - RNA, 18 nt, Artificial Sequence
  Synthetic
cagggacaaagucaauua

SEQ ID NO: 507597 - RNA, 19 nt, Artificial Sequence
  Synthetic
ucagggacaaagucaauua

SEQ ID NO: 507598 - RNA, 20 nt, Artificial Sequence
  Synthetic
aucagggacaaagucaauua

SEQ ID NO: 507599 - RNA, 21 nt, Artificial Sequence
  Synthetic
caucagggacaaagucaauua

SEQ ID NO: 507600 - RNA, 22 nt, Artificial Sequence
  Synthetic
ucaucagggacaaagucaauua

SEQ ID NO: 507601 - RNA, 23 nt, Artificial Sequence
  Synthetic
gucaucagggacaaagucaauua

SEQ ID NO: 507602 - RNA, 24 nt, Artificial Sequence
  Synthetic
ggucaucagggacaaagucaauua

SEQ ID NO: 507603 - RNA, 18 nt, Artificial Sequence
  Synthetic
auggaggacugucaauua

SEQ ID NO: 507604 - RNA, 19 nt, Artificial Sequence
  Synthetic
aauggaggacugucaauua

SEQ ID NO: 507605 - RNA, 20 nt, Artificial Sequence
  Synthetic
uaauggaggacugucaauua

SEQ ID NO: 507606 - RNA, 21 nt, Artificial Sequence
  Synthetic
guaauggaggacugucaauua

SEQ ID NO: 507607 - RNA, 22 nt, Artificial Sequence
  Synthetic
uguaauggaggacugucaauua

SEQ ID NO: 507608 - RNA, 23 nt, Artificial Sequence
  Synthetic
guguaauggaggacugucaauua

SEQ ID NO: 507609 - RNA, 24 nt, Artificial Sequence
  Synthetic
gguguaauggaggacugucaauua

SEQ ID NO: 507610 - RNA, 18 nt, Artificial Sequence
  Synthetic
aacuucacaaaagaauua

SEQ ID NO: 507611 - RNA, 19 nt, Artificial Sequence
  Synthetic
gaacuucacaaaagaauua

SEQ ID NO: 507612 - RNA, 20 nt, Artificial Sequence
  Synthetic
agaacuucacaaaagaauua

SEQ ID NO: 507613 - RNA, 21 nt, Artificial Sequence
  Synthetic
aagaacuucacaaaagaauua

SEQ ID NO: 507614 - RNA, 22 nt, Artificial Sequence
  Synthetic
aaagaacuucacaaaagaauua

SEQ ID NO: 507615 - RNA, 23 nt, Artificial Sequence
  Synthetic
gaaagaacuucacaaaagaauua

SEQ ID NO: 507616 - RNA, 24 nt, Artificial Sequence
  Synthetic
ggaaagaacuucacaaaagaauua

SEQ ID NO: 507617 - RNA, 18 nt, Artificial Sequence
  Synthetic
aauggucauaaagaauua

SEQ ID NO: 507618 - RNA, 19 nt, Artificial Sequence
  Synthetic
gaauggucauaaagaauua

SEQ ID NO: 507619 - RNA, 20 nt, Artificial Sequence
  Synthetic
ggaauggucauaaagaauua

SEQ ID NO: 507620 - RNA, 21 nt, Artificial Sequence
  Synthetic
aggaauggucauaaagaauua

SEQ ID NO: 507621 - RNA, 22 nt, Artificial Sequence
  Synthetic
aaggaauggucauaaagaauua

SEQ ID NO: 507622 - RNA, 23 nt, Artificial Sequence
  Synthetic
aaaggaauggucauaaagaauua

SEQ ID NO: 507623 - RNA, 24 nt, Artificial Sequence
  Synthetic
gaaaggaauggucauaaagaauua

SEQ ID NO: 507624 - RNA, 18 nt, Artificial Sequence
  Synthetic
aagaacaaauaagaauua

SEQ ID NO: 507625 - RNA, 19 nt, Artificial Sequence
  Synthetic
gaagaacaaauaagaauua

SEQ ID NO: 507626 - RNA, 20 nt, Artificial Sequence
  Synthetic
ggaagaacaaauaagaauua

SEQ ID NO: 507627 - RNA, 21 nt, Artificial Sequence
  Synthetic
uggaagaacaaauaagaauua

SEQ ID NO: 507628 - RNA, 22 nt, Artificial Sequence
  Synthetic
cuggaagaacaaauaagaauua

SEQ ID NO: 507629 - RNA, 23 nt, Artificial Sequence
  Synthetic
ccuggaagaacaaauaagaauua

SEQ ID NO: 507630 - RNA, 24 nt, Artificial Sequence
  Synthetic
cccuggaagaacaaauaagaauua

SEQ ID NO: 507631 - RNA, 18 nt, Artificial Sequence
  Synthetic
ucaggacacuaagaauua

SEQ ID NO: 507632 - RNA, 19 nt, Artificial Sequence
  Synthetic
gucaggacacuaagaauua

SEQ ID NO: 507633 - RNA, 20 nt, Artificial Sequence
  Synthetic
ugucaggacacuaagaauua

SEQ ID NO: 507634 - RNA, 21 nt, Artificial Sequence
  Synthetic
gugucaggacacuaagaauua

SEQ ID NO: 507635 - RNA, 22 nt, Artificial Sequence
  Synthetic
agugucaggacacuaagaauua

SEQ ID NO: 507636 - RNA, 23 nt, Artificial Sequence
  Synthetic
cagugucaggacacuaagaauua

SEQ ID NO: 507637 - RNA, 24 nt, Artificial Sequence
  Synthetic
ucagugucaggacacuaagaauua

SEQ ID NO: 507638 - RNA, 18 nt, Artificial Sequence
  Synthetic
cauggaggcccagaauua

SEQ ID NO: 507639 - RNA, 19 nt, Artificial Sequence
  Synthetic
acauggaggcccagaauua

SEQ ID NO: 507640 - RNA, 20 nt, Artificial Sequence
  Synthetic
uacauggaggcccagaauua

SEQ ID NO: 507641 - RNA, 21 nt, Artificial Sequence
  Synthetic
cuacauggaggcccagaauua

SEQ ID NO: 507642 - RNA, 22 nt, Artificial Sequence
  Synthetic
acuacauggaggcccagaauua

SEQ ID NO: 507643 - RNA, 23 nt, Artificial Sequence
  Synthetic
aacuacauggaggcccagaauua

SEQ ID NO: 507644 - RNA, 24 nt, Artificial Sequence
  Synthetic
aaacuacauggaggcccagaauua

SEQ ID NO: 507645 - RNA, 18 nt, Artificial Sequence
  Synthetic
cacaacaaguaggaauua

SEQ ID NO: 507646 - RNA, 19 nt, Artificial Sequence
  Synthetic
ccacaacaaguaggaauua

SEQ ID NO: 507647 - RNA, 20 nt, Artificial Sequence
  Synthetic
cccacaacaaguaggaauua

SEQ ID NO: 507648 - RNA, 21 nt, Artificial Sequence
  Synthetic
ucccacaacaaguaggaauua

SEQ ID NO: 507649 - RNA, 22 nt, Artificial Sequence
  Synthetic
cucccacaacaaguaggaauua

SEQ ID NO: 507650 - RNA, 23 nt, Artificial Sequence
  Synthetic
ccucccacaacaaguaggaauua

SEQ ID NO: 507651 - RNA, 24 nt, Artificial Sequence
  Synthetic
cccucccacaacaaguaggaauua

SEQ ID NO: 507652 - RNA, 18 nt, Artificial Sequence
  Synthetic
cacaacacaugggaauua

SEQ ID NO: 507653 - RNA, 19 nt, Artificial Sequence
  Synthetic
ccacaacacaugggaauua

SEQ ID NO: 507654 - RNA, 20 nt, Artificial Sequence
  Synthetic
cccacaacacaugggaauua

SEQ ID NO: 507655 - RNA, 21 nt, Artificial Sequence
  Synthetic
ucccacaacacaugggaauua

SEQ ID NO: 507656 - RNA, 22 nt, Artificial Sequence
  Synthetic
cucccacaacacaugggaauua

SEQ ID NO: 507657 - RNA, 23 nt, Artificial Sequence
  Synthetic
ccucccacaacacaugggaauua

SEQ ID NO: 507658 - RNA, 24 nt, Artificial Sequence
  Synthetic
cccucccacaacacaugggaauua

SEQ ID NO: 507659 - RNA, 18 nt, Artificial Sequence
  Synthetic
cccaaagugcuggaauua

SEQ ID NO: 507660 - RNA, 19 nt, Artificial Sequence
  Synthetic
ucccaaagugcuggaauua

SEQ ID NO: 507661 - RNA, 20 nt, Artificial Sequence
  Synthetic
cucccaaagugcuggaauua

SEQ ID NO: 507662 - RNA, 21 nt, Artificial Sequence
  Synthetic
ccucccaaagugcuggaauua

SEQ ID NO: 507663 - RNA, 22 nt, Artificial Sequence
  Synthetic
gccucccaaagugcuggaauua

SEQ ID NO: 507664 - RNA, 23 nt, Artificial Sequence
  Synthetic
agccucccaaagugcuggaauua

SEQ ID NO: 507665 - RNA, 24 nt, Artificial Sequence
  Synthetic
cagccucccaaagugcuggaauua

SEQ ID NO: 507666 - RNA, 18 nt, Artificial Sequence
  Synthetic
ucaccaacauaugaauua

SEQ ID NO: 507667 - RNA, 19 nt, Artificial Sequence
  Synthetic
uucaccaacauaugaauua

SEQ ID NO: 507668 - RNA, 20 nt, Artificial Sequence
  Synthetic
guucaccaacauaugaauua

SEQ ID NO: 507669 - RNA, 21 nt, Artificial Sequence
  Synthetic
cguucaccaacauaugaauua

SEQ ID NO: 507670 - RNA, 22 nt, Artificial Sequence
  Synthetic
ccguucaccaacauaugaauua

SEQ ID NO: 507671 - RNA, 23 nt, Artificial Sequence
  Synthetic
gccguucaccaacauaugaauua

SEQ ID NO: 507672 - RNA, 24 nt, Artificial Sequence
  Synthetic
ugccguucaccaacauaugaauua

SEQ ID NO: 507673 - RNA, 18 nt, Artificial Sequence
  Synthetic
uuggagguaauugaauua

SEQ ID NO: 507674 - RNA, 19 nt, Artificial Sequence
  Synthetic
guuggagguaauugaauua

SEQ ID NO: 507675 - RNA, 20 nt, Artificial Sequence
  Synthetic
aguuggagguaauugaauua

SEQ ID NO: 507676 - RNA, 21 nt, Artificial Sequence
  Synthetic
caguuggagguaauugaauua

SEQ ID NO: 507677 - RNA, 22 nt, Artificial Sequence
  Synthetic
ccaguuggagguaauugaauua

SEQ ID NO: 507678 - RNA, 23 nt, Artificial Sequence
  Synthetic
cccaguuggagguaauugaauua

SEQ ID NO: 507679 - RNA, 24 nt, Artificial Sequence
  Synthetic
acccaguuggagguaauugaauua

SEQ ID NO: 507680 - RNA, 18 nt, Artificial Sequence
  Synthetic
aaacuaauucaauaauua

SEQ ID NO: 507681 - RNA, 19 nt, Artificial Sequence
  Synthetic
uaaacuaauucaauaauua

SEQ ID NO: 507682 - RNA, 20 nt, Artificial Sequence
  Synthetic
cuaaacuaauucaauaauua

SEQ ID NO: 507683 - RNA, 21 nt, Artificial Sequence
  Synthetic
ucuaaacuaauucaauaauua

SEQ ID NO: 507684 - RNA, 22 nt, Artificial Sequence
  Synthetic
cucuaaacuaauucaauaauua

SEQ ID NO: 507685 - RNA, 23 nt, Artificial Sequence
  Synthetic
gcucuaaacuaauucaauaauua

SEQ ID NO: 507686 - RNA, 24 nt, Artificial Sequence
  Synthetic
ugcucuaaacuaauucaauaauua

SEQ ID NO: 507687 - RNA, 18 nt, Artificial Sequence
  Synthetic
aguguguagguauaauua

SEQ ID NO: 507688 - RNA, 19 nt, Artificial Sequence
  Synthetic
aaguguguagguauaauua

SEQ ID NO: 507689 - RNA, 20 nt, Artificial Sequence
  Synthetic
uaaguguguagguauaauua

SEQ ID NO: 507690 - RNA, 21 nt, Artificial Sequence
  Synthetic
guaaguguguagguauaauua

SEQ ID NO: 507691 - RNA, 22 nt, Artificial Sequence
  Synthetic
uguaaguguguagguauaauua

SEQ ID NO: 507692 - RNA, 23 nt, Artificial Sequence
  Synthetic
uuguaaguguguagguauaauua

SEQ ID NO: 507693 - RNA, 24 nt, Artificial Sequence
  Synthetic
auuguaaguguguagguauaauua

SEQ ID NO: 507694 - RNA, 18 nt, Artificial Sequence
  Synthetic
cuacagcacuuauaauua

SEQ ID NO: 507695 - RNA, 19 nt, Artificial Sequence
  Synthetic
ucuacagcacuuauaauua

SEQ ID NO: 507696 - RNA, 20 nt, Artificial Sequence
  Synthetic
cucuacagcacuuauaauua

SEQ ID NO: 507697 - RNA, 21 nt, Artificial Sequence
  Synthetic
acucuacagcacuuauaauua

SEQ ID NO: 507698 - RNA, 22 nt, Artificial Sequence
  Synthetic
cacucuacagcacuuauaauua

SEQ ID NO: 507699 - RNA, 23 nt, Artificial Sequence
  Synthetic
acacucuacagcacuuauaauua

SEQ ID NO: 507700 - RNA, 24 nt, Artificial Sequence
  Synthetic
uacacucuacagcacuuauaauua

SEQ ID NO: 507701 - RNA, 18 nt, Artificial Sequence
  Synthetic
uaauaauaauacuaauua

SEQ ID NO: 507702 - RNA, 19 nt, Artificial Sequence
  Synthetic
auaauaauaauacuaauua

SEQ ID NO: 507703 - RNA, 20 nt, Artificial Sequence
  Synthetic
aauaauaauaauacuaauua

SEQ ID NO: 507704 - RNA, 21 nt, Artificial Sequence
  Synthetic
uaauaauaauaauacuaauua

SEQ ID NO: 507705 - RNA, 22 nt, Artificial Sequence
  Synthetic
uuaauaauaauaauacuaauua

SEQ ID NO: 507706 - RNA, 23 nt, Artificial Sequence
  Synthetic
auuaauaauaauaauacuaauua

SEQ ID NO: 507707 - RNA, 24 nt, Artificial Sequence
  Synthetic
aauuaauaauaauaauacuaauua

SEQ ID NO: 507708 - RNA, 18 nt, Artificial Sequence
  Synthetic
ugggaagaccaguaauua

SEQ ID NO: 507709 - RNA, 19 nt, Artificial Sequence
  Synthetic
augggaagaccaguaauua

SEQ ID NO: 507710 - RNA, 20 nt, Artificial Sequence
  Synthetic
caugggaagaccaguaauua

SEQ ID NO: 507711 - RNA, 21 nt, Artificial Sequence
  Synthetic
ucaugggaagaccaguaauua

SEQ ID NO: 507712 - RNA, 22 nt, Artificial Sequence
  Synthetic
gucaugggaagaccaguaauua

SEQ ID NO: 507713 - RNA, 23 nt, Artificial Sequence
  Synthetic
agucaugggaagaccaguaauua

SEQ ID NO: 507714 - RNA, 24 nt, Artificial Sequence
  Synthetic
gagucaugggaagaccaguaauua

SEQ ID NO: 507715 - RNA, 18 nt, Artificial Sequence
  Synthetic
aauauuuuuggguaauua

SEQ ID NO: 507716 - RNA, 19 nt, Artificial Sequence
  Synthetic
aaauauuuuuggguaauua

SEQ ID NO: 507717 - RNA, 20 nt, Artificial Sequence
  Synthetic
caaauauuuuuggguaauua

SEQ ID NO: 507718 - RNA, 21 nt, Artificial Sequence
  Synthetic
ucaaauauuuuuggguaauua

SEQ ID NO: 507719 - RNA, 22 nt, Artificial Sequence
  Synthetic
aucaaauauuuuuggguaauua

SEQ ID NO: 507720 - RNA, 23 nt, Artificial Sequence
  Synthetic
aaucaaauauuuuuggguaauua

SEQ ID NO: 507721 - RNA, 24 nt, Artificial Sequence
  Synthetic
aaaucaaauauuuuuggguaauua

SEQ ID NO: 507722 - RNA, 18 nt, Artificial Sequence
  Synthetic
aaggauaguuauuaauua

SEQ ID NO: 507723 - RNA, 19 nt, Artificial Sequence
  Synthetic
uaaggauaguuauuaauua

SEQ ID NO: 507724 - RNA, 20 nt, Artificial Sequence
  Synthetic
uuaaggauaguuauuaauua

SEQ ID NO: 507725 - RNA, 21 nt, Artificial Sequence
  Synthetic
uuuaaggauaguuauuaauua

SEQ ID NO: 507726 - RNA, 22 nt, Artificial Sequence
  Synthetic
cuuuaaggauaguuauuaauua

SEQ ID NO: 507727 - RNA, 23 nt, Artificial Sequence
  Synthetic
ucuuuaaggauaguuauuaauua

SEQ ID NO: 507728 - RNA, 24 nt, Artificial Sequence
  Synthetic
aucuuuaaggauaguuauuaauua

SEQ ID NO: 507729 - RNA, 18 nt, Artificial Sequence
  Synthetic
ucucuccaaacuuaauua

SEQ ID NO: 507730 - RNA, 19 nt, Artificial Sequence
  Synthetic
cucucuccaaacuuaauua

SEQ ID NO: 507731 - RNA, 20 nt, Artificial Sequence
  Synthetic
gcucucuccaaacuuaauua

SEQ ID NO: 507732 - RNA, 21 nt, Artificial Sequence
  Synthetic
ugcucucuccaaacuuaauua

SEQ ID NO: 507733 - RNA, 22 nt, Artificial Sequence
  Synthetic
uugcucucuccaaacuuaauua

SEQ ID NO: 507734 - RNA, 23 nt, Artificial Sequence
  Synthetic
cuugcucucuccaaacuuaauua

SEQ ID NO: 507735 - RNA, 24 nt, Artificial Sequence
  Synthetic
acuugcucucuccaaacuuaauua

SEQ ID NO: 507736 - RNA, 18 nt, Artificial Sequence
  Synthetic
cacuuuucuguuuaauua

SEQ ID NO: 507737 - RNA, 19 nt, Artificial Sequence
  Synthetic
acacuuuucuguuuaauua

SEQ ID NO: 507738 - RNA, 20 nt, Artificial Sequence
  Synthetic
cacacuuuucuguuuaauua

SEQ ID NO: 507739 - RNA, 21 nt, Artificial Sequence
  Synthetic
gcacacuuuucuguuuaauua

SEQ ID NO: 507740 - RNA, 22 nt, Artificial Sequence
  Synthetic
ggcacacuuuucuguuuaauua

SEQ ID NO: 507741 - RNA, 23 nt, Artificial Sequence
  Synthetic
uggcacacuuuucuguuuaauua

SEQ ID NO: 507742 - RNA, 24 nt, Artificial Sequence
  Synthetic
auggcacacuuuucuguuuaauua

SEQ ID NO: 507743 - RNA, 18 nt, Artificial Sequence
  Synthetic
aguagagugcaaacauua

SEQ ID NO: 507744 - RNA, 19 nt, Artificial Sequence
  Synthetic
aaguagagugcaaacauua

SEQ ID NO: 507745 - RNA, 20 nt, Artificial Sequence
  Synthetic
gaaguagagugcaaacauua

SEQ ID NO: 507746 - RNA, 21 nt, Artificial Sequence
  Synthetic
ggaaguagagugcaaacauua

SEQ ID NO: 507747 - RNA, 22 nt, Artificial Sequence
  Synthetic
aggaaguagagugcaaacauua

SEQ ID NO: 507748 - RNA, 23 nt, Artificial Sequence
  Synthetic
aaggaaguagagugcaaacauua

SEQ ID NO: 507749 - RNA, 24 nt, Artificial Sequence
  Synthetic
aaaggaaguagagugcaaacauua

SEQ ID NO: 507750 - RNA, 18 nt, Artificial Sequence
  Synthetic
uucuuaacaucaacauua

SEQ ID NO: 507751 - RNA, 19 nt, Artificial Sequence
  Synthetic
uuucuuaacaucaacauua

SEQ ID NO: 507752 - RNA, 20 nt, Artificial Sequence
  Synthetic
auuucuuaacaucaacauua

SEQ ID NO: 507753 - RNA, 21 nt, Artificial Sequence
  Synthetic
aauuucuuaacaucaacauua

SEQ ID NO: 507754 - RNA, 22 nt, Artificial Sequence
  Synthetic
uaauuucuuaacaucaacauua

SEQ ID NO: 507755 - RNA, 23 nt, Artificial Sequence
  Synthetic
auaauuucuuaacaucaacauua

SEQ ID NO: 507756 - RNA, 24 nt, Artificial Sequence
  Synthetic
aauaauuucuuaacaucaacauua

SEQ ID NO: 507757 - RNA, 18 nt, Artificial Sequence
  Synthetic
aauccauaaugaacauua

SEQ ID NO: 507758 - RNA, 19 nt, Artificial Sequence
  Synthetic
uaauccauaaugaacauua

SEQ ID NO: 507759 - RNA, 20 nt, Artificial Sequence
  Synthetic
auaauccauaaugaacauua

SEQ ID NO: 507760 - RNA, 21 nt, Artificial Sequence
  Synthetic
uauaauccauaaugaacauua

SEQ ID NO: 507761 - RNA, 22 nt, Artificial Sequence
  Synthetic
uuauaauccauaaugaacauua

SEQ ID NO: 507762 - RNA, 23 nt, Artificial Sequence
  Synthetic
auuauaauccauaaugaacauua

SEQ ID NO: 507763 - RNA, 24 nt, Artificial Sequence
  Synthetic
uauuauaauccauaaugaacauua

SEQ ID NO: 507764 - RNA, 18 nt, Artificial Sequence
  Synthetic
cuaagaagccagacauua

SEQ ID NO: 507765 - RNA, 19 nt, Artificial Sequence
  Synthetic
acuaagaagccagacauua

SEQ ID NO: 507766 - RNA, 20 nt, Artificial Sequence
  Synthetic
cacuaagaagccagacauua

SEQ ID NO: 507767 - RNA, 21 nt, Artificial Sequence
  Synthetic
gcacuaagaagccagacauua

SEQ ID NO: 507768 - RNA, 22 nt, Artificial Sequence
  Synthetic
ugcacuaagaagccagacauua

SEQ ID NO: 507769 - RNA, 23 nt, Artificial Sequence
  Synthetic
augcacuaagaagccagacauua

SEQ ID NO: 507770 - RNA, 24 nt, Artificial Sequence
  Synthetic
aaugcacuaagaagccagacauua

SEQ ID NO: 507771 - RNA, 18 nt, Artificial Sequence
  Synthetic
aaauaagggaauacauua

SEQ ID NO: 507772 - RNA, 19 nt, Artificial Sequence
  Synthetic
caaauaagggaauacauua

SEQ ID NO: 507773 - RNA, 20 nt, Artificial Sequence
  Synthetic
ucaaauaagggaauacauua

SEQ ID NO: 507774 - RNA, 21 nt, Artificial Sequence
  Synthetic
cucaaauaagggaauacauua

SEQ ID NO: 507775 - RNA, 22 nt, Artificial Sequence
  Synthetic
ccucaaauaagggaauacauua

SEQ ID NO: 507776 - RNA, 23 nt, Artificial Sequence
  Synthetic
cccucaaauaagggaauacauua

SEQ ID NO: 507777 - RNA, 24 nt, Artificial Sequence
  Synthetic
ucccucaaauaagggaauacauua

SEQ ID NO: 507778 - RNA, 18 nt, Artificial Sequence
  Synthetic
ugggucacuccuacauua

SEQ ID NO: 507779 - RNA, 19 nt, Artificial Sequence
  Synthetic
uugggucacuccuacauua

SEQ ID NO: 507780 - RNA, 20 nt, Artificial Sequence
  Synthetic
cuugggucacuccuacauua

SEQ ID NO: 507781 - RNA, 21 nt, Artificial Sequence
  Synthetic
ccuugggucacuccuacauua

SEQ ID NO: 507782 - RNA, 22 nt, Artificial Sequence
  Synthetic
accuugggucacuccuacauua

SEQ ID NO: 507783 - RNA, 23 nt, Artificial Sequence
  Synthetic
uaccuugggucacuccuacauua

SEQ ID NO: 507784 - RNA, 24 nt, Artificial Sequence
  Synthetic
cuaccuugggucacuccuacauua

SEQ ID NO: 507785 - RNA, 18 nt, Artificial Sequence
  Synthetic
gaagacauuauuacauua

SEQ ID NO: 507786 - RNA, 19 nt, Artificial Sequence
  Synthetic
ggaagacauuauuacauua

SEQ ID NO: 507787 - RNA, 20 nt, Artificial Sequence
  Synthetic
aggaagacauuauuacauua

SEQ ID NO: 507788 - RNA, 21 nt, Artificial Sequence
  Synthetic
uaggaagacauuauuacauua

SEQ ID NO: 507789 - RNA, 22 nt, Artificial Sequence
  Synthetic
cuaggaagacauuauuacauua

SEQ ID NO: 507790 - RNA, 23 nt, Artificial Sequence
  Synthetic
ucuaggaagacauuauuacauua

SEQ ID NO: 507791 - RNA, 24 nt, Artificial Sequence
  Synthetic
uucuaggaagacauuauuacauua

SEQ ID NO: 507792 - RNA, 18 nt, Artificial Sequence
  Synthetic
cccuuuacguuuacauua

SEQ ID NO: 507793 - RNA, 19 nt, Artificial Sequence
  Synthetic
gcccuuuacguuuacauua

SEQ ID NO: 507794 - RNA, 20 nt, Artificial Sequence
  Synthetic
ggcccuuuacguuuacauua

SEQ ID NO: 507795 - RNA, 21 nt, Artificial Sequence
  Synthetic
uggcccuuuacguuuacauua

SEQ ID NO: 507796 - RNA, 22 nt, Artificial Sequence
  Synthetic
cuggcccuuuacguuuacauua

SEQ ID NO: 507797 - RNA, 23 nt, Artificial Sequence
  Synthetic
ucuggcccuuuacguuuacauua

SEQ ID NO: 507798 - RNA, 24 nt, Artificial Sequence
  Synthetic
cucuggcccuuuacguuuacauua

SEQ ID NO: 507799 - RNA, 18 nt, Artificial Sequence
  Synthetic
accgagcuguuuacauua

SEQ ID NO: 507800 - RNA, 19 nt, Artificial Sequence
  Synthetic
aaccgagcuguuuacauua

SEQ ID NO: 507801 - RNA, 20 nt, Artificial Sequence
  Synthetic
uaaccgagcuguuuacauua

SEQ ID NO: 507802 - RNA, 21 nt, Artificial Sequence
  Synthetic
cuaaccgagcuguuuacauua

SEQ ID NO: 507803 - RNA, 22 nt, Artificial Sequence
  Synthetic
ccuaaccgagcuguuuacauua

SEQ ID NO: 507804 - RNA, 23 nt, Artificial Sequence
  Synthetic
uccuaaccgagcuguuuacauua

SEQ ID NO: 507805 - RNA, 24 nt, Artificial Sequence
  Synthetic
uuccuaaccgagcuguuuacauua

SEQ ID NO: 507806 - RNA, 18 nt, Artificial Sequence
  Synthetic
acugcauccucaccauua

SEQ ID NO: 507807 - RNA, 19 nt, Artificial Sequence
  Synthetic
aacugcauccucaccauua

SEQ ID NO: 507808 - RNA, 20 nt, Artificial Sequence
  Synthetic
uaacugcauccucaccauua

SEQ ID NO: 507809 - RNA, 21 nt, Artificial Sequence
  Synthetic
uuaacugcauccucaccauua

SEQ ID NO: 507810 - RNA, 22 nt, Artificial Sequence
  Synthetic
uuuaacugcauccucaccauua

SEQ ID NO: 507811 - RNA, 23 nt, Artificial Sequence
  Synthetic
auuuaacugcauccucaccauua

SEQ ID NO: 507812 - RNA, 24 nt, Artificial Sequence
  Synthetic
cauuuaacugcauccucaccauua

SEQ ID NO: 507813 - RNA, 18 nt, Artificial Sequence
  Synthetic
gcauggccuggaccauua

SEQ ID NO: 507814 - RNA, 19 nt, Artificial Sequence
  Synthetic
ugcauggccuggaccauua

SEQ ID NO: 507815 - RNA, 20 nt, Artificial Sequence
  Synthetic
uugcauggccuggaccauua

SEQ ID NO: 507816 - RNA, 21 nt, Artificial Sequence
  Synthetic
uuugcauggccuggaccauua

SEQ ID NO: 507817 - RNA, 22 nt, Artificial Sequence
  Synthetic
auuugcauggccuggaccauua

SEQ ID NO: 507818 - RNA, 23 nt, Artificial Sequence
  Synthetic
aauuugcauggccuggaccauua

SEQ ID NO: 507819 - RNA, 24 nt, Artificial Sequence
  Synthetic
uaauuugcauggccuggaccauua

SEQ ID NO: 507820 - RNA, 18 nt, Artificial Sequence
  Synthetic
augacaauuaccccauua

SEQ ID NO: 507821 - RNA, 19 nt, Artificial Sequence
  Synthetic
uaugacaauuaccccauua

SEQ ID NO: 507822 - RNA, 20 nt, Artificial Sequence
  Synthetic
guaugacaauuaccccauua

SEQ ID NO: 507823 - RNA, 21 nt, Artificial Sequence
  Synthetic
aguaugacaauuaccccauua

SEQ ID NO: 507824 - RNA, 22 nt, Artificial Sequence
  Synthetic
gaguaugacaauuaccccauua

SEQ ID NO: 507825 - RNA, 23 nt, Artificial Sequence
  Synthetic
agaguaugacaauuaccccauua

SEQ ID NO: 507826 - RNA, 24 nt, Artificial Sequence
  Synthetic
cagaguaugacaauuaccccauua

SEQ ID NO: 507827 - RNA, 18 nt, Artificial Sequence
  Synthetic
aucauuuaacccccauua

SEQ ID NO: 507828 - RNA, 19 nt, Artificial Sequence
  Synthetic
aaucauuuaacccccauua

SEQ ID NO: 507829 - RNA, 20 nt, Artificial Sequence
  Synthetic
uaaucauuuaacccccauua

SEQ ID NO: 507830 - RNA, 21 nt, Artificial Sequence
  Synthetic
auaaucauuuaacccccauua

SEQ ID NO: 507831 - RNA, 22 nt, Artificial Sequence
  Synthetic
aauaaucauuuaacccccauua

SEQ ID NO: 507832 - RNA, 23 nt, Artificial Sequence
  Synthetic
aaauaaucauuuaacccccauua

SEQ ID NO: 507833 - RNA, 24 nt, Artificial Sequence
  Synthetic
gaaauaaucauuuaacccccauua

SEQ ID NO: 507834 - RNA, 18 nt, Artificial Sequence
  Synthetic
uuacuaucugccccauua

SEQ ID NO: 507835 - RNA, 19 nt, Artificial Sequence
  Synthetic
uuuacuaucugccccauua

SEQ ID NO: 507836 - RNA, 20 nt, Artificial Sequence
  Synthetic
auuuacuaucugccccauua

SEQ ID NO: 507837 - RNA, 21 nt, Artificial Sequence
  Synthetic
uauuuacuaucugccccauua

SEQ ID NO: 507838 - RNA, 22 nt, Artificial Sequence
  Synthetic
auauuuacuaucugccccauua

SEQ ID NO: 507839 - RNA, 23 nt, Artificial Sequence
  Synthetic
aauauuuacuaucugccccauua

SEQ ID NO: 507840 - RNA, 24 nt, Artificial Sequence
  Synthetic
aaauauuuacuaucugccccauua

SEQ ID NO: 507841 - RNA, 18 nt, Artificial Sequence
  Synthetic
aaccuagugaucccauua

SEQ ID NO: 507842 - RNA, 19 nt, Artificial Sequence
  Synthetic
caaccuagugaucccauua

SEQ ID NO: 507843 - RNA, 20 nt, Artificial Sequence
  Synthetic
ucaaccuagugaucccauua

SEQ ID NO: 507844 - RNA, 21 nt, Artificial Sequence
  Synthetic
uucaaccuagugaucccauua

SEQ ID NO: 507845 - RNA, 22 nt, Artificial Sequence
  Synthetic
guucaaccuagugaucccauua

SEQ ID NO: 507846 - RNA, 23 nt, Artificial Sequence
  Synthetic
cguucaaccuagugaucccauua

SEQ ID NO: 507847 - RNA, 24 nt, Artificial Sequence
  Synthetic
ucguucaaccuagugaucccauua

SEQ ID NO: 507848 - RNA, 18 nt, Artificial Sequence
  Synthetic
agagacccuuucccauua

SEQ ID NO: 507849 - RNA, 19 nt, Artificial Sequence
  Synthetic
aagagacccuuucccauua

SEQ ID NO: 507850 - RNA, 20 nt, Artificial Sequence
  Synthetic
aaagagacccuuucccauua

SEQ ID NO: 507851 - RNA, 21 nt, Artificial Sequence
  Synthetic
uaaagagacccuuucccauua

SEQ ID NO: 507852 - RNA, 22 nt, Artificial Sequence
  Synthetic
uuaaagagacccuuucccauua

SEQ ID NO: 507853 - RNA, 23 nt, Artificial Sequence
  Synthetic
auuaaagagacccuuucccauua

SEQ ID NO: 507854 - RNA, 24 nt, Artificial Sequence
  Synthetic
gauuaaagagacccuuucccauua

SEQ ID NO: 507855 - RNA, 18 nt, Artificial Sequence
  Synthetic
gugaccucuuucccauua

SEQ ID NO: 507856 - RNA, 19 nt, Artificial Sequence
  Synthetic
agugaccucuuucccauua

SEQ ID NO: 507857 - RNA, 20 nt, Artificial Sequence
  Synthetic
aagugaccucuuucccauua

SEQ ID NO: 507858 - RNA, 21 nt, Artificial Sequence
  Synthetic
aaagugaccucuuucccauua

SEQ ID NO: 507859 - RNA, 22 nt, Artificial Sequence
  Synthetic
uaaagugaccucuuucccauua

SEQ ID NO: 507860 - RNA, 23 nt, Artificial Sequence
  Synthetic
cuaaagugaccucuuucccauua

SEQ ID NO: 507861 - RNA, 24 nt, Artificial Sequence
  Synthetic
ccuaaagugaccucuuucccauua

SEQ ID NO: 507862 - RNA, 18 nt, Artificial Sequence
  Synthetic
uaaaauaaaaggccauua

SEQ ID NO: 507863 - RNA, 19 nt, Artificial Sequence
  Synthetic
guaaaauaaaaggccauua

SEQ ID NO: 507864 - RNA, 20 nt, Artificial Sequence
  Synthetic
aguaaaauaaaaggccauua

SEQ ID NO: 507865 - RNA, 21 nt, Artificial Sequence
  Synthetic
gaguaaaauaaaaggccauua

SEQ ID NO: 507866 - RNA, 22 nt, Artificial Sequence
  Synthetic
agaguaaaauaaaaggccauua

SEQ ID NO: 507867 - RNA, 23 nt, Artificial Sequence
  Synthetic
gagaguaaaauaaaaggccauua

SEQ ID NO: 507868 - RNA, 24 nt, Artificial Sequence
  Synthetic
ugagaguaaaauaaaaggccauua

SEQ ID NO: 507869 - RNA, 18 nt, Artificial Sequence
  Synthetic
aacaugaugaauccauua

SEQ ID NO: 507870 - RNA, 19 nt, Artificial Sequence
  Synthetic
aaacaugaugaauccauua

SEQ ID NO: 507871 - RNA, 20 nt, Artificial Sequence
  Synthetic
aaaacaugaugaauccauua

SEQ ID NO: 507872 - RNA, 21 nt, Artificial Sequence
  Synthetic
uaaaacaugaugaauccauua

SEQ ID NO: 507873 - RNA, 22 nt, Artificial Sequence
  Synthetic
uuaaaacaugaugaauccauua

SEQ ID NO: 507874 - RNA, 23 nt, Artificial Sequence
  Synthetic
auuaaaacaugaugaauccauua

SEQ ID NO: 507875 - RNA, 24 nt, Artificial Sequence
  Synthetic
uauuaaaacaugaugaauccauua

SEQ ID NO: 507876 - RNA, 18 nt, Artificial Sequence
  Synthetic
aaaugaguacauccauua

SEQ ID NO: 507877 - RNA, 19 nt, Artificial Sequence
  Synthetic
uaaaugaguacauccauua

SEQ ID NO: 507878 - RNA, 20 nt, Artificial Sequence
  Synthetic
guaaaugaguacauccauua

SEQ ID NO: 507879 - RNA, 21 nt, Artificial Sequence
  Synthetic
uguaaaugaguacauccauua

SEQ ID NO: 507880 - RNA, 22 nt, Artificial Sequence
  Synthetic
auguaaaugaguacauccauua

SEQ ID NO: 507881 - RNA, 23 nt, Artificial Sequence
  Synthetic
aauguaaaugaguacauccauua

SEQ ID NO: 507882 - RNA, 24 nt, Artificial Sequence
  Synthetic
gaauguaaaugaguacauccauua

SEQ ID NO: 507883 - RNA, 18 nt, Artificial Sequence
  Synthetic
ugaggcauuucagcauua

SEQ ID NO: 507884 - RNA, 19 nt, Artificial Sequence
  Synthetic
cugaggcauuucagcauua

SEQ ID NO: 507885 - RNA, 20 nt, Artificial Sequence
  Synthetic
acugaggcauuucagcauua

SEQ ID NO: 507886 - RNA, 21 nt, Artificial Sequence
  Synthetic
cacugaggcauuucagcauua

SEQ ID NO: 507887 - RNA, 22 nt, Artificial Sequence
  Synthetic
gcacugaggcauuucagcauua

SEQ ID NO: 507888 - RNA, 23 nt, Artificial Sequence
  Synthetic
agcacugaggcauuucagcauua

SEQ ID NO: 507889 - RNA, 24 nt, Artificial Sequence
  Synthetic
gagcacugaggcauuucagcauua

SEQ ID NO: 507890 - RNA, 18 nt, Artificial Sequence
  Synthetic
uguuucaugcaggcauua

SEQ ID NO: 507891 - RNA, 19 nt, Artificial Sequence
  Synthetic
uuguuucaugcaggcauua

SEQ ID NO: 507892 - RNA, 20 nt, Artificial Sequence
  Synthetic
uuuguuucaugcaggcauua

SEQ ID NO: 507893 - RNA, 21 nt, Artificial Sequence
  Synthetic
guuuguuucaugcaggcauua

SEQ ID NO: 507894 - RNA, 22 nt, Artificial Sequence
  Synthetic
aguuuguuucaugcaggcauua

SEQ ID NO: 507895 - RNA, 23 nt, Artificial Sequence
  Synthetic
uaguuuguuucaugcaggcauua

SEQ ID NO: 507896 - RNA, 24 nt, Artificial Sequence
  Synthetic
cuaguuuguuucaugcaggcauua

SEQ ID NO: 507897 - RNA, 18 nt, Artificial Sequence
  Synthetic
aggagaaaagaugcauua

SEQ ID NO: 507898 - RNA, 19 nt, Artificial Sequence
  Synthetic
aaggagaaaagaugcauua

SEQ ID NO: 507899 - RNA, 20 nt, Artificial Sequence
  Synthetic
gaaggagaaaagaugcauua

SEQ ID NO: 507900 - RNA, 21 nt, Artificial Sequence
  Synthetic
ugaaggagaaaagaugcauua

SEQ ID NO: 507901 - RNA, 22 nt, Artificial Sequence
  Synthetic
augaaggagaaaagaugcauua

SEQ ID NO: 507902 - RNA, 23 nt, Artificial Sequence
  Synthetic
gaugaaggagaaaagaugcauua

SEQ ID NO: 507903 - RNA, 24 nt, Artificial Sequence
  Synthetic
ugaugaaggagaaaagaugcauua

SEQ ID NO: 507904 - RNA, 18 nt, Artificial Sequence
  Synthetic
cuuuucuggucaucauua

SEQ ID NO: 507905 - RNA, 19 nt, Artificial Sequence
  Synthetic
ucuuuucuggucaucauua

SEQ ID NO: 507906 - RNA, 20 nt, Artificial Sequence
  Synthetic
gucuuuucuggucaucauua

SEQ ID NO: 507907 - RNA, 21 nt, Artificial Sequence
  Synthetic
ugucuuuucuggucaucauua

SEQ ID NO: 507908 - RNA, 22 nt, Artificial Sequence
  Synthetic
augucuuuucuggucaucauua

SEQ ID NO: 507909 - RNA, 23 nt, Artificial Sequence
  Synthetic
caugucuuuucuggucaucauua

SEQ ID NO: 507910 - RNA, 24 nt, Artificial Sequence
  Synthetic
ucaugucuuuucuggucaucauua

SEQ ID NO: 507911 - RNA, 18 nt, Artificial Sequence
  Synthetic
auuaaaaguagaucauua

SEQ ID NO: 507912 - RNA, 19 nt, Artificial Sequence
  Synthetic
aauuaaaaguagaucauua

SEQ ID NO: 507913 - RNA, 20 nt, Artificial Sequence
  Synthetic
aaauuaaaaguagaucauua

SEQ ID NO: 507914 - RNA, 21 nt, Artificial Sequence
  Synthetic
aaaauuaaaaguagaucauua

SEQ ID NO: 507915 - RNA, 22 nt, Artificial Sequence
  Synthetic
caaaauuaaaaguagaucauua

SEQ ID NO: 507916 - RNA, 23 nt, Artificial Sequence
  Synthetic
ccaaaauuaaaaguagaucauua

SEQ ID NO: 507917 - RNA, 24 nt, Artificial Sequence
  Synthetic
accaaaauuaaaaguagaucauua

SEQ ID NO: 507918 - RNA, 18 nt, Artificial Sequence
  Synthetic
gaguaagcccgaucauua

SEQ ID NO: 507919 - RNA, 19 nt, Artificial Sequence
  Synthetic
agaguaagcccgaucauua

SEQ ID NO: 507920 - RNA, 20 nt, Artificial Sequence
  Synthetic
gagaguaagcccgaucauua

SEQ ID NO: 507921 - RNA, 21 nt, Artificial Sequence
  Synthetic
ugagaguaagcccgaucauua

SEQ ID NO: 507922 - RNA, 22 nt, Artificial Sequence
  Synthetic
uugagaguaagcccgaucauua

SEQ ID NO: 507923 - RNA, 23 nt, Artificial Sequence
  Synthetic
auugagaguaagcccgaucauua

SEQ ID NO: 507924 - RNA, 24 nt, Artificial Sequence
  Synthetic
gauugagaguaagcccgaucauua

SEQ ID NO: 507925 - RNA, 18 nt, Artificial Sequence
  Synthetic
gaucuuugaguaucauua

SEQ ID NO: 507926 - RNA, 19 nt, Artificial Sequence
  Synthetic
agaucuuugaguaucauua

SEQ ID NO: 507927 - RNA, 20 nt, Artificial Sequence
  Synthetic
aagaucuuugaguaucauua

SEQ ID NO: 507928 - RNA, 21 nt, Artificial Sequence
  Synthetic
caagaucuuugaguaucauua

SEQ ID NO: 507929 - RNA, 22 nt, Artificial Sequence
  Synthetic
ucaagaucuuugaguaucauua

SEQ ID NO: 507930 - RNA, 23 nt, Artificial Sequence
  Synthetic
uucaagaucuuugaguaucauua

SEQ ID NO: 507931 - RNA, 24 nt, Artificial Sequence
  Synthetic
auucaagaucuuugaguaucauua

SEQ ID NO: 507932 - RNA, 18 nt, Artificial Sequence
  Synthetic
aagguuaacuuaucauua

SEQ ID NO: 507933 - RNA, 19 nt, Artificial Sequence
  Synthetic
uaagguuaacuuaucauua

SEQ ID NO: 507934 - RNA, 20 nt, Artificial Sequence
  Synthetic
cuaagguuaacuuaucauua

SEQ ID NO: 507935 - RNA, 21 nt, Artificial Sequence
  Synthetic
gcuaagguuaacuuaucauua

SEQ ID NO: 507936 - RNA, 22 nt, Artificial Sequence
  Synthetic
agcuaagguuaacuuaucauua

SEQ ID NO: 507937 - RNA, 23 nt, Artificial Sequence
  Synthetic
aagcuaagguuaacuuaucauua

SEQ ID NO: 507938 - RNA, 24 nt, Artificial Sequence
  Synthetic
uaagcuaagguuaacuuaucauua

SEQ ID NO: 507939 - RNA, 18 nt, Artificial Sequence
  Synthetic
uuugcgaauuuaucauua

SEQ ID NO: 507940 - RNA, 19 nt, Artificial Sequence
  Synthetic
auuugcgaauuuaucauua

SEQ ID NO: 507941 - RNA, 20 nt, Artificial Sequence
  Synthetic
gauuugcgaauuuaucauua

SEQ ID NO: 507942 - RNA, 21 nt, Artificial Sequence
  Synthetic
agauuugcgaauuuaucauua

SEQ ID NO: 507943 - RNA, 22 nt, Artificial Sequence
  Synthetic
gagauuugcgaauuuaucauua

SEQ ID NO: 507944 - RNA, 23 nt, Artificial Sequence
  Synthetic
agagauuugcgaauuuaucauua

SEQ ID NO: 507945 - RNA, 24 nt, Artificial Sequence
  Synthetic
uagagauuugcgaauuuaucauua

SEQ ID NO: 507946 - RNA, 18 nt, Artificial Sequence
  Synthetic
uuaaaaauucacucauua

SEQ ID NO: 507947 - RNA, 19 nt, Artificial Sequence
  Synthetic
uuuaaaaauucacucauua

SEQ ID NO: 507948 - RNA, 20 nt, Artificial Sequence
  Synthetic
uuuuaaaaauucacucauua

SEQ ID NO: 507949 - RNA, 21 nt, Artificial Sequence
  Synthetic
uuuuuaaaaauucacucauua

SEQ ID NO: 507950 - RNA, 22 nt, Artificial Sequence
  Synthetic
uuuuuuaaaaauucacucauua

SEQ ID NO: 507951 - RNA, 23 nt, Artificial Sequence
  Synthetic
cuuuuuuaaaaauucacucauua

SEQ ID NO: 507952 - RNA, 24 nt, Artificial Sequence
  Synthetic
acuuuuuuaaaaauucacucauua

SEQ ID NO: 507953 - RNA, 18 nt, Artificial Sequence
  Synthetic
aagguugucuccucauua

SEQ ID NO: 507954 - RNA, 19 nt, Artificial Sequence
  Synthetic
uaagguugucuccucauua

SEQ ID NO: 507955 - RNA, 20 nt, Artificial Sequence
  Synthetic
uuaagguugucuccucauua

SEQ ID NO: 507956 - RNA, 21 nt, Artificial Sequence
  Synthetic
uuuaagguugucuccucauua

SEQ ID NO: 507957 - RNA, 22 nt, Artificial Sequence
  Synthetic
uuuuaagguugucuccucauua

SEQ ID NO: 507958 - RNA, 23 nt, Artificial Sequence
  Synthetic
cuuuuaagguugucuccucauua

SEQ ID NO: 507959 - RNA, 24 nt, Artificial Sequence
  Synthetic
gcuuuuaagguugucuccucauua

SEQ ID NO: 507960 - RNA, 18 nt, Artificial Sequence
  Synthetic
uauaccucuagcucauua

SEQ ID NO: 507961 - RNA, 19 nt, Artificial Sequence
  Synthetic
guauaccucuagcucauua

SEQ ID NO: 507962 - RNA, 20 nt, Artificial Sequence
  Synthetic
aguauaccucuagcucauua

SEQ ID NO: 507963 - RNA, 21 nt, Artificial Sequence
  Synthetic
uaguauaccucuagcucauua

SEQ ID NO: 507964 - RNA, 22 nt, Artificial Sequence
  Synthetic
auaguauaccucuagcucauua

SEQ ID NO: 507965 - RNA, 23 nt, Artificial Sequence
  Synthetic
aauaguauaccucuagcucauua

SEQ ID NO: 507966 - RNA, 24 nt, Artificial Sequence
  Synthetic
aaauaguauaccucuagcucauua

SEQ ID NO: 507967 - RNA, 18 nt, Artificial Sequence
  Synthetic
uuggagauagggucauua

SEQ ID NO: 507968 - RNA, 19 nt, Artificial Sequence
  Synthetic
uuuggagauagggucauua

SEQ ID NO: 507969 - RNA, 20 nt, Artificial Sequence
  Synthetic
auuuggagauagggucauua

SEQ ID NO: 507970 - RNA, 21 nt, Artificial Sequence
  Synthetic
uauuuggagauagggucauua

SEQ ID NO: 507971 - RNA, 22 nt, Artificial Sequence
  Synthetic
cuauuuggagauagggucauua

SEQ ID NO: 507972 - RNA, 23 nt, Artificial Sequence
  Synthetic
ccuauuuggagauagggucauua

SEQ ID NO: 507973 - RNA, 24 nt, Artificial Sequence
  Synthetic
cccuauuuggagauagggucauua

SEQ ID NO: 507974 - RNA, 21 nt, Artificial Sequence
  Synthetic
ccucaucaucacuggucauua

SEQ ID NO: 507975 - RNA, 22 nt, Artificial Sequence
  Synthetic
accucaucaucacuggucauua

SEQ ID NO: 507976 - RNA, 23 nt, Artificial Sequence
  Synthetic
aaccucaucaucacuggucauua

SEQ ID NO: 507977 - RNA, 24 nt, Artificial Sequence
  Synthetic
aaaccucaucaucacuggucauua

SEQ ID NO: 507978 - RNA, 18 nt, Artificial Sequence
  Synthetic
cauuaucacuggucauua

SEQ ID NO: 507979 - RNA, 19 nt, Artificial Sequence
  Synthetic
ucauuaucacuggucauua

SEQ ID NO: 507980 - RNA, 20 nt, Artificial Sequence
  Synthetic
cucauuaucacuggucauua

SEQ ID NO: 507981 - RNA, 21 nt, Artificial Sequence
  Synthetic
gcucauuaucacuggucauua

SEQ ID NO: 507982 - RNA, 22 nt, Artificial Sequence
  Synthetic
agcucauuaucacuggucauua

SEQ ID NO: 507983 - RNA, 23 nt, Artificial Sequence
  Synthetic
aagcucauuaucacuggucauua

SEQ ID NO: 507984 - RNA, 24 nt, Artificial Sequence
  Synthetic
aaagcucauuaucacuggucauua

SEQ ID NO: 507985 - RNA, 18 nt, Artificial Sequence
  Synthetic
acuuaaucuuugucauua

SEQ ID NO: 507986 - RNA, 19 nt, Artificial Sequence
  Synthetic
gacuuaaucuuugucauua

SEQ ID NO: 507987 - RNA, 20 nt, Artificial Sequence
  Synthetic
agacuuaaucuuugucauua

SEQ ID NO: 507988 - RNA, 21 nt, Artificial Sequence
  Synthetic
gagacuuaaucuuugucauua

SEQ ID NO: 507989 - RNA, 22 nt, Artificial Sequence
  Synthetic
agagacuuaaucuuugucauua

SEQ ID NO: 507990 - RNA, 23 nt, Artificial Sequence
  Synthetic
uagagacuuaaucuuugucauua

SEQ ID NO: 507991 - RNA, 24 nt, Artificial Sequence
  Synthetic
auagagacuuaaucuuugucauua

SEQ ID NO: 507992 - RNA, 18 nt, Artificial Sequence
  Synthetic
aucauacaaaauucauua

SEQ ID NO: 507993 - RNA, 19 nt, Artificial Sequence
  Synthetic
uaucauacaaaauucauua

SEQ ID NO: 507994 - RNA, 20 nt, Artificial Sequence
  Synthetic
auaucauacaaaauucauua

SEQ ID NO: 507995 - RNA, 21 nt, Artificial Sequence
  Synthetic
aauaucauacaaaauucauua

SEQ ID NO: 507996 - RNA, 22 nt, Artificial Sequence
  Synthetic
uaauaucauacaaaauucauua

SEQ ID NO: 507997 - RNA, 23 nt, Artificial Sequence
  Synthetic
guaauaucauacaaaauucauua

SEQ ID NO: 507998 - RNA, 24 nt, Artificial Sequence
  Synthetic
gguaauaucauacaaaauucauua

SEQ ID NO: 507999 - RNA, 18 nt, Artificial Sequence
  Synthetic
uuucagcauuguucauua

SEQ ID NO: 508000 - RNA, 19 nt, Artificial Sequence
  Synthetic
guuucagcauuguucauua

SEQ ID NO: 508001 - RNA, 20 nt, Artificial Sequence
  Synthetic
uguuucagcauuguucauua

SEQ ID NO: 508002 - RNA, 21 nt, Artificial Sequence
  Synthetic
uuguuucagcauuguucauua

SEQ ID NO: 508003 - RNA, 22 nt, Artificial Sequence
  Synthetic
guuguuucagcauuguucauua

SEQ ID NO: 508004 - RNA, 23 nt, Artificial Sequence
  Synthetic
uguuguuucagcauuguucauua

SEQ ID NO: 508005 - RNA, 24 nt, Artificial Sequence
  Synthetic
auguuguuucagcauuguucauua

SEQ ID NO: 508006 - RNA, 18 nt, Artificial Sequence
  Synthetic
ugcuacgaagaaagauua

SEQ ID NO: 508007 - RNA, 19 nt, Artificial Sequence
  Synthetic
augcuacgaagaaagauua

SEQ ID NO: 508008 - RNA, 20 nt, Artificial Sequence
  Synthetic
gaugcuacgaagaaagauua

SEQ ID NO: 508009 - RNA, 21 nt, Artificial Sequence
  Synthetic
ugaugcuacgaagaaagauua

SEQ ID NO: 508010 - RNA, 22 nt, Artificial Sequence
  Synthetic
augaugcuacgaagaaagauua

SEQ ID NO: 508011 - RNA, 23 nt, Artificial Sequence
  Synthetic
aaugaugcuacgaagaaagauua

SEQ ID NO: 508012 - RNA, 24 nt, Artificial Sequence
  Synthetic
caaugaugcuacgaagaaagauua

SEQ ID NO: 508013 - RNA, 18 nt, Artificial Sequence
  Synthetic
ugacauuaaccaagauua

SEQ ID NO: 508014 - RNA, 19 nt, Artificial Sequence
  Synthetic
gugacauuaaccaagauua

SEQ ID NO: 508015 - RNA, 20 nt, Artificial Sequence
  Synthetic
agugacauuaaccaagauua

SEQ ID NO: 508016 - RNA, 21 nt, Artificial Sequence
  Synthetic
gagugacauuaaccaagauua

SEQ ID NO: 508017 - RNA, 22 nt, Artificial Sequence
  Synthetic
agagugacauuaaccaagauua

SEQ ID NO: 508018 - RNA, 23 nt, Artificial Sequence
  Synthetic
gagagugacauuaaccaagauua

SEQ ID NO: 508019 - RNA, 24 nt, Artificial Sequence
  Synthetic
ugagagugacauuaaccaagauua

SEQ ID NO: 508020 - RNA, 18 nt, Artificial Sequence
  Synthetic
gaagccuuaagaagauua

SEQ ID NO: 508021 - RNA, 19 nt, Artificial Sequence
  Synthetic
ggaagccuuaagaagauua

SEQ ID NO: 508022 - RNA, 20 nt, Artificial Sequence
  Synthetic
aggaagccuuaagaagauua

SEQ ID NO: 508023 - RNA, 21 nt, Artificial Sequence
  Synthetic
gaggaagccuuaagaagauua

SEQ ID NO: 508024 - RNA, 22 nt, Artificial Sequence
  Synthetic
ggaggaagccuuaagaagauua

SEQ ID NO: 508025 - RNA, 23 nt, Artificial Sequence
  Synthetic
uggaggaagccuuaagaagauua

SEQ ID NO: 508026 - RNA, 24 nt, Artificial Sequence
  Synthetic
cuggaggaagccuuaagaagauua

SEQ ID NO: 508027 - RNA, 18 nt, Artificial Sequence
  Synthetic
uuucacaguggaagauua

SEQ ID NO: 508028 - RNA, 19 nt, Artificial Sequence
  Synthetic
auuucacaguggaagauua

SEQ ID NO: 508029 - RNA, 20 nt, Artificial Sequence
  Synthetic
cauuucacaguggaagauua

SEQ ID NO: 508030 - RNA, 21 nt, Artificial Sequence
  Synthetic
ccauuucacaguggaagauua

SEQ ID NO: 508031 - RNA, 22 nt, Artificial Sequence
  Synthetic
uccauuucacaguggaagauua

SEQ ID NO: 508032 - RNA, 23 nt, Artificial Sequence
  Synthetic
uuccauuucacaguggaagauua

SEQ ID NO: 508033 - RNA, 24 nt, Artificial Sequence
  Synthetic
auuccauuucacaguggaagauua

SEQ ID NO: 508034 - RNA, 18 nt, Artificial Sequence
  Synthetic
auuauguaaaacagauua

SEQ ID NO: 508035 - RNA, 19 nt, Artificial Sequence
  Synthetic
gauuauguaaaacagauua

SEQ ID NO: 508036 - RNA, 20 nt, Artificial Sequence
  Synthetic
ggauuauguaaaacagauua

SEQ ID NO: 508037 - RNA, 21 nt, Artificial Sequence
  Synthetic
uggauuauguaaaacagauua

SEQ ID NO: 508038 - RNA, 22 nt, Artificial Sequence
  Synthetic
auggauuauguaaaacagauua

SEQ ID NO: 508039 - RNA, 23 nt, Artificial Sequence
  Synthetic
gauggauuauguaaaacagauua

SEQ ID NO: 508040 - RNA, 24 nt, Artificial Sequence
  Synthetic
agauggauuauguaaaacagauua

SEQ ID NO: 508041 - RNA, 18 nt, Artificial Sequence
  Synthetic
auaauaaaugacagauua

SEQ ID NO: 508042 - RNA, 19 nt, Artificial Sequence
  Synthetic
uauaauaaaugacagauua

SEQ ID NO: 508043 - RNA, 20 nt, Artificial Sequence
  Synthetic
uuauaauaaaugacagauua

SEQ ID NO: 508044 - RNA, 21 nt, Artificial Sequence
  Synthetic
auuauaauaaaugacagauua

SEQ ID NO: 508045 - RNA, 22 nt, Artificial Sequence
  Synthetic
gauuauaauaaaugacagauua

SEQ ID NO: 508046 - RNA, 23 nt, Artificial Sequence
  Synthetic
agauuauaauaaaugacagauua

SEQ ID NO: 508047 - RNA, 24 nt, Artificial Sequence
  Synthetic
gagauuauaauaaaugacagauua

SEQ ID NO: 508048 - RNA, 18 nt, Artificial Sequence
  Synthetic
auuagcaucuccagauua

SEQ ID NO: 508049 - RNA, 19 nt, Artificial Sequence
  Synthetic
uauuagcaucuccagauua

SEQ ID NO: 508050 - RNA, 20 nt, Artificial Sequence
  Synthetic
uuauuagcaucuccagauua

SEQ ID NO: 508051 - RNA, 21 nt, Artificial Sequence
  Synthetic
uuuauuagcaucuccagauua

SEQ ID NO: 508052 - RNA, 22 nt, Artificial Sequence
  Synthetic
cuuuauuagcaucuccagauua

SEQ ID NO: 508053 - RNA, 23 nt, Artificial Sequence
  Synthetic
gcuuuauuagcaucuccagauua

SEQ ID NO: 508054 - RNA, 24 nt, Artificial Sequence
  Synthetic
ggcuuuauuagcaucuccagauua

SEQ ID NO: 508055 - RNA, 18 nt, Artificial Sequence
  Synthetic
gggcuuuguagcagauua

SEQ ID NO: 508056 - RNA, 19 nt, Artificial Sequence
  Synthetic
agggcuuuguagcagauua

SEQ ID NO: 508057 - RNA, 20 nt, Artificial Sequence
  Synthetic
gagggcuuuguagcagauua

SEQ ID NO: 508058 - RNA, 21 nt, Artificial Sequence
  Synthetic
ggagggcuuuguagcagauua

SEQ ID NO: 508059 - RNA, 22 nt, Artificial Sequence
  Synthetic
aggagggcuuuguagcagauua

SEQ ID NO: 508060 - RNA, 23 nt, Artificial Sequence
  Synthetic
gaggagggcuuuguagcagauua

SEQ ID NO: 508061 - RNA, 24 nt, Artificial Sequence
  Synthetic
agaggagggcuuuguagcagauua

SEQ ID NO: 508062 - RNA, 18 nt, Artificial Sequence
  Synthetic
cugugccagaagagauua

SEQ ID NO: 508063 - RNA, 19 nt, Artificial Sequence
  Synthetic
ucugugccagaagagauua

SEQ ID NO: 508064 - RNA, 20 nt, Artificial Sequence
  Synthetic
cucugugccagaagagauua

SEQ ID NO: 508065 - RNA, 21 nt, Artificial Sequence
  Synthetic
acucugugccagaagagauua

SEQ ID NO: 508066 - RNA, 22 nt, Artificial Sequence
  Synthetic
gacucugugccagaagagauua

SEQ ID NO: 508067 - RNA, 23 nt, Artificial Sequence
  Synthetic
ugacucugugccagaagagauua

SEQ ID NO: 508068 - RNA, 24 nt, Artificial Sequence
  Synthetic
uugacucugugccagaagagauua

SEQ ID NO: 508069 - RNA, 18 nt, Artificial Sequence
  Synthetic
aaauagguggagagauua

SEQ ID NO: 508070 - RNA, 19 nt, Artificial Sequence
  Synthetic
caaauagguggagagauua

SEQ ID NO: 508071 - RNA, 20 nt, Artificial Sequence
  Synthetic
acaaauagguggagagauua

SEQ ID NO: 508072 - RNA, 21 nt, Artificial Sequence
  Synthetic
aacaaauagguggagagauua

SEQ ID NO: 508073 - RNA, 22 nt, Artificial Sequence
  Synthetic
gaacaaauagguggagagauua

SEQ ID NO: 508074 - RNA, 23 nt, Artificial Sequence
  Synthetic
ggaacaaauagguggagagauua

SEQ ID NO: 508075 - RNA, 24 nt, Artificial Sequence
  Synthetic
aggaacaaauagguggagagauua

SEQ ID NO: 508076 - RNA, 18 nt, Artificial Sequence
  Synthetic
agguaaaacacgagauua

SEQ ID NO: 508077 - RNA, 19 nt, Artificial Sequence
  Synthetic
uagguaaaacacgagauua

SEQ ID NO: 508078 - RNA, 20 nt, Artificial Sequence
  Synthetic
guagguaaaacacgagauua

SEQ ID NO: 508079 - RNA, 21 nt, Artificial Sequence
  Synthetic
cguagguaaaacacgagauua

SEQ ID NO: 508080 - RNA, 22 nt, Artificial Sequence
  Synthetic
acguagguaaaacacgagauua

SEQ ID NO: 508081 - RNA, 23 nt, Artificial Sequence
  Synthetic
gacguagguaaaacacgagauua

SEQ ID NO: 508082 - RNA, 24 nt, Artificial Sequence
  Synthetic
agacguagguaaaacacgagauua

SEQ ID NO: 508083 - RNA, 18 nt, Artificial Sequence
  Synthetic
gaauacaaagggagauua

SEQ ID NO: 508084 - RNA, 19 nt, Artificial Sequence
  Synthetic
ugaauacaaagggagauua

SEQ ID NO: 508085 - RNA, 20 nt, Artificial Sequence
  Synthetic
cugaauacaaagggagauua

SEQ ID NO: 508086 - RNA, 21 nt, Artificial Sequence
  Synthetic
gcugaauacaaagggagauua

SEQ ID NO: 508087 - RNA, 22 nt, Artificial Sequence
  Synthetic
ggcugaauacaaagggagauua

SEQ ID NO: 508088 - RNA, 23 nt, Artificial Sequence
  Synthetic
gggcugaauacaaagggagauua

SEQ ID NO: 508089 - RNA, 24 nt, Artificial Sequence
  Synthetic
agggcugaauacaaagggagauua

SEQ ID NO: 508090 - RNA, 18 nt, Artificial Sequence
  Synthetic
augaagauaaugagauua

SEQ ID NO: 508091 - RNA, 19 nt, Artificial Sequence
  Synthetic
aaugaagauaaugagauua

SEQ ID NO: 508092 - RNA, 20 nt, Artificial Sequence
  Synthetic
aaaugaagauaaugagauua

SEQ ID NO: 508093 - RNA, 21 nt, Artificial Sequence
  Synthetic
caaaugaagauaaugagauua

SEQ ID NO: 508094 - RNA, 22 nt, Artificial Sequence
  Synthetic
ucaaaugaagauaaugagauua

SEQ ID NO: 508095 - RNA, 23 nt, Artificial Sequence
  Synthetic
aucaaaugaagauaaugagauua

SEQ ID NO: 508096 - RNA, 24 nt, Artificial Sequence
  Synthetic
uaucaaaugaagauaaugagauua

SEQ ID NO: 508097 - RNA, 18 nt, Artificial Sequence
  Synthetic
gcacugagggugagauua

SEQ ID NO: 508098 - RNA, 19 nt, Artificial Sequence
  Synthetic
ggcacugagggugagauua

SEQ ID NO: 508099 - RNA, 20 nt, Artificial Sequence
  Synthetic
aggcacugagggugagauua

SEQ ID NO: 508100 - RNA, 21 nt, Artificial Sequence
  Synthetic
aaggcacugagggugagauua

SEQ ID NO: 508101 - RNA, 22 nt, Artificial Sequence
  Synthetic
aaaggcacugagggugagauua

SEQ ID NO: 508102 - RNA, 23 nt, Artificial Sequence
  Synthetic
uaaaggcacugagggugagauua

SEQ ID NO: 508103 - RNA, 24 nt, Artificial Sequence
  Synthetic
uuaaaggcacugagggugagauua

SEQ ID NO: 508104 - RNA, 18 nt, Artificial Sequence
  Synthetic
agagcugagauuagauua

SEQ ID NO: 508105 - RNA, 19 nt, Artificial Sequence
  Synthetic
cagagcugagauuagauua

SEQ ID NO: 508106 - RNA, 20 nt, Artificial Sequence
  Synthetic
acagagcugagauuagauua

SEQ ID NO: 508107 - RNA, 21 nt, Artificial Sequence
  Synthetic
gacagagcugagauuagauua

SEQ ID NO: 508108 - RNA, 22 nt, Artificial Sequence
  Synthetic
ggacagagcugagauuagauua

SEQ ID NO: 508109 - RNA, 23 nt, Artificial Sequence
  Synthetic
aggacagagcugagauuagauua

SEQ ID NO: 508110 - RNA, 24 nt, Artificial Sequence
  Synthetic
aaggacagagcugagauuagauua

SEQ ID NO: 508111 - RNA, 18 nt, Artificial Sequence
  Synthetic
agcauuuagcuuagauua

SEQ ID NO: 508112 - RNA, 19 nt, Artificial Sequence
  Synthetic
gagcauuuagcuuagauua

SEQ ID NO: 508113 - RNA, 20 nt, Artificial Sequence
  Synthetic
ugagcauuuagcuuagauua

SEQ ID NO: 508114 - RNA, 21 nt, Artificial Sequence
  Synthetic
uugagcauuuagcuuagauua

SEQ ID NO: 508115 - RNA, 22 nt, Artificial Sequence
  Synthetic
uuugagcauuuagcuuagauua

SEQ ID NO: 508116 - RNA, 23 nt, Artificial Sequence
  Synthetic
uuuugagcauuuagcuuagauua

SEQ ID NO: 508117 - RNA, 24 nt, Artificial Sequence
  Synthetic
auuuugagcauuuagcuuagauua

SEQ ID NO: 508118 - RNA, 18 nt, Artificial Sequence
  Synthetic
acauuuuaauaacgauua

SEQ ID NO: 508119 - RNA, 19 nt, Artificial Sequence
  Synthetic
uacauuuuaauaacgauua

SEQ ID NO: 508120 - RNA, 20 nt, Artificial Sequence
  Synthetic
cuacauuuuaauaacgauua

SEQ ID NO: 508121 - RNA, 21 nt, Artificial Sequence
  Synthetic
acuacauuuuaauaacgauua

SEQ ID NO: 508122 - RNA, 22 nt, Artificial Sequence
  Synthetic
gacuacauuuuaauaacgauua

SEQ ID NO: 508123 - RNA, 23 nt, Artificial Sequence
  Synthetic
ggacuacauuuuaauaacgauua

SEQ ID NO: 508124 - RNA, 24 nt, Artificial Sequence
  Synthetic
uggacuacauuuuaauaacgauua

SEQ ID NO: 508125 - RNA, 18 nt, Artificial Sequence
  Synthetic
ccuccaacagagcgauua

SEQ ID NO: 508126 - RNA, 19 nt, Artificial Sequence
  Synthetic
cccuccaacagagcgauua

SEQ ID NO: 508127 - RNA, 20 nt, Artificial Sequence
  Synthetic
acccuccaacagagcgauua

SEQ ID NO: 508128 - RNA, 21 nt, Artificial Sequence
  Synthetic
cacccuccaacagagcgauua

SEQ ID NO: 508129 - RNA, 22 nt, Artificial Sequence
  Synthetic
ccacccuccaacagagcgauua

SEQ ID NO: 508130 - RNA, 23 nt, Artificial Sequence
  Synthetic
gccacccuccaacagagcgauua

SEQ ID NO: 508131 - RNA, 24 nt, Artificial Sequence
  Synthetic
ggccacccuccaacagagcgauua

SEQ ID NO: 508132 - RNA, 18 nt, Artificial Sequence
  Synthetic
ucuagccaggaaggauua

SEQ ID NO: 508133 - RNA, 19 nt, Artificial Sequence
  Synthetic
cucuagccaggaaggauua

SEQ ID NO: 508134 - RNA, 20 nt, Artificial Sequence
  Synthetic
ucucuagccaggaaggauua

SEQ ID NO: 508135 - RNA, 21 nt, Artificial Sequence
  Synthetic
uucucuagccaggaaggauua

SEQ ID NO: 508136 - RNA, 22 nt, Artificial Sequence
  Synthetic
uuucucuagccaggaaggauua

SEQ ID NO: 508137 - RNA, 23 nt, Artificial Sequence
  Synthetic
cuuucucuagccaggaaggauua

SEQ ID NO: 508138 - RNA, 24 nt, Artificial Sequence
  Synthetic
gcuuucucuagccaggaaggauua

SEQ ID NO: 508139 - RNA, 18 nt, Artificial Sequence
  Synthetic
cugacuuccccaggauua

SEQ ID NO: 508140 - RNA, 19 nt, Artificial Sequence
  Synthetic
acugacuuccccaggauua

SEQ ID NO: 508141 - RNA, 20 nt, Artificial Sequence
  Synthetic
cacugacuuccccaggauua

SEQ ID NO: 508142 - RNA, 21 nt, Artificial Sequence
  Synthetic
gcacugacuuccccaggauua

SEQ ID NO: 508143 - RNA, 22 nt, Artificial Sequence
  Synthetic
agcacugacuuccccaggauua

SEQ ID NO: 508144 - RNA, 23 nt, Artificial Sequence
  Synthetic
cagcacugacuuccccaggauua

SEQ ID NO: 508145 - RNA, 24 nt, Artificial Sequence
  Synthetic
acagcacugacuuccccaggauua

SEQ ID NO: 508146 - RNA, 18 nt, Artificial Sequence
  Synthetic
aacuaauacauaggauua

SEQ ID NO: 508147 - RNA, 19 nt, Artificial Sequence
  Synthetic
gaacuaauacauaggauua

SEQ ID NO: 508148 - RNA, 20 nt, Artificial Sequence
  Synthetic
ugaacuaauacauaggauua

SEQ ID NO: 508149 - RNA, 21 nt, Artificial Sequence
  Synthetic
augaacuaauacauaggauua

SEQ ID NO: 508150 - RNA, 22 nt, Artificial Sequence
  Synthetic
aaugaacuaauacauaggauua

SEQ ID NO: 508151 - RNA, 23 nt, Artificial Sequence
  Synthetic
aaaugaacuaauacauaggauua

SEQ ID NO: 508152 - RNA, 24 nt, Artificial Sequence
  Synthetic
aaaaugaacuaauacauaggauua

SEQ ID NO: 508153 - RNA, 18 nt, Artificial Sequence
  Synthetic
aaacuaucgguaggauua

SEQ ID NO: 508154 - RNA, 19 nt, Artificial Sequence
  Synthetic
uaaacuaucgguaggauua

SEQ ID NO: 508155 - RNA, 20 nt, Artificial Sequence
  Synthetic
guaaacuaucgguaggauua

SEQ ID NO: 508156 - RNA, 21 nt, Artificial Sequence
  Synthetic
uguaaacuaucgguaggauua

SEQ ID NO: 508157 - RNA, 22 nt, Artificial Sequence
  Synthetic
cuguaaacuaucgguaggauua

SEQ ID NO: 508158 - RNA, 23 nt, Artificial Sequence
  Synthetic
acuguaaacuaucgguaggauua

SEQ ID NO: 508159 - RNA, 24 nt, Artificial Sequence
  Synthetic
uacuguaaacuaucgguaggauua

SEQ ID NO: 508160 - RNA, 18 nt, Artificial Sequence
  Synthetic
aggauuguuuuaggauua

SEQ ID NO: 508161 - RNA, 19 nt, Artificial Sequence
  Synthetic
caggauuguuuuaggauua

SEQ ID NO: 508162 - RNA, 20 nt, Artificial Sequence
  Synthetic
ccaggauuguuuuaggauua

SEQ ID NO: 508163 - RNA, 21 nt, Artificial Sequence
  Synthetic
accaggauuguuuuaggauua

SEQ ID NO: 508164 - RNA, 22 nt, Artificial Sequence
  Synthetic
caccaggauuguuuuaggauua

SEQ ID NO: 508165 - RNA, 23 nt, Artificial Sequence
  Synthetic
ccaccaggauuguuuuaggauua

SEQ ID NO: 508166 - RNA, 24 nt, Artificial Sequence
  Synthetic
cccaccaggauuguuuuaggauua

SEQ ID NO: 508167 - RNA, 18 nt, Artificial Sequence
  Synthetic
ucucuagggaagggauua

SEQ ID NO: 508168 - RNA, 19 nt, Artificial Sequence
  Synthetic
aucucuagggaagggauua

SEQ ID NO: 508169 - RNA, 20 nt, Artificial Sequence
  Synthetic
gaucucuagggaagggauua

SEQ ID NO: 508170 - RNA, 21 nt, Artificial Sequence
  Synthetic
ugaucucuagggaagggauua

SEQ ID NO: 508171 - RNA, 22 nt, Artificial Sequence
  Synthetic
augaucucuagggaagggauua

SEQ ID NO: 508172 - RNA, 23 nt, Artificial Sequence
  Synthetic
aaugaucucuagggaagggauua

SEQ ID NO: 508173 - RNA, 24 nt, Artificial Sequence
  Synthetic
uaaugaucucuagggaagggauua

SEQ ID NO: 508174 - RNA, 18 nt, Artificial Sequence
  Synthetic
aaucaagaauggggauua

SEQ ID NO: 508175 - RNA, 19 nt, Artificial Sequence
  Synthetic
aaaucaagaauggggauua

SEQ ID NO: 508176 - RNA, 20 nt, Artificial Sequence
  Synthetic
gaaaucaagaauggggauua

SEQ ID NO: 508177 - RNA, 21 nt, Artificial Sequence
  Synthetic
agaaaucaagaauggggauua

SEQ ID NO: 508178 - RNA, 22 nt, Artificial Sequence
  Synthetic
cagaaaucaagaauggggauua

SEQ ID NO: 508179 - RNA, 23 nt, Artificial Sequence
  Synthetic
ccagaaaucaagaauggggauua

SEQ ID NO: 508180 - RNA, 24 nt, Artificial Sequence
  Synthetic
uccagaaaucaagaauggggauua

SEQ ID NO: 508181 - RNA, 18 nt, Artificial Sequence
  Synthetic
caucuguggaugggauua

SEQ ID NO: 508182 - RNA, 19 nt, Artificial Sequence
  Synthetic
gcaucuguggaugggauua

SEQ ID NO: 508183 - RNA, 20 nt, Artificial Sequence
  Synthetic
ggcaucuguggaugggauua

SEQ ID NO: 508184 - RNA, 21 nt, Artificial Sequence
  Synthetic
uggcaucuguggaugggauua

SEQ ID NO: 508185 - RNA, 22 nt, Artificial Sequence
  Synthetic
cuggcaucuguggaugggauua

SEQ ID NO: 508186 - RNA, 23 nt, Artificial Sequence
  Synthetic
ccuggcaucuguggaugggauua

SEQ ID NO: 508187 - RNA, 24 nt, Artificial Sequence
  Synthetic
accuggcaucuguggaugggauua

SEQ ID NO: 508188 - RNA, 18 nt, Artificial Sequence
  Synthetic
gagaugaaacugggauua

SEQ ID NO: 508189 - RNA, 19 nt, Artificial Sequence
  Synthetic
agagaugaaacugggauua

SEQ ID NO: 508190 - RNA, 20 nt, Artificial Sequence
  Synthetic
aagagaugaaacugggauua

SEQ ID NO: 508191 - RNA, 21 nt, Artificial Sequence
  Synthetic
aaagagaugaaacugggauua

SEQ ID NO: 508192 - RNA, 22 nt, Artificial Sequence
  Synthetic
gaaagagaugaaacugggauua

SEQ ID NO: 508193 - RNA, 23 nt, Artificial Sequence
  Synthetic
ugaaagagaugaaacugggauua

SEQ ID NO: 508194 - RNA, 24 nt, Artificial Sequence
  Synthetic
augaaagagaugaaacugggauua

SEQ ID NO: 508195 - RNA, 18 nt, Artificial Sequence
  Synthetic
cccaaguagcugggauua

SEQ ID NO: 508196 - RNA, 19 nt, Artificial Sequence
  Synthetic
ucccaaguagcugggauua

SEQ ID NO: 508197 - RNA, 20 nt, Artificial Sequence
  Synthetic
cucccaaguagcugggauua

SEQ ID NO: 508198 - RNA, 21 nt, Artificial Sequence
  Synthetic
ccucccaaguagcugggauua

SEQ ID NO: 508199 - RNA, 22 nt, Artificial Sequence
  Synthetic
gccucccaaguagcugggauua

SEQ ID NO: 508200 - RNA, 23 nt, Artificial Sequence
  Synthetic
agccucccaaguagcugggauua

SEQ ID NO: 508201 - RNA, 24 nt, Artificial Sequence
  Synthetic
cagccucccaaguagcugggauua

SEQ ID NO: 508202 - RNA, 21 nt, Artificial Sequence
  Synthetic
cguccugaguagcugggauua

SEQ ID NO: 508203 - RNA, 22 nt, Artificial Sequence
  Synthetic
gcguccugaguagcugggauua

SEQ ID NO: 508204 - RNA, 23 nt, Artificial Sequence
  Synthetic
agcguccugaguagcugggauua

SEQ ID NO: 508205 - RNA, 24 nt, Artificial Sequence
  Synthetic
cagcguccugaguagcugggauua

SEQ ID NO: 508206 - RNA, 21 nt, Artificial Sequence
  Synthetic
ccucccaaagugcugggauua

SEQ ID NO: 508207 - RNA, 22 nt, Artificial Sequence
  Synthetic
gccucccaaagugcugggauua

SEQ ID NO: 508208 - RNA, 23 nt, Artificial Sequence
  Synthetic
ggccucccaaagugcugggauua

SEQ ID NO: 508209 - RNA, 24 nt, Artificial Sequence
  Synthetic
cggccucccaaagugcugggauua

SEQ ID NO: 508210 - RNA, 24 nt, Artificial Sequence
  Synthetic
uggccucccaaagugcugggauua

SEQ ID NO: 508211 - RNA, 18 nt, Artificial Sequence
  Synthetic
cccacaguucugggauua

SEQ ID NO: 508212 - RNA, 19 nt, Artificial Sequence
  Synthetic
ucccacaguucugggauua

SEQ ID NO: 508213 - RNA, 20 nt, Artificial Sequence
  Synthetic
cucccacaguucugggauua

SEQ ID NO: 508214 - RNA, 21 nt, Artificial Sequence
  Synthetic
ccucccacaguucugggauua

SEQ ID NO: 508215 - RNA, 22 nt, Artificial Sequence
  Synthetic
gccucccacaguucugggauua

SEQ ID NO: 508216 - RNA, 23 nt, Artificial Sequence
  Synthetic
agccucccacaguucugggauua

SEQ ID NO: 508217 - RNA, 24 nt, Artificial Sequence
  Synthetic
uagccucccacaguucugggauua

SEQ ID NO: 508218 - RNA, 18 nt, Artificial Sequence
  Synthetic
gggacauacaauggauua

SEQ ID NO: 508219 - RNA, 19 nt, Artificial Sequence
  Synthetic
cgggacauacaauggauua

SEQ ID NO: 508220 - RNA, 20 nt, Artificial Sequence
  Synthetic
ccgggacauacaauggauua

SEQ ID NO: 508221 - RNA, 21 nt, Artificial Sequence
  Synthetic
cccgggacauacaauggauua

SEQ ID NO: 508222 - RNA, 22 nt, Artificial Sequence
  Synthetic
ccccgggacauacaauggauua

SEQ ID NO: 508223 - RNA, 23 nt, Artificial Sequence
  Synthetic
cccccgggacauacaauggauua

SEQ ID NO: 508224 - RNA, 24 nt, Artificial Sequence
  Synthetic
acccccgggacauacaauggauua

SEQ ID NO: 508225 - RNA, 18 nt, Artificial Sequence
  Synthetic
uuucaagucaauggauua

SEQ ID NO: 508226 - RNA, 19 nt, Artificial Sequence
  Synthetic
uuuucaagucaauggauua

SEQ ID NO: 508227 - RNA, 20 nt, Artificial Sequence
  Synthetic
guuuucaagucaauggauua

SEQ ID NO: 508228 - RNA, 21 nt, Artificial Sequence
  Synthetic
aguuuucaagucaauggauua

SEQ ID NO: 508229 - RNA, 22 nt, Artificial Sequence
  Synthetic
aaguuuucaagucaauggauua

SEQ ID NO: 508230 - RNA, 23 nt, Artificial Sequence
  Synthetic
aaaguuuucaagucaauggauua

SEQ ID NO: 508231 - RNA, 24 nt, Artificial Sequence
  Synthetic
gaaaguuuucaagucaauggauua

SEQ ID NO: 508232 - RNA, 18 nt, Artificial Sequence
  Synthetic
ugaggaggguauggauua

SEQ ID NO: 508233 - RNA, 19 nt, Artificial Sequence
  Synthetic
augaggaggguauggauua

SEQ ID NO: 508234 - RNA, 20 nt, Artificial Sequence
  Synthetic
aaugaggaggguauggauua

SEQ ID NO: 508235 - RNA, 21 nt, Artificial Sequence
  Synthetic
aaaugaggaggguauggauua

SEQ ID NO: 508236 - RNA, 22 nt, Artificial Sequence
  Synthetic
aaaaugaggaggguauggauua

SEQ ID NO: 508237 - RNA, 23 nt, Artificial Sequence
  Synthetic
aaaaaugaggaggguauggauua

SEQ ID NO: 508238 - RNA, 24 nt, Artificial Sequence
  Synthetic
uaaaaaugaggaggguauggauua

SEQ ID NO: 508239 - RNA, 18 nt, Artificial Sequence
  Synthetic
guucaaaucauuggauua

SEQ ID NO: 508240 - RNA, 19 nt, Artificial Sequence
  Synthetic
uguucaaaucauuggauua

SEQ ID NO: 508241 - RNA, 20 nt, Artificial Sequence
  Synthetic
auguucaaaucauuggauua

SEQ ID NO: 508242 - RNA, 21 nt, Artificial Sequence
  Synthetic
aauguucaaaucauuggauua

SEQ ID NO: 508243 - RNA, 22 nt, Artificial Sequence
  Synthetic
aaauguucaaaucauuggauua

SEQ ID NO: 508244 - RNA, 23 nt, Artificial Sequence
  Synthetic
aaaauguucaaaucauuggauua

SEQ ID NO: 508245 - RNA, 24 nt, Artificial Sequence
  Synthetic
aaaaauguucaaaucauuggauua

SEQ ID NO: 508246 - RNA, 18 nt, Artificial Sequence
  Synthetic
ugcugugccuuuggauua

SEQ ID NO: 508247 - RNA, 19 nt, Artificial Sequence
  Synthetic
uugcugugccuuuggauua

SEQ ID NO: 508248 - RNA, 20 nt, Artificial Sequence
  Synthetic
auugcugugccuuuggauua

SEQ ID NO: 508249 - RNA, 21 nt, Artificial Sequence
  Synthetic
gauugcugugccuuuggauua

SEQ ID NO: 508250 - RNA, 22 nt, Artificial Sequence
  Synthetic
ggauugcugugccuuuggauua

SEQ ID NO: 508251 - RNA, 23 nt, Artificial Sequence
  Synthetic
cggauugcugugccuuuggauua

SEQ ID NO: 508252 - RNA, 24 nt, Artificial Sequence
  Synthetic
acggauugcugugccuuuggauua

SEQ ID NO: 508253 - RNA, 18 nt, Artificial Sequence
  Synthetic
agcaucugguaaugauua

SEQ ID NO: 508254 - RNA, 19 nt, Artificial Sequence
  Synthetic
uagcaucugguaaugauua

SEQ ID NO: 508255 - RNA, 20 nt, Artificial Sequence
  Synthetic
auagcaucugguaaugauua

SEQ ID NO: 508256 - RNA, 21 nt, Artificial Sequence
  Synthetic
aauagcaucugguaaugauua

SEQ ID NO: 508257 - RNA, 22 nt, Artificial Sequence
  Synthetic
aaauagcaucugguaaugauua

SEQ ID NO: 508258 - RNA, 23 nt, Artificial Sequence
  Synthetic
aaaauagcaucugguaaugauua

SEQ ID NO: 508259 - RNA, 24 nt, Artificial Sequence
  Synthetic
gaaaauagcaucugguaaugauua

SEQ ID NO: 508260 - RNA, 18 nt, Artificial Sequence
  Synthetic
acaauuauuauaugauua

SEQ ID NO: 508261 - RNA, 19 nt, Artificial Sequence
  Synthetic
cacaauuauuauaugauua

SEQ ID NO: 508262 - RNA, 20 nt, Artificial Sequence
  Synthetic
ucacaauuauuauaugauua

SEQ ID NO: 508263 - RNA, 21 nt, Artificial Sequence
  Synthetic
cucacaauuauuauaugauua

SEQ ID NO: 508264 - RNA, 22 nt, Artificial Sequence
  Synthetic
ccucacaauuauuauaugauua

SEQ ID NO: 508265 - RNA, 23 nt, Artificial Sequence
  Synthetic
accucacaauuauuauaugauua

SEQ ID NO: 508266 - RNA, 24 nt, Artificial Sequence
  Synthetic
caccucacaauuauuauaugauua

SEQ ID NO: 508267 - RNA, 18 nt, Artificial Sequence
  Synthetic
ucaagauagguaugauua

SEQ ID NO: 508268 - RNA, 19 nt, Artificial Sequence
  Synthetic
uucaagauagguaugauua

SEQ ID NO: 508269 - RNA, 20 nt, Artificial Sequence
  Synthetic
cuucaagauagguaugauua

SEQ ID NO: 508270 - RNA, 21 nt, Artificial Sequence
  Synthetic
ucuucaagauagguaugauua

SEQ ID NO: 508271 - RNA, 22 nt, Artificial Sequence
  Synthetic
gucuucaagauagguaugauua

SEQ ID NO: 508272 - RNA, 23 nt, Artificial Sequence
  Synthetic
agucuucaagauagguaugauua

SEQ ID NO: 508273 - RNA, 24 nt, Artificial Sequence
  Synthetic
aagucuucaagauagguaugauua

SEQ ID NO: 508274 - RNA, 18 nt, Artificial Sequence
  Synthetic
uggauuagaaacugauua

SEQ ID NO: 508275 - RNA, 19 nt, Artificial Sequence
  Synthetic
uuggauuagaaacugauua

SEQ ID NO: 508276 - RNA, 20 nt, Artificial Sequence
  Synthetic
uuuggauuagaaacugauua

SEQ ID NO: 508277 - RNA, 21 nt, Artificial Sequence
  Synthetic
uuuuggauuagaaacugauua

SEQ ID NO: 508278 - RNA, 22 nt, Artificial Sequence
  Synthetic
auuuuggauuagaaacugauua

SEQ ID NO: 508279 - RNA, 23 nt, Artificial Sequence
  Synthetic
aauuuuggauuagaaacugauua

SEQ ID NO: 508280 - RNA, 24 nt, Artificial Sequence
  Synthetic
caauuuuggauuagaaacugauua

SEQ ID NO: 508281 - RNA, 18 nt, Artificial Sequence
  Synthetic
cuccagggcuacugauua

SEQ ID NO: 508282 - RNA, 19 nt, Artificial Sequence
  Synthetic
acuccagggcuacugauua

SEQ ID NO: 508283 - RNA, 20 nt, Artificial Sequence
  Synthetic
gacuccagggcuacugauua

SEQ ID NO: 508284 - RNA, 21 nt, Artificial Sequence
  Synthetic
agacuccagggcuacugauua

SEQ ID NO: 508285 - RNA, 22 nt, Artificial Sequence
  Synthetic
aagacuccagggcuacugauua

SEQ ID NO: 508286 - RNA, 23 nt, Artificial Sequence
  Synthetic
aaagacuccagggcuacugauua

SEQ ID NO: 508287 - RNA, 24 nt, Artificial Sequence
  Synthetic
caaagacuccagggcuacugauua

SEQ ID NO: 508288 - RNA, 18 nt, Artificial Sequence
  Synthetic
ggcaggagagagugauua

SEQ ID NO: 508289 - RNA, 19 nt, Artificial Sequence
  Synthetic
gggcaggagagagugauua

SEQ ID NO: 508290 - RNA, 20 nt, Artificial Sequence
  Synthetic
ggggcaggagagagugauua

SEQ ID NO: 508291 - RNA, 21 nt, Artificial Sequence
  Synthetic
aggggcaggagagagugauua

SEQ ID NO: 508292 - RNA, 22 nt, Artificial Sequence
  Synthetic
gaggggcaggagagagugauua

SEQ ID NO: 508293 - RNA, 23 nt, Artificial Sequence
  Synthetic
ggaggggcaggagagagugauua

SEQ ID NO: 508294 - RNA, 24 nt, Artificial Sequence
  Synthetic
gggaggggcaggagagagugauua

SEQ ID NO: 508295 - RNA, 18 nt, Artificial Sequence
  Synthetic
gggacaaauuugugauua

SEQ ID NO: 508296 - RNA, 19 nt, Artificial Sequence
  Synthetic
ugggacaaauuugugauua

SEQ ID NO: 508297 - RNA, 20 nt, Artificial Sequence
  Synthetic
cugggacaaauuugugauua

SEQ ID NO: 508298 - RNA, 21 nt, Artificial Sequence
  Synthetic
ucugggacaaauuugugauua

SEQ ID NO: 508299 - RNA, 22 nt, Artificial Sequence
  Synthetic
gucugggacaaauuugugauua

SEQ ID NO: 508300 - RNA, 23 nt, Artificial Sequence
  Synthetic
ugucugggacaaauuugugauua

SEQ ID NO: 508301 - RNA, 24 nt, Artificial Sequence
  Synthetic
augucugggacaaauuugugauua

SEQ ID NO: 508302 - RNA, 18 nt, Artificial Sequence
  Synthetic
augaaagaucaaauauua

SEQ ID NO: 508303 - RNA, 19 nt, Artificial Sequence
  Synthetic
aaugaaagaucaaauauua

SEQ ID NO: 508304 - RNA, 20 nt, Artificial Sequence
  Synthetic
caaugaaagaucaaauauua

SEQ ID NO: 508305 - RNA, 21 nt, Artificial Sequence
  Synthetic
acaaugaaagaucaaauauua

SEQ ID NO: 508306 - RNA, 22 nt, Artificial Sequence
  Synthetic
gacaaugaaagaucaaauauua

SEQ ID NO: 508307 - RNA, 23 nt, Artificial Sequence
  Synthetic
agacaaugaaagaucaaauauua

SEQ ID NO: 508308 - RNA, 24 nt, Artificial Sequence
  Synthetic
cagacaaugaaagaucaaauauua

SEQ ID NO: 508309 - RNA, 18 nt, Artificial Sequence
  Synthetic
aagugaaguuaaauauua

SEQ ID NO: 508310 - RNA, 19 nt, Artificial Sequence
  Synthetic
gaagugaaguuaaauauua

SEQ ID NO: 508311 - RNA, 20 nt, Artificial Sequence
  Synthetic
ggaagugaaguuaaauauua

SEQ ID NO: 508312 - RNA, 21 nt, Artificial Sequence
  Synthetic
aggaagugaaguuaaauauua

SEQ ID NO: 508313 - RNA, 22 nt, Artificial Sequence
  Synthetic
aaggaagugaaguuaaauauua

SEQ ID NO: 508314 - RNA, 23 nt, Artificial Sequence
  Synthetic
gaaggaagugaaguuaaauauua

SEQ ID NO: 508315 - RNA, 24 nt, Artificial Sequence
  Synthetic
ugaaggaagugaaguuaaauauua

SEQ ID NO: 508316 - RNA, 18 nt, Artificial Sequence
  Synthetic
aauuggcucccaauauua

SEQ ID NO: 508317 - RNA, 19 nt, Artificial Sequence
  Synthetic
uaauuggcucccaauauua

SEQ ID NO: 508318 - RNA, 20 nt, Artificial Sequence
  Synthetic
cuaauuggcucccaauauua

SEQ ID NO: 508319 - RNA, 21 nt, Artificial Sequence
  Synthetic
acuaauuggcucccaauauua

SEQ ID NO: 508320 - RNA, 22 nt, Artificial Sequence
  Synthetic
uacuaauuggcucccaauauua

SEQ ID NO: 508321 - RNA, 23 nt, Artificial Sequence
  Synthetic
cuacuaauuggcucccaauauua

SEQ ID NO: 508322 - RNA, 24 nt, Artificial Sequence
  Synthetic
acuacuaauuggcucccaauauua

SEQ ID NO: 508323 - RNA, 18 nt, Artificial Sequence
  Synthetic
acuuuuugaggaauauua

SEQ ID NO: 508324 - RNA, 19 nt, Artificial Sequence
  Synthetic
aacuuuuugaggaauauua

SEQ ID NO: 508325 - RNA, 20 nt, Artificial Sequence
  Synthetic
caacuuuuugaggaauauua

SEQ ID NO: 508326 - RNA, 21 nt, Artificial Sequence
  Synthetic
ccaacuuuuugaggaauauua

SEQ ID NO: 508327 - RNA, 22 nt, Artificial Sequence
  Synthetic
uccaacuuuuugaggaauauua

SEQ ID NO: 508328 - RNA, 23 nt, Artificial Sequence
  Synthetic
auccaacuuuuugaggaauauua

SEQ ID NO: 508329 - RNA, 24 nt, Artificial Sequence
  Synthetic
aauccaacuuuuugaggaauauua

SEQ ID NO: 508330 - RNA, 18 nt, Artificial Sequence
  Synthetic
aaaaaacuaggaauauua

SEQ ID NO: 508331 - RNA, 19 nt, Artificial Sequence
  Synthetic
uaaaaaacuaggaauauua

SEQ ID NO: 508332 - RNA, 20 nt, Artificial Sequence
  Synthetic
auaaaaaacuaggaauauua

SEQ ID NO: 508333 - RNA, 21 nt, Artificial Sequence
  Synthetic
aauaaaaaacuaggaauauua

SEQ ID NO: 508334 - RNA, 22 nt, Artificial Sequence
  Synthetic
gaauaaaaaacuaggaauauua

SEQ ID NO: 508335 - RNA, 23 nt, Artificial Sequence
  Synthetic
ggaauaaaaaacuaggaauauua

SEQ ID NO: 508336 - RNA, 24 nt, Artificial Sequence
  Synthetic
aggaauaaaaaacuaggaauauua

SEQ ID NO: 508337 - RNA, 18 nt, Artificial Sequence
  Synthetic
cuauaauuuugaauauua

SEQ ID NO: 508338 - RNA, 19 nt, Artificial Sequence
  Synthetic
gcuauaauuuugaauauua

SEQ ID NO: 508339 - RNA, 20 nt, Artificial Sequence
  Synthetic
ugcuauaauuuugaauauua

SEQ ID NO: 508340 - RNA, 21 nt, Artificial Sequence
  Synthetic
augcuauaauuuugaauauua

SEQ ID NO: 508341 - RNA, 22 nt, Artificial Sequence
  Synthetic
uaugcuauaauuuugaauauua

SEQ ID NO: 508342 - RNA, 23 nt, Artificial Sequence
  Synthetic
cuaugcuauaauuuugaauauua

SEQ ID NO: 508343 - RNA, 24 nt, Artificial Sequence
  Synthetic
acuaugcuauaauuuugaauauua

SEQ ID NO: 508344 - RNA, 18 nt, Artificial Sequence
  Synthetic
uuuaccaauguaauauua

SEQ ID NO: 508345 - RNA, 19 nt, Artificial Sequence
  Synthetic
cuuuaccaauguaauauua

SEQ ID NO: 508346 - RNA, 20 nt, Artificial Sequence
  Synthetic
ucuuuaccaauguaauauua

SEQ ID NO: 508347 - RNA, 21 nt, Artificial Sequence
  Synthetic
gucuuuaccaauguaauauua

SEQ ID NO: 508348 - RNA, 22 nt, Artificial Sequence
  Synthetic
cgucuuuaccaauguaauauua

SEQ ID NO: 508349 - RNA, 23 nt, Artificial Sequence
  Synthetic
acgucuuuaccaauguaauauua

SEQ ID NO: 508350 - RNA, 24 nt, Artificial Sequence
  Synthetic
gacgucuuuaccaauguaauauua

SEQ ID NO: 508351 - RNA, 18 nt, Artificial Sequence
  Synthetic
cuuaacuccuuaauauua

SEQ ID NO: 508352 - RNA, 19 nt, Artificial Sequence
  Synthetic
gcuuaacuccuuaauauua

SEQ ID NO: 508353 - RNA, 20 nt, Artificial Sequence
  Synthetic
ugcuuaacuccuuaauauua

SEQ ID NO: 508354 - RNA, 21 nt, Artificial Sequence
  Synthetic
augcuuaacuccuuaauauua

SEQ ID NO: 508355 - RNA, 22 nt, Artificial Sequence
  Synthetic
aaugcuuaacuccuuaauauua

SEQ ID NO: 508356 - RNA, 23 nt, Artificial Sequence
  Synthetic
aaaugcuuaacuccuuaauauua

SEQ ID NO: 508357 - RNA, 24 nt, Artificial Sequence
  Synthetic
uaaaugcuuaacuccuuaauauua

SEQ ID NO: 508358 - RNA, 18 nt, Artificial Sequence
  Synthetic
accuaaauguuaauauua

SEQ ID NO: 508359 - RNA, 19 nt, Artificial Sequence
  Synthetic
caccuaaauguuaauauua

SEQ ID NO: 508360 - RNA, 20 nt, Artificial Sequence
  Synthetic
acaccuaaauguuaauauua

SEQ ID NO: 508361 - RNA, 21 nt, Artificial Sequence
  Synthetic
gacaccuaaauguuaauauua

SEQ ID NO: 508362 - RNA, 22 nt, Artificial Sequence
  Synthetic
ugacaccuaaauguuaauauua

SEQ ID NO: 508363 - RNA, 23 nt, Artificial Sequence
  Synthetic
augacaccuaaauguuaauauua

SEQ ID NO: 508364 - RNA, 24 nt, Artificial Sequence
  Synthetic
caugacaccuaaauguuaauauua

SEQ ID NO: 508365 - RNA, 18 nt, Artificial Sequence
  Synthetic
caacauucuuuaauauua

SEQ ID NO: 508366 - RNA, 19 nt, Artificial Sequence
  Synthetic
ucaacauucuuuaauauua

SEQ ID NO: 508367 - RNA, 20 nt, Artificial Sequence
  Synthetic
gucaacauucuuuaauauua

SEQ ID NO: 508368 - RNA, 21 nt, Artificial Sequence
  Synthetic
agucaacauucuuuaauauua

SEQ ID NO: 508369 - RNA, 22 nt, Artificial Sequence
  Synthetic
aagucaacauucuuuaauauua

SEQ ID NO: 508370 - RNA, 23 nt, Artificial Sequence
  Synthetic
aaagucaacauucuuuaauauua

SEQ ID NO: 508371 - RNA, 24 nt, Artificial Sequence
  Synthetic
gaaagucaacauucuuuaauauua

SEQ ID NO: 508372 - RNA, 18 nt, Artificial Sequence
  Synthetic
auuuuaaauaacauauua

SEQ ID NO: 508373 - RNA, 19 nt, Artificial Sequence
  Synthetic
cauuuuaaauaacauauua

SEQ ID NO: 508374 - RNA, 20 nt, Artificial Sequence
  Synthetic
acauuuuaaauaacauauua

SEQ ID NO: 508375 - RNA, 21 nt, Artificial Sequence
  Synthetic
gacauuuuaaauaacauauua

SEQ ID NO: 508376 - RNA, 22 nt, Artificial Sequence
  Synthetic
ugacauuuuaaauaacauauua

SEQ ID NO: 508377 - RNA, 23 nt, Artificial Sequence
  Synthetic
uugacauuuuaaauaacauauua

SEQ ID NO: 508378 - RNA, 24 nt, Artificial Sequence
  Synthetic
uuugacauuuuaaauaacauauua

SEQ ID NO: 508379 - RNA, 18 nt, Artificial Sequence
  Synthetic
ucuccuaccuacauauua

SEQ ID NO: 508380 - RNA, 19 nt, Artificial Sequence
  Synthetic
uucuccuaccuacauauua

SEQ ID NO: 508381 - RNA, 20 nt, Artificial Sequence
  Synthetic
uuucuccuaccuacauauua

SEQ ID NO: 508382 - RNA, 21 nt, Artificial Sequence
  Synthetic
uuuucuccuaccuacauauua

SEQ ID NO: 508383 - RNA, 22 nt, Artificial Sequence
  Synthetic
cuuuucuccuaccuacauauua

SEQ ID NO: 508384 - RNA, 23 nt, Artificial Sequence
  Synthetic
acuuuucuccuaccuacauauua

SEQ ID NO: 508385 - RNA, 24 nt, Artificial Sequence
  Synthetic
cacuuuucuccuaccuacauauua

SEQ ID NO: 508386 - RNA, 18 nt, Artificial Sequence
  Synthetic
uuuucauuuaccauauua

SEQ ID NO: 508387 - RNA, 19 nt, Artificial Sequence
  Synthetic
guuuucauuuaccauauua

SEQ ID NO: 508388 - RNA, 20 nt, Artificial Sequence
  Synthetic
aguuuucauuuaccauauua

SEQ ID NO: 508389 - RNA, 21 nt, Artificial Sequence
  Synthetic
aaguuuucauuuaccauauua

SEQ ID NO: 508390 - RNA, 22 nt, Artificial Sequence
  Synthetic
aaaguuuucauuuaccauauua

SEQ ID NO: 508391 - RNA, 23 nt, Artificial Sequence
  Synthetic
aaaaguuuucauuuaccauauua

SEQ ID NO: 508392 - RNA, 24 nt, Artificial Sequence
  Synthetic
uaaaaguuuucauuuaccauauua

SEQ ID NO: 508393 - RNA, 18 nt, Artificial Sequence
  Synthetic
uguuuagcacgcauauua

SEQ ID NO: 508394 - RNA, 19 nt, Artificial Sequence
  Synthetic
cuguuuagcacgcauauua

SEQ ID NO: 508395 - RNA, 20 nt, Artificial Sequence
  Synthetic
acuguuuagcacgcauauua

SEQ ID NO: 508396 - RNA, 21 nt, Artificial Sequence
  Synthetic
aacuguuuagcacgcauauua

SEQ ID NO: 508397 - RNA, 22 nt, Artificial Sequence
  Synthetic
caacuguuuagcacgcauauua

SEQ ID NO: 508398 - RNA, 23 nt, Artificial Sequence
  Synthetic
ccaacuguuuagcacgcauauua

SEQ ID NO: 508399 - RNA, 24 nt, Artificial Sequence
  Synthetic
cccaacuguuuagcacgcauauua

SEQ ID NO: 508400 - RNA, 18 nt, Artificial Sequence
  Synthetic
ccuuauugacagauauua

SEQ ID NO: 508401 - RNA, 19 nt, Artificial Sequence
  Synthetic
cccuuauugacagauauua

SEQ ID NO: 508402 - RNA, 20 nt, Artificial Sequence
  Synthetic
acccuuauugacagauauua

SEQ ID NO: 508403 - RNA, 21 nt, Artificial Sequence
  Synthetic
gacccuuauugacagauauua

SEQ ID NO: 508404 - RNA, 22 nt, Artificial Sequence
  Synthetic
agacccuuauugacagauauua

SEQ ID NO: 508405 - RNA, 23 nt, Artificial Sequence
  Synthetic
gagacccuuauugacagauauua

SEQ ID NO: 508406 - RNA, 24 nt, Artificial Sequence
  Synthetic
agagacccuuauugacagauauua

SEQ ID NO: 508407 - RNA, 18 nt, Artificial Sequence
  Synthetic
ggaggugaauagauauua

SEQ ID NO: 508408 - RNA, 19 nt, Artificial Sequence
  Synthetic
uggaggugaauagauauua

SEQ ID NO: 508409 - RNA, 20 nt, Artificial Sequence
  Synthetic
uuggaggugaauagauauua

SEQ ID NO: 508410 - RNA, 21 nt, Artificial Sequence
  Synthetic
guuggaggugaauagauauua

SEQ ID NO: 508411 - RNA, 22 nt, Artificial Sequence
  Synthetic
uguuggaggugaauagauauua

SEQ ID NO: 508412 - RNA, 23 nt, Artificial Sequence
  Synthetic
guguuggaggugaauagauauua

SEQ ID NO: 508413 - RNA, 24 nt, Artificial Sequence
  Synthetic
gguguuggaggugaauagauauua

SEQ ID NO: 508414 - RNA, 18 nt, Artificial Sequence
  Synthetic
ucaaauacuuagauauua

SEQ ID NO: 508415 - RNA, 19 nt, Artificial Sequence
  Synthetic
cucaaauacuuagauauua

SEQ ID NO: 508416 - RNA, 20 nt, Artificial Sequence
  Synthetic
acucaaauacuuagauauua

SEQ ID NO: 508417 - RNA, 21 nt, Artificial Sequence
  Synthetic
gacucaaauacuuagauauua

SEQ ID NO: 508418 - RNA, 22 nt, Artificial Sequence
  Synthetic
ugacucaaauacuuagauauua

SEQ ID NO: 508419 - RNA, 23 nt, Artificial Sequence
  Synthetic
cugacucaaauacuuagauauua

SEQ ID NO: 508420 - RNA, 24 nt, Artificial Sequence
  Synthetic
ucugacucaaauacuuagauauua

SEQ ID NO: 508421 - RNA, 18 nt, Artificial Sequence
  Synthetic
ggauaugacuggauauua

SEQ ID NO: 508422 - RNA, 19 nt, Artificial Sequence
  Synthetic
aggauaugacuggauauua

SEQ ID NO: 508423 - RNA, 20 nt, Artificial Sequence
  Synthetic
aaggauaugacuggauauua

SEQ ID NO: 508424 - RNA, 21 nt, Artificial Sequence
  Synthetic
gaaggauaugacuggauauua

SEQ ID NO: 508425 - RNA, 22 nt, Artificial Sequence
  Synthetic
ggaaggauaugacuggauauua

SEQ ID NO: 508426 - RNA, 23 nt, Artificial Sequence
  Synthetic
gggaaggauaugacuggauauua

SEQ ID NO: 508427 - RNA, 24 nt, Artificial Sequence
  Synthetic
agggaaggauaugacuggauauua

SEQ ID NO: 508428 - RNA, 18 nt, Artificial Sequence
  Synthetic
cuggggaaagugauauua

SEQ ID NO: 508429 - RNA, 19 nt, Artificial Sequence
  Synthetic
gcuggggaaagugauauua

SEQ ID NO: 508430 - RNA, 20 nt, Artificial Sequence
  Synthetic
ugcuggggaaagugauauua

SEQ ID NO: 508431 - RNA, 21 nt, Artificial Sequence
  Synthetic
uugcuggggaaagugauauua

SEQ ID NO: 508432 - RNA, 22 nt, Artificial Sequence
  Synthetic
uuugcuggggaaagugauauua

SEQ ID NO: 508433 - RNA, 23 nt, Artificial Sequence
  Synthetic
guuugcuggggaaagugauauua

SEQ ID NO: 508434 - RNA, 24 nt, Artificial Sequence
  Synthetic
gguuugcuggggaaagugauauua

SEQ ID NO: 508435 - RNA, 18 nt, Artificial Sequence
  Synthetic
auagugugaaauauauua

SEQ ID NO: 508436 - RNA, 19 nt, Artificial Sequence
  Synthetic
gauagugugaaauauauua

SEQ ID NO: 508437 - RNA, 20 nt, Artificial Sequence
  Synthetic
ugauagugugaaauauauua

SEQ ID NO: 508438 - RNA, 21 nt, Artificial Sequence
  Synthetic
augauagugugaaauauauua

SEQ ID NO: 508439 - RNA, 22 nt, Artificial Sequence
  Synthetic
aaugauagugugaaauauauua

SEQ ID NO: 508440 - RNA, 23 nt, Artificial Sequence
  Synthetic
aaaugauagugugaaauauauua

SEQ ID NO: 508441 - RNA, 24 nt, Artificial Sequence
  Synthetic
gaaaugauagugugaaauauauua

SEQ ID NO: 508442 - RNA, 18 nt, Artificial Sequence
  Synthetic
ugauaggccuauauauua

SEQ ID NO: 508443 - RNA, 19 nt, Artificial Sequence
  Synthetic
augauaggccuauauauua

SEQ ID NO: 508444 - RNA, 20 nt, Artificial Sequence
  Synthetic
uaugauaggccuauauauua

SEQ ID NO: 508445 - RNA, 21 nt, Artificial Sequence
  Synthetic
cuaugauaggccuauauauua

SEQ ID NO: 508446 - RNA, 22 nt, Artificial Sequence
  Synthetic
gcuaugauaggccuauauauua

SEQ ID NO: 508447 - RNA, 23 nt, Artificial Sequence
  Synthetic
ggcuaugauaggccuauauauua

SEQ ID NO: 508448 - RNA, 24 nt, Artificial Sequence
  Synthetic
uggcuaugauaggccuauauauua

SEQ ID NO: 508449 - RNA, 18 nt, Artificial Sequence
  Synthetic
acaauacuuuauauauua

SEQ ID NO: 508450 - RNA, 19 nt, Artificial Sequence
  Synthetic
aacaauacuuuauauauua

SEQ ID NO: 508451 - RNA, 20 nt, Artificial Sequence
  Synthetic
aaacaauacuuuauauauua

SEQ ID NO: 508452 - RNA, 21 nt, Artificial Sequence
  Synthetic
gaaacaauacuuuauauauua

SEQ ID NO: 508453 - RNA, 22 nt, Artificial Sequence
  Synthetic
ggaaacaauacuuuauauauua

SEQ ID NO: 508454 - RNA, 23 nt, Artificial Sequence
  Synthetic
aggaaacaauacuuuauauauua

SEQ ID NO: 508455 - RNA, 24 nt, Artificial Sequence
  Synthetic
uaggaaacaauacuuuauauauua

SEQ ID NO: 508456 - RNA, 18 nt, Artificial Sequence
  Synthetic
uccucagcauguauauua

SEQ ID NO: 508457 - RNA, 19 nt, Artificial Sequence
  Synthetic
auccucagcauguauauua

SEQ ID NO: 508458 - RNA, 20 nt, Artificial Sequence
  Synthetic
aauccucagcauguauauua

SEQ ID NO: 508459 - RNA, 21 nt, Artificial Sequence
  Synthetic
caauccucagcauguauauua

SEQ ID NO: 508460 - RNA, 22 nt, Artificial Sequence
  Synthetic
ccaauccucagcauguauauua

SEQ ID NO: 508461 - RNA, 23 nt, Artificial Sequence
  Synthetic
accaauccucagcauguauauua

SEQ ID NO: 508462 - RNA, 24 nt, Artificial Sequence
  Synthetic
aaccaauccucagcauguauauua

SEQ ID NO: 508463 - RNA, 18 nt, Artificial Sequence
  Synthetic
aaaaaaaaaaaacuauua

SEQ ID NO: 508464 - RNA, 19 nt, Artificial Sequence
  Synthetic
caaaaaaaaaaaacuauua

SEQ ID NO: 508465 - RNA, 20 nt, Artificial Sequence
  Synthetic
acaaaaaaaaaaaacuauua

SEQ ID NO: 508466 - RNA, 21 nt, Artificial Sequence
  Synthetic
uacaaaaaaaaaaaacuauua

SEQ ID NO: 508467 - RNA, 22 nt, Artificial Sequence
  Synthetic
uuacaaaaaaaaaaaacuauua

SEQ ID NO: 508468 - RNA, 23 nt, Artificial Sequence
  Synthetic
auuacaaaaaaaaaaaacuauua

SEQ ID NO: 508469 - RNA, 24 nt, Artificial Sequence
  Synthetic
cauuacaaaaaaaaaaaacuauua

SEQ ID NO: 508470 - RNA, 18 nt, Artificial Sequence
  Synthetic
ucgaaaggcaaacuauua

SEQ ID NO: 508471 - RNA, 19 nt, Artificial Sequence
  Synthetic
uucgaaaggcaaacuauua

SEQ ID NO: 508472 - RNA, 20 nt, Artificial Sequence
  Synthetic
auucgaaaggcaaacuauua

SEQ ID NO: 508473 - RNA, 21 nt, Artificial Sequence
  Synthetic
uauucgaaaggcaaacuauua

SEQ ID NO: 508474 - RNA, 22 nt, Artificial Sequence
  Synthetic
cuauucgaaaggcaaacuauua

SEQ ID NO: 508475 - RNA, 23 nt, Artificial Sequence
  Synthetic
acuauucgaaaggcaaacuauua

SEQ ID NO: 508476 - RNA, 24 nt, Artificial Sequence
  Synthetic
cacuauucgaaaggcaaacuauua

SEQ ID NO: 508477 - RNA, 18 nt, Artificial Sequence
  Synthetic
gacauuuuugaacuauua

SEQ ID NO: 508478 - RNA, 19 nt, Artificial Sequence
  Synthetic
agacauuuuugaacuauua

SEQ ID NO: 508479 - RNA, 20 nt, Artificial Sequence
  Synthetic
aagacauuuuugaacuauua

SEQ ID NO: 508480 - RNA, 21 nt, Artificial Sequence
  Synthetic
aaagacauuuuugaacuauua

SEQ ID NO: 508481 - RNA, 22 nt, Artificial Sequence
  Synthetic
aaaagacauuuuugaacuauua

SEQ ID NO: 508482 - RNA, 23 nt, Artificial Sequence
  Synthetic
uaaaagacauuuuugaacuauua

SEQ ID NO: 508483 - RNA, 24 nt, Artificial Sequence
  Synthetic
auaaaagacauuuuugaacuauua

SEQ ID NO: 508484 - RNA, 18 nt, Artificial Sequence
  Synthetic
cuugcaacugcacuauua

SEQ ID NO: 508485 - RNA, 19 nt, Artificial Sequence
  Synthetic
ucuugcaacugcacuauua

SEQ ID NO: 508486 - RNA, 20 nt, Artificial Sequence
  Synthetic
uucuugcaacugcacuauua

SEQ ID NO: 508487 - RNA, 21 nt, Artificial Sequence
  Synthetic
guucuugcaacugcacuauua

SEQ ID NO: 508488 - RNA, 22 nt, Artificial Sequence
  Synthetic
gguucuugcaacugcacuauua

SEQ ID NO: 508489 - RNA, 23 nt, Artificial Sequence
  Synthetic
ugguucuugcaacugcacuauua

SEQ ID NO: 508490 - RNA, 24 nt, Artificial Sequence
  Synthetic
cugguucuugcaacugcacuauua

SEQ ID NO: 508491 - RNA, 18 nt, Artificial Sequence
  Synthetic
auuuaugccucacuauua

SEQ ID NO: 508492 - RNA, 19 nt, Artificial Sequence
  Synthetic
cauuuaugccucacuauua

SEQ ID NO: 508493 - RNA, 20 nt, Artificial Sequence
  Synthetic
ucauuuaugccucacuauua

SEQ ID NO: 508494 - RNA, 21 nt, Artificial Sequence
  Synthetic
gucauuuaugccucacuauua

SEQ ID NO: 508495 - RNA, 22 nt, Artificial Sequence
  Synthetic
agucauuuaugccucacuauua

SEQ ID NO: 508496 - RNA, 23 nt, Artificial Sequence
  Synthetic
cagucauuuaugccucacuauua

SEQ ID NO: 508497 - RNA, 24 nt, Artificial Sequence
  Synthetic
ucagucauuuaugccucacuauua

SEQ ID NO: 508498 - RNA, 18 nt, Artificial Sequence
  Synthetic
uauaagcuuucacuauua

SEQ ID NO: 508499 - RNA, 19 nt, Artificial Sequence
  Synthetic
cuauaagcuuucacuauua

SEQ ID NO: 508500 - RNA, 20 nt, Artificial Sequence
  Synthetic
acuauaagcuuucacuauua

SEQ ID NO: 508501 - RNA, 21 nt, Artificial Sequence
  Synthetic
gacuauaagcuuucacuauua

SEQ ID NO: 508502 - RNA, 22 nt, Artificial Sequence
  Synthetic
ggacuauaagcuuucacuauua

SEQ ID NO: 508503 - RNA, 23 nt, Artificial Sequence
  Synthetic
uggacuauaagcuuucacuauua

SEQ ID NO: 508504 - RNA, 24 nt, Artificial Sequence
  Synthetic
guggacuauaagcuuucacuauua

SEQ ID NO: 508505 - RNA, 18 nt, Artificial Sequence
  Synthetic
aaugcuuaaugacuauua

SEQ ID NO: 508506 - RNA, 19 nt, Artificial Sequence
  Synthetic
caaugcuuaaugacuauua

SEQ ID NO: 508507 - RNA, 20 nt, Artificial Sequence
  Synthetic
ucaaugcuuaaugacuauua

SEQ ID NO: 508508 - RNA, 21 nt, Artificial Sequence
  Synthetic
aucaaugcuuaaugacuauua

SEQ ID NO: 508509 - RNA, 22 nt, Artificial Sequence
  Synthetic
gaucaaugcuuaaugacuauua

SEQ ID NO: 508510 - RNA, 23 nt, Artificial Sequence
  Synthetic
cgaucaaugcuuaaugacuauua

SEQ ID NO: 508511 - RNA, 24 nt, Artificial Sequence
  Synthetic
ucgaucaaugcuuaaugacuauua

SEQ ID NO: 508512 - RNA, 18 nt, Artificial Sequence
  Synthetic
cugucuacuuuccuauua

SEQ ID NO: 508513 - RNA, 19 nt, Artificial Sequence
  Synthetic
ucugucuacuuuccuauua

SEQ ID NO: 508514 - RNA, 20 nt, Artificial Sequence
  Synthetic
cucugucuacuuuccuauua

SEQ ID NO: 508515 - RNA, 21 nt, Artificial Sequence
  Synthetic
ccucugucuacuuuccuauua

SEQ ID NO: 508516 - RNA, 22 nt, Artificial Sequence
  Synthetic
gccucugucuacuuuccuauua

SEQ ID NO: 508517 - RNA, 23 nt, Artificial Sequence
  Synthetic
ugccucugucuacuuuccuauua

SEQ ID NO: 508518 - RNA, 24 nt, Artificial Sequence
  Synthetic
augccucugucuacuuuccuauua

SEQ ID NO: 508519 - RNA, 18 nt, Artificial Sequence
  Synthetic
aaauuggcgucucuauua

SEQ ID NO: 508520 - RNA, 19 nt, Artificial Sequence
  Synthetic
caaauuggcgucucuauua

SEQ ID NO: 508521 - RNA, 20 nt, Artificial Sequence
  Synthetic
ucaaauuggcgucucuauua

SEQ ID NO: 508522 - RNA, 21 nt, Artificial Sequence
  Synthetic
uucaaauuggcgucucuauua

SEQ ID NO: 508523 - RNA, 22 nt, Artificial Sequence
  Synthetic
uuucaaauuggcgucucuauua

SEQ ID NO: 508524 - RNA, 23 nt, Artificial Sequence
  Synthetic
auuucaaauuggcgucucuauua

SEQ ID NO: 508525 - RNA, 24 nt, Artificial Sequence
  Synthetic
aauuucaaauuggcgucucuauua

SEQ ID NO: 508526 - RNA, 18 nt, Artificial Sequence
  Synthetic
ccugccauguuucuauua

SEQ ID NO: 508527 - RNA, 19 nt, Artificial Sequence
  Synthetic
cccugccauguuucuauua

SEQ ID NO: 508528 - RNA, 20 nt, Artificial Sequence
  Synthetic
ccccugccauguuucuauua

SEQ ID NO: 508529 - RNA, 21 nt, Artificial Sequence
  Synthetic
uccccugccauguuucuauua

SEQ ID NO: 508530 - RNA, 22 nt, Artificial Sequence
  Synthetic
cuccccugccauguuucuauua

SEQ ID NO: 508531 - RNA, 23 nt, Artificial Sequence
  Synthetic
ccuccccugccauguuucuauua

SEQ ID NO: 508532 - RNA, 24 nt, Artificial Sequence
  Synthetic
cccuccccugccauguuucuauua

SEQ ID NO: 508533 - RNA, 18 nt, Artificial Sequence
  Synthetic
uagauauuuaaaguauua

SEQ ID NO: 508534 - RNA, 19 nt, Artificial Sequence
  Synthetic
cuagauauuuaaaguauua

SEQ ID NO: 508535 - RNA, 20 nt, Artificial Sequence
  Synthetic
ccuagauauuuaaaguauua

SEQ ID NO: 508536 - RNA, 21 nt, Artificial Sequence
  Synthetic
gccuagauauuuaaaguauua

SEQ ID NO: 508537 - RNA, 22 nt, Artificial Sequence
  Synthetic
ugccuagauauuuaaaguauua

SEQ ID NO: 508538 - RNA, 23 nt, Artificial Sequence
  Synthetic
cugccuagauauuuaaaguauua

SEQ ID NO: 508539 - RNA, 24 nt, Artificial Sequence
  Synthetic
acugccuagauauuuaaaguauua

SEQ ID NO: 508540 - RNA, 18 nt, Artificial Sequence
  Synthetic
gauuaugauuaaguauua

SEQ ID NO: 508541 - RNA, 19 nt, Artificial Sequence
  Synthetic
ggauuaugauuaaguauua

SEQ ID NO: 508542 - RNA, 20 nt, Artificial Sequence
  Synthetic
aggauuaugauuaaguauua

SEQ ID NO: 508543 - RNA, 21 nt, Artificial Sequence
  Synthetic
aaggauuaugauuaaguauua

SEQ ID NO: 508544 - RNA, 22 nt, Artificial Sequence
  Synthetic
caaggauuaugauuaaguauua

SEQ ID NO: 508545 - RNA, 23 nt, Artificial Sequence
  Synthetic
ccaaggauuaugauuaaguauua

SEQ ID NO: 508546 - RNA, 24 nt, Artificial Sequence
  Synthetic
gccaaggauuaugauuaaguauua

SEQ ID NO: 508547 - RNA, 18 nt, Artificial Sequence
  Synthetic
uuauugauaacaguauua

SEQ ID NO: 508548 - RNA, 19 nt, Artificial Sequence
  Synthetic
uuuauugauaacaguauua

SEQ ID NO: 508549 - RNA, 20 nt, Artificial Sequence
  Synthetic
auuuauugauaacaguauua

SEQ ID NO: 508550 - RNA, 21 nt, Artificial Sequence
  Synthetic
aauuuauugauaacaguauua

SEQ ID NO: 508551 - RNA, 22 nt, Artificial Sequence
  Synthetic
gaauuuauugauaacaguauua

SEQ ID NO: 508552 - RNA, 23 nt, Artificial Sequence
  Synthetic
ugaauuuauugauaacaguauua

SEQ ID NO: 508553 - RNA, 24 nt, Artificial Sequence
  Synthetic
cugaauuuauugauaacaguauua

SEQ ID NO: 508554 - RNA, 18 nt, Artificial Sequence
  Synthetic
cacacaaauauaguauua

SEQ ID NO: 508555 - RNA, 19 nt, Artificial Sequence
  Synthetic
acacacaaauauaguauua

SEQ ID NO: 508556 - RNA, 20 nt, Artificial Sequence
  Synthetic
aacacacaaauauaguauua

SEQ ID NO: 508557 - RNA, 21 nt, Artificial Sequence
  Synthetic
caacacacaaauauaguauua

SEQ ID NO: 508558 - RNA, 22 nt, Artificial Sequence
  Synthetic
gcaacacacaaauauaguauua

SEQ ID NO: 508559 - RNA, 23 nt, Artificial Sequence
  Synthetic
ugcaacacacaaauauaguauua

SEQ ID NO: 508560 - RNA, 24 nt, Artificial Sequence
  Synthetic
uugcaacacacaaauauaguauua

SEQ ID NO: 508561 - RNA, 18 nt, Artificial Sequence
  Synthetic
uugagacagcuaguauua

SEQ ID NO: 508562 - RNA, 19 nt, Artificial Sequence
  Synthetic
uuugagacagcuaguauua

SEQ ID NO: 508563 - RNA, 20 nt, Artificial Sequence
  Synthetic
auuugagacagcuaguauua

SEQ ID NO: 508564 - RNA, 21 nt, Artificial Sequence
  Synthetic
cauuugagacagcuaguauua

SEQ ID NO: 508565 - RNA, 22 nt, Artificial Sequence
  Synthetic
ucauuugagacagcuaguauua

SEQ ID NO: 508566 - RNA, 23 nt, Artificial Sequence
  Synthetic
gucauuugagacagcuaguauua

SEQ ID NO: 508567 - RNA, 24 nt, Artificial Sequence
  Synthetic
agucauuugagacagcuaguauua

SEQ ID NO: 508568 - RNA, 18 nt, Artificial Sequence
  Synthetic
uuuauugccuccguauua

SEQ ID NO: 508569 - RNA, 19 nt, Artificial Sequence
  Synthetic
uuuuauugccuccguauua

SEQ ID NO: 508570 - RNA, 20 nt, Artificial Sequence
  Synthetic
uuuuuauugccuccguauua

SEQ ID NO: 508571 - RNA, 21 nt, Artificial Sequence
  Synthetic
auuuuuauugccuccguauua

SEQ ID NO: 508572 - RNA, 22 nt, Artificial Sequence
  Synthetic
aauuuuuauugccuccguauua

SEQ ID NO: 508573 - RNA, 23 nt, Artificial Sequence
  Synthetic
aaauuuuuauugccuccguauua

SEQ ID NO: 508574 - RNA, 24 nt, Artificial Sequence
  Synthetic
gaaauuuuuauugccuccguauua

SEQ ID NO: 508575 - RNA, 18 nt, Artificial Sequence
  Synthetic
aacauaagaaugguauua

SEQ ID NO: 508576 - RNA, 19 nt, Artificial Sequence
  Synthetic
aaacauaagaaugguauua

SEQ ID NO: 508577 - RNA, 20 nt, Artificial Sequence
  Synthetic
aaaacauaagaaugguauua

SEQ ID NO: 508578 - RNA, 21 nt, Artificial Sequence
  Synthetic
gaaaacauaagaaugguauua

SEQ ID NO: 508579 - RNA, 22 nt, Artificial Sequence
  Synthetic
ggaaaacauaagaaugguauua

SEQ ID NO: 508580 - RNA, 23 nt, Artificial Sequence
  Synthetic
gggaaaacauaagaaugguauua

SEQ ID NO: 508581 - RNA, 24 nt, Artificial Sequence
  Synthetic
agggaaaacauaagaaugguauua

SEQ ID NO: 508582 - RNA, 18 nt, Artificial Sequence
  Synthetic
uuaguuuuaucuguauua

SEQ ID NO: 508583 - RNA, 19 nt, Artificial Sequence
  Synthetic
uuuaguuuuaucuguauua

SEQ ID NO: 508584 - RNA, 20 nt, Artificial Sequence
  Synthetic
auuuaguuuuaucuguauua

SEQ ID NO: 508585 - RNA, 21 nt, Artificial Sequence
  Synthetic
cauuuaguuuuaucuguauua

SEQ ID NO: 508586 - RNA, 22 nt, Artificial Sequence
  Synthetic
ucauuuaguuuuaucuguauua

SEQ ID NO: 508587 - RNA, 23 nt, Artificial Sequence
  Synthetic
uucauuuaguuuuaucuguauua

SEQ ID NO: 508588 - RNA, 24 nt, Artificial Sequence
  Synthetic
auucauuuaguuuuaucuguauua

SEQ ID NO: 508589 - RNA, 18 nt, Artificial Sequence
  Synthetic
gacauacuuucuguauua

SEQ ID NO: 508590 - RNA, 19 nt, Artificial Sequence
  Synthetic
agacauacuuucuguauua

SEQ ID NO: 508591 - RNA, 20 nt, Artificial Sequence
  Synthetic
aagacauacuuucuguauua

SEQ ID NO: 508592 - RNA, 21 nt, Artificial Sequence
  Synthetic
caagacauacuuucuguauua

SEQ ID NO: 508593 - RNA, 22 nt, Artificial Sequence
  Synthetic
acaagacauacuuucuguauua

SEQ ID NO: 508594 - RNA, 23 nt, Artificial Sequence
  Synthetic
uacaagacauacuuucuguauua

SEQ ID NO: 508595 - RNA, 24 nt, Artificial Sequence
  Synthetic
auacaagacauacuuucuguauua

SEQ ID NO: 508596 - RNA, 18 nt, Artificial Sequence
  Synthetic
uacuuucuagguguauua

SEQ ID NO: 508597 - RNA, 19 nt, Artificial Sequence
  Synthetic
auacuuucuagguguauua

SEQ ID NO: 508598 - RNA, 20 nt, Artificial Sequence
  Synthetic
aauacuuucuagguguauua

SEQ ID NO: 508599 - RNA, 21 nt, Artificial Sequence
  Synthetic
caauacuuucuagguguauua

SEQ ID NO: 508600 - RNA, 22 nt, Artificial Sequence
  Synthetic
ucaauacuuucuagguguauua

SEQ ID NO: 508601 - RNA, 23 nt, Artificial Sequence
  Synthetic
uucaauacuuucuagguguauua

SEQ ID NO: 508602 - RNA, 24 nt, Artificial Sequence
  Synthetic
uuucaauacuuucuagguguauua

SEQ ID NO: 508603 - RNA, 18 nt, Artificial Sequence
  Synthetic
aauggggcuuuuguauua

SEQ ID NO: 508604 - RNA, 19 nt, Artificial Sequence
  Synthetic
aaauggggcuuuuguauua

SEQ ID NO: 508605 - RNA, 20 nt, Artificial Sequence
  Synthetic
aaaauggggcuuuuguauua

SEQ ID NO: 508606 - RNA, 21 nt, Artificial Sequence
  Synthetic
gaaaauggggcuuuuguauua

SEQ ID NO: 508607 - RNA, 22 nt, Artificial Sequence
  Synthetic
ugaaaauggggcuuuuguauua

SEQ ID NO: 508608 - RNA, 23 nt, Artificial Sequence
  Synthetic
gugaaaauggggcuuuuguauua

SEQ ID NO: 508609 - RNA, 24 nt, Artificial Sequence
  Synthetic
agugaaaauggggcuuuuguauua

SEQ ID NO: 508610 - RNA, 18 nt, Artificial Sequence
  Synthetic
uuccuuucaaaauuauua

SEQ ID NO: 508611 - RNA, 19 nt, Artificial Sequence
  Synthetic
auuccuuucaaaauuauua

SEQ ID NO: 508612 - RNA, 20 nt, Artificial Sequence
  Synthetic
cauuccuuucaaaauuauua

SEQ ID NO: 508613 - RNA, 21 nt, Artificial Sequence
  Synthetic
acauuccuuucaaaauuauua

SEQ ID NO: 508614 - RNA, 22 nt, Artificial Sequence
  Synthetic
gacauuccuuucaaaauuauua

SEQ ID NO: 508615 - RNA, 23 nt, Artificial Sequence
  Synthetic
ugacauuccuuucaaaauuauua

SEQ ID NO: 508616 - RNA, 24 nt, Artificial Sequence
  Synthetic
uugacauuccuuucaaaauuauua

SEQ ID NO: 508617 - RNA, 18 nt, Artificial Sequence
  Synthetic
agaaagcacuaauuauua

SEQ ID NO: 508618 - RNA, 19 nt, Artificial Sequence
  Synthetic
aagaaagcacuaauuauua

SEQ ID NO: 508619 - RNA, 20 nt, Artificial Sequence
  Synthetic
uaagaaagcacuaauuauua

SEQ ID NO: 508620 - RNA, 21 nt, Artificial Sequence
  Synthetic
cuaagaaagcacuaauuauua

SEQ ID NO: 508621 - RNA, 22 nt, Artificial Sequence
  Synthetic
acuaagaaagcacuaauuauua

SEQ ID NO: 508622 - RNA, 23 nt, Artificial Sequence
  Synthetic
aacuaagaaagcacuaauuauua

SEQ ID NO: 508623 - RNA, 24 nt, Artificial Sequence
  Synthetic
uaacuaagaaagcacuaauuauua

SEQ ID NO: 508624 - RNA, 18 nt, Artificial Sequence
  Synthetic
auaaaucucuaauuauua

SEQ ID NO: 508625 - RNA, 19 nt, Artificial Sequence
  Synthetic
cauaaaucucuaauuauua

SEQ ID NO: 508626 - RNA, 20 nt, Artificial Sequence
  Synthetic
acauaaaucucuaauuauua

SEQ ID NO: 508627 - RNA, 21 nt, Artificial Sequence
  Synthetic
cacauaaaucucuaauuauua

SEQ ID NO: 508628 - RNA, 22 nt, Artificial Sequence
  Synthetic
acacauaaaucucuaauuauua

SEQ ID NO: 508629 - RNA, 23 nt, Artificial Sequence
  Synthetic
gacacauaaaucucuaauuauua

SEQ ID NO: 508630 - RNA, 24 nt, Artificial Sequence
  Synthetic
ggacacauaaaucucuaauuauua

SEQ ID NO: 508631 - RNA, 18 nt, Artificial Sequence
  Synthetic
caccugagaagauuauua

SEQ ID NO: 508632 - RNA, 19 nt, Artificial Sequence
  Synthetic
gcaccugagaagauuauua

SEQ ID NO: 508633 - RNA, 20 nt, Artificial Sequence
  Synthetic
agcaccugagaagauuauua

SEQ ID NO: 508634 - RNA, 21 nt, Artificial Sequence
  Synthetic
aagcaccugagaagauuauua

SEQ ID NO: 508635 - RNA, 22 nt, Artificial Sequence
  Synthetic
uaagcaccugagaagauuauua

SEQ ID NO: 508636 - RNA, 23 nt, Artificial Sequence
  Synthetic
guaagcaccugagaagauuauua

SEQ ID NO: 508637 - RNA, 24 nt, Artificial Sequence
  Synthetic
uguaagcaccugagaagauuauua

SEQ ID NO: 508638 - RNA, 18 nt, Artificial Sequence
  Synthetic
uuaugauuaugauuauua

SEQ ID NO: 508639 - RNA, 19 nt, Artificial Sequence
  Synthetic
auuaugauuaugauuauua

SEQ ID NO: 508640 - RNA, 20 nt, Artificial Sequence
  Synthetic
uauuaugauuaugauuauua

SEQ ID NO: 508641 - RNA, 21 nt, Artificial Sequence
  Synthetic
uuauuaugauuaugauuauua

SEQ ID NO: 508642 - RNA, 22 nt, Artificial Sequence
  Synthetic
auuauuaugauuaugauuauua

SEQ ID NO: 508643 - RNA, 23 nt, Artificial Sequence
  Synthetic
uauuauuaugauuaugauuauua

SEQ ID NO: 508644 - RNA, 24 nt, Artificial Sequence
  Synthetic
uuauuauuaugauuaugauuauua

SEQ ID NO: 508645 - RNA, 18 nt, Artificial Sequence
  Synthetic
ugacugcccauauuauua

SEQ ID NO: 508646 - RNA, 19 nt, Artificial Sequence
  Synthetic
gugacugcccauauuauua

SEQ ID NO: 508647 - RNA, 20 nt, Artificial Sequence
  Synthetic
cgugacugcccauauuauua

SEQ ID NO: 508648 - RNA, 21 nt, Artificial Sequence
  Synthetic
acgugacugcccauauuauua

SEQ ID NO: 508649 - RNA, 22 nt, Artificial Sequence
  Synthetic
aacgugacugcccauauuauua

SEQ ID NO: 508650 - RNA, 23 nt, Artificial Sequence
  Synthetic
aaacgugacugcccauauuauua

SEQ ID NO: 508651 - RNA, 24 nt, Artificial Sequence
  Synthetic
aaaacgugacugcccauauuauua

SEQ ID NO: 508652 - RNA, 18 nt, Artificial Sequence
  Synthetic
acacaaauuauauuauua

SEQ ID NO: 508653 - RNA, 19 nt, Artificial Sequence
  Synthetic
gacacaaauuauauuauua

SEQ ID NO: 508654 - RNA, 20 nt, Artificial Sequence
  Synthetic
agacacaaauuauauuauua

SEQ ID NO: 508655 - RNA, 21 nt, Artificial Sequence
  Synthetic
cagacacaaauuauauuauua

SEQ ID NO: 508656 - RNA, 22 nt, Artificial Sequence
  Synthetic
ucagacacaaauuauauuauua

SEQ ID NO: 508657 - RNA, 23 nt, Artificial Sequence
  Synthetic
cucagacacaaauuauauuauua

SEQ ID NO: 508658 - RNA, 24 nt, Artificial Sequence
  Synthetic
ucucagacacaaauuauauuauua

SEQ ID NO: 508659 - RNA, 18 nt, Artificial Sequence
  Synthetic
gcauguucucacuuauua

SEQ ID NO: 508660 - RNA, 19 nt, Artificial Sequence
  Synthetic
ugcauguucucacuuauua

SEQ ID NO: 508661 - RNA, 20 nt, Artificial Sequence
  Synthetic
cugcauguucucacuuauua

SEQ ID NO: 508662 - RNA, 21 nt, Artificial Sequence
  Synthetic
acugcauguucucacuuauua

SEQ ID NO: 508663 - RNA, 22 nt, Artificial Sequence
  Synthetic
uacugcauguucucacuuauua

SEQ ID NO: 508664 - RNA, 23 nt, Artificial Sequence
  Synthetic
auacugcauguucucacuuauua

SEQ ID NO: 508665 - RNA, 24 nt, Artificial Sequence
  Synthetic
aauacugcauguucucacuuauua

SEQ ID NO: 508666 - RNA, 18 nt, Artificial Sequence
  Synthetic
gagcagccauacuuauua

SEQ ID NO: 508667 - RNA, 19 nt, Artificial Sequence
  Synthetic
ggagcagccauacuuauua

SEQ ID NO: 508668 - RNA, 20 nt, Artificial Sequence
  Synthetic
gggagcagccauacuuauua

SEQ ID NO: 508669 - RNA, 21 nt, Artificial Sequence
  Synthetic
ggggagcagccauacuuauua

SEQ ID NO: 508670 - RNA, 22 nt, Artificial Sequence
  Synthetic
uggggagcagccauacuuauua

SEQ ID NO: 508671 - RNA, 23 nt, Artificial Sequence
  Synthetic
cuggggagcagccauacuuauua

SEQ ID NO: 508672 - RNA, 24 nt, Artificial Sequence
  Synthetic
ucuggggagcagccauacuuauua

SEQ ID NO: 508673 - RNA, 18 nt, Artificial Sequence
  Synthetic
uucuugcuuggcuuauua

SEQ ID NO: 508674 - RNA, 19 nt, Artificial Sequence
  Synthetic
auucuugcuuggcuuauua

SEQ ID NO: 508675 - RNA, 20 nt, Artificial Sequence
  Synthetic
aauucuugcuuggcuuauua

SEQ ID NO: 508676 - RNA, 21 nt, Artificial Sequence
  Synthetic
caauucuugcuuggcuuauua

SEQ ID NO: 508677 - RNA, 22 nt, Artificial Sequence
  Synthetic
ucaauucuugcuuggcuuauua

SEQ ID NO: 508678 - RNA, 23 nt, Artificial Sequence
  Synthetic
aucaauucuugcuuggcuuauua

SEQ ID NO: 508679 - RNA, 24 nt, Artificial Sequence
  Synthetic
caucaauucuugcuuggcuuauua

SEQ ID NO: 508680 - RNA, 18 nt, Artificial Sequence
  Synthetic
ugaggaagugucuuauua

SEQ ID NO: 508681 - RNA, 19 nt, Artificial Sequence
  Synthetic
cugaggaagugucuuauua

SEQ ID NO: 508682 - RNA, 20 nt, Artificial Sequence
  Synthetic
ucugaggaagugucuuauua

SEQ ID NO: 508683 - RNA, 21 nt, Artificial Sequence
  Synthetic
gucugaggaagugucuuauua

SEQ ID NO: 508684 - RNA, 22 nt, Artificial Sequence
  Synthetic
ugucugaggaagugucuuauua

SEQ ID NO: 508685 - RNA, 23 nt, Artificial Sequence
  Synthetic
gugucugaggaagugucuuauua

SEQ ID NO: 508686 - RNA, 24 nt, Artificial Sequence
  Synthetic
agugucugaggaagugucuuauua

SEQ ID NO: 508687 - RNA, 18 nt, Artificial Sequence
  Synthetic
auuguguaguucuuauua

SEQ ID NO: 508688 - RNA, 19 nt, Artificial Sequence
  Synthetic
cauuguguaguucuuauua

SEQ ID NO: 508689 - RNA, 20 nt, Artificial Sequence
  Synthetic
acauuguguaguucuuauua

SEQ ID NO: 508690 - RNA, 21 nt, Artificial Sequence
  Synthetic
aacauuguguaguucuuauua

SEQ ID NO: 508691 - RNA, 22 nt, Artificial Sequence
  Synthetic
gaacauuguguaguucuuauua

SEQ ID NO: 508692 - RNA, 23 nt, Artificial Sequence
  Synthetic
agaacauuguguaguucuuauua

SEQ ID NO: 508693 - RNA, 24 nt, Artificial Sequence
  Synthetic
gagaacauuguguaguucuuauua

SEQ ID NO: 508694 - RNA, 18 nt, Artificial Sequence
  Synthetic
cccaucuaaaaguuauua

SEQ ID NO: 508695 - RNA, 19 nt, Artificial Sequence
  Synthetic
ucccaucuaaaaguuauua

SEQ ID NO: 508696 - RNA, 20 nt, Artificial Sequence
  Synthetic
cucccaucuaaaaguuauua

SEQ ID NO: 508697 - RNA, 21 nt, Artificial Sequence
  Synthetic
ccucccaucuaaaaguuauua

SEQ ID NO: 508698 - RNA, 22 nt, Artificial Sequence
  Synthetic
cccucccaucuaaaaguuauua

SEQ ID NO: 508699 - RNA, 23 nt, Artificial Sequence
  Synthetic
ccccucccaucuaaaaguuauua

SEQ ID NO: 508700 - RNA, 24 nt, Artificial Sequence
  Synthetic
cccccucccaucuaaaaguuauua

SEQ ID NO: 508701 - RNA, 18 nt, Artificial Sequence
  Synthetic
acaaauaacaaguuauua

SEQ ID NO: 508702 - RNA, 19 nt, Artificial Sequence
  Synthetic
cacaaauaacaaguuauua

SEQ ID NO: 508703 - RNA, 20 nt, Artificial Sequence
  Synthetic
ccacaaauaacaaguuauua

SEQ ID NO: 508704 - RNA, 21 nt, Artificial Sequence
  Synthetic
accacaaauaacaaguuauua

SEQ ID NO: 508705 - RNA, 22 nt, Artificial Sequence
  Synthetic
uaccacaaauaacaaguuauua

SEQ ID NO: 508706 - RNA, 23 nt, Artificial Sequence
  Synthetic
cuaccacaaauaacaaguuauua

SEQ ID NO: 508707 - RNA, 24 nt, Artificial Sequence
  Synthetic
ccuaccacaaauaacaaguuauua

SEQ ID NO: 508708 - RNA, 18 nt, Artificial Sequence
  Synthetic
uuuaaaauacaguuauua

SEQ ID NO: 508709 - RNA, 19 nt, Artificial Sequence
  Synthetic
uuuuaaaauacaguuauua

SEQ ID NO: 508710 - RNA, 20 nt, Artificial Sequence
  Synthetic
cuuuuaaaauacaguuauua

SEQ ID NO: 508711 - RNA, 21 nt, Artificial Sequence
  Synthetic
acuuuuaaaauacaguuauua

SEQ ID NO: 508712 - RNA, 22 nt, Artificial Sequence
  Synthetic
aacuuuuaaaauacaguuauua

SEQ ID NO: 508713 - RNA, 23 nt, Artificial Sequence
  Synthetic
aaacuuuuaaaauacaguuauua

SEQ ID NO: 508714 - RNA, 24 nt, Artificial Sequence
  Synthetic
aaaacuuuuaaaauacaguuauua

SEQ ID NO: 508715 - RNA, 18 nt, Artificial Sequence
  Synthetic
uccuuuugauuguuauua

SEQ ID NO: 508716 - RNA, 19 nt, Artificial Sequence
  Synthetic
uuccuuuugauuguuauua

SEQ ID NO: 508717 - RNA, 20 nt, Artificial Sequence
  Synthetic
guuccuuuugauuguuauua

SEQ ID NO: 508718 - RNA, 21 nt, Artificial Sequence
  Synthetic
uguuccuuuugauuguuauua

SEQ ID NO: 508719 - RNA, 22 nt, Artificial Sequence
  Synthetic
cuguuccuuuugauuguuauua

SEQ ID NO: 508720 - RNA, 23 nt, Artificial Sequence
  Synthetic
acuguuccuuuugauuguuauua

SEQ ID NO: 508721 - RNA, 24 nt, Artificial Sequence
  Synthetic
uacuguuccuuuugauuguuauua

SEQ ID NO: 508722 - RNA, 18 nt, Artificial Sequence
  Synthetic
uuaauaaaucauuuauua

SEQ ID NO: 508723 - RNA, 19 nt, Artificial Sequence
  Synthetic
cuuaauaaaucauuuauua

SEQ ID NO: 508724 - RNA, 20 nt, Artificial Sequence
  Synthetic
ucuuaauaaaucauuuauua

SEQ ID NO: 508725 - RNA, 21 nt, Artificial Sequence
  Synthetic
aucuuaauaaaucauuuauua

SEQ ID NO: 508726 - RNA, 22 nt, Artificial Sequence
  Synthetic
aaucuuaauaaaucauuuauua

SEQ ID NO: 508727 - RNA, 23 nt, Artificial Sequence
  Synthetic
caaucuuaauaaaucauuuauua

SEQ ID NO: 508728 - RNA, 24 nt, Artificial Sequence
  Synthetic
gcaaucuuaauaaaucauuuauua

SEQ ID NO: 508729 - RNA, 18 nt, Artificial Sequence
  Synthetic
uuuuucagugcuuuauua

SEQ ID NO: 508730 - RNA, 19 nt, Artificial Sequence
  Synthetic
uuuuuucagugcuuuauua

SEQ ID NO: 508731 - RNA, 20 nt, Artificial Sequence
  Synthetic
uuuuuuucagugcuuuauua

SEQ ID NO: 508732 - RNA, 21 nt, Artificial Sequence
  Synthetic
auuuuuuucagugcuuuauua

SEQ ID NO: 508733 - RNA, 22 nt, Artificial Sequence
  Synthetic
aauuuuuuucagugcuuuauua

SEQ ID NO: 508734 - RNA, 23 nt, Artificial Sequence
  Synthetic
aaauuuuuuucagugcuuuauua

SEQ ID NO: 508735 - RNA, 24 nt, Artificial Sequence
  Synthetic
aaaauuuuuuucagugcuuuauua

SEQ ID NO: 508736 - RNA, 18 nt, Artificial Sequence
  Synthetic
gucuauuaaucuuuauua

SEQ ID NO: 508737 - RNA, 19 nt, Artificial Sequence
  Synthetic
ugucuauuaaucuuuauua

SEQ ID NO: 508738 - RNA, 20 nt, Artificial Sequence
  Synthetic
augucuauuaaucuuuauua

SEQ ID NO: 508739 - RNA, 21 nt, Artificial Sequence
  Synthetic
uaugucuauuaaucuuuauua

SEQ ID NO: 508740 - RNA, 22 nt, Artificial Sequence
  Synthetic
cuaugucuauuaaucuuuauua

SEQ ID NO: 508741 - RNA, 23 nt, Artificial Sequence
  Synthetic
ucuaugucuauuaaucuuuauua

SEQ ID NO: 508742 - RNA, 24 nt, Artificial Sequence
  Synthetic
aucuaugucuauuaaucuuuauua

SEQ ID NO: 508743 - RNA, 18 nt, Artificial Sequence
  Synthetic
guugauuuaauuuuauua

SEQ ID NO: 508744 - RNA, 19 nt, Artificial Sequence
  Synthetic
aguugauuuaauuuuauua

SEQ ID NO: 508745 - RNA, 20 nt, Artificial Sequence
  Synthetic
aaguugauuuaauuuuauua

SEQ ID NO: 508746 - RNA, 21 nt, Artificial Sequence
  Synthetic
aaaguugauuuaauuuuauua

SEQ ID NO: 508747 - RNA, 22 nt, Artificial Sequence
  Synthetic
uaaaguugauuuaauuuuauua

SEQ ID NO: 508748 - RNA, 23 nt, Artificial Sequence
  Synthetic
guaaaguugauuuaauuuuauua

SEQ ID NO: 508749 - RNA, 24 nt, Artificial Sequence
  Synthetic
uguaaaguugauuuaauuuuauua

SEQ ID NO: 508750 - RNA, 18 nt, Artificial Sequence
  Synthetic
cucaauacauuuuuauua

SEQ ID NO: 508751 - RNA, 19 nt, Artificial Sequence
  Synthetic
ccucaauacauuuuuauua

SEQ ID NO: 508752 - RNA, 20 nt, Artificial Sequence
  Synthetic
cccucaauacauuuuuauua

SEQ ID NO: 508753 - RNA, 21 nt, Artificial Sequence
  Synthetic
ucccucaauacauuuuuauua

SEQ ID NO: 508754 - RNA, 22 nt, Artificial Sequence
  Synthetic
aucccucaauacauuuuuauua

SEQ ID NO: 508755 - RNA, 23 nt, Artificial Sequence
  Synthetic
aaucccucaauacauuuuuauua

SEQ ID NO: 508756 - RNA, 24 nt, Artificial Sequence
  Synthetic
uaaucccucaauacauuuuuauua

SEQ ID NO: 508757 - RNA, 18 nt, Artificial Sequence
  Synthetic
aaaucgaucucaaacuua

SEQ ID NO: 508758 - RNA, 19 nt, Artificial Sequence
  Synthetic
gaaaucgaucucaaacuua

SEQ ID NO: 508759 - RNA, 20 nt, Artificial Sequence
  Synthetic
agaaaucgaucucaaacuua

SEQ ID NO: 508760 - RNA, 21 nt, Artificial Sequence
  Synthetic
uagaaaucgaucucaaacuua

SEQ ID NO: 508761 - RNA, 22 nt, Artificial Sequence
  Synthetic
guagaaaucgaucucaaacuua

SEQ ID NO: 508762 - RNA, 23 nt, Artificial Sequence
  Synthetic
uguagaaaucgaucucaaacuua

SEQ ID NO: 508763 - RNA, 24 nt, Artificial Sequence
  Synthetic
uuguagaaaucgaucucaaacuua

SEQ ID NO: 508764 - RNA, 18 nt, Artificial Sequence
  Synthetic
cauaguauccgaaacuua

SEQ ID NO: 508765 - RNA, 19 nt, Artificial Sequence
  Synthetic
ucauaguauccgaaacuua

SEQ ID NO: 508766 - RNA, 20 nt, Artificial Sequence
  Synthetic
uucauaguauccgaaacuua

SEQ ID NO: 508767 - RNA, 21 nt, Artificial Sequence
  Synthetic
auucauaguauccgaaacuua

SEQ ID NO: 508768 - RNA, 22 nt, Artificial Sequence
  Synthetic
gauucauaguauccgaaacuua

SEQ ID NO: 508769 - RNA, 23 nt, Artificial Sequence
  Synthetic
agauucauaguauccgaaacuua

SEQ ID NO: 508770 - RNA, 24 nt, Artificial Sequence
  Synthetic
uagauucauaguauccgaaacuua

SEQ ID NO: 508771 - RNA, 18 nt, Artificial Sequence
  Synthetic
cuggaaauauuaaacuua

SEQ ID NO: 508772 - RNA, 19 nt, Artificial Sequence
  Synthetic
ccuggaaauauuaaacuua

SEQ ID NO: 508773 - RNA, 20 nt, Artificial Sequence
  Synthetic
uccuggaaauauuaaacuua

SEQ ID NO: 508774 - RNA, 21 nt, Artificial Sequence
  Synthetic
auccuggaaauauuaaacuua

SEQ ID NO: 508775 - RNA, 22 nt, Artificial Sequence
  Synthetic
aauccuggaaauauuaaacuua

SEQ ID NO: 508776 - RNA, 23 nt, Artificial Sequence
  Synthetic
aaauccuggaaauauuaaacuua

SEQ ID NO: 508777 - RNA, 24 nt, Artificial Sequence
  Synthetic
aaaauccuggaaauauuaaacuua

SEQ ID NO: 508778 - RNA, 18 nt, Artificial Sequence
  Synthetic
uucauccuguacaacuua

SEQ ID NO: 508779 - RNA, 19 nt, Artificial Sequence
  Synthetic
guucauccuguacaacuua

SEQ ID NO: 508780 - RNA, 20 nt, Artificial Sequence
  Synthetic
uguucauccuguacaacuua

SEQ ID NO: 508781 - RNA, 21 nt, Artificial Sequence
  Synthetic
guguucauccuguacaacuua

SEQ ID NO: 508782 - RNA, 22 nt, Artificial Sequence
  Synthetic
cguguucauccuguacaacuua

SEQ ID NO: 508783 - RNA, 23 nt, Artificial Sequence
  Synthetic
gcguguucauccuguacaacuua

SEQ ID NO: 508784 - RNA, 24 nt, Artificial Sequence
  Synthetic
ggcguguucauccuguacaacuua

SEQ ID NO: 508785 - RNA, 18 nt, Artificial Sequence
  Synthetic
gcaaaucuuuacaacuua

SEQ ID NO: 508786 - RNA, 19 nt, Artificial Sequence
  Synthetic
ggcaaaucuuuacaacuua

SEQ ID NO: 508787 - RNA, 20 nt, Artificial Sequence
  Synthetic
cggcaaaucuuuacaacuua

SEQ ID NO: 508788 - RNA, 21 nt, Artificial Sequence
  Synthetic
acggcaaaucuuuacaacuua

SEQ ID NO: 508789 - RNA, 22 nt, Artificial Sequence
  Synthetic
uacggcaaaucuuuacaacuua

SEQ ID NO: 508790 - RNA, 23 nt, Artificial Sequence
  Synthetic
cuacggcaaaucuuuacaacuua

SEQ ID NO: 508791 - RNA, 24 nt, Artificial Sequence
  Synthetic
ccuacggcaaaucuuuacaacuua

SEQ ID NO: 508792 - RNA, 18 nt, Artificial Sequence
  Synthetic
gucaacacucucaacuua

SEQ ID NO: 508793 - RNA, 19 nt, Artificial Sequence
  Synthetic
ugucaacacucucaacuua

SEQ ID NO: 508794 - RNA, 20 nt, Artificial Sequence
  Synthetic
uugucaacacucucaacuua

SEQ ID NO: 508795 - RNA, 21 nt, Artificial Sequence
  Synthetic
cuugucaacacucucaacuua

SEQ ID NO: 508796 - RNA, 22 nt, Artificial Sequence
  Synthetic
ucuugucaacacucucaacuua

SEQ ID NO: 508797 - RNA, 23 nt, Artificial Sequence
  Synthetic
uucuugucaacacucucaacuua

SEQ ID NO: 508798 - RNA, 24 nt, Artificial Sequence
  Synthetic
uuucuugucaacacucucaacuua

SEQ ID NO: 508799 - RNA, 18 nt, Artificial Sequence
  Synthetic
agacucagaaagaacuua

SEQ ID NO: 508800 - RNA, 19 nt, Artificial Sequence
  Synthetic
cagacucagaaagaacuua

SEQ ID NO: 508801 - RNA, 20 nt, Artificial Sequence
  Synthetic
acagacucagaaagaacuua

SEQ ID NO: 508802 - RNA, 21 nt, Artificial Sequence
  Synthetic
cacagacucagaaagaacuua

SEQ ID NO: 508803 - RNA, 22 nt, Artificial Sequence
  Synthetic
acacagacucagaaagaacuua

SEQ ID NO: 508804 - RNA, 23 nt, Artificial Sequence
  Synthetic
cacacagacucagaaagaacuua

SEQ ID NO: 508805 - RNA, 24 nt, Artificial Sequence
  Synthetic
gcacacagacucagaaagaacuua

SEQ ID NO: 508806 - RNA, 18 nt, Artificial Sequence
  Synthetic
uuucugcuguugaacuua

SEQ ID NO: 508807 - RNA, 19 nt, Artificial Sequence
  Synthetic
auuucugcuguugaacuua

SEQ ID NO: 508808 - RNA, 20 nt, Artificial Sequence
  Synthetic
uauuucugcuguugaacuua

SEQ ID NO: 508809 - RNA, 21 nt, Artificial Sequence
  Synthetic
guauuucugcuguugaacuua

SEQ ID NO: 508810 - RNA, 22 nt, Artificial Sequence
  Synthetic
gguauuucugcuguugaacuua

SEQ ID NO: 508811 - RNA, 23 nt, Artificial Sequence
  Synthetic
ugguauuucugcuguugaacuua

SEQ ID NO: 508812 - RNA, 24 nt, Artificial Sequence
  Synthetic
gugguauuucugcuguugaacuua

SEQ ID NO: 508813 - RNA, 18 nt, Artificial Sequence
  Synthetic
cucauccacaauaacuua

SEQ ID NO: 508814 - RNA, 19 nt, Artificial Sequence
  Synthetic
ccucauccacaauaacuua

SEQ ID NO: 508815 - RNA, 20 nt, Artificial Sequence
  Synthetic
uccucauccacaauaacuua

SEQ ID NO: 508816 - RNA, 21 nt, Artificial Sequence
  Synthetic
auccucauccacaauaacuua

SEQ ID NO: 508817 - RNA, 22 nt, Artificial Sequence
  Synthetic
uauccucauccacaauaacuua

SEQ ID NO: 508818 - RNA, 23 nt, Artificial Sequence
  Synthetic
auauccucauccacaauaacuua

SEQ ID NO: 508819 - RNA, 24 nt, Artificial Sequence
  Synthetic
uauauccucauccacaauaacuua

SEQ ID NO: 508820 - RNA, 18 nt, Artificial Sequence
  Synthetic
cugggcuucaauaacuua

SEQ ID NO: 508821 - RNA, 19 nt, Artificial Sequence
  Synthetic
acugggcuucaauaacuua

SEQ ID NO: 508822 - RNA, 20 nt, Artificial Sequence
  Synthetic
aacugggcuucaauaacuua

SEQ ID NO: 508823 - RNA, 21 nt, Artificial Sequence
  Synthetic
caacugggcuucaauaacuua

SEQ ID NO: 508824 - RNA, 22 nt, Artificial Sequence
  Synthetic
ucaacugggcuucaauaacuua

SEQ ID NO: 508825 - RNA, 23 nt, Artificial Sequence
  Synthetic
uucaacugggcuucaauaacuua

SEQ ID NO: 508826 - RNA, 24 nt, Artificial Sequence
  Synthetic
guucaacugggcuucaauaacuua

SEQ ID NO: 508827 - RNA, 18 nt, Artificial Sequence
  Synthetic
uguacaaguucuaacuua

SEQ ID NO: 508828 - RNA, 19 nt, Artificial Sequence
  Synthetic
auguacaaguucuaacuua

SEQ ID NO: 508829 - RNA, 20 nt, Artificial Sequence
  Synthetic
aauguacaaguucuaacuua

SEQ ID NO: 508830 - RNA, 21 nt, Artificial Sequence
  Synthetic
caauguacaaguucuaacuua

SEQ ID NO: 508831 - RNA, 22 nt, Artificial Sequence
  Synthetic
acaauguacaaguucuaacuua

SEQ ID NO: 508832 - RNA, 23 nt, Artificial Sequence
  Synthetic
uacaauguacaaguucuaacuua

SEQ ID NO: 508833 - RNA, 24 nt, Artificial Sequence
  Synthetic
cuacaauguacaaguucuaacuua

SEQ ID NO: 508834 - RNA, 18 nt, Artificial Sequence
  Synthetic
acauggauuuuuaacuua

SEQ ID NO: 508835 - RNA, 19 nt, Artificial Sequence
  Synthetic
aacauggauuuuuaacuua

SEQ ID NO: 508836 - RNA, 20 nt, Artificial Sequence
  Synthetic
uaacauggauuuuuaacuua

SEQ ID NO: 508837 - RNA, 21 nt, Artificial Sequence
  Synthetic
uuaacauggauuuuuaacuua

SEQ ID NO: 508838 - RNA, 22 nt, Artificial Sequence
  Synthetic
cuuaacauggauuuuuaacuua

SEQ ID NO: 508839 - RNA, 23 nt, Artificial Sequence
  Synthetic
ccuuaacauggauuuuuaacuua

SEQ ID NO: 508840 - RNA, 24 nt, Artificial Sequence
  Synthetic
gccuuaacauggauuuuuaacuua

SEQ ID NO: 508841 - RNA, 18 nt, Artificial Sequence
  Synthetic
uuuucccaugaacacuua

SEQ ID NO: 508842 - RNA, 19 nt, Artificial Sequence
  Synthetic
uuuuucccaugaacacuua

SEQ ID NO: 508843 - RNA, 20 nt, Artificial Sequence
  Synthetic
uuuuuucccaugaacacuua

SEQ ID NO: 508844 - RNA, 21 nt, Artificial Sequence
  Synthetic
uuuuuuucccaugaacacuua

SEQ ID NO: 508845 - RNA, 22 nt, Artificial Sequence
  Synthetic
uuuuuuuucccaugaacacuua

SEQ ID NO: 508846 - RNA, 23 nt, Artificial Sequence
  Synthetic
cuuuuuuuucccaugaacacuua

SEQ ID NO: 508847 - RNA, 24 nt, Artificial Sequence
  Synthetic
ucuuuuuuuucccaugaacacuua

SEQ ID NO: 508848 - RNA, 18 nt, Artificial Sequence
  Synthetic
aguuaaacaacacacuua

SEQ ID NO: 508849 - RNA, 19 nt, Artificial Sequence
  Synthetic
caguuaaacaacacacuua

SEQ ID NO: 508850 - RNA, 20 nt, Artificial Sequence
  Synthetic
gcaguuaaacaacacacuua

SEQ ID NO: 508851 - RNA, 21 nt, Artificial Sequence
  Synthetic
agcaguuaaacaacacacuua

SEQ ID NO: 508852 - RNA, 22 nt, Artificial Sequence
  Synthetic
aagcaguuaaacaacacacuua

SEQ ID NO: 508853 - RNA, 23 nt, Artificial Sequence
  Synthetic
gaagcaguuaaacaacacacuua

SEQ ID NO: 508854 - RNA, 24 nt, Artificial Sequence
  Synthetic
agaagcaguuaaacaacacacuua

SEQ ID NO: 508855 - RNA, 18 nt, Artificial Sequence
  Synthetic
agagccagcuuacacuua

SEQ ID NO: 508856 - RNA, 19 nt, Artificial Sequence
  Synthetic
gagagccagcuuacacuua

SEQ ID NO: 508857 - RNA, 20 nt, Artificial Sequence
  Synthetic
agagagccagcuuacacuua

SEQ ID NO: 508858 - RNA, 21 nt, Artificial Sequence
  Synthetic
gagagagccagcuuacacuua

SEQ ID NO: 508859 - RNA, 22 nt, Artificial Sequence
  Synthetic
agagagagccagcuuacacuua

SEQ ID NO: 508860 - RNA, 23 nt, Artificial Sequence
  Synthetic
cagagagagccagcuuacacuua

SEQ ID NO: 508861 - RNA, 24 nt, Artificial Sequence
  Synthetic
gcagagagagccagcuuacacuua

SEQ ID NO: 508862 - RNA, 18 nt, Artificial Sequence
  Synthetic
cuguaaucccagcacuua

SEQ ID NO: 508863 - RNA, 19 nt, Artificial Sequence
  Synthetic
ccuguaaucccagcacuua

SEQ ID NO: 508864 - RNA, 20 nt, Artificial Sequence
  Synthetic
gccuguaaucccagcacuua

SEQ ID NO: 508865 - RNA, 21 nt, Artificial Sequence
  Synthetic
ugccuguaaucccagcacuua

SEQ ID NO: 508866 - RNA, 22 nt, Artificial Sequence
  Synthetic
augccuguaaucccagcacuua

SEQ ID NO: 508867 - RNA, 23 nt, Artificial Sequence
  Synthetic
caugccuguaaucccagcacuua

SEQ ID NO: 508868 - RNA, 24 nt, Artificial Sequence
  Synthetic
ucaugccuguaaucccagcacuua

SEQ ID NO: 508869 - RNA, 18 nt, Artificial Sequence
  Synthetic
uguagcuuuucucacuua

SEQ ID NO: 508870 - RNA, 19 nt, Artificial Sequence
  Synthetic
auguagcuuuucucacuua

SEQ ID NO: 508871 - RNA, 20 nt, Artificial Sequence
  Synthetic
uauguagcuuuucucacuua

SEQ ID NO: 508872 - RNA, 21 nt, Artificial Sequence
  Synthetic
uuauguagcuuuucucacuua

SEQ ID NO: 508873 - RNA, 22 nt, Artificial Sequence
  Synthetic
uuuauguagcuuuucucacuua

SEQ ID NO: 508874 - RNA, 23 nt, Artificial Sequence
  Synthetic
guuuauguagcuuuucucacuua

SEQ ID NO: 508875 - RNA, 24 nt, Artificial Sequence
  Synthetic
aguuuauguagcuuuucucacuua

SEQ ID NO: 508876 - RNA, 18 nt, Artificial Sequence
  Synthetic
aucagaauagaagacuua

SEQ ID NO: 508877 - RNA, 19 nt, Artificial Sequence
  Synthetic
caucagaauagaagacuua

SEQ ID NO: 508878 - RNA, 20 nt, Artificial Sequence
  Synthetic
gcaucagaauagaagacuua

SEQ ID NO: 508879 - RNA, 21 nt, Artificial Sequence
  Synthetic
ugcaucagaauagaagacuua

SEQ ID NO: 508880 - RNA, 22 nt, Artificial Sequence
  Synthetic
cugcaucagaauagaagacuua

SEQ ID NO: 508881 - RNA, 23 nt, Artificial Sequence
  Synthetic
ccugcaucagaauagaagacuua

SEQ ID NO: 508882 - RNA, 24 nt, Artificial Sequence
  Synthetic
uccugcaucagaauagaagacuua

SEQ ID NO: 508883 - RNA, 18 nt, Artificial Sequence
  Synthetic
gaaaaaauaagagacuua

SEQ ID NO: 508884 - RNA, 19 nt, Artificial Sequence
  Synthetic
ugaaaaaauaagagacuua

SEQ ID NO: 508885 - RNA, 20 nt, Artificial Sequence
  Synthetic
gugaaaaaauaagagacuua

SEQ ID NO: 508886 - RNA, 21 nt, Artificial Sequence
  Synthetic
agugaaaaaauaagagacuua

SEQ ID NO: 508887 - RNA, 22 nt, Artificial Sequence
  Synthetic
uagugaaaaaauaagagacuua

SEQ ID NO: 508888 - RNA, 23 nt, Artificial Sequence
  Synthetic
auagugaaaaaauaagagacuua

SEQ ID NO: 508889 - RNA, 24 nt, Artificial Sequence
  Synthetic
aauagugaaaaaauaagagacuua

SEQ ID NO: 508890 - RNA, 18 nt, Artificial Sequence
  Synthetic
acccauguauuagacuua

SEQ ID NO: 508891 - RNA, 19 nt, Artificial Sequence
  Synthetic
gacccauguauuagacuua

SEQ ID NO: 508892 - RNA, 20 nt, Artificial Sequence
  Synthetic
ugacccauguauuagacuua

SEQ ID NO: 508893 - RNA, 21 nt, Artificial Sequence
  Synthetic
augacccauguauuagacuua

SEQ ID NO: 508894 - RNA, 22 nt, Artificial Sequence
  Synthetic
aaugacccauguauuagacuua

SEQ ID NO: 508895 - RNA, 23 nt, Artificial Sequence
  Synthetic
uaaugacccauguauuagacuua

SEQ ID NO: 508896 - RNA, 24 nt, Artificial Sequence
  Synthetic
uuaaugacccauguauuagacuua

SEQ ID NO: 508897 - RNA, 18 nt, Artificial Sequence
  Synthetic
cauuucagggaugacuua

SEQ ID NO: 508898 - RNA, 19 nt, Artificial Sequence
  Synthetic
ccauuucagggaugacuua

SEQ ID NO: 508899 - RNA, 20 nt, Artificial Sequence
  Synthetic
cccauuucagggaugacuua

SEQ ID NO: 508900 - RNA, 21 nt, Artificial Sequence
  Synthetic
ucccauuucagggaugacuua

SEQ ID NO: 508901 - RNA, 22 nt, Artificial Sequence
  Synthetic
aucccauuucagggaugacuua

SEQ ID NO: 508902 - RNA, 23 nt, Artificial Sequence
  Synthetic
uaucccauuucagggaugacuua

SEQ ID NO: 508903 - RNA, 24 nt, Artificial Sequence
  Synthetic
auaucccauuucagggaugacuua

SEQ ID NO: 508904 - RNA, 18 nt, Artificial Sequence
  Synthetic
ugcuaucucccugacuua

SEQ ID NO: 508905 - RNA, 19 nt, Artificial Sequence
  Synthetic
cugcuaucucccugacuua

SEQ ID NO: 508906 - RNA, 20 nt, Artificial Sequence
  Synthetic
ccugcuaucucccugacuua

SEQ ID NO: 508907 - RNA, 21 nt, Artificial Sequence
  Synthetic
uccugcuaucucccugacuua

SEQ ID NO: 508908 - RNA, 22 nt, Artificial Sequence
  Synthetic
uuccugcuaucucccugacuua

SEQ ID NO: 508909 - RNA, 23 nt, Artificial Sequence
  Synthetic
uuuccugcuaucucccugacuua

SEQ ID NO: 508910 - RNA, 24 nt, Artificial Sequence
  Synthetic
auuuccugcuaucucccugacuua

SEQ ID NO: 508911 - RNA, 18 nt, Artificial Sequence
  Synthetic
uuuuuaaaaagugacuua

SEQ ID NO: 508912 - RNA, 19 nt, Artificial Sequence
  Synthetic
uuuuuuaaaaagugacuua

SEQ ID NO: 508913 - RNA, 20 nt, Artificial Sequence
  Synthetic
cuuuuuuaaaaagugacuua

SEQ ID NO: 508914 - RNA, 21 nt, Artificial Sequence
  Synthetic
gcuuuuuuaaaaagugacuua

SEQ ID NO: 508915 - RNA, 22 nt, Artificial Sequence
  Synthetic
ugcuuuuuuaaaaagugacuua

SEQ ID NO: 508916 - RNA, 23 nt, Artificial Sequence
  Synthetic
augcuuuuuuaaaaagugacuua

SEQ ID NO: 508917 - RNA, 24 nt, Artificial Sequence
  Synthetic
aaugcuuuuuuaaaaagugacuua

SEQ ID NO: 508918 - RNA, 18 nt, Artificial Sequence
  Synthetic
guuauauucuuugacuua

SEQ ID NO: 508919 - RNA, 19 nt, Artificial Sequence
  Synthetic
uguuauauucuuugacuua

SEQ ID NO: 508920 - RNA, 20 nt, Artificial Sequence
  Synthetic
cuguuauauucuuugacuua

SEQ ID NO: 508921 - RNA, 21 nt, Artificial Sequence
  Synthetic
ccuguuauauucuuugacuua

SEQ ID NO: 508922 - RNA, 22 nt, Artificial Sequence
  Synthetic
uccuguuauauucuuugacuua

SEQ ID NO: 508923 - RNA, 23 nt, Artificial Sequence
  Synthetic
guccuguuauauucuuugacuua

SEQ ID NO: 508924 - RNA, 24 nt, Artificial Sequence
  Synthetic
uguccuguuauauucuuugacuua

SEQ ID NO: 508925 - RNA, 18 nt, Artificial Sequence
  Synthetic
uaaaaauuaaaauacuua

SEQ ID NO: 508926 - RNA, 19 nt, Artificial Sequence
  Synthetic
uuaaaaauuaaaauacuua

SEQ ID NO: 508927 - RNA, 20 nt, Artificial Sequence
  Synthetic
cuuaaaaauuaaaauacuua

SEQ ID NO: 508928 - RNA, 21 nt, Artificial Sequence
  Synthetic
acuuaaaaauuaaaauacuua

SEQ ID NO: 508929 - RNA, 22 nt, Artificial Sequence
  Synthetic
cacuuaaaaauuaaaauacuua

SEQ ID NO: 508930 - RNA, 23 nt, Artificial Sequence
  Synthetic
acacuuaaaaauuaaaauacuua

SEQ ID NO: 508931 - RNA, 24 nt, Artificial Sequence
  Synthetic
uacacuuaaaaauuaaaauacuua

SEQ ID NO: 508932 - RNA, 18 nt, Artificial Sequence
  Synthetic
uucacugacaaauacuua

SEQ ID NO: 508933 - RNA, 19 nt, Artificial Sequence
  Synthetic
guucacugacaaauacuua

SEQ ID NO: 508934 - RNA, 20 nt, Artificial Sequence
  Synthetic
cguucacugacaaauacuua

SEQ ID NO: 508935 - RNA, 21 nt, Artificial Sequence
  Synthetic
ucguucacugacaaauacuua

SEQ ID NO: 508936 - RNA, 22 nt, Artificial Sequence
  Synthetic
uucguucacugacaaauacuua

SEQ ID NO: 508937 - RNA, 23 nt, Artificial Sequence
  Synthetic
uuucguucacugacaaauacuua

SEQ ID NO: 508938 - RNA, 24 nt, Artificial Sequence
  Synthetic
uuuucguucacugacaaauacuua

SEQ ID NO: 508939 - RNA, 18 nt, Artificial Sequence
  Synthetic
ccagauuuuaaauacuua

SEQ ID NO: 508940 - RNA, 19 nt, Artificial Sequence
  Synthetic
accagauuuuaaauacuua

SEQ ID NO: 508941 - RNA, 20 nt, Artificial Sequence
  Synthetic
uaccagauuuuaaauacuua

SEQ ID NO: 508942 - RNA, 21 nt, Artificial Sequence
  Synthetic
uuaccagauuuuaaauacuua

SEQ ID NO: 508943 - RNA, 22 nt, Artificial Sequence
  Synthetic
cuuaccagauuuuaaauacuua

SEQ ID NO: 508944 - RNA, 23 nt, Artificial Sequence
  Synthetic
acuuaccagauuuuaaauacuua

SEQ ID NO: 508945 - RNA, 24 nt, Artificial Sequence
  Synthetic
aacuuaccagauuuuaaauacuua

SEQ ID NO: 508946 - RNA, 18 nt, Artificial Sequence
  Synthetic
ggaugucgucaauacuua

SEQ ID NO: 508947 - RNA, 19 nt, Artificial Sequence
  Synthetic
aggaugucgucaauacuua

SEQ ID NO: 508948 - RNA, 20 nt, Artificial Sequence
  Synthetic
aaggaugucgucaauacuua

SEQ ID NO: 508949 - RNA, 21 nt, Artificial Sequence
  Synthetic
gaaggaugucgucaauacuua

SEQ ID NO: 508950 - RNA, 22 nt, Artificial Sequence
  Synthetic
ugaaggaugucgucaauacuua

SEQ ID NO: 508951 - RNA, 23 nt, Artificial Sequence
  Synthetic
augaaggaugucgucaauacuua

SEQ ID NO: 508952 - RNA, 24 nt, Artificial Sequence
  Synthetic
uaugaaggaugucgucaauacuua

SEQ ID NO: 508953 - RNA, 18 nt, Artificial Sequence
  Synthetic
agauaugaaacauacuua

SEQ ID NO: 508954 - RNA, 19 nt, Artificial Sequence
  Synthetic
uagauaugaaacauacuua

SEQ ID NO: 508955 - RNA, 20 nt, Artificial Sequence
  Synthetic
auagauaugaaacauacuua

SEQ ID NO: 508956 - RNA, 21 nt, Artificial Sequence
  Synthetic
uauagauaugaaacauacuua

SEQ ID NO: 508957 - RNA, 22 nt, Artificial Sequence
  Synthetic
uuauagauaugaaacauacuua

SEQ ID NO: 508958 - RNA, 23 nt, Artificial Sequence
  Synthetic
auuauagauaugaaacauacuua

SEQ ID NO: 508959 - RNA, 24 nt, Artificial Sequence
  Synthetic
uauuauagauaugaaacauacuua

SEQ ID NO: 508960 - RNA, 18 nt, Artificial Sequence
  Synthetic
uuaauuaaaguauacuua

SEQ ID NO: 508961 - RNA, 19 nt, Artificial Sequence
  Synthetic
uuuaauuaaaguauacuua

SEQ ID NO: 508962 - RNA, 20 nt, Artificial Sequence
  Synthetic
guuuaauuaaaguauacuua

SEQ ID NO: 508963 - RNA, 21 nt, Artificial Sequence
  Synthetic
uguuuaauuaaaguauacuua

SEQ ID NO: 508964 - RNA, 22 nt, Artificial Sequence
  Synthetic
auguuuaauuaaaguauacuua

SEQ ID NO: 508965 - RNA, 23 nt, Artificial Sequence
  Synthetic
aauguuuaauuaaaguauacuua

SEQ ID NO: 508966 - RNA, 24 nt, Artificial Sequence
  Synthetic
aaauguuuaauuaaaguauacuua

SEQ ID NO: 508967 - RNA, 18 nt, Artificial Sequence
  Synthetic
aaauucguuaccuacuua

SEQ ID NO: 508968 - RNA, 19 nt, Artificial Sequence
  Synthetic
aaaauucguuaccuacuua

SEQ ID NO: 508969 - RNA, 20 nt, Artificial Sequence
  Synthetic
uaaaauucguuaccuacuua

SEQ ID NO: 508970 - RNA, 21 nt, Artificial Sequence
  Synthetic
guaaaauucguuaccuacuua

SEQ ID NO: 508971 - RNA, 22 nt, Artificial Sequence
  Synthetic
uguaaaauucguuaccuacuua

SEQ ID NO: 508972 - RNA, 23 nt, Artificial Sequence
  Synthetic
uuguaaaauucguuaccuacuua

SEQ ID NO: 508973 - RNA, 24 nt, Artificial Sequence
  Synthetic
uuuguaaaauucguuaccuacuua

SEQ ID NO: 508974 - RNA, 18 nt, Artificial Sequence
  Synthetic
agcuucucuuccuacuua

SEQ ID NO: 508975 - RNA, 19 nt, Artificial Sequence
  Synthetic
cagcuucucuuccuacuua

SEQ ID NO: 508976 - RNA, 20 nt, Artificial Sequence
  Synthetic
ccagcuucucuuccuacuua

SEQ ID NO: 508977 - RNA, 21 nt, Artificial Sequence
  Synthetic
accagcuucucuuccuacuua

SEQ ID NO: 508978 - RNA, 22 nt, Artificial Sequence
  Synthetic
uaccagcuucucuuccuacuua

SEQ ID NO: 508979 - RNA, 23 nt, Artificial Sequence
  Synthetic
auaccagcuucucuuccuacuua

SEQ ID NO: 508980 - RNA, 24 nt, Artificial Sequence
  Synthetic
aauaccagcuucucuuccuacuua

SEQ ID NO: 508981 - RNA, 18 nt, Artificial Sequence
  Synthetic
uccuuguucugcuacuua

SEQ ID NO: 508982 - RNA, 19 nt, Artificial Sequence
  Synthetic
auccuuguucugcuacuua

SEQ ID NO: 508983 - RNA, 20 nt, Artificial Sequence
  Synthetic
aauccuuguucugcuacuua

SEQ ID NO: 508984 - RNA, 21 nt, Artificial Sequence
  Synthetic
gaauccuuguucugcuacuua

SEQ ID NO: 508985 - RNA, 22 nt, Artificial Sequence
  Synthetic
ugaauccuuguucugcuacuua

SEQ ID NO: 508986 - RNA, 23 nt, Artificial Sequence
  Synthetic
uugaauccuuguucugcuacuua

SEQ ID NO: 508987 - RNA, 24 nt, Artificial Sequence
  Synthetic
uuugaauccuuguucugcuacuua

SEQ ID NO: 508988 - RNA, 18 nt, Artificial Sequence
  Synthetic
acaggauacaaguacuua

SEQ ID NO: 508989 - RNA, 19 nt, Artificial Sequence
  Synthetic
uacaggauacaaguacuua

SEQ ID NO: 508990 - RNA, 20 nt, Artificial Sequence
  Synthetic
auacaggauacaaguacuua

SEQ ID NO: 508991 - RNA, 21 nt, Artificial Sequence
  Synthetic
aauacaggauacaaguacuua

SEQ ID NO: 508992 - RNA, 22 nt, Artificial Sequence
  Synthetic
aaauacaggauacaaguacuua

SEQ ID NO: 508993 - RNA, 23 nt, Artificial Sequence
  Synthetic
aaaauacaggauacaaguacuua

SEQ ID NO: 508994 - RNA, 24 nt, Artificial Sequence
  Synthetic
aaaaauacaggauacaaguacuua

SEQ ID NO: 508995 - RNA, 18 nt, Artificial Sequence
  Synthetic
uagagguccgaguacuua

SEQ ID NO: 508996 - RNA, 19 nt, Artificial Sequence
  Synthetic
uuagagguccgaguacuua

SEQ ID NO: 508997 - RNA, 20 nt, Artificial Sequence
  Synthetic
uuuagagguccgaguacuua

SEQ ID NO: 508998 - RNA, 21 nt, Artificial Sequence
  Synthetic
cuuuagagguccgaguacuua

SEQ ID NO: 508999 - RNA, 22 nt, Artificial Sequence
  Synthetic
ccuuuagagguccgaguacuua

SEQ ID NO: 509000 - RNA, 23 nt, Artificial Sequence
  Synthetic
gccuuuagagguccgaguacuua

SEQ ID NO: 509001 - RNA, 24 nt, Artificial Sequence
  Synthetic
ugccuuuagagguccgaguacuua

SEQ ID NO: 509002 - RNA, 18 nt, Artificial Sequence
  Synthetic
aucucucagggguacuua

SEQ ID NO: 509003 - RNA, 19 nt, Artificial Sequence
  Synthetic
gaucucucagggguacuua

SEQ ID NO: 509004 - RNA, 20 nt, Artificial Sequence
  Synthetic
ugaucucucagggguacuua

SEQ ID NO: 509005 - RNA, 21 nt, Artificial Sequence
  Synthetic
augaucucucagggguacuua

SEQ ID NO: 509006 - RNA, 22 nt, Artificial Sequence
  Synthetic
aaugaucucucagggguacuua

SEQ ID NO: 509007 - RNA, 23 nt, Artificial Sequence
  Synthetic
caaugaucucucagggguacuua

SEQ ID NO: 509008 - RNA, 24 nt, Artificial Sequence
  Synthetic
acaaugaucucucagggguacuua

SEQ ID NO: 509009 - RNA, 18 nt, Artificial Sequence
  Synthetic
uuucacuauaguuacuua

SEQ ID NO: 509010 - RNA, 19 nt, Artificial Sequence
  Synthetic
cuuucacuauaguuacuua

SEQ ID NO: 509011 - RNA, 20 nt, Artificial Sequence
  Synthetic
gcuuucacuauaguuacuua

SEQ ID NO: 509012 - RNA, 21 nt, Artificial Sequence
  Synthetic
ugcuuucacuauaguuacuua

SEQ ID NO: 509013 - RNA, 22 nt, Artificial Sequence
  Synthetic
gugcuuucacuauaguuacuua

SEQ ID NO: 509014 - RNA, 23 nt, Artificial Sequence
  Synthetic
cgugcuuucacuauaguuacuua

SEQ ID NO: 509015 - RNA, 24 nt, Artificial Sequence
  Synthetic
ucgugcuuucacuauaguuacuua

SEQ ID NO: 509016 - RNA, 18 nt, Artificial Sequence
  Synthetic
auauuuguggguuacuua

SEQ ID NO: 509017 - RNA, 19 nt, Artificial Sequence
  Synthetic
uauauuuguggguuacuua

SEQ ID NO: 509018 - RNA, 20 nt, Artificial Sequence
  Synthetic
auauauuuguggguuacuua

SEQ ID NO: 509019 - RNA, 21 nt, Artificial Sequence
  Synthetic
uauauauuuguggguuacuua

SEQ ID NO: 509020 - RNA, 22 nt, Artificial Sequence
  Synthetic
auauauauuuguggguuacuua

SEQ ID NO: 509021 - RNA, 23 nt, Artificial Sequence
  Synthetic
uauauauauuuguggguuacuua

SEQ ID NO: 509022 - RNA, 24 nt, Artificial Sequence
  Synthetic
guauauauauuuguggguuacuua

SEQ ID NO: 509023 - RNA, 18 nt, Artificial Sequence
  Synthetic
ucucuuccacuuuacuua

SEQ ID NO: 509024 - RNA, 19 nt, Artificial Sequence
  Synthetic
uucucuuccacuuuacuua

SEQ ID NO: 509025 - RNA, 20 nt, Artificial Sequence
  Synthetic
auucucuuccacuuuacuua

SEQ ID NO: 509026 - RNA, 21 nt, Artificial Sequence
  Synthetic
aauucucuuccacuuuacuua

SEQ ID NO: 509027 - RNA, 22 nt, Artificial Sequence
  Synthetic
gaauucucuuccacuuuacuua

SEQ ID NO: 509028 - RNA, 23 nt, Artificial Sequence
  Synthetic
ugaauucucuuccacuuuacuua

SEQ ID NO: 509029 - RNA, 24 nt, Artificial Sequence
  Synthetic
cugaauucucuuccacuuuacuua

SEQ ID NO: 509030 - RNA, 18 nt, Artificial Sequence
  Synthetic
uacauuuauuuuuacuua

SEQ ID NO: 509031 - RNA, 19 nt, Artificial Sequence
  Synthetic
uuacauuuauuuuuacuua

SEQ ID NO: 509032 - RNA, 20 nt, Artificial Sequence
  Synthetic
uuuacauuuauuuuuacuua

SEQ ID NO: 509033 - RNA, 21 nt, Artificial Sequence
  Synthetic
auuuacauuuauuuuuacuua

SEQ ID NO: 509034 - RNA, 22 nt, Artificial Sequence
  Synthetic
aauuuacauuuauuuuuacuua

SEQ ID NO: 509035 - RNA, 23 nt, Artificial Sequence
  Synthetic
uaauuuacauuuauuuuuacuua

SEQ ID NO: 509036 - RNA, 24 nt, Artificial Sequence
  Synthetic
auaauuuacauuuauuuuuacuua

SEQ ID NO: 509037 - RNA, 18 nt, Artificial Sequence
  Synthetic
uuaaaugcaauaaccuua

SEQ ID NO: 509038 - RNA, 19 nt, Artificial Sequence
  Synthetic
uuuaaaugcaauaaccuua

SEQ ID NO: 509039 - RNA, 20 nt, Artificial Sequence
  Synthetic
cuuuaaaugcaauaaccuua

SEQ ID NO: 509040 - RNA, 21 nt, Artificial Sequence
  Synthetic
acuuuaaaugcaauaaccuua

SEQ ID NO: 509041 - RNA, 22 nt, Artificial Sequence
  Synthetic
gacuuuaaaugcaauaaccuua

SEQ ID NO: 509042 - RNA, 23 nt, Artificial Sequence
  Synthetic
agacuuuaaaugcaauaaccuua

SEQ ID NO: 509043 - RNA, 24 nt, Artificial Sequence
  Synthetic
uagacuuuaaaugcaauaaccuua

SEQ ID NO: 509044 - RNA, 18 nt, Artificial Sequence
  Synthetic
ggaagaagugacaccuua

SEQ ID NO: 509045 - RNA, 19 nt, Artificial Sequence
  Synthetic
aggaagaagugacaccuua

SEQ ID NO: 509046 - RNA, 20 nt, Artificial Sequence
  Synthetic
uaggaagaagugacaccuua

SEQ ID NO: 509047 - RNA, 21 nt, Artificial Sequence
  Synthetic
guaggaagaagugacaccuua

SEQ ID NO: 509048 - RNA, 22 nt, Artificial Sequence
  Synthetic
aguaggaagaagugacaccuua

SEQ ID NO: 509049 - RNA, 23 nt, Artificial Sequence
  Synthetic
gaguaggaagaagugacaccuua

SEQ ID NO: 509050 - RNA, 24 nt, Artificial Sequence
  Synthetic
agaguaggaagaagugacaccuua

SEQ ID NO: 509051 - RNA, 18 nt, Artificial Sequence
  Synthetic
uuuuuuguaaccaccuua

SEQ ID NO: 509052 - RNA, 19 nt, Artificial Sequence
  Synthetic
cuuuuuuguaaccaccuua

SEQ ID NO: 509053 - RNA, 20 nt, Artificial Sequence
  Synthetic
ucuuuuuuguaaccaccuua

SEQ ID NO: 509054 - RNA, 21 nt, Artificial Sequence
  Synthetic
uucuuuuuuguaaccaccuua

SEQ ID NO: 509055 - RNA, 22 nt, Artificial Sequence
  Synthetic
auucuuuuuuguaaccaccuua

SEQ ID NO: 509056 - RNA, 23 nt, Artificial Sequence
  Synthetic
gauucuuuuuuguaaccaccuua

SEQ ID NO: 509057 - RNA, 24 nt, Artificial Sequence
  Synthetic
ugauucuuuuuuguaaccaccuua

SEQ ID NO: 509058 - RNA, 18 nt, Artificial Sequence
  Synthetic
guggcucauuucaccuua

SEQ ID NO: 509059 - RNA, 19 nt, Artificial Sequence
  Synthetic
aguggcucauuucaccuua

SEQ ID NO: 509060 - RNA, 20 nt, Artificial Sequence
  Synthetic
aaguggcucauuucaccuua

SEQ ID NO: 509061 - RNA, 21 nt, Artificial Sequence
  Synthetic
caaguggcucauuucaccuua

SEQ ID NO: 509062 - RNA, 22 nt, Artificial Sequence
  Synthetic
acaaguggcucauuucaccuua

SEQ ID NO: 509063 - RNA, 23 nt, Artificial Sequence
  Synthetic
uacaaguggcucauuucaccuua

SEQ ID NO: 509064 - RNA, 24 nt, Artificial Sequence
  Synthetic
cuacaaguggcucauuucaccuua

SEQ ID NO: 509065 - RNA, 18 nt, Artificial Sequence
  Synthetic
agggaaucugcuaccuua

SEQ ID NO: 509066 - RNA, 19 nt, Artificial Sequence
  Synthetic
aagggaaucugcuaccuua

SEQ ID NO: 509067 - RNA, 20 nt, Artificial Sequence
  Synthetic
aaagggaaucugcuaccuua

SEQ ID NO: 509068 - RNA, 21 nt, Artificial Sequence
  Synthetic
aaaagggaaucugcuaccuua

SEQ ID NO: 509069 - RNA, 22 nt, Artificial Sequence
  Synthetic
caaaagggaaucugcuaccuua

SEQ ID NO: 509070 - RNA, 23 nt, Artificial Sequence
  Synthetic
ccaaaagggaaucugcuaccuua

SEQ ID NO: 509071 - RNA, 24 nt, Artificial Sequence
  Synthetic
gccaaaagggaaucugcuaccuua

SEQ ID NO: 509072 - RNA, 18 nt, Artificial Sequence
  Synthetic
cuugagaaagguaccuua

SEQ ID NO: 509073 - RNA, 19 nt, Artificial Sequence
  Synthetic
acuugagaaagguaccuua

SEQ ID NO: 509074 - RNA, 20 nt, Artificial Sequence
  Synthetic
gacuugagaaagguaccuua

SEQ ID NO: 509075 - RNA, 21 nt, Artificial Sequence
  Synthetic
ugacuugagaaagguaccuua

SEQ ID NO: 509076 - RNA, 22 nt, Artificial Sequence
  Synthetic
augacuugagaaagguaccuua

SEQ ID NO: 509077 - RNA, 23 nt, Artificial Sequence
  Synthetic
aaugacuugagaaagguaccuua

SEQ ID NO: 509078 - RNA, 24 nt, Artificial Sequence
  Synthetic
uaaugacuugagaaagguaccuua

SEQ ID NO: 509079 - RNA, 18 nt, Artificial Sequence
  Synthetic
agggcauauuuuaccuua

SEQ ID NO: 509080 - RNA, 19 nt, Artificial Sequence
  Synthetic
aagggcauauuuuaccuua

SEQ ID NO: 509081 - RNA, 20 nt, Artificial Sequence
  Synthetic
aaagggcauauuuuaccuua

SEQ ID NO: 509082 - RNA, 21 nt, Artificial Sequence
  Synthetic
aaaagggcauauuuuaccuua

SEQ ID NO: 509083 - RNA, 22 nt, Artificial Sequence
  Synthetic
gaaaagggcauauuuuaccuua

SEQ ID NO: 509084 - RNA, 23 nt, Artificial Sequence
  Synthetic
ggaaaagggcauauuuuaccuua

SEQ ID NO: 509085 - RNA, 24 nt, Artificial Sequence
  Synthetic
aggaaaagggcauauuuuaccuua

SEQ ID NO: 509086 - RNA, 18 nt, Artificial Sequence
  Synthetic
accauagcagcccccuua

SEQ ID NO: 509087 - RNA, 19 nt, Artificial Sequence
  Synthetic
gaccauagcagcccccuua

SEQ ID NO: 509088 - RNA, 20 nt, Artificial Sequence
  Synthetic
agaccauagcagcccccuua

SEQ ID NO: 509089 - RNA, 21 nt, Artificial Sequence
  Synthetic
cagaccauagcagcccccuua

SEQ ID NO: 509090 - RNA, 22 nt, Artificial Sequence
  Synthetic
ucagaccauagcagcccccuua

SEQ ID NO: 509091 - RNA, 23 nt, Artificial Sequence
  Synthetic
uucagaccauagcagcccccuua

SEQ ID NO: 509092 - RNA, 24 nt, Artificial Sequence
  Synthetic
auucagaccauagcagcccccuua

SEQ ID NO: 509093 - RNA, 18 nt, Artificial Sequence
  Synthetic
gccaguuuucuccccuua

SEQ ID NO: 509094 - RNA, 19 nt, Artificial Sequence
  Synthetic
ugccaguuuucuccccuua

SEQ ID NO: 509095 - RNA, 20 nt, Artificial Sequence
  Synthetic
uugccaguuuucuccccuua

SEQ ID NO: 509096 - RNA, 21 nt, Artificial Sequence
  Synthetic
uuugccaguuuucuccccuua

SEQ ID NO: 509097 - RNA, 22 nt, Artificial Sequence
  Synthetic
uuuugccaguuuucuccccuua

SEQ ID NO: 509098 - RNA, 23 nt, Artificial Sequence
  Synthetic
auuuugccaguuuucuccccuua

SEQ ID NO: 509099 - RNA, 24 nt, Artificial Sequence
  Synthetic
uauuuugccaguuuucuccccuua

SEQ ID NO: 509100 - RNA, 18 nt, Artificial Sequence
  Synthetic
uuguaaauuaggcccuua

SEQ ID NO: 509101 - RNA, 19 nt, Artificial Sequence
  Synthetic
uuuguaaauuaggcccuua

SEQ ID NO: 509102 - RNA, 20 nt, Artificial Sequence
  Synthetic
cuuuguaaauuaggcccuua

SEQ ID NO: 509103 - RNA, 21 nt, Artificial Sequence
  Synthetic
gcuuuguaaauuaggcccuua

SEQ ID NO: 509104 - RNA, 22 nt, Artificial Sequence
  Synthetic
ugcuuuguaaauuaggcccuua

SEQ ID NO: 509105 - RNA, 23 nt, Artificial Sequence
  Synthetic
cugcuuuguaaauuaggcccuua

SEQ ID NO: 509106 - RNA, 24 nt, Artificial Sequence
  Synthetic
gcugcuuuguaaauuaggcccuua

SEQ ID NO: 509107 - RNA, 18 nt, Artificial Sequence
  Synthetic
cuguccaccacucccuua

SEQ ID NO: 509108 - RNA, 19 nt, Artificial Sequence
  Synthetic
ccuguccaccacucccuua

SEQ ID NO: 509109 - RNA, 20 nt, Artificial Sequence
  Synthetic
cccuguccaccacucccuua

SEQ ID NO: 509110 - RNA, 21 nt, Artificial Sequence
  Synthetic
acccuguccaccacucccuua

SEQ ID NO: 509111 - RNA, 22 nt, Artificial Sequence
  Synthetic
aacccuguccaccacucccuua

SEQ ID NO: 509112 - RNA, 23 nt, Artificial Sequence
  Synthetic
caacccuguccaccacucccuua

SEQ ID NO: 509113 - RNA, 24 nt, Artificial Sequence
  Synthetic
gcaacccuguccaccacucccuua

SEQ ID NO: 509114 - RNA, 18 nt, Artificial Sequence
  Synthetic
ggguugaaaauucccuua

SEQ ID NO: 509115 - RNA, 19 nt, Artificial Sequence
  Synthetic
uggguugaaaauucccuua

SEQ ID NO: 509116 - RNA, 20 nt, Artificial Sequence
  Synthetic
cuggguugaaaauucccuua

SEQ ID NO: 509117 - RNA, 21 nt, Artificial Sequence
  Synthetic
ucuggguugaaaauucccuua

SEQ ID NO: 509118 - RNA, 22 nt, Artificial Sequence
  Synthetic
uucuggguugaaaauucccuua

SEQ ID NO: 509119 - RNA, 23 nt, Artificial Sequence
  Synthetic
auucuggguugaaaauucccuua

SEQ ID NO: 509120 - RNA, 24 nt, Artificial Sequence
  Synthetic
aauucuggguugaaaauucccuua

SEQ ID NO: 509121 - RNA, 18 nt, Artificial Sequence
  Synthetic
cccugaaaaagagccuua

SEQ ID NO: 509122 - RNA, 19 nt, Artificial Sequence
  Synthetic
acccugaaaaagagccuua

SEQ ID NO: 509123 - RNA, 20 nt, Artificial Sequence
  Synthetic
gacccugaaaaagagccuua

SEQ ID NO: 509124 - RNA, 21 nt, Artificial Sequence
  Synthetic
agacccugaaaaagagccuua

SEQ ID NO: 509125 - RNA, 22 nt, Artificial Sequence
  Synthetic
aagacccugaaaaagagccuua

SEQ ID NO: 509126 - RNA, 23 nt, Artificial Sequence
  Synthetic
gaagacccugaaaaagagccuua

SEQ ID NO: 509127 - RNA, 24 nt, Artificial Sequence
  Synthetic
ggaagacccugaaaaagagccuua

SEQ ID NO: 509128 - RNA, 18 nt, Artificial Sequence
  Synthetic
uuggucaagagagccuua

SEQ ID NO: 509129 - RNA, 19 nt, Artificial Sequence
  Synthetic
guuggucaagagagccuua

SEQ ID NO: 509130 - RNA, 20 nt, Artificial Sequence
  Synthetic
gguuggucaagagagccuua

SEQ ID NO: 509131 - RNA, 21 nt, Artificial Sequence
  Synthetic
ggguuggucaagagagccuua

SEQ ID NO: 509132 - RNA, 22 nt, Artificial Sequence
  Synthetic
uggguuggucaagagagccuua

SEQ ID NO: 509133 - RNA, 23 nt, Artificial Sequence
  Synthetic
auggguuggucaagagagccuua

SEQ ID NO: 509134 - RNA, 24 nt, Artificial Sequence
  Synthetic
uauggguuggucaagagagccuua

SEQ ID NO: 509135 - RNA, 18 nt, Artificial Sequence
  Synthetic
auguucuauaaauccuua

SEQ ID NO: 509136 - RNA, 19 nt, Artificial Sequence
  Synthetic
aauguucuauaaauccuua

SEQ ID NO: 509137 - RNA, 20 nt, Artificial Sequence
  Synthetic
uaauguucuauaaauccuua

SEQ ID NO: 509138 - RNA, 21 nt, Artificial Sequence
  Synthetic
uuaauguucuauaaauccuua

SEQ ID NO: 509139 - RNA, 22 nt, Artificial Sequence
  Synthetic
auuaauguucuauaaauccuua

SEQ ID NO: 509140 - RNA, 23 nt, Artificial Sequence
  Synthetic
aauuaauguucuauaaauccuua

SEQ ID NO: 509141 - RNA, 24 nt, Artificial Sequence
  Synthetic
gaauuaauguucuauaaauccuua

SEQ ID NO: 509142 - RNA, 18 nt, Artificial Sequence
  Synthetic
caguguaggaccuccuua

SEQ ID NO: 509143 - RNA, 19 nt, Artificial Sequence
  Synthetic
ccaguguaggaccuccuua

SEQ ID NO: 509144 - RNA, 20 nt, Artificial Sequence
  Synthetic
uccaguguaggaccuccuua

SEQ ID NO: 509145 - RNA, 21 nt, Artificial Sequence
  Synthetic
cuccaguguaggaccuccuua

SEQ ID NO: 509146 - RNA, 22 nt, Artificial Sequence
  Synthetic
ucuccaguguaggaccuccuua

SEQ ID NO: 509147 - RNA, 23 nt, Artificial Sequence
  Synthetic
aucuccaguguaggaccuccuua

SEQ ID NO: 509148 - RNA, 24 nt, Artificial Sequence
  Synthetic
aaucuccaguguaggaccuccuua

SEQ ID NO: 509149 - RNA, 18 nt, Artificial Sequence
  Synthetic
ugcagauuuuccuccuua

SEQ ID NO: 509150 - RNA, 19 nt, Artificial Sequence
  Synthetic
augcagauuuuccuccuua

SEQ ID NO: 509151 - RNA, 20 nt, Artificial Sequence
  Synthetic
aaugcagauuuuccuccuua

SEQ ID NO: 509152 - RNA, 21 nt, Artificial Sequence
  Synthetic
aaaugcagauuuuccuccuua

SEQ ID NO: 509153 - RNA, 22 nt, Artificial Sequence
  Synthetic
aaaaugcagauuuuccuccuua

SEQ ID NO: 509154 - RNA, 23 nt, Artificial Sequence
  Synthetic
aaaaaugcagauuuuccuccuua

SEQ ID NO: 509155 - RNA, 24 nt, Artificial Sequence
  Synthetic
uaaaaaugcagauuuuccuccuua

SEQ ID NO: 509156 - RNA, 18 nt, Artificial Sequence
  Synthetic
agacacaaggaguccuua

SEQ ID NO: 509157 - RNA, 19 nt, Artificial Sequence
  Synthetic
gagacacaaggaguccuua

SEQ ID NO: 509158 - RNA, 20 nt, Artificial Sequence
  Synthetic
ggagacacaaggaguccuua

SEQ ID NO: 509159 - RNA, 21 nt, Artificial Sequence
  Synthetic
aggagacacaaggaguccuua

SEQ ID NO: 509160 - RNA, 22 nt, Artificial Sequence
  Synthetic
aaggagacacaaggaguccuua

SEQ ID NO: 509161 - RNA, 23 nt, Artificial Sequence
  Synthetic
gaaggagacacaaggaguccuua

SEQ ID NO: 509162 - RNA, 24 nt, Artificial Sequence
  Synthetic
ugaaggagacacaaggaguccuua

SEQ ID NO: 509163 - RNA, 18 nt, Artificial Sequence
  Synthetic
uccugccuaggguccuua

SEQ ID NO: 509164 - RNA, 19 nt, Artificial Sequence
  Synthetic
uuccugccuaggguccuua

SEQ ID NO: 509165 - RNA, 20 nt, Artificial Sequence
  Synthetic
uuuccugccuaggguccuua

SEQ ID NO: 509166 - RNA, 21 nt, Artificial Sequence
  Synthetic
uuuuccugccuaggguccuua

SEQ ID NO: 509167 - RNA, 22 nt, Artificial Sequence
  Synthetic
cuuuuccugccuaggguccuua

SEQ ID NO: 509168 - RNA, 23 nt, Artificial Sequence
  Synthetic
ucuuuuccugccuaggguccuua

SEQ ID NO: 509169 - RNA, 24 nt, Artificial Sequence
  Synthetic
gucuuuuccugccuaggguccuua

SEQ ID NO: 509170 - RNA, 18 nt, Artificial Sequence
  Synthetic
guauauuaggguuccuua

SEQ ID NO: 509171 - RNA, 19 nt, Artificial Sequence
  Synthetic
aguauauuaggguuccuua

SEQ ID NO: 509172 - RNA, 20 nt, Artificial Sequence
  Synthetic
gaguauauuaggguuccuua

SEQ ID NO: 509173 - RNA, 21 nt, Artificial Sequence
  Synthetic
ggaguauauuaggguuccuua

SEQ ID NO: 509174 - RNA, 22 nt, Artificial Sequence
  Synthetic
aggaguauauuaggguuccuua

SEQ ID NO: 509175 - RNA, 23 nt, Artificial Sequence
  Synthetic
aaggaguauauuaggguuccuua

SEQ ID NO: 509176 - RNA, 24 nt, Artificial Sequence
  Synthetic
uaaggaguauauuaggguuccuua

SEQ ID NO: 509177 - RNA, 18 nt, Artificial Sequence
  Synthetic
caacuagucauuuccuua

SEQ ID NO: 509178 - RNA, 19 nt, Artificial Sequence
  Synthetic
acaacuagucauuuccuua

SEQ ID NO: 509179 - RNA, 20 nt, Artificial Sequence
  Synthetic
gacaacuagucauuuccuua

SEQ ID NO: 509180 - RNA, 21 nt, Artificial Sequence
  Synthetic
ugacaacuagucauuuccuua

SEQ ID NO: 509181 - RNA, 22 nt, Artificial Sequence
  Synthetic
uugacaacuagucauuuccuua

SEQ ID NO: 509182 - RNA, 23 nt, Artificial Sequence
  Synthetic
auugacaacuagucauuuccuua

SEQ ID NO: 509183 - RNA, 24 nt, Artificial Sequence
  Synthetic
uauugacaacuagucauuuccuua

SEQ ID NO: 509184 - RNA, 18 nt, Artificial Sequence
  Synthetic
cccgggccugaaagcuua

SEQ ID NO: 509185 - RNA, 19 nt, Artificial Sequence
  Synthetic
ucccgggccugaaagcuua

SEQ ID NO: 509186 - RNA, 20 nt, Artificial Sequence
  Synthetic
cucccgggccugaaagcuua

SEQ ID NO: 509187 - RNA, 21 nt, Artificial Sequence
  Synthetic
ucucccgggccugaaagcuua

SEQ ID NO: 509188 - RNA, 22 nt, Artificial Sequence
  Synthetic
cucucccgggccugaaagcuua

SEQ ID NO: 509189 - RNA, 23 nt, Artificial Sequence
  Synthetic
ucucucccgggccugaaagcuua

SEQ ID NO: 509190 - RNA, 24 nt, Artificial Sequence
  Synthetic
uucucucccgggccugaaagcuua

SEQ ID NO: 509191 - RNA, 18 nt, Artificial Sequence
  Synthetic
uuugucucuucaagcuua

SEQ ID NO: 509192 - RNA, 19 nt, Artificial Sequence
  Synthetic
cuuugucucuucaagcuua

SEQ ID NO: 509193 - RNA, 20 nt, Artificial Sequence
  Synthetic
ccuuugucucuucaagcuua

SEQ ID NO: 509194 - RNA, 21 nt, Artificial Sequence
  Synthetic
uccuuugucucuucaagcuua

SEQ ID NO: 509195 - RNA, 22 nt, Artificial Sequence
  Synthetic
cuccuuugucucuucaagcuua

SEQ ID NO: 509196 - RNA, 23 nt, Artificial Sequence
  Synthetic
ucuccuuugucucuucaagcuua

SEQ ID NO: 509197 - RNA, 24 nt, Artificial Sequence
  Synthetic
aucuccuuugucucuucaagcuua

SEQ ID NO: 509198 - RNA, 18 nt, Artificial Sequence
  Synthetic
aggaggauuucaagcuua

SEQ ID NO: 509199 - RNA, 19 nt, Artificial Sequence
  Synthetic
uaggaggauuucaagcuua

SEQ ID NO: 509200 - RNA, 20 nt, Artificial Sequence
  Synthetic
uuaggaggauuucaagcuua

SEQ ID NO: 509201 - RNA, 21 nt, Artificial Sequence
  Synthetic
uuuaggaggauuucaagcuua

SEQ ID NO: 509202 - RNA, 22 nt, Artificial Sequence
  Synthetic
auuuaggaggauuucaagcuua

SEQ ID NO: 509203 - RNA, 23 nt, Artificial Sequence
  Synthetic
aauuuaggaggauuucaagcuua

SEQ ID NO: 509204 - RNA, 24 nt, Artificial Sequence
  Synthetic
caauuuaggaggauuucaagcuua

SEQ ID NO: 509205 - RNA, 18 nt, Artificial Sequence
  Synthetic
uccuucugaagaagcuua

SEQ ID NO: 509206 - RNA, 19 nt, Artificial Sequence
  Synthetic
cuccuucugaagaagcuua

SEQ ID NO: 509207 - RNA, 20 nt, Artificial Sequence
  Synthetic
acuccuucugaagaagcuua

SEQ ID NO: 509208 - RNA, 21 nt, Artificial Sequence
  Synthetic
uacuccuucugaagaagcuua

SEQ ID NO: 509209 - RNA, 22 nt, Artificial Sequence
  Synthetic
auacuccuucugaagaagcuua

SEQ ID NO: 509210 - RNA, 23 nt, Artificial Sequence
  Synthetic
uauacuccuucugaagaagcuua

SEQ ID NO: 509211 - RNA, 24 nt, Artificial Sequence
  Synthetic
cuauacuccuucugaagaagcuua

SEQ ID NO: 509212 - RNA, 18 nt, Artificial Sequence
  Synthetic
caguaacauagaagcuua

SEQ ID NO: 509213 - RNA, 19 nt, Artificial Sequence
  Synthetic
ucaguaacauagaagcuua

SEQ ID NO: 509214 - RNA, 20 nt, Artificial Sequence
  Synthetic
uucaguaacauagaagcuua

SEQ ID NO: 509215 - RNA, 21 nt, Artificial Sequence
  Synthetic
uuucaguaacauagaagcuua

SEQ ID NO: 509216 - RNA, 22 nt, Artificial Sequence
  Synthetic
uuuucaguaacauagaagcuua

SEQ ID NO: 509217 - RNA, 23 nt, Artificial Sequence
  Synthetic
cuuuucaguaacauagaagcuua

SEQ ID NO: 509218 - RNA, 24 nt, Artificial Sequence
  Synthetic
ccuuuucaguaacauagaagcuua

SEQ ID NO: 509219 - RNA, 21 nt, Artificial Sequence
  Synthetic
cugaaguugcuuaucagcuua

SEQ ID NO: 509220 - RNA, 22 nt, Artificial Sequence
  Synthetic
gcugaaguugcuuaucagcuua

SEQ ID NO: 509221 - RNA, 23 nt, Artificial Sequence
  Synthetic
ugcugaaguugcuuaucagcuua

SEQ ID NO: 509222 - RNA, 24 nt, Artificial Sequence
  Synthetic
uugcugaaguugcuuaucagcuua

SEQ ID NO: 509223 - RNA, 18 nt, Artificial Sequence
  Synthetic
agagaaacccugagcuua

SEQ ID NO: 509224 - RNA, 19 nt, Artificial Sequence
  Synthetic
gagagaaacccugagcuua

SEQ ID NO: 509225 - RNA, 20 nt, Artificial Sequence
  Synthetic
ggagagaaacccugagcuua

SEQ ID NO: 509226 - RNA, 21 nt, Artificial Sequence
  Synthetic
aggagagaaacccugagcuua

SEQ ID NO: 509227 - RNA, 22 nt, Artificial Sequence
  Synthetic
caggagagaaacccugagcuua

SEQ ID NO: 509228 - RNA, 23 nt, Artificial Sequence
  Synthetic
acaggagagaaacccugagcuua

SEQ ID NO: 509229 - RNA, 24 nt, Artificial Sequence
  Synthetic
cacaggagagaaacccugagcuua

SEQ ID NO: 509230 - RNA, 18 nt, Artificial Sequence
  Synthetic
cuguaacccuagcgcuua

SEQ ID NO: 509231 - RNA, 19 nt, Artificial Sequence
  Synthetic
ccuguaacccuagcgcuua

SEQ ID NO: 509232 - RNA, 20 nt, Artificial Sequence
  Synthetic
gccuguaacccuagcgcuua

SEQ ID NO: 509233 - RNA, 21 nt, Artificial Sequence
  Synthetic
ugccuguaacccuagcgcuua

SEQ ID NO: 509234 - RNA, 22 nt, Artificial Sequence
  Synthetic
augccuguaacccuagcgcuua

SEQ ID NO: 509235 - RNA, 23 nt, Artificial Sequence
  Synthetic
caugccuguaacccuagcgcuua

SEQ ID NO: 509236 - RNA, 24 nt, Artificial Sequence
  Synthetic
ucaugccuguaacccuagcgcuua

SEQ ID NO: 509237 - RNA, 18 nt, Artificial Sequence
  Synthetic
ucggauauugcaggcuua

SEQ ID NO: 509238 - RNA, 19 nt, Artificial Sequence
  Synthetic
aucggauauugcaggcuua

SEQ ID NO: 509239 - RNA, 20 nt, Artificial Sequence
  Synthetic
aaucggauauugcaggcuua

SEQ ID NO: 509240 - RNA, 21 nt, Artificial Sequence
  Synthetic
caaucggauauugcaggcuua

SEQ ID NO: 509241 - RNA, 22 nt, Artificial Sequence
  Synthetic
ccaaucggauauugcaggcuua

SEQ ID NO: 509242 - RNA, 23 nt, Artificial Sequence
  Synthetic
gccaaucggauauugcaggcuua

SEQ ID NO: 509243 - RNA, 24 nt, Artificial Sequence
  Synthetic
agccaaucggauauugcaggcuua

SEQ ID NO: 509244 - RNA, 18 nt, Artificial Sequence
  Synthetic
cccucauuuuccggcuua

SEQ ID NO: 509245 - RNA, 19 nt, Artificial Sequence
  Synthetic
gcccucauuuuccggcuua

SEQ ID NO: 509246 - RNA, 20 nt, Artificial Sequence
  Synthetic
ggcccucauuuuccggcuua

SEQ ID NO: 509247 - RNA, 21 nt, Artificial Sequence
  Synthetic
uggcccucauuuuccggcuua

SEQ ID NO: 509248 - RNA, 22 nt, Artificial Sequence
  Synthetic
auggcccucauuuuccggcuua

SEQ ID NO: 509249 - RNA, 23 nt, Artificial Sequence
  Synthetic
aauggcccucauuuuccggcuua

SEQ ID NO: 509250 - RNA, 24 nt, Artificial Sequence
  Synthetic
aaauggcccucauuuuccggcuua

SEQ ID NO: 509251 - RNA, 18 nt, Artificial Sequence
  Synthetic
aguucauggaggggcuua

SEQ ID NO: 509252 - RNA, 19 nt, Artificial Sequence
  Synthetic
aaguucauggaggggcuua

SEQ ID NO: 509253 - RNA, 20 nt, Artificial Sequence
  Synthetic
caaguucauggaggggcuua

SEQ ID NO: 509254 - RNA, 21 nt, Artificial Sequence
  Synthetic
ccaaguucauggaggggcuua

SEQ ID NO: 509255 - RNA, 22 nt, Artificial Sequence
  Synthetic
accaaguucauggaggggcuua

SEQ ID NO: 509256 - RNA, 23 nt, Artificial Sequence
  Synthetic
uaccaaguucauggaggggcuua

SEQ ID NO: 509257 - RNA, 24 nt, Artificial Sequence
  Synthetic
uuaccaaguucauggaggggcuua

SEQ ID NO: 509258 - RNA, 18 nt, Artificial Sequence
  Synthetic
uauuggagguggggcuua

SEQ ID NO: 509259 - RNA, 19 nt, Artificial Sequence
  Synthetic
auauuggagguggggcuua

SEQ ID NO: 509260 - RNA, 20 nt, Artificial Sequence
  Synthetic
aauauuggagguggggcuua

SEQ ID NO: 509261 - RNA, 21 nt, Artificial Sequence
  Synthetic
caauauuggagguggggcuua

SEQ ID NO: 509262 - RNA, 22 nt, Artificial Sequence
  Synthetic
ucaauauuggagguggggcuua

SEQ ID NO: 509263 - RNA, 23 nt, Artificial Sequence
  Synthetic
cucaauauuggagguggggcuua

SEQ ID NO: 509264 - RNA, 24 nt, Artificial Sequence
  Synthetic
ccucaauauuggagguggggcuua

SEQ ID NO: 509265 - RNA, 18 nt, Artificial Sequence
  Synthetic
aguuggguuucuggcuua

SEQ ID NO: 509266 - RNA, 19 nt, Artificial Sequence
  Synthetic
aaguuggguuucuggcuua

SEQ ID NO: 509267 - RNA, 20 nt, Artificial Sequence
  Synthetic
caaguuggguuucuggcuua

SEQ ID NO: 509268 - RNA, 21 nt, Artificial Sequence
  Synthetic
gcaaguuggguuucuggcuua

SEQ ID NO: 509269 - RNA, 22 nt, Artificial Sequence
  Synthetic
ggcaaguuggguuucuggcuua

SEQ ID NO: 509270 - RNA, 23 nt, Artificial Sequence
  Synthetic
aggcaaguuggguuucuggcuua

SEQ ID NO: 509271 - RNA, 24 nt, Artificial Sequence
  Synthetic
gaggcaaguuggguuucuggcuua

SEQ ID NO: 509272 - RNA, 18 nt, Artificial Sequence
  Synthetic
gcacucuauuuuggcuua

SEQ ID NO: 509273 - RNA, 19 nt, Artificial Sequence
  Synthetic
agcacucuauuuuggcuua

SEQ ID NO: 509274 - RNA, 20 nt, Artificial Sequence
  Synthetic
aagcacucuauuuuggcuua

SEQ ID NO: 509275 - RNA, 21 nt, Artificial Sequence
  Synthetic
uaagcacucuauuuuggcuua

SEQ ID NO: 509276 - RNA, 22 nt, Artificial Sequence
  Synthetic
uuaagcacucuauuuuggcuua

SEQ ID NO: 509277 - RNA, 23 nt, Artificial Sequence
  Synthetic
auuaagcacucuauuuuggcuua

SEQ ID NO: 509278 - RNA, 24 nt, Artificial Sequence
  Synthetic
aauuaagcacucuauuuuggcuua

SEQ ID NO: 509279 - RNA, 18 nt, Artificial Sequence
  Synthetic
cuacuugcuuaaugcuua

SEQ ID NO: 509280 - RNA, 19 nt, Artificial Sequence
  Synthetic
ccuacuugcuuaaugcuua

SEQ ID NO: 509281 - RNA, 20 nt, Artificial Sequence
  Synthetic
accuacuugcuuaaugcuua

SEQ ID NO: 509282 - RNA, 21 nt, Artificial Sequence
  Synthetic
uaccuacuugcuuaaugcuua

SEQ ID NO: 509283 - RNA, 22 nt, Artificial Sequence
  Synthetic
uuaccuacuugcuuaaugcuua

SEQ ID NO: 509284 - RNA, 23 nt, Artificial Sequence
  Synthetic
uuuaccuacuugcuuaaugcuua

SEQ ID NO: 509285 - RNA, 24 nt, Artificial Sequence
  Synthetic
guuuaccuacuugcuuaaugcuua

SEQ ID NO: 509286 - RNA, 18 nt, Artificial Sequence
  Synthetic
aaaaacauuccaugcuua

SEQ ID NO: 509287 - RNA, 19 nt, Artificial Sequence
  Synthetic
gaaaaacauuccaugcuua

SEQ ID NO: 509288 - RNA, 20 nt, Artificial Sequence
  Synthetic
ggaaaaacauuccaugcuua

SEQ ID NO: 509289 - RNA, 21 nt, Artificial Sequence
  Synthetic
uggaaaaacauuccaugcuua

SEQ ID NO: 509290 - RNA, 22 nt, Artificial Sequence
  Synthetic
auggaaaaacauuccaugcuua

SEQ ID NO: 509291 - RNA, 23 nt, Artificial Sequence
  Synthetic
aauggaaaaacauuccaugcuua

SEQ ID NO: 509292 - RNA, 24 nt, Artificial Sequence
  Synthetic
aaauggaaaaacauuccaugcuua

SEQ ID NO: 509293 - RNA, 18 nt, Artificial Sequence
  Synthetic
acaugugaccucugcuua

SEQ ID NO: 509294 - RNA, 19 nt, Artificial Sequence
  Synthetic
cacaugugaccucugcuua

SEQ ID NO: 509295 - RNA, 20 nt, Artificial Sequence
  Synthetic
ccacaugugaccucugcuua

SEQ ID NO: 509296 - RNA, 21 nt, Artificial Sequence
  Synthetic
uccacaugugaccucugcuua

SEQ ID NO: 509297 - RNA, 22 nt, Artificial Sequence
  Synthetic
cuccacaugugaccucugcuua

SEQ ID NO: 509298 - RNA, 23 nt, Artificial Sequence
  Synthetic
ucuccacaugugaccucugcuua

SEQ ID NO: 509299 - RNA, 24 nt, Artificial Sequence
  Synthetic
uucuccacaugugaccucugcuua

SEQ ID NO: 509300 - RNA, 18 nt, Artificial Sequence
  Synthetic
uucucauuucucugcuua

SEQ ID NO: 509301 - RNA, 19 nt, Artificial Sequence
  Synthetic
guucucauuucucugcuua

SEQ ID NO: 509302 - RNA, 20 nt, Artificial Sequence
  Synthetic
aguucucauuucucugcuua

SEQ ID NO: 509303 - RNA, 21 nt, Artificial Sequence
  Synthetic
uaguucucauuucucugcuua

SEQ ID NO: 509304 - RNA, 22 nt, Artificial Sequence
  Synthetic
auaguucucauuucucugcuua

SEQ ID NO: 509305 - RNA, 23 nt, Artificial Sequence
  Synthetic
uauaguucucauuucucugcuua

SEQ ID NO: 509306 - RNA, 24 nt, Artificial Sequence
  Synthetic
uuauaguucucauuucucugcuua

SEQ ID NO: 509307 - RNA, 18 nt, Artificial Sequence
  Synthetic
aauacagagaagugcuua

SEQ ID NO: 509308 - RNA, 19 nt, Artificial Sequence
  Synthetic
gaauacagagaagugcuua

SEQ ID NO: 509309 - RNA, 20 nt, Artificial Sequence
  Synthetic
cgaauacagagaagugcuua

SEQ ID NO: 509310 - RNA, 21 nt, Artificial Sequence
  Synthetic
acgaauacagagaagugcuua

SEQ ID NO: 509311 - RNA, 22 nt, Artificial Sequence
  Synthetic
aacgaauacagagaagugcuua

SEQ ID NO: 509312 - RNA, 23 nt, Artificial Sequence
  Synthetic
uaacgaauacagagaagugcuua

SEQ ID NO: 509313 - RNA, 24 nt, Artificial Sequence
  Synthetic
auaacgaauacagagaagugcuua

SEQ ID NO: 509314 - RNA, 18 nt, Artificial Sequence
  Synthetic
ggaaggaaugagugcuua

SEQ ID NO: 509315 - RNA, 19 nt, Artificial Sequence
  Synthetic
aggaaggaaugagugcuua

SEQ ID NO: 509316 - RNA, 20 nt, Artificial Sequence
  Synthetic
gaggaaggaaugagugcuua

SEQ ID NO: 509317 - RNA, 21 nt, Artificial Sequence
  Synthetic
agaggaaggaaugagugcuua

SEQ ID NO: 509318 - RNA, 22 nt, Artificial Sequence
  Synthetic
aagaggaaggaaugagugcuua

SEQ ID NO: 509319 - RNA, 23 nt, Artificial Sequence
  Synthetic
aaagaggaaggaaugagugcuua

SEQ ID NO: 509320 - RNA, 24 nt, Artificial Sequence
  Synthetic
gaaagaggaaggaaugagugcuua

SEQ ID NO: 509321 - RNA, 18 nt, Artificial Sequence
  Synthetic
agcuguauaacgugcuua

SEQ ID NO: 509322 - RNA, 19 nt, Artificial Sequence
  Synthetic
aagcuguauaacgugcuua

SEQ ID NO: 509323 - RNA, 20 nt, Artificial Sequence
  Synthetic
gaagcuguauaacgugcuua

SEQ ID NO: 509324 - RNA, 21 nt, Artificial Sequence
  Synthetic
ugaagcuguauaacgugcuua

SEQ ID NO: 509325 - RNA, 22 nt, Artificial Sequence
  Synthetic
augaagcuguauaacgugcuua

SEQ ID NO: 509326 - RNA, 23 nt, Artificial Sequence
  Synthetic
caugaagcuguauaacgugcuua

SEQ ID NO: 509327 - RNA, 24 nt, Artificial Sequence
  Synthetic
acaugaagcuguauaacgugcuua

SEQ ID NO: 509328 - RNA, 18 nt, Artificial Sequence
  Synthetic
caucuuuucaugugcuua

SEQ ID NO: 509329 - RNA, 19 nt, Artificial Sequence
  Synthetic
ccaucuuuucaugugcuua

SEQ ID NO: 509330 - RNA, 20 nt, Artificial Sequence
  Synthetic
accaucuuuucaugugcuua

SEQ ID NO: 509331 - RNA, 21 nt, Artificial Sequence
  Synthetic
aaccaucuuuucaugugcuua

SEQ ID NO: 509332 - RNA, 22 nt, Artificial Sequence
  Synthetic
uaaccaucuuuucaugugcuua

SEQ ID NO: 509333 - RNA, 23 nt, Artificial Sequence
  Synthetic
uuaaccaucuuuucaugugcuua

SEQ ID NO: 509334 - RNA, 24 nt, Artificial Sequence
  Synthetic
guuaaccaucuuuucaugugcuua

SEQ ID NO: 509335 - RNA, 18 nt, Artificial Sequence
  Synthetic
acucuucuacugugcuua

SEQ ID NO: 509336 - RNA, 19 nt, Artificial Sequence
  Synthetic
gacucuucuacugugcuua

SEQ ID NO: 509337 - RNA, 20 nt, Artificial Sequence
  Synthetic
ggacucuucuacugugcuua

SEQ ID NO: 509338 - RNA, 21 nt, Artificial Sequence
  Synthetic
gggacucuucuacugugcuua

SEQ ID NO: 509339 - RNA, 22 nt, Artificial Sequence
  Synthetic
ggggacucuucuacugugcuua

SEQ ID NO: 509340 - RNA, 23 nt, Artificial Sequence
  Synthetic
aggggacucuucuacugugcuua

SEQ ID NO: 509341 - RNA, 24 nt, Artificial Sequence
  Synthetic
uaggggacucuucuacugugcuua

SEQ ID NO: 509342 - RNA, 18 nt, Artificial Sequence
  Synthetic
aggauaggaaauugcuua

SEQ ID NO: 509343 - RNA, 19 nt, Artificial Sequence
  Synthetic
aaggauaggaaauugcuua

SEQ ID NO: 509344 - RNA, 20 nt, Artificial Sequence
  Synthetic
gaaggauaggaaauugcuua

SEQ ID NO: 509345 - RNA, 21 nt, Artificial Sequence
  Synthetic
cgaaggauaggaaauugcuua

SEQ ID NO: 509346 - RNA, 22 nt, Artificial Sequence
  Synthetic
gcgaaggauaggaaauugcuua

SEQ ID NO: 509347 - RNA, 23 nt, Artificial Sequence
  Synthetic
ggcgaaggauaggaaauugcuua

SEQ ID NO: 509348 - RNA, 24 nt, Artificial Sequence
  Synthetic
gggcgaaggauaggaaauugcuua

SEQ ID NO: 509349 - RNA, 18 nt, Artificial Sequence
  Synthetic
acaucagaggcuugcuua

SEQ ID NO: 509350 - RNA, 19 nt, Artificial Sequence
  Synthetic
gacaucagaggcuugcuua

SEQ ID NO: 509351 - RNA, 20 nt, Artificial Sequence
  Synthetic
ugacaucagaggcuugcuua

SEQ ID NO: 509352 - RNA, 21 nt, Artificial Sequence
  Synthetic
uugacaucagaggcuugcuua

SEQ ID NO: 509353 - RNA, 22 nt, Artificial Sequence
  Synthetic
uuugacaucagaggcuugcuua

SEQ ID NO: 509354 - RNA, 23 nt, Artificial Sequence
  Synthetic
auuugacaucagaggcuugcuua

SEQ ID NO: 509355 - RNA, 24 nt, Artificial Sequence
  Synthetic
uauuugacaucagaggcuugcuua

SEQ ID NO: 509356 - RNA, 18 nt, Artificial Sequence
  Synthetic
agagacuccucuugcuua

SEQ ID NO: 509357 - RNA, 19 nt, Artificial Sequence
  Synthetic
cagagacuccucuugcuua

SEQ ID NO: 509358 - RNA, 20 nt, Artificial Sequence
  Synthetic
ucagagacuccucuugcuua

SEQ ID NO: 509359 - RNA, 21 nt, Artificial Sequence
  Synthetic
uucagagacuccucuugcuua

SEQ ID NO: 509360 - RNA, 22 nt, Artificial Sequence
  Synthetic
cuucagagacuccucuugcuua

SEQ ID NO: 509361 - RNA, 23 nt, Artificial Sequence
  Synthetic
ccuucagagacuccucuugcuua

SEQ ID NO: 509362 - RNA, 24 nt, Artificial Sequence
  Synthetic
accuucagagacuccucuugcuua

SEQ ID NO: 509363 - RNA, 18 nt, Artificial Sequence
  Synthetic
gcuuugugcuguugcuua

SEQ ID NO: 509364 - RNA, 19 nt, Artificial Sequence
  Synthetic
ugcuuugugcuguugcuua

SEQ ID NO: 509365 - RNA, 20 nt, Artificial Sequence
  Synthetic
uugcuuugugcuguugcuua

SEQ ID NO: 509366 - RNA, 21 nt, Artificial Sequence
  Synthetic
uuugcuuugugcuguugcuua

SEQ ID NO: 509367 - RNA, 22 nt, Artificial Sequence
  Synthetic
uuuugcuuugugcuguugcuua

SEQ ID NO: 509368 - RNA, 23 nt, Artificial Sequence
  Synthetic
uuuuugcuuugugcuguugcuua

SEQ ID NO: 509369 - RNA, 24 nt, Artificial Sequence
  Synthetic
auuuuugcuuugugcuguugcuua

SEQ ID NO: 509370 - RNA, 18 nt, Artificial Sequence
  Synthetic
acuccuuacuuuugcuua

SEQ ID NO: 509371 - RNA, 19 nt, Artificial Sequence
  Synthetic
gacuccuuacuuuugcuua

SEQ ID NO: 509372 - RNA, 20 nt, Artificial Sequence
  Synthetic
ugacuccuuacuuuugcuua

SEQ ID NO: 509373 - RNA, 21 nt, Artificial Sequence
  Synthetic
gugacuccuuacuuuugcuua

SEQ ID NO: 509374 - RNA, 22 nt, Artificial Sequence
  Synthetic
agugacuccuuacuuuugcuua

SEQ ID NO: 509375 - RNA, 23 nt, Artificial Sequence
  Synthetic
aagugacuccuuacuuuugcuua

SEQ ID NO: 509376 - RNA, 24 nt, Artificial Sequence
  Synthetic
aaagugacuccuuacuuuugcuua

SEQ ID NO: 509377 - RNA, 18 nt, Artificial Sequence
  Synthetic
aaaauaaaagaaaucuua

SEQ ID NO: 509378 - RNA, 19 nt, Artificial Sequence
  Synthetic
gaaaauaaaagaaaucuua

SEQ ID NO: 509379 - RNA, 20 nt, Artificial Sequence
  Synthetic
ugaaaauaaaagaaaucuua

SEQ ID NO: 509380 - RNA, 21 nt, Artificial Sequence
  Synthetic
uugaaaauaaaagaaaucuua

SEQ ID NO: 509381 - RNA, 22 nt, Artificial Sequence
  Synthetic
uuugaaaauaaaagaaaucuua

SEQ ID NO: 509382 - RNA, 23 nt, Artificial Sequence
  Synthetic
cuuugaaaauaaaagaaaucuua

SEQ ID NO: 509383 - RNA, 24 nt, Artificial Sequence
  Synthetic
ucuuugaaaauaaaagaaaucuua

SEQ ID NO: 509384 - RNA, 18 nt, Artificial Sequence
  Synthetic
ugcagucaugaaaucuua

SEQ ID NO: 509385 - RNA, 19 nt, Artificial Sequence
  Synthetic
cugcagucaugaaaucuua

SEQ ID NO: 509386 - RNA, 20 nt, Artificial Sequence
  Synthetic
ucugcagucaugaaaucuua

SEQ ID NO: 509387 - RNA, 21 nt, Artificial Sequence
  Synthetic
aucugcagucaugaaaucuua

SEQ ID NO: 509388 - RNA, 22 nt, Artificial Sequence
  Synthetic
aaucugcagucaugaaaucuua

SEQ ID NO: 509389 - RNA, 23 nt, Artificial Sequence
  Synthetic
caaucugcagucaugaaaucuua

SEQ ID NO: 509390 - RNA, 24 nt, Artificial Sequence
  Synthetic
gcaaucugcagucaugaaaucuua

SEQ ID NO: 509391 - RNA, 18 nt, Artificial Sequence
  Synthetic
guaagauuugaaaucuua

SEQ ID NO: 509392 - RNA, 19 nt, Artificial Sequence
  Synthetic
aguaagauuugaaaucuua

SEQ ID NO: 509393 - RNA, 20 nt, Artificial Sequence
  Synthetic
aaguaagauuugaaaucuua

SEQ ID NO: 509394 - RNA, 21 nt, Artificial Sequence
  Synthetic
aaaguaagauuugaaaucuua

SEQ ID NO: 509395 - RNA, 22 nt, Artificial Sequence
  Synthetic
uaaaguaagauuugaaaucuua

SEQ ID NO: 509396 - RNA, 23 nt, Artificial Sequence
  Synthetic
guaaaguaagauuugaaaucuua

SEQ ID NO: 509397 - RNA, 24 nt, Artificial Sequence
  Synthetic
cguaaaguaagauuugaaaucuua

SEQ ID NO: 509398 - RNA, 18 nt, Artificial Sequence
  Synthetic
aaauuugcuuuaaucuua

SEQ ID NO: 509399 - RNA, 19 nt, Artificial Sequence
  Synthetic
gaaauuugcuuuaaucuua

SEQ ID NO: 509400 - RNA, 20 nt, Artificial Sequence
  Synthetic
ggaaauuugcuuuaaucuua

SEQ ID NO: 509401 - RNA, 21 nt, Artificial Sequence
  Synthetic
uggaaauuugcuuuaaucuua

SEQ ID NO: 509402 - RNA, 22 nt, Artificial Sequence
  Synthetic
uuggaaauuugcuuuaaucuua

SEQ ID NO: 509403 - RNA, 23 nt, Artificial Sequence
  Synthetic
guuggaaauuugcuuuaaucuua

SEQ ID NO: 509404 - RNA, 24 nt, Artificial Sequence
  Synthetic
uguuggaaauuugcuuuaaucuua

SEQ ID NO: 509405 - RNA, 18 nt, Artificial Sequence
  Synthetic
ucuuuuuaauacaucuua

SEQ ID NO: 509406 - RNA, 19 nt, Artificial Sequence
  Synthetic
uucuuuuuaauacaucuua

SEQ ID NO: 509407 - RNA, 20 nt, Artificial Sequence
  Synthetic
cuucuuuuuaauacaucuua

SEQ ID NO: 509408 - RNA, 21 nt, Artificial Sequence
  Synthetic
ucuucuuuuuaauacaucuua

SEQ ID NO: 509409 - RNA, 22 nt, Artificial Sequence
  Synthetic
aucuucuuuuuaauacaucuua

SEQ ID NO: 509410 - RNA, 23 nt, Artificial Sequence
  Synthetic
aaucuucuuuuuaauacaucuua

SEQ ID NO: 509411 - RNA, 24 nt, Artificial Sequence
  Synthetic
aaaucuucuuuuuaauacaucuua

SEQ ID NO: 509412 - RNA, 18 nt, Artificial Sequence
  Synthetic
auuaaaaacaggaucuua

SEQ ID NO: 509413 - RNA, 19 nt, Artificial Sequence
  Synthetic
aauuaaaaacaggaucuua

SEQ ID NO: 509414 - RNA, 20 nt, Artificial Sequence
  Synthetic
gaauuaaaaacaggaucuua

SEQ ID NO: 509415 - RNA, 21 nt, Artificial Sequence
  Synthetic
agaauuaaaaacaggaucuua

SEQ ID NO: 509416 - RNA, 22 nt, Artificial Sequence
  Synthetic
aagaauuaaaaacaggaucuua

SEQ ID NO: 509417 - RNA, 23 nt, Artificial Sequence
  Synthetic
aaagaauuaaaaacaggaucuua

SEQ ID NO: 509418 - RNA, 24 nt, Artificial Sequence
  Synthetic
aaaagaauuaaaaacaggaucuua

SEQ ID NO: 509419 - RNA, 18 nt, Artificial Sequence
  Synthetic
ucauucugcaugaucuua

SEQ ID NO: 509420 - RNA, 19 nt, Artificial Sequence
  Synthetic
cucauucugcaugaucuua

SEQ ID NO: 509421 - RNA, 20 nt, Artificial Sequence
  Synthetic
ccucauucugcaugaucuua

SEQ ID NO: 509422 - RNA, 21 nt, Artificial Sequence
  Synthetic
cccucauucugcaugaucuua

SEQ ID NO: 509423 - RNA, 22 nt, Artificial Sequence
  Synthetic
ucccucauucugcaugaucuua

SEQ ID NO: 509424 - RNA, 23 nt, Artificial Sequence
  Synthetic
uucccucauucugcaugaucuua

SEQ ID NO: 509425 - RNA, 24 nt, Artificial Sequence
  Synthetic
cuucccucauucugcaugaucuua

SEQ ID NO: 509426 - RNA, 18 nt, Artificial Sequence
  Synthetic
cacuauuuccugaucuua

SEQ ID NO: 509427 - RNA, 19 nt, Artificial Sequence
  Synthetic
ucacuauuuccugaucuua

SEQ ID NO: 509428 - RNA, 20 nt, Artificial Sequence
  Synthetic
uucacuauuuccugaucuua

SEQ ID NO: 509429 - RNA, 21 nt, Artificial Sequence
  Synthetic
cuucacuauuuccugaucuua

SEQ ID NO: 509430 - RNA, 22 nt, Artificial Sequence
  Synthetic
ccuucacuauuuccugaucuua

SEQ ID NO: 509431 - RNA, 23 nt, Artificial Sequence
  Synthetic
uccuucacuauuuccugaucuua

SEQ ID NO: 509432 - RNA, 24 nt, Artificial Sequence
  Synthetic
auccuucacuauuuccugaucuua

SEQ ID NO: 509433 - RNA, 18 nt, Artificial Sequence
  Synthetic
aggucauuggugaucuua

SEQ ID NO: 509434 - RNA, 19 nt, Artificial Sequence
  Synthetic
gaggucauuggugaucuua

SEQ ID NO: 509435 - RNA, 20 nt, Artificial Sequence
  Synthetic
ggaggucauuggugaucuua

SEQ ID NO: 509436 - RNA, 21 nt, Artificial Sequence
  Synthetic
aggaggucauuggugaucuua

SEQ ID NO: 509437 - RNA, 22 nt, Artificial Sequence
  Synthetic
uaggaggucauuggugaucuua

SEQ ID NO: 509438 - RNA, 23 nt, Artificial Sequence
  Synthetic
uuaggaggucauuggugaucuua

SEQ ID NO: 509439 - RNA, 24 nt, Artificial Sequence
  Synthetic
uuuaggaggucauuggugaucuua

SEQ ID NO: 509440 - RNA, 18 nt, Artificial Sequence
  Synthetic
uucugcaguuugaucuua

SEQ ID NO: 509441 - RNA, 19 nt, Artificial Sequence
  Synthetic
guucugcaguuugaucuua

SEQ ID NO: 509442 - RNA, 20 nt, Artificial Sequence
  Synthetic
uguucugcaguuugaucuua

SEQ ID NO: 509443 - RNA, 21 nt, Artificial Sequence
  Synthetic
uuguucugcaguuugaucuua

SEQ ID NO: 509444 - RNA, 22 nt, Artificial Sequence
  Synthetic
auuguucugcaguuugaucuua

SEQ ID NO: 509445 - RNA, 23 nt, Artificial Sequence
  Synthetic
cauuguucugcaguuugaucuua

SEQ ID NO: 509446 - RNA, 24 nt, Artificial Sequence
  Synthetic
ccauuguucugcaguuugaucuua

SEQ ID NO: 509447 - RNA, 18 nt, Artificial Sequence
  Synthetic
gcugaguuuuugaucuua

SEQ ID NO: 509448 - RNA, 19 nt, Artificial Sequence
  Synthetic
agcugaguuuuugaucuua

SEQ ID NO: 509449 - RNA, 20 nt, Artificial Sequence
  Synthetic
gagcugaguuuuugaucuua

SEQ ID NO: 509450 - RNA, 21 nt, Artificial Sequence
  Synthetic
ugagcugaguuuuugaucuua

SEQ ID NO: 509451 - RNA, 22 nt, Artificial Sequence
  Synthetic
gugagcugaguuuuugaucuua

SEQ ID NO: 509452 - RNA, 23 nt, Artificial Sequence
  Synthetic
ugugagcugaguuuuugaucuua

SEQ ID NO: 509453 - RNA, 24 nt, Artificial Sequence
  Synthetic
uugugagcugaguuuuugaucuua

SEQ ID NO: 509454 - RNA, 18 nt, Artificial Sequence
  Synthetic
auuuaaaauuauaucuua

SEQ ID NO: 509455 - RNA, 19 nt, Artificial Sequence
  Synthetic
cauuuaaaauuauaucuua

SEQ ID NO: 509456 - RNA, 20 nt, Artificial Sequence
  Synthetic
acauuuaaaauuauaucuua

SEQ ID NO: 509457 - RNA, 21 nt, Artificial Sequence
  Synthetic
aacauuuaaaauuauaucuua

SEQ ID NO: 509458 - RNA, 22 nt, Artificial Sequence
  Synthetic
aaacauuuaaaauuauaucuua

SEQ ID NO: 509459 - RNA, 23 nt, Artificial Sequence
  Synthetic
gaaacauuuaaaauuauaucuua

SEQ ID NO: 509460 - RNA, 24 nt, Artificial Sequence
  Synthetic
agaaacauuuaaaauuauaucuua

SEQ ID NO: 509461 - RNA, 18 nt, Artificial Sequence
  Synthetic
ggaaaacuuucuaucuua

SEQ ID NO: 509462 - RNA, 19 nt, Artificial Sequence
  Synthetic
gggaaaacuuucuaucuua

SEQ ID NO: 509463 - RNA, 20 nt, Artificial Sequence
  Synthetic
cgggaaaacuuucuaucuua

SEQ ID NO: 509464 - RNA, 21 nt, Artificial Sequence
  Synthetic
gcgggaaaacuuucuaucuua

SEQ ID NO: 509465 - RNA, 22 nt, Artificial Sequence
  Synthetic
cgcgggaaaacuuucuaucuua

SEQ ID NO: 509466 - RNA, 23 nt, Artificial Sequence
  Synthetic
acgcgggaaaacuuucuaucuua

SEQ ID NO: 509467 - RNA, 24 nt, Artificial Sequence
  Synthetic
aacgcgggaaaacuuucuaucuua

SEQ ID NO: 509468 - RNA, 18 nt, Artificial Sequence
  Synthetic
gcccacaacuguaucuua

SEQ ID NO: 509469 - RNA, 19 nt, Artificial Sequence
  Synthetic
ugcccacaacuguaucuua

SEQ ID NO: 509470 - RNA, 20 nt, Artificial Sequence
  Synthetic
augcccacaacuguaucuua

SEQ ID NO: 509471 - RNA, 21 nt, Artificial Sequence
  Synthetic
caugcccacaacuguaucuua

SEQ ID NO: 509472 - RNA, 22 nt, Artificial Sequence
  Synthetic
ucaugcccacaacuguaucuua

SEQ ID NO: 509473 - RNA, 23 nt, Artificial Sequence
  Synthetic
aucaugcccacaacuguaucuua

SEQ ID NO: 509474 - RNA, 24 nt, Artificial Sequence
  Synthetic
aaucaugcccacaacuguaucuua

SEQ ID NO: 509475 - RNA, 18 nt, Artificial Sequence
  Synthetic
aaggaacuaauuaucuua

SEQ ID NO: 509476 - RNA, 19 nt, Artificial Sequence
  Synthetic
aaaggaacuaauuaucuua

SEQ ID NO: 509477 - RNA, 20 nt, Artificial Sequence
  Synthetic
aaaaggaacuaauuaucuua

SEQ ID NO: 509478 - RNA, 21 nt, Artificial Sequence
  Synthetic
gaaaaggaacuaauuaucuua

SEQ ID NO: 509479 - RNA, 22 nt, Artificial Sequence
  Synthetic
agaaaaggaacuaauuaucuua

SEQ ID NO: 509480 - RNA, 23 nt, Artificial Sequence
  Synthetic
aagaaaaggaacuaauuaucuua

SEQ ID NO: 509481 - RNA, 24 nt, Artificial Sequence
  Synthetic
uaagaaaaggaacuaauuaucuua

SEQ ID NO: 509482 - RNA, 18 nt, Artificial Sequence
  Synthetic
auuuuuucuaaacucuua

SEQ ID NO: 509483 - RNA, 19 nt, Artificial Sequence
  Synthetic
uauuuuuucuaaacucuua

SEQ ID NO: 509484 - RNA, 20 nt, Artificial Sequence
  Synthetic
cuauuuuuucuaaacucuua

SEQ ID NO: 509485 - RNA, 21 nt, Artificial Sequence
  Synthetic
gcuauuuuuucuaaacucuua

SEQ ID NO: 509486 - RNA, 22 nt, Artificial Sequence
  Synthetic
ggcuauuuuuucuaaacucuua

SEQ ID NO: 509487 - RNA, 23 nt, Artificial Sequence
  Synthetic
uggcuauuuuuucuaaacucuua

SEQ ID NO: 509488 - RNA, 24 nt, Artificial Sequence
  Synthetic
cuggcuauuuuuucuaaacucuua

SEQ ID NO: 509489 - RNA, 18 nt, Artificial Sequence
  Synthetic
auuuaacauuaacucuua

SEQ ID NO: 509490 - RNA, 19 nt, Artificial Sequence
  Synthetic
aauuuaacauuaacucuua

SEQ ID NO: 509491 - RNA, 20 nt, Artificial Sequence
  Synthetic
gaauuuaacauuaacucuua

SEQ ID NO: 509492 - RNA, 21 nt, Artificial Sequence
  Synthetic
ugaauuuaacauuaacucuua

SEQ ID NO: 509493 - RNA, 22 nt, Artificial Sequence
  Synthetic
augaauuuaacauuaacucuua

SEQ ID NO: 509494 - RNA, 23 nt, Artificial Sequence
  Synthetic
aaugaauuuaacauuaacucuua

SEQ ID NO: 509495 - RNA, 24 nt, Artificial Sequence
  Synthetic
caaugaauuuaacauuaacucuua

SEQ ID NO: 509496 - RNA, 18 nt, Artificial Sequence
  Synthetic
auuaaauaagcacucuua

SEQ ID NO: 509497 - RNA, 19 nt, Artificial Sequence
  Synthetic
gauuaaauaagcacucuua

SEQ ID NO: 509498 - RNA, 20 nt, Artificial Sequence
  Synthetic
ugauuaaauaagcacucuua

SEQ ID NO: 509499 - RNA, 21 nt, Artificial Sequence
  Synthetic
augauuaaauaagcacucuua

SEQ ID NO: 509500 - RNA, 22 nt, Artificial Sequence
  Synthetic
aaugauuaaauaagcacucuua

SEQ ID NO: 509501 - RNA, 23 nt, Artificial Sequence
  Synthetic
uaaugauuaaauaagcacucuua

SEQ ID NO: 509502 - RNA, 24 nt, Artificial Sequence
  Synthetic
uuaaugauuaaauaagcacucuua

SEQ ID NO: 509503 - RNA, 18 nt, Artificial Sequence
  Synthetic
aacuuugcuggacucuua

SEQ ID NO: 509504 - RNA, 19 nt, Artificial Sequence
  Synthetic
aaacuuugcuggacucuua

SEQ ID NO: 509505 - RNA, 20 nt, Artificial Sequence
  Synthetic
uaaacuuugcuggacucuua

SEQ ID NO: 509506 - RNA, 21 nt, Artificial Sequence
  Synthetic
uuaaacuuugcuggacucuua

SEQ ID NO: 509507 - RNA, 22 nt, Artificial Sequence
  Synthetic
uuuaaacuuugcuggacucuua

SEQ ID NO: 509508 - RNA, 23 nt, Artificial Sequence
  Synthetic
guuuaaacuuugcuggacucuua

SEQ ID NO: 509509 - RNA, 24 nt, Artificial Sequence
  Synthetic
uguuuaaacuuugcuggacucuua

SEQ ID NO: 509510 - RNA, 18 nt, Artificial Sequence
  Synthetic
uuuuccaaugcccucuua

SEQ ID NO: 509511 - RNA, 19 nt, Artificial Sequence
  Synthetic
uuuuuccaaugcccucuua

SEQ ID NO: 509512 - RNA, 20 nt, Artificial Sequence
  Synthetic
cuuuuuccaaugcccucuua

SEQ ID NO: 509513 - RNA, 21 nt, Artificial Sequence
  Synthetic
gcuuuuuccaaugcccucuua

SEQ ID NO: 509514 - RNA, 22 nt, Artificial Sequence
  Synthetic
agcuuuuuccaaugcccucuua

SEQ ID NO: 509515 - RNA, 23 nt, Artificial Sequence
  Synthetic
aagcuuuuuccaaugcccucuua

SEQ ID NO: 509516 - RNA, 24 nt, Artificial Sequence
  Synthetic
gaagcuuuuuccaaugcccucuua

SEQ ID NO: 509517 - RNA, 18 nt, Artificial Sequence
  Synthetic
cauauugucuuccucuua

SEQ ID NO: 509518 - RNA, 19 nt, Artificial Sequence
  Synthetic
ucauauugucuuccucuua

SEQ ID NO: 509519 - RNA, 20 nt, Artificial Sequence
  Synthetic
uucauauugucuuccucuua

SEQ ID NO: 509520 - RNA, 21 nt, Artificial Sequence
  Synthetic
auucauauugucuuccucuua

SEQ ID NO: 509521 - RNA, 22 nt, Artificial Sequence
  Synthetic
cauucauauugucuuccucuua

SEQ ID NO: 509522 - RNA, 23 nt, Artificial Sequence
  Synthetic
acauucauauugucuuccucuua

SEQ ID NO: 509523 - RNA, 24 nt, Artificial Sequence
  Synthetic
uacauucauauugucuuccucuua

SEQ ID NO: 509524 - RNA, 18 nt, Artificial Sequence
  Synthetic
gccuuauacuaucucuua

SEQ ID NO: 509525 - RNA, 19 nt, Artificial Sequence
  Synthetic
agccuuauacuaucucuua

SEQ ID NO: 509526 - RNA, 20 nt, Artificial Sequence
  Synthetic
cagccuuauacuaucucuua

SEQ ID NO: 509527 - RNA, 21 nt, Artificial Sequence
  Synthetic
gcagccuuauacuaucucuua

SEQ ID NO: 509528 - RNA, 22 nt, Artificial Sequence
  Synthetic
ugcagccuuauacuaucucuua

SEQ ID NO: 509529 - RNA, 23 nt, Artificial Sequence
  Synthetic
uugcagccuuauacuaucucuua

SEQ ID NO: 509530 - RNA, 24 nt, Artificial Sequence
  Synthetic
guugcagccuuauacuaucucuua

SEQ ID NO: 509531 - RNA, 18 nt, Artificial Sequence
  Synthetic
cccacaacaucucucuua

SEQ ID NO: 509532 - RNA, 19 nt, Artificial Sequence
  Synthetic
ucccacaacaucucucuua

SEQ ID NO: 509533 - RNA, 20 nt, Artificial Sequence
  Synthetic
uucccacaacaucucucuua

SEQ ID NO: 509534 - RNA, 21 nt, Artificial Sequence
  Synthetic
auucccacaacaucucucuua

SEQ ID NO: 509535 - RNA, 22 nt, Artificial Sequence
  Synthetic
aauucccacaacaucucucuua

SEQ ID NO: 509536 - RNA, 23 nt, Artificial Sequence
  Synthetic
aaauucccacaacaucucucuua

SEQ ID NO: 509537 - RNA, 24 nt, Artificial Sequence
  Synthetic
uaaauucccacaacaucucucuua

SEQ ID NO: 509538 - RNA, 18 nt, Artificial Sequence
  Synthetic
uuauaucagagucucuua

SEQ ID NO: 509539 - RNA, 19 nt, Artificial Sequence
  Synthetic
auuauaucagagucucuua

SEQ ID NO: 509540 - RNA, 20 nt, Artificial Sequence
  Synthetic
aauuauaucagagucucuua

SEQ ID NO: 509541 - RNA, 21 nt, Artificial Sequence
  Synthetic
caauuauaucagagucucuua

SEQ ID NO: 509542 - RNA, 22 nt, Artificial Sequence
  Synthetic
ucaauuauaucagagucucuua

SEQ ID NO: 509543 - RNA, 23 nt, Artificial Sequence
  Synthetic
gucaauuauaucagagucucuua

SEQ ID NO: 509544 - RNA, 24 nt, Artificial Sequence
  Synthetic
agucaauuauaucagagucucuua

SEQ ID NO: 509545 - RNA, 18 nt, Artificial Sequence
  Synthetic
aaggcugagauucucuua

SEQ ID NO: 509546 - RNA, 19 nt, Artificial Sequence
  Synthetic
gaaggcugagauucucuua

SEQ ID NO: 509547 - RNA, 20 nt, Artificial Sequence
  Synthetic
ggaaggcugagauucucuua

SEQ ID NO: 509548 - RNA, 21 nt, Artificial Sequence
  Synthetic
uggaaggcugagauucucuua

SEQ ID NO: 509549 - RNA, 22 nt, Artificial Sequence
  Synthetic
uuggaaggcugagauucucuua

SEQ ID NO: 509550 - RNA, 23 nt, Artificial Sequence
  Synthetic
uuuggaaggcugagauucucuua

SEQ ID NO: 509551 - RNA, 24 nt, Artificial Sequence
  Synthetic
guuuggaaggcugagauucucuua

SEQ ID NO: 509552 - RNA, 18 nt, Artificial Sequence
  Synthetic
aacggauugacagucuua

SEQ ID NO: 509553 - RNA, 19 nt, Artificial Sequence
  Synthetic
aaacggauugacagucuua

SEQ ID NO: 509554 - RNA, 20 nt, Artificial Sequence
  Synthetic
aaaacggauugacagucuua

SEQ ID NO: 509555 - RNA, 21 nt, Artificial Sequence
  Synthetic
aaaaacggauugacagucuua

SEQ ID NO: 509556 - RNA, 22 nt, Artificial Sequence
  Synthetic
gaaaaacggauugacagucuua

SEQ ID NO: 509557 - RNA, 23 nt, Artificial Sequence
  Synthetic
agaaaaacggauugacagucuua

SEQ ID NO: 509558 - RNA, 24 nt, Artificial Sequence
  Synthetic
uagaaaaacggauugacagucuua

SEQ ID NO: 509559 - RNA, 18 nt, Artificial Sequence
  Synthetic
caaucuggaaaggucuua

SEQ ID NO: 509560 - RNA, 19 nt, Artificial Sequence
  Synthetic
ccaaucuggaaaggucuua

SEQ ID NO: 509561 - RNA, 20 nt, Artificial Sequence
  Synthetic
cccaaucuggaaaggucuua

SEQ ID NO: 509562 - RNA, 21 nt, Artificial Sequence
  Synthetic
ccccaaucuggaaaggucuua

SEQ ID NO: 509563 - RNA, 22 nt, Artificial Sequence
  Synthetic
accccaaucuggaaaggucuua

SEQ ID NO: 509564 - RNA, 23 nt, Artificial Sequence
  Synthetic
aaccccaaucuggaaaggucuua

SEQ ID NO: 509565 - RNA, 24 nt, Artificial Sequence
  Synthetic
caaccccaaucuggaaaggucuua

SEQ ID NO: 509566 - RNA, 18 nt, Artificial Sequence
  Synthetic
auaauagucagugucuua

SEQ ID NO: 509567 - RNA, 19 nt, Artificial Sequence
  Synthetic
aauaauagucagugucuua

SEQ ID NO: 509568 - RNA, 20 nt, Artificial Sequence
  Synthetic
uaauaauagucagugucuua

SEQ ID NO: 509569 - RNA, 21 nt, Artificial Sequence
  Synthetic
uuaauaauagucagugucuua

SEQ ID NO: 509570 - RNA, 22 nt, Artificial Sequence
  Synthetic
uuuaauaauagucagugucuua

SEQ ID NO: 509571 - RNA, 23 nt, Artificial Sequence
  Synthetic
uuuuaauaauagucagugucuua

SEQ ID NO: 509572 - RNA, 24 nt, Artificial Sequence
  Synthetic
uuuuuaauaauagucagugucuua

SEQ ID NO: 509573 - RNA, 18 nt, Artificial Sequence
  Synthetic
gaacauggaaaauucuua

SEQ ID NO: 509574 - RNA, 19 nt, Artificial Sequence
  Synthetic
agaacauggaaaauucuua

SEQ ID NO: 509575 - RNA, 20 nt, Artificial Sequence
  Synthetic
uagaacauggaaaauucuua

SEQ ID NO: 509576 - RNA, 21 nt, Artificial Sequence
  Synthetic
uuagaacauggaaaauucuua

SEQ ID NO: 509577 - RNA, 22 nt, Artificial Sequence
  Synthetic
uuuagaacauggaaaauucuua

SEQ ID NO: 509578 - RNA, 23 nt, Artificial Sequence
  Synthetic
guuuagaacauggaaaauucuua

SEQ ID NO: 509579 - RNA, 24 nt, Artificial Sequence
  Synthetic
gguuuagaacauggaaaauucuua

SEQ ID NO: 509580 - RNA, 18 nt, Artificial Sequence
  Synthetic
acauuucagaaauucuua

SEQ ID NO: 509581 - RNA, 19 nt, Artificial Sequence
  Synthetic
aacauuucagaaauucuua

SEQ ID NO: 509582 - RNA, 20 nt, Artificial Sequence
  Synthetic
gaacauuucagaaauucuua

SEQ ID NO: 509583 - RNA, 21 nt, Artificial Sequence
  Synthetic
agaacauuucagaaauucuua

SEQ ID NO: 509584 - RNA, 22 nt, Artificial Sequence
  Synthetic
aagaacauuucagaaauucuua

SEQ ID NO: 509585 - RNA, 23 nt, Artificial Sequence
  Synthetic
aaagaacauuucagaaauucuua

SEQ ID NO: 509586 - RNA, 24 nt, Artificial Sequence
  Synthetic
caaagaacauuucagaaauucuua

SEQ ID NO: 509587 - RNA, 18 nt, Artificial Sequence
  Synthetic
uuauaaucuucauucuua

SEQ ID NO: 509588 - RNA, 19 nt, Artificial Sequence
  Synthetic
uuuauaaucuucauucuua

SEQ ID NO: 509589 - RNA, 20 nt, Artificial Sequence
  Synthetic
auuuauaaucuucauucuua

SEQ ID NO: 509590 - RNA, 21 nt, Artificial Sequence
  Synthetic
aauuuauaaucuucauucuua

SEQ ID NO: 509591 - RNA, 22 nt, Artificial Sequence
  Synthetic
gaauuuauaaucuucauucuua

SEQ ID NO: 509592 - RNA, 23 nt, Artificial Sequence
  Synthetic
ggaauuuauaaucuucauucuua

SEQ ID NO: 509593 - RNA, 24 nt, Artificial Sequence
  Synthetic
gggaauuuauaaucuucauucuua

SEQ ID NO: 509594 - RNA, 18 nt, Artificial Sequence
  Synthetic
guuaagaacagauucuua

SEQ ID NO: 509595 - RNA, 19 nt, Artificial Sequence
  Synthetic
aguuaagaacagauucuua

SEQ ID NO: 509596 - RNA, 20 nt, Artificial Sequence
  Synthetic
caguuaagaacagauucuua

SEQ ID NO: 509597 - RNA, 21 nt, Artificial Sequence
  Synthetic
gcaguuaagaacagauucuua

SEQ ID NO: 509598 - RNA, 22 nt, Artificial Sequence
  Synthetic
ggcaguuaagaacagauucuua

SEQ ID NO: 509599 - RNA, 23 nt, Artificial Sequence
  Synthetic
uggcaguuaagaacagauucuua

SEQ ID NO: 509600 - RNA, 24 nt, Artificial Sequence
  Synthetic
auggcaguuaagaacagauucuua

SEQ ID NO: 509601 - RNA, 18 nt, Artificial Sequence
  Synthetic
uauaauggccuauucuua

SEQ ID NO: 509602 - RNA, 19 nt, Artificial Sequence
  Synthetic
auauaauggccuauucuua

SEQ ID NO: 509603 - RNA, 20 nt, Artificial Sequence
  Synthetic
uauauaauggccuauucuua

SEQ ID NO: 509604 - RNA, 21 nt, Artificial Sequence
  Synthetic
uuauauaauggccuauucuua

SEQ ID NO: 509605 - RNA, 22 nt, Artificial Sequence
  Synthetic
uuuauauaauggccuauucuua

SEQ ID NO: 509606 - RNA, 23 nt, Artificial Sequence
  Synthetic
cuuuauauaauggccuauucuua

SEQ ID NO: 509607 - RNA, 24 nt, Artificial Sequence
  Synthetic
acuuuauauaauggccuauucuua

SEQ ID NO: 509608 - RNA, 18 nt, Artificial Sequence
  Synthetic
guaauuuuuguauucuua

SEQ ID NO: 509609 - RNA, 19 nt, Artificial Sequence
  Synthetic
aguaauuuuuguauucuua

SEQ ID NO: 509610 - RNA, 20 nt, Artificial Sequence
  Synthetic
caguaauuuuuguauucuua

SEQ ID NO: 509611 - RNA, 21 nt, Artificial Sequence
  Synthetic
ucaguaauuuuuguauucuua

SEQ ID NO: 509612 - RNA, 22 nt, Artificial Sequence
  Synthetic
uucaguaauuuuuguauucuua

SEQ ID NO: 509613 - RNA, 23 nt, Artificial Sequence
  Synthetic
uuucaguaauuuuuguauucuua

SEQ ID NO: 509614 - RNA, 24 nt, Artificial Sequence
  Synthetic
uuuucaguaauuuuuguauucuua

SEQ ID NO: 509615 - RNA, 18 nt, Artificial Sequence
  Synthetic
ugccacacugccuucuua

SEQ ID NO: 509616 - RNA, 19 nt, Artificial Sequence
  Synthetic
augccacacugccuucuua

SEQ ID NO: 509617 - RNA, 20 nt, Artificial Sequence
  Synthetic
caugccacacugccuucuua

SEQ ID NO: 509618 - RNA, 21 nt, Artificial Sequence
  Synthetic
acaugccacacugccuucuua

SEQ ID NO: 509619 - RNA, 22 nt, Artificial Sequence
  Synthetic
aacaugccacacugccuucuua

SEQ ID NO: 509620 - RNA, 23 nt, Artificial Sequence
  Synthetic
caacaugccacacugccuucuua

SEQ ID NO: 509621 - RNA, 24 nt, Artificial Sequence
  Synthetic
ucaacaugccacacugccuucuua

SEQ ID NO: 509622 - RNA, 18 nt, Artificial Sequence
  Synthetic
gugagaaaaaucuucuua

SEQ ID NO: 509623 - RNA, 19 nt, Artificial Sequence
  Synthetic
ggugagaaaaaucuucuua

SEQ ID NO: 509624 - RNA, 20 nt, Artificial Sequence
  Synthetic
aggugagaaaaaucuucuua

SEQ ID NO: 509625 - RNA, 21 nt, Artificial Sequence
  Synthetic
caggugagaaaaaucuucuua

SEQ ID NO: 509626 - RNA, 22 nt, Artificial Sequence
  Synthetic
acaggugagaaaaaucuucuua

SEQ ID NO: 509627 - RNA, 23 nt, Artificial Sequence
  Synthetic
gacaggugagaaaaaucuucuua

SEQ ID NO: 509628 - RNA, 24 nt, Artificial Sequence
  Synthetic
ggacaggugagaaaaaucuucuua

SEQ ID NO: 509629 - RNA, 18 nt, Artificial Sequence
  Synthetic
aauagguguaaguucuua

SEQ ID NO: 509630 - RNA, 19 nt, Artificial Sequence
  Synthetic
uaauagguguaaguucuua

SEQ ID NO: 509631 - RNA, 20 nt, Artificial Sequence
  Synthetic
cuaauagguguaaguucuua

SEQ ID NO: 509632 - RNA, 21 nt, Artificial Sequence
  Synthetic
ucuaauagguguaaguucuua

SEQ ID NO: 509633 - RNA, 22 nt, Artificial Sequence
  Synthetic
gucuaauagguguaaguucuua

SEQ ID NO: 509634 - RNA, 23 nt, Artificial Sequence
  Synthetic
ugucuaauagguguaaguucuua

SEQ ID NO: 509635 - RNA, 24 nt, Artificial Sequence
  Synthetic
uugucuaauagguguaaguucuua

SEQ ID NO: 509636 - RNA, 18 nt, Artificial Sequence
  Synthetic
caaccuagugauuucuua

SEQ ID NO: 509637 - RNA, 19 nt, Artificial Sequence
  Synthetic
ucaaccuagugauuucuua

SEQ ID NO: 509638 - RNA, 20 nt, Artificial Sequence
  Synthetic
uucaaccuagugauuucuua

SEQ ID NO: 509639 - RNA, 21 nt, Artificial Sequence
  Synthetic
cuucaaccuagugauuucuua

SEQ ID NO: 509640 - RNA, 22 nt, Artificial Sequence
  Synthetic
ucuucaaccuagugauuucuua

SEQ ID NO: 509641 - RNA, 23 nt, Artificial Sequence
  Synthetic
uucuucaaccuagugauuucuua

SEQ ID NO: 509642 - RNA, 24 nt, Artificial Sequence
  Synthetic
cuucuucaaccuagugauuucuua

SEQ ID NO: 509643 - RNA, 18 nt, Artificial Sequence
  Synthetic
gaaguuugggcuuucuua

SEQ ID NO: 509644 - RNA, 19 nt, Artificial Sequence
  Synthetic
agaaguuugggcuuucuua

SEQ ID NO: 509645 - RNA, 20 nt, Artificial Sequence
  Synthetic
gagaaguuugggcuuucuua

SEQ ID NO: 509646 - RNA, 21 nt, Artificial Sequence
  Synthetic
agagaaguuugggcuuucuua

SEQ ID NO: 509647 - RNA, 22 nt, Artificial Sequence
  Synthetic
cagagaaguuugggcuuucuua

SEQ ID NO: 509648 - RNA, 23 nt, Artificial Sequence
  Synthetic
gcagagaaguuugggcuuucuua

SEQ ID NO: 509649 - RNA, 24 nt, Artificial Sequence
  Synthetic
ugcagagaaguuugggcuuucuua

SEQ ID NO: 509650 - RNA, 18 nt, Artificial Sequence
  Synthetic
aggcuauugauuuucuua

SEQ ID NO: 509651 - RNA, 19 nt, Artificial Sequence
  Synthetic
uaggcuauugauuuucuua

SEQ ID NO: 509652 - RNA, 20 nt, Artificial Sequence
  Synthetic
guaggcuauugauuuucuua

SEQ ID NO: 509653 - RNA, 21 nt, Artificial Sequence
  Synthetic
gguaggcuauugauuuucuua

SEQ ID NO: 509654 - RNA, 22 nt, Artificial Sequence
  Synthetic
ggguaggcuauugauuuucuua

SEQ ID NO: 509655 - RNA, 23 nt, Artificial Sequence
  Synthetic
gggguaggcuauugauuuucuua

SEQ ID NO: 509656 - RNA, 24 nt, Artificial Sequence
  Synthetic
ggggguaggcuauugauuuucuua

SEQ ID NO: 509657 - RNA, 18 nt, Artificial Sequence
  Synthetic
cauaaucaucuuuucuua

SEQ ID NO: 509658 - RNA, 19 nt, Artificial Sequence
  Synthetic
ccauaaucaucuuuucuua

SEQ ID NO: 509659 - RNA, 20 nt, Artificial Sequence
  Synthetic
gccauaaucaucuuuucuua

SEQ ID NO: 509660 - RNA, 21 nt, Artificial Sequence
  Synthetic
ggccauaaucaucuuuucuua

SEQ ID NO: 509661 - RNA, 22 nt, Artificial Sequence
  Synthetic
aggccauaaucaucuuuucuua

SEQ ID NO: 509662 - RNA, 23 nt, Artificial Sequence
  Synthetic
aaggccauaaucaucuuuucuua

SEQ ID NO: 509663 - RNA, 24 nt, Artificial Sequence
  Synthetic
aaaggccauaaucaucuuuucuua

SEQ ID NO: 509664 - RNA, 18 nt, Artificial Sequence
  Synthetic
uauuauuccuuuuucuua

SEQ ID NO: 509665 - RNA, 19 nt, Artificial Sequence
  Synthetic
uuauuauuccuuuuucuua

SEQ ID NO: 509666 - RNA, 20 nt, Artificial Sequence
  Synthetic
auuauuauuccuuuuucuua

SEQ ID NO: 509667 - RNA, 21 nt, Artificial Sequence
  Synthetic
cauuauuauuccuuuuucuua

SEQ ID NO: 509668 - RNA, 22 nt, Artificial Sequence
  Synthetic
gcauuauuauuccuuuuucuua

SEQ ID NO: 509669 - RNA, 23 nt, Artificial Sequence
  Synthetic
ggcauuauuauuccuuuuucuua

SEQ ID NO: 509670 - RNA, 24 nt, Artificial Sequence
  Synthetic
aggcauuauuauuccuuuuucuua

SEQ ID NO: 509671 - RNA, 18 nt, Artificial Sequence
  Synthetic
ucuuuuauguuuuucuua

SEQ ID NO: 509672 - RNA, 19 nt, Artificial Sequence
  Synthetic
aucuuuuauguuuuucuua

SEQ ID NO: 509673 - RNA, 20 nt, Artificial Sequence
  Synthetic
uaucuuuuauguuuuucuua

SEQ ID NO: 509674 - RNA, 21 nt, Artificial Sequence
  Synthetic
cuaucuuuuauguuuuucuua

SEQ ID NO: 509675 - RNA, 22 nt, Artificial Sequence
  Synthetic
ccuaucuuuuauguuuuucuua

SEQ ID NO: 509676 - RNA, 23 nt, Artificial Sequence
  Synthetic
cccuaucuuuuauguuuuucuua

SEQ ID NO: 509677 - RNA, 24 nt, Artificial Sequence
  Synthetic
gcccuaucuuuuauguuuuucuua

SEQ ID NO: 509678 - RNA, 18 nt, Artificial Sequence
  Synthetic
aacaacuuaaaaaaguua

SEQ ID NO: 509679 - RNA, 19 nt, Artificial Sequence
  Synthetic
aaacaacuuaaaaaaguua

SEQ ID NO: 509680 - RNA, 20 nt, Artificial Sequence
  Synthetic
caaacaacuuaaaaaaguua

SEQ ID NO: 509681 - RNA, 21 nt, Artificial Sequence
  Synthetic
ucaaacaacuuaaaaaaguua

SEQ ID NO: 509682 - RNA, 22 nt, Artificial Sequence
  Synthetic
uucaaacaacuuaaaaaaguua

SEQ ID NO: 509683 - RNA, 23 nt, Artificial Sequence
  Synthetic
auucaaacaacuuaaaaaaguua

SEQ ID NO: 509684 - RNA, 24 nt, Artificial Sequence
  Synthetic
gauucaaacaacuuaaaaaaguua

SEQ ID NO: 509685 - RNA, 18 nt, Artificial Sequence
  Synthetic
uguuacagcaaaaaguua

SEQ ID NO: 509686 - RNA, 19 nt, Artificial Sequence
  Synthetic
uuguuacagcaaaaaguua

SEQ ID NO: 509687 - RNA, 20 nt, Artificial Sequence
  Synthetic
guuguuacagcaaaaaguua

SEQ ID NO: 509688 - RNA, 21 nt, Artificial Sequence
  Synthetic
uguuguuacagcaaaaaguua

SEQ ID NO: 509689 - RNA, 22 nt, Artificial Sequence
  Synthetic
cuguuguuacagcaaaaaguua

SEQ ID NO: 509690 - RNA, 23 nt, Artificial Sequence
  Synthetic
ucuguuguuacagcaaaaaguua

SEQ ID NO: 509691 - RNA, 24 nt, Artificial Sequence
  Synthetic
aucuguuguuacagcaaaaaguua

SEQ ID NO: 509692 - RNA, 18 nt, Artificial Sequence
  Synthetic
aaaauucucaaaaaguua

SEQ ID NO: 509693 - RNA, 19 nt, Artificial Sequence
  Synthetic
gaaaauucucaaaaaguua

SEQ ID NO: 509694 - RNA, 20 nt, Artificial Sequence
  Synthetic
agaaaauucucaaaaaguua

SEQ ID NO: 509695 - RNA, 21 nt, Artificial Sequence
  Synthetic
gagaaaauucucaaaaaguua

SEQ ID NO: 509696 - RNA, 22 nt, Artificial Sequence
  Synthetic
ugagaaaauucucaaaaaguua

SEQ ID NO: 509697 - RNA, 23 nt, Artificial Sequence
  Synthetic
gugagaaaauucucaaaaaguua

SEQ ID NO: 509698 - RNA, 24 nt, Artificial Sequence
  Synthetic
ugugagaaaauucucaaaaaguua

SEQ ID NO: 509699 - RNA, 18 nt, Artificial Sequence
  Synthetic
uaggcccugcaaaaguua

SEQ ID NO: 509700 - RNA, 19 nt, Artificial Sequence
  Synthetic
auaggcccugcaaaaguua

SEQ ID NO: 509701 - RNA, 20 nt, Artificial Sequence
  Synthetic
uauaggcccugcaaaaguua

SEQ ID NO: 509702 - RNA, 21 nt, Artificial Sequence
  Synthetic
cuauaggcccugcaaaaguua

SEQ ID NO: 509703 - RNA, 22 nt, Artificial Sequence
  Synthetic
acuauaggcccugcaaaaguua

SEQ ID NO: 509704 - RNA, 23 nt, Artificial Sequence
  Synthetic
uacuauaggcccugcaaaaguua

SEQ ID NO: 509705 - RNA, 24 nt, Artificial Sequence
  Synthetic
uuacuauaggcccugcaaaaguua

SEQ ID NO: 509706 - RNA, 18 nt, Artificial Sequence
  Synthetic
uuucauuacacaaaguua

SEQ ID NO: 509707 - RNA, 19 nt, Artificial Sequence
  Synthetic
auuucauuacacaaaguua

SEQ ID NO: 509708 - RNA, 20 nt, Artificial Sequence
  Synthetic
gauuucauuacacaaaguua

SEQ ID NO: 509709 - RNA, 21 nt, Artificial Sequence
  Synthetic
ggauuucauuacacaaaguua

SEQ ID NO: 509710 - RNA, 22 nt, Artificial Sequence
  Synthetic
aggauuucauuacacaaaguua

SEQ ID NO: 509711 - RNA, 23 nt, Artificial Sequence
  Synthetic
gaggauuucauuacacaaaguua

SEQ ID NO: 509712 - RNA, 24 nt, Artificial Sequence
  Synthetic
ugaggauuucauuacacaaaguua

SEQ ID NO: 509713 - RNA, 18 nt, Artificial Sequence
  Synthetic
ggaccugcaccaaaguua

SEQ ID NO: 509714 - RNA, 19 nt, Artificial Sequence
  Synthetic
uggaccugcaccaaaguua

SEQ ID NO: 509715 - RNA, 20 nt, Artificial Sequence
  Synthetic
cuggaccugcaccaaaguua

SEQ ID NO: 509716 - RNA, 21 nt, Artificial Sequence
  Synthetic
ucuggaccugcaccaaaguua

SEQ ID NO: 509717 - RNA, 22 nt, Artificial Sequence
  Synthetic
aucuggaccugcaccaaaguua

SEQ ID NO: 509718 - RNA, 23 nt, Artificial Sequence
  Synthetic
aaucuggaccugcaccaaaguua

SEQ ID NO: 509719 - RNA, 24 nt, Artificial Sequence
  Synthetic
aaaucuggaccugcaccaaaguua

SEQ ID NO: 509720 - RNA, 22 nt, Artificial Sequence
  Synthetic
uucuggaccugcaccaaaguua

SEQ ID NO: 509721 - RNA, 23 nt, Artificial Sequence
  Synthetic
auucuggaccugcaccaaaguua

SEQ ID NO: 509722 - RNA, 24 nt, Artificial Sequence
  Synthetic
aauucuggaccugcaccaaaguua

SEQ ID NO: 509723 - RNA, 18 nt, Artificial Sequence
  Synthetic
uguaagaagccaaaguua

SEQ ID NO: 509724 - RNA, 19 nt, Artificial Sequence
  Synthetic
uuguaagaagccaaaguua

SEQ ID NO: 509725 - RNA, 20 nt, Artificial Sequence
  Synthetic
uuuguaagaagccaaaguua

SEQ ID NO: 509726 - RNA, 21 nt, Artificial Sequence
  Synthetic
auuuguaagaagccaaaguua

SEQ ID NO: 509727 - RNA, 22 nt, Artificial Sequence
  Synthetic
aauuuguaagaagccaaaguua

SEQ ID NO: 509728 - RNA, 23 nt, Artificial Sequence
  Synthetic
gaauuuguaagaagccaaaguua

SEQ ID NO: 509729 - RNA, 24 nt, Artificial Sequence
  Synthetic
ugaauuuguaagaagccaaaguua

SEQ ID NO: 509730 - RNA, 18 nt, Artificial Sequence
  Synthetic
uuuccuguaagaaaguua

SEQ ID NO: 509731 - RNA, 19 nt, Artificial Sequence
  Synthetic
cuuuccuguaagaaaguua

SEQ ID NO: 509732 - RNA, 20 nt, Artificial Sequence
  Synthetic
gcuuuccuguaagaaaguua

SEQ ID NO: 509733 - RNA, 21 nt, Artificial Sequence
  Synthetic
ugcuuuccuguaagaaaguua

SEQ ID NO: 509734 - RNA, 22 nt, Artificial Sequence
  Synthetic
uugcuuuccuguaagaaaguua

SEQ ID NO: 509735 - RNA, 23 nt, Artificial Sequence
  Synthetic
auugcuuuccuguaagaaaguua

SEQ ID NO: 509736 - RNA, 24 nt, Artificial Sequence
  Synthetic
cauugcuuuccuguaagaaaguua

SEQ ID NO: 509737 - RNA, 18 nt, Artificial Sequence
  Synthetic
aagaaagaaugaaaguua

SEQ ID NO: 509738 - RNA, 19 nt, Artificial Sequence
  Synthetic
aaagaaagaaugaaaguua

SEQ ID NO: 509739 - RNA, 20 nt, Artificial Sequence
  Synthetic
uaaagaaagaaugaaaguua

SEQ ID NO: 509740 - RNA, 21 nt, Artificial Sequence
  Synthetic
guaaagaaagaaugaaaguua

SEQ ID NO: 509741 - RNA, 22 nt, Artificial Sequence
  Synthetic
aguaaagaaagaaugaaaguua

SEQ ID NO: 509742 - RNA, 23 nt, Artificial Sequence
  Synthetic
gaguaaagaaagaaugaaaguua

SEQ ID NO: 509743 - RNA, 24 nt, Artificial Sequence
  Synthetic
ugaguaaagaaagaaugaaaguua

SEQ ID NO: 509744 - RNA, 18 nt, Artificial Sequence
  Synthetic
agaccagugaacaaguua

SEQ ID NO: 509745 - RNA, 19 nt, Artificial Sequence
  Synthetic
aagaccagugaacaaguua

SEQ ID NO: 509746 - RNA, 20 nt, Artificial Sequence
  Synthetic
aaagaccagugaacaaguua

SEQ ID NO: 509747 - RNA, 21 nt, Artificial Sequence
  Synthetic
gaaagaccagugaacaaguua

SEQ ID NO: 509748 - RNA, 22 nt, Artificial Sequence
  Synthetic
agaaagaccagugaacaaguua

SEQ ID NO: 509749 - RNA, 23 nt, Artificial Sequence
  Synthetic
cagaaagaccagugaacaaguua

SEQ ID NO: 509750 - RNA, 24 nt, Artificial Sequence
  Synthetic
gcagaaagaccagugaacaaguua

SEQ ID NO: 509751 - RNA, 18 nt, Artificial Sequence
  Synthetic
aauguggcagucaaguua

SEQ ID NO: 509752 - RNA, 19 nt, Artificial Sequence
  Synthetic
gaauguggcagucaaguua

SEQ ID NO: 509753 - RNA, 20 nt, Artificial Sequence
  Synthetic
agaauguggcagucaaguua

SEQ ID NO: 509754 - RNA, 21 nt, Artificial Sequence
  Synthetic
uagaauguggcagucaaguua

SEQ ID NO: 509755 - RNA, 22 nt, Artificial Sequence
  Synthetic
cuagaauguggcagucaaguua

SEQ ID NO: 509756 - RNA, 23 nt, Artificial Sequence
  Synthetic
gcuagaauguggcagucaaguua

SEQ ID NO: 509757 - RNA, 24 nt, Artificial Sequence
  Synthetic
agcuagaauguggcagucaaguua

SEQ ID NO: 509758 - RNA, 18 nt, Artificial Sequence
  Synthetic
uucagccugaagaaguua

SEQ ID NO: 509759 - RNA, 19 nt, Artificial Sequence
  Synthetic
auucagccugaagaaguua

SEQ ID NO: 509760 - RNA, 20 nt, Artificial Sequence
  Synthetic
uauucagccugaagaaguua

SEQ ID NO: 509761 - RNA, 21 nt, Artificial Sequence
  Synthetic
auauucagccugaagaaguua

SEQ ID NO: 509762 - RNA, 22 nt, Artificial Sequence
  Synthetic
cauauucagccugaagaaguua

SEQ ID NO: 509763 - RNA, 23 nt, Artificial Sequence
  Synthetic
ccauauucagccugaagaaguua

SEQ ID NO: 509764 - RNA, 24 nt, Artificial Sequence
  Synthetic
cccauauucagccugaagaaguua

SEQ ID NO: 509765 - RNA, 18 nt, Artificial Sequence
  Synthetic
aacauuuucuagaaguua

SEQ ID NO: 509766 - RNA, 19 nt, Artificial Sequence
  Synthetic
aaacauuuucuagaaguua

SEQ ID NO: 509767 - RNA, 20 nt, Artificial Sequence
  Synthetic
caaacauuuucuagaaguua

SEQ ID NO: 509768 - RNA, 21 nt, Artificial Sequence
  Synthetic
ccaaacauuuucuagaaguua

SEQ ID NO: 509769 - RNA, 22 nt, Artificial Sequence
  Synthetic
accaaacauuuucuagaaguua

SEQ ID NO: 509770 - RNA, 23 nt, Artificial Sequence
  Synthetic
uaccaaacauuuucuagaaguua

SEQ ID NO: 509771 - RNA, 24 nt, Artificial Sequence
  Synthetic
guaccaaacauuuucuagaaguua

SEQ ID NO: 509772 - RNA, 18 nt, Artificial Sequence
  Synthetic
acugcugacaggaaguua

SEQ ID NO: 509773 - RNA, 19 nt, Artificial Sequence
  Synthetic
gacugcugacaggaaguua

SEQ ID NO: 509774 - RNA, 20 nt, Artificial Sequence
  Synthetic
ggacugcugacaggaaguua

SEQ ID NO: 509775 - RNA, 21 nt, Artificial Sequence
  Synthetic
uggacugcugacaggaaguua

SEQ ID NO: 509776 - RNA, 22 nt, Artificial Sequence
  Synthetic
guggacugcugacaggaaguua

SEQ ID NO: 509777 - RNA, 23 nt, Artificial Sequence
  Synthetic
uguggacugcugacaggaaguua

SEQ ID NO: 509778 - RNA, 24 nt, Artificial Sequence
  Synthetic
cuguggacugcugacaggaaguua

SEQ ID NO: 509779 - RNA, 18 nt, Artificial Sequence
  Synthetic
auagauuucaugaaguua

SEQ ID NO: 509780 - RNA, 19 nt, Artificial Sequence
  Synthetic
aauagauuucaugaaguua

SEQ ID NO: 509781 - RNA, 20 nt, Artificial Sequence
  Synthetic
aaauagauuucaugaaguua

SEQ ID NO: 509782 - RNA, 21 nt, Artificial Sequence
  Synthetic
gaaauagauuucaugaaguua

SEQ ID NO: 509783 - RNA, 22 nt, Artificial Sequence
  Synthetic
agaaauagauuucaugaaguua

SEQ ID NO: 509784 - RNA, 23 nt, Artificial Sequence
  Synthetic
uagaaauagauuucaugaaguua

SEQ ID NO: 509785 - RNA, 24 nt, Artificial Sequence
  Synthetic
uuagaaauagauuucaugaaguua

SEQ ID NO: 509786 - RNA, 18 nt, Artificial Sequence
  Synthetic
gcuuuggagaugaaguua

SEQ ID NO: 509787 - RNA, 19 nt, Artificial Sequence
  Synthetic
ggcuuuggagaugaaguua

SEQ ID NO: 509788 - RNA, 20 nt, Artificial Sequence
  Synthetic
aggcuuuggagaugaaguua

SEQ ID NO: 509789 - RNA, 21 nt, Artificial Sequence
  Synthetic
aaggcuuuggagaugaaguua

SEQ ID NO: 509790 - RNA, 22 nt, Artificial Sequence
  Synthetic
aaaggcuuuggagaugaaguua

SEQ ID NO: 509791 - RNA, 23 nt, Artificial Sequence
  Synthetic
gaaaggcuuuggagaugaaguua

SEQ ID NO: 509792 - RNA, 24 nt, Artificial Sequence
  Synthetic
ggaaaggcuuuggagaugaaguua

SEQ ID NO: 509793 - RNA, 18 nt, Artificial Sequence
  Synthetic
aacuuacaaaauaaguua

SEQ ID NO: 509794 - RNA, 19 nt, Artificial Sequence
  Synthetic
caacuuacaaaauaaguua

SEQ ID NO: 509795 - RNA, 20 nt, Artificial Sequence
  Synthetic
ucaacuuacaaaauaaguua

SEQ ID NO: 509796 - RNA, 21 nt, Artificial Sequence
  Synthetic
cucaacuuacaaaauaaguua

SEQ ID NO: 509797 - RNA, 22 nt, Artificial Sequence
  Synthetic
acucaacuuacaaaauaaguua

SEQ ID NO: 509798 - RNA, 23 nt, Artificial Sequence
  Synthetic
cacucaacuuacaaaauaaguua

SEQ ID NO: 509799 - RNA, 24 nt, Artificial Sequence
  Synthetic
ucacucaacuuacaaaauaaguua

SEQ ID NO: 509800 - RNA, 18 nt, Artificial Sequence
  Synthetic
acagucuccaauaaguua

SEQ ID NO: 509801 - RNA, 19 nt, Artificial Sequence
  Synthetic
cacagucuccaauaaguua

SEQ ID NO: 509802 - RNA, 20 nt, Artificial Sequence
  Synthetic
ucacagucuccaauaaguua

SEQ ID NO: 509803 - RNA, 21 nt, Artificial Sequence
  Synthetic
uucacagucuccaauaaguua

SEQ ID NO: 509804 - RNA, 22 nt, Artificial Sequence
  Synthetic
auucacagucuccaauaaguua

SEQ ID NO: 509805 - RNA, 23 nt, Artificial Sequence
  Synthetic
gauucacagucuccaauaaguua

SEQ ID NO: 509806 - RNA, 24 nt, Artificial Sequence
  Synthetic
ugauucacagucuccaauaaguua

SEQ ID NO: 509807 - RNA, 18 nt, Artificial Sequence
  Synthetic
uuuuguuaccauaaguua

SEQ ID NO: 509808 - RNA, 19 nt, Artificial Sequence
  Synthetic
cuuuuguuaccauaaguua

SEQ ID NO: 509809 - RNA, 20 nt, Artificial Sequence
  Synthetic
ucuuuuguuaccauaaguua

SEQ ID NO: 509810 - RNA, 21 nt, Artificial Sequence
  Synthetic
gucuuuuguuaccauaaguua

SEQ ID NO: 509811 - RNA, 22 nt, Artificial Sequence
  Synthetic
ggucuuuuguuaccauaaguua

SEQ ID NO: 509812 - RNA, 23 nt, Artificial Sequence
  Synthetic
uggucuuuuguuaccauaaguua

SEQ ID NO: 509813 - RNA, 24 nt, Artificial Sequence
  Synthetic
guggucuuuuguuaccauaaguua

SEQ ID NO: 509814 - RNA, 18 nt, Artificial Sequence
  Synthetic
augugaaguuauaaguua

SEQ ID NO: 509815 - RNA, 19 nt, Artificial Sequence
  Synthetic
uaugugaaguuauaaguua

SEQ ID NO: 509816 - RNA, 20 nt, Artificial Sequence
  Synthetic
uuaugugaaguuauaaguua

SEQ ID NO: 509817 - RNA, 21 nt, Artificial Sequence
  Synthetic
guuaugugaaguuauaaguua

SEQ ID NO: 509818 - RNA, 22 nt, Artificial Sequence
  Synthetic
aguuaugugaaguuauaaguua

SEQ ID NO: 509819 - RNA, 23 nt, Artificial Sequence
  Synthetic
aaguuaugugaaguuauaaguua

SEQ ID NO: 509820 - RNA, 24 nt, Artificial Sequence
  Synthetic
aaaguuaugugaaguuauaaguua

SEQ ID NO: 509821 - RNA, 18 nt, Artificial Sequence
  Synthetic
uaaaaauauaguaaguua

SEQ ID NO: 509822 - RNA, 19 nt, Artificial Sequence
  Synthetic
auaaaaauauaguaaguua

SEQ ID NO: 509823 - RNA, 20 nt, Artificial Sequence
  Synthetic
uauaaaaauauaguaaguua

SEQ ID NO: 509824 - RNA, 21 nt, Artificial Sequence
  Synthetic
guauaaaaauauaguaaguua

SEQ ID NO: 509825 - RNA, 22 nt, Artificial Sequence
  Synthetic
gguauaaaaauauaguaaguua

SEQ ID NO: 509826 - RNA, 23 nt, Artificial Sequence
  Synthetic
agguauaaaaauauaguaaguua

SEQ ID NO: 509827 - RNA, 24 nt, Artificial Sequence
  Synthetic
uagguauaaaaauauaguaaguua

SEQ ID NO: 509828 - RNA, 18 nt, Artificial Sequence
  Synthetic
acaauggguuuuaaguua

SEQ ID NO: 509829 - RNA, 19 nt, Artificial Sequence
  Synthetic
aacaauggguuuuaaguua

SEQ ID NO: 509830 - RNA, 20 nt, Artificial Sequence
  Synthetic
gaacaauggguuuuaaguua

SEQ ID NO: 509831 - RNA, 21 nt, Artificial Sequence
  Synthetic
agaacaauggguuuuaaguua

SEQ ID NO: 509832 - RNA, 22 nt, Artificial Sequence
  Synthetic
uagaacaauggguuuuaaguua

SEQ ID NO: 509833 - RNA, 23 nt, Artificial Sequence
  Synthetic
uuagaacaauggguuuuaaguua

SEQ ID NO: 509834 - RNA, 24 nt, Artificial Sequence
  Synthetic
auuagaacaauggguuuuaaguua

SEQ ID NO: 509835 - RNA, 18 nt, Artificial Sequence
  Synthetic
aaaauaaaaaaacaguua

SEQ ID NO: 509836 - RNA, 19 nt, Artificial Sequence
  Synthetic
aaaaauaaaaaaacaguua

SEQ ID NO: 509837 - RNA, 20 nt, Artificial Sequence
  Synthetic
uaaaaauaaaaaaacaguua

SEQ ID NO: 509838 - RNA, 21 nt, Artificial Sequence
  Synthetic
auaaaaauaaaaaaacaguua

SEQ ID NO: 509839 - RNA, 22 nt, Artificial Sequence
  Synthetic
aauaaaaauaaaaaaacaguua

SEQ ID NO: 509840 - RNA, 23 nt, Artificial Sequence
  Synthetic
aaauaaaaauaaaaaaacaguua

SEQ ID NO: 509841 - RNA, 24 nt, Artificial Sequence
  Synthetic
aaaauaaaaauaaaaaaacaguua

SEQ ID NO: 509842 - RNA, 18 nt, Artificial Sequence
  Synthetic
aaaucuaaugaacaguua

SEQ ID NO: 509843 - RNA, 19 nt, Artificial Sequence
  Synthetic
gaaaucuaaugaacaguua

SEQ ID NO: 509844 - RNA, 20 nt, Artificial Sequence
  Synthetic
ugaaaucuaaugaacaguua

SEQ ID NO: 509845 - RNA, 21 nt, Artificial Sequence
  Synthetic
gugaaaucuaaugaacaguua

SEQ ID NO: 509846 - RNA, 22 nt, Artificial Sequence
  Synthetic
ggugaaaucuaaugaacaguua

SEQ ID NO: 509847 - RNA, 23 nt, Artificial Sequence
  Synthetic
uggugaaaucuaaugaacaguua

SEQ ID NO: 509848 - RNA, 24 nt, Artificial Sequence
  Synthetic
cuggugaaaucuaaugaacaguua

SEQ ID NO: 509849 - RNA, 18 nt, Artificial Sequence
  Synthetic
uaaaacuaugcacaguua

SEQ ID NO: 509850 - RNA, 19 nt, Artificial Sequence
  Synthetic
auaaaacuaugcacaguua

SEQ ID NO: 509851 - RNA, 20 nt, Artificial Sequence
  Synthetic
uauaaaacuaugcacaguua

SEQ ID NO: 509852 - RNA, 21 nt, Artificial Sequence
  Synthetic
auauaaaacuaugcacaguua

SEQ ID NO: 509853 - RNA, 22 nt, Artificial Sequence
  Synthetic
aauauaaaacuaugcacaguua

SEQ ID NO: 509854 - RNA, 23 nt, Artificial Sequence
  Synthetic
gaauauaaaacuaugcacaguua

SEQ ID NO: 509855 - RNA, 24 nt, Artificial Sequence
  Synthetic
ugaauauaaaacuaugcacaguua

SEQ ID NO: 509856 - RNA, 18 nt, Artificial Sequence
  Synthetic
augaguaaccuacaguua

SEQ ID NO: 509857 - RNA, 19 nt, Artificial Sequence
  Synthetic
aaugaguaaccuacaguua

SEQ ID NO: 509858 - RNA, 20 nt, Artificial Sequence
  Synthetic
aaaugaguaaccuacaguua

SEQ ID NO: 509859 - RNA, 21 nt, Artificial Sequence
  Synthetic
caaaugaguaaccuacaguua

SEQ ID NO: 509860 - RNA, 22 nt, Artificial Sequence
  Synthetic
acaaaugaguaaccuacaguua

SEQ ID NO: 509861 - RNA, 23 nt, Artificial Sequence
  Synthetic
uacaaaugaguaaccuacaguua

SEQ ID NO: 509862 - RNA, 24 nt, Artificial Sequence
  Synthetic
auacaaaugaguaaccuacaguua

SEQ ID NO: 509863 - RNA, 18 nt, Artificial Sequence
  Synthetic
gaagcaaaauggcaguua

SEQ ID NO: 509864 - RNA, 19 nt, Artificial Sequence
  Synthetic
ugaagcaaaauggcaguua

SEQ ID NO: 509865 - RNA, 20 nt, Artificial Sequence
  Synthetic
augaagcaaaauggcaguua

SEQ ID NO: 509866 - RNA, 21 nt, Artificial Sequence
  Synthetic
aaugaagcaaaauggcaguua

SEQ ID NO: 509867 - RNA, 22 nt, Artificial Sequence
  Synthetic
aaaugaagcaaaauggcaguua

SEQ ID NO: 509868 - RNA, 23 nt, Artificial Sequence
  Synthetic
aaaaugaagcaaaauggcaguua

SEQ ID NO: 509869 - RNA, 24 nt, Artificial Sequence
  Synthetic
caaaaugaagcaaaauggcaguua

SEQ ID NO: 509870 - RNA, 18 nt, Artificial Sequence
  Synthetic
cuuuaugcacugcaguua

SEQ ID NO: 509871 - RNA, 19 nt, Artificial Sequence
  Synthetic
ucuuuaugcacugcaguua

SEQ ID NO: 509872 - RNA, 20 nt, Artificial Sequence
  Synthetic
uucuuuaugcacugcaguua

SEQ ID NO: 509873 - RNA, 21 nt, Artificial Sequence
  Synthetic
uuucuuuaugcacugcaguua

SEQ ID NO: 509874 - RNA, 22 nt, Artificial Sequence
  Synthetic
cuuucuuuaugcacugcaguua

SEQ ID NO: 509875 - RNA, 23 nt, Artificial Sequence
  Synthetic
ccuuucuuuaugcacugcaguua

SEQ ID NO: 509876 - RNA, 24 nt, Artificial Sequence
  Synthetic
uccuuucuuuaugcacugcaguua

SEQ ID NO: 509877 - RNA, 18 nt, Artificial Sequence
  Synthetic
gccaaaccauaucaguua

SEQ ID NO: 509878 - RNA, 19 nt, Artificial Sequence
  Synthetic
agccaaaccauaucaguua

SEQ ID NO: 509879 - RNA, 20 nt, Artificial Sequence
  Synthetic
cagccaaaccauaucaguua

SEQ ID NO: 509880 - RNA, 21 nt, Artificial Sequence
  Synthetic
acagccaaaccauaucaguua

SEQ ID NO: 509881 - RNA, 22 nt, Artificial Sequence
  Synthetic
cacagccaaaccauaucaguua

SEQ ID NO: 509882 - RNA, 23 nt, Artificial Sequence
  Synthetic
acacagccaaaccauaucaguua

SEQ ID NO: 509883 - RNA, 24 nt, Artificial Sequence
  Synthetic
gacacagccaaaccauaucaguua

SEQ ID NO: 509884 - RNA, 18 nt, Artificial Sequence
  Synthetic
acccuaagagcucaguua

SEQ ID NO: 509885 - RNA, 19 nt, Artificial Sequence
  Synthetic
gacccuaagagcucaguua

SEQ ID NO: 509886 - RNA, 20 nt, Artificial Sequence
  Synthetic
ggacccuaagagcucaguua

SEQ ID NO: 509887 - RNA, 21 nt, Artificial Sequence
  Synthetic
uggacccuaagagcucaguua

SEQ ID NO: 509888 - RNA, 22 nt, Artificial Sequence
  Synthetic
auggacccuaagagcucaguua

SEQ ID NO: 509889 - RNA, 23 nt, Artificial Sequence
  Synthetic
gauggacccuaagagcucaguua

SEQ ID NO: 509890 - RNA, 24 nt, Artificial Sequence
  Synthetic
agauggacccuaagagcucaguua

SEQ ID NO: 509891 - RNA, 18 nt, Artificial Sequence
  Synthetic
caugcuacaugucaguua

SEQ ID NO: 509892 - RNA, 19 nt, Artificial Sequence
  Synthetic
ucaugcuacaugucaguua

SEQ ID NO: 509893 - RNA, 20 nt, Artificial Sequence
  Synthetic
gucaugcuacaugucaguua

SEQ ID NO: 509894 - RNA, 21 nt, Artificial Sequence
  Synthetic
agucaugcuacaugucaguua

SEQ ID NO: 509895 - RNA, 22 nt, Artificial Sequence
  Synthetic
cagucaugcuacaugucaguua

SEQ ID NO: 509896 - RNA, 23 nt, Artificial Sequence
  Synthetic
ucagucaugcuacaugucaguua

SEQ ID NO: 509897 - RNA, 24 nt, Artificial Sequence
  Synthetic
uucagucaugcuacaugucaguua

SEQ ID NO: 509898 - RNA, 18 nt, Artificial Sequence
  Synthetic
uucauuucaauucaguua

SEQ ID NO: 509899 - RNA, 19 nt, Artificial Sequence
  Synthetic
uuucauuucaauucaguua

SEQ ID NO: 509900 - RNA, 20 nt, Artificial Sequence
  Synthetic
guuucauuucaauucaguua

SEQ ID NO: 509901 - RNA, 21 nt, Artificial Sequence
  Synthetic
gguuucauuucaauucaguua

SEQ ID NO: 509902 - RNA, 22 nt, Artificial Sequence
  Synthetic
agguuucauuucaauucaguua

SEQ ID NO: 509903 - RNA, 23 nt, Artificial Sequence
  Synthetic
cagguuucauuucaauucaguua

SEQ ID NO: 509904 - RNA, 24 nt, Artificial Sequence
  Synthetic
ucagguuucauuucaauucaguua

SEQ ID NO: 509905 - RNA, 18 nt, Artificial Sequence
  Synthetic
ugguaacacauucaguua

SEQ ID NO: 509906 - RNA, 19 nt, Artificial Sequence
  Synthetic
gugguaacacauucaguua

SEQ ID NO: 509907 - RNA, 20 nt, Artificial Sequence
  Synthetic
agugguaacacauucaguua

SEQ ID NO: 509908 - RNA, 21 nt, Artificial Sequence
  Synthetic
uagugguaacacauucaguua

SEQ ID NO: 509909 - RNA, 22 nt, Artificial Sequence
  Synthetic
auagugguaacacauucaguua

SEQ ID NO: 509910 - RNA, 23 nt, Artificial Sequence
  Synthetic
aauagugguaacacauucaguua

SEQ ID NO: 509911 - RNA, 24 nt, Artificial Sequence
  Synthetic
gaauagugguaacacauucaguua

SEQ ID NO: 509912 - RNA, 18 nt, Artificial Sequence
  Synthetic
ugacucuugguucaguua

SEQ ID NO: 509913 - RNA, 19 nt, Artificial Sequence
  Synthetic
uugacucuugguucaguua

SEQ ID NO: 509914 - RNA, 20 nt, Artificial Sequence
  Synthetic
auugacucuugguucaguua

SEQ ID NO: 509915 - RNA, 21 nt, Artificial Sequence
  Synthetic
aauugacucuugguucaguua

SEQ ID NO: 509916 - RNA, 22 nt, Artificial Sequence
  Synthetic
aaauugacucuugguucaguua

SEQ ID NO: 509917 - RNA, 23 nt, Artificial Sequence
  Synthetic
aaaauugacucuugguucaguua

SEQ ID NO: 509918 - RNA, 24 nt, Artificial Sequence
  Synthetic
aaaaauugacucuugguucaguua

SEQ ID NO: 509919 - RNA, 24 nt, Artificial Sequence
  Synthetic
augcuggccucauaaaaagaguua

SEQ ID NO: 509920 - RNA, 18 nt, Artificial Sequence
  Synthetic
ucagacaccaaagaguua

SEQ ID NO: 509921 - RNA, 19 nt, Artificial Sequence
  Synthetic
uucagacaccaaagaguua

SEQ ID NO: 509922 - RNA, 20 nt, Artificial Sequence
  Synthetic
auucagacaccaaagaguua

SEQ ID NO: 509923 - RNA, 21 nt, Artificial Sequence
  Synthetic
aauucagacaccaaagaguua

SEQ ID NO: 509924 - RNA, 22 nt, Artificial Sequence
  Synthetic
aaauucagacaccaaagaguua

SEQ ID NO: 509925 - RNA, 23 nt, Artificial Sequence
  Synthetic
caaauucagacaccaaagaguua

SEQ ID NO: 509926 - RNA, 24 nt, Artificial Sequence
  Synthetic
acaaauucagacaccaaagaguua

SEQ ID NO: 509927 - RNA, 18 nt, Artificial Sequence
  Synthetic
cagcuaaggaaagaguua

SEQ ID NO: 509928 - RNA, 19 nt, Artificial Sequence
  Synthetic
acagcuaaggaaagaguua

SEQ ID NO: 509929 - RNA, 20 nt, Artificial Sequence
  Synthetic
aacagcuaaggaaagaguua

SEQ ID NO: 509930 - RNA, 21 nt, Artificial Sequence
  Synthetic
uaacagcuaaggaaagaguua

SEQ ID NO: 509931 - RNA, 22 nt, Artificial Sequence
  Synthetic
guaacagcuaaggaaagaguua

SEQ ID NO: 509932 - RNA, 23 nt, Artificial Sequence
  Synthetic
aguaacagcuaaggaaagaguua

SEQ ID NO: 509933 - RNA, 24 nt, Artificial Sequence
  Synthetic
caguaacagcuaaggaaagaguua

SEQ ID NO: 509934 - RNA, 18 nt, Artificial Sequence
  Synthetic
auuuuuagaagagaguua

SEQ ID NO: 509935 - RNA, 19 nt, Artificial Sequence
  Synthetic
aauuuuuagaagagaguua

SEQ ID NO: 509936 - RNA, 20 nt, Artificial Sequence
  Synthetic
uaauuuuuagaagagaguua

SEQ ID NO: 509937 - RNA, 21 nt, Artificial Sequence
  Synthetic
auaauuuuuagaagagaguua

SEQ ID NO: 509938 - RNA, 22 nt, Artificial Sequence
  Synthetic
aauaauuuuuagaagagaguua

SEQ ID NO: 509939 - RNA, 23 nt, Artificial Sequence
  Synthetic
uaauaauuuuuagaagagaguua

SEQ ID NO: 509940 - RNA, 24 nt, Artificial Sequence
  Synthetic
cuaauaauuuuuagaagagaguua

SEQ ID NO: 509941 - RNA, 18 nt, Artificial Sequence
  Synthetic
ggucaacuuuuagaguua

SEQ ID NO: 509942 - RNA, 19 nt, Artificial Sequence
  Synthetic
gggucaacuuuuagaguua

SEQ ID NO: 509943 - RNA, 20 nt, Artificial Sequence
  Synthetic
agggucaacuuuuagaguua

SEQ ID NO: 509944 - RNA, 21 nt, Artificial Sequence
  Synthetic
gagggucaacuuuuagaguua

SEQ ID NO: 509945 - RNA, 22 nt, Artificial Sequence
  Synthetic
ugagggucaacuuuuagaguua

SEQ ID NO: 509946 - RNA, 23 nt, Artificial Sequence
  Synthetic
augagggucaacuuuuagaguua

SEQ ID NO: 509947 - RNA, 24 nt, Artificial Sequence
  Synthetic
uaugagggucaacuuuuagaguua

SEQ ID NO: 509948 - RNA, 18 nt, Artificial Sequence
  Synthetic
ccauauuuuaacgaguua

SEQ ID NO: 509949 - RNA, 19 nt, Artificial Sequence
  Synthetic
accauauuuuaacgaguua

SEQ ID NO: 509950 - RNA, 20 nt, Artificial Sequence
  Synthetic
gaccauauuuuaacgaguua

SEQ ID NO: 509951 - RNA, 21 nt, Artificial Sequence
  Synthetic
ggaccauauuuuaacgaguua

SEQ ID NO: 509952 - RNA, 22 nt, Artificial Sequence
  Synthetic
cggaccauauuuuaacgaguua

SEQ ID NO: 509953 - RNA, 23 nt, Artificial Sequence
  Synthetic
acggaccauauuuuaacgaguua

SEQ ID NO: 509954 - RNA, 24 nt, Artificial Sequence
  Synthetic
aacggaccauauuuuaacgaguua

SEQ ID NO: 509955 - RNA, 18 nt, Artificial Sequence
  Synthetic
aguguaauaacugaguua

SEQ ID NO: 509956 - RNA, 19 nt, Artificial Sequence
  Synthetic
caguguaauaacugaguua

SEQ ID NO: 509957 - RNA, 20 nt, Artificial Sequence
  Synthetic
ccaguguaauaacugaguua

SEQ ID NO: 509958 - RNA, 21 nt, Artificial Sequence
  Synthetic
cccaguguaauaacugaguua

SEQ ID NO: 509959 - RNA, 22 nt, Artificial Sequence
  Synthetic
ccccaguguaauaacugaguua

SEQ ID NO: 509960 - RNA, 23 nt, Artificial Sequence
  Synthetic
gccccaguguaauaacugaguua

SEQ ID NO: 509961 - RNA, 24 nt, Artificial Sequence
  Synthetic
agccccaguguaauaacugaguua

SEQ ID NO: 509962 - RNA, 18 nt, Artificial Sequence
  Synthetic
aaauucccuucugaguua

SEQ ID NO: 509963 - RNA, 19 nt, Artificial Sequence
  Synthetic
aaaauucccuucugaguua

SEQ ID NO: 509964 - RNA, 20 nt, Artificial Sequence
  Synthetic
uaaaauucccuucugaguua

SEQ ID NO: 509965 - RNA, 21 nt, Artificial Sequence
  Synthetic
uuaaaauucccuucugaguua

SEQ ID NO: 509966 - RNA, 22 nt, Artificial Sequence
  Synthetic
uuuaaaauucccuucugaguua

SEQ ID NO: 509967 - RNA, 23 nt, Artificial Sequence
  Synthetic
uuuuaaaauucccuucugaguua

SEQ ID NO: 509968 - RNA, 24 nt, Artificial Sequence
  Synthetic
uuuuuaaaauucccuucugaguua

SEQ ID NO: 509969 - RNA, 18 nt, Artificial Sequence
  Synthetic
ucaugauaauaauaguua

SEQ ID NO: 509970 - RNA, 19 nt, Artificial Sequence
  Synthetic
aucaugauaauaauaguua

SEQ ID NO: 509971 - RNA, 20 nt, Artificial Sequence
  Synthetic
aaucaugauaauaauaguua

SEQ ID NO: 509972 - RNA, 21 nt, Artificial Sequence
  Synthetic
caaucaugauaauaauaguua

SEQ ID NO: 509973 - RNA, 22 nt, Artificial Sequence
  Synthetic
gcaaucaugauaauaauaguua

SEQ ID NO: 509974 - RNA, 23 nt, Artificial Sequence
  Synthetic
agcaaucaugauaauaauaguua

SEQ ID NO: 509975 - RNA, 24 nt, Artificial Sequence
  Synthetic
aagcaaucaugauaauaauaguua

SEQ ID NO: 509976 - RNA, 18 nt, Artificial Sequence
  Synthetic
caagaaaauauauaguua

SEQ ID NO: 509977 - RNA, 19 nt, Artificial Sequence
  Synthetic
acaagaaaauauauaguua

SEQ ID NO: 509978 - RNA, 20 nt, Artificial Sequence
  Synthetic
uacaagaaaauauauaguua

SEQ ID NO: 509979 - RNA, 21 nt, Artificial Sequence
  Synthetic
uuacaagaaaauauauaguua

SEQ ID NO: 509980 - RNA, 22 nt, Artificial Sequence
  Synthetic
uuuacaagaaaauauauaguua

SEQ ID NO: 509981 - RNA, 23 nt, Artificial Sequence
  Synthetic
cuuuacaagaaaauauauaguua

SEQ ID NO: 509982 - RNA, 24 nt, Artificial Sequence
  Synthetic
gcuuuacaagaaaauauauaguua

SEQ ID NO: 509983 - RNA, 18 nt, Artificial Sequence
  Synthetic
ccuaaaaagcuauaguua

SEQ ID NO: 509984 - RNA, 19 nt, Artificial Sequence
  Synthetic
accuaaaaagcuauaguua

SEQ ID NO: 509985 - RNA, 20 nt, Artificial Sequence
  Synthetic
uaccuaaaaagcuauaguua

SEQ ID NO: 509986 - RNA, 21 nt, Artificial Sequence
  Synthetic
cuaccuaaaaagcuauaguua

SEQ ID NO: 509987 - RNA, 22 nt, Artificial Sequence
  Synthetic
ccuaccuaaaaagcuauaguua

SEQ ID NO: 509988 - RNA, 23 nt, Artificial Sequence
  Synthetic
uccuaccuaaaaagcuauaguua

SEQ ID NO: 509989 - RNA, 24 nt, Artificial Sequence
  Synthetic
cuccuaccuaaaaagcuauaguua

SEQ ID NO: 509990 - RNA, 18 nt, Artificial Sequence
  Synthetic
ucaggauuauuauaguua

SEQ ID NO: 509991 - RNA, 19 nt, Artificial Sequence
  Synthetic
aucaggauuauuauaguua

SEQ ID NO: 509992 - RNA, 20 nt, Artificial Sequence
  Synthetic
caucaggauuauuauaguua

SEQ ID NO: 509993 - RNA, 21 nt, Artificial Sequence
  Synthetic
ucaucaggauuauuauaguua

SEQ ID NO: 509994 - RNA, 22 nt, Artificial Sequence
  Synthetic
uucaucaggauuauuauaguua

SEQ ID NO: 509995 - RNA, 23 nt, Artificial Sequence
  Synthetic
auucaucaggauuauuauaguua

SEQ ID NO: 509996 - RNA, 24 nt, Artificial Sequence
  Synthetic
aauucaucaggauuauuauaguua

SEQ ID NO: 509997 - RNA, 18 nt, Artificial Sequence
  Synthetic
guauaacaaaacuaguua

SEQ ID NO: 509998 - RNA, 19 nt, Artificial Sequence
  Synthetic
uguauaacaaaacuaguua

SEQ ID NO: 509999 - RNA, 20 nt, Artificial Sequence
  Synthetic
auguauaacaaaacuaguua

SEQ ID NO: 510000 - RNA, 21 nt, Artificial Sequence
  Synthetic
gauguauaacaaaacuaguua

SEQ ID NO: 510001 - RNA, 22 nt, Artificial Sequence
  Synthetic
agauguauaacaaaacuaguua

SEQ ID NO: 510002 - RNA, 23 nt, Artificial Sequence
  Synthetic
uagauguauaacaaaacuaguua

SEQ ID NO: 510003 - RNA, 24 nt, Artificial Sequence
  Synthetic
guagauguauaacaaaacuaguua

SEQ ID NO: 510004 - RNA, 18 nt, Artificial Sequence
  Synthetic
cuaauuagccacuaguua

SEQ ID NO: 510005 - RNA, 19 nt, Artificial Sequence
  Synthetic
gcuaauuagccacuaguua

SEQ ID NO: 510006 - RNA, 20 nt, Artificial Sequence
  Synthetic
agcuaauuagccacuaguua

SEQ ID NO: 510007 - RNA, 21 nt, Artificial Sequence
  Synthetic
gagcuaauuagccacuaguua

SEQ ID NO: 510008 - RNA, 22 nt, Artificial Sequence
  Synthetic
ugagcuaauuagccacuaguua

SEQ ID NO: 510009 - RNA, 23 nt, Artificial Sequence
  Synthetic
cugagcuaauuagccacuaguua

SEQ ID NO: 510010 - RNA, 24 nt, Artificial Sequence
  Synthetic
acugagcuaauuagccacuaguua

SEQ ID NO: 510011 - RNA, 18 nt, Artificial Sequence
  Synthetic
aaaacauacaucuaguua

SEQ ID NO: 510012 - RNA, 19 nt, Artificial Sequence
  Synthetic
uaaaacauacaucuaguua

SEQ ID NO: 510013 - RNA, 20 nt, Artificial Sequence
  Synthetic
guaaaacauacaucuaguua

SEQ ID NO: 510014 - RNA, 21 nt, Artificial Sequence
  Synthetic
aguaaaacauacaucuaguua

SEQ ID NO: 510015 - RNA, 22 nt, Artificial Sequence
  Synthetic
gaguaaaacauacaucuaguua

SEQ ID NO: 510016 - RNA, 23 nt, Artificial Sequence
  Synthetic
ugaguaaaacauacaucuaguua

SEQ ID NO: 510017 - RNA, 24 nt, Artificial Sequence
  Synthetic
augaguaaaacauacaucuaguua

SEQ ID NO: 510018 - RNA, 18 nt, Artificial Sequence
  Synthetic
guguaugucuucuaguua

SEQ ID NO: 510019 - RNA, 19 nt, Artificial Sequence
  Synthetic
aguguaugucuucuaguua

SEQ ID NO: 510020 - RNA, 20 nt, Artificial Sequence
  Synthetic
uaguguaugucuucuaguua

SEQ ID NO: 510021 - RNA, 21 nt, Artificial Sequence
  Synthetic
cuaguguaugucuucuaguua

SEQ ID NO: 510022 - RNA, 22 nt, Artificial Sequence
  Synthetic
gcuaguguaugucuucuaguua

SEQ ID NO: 510023 - RNA, 23 nt, Artificial Sequence
  Synthetic
ugcuaguguaugucuucuaguua

SEQ ID NO: 510024 - RNA, 24 nt, Artificial Sequence
  Synthetic
augcuaguguaugucuucuaguua

SEQ ID NO: 510025 - RNA, 18 nt, Artificial Sequence
  Synthetic
uuguagccuuucuaguua

SEQ ID NO: 510026 - RNA, 19 nt, Artificial Sequence
  Synthetic
auuguagccuuucuaguua

SEQ ID NO: 510027 - RNA, 20 nt, Artificial Sequence
  Synthetic
aauuguagccuuucuaguua

SEQ ID NO: 510028 - RNA, 21 nt, Artificial Sequence
  Synthetic
aaauuguagccuuucuaguua

SEQ ID NO: 510029 - RNA, 22 nt, Artificial Sequence
  Synthetic
uaaauuguagccuuucuaguua

SEQ ID NO: 510030 - RNA, 23 nt, Artificial Sequence
  Synthetic
cuaaauuguagccuuucuaguua

SEQ ID NO: 510031 - RNA, 24 nt, Artificial Sequence
  Synthetic
acuaaauuguagccuuucuaguua

SEQ ID NO: 510032 - RNA, 18 nt, Artificial Sequence
  Synthetic
auaauuucauaguaguua

SEQ ID NO: 510033 - RNA, 19 nt, Artificial Sequence
  Synthetic
cauaauuucauaguaguua

SEQ ID NO: 510034 - RNA, 20 nt, Artificial Sequence
  Synthetic
ccauaauuucauaguaguua

SEQ ID NO: 510035 - RNA, 21 nt, Artificial Sequence
  Synthetic
accauaauuucauaguaguua

SEQ ID NO: 510036 - RNA, 22 nt, Artificial Sequence
  Synthetic
aaccauaauuucauaguaguua

SEQ ID NO: 510037 - RNA, 23 nt, Artificial Sequence
  Synthetic
uaaccauaauuucauaguaguua

SEQ ID NO: 510038 - RNA, 24 nt, Artificial Sequence
  Synthetic
auaaccauaauuucauaguaguua

SEQ ID NO: 510039 - RNA, 18 nt, Artificial Sequence
  Synthetic
auucucuaacuguaguua

SEQ ID NO: 510040 - RNA, 19 nt, Artificial Sequence
  Synthetic
uauucucuaacuguaguua

SEQ ID NO: 510041 - RNA, 20 nt, Artificial Sequence
  Synthetic
guauucucuaacuguaguua

SEQ ID NO: 510042 - RNA, 21 nt, Artificial Sequence
  Synthetic
gguauucucuaacuguaguua

SEQ ID NO: 510043 - RNA, 22 nt, Artificial Sequence
  Synthetic
agguauucucuaacuguaguua

SEQ ID NO: 510044 - RNA, 23 nt, Artificial Sequence
  Synthetic
gagguauucucuaacuguaguua

SEQ ID NO: 510045 - RNA, 24 nt, Artificial Sequence
  Synthetic
agagguauucucuaacuguaguua

SEQ ID NO: 510046 - RNA, 18 nt, Artificial Sequence
  Synthetic
auuacagcacuguaguua

SEQ ID NO: 510047 - RNA, 19 nt, Artificial Sequence
  Synthetic
gauuacagcacuguaguua

SEQ ID NO: 510048 - RNA, 20 nt, Artificial Sequence
  Synthetic
agauuacagcacuguaguua

SEQ ID NO: 510049 - RNA, 21 nt, Artificial Sequence
  Synthetic
gagauuacagcacuguaguua

SEQ ID NO: 510050 - RNA, 22 nt, Artificial Sequence
  Synthetic
agagauuacagcacuguaguua

SEQ ID NO: 510051 - RNA, 23 nt, Artificial Sequence
  Synthetic
aagagauuacagcacuguaguua

SEQ ID NO: 510052 - RNA, 24 nt, Artificial Sequence
  Synthetic
aaagagauuacagcacuguaguua

SEQ ID NO: 510053 - RNA, 18 nt, Artificial Sequence
  Synthetic
uacuucuuucucacguua

SEQ ID NO: 510054 - RNA, 19 nt, Artificial Sequence
  Synthetic
uuacuucuuucucacguua

SEQ ID NO: 510055 - RNA, 20 nt, Artificial Sequence
  Synthetic
cuuacuucuuucucacguua

SEQ ID NO: 510056 - RNA, 21 nt, Artificial Sequence
  Synthetic
ccuuacuucuuucucacguua

SEQ ID NO: 510057 - RNA, 22 nt, Artificial Sequence
  Synthetic
cccuuacuucuuucucacguua

SEQ ID NO: 510058 - RNA, 23 nt, Artificial Sequence
  Synthetic
ucccuuacuucuuucucacguua

SEQ ID NO: 510059 - RNA, 24 nt, Artificial Sequence
  Synthetic
uucccuuacuucuuucucacguua

SEQ ID NO: 510060 - RNA, 18 nt, Artificial Sequence
  Synthetic
uuaccaucuggaccguua

SEQ ID NO: 510061 - RNA, 19 nt, Artificial Sequence
  Synthetic
uuuaccaucuggaccguua

SEQ ID NO: 510062 - RNA, 20 nt, Artificial Sequence
  Synthetic
auuuaccaucuggaccguua

SEQ ID NO: 510063 - RNA, 21 nt, Artificial Sequence
  Synthetic
cauuuaccaucuggaccguua

SEQ ID NO: 510064 - RNA, 22 nt, Artificial Sequence
  Synthetic
acauuuaccaucuggaccguua

SEQ ID NO: 510065 - RNA, 23 nt, Artificial Sequence
  Synthetic
aacauuuaccaucuggaccguua

SEQ ID NO: 510066 - RNA, 24 nt, Artificial Sequence
  Synthetic
aaacauuuaccaucuggaccguua

SEQ ID NO: 510067 - RNA, 18 nt, Artificial Sequence
  Synthetic
guaugagagcaggcguua

SEQ ID NO: 510068 - RNA, 19 nt, Artificial Sequence
  Synthetic
uguaugagagcaggcguua

SEQ ID NO: 510069 - RNA, 20 nt, Artificial Sequence
  Synthetic
cuguaugagagcaggcguua

SEQ ID NO: 510070 - RNA, 21 nt, Artificial Sequence
  Synthetic
acuguaugagagcaggcguua

SEQ ID NO: 510071 - RNA, 22 nt, Artificial Sequence
  Synthetic
cacuguaugagagcaggcguua

SEQ ID NO: 510072 - RNA, 23 nt, Artificial Sequence
  Synthetic
ccacuguaugagagcaggcguua

SEQ ID NO: 510073 - RNA, 24 nt, Artificial Sequence
  Synthetic
gccacuguaugagagcaggcguua

SEQ ID NO: 510074 - RNA, 18 nt, Artificial Sequence
  Synthetic
acuccuuacuucucguua

SEQ ID NO: 510075 - RNA, 19 nt, Artificial Sequence
  Synthetic
gacuccuuacuucucguua

SEQ ID NO: 510076 - RNA, 20 nt, Artificial Sequence
  Synthetic
ugacuccuuacuucucguua

SEQ ID NO: 510077 - RNA, 21 nt, Artificial Sequence
  Synthetic
gugacuccuuacuucucguua

SEQ ID NO: 510078 - RNA, 22 nt, Artificial Sequence
  Synthetic
agugacuccuuacuucucguua

SEQ ID NO: 510079 - RNA, 23 nt, Artificial Sequence
  Synthetic
aagugacuccuuacuucucguua

SEQ ID NO: 510080 - RNA, 24 nt, Artificial Sequence
  Synthetic
gaagugacuccuuacuucucguua

SEQ ID NO: 510081 - RNA, 18 nt, Artificial Sequence
  Synthetic
uuagaauugaaaagguua

SEQ ID NO: 510082 - RNA, 19 nt, Artificial Sequence
  Synthetic
cuuagaauugaaaagguua

SEQ ID NO: 510083 - RNA, 20 nt, Artificial Sequence
  Synthetic
acuuagaauugaaaagguua

SEQ ID NO: 510084 - RNA, 21 nt, Artificial Sequence
  Synthetic
gacuuagaauugaaaagguua

SEQ ID NO: 510085 - RNA, 22 nt, Artificial Sequence
  Synthetic
ggacuuagaauugaaaagguua

SEQ ID NO: 510086 - RNA, 23 nt, Artificial Sequence
  Synthetic
uggacuuagaauugaaaagguua

SEQ ID NO: 510087 - RNA, 24 nt, Artificial Sequence
  Synthetic
cuggacuuagaauugaaaagguua

SEQ ID NO: 510088 - RNA, 18 nt, Artificial Sequence
  Synthetic
gaaacauuuaaaagguua

SEQ ID NO: 510089 - RNA, 19 nt, Artificial Sequence
  Synthetic
agaaacauuuaaaagguua

SEQ ID NO: 510090 - RNA, 20 nt, Artificial Sequence
  Synthetic
gagaaacauuuaaaagguua

SEQ ID NO: 510091 - RNA, 21 nt, Artificial Sequence
  Synthetic
ggagaaacauuuaaaagguua

SEQ ID NO: 510092 - RNA, 22 nt, Artificial Sequence
  Synthetic
aggagaaacauuuaaaagguua

SEQ ID NO: 510093 - RNA, 23 nt, Artificial Sequence
  Synthetic
uaggagaaacauuuaaaagguua

SEQ ID NO: 510094 - RNA, 24 nt, Artificial Sequence
  Synthetic
cuaggagaaacauuuaaaagguua

SEQ ID NO: 510095 - RNA, 18 nt, Artificial Sequence
  Synthetic
aaagggaauuaaagguua

SEQ ID NO: 510096 - RNA, 19 nt, Artificial Sequence
  Synthetic
aaaagggaauuaaagguua

SEQ ID NO: 510097 - RNA, 20 nt, Artificial Sequence
  Synthetic
aaaaagggaauuaaagguua

SEQ ID NO: 510098 - RNA, 21 nt, Artificial Sequence
  Synthetic
gaaaaagggaauuaaagguua

SEQ ID NO: 510099 - RNA, 22 nt, Artificial Sequence
  Synthetic
agaaaaagggaauuaaagguua

SEQ ID NO: 510100 - RNA, 23 nt, Artificial Sequence
  Synthetic
gagaaaaagggaauuaaagguua

SEQ ID NO: 510101 - RNA, 24 nt, Artificial Sequence
  Synthetic
agagaaaaagggaauuaaagguua

SEQ ID NO: 510102 - RNA, 18 nt, Artificial Sequence
  Synthetic
aaaaauuauucaagguua

SEQ ID NO: 510103 - RNA, 19 nt, Artificial Sequence
  Synthetic
aaaaaauuauucaagguua

SEQ ID NO: 510104 - RNA, 20 nt, Artificial Sequence
  Synthetic
uaaaaaauuauucaagguua

SEQ ID NO: 510105 - RNA, 21 nt, Artificial Sequence
  Synthetic
cuaaaaaauuauucaagguua

SEQ ID NO: 510106 - RNA, 22 nt, Artificial Sequence
  Synthetic
ccuaaaaaauuauucaagguua

SEQ ID NO: 510107 - RNA, 23 nt, Artificial Sequence
  Synthetic
cccuaaaaaauuauucaagguua

SEQ ID NO: 510108 - RNA, 24 nt, Artificial Sequence
  Synthetic
acccuaaaaaauuauucaagguua

SEQ ID NO: 510109 - RNA, 18 nt, Artificial Sequence
  Synthetic
ucauuuuagugaagguua

SEQ ID NO: 510110 - RNA, 19 nt, Artificial Sequence
  Synthetic
cucauuuuagugaagguua

SEQ ID NO: 510111 - RNA, 20 nt, Artificial Sequence
  Synthetic
ucucauuuuagugaagguua

SEQ ID NO: 510112 - RNA, 21 nt, Artificial Sequence
  Synthetic
uucucauuuuagugaagguua

SEQ ID NO: 510113 - RNA, 22 nt, Artificial Sequence
  Synthetic
auucucauuuuagugaagguua

SEQ ID NO: 510114 - RNA, 23 nt, Artificial Sequence
  Synthetic
uauucucauuuuagugaagguua

SEQ ID NO: 510115 - RNA, 24 nt, Artificial Sequence
  Synthetic
cuauucucauuuuagugaagguua

SEQ ID NO: 510116 - RNA, 18 nt, Artificial Sequence
  Synthetic
accucaacccuaagguua

SEQ ID NO: 510117 - RNA, 19 nt, Artificial Sequence
  Synthetic
gaccucaacccuaagguua

SEQ ID NO: 510118 - RNA, 20 nt, Artificial Sequence
  Synthetic
ugaccucaacccuaagguua

SEQ ID NO: 510119 - RNA, 21 nt, Artificial Sequence
  Synthetic
gugaccucaacccuaagguua

SEQ ID NO: 510120 - RNA, 22 nt, Artificial Sequence
  Synthetic
ugugaccucaacccuaagguua

SEQ ID NO: 510121 - RNA, 23 nt, Artificial Sequence
  Synthetic
uugugaccucaacccuaagguua

SEQ ID NO: 510122 - RNA, 24 nt, Artificial Sequence
  Synthetic
auugugaccucaacccuaagguua

SEQ ID NO: 510123 - RNA, 18 nt, Artificial Sequence
  Synthetic
auauugagguuaagguua

SEQ ID NO: 510124 - RNA, 19 nt, Artificial Sequence
  Synthetic
uauauugagguuaagguua

SEQ ID NO: 510125 - RNA, 20 nt, Artificial Sequence
  Synthetic
auauauugagguuaagguua

SEQ ID NO: 510126 - RNA, 21 nt, Artificial Sequence
  Synthetic
uauauauugagguuaagguua

SEQ ID NO: 510127 - RNA, 22 nt, Artificial Sequence
  Synthetic
guauauauugagguuaagguua

SEQ ID NO: 510128 - RNA, 23 nt, Artificial Sequence
  Synthetic
aguauauauugagguuaagguua

SEQ ID NO: 510129 - RNA, 24 nt, Artificial Sequence
  Synthetic
gaguauauauugagguuaagguua

SEQ ID NO: 510130 - RNA, 18 nt, Artificial Sequence
  Synthetic
uaacuaagucacagguua

SEQ ID NO: 510131 - RNA, 19 nt, Artificial Sequence
  Synthetic
cuaacuaagucacagguua

SEQ ID NO: 510132 - RNA, 20 nt, Artificial Sequence
  Synthetic
ccuaacuaagucacagguua

SEQ ID NO: 510133 - RNA, 21 nt, Artificial Sequence
  Synthetic
gccuaacuaagucacagguua

SEQ ID NO: 510134 - RNA, 22 nt, Artificial Sequence
  Synthetic
agccuaacuaagucacagguua

SEQ ID NO: 510135 - RNA, 23 nt, Artificial Sequence
  Synthetic
aagccuaacuaagucacagguua

SEQ ID NO: 510136 - RNA, 24 nt, Artificial Sequence
  Synthetic
gaagccuaacuaagucacagguua

SEQ ID NO: 510137 - RNA, 18 nt, Artificial Sequence
  Synthetic
caaggaggucagagguua

SEQ ID NO: 510138 - RNA, 19 nt, Artificial Sequence
  Synthetic
ucaaggaggucagagguua

SEQ ID NO: 510139 - RNA, 20 nt, Artificial Sequence
  Synthetic
uucaaggaggucagagguua

SEQ ID NO: 510140 - RNA, 21 nt, Artificial Sequence
  Synthetic
guucaaggaggucagagguua

SEQ ID NO: 510141 - RNA, 22 nt, Artificial Sequence
  Synthetic
gguucaaggaggucagagguua

SEQ ID NO: 510142 - RNA, 23 nt, Artificial Sequence
  Synthetic
ugguucaaggaggucagagguua

SEQ ID NO: 510143 - RNA, 24 nt, Artificial Sequence
  Synthetic
uugguucaaggaggucagagguua

SEQ ID NO: 510144 - RNA, 18 nt, Artificial Sequence
  Synthetic
gagauaucaaugagguua

SEQ ID NO: 510145 - RNA, 19 nt, Artificial Sequence
  Synthetic
ggagauaucaaugagguua

SEQ ID NO: 510146 - RNA, 20 nt, Artificial Sequence
  Synthetic
uggagauaucaaugagguua

SEQ ID NO: 510147 - RNA, 21 nt, Artificial Sequence
  Synthetic
cuggagauaucaaugagguua

SEQ ID NO: 510148 - RNA, 22 nt, Artificial Sequence
  Synthetic
acuggagauaucaaugagguua

SEQ ID NO: 510149 - RNA, 23 nt, Artificial Sequence
  Synthetic
uacuggagauaucaaugagguua

SEQ ID NO: 510150 - RNA, 24 nt, Artificial Sequence
  Synthetic
uuacuggagauaucaaugagguua

SEQ ID NO: 510151 - RNA, 18 nt, Artificial Sequence
  Synthetic
aggaauuuggugagguua

SEQ ID NO: 510152 - RNA, 19 nt, Artificial Sequence
  Synthetic
uaggaauuuggugagguua

SEQ ID NO: 510153 - RNA, 20 nt, Artificial Sequence
  Synthetic
guaggaauuuggugagguua

SEQ ID NO: 510154 - RNA, 21 nt, Artificial Sequence
  Synthetic
aguaggaauuuggugagguua

SEQ ID NO: 510155 - RNA, 22 nt, Artificial Sequence
  Synthetic
aaguaggaauuuggugagguua

SEQ ID NO: 510156 - RNA, 23 nt, Artificial Sequence
  Synthetic
gaaguaggaauuuggugagguua

SEQ ID NO: 510157 - RNA, 24 nt, Artificial Sequence
  Synthetic
agaaguaggaauuuggugagguua

SEQ ID NO: 510158 - RNA, 18 nt, Artificial Sequence
  Synthetic
accauauaacauagguua

SEQ ID NO: 510159 - RNA, 19 nt, Artificial Sequence
  Synthetic
uaccauauaacauagguua

SEQ ID NO: 510160 - RNA, 20 nt, Artificial Sequence
  Synthetic
uuaccauauaacauagguua

SEQ ID NO: 510161 - RNA, 21 nt, Artificial Sequence
  Synthetic
uuuaccauauaacauagguua

SEQ ID NO: 510162 - RNA, 22 nt, Artificial Sequence
  Synthetic
auuuaccauauaacauagguua

SEQ ID NO: 510163 - RNA, 23 nt, Artificial Sequence
  Synthetic
cauuuaccauauaacauagguua

SEQ ID NO: 510164 - RNA, 24 nt, Artificial Sequence
  Synthetic
acauuuaccauauaacauagguua

SEQ ID NO: 510165 - RNA, 18 nt, Artificial Sequence
  Synthetic
uaaaauaacuauagguua

SEQ ID NO: 510166 - RNA, 19 nt, Artificial Sequence
  Synthetic
uuaaaauaacuauagguua

SEQ ID NO: 510167 - RNA, 20 nt, Artificial Sequence
  Synthetic
cuuaaaauaacuauagguua

SEQ ID NO: 510168 - RNA, 21 nt, Artificial Sequence
  Synthetic
ucuuaaaauaacuauagguua

SEQ ID NO: 510169 - RNA, 22 nt, Artificial Sequence
  Synthetic
uucuuaaaauaacuauagguua

SEQ ID NO: 510170 - RNA, 23 nt, Artificial Sequence
  Synthetic
uuucuuaaaauaacuauagguua

SEQ ID NO: 510171 - RNA, 24 nt, Artificial Sequence
  Synthetic
cuuucuuaaaauaacuauagguua

SEQ ID NO: 510172 - RNA, 18 nt, Artificial Sequence
  Synthetic
ucaauaaaugaacgguua

SEQ ID NO: 510173 - RNA, 19 nt, Artificial Sequence
  Synthetic
aucaauaaaugaacgguua

SEQ ID NO: 510174 - RNA, 20 nt, Artificial Sequence
  Synthetic
caucaauaaaugaacgguua

SEQ ID NO: 510175 - RNA, 21 nt, Artificial Sequence
  Synthetic
ccaucaauaaaugaacgguua

SEQ ID NO: 510176 - RNA, 22 nt, Artificial Sequence
  Synthetic
uccaucaauaaaugaacgguua

SEQ ID NO: 510177 - RNA, 23 nt, Artificial Sequence
  Synthetic
guccaucaauaaaugaacgguua

SEQ ID NO: 510178 - RNA, 24 nt, Artificial Sequence
  Synthetic
uguccaucaauaaaugaacgguua

SEQ ID NO: 510179 - RNA, 18 nt, Artificial Sequence
  Synthetic
ucacccuaacaaggguua

SEQ ID NO: 510180 - RNA, 19 nt, Artificial Sequence
  Synthetic
cucacccuaacaaggguua

SEQ ID NO: 510181 - RNA, 20 nt, Artificial Sequence
  Synthetic
ucucacccuaacaaggguua

SEQ ID NO: 510182 - RNA, 21 nt, Artificial Sequence
  Synthetic
uucucacccuaacaaggguua

SEQ ID NO: 510183 - RNA, 22 nt, Artificial Sequence
  Synthetic
uuucucacccuaacaaggguua

SEQ ID NO: 510184 - RNA, 23 nt, Artificial Sequence
  Synthetic
auuucucacccuaacaaggguua

SEQ ID NO: 510185 - RNA, 24 nt, Artificial Sequence
  Synthetic
uauuucucacccuaacaaggguua

SEQ ID NO: 510186 - RNA, 18 nt, Artificial Sequence
  Synthetic
gaaagcggguagggguua

SEQ ID NO: 510187 - RNA, 19 nt, Artificial Sequence
  Synthetic
ggaaagcggguagggguua

SEQ ID NO: 510188 - RNA, 20 nt, Artificial Sequence
  Synthetic
aggaaagcggguagggguua

SEQ ID NO: 510189 - RNA, 21 nt, Artificial Sequence
  Synthetic
aaggaaagcggguagggguua

SEQ ID NO: 510190 - RNA, 22 nt, Artificial Sequence
  Synthetic
aaaggaaagcggguagggguua

SEQ ID NO: 510191 - RNA, 23 nt, Artificial Sequence
  Synthetic
caaaggaaagcggguagggguua

SEQ ID NO: 510192 - RNA, 24 nt, Artificial Sequence
  Synthetic
gcaaaggaaagcggguagggguua

SEQ ID NO: 510193 - RNA, 18 nt, Artificial Sequence
  Synthetic
ucaggggaugggggguua

SEQ ID NO: 510194 - RNA, 19 nt, Artificial Sequence
  Synthetic
cucaggggaugggggguua

SEQ ID NO: 510195 - RNA, 20 nt, Artificial Sequence
  Synthetic
ucucaggggaugggggguua

SEQ ID NO: 510196 - RNA, 21 nt, Artificial Sequence
  Synthetic
cucucaggggaugggggguua

SEQ ID NO: 510197 - RNA, 22 nt, Artificial Sequence
  Synthetic
ccucucaggggaugggggguua

SEQ ID NO: 510198 - RNA, 23 nt, Artificial Sequence
  Synthetic
gccucucaggggaugggggguua

SEQ ID NO: 510199 - RNA, 24 nt, Artificial Sequence
  Synthetic
ggccucucaggggaugggggguua

SEQ ID NO: 510200 - RNA, 18 nt, Artificial Sequence
  Synthetic
ugguagugguggggguua

SEQ ID NO: 510201 - RNA, 19 nt, Artificial Sequence
  Synthetic
augguagugguggggguua

SEQ ID NO: 510202 - RNA, 20 nt, Artificial Sequence
  Synthetic
aaugguagugguggggguua

SEQ ID NO: 510203 - RNA, 21 nt, Artificial Sequence
  Synthetic
aaaugguagugguggggguua

SEQ ID NO: 510204 - RNA, 22 nt, Artificial Sequence
  Synthetic
gaaaugguagugguggggguua

SEQ ID NO: 510205 - RNA, 23 nt, Artificial Sequence
  Synthetic
cgaaaugguagugguggggguua

SEQ ID NO: 510206 - RNA, 24 nt, Artificial Sequence
  Synthetic
ccgaaaugguagugguggggguua

SEQ ID NO: 510207 - RNA, 18 nt, Artificial Sequence
  Synthetic
ugucucucaucuggguua

SEQ ID NO: 510208 - RNA, 19 nt, Artificial Sequence
  Synthetic
uugucucucaucuggguua

SEQ ID NO: 510209 - RNA, 20 nt, Artificial Sequence
  Synthetic
auugucucucaucuggguua

SEQ ID NO: 510210 - RNA, 21 nt, Artificial Sequence
  Synthetic
uauugucucucaucuggguua

SEQ ID NO: 510211 - RNA, 22 nt, Artificial Sequence
  Synthetic
uuauugucucucaucuggguua

SEQ ID NO: 510212 - RNA, 23 nt, Artificial Sequence
  Synthetic
auuauugucucucaucuggguua

SEQ ID NO: 510213 - RNA, 24 nt, Artificial Sequence
  Synthetic
uauuauugucucucaucuggguua

SEQ ID NO: 510214 - RNA, 18 nt, Artificial Sequence
  Synthetic
aaguauucaaguggguua

SEQ ID NO: 510215 - RNA, 19 nt, Artificial Sequence
  Synthetic
aaaguauucaaguggguua

SEQ ID NO: 510216 - RNA, 20 nt, Artificial Sequence
  Synthetic
gaaaguauucaaguggguua

SEQ ID NO: 510217 - RNA, 21 nt, Artificial Sequence
  Synthetic
ugaaaguauucaaguggguua

SEQ ID NO: 510218 - RNA, 22 nt, Artificial Sequence
  Synthetic
augaaaguauucaaguggguua

SEQ ID NO: 510219 - RNA, 23 nt, Artificial Sequence
  Synthetic
gaugaaaguauucaaguggguua

SEQ ID NO: 510220 - RNA, 24 nt, Artificial Sequence
  Synthetic
agaugaaaguauucaaguggguua

SEQ ID NO: 510221 - RNA, 18 nt, Artificial Sequence
  Synthetic
gguaaguacuguggguua

SEQ ID NO: 510222 - RNA, 19 nt, Artificial Sequence
  Synthetic
ugguaaguacuguggguua

SEQ ID NO: 510223 - RNA, 20 nt, Artificial Sequence
  Synthetic
cugguaaguacuguggguua

SEQ ID NO: 510224 - RNA, 21 nt, Artificial Sequence
  Synthetic
ucugguaaguacuguggguua

SEQ ID NO: 510225 - RNA, 22 nt, Artificial Sequence
  Synthetic
uucugguaaguacuguggguua

SEQ ID NO: 510226 - RNA, 23 nt, Artificial Sequence
  Synthetic
uuucugguaaguacuguggguua

SEQ ID NO: 510227 - RNA, 24 nt, Artificial Sequence
  Synthetic
cuuucugguaaguacuguggguua

SEQ ID NO: 510228 - RNA, 18 nt, Artificial Sequence
  Synthetic
aauaaaacacaaugguua

SEQ ID NO: 510229 - RNA, 19 nt, Artificial Sequence
  Synthetic
gaauaaaacacaaugguua

SEQ ID NO: 510230 - RNA, 20 nt, Artificial Sequence
  Synthetic
ggaauaaaacacaaugguua

SEQ ID NO: 510231 - RNA, 21 nt, Artificial Sequence
  Synthetic
aggaauaaaacacaaugguua

SEQ ID NO: 510232 - RNA, 22 nt, Artificial Sequence
  Synthetic
gaggaauaaaacacaaugguua

SEQ ID NO: 510233 - RNA, 23 nt, Artificial Sequence
  Synthetic
cgaggaauaaaacacaaugguua

SEQ ID NO: 510234 - RNA, 24 nt, Artificial Sequence
  Synthetic
gcgaggaauaaaacacaaugguua

SEQ ID NO: 510235 - RNA, 18 nt, Artificial Sequence
  Synthetic
caucacuaucaaugguua

SEQ ID NO: 510236 - RNA, 19 nt, Artificial Sequence
  Synthetic
ucaucacuaucaaugguua

SEQ ID NO: 510237 - RNA, 20 nt, Artificial Sequence
  Synthetic
gucaucacuaucaaugguua

SEQ ID NO: 510238 - RNA, 21 nt, Artificial Sequence
  Synthetic
ugucaucacuaucaaugguua

SEQ ID NO: 510239 - RNA, 22 nt, Artificial Sequence
  Synthetic
cugucaucacuaucaaugguua

SEQ ID NO: 510240 - RNA, 23 nt, Artificial Sequence
  Synthetic
acugucaucacuaucaaugguua

SEQ ID NO: 510241 - RNA, 24 nt, Artificial Sequence
  Synthetic
gacugucaucacuaucaaugguua

SEQ ID NO: 510242 - RNA, 18 nt, Artificial Sequence
  Synthetic
uuuaucaacaacugguua

SEQ ID NO: 510243 - RNA, 19 nt, Artificial Sequence
  Synthetic
auuuaucaacaacugguua

SEQ ID NO: 510244 - RNA, 20 nt, Artificial Sequence
  Synthetic
cauuuaucaacaacugguua

SEQ ID NO: 510245 - RNA, 21 nt, Artificial Sequence
  Synthetic
gcauuuaucaacaacugguua

SEQ ID NO: 510246 - RNA, 22 nt, Artificial Sequence
  Synthetic
ugcauuuaucaacaacugguua

SEQ ID NO: 510247 - RNA, 23 nt, Artificial Sequence
  Synthetic
cugcauuuaucaacaacugguua

SEQ ID NO: 510248 - RNA, 24 nt, Artificial Sequence
  Synthetic
acugcauuuaucaacaacugguua

SEQ ID NO: 510249 - RNA, 18 nt, Artificial Sequence
  Synthetic
agggacagacccugguua

SEQ ID NO: 510250 - RNA, 19 nt, Artificial Sequence
  Synthetic
gagggacagacccugguua

SEQ ID NO: 510251 - RNA, 20 nt, Artificial Sequence
  Synthetic
ugagggacagacccugguua

SEQ ID NO: 510252 - RNA, 21 nt, Artificial Sequence
  Synthetic
cugagggacagacccugguua

SEQ ID NO: 510253 - RNA, 22 nt, Artificial Sequence
  Synthetic
gcugagggacagacccugguua

SEQ ID NO: 510254 - RNA, 23 nt, Artificial Sequence
  Synthetic
ugcugagggacagacccugguua

SEQ ID NO: 510255 - RNA, 24 nt, Artificial Sequence
  Synthetic
augcugagggacagacccugguua

SEQ ID NO: 510256 - RNA, 18 nt, Artificial Sequence
  Synthetic
auuaagugauccugguua

SEQ ID NO: 510257 - RNA, 19 nt, Artificial Sequence
  Synthetic
uauuaagugauccugguua

SEQ ID NO: 510258 - RNA, 20 nt, Artificial Sequence
  Synthetic
uuauuaagugauccugguua

SEQ ID NO: 510259 - RNA, 21 nt, Artificial Sequence
  Synthetic
cuuauuaagugauccugguua

SEQ ID NO: 510260 - RNA, 22 nt, Artificial Sequence
  Synthetic
ucuuauuaagugauccugguua

SEQ ID NO: 510261 - RNA, 23 nt, Artificial Sequence
  Synthetic
uucuuauuaagugauccugguua

SEQ ID NO: 510262 - RNA, 24 nt, Artificial Sequence
  Synthetic
uuucuuauuaagugauccugguua

SEQ ID NO: 510263 - RNA, 18 nt, Artificial Sequence
  Synthetic
uaaucuaagugcugguua

SEQ ID NO: 510264 - RNA, 19 nt, Artificial Sequence
  Synthetic
uuaaucuaagugcugguua

SEQ ID NO: 510265 - RNA, 20 nt, Artificial Sequence
  Synthetic
uuuaaucuaagugcugguua

SEQ ID NO: 510266 - RNA, 21 nt, Artificial Sequence
  Synthetic
uuuuaaucuaagugcugguua

SEQ ID NO: 510267 - RNA, 22 nt, Artificial Sequence
  Synthetic
uuuuuaaucuaagugcugguua

SEQ ID NO: 510268 - RNA, 23 nt, Artificial Sequence
  Synthetic
guuuuuaaucuaagugcugguua

SEQ ID NO: 510269 - RNA, 24 nt, Artificial Sequence
  Synthetic
uguuuuuaaucuaagugcugguua

SEQ ID NO: 510270 - RNA, 18 nt, Artificial Sequence
  Synthetic
uaaaucagaaucugguua

SEQ ID NO: 510271 - RNA, 19 nt, Artificial Sequence
  Synthetic
guaaaucagaaucugguua

SEQ ID NO: 510272 - RNA, 20 nt, Artificial Sequence
  Synthetic
uguaaaucagaaucugguua

SEQ ID NO: 510273 - RNA, 21 nt, Artificial Sequence
  Synthetic
cuguaaaucagaaucugguua

SEQ ID NO: 510274 - RNA, 22 nt, Artificial Sequence
  Synthetic
ucuguaaaucagaaucugguua

SEQ ID NO: 510275 - RNA, 23 nt, Artificial Sequence
  Synthetic
uucuguaaaucagaaucugguua

SEQ ID NO: 510276 - RNA, 24 nt, Artificial Sequence
  Synthetic
auucuguaaaucagaaucugguua

SEQ ID NO: 510277 - RNA, 18 nt, Artificial Sequence
  Synthetic
gagucuccaaggugguua

SEQ ID NO: 510278 - RNA, 19 nt, Artificial Sequence
  Synthetic
ugagucuccaaggugguua

SEQ ID NO: 510279 - RNA, 20 nt, Artificial Sequence
  Synthetic
cugagucuccaaggugguua

SEQ ID NO: 510280 - RNA, 21 nt, Artificial Sequence
  Synthetic
acugagucuccaaggugguua

SEQ ID NO: 510281 - RNA, 22 nt, Artificial Sequence
  Synthetic
uacugagucuccaaggugguua

SEQ ID NO: 510282 - RNA, 23 nt, Artificial Sequence
  Synthetic
auacugagucuccaaggugguua

SEQ ID NO: 510283 - RNA, 24 nt, Artificial Sequence
  Synthetic
uauacugagucuccaaggugguua

SEQ ID NO: 510284 - RNA, 18 nt, Artificial Sequence
  Synthetic
gagaguccuuugugguua

SEQ ID NO: 510285 - RNA, 19 nt, Artificial Sequence
  Synthetic
agagaguccuuugugguua

SEQ ID NO: 510286 - RNA, 20 nt, Artificial Sequence
  Synthetic
gagagaguccuuugugguua

SEQ ID NO: 510287 - RNA, 21 nt, Artificial Sequence
  Synthetic
ugagagaguccuuugugguua

SEQ ID NO: 510288 - RNA, 22 nt, Artificial Sequence
  Synthetic
gugagagaguccuuugugguua

SEQ ID NO: 510289 - RNA, 23 nt, Artificial Sequence
  Synthetic
agugagagaguccuuugugguua

SEQ ID NO: 510290 - RNA, 24 nt, Artificial Sequence
  Synthetic
aagugagagaguccuuugugguua

SEQ ID NO: 510291 - RNA, 18 nt, Artificial Sequence
  Synthetic
aaauauaucccuugguua

SEQ ID NO: 510292 - RNA, 19 nt, Artificial Sequence
  Synthetic
gaaauauaucccuugguua

SEQ ID NO: 510293 - RNA, 20 nt, Artificial Sequence
  Synthetic
ugaaauauaucccuugguua

SEQ ID NO: 510294 - RNA, 21 nt, Artificial Sequence
  Synthetic
cugaaauauaucccuugguua

SEQ ID NO: 510295 - RNA, 22 nt, Artificial Sequence
  Synthetic
gcugaaauauaucccuugguua

SEQ ID NO: 510296 - RNA, 23 nt, Artificial Sequence
  Synthetic
agcugaaauauaucccuugguua

SEQ ID NO: 510297 - RNA, 24 nt, Artificial Sequence
  Synthetic
aagcugaaauauaucccuugguua

SEQ ID NO: 510298 - RNA, 18 nt, Artificial Sequence
  Synthetic
auuuugauaguuugguua

SEQ ID NO: 510299 - RNA, 19 nt, Artificial Sequence
  Synthetic
aauuuugauaguuugguua

SEQ ID NO: 510300 - RNA, 20 nt, Artificial Sequence
  Synthetic
uaauuuugauaguuugguua

SEQ ID NO: 510301 - RNA, 21 nt, Artificial Sequence
  Synthetic
auaauuuugauaguuugguua

SEQ ID NO: 510302 - RNA, 22 nt, Artificial Sequence
  Synthetic
uauaauuuugauaguuugguua

SEQ ID NO: 510303 - RNA, 23 nt, Artificial Sequence
  Synthetic
auauaauuuugauaguuugguua

SEQ ID NO: 510304 - RNA, 24 nt, Artificial Sequence
  Synthetic
cauauaauuuugauaguuugguua

SEQ ID NO: 510305 - RNA, 18 nt, Artificial Sequence
  Synthetic
accauacuguuuugguua

SEQ ID NO: 510306 - RNA, 19 nt, Artificial Sequence
  Synthetic
uaccauacuguuuugguua

SEQ ID NO: 510307 - RNA, 20 nt, Artificial Sequence
  Synthetic
auaccauacuguuuugguua

SEQ ID NO: 510308 - RNA, 21 nt, Artificial Sequence
  Synthetic
aauaccauacuguuuugguua

SEQ ID NO: 510309 - RNA, 22 nt, Artificial Sequence
  Synthetic
caauaccauacuguuuugguua

SEQ ID NO: 510310 - RNA, 23 nt, Artificial Sequence
  Synthetic
ccaauaccauacuguuuugguua

SEQ ID NO: 510311 - RNA, 24 nt, Artificial Sequence
  Synthetic
accaauaccauacuguuuugguua

SEQ ID NO: 510312 - RNA, 18 nt, Artificial Sequence
  Synthetic
ucuuaaauccaaauguua

SEQ ID NO: 510313 - RNA, 19 nt, Artificial Sequence
  Synthetic
cucuuaaauccaaauguua

SEQ ID NO: 510314 - RNA, 20 nt, Artificial Sequence
  Synthetic
gcucuuaaauccaaauguua

SEQ ID NO: 510315 - RNA, 21 nt, Artificial Sequence
  Synthetic
ggcucuuaaauccaaauguua

SEQ ID NO: 510316 - RNA, 22 nt, Artificial Sequence
  Synthetic
aggcucuuaaauccaaauguua

SEQ ID NO: 510317 - RNA, 23 nt, Artificial Sequence
  Synthetic
aaggcucuuaaauccaaauguua

SEQ ID NO: 510318 - RNA, 24 nt, Artificial Sequence
  Synthetic
caaggcucuuaaauccaaauguua

SEQ ID NO: 510319 - RNA, 18 nt, Artificial Sequence
  Synthetic
ucuugcacugcaauguua

SEQ ID NO: 510320 - RNA, 19 nt, Artificial Sequence
  Synthetic
uucuugcacugcaauguua

SEQ ID NO: 510321 - RNA, 20 nt, Artificial Sequence
  Synthetic
guucuugcacugcaauguua

SEQ ID NO: 510322 - RNA, 21 nt, Artificial Sequence
  Synthetic
aguucuugcacugcaauguua

SEQ ID NO: 510323 - RNA, 22 nt, Artificial Sequence
  Synthetic
aaguucuugcacugcaauguua

SEQ ID NO: 510324 - RNA, 23 nt, Artificial Sequence
  Synthetic
aaaguucuugcacugcaauguua

SEQ ID NO: 510325 - RNA, 24 nt, Artificial Sequence
  Synthetic
uaaaguucuugcacugcaauguua

SEQ ID NO: 510326 - RNA, 18 nt, Artificial Sequence
  Synthetic
agcuuugacagaauguua

SEQ ID NO: 510327 - RNA, 19 nt, Artificial Sequence
  Synthetic
gagcuuugacagaauguua

SEQ ID NO: 510328 - RNA, 20 nt, Artificial Sequence
  Synthetic
ggagcuuugacagaauguua

SEQ ID NO: 510329 - RNA, 21 nt, Artificial Sequence
  Synthetic
aggagcuuugacagaauguua

SEQ ID NO: 510330 - RNA, 22 nt, Artificial Sequence
  Synthetic
caggagcuuugacagaauguua

SEQ ID NO: 510331 - RNA, 23 nt, Artificial Sequence
  Synthetic
ucaggagcuuugacagaauguua

SEQ ID NO: 510332 - RNA, 24 nt, Artificial Sequence
  Synthetic
gucaggagcuuugacagaauguua

SEQ ID NO: 510333 - RNA, 18 nt, Artificial Sequence
  Synthetic
augauuuccugaauguua

SEQ ID NO: 510334 - RNA, 19 nt, Artificial Sequence
  Synthetic
caugauuuccugaauguua

SEQ ID NO: 510335 - RNA, 20 nt, Artificial Sequence
  Synthetic
acaugauuuccugaauguua

SEQ ID NO: 510336 - RNA, 21 nt, Artificial Sequence
  Synthetic
gacaugauuuccugaauguua

SEQ ID NO: 510337 - RNA, 22 nt, Artificial Sequence
  Synthetic
ugacaugauuuccugaauguua

SEQ ID NO: 510338 - RNA, 23 nt, Artificial Sequence
  Synthetic
uugacaugauuuccugaauguua

SEQ ID NO: 510339 - RNA, 24 nt, Artificial Sequence
  Synthetic
cuugacaugauuuccugaauguua

SEQ ID NO: 510340 - RNA, 18 nt, Artificial Sequence
  Synthetic
cauaaguuuugaauguua

SEQ ID NO: 510341 - RNA, 19 nt, Artificial Sequence
  Synthetic
ucauaaguuuugaauguua

SEQ ID NO: 510342 - RNA, 20 nt, Artificial Sequence
  Synthetic
uucauaaguuuugaauguua

SEQ ID NO: 510343 - RNA, 21 nt, Artificial Sequence
  Synthetic
auucauaaguuuugaauguua

SEQ ID NO: 510344 - RNA, 22 nt, Artificial Sequence
  Synthetic
uauucauaaguuuugaauguua

SEQ ID NO: 510345 - RNA, 23 nt, Artificial Sequence
  Synthetic
guauucauaaguuuugaauguua

SEQ ID NO: 510346 - RNA, 24 nt, Artificial Sequence
  Synthetic
gguauucauaaguuuugaauguua

SEQ ID NO: 510347 - RNA, 18 nt, Artificial Sequence
  Synthetic
uagcauuuaauaauguua

SEQ ID NO: 510348 - RNA, 19 nt, Artificial Sequence
  Synthetic
auagcauuuaauaauguua

SEQ ID NO: 510349 - RNA, 20 nt, Artificial Sequence
  Synthetic
cauagcauuuaauaauguua

SEQ ID NO: 510350 - RNA, 21 nt, Artificial Sequence
  Synthetic
ucauagcauuuaauaauguua

SEQ ID NO: 510351 - RNA, 22 nt, Artificial Sequence
  Synthetic
aucauagcauuuaauaauguua

SEQ ID NO: 510352 - RNA, 23 nt, Artificial Sequence
  Synthetic
uaucauagcauuuaauaauguua

SEQ ID NO: 510353 - RNA, 24 nt, Artificial Sequence
  Synthetic
auaucauagcauuuaauaauguua

SEQ ID NO: 510354 - RNA, 18 nt, Artificial Sequence
  Synthetic
auuuuauuuauaauguua

SEQ ID NO: 510355 - RNA, 19 nt, Artificial Sequence
  Synthetic
uauuuuauuuauaauguua

SEQ ID NO: 510356 - RNA, 20 nt, Artificial Sequence
  Synthetic
auauuuuauuuauaauguua

SEQ ID NO: 510357 - RNA, 21 nt, Artificial Sequence
  Synthetic
aauauuuuauuuauaauguua

SEQ ID NO: 510358 - RNA, 22 nt, Artificial Sequence
  Synthetic
aaauauuuuauuuauaauguua

SEQ ID NO: 510359 - RNA, 23 nt, Artificial Sequence
  Synthetic
aaaauauuuuauuuauaauguua

SEQ ID NO: 510360 - RNA, 24 nt, Artificial Sequence
  Synthetic
aaaaauauuuuauuuauaauguua

SEQ ID NO: 510361 - RNA, 18 nt, Artificial Sequence
  Synthetic
caguuaauaaucauguua

SEQ ID NO: 510362 - RNA, 19 nt, Artificial Sequence
  Synthetic
acaguuaauaaucauguua

SEQ ID NO: 510363 - RNA, 20 nt, Artificial Sequence
  Synthetic
uacaguuaauaaucauguua

SEQ ID NO: 510364 - RNA, 21 nt, Artificial Sequence
  Synthetic
uuacaguuaauaaucauguua

SEQ ID NO: 510365 - RNA, 22 nt, Artificial Sequence
  Synthetic
guuacaguuaauaaucauguua

SEQ ID NO: 510366 - RNA, 23 nt, Artificial Sequence
  Synthetic
aguuacaguuaauaaucauguua

SEQ ID NO: 510367 - RNA, 24 nt, Artificial Sequence
  Synthetic
aaguuacaguuaauaaucauguua

SEQ ID NO: 510368 - RNA, 18 nt, Artificial Sequence
  Synthetic
uaaggaaaguucauguua

SEQ ID NO: 510369 - RNA, 19 nt, Artificial Sequence
  Synthetic
auaaggaaaguucauguua

SEQ ID NO: 510370 - RNA, 20 nt, Artificial Sequence
  Synthetic
cauaaggaaaguucauguua

SEQ ID NO: 510371 - RNA, 21 nt, Artificial Sequence
  Synthetic
gcauaaggaaaguucauguua

SEQ ID NO: 510372 - RNA, 22 nt, Artificial Sequence
  Synthetic
agcauaaggaaaguucauguua

SEQ ID NO: 510373 - RNA, 23 nt, Artificial Sequence
  Synthetic
aagcauaaggaaaguucauguua

SEQ ID NO: 510374 - RNA, 24 nt, Artificial Sequence
  Synthetic
aaagcauaaggaaaguucauguua

SEQ ID NO: 510375 - RNA, 18 nt, Artificial Sequence
  Synthetic
gagaauacugagauguua

SEQ ID NO: 510376 - RNA, 19 nt, Artificial Sequence
  Synthetic
agagaauacugagauguua

SEQ ID NO: 510377 - RNA, 20 nt, Artificial Sequence
  Synthetic
cagagaauacugagauguua

SEQ ID NO: 510378 - RNA, 21 nt, Artificial Sequence
  Synthetic
acagagaauacugagauguua

SEQ ID NO: 510379 - RNA, 22 nt, Artificial Sequence
  Synthetic
aacagagaauacugagauguua

SEQ ID NO: 510380 - RNA, 23 nt, Artificial Sequence
  Synthetic
gaacagagaauacugagauguua

SEQ ID NO: 510381 - RNA, 24 nt, Artificial Sequence
  Synthetic
agaacagagaauacugagauguua

SEQ ID NO: 510382 - RNA, 18 nt, Artificial Sequence
  Synthetic
ggucugaugcugauguua

SEQ ID NO: 510383 - RNA, 19 nt, Artificial Sequence
  Synthetic
aggucugaugcugauguua

SEQ ID NO: 510384 - RNA, 20 nt, Artificial Sequence
  Synthetic
gaggucugaugcugauguua

SEQ ID NO: 510385 - RNA, 21 nt, Artificial Sequence
  Synthetic
agaggucugaugcugauguua

SEQ ID NO: 510386 - RNA, 22 nt, Artificial Sequence
  Synthetic
cagaggucugaugcugauguua

SEQ ID NO: 510387 - RNA, 23 nt, Artificial Sequence
  Synthetic
gcagaggucugaugcugauguua

SEQ ID NO: 510388 - RNA, 24 nt, Artificial Sequence
  Synthetic
ugcagaggucugaugcugauguua

SEQ ID NO: 510389 - RNA, 18 nt, Artificial Sequence
  Synthetic
uauugcgguacuauguua

SEQ ID NO: 510390 - RNA, 19 nt, Artificial Sequence
  Synthetic
uuauugcgguacuauguua

SEQ ID NO: 510391 - RNA, 20 nt, Artificial Sequence
  Synthetic
guuauugcgguacuauguua

SEQ ID NO: 510392 - RNA, 21 nt, Artificial Sequence
  Synthetic
aguuauugcgguacuauguua

SEQ ID NO: 510393 - RNA, 22 nt, Artificial Sequence
  Synthetic
gaguuauugcgguacuauguua

SEQ ID NO: 510394 - RNA, 23 nt, Artificial Sequence
  Synthetic
agaguuauugcgguacuauguua

SEQ ID NO: 510395 - RNA, 24 nt, Artificial Sequence
  Synthetic
cagaguuauugcgguacuauguua

SEQ ID NO: 510396 - RNA, 18 nt, Artificial Sequence
  Synthetic
acaaacaacgcuauguua

SEQ ID NO: 510397 - RNA, 19 nt, Artificial Sequence
  Synthetic
gacaaacaacgcuauguua

SEQ ID NO: 510398 - RNA, 20 nt, Artificial Sequence
  Synthetic
ugacaaacaacgcuauguua

SEQ ID NO: 510399 - RNA, 21 nt, Artificial Sequence
  Synthetic
augacaaacaacgcuauguua

SEQ ID NO: 510400 - RNA, 22 nt, Artificial Sequence
  Synthetic
gaugacaaacaacgcuauguua

SEQ ID NO: 510401 - RNA, 23 nt, Artificial Sequence
  Synthetic
ugaugacaaacaacgcuauguua

SEQ ID NO: 510402 - RNA, 24 nt, Artificial Sequence
  Synthetic
gugaugacaaacaacgcuauguua

SEQ ID NO: 510403 - RNA, 18 nt, Artificial Sequence
  Synthetic
agauaugccauuauguua

SEQ ID NO: 510404 - RNA, 19 nt, Artificial Sequence
  Synthetic
cagauaugccauuauguua

SEQ ID NO: 510405 - RNA, 20 nt, Artificial Sequence
  Synthetic
ucagauaugccauuauguua

SEQ ID NO: 510406 - RNA, 21 nt, Artificial Sequence
  Synthetic
uucagauaugccauuauguua

SEQ ID NO: 510407 - RNA, 22 nt, Artificial Sequence
  Synthetic
uuucagauaugccauuauguua

SEQ ID NO: 510408 - RNA, 23 nt, Artificial Sequence
  Synthetic
auuucagauaugccauuauguua

SEQ ID NO: 510409 - RNA, 24 nt, Artificial Sequence
  Synthetic
aauuucagauaugccauuauguua

SEQ ID NO: 510410 - RNA, 18 nt, Artificial Sequence
  Synthetic
ccuugcacuuuuauguua

SEQ ID NO: 510411 - RNA, 19 nt, Artificial Sequence
  Synthetic
gccuugcacuuuuauguua

SEQ ID NO: 510412 - RNA, 20 nt, Artificial Sequence
  Synthetic
ugccuugcacuuuuauguua

SEQ ID NO: 510413 - RNA, 21 nt, Artificial Sequence
  Synthetic
cugccuugcacuuuuauguua

SEQ ID NO: 510414 - RNA, 22 nt, Artificial Sequence
  Synthetic
ucugccuugcacuuuuauguua

SEQ ID NO: 510415 - RNA, 23 nt, Artificial Sequence
  Synthetic
cucugccuugcacuuuuauguua

SEQ ID NO: 510416 - RNA, 24 nt, Artificial Sequence
  Synthetic
gcucugccuugcacuuuuauguua

SEQ ID NO: 510417 - RNA, 18 nt, Artificial Sequence
  Synthetic
uccaguggauaacuguua

SEQ ID NO: 510418 - RNA, 19 nt, Artificial Sequence
  Synthetic
uuccaguggauaacuguua

SEQ ID NO: 510419 - RNA, 20 nt, Artificial Sequence
  Synthetic
auuccaguggauaacuguua

SEQ ID NO: 510420 - RNA, 21 nt, Artificial Sequence
  Synthetic
uauuccaguggauaacuguua

SEQ ID NO: 510421 - RNA, 22 nt, Artificial Sequence
  Synthetic
uuauuccaguggauaacuguua

SEQ ID NO: 510422 - RNA, 23 nt, Artificial Sequence
  Synthetic
guuauuccaguggauaacuguua

SEQ ID NO: 510423 - RNA, 24 nt, Artificial Sequence
  Synthetic
uguuauuccaguggauaacuguua

SEQ ID NO: 510424 - RNA, 18 nt, Artificial Sequence
  Synthetic
gaacacuuuacacuguua

SEQ ID NO: 510425 - RNA, 19 nt, Artificial Sequence
  Synthetic
ggaacacuuuacacuguua

SEQ ID NO: 510426 - RNA, 20 nt, Artificial Sequence
  Synthetic
aggaacacuuuacacuguua

SEQ ID NO: 510427 - RNA, 21 nt, Artificial Sequence
  Synthetic
uaggaacacuuuacacuguua

SEQ ID NO: 510428 - RNA, 22 nt, Artificial Sequence
  Synthetic
auaggaacacuuuacacuguua

SEQ ID NO: 510429 - RNA, 23 nt, Artificial Sequence
  Synthetic
aauaggaacacuuuacacuguua

SEQ ID NO: 510430 - RNA, 24 nt, Artificial Sequence
  Synthetic
aaauaggaacacuuuacacuguua

SEQ ID NO: 510431 - RNA, 18 nt, Artificial Sequence
  Synthetic
uuugaaacaucacuguua

SEQ ID NO: 510432 - RNA, 19 nt, Artificial Sequence
  Synthetic
cuuugaaacaucacuguua

SEQ ID NO: 510433 - RNA, 20 nt, Artificial Sequence
  Synthetic
ccuuugaaacaucacuguua

SEQ ID NO: 510434 - RNA, 21 nt, Artificial Sequence
  Synthetic
accuuugaaacaucacuguua

SEQ ID NO: 510435 - RNA, 22 nt, Artificial Sequence
  Synthetic
gaccuuugaaacaucacuguua

SEQ ID NO: 510436 - RNA, 23 nt, Artificial Sequence
  Synthetic
ugaccuuugaaacaucacuguua

SEQ ID NO: 510437 - RNA, 24 nt, Artificial Sequence
  Synthetic
gugaccuuugaaacaucacuguua

SEQ ID NO: 510438 - RNA, 18 nt, Artificial Sequence
  Synthetic
acaaagaacagacuguua

SEQ ID NO: 510439 - RNA, 19 nt, Artificial Sequence
  Synthetic
aacaaagaacagacuguua

SEQ ID NO: 510440 - RNA, 20 nt, Artificial Sequence
  Synthetic
aaacaaagaacagacuguua

SEQ ID NO: 510441 - RNA, 21 nt, Artificial Sequence
  Synthetic
uaaacaaagaacagacuguua

SEQ ID NO: 510442 - RNA, 22 nt, Artificial Sequence
  Synthetic
guaaacaaagaacagacuguua

SEQ ID NO: 510443 - RNA, 23 nt, Artificial Sequence
  Synthetic
aguaaacaaagaacagacuguua

SEQ ID NO: 510444 - RNA, 24 nt, Artificial Sequence
  Synthetic
caguaaacaaagaacagacuguua

SEQ ID NO: 510445 - RNA, 18 nt, Artificial Sequence
  Synthetic
ugacuguguugacuguua

SEQ ID NO: 510446 - RNA, 19 nt, Artificial Sequence
  Synthetic
uugacuguguugacuguua

SEQ ID NO: 510447 - RNA, 20 nt, Artificial Sequence
  Synthetic
guugacuguguugacuguua

SEQ ID NO: 510448 - RNA, 21 nt, Artificial Sequence
  Synthetic
uguugacuguguugacuguua

SEQ ID NO: 510449 - RNA, 22 nt, Artificial Sequence
  Synthetic
cuguugacuguguugacuguua

SEQ ID NO: 510450 - RNA, 23 nt, Artificial Sequence
  Synthetic
acuguugacuguguugacuguua

SEQ ID NO: 510451 - RNA, 24 nt, Artificial Sequence
  Synthetic
uacuguugacuguguugacuguua

SEQ ID NO: 510452 - RNA, 18 nt, Artificial Sequence
  Synthetic
auuacagagaaccuguua

SEQ ID NO: 510453 - RNA, 19 nt, Artificial Sequence
  Synthetic
uauuacagagaaccuguua

SEQ ID NO: 510454 - RNA, 20 nt, Artificial Sequence
  Synthetic
auauuacagagaaccuguua

SEQ ID NO: 510455 - RNA, 21 nt, Artificial Sequence
  Synthetic
uauauuacagagaaccuguua

SEQ ID NO: 510456 - RNA, 22 nt, Artificial Sequence
  Synthetic
guauauuacagagaaccuguua

SEQ ID NO: 510457 - RNA, 23 nt, Artificial Sequence
  Synthetic
uguauauuacagagaaccuguua

SEQ ID NO: 510458 - RNA, 24 nt, Artificial Sequence
  Synthetic
auguauauuacagagaaccuguua

SEQ ID NO: 510459 - RNA, 18 nt, Artificial Sequence
  Synthetic
gccaccuaaguccuguua

SEQ ID NO: 510460 - RNA, 19 nt, Artificial Sequence
  Synthetic
ggccaccuaaguccuguua

SEQ ID NO: 510461 - RNA, 20 nt, Artificial Sequence
  Synthetic
gggccaccuaaguccuguua

SEQ ID NO: 510462 - RNA, 21 nt, Artificial Sequence
  Synthetic
ugggccaccuaaguccuguua

SEQ ID NO: 510463 - RNA, 22 nt, Artificial Sequence
  Synthetic
cugggccaccuaaguccuguua

SEQ ID NO: 510464 - RNA, 23 nt, Artificial Sequence
  Synthetic
ucugggccaccuaaguccuguua

SEQ ID NO: 510465 - RNA, 24 nt, Artificial Sequence
  Synthetic
cucugggccaccuaaguccuguua

SEQ ID NO: 510466 - RNA, 18 nt, Artificial Sequence
  Synthetic
aaucacuuuaagcuguua

SEQ ID NO: 510467 - RNA, 19 nt, Artificial Sequence
  Synthetic
gaaucacuuuaagcuguua

SEQ ID NO: 510468 - RNA, 20 nt, Artificial Sequence
  Synthetic
ugaaucacuuuaagcuguua

SEQ ID NO: 510469 - RNA, 21 nt, Artificial Sequence
  Synthetic
augaaucacuuuaagcuguua

SEQ ID NO: 510470 - RNA, 22 nt, Artificial Sequence
  Synthetic
aaugaaucacuuuaagcuguua

SEQ ID NO: 510471 - RNA, 23 nt, Artificial Sequence
  Synthetic
aaaugaaucacuuuaagcuguua

SEQ ID NO: 510472 - RNA, 24 nt, Artificial Sequence
  Synthetic
gaaaugaaucacuuuaagcuguua

SEQ ID NO: 510473 - RNA, 18 nt, Artificial Sequence
  Synthetic
uuaacacuaaggcuguua

SEQ ID NO: 510474 - RNA, 19 nt, Artificial Sequence
  Synthetic
cuuaacacuaaggcuguua

SEQ ID NO: 510475 - RNA, 20 nt, Artificial Sequence
  Synthetic
gcuuaacacuaaggcuguua

SEQ ID NO: 510476 - RNA, 21 nt, Artificial Sequence
  Synthetic
ugcuuaacacuaaggcuguua

SEQ ID NO: 510477 - RNA, 22 nt, Artificial Sequence
  Synthetic
cugcuuaacacuaaggcuguua

SEQ ID NO: 510478 - RNA, 23 nt, Artificial Sequence
  Synthetic
ccugcuuaacacuaaggcuguua

SEQ ID NO: 510479 - RNA, 24 nt, Artificial Sequence
  Synthetic
gccugcuuaacacuaaggcuguua

SEQ ID NO: 510480 - RNA, 18 nt, Artificial Sequence
  Synthetic
cagagaaaucaucuguua

SEQ ID NO: 510481 - RNA, 19 nt, Artificial Sequence
  Synthetic
gcagagaaaucaucuguua

SEQ ID NO: 510482 - RNA, 20 nt, Artificial Sequence
  Synthetic
agcagagaaaucaucuguua

SEQ ID NO: 510483 - RNA, 21 nt, Artificial Sequence
  Synthetic
uagcagagaaaucaucuguua

SEQ ID NO: 510484 - RNA, 22 nt, Artificial Sequence
  Synthetic
uuagcagagaaaucaucuguua

SEQ ID NO: 510485 - RNA, 23 nt, Artificial Sequence
  Synthetic
uuuagcagagaaaucaucuguua

SEQ ID NO: 510486 - RNA, 24 nt, Artificial Sequence
  Synthetic
uuuuagcagagaaaucaucuguua

SEQ ID NO: 510487 - RNA, 18 nt, Artificial Sequence
  Synthetic
auaugggucuaucuguua

SEQ ID NO: 510488 - RNA, 19 nt, Artificial Sequence
  Synthetic
uauaugggucuaucuguua

SEQ ID NO: 510489 - RNA, 20 nt, Artificial Sequence
  Synthetic
cuauaugggucuaucuguua

SEQ ID NO: 510490 - RNA, 21 nt, Artificial Sequence
  Synthetic
gcuauaugggucuaucuguua

SEQ ID NO: 510491 - RNA, 22 nt, Artificial Sequence
  Synthetic
ggcuauaugggucuaucuguua

SEQ ID NO: 510492 - RNA, 23 nt, Artificial Sequence
  Synthetic
aggcuauaugggucuaucuguua

SEQ ID NO: 510493 - RNA, 24 nt, Artificial Sequence
  Synthetic
aaggcuauaugggucuaucuguua

SEQ ID NO: 510494 - RNA, 18 nt, Artificial Sequence
  Synthetic
gugauacaguaaguguua

SEQ ID NO: 510495 - RNA, 19 nt, Artificial Sequence
  Synthetic
ugugauacaguaaguguua

SEQ ID NO: 510496 - RNA, 20 nt, Artificial Sequence
  Synthetic
uugugauacaguaaguguua

SEQ ID NO: 510497 - RNA, 21 nt, Artificial Sequence
  Synthetic
auugugauacaguaaguguua

SEQ ID NO: 510498 - RNA, 22 nt, Artificial Sequence
  Synthetic
gauugugauacaguaaguguua

SEQ ID NO: 510499 - RNA, 23 nt, Artificial Sequence
  Synthetic
agauugugauacaguaaguguua

SEQ ID NO: 510500 - RNA, 24 nt, Artificial Sequence
  Synthetic
uagauugugauacaguaaguguua

SEQ ID NO: 510501 - RNA, 18 nt, Artificial Sequence
  Synthetic
aauuaagcacuaguguua

SEQ ID NO: 510502 - RNA, 19 nt, Artificial Sequence
  Synthetic
aaauuaagcacuaguguua

SEQ ID NO: 510503 - RNA, 20 nt, Artificial Sequence
  Synthetic
aaaauuaagcacuaguguua

SEQ ID NO: 510504 - RNA, 21 nt, Artificial Sequence
  Synthetic
caaaauuaagcacuaguguua

SEQ ID NO: 510505 - RNA, 22 nt, Artificial Sequence
  Synthetic
gcaaaauuaagcacuaguguua

SEQ ID NO: 510506 - RNA, 23 nt, Artificial Sequence
  Synthetic
ggcaaaauuaagcacuaguguua

SEQ ID NO: 510507 - RNA, 24 nt, Artificial Sequence
  Synthetic
uggcaaaauuaagcacuaguguua

SEQ ID NO: 510508 - RNA, 18 nt, Artificial Sequence
  Synthetic
uuauaguggcuaguguua

SEQ ID NO: 510509 - RNA, 19 nt, Artificial Sequence
  Synthetic
guuauaguggcuaguguua

SEQ ID NO: 510510 - RNA, 20 nt, Artificial Sequence
  Synthetic
uguuauaguggcuaguguua

SEQ ID NO: 510511 - RNA, 21 nt, Artificial Sequence
  Synthetic
cuguuauaguggcuaguguua

SEQ ID NO: 510512 - RNA, 22 nt, Artificial Sequence
  Synthetic
ccuguuauaguggcuaguguua

SEQ ID NO: 510513 - RNA, 23 nt, Artificial Sequence
  Synthetic
accuguuauaguggcuaguguua

SEQ ID NO: 510514 - RNA, 24 nt, Artificial Sequence
  Synthetic
uaccuguuauaguggcuaguguua

SEQ ID NO: 510515 - RNA, 18 nt, Artificial Sequence
  Synthetic
guauucaacuucguguua

SEQ ID NO: 510516 - RNA, 19 nt, Artificial Sequence
  Synthetic
uguauucaacuucguguua

SEQ ID NO: 510517 - RNA, 20 nt, Artificial Sequence
  Synthetic
cuguauucaacuucguguua

SEQ ID NO: 510518 - RNA, 21 nt, Artificial Sequence
  Synthetic
ucuguauucaacuucguguua

SEQ ID NO: 510519 - RNA, 22 nt, Artificial Sequence
  Synthetic
aucuguauucaacuucguguua

SEQ ID NO: 510520 - RNA, 23 nt, Artificial Sequence
  Synthetic
caucuguauucaacuucguguua

SEQ ID NO: 510521 - RNA, 24 nt, Artificial Sequence
  Synthetic
ucaucuguauucaacuucguguua

SEQ ID NO: 510522 - RNA, 18 nt, Artificial Sequence
  Synthetic
agaaucauucagguguua

SEQ ID NO: 510523 - RNA, 19 nt, Artificial Sequence
  Synthetic
cagaaucauucagguguua

SEQ ID NO: 510524 - RNA, 20 nt, Artificial Sequence
  Synthetic
acagaaucauucagguguua

SEQ ID NO: 510525 - RNA, 21 nt, Artificial Sequence
  Synthetic
uacagaaucauucagguguua

SEQ ID NO: 510526 - RNA, 22 nt, Artificial Sequence
  Synthetic
guacagaaucauucagguguua

SEQ ID NO: 510527 - RNA, 23 nt, Artificial Sequence
  Synthetic
uguacagaaucauucagguguua

SEQ ID NO: 510528 - RNA, 24 nt, Artificial Sequence
  Synthetic
auguacagaaucauucagguguua

SEQ ID NO: 510529 - RNA, 18 nt, Artificial Sequence
  Synthetic
uagacagaauagguguua

SEQ ID NO: 510530 - RNA, 19 nt, Artificial Sequence
  Synthetic
guagacagaauagguguua

SEQ ID NO: 510531 - RNA, 20 nt, Artificial Sequence
  Synthetic
aguagacagaauagguguua

SEQ ID NO: 510532 - RNA, 21 nt, Artificial Sequence
  Synthetic
uaguagacagaauagguguua

SEQ ID NO: 510533 - RNA, 22 nt, Artificial Sequence
  Synthetic
auaguagacagaauagguguua

SEQ ID NO: 510534 - RNA, 23 nt, Artificial Sequence
  Synthetic
gauaguagacagaauagguguua

SEQ ID NO: 510535 - RNA, 24 nt, Artificial Sequence
  Synthetic
agauaguagacagaauagguguua

SEQ ID NO: 510536 - RNA, 18 nt, Artificial Sequence
  Synthetic
cuggggaagaggguguua

SEQ ID NO: 510537 - RNA, 19 nt, Artificial Sequence
  Synthetic
ccuggggaagaggguguua

SEQ ID NO: 510538 - RNA, 20 nt, Artificial Sequence
  Synthetic
accuggggaagaggguguua

SEQ ID NO: 510539 - RNA, 21 nt, Artificial Sequence
  Synthetic
aaccuggggaagaggguguua

SEQ ID NO: 510540 - RNA, 22 nt, Artificial Sequence
  Synthetic
aaaccuggggaagaggguguua

SEQ ID NO: 510541 - RNA, 23 nt, Artificial Sequence
  Synthetic
aaaaccuggggaagaggguguua

SEQ ID NO: 510542 - RNA, 24 nt, Artificial Sequence
  Synthetic
gaaaaccuggggaagaggguguua

SEQ ID NO: 510543 - RNA, 18 nt, Artificial Sequence
  Synthetic
uuaacugcguugguguua

SEQ ID NO: 510544 - RNA, 19 nt, Artificial Sequence
  Synthetic
uuuaacugcguugguguua

SEQ ID NO: 510545 - RNA, 20 nt, Artificial Sequence
  Synthetic
uuuuaacugcguugguguua

SEQ ID NO: 510546 - RNA, 21 nt, Artificial Sequence
  Synthetic
uuuuuaacugcguugguguua

SEQ ID NO: 510547 - RNA, 22 nt, Artificial Sequence
  Synthetic
uuuuuuaacugcguugguguua

SEQ ID NO: 510548 - RNA, 23 nt, Artificial Sequence
  Synthetic
uuuuuuuaacugcguugguguua

SEQ ID NO: 510549 - RNA, 24 nt, Artificial Sequence
  Synthetic
uuuuuuuuaacugcguugguguua

SEQ ID NO: 510550 - RNA, 18 nt, Artificial Sequence
  Synthetic
uugaauucccauguguua

SEQ ID NO: 510551 - RNA, 19 nt, Artificial Sequence
  Synthetic
guugaauucccauguguua

SEQ ID NO: 510552 - RNA, 20 nt, Artificial Sequence
  Synthetic
uguugaauucccauguguua

SEQ ID NO: 510553 - RNA, 21 nt, Artificial Sequence
  Synthetic
auguugaauucccauguguua

SEQ ID NO: 510554 - RNA, 22 nt, Artificial Sequence
  Synthetic
cauguugaauucccauguguua

SEQ ID NO: 510555 - RNA, 23 nt, Artificial Sequence
  Synthetic
ucauguugaauucccauguguua

SEQ ID NO: 510556 - RNA, 24 nt, Artificial Sequence
  Synthetic
cucauguugaauucccauguguua

SEQ ID NO: 510557 - RNA, 18 nt, Artificial Sequence
  Synthetic
uuagggcgaaguguguua

SEQ ID NO: 510558 - RNA, 19 nt, Artificial Sequence
  Synthetic
guuagggcgaaguguguua

SEQ ID NO: 510559 - RNA, 20 nt, Artificial Sequence
  Synthetic
gguuagggcgaaguguguua

SEQ ID NO: 510560 - RNA, 21 nt, Artificial Sequence
  Synthetic
agguuagggcgaaguguguua

SEQ ID NO: 510561 - RNA, 22 nt, Artificial Sequence
  Synthetic
aagguuagggcgaaguguguua

SEQ ID NO: 510562 - RNA, 23 nt, Artificial Sequence
  Synthetic
aaagguuagggcgaaguguguua

SEQ ID NO: 510563 - RNA, 24 nt, Artificial Sequence
  Synthetic
caaagguuagggcgaaguguguua

SEQ ID NO: 510564 - RNA, 18 nt, Artificial Sequence
  Synthetic
guucauuguuaauuguua

SEQ ID NO: 510565 - RNA, 19 nt, Artificial Sequence
  Synthetic
aguucauuguuaauuguua

SEQ ID NO: 510566 - RNA, 20 nt, Artificial Sequence
  Synthetic
aaguucauuguuaauuguua

SEQ ID NO: 510567 - RNA, 21 nt, Artificial Sequence
  Synthetic
uaaguucauuguuaauuguua

SEQ ID NO: 510568 - RNA, 22 nt, Artificial Sequence
  Synthetic
auaaguucauuguuaauuguua

SEQ ID NO: 510569 - RNA, 23 nt, Artificial Sequence
  Synthetic
aauaaguucauuguuaauuguua

SEQ ID NO: 510570 - RNA, 24 nt, Artificial Sequence
  Synthetic
aaauaaguucauuguuaauuguua

SEQ ID NO: 510571 - RNA, 18 nt, Artificial Sequence
  Synthetic
guuaccaucauauuguua

SEQ ID NO: 510572 - RNA, 19 nt, Artificial Sequence
  Synthetic
uguuaccaucauauuguua

SEQ ID NO: 510573 - RNA, 20 nt, Artificial Sequence
  Synthetic
cuguuaccaucauauuguua

SEQ ID NO: 510574 - RNA, 21 nt, Artificial Sequence
  Synthetic
acuguuaccaucauauuguua

SEQ ID NO: 510575 - RNA, 22 nt, Artificial Sequence
  Synthetic
cacuguuaccaucauauuguua

SEQ ID NO: 510576 - RNA, 23 nt, Artificial Sequence
  Synthetic
ccacuguuaccaucauauuguua

SEQ ID NO: 510577 - RNA, 24 nt, Artificial Sequence
  Synthetic
uccacuguuaccaucauauuguua

SEQ ID NO: 510578 - RNA, 18 nt, Artificial Sequence
  Synthetic
guguguguucauuuguua

SEQ ID NO: 510579 - RNA, 19 nt, Artificial Sequence
  Synthetic
uguguguguucauuuguua

SEQ ID NO: 510580 - RNA, 20 nt, Artificial Sequence
  Synthetic
auguguguguucauuuguua

SEQ ID NO: 510581 - RNA, 21 nt, Artificial Sequence
  Synthetic
aauguguguguucauuuguua

SEQ ID NO: 510582 - RNA, 22 nt, Artificial Sequence
  Synthetic
aaauguguguguucauuuguua

SEQ ID NO: 510583 - RNA, 23 nt, Artificial Sequence
  Synthetic
caaauguguguguucauuuguua

SEQ ID NO: 510584 - RNA, 24 nt, Artificial Sequence
  Synthetic
acaaauguguguguucauuuguua

SEQ ID NO: 510585 - RNA, 18 nt, Artificial Sequence
  Synthetic
aacaauggauauuuguua

SEQ ID NO: 510586 - RNA, 19 nt, Artificial Sequence
  Synthetic
uaacaauggauauuuguua

SEQ ID NO: 510587 - RNA, 20 nt, Artificial Sequence
  Synthetic
auaacaauggauauuuguua

SEQ ID NO: 510588 - RNA, 21 nt, Artificial Sequence
  Synthetic
uauaacaauggauauuuguua

SEQ ID NO: 510589 - RNA, 22 nt, Artificial Sequence
  Synthetic
uuauaacaauggauauuuguua

SEQ ID NO: 510590 - RNA, 23 nt, Artificial Sequence
  Synthetic
auuauaacaauggauauuuguua

SEQ ID NO: 510591 - RNA, 24 nt, Artificial Sequence
  Synthetic
uauuauaacaauggauauuuguua

SEQ ID NO: 510592 - RNA, 18 nt, Artificial Sequence
  Synthetic
aagacaaaguauuuguua

SEQ ID NO: 510593 - RNA, 19 nt, Artificial Sequence
  Synthetic
aaagacaaaguauuuguua

SEQ ID NO: 510594 - RNA, 20 nt, Artificial Sequence
  Synthetic
uaaagacaaaguauuuguua

SEQ ID NO: 510595 - RNA, 21 nt, Artificial Sequence
  Synthetic
uuaaagacaaaguauuuguua

SEQ ID NO: 510596 - RNA, 22 nt, Artificial Sequence
  Synthetic
cuuaaagacaaaguauuuguua

SEQ ID NO: 510597 - RNA, 23 nt, Artificial Sequence
  Synthetic
gcuuaaagacaaaguauuuguua

SEQ ID NO: 510598 - RNA, 24 nt, Artificial Sequence
  Synthetic
ugcuuaaagacaaaguauuuguua

SEQ ID NO: 510599 - RNA, 18 nt, Artificial Sequence
  Synthetic
caaugagccacuuuguua

SEQ ID NO: 510600 - RNA, 19 nt, Artificial Sequence
  Synthetic
acaaugagccacuuuguua

SEQ ID NO: 510601 - RNA, 20 nt, Artificial Sequence
  Synthetic
aacaaugagccacuuuguua

SEQ ID NO: 510602 - RNA, 21 nt, Artificial Sequence
  Synthetic
gaacaaugagccacuuuguua

SEQ ID NO: 510603 - RNA, 22 nt, Artificial Sequence
  Synthetic
agaacaaugagccacuuuguua

SEQ ID NO: 510604 - RNA, 23 nt, Artificial Sequence
  Synthetic
aagaacaaugagccacuuuguua

SEQ ID NO: 510605 - RNA, 24 nt, Artificial Sequence
  Synthetic
aaagaacaaugagccacuuuguua

SEQ ID NO: 510606 - RNA, 18 nt, Artificial Sequence
  Synthetic
acauacaauucuuuguua

SEQ ID NO: 510607 - RNA, 19 nt, Artificial Sequence
  Synthetic
cacauacaauucuuuguua

SEQ ID NO: 510608 - RNA, 20 nt, Artificial Sequence
  Synthetic
acacauacaauucuuuguua

SEQ ID NO: 510609 - RNA, 21 nt, Artificial Sequence
  Synthetic
aacacauacaauucuuuguua

SEQ ID NO: 510610 - RNA, 22 nt, Artificial Sequence
  Synthetic
caacacauacaauucuuuguua

SEQ ID NO: 510611 - RNA, 23 nt, Artificial Sequence
  Synthetic
ucaacacauacaauucuuuguua

SEQ ID NO: 510612 - RNA, 24 nt, Artificial Sequence
  Synthetic
uucaacacauacaauucuuuguua

SEQ ID NO: 510613 - RNA, 18 nt, Artificial Sequence
  Synthetic
gucugugguauuuuguua

SEQ ID NO: 510614 - RNA, 19 nt, Artificial Sequence
  Synthetic
agucugugguauuuuguua

SEQ ID NO: 510615 - RNA, 20 nt, Artificial Sequence
  Synthetic
cagucugugguauuuuguua

SEQ ID NO: 510616 - RNA, 21 nt, Artificial Sequence
  Synthetic
ccagucugugguauuuuguua

SEQ ID NO: 510617 - RNA, 22 nt, Artificial Sequence
  Synthetic
cccagucugugguauuuuguua

SEQ ID NO: 510618 - RNA, 23 nt, Artificial Sequence
  Synthetic
acccagucugugguauuuuguua

SEQ ID NO: 510619 - RNA, 24 nt, Artificial Sequence
  Synthetic
uacccagucugugguauuuuguua

SEQ ID NO: 510620 - RNA, 18 nt, Artificial Sequence
  Synthetic
aauggauuuauuuuguua

SEQ ID NO: 510621 - RNA, 19 nt, Artificial Sequence
  Synthetic
aaauggauuuauuuuguua

SEQ ID NO: 510622 - RNA, 20 nt, Artificial Sequence
  Synthetic
aaaauggauuuauuuuguua

SEQ ID NO: 510623 - RNA, 21 nt, Artificial Sequence
  Synthetic
uaaaauggauuuauuuuguua

SEQ ID NO: 510624 - RNA, 22 nt, Artificial Sequence
  Synthetic
uuaaaauggauuuauuuuguua

SEQ ID NO: 510625 - RNA, 23 nt, Artificial Sequence
  Synthetic
uuuaaaauggauuuauuuuguua

SEQ ID NO: 510626 - RNA, 24 nt, Artificial Sequence
  Synthetic
guuuaaaauggauuuauuuuguua

SEQ ID NO: 510627 - RNA, 18 nt, Artificial Sequence
  Synthetic
ugcacauuuguuuuguua

SEQ ID NO: 510628 - RNA, 19 nt, Artificial Sequence
  Synthetic
uugcacauuuguuuuguua

SEQ ID NO: 510629 - RNA, 20 nt, Artificial Sequence
  Synthetic
auugcacauuuguuuuguua

SEQ ID NO: 510630 - RNA, 21 nt, Artificial Sequence
  Synthetic
cauugcacauuuguuuuguua

SEQ ID NO: 510631 - RNA, 22 nt, Artificial Sequence
  Synthetic
acauugcacauuuguuuuguua

SEQ ID NO: 510632 - RNA, 23 nt, Artificial Sequence
  Synthetic
aacauugcacauuuguuuuguua

SEQ ID NO: 510633 - RNA, 24 nt, Artificial Sequence
  Synthetic
uaacauugcacauuuguuuuguua

SEQ ID NO: 510634 - RNA, 18 nt, Artificial Sequence
  Synthetic
uuggauguguuuuuguua

SEQ ID NO: 510635 - RNA, 19 nt, Artificial Sequence
  Synthetic
guuggauguguuuuuguua

SEQ ID NO: 510636 - RNA, 20 nt, Artificial Sequence
  Synthetic
uguuggauguguuuuuguua

SEQ ID NO: 510637 - RNA, 21 nt, Artificial Sequence
  Synthetic
auguuggauguguuuuuguua

SEQ ID NO: 510638 - RNA, 22 nt, Artificial Sequence
  Synthetic
uauguuggauguguuuuuguua

SEQ ID NO: 510639 - RNA, 23 nt, Artificial Sequence
  Synthetic
guauguuggauguguuuuuguua

SEQ ID NO: 510640 - RNA, 24 nt, Artificial Sequence
  Synthetic
gguauguuggauguguuuuuguua

SEQ ID NO: 510641 - RNA, 18 nt, Artificial Sequence
  Synthetic
caauauuguuuuuuguua

SEQ ID NO: 510642 - RNA, 19 nt, Artificial Sequence
  Synthetic
ucaauauuguuuuuuguua

SEQ ID NO: 510643 - RNA, 20 nt, Artificial Sequence
  Synthetic
aucaauauuguuuuuuguua

SEQ ID NO: 510644 - RNA, 21 nt, Artificial Sequence
  Synthetic
aaucaauauuguuuuuuguua

SEQ ID NO: 510645 - RNA, 22 nt, Artificial Sequence
  Synthetic
caaucaauauuguuuuuuguua

SEQ ID NO: 510646 - RNA, 23 nt, Artificial Sequence
  Synthetic
ccaaucaauauuguuuuuuguua

SEQ ID NO: 510647 - RNA, 24 nt, Artificial Sequence
  Synthetic
accaaucaauauuguuuuuuguua

SEQ ID NO: 510648 - RNA, 18 nt, Artificial Sequence
  Synthetic
caaacaaacaaaaauuua

SEQ ID NO: 510649 - RNA, 19 nt, Artificial Sequence
  Synthetic
ccaaacaaacaaaaauuua

SEQ ID NO: 510650 - RNA, 20 nt, Artificial Sequence
  Synthetic
cccaaacaaacaaaaauuua

SEQ ID NO: 510651 - RNA, 21 nt, Artificial Sequence
  Synthetic
ccccaaacaaacaaaaauuua

SEQ ID NO: 510652 - RNA, 22 nt, Artificial Sequence
  Synthetic
cccccaaacaaacaaaaauuua

SEQ ID NO: 510653 - RNA, 23 nt, Artificial Sequence
  Synthetic
ccccccaaacaaacaaaaauuua

SEQ ID NO: 510654 - RNA, 24 nt, Artificial Sequence
  Synthetic
accccccaaacaaacaaaaauuua

SEQ ID NO: 510655 - RNA, 18 nt, Artificial Sequence
  Synthetic
guuaacaucaaaaauuua

SEQ ID NO: 510656 - RNA, 19 nt, Artificial Sequence
  Synthetic
uguuaacaucaaaaauuua

SEQ ID NO: 510657 - RNA, 20 nt, Artificial Sequence
  Synthetic
cuguuaacaucaaaaauuua

SEQ ID NO: 510658 - RNA, 21 nt, Artificial Sequence
  Synthetic
ucuguuaacaucaaaaauuua

SEQ ID NO: 510659 - RNA, 22 nt, Artificial Sequence
  Synthetic
uucuguuaacaucaaaaauuua

SEQ ID NO: 510660 - RNA, 23 nt, Artificial Sequence
  Synthetic
uuucuguuaacaucaaaaauuua

SEQ ID NO: 510661 - RNA, 24 nt, Artificial Sequence
  Synthetic
guuucuguuaacaucaaaaauuua

SEQ ID NO: 510662 - RNA, 18 nt, Artificial Sequence
  Synthetic
gaggcuuugaaaaauuua

SEQ ID NO: 510663 - RNA, 19 nt, Artificial Sequence
  Synthetic
ugaggcuuugaaaaauuua

SEQ ID NO: 510664 - RNA, 20 nt, Artificial Sequence
  Synthetic
cugaggcuuugaaaaauuua

SEQ ID NO: 510665 - RNA, 21 nt, Artificial Sequence
  Synthetic
gcugaggcuuugaaaaauuua

SEQ ID NO: 510666 - RNA, 22 nt, Artificial Sequence
  Synthetic
ggcugaggcuuugaaaaauuua

SEQ ID NO: 510667 - RNA, 23 nt, Artificial Sequence
  Synthetic
gggcugaggcuuugaaaaauuua

SEQ ID NO: 510668 - RNA, 24 nt, Artificial Sequence
  Synthetic
ggggcugaggcuuugaaaaauuua

SEQ ID NO: 510669 - RNA, 18 nt, Artificial Sequence
  Synthetic
ugaggacaauaaaauuua

SEQ ID NO: 510670 - RNA, 19 nt, Artificial Sequence
  Synthetic
cugaggacaauaaaauuua

SEQ ID NO: 510671 - RNA, 20 nt, Artificial Sequence
  Synthetic
ccugaggacaauaaaauuua

SEQ ID NO: 510672 - RNA, 21 nt, Artificial Sequence
  Synthetic
cccugaggacaauaaaauuua

SEQ ID NO: 510673 - RNA, 22 nt, Artificial Sequence
  Synthetic
acccugaggacaauaaaauuua

SEQ ID NO: 510674 - RNA, 23 nt, Artificial Sequence
  Synthetic
aacccugaggacaauaaaauuua

SEQ ID NO: 510675 - RNA, 24 nt, Artificial Sequence
  Synthetic
aaacccugaggacaauaaaauuua

SEQ ID NO: 510676 - RNA, 18 nt, Artificial Sequence
  Synthetic
cuuaagaacuaaaauuua

SEQ ID NO: 510677 - RNA, 19 nt, Artificial Sequence
  Synthetic
gcuuaagaacuaaaauuua

SEQ ID NO: 510678 - RNA, 20 nt, Artificial Sequence
  Synthetic
cgcuuaagaacuaaaauuua

SEQ ID NO: 510679 - RNA, 21 nt, Artificial Sequence
  Synthetic
acgcuuaagaacuaaaauuua

SEQ ID NO: 510680 - RNA, 22 nt, Artificial Sequence
  Synthetic
aacgcuuaagaacuaaaauuua

SEQ ID NO: 510681 - RNA, 23 nt, Artificial Sequence
  Synthetic
gaacgcuuaagaacuaaaauuua

SEQ ID NO: 510682 - RNA, 24 nt, Artificial Sequence
  Synthetic
ugaacgcuuaagaacuaaaauuua

SEQ ID NO: 510683 - RNA, 18 nt, Artificial Sequence
  Synthetic
gcugcugaaacaaauuua

SEQ ID NO: 510684 - RNA, 19 nt, Artificial Sequence
  Synthetic
agcugcugaaacaaauuua

SEQ ID NO: 510685 - RNA, 20 nt, Artificial Sequence
  Synthetic
aagcugcugaaacaaauuua

SEQ ID NO: 510686 - RNA, 21 nt, Artificial Sequence
  Synthetic
caagcugcugaaacaaauuua

SEQ ID NO: 510687 - RNA, 22 nt, Artificial Sequence
  Synthetic
ucaagcugcugaaacaaauuua

SEQ ID NO: 510688 - RNA, 23 nt, Artificial Sequence
  Synthetic
cucaagcugcugaaacaaauuua

SEQ ID NO: 510689 - RNA, 24 nt, Artificial Sequence
  Synthetic
ucucaagcugcugaaacaaauuua

SEQ ID NO: 510690 - RNA, 18 nt, Artificial Sequence
  Synthetic
acacuuugcacaaauuua

SEQ ID NO: 510691 - RNA, 19 nt, Artificial Sequence
  Synthetic
uacacuuugcacaaauuua

SEQ ID NO: 510692 - RNA, 20 nt, Artificial Sequence
  Synthetic
auacacuuugcacaaauuua

SEQ ID NO: 510693 - RNA, 21 nt, Artificial Sequence
  Synthetic
aauacacuuugcacaaauuua

SEQ ID NO: 510694 - RNA, 22 nt, Artificial Sequence
  Synthetic
gaauacacuuugcacaaauuua

SEQ ID NO: 510695 - RNA, 23 nt, Artificial Sequence
  Synthetic
agaauacacuuugcacaaauuua

SEQ ID NO: 510696 - RNA, 24 nt, Artificial Sequence
  Synthetic
aagaauacacuuugcacaaauuua

SEQ ID NO: 510697 - RNA, 18 nt, Artificial Sequence
  Synthetic
caucuauaagcaaauuua

SEQ ID NO: 510698 - RNA, 19 nt, Artificial Sequence
  Synthetic
ucaucuauaagcaaauuua

SEQ ID NO: 510699 - RNA, 20 nt, Artificial Sequence
  Synthetic
aucaucuauaagcaaauuua

SEQ ID NO: 510700 - RNA, 21 nt, Artificial Sequence
  Synthetic
aaucaucuauaagcaaauuua

SEQ ID NO: 510701 - RNA, 22 nt, Artificial Sequence
  Synthetic
uaaucaucuauaagcaaauuua

SEQ ID NO: 510702 - RNA, 23 nt, Artificial Sequence
  Synthetic
uuaaucaucuauaagcaaauuua

SEQ ID NO: 510703 - RNA, 24 nt, Artificial Sequence
  Synthetic
guuaaucaucuauaagcaaauuua

SEQ ID NO: 510704 - RNA, 18 nt, Artificial Sequence
  Synthetic
aacuucacugcaaauuua

SEQ ID NO: 510705 - RNA, 19 nt, Artificial Sequence
  Synthetic
caacuucacugcaaauuua

SEQ ID NO: 510706 - RNA, 20 nt, Artificial Sequence
  Synthetic
acaacuucacugcaaauuua

SEQ ID NO: 510707 - RNA, 21 nt, Artificial Sequence
  Synthetic
gacaacuucacugcaaauuua

SEQ ID NO: 510708 - RNA, 22 nt, Artificial Sequence
  Synthetic
agacaacuucacugcaaauuua

SEQ ID NO: 510709 - RNA, 23 nt, Artificial Sequence
  Synthetic
aagacaacuucacugcaaauuua

SEQ ID NO: 510710 - RNA, 24 nt, Artificial Sequence
  Synthetic
aaagacaacuucacugcaaauuua

SEQ ID NO: 510711 - RNA, 18 nt, Artificial Sequence
  Synthetic
uccauauaaagaaauuua

SEQ ID NO: 510712 - RNA, 19 nt, Artificial Sequence
  Synthetic
auccauauaaagaaauuua

SEQ ID NO: 510713 - RNA, 20 nt, Artificial Sequence
  Synthetic
cauccauauaaagaaauuua

SEQ ID NO: 510714 - RNA, 21 nt, Artificial Sequence
  Synthetic
gcauccauauaaagaaauuua

SEQ ID NO: 510715 - RNA, 22 nt, Artificial Sequence
  Synthetic
ugcauccauauaaagaaauuua

SEQ ID NO: 510716 - RNA, 23 nt, Artificial Sequence
  Synthetic
augcauccauauaaagaaauuua

SEQ ID NO: 510717 - RNA, 24 nt, Artificial Sequence
  Synthetic
uaugcauccauauaaagaaauuua

SEQ ID NO: 510718 - RNA, 18 nt, Artificial Sequence
  Synthetic
ggaggaaauugaaauuua

SEQ ID NO: 510719 - RNA, 19 nt, Artificial Sequence
  Synthetic
aggaggaaauugaaauuua

SEQ ID NO: 510720 - RNA, 20 nt, Artificial Sequence
  Synthetic
aaggaggaaauugaaauuua

SEQ ID NO: 510721 - RNA, 21 nt, Artificial Sequence
  Synthetic
aaaggaggaaauugaaauuua

SEQ ID NO: 510722 - RNA, 22 nt, Artificial Sequence
  Synthetic
gaaaggaggaaauugaaauuua

SEQ ID NO: 510723 - RNA, 23 nt, Artificial Sequence
  Synthetic
ggaaaggaggaaauugaaauuua

SEQ ID NO: 510724 - RNA, 24 nt, Artificial Sequence
  Synthetic
aggaaaggaggaaauugaaauuua

SEQ ID NO: 510725 - RNA, 18 nt, Artificial Sequence
  Synthetic
caaggcacuugaaauuua

SEQ ID NO: 510726 - RNA, 19 nt, Artificial Sequence
  Synthetic
ucaaggcacuugaaauuua

SEQ ID NO: 510727 - RNA, 20 nt, Artificial Sequence
  Synthetic
uucaaggcacuugaaauuua

SEQ ID NO: 510728 - RNA, 21 nt, Artificial Sequence
  Synthetic
cuucaaggcacuugaaauuua

SEQ ID NO: 510729 - RNA, 22 nt, Artificial Sequence
  Synthetic
ccuucaaggcacuugaaauuua

SEQ ID NO: 510730 - RNA, 23 nt, Artificial Sequence
  Synthetic
gccuucaaggcacuugaaauuua

SEQ ID NO: 510731 - RNA, 24 nt, Artificial Sequence
  Synthetic
ugccuucaaggcacuugaaauuua

SEQ ID NO: 510732 - RNA, 18 nt, Artificial Sequence
  Synthetic
aaagcuuaucuaaauuua

SEQ ID NO: 510733 - RNA, 19 nt, Artificial Sequence
  Synthetic
aaaagcuuaucuaaauuua

SEQ ID NO: 510734 - RNA, 20 nt, Artificial Sequence
  Synthetic
aaaaagcuuaucuaaauuua

SEQ ID NO: 510735 - RNA, 21 nt, Artificial Sequence
  Synthetic
aaaaaagcuuaucuaaauuua

SEQ ID NO: 510736 - RNA, 22 nt, Artificial Sequence
  Synthetic
aaaaaaagcuuaucuaaauuua

SEQ ID NO: 510737 - RNA, 23 nt, Artificial Sequence
  Synthetic
aaaaaaaagcuuaucuaaauuua

SEQ ID NO: 510738 - RNA, 24 nt, Artificial Sequence
  Synthetic
aaaaaaaaagcuuaucuaaauuua

SEQ ID NO: 510739 - RNA, 18 nt, Artificial Sequence
  Synthetic
caucucugcuuaaauuua

SEQ ID NO: 510740 - RNA, 19 nt, Artificial Sequence
  Synthetic
acaucucugcuuaaauuua

SEQ ID NO: 510741 - RNA, 20 nt, Artificial Sequence
  Synthetic
uacaucucugcuuaaauuua

SEQ ID NO: 510742 - RNA, 21 nt, Artificial Sequence
  Synthetic
guacaucucugcuuaaauuua

SEQ ID NO: 510743 - RNA, 22 nt, Artificial Sequence
  Synthetic
uguacaucucugcuuaaauuua

SEQ ID NO: 510744 - RNA, 23 nt, Artificial Sequence
  Synthetic
uuguacaucucugcuuaaauuua

SEQ ID NO: 510745 - RNA, 24 nt, Artificial Sequence
  Synthetic
cuuguacaucucugcuuaaauuua

SEQ ID NO: 510746 - RNA, 18 nt, Artificial Sequence
  Synthetic
gaacucaucuacaauuua

SEQ ID NO: 510747 - RNA, 19 nt, Artificial Sequence
  Synthetic
ggaacucaucuacaauuua

SEQ ID NO: 510748 - RNA, 20 nt, Artificial Sequence
  Synthetic
gggaacucaucuacaauuua

SEQ ID NO: 510749 - RNA, 21 nt, Artificial Sequence
  Synthetic
agggaacucaucuacaauuua

SEQ ID NO: 510750 - RNA, 22 nt, Artificial Sequence
  Synthetic
uagggaacucaucuacaauuua

SEQ ID NO: 510751 - RNA, 23 nt, Artificial Sequence
  Synthetic
auagggaacucaucuacaauuua

SEQ ID NO: 510752 - RNA, 24 nt, Artificial Sequence
  Synthetic
uauagggaacucaucuacaauuua

SEQ ID NO: 510753 - RNA, 18 nt, Artificial Sequence
  Synthetic
augauuacuaucaauuua

SEQ ID NO: 510754 - RNA, 19 nt, Artificial Sequence
  Synthetic
caugauuacuaucaauuua

SEQ ID NO: 510755 - RNA, 20 nt, Artificial Sequence
  Synthetic
acaugauuacuaucaauuua

SEQ ID NO: 510756 - RNA, 21 nt, Artificial Sequence
  Synthetic
aacaugauuacuaucaauuua

SEQ ID NO: 510757 - RNA, 22 nt, Artificial Sequence
  Synthetic
aaacaugauuacuaucaauuua

SEQ ID NO: 510758 - RNA, 23 nt, Artificial Sequence
  Synthetic
aaaacaugauuacuaucaauuua

SEQ ID NO: 510759 - RNA, 24 nt, Artificial Sequence
  Synthetic
gaaaacaugauuacuaucaauuua

SEQ ID NO: 510760 - RNA, 18 nt, Artificial Sequence
  Synthetic
guugacucuaagaauuua

SEQ ID NO: 510761 - RNA, 19 nt, Artificial Sequence
  Synthetic
uguugacucuaagaauuua

SEQ ID NO: 510762 - RNA, 20 nt, Artificial Sequence
  Synthetic
uuguugacucuaagaauuua

SEQ ID NO: 510763 - RNA, 21 nt, Artificial Sequence
  Synthetic
auuguugacucuaagaauuua

SEQ ID NO: 510764 - RNA, 22 nt, Artificial Sequence
  Synthetic
aauuguugacucuaagaauuua

SEQ ID NO: 510765 - RNA, 23 nt, Artificial Sequence
  Synthetic
caauuguugacucuaagaauuua

SEQ ID NO: 510766 - RNA, 24 nt, Artificial Sequence
  Synthetic
acaauuguugacucuaagaauuua

SEQ ID NO: 510767 - RNA, 18 nt, Artificial Sequence
  Synthetic
caucuuaaaaauaauuua

SEQ ID NO: 510768 - RNA, 19 nt, Artificial Sequence
  Synthetic
ucaucuuaaaaauaauuua

SEQ ID NO: 510769 - RNA, 20 nt, Artificial Sequence
  Synthetic
uucaucuuaaaaauaauuua

SEQ ID NO: 510770 - RNA, 21 nt, Artificial Sequence
  Synthetic
guucaucuuaaaaauaauuua

SEQ ID NO: 510771 - RNA, 22 nt, Artificial Sequence
  Synthetic
aguucaucuuaaaaauaauuua

SEQ ID NO: 510772 - RNA, 23 nt, Artificial Sequence
  Synthetic
uaguucaucuuaaaaauaauuua

SEQ ID NO: 510773 - RNA, 24 nt, Artificial Sequence
  Synthetic
guaguucaucuuaaaaauaauuua

SEQ ID NO: 510774 - RNA, 18 nt, Artificial Sequence
  Synthetic
uaaacuuaaaauaauuua

SEQ ID NO: 510775 - RNA, 19 nt, Artificial Sequence
  Synthetic
guaaacuuaaaauaauuua

SEQ ID NO: 510776 - RNA, 20 nt, Artificial Sequence
  Synthetic
aguaaacuuaaaauaauuua

SEQ ID NO: 510777 - RNA, 21 nt, Artificial Sequence
  Synthetic
aaguaaacuuaaaauaauuua

SEQ ID NO: 510778 - RNA, 22 nt, Artificial Sequence
  Synthetic
aaaguaaacuuaaaauaauuua

SEQ ID NO: 510779 - RNA, 23 nt, Artificial Sequence
  Synthetic
gaaaguaaacuuaaaauaauuua

SEQ ID NO: 510780 - RNA, 24 nt, Artificial Sequence
  Synthetic
ugaaaguaaacuuaaaauaauuua

SEQ ID NO: 510781 - RNA, 18 nt, Artificial Sequence
  Synthetic
aaucuuuaaaauaauuua

SEQ ID NO: 510782 - RNA, 19 nt, Artificial Sequence
  Synthetic
aaaucuuuaaaauaauuua

SEQ ID NO: 510783 - RNA, 20 nt, Artificial Sequence
  Synthetic
caaaucuuuaaaauaauuua

SEQ ID NO: 510784 - RNA, 21 nt, Artificial Sequence
  Synthetic
acaaaucuuuaaaauaauuua

SEQ ID NO: 510785 - RNA, 22 nt, Artificial Sequence
  Synthetic
uacaaaucuuuaaaauaauuua

SEQ ID NO: 510786 - RNA, 23 nt, Artificial Sequence
  Synthetic
guacaaaucuuuaaaauaauuua

SEQ ID NO: 510787 - RNA, 24 nt, Artificial Sequence
  Synthetic
cguacaaaucuuuaaaauaauuua

SEQ ID NO: 510788 - RNA, 18 nt, Artificial Sequence
  Synthetic
cuguaccccaauaauuua

SEQ ID NO: 510789 - RNA, 19 nt, Artificial Sequence
  Synthetic
ccuguaccccaauaauuua

SEQ ID NO: 510790 - RNA, 20 nt, Artificial Sequence
  Synthetic
accuguaccccaauaauuua

SEQ ID NO: 510791 - RNA, 21 nt, Artificial Sequence
  Synthetic
caccuguaccccaauaauuua

SEQ ID NO: 510792 - RNA, 22 nt, Artificial Sequence
  Synthetic
ccaccuguaccccaauaauuua

SEQ ID NO: 510793 - RNA, 23 nt, Artificial Sequence
  Synthetic
accaccuguaccccaauaauuua

SEQ ID NO: 510794 - RNA, 24 nt, Artificial Sequence
  Synthetic
uaccaccuguaccccaauaauuua

SEQ ID NO: 510795 - RNA, 18 nt, Artificial Sequence
  Synthetic
auauuuuuucauaauuua

SEQ ID NO: 510796 - RNA, 19 nt, Artificial Sequence
  Synthetic
aauauuuuuucauaauuua

SEQ ID NO: 510797 - RNA, 20 nt, Artificial Sequence
  Synthetic
uaauauuuuuucauaauuua

SEQ ID NO: 510798 - RNA, 21 nt, Artificial Sequence
  Synthetic
guaauauuuuuucauaauuua

SEQ ID NO: 510799 - RNA, 22 nt, Artificial Sequence
  Synthetic
uguaauauuuuuucauaauuua

SEQ ID NO: 510800 - RNA, 23 nt, Artificial Sequence
  Synthetic
guguaauauuuuuucauaauuua

SEQ ID NO: 510801 - RNA, 24 nt, Artificial Sequence
  Synthetic
aguguaauauuuuuucauaauuua

SEQ ID NO: 510802 - RNA, 18 nt, Artificial Sequence
  Synthetic
uagggaacauauaauuua

SEQ ID NO: 510803 - RNA, 19 nt, Artificial Sequence
  Synthetic
uuagggaacauauaauuua

SEQ ID NO: 510804 - RNA, 20 nt, Artificial Sequence
  Synthetic
cuuagggaacauauaauuua

SEQ ID NO: 510805 - RNA, 21 nt, Artificial Sequence
  Synthetic
acuuagggaacauauaauuua

SEQ ID NO: 510806 - RNA, 22 nt, Artificial Sequence
  Synthetic
aacuuagggaacauauaauuua

SEQ ID NO: 510807 - RNA, 23 nt, Artificial Sequence
  Synthetic
aaacuuagggaacauauaauuua

SEQ ID NO: 510808 - RNA, 24 nt, Artificial Sequence
  Synthetic
caaacuuagggaacauauaauuua

SEQ ID NO: 510809 - RNA, 21 nt, Artificial Sequence
  Synthetic
gucccaucaauaccuaauuua

SEQ ID NO: 510810 - RNA, 22 nt, Artificial Sequence
  Synthetic
ugucccaucaauaccuaauuua

SEQ ID NO: 510811 - RNA, 23 nt, Artificial Sequence
  Synthetic
augucccaucaauaccuaauuua

SEQ ID NO: 510812 - RNA, 24 nt, Artificial Sequence
  Synthetic
uaugucccaucaauaccuaauuua

SEQ ID NO: 510813 - RNA, 18 nt, Artificial Sequence
  Synthetic
ccaucaguaccuaauuua

SEQ ID NO: 510814 - RNA, 19 nt, Artificial Sequence
  Synthetic
uccaucaguaccuaauuua

SEQ ID NO: 510815 - RNA, 20 nt, Artificial Sequence
  Synthetic
uuccaucaguaccuaauuua

SEQ ID NO: 510816 - RNA, 21 nt, Artificial Sequence
  Synthetic
guuccaucaguaccuaauuua

SEQ ID NO: 510817 - RNA, 22 nt, Artificial Sequence
  Synthetic
cguuccaucaguaccuaauuua

SEQ ID NO: 510818 - RNA, 23 nt, Artificial Sequence
  Synthetic
acguuccaucaguaccuaauuua

SEQ ID NO: 510819 - RNA, 24 nt, Artificial Sequence
  Synthetic
uacguuccaucaguaccuaauuua

SEQ ID NO: 510820 - RNA, 18 nt, Artificial Sequence
  Synthetic
cauagaacuuguaauuua

SEQ ID NO: 510821 - RNA, 19 nt, Artificial Sequence
  Synthetic
acauagaacuuguaauuua

SEQ ID NO: 510822 - RNA, 20 nt, Artificial Sequence
  Synthetic
cacauagaacuuguaauuua

SEQ ID NO: 510823 - RNA, 21 nt, Artificial Sequence
  Synthetic
acacauagaacuuguaauuua

SEQ ID NO: 510824 - RNA, 22 nt, Artificial Sequence
  Synthetic
uacacauagaacuuguaauuua

SEQ ID NO: 510825 - RNA, 23 nt, Artificial Sequence
  Synthetic
auacacauagaacuuguaauuua

SEQ ID NO: 510826 - RNA, 24 nt, Artificial Sequence
  Synthetic
aauacacauagaacuuguaauuua

SEQ ID NO: 510827 - RNA, 18 nt, Artificial Sequence
  Synthetic
ggcauuuagauuaauuua

SEQ ID NO: 510828 - RNA, 19 nt, Artificial Sequence
  Synthetic
uggcauuuagauuaauuua

SEQ ID NO: 510829 - RNA, 20 nt, Artificial Sequence
  Synthetic
auggcauuuagauuaauuua

SEQ ID NO: 510830 - RNA, 21 nt, Artificial Sequence
  Synthetic
cauggcauuuagauuaauuua

SEQ ID NO: 510831 - RNA, 22 nt, Artificial Sequence
  Synthetic
ucauggcauuuagauuaauuua

SEQ ID NO: 510832 - RNA, 23 nt, Artificial Sequence
  Synthetic
cucauggcauuuagauuaauuua

SEQ ID NO: 510833 - RNA, 24 nt, Artificial Sequence
  Synthetic
ccucauggcauuuagauuaauuua

SEQ ID NO: 510834 - RNA, 18 nt, Artificial Sequence
  Synthetic
ccuacaccauuuaauuua

SEQ ID NO: 510835 - RNA, 19 nt, Artificial Sequence
  Synthetic
uccuacaccauuuaauuua

SEQ ID NO: 510836 - RNA, 20 nt, Artificial Sequence
  Synthetic
auccuacaccauuuaauuua

SEQ ID NO: 510837 - RNA, 21 nt, Artificial Sequence
  Synthetic
cauccuacaccauuuaauuua

SEQ ID NO: 510838 - RNA, 22 nt, Artificial Sequence
  Synthetic
ucauccuacaccauuuaauuua

SEQ ID NO: 510839 - RNA, 23 nt, Artificial Sequence
  Synthetic
cucauccuacaccauuuaauuua

SEQ ID NO: 510840 - RNA, 24 nt, Artificial Sequence
  Synthetic
ucucauccuacaccauuuaauuua

SEQ ID NO: 510841 - RNA, 18 nt, Artificial Sequence
  Synthetic
gaauucuacaaacauuua

SEQ ID NO: 510842 - RNA, 19 nt, Artificial Sequence
  Synthetic
agaauucuacaaacauuua

SEQ ID NO: 510843 - RNA, 20 nt, Artificial Sequence
  Synthetic
gagaauucuacaaacauuua

SEQ ID NO: 510844 - RNA, 21 nt, Artificial Sequence
  Synthetic
ggagaauucuacaaacauuua

SEQ ID NO: 510845 - RNA, 22 nt, Artificial Sequence
  Synthetic
gggagaauucuacaaacauuua

SEQ ID NO: 510846 - RNA, 23 nt, Artificial Sequence
  Synthetic
ugggagaauucuacaaacauuua

SEQ ID NO: 510847 - RNA, 24 nt, Artificial Sequence
  Synthetic
augggagaauucuacaaacauuua

SEQ ID NO: 510848 - RNA, 18 nt, Artificial Sequence
  Synthetic
ucuuuugauaaacauuua

SEQ ID NO: 510849 - RNA, 19 nt, Artificial Sequence
  Synthetic
aucuuuugauaaacauuua

SEQ ID NO: 510850 - RNA, 20 nt, Artificial Sequence
  Synthetic
aaucuuuugauaaacauuua

SEQ ID NO: 510851 - RNA, 21 nt, Artificial Sequence
  Synthetic
caaucuuuugauaaacauuua

SEQ ID NO: 510852 - RNA, 22 nt, Artificial Sequence
  Synthetic
ucaaucuuuugauaaacauuua

SEQ ID NO: 510853 - RNA, 23 nt, Artificial Sequence
  Synthetic
cucaaucuuuugauaaacauuua

SEQ ID NO: 510854 - RNA, 24 nt, Artificial Sequence
  Synthetic
acucaaucuuuugauaaacauuua

SEQ ID NO: 510855 - RNA, 18 nt, Artificial Sequence
  Synthetic
ugucagagguaacauuua

SEQ ID NO: 510856 - RNA, 19 nt, Artificial Sequence
  Synthetic
augucagagguaacauuua

SEQ ID NO: 510857 - RNA, 20 nt, Artificial Sequence
  Synthetic
caugucagagguaacauuua

SEQ ID NO: 510858 - RNA, 21 nt, Artificial Sequence
  Synthetic
ucaugucagagguaacauuua

SEQ ID NO: 510859 - RNA, 22 nt, Artificial Sequence
  Synthetic
uucaugucagagguaacauuua

SEQ ID NO: 510860 - RNA, 23 nt, Artificial Sequence
  Synthetic
uuucaugucagagguaacauuua

SEQ ID NO: 510861 - RNA, 24 nt, Artificial Sequence
  Synthetic
cuuucaugucagagguaacauuua

SEQ ID NO: 510862 - RNA, 18 nt, Artificial Sequence
  Synthetic
aaaagcuauacacauuua

SEQ ID NO: 510863 - RNA, 19 nt, Artificial Sequence
  Synthetic
aaaaagcuauacacauuua

SEQ ID NO: 510864 - RNA, 20 nt, Artificial Sequence
  Synthetic
uaaaaagcuauacacauuua

SEQ ID NO: 510865 - RNA, 21 nt, Artificial Sequence
  Synthetic
auaaaaagcuauacacauuua

SEQ ID NO: 510866 - RNA, 22 nt, Artificial Sequence
  Synthetic
cauaaaaagcuauacacauuua

SEQ ID NO: 510867 - RNA, 23 nt, Artificial Sequence
  Synthetic
acauaaaaagcuauacacauuua

SEQ ID NO: 510868 - RNA, 24 nt, Artificial Sequence
  Synthetic
gacauaaaaagcuauacacauuua

SEQ ID NO: 510869 - RNA, 18 nt, Artificial Sequence
  Synthetic
ucaagcuauccacauuua

SEQ ID NO: 510870 - RNA, 19 nt, Artificial Sequence
  Synthetic
aucaagcuauccacauuua

SEQ ID NO: 510871 - RNA, 20 nt, Artificial Sequence
  Synthetic
caucaagcuauccacauuua

SEQ ID NO: 510872 - RNA, 21 nt, Artificial Sequence
  Synthetic
ccaucaagcuauccacauuua

SEQ ID NO: 510873 - RNA, 22 nt, Artificial Sequence
  Synthetic
uccaucaagcuauccacauuua

SEQ ID NO: 510874 - RNA, 23 nt, Artificial Sequence
  Synthetic
auccaucaagcuauccacauuua

SEQ ID NO: 510875 - RNA, 24 nt, Artificial Sequence
  Synthetic
uauccaucaagcuauccacauuua

SEQ ID NO: 510876 - RNA, 18 nt, Artificial Sequence
  Synthetic
ucauccugggcacauuua

SEQ ID NO: 510877 - RNA, 19 nt, Artificial Sequence
  Synthetic
cucauccugggcacauuua

SEQ ID NO: 510878 - RNA, 20 nt, Artificial Sequence
  Synthetic
ucucauccugggcacauuua

SEQ ID NO: 510879 - RNA, 21 nt, Artificial Sequence
  Synthetic
gucucauccugggcacauuua

SEQ ID NO: 510880 - RNA, 22 nt, Artificial Sequence
  Synthetic
ggucucauccugggcacauuua

SEQ ID NO: 510881 - RNA, 23 nt, Artificial Sequence
  Synthetic
gggucucauccugggcacauuua

SEQ ID NO: 510882 - RNA, 24 nt, Artificial Sequence
  Synthetic
ugggucucauccugggcacauuua

SEQ ID NO: 510883 - RNA, 18 nt, Artificial Sequence
  Synthetic
cuauguauugcacauuua

SEQ ID NO: 510884 - RNA, 19 nt, Artificial Sequence
  Synthetic
gcuauguauugcacauuua

SEQ ID NO: 510885 - RNA, 20 nt, Artificial Sequence
  Synthetic
agcuauguauugcacauuua

SEQ ID NO: 510886 - RNA, 21 nt, Artificial Sequence
  Synthetic
uagcuauguauugcacauuua

SEQ ID NO: 510887 - RNA, 22 nt, Artificial Sequence
  Synthetic
uuagcuauguauugcacauuua

SEQ ID NO: 510888 - RNA, 23 nt, Artificial Sequence
  Synthetic
guuagcuauguauugcacauuua

SEQ ID NO: 510889 - RNA, 24 nt, Artificial Sequence
  Synthetic
gguuagcuauguauugcacauuua

SEQ ID NO: 510890 - RNA, 18 nt, Artificial Sequence
  Synthetic
cagcuacggucacauuua

SEQ ID NO: 510891 - RNA, 19 nt, Artificial Sequence
  Synthetic
gcagcuacggucacauuua

SEQ ID NO: 510892 - RNA, 20 nt, Artificial Sequence
  Synthetic
agcagcuacggucacauuua

SEQ ID NO: 510893 - RNA, 21 nt, Artificial Sequence
  Synthetic
uagcagcuacggucacauuua

SEQ ID NO: 510894 - RNA, 22 nt, Artificial Sequence
  Synthetic
uuagcagcuacggucacauuua

SEQ ID NO: 510895 - RNA, 23 nt, Artificial Sequence
  Synthetic
auuagcagcuacggucacauuua

SEQ ID NO: 510896 - RNA, 24 nt, Artificial Sequence
  Synthetic
gauuagcagcuacggucacauuua

SEQ ID NO: 510897 - RNA, 18 nt, Artificial Sequence
  Synthetic
cuacuucuuucacauuua

SEQ ID NO: 510898 - RNA, 19 nt, Artificial Sequence
  Synthetic
ucuacuucuuucacauuua

SEQ ID NO: 510899 - RNA, 20 nt, Artificial Sequence
  Synthetic
aucuacuucuuucacauuua

SEQ ID NO: 510900 - RNA, 21 nt, Artificial Sequence
  Synthetic
aaucuacuucuuucacauuua

SEQ ID NO: 510901 - RNA, 22 nt, Artificial Sequence
  Synthetic
caaucuacuucuuucacauuua

SEQ ID NO: 510902 - RNA, 23 nt, Artificial Sequence
  Synthetic
acaaucuacuucuuucacauuua

SEQ ID NO: 510903 - RNA, 24 nt, Artificial Sequence
  Synthetic
uacaaucuacuucuuucacauuua

SEQ ID NO: 510904 - RNA, 18 nt, Artificial Sequence
  Synthetic
cuuaauacaauacauuua

SEQ ID NO: 510905 - RNA, 19 nt, Artificial Sequence
  Synthetic
acuuaauacaauacauuua

SEQ ID NO: 510906 - RNA, 20 nt, Artificial Sequence
  Synthetic
cacuuaauacaauacauuua

SEQ ID NO: 510907 - RNA, 21 nt, Artificial Sequence
  Synthetic
acacuuaauacaauacauuua

SEQ ID NO: 510908 - RNA, 22 nt, Artificial Sequence
  Synthetic
aacacuuaauacaauacauuua

SEQ ID NO: 510909 - RNA, 23 nt, Artificial Sequence
  Synthetic
uaacacuuaauacaauacauuua

SEQ ID NO: 510910 - RNA, 24 nt, Artificial Sequence
  Synthetic
auaacacuuaauacaauacauuua

SEQ ID NO: 510911 - RNA, 18 nt, Artificial Sequence
  Synthetic
acauuucuaauacauuua

SEQ ID NO: 510912 - RNA, 19 nt, Artificial Sequence
  Synthetic
cacauuucuaauacauuua

SEQ ID NO: 510913 - RNA, 20 nt, Artificial Sequence
  Synthetic
ucacauuucuaauacauuua

SEQ ID NO: 510914 - RNA, 21 nt, Artificial Sequence
  Synthetic
gucacauuucuaauacauuua

SEQ ID NO: 510915 - RNA, 22 nt, Artificial Sequence
  Synthetic
agucacauuucuaauacauuua

SEQ ID NO: 510916 - RNA, 23 nt, Artificial Sequence
  Synthetic
aagucacauuucuaauacauuua

SEQ ID NO: 510917 - RNA, 24 nt, Artificial Sequence
  Synthetic
caagucacauuucuaauacauuua

SEQ ID NO: 510918 - RNA, 18 nt, Artificial Sequence
  Synthetic
uccuuuaugaaccauuua

SEQ ID NO: 510919 - RNA, 19 nt, Artificial Sequence
  Synthetic
uuccuuuaugaaccauuua

SEQ ID NO: 510920 - RNA, 20 nt, Artificial Sequence
  Synthetic
cuuccuuuaugaaccauuua

SEQ ID NO: 510921 - RNA, 21 nt, Artificial Sequence
  Synthetic
ccuuccuuuaugaaccauuua

SEQ ID NO: 510922 - RNA, 22 nt, Artificial Sequence
  Synthetic
gccuuccuuuaugaaccauuua

SEQ ID NO: 510923 - RNA, 23 nt, Artificial Sequence
  Synthetic
ggccuuccuuuaugaaccauuua

SEQ ID NO: 510924 - RNA, 24 nt, Artificial Sequence
  Synthetic
aggccuuccuuuaugaaccauuua

SEQ ID NO: 510925 - RNA, 18 nt, Artificial Sequence
  Synthetic
aacaauauguaccauuua

SEQ ID NO: 510926 - RNA, 19 nt, Artificial Sequence
  Synthetic
uaacaauauguaccauuua

SEQ ID NO: 510927 - RNA, 20 nt, Artificial Sequence
  Synthetic
auaacaauauguaccauuua

SEQ ID NO: 510928 - RNA, 21 nt, Artificial Sequence
  Synthetic
cauaacaauauguaccauuua

SEQ ID NO: 510929 - RNA, 22 nt, Artificial Sequence
  Synthetic
ccauaacaauauguaccauuua

SEQ ID NO: 510930 - RNA, 23 nt, Artificial Sequence
  Synthetic
accauaacaauauguaccauuua

SEQ ID NO: 510931 - RNA, 24 nt, Artificial Sequence
  Synthetic
caccauaacaauauguaccauuua

SEQ ID NO: 510932 - RNA, 18 nt, Artificial Sequence
  Synthetic
uaaaaccuuucccauuua

SEQ ID NO: 510933 - RNA, 19 nt, Artificial Sequence
  Synthetic
guaaaaccuuucccauuua

SEQ ID NO: 510934 - RNA, 20 nt, Artificial Sequence
  Synthetic
aguaaaaccuuucccauuua

SEQ ID NO: 510935 - RNA, 21 nt, Artificial Sequence
  Synthetic
aaguaaaaccuuucccauuua

SEQ ID NO: 510936 - RNA, 22 nt, Artificial Sequence
  Synthetic
aaaguaaaaccuuucccauuua

SEQ ID NO: 510937 - RNA, 23 nt, Artificial Sequence
  Synthetic
caaaguaaaaccuuucccauuua

SEQ ID NO: 510938 - RNA, 24 nt, Artificial Sequence
  Synthetic
ucaaaguaaaaccuuucccauuua

SEQ ID NO: 510939 - RNA, 18 nt, Artificial Sequence
  Synthetic
caaugcaacagccauuua

SEQ ID NO: 510940 - RNA, 19 nt, Artificial Sequence
  Synthetic
acaaugcaacagccauuua

SEQ ID NO: 510941 - RNA, 20 nt, Artificial Sequence
  Synthetic
cacaaugcaacagccauuua

SEQ ID NO: 510942 - RNA, 21 nt, Artificial Sequence
  Synthetic
ucacaaugcaacagccauuua

SEQ ID NO: 510943 - RNA, 22 nt, Artificial Sequence
  Synthetic
aucacaaugcaacagccauuua

SEQ ID NO: 510944 - RNA, 23 nt, Artificial Sequence
  Synthetic
aaucacaaugcaacagccauuua

SEQ ID NO: 510945 - RNA, 24 nt, Artificial Sequence
  Synthetic
uaaucacaaugcaacagccauuua

SEQ ID NO: 510946 - RNA, 18 nt, Artificial Sequence
  Synthetic
uugauaaacaagcauuua

SEQ ID NO: 510947 - RNA, 19 nt, Artificial Sequence
  Synthetic
auugauaaacaagcauuua

SEQ ID NO: 510948 - RNA, 20 nt, Artificial Sequence
  Synthetic
aauugauaaacaagcauuua

SEQ ID NO: 510949 - RNA, 21 nt, Artificial Sequence
  Synthetic
aaauugauaaacaagcauuua

SEQ ID NO: 510950 - RNA, 22 nt, Artificial Sequence
  Synthetic
aaaauugauaaacaagcauuua

SEQ ID NO: 510951 - RNA, 23 nt, Artificial Sequence
  Synthetic
uaaaauugauaaacaagcauuua

SEQ ID NO: 510952 - RNA, 24 nt, Artificial Sequence
  Synthetic
auaaaauugauaaacaagcauuua

SEQ ID NO: 510953 - RNA, 18 nt, Artificial Sequence
  Synthetic
aaaacuuugcagcauuua

SEQ ID NO: 510954 - RNA, 19 nt, Artificial Sequence
  Synthetic
uaaaacuuugcagcauuua

SEQ ID NO: 510955 - RNA, 20 nt, Artificial Sequence
  Synthetic
auaaaacuuugcagcauuua

SEQ ID NO: 510956 - RNA, 21 nt, Artificial Sequence
  Synthetic
aauaaaacuuugcagcauuua

SEQ ID NO: 510957 - RNA, 22 nt, Artificial Sequence
  Synthetic
uaauaaaacuuugcagcauuua

SEQ ID NO: 510958 - RNA, 23 nt, Artificial Sequence
  Synthetic
guaauaaaacuuugcagcauuua

SEQ ID NO: 510959 - RNA, 24 nt, Artificial Sequence
  Synthetic
aguaauaaaacuuugcagcauuua

SEQ ID NO: 510960 - RNA, 18 nt, Artificial Sequence
  Synthetic
cccacuacagagcauuua

SEQ ID NO: 510961 - RNA, 19 nt, Artificial Sequence
  Synthetic
ucccacuacagagcauuua

SEQ ID NO: 510962 - RNA, 20 nt, Artificial Sequence
  Synthetic
aucccacuacagagcauuua

SEQ ID NO: 510963 - RNA, 21 nt, Artificial Sequence
  Synthetic
aaucccacuacagagcauuua

SEQ ID NO: 510964 - RNA, 22 nt, Artificial Sequence
  Synthetic
aaaucccacuacagagcauuua

SEQ ID NO: 510965 - RNA, 23 nt, Artificial Sequence
  Synthetic
uaaaucccacuacagagcauuua

SEQ ID NO: 510966 - RNA, 24 nt, Artificial Sequence
  Synthetic
cuaaaucccacuacagagcauuua

SEQ ID NO: 510967 - RNA, 18 nt, Artificial Sequence
  Synthetic
cuagcuucagggcauuua

SEQ ID NO: 510968 - RNA, 19 nt, Artificial Sequence
  Synthetic
gcuagcuucagggcauuua

SEQ ID NO: 510969 - RNA, 20 nt, Artificial Sequence
  Synthetic
agcuagcuucagggcauuua

SEQ ID NO: 510970 - RNA, 21 nt, Artificial Sequence
  Synthetic
gagcuagcuucagggcauuua

SEQ ID NO: 510971 - RNA, 22 nt, Artificial Sequence
  Synthetic
agagcuagcuucagggcauuua

SEQ ID NO: 510972 - RNA, 23 nt, Artificial Sequence
  Synthetic
cagagcuagcuucagggcauuua

SEQ ID NO: 510973 - RNA, 24 nt, Artificial Sequence
  Synthetic
acagagcuagcuucagggcauuua

SEQ ID NO: 510974 - RNA, 18 nt, Artificial Sequence
  Synthetic
auacaaugauggcauuua

SEQ ID NO: 510975 - RNA, 19 nt, Artificial Sequence
  Synthetic
gauacaaugauggcauuua

SEQ ID NO: 510976 - RNA, 20 nt, Artificial Sequence
  Synthetic
ugauacaaugauggcauuua

SEQ ID NO: 510977 - RNA, 21 nt, Artificial Sequence
  Synthetic
gugauacaaugauggcauuua

SEQ ID NO: 510978 - RNA, 22 nt, Artificial Sequence
  Synthetic
ugugauacaaugauggcauuua

SEQ ID NO: 510979 - RNA, 23 nt, Artificial Sequence
  Synthetic
augugauacaaugauggcauuua

SEQ ID NO: 510980 - RNA, 24 nt, Artificial Sequence
  Synthetic
caugugauacaaugauggcauuua

SEQ ID NO: 510981 - RNA, 18 nt, Artificial Sequence
  Synthetic
uggcauagaaugcauuua

SEQ ID NO: 510982 - RNA, 19 nt, Artificial Sequence
  Synthetic
uuggcauagaaugcauuua

SEQ ID NO: 510983 - RNA, 20 nt, Artificial Sequence
  Synthetic
auuggcauagaaugcauuua

SEQ ID NO: 510984 - RNA, 21 nt, Artificial Sequence
  Synthetic
uauuggcauagaaugcauuua

SEQ ID NO: 510985 - RNA, 22 nt, Artificial Sequence
  Synthetic
uuauuggcauagaaugcauuua

SEQ ID NO: 510986 - RNA, 23 nt, Artificial Sequence
  Synthetic
uuuauuggcauagaaugcauuua

SEQ ID NO: 510987 - RNA, 24 nt, Artificial Sequence
  Synthetic
auuuauuggcauagaaugcauuua

SEQ ID NO: 510988 - RNA, 18 nt, Artificial Sequence
  Synthetic
uuaucuggauugcauuua

SEQ ID NO: 510989 - RNA, 19 nt, Artificial Sequence
  Synthetic
guuaucuggauugcauuua

SEQ ID NO: 510990 - RNA, 20 nt, Artificial Sequence
  Synthetic
uguuaucuggauugcauuua

SEQ ID NO: 510991 - RNA, 21 nt, Artificial Sequence
  Synthetic
guguuaucuggauugcauuua

SEQ ID NO: 510992 - RNA, 22 nt, Artificial Sequence
  Synthetic
gguguuaucuggauugcauuua

SEQ ID NO: 510993 - RNA, 23 nt, Artificial Sequence
  Synthetic
agguguuaucuggauugcauuua

SEQ ID NO: 510994 - RNA, 24 nt, Artificial Sequence
  Synthetic
aagguguuaucuggauugcauuua

SEQ ID NO: 510995 - RNA, 18 nt, Artificial Sequence
  Synthetic
acugaaagaagucauuua

SEQ ID NO: 510996 - RNA, 19 nt, Artificial Sequence
  Synthetic
aacugaaagaagucauuua

SEQ ID NO: 510997 - RNA, 20 nt, Artificial Sequence
  Synthetic
aaacugaaagaagucauuua

SEQ ID NO: 510998 - RNA, 21 nt, Artificial Sequence
  Synthetic
uaaacugaaagaagucauuua

SEQ ID NO: 510999 - RNA, 22 nt, Artificial Sequence
  Synthetic
auaaacugaaagaagucauuua

SEQ ID NO: 511000 - RNA, 23 nt, Artificial Sequence
  Synthetic
aauaaacugaaagaagucauuua

SEQ ID NO: 511001 - RNA, 24 nt, Artificial Sequence
  Synthetic
aaauaaacugaaagaagucauuua

SEQ ID NO: 511002 - RNA, 18 nt, Artificial Sequence
  Synthetic
uaaauauuuauucauuua

SEQ ID NO: 511003 - RNA, 19 nt, Artificial Sequence
  Synthetic
uuaaauauuuauucauuua

SEQ ID NO: 511004 - RNA, 20 nt, Artificial Sequence
  Synthetic
cuuaaauauuuauucauuua

SEQ ID NO: 511005 - RNA, 21 nt, Artificial Sequence
  Synthetic
acuuaaauauuuauucauuua

SEQ ID NO: 511006 - RNA, 22 nt, Artificial Sequence
  Synthetic
uacuuaaauauuuauucauuua

SEQ ID NO: 511007 - RNA, 23 nt, Artificial Sequence
  Synthetic
uuacuuaaauauuuauucauuua

SEQ ID NO: 511008 - RNA, 24 nt, Artificial Sequence
  Synthetic
cuuacuuaaauauuuauucauuua

SEQ ID NO: 511009 - RNA, 18 nt, Artificial Sequence
  Synthetic
aaggcaaucuuucauuua

SEQ ID NO: 511010 - RNA, 19 nt, Artificial Sequence
  Synthetic
gaaggcaaucuuucauuua

SEQ ID NO: 511011 - RNA, 20 nt, Artificial Sequence
  Synthetic
agaaggcaaucuuucauuua

SEQ ID NO: 511012 - RNA, 21 nt, Artificial Sequence
  Synthetic
uagaaggcaaucuuucauuua

SEQ ID NO: 511013 - RNA, 22 nt, Artificial Sequence
  Synthetic
auagaaggcaaucuuucauuua

SEQ ID NO: 511014 - RNA, 23 nt, Artificial Sequence
  Synthetic
aauagaaggcaaucuuucauuua

SEQ ID NO: 511015 - RNA, 24 nt, Artificial Sequence
  Synthetic
gaauagaaggcaaucuuucauuua

SEQ ID NO: 511016 - RNA, 18 nt, Artificial Sequence
  Synthetic
uacaugauaaaagauuua

SEQ ID NO: 511017 - RNA, 19 nt, Artificial Sequence
  Synthetic
uuacaugauaaaagauuua

SEQ ID NO: 511018 - RNA, 20 nt, Artificial Sequence
  Synthetic
guuacaugauaaaagauuua

SEQ ID NO: 511019 - RNA, 21 nt, Artificial Sequence
  Synthetic
aguuacaugauaaaagauuua

SEQ ID NO: 511020 - RNA, 22 nt, Artificial Sequence
  Synthetic
gaguuacaugauaaaagauuua

SEQ ID NO: 511021 - RNA, 23 nt, Artificial Sequence
  Synthetic
ugaguuacaugauaaaagauuua

SEQ ID NO: 511022 - RNA, 24 nt, Artificial Sequence
  Synthetic
augaguuacaugauaaaagauuua

SEQ ID NO: 511023 - RNA, 18 nt, Artificial Sequence
  Synthetic
ucaucuaccacagauuua

SEQ ID NO: 511024 - RNA, 19 nt, Artificial Sequence
  Synthetic
uucaucuaccacagauuua

SEQ ID NO: 511025 - RNA, 20 nt, Artificial Sequence
  Synthetic
uuucaucuaccacagauuua

SEQ ID NO: 511026 - RNA, 21 nt, Artificial Sequence
  Synthetic
cuuucaucuaccacagauuua

SEQ ID NO: 511027 - RNA, 22 nt, Artificial Sequence
  Synthetic
ucuuucaucuaccacagauuua

SEQ ID NO: 511028 - RNA, 23 nt, Artificial Sequence
  Synthetic
uucuuucaucuaccacagauuua

SEQ ID NO: 511029 - RNA, 24 nt, Artificial Sequence
  Synthetic
guucuuucaucuaccacagauuua

SEQ ID NO: 511030 - RNA, 18 nt, Artificial Sequence
  Synthetic
gauucuuggggagauuua

SEQ ID NO: 511031 - RNA, 19 nt, Artificial Sequence
  Synthetic
ugauucuuggggagauuua

SEQ ID NO: 511032 - RNA, 20 nt, Artificial Sequence
  Synthetic
cugauucuuggggagauuua

SEQ ID NO: 511033 - RNA, 21 nt, Artificial Sequence
  Synthetic
acugauucuuggggagauuua

SEQ ID NO: 511034 - RNA, 22 nt, Artificial Sequence
  Synthetic
uacugauucuuggggagauuua

SEQ ID NO: 511035 - RNA, 23 nt, Artificial Sequence
  Synthetic
uuacugauucuuggggagauuua

SEQ ID NO: 511036 - RNA, 24 nt, Artificial Sequence
  Synthetic
uuuacugauucuuggggagauuua

SEQ ID NO: 511037 - RNA, 18 nt, Artificial Sequence
  Synthetic
guaagagcuugagauuua

SEQ ID NO: 511038 - RNA, 19 nt, Artificial Sequence
  Synthetic
aguaagagcuugagauuua

SEQ ID NO: 511039 - RNA, 20 nt, Artificial Sequence
  Synthetic
aaguaagagcuugagauuua

SEQ ID NO: 511040 - RNA, 21 nt, Artificial Sequence
  Synthetic
uaaguaagagcuugagauuua

SEQ ID NO: 511041 - RNA, 22 nt, Artificial Sequence
  Synthetic
auaaguaagagcuugagauuua

SEQ ID NO: 511042 - RNA, 23 nt, Artificial Sequence
  Synthetic
aauaaguaagagcuugagauuua

SEQ ID NO: 511043 - RNA, 24 nt, Artificial Sequence
  Synthetic
uaauaaguaagagcuugagauuua

SEQ ID NO: 511044 - RNA, 18 nt, Artificial Sequence
  Synthetic
cuugggcaaguggauuua

SEQ ID NO: 511045 - RNA, 19 nt, Artificial Sequence
  Synthetic
ccuugggcaaguggauuua

SEQ ID NO: 511046 - RNA, 20 nt, Artificial Sequence
  Synthetic
accuugggcaaguggauuua

SEQ ID NO: 511047 - RNA, 21 nt, Artificial Sequence
  Synthetic
aaccuugggcaaguggauuua

SEQ ID NO: 511048 - RNA, 22 nt, Artificial Sequence
  Synthetic
aaaccuugggcaaguggauuua

SEQ ID NO: 511049 - RNA, 23 nt, Artificial Sequence
  Synthetic
uaaaccuugggcaaguggauuua

SEQ ID NO: 511050 - RNA, 24 nt, Artificial Sequence
  Synthetic
uuaaaccuugggcaaguggauuua

SEQ ID NO: 511051 - RNA, 18 nt, Artificial Sequence
  Synthetic
auuugaauuaaugauuua

SEQ ID NO: 511052 - RNA, 19 nt, Artificial Sequence
  Synthetic
cauuugaauuaaugauuua

SEQ ID NO: 511053 - RNA, 20 nt, Artificial Sequence
  Synthetic
ucauuugaauuaaugauuua

SEQ ID NO: 511054 - RNA, 21 nt, Artificial Sequence
  Synthetic
aucauuugaauuaaugauuua

SEQ ID NO: 511055 - RNA, 22 nt, Artificial Sequence
  Synthetic
aaucauuugaauuaaugauuua

SEQ ID NO: 511056 - RNA, 23 nt, Artificial Sequence
  Synthetic
aaaucauuugaauuaaugauuua

SEQ ID NO: 511057 - RNA, 24 nt, Artificial Sequence
  Synthetic
gaaaucauuugaauuaaugauuua

SEQ ID NO: 511058 - RNA, 18 nt, Artificial Sequence
  Synthetic
uguaaacauccugauuua

SEQ ID NO: 511059 - RNA, 19 nt, Artificial Sequence
  Synthetic
uuguaaacauccugauuua

SEQ ID NO: 511060 - RNA, 20 nt, Artificial Sequence
  Synthetic
uuuguaaacauccugauuua

SEQ ID NO: 511061 - RNA, 21 nt, Artificial Sequence
  Synthetic
uuuuguaaacauccugauuua

SEQ ID NO: 511062 - RNA, 22 nt, Artificial Sequence
  Synthetic
guuuuguaaacauccugauuua

SEQ ID NO: 511063 - RNA, 23 nt, Artificial Sequence
  Synthetic
uguuuuguaaacauccugauuua

SEQ ID NO: 511064 - RNA, 24 nt, Artificial Sequence
  Synthetic
cuguuuuguaaacauccugauuua

SEQ ID NO: 511065 - RNA, 18 nt, Artificial Sequence
  Synthetic
auguuugaagcugauuua

SEQ ID NO: 511066 - RNA, 19 nt, Artificial Sequence
  Synthetic
uauguuugaagcugauuua

SEQ ID NO: 511067 - RNA, 20 nt, Artificial Sequence
  Synthetic
auauguuugaagcugauuua

SEQ ID NO: 511068 - RNA, 21 nt, Artificial Sequence
  Synthetic
aauauguuugaagcugauuua

SEQ ID NO: 511069 - RNA, 22 nt, Artificial Sequence
  Synthetic
gaauauguuugaagcugauuua

SEQ ID NO: 511070 - RNA, 23 nt, Artificial Sequence
  Synthetic
agaauauguuugaagcugauuua

SEQ ID NO: 511071 - RNA, 24 nt, Artificial Sequence
  Synthetic
cagaauauguuugaagcugauuua

SEQ ID NO: 511072 - RNA, 18 nt, Artificial Sequence
  Synthetic
uuggagaccauugauuua

SEQ ID NO: 511073 - RNA, 19 nt, Artificial Sequence
  Synthetic
guuggagaccauugauuua

SEQ ID NO: 511074 - RNA, 20 nt, Artificial Sequence
  Synthetic
uguuggagaccauugauuua

SEQ ID NO: 511075 - RNA, 21 nt, Artificial Sequence
  Synthetic
cuguuggagaccauugauuua

SEQ ID NO: 511076 - RNA, 22 nt, Artificial Sequence
  Synthetic
ucuguuggagaccauugauuua

SEQ ID NO: 511077 - RNA, 23 nt, Artificial Sequence
  Synthetic
aucuguuggagaccauugauuua

SEQ ID NO: 511078 - RNA, 24 nt, Artificial Sequence
  Synthetic
gaucuguuggagaccauugauuua

SEQ ID NO: 511079 - RNA, 18 nt, Artificial Sequence
  Synthetic
ucuuuguuguuugauuua

SEQ ID NO: 511080 - RNA, 19 nt, Artificial Sequence
  Synthetic
gucuuuguuguuugauuua

SEQ ID NO: 511081 - RNA, 20 nt, Artificial Sequence
  Synthetic
agucuuuguuguuugauuua

SEQ ID NO: 511082 - RNA, 21 nt, Artificial Sequence
  Synthetic
uagucuuuguuguuugauuua

SEQ ID NO: 511083 - RNA, 22 nt, Artificial Sequence
  Synthetic
cuagucuuuguuguuugauuua

SEQ ID NO: 511084 - RNA, 23 nt, Artificial Sequence
  Synthetic
ucuagucuuuguuguuugauuua

SEQ ID NO: 511085 - RNA, 24 nt, Artificial Sequence
  Synthetic
aucuagucuuuguuguuugauuua

SEQ ID NO: 511086 - RNA, 18 nt, Artificial Sequence
  Synthetic
agagcuagaaaauauuua

SEQ ID NO: 511087 - RNA, 19 nt, Artificial Sequence
  Synthetic
aagagcuagaaaauauuua

SEQ ID NO: 511088 - RNA, 20 nt, Artificial Sequence
  Synthetic
aaagagcuagaaaauauuua

SEQ ID NO: 511089 - RNA, 21 nt, Artificial Sequence
  Synthetic
caaagagcuagaaaauauuua

SEQ ID NO: 511090 - RNA, 22 nt, Artificial Sequence
  Synthetic
ucaaagagcuagaaaauauuua

SEQ ID NO: 511091 - RNA, 23 nt, Artificial Sequence
  Synthetic
aucaaagagcuagaaaauauuua

SEQ ID NO: 511092 - RNA, 24 nt, Artificial Sequence
  Synthetic
aaucaaagagcuagaaaauauuua

SEQ ID NO: 511093 - RNA, 18 nt, Artificial Sequence
  Synthetic
guacucuacaaauauuua

SEQ ID NO: 511094 - RNA, 19 nt, Artificial Sequence
  Synthetic
uguacucuacaaauauuua

SEQ ID NO: 511095 - RNA, 20 nt, Artificial Sequence
  Synthetic
auguacucuacaaauauuua

SEQ ID NO: 511096 - RNA, 21 nt, Artificial Sequence
  Synthetic
uauguacucuacaaauauuua

SEQ ID NO: 511097 - RNA, 22 nt, Artificial Sequence
  Synthetic
uuauguacucuacaaauauuua

SEQ ID NO: 511098 - RNA, 23 nt, Artificial Sequence
  Synthetic
auuauguacucuacaaauauuua

SEQ ID NO: 511099 - RNA, 24 nt, Artificial Sequence
  Synthetic
aauuauguacucuacaaauauuua

SEQ ID NO: 511100 - RNA, 18 nt, Artificial Sequence
  Synthetic
gaacugccuaaauauuua

SEQ ID NO: 511101 - RNA, 19 nt, Artificial Sequence
  Synthetic
ugaacugccuaaauauuua

SEQ ID NO: 511102 - RNA, 20 nt, Artificial Sequence
  Synthetic
augaacugccuaaauauuua

SEQ ID NO: 511103 - RNA, 21 nt, Artificial Sequence
  Synthetic
aaugaacugccuaaauauuua

SEQ ID NO: 511104 - RNA, 22 nt, Artificial Sequence
  Synthetic
uaaugaacugccuaaauauuua

SEQ ID NO: 511105 - RNA, 23 nt, Artificial Sequence
  Synthetic
uuaaugaacugccuaaauauuua

SEQ ID NO: 511106 - RNA, 24 nt, Artificial Sequence
  Synthetic
guuaaugaacugccuaaauauuua

SEQ ID NO: 511107 - RNA, 18 nt, Artificial Sequence
  Synthetic
uuguucaguaaauauuua

SEQ ID NO: 511108 - RNA, 19 nt, Artificial Sequence
  Synthetic
uuuguucaguaaauauuua

SEQ ID NO: 511109 - RNA, 20 nt, Artificial Sequence
  Synthetic
auuuguucaguaaauauuua

SEQ ID NO: 511110 - RNA, 21 nt, Artificial Sequence
  Synthetic
aauuuguucaguaaauauuua

SEQ ID NO: 511111 - RNA, 22 nt, Artificial Sequence
  Synthetic
uaauuuguucaguaaauauuua

SEQ ID NO: 511112 - RNA, 23 nt, Artificial Sequence
  Synthetic
uuaauuuguucaguaaauauuua

SEQ ID NO: 511113 - RNA, 24 nt, Artificial Sequence
  Synthetic
auuaauuuguucaguaaauauuua

SEQ ID NO: 511114 - RNA, 18 nt, Artificial Sequence
  Synthetic
uauaauuuuaaauauuua

SEQ ID NO: 511115 - RNA, 19 nt, Artificial Sequence
  Synthetic
uuauaauuuuaaauauuua

SEQ ID NO: 511116 - RNA, 20 nt, Artificial Sequence
  Synthetic
uuuauaauuuuaaauauuua

SEQ ID NO: 511117 - RNA, 21 nt, Artificial Sequence
  Synthetic
uuuuauaauuuuaaauauuua

SEQ ID NO: 511118 - RNA, 22 nt, Artificial Sequence
  Synthetic
auuuuauaauuuuaaauauuua

SEQ ID NO: 511119 - RNA, 23 nt, Artificial Sequence
  Synthetic
aauuuuauaauuuuaaauauuua

SEQ ID NO: 511120 - RNA, 24 nt, Artificial Sequence
  Synthetic
aaauuuuauaauuuuaaauauuua

SEQ ID NO: 511121 - RNA, 18 nt, Artificial Sequence
  Synthetic
uuuaauaaucaauauuua

SEQ ID NO: 511122 - RNA, 19 nt, Artificial Sequence
  Synthetic
uuuuaauaaucaauauuua

SEQ ID NO: 511123 - RNA, 20 nt, Artificial Sequence
  Synthetic
auuuuaauaaucaauauuua

SEQ ID NO: 511124 - RNA, 21 nt, Artificial Sequence
  Synthetic
aauuuuaauaaucaauauuua

SEQ ID NO: 511125 - RNA, 22 nt, Artificial Sequence
  Synthetic
gaauuuuaauaaucaauauuua

SEQ ID NO: 511126 - RNA, 23 nt, Artificial Sequence
  Synthetic
ugaauuuuaauaaucaauauuua

SEQ ID NO: 511127 - RNA, 24 nt, Artificial Sequence
  Synthetic
augaauuuuaauaaucaauauuua

SEQ ID NO: 511128 - RNA, 18 nt, Artificial Sequence
  Synthetic
aaaaacagcuaauauuua

SEQ ID NO: 511129 - RNA, 19 nt, Artificial Sequence
  Synthetic
uaaaaacagcuaauauuua

SEQ ID NO: 511130 - RNA, 20 nt, Artificial Sequence
  Synthetic
auaaaaacagcuaauauuua

SEQ ID NO: 511131 - RNA, 21 nt, Artificial Sequence
  Synthetic
cauaaaaacagcuaauauuua

SEQ ID NO: 511132 - RNA, 22 nt, Artificial Sequence
  Synthetic
ucauaaaaacagcuaauauuua

SEQ ID NO: 511133 - RNA, 23 nt, Artificial Sequence
  Synthetic
cucauaaaaacagcuaauauuua

SEQ ID NO: 511134 - RNA, 24 nt, Artificial Sequence
  Synthetic
acucauaaaaacagcuaauauuua

SEQ ID NO: 511135 - RNA, 18 nt, Artificial Sequence
  Synthetic
aaauggaucuaauauuua

SEQ ID NO: 511136 - RNA, 19 nt, Artificial Sequence
  Synthetic
uaaauggaucuaauauuua

SEQ ID NO: 511137 - RNA, 20 nt, Artificial Sequence
  Synthetic
auaaauggaucuaauauuua

SEQ ID NO: 511138 - RNA, 21 nt, Artificial Sequence
  Synthetic
aauaaauggaucuaauauuua

SEQ ID NO: 511139 - RNA, 22 nt, Artificial Sequence
  Synthetic
gaauaaauggaucuaauauuua

SEQ ID NO: 511140 - RNA, 23 nt, Artificial Sequence
  Synthetic
agaauaaauggaucuaauauuua

SEQ ID NO: 511141 - RNA, 24 nt, Artificial Sequence
  Synthetic
uagaauaaauggaucuaauauuua

SEQ ID NO: 511142 - RNA, 18 nt, Artificial Sequence
  Synthetic
agaaaaaaugcauauuua

SEQ ID NO: 511143 - RNA, 19 nt, Artificial Sequence
  Synthetic
gagaaaaaaugcauauuua

SEQ ID NO: 511144 - RNA, 20 nt, Artificial Sequence
  Synthetic
agagaaaaaaugcauauuua

SEQ ID NO: 511145 - RNA, 21 nt, Artificial Sequence
  Synthetic
uagagaaaaaaugcauauuua

SEQ ID NO: 511146 - RNA, 22 nt, Artificial Sequence
  Synthetic
guagagaaaaaaugcauauuua

SEQ ID NO: 511147 - RNA, 23 nt, Artificial Sequence
  Synthetic
gguagagaaaaaaugcauauuua

SEQ ID NO: 511148 - RNA, 24 nt, Artificial Sequence
  Synthetic
agguagagaaaaaaugcauauuua

SEQ ID NO: 511149 - RNA, 18 nt, Artificial Sequence
  Synthetic
ggacuuaacagauauuua

SEQ ID NO: 511150 - RNA, 19 nt, Artificial Sequence
  Synthetic
uggacuuaacagauauuua

SEQ ID NO: 511151 - RNA, 20 nt, Artificial Sequence
  Synthetic
auggacuuaacagauauuua

SEQ ID NO: 511152 - RNA, 21 nt, Artificial Sequence
  Synthetic
aauggacuuaacagauauuua

SEQ ID NO: 511153 - RNA, 22 nt, Artificial Sequence
  Synthetic
aaauggacuuaacagauauuua

SEQ ID NO: 511154 - RNA, 23 nt, Artificial Sequence
  Synthetic
caaauggacuuaacagauauuua

SEQ ID NO: 511155 - RNA, 24 nt, Artificial Sequence
  Synthetic
acaaauggacuuaacagauauuua

SEQ ID NO: 511156 - RNA, 18 nt, Artificial Sequence
  Synthetic
aguaaccagugauauuua

SEQ ID NO: 511157 - RNA, 19 nt, Artificial Sequence
  Synthetic
gaguaaccagugauauuua

SEQ ID NO: 511158 - RNA, 20 nt, Artificial Sequence
  Synthetic
agaguaaccagugauauuua

SEQ ID NO: 511159 - RNA, 21 nt, Artificial Sequence
  Synthetic
aagaguaaccagugauauuua

SEQ ID NO: 511160 - RNA, 22 nt, Artificial Sequence
  Synthetic
gaagaguaaccagugauauuua

SEQ ID NO: 511161 - RNA, 23 nt, Artificial Sequence
  Synthetic
ugaagaguaaccagugauauuua

SEQ ID NO: 511162 - RNA, 24 nt, Artificial Sequence
  Synthetic
uugaagaguaaccagugauauuua

SEQ ID NO: 511163 - RNA, 18 nt, Artificial Sequence
  Synthetic
auacuuuaaauauauuua

SEQ ID NO: 511164 - RNA, 19 nt, Artificial Sequence
  Synthetic
uauacuuuaaauauauuua

SEQ ID NO: 511165 - RNA, 20 nt, Artificial Sequence
  Synthetic
uuauacuuuaaauauauuua

SEQ ID NO: 511166 - RNA, 21 nt, Artificial Sequence
  Synthetic
guuauacuuuaaauauauuua

SEQ ID NO: 511167 - RNA, 22 nt, Artificial Sequence
  Synthetic
uguuauacuuuaaauauauuua

SEQ ID NO: 511168 - RNA, 23 nt, Artificial Sequence
  Synthetic
auguuauacuuuaaauauauuua

SEQ ID NO: 511169 - RNA, 24 nt, Artificial Sequence
  Synthetic
aauguuauacuuuaaauauauuua

SEQ ID NO: 511170 - RNA, 18 nt, Artificial Sequence
  Synthetic
ucuaaauauauauauuua

SEQ ID NO: 511171 - RNA, 19 nt, Artificial Sequence
  Synthetic
gucuaaauauauauauuua

SEQ ID NO: 511172 - RNA, 20 nt, Artificial Sequence
  Synthetic
agucuaaauauauauauuua

SEQ ID NO: 511173 - RNA, 21 nt, Artificial Sequence
  Synthetic
uagucuaaauauauauauuua

SEQ ID NO: 511174 - RNA, 22 nt, Artificial Sequence
  Synthetic
auagucuaaauauauauauuua

SEQ ID NO: 511175 - RNA, 23 nt, Artificial Sequence
  Synthetic
uauagucuaaauauauauauuua

SEQ ID NO: 511176 - RNA, 24 nt, Artificial Sequence
  Synthetic
auauagucuaaauauauauauuua

SEQ ID NO: 511177 - RNA, 18 nt, Artificial Sequence
  Synthetic
gagaugcuucacuauuua

SEQ ID NO: 511178 - RNA, 19 nt, Artificial Sequence
  Synthetic
ggagaugcuucacuauuua

SEQ ID NO: 511179 - RNA, 20 nt, Artificial Sequence
  Synthetic
gggagaugcuucacuauuua

SEQ ID NO: 511180 - RNA, 21 nt, Artificial Sequence
  Synthetic
ugggagaugcuucacuauuua

SEQ ID NO: 511181 - RNA, 22 nt, Artificial Sequence
  Synthetic
gugggagaugcuucacuauuua

SEQ ID NO: 511182 - RNA, 23 nt, Artificial Sequence
  Synthetic
ugugggagaugcuucacuauuua

SEQ ID NO: 511183 - RNA, 24 nt, Artificial Sequence
  Synthetic
augugggagaugcuucacuauuua

SEQ ID NO: 511184 - RNA, 18 nt, Artificial Sequence
  Synthetic
uaaauuuaugccuauuua

SEQ ID NO: 511185 - RNA, 19 nt, Artificial Sequence
  Synthetic
auaaauuuaugccuauuua

SEQ ID NO: 511186 - RNA, 20 nt, Artificial Sequence
  Synthetic
aauaaauuuaugccuauuua

SEQ ID NO: 511187 - RNA, 21 nt, Artificial Sequence
  Synthetic
aaauaaauuuaugccuauuua

SEQ ID NO: 511188 - RNA, 22 nt, Artificial Sequence
  Synthetic
aaaauaaauuuaugccuauuua

SEQ ID NO: 511189 - RNA, 23 nt, Artificial Sequence
  Synthetic
aaaaauaaauuuaugccuauuua

SEQ ID NO: 511190 - RNA, 24 nt, Artificial Sequence
  Synthetic
aaaaaauaaauuuaugccuauuua

SEQ ID NO: 511191 - RNA, 18 nt, Artificial Sequence
  Synthetic
aaauuauacagcuauuua

SEQ ID NO: 511192 - RNA, 19 nt, Artificial Sequence
  Synthetic
caaauuauacagcuauuua

SEQ ID NO: 511193 - RNA, 20 nt, Artificial Sequence
  Synthetic
ucaaauuauacagcuauuua

SEQ ID NO: 511194 - RNA, 21 nt, Artificial Sequence
  Synthetic
uucaaauuauacagcuauuua

SEQ ID NO: 511195 - RNA, 22 nt, Artificial Sequence
  Synthetic
cuucaaauuauacagcuauuua

SEQ ID NO: 511196 - RNA, 23 nt, Artificial Sequence
  Synthetic
gcuucaaauuauacagcuauuua

SEQ ID NO: 511197 - RNA, 24 nt, Artificial Sequence
  Synthetic
ugcuucaaauuauacagcuauuua

SEQ ID NO: 511198 - RNA, 18 nt, Artificial Sequence
  Synthetic
acaguugcauucuauuua

SEQ ID NO: 511199 - RNA, 19 nt, Artificial Sequence
  Synthetic
cacaguugcauucuauuua

SEQ ID NO: 511200 - RNA, 20 nt, Artificial Sequence
  Synthetic
acacaguugcauucuauuua

SEQ ID NO: 511201 - RNA, 21 nt, Artificial Sequence
  Synthetic
uacacaguugcauucuauuua

SEQ ID NO: 511202 - RNA, 22 nt, Artificial Sequence
  Synthetic
uuacacaguugcauucuauuua

SEQ ID NO: 511203 - RNA, 23 nt, Artificial Sequence
  Synthetic
uuuacacaguugcauucuauuua

SEQ ID NO: 511204 - RNA, 24 nt, Artificial Sequence
  Synthetic
auuuacacaguugcauucuauuua

SEQ ID NO: 511205 - RNA, 18 nt, Artificial Sequence
  Synthetic
uuguuuauauucuauuua

SEQ ID NO: 511206 - RNA, 19 nt, Artificial Sequence
  Synthetic
uuuguuuauauucuauuua

SEQ ID NO: 511207 - RNA, 20 nt, Artificial Sequence
  Synthetic
uuuuguuuauauucuauuua

SEQ ID NO: 511208 - RNA, 21 nt, Artificial Sequence
  Synthetic
guuuuguuuauauucuauuua

SEQ ID NO: 511209 - RNA, 22 nt, Artificial Sequence
  Synthetic
uguuuuguuuauauucuauuua

SEQ ID NO: 511210 - RNA, 23 nt, Artificial Sequence
  Synthetic
auguuuuguuuauauucuauuua

SEQ ID NO: 511211 - RNA, 24 nt, Artificial Sequence
  Synthetic
aauguuuuguuuauauucuauuua

SEQ ID NO: 511212 - RNA, 18 nt, Artificial Sequence
  Synthetic
auuaggaaacaguauuua

SEQ ID NO: 511213 - RNA, 19 nt, Artificial Sequence
  Synthetic
aauuaggaaacaguauuua

SEQ ID NO: 511214 - RNA, 20 nt, Artificial Sequence
  Synthetic
uaauuaggaaacaguauuua

SEQ ID NO: 511215 - RNA, 21 nt, Artificial Sequence
  Synthetic
uuaauuaggaaacaguauuua

SEQ ID NO: 511216 - RNA, 22 nt, Artificial Sequence
  Synthetic
auuaauuaggaaacaguauuua

SEQ ID NO: 511217 - RNA, 23 nt, Artificial Sequence
  Synthetic
gauuaauuaggaaacaguauuua

SEQ ID NO: 511218 - RNA, 24 nt, Artificial Sequence
  Synthetic
agauuaauuaggaaacaguauuua

SEQ ID NO: 511219 - RNA, 18 nt, Artificial Sequence
  Synthetic
ucagauuuucaguauuua

SEQ ID NO: 511220 - RNA, 19 nt, Artificial Sequence
  Synthetic
uucagauuuucaguauuua

SEQ ID NO: 511221 - RNA, 20 nt, Artificial Sequence
  Synthetic
cuucagauuuucaguauuua

SEQ ID NO: 511222 - RNA, 21 nt, Artificial Sequence
  Synthetic
acuucagauuuucaguauuua

SEQ ID NO: 511223 - RNA, 22 nt, Artificial Sequence
  Synthetic
aacuucagauuuucaguauuua

SEQ ID NO: 511224 - RNA, 23 nt, Artificial Sequence
  Synthetic
caacuucagauuuucaguauuua

SEQ ID NO: 511225 - RNA, 24 nt, Artificial Sequence
  Synthetic
ucaacuucagauuuucaguauuua

SEQ ID NO: 511226 - RNA, 18 nt, Artificial Sequence
  Synthetic
aaauagguuuaguauuua

SEQ ID NO: 511227 - RNA, 19 nt, Artificial Sequence
  Synthetic
aaaauagguuuaguauuua

SEQ ID NO: 511228 - RNA, 20 nt, Artificial Sequence
  Synthetic
aaaaauagguuuaguauuua

SEQ ID NO: 511229 - RNA, 21 nt, Artificial Sequence
  Synthetic
uaaaaauagguuuaguauuua

SEQ ID NO: 511230 - RNA, 22 nt, Artificial Sequence
  Synthetic
uuaaaaauagguuuaguauuua

SEQ ID NO: 511231 - RNA, 23 nt, Artificial Sequence
  Synthetic
auuaaaaauagguuuaguauuua

SEQ ID NO: 511232 - RNA, 24 nt, Artificial Sequence
  Synthetic
uauuaaaaauagguuuaguauuua

SEQ ID NO: 511233 - RNA, 18 nt, Artificial Sequence
  Synthetic
cauuuacagaauuauuua

SEQ ID NO: 511234 - RNA, 19 nt, Artificial Sequence
  Synthetic
ucauuuacagaauuauuua

SEQ ID NO: 511235 - RNA, 20 nt, Artificial Sequence
  Synthetic
aucauuuacagaauuauuua

SEQ ID NO: 511236 - RNA, 21 nt, Artificial Sequence
  Synthetic
aaucauuuacagaauuauuua

SEQ ID NO: 511237 - RNA, 22 nt, Artificial Sequence
  Synthetic
aaaucauuuacagaauuauuua

SEQ ID NO: 511238 - RNA, 23 nt, Artificial Sequence
  Synthetic
aaaaucauuuacagaauuauuua

SEQ ID NO: 511239 - RNA, 24 nt, Artificial Sequence
  Synthetic
gaaaaucauuuacagaauuauuua

SEQ ID NO: 511240 - RNA, 18 nt, Artificial Sequence
  Synthetic
aauaaauguucuuauuua

SEQ ID NO: 511241 - RNA, 19 nt, Artificial Sequence
  Synthetic
uaauaaauguucuuauuua

SEQ ID NO: 511242 - RNA, 20 nt, Artificial Sequence
  Synthetic
uuaauaaauguucuuauuua

SEQ ID NO: 511243 - RNA, 21 nt, Artificial Sequence
  Synthetic
uuuaauaaauguucuuauuua

SEQ ID NO: 511244 - RNA, 22 nt, Artificial Sequence
  Synthetic
uuuuaauaaauguucuuauuua

SEQ ID NO: 511245 - RNA, 23 nt, Artificial Sequence
  Synthetic
uuuuuaauaaauguucuuauuua

SEQ ID NO: 511246 - RNA, 24 nt, Artificial Sequence
  Synthetic
uuuuuuaauaaauguucuuauuua

SEQ ID NO: 511247 - RNA, 18 nt, Artificial Sequence
  Synthetic
uggcuuuggaguuauuua

SEQ ID NO: 511248 - RNA, 19 nt, Artificial Sequence
  Synthetic
cuggcuuuggaguuauuua

SEQ ID NO: 511249 - RNA, 20 nt, Artificial Sequence
  Synthetic
acuggcuuuggaguuauuua

SEQ ID NO: 511250 - RNA, 21 nt, Artificial Sequence
  Synthetic
gacuggcuuuggaguuauuua

SEQ ID NO: 511251 - RNA, 22 nt, Artificial Sequence
  Synthetic
ggacuggcuuuggaguuauuua

SEQ ID NO: 511252 - RNA, 23 nt, Artificial Sequence
  Synthetic
aggacuggcuuuggaguuauuua

SEQ ID NO: 511253 - RNA, 24 nt, Artificial Sequence
  Synthetic
caggacuggcuuuggaguuauuua

SEQ ID NO: 511254 - RNA, 18 nt, Artificial Sequence
  Synthetic
aaaggacacauuuauuua

SEQ ID NO: 511255 - RNA, 19 nt, Artificial Sequence
  Synthetic
aaaaggacacauuuauuua

SEQ ID NO: 511256 - RNA, 20 nt, Artificial Sequence
  Synthetic
gaaaaggacacauuuauuua

SEQ ID NO: 511257 - RNA, 21 nt, Artificial Sequence
  Synthetic
ugaaaaggacacauuuauuua

SEQ ID NO: 511258 - RNA, 22 nt, Artificial Sequence
  Synthetic
cugaaaaggacacauuuauuua

SEQ ID NO: 511259 - RNA, 23 nt, Artificial Sequence
  Synthetic
ucugaaaaggacacauuuauuua

SEQ ID NO: 511260 - RNA, 24 nt, Artificial Sequence
  Synthetic
uucugaaaaggacacauuuauuua

SEQ ID NO: 511261 - RNA, 18 nt, Artificial Sequence
  Synthetic
uauuuauuuauuuauuua

SEQ ID NO: 511262 - RNA, 19 nt, Artificial Sequence
  Synthetic
uuauuuauuuauuuauuua

SEQ ID NO: 511263 - RNA, 20 nt, Artificial Sequence
  Synthetic
uuuauuuauuuauuuauuua

SEQ ID NO: 511264 - RNA, 21 nt, Artificial Sequence
  Synthetic
auuuauuuauuuauuuauuua

SEQ ID NO: 511265 - RNA, 22 nt, Artificial Sequence
  Synthetic
uauuuauuuauuuauuuauuua

SEQ ID NO: 511266 - RNA, 23 nt, Artificial Sequence
  Synthetic
uuauuuauuuauuuauuuauuua

SEQ ID NO: 511267 - RNA, 24 nt, Artificial Sequence
  Synthetic
uuuauuuauuuauuuauuuauuua

SEQ ID NO: 511268 - RNA, 18 nt, Artificial Sequence
  Synthetic
aaggaccuucuuuauuua

SEQ ID NO: 511269 - RNA, 19 nt, Artificial Sequence
  Synthetic
aaaggaccuucuuuauuua

SEQ ID NO: 511270 - RNA, 20 nt, Artificial Sequence
  Synthetic
aaaaggaccuucuuuauuua

SEQ ID NO: 511271 - RNA, 21 nt, Artificial Sequence
  Synthetic
caaaaggaccuucuuuauuua

SEQ ID NO: 511272 - RNA, 22 nt, Artificial Sequence
  Synthetic
ccaaaaggaccuucuuuauuua

SEQ ID NO: 511273 - RNA, 23 nt, Artificial Sequence
  Synthetic
accaaaaggaccuucuuuauuua

SEQ ID NO: 511274 - RNA, 24 nt, Artificial Sequence
  Synthetic
caccaaaaggaccuucuuuauuua

SEQ ID NO: 511275 - RNA, 18 nt, Artificial Sequence
  Synthetic
acaaaggaauuuuauuua

SEQ ID NO: 511276 - RNA, 19 nt, Artificial Sequence
  Synthetic
cacaaaggaauuuuauuua

SEQ ID NO: 511277 - RNA, 20 nt, Artificial Sequence
  Synthetic
acacaaaggaauuuuauuua

SEQ ID NO: 511278 - RNA, 21 nt, Artificial Sequence
  Synthetic
gacacaaaggaauuuuauuua

SEQ ID NO: 511279 - RNA, 22 nt, Artificial Sequence
  Synthetic
ugacacaaaggaauuuuauuua

SEQ ID NO: 511280 - RNA, 23 nt, Artificial Sequence
  Synthetic
uugacacaaaggaauuuuauuua

SEQ ID NO: 511281 - RNA, 24 nt, Artificial Sequence
  Synthetic
uuugacacaaaggaauuuuauuua

SEQ ID NO: 511282 - RNA, 18 nt, Artificial Sequence
  Synthetic
caggcauaauuuuauuua

SEQ ID NO: 511283 - RNA, 19 nt, Artificial Sequence
  Synthetic
ccaggcauaauuuuauuua

SEQ ID NO: 511284 - RNA, 20 nt, Artificial Sequence
  Synthetic
uccaggcauaauuuuauuua

SEQ ID NO: 511285 - RNA, 21 nt, Artificial Sequence
  Synthetic
cuccaggcauaauuuuauuua

SEQ ID NO: 511286 - RNA, 22 nt, Artificial Sequence
  Synthetic
ucuccaggcauaauuuuauuua

SEQ ID NO: 511287 - RNA, 23 nt, Artificial Sequence
  Synthetic
uucuccaggcauaauuuuauuua

SEQ ID NO: 511288 - RNA, 24 nt, Artificial Sequence
  Synthetic
uuucuccaggcauaauuuuauuua

SEQ ID NO: 511289 - RNA, 18 nt, Artificial Sequence
  Synthetic
gacaauacauuuuauuua

SEQ ID NO: 511290 - RNA, 19 nt, Artificial Sequence
  Synthetic
ugacaauacauuuuauuua

SEQ ID NO: 511291 - RNA, 20 nt, Artificial Sequence
  Synthetic
augacaauacauuuuauuua

SEQ ID NO: 511292 - RNA, 21 nt, Artificial Sequence
  Synthetic
aaugacaauacauuuuauuua

SEQ ID NO: 511293 - RNA, 22 nt, Artificial Sequence
  Synthetic
gaaugacaauacauuuuauuua

SEQ ID NO: 511294 - RNA, 23 nt, Artificial Sequence
  Synthetic
agaaugacaauacauuuuauuua

SEQ ID NO: 511295 - RNA, 24 nt, Artificial Sequence
  Synthetic
gagaaugacaauacauuuuauuua

SEQ ID NO: 511296 - RNA, 18 nt, Artificial Sequence
  Synthetic
cuaugaccuuuuuauuua

SEQ ID NO: 511297 - RNA, 19 nt, Artificial Sequence
  Synthetic
ucuaugaccuuuuuauuua

SEQ ID NO: 511298 - RNA, 20 nt, Artificial Sequence
  Synthetic
cucuaugaccuuuuuauuua

SEQ ID NO: 511299 - RNA, 21 nt, Artificial Sequence
  Synthetic
acucuaugaccuuuuuauuua

SEQ ID NO: 511300 - RNA, 22 nt, Artificial Sequence
  Synthetic
aacucuaugaccuuuuuauuua

SEQ ID NO: 511301 - RNA, 23 nt, Artificial Sequence
  Synthetic
caacucuaugaccuuuuuauuua

SEQ ID NO: 511302 - RNA, 24 nt, Artificial Sequence
  Synthetic
gcaacucuaugaccuuuuuauuua

SEQ ID NO: 511303 - RNA, 18 nt, Artificial Sequence
  Synthetic
aacauucuuaaaacuuua

SEQ ID NO: 511304 - RNA, 19 nt, Artificial Sequence
  Synthetic
aaacauucuuaaaacuuua

SEQ ID NO: 511305 - RNA, 20 nt, Artificial Sequence
  Synthetic
aaaacauucuuaaaacuuua

SEQ ID NO: 511306 - RNA, 21 nt, Artificial Sequence
  Synthetic
uaaaacauucuuaaaacuuua

SEQ ID NO: 511307 - RNA, 22 nt, Artificial Sequence
  Synthetic
uuaaaacauucuuaaaacuuua

SEQ ID NO: 511308 - RNA, 23 nt, Artificial Sequence
  Synthetic
cuuaaaacauucuuaaaacuuua

SEQ ID NO: 511309 - RNA, 24 nt, Artificial Sequence
  Synthetic
ucuuaaaacauucuuaaaacuuua

SEQ ID NO: 511310 - RNA, 18 nt, Artificial Sequence
  Synthetic
ggcagguccuaaacuuua

SEQ ID NO: 511311 - RNA, 19 nt, Artificial Sequence
  Synthetic
aggcagguccuaaacuuua

SEQ ID NO: 511312 - RNA, 20 nt, Artificial Sequence
  Synthetic
aaggcagguccuaaacuuua

SEQ ID NO: 511313 - RNA, 21 nt, Artificial Sequence
  Synthetic
aaaggcagguccuaaacuuua

SEQ ID NO: 511314 - RNA, 22 nt, Artificial Sequence
  Synthetic
aaaaggcagguccuaaacuuua

SEQ ID NO: 511315 - RNA, 23 nt, Artificial Sequence
  Synthetic
uaaaaggcagguccuaaacuuua

SEQ ID NO: 511316 - RNA, 24 nt, Artificial Sequence
  Synthetic
cuaaaaggcagguccuaaacuuua

SEQ ID NO: 511317 - RNA, 18 nt, Artificial Sequence
  Synthetic
uucauuguaggaacuuua

SEQ ID NO: 511318 - RNA, 19 nt, Artificial Sequence
  Synthetic
uuucauuguaggaacuuua

SEQ ID NO: 511319 - RNA, 20 nt, Artificial Sequence
  Synthetic
auuucauuguaggaacuuua

SEQ ID NO: 511320 - RNA, 21 nt, Artificial Sequence
  Synthetic
cauuucauuguaggaacuuua

SEQ ID NO: 511321 - RNA, 22 nt, Artificial Sequence
  Synthetic
acauuucauuguaggaacuuua

SEQ ID NO: 511322 - RNA, 23 nt, Artificial Sequence
  Synthetic
aacauuucauuguaggaacuuua

SEQ ID NO: 511323 - RNA, 24 nt, Artificial Sequence
  Synthetic
aaacauuucauuguaggaacuuua

SEQ ID NO: 511324 - RNA, 18 nt, Artificial Sequence
  Synthetic
uaugcauauggaacuuua

SEQ ID NO: 511325 - RNA, 19 nt, Artificial Sequence
  Synthetic
uuaugcauauggaacuuua

SEQ ID NO: 511326 - RNA, 20 nt, Artificial Sequence
  Synthetic
uuuaugcauauggaacuuua

SEQ ID NO: 511327 - RNA, 21 nt, Artificial Sequence
  Synthetic
guuuaugcauauggaacuuua

SEQ ID NO: 511328 - RNA, 22 nt, Artificial Sequence
  Synthetic
uguuuaugcauauggaacuuua

SEQ ID NO: 511329 - RNA, 23 nt, Artificial Sequence
  Synthetic
cuguuuaugcauauggaacuuua

SEQ ID NO: 511330 - RNA, 24 nt, Artificial Sequence
  Synthetic
acuguuuaugcauauggaacuuua

SEQ ID NO: 511331 - RNA, 18 nt, Artificial Sequence
  Synthetic
aagauaauacuaacuuua

SEQ ID NO: 511332 - RNA, 19 nt, Artificial Sequence
  Synthetic
aaagauaauacuaacuuua

SEQ ID NO: 511333 - RNA, 20 nt, Artificial Sequence
  Synthetic
uaaagauaauacuaacuuua

SEQ ID NO: 511334 - RNA, 21 nt, Artificial Sequence
  Synthetic
auaaagauaauacuaacuuua

SEQ ID NO: 511335 - RNA, 22 nt, Artificial Sequence
  Synthetic
aauaaagauaauacuaacuuua

SEQ ID NO: 511336 - RNA, 23 nt, Artificial Sequence
  Synthetic
aaauaaagauaauacuaacuuua

SEQ ID NO: 511337 - RNA, 24 nt, Artificial Sequence
  Synthetic
caaauaaagauaauacuaacuuua

SEQ ID NO: 511338 - RNA, 18 nt, Artificial Sequence
  Synthetic
gauaggugugccacuuua

SEQ ID NO: 511339 - RNA, 19 nt, Artificial Sequence
  Synthetic
ggauaggugugccacuuua

SEQ ID NO: 511340 - RNA, 20 nt, Artificial Sequence
  Synthetic
uggauaggugugccacuuua

SEQ ID NO: 511341 - RNA, 21 nt, Artificial Sequence
  Synthetic
guggauaggugugccacuuua

SEQ ID NO: 511342 - RNA, 22 nt, Artificial Sequence
  Synthetic
uguggauaggugugccacuuua

SEQ ID NO: 511343 - RNA, 23 nt, Artificial Sequence
  Synthetic
auguggauaggugugccacuuua

SEQ ID NO: 511344 - RNA, 24 nt, Artificial Sequence
  Synthetic
gauguggauaggugugccacuuua

SEQ ID NO: 511345 - RNA, 18 nt, Artificial Sequence
  Synthetic
gugaagugaagcacuuua

SEQ ID NO: 511346 - RNA, 19 nt, Artificial Sequence
  Synthetic
agugaagugaagcacuuua

SEQ ID NO: 511347 - RNA, 20 nt, Artificial Sequence
  Synthetic
aagugaagugaagcacuuua

SEQ ID NO: 511348 - RNA, 21 nt, Artificial Sequence
  Synthetic
gaagugaagugaagcacuuua

SEQ ID NO: 511349 - RNA, 22 nt, Artificial Sequence
  Synthetic
ugaagugaagugaagcacuuua

SEQ ID NO: 511350 - RNA, 23 nt, Artificial Sequence
  Synthetic
augaagugaagugaagcacuuua

SEQ ID NO: 511351 - RNA, 24 nt, Artificial Sequence
  Synthetic
aaugaagugaagugaagcacuuua

SEQ ID NO: 511352 - RNA, 18 nt, Artificial Sequence
  Synthetic
gaguaguggggcacuuua

SEQ ID NO: 511353 - RNA, 19 nt, Artificial Sequence
  Synthetic
ugaguaguggggcacuuua

SEQ ID NO: 511354 - RNA, 20 nt, Artificial Sequence
  Synthetic
gugaguaguggggcacuuua

SEQ ID NO: 511355 - RNA, 21 nt, Artificial Sequence
  Synthetic
agugaguaguggggcacuuua

SEQ ID NO: 511356 - RNA, 22 nt, Artificial Sequence
  Synthetic
cagugaguaguggggcacuuua

SEQ ID NO: 511357 - RNA, 23 nt, Artificial Sequence
  Synthetic
ucagugaguaguggggcacuuua

SEQ ID NO: 511358 - RNA, 24 nt, Artificial Sequence
  Synthetic
aucagugaguaguggggcacuuua

SEQ ID NO: 511359 - RNA, 18 nt, Artificial Sequence
  Synthetic
uccuggucaugcacuuua

SEQ ID NO: 511360 - RNA, 19 nt, Artificial Sequence
  Synthetic
uuccuggucaugcacuuua

SEQ ID NO: 511361 - RNA, 20 nt, Artificial Sequence
  Synthetic
uuuccuggucaugcacuuua

SEQ ID NO: 511362 - RNA, 21 nt, Artificial Sequence
  Synthetic
cuuuccuggucaugcacuuua

SEQ ID NO: 511363 - RNA, 22 nt, Artificial Sequence
  Synthetic
acuuuccuggucaugcacuuua

SEQ ID NO: 511364 - RNA, 23 nt, Artificial Sequence
  Synthetic
aacuuuccuggucaugcacuuua

SEQ ID NO: 511365 - RNA, 24 nt, Artificial Sequence
  Synthetic
gaacuuuccuggucaugcacuuua

SEQ ID NO: 511366 - RNA, 18 nt, Artificial Sequence
  Synthetic
uuauaucccaagacuuua

SEQ ID NO: 511367 - RNA, 19 nt, Artificial Sequence
  Synthetic
uuuauaucccaagacuuua

SEQ ID NO: 511368 - RNA, 20 nt, Artificial Sequence
  Synthetic
guuuauaucccaagacuuua

SEQ ID NO: 511369 - RNA, 21 nt, Artificial Sequence
  Synthetic
uguuuauaucccaagacuuua

SEQ ID NO: 511370 - RNA, 22 nt, Artificial Sequence
  Synthetic
uuguuuauaucccaagacuuua

SEQ ID NO: 511371 - RNA, 23 nt, Artificial Sequence
  Synthetic
cuuguuuauaucccaagacuuua

SEQ ID NO: 511372 - RNA, 24 nt, Artificial Sequence
  Synthetic
ccuuguuuauaucccaagacuuua

SEQ ID NO: 511373 - RNA, 18 nt, Artificial Sequence
  Synthetic
uugaaaauucagacuuua

SEQ ID NO: 511374 - RNA, 19 nt, Artificial Sequence
  Synthetic
cuugaaaauucagacuuua

SEQ ID NO: 511375 - RNA, 20 nt, Artificial Sequence
  Synthetic
ccuugaaaauucagacuuua

SEQ ID NO: 511376 - RNA, 21 nt, Artificial Sequence
  Synthetic
cccuugaaaauucagacuuua

SEQ ID NO: 511377 - RNA, 22 nt, Artificial Sequence
  Synthetic
gcccuugaaaauucagacuuua

SEQ ID NO: 511378 - RNA, 23 nt, Artificial Sequence
  Synthetic
agcccuugaaaauucagacuuua

SEQ ID NO: 511379 - RNA, 24 nt, Artificial Sequence
  Synthetic
aagcccuugaaaauucagacuuua

SEQ ID NO: 511380 - RNA, 18 nt, Artificial Sequence
  Synthetic
aaucaagcugggacuuua

SEQ ID NO: 511381 - RNA, 19 nt, Artificial Sequence
  Synthetic
aaaucaagcugggacuuua

SEQ ID NO: 511382 - RNA, 20 nt, Artificial Sequence
  Synthetic
aaaaucaagcugggacuuua

SEQ ID NO: 511383 - RNA, 21 nt, Artificial Sequence
  Synthetic
uaaaaucaagcugggacuuua

SEQ ID NO: 511384 - RNA, 22 nt, Artificial Sequence
  Synthetic
auaaaaucaagcugggacuuua

SEQ ID NO: 511385 - RNA, 23 nt, Artificial Sequence
  Synthetic
uauaaaaucaagcugggacuuua

SEQ ID NO: 511386 - RNA, 24 nt, Artificial Sequence
  Synthetic
auauaaaaucaagcugggacuuua

SEQ ID NO: 511387 - RNA, 18 nt, Artificial Sequence
  Synthetic
gcacucuuugugacuuua

SEQ ID NO: 511388 - RNA, 19 nt, Artificial Sequence
  Synthetic
ugcacucuuugugacuuua

SEQ ID NO: 511389 - RNA, 20 nt, Artificial Sequence
  Synthetic
cugcacucuuugugacuuua

SEQ ID NO: 511390 - RNA, 21 nt, Artificial Sequence
  Synthetic
acugcacucuuugugacuuua

SEQ ID NO: 511391 - RNA, 22 nt, Artificial Sequence
  Synthetic
aacugcacucuuugugacuuua

SEQ ID NO: 511392 - RNA, 23 nt, Artificial Sequence
  Synthetic
caacugcacucuuugugacuuua

SEQ ID NO: 511393 - RNA, 24 nt, Artificial Sequence
  Synthetic
ccaacugcacucuuugugacuuua

SEQ ID NO: 511394 - RNA, 18 nt, Artificial Sequence
  Synthetic
cagagaccugauacuuua

SEQ ID NO: 511395 - RNA, 19 nt, Artificial Sequence
  Synthetic
ccagagaccugauacuuua

SEQ ID NO: 511396 - RNA, 20 nt, Artificial Sequence
  Synthetic
accagagaccugauacuuua

SEQ ID NO: 511397 - RNA, 21 nt, Artificial Sequence
  Synthetic
aaccagagaccugauacuuua

SEQ ID NO: 511398 - RNA, 22 nt, Artificial Sequence
  Synthetic
aaaccagagaccugauacuuua

SEQ ID NO: 511399 - RNA, 23 nt, Artificial Sequence
  Synthetic
caaaccagagaccugauacuuua

SEQ ID NO: 511400 - RNA, 24 nt, Artificial Sequence
  Synthetic
acaaaccagagaccugauacuuua

SEQ ID NO: 511401 - RNA, 18 nt, Artificial Sequence
  Synthetic
auuuuuuaaacuacuuua

SEQ ID NO: 511402 - RNA, 19 nt, Artificial Sequence
  Synthetic
uauuuuuuaaacuacuuua

SEQ ID NO: 511403 - RNA, 20 nt, Artificial Sequence
  Synthetic
auauuuuuuaaacuacuuua

SEQ ID NO: 511404 - RNA, 21 nt, Artificial Sequence
  Synthetic
cauauuuuuuaaacuacuuua

SEQ ID NO: 511405 - RNA, 22 nt, Artificial Sequence
  Synthetic
ucauauuuuuuaaacuacuuua

SEQ ID NO: 511406 - RNA, 23 nt, Artificial Sequence
  Synthetic
uucauauuuuuuaaacuacuuua

SEQ ID NO: 511407 - RNA, 24 nt, Artificial Sequence
  Synthetic
uuucauauuuuuuaaacuacuuua

SEQ ID NO: 511408 - RNA, 18 nt, Artificial Sequence
  Synthetic
gccucaauagcuacuuua

SEQ ID NO: 511409 - RNA, 19 nt, Artificial Sequence
  Synthetic
agccucaauagcuacuuua

SEQ ID NO: 511410 - RNA, 20 nt, Artificial Sequence
  Synthetic
uagccucaauagcuacuuua

SEQ ID NO: 511411 - RNA, 21 nt, Artificial Sequence
  Synthetic
guagccucaauagcuacuuua

SEQ ID NO: 511412 - RNA, 22 nt, Artificial Sequence
  Synthetic
aguagccucaauagcuacuuua

SEQ ID NO: 511413 - RNA, 23 nt, Artificial Sequence
  Synthetic
caguagccucaauagcuacuuua

SEQ ID NO: 511414 - RNA, 24 nt, Artificial Sequence
  Synthetic
ucaguagccucaauagcuacuuua

SEQ ID NO: 511415 - RNA, 18 nt, Artificial Sequence
  Synthetic
cuaauuuuuuguacuuua

SEQ ID NO: 511416 - RNA, 19 nt, Artificial Sequence
  Synthetic
acuaauuuuuuguacuuua

SEQ ID NO: 511417 - RNA, 20 nt, Artificial Sequence
  Synthetic
aacuaauuuuuuguacuuua

SEQ ID NO: 511418 - RNA, 21 nt, Artificial Sequence
  Synthetic
caacuaauuuuuuguacuuua

SEQ ID NO: 511419 - RNA, 22 nt, Artificial Sequence
  Synthetic
ccaacuaauuuuuuguacuuua

SEQ ID NO: 511420 - RNA, 23 nt, Artificial Sequence
  Synthetic
cccaacuaauuuuuuguacuuua

SEQ ID NO: 511421 - RNA, 24 nt, Artificial Sequence
  Synthetic
gcccaacuaauuuuuuguacuuua

SEQ ID NO: 511422 - RNA, 18 nt, Artificial Sequence
  Synthetic
guguaagaaauuacuuua

SEQ ID NO: 511423 - RNA, 19 nt, Artificial Sequence
  Synthetic
gguguaagaaauuacuuua

SEQ ID NO: 511424 - RNA, 20 nt, Artificial Sequence
  Synthetic
ggguguaagaaauuacuuua

SEQ ID NO: 511425 - RNA, 21 nt, Artificial Sequence
  Synthetic
gggguguaagaaauuacuuua

SEQ ID NO: 511426 - RNA, 22 nt, Artificial Sequence
  Synthetic
agggguguaagaaauuacuuua

SEQ ID NO: 511427 - RNA, 23 nt, Artificial Sequence
  Synthetic
gagggguguaagaaauuacuuua

SEQ ID NO: 511428 - RNA, 24 nt, Artificial Sequence
  Synthetic
ugagggguguaagaaauuacuuua

SEQ ID NO: 511429 - RNA, 18 nt, Artificial Sequence
  Synthetic
uuacuaaguuuuacuuua

SEQ ID NO: 511430 - RNA, 19 nt, Artificial Sequence
  Synthetic
uuuacuaaguuuuacuuua

SEQ ID NO: 511431 - RNA, 20 nt, Artificial Sequence
  Synthetic
guuuacuaaguuuuacuuua

SEQ ID NO: 511432 - RNA, 21 nt, Artificial Sequence
  Synthetic
uguuuacuaaguuuuacuuua

SEQ ID NO: 511433 - RNA, 22 nt, Artificial Sequence
  Synthetic
auguuuacuaaguuuuacuuua

SEQ ID NO: 511434 - RNA, 23 nt, Artificial Sequence
  Synthetic
aauguuuacuaaguuuuacuuua

SEQ ID NO: 511435 - RNA, 24 nt, Artificial Sequence
  Synthetic
uaauguuuacuaaguuuuacuuua

SEQ ID NO: 511436 - RNA, 18 nt, Artificial Sequence
  Synthetic
uuaacaaaacaaccuuua

SEQ ID NO: 511437 - RNA, 19 nt, Artificial Sequence
  Synthetic
auuaacaaaacaaccuuua

SEQ ID NO: 511438 - RNA, 20 nt, Artificial Sequence
  Synthetic
aauuaacaaaacaaccuuua

SEQ ID NO: 511439 - RNA, 21 nt, Artificial Sequence
  Synthetic
gaauuaacaaaacaaccuuua

SEQ ID NO: 511440 - RNA, 22 nt, Artificial Sequence
  Synthetic
ggaauuaacaaaacaaccuuua

SEQ ID NO: 511441 - RNA, 23 nt, Artificial Sequence
  Synthetic
uggaauuaacaaaacaaccuuua

SEQ ID NO: 511442 - RNA, 24 nt, Artificial Sequence
  Synthetic
cuggaauuaacaaaacaaccuuua

SEQ ID NO: 511443 - RNA, 18 nt, Artificial Sequence
  Synthetic
aaaacauaagacccuuua

SEQ ID NO: 511444 - RNA, 19 nt, Artificial Sequence
  Synthetic
aaaaacauaagacccuuua

SEQ ID NO: 511445 - RNA, 20 nt, Artificial Sequence
  Synthetic
uaaaaacauaagacccuuua

SEQ ID NO: 511446 - RNA, 21 nt, Artificial Sequence
  Synthetic
uuaaaaacauaagacccuuua

SEQ ID NO: 511447 - RNA, 22 nt, Artificial Sequence
  Synthetic
guuaaaaacauaagacccuuua

SEQ ID NO: 511448 - RNA, 23 nt, Artificial Sequence
  Synthetic
gguuaaaaacauaagacccuuua

SEQ ID NO: 511449 - RNA, 24 nt, Artificial Sequence
  Synthetic
agguuaaaaacauaagacccuuua

SEQ ID NO: 511450 - RNA, 18 nt, Artificial Sequence
  Synthetic
cgacuaacugccccuuua

SEQ ID NO: 511451 - RNA, 19 nt, Artificial Sequence
  Synthetic
ucgacuaacugccccuuua

SEQ ID NO: 511452 - RNA, 20 nt, Artificial Sequence
  Synthetic
aucgacuaacugccccuuua

SEQ ID NO: 511453 - RNA, 21 nt, Artificial Sequence
  Synthetic
uaucgacuaacugccccuuua

SEQ ID NO: 511454 - RNA, 22 nt, Artificial Sequence
  Synthetic
auaucgacuaacugccccuuua

SEQ ID NO: 511455 - RNA, 23 nt, Artificial Sequence
  Synthetic
aauaucgacuaacugccccuuua

SEQ ID NO: 511456 - RNA, 24 nt, Artificial Sequence
  Synthetic
aaauaucgacuaacugccccuuua

SEQ ID NO: 511457 - RNA, 18 nt, Artificial Sequence
  Synthetic
acuuuugguugcccuuua

SEQ ID NO: 511458 - RNA, 19 nt, Artificial Sequence
  Synthetic
aacuuuugguugcccuuua

SEQ ID NO: 511459 - RNA, 20 nt, Artificial Sequence
  Synthetic
gaacuuuugguugcccuuua

SEQ ID NO: 511460 - RNA, 21 nt, Artificial Sequence
  Synthetic
ugaacuuuugguugcccuuua

SEQ ID NO: 511461 - RNA, 22 nt, Artificial Sequence
  Synthetic
cugaacuuuugguugcccuuua

SEQ ID NO: 511462 - RNA, 23 nt, Artificial Sequence
  Synthetic
acugaacuuuugguugcccuuua

SEQ ID NO: 511463 - RNA, 24 nt, Artificial Sequence
  Synthetic
uacugaacuuuugguugcccuuua

SEQ ID NO: 511464 - RNA, 18 nt, Artificial Sequence
  Synthetic
guggagguagggccuuua

SEQ ID NO: 511465 - RNA, 19 nt, Artificial Sequence
  Synthetic
aguggagguagggccuuua

SEQ ID NO: 511466 - RNA, 20 nt, Artificial Sequence
  Synthetic
aaguggagguagggccuuua

SEQ ID NO: 511467 - RNA, 21 nt, Artificial Sequence
  Synthetic
caaguggagguagggccuuua

SEQ ID NO: 511468 - RNA, 22 nt, Artificial Sequence
  Synthetic
gcaaguggagguagggccuuua

SEQ ID NO: 511469 - RNA, 23 nt, Artificial Sequence
  Synthetic
ugcaaguggagguagggccuuua

SEQ ID NO: 511470 - RNA, 24 nt, Artificial Sequence
  Synthetic
cugcaaguggagguagggccuuua

SEQ ID NO: 511471 - RNA, 18 nt, Artificial Sequence
  Synthetic
uaggagauggggccuuua

SEQ ID NO: 511472 - RNA, 19 nt, Artificial Sequence
  Synthetic
uuaggagauggggccuuua

SEQ ID NO: 511473 - RNA, 20 nt, Artificial Sequence
  Synthetic
auuaggagauggggccuuua

SEQ ID NO: 511474 - RNA, 21 nt, Artificial Sequence
  Synthetic
uauuaggagauggggccuuua

SEQ ID NO: 511475 - RNA, 22 nt, Artificial Sequence
  Synthetic
guauuaggagauggggccuuua

SEQ ID NO: 511476 - RNA, 23 nt, Artificial Sequence
  Synthetic
gguauuaggagauggggccuuua

SEQ ID NO: 511477 - RNA, 24 nt, Artificial Sequence
  Synthetic
ugguauuaggagauggggccuuua

SEQ ID NO: 511478 - RNA, 18 nt, Artificial Sequence
  Synthetic
guuuuaaauccuccuuua

SEQ ID NO: 511479 - RNA, 19 nt, Artificial Sequence
  Synthetic
uguuuuaaauccuccuuua

SEQ ID NO: 511480 - RNA, 20 nt, Artificial Sequence
  Synthetic
cuguuuuaaauccuccuuua

SEQ ID NO: 511481 - RNA, 21 nt, Artificial Sequence
  Synthetic
acuguuuuaaauccuccuuua

SEQ ID NO: 511482 - RNA, 22 nt, Artificial Sequence
  Synthetic
aacuguuuuaaauccuccuuua

SEQ ID NO: 511483 - RNA, 23 nt, Artificial Sequence
  Synthetic
caacuguuuuaaauccuccuuua

SEQ ID NO: 511484 - RNA, 24 nt, Artificial Sequence
  Synthetic
ucaacuguuuuaaauccuccuuua

SEQ ID NO: 511485 - RNA, 18 nt, Artificial Sequence
  Synthetic
auauuacaccuuccuuua

SEQ ID NO: 511486 - RNA, 19 nt, Artificial Sequence
  Synthetic
aauauuacaccuuccuuua

SEQ ID NO: 511487 - RNA, 20 nt, Artificial Sequence
  Synthetic
gaauauuacaccuuccuuua

SEQ ID NO: 511488 - RNA, 21 nt, Artificial Sequence
  Synthetic
agaauauuacaccuuccuuua

SEQ ID NO: 511489 - RNA, 22 nt, Artificial Sequence
  Synthetic
uagaauauuacaccuuccuuua

SEQ ID NO: 511490 - RNA, 23 nt, Artificial Sequence
  Synthetic
auagaauauuacaccuuccuuua

SEQ ID NO: 511491 - RNA, 24 nt, Artificial Sequence
  Synthetic
aauagaauauuacaccuuccuuua

SEQ ID NO: 511492 - RNA, 18 nt, Artificial Sequence
  Synthetic
acuuuaaauuuuccuuua

SEQ ID NO: 511493 - RNA, 19 nt, Artificial Sequence
  Synthetic
uacuuuaaauuuuccuuua

SEQ ID NO: 511494 - RNA, 20 nt, Artificial Sequence
  Synthetic
uuacuuuaaauuuuccuuua

SEQ ID NO: 511495 - RNA, 21 nt, Artificial Sequence
  Synthetic
uuuacuuuaaauuuuccuuua

SEQ ID NO: 511496 - RNA, 22 nt, Artificial Sequence
  Synthetic
auuuacuuuaaauuuuccuuua

SEQ ID NO: 511497 - RNA, 23 nt, Artificial Sequence
  Synthetic
aauuuacuuuaaauuuuccuuua

SEQ ID NO: 511498 - RNA, 24 nt, Artificial Sequence
  Synthetic
aaauuuacuuuaaauuuuccuuua

SEQ ID NO: 511499 - RNA, 18 nt, Artificial Sequence
  Synthetic
aaucacauagaagcuuua

SEQ ID NO: 511500 - RNA, 19 nt, Artificial Sequence
  Synthetic
uaaucacauagaagcuuua

SEQ ID NO: 511501 - RNA, 20 nt, Artificial Sequence
  Synthetic
uuaaucacauagaagcuuua

SEQ ID NO: 511502 - RNA, 21 nt, Artificial Sequence
  Synthetic
uuuaaucacauagaagcuuua

SEQ ID NO: 511503 - RNA, 22 nt, Artificial Sequence
  Synthetic
cuuuaaucacauagaagcuuua

SEQ ID NO: 511504 - RNA, 23 nt, Artificial Sequence
  Synthetic
ucuuuaaucacauagaagcuuua

SEQ ID NO: 511505 - RNA, 24 nt, Artificial Sequence
  Synthetic
cucuuuaaucacauagaagcuuua

SEQ ID NO: 511506 - RNA, 18 nt, Artificial Sequence
  Synthetic
aaucagaaauaagcuuua

SEQ ID NO: 511507 - RNA, 19 nt, Artificial Sequence
  Synthetic
uaaucagaaauaagcuuua

SEQ ID NO: 511508 - RNA, 20 nt, Artificial Sequence
  Synthetic
auaaucagaaauaagcuuua

SEQ ID NO: 511509 - RNA, 21 nt, Artificial Sequence
  Synthetic
aauaaucagaaauaagcuuua

SEQ ID NO: 511510 - RNA, 22 nt, Artificial Sequence
  Synthetic
aaauaaucagaaauaagcuuua

SEQ ID NO: 511511 - RNA, 23 nt, Artificial Sequence
  Synthetic
aaaauaaucagaaauaagcuuua

SEQ ID NO: 511512 - RNA, 24 nt, Artificial Sequence
  Synthetic
aaaaauaaucagaaauaagcuuua

SEQ ID NO: 511513 - RNA, 18 nt, Artificial Sequence
  Synthetic
gcuuuacuuagagcuuua

SEQ ID NO: 511514 - RNA, 19 nt, Artificial Sequence
  Synthetic
agcuuuacuuagagcuuua

SEQ ID NO: 511515 - RNA, 20 nt, Artificial Sequence
  Synthetic
cagcuuuacuuagagcuuua

SEQ ID NO: 511516 - RNA, 21 nt, Artificial Sequence
  Synthetic
acagcuuuacuuagagcuuua

SEQ ID NO: 511517 - RNA, 22 nt, Artificial Sequence
  Synthetic
aacagcuuuacuuagagcuuua

SEQ ID NO: 511518 - RNA, 23 nt, Artificial Sequence
  Synthetic
uaacagcuuuacuuagagcuuua

SEQ ID NO: 511519 - RNA, 24 nt, Artificial Sequence
  Synthetic
cuaacagcuuuacuuagagcuuua

SEQ ID NO: 511520 - RNA, 18 nt, Artificial Sequence
  Synthetic
uagauucuuaacgcuuua

SEQ ID NO: 511521 - RNA, 19 nt, Artificial Sequence
  Synthetic
uuagauucuuaacgcuuua

SEQ ID NO: 511522 - RNA, 20 nt, Artificial Sequence
  Synthetic
uuuagauucuuaacgcuuua

SEQ ID NO: 511523 - RNA, 21 nt, Artificial Sequence
  Synthetic
uuuuagauucuuaacgcuuua

SEQ ID NO: 511524 - RNA, 22 nt, Artificial Sequence
  Synthetic
guuuuagauucuuaacgcuuua

SEQ ID NO: 511525 - RNA, 23 nt, Artificial Sequence
  Synthetic
uguuuuagauucuuaacgcuuua

SEQ ID NO: 511526 - RNA, 24 nt, Artificial Sequence
  Synthetic
uuguuuuagauucuuaacgcuuua

SEQ ID NO: 511527 - RNA, 18 nt, Artificial Sequence
  Synthetic
gaagagcacaaugcuuua

SEQ ID NO: 511528 - RNA, 19 nt, Artificial Sequence
  Synthetic
ugaagagcacaaugcuuua

SEQ ID NO: 511529 - RNA, 20 nt, Artificial Sequence
  Synthetic
cugaagagcacaaugcuuua

SEQ ID NO: 511530 - RNA, 21 nt, Artificial Sequence
  Synthetic
ucugaagagcacaaugcuuua

SEQ ID NO: 511531 - RNA, 22 nt, Artificial Sequence
  Synthetic
cucugaagagcacaaugcuuua

SEQ ID NO: 511532 - RNA, 23 nt, Artificial Sequence
  Synthetic
gcucugaagagcacaaugcuuua

SEQ ID NO: 511533 - RNA, 24 nt, Artificial Sequence
  Synthetic
ugcucugaagagcacaaugcuuua

SEQ ID NO: 511534 - RNA, 18 nt, Artificial Sequence
  Synthetic
caaaaauucuuugcuuua

SEQ ID NO: 511535 - RNA, 19 nt, Artificial Sequence
  Synthetic
acaaaaauucuuugcuuua

SEQ ID NO: 511536 - RNA, 20 nt, Artificial Sequence
  Synthetic
uacaaaaauucuuugcuuua

SEQ ID NO: 511537 - RNA, 21 nt, Artificial Sequence
  Synthetic
cuacaaaaauucuuugcuuua

SEQ ID NO: 511538 - RNA, 22 nt, Artificial Sequence
  Synthetic
gcuacaaaaauucuuugcuuua

SEQ ID NO: 511539 - RNA, 23 nt, Artificial Sequence
  Synthetic
ugcuacaaaaauucuuugcuuua

SEQ ID NO: 511540 - RNA, 24 nt, Artificial Sequence
  Synthetic
cugcuacaaaaauucuuugcuuua

SEQ ID NO: 511541 - RNA, 18 nt, Artificial Sequence
  Synthetic
gaaaaaguaaaaucuuua

SEQ ID NO: 511542 - RNA, 19 nt, Artificial Sequence
  Synthetic
ggaaaaaguaaaaucuuua

SEQ ID NO: 511543 - RNA, 20 nt, Artificial Sequence
  Synthetic
aggaaaaaguaaaaucuuua

SEQ ID NO: 511544 - RNA, 21 nt, Artificial Sequence
  Synthetic
gaggaaaaaguaaaaucuuua

SEQ ID NO: 511545 - RNA, 22 nt, Artificial Sequence
  Synthetic
agaggaaaaaguaaaaucuuua

SEQ ID NO: 511546 - RNA, 23 nt, Artificial Sequence
  Synthetic
gagaggaaaaaguaaaaucuuua

SEQ ID NO: 511547 - RNA, 24 nt, Artificial Sequence
  Synthetic
agagaggaaaaaguaaaaucuuua

SEQ ID NO: 511548 - RNA, 18 nt, Artificial Sequence
  Synthetic
cucacacaaagaucuuua

SEQ ID NO: 511549 - RNA, 19 nt, Artificial Sequence
  Synthetic
acucacacaaagaucuuua

SEQ ID NO: 511550 - RNA, 20 nt, Artificial Sequence
  Synthetic
gacucacacaaagaucuuua

SEQ ID NO: 511551 - RNA, 21 nt, Artificial Sequence
  Synthetic
cgacucacacaaagaucuuua

SEQ ID NO: 511552 - RNA, 22 nt, Artificial Sequence
  Synthetic
ucgacucacacaaagaucuuua

SEQ ID NO: 511553 - RNA, 23 nt, Artificial Sequence
  Synthetic
uucgacucacacaaagaucuuua

SEQ ID NO: 511554 - RNA, 24 nt, Artificial Sequence
  Synthetic
cuucgacucacacaaagaucuuua

SEQ ID NO: 511555 - RNA, 18 nt, Artificial Sequence
  Synthetic
cccaccucuguaucuuua

SEQ ID NO: 511556 - RNA, 19 nt, Artificial Sequence
  Synthetic
acccaccucuguaucuuua

SEQ ID NO: 511557 - RNA, 20 nt, Artificial Sequence
  Synthetic
cacccaccucuguaucuuua

SEQ ID NO: 511558 - RNA, 21 nt, Artificial Sequence
  Synthetic
ccacccaccucuguaucuuua

SEQ ID NO: 511559 - RNA, 22 nt, Artificial Sequence
  Synthetic
uccacccaccucuguaucuuua

SEQ ID NO: 511560 - RNA, 23 nt, Artificial Sequence
  Synthetic
uuccacccaccucuguaucuuua

SEQ ID NO: 511561 - RNA, 24 nt, Artificial Sequence
  Synthetic
auuccacccaccucuguaucuuua

SEQ ID NO: 511562 - RNA, 18 nt, Artificial Sequence
  Synthetic
gauaaaacaagcucuuua

SEQ ID NO: 511563 - RNA, 19 nt, Artificial Sequence
  Synthetic
agauaaaacaagcucuuua

SEQ ID NO: 511564 - RNA, 20 nt, Artificial Sequence
  Synthetic
aagauaaaacaagcucuuua

SEQ ID NO: 511565 - RNA, 21 nt, Artificial Sequence
  Synthetic
gaagauaaaacaagcucuuua

SEQ ID NO: 511566 - RNA, 22 nt, Artificial Sequence
  Synthetic
agaagauaaaacaagcucuuua

SEQ ID NO: 511567 - RNA, 23 nt, Artificial Sequence
  Synthetic
aagaagauaaaacaagcucuuua

SEQ ID NO: 511568 - RNA, 24 nt, Artificial Sequence
  Synthetic
aaagaagauaaaacaagcucuuua

SEQ ID NO: 511569 - RNA, 18 nt, Artificial Sequence
  Synthetic
ugugcaguaagcucuuua

SEQ ID NO: 511570 - RNA, 19 nt, Artificial Sequence
  Synthetic
augugcaguaagcucuuua

SEQ ID NO: 511571 - RNA, 20 nt, Artificial Sequence
  Synthetic
aaugugcaguaagcucuuua

SEQ ID NO: 511572 - RNA, 21 nt, Artificial Sequence
  Synthetic
caaugugcaguaagcucuuua

SEQ ID NO: 511573 - RNA, 22 nt, Artificial Sequence
  Synthetic
ucaaugugcaguaagcucuuua

SEQ ID NO: 511574 - RNA, 23 nt, Artificial Sequence
  Synthetic
gucaaugugcaguaagcucuuua

SEQ ID NO: 511575 - RNA, 24 nt, Artificial Sequence
  Synthetic
agucaaugugcaguaagcucuuua

SEQ ID NO: 511576 - RNA, 18 nt, Artificial Sequence
  Synthetic
cuaagaacugggucuuua

SEQ ID NO: 511577 - RNA, 19 nt, Artificial Sequence
  Synthetic
ucuaagaacugggucuuua

SEQ ID NO: 511578 - RNA, 20 nt, Artificial Sequence
  Synthetic
cucuaagaacugggucuuua

SEQ ID NO: 511579 - RNA, 21 nt, Artificial Sequence
  Synthetic
gcucuaagaacugggucuuua

SEQ ID NO: 511580 - RNA, 22 nt, Artificial Sequence
  Synthetic
agcucuaagaacugggucuuua

SEQ ID NO: 511581 - RNA, 23 nt, Artificial Sequence
  Synthetic
aagcucuaagaacugggucuuua

SEQ ID NO: 511582 - RNA, 24 nt, Artificial Sequence
  Synthetic
uaagcucuaagaacugggucuuua

SEQ ID NO: 511583 - RNA, 18 nt, Artificial Sequence
  Synthetic
uauauugcuuggucuuua

SEQ ID NO: 511584 - RNA, 19 nt, Artificial Sequence
  Synthetic
guauauugcuuggucuuua

SEQ ID NO: 511585 - RNA, 20 nt, Artificial Sequence
  Synthetic
aguauauugcuuggucuuua

SEQ ID NO: 511586 - RNA, 21 nt, Artificial Sequence
  Synthetic
gaguauauugcuuggucuuua

SEQ ID NO: 511587 - RNA, 22 nt, Artificial Sequence
  Synthetic
ggaguauauugcuuggucuuua

SEQ ID NO: 511588 - RNA, 23 nt, Artificial Sequence
  Synthetic
uggaguauauugcuuggucuuua

SEQ ID NO: 511589 - RNA, 24 nt, Artificial Sequence
  Synthetic
cuggaguauauugcuuggucuuua

SEQ ID NO: 511590 - RNA, 18 nt, Artificial Sequence
  Synthetic
gagugccuuuggucuuua

SEQ ID NO: 511591 - RNA, 19 nt, Artificial Sequence
  Synthetic
agagugccuuuggucuuua

SEQ ID NO: 511592 - RNA, 20 nt, Artificial Sequence
  Synthetic
aagagugccuuuggucuuua

SEQ ID NO: 511593 - RNA, 21 nt, Artificial Sequence
  Synthetic
gaagagugccuuuggucuuua

SEQ ID NO: 511594 - RNA, 22 nt, Artificial Sequence
  Synthetic
ggaagagugccuuuggucuuua

SEQ ID NO: 511595 - RNA, 23 nt, Artificial Sequence
  Synthetic
gggaagagugccuuuggucuuua

SEQ ID NO: 511596 - RNA, 24 nt, Artificial Sequence
  Synthetic
ggggaagagugccuuuggucuuua

SEQ ID NO: 511597 - RNA, 18 nt, Artificial Sequence
  Synthetic
uugaaucuacugucuuua

SEQ ID NO: 511598 - RNA, 19 nt, Artificial Sequence
  Synthetic
guugaaucuacugucuuua

SEQ ID NO: 511599 - RNA, 20 nt, Artificial Sequence
  Synthetic
aguugaaucuacugucuuua

SEQ ID NO: 511600 - RNA, 21 nt, Artificial Sequence
  Synthetic
caguugaaucuacugucuuua

SEQ ID NO: 511601 - RNA, 22 nt, Artificial Sequence
  Synthetic
gcaguugaaucuacugucuuua

SEQ ID NO: 511602 - RNA, 23 nt, Artificial Sequence
  Synthetic
agcaguugaaucuacugucuuua

SEQ ID NO: 511603 - RNA, 24 nt, Artificial Sequence
  Synthetic
aagcaguugaaucuacugucuuua

SEQ ID NO: 511604 - RNA, 18 nt, Artificial Sequence
  Synthetic
gagcuaugggcuucuuua

SEQ ID NO: 511605 - RNA, 19 nt, Artificial Sequence
  Synthetic
agagcuaugggcuucuuua

SEQ ID NO: 511606 - RNA, 20 nt, Artificial Sequence
  Synthetic
uagagcuaugggcuucuuua

SEQ ID NO: 511607 - RNA, 21 nt, Artificial Sequence
  Synthetic
auagagcuaugggcuucuuua

SEQ ID NO: 511608 - RNA, 22 nt, Artificial Sequence
  Synthetic
uauagagcuaugggcuucuuua

SEQ ID NO: 511609 - RNA, 23 nt, Artificial Sequence
  Synthetic
auauagagcuaugggcuucuuua

SEQ ID NO: 511610 - RNA, 24 nt, Artificial Sequence
  Synthetic
cauauagagcuaugggcuucuuua

SEQ ID NO: 511611 - RNA, 18 nt, Artificial Sequence
  Synthetic
acaauccagaguucuuua

SEQ ID NO: 511612 - RNA, 19 nt, Artificial Sequence
  Synthetic
aacaauccagaguucuuua

SEQ ID NO: 511613 - RNA, 20 nt, Artificial Sequence
  Synthetic
aaacaauccagaguucuuua

SEQ ID NO: 511614 - RNA, 21 nt, Artificial Sequence
  Synthetic
gaaacaauccagaguucuuua

SEQ ID NO: 511615 - RNA, 22 nt, Artificial Sequence
  Synthetic
agaaacaauccagaguucuuua

SEQ ID NO: 511616 - RNA, 23 nt, Artificial Sequence
  Synthetic
aagaaacaauccagaguucuuua

SEQ ID NO: 511617 - RNA, 24 nt, Artificial Sequence
  Synthetic
gaagaaacaauccagaguucuuua

SEQ ID NO: 511618 - RNA, 18 nt, Artificial Sequence
  Synthetic
cuaaaaguuauuucuuua

SEQ ID NO: 511619 - RNA, 19 nt, Artificial Sequence
  Synthetic
ucuaaaaguuauuucuuua

SEQ ID NO: 511620 - RNA, 20 nt, Artificial Sequence
  Synthetic
aucuaaaaguuauuucuuua

SEQ ID NO: 511621 - RNA, 21 nt, Artificial Sequence
  Synthetic
uaucuaaaaguuauuucuuua

SEQ ID NO: 511622 - RNA, 22 nt, Artificial Sequence
  Synthetic
auaucuaaaaguuauuucuuua

SEQ ID NO: 511623 - RNA, 23 nt, Artificial Sequence
  Synthetic
cauaucuaaaaguuauuucuuua

SEQ ID NO: 511624 - RNA, 24 nt, Artificial Sequence
  Synthetic
ucauaucuaaaaguuauuucuuua

SEQ ID NO: 511625 - RNA, 18 nt, Artificial Sequence
  Synthetic
gugucccaucuuucuuua

SEQ ID NO: 511626 - RNA, 19 nt, Artificial Sequence
  Synthetic
agugucccaucuuucuuua

SEQ ID NO: 511627 - RNA, 20 nt, Artificial Sequence
  Synthetic
uagugucccaucuuucuuua

SEQ ID NO: 511628 - RNA, 21 nt, Artificial Sequence
  Synthetic
cuagugucccaucuuucuuua

SEQ ID NO: 511629 - RNA, 22 nt, Artificial Sequence
  Synthetic
ucuagugucccaucuuucuuua

SEQ ID NO: 511630 - RNA, 23 nt, Artificial Sequence
  Synthetic
gucuagugucccaucuuucuuua

SEQ ID NO: 511631 - RNA, 24 nt, Artificial Sequence
  Synthetic
agucuagugucccaucuuucuuua

SEQ ID NO: 511632 - RNA, 18 nt, Artificial Sequence
  Synthetic
ccuacauaucaaaguuua

SEQ ID NO: 511633 - RNA, 19 nt, Artificial Sequence
  Synthetic
gccuacauaucaaaguuua

SEQ ID NO: 511634 - RNA, 20 nt, Artificial Sequence
  Synthetic
ugccuacauaucaaaguuua

SEQ ID NO: 511635 - RNA, 21 nt, Artificial Sequence
  Synthetic
gugccuacauaucaaaguuua

SEQ ID NO: 511636 - RNA, 22 nt, Artificial Sequence
  Synthetic
agugccuacauaucaaaguuua

SEQ ID NO: 511637 - RNA, 23 nt, Artificial Sequence
  Synthetic
gagugccuacauaucaaaguuua

SEQ ID NO: 511638 - RNA, 24 nt, Artificial Sequence
  Synthetic
ugagugccuacauaucaaaguuua

SEQ ID NO: 511639 - RNA, 18 nt, Artificial Sequence
  Synthetic
gagaguguagaaaguuua

SEQ ID NO: 511640 - RNA, 19 nt, Artificial Sequence
  Synthetic
ggagaguguagaaaguuua

SEQ ID NO: 511641 - RNA, 20 nt, Artificial Sequence
  Synthetic
gggagaguguagaaaguuua

SEQ ID NO: 511642 - RNA, 21 nt, Artificial Sequence
  Synthetic
ugggagaguguagaaaguuua

SEQ ID NO: 511643 - RNA, 22 nt, Artificial Sequence
  Synthetic
uugggagaguguagaaaguuua

SEQ ID NO: 511644 - RNA, 23 nt, Artificial Sequence
  Synthetic
cuugggagaguguagaaaguuua

SEQ ID NO: 511645 - RNA, 24 nt, Artificial Sequence
  Synthetic
ucuugggagaguguagaaaguuua

SEQ ID NO: 511646 - RNA, 18 nt, Artificial Sequence
  Synthetic
caguguggcuaaaguuua

SEQ ID NO: 511647 - RNA, 19 nt, Artificial Sequence
  Synthetic
ucaguguggcuaaaguuua

SEQ ID NO: 511648 - RNA, 20 nt, Artificial Sequence
  Synthetic
uucaguguggcuaaaguuua

SEQ ID NO: 511649 - RNA, 21 nt, Artificial Sequence
  Synthetic
auucaguguggcuaaaguuua

SEQ ID NO: 511650 - RNA, 22 nt, Artificial Sequence
  Synthetic
aauucaguguggcuaaaguuua

SEQ ID NO: 511651 - RNA, 23 nt, Artificial Sequence
  Synthetic
gaauucaguguggcuaaaguuua

SEQ ID NO: 511652 - RNA, 24 nt, Artificial Sequence
  Synthetic
ggaauucaguguggcuaaaguuua

SEQ ID NO: 511653 - RNA, 18 nt, Artificial Sequence
  Synthetic
gacaucuuggcaaguuua

SEQ ID NO: 511654 - RNA, 19 nt, Artificial Sequence
  Synthetic
agacaucuuggcaaguuua

SEQ ID NO: 511655 - RNA, 20 nt, Artificial Sequence
  Synthetic
aagacaucuuggcaaguuua

SEQ ID NO: 511656 - RNA, 21 nt, Artificial Sequence
  Synthetic
gaagacaucuuggcaaguuua

SEQ ID NO: 511657 - RNA, 22 nt, Artificial Sequence
  Synthetic
agaagacaucuuggcaaguuua

SEQ ID NO: 511658 - RNA, 23 nt, Artificial Sequence
  Synthetic
uagaagacaucuuggcaaguuua

SEQ ID NO: 511659 - RNA, 24 nt, Artificial Sequence
  Synthetic
guagaagacaucuuggcaaguuua

SEQ ID NO: 511660 - RNA, 18 nt, Artificial Sequence
  Synthetic
auuauuccuagaaguuua

SEQ ID NO: 511661 - RNA, 19 nt, Artificial Sequence
  Synthetic
aauuauuccuagaaguuua

SEQ ID NO: 511662 - RNA, 20 nt, Artificial Sequence
  Synthetic
uaauuauuccuagaaguuua

SEQ ID NO: 511663 - RNA, 21 nt, Artificial Sequence
  Synthetic
uuaauuauuccuagaaguuua

SEQ ID NO: 511664 - RNA, 22 nt, Artificial Sequence
  Synthetic
guuaauuauuccuagaaguuua

SEQ ID NO: 511665 - RNA, 23 nt, Artificial Sequence
  Synthetic
aguuaauuauuccuagaaguuua

SEQ ID NO: 511666 - RNA, 24 nt, Artificial Sequence
  Synthetic
aaguuaauuauuccuagaaguuua

SEQ ID NO: 511667 - RNA, 18 nt, Artificial Sequence
  Synthetic
agcgagaagggaaguuua

SEQ ID NO: 511668 - RNA, 19 nt, Artificial Sequence
  Synthetic
aagcgagaagggaaguuua

SEQ ID NO: 511669 - RNA, 20 nt, Artificial Sequence
  Synthetic
gaagcgagaagggaaguuua

SEQ ID NO: 511670 - RNA, 21 nt, Artificial Sequence
  Synthetic
ugaagcgagaagggaaguuua

SEQ ID NO: 511671 - RNA, 22 nt, Artificial Sequence
  Synthetic
augaagcgagaagggaaguuua

SEQ ID NO: 511672 - RNA, 23 nt, Artificial Sequence
  Synthetic
aaugaagcgagaagggaaguuua

SEQ ID NO: 511673 - RNA, 24 nt, Artificial Sequence
  Synthetic
aaaugaagcgagaagggaaguuua

SEQ ID NO: 511674 - RNA, 18 nt, Artificial Sequence
  Synthetic
ucuaguaacauaaguuua

SEQ ID NO: 511675 - RNA, 19 nt, Artificial Sequence
  Synthetic
uucuaguaacauaaguuua

SEQ ID NO: 511676 - RNA, 20 nt, Artificial Sequence
  Synthetic
auucuaguaacauaaguuua

SEQ ID NO: 511677 - RNA, 21 nt, Artificial Sequence
  Synthetic
cauucuaguaacauaaguuua

SEQ ID NO: 511678 - RNA, 22 nt, Artificial Sequence
  Synthetic
gcauucuaguaacauaaguuua

SEQ ID NO: 511679 - RNA, 23 nt, Artificial Sequence
  Synthetic
ggcauucuaguaacauaaguuua

SEQ ID NO: 511680 - RNA, 24 nt, Artificial Sequence
  Synthetic
aggcauucuaguaacauaaguuua

SEQ ID NO: 511681 - RNA, 18 nt, Artificial Sequence
  Synthetic
uguucuugcgacaguuua

SEQ ID NO: 511682 - RNA, 19 nt, Artificial Sequence
  Synthetic
uuguucuugcgacaguuua

SEQ ID NO: 511683 - RNA, 20 nt, Artificial Sequence
  Synthetic
uuuguucuugcgacaguuua

SEQ ID NO: 511684 - RNA, 21 nt, Artificial Sequence
  Synthetic
uuuuguucuugcgacaguuua

SEQ ID NO: 511685 - RNA, 22 nt, Artificial Sequence
  Synthetic
uuuuuguucuugcgacaguuua

SEQ ID NO: 511686 - RNA, 23 nt, Artificial Sequence
  Synthetic
uuuuuuguucuugcgacaguuua

SEQ ID NO: 511687 - RNA, 24 nt, Artificial Sequence
  Synthetic
guuuuuuguucuugcgacaguuua

SEQ ID NO: 511688 - RNA, 18 nt, Artificial Sequence
  Synthetic
aacauuucagccaguuua

SEQ ID NO: 511689 - RNA, 19 nt, Artificial Sequence
  Synthetic
gaacauuucagccaguuua

SEQ ID NO: 511690 - RNA, 20 nt, Artificial Sequence
  Synthetic
ugaacauuucagccaguuua

SEQ ID NO: 511691 - RNA, 21 nt, Artificial Sequence
  Synthetic
gugaacauuucagccaguuua

SEQ ID NO: 511692 - RNA, 22 nt, Artificial Sequence
  Synthetic
ugugaacauuucagccaguuua

SEQ ID NO: 511693 - RNA, 23 nt, Artificial Sequence
  Synthetic
uugugaacauuucagccaguuua

SEQ ID NO: 511694 - RNA, 24 nt, Artificial Sequence
  Synthetic
uuugugaacauuucagccaguuua

SEQ ID NO: 511695 - RNA, 18 nt, Artificial Sequence
  Synthetic
gaugugaggggcaguuua

SEQ ID NO: 511696 - RNA, 19 nt, Artificial Sequence
  Synthetic
ugaugugaggggcaguuua

SEQ ID NO: 511697 - RNA, 20 nt, Artificial Sequence
  Synthetic
augaugugaggggcaguuua

SEQ ID NO: 511698 - RNA, 21 nt, Artificial Sequence
  Synthetic
aaugaugugaggggcaguuua

SEQ ID NO: 511699 - RNA, 22 nt, Artificial Sequence
  Synthetic
caaugaugugaggggcaguuua

SEQ ID NO: 511700 - RNA, 23 nt, Artificial Sequence
  Synthetic
acaaugaugugaggggcaguuua

SEQ ID NO: 511701 - RNA, 24 nt, Artificial Sequence
  Synthetic
uacaaugaugugaggggcaguuua

SEQ ID NO: 511702 - RNA, 18 nt, Artificial Sequence
  Synthetic
agaagguaaaagaguuua

SEQ ID NO: 511703 - RNA, 19 nt, Artificial Sequence
  Synthetic
cagaagguaaaagaguuua

SEQ ID NO: 511704 - RNA, 20 nt, Artificial Sequence
  Synthetic
ucagaagguaaaagaguuua

SEQ ID NO: 511705 - RNA, 21 nt, Artificial Sequence
  Synthetic
uucagaagguaaaagaguuua

SEQ ID NO: 511706 - RNA, 22 nt, Artificial Sequence
  Synthetic
auucagaagguaaaagaguuua

SEQ ID NO: 511707 - RNA, 23 nt, Artificial Sequence
  Synthetic
aauucagaagguaaaagaguuua

SEQ ID NO: 511708 - RNA, 24 nt, Artificial Sequence
  Synthetic
gaauucagaagguaaaagaguuua

SEQ ID NO: 511709 - RNA, 18 nt, Artificial Sequence
  Synthetic
uguucuugcaauaguuua

SEQ ID NO: 511710 - RNA, 19 nt, Artificial Sequence
  Synthetic
uuguucuugcaauaguuua

SEQ ID NO: 511711 - RNA, 20 nt, Artificial Sequence
  Synthetic
uuuguucuugcaauaguuua

SEQ ID NO: 511712 - RNA, 21 nt, Artificial Sequence
  Synthetic
uuuuguucuugcaauaguuua

SEQ ID NO: 511713 - RNA, 22 nt, Artificial Sequence
  Synthetic
uuuuuguucuugcaauaguuua

SEQ ID NO: 511714 - RNA, 23 nt, Artificial Sequence
  Synthetic
uuuuuuguucuugcaauaguuua

SEQ ID NO: 511715 - RNA, 24 nt, Artificial Sequence
  Synthetic
guuuuuuguucuugcaauaguuua

SEQ ID NO: 511716 - RNA, 18 nt, Artificial Sequence
  Synthetic
cuaagagcagauaguuua

SEQ ID NO: 511717 - RNA, 19 nt, Artificial Sequence
  Synthetic
acuaagagcagauaguuua

SEQ ID NO: 511718 - RNA, 20 nt, Artificial Sequence
  Synthetic
aacuaagagcagauaguuua

SEQ ID NO: 511719 - RNA, 21 nt, Artificial Sequence
  Synthetic
aaacuaagagcagauaguuua

SEQ ID NO: 511720 - RNA, 22 nt, Artificial Sequence
  Synthetic
gaaacuaagagcagauaguuua

SEQ ID NO: 511721 - RNA, 23 nt, Artificial Sequence
  Synthetic
ggaaacuaagagcagauaguuua

SEQ ID NO: 511722 - RNA, 24 nt, Artificial Sequence
  Synthetic
aggaaacuaagagcagauaguuua

SEQ ID NO: 511723 - RNA, 21 nt, Artificial Sequence
  Synthetic
uuuuguucuugcgauaguuua

SEQ ID NO: 511724 - RNA, 22 nt, Artificial Sequence
  Synthetic
uuuuuguucuugcgauaguuua

SEQ ID NO: 511725 - RNA, 23 nt, Artificial Sequence
  Synthetic
uuuuuuguucuugcgauaguuua

SEQ ID NO: 511726 - RNA, 24 nt, Artificial Sequence
  Synthetic
guuuuuuguucuugcgauaguuua

SEQ ID NO: 511727 - RNA, 18 nt, Artificial Sequence
  Synthetic
uguucuugugauaguuua

SEQ ID NO: 511728 - RNA, 19 nt, Artificial Sequence
  Synthetic
cuguucuugugauaguuua

SEQ ID NO: 511729 - RNA, 20 nt, Artificial Sequence
  Synthetic
ucuguucuugugauaguuua

SEQ ID NO: 511730 - RNA, 21 nt, Artificial Sequence
  Synthetic
uucuguucuugugauaguuua

SEQ ID NO: 511731 - RNA, 22 nt, Artificial Sequence
  Synthetic
guucuguucuugugauaguuua

SEQ ID NO: 511732 - RNA, 23 nt, Artificial Sequence
  Synthetic
uguucuguucuugugauaguuua

SEQ ID NO: 511733 - RNA, 24 nt, Artificial Sequence
  Synthetic
guguucuguucuugugauaguuua

SEQ ID NO: 511734 - RNA, 18 nt, Artificial Sequence
  Synthetic
aacuaaaagcuuaguuua

SEQ ID NO: 511735 - RNA, 19 nt, Artificial Sequence
  Synthetic
caacuaaaagcuuaguuua

SEQ ID NO: 511736 - RNA, 20 nt, Artificial Sequence
  Synthetic
acaacuaaaagcuuaguuua

SEQ ID NO: 511737 - RNA, 21 nt, Artificial Sequence
  Synthetic
uacaacuaaaagcuuaguuua

SEQ ID NO: 511738 - RNA, 22 nt, Artificial Sequence
  Synthetic
cuacaacuaaaagcuuaguuua

SEQ ID NO: 511739 - RNA, 23 nt, Artificial Sequence
  Synthetic
acuacaacuaaaagcuuaguuua

SEQ ID NO: 511740 - RNA, 24 nt, Artificial Sequence
  Synthetic
uacuacaacuaaaagcuuaguuua

SEQ ID NO: 511741 - RNA, 18 nt, Artificial Sequence
  Synthetic
uagaagcagacacguuua

SEQ ID NO: 511742 - RNA, 19 nt, Artificial Sequence
  Synthetic
cuagaagcagacacguuua

SEQ ID NO: 511743 - RNA, 20 nt, Artificial Sequence
  Synthetic
ucuagaagcagacacguuua

SEQ ID NO: 511744 - RNA, 21 nt, Artificial Sequence
  Synthetic
aucuagaagcagacacguuua

SEQ ID NO: 511745 - RNA, 22 nt, Artificial Sequence
  Synthetic
caucuagaagcagacacguuua

SEQ ID NO: 511746 - RNA, 23 nt, Artificial Sequence
  Synthetic
ucaucuagaagcagacacguuua

SEQ ID NO: 511747 - RNA, 24 nt, Artificial Sequence
  Synthetic
uucaucuagaagcagacacguuua

SEQ ID NO: 511748 - RNA, 18 nt, Artificial Sequence
  Synthetic
cauggaggaacucguuua

SEQ ID NO: 511749 - RNA, 19 nt, Artificial Sequence
  Synthetic
ccauggaggaacucguuua

SEQ ID NO: 511750 - RNA, 20 nt, Artificial Sequence
  Synthetic
cccauggaggaacucguuua

SEQ ID NO: 511751 - RNA, 21 nt, Artificial Sequence
  Synthetic
ucccauggaggaacucguuua

SEQ ID NO: 511752 - RNA, 22 nt, Artificial Sequence
  Synthetic
gucccauggaggaacucguuua

SEQ ID NO: 511753 - RNA, 23 nt, Artificial Sequence
  Synthetic
agucccauggaggaacucguuua

SEQ ID NO: 511754 - RNA, 24 nt, Artificial Sequence
  Synthetic
uagucccauggaggaacucguuua

SEQ ID NO: 511755 - RNA, 18 nt, Artificial Sequence
  Synthetic
cuggggaaaaaagguuua

SEQ ID NO: 511756 - RNA, 19 nt, Artificial Sequence
  Synthetic
ucuggggaaaaaagguuua

SEQ ID NO: 511757 - RNA, 20 nt, Artificial Sequence
  Synthetic
uucuggggaaaaaagguuua

SEQ ID NO: 511758 - RNA, 21 nt, Artificial Sequence
  Synthetic
uuucuggggaaaaaagguuua

SEQ ID NO: 511759 - RNA, 22 nt, Artificial Sequence
  Synthetic
auuucuggggaaaaaagguuua

SEQ ID NO: 511760 - RNA, 23 nt, Artificial Sequence
  Synthetic
gauuucuggggaaaaaagguuua

SEQ ID NO: 511761 - RNA, 24 nt, Artificial Sequence
  Synthetic
agauuucuggggaaaaaagguuua

SEQ ID NO: 511762 - RNA, 18 nt, Artificial Sequence
  Synthetic
auaaaggaaagagguuua

SEQ ID NO: 511763 - RNA, 19 nt, Artificial Sequence
  Synthetic
uauaaaggaaagagguuua

SEQ ID NO: 511764 - RNA, 20 nt, Artificial Sequence
  Synthetic
uuauaaaggaaagagguuua

SEQ ID NO: 511765 - RNA, 21 nt, Artificial Sequence
  Synthetic
uuuauaaaggaaagagguuua

SEQ ID NO: 511766 - RNA, 22 nt, Artificial Sequence
  Synthetic
auuuauaaaggaaagagguuua

SEQ ID NO: 511767 - RNA, 23 nt, Artificial Sequence
  Synthetic
gauuuauaaaggaaagagguuua

SEQ ID NO: 511768 - RNA, 24 nt, Artificial Sequence
  Synthetic
ugauuuauaaaggaaagagguuua

SEQ ID NO: 511769 - RNA, 18 nt, Artificial Sequence
  Synthetic
cagaaguagagagguuua

SEQ ID NO: 511770 - RNA, 19 nt, Artificial Sequence
  Synthetic
ucagaaguagagagguuua

SEQ ID NO: 511771 - RNA, 20 nt, Artificial Sequence
  Synthetic
uucagaaguagagagguuua

SEQ ID NO: 511772 - RNA, 21 nt, Artificial Sequence
  Synthetic
auucagaaguagagagguuua

SEQ ID NO: 511773 - RNA, 22 nt, Artificial Sequence
  Synthetic
aauucagaaguagagagguuua

SEQ ID NO: 511774 - RNA, 23 nt, Artificial Sequence
  Synthetic
gaauucagaaguagagagguuua

SEQ ID NO: 511775 - RNA, 24 nt, Artificial Sequence
  Synthetic
agaauucagaaguagagagguuua

SEQ ID NO: 511776 - RNA, 18 nt, Artificial Sequence
  Synthetic
ugaaaacuaugagguuua

SEQ ID NO: 511777 - RNA, 19 nt, Artificial Sequence
  Synthetic
uugaaaacuaugagguuua

SEQ ID NO: 511778 - RNA, 20 nt, Artificial Sequence
  Synthetic
guugaaaacuaugagguuua

SEQ ID NO: 511779 - RNA, 21 nt, Artificial Sequence
  Synthetic
aguugaaaacuaugagguuua

SEQ ID NO: 511780 - RNA, 22 nt, Artificial Sequence
  Synthetic
aaguugaaaacuaugagguuua

SEQ ID NO: 511781 - RNA, 23 nt, Artificial Sequence
  Synthetic
gaaguugaaaacuaugagguuua

SEQ ID NO: 511782 - RNA, 24 nt, Artificial Sequence
  Synthetic
agaaguugaaaacuaugagguuua

SEQ ID NO: 511783 - RNA, 18 nt, Artificial Sequence
  Synthetic
uuacuguauaaggguuua

SEQ ID NO: 511784 - RNA, 19 nt, Artificial Sequence
  Synthetic
guuacuguauaaggguuua

SEQ ID NO: 511785 - RNA, 20 nt, Artificial Sequence
  Synthetic
uguuacuguauaaggguuua

SEQ ID NO: 511786 - RNA, 21 nt, Artificial Sequence
  Synthetic
auguuacuguauaaggguuua

SEQ ID NO: 511787 - RNA, 22 nt, Artificial Sequence
  Synthetic
gauguuacuguauaaggguuua

SEQ ID NO: 511788 - RNA, 23 nt, Artificial Sequence
  Synthetic
agauguuacuguauaaggguuua

SEQ ID NO: 511789 - RNA, 24 nt, Artificial Sequence
  Synthetic
aagauguuacuguauaaggguuua

SEQ ID NO: 511790 - RNA, 18 nt, Artificial Sequence
  Synthetic
gucaagaaugaggguuua

SEQ ID NO: 511791 - RNA, 19 nt, Artificial Sequence
  Synthetic
agucaagaaugaggguuua

SEQ ID NO: 511792 - RNA, 20 nt, Artificial Sequence
  Synthetic
cagucaagaaugaggguuua

SEQ ID NO: 511793 - RNA, 21 nt, Artificial Sequence
  Synthetic
acagucaagaaugaggguuua

SEQ ID NO: 511794 - RNA, 22 nt, Artificial Sequence
  Synthetic
cacagucaagaaugaggguuua

SEQ ID NO: 511795 - RNA, 23 nt, Artificial Sequence
  Synthetic
acacagucaagaaugaggguuua

SEQ ID NO: 511796 - RNA, 24 nt, Artificial Sequence
  Synthetic
gacacagucaagaaugaggguuua

SEQ ID NO: 511797 - RNA, 18 nt, Artificial Sequence
  Synthetic
aucuucucugaggguuua

SEQ ID NO: 511798 - RNA, 19 nt, Artificial Sequence
  Synthetic
gaucuucucugaggguuua

SEQ ID NO: 511799 - RNA, 20 nt, Artificial Sequence
  Synthetic
agaucuucucugaggguuua

SEQ ID NO: 511800 - RNA, 21 nt, Artificial Sequence
  Synthetic
aagaucuucucugaggguuua

SEQ ID NO: 511801 - RNA, 22 nt, Artificial Sequence
  Synthetic
aaagaucuucucugaggguuua

SEQ ID NO: 511802 - RNA, 23 nt, Artificial Sequence
  Synthetic
aaaagaucuucucugaggguuua

SEQ ID NO: 511803 - RNA, 24 nt, Artificial Sequence
  Synthetic
caaaagaucuucucugaggguuua

SEQ ID NO: 511804 - RNA, 18 nt, Artificial Sequence
  Synthetic
augcaaugcuuggguuua

SEQ ID NO: 511805 - RNA, 19 nt, Artificial Sequence
  Synthetic
aaugcaaugcuuggguuua

SEQ ID NO: 511806 - RNA, 20 nt, Artificial Sequence
  Synthetic
aaaugcaaugcuuggguuua

SEQ ID NO: 511807 - RNA, 21 nt, Artificial Sequence
  Synthetic
uaaaugcaaugcuuggguuua

SEQ ID NO: 511808 - RNA, 22 nt, Artificial Sequence
  Synthetic
uuaaaugcaaugcuuggguuua

SEQ ID NO: 511809 - RNA, 23 nt, Artificial Sequence
  Synthetic
cuuaaaugcaaugcuuggguuua

SEQ ID NO: 511810 - RNA, 24 nt, Artificial Sequence
  Synthetic
ccuuaaaugcaaugcuuggguuua

SEQ ID NO: 511811 - RNA, 18 nt, Artificial Sequence
  Synthetic
uagacgcuucaugguuua

SEQ ID NO: 511812 - RNA, 19 nt, Artificial Sequence
  Synthetic
uuagacgcuucaugguuua

SEQ ID NO: 511813 - RNA, 20 nt, Artificial Sequence
  Synthetic
guuagacgcuucaugguuua

SEQ ID NO: 511814 - RNA, 21 nt, Artificial Sequence
  Synthetic
aguuagacgcuucaugguuua

SEQ ID NO: 511815 - RNA, 22 nt, Artificial Sequence
  Synthetic
uaguuagacgcuucaugguuua

SEQ ID NO: 511816 - RNA, 23 nt, Artificial Sequence
  Synthetic
guaguuagacgcuucaugguuua

SEQ ID NO: 511817 - RNA, 24 nt, Artificial Sequence
  Synthetic
uguaguuagacgcuucaugguuua

SEQ ID NO: 511818 - RNA, 18 nt, Artificial Sequence
  Synthetic
gcaccagagacugguuua

SEQ ID NO: 511819 - RNA, 19 nt, Artificial Sequence
  Synthetic
ggcaccagagacugguuua

SEQ ID NO: 511820 - RNA, 20 nt, Artificial Sequence
  Synthetic
cggcaccagagacugguuua

SEQ ID NO: 511821 - RNA, 21 nt, Artificial Sequence
  Synthetic
ucggcaccagagacugguuua

SEQ ID NO: 511822 - RNA, 22 nt, Artificial Sequence
  Synthetic
uucggcaccagagacugguuua

SEQ ID NO: 511823 - RNA, 23 nt, Artificial Sequence
  Synthetic
uuucggcaccagagacugguuua

SEQ ID NO: 511824 - RNA, 24 nt, Artificial Sequence
  Synthetic
uuuucggcaccagagacugguuua

SEQ ID NO: 511825 - RNA, 18 nt, Artificial Sequence
  Synthetic
uuuuaaguaagugguuua

SEQ ID NO: 511826 - RNA, 19 nt, Artificial Sequence
  Synthetic
auuuuaaguaagugguuua

SEQ ID NO: 511827 - RNA, 20 nt, Artificial Sequence
  Synthetic
cauuuuaaguaagugguuua

SEQ ID NO: 511828 - RNA, 21 nt, Artificial Sequence
  Synthetic
gcauuuuaaguaagugguuua

SEQ ID NO: 511829 - RNA, 22 nt, Artificial Sequence
  Synthetic
ggcauuuuaaguaagugguuua

SEQ ID NO: 511830 - RNA, 23 nt, Artificial Sequence
  Synthetic
uggcauuuuaaguaagugguuua

SEQ ID NO: 511831 - RNA, 24 nt, Artificial Sequence
  Synthetic
auggcauuuuaaguaagugguuua

SEQ ID NO: 511832 - RNA, 18 nt, Artificial Sequence
  Synthetic
aaacgaaaaguugguuua

SEQ ID NO: 511833 - RNA, 19 nt, Artificial Sequence
  Synthetic
aaaacgaaaaguugguuua

SEQ ID NO: 511834 - RNA, 20 nt, Artificial Sequence
  Synthetic
caaaacgaaaaguugguuua

SEQ ID NO: 511835 - RNA, 21 nt, Artificial Sequence
  Synthetic
acaaaacgaaaaguugguuua

SEQ ID NO: 511836 - RNA, 22 nt, Artificial Sequence
  Synthetic
aacaaaacgaaaaguugguuua

SEQ ID NO: 511837 - RNA, 23 nt, Artificial Sequence
  Synthetic
caacaaaacgaaaaguugguuua

SEQ ID NO: 511838 - RNA, 24 nt, Artificial Sequence
  Synthetic
ucaacaaaacgaaaaguugguuua

SEQ ID NO: 511839 - RNA, 18 nt, Artificial Sequence
  Synthetic
uuguauuggugauguuua

SEQ ID NO: 511840 - RNA, 19 nt, Artificial Sequence
  Synthetic
guuguauuggugauguuua

SEQ ID NO: 511841 - RNA, 20 nt, Artificial Sequence
  Synthetic
gguuguauuggugauguuua

SEQ ID NO: 511842 - RNA, 21 nt, Artificial Sequence
  Synthetic
agguuguauuggugauguuua

SEQ ID NO: 511843 - RNA, 22 nt, Artificial Sequence
  Synthetic
cagguuguauuggugauguuua

SEQ ID NO: 511844 - RNA, 23 nt, Artificial Sequence
  Synthetic
acagguuguauuggugauguuua

SEQ ID NO: 511845 - RNA, 24 nt, Artificial Sequence
  Synthetic
aacagguuguauuggugauguuua

SEQ ID NO: 511846 - RNA, 18 nt, Artificial Sequence
  Synthetic
cuguaugucguauguuua

SEQ ID NO: 511847 - RNA, 19 nt, Artificial Sequence
  Synthetic
gcuguaugucguauguuua

SEQ ID NO: 511848 - RNA, 20 nt, Artificial Sequence
  Synthetic
agcuguaugucguauguuua

SEQ ID NO: 511849 - RNA, 21 nt, Artificial Sequence
  Synthetic
aagcuguaugucguauguuua

SEQ ID NO: 511850 - RNA, 22 nt, Artificial Sequence
  Synthetic
aaagcuguaugucguauguuua

SEQ ID NO: 511851 - RNA, 23 nt, Artificial Sequence
  Synthetic
aaaagcuguaugucguauguuua

SEQ ID NO: 511852 - RNA, 24 nt, Artificial Sequence
  Synthetic
uaaaagcuguaugucguauguuua

SEQ ID NO: 511853 - RNA, 18 nt, Artificial Sequence
  Synthetic
uucugcauugacuguuua

SEQ ID NO: 511854 - RNA, 19 nt, Artificial Sequence
  Synthetic
auucugcauugacuguuua

SEQ ID NO: 511855 - RNA, 20 nt, Artificial Sequence
  Synthetic
aauucugcauugacuguuua

SEQ ID NO: 511856 - RNA, 21 nt, Artificial Sequence
  Synthetic
gaauucugcauugacuguuua

SEQ ID NO: 511857 - RNA, 22 nt, Artificial Sequence
  Synthetic
ggaauucugcauugacuguuua

SEQ ID NO: 511858 - RNA, 23 nt, Artificial Sequence
  Synthetic
aggaauucugcauugacuguuua

SEQ ID NO: 511859 - RNA, 24 nt, Artificial Sequence
  Synthetic
uaggaauucugcauugacuguuua

SEQ ID NO: 511860 - RNA, 18 nt, Artificial Sequence
  Synthetic
caggagacuuccuguuua

SEQ ID NO: 511861 - RNA, 19 nt, Artificial Sequence
  Synthetic
ccaggagacuuccuguuua

SEQ ID NO: 511862 - RNA, 20 nt, Artificial Sequence
  Synthetic
gccaggagacuuccuguuua

SEQ ID NO: 511863 - RNA, 21 nt, Artificial Sequence
  Synthetic
ggccaggagacuuccuguuua

SEQ ID NO: 511864 - RNA, 22 nt, Artificial Sequence
  Synthetic
aggccaggagacuuccuguuua

SEQ ID NO: 511865 - RNA, 23 nt, Artificial Sequence
  Synthetic
caggccaggagacuuccuguuua

SEQ ID NO: 511866 - RNA, 24 nt, Artificial Sequence
  Synthetic
ucaggccaggagacuuccuguuua

SEQ ID NO: 511867 - RNA, 18 nt, Artificial Sequence
  Synthetic
aguagauggaaguguuua

SEQ ID NO: 511868 - RNA, 19 nt, Artificial Sequence
  Synthetic
gaguagauggaaguguuua

SEQ ID NO: 511869 - RNA, 20 nt, Artificial Sequence
  Synthetic
agaguagauggaaguguuua

SEQ ID NO: 511870 - RNA, 21 nt, Artificial Sequence
  Synthetic
cagaguagauggaaguguuua

SEQ ID NO: 511871 - RNA, 22 nt, Artificial Sequence
  Synthetic
acagaguagauggaaguguuua

SEQ ID NO: 511872 - RNA, 23 nt, Artificial Sequence
  Synthetic
cacagaguagauggaaguguuua

SEQ ID NO: 511873 - RNA, 24 nt, Artificial Sequence
  Synthetic
ccacagaguagauggaaguguuua

SEQ ID NO: 511874 - RNA, 18 nt, Artificial Sequence
  Synthetic
cucuuaucugauuguuua

SEQ ID NO: 511875 - RNA, 19 nt, Artificial Sequence
  Synthetic
ucucuuaucugauuguuua

SEQ ID NO: 511876 - RNA, 20 nt, Artificial Sequence
  Synthetic
cucucuuaucugauuguuua

SEQ ID NO: 511877 - RNA, 21 nt, Artificial Sequence
  Synthetic
ccucucuuaucugauuguuua

SEQ ID NO: 511878 - RNA, 22 nt, Artificial Sequence
  Synthetic
gccucucuuaucugauuguuua

SEQ ID NO: 511879 - RNA, 23 nt, Artificial Sequence
  Synthetic
agccucucuuaucugauuguuua

SEQ ID NO: 511880 - RNA, 24 nt, Artificial Sequence
  Synthetic
gagccucucuuaucugauuguuua

SEQ ID NO: 511881 - RNA, 18 nt, Artificial Sequence
  Synthetic
ucuuguugggguuguuua

SEQ ID NO: 511882 - RNA, 19 nt, Artificial Sequence
  Synthetic
uucuuguugggguuguuua

SEQ ID NO: 511883 - RNA, 20 nt, Artificial Sequence
  Synthetic
uuucuuguugggguuguuua

SEQ ID NO: 511884 - RNA, 21 nt, Artificial Sequence
  Synthetic
cuuucuuguugggguuguuua

SEQ ID NO: 511885 - RNA, 22 nt, Artificial Sequence
  Synthetic
acuuucuuguugggguuguuua

SEQ ID NO: 511886 - RNA, 23 nt, Artificial Sequence
  Synthetic
uacuuucuuguugggguuguuua

SEQ ID NO: 511887 - RNA, 24 nt, Artificial Sequence
  Synthetic
guacuuucuuguugggguuguuua

SEQ ID NO: 511888 - RNA, 18 nt, Artificial Sequence
  Synthetic
cauaaaaauaaaauuuua

SEQ ID NO: 511889 - RNA, 19 nt, Artificial Sequence
  Synthetic
acauaaaaauaaaauuuua

SEQ ID NO: 511890 - RNA, 20 nt, Artificial Sequence
  Synthetic
aacauaaaaauaaaauuuua

SEQ ID NO: 511891 - RNA, 21 nt, Artificial Sequence
  Synthetic
aaacauaaaaauaaaauuuua

SEQ ID NO: 511892 - RNA, 22 nt, Artificial Sequence
  Synthetic
uaaacauaaaaauaaaauuuua

SEQ ID NO: 511893 - RNA, 23 nt, Artificial Sequence
  Synthetic
auaaacauaaaaauaaaauuuua

SEQ ID NO: 511894 - RNA, 24 nt, Artificial Sequence
  Synthetic
gauaaacauaaaaauaaaauuuua

SEQ ID NO: 511895 - RNA, 18 nt, Artificial Sequence
  Synthetic
uguauuuauaaaauuuua

SEQ ID NO: 511896 - RNA, 19 nt, Artificial Sequence
  Synthetic
uuguauuuauaaaauuuua

SEQ ID NO: 511897 - RNA, 20 nt, Artificial Sequence
  Synthetic
uuuguauuuauaaaauuuua

SEQ ID NO: 511898 - RNA, 21 nt, Artificial Sequence
  Synthetic
cuuuguauuuauaaaauuuua

SEQ ID NO: 511899 - RNA, 22 nt, Artificial Sequence
  Synthetic
acuuuguauuuauaaaauuuua

SEQ ID NO: 511900 - RNA, 23 nt, Artificial Sequence
  Synthetic
aacuuuguauuuauaaaauuuua

SEQ ID NO: 511901 - RNA, 24 nt, Artificial Sequence
  Synthetic
aaacuuuguauuuauaaaauuuua

SEQ ID NO: 511902 - RNA, 18 nt, Artificial Sequence
  Synthetic
agggaacaguaaauuuua

SEQ ID NO: 511903 - RNA, 19 nt, Artificial Sequence
  Synthetic
cagggaacaguaaauuuua

SEQ ID NO: 511904 - RNA, 20 nt, Artificial Sequence
  Synthetic
ucagggaacaguaaauuuua

SEQ ID NO: 511905 - RNA, 21 nt, Artificial Sequence
  Synthetic
uucagggaacaguaaauuuua

SEQ ID NO: 511906 - RNA, 22 nt, Artificial Sequence
  Synthetic
auucagggaacaguaaauuuua

SEQ ID NO: 511907 - RNA, 23 nt, Artificial Sequence
  Synthetic
uauucagggaacaguaaauuuua

SEQ ID NO: 511908 - RNA, 24 nt, Artificial Sequence
  Synthetic
auauucagggaacaguaaauuuua

SEQ ID NO: 511909 - RNA, 18 nt, Artificial Sequence
  Synthetic
aaacaaaagagaauuuua

SEQ ID NO: 511910 - RNA, 19 nt, Artificial Sequence
  Synthetic
aaaacaaaagagaauuuua

SEQ ID NO: 511911 - RNA, 20 nt, Artificial Sequence
  Synthetic
uaaaacaaaagagaauuuua

SEQ ID NO: 511912 - RNA, 21 nt, Artificial Sequence
  Synthetic
guaaaacaaaagagaauuuua

SEQ ID NO: 511913 - RNA, 22 nt, Artificial Sequence
  Synthetic
aguaaaacaaaagagaauuuua

SEQ ID NO: 511914 - RNA, 23 nt, Artificial Sequence
  Synthetic
uaguaaaacaaaagagaauuuua

SEQ ID NO: 511915 - RNA, 24 nt, Artificial Sequence
  Synthetic
uuaguaaaacaaaagagaauuuua

SEQ ID NO: 511916 - RNA, 18 nt, Artificial Sequence
  Synthetic
aagggguguugaauuuua

SEQ ID NO: 511917 - RNA, 19 nt, Artificial Sequence
  Synthetic
gaagggguguugaauuuua

SEQ ID NO: 511918 - RNA, 20 nt, Artificial Sequence
  Synthetic
ugaagggguguugaauuuua

SEQ ID NO: 511919 - RNA, 21 nt, Artificial Sequence
  Synthetic
augaagggguguugaauuuua

SEQ ID NO: 511920 - RNA, 22 nt, Artificial Sequence
  Synthetic
caugaagggguguugaauuuua

SEQ ID NO: 511921 - RNA, 23 nt, Artificial Sequence
  Synthetic
gcaugaagggguguugaauuuua

SEQ ID NO: 511922 - RNA, 24 nt, Artificial Sequence
  Synthetic
agcaugaagggguguugaauuuua

SEQ ID NO: 511923 - RNA, 18 nt, Artificial Sequence
  Synthetic
aggugacuuugaauuuua

SEQ ID NO: 511924 - RNA, 19 nt, Artificial Sequence
  Synthetic
caggugacuuugaauuuua

SEQ ID NO: 511925 - RNA, 20 nt, Artificial Sequence
  Synthetic
acaggugacuuugaauuuua

SEQ ID NO: 511926 - RNA, 21 nt, Artificial Sequence
  Synthetic
gacaggugacuuugaauuuua

SEQ ID NO: 511927 - RNA, 22 nt, Artificial Sequence
  Synthetic
agacaggugacuuugaauuuua

SEQ ID NO: 511928 - RNA, 23 nt, Artificial Sequence
  Synthetic
aagacaggugacuuugaauuuua

SEQ ID NO: 511929 - RNA, 24 nt, Artificial Sequence
  Synthetic
caagacaggugacuuugaauuuua

SEQ ID NO: 511930 - RNA, 18 nt, Artificial Sequence
  Synthetic
uaugggcauauaauuuua

SEQ ID NO: 511931 - RNA, 19 nt, Artificial Sequence
  Synthetic
cuaugggcauauaauuuua

SEQ ID NO: 511932 - RNA, 20 nt, Artificial Sequence
  Synthetic
ccuaugggcauauaauuuua

SEQ ID NO: 511933 - RNA, 21 nt, Artificial Sequence
  Synthetic
uccuaugggcauauaauuuua

SEQ ID NO: 511934 - RNA, 22 nt, Artificial Sequence
  Synthetic
cuccuaugggcauauaauuuua

SEQ ID NO: 511935 - RNA, 23 nt, Artificial Sequence
  Synthetic
gcuccuaugggcauauaauuuua

SEQ ID NO: 511936 - RNA, 24 nt, Artificial Sequence
  Synthetic
ugcuccuaugggcauauaauuuua

SEQ ID NO: 511937 - RNA, 18 nt, Artificial Sequence
  Synthetic
ugauagaauguaauuuua

SEQ ID NO: 511938 - RNA, 19 nt, Artificial Sequence
  Synthetic
augauagaauguaauuuua

SEQ ID NO: 511939 - RNA, 20 nt, Artificial Sequence
  Synthetic
aaugauagaauguaauuuua

SEQ ID NO: 511940 - RNA, 21 nt, Artificial Sequence
  Synthetic
uaaugauagaauguaauuuua

SEQ ID NO: 511941 - RNA, 22 nt, Artificial Sequence
  Synthetic
guaaugauagaauguaauuuua

SEQ ID NO: 511942 - RNA, 23 nt, Artificial Sequence
  Synthetic
uguaaugauagaauguaauuuua

SEQ ID NO: 511943 - RNA, 24 nt, Artificial Sequence
  Synthetic
guguaaugauagaauguaauuuua

SEQ ID NO: 511944 - RNA, 18 nt, Artificial Sequence
  Synthetic
auaaucaccuuaauuuua

SEQ ID NO: 511945 - RNA, 19 nt, Artificial Sequence
  Synthetic
uauaaucaccuuaauuuua

SEQ ID NO: 511946 - RNA, 20 nt, Artificial Sequence
  Synthetic
guauaaucaccuuaauuuua

SEQ ID NO: 511947 - RNA, 21 nt, Artificial Sequence
  Synthetic
aguauaaucaccuuaauuuua

SEQ ID NO: 511948 - RNA, 22 nt, Artificial Sequence
  Synthetic
uaguauaaucaccuuaauuuua

SEQ ID NO: 511949 - RNA, 23 nt, Artificial Sequence
  Synthetic
auaguauaaucaccuuaauuuua

SEQ ID NO: 511950 - RNA, 24 nt, Artificial Sequence
  Synthetic
aauaguauaaucaccuuaauuuua

SEQ ID NO: 511951 - RNA, 18 nt, Artificial Sequence
  Synthetic
ugccauuuguuaauuuua

SEQ ID NO: 511952 - RNA, 19 nt, Artificial Sequence
  Synthetic
uugccauuuguuaauuuua

SEQ ID NO: 511953 - RNA, 20 nt, Artificial Sequence
  Synthetic
uuugccauuuguuaauuuua

SEQ ID NO: 511954 - RNA, 21 nt, Artificial Sequence
  Synthetic
guuugccauuuguuaauuuua

SEQ ID NO: 511955 - RNA, 22 nt, Artificial Sequence
  Synthetic
uguuugccauuuguuaauuuua

SEQ ID NO: 511956 - RNA, 23 nt, Artificial Sequence
  Synthetic
cuguuugccauuuguuaauuuua

SEQ ID NO: 511957 - RNA, 24 nt, Artificial Sequence
  Synthetic
acuguuugccauuuguuaauuuua

SEQ ID NO: 511958 - RNA, 18 nt, Artificial Sequence
  Synthetic
caaagaaccaacauuuua

SEQ ID NO: 511959 - RNA, 19 nt, Artificial Sequence
  Synthetic
ucaaagaaccaacauuuua

SEQ ID NO: 511960 - RNA, 20 nt, Artificial Sequence
  Synthetic
gucaaagaaccaacauuuua

SEQ ID NO: 511961 - RNA, 21 nt, Artificial Sequence
  Synthetic
agucaaagaaccaacauuuua

SEQ ID NO: 511962 - RNA, 22 nt, Artificial Sequence
  Synthetic
uagucaaagaaccaacauuuua

SEQ ID NO: 511963 - RNA, 23 nt, Artificial Sequence
  Synthetic
guagucaaagaaccaacauuuua

SEQ ID NO: 511964 - RNA, 24 nt, Artificial Sequence
  Synthetic
aguagucaaagaaccaacauuuua

SEQ ID NO: 511965 - RNA, 18 nt, Artificial Sequence
  Synthetic
ucaacuauugacauuuua

SEQ ID NO: 511966 - RNA, 19 nt, Artificial Sequence
  Synthetic
uucaacuauugacauuuua

SEQ ID NO: 511967 - RNA, 20 nt, Artificial Sequence
  Synthetic
uuucaacuauugacauuuua

SEQ ID NO: 511968 - RNA, 21 nt, Artificial Sequence
  Synthetic
guuucaacuauugacauuuua

SEQ ID NO: 511969 - RNA, 22 nt, Artificial Sequence
  Synthetic
aguuucaacuauugacauuuua

SEQ ID NO: 511970 - RNA, 23 nt, Artificial Sequence
  Synthetic
uaguuucaacuauugacauuuua

SEQ ID NO: 511971 - RNA, 24 nt, Artificial Sequence
  Synthetic
uuaguuucaacuauugacauuuua

SEQ ID NO: 511972 - RNA, 18 nt, Artificial Sequence
  Synthetic
ccuuccaguaccauuuua

SEQ ID NO: 511973 - RNA, 19 nt, Artificial Sequence
  Synthetic
uccuuccaguaccauuuua

SEQ ID NO: 511974 - RNA, 20 nt, Artificial Sequence
  Synthetic
auccuuccaguaccauuuua

SEQ ID NO: 511975 - RNA, 21 nt, Artificial Sequence
  Synthetic
uauccuuccaguaccauuuua

SEQ ID NO: 511976 - RNA, 22 nt, Artificial Sequence
  Synthetic
guauccuuccaguaccauuuua

SEQ ID NO: 511977 - RNA, 23 nt, Artificial Sequence
  Synthetic
cguauccuuccaguaccauuuua

SEQ ID NO: 511978 - RNA, 24 nt, Artificial Sequence
  Synthetic
acguauccuuccaguaccauuuua

SEQ ID NO: 511979 - RNA, 18 nt, Artificial Sequence
  Synthetic
aucuauaguaccauuuua

SEQ ID NO: 511980 - RNA, 19 nt, Artificial Sequence
  Synthetic
gaucuauaguaccauuuua

SEQ ID NO: 511981 - RNA, 20 nt, Artificial Sequence
  Synthetic
agaucuauaguaccauuuua

SEQ ID NO: 511982 - RNA, 21 nt, Artificial Sequence
  Synthetic
aagaucuauaguaccauuuua

SEQ ID NO: 511983 - RNA, 22 nt, Artificial Sequence
  Synthetic
aaagaucuauaguaccauuuua

SEQ ID NO: 511984 - RNA, 23 nt, Artificial Sequence
  Synthetic
uaaagaucuauaguaccauuuua

SEQ ID NO: 511985 - RNA, 24 nt, Artificial Sequence
  Synthetic
auaaagaucuauaguaccauuuua

SEQ ID NO: 511986 - RNA, 18 nt, Artificial Sequence
  Synthetic
auuuauauuuccauuuua

SEQ ID NO: 511987 - RNA, 19 nt, Artificial Sequence
  Synthetic
cauuuauauuuccauuuua

SEQ ID NO: 511988 - RNA, 20 nt, Artificial Sequence
  Synthetic
ucauuuauauuuccauuuua

SEQ ID NO: 511989 - RNA, 21 nt, Artificial Sequence
  Synthetic
cucauuuauauuuccauuuua

SEQ ID NO: 511990 - RNA, 22 nt, Artificial Sequence
  Synthetic
ucucauuuauauuuccauuuua

SEQ ID NO: 511991 - RNA, 23 nt, Artificial Sequence
  Synthetic
aucucauuuauauuuccauuuua

SEQ ID NO: 511992 - RNA, 24 nt, Artificial Sequence
  Synthetic
caucucauuuauauuuccauuuua

SEQ ID NO: 511993 - RNA, 18 nt, Artificial Sequence
  Synthetic
uauuuuucaagcauuuua

SEQ ID NO: 511994 - RNA, 19 nt, Artificial Sequence
  Synthetic
uuauuuuucaagcauuuua

SEQ ID NO: 511995 - RNA, 20 nt, Artificial Sequence
  Synthetic
cuuauuuuucaagcauuuua

SEQ ID NO: 511996 - RNA, 21 nt, Artificial Sequence
  Synthetic
acuuauuuuucaagcauuuua

SEQ ID NO: 511997 - RNA, 22 nt, Artificial Sequence
  Synthetic
aacuuauuuuucaagcauuuua

SEQ ID NO: 511998 - RNA, 23 nt, Artificial Sequence
  Synthetic
caacuuauuuuucaagcauuuua

SEQ ID NO: 511999 - RNA, 24 nt, Artificial Sequence
  Synthetic
ucaacuuauuuuucaagcauuuua

SEQ ID NO: 512000 - RNA, 18 nt, Artificial Sequence
  Synthetic
aucgccuaaaucauuuua

SEQ ID NO: 512001 - RNA, 19 nt, Artificial Sequence
  Synthetic
caucgccuaaaucauuuua

SEQ ID NO: 512002 - RNA, 20 nt, Artificial Sequence
  Synthetic
acaucgccuaaaucauuuua

SEQ ID NO: 512003 - RNA, 21 nt, Artificial Sequence
  Synthetic
cacaucgccuaaaucauuuua

SEQ ID NO: 512004 - RNA, 22 nt, Artificial Sequence
  Synthetic
acacaucgccuaaaucauuuua

SEQ ID NO: 512005 - RNA, 23 nt, Artificial Sequence
  Synthetic
uacacaucgccuaaaucauuuua

SEQ ID NO: 512006 - RNA, 24 nt, Artificial Sequence
  Synthetic
guacacaucgccuaaaucauuuua

SEQ ID NO: 512007 - RNA, 18 nt, Artificial Sequence
  Synthetic
auguuauacaucauuuua

SEQ ID NO: 512008 - RNA, 19 nt, Artificial Sequence
  Synthetic
uauguuauacaucauuuua

SEQ ID NO: 512009 - RNA, 20 nt, Artificial Sequence
  Synthetic
uuauguuauacaucauuuua

SEQ ID NO: 512010 - RNA, 21 nt, Artificial Sequence
  Synthetic
auuauguuauacaucauuuua

SEQ ID NO: 512011 - RNA, 22 nt, Artificial Sequence
  Synthetic
gauuauguuauacaucauuuua

SEQ ID NO: 512012 - RNA, 23 nt, Artificial Sequence
  Synthetic
ugauuauguuauacaucauuuua

SEQ ID NO: 512013 - RNA, 24 nt, Artificial Sequence
  Synthetic
gugauuauguuauacaucauuuua

SEQ ID NO: 512014 - RNA, 18 nt, Artificial Sequence
  Synthetic
uccccuauucucauuuua

SEQ ID NO: 512015 - RNA, 19 nt, Artificial Sequence
  Synthetic
uuccccuauucucauuuua

SEQ ID NO: 512016 - RNA, 20 nt, Artificial Sequence
  Synthetic
auuccccuauucucauuuua

SEQ ID NO: 512017 - RNA, 21 nt, Artificial Sequence
  Synthetic
aauuccccuauucucauuuua

SEQ ID NO: 512018 - RNA, 22 nt, Artificial Sequence
  Synthetic
uaauuccccuauucucauuuua

SEQ ID NO: 512019 - RNA, 23 nt, Artificial Sequence
  Synthetic
uuaauuccccuauucucauuuua

SEQ ID NO: 512020 - RNA, 24 nt, Artificial Sequence
  Synthetic
uuuaauuccccuauucucauuuua

SEQ ID NO: 512021 - RNA, 18 nt, Artificial Sequence
  Synthetic
cgaguuugggucauuuua

SEQ ID NO: 512022 - RNA, 19 nt, Artificial Sequence
  Synthetic
acgaguuugggucauuuua

SEQ ID NO: 512023 - RNA, 20 nt, Artificial Sequence
  Synthetic
aacgaguuugggucauuuua

SEQ ID NO: 512024 - RNA, 21 nt, Artificial Sequence
  Synthetic
caacgaguuugggucauuuua

SEQ ID NO: 512025 - RNA, 22 nt, Artificial Sequence
  Synthetic
ccaacgaguuugggucauuuua

SEQ ID NO: 512026 - RNA, 23 nt, Artificial Sequence
  Synthetic
gccaacgaguuugggucauuuua

SEQ ID NO: 512027 - RNA, 24 nt, Artificial Sequence
  Synthetic
ggccaacgaguuugggucauuuua

SEQ ID NO: 512028 - RNA, 18 nt, Artificial Sequence
  Synthetic
uggaaaaucuucauuuua

SEQ ID NO: 512029 - RNA, 19 nt, Artificial Sequence
  Synthetic
guggaaaaucuucauuuua

SEQ ID NO: 512030 - RNA, 20 nt, Artificial Sequence
  Synthetic
gguggaaaaucuucauuuua

SEQ ID NO: 512031 - RNA, 21 nt, Artificial Sequence
  Synthetic
ugguggaaaaucuucauuuua

SEQ ID NO: 512032 - RNA, 22 nt, Artificial Sequence
  Synthetic
uugguggaaaaucuucauuuua

SEQ ID NO: 512033 - RNA, 23 nt, Artificial Sequence
  Synthetic
auugguggaaaaucuucauuuua

SEQ ID NO: 512034 - RNA, 24 nt, Artificial Sequence
  Synthetic
gauugguggaaaaucuucauuuua

SEQ ID NO: 512035 - RNA, 18 nt, Artificial Sequence
  Synthetic
cauggcuauaagauuuua

SEQ ID NO: 512036 - RNA, 19 nt, Artificial Sequence
  Synthetic
gcauggcuauaagauuuua

SEQ ID NO: 512037 - RNA, 20 nt, Artificial Sequence
  Synthetic
agcauggcuauaagauuuua

SEQ ID NO: 512038 - RNA, 21 nt, Artificial Sequence
  Synthetic
uagcauggcuauaagauuuua

SEQ ID NO: 512039 - RNA, 22 nt, Artificial Sequence
  Synthetic
auagcauggcuauaagauuuua

SEQ ID NO: 512040 - RNA, 23 nt, Artificial Sequence
  Synthetic
uauagcauggcuauaagauuuua

SEQ ID NO: 512041 - RNA, 24 nt, Artificial Sequence
  Synthetic
uuauagcauggcuauaagauuuua

SEQ ID NO: 512042 - RNA, 18 nt, Artificial Sequence
  Synthetic
caucaggcagagauuuua

SEQ ID NO: 512043 - RNA, 19 nt, Artificial Sequence
  Synthetic
acaucaggcagagauuuua

SEQ ID NO: 512044 - RNA, 20 nt, Artificial Sequence
  Synthetic
uacaucaggcagagauuuua

SEQ ID NO: 512045 - RNA, 21 nt, Artificial Sequence
  Synthetic
cuacaucaggcagagauuuua

SEQ ID NO: 512046 - RNA, 22 nt, Artificial Sequence
  Synthetic
gcuacaucaggcagagauuuua

SEQ ID NO: 512047 - RNA, 23 nt, Artificial Sequence
  Synthetic
ggcuacaucaggcagagauuuua

SEQ ID NO: 512048 - RNA, 24 nt, Artificial Sequence
  Synthetic
uggcuacaucaggcagagauuuua

SEQ ID NO: 512049 - RNA, 18 nt, Artificial Sequence
  Synthetic
guucuaaaauggauuuua

SEQ ID NO: 512050 - RNA, 19 nt, Artificial Sequence
  Synthetic
aguucuaaaauggauuuua

SEQ ID NO: 512051 - RNA, 20 nt, Artificial Sequence
  Synthetic
uaguucuaaaauggauuuua

SEQ ID NO: 512052 - RNA, 21 nt, Artificial Sequence
  Synthetic
auaguucuaaaauggauuuua

SEQ ID NO: 512053 - RNA, 22 nt, Artificial Sequence
  Synthetic
aauaguucuaaaauggauuuua

SEQ ID NO: 512054 - RNA, 23 nt, Artificial Sequence
  Synthetic
caauaguucuaaaauggauuuua

SEQ ID NO: 512055 - RNA, 24 nt, Artificial Sequence
  Synthetic
ucaauaguucuaaaauggauuuua

SEQ ID NO: 512056 - RNA, 18 nt, Artificial Sequence
  Synthetic
gcacauagaaauauuuua

SEQ ID NO: 512057 - RNA, 19 nt, Artificial Sequence
  Synthetic
ggcacauagaaauauuuua

SEQ ID NO: 512058 - RNA, 20 nt, Artificial Sequence
  Synthetic
uggcacauagaaauauuuua

SEQ ID NO: 512059 - RNA, 21 nt, Artificial Sequence
  Synthetic
auggcacauagaaauauuuua

SEQ ID NO: 512060 - RNA, 22 nt, Artificial Sequence
  Synthetic
uauggcacauagaaauauuuua

SEQ ID NO: 512061 - RNA, 23 nt, Artificial Sequence
  Synthetic
auauggcacauagaaauauuuua

SEQ ID NO: 512062 - RNA, 24 nt, Artificial Sequence
  Synthetic
uauauggcacauagaaauauuuua

SEQ ID NO: 512063 - RNA, 18 nt, Artificial Sequence
  Synthetic
cuacuauuuaauauuuua

SEQ ID NO: 512064 - RNA, 19 nt, Artificial Sequence
  Synthetic
ucuacuauuuaauauuuua

SEQ ID NO: 512065 - RNA, 20 nt, Artificial Sequence
  Synthetic
uucuacuauuuaauauuuua

SEQ ID NO: 512066 - RNA, 21 nt, Artificial Sequence
  Synthetic
uuucuacuauuuaauauuuua

SEQ ID NO: 512067 - RNA, 22 nt, Artificial Sequence
  Synthetic
auuucuacuauuuaauauuuua

SEQ ID NO: 512068 - RNA, 23 nt, Artificial Sequence
  Synthetic
uauuucuacuauuuaauauuuua

SEQ ID NO: 512069 - RNA, 24 nt, Artificial Sequence
  Synthetic
uuauuucuacuauuuaauauuuua

SEQ ID NO: 512070 - RNA, 18 nt, Artificial Sequence
  Synthetic
auuaaaagacauauuuua

SEQ ID NO: 512071 - RNA, 19 nt, Artificial Sequence
  Synthetic
aauuaaaagacauauuuua

SEQ ID NO: 512072 - RNA, 20 nt, Artificial Sequence
  Synthetic
gaauuaaaagacauauuuua

SEQ ID NO: 512073 - RNA, 21 nt, Artificial Sequence
  Synthetic
ggaauuaaaagacauauuuua

SEQ ID NO: 512074 - RNA, 22 nt, Artificial Sequence
  Synthetic
aggaauuaaaagacauauuuua

SEQ ID NO: 512075 - RNA, 23 nt, Artificial Sequence
  Synthetic
aaggaauuaaaagacauauuuua

SEQ ID NO: 512076 - RNA, 24 nt, Artificial Sequence
  Synthetic
uaaggaauuaaaagacauauuuua

SEQ ID NO: 512077 - RNA, 18 nt, Artificial Sequence
  Synthetic
aagggguggacuauuuua

SEQ ID NO: 512078 - RNA, 19 nt, Artificial Sequence
  Synthetic
gaagggguggacuauuuua

SEQ ID NO: 512079 - RNA, 20 nt, Artificial Sequence
  Synthetic
ugaagggguggacuauuuua

SEQ ID NO: 512080 - RNA, 21 nt, Artificial Sequence
  Synthetic
gugaagggguggacuauuuua

SEQ ID NO: 512081 - RNA, 22 nt, Artificial Sequence
  Synthetic
agugaagggguggacuauuuua

SEQ ID NO: 512082 - RNA, 23 nt, Artificial Sequence
  Synthetic
aagugaagggguggacuauuuua

SEQ ID NO: 512083 - RNA, 24 nt, Artificial Sequence
  Synthetic
aaagugaagggguggacuauuuua

SEQ ID NO: 512084 - RNA, 18 nt, Artificial Sequence
  Synthetic
agguccuauacuauuuua

SEQ ID NO: 512085 - RNA, 19 nt, Artificial Sequence
  Synthetic
aagguccuauacuauuuua

SEQ ID NO: 512086 - RNA, 20 nt, Artificial Sequence
  Synthetic
aaagguccuauacuauuuua

SEQ ID NO: 512087 - RNA, 21 nt, Artificial Sequence
  Synthetic
aaaagguccuauacuauuuua

SEQ ID NO: 512088 - RNA, 22 nt, Artificial Sequence
  Synthetic
uaaaagguccuauacuauuuua

SEQ ID NO: 512089 - RNA, 23 nt, Artificial Sequence
  Synthetic
auaaaagguccuauacuauuuua

SEQ ID NO: 512090 - RNA, 24 nt, Artificial Sequence
  Synthetic
aauaaaagguccuauacuauuuua

SEQ ID NO: 512091 - RNA, 18 nt, Artificial Sequence
  Synthetic
auuuuaccuacuauuuua

SEQ ID NO: 512092 - RNA, 19 nt, Artificial Sequence
  Synthetic
aauuuuaccuacuauuuua

SEQ ID NO: 512093 - RNA, 20 nt, Artificial Sequence
  Synthetic
aaauuuuaccuacuauuuua

SEQ ID NO: 512094 - RNA, 21 nt, Artificial Sequence
  Synthetic
aaaauuuuaccuacuauuuua

SEQ ID NO: 512095 - RNA, 22 nt, Artificial Sequence
  Synthetic
aaaaauuuuaccuacuauuuua

SEQ ID NO: 512096 - RNA, 23 nt, Artificial Sequence
  Synthetic
uaaaaauuuuaccuacuauuuua

SEQ ID NO: 512097 - RNA, 24 nt, Artificial Sequence
  Synthetic
uuaaaaauuuuaccuacuauuuua

SEQ ID NO: 512098 - RNA, 18 nt, Artificial Sequence
  Synthetic
caggaugcuacuauuuua

SEQ ID NO: 512099 - RNA, 19 nt, Artificial Sequence
  Synthetic
ucaggaugcuacuauuuua

SEQ ID NO: 512100 - RNA, 20 nt, Artificial Sequence
  Synthetic
aucaggaugcuacuauuuua

SEQ ID NO: 512101 - RNA, 21 nt, Artificial Sequence
  Synthetic
uaucaggaugcuacuauuuua

SEQ ID NO: 512102 - RNA, 22 nt, Artificial Sequence
  Synthetic
uuaucaggaugcuacuauuuua

SEQ ID NO: 512103 - RNA, 23 nt, Artificial Sequence
  Synthetic
cuuaucaggaugcuacuauuuua

SEQ ID NO: 512104 - RNA, 24 nt, Artificial Sequence
  Synthetic
ccuuaucaggaugcuacuauuuua

SEQ ID NO: 512105 - RNA, 18 nt, Artificial Sequence
  Synthetic
auaagugagccuauuuua

SEQ ID NO: 512106 - RNA, 19 nt, Artificial Sequence
  Synthetic
uauaagugagccuauuuua

SEQ ID NO: 512107 - RNA, 20 nt, Artificial Sequence
  Synthetic
uuauaagugagccuauuuua

SEQ ID NO: 512108 - RNA, 21 nt, Artificial Sequence
  Synthetic
guuauaagugagccuauuuua

SEQ ID NO: 512109 - RNA, 22 nt, Artificial Sequence
  Synthetic
aguuauaagugagccuauuuua

SEQ ID NO: 512110 - RNA, 23 nt, Artificial Sequence
  Synthetic
uaguuauaagugagccuauuuua

SEQ ID NO: 512111 - RNA, 24 nt, Artificial Sequence
  Synthetic
auaguuauaagugagccuauuuua

SEQ ID NO: 512112 - RNA, 18 nt, Artificial Sequence
  Synthetic
uguaaguucucuauuuua

SEQ ID NO: 512113 - RNA, 19 nt, Artificial Sequence
  Synthetic
auguaaguucucuauuuua

SEQ ID NO: 512114 - RNA, 20 nt, Artificial Sequence
  Synthetic
gauguaaguucucuauuuua

SEQ ID NO: 512115 - RNA, 21 nt, Artificial Sequence
  Synthetic
agauguaaguucucuauuuua

SEQ ID NO: 512116 - RNA, 22 nt, Artificial Sequence
  Synthetic
aagauguaaguucucuauuuua

SEQ ID NO: 512117 - RNA, 23 nt, Artificial Sequence
  Synthetic
caagauguaaguucucuauuuua

SEQ ID NO: 512118 - RNA, 24 nt, Artificial Sequence
  Synthetic
acaagauguaaguucucuauuuua

SEQ ID NO: 512119 - RNA, 18 nt, Artificial Sequence
  Synthetic
ggaaacaagucuauuuua

SEQ ID NO: 512120 - RNA, 19 nt, Artificial Sequence
  Synthetic
aggaaacaagucuauuuua

SEQ ID NO: 512121 - RNA, 20 nt, Artificial Sequence
  Synthetic
gaggaaacaagucuauuuua

SEQ ID NO: 512122 - RNA, 21 nt, Artificial Sequence
  Synthetic
agaggaaacaagucuauuuua

SEQ ID NO: 512123 - RNA, 22 nt, Artificial Sequence
  Synthetic
aagaggaaacaagucuauuuua

SEQ ID NO: 512124 - RNA, 23 nt, Artificial Sequence
  Synthetic
caagaggaaacaagucuauuuua

SEQ ID NO: 512125 - RNA, 24 nt, Artificial Sequence
  Synthetic
ucaagaggaaacaagucuauuuua

SEQ ID NO: 512126 - RNA, 18 nt, Artificial Sequence
  Synthetic
uaguugcacaguauuuua

SEQ ID NO: 512127 - RNA, 19 nt, Artificial Sequence
  Synthetic
uuaguugcacaguauuuua

SEQ ID NO: 512128 - RNA, 20 nt, Artificial Sequence
  Synthetic
uuuaguugcacaguauuuua

SEQ ID NO: 512129 - RNA, 21 nt, Artificial Sequence
  Synthetic
guuuaguugcacaguauuuua

SEQ ID NO: 512130 - RNA, 22 nt, Artificial Sequence
  Synthetic
aguuuaguugcacaguauuuua

SEQ ID NO: 512131 - RNA, 23 nt, Artificial Sequence
  Synthetic
caguuuaguugcacaguauuuua

SEQ ID NO: 512132 - RNA, 24 nt, Artificial Sequence
  Synthetic
acaguuuaguugcacaguauuuua

SEQ ID NO: 512133 - RNA, 18 nt, Artificial Sequence
  Synthetic
cgguaugccaguauuuua

SEQ ID NO: 512134 - RNA, 19 nt, Artificial Sequence
  Synthetic
ucgguaugccaguauuuua

SEQ ID NO: 512135 - RNA, 20 nt, Artificial Sequence
  Synthetic
uucgguaugccaguauuuua

SEQ ID NO: 512136 - RNA, 21 nt, Artificial Sequence
  Synthetic
auucgguaugccaguauuuua

SEQ ID NO: 512137 - RNA, 22 nt, Artificial Sequence
  Synthetic
gauucgguaugccaguauuuua

SEQ ID NO: 512138 - RNA, 23 nt, Artificial Sequence
  Synthetic
ggauucgguaugccaguauuuua

SEQ ID NO: 512139 - RNA, 24 nt, Artificial Sequence
  Synthetic
uggauucgguaugccaguauuuua

SEQ ID NO: 512140 - RNA, 21 nt, Artificial Sequence
  Synthetic
auucgguuugccaguauuuua

SEQ ID NO: 512141 - RNA, 22 nt, Artificial Sequence
  Synthetic
gauucgguuugccaguauuuua

SEQ ID NO: 512142 - RNA, 23 nt, Artificial Sequence
  Synthetic
ggauucgguuugccaguauuuua

SEQ ID NO: 512143 - RNA, 24 nt, Artificial Sequence
  Synthetic
uggauucgguuugccaguauuuua

SEQ ID NO: 512144 - RNA, 18 nt, Artificial Sequence
  Synthetic
uggaauaaggguauuuua

SEQ ID NO: 512145 - RNA, 19 nt, Artificial Sequence
  Synthetic
auggaauaaggguauuuua

SEQ ID NO: 512146 - RNA, 20 nt, Artificial Sequence
  Synthetic
uauggaauaaggguauuuua

SEQ ID NO: 512147 - RNA, 21 nt, Artificial Sequence
  Synthetic
guauggaauaaggguauuuua

SEQ ID NO: 512148 - RNA, 22 nt, Artificial Sequence
  Synthetic
aguauggaauaaggguauuuua

SEQ ID NO: 512149 - RNA, 23 nt, Artificial Sequence
  Synthetic
aaguauggaauaaggguauuuua

SEQ ID NO: 512150 - RNA, 24 nt, Artificial Sequence
  Synthetic
gaaguauggaauaaggguauuuua

SEQ ID NO: 512151 - RNA, 18 nt, Artificial Sequence
  Synthetic
aaucccacugguauuuua

SEQ ID NO: 512152 - RNA, 19 nt, Artificial Sequence
  Synthetic
gaaucccacugguauuuua

SEQ ID NO: 512153 - RNA, 20 nt, Artificial Sequence
  Synthetic
agaaucccacugguauuuua

SEQ ID NO: 512154 - RNA, 21 nt, Artificial Sequence
  Synthetic
cagaaucccacugguauuuua

SEQ ID NO: 512155 - RNA, 22 nt, Artificial Sequence
  Synthetic
ucagaaucccacugguauuuua

SEQ ID NO: 512156 - RNA, 23 nt, Artificial Sequence
  Synthetic
aucagaaucccacugguauuuua

SEQ ID NO: 512157 - RNA, 24 nt, Artificial Sequence
  Synthetic
uaucagaaucccacugguauuuua

SEQ ID NO: 512158 - RNA, 18 nt, Artificial Sequence
  Synthetic
ucaaugaucuguauuuua

SEQ ID NO: 512159 - RNA, 19 nt, Artificial Sequence
  Synthetic
aucaaugaucuguauuuua

SEQ ID NO: 512160 - RNA, 20 nt, Artificial Sequence
  Synthetic
uaucaaugaucuguauuuua

SEQ ID NO: 512161 - RNA, 21 nt, Artificial Sequence
  Synthetic
auaucaaugaucuguauuuua

SEQ ID NO: 512162 - RNA, 22 nt, Artificial Sequence
  Synthetic
aauaucaaugaucuguauuuua

SEQ ID NO: 512163 - RNA, 23 nt, Artificial Sequence
  Synthetic
caauaucaaugaucuguauuuua

SEQ ID NO: 512164 - RNA, 24 nt, Artificial Sequence
  Synthetic
acaauaucaaugaucuguauuuua

SEQ ID NO: 512165 - RNA, 18 nt, Artificial Sequence
  Synthetic
acaaaauguauuauuuua

SEQ ID NO: 512166 - RNA, 19 nt, Artificial Sequence
  Synthetic
gacaaaauguauuauuuua

SEQ ID NO: 512167 - RNA, 20 nt, Artificial Sequence
  Synthetic
ggacaaaauguauuauuuua

SEQ ID NO: 512168 - RNA, 21 nt, Artificial Sequence
  Synthetic
uggacaaaauguauuauuuua

SEQ ID NO: 512169 - RNA, 22 nt, Artificial Sequence
  Synthetic
auggacaaaauguauuauuuua

SEQ ID NO: 512170 - RNA, 23 nt, Artificial Sequence
  Synthetic
uauggacaaaauguauuauuuua

SEQ ID NO: 512171 - RNA, 24 nt, Artificial Sequence
  Synthetic
cuauggacaaaauguauuauuuua

SEQ ID NO: 512172 - RNA, 18 nt, Artificial Sequence
  Synthetic
caguagcaauuuauuuua

SEQ ID NO: 512173 - RNA, 19 nt, Artificial Sequence
  Synthetic
acaguagcaauuuauuuua

SEQ ID NO: 512174 - RNA, 20 nt, Artificial Sequence
  Synthetic
uacaguagcaauuuauuuua

SEQ ID NO: 512175 - RNA, 21 nt, Artificial Sequence
  Synthetic
guacaguagcaauuuauuuua

SEQ ID NO: 512176 - RNA, 22 nt, Artificial Sequence
  Synthetic
uguacaguagcaauuuauuuua

SEQ ID NO: 512177 - RNA, 23 nt, Artificial Sequence
  Synthetic
auguacaguagcaauuuauuuua

SEQ ID NO: 512178 - RNA, 24 nt, Artificial Sequence
  Synthetic
uauguacaguagcaauuuauuuua

SEQ ID NO: 512179 - RNA, 18 nt, Artificial Sequence
  Synthetic
uuuuguuaauuuauuuua

SEQ ID NO: 512180 - RNA, 19 nt, Artificial Sequence
  Synthetic
uuuuuguuaauuuauuuua

SEQ ID NO: 512181 - RNA, 20 nt, Artificial Sequence
  Synthetic
auuuuuguuaauuuauuuua

SEQ ID NO: 512182 - RNA, 21 nt, Artificial Sequence
  Synthetic
uauuuuuguuaauuuauuuua

SEQ ID NO: 512183 - RNA, 22 nt, Artificial Sequence
  Synthetic
auauuuuuguuaauuuauuuua

SEQ ID NO: 512184 - RNA, 23 nt, Artificial Sequence
  Synthetic
aauauuuuuguuaauuuauuuua

SEQ ID NO: 512185 - RNA, 24 nt, Artificial Sequence
  Synthetic
aaauauuuuuguuaauuuauuuua

SEQ ID NO: 512186 - RNA, 18 nt, Artificial Sequence
  Synthetic
auggaaauuuuuauuuua

SEQ ID NO: 512187 - RNA, 19 nt, Artificial Sequence
  Synthetic
aauggaaauuuuuauuuua

SEQ ID NO: 512188 - RNA, 20 nt, Artificial Sequence
  Synthetic
uaauggaaauuuuuauuuua

SEQ ID NO: 512189 - RNA, 21 nt, Artificial Sequence
  Synthetic
guaauggaaauuuuuauuuua

SEQ ID NO: 512190 - RNA, 22 nt, Artificial Sequence
  Synthetic
gguaauggaaauuuuuauuuua

SEQ ID NO: 512191 - RNA, 23 nt, Artificial Sequence
  Synthetic
agguaauggaaauuuuuauuuua

SEQ ID NO: 512192 - RNA, 24 nt, Artificial Sequence
  Synthetic
gagguaauggaaauuuuuauuuua

SEQ ID NO: 512193 - RNA, 18 nt, Artificial Sequence
  Synthetic
aacucccuuuuuauuuua

SEQ ID NO: 512194 - RNA, 19 nt, Artificial Sequence
  Synthetic
uaacucccuuuuuauuuua

SEQ ID NO: 512195 - RNA, 20 nt, Artificial Sequence
  Synthetic
uuaacucccuuuuuauuuua

SEQ ID NO: 512196 - RNA, 21 nt, Artificial Sequence
  Synthetic
guuaacucccuuuuuauuuua

SEQ ID NO: 512197 - RNA, 22 nt, Artificial Sequence
  Synthetic
uguuaacucccuuuuuauuuua

SEQ ID NO: 512198 - RNA, 23 nt, Artificial Sequence
  Synthetic
cuguuaacucccuuuuuauuuua

SEQ ID NO: 512199 - RNA, 24 nt, Artificial Sequence
  Synthetic
ucuguuaacucccuuuuuauuuua

SEQ ID NO: 512200 - RNA, 18 nt, Artificial Sequence
  Synthetic
guaauaaaaaaacuuuua

SEQ ID NO: 512201 - RNA, 19 nt, Artificial Sequence
  Synthetic
aguaauaaaaaaacuuuua

SEQ ID NO: 512202 - RNA, 20 nt, Artificial Sequence
  Synthetic
caguaauaaaaaaacuuuua

SEQ ID NO: 512203 - RNA, 21 nt, Artificial Sequence
  Synthetic
gcaguaauaaaaaaacuuuua

SEQ ID NO: 512204 - RNA, 22 nt, Artificial Sequence
  Synthetic
agcaguaauaaaaaaacuuuua

SEQ ID NO: 512205 - RNA, 23 nt, Artificial Sequence
  Synthetic
cagcaguaauaaaaaaacuuuua

SEQ ID NO: 512206 - RNA, 24 nt, Artificial Sequence
  Synthetic
acagcaguaauaaaaaaacuuuua

SEQ ID NO: 512207 - RNA, 18 nt, Artificial Sequence
  Synthetic
cucuuaagcuaacuuuua

SEQ ID NO: 512208 - RNA, 19 nt, Artificial Sequence
  Synthetic
ucucuuaagcuaacuuuua

SEQ ID NO: 512209 - RNA, 20 nt, Artificial Sequence
  Synthetic
uucucuuaagcuaacuuuua

SEQ ID NO: 512210 - RNA, 21 nt, Artificial Sequence
  Synthetic
cuucucuuaagcuaacuuuua

SEQ ID NO: 512211 - RNA, 22 nt, Artificial Sequence
  Synthetic
ccuucucuuaagcuaacuuuua

SEQ ID NO: 512212 - RNA, 23 nt, Artificial Sequence
  Synthetic
gccuucucuuaagcuaacuuuua

SEQ ID NO: 512213 - RNA, 24 nt, Artificial Sequence
  Synthetic
ugccuucucuuaagcuaacuuuua

SEQ ID NO: 512214 - RNA, 18 nt, Artificial Sequence
  Synthetic
cuugcaaacacacuuuua

SEQ ID NO: 512215 - RNA, 19 nt, Artificial Sequence
  Synthetic
ucuugcaaacacacuuuua

SEQ ID NO: 512216 - RNA, 20 nt, Artificial Sequence
  Synthetic
uucuugcaaacacacuuuua

SEQ ID NO: 512217 - RNA, 21 nt, Artificial Sequence
  Synthetic
guucuugcaaacacacuuuua

SEQ ID NO: 512218 - RNA, 22 nt, Artificial Sequence
  Synthetic
uguucuugcaaacacacuuuua

SEQ ID NO: 512219 - RNA, 23 nt, Artificial Sequence
  Synthetic
cuguucuugcaaacacacuuuua

SEQ ID NO: 512220 - RNA, 24 nt, Artificial Sequence
  Synthetic
ccuguucuugcaaacacacuuuua

SEQ ID NO: 512221 - RNA, 18 nt, Artificial Sequence
  Synthetic
guuucacuucuacuuuua

SEQ ID NO: 512222 - RNA, 19 nt, Artificial Sequence
  Synthetic
aguuucacuucuacuuuua

SEQ ID NO: 512223 - RNA, 20 nt, Artificial Sequence
  Synthetic
uaguuucacuucuacuuuua

SEQ ID NO: 512224 - RNA, 21 nt, Artificial Sequence
  Synthetic
uuaguuucacuucuacuuuua

SEQ ID NO: 512225 - RNA, 22 nt, Artificial Sequence
  Synthetic
auuaguuucacuucuacuuuua

SEQ ID NO: 512226 - RNA, 23 nt, Artificial Sequence
  Synthetic
uauuaguuucacuucuacuuuua

SEQ ID NO: 512227 - RNA, 24 nt, Artificial Sequence
  Synthetic
auauuaguuucacuucuacuuuua

SEQ ID NO: 512228 - RNA, 18 nt, Artificial Sequence
  Synthetic
uacaacccaguacuuuua

SEQ ID NO: 512229 - RNA, 19 nt, Artificial Sequence
  Synthetic
auacaacccaguacuuuua

SEQ ID NO: 512230 - RNA, 20 nt, Artificial Sequence
  Synthetic
uauacaacccaguacuuuua

SEQ ID NO: 512231 - RNA, 21 nt, Artificial Sequence
  Synthetic
uuauacaacccaguacuuuua

SEQ ID NO: 512232 - RNA, 22 nt, Artificial Sequence
  Synthetic
auuauacaacccaguacuuuua

SEQ ID NO: 512233 - RNA, 23 nt, Artificial Sequence
  Synthetic
gauuauacaacccaguacuuuua

SEQ ID NO: 512234 - RNA, 24 nt, Artificial Sequence
  Synthetic
ugauuauacaacccaguacuuuua

SEQ ID NO: 512235 - RNA, 18 nt, Artificial Sequence
  Synthetic
gucugccugguacuuuua

SEQ ID NO: 512236 - RNA, 19 nt, Artificial Sequence
  Synthetic
ugucugccugguacuuuua

SEQ ID NO: 512237 - RNA, 20 nt, Artificial Sequence
  Synthetic
augucugccugguacuuuua

SEQ ID NO: 512238 - RNA, 21 nt, Artificial Sequence
  Synthetic
uaugucugccugguacuuuua

SEQ ID NO: 512239 - RNA, 22 nt, Artificial Sequence
  Synthetic
auaugucugccugguacuuuua

SEQ ID NO: 512240 - RNA, 23 nt, Artificial Sequence
  Synthetic
aauaugucugccugguacuuuua

SEQ ID NO: 512241 - RNA, 24 nt, Artificial Sequence
  Synthetic
aaauaugucugccugguacuuuua

SEQ ID NO: 512242 - RNA, 18 nt, Artificial Sequence
  Synthetic
caagaaaguguacuuuua

SEQ ID NO: 512243 - RNA, 19 nt, Artificial Sequence
  Synthetic
ucaagaaaguguacuuuua

SEQ ID NO: 512244 - RNA, 20 nt, Artificial Sequence
  Synthetic
aucaagaaaguguacuuuua

SEQ ID NO: 512245 - RNA, 21 nt, Artificial Sequence
  Synthetic
uaucaagaaaguguacuuuua

SEQ ID NO: 512246 - RNA, 22 nt, Artificial Sequence
  Synthetic
auaucaagaaaguguacuuuua

SEQ ID NO: 512247 - RNA, 23 nt, Artificial Sequence
  Synthetic
aauaucaagaaaguguacuuuua

SEQ ID NO: 512248 - RNA, 24 nt, Artificial Sequence
  Synthetic
gaauaucaagaaaguguacuuuua

SEQ ID NO: 512249 - RNA, 18 nt, Artificial Sequence
  Synthetic
uauguauuugaccuuuua

SEQ ID NO: 512250 - RNA, 19 nt, Artificial Sequence
  Synthetic
auauguauuugaccuuuua

SEQ ID NO: 512251 - RNA, 20 nt, Artificial Sequence
  Synthetic
aauauguauuugaccuuuua

SEQ ID NO: 512252 - RNA, 21 nt, Artificial Sequence
  Synthetic
uaauauguauuugaccuuuua

SEQ ID NO: 512253 - RNA, 22 nt, Artificial Sequence
  Synthetic
auaauauguauuugaccuuuua

SEQ ID NO: 512254 - RNA, 23 nt, Artificial Sequence
  Synthetic
cauaauauguauuugaccuuuua

SEQ ID NO: 512255 - RNA, 24 nt, Artificial Sequence
  Synthetic
ucauaauauguauuugaccuuuua

SEQ ID NO: 512256 - RNA, 18 nt, Artificial Sequence
  Synthetic
guuaucaccacccuuuua

SEQ ID NO: 512257 - RNA, 19 nt, Artificial Sequence
  Synthetic
uguuaucaccacccuuuua

SEQ ID NO: 512258 - RNA, 20 nt, Artificial Sequence
  Synthetic
guguuaucaccacccuuuua

SEQ ID NO: 512259 - RNA, 21 nt, Artificial Sequence
  Synthetic
aguguuaucaccacccuuuua

SEQ ID NO: 512260 - RNA, 22 nt, Artificial Sequence
  Synthetic
gaguguuaucaccacccuuuua

SEQ ID NO: 512261 - RNA, 23 nt, Artificial Sequence
  Synthetic
ugaguguuaucaccacccuuuua

SEQ ID NO: 512262 - RNA, 24 nt, Artificial Sequence
  Synthetic
augaguguuaucaccacccuuuua

SEQ ID NO: 512263 - RNA, 18 nt, Artificial Sequence
  Synthetic
cccgaaugcacccuuuua

SEQ ID NO: 512264 - RNA, 19 nt, Artificial Sequence
  Synthetic
gcccgaaugcacccuuuua

SEQ ID NO: 512265 - RNA, 20 nt, Artificial Sequence
  Synthetic
ggcccgaaugcacccuuuua

SEQ ID NO: 512266 - RNA, 21 nt, Artificial Sequence
  Synthetic
gggcccgaaugcacccuuuua

SEQ ID NO: 512267 - RNA, 22 nt, Artificial Sequence
  Synthetic
agggcccgaaugcacccuuuua

SEQ ID NO: 512268 - RNA, 23 nt, Artificial Sequence
  Synthetic
aagggcccgaaugcacccuuuua

SEQ ID NO: 512269 - RNA, 24 nt, Artificial Sequence
  Synthetic
gaagggcccgaaugcacccuuuua

SEQ ID NO: 512270 - RNA, 18 nt, Artificial Sequence
  Synthetic
auuuuguguggccuuuua

SEQ ID NO: 512271 - RNA, 19 nt, Artificial Sequence
  Synthetic
uauuuuguguggccuuuua

SEQ ID NO: 512272 - RNA, 20 nt, Artificial Sequence
  Synthetic
uuauuuuguguggccuuuua

SEQ ID NO: 512273 - RNA, 21 nt, Artificial Sequence
  Synthetic
cuuauuuuguguggccuuuua

SEQ ID NO: 512274 - RNA, 22 nt, Artificial Sequence
  Synthetic
acuuauuuuguguggccuuuua

SEQ ID NO: 512275 - RNA, 23 nt, Artificial Sequence
  Synthetic
uacuuauuuuguguggccuuuua

SEQ ID NO: 512276 - RNA, 24 nt, Artificial Sequence
  Synthetic
auacuuauuuuguguggccuuuua

SEQ ID NO: 512277 - RNA, 18 nt, Artificial Sequence
  Synthetic
uuucuauuuggccuuuua

SEQ ID NO: 512278 - RNA, 19 nt, Artificial Sequence
  Synthetic
uuuucuauuuggccuuuua

SEQ ID NO: 512279 - RNA, 20 nt, Artificial Sequence
  Synthetic
uuuuucuauuuggccuuuua

SEQ ID NO: 512280 - RNA, 21 nt, Artificial Sequence
  Synthetic
auuuuucuauuuggccuuuua

SEQ ID NO: 512281 - RNA, 22 nt, Artificial Sequence
  Synthetic
aauuuuucuauuuggccuuuua

SEQ ID NO: 512282 - RNA, 23 nt, Artificial Sequence
  Synthetic
aaauuuuucuauuuggccuuuua

SEQ ID NO: 512283 - RNA, 24 nt, Artificial Sequence
  Synthetic
gaaauuuuucuauuuggccuuuua

SEQ ID NO: 512284 - RNA, 18 nt, Artificial Sequence
  Synthetic
acaguaugacagcuuuua

SEQ ID NO: 512285 - RNA, 19 nt, Artificial Sequence
  Synthetic
uacaguaugacagcuuuua

SEQ ID NO: 512286 - RNA, 20 nt, Artificial Sequence
  Synthetic
uuacaguaugacagcuuuua

SEQ ID NO: 512287 - RNA, 21 nt, Artificial Sequence
  Synthetic
cuuacaguaugacagcuuuua

SEQ ID NO: 512288 - RNA, 22 nt, Artificial Sequence
  Synthetic
acuuacaguaugacagcuuuua

SEQ ID NO: 512289 - RNA, 23 nt, Artificial Sequence
  Synthetic
aacuuacaguaugacagcuuuua

SEQ ID NO: 512290 - RNA, 24 nt, Artificial Sequence
  Synthetic
gaacuuacaguaugacagcuuuua

SEQ ID NO: 512291 - RNA, 18 nt, Artificial Sequence
  Synthetic
aacacaaaaaggcuuuua

SEQ ID NO: 512292 - RNA, 19 nt, Artificial Sequence
  Synthetic
uaacacaaaaaggcuuuua

SEQ ID NO: 512293 - RNA, 20 nt, Artificial Sequence
  Synthetic
uuaacacaaaaaggcuuuua

SEQ ID NO: 512294 - RNA, 21 nt, Artificial Sequence
  Synthetic
auuaacacaaaaaggcuuuua

SEQ ID NO: 512295 - RNA, 22 nt, Artificial Sequence
  Synthetic
aauuaacacaaaaaggcuuuua

SEQ ID NO: 512296 - RNA, 23 nt, Artificial Sequence
  Synthetic
caauuaacacaaaaaggcuuuua

SEQ ID NO: 512297 - RNA, 24 nt, Artificial Sequence
  Synthetic
acaauuaacacaaaaaggcuuuua

SEQ ID NO: 512298 - RNA, 18 nt, Artificial Sequence
  Synthetic
cuguuaagcuugcuuuua

SEQ ID NO: 512299 - RNA, 19 nt, Artificial Sequence
  Synthetic
ucuguuaagcuugcuuuua

SEQ ID NO: 512300 - RNA, 20 nt, Artificial Sequence
  Synthetic
aucuguuaagcuugcuuuua

SEQ ID NO: 512301 - RNA, 21 nt, Artificial Sequence
  Synthetic
aaucuguuaagcuugcuuuua

SEQ ID NO: 512302 - RNA, 22 nt, Artificial Sequence
  Synthetic
gaaucuguuaagcuugcuuuua

SEQ ID NO: 512303 - RNA, 23 nt, Artificial Sequence
  Synthetic
agaaucuguuaagcuugcuuuua

SEQ ID NO: 512304 - RNA, 24 nt, Artificial Sequence
  Synthetic
aagaaucuguuaagcuugcuuuua

SEQ ID NO: 512305 - RNA, 18 nt, Artificial Sequence
  Synthetic
cugauugagcaucuuuua

SEQ ID NO: 512306 - RNA, 19 nt, Artificial Sequence
  Synthetic
ucugauugagcaucuuuua

SEQ ID NO: 512307 - RNA, 20 nt, Artificial Sequence
  Synthetic
uucugauugagcaucuuuua

SEQ ID NO: 512308 - RNA, 21 nt, Artificial Sequence
  Synthetic
uuucugauugagcaucuuuua

SEQ ID NO: 512309 - RNA, 22 nt, Artificial Sequence
  Synthetic
auuucugauugagcaucuuuua

SEQ ID NO: 512310 - RNA, 23 nt, Artificial Sequence
  Synthetic
cauuucugauugagcaucuuuua

SEQ ID NO: 512311 - RNA, 24 nt, Artificial Sequence
  Synthetic
ucauuucugauugagcaucuuuua

SEQ ID NO: 512312 - RNA, 18 nt, Artificial Sequence
  Synthetic
gcaaucuuaggucuuuua

SEQ ID NO: 512313 - RNA, 19 nt, Artificial Sequence
  Synthetic
ugcaaucuuaggucuuuua

SEQ ID NO: 512314 - RNA, 20 nt, Artificial Sequence
  Synthetic
augcaaucuuaggucuuuua

SEQ ID NO: 512315 - RNA, 21 nt, Artificial Sequence
  Synthetic
uaugcaaucuuaggucuuuua

SEQ ID NO: 512316 - RNA, 22 nt, Artificial Sequence
  Synthetic
uuaugcaaucuuaggucuuuua

SEQ ID NO: 512317 - RNA, 23 nt, Artificial Sequence
  Synthetic
uuuaugcaaucuuaggucuuuua

SEQ ID NO: 512318 - RNA, 24 nt, Artificial Sequence
  Synthetic
uuuuaugcaaucuuaggucuuuua

SEQ ID NO: 512319 - RNA, 18 nt, Artificial Sequence
  Synthetic
guaaucaaacuucuuuua

SEQ ID NO: 512320 - RNA, 19 nt, Artificial Sequence
  Synthetic
aguaaucaaacuucuuuua

SEQ ID NO: 512321 - RNA, 20 nt, Artificial Sequence
  Synthetic
gaguaaucaaacuucuuuua

SEQ ID NO: 512322 - RNA, 21 nt, Artificial Sequence
  Synthetic
ugaguaaucaaacuucuuuua

SEQ ID NO: 512323 - RNA, 22 nt, Artificial Sequence
  Synthetic
gugaguaaucaaacuucuuuua

SEQ ID NO: 512324 - RNA, 23 nt, Artificial Sequence
  Synthetic
ugugaguaaucaaacuucuuuua

SEQ ID NO: 512325 - RNA, 24 nt, Artificial Sequence
  Synthetic
cugugaguaaucaaacuucuuuua

SEQ ID NO: 512326 - RNA, 18 nt, Artificial Sequence
  Synthetic
uaaguauagcuucuuuua

SEQ ID NO: 512327 - RNA, 19 nt, Artificial Sequence
  Synthetic
uuaaguauagcuucuuuua

SEQ ID NO: 512328 - RNA, 20 nt, Artificial Sequence
  Synthetic
auuaaguauagcuucuuuua

SEQ ID NO: 512329 - RNA, 21 nt, Artificial Sequence
  Synthetic
uauuaaguauagcuucuuuua

SEQ ID NO: 512330 - RNA, 22 nt, Artificial Sequence
  Synthetic
uuauuaaguauagcuucuuuua

SEQ ID NO: 512331 - RNA, 23 nt, Artificial Sequence
  Synthetic
uuuauuaaguauagcuucuuuua

SEQ ID NO: 512332 - RNA, 24 nt, Artificial Sequence
  Synthetic
cuuuauuaaguauagcuucuuuua

SEQ ID NO: 512333 - RNA, 18 nt, Artificial Sequence
  Synthetic
ucaugcuuucuucuuuua

SEQ ID NO: 512334 - RNA, 19 nt, Artificial Sequence
  Synthetic
uucaugcuuucuucuuuua

SEQ ID NO: 512335 - RNA, 20 nt, Artificial Sequence
  Synthetic
uuucaugcuuucuucuuuua

SEQ ID NO: 512336 - RNA, 21 nt, Artificial Sequence
  Synthetic
guuucaugcuuucuucuuuua

SEQ ID NO: 512337 - RNA, 22 nt, Artificial Sequence
  Synthetic
uguuucaugcuuucuucuuuua

SEQ ID NO: 512338 - RNA, 23 nt, Artificial Sequence
  Synthetic
auguuucaugcuuucuucuuuua

SEQ ID NO: 512339 - RNA, 24 nt, Artificial Sequence
  Synthetic
gauguuucaugcuuucuucuuuua

SEQ ID NO: 512340 - RNA, 18 nt, Artificial Sequence
  Synthetic
uggguagaauuucuuuua

SEQ ID NO: 512341 - RNA, 19 nt, Artificial Sequence
  Synthetic
guggguagaauuucuuuua

SEQ ID NO: 512342 - RNA, 20 nt, Artificial Sequence
  Synthetic
aguggguagaauuucuuuua

SEQ ID NO: 512343 - RNA, 21 nt, Artificial Sequence
  Synthetic
uaguggguagaauuucuuuua

SEQ ID NO: 512344 - RNA, 22 nt, Artificial Sequence
  Synthetic
uuaguggguagaauuucuuuua

SEQ ID NO: 512345 - RNA, 23 nt, Artificial Sequence
  Synthetic
uuuaguggguagaauuucuuuua

SEQ ID NO: 512346 - RNA, 24 nt, Artificial Sequence
  Synthetic
cuuuaguggguagaauuucuuuua

SEQ ID NO: 512347 - RNA, 18 nt, Artificial Sequence
  Synthetic
aucugaaacaaaguuuua

SEQ ID NO: 512348 - RNA, 19 nt, Artificial Sequence
  Synthetic
uaucugaaacaaaguuuua

SEQ ID NO: 512349 - RNA, 20 nt, Artificial Sequence
  Synthetic
auaucugaaacaaaguuuua

SEQ ID NO: 512350 - RNA, 21 nt, Artificial Sequence
  Synthetic
aauaucugaaacaaaguuuua

SEQ ID NO: 512351 - RNA, 22 nt, Artificial Sequence
  Synthetic
aaauaucugaaacaaaguuuua

SEQ ID NO: 512352 - RNA, 23 nt, Artificial Sequence
  Synthetic
gaaauaucugaaacaaaguuuua

SEQ ID NO: 512353 - RNA, 24 nt, Artificial Sequence
  Synthetic
ugaaauaucugaaacaaaguuuua

SEQ ID NO: 512354 - RNA, 18 nt, Artificial Sequence
  Synthetic
gaaauucagaaaguuuua

SEQ ID NO: 512355 - RNA, 19 nt, Artificial Sequence
  Synthetic
ugaaauucagaaaguuuua

SEQ ID NO: 512356 - RNA, 20 nt, Artificial Sequence
  Synthetic
gugaaauucagaaaguuuua

SEQ ID NO: 512357 - RNA, 21 nt, Artificial Sequence
  Synthetic
ugugaaauucagaaaguuuua

SEQ ID NO: 512358 - RNA, 22 nt, Artificial Sequence
  Synthetic
gugugaaauucagaaaguuuua

SEQ ID NO: 512359 - RNA, 23 nt, Artificial Sequence
  Synthetic
agugugaaauucagaaaguuuua

SEQ ID NO: 512360 - RNA, 24 nt, Artificial Sequence
  Synthetic
cagugugaaauucagaaaguuuua

SEQ ID NO: 512361 - RNA, 18 nt, Artificial Sequence
  Synthetic
uuuaaaaauaaaguuuua

SEQ ID NO: 512362 - RNA, 19 nt, Artificial Sequence
  Synthetic
guuuaaaaauaaaguuuua

SEQ ID NO: 512363 - RNA, 20 nt, Artificial Sequence
  Synthetic
aguuuaaaaauaaaguuuua

SEQ ID NO: 512364 - RNA, 21 nt, Artificial Sequence
  Synthetic
uaguuuaaaaauaaaguuuua

SEQ ID NO: 512365 - RNA, 22 nt, Artificial Sequence
  Synthetic
guaguuuaaaaauaaaguuuua

SEQ ID NO: 512366 - RNA, 23 nt, Artificial Sequence
  Synthetic
uguaguuuaaaaauaaaguuuua

SEQ ID NO: 512367 - RNA, 24 nt, Artificial Sequence
  Synthetic
uuguaguuuaaaaauaaaguuuua

SEQ ID NO: 512368 - RNA, 21 nt, Artificial Sequence
  Synthetic
guuuuuguaaauaaaguuuua

SEQ ID NO: 512369 - RNA, 22 nt, Artificial Sequence
  Synthetic
uguuuuuguaaauaaaguuuua

SEQ ID NO: 512370 - RNA, 23 nt, Artificial Sequence
  Synthetic
cuguuuuuguaaauaaaguuuua

SEQ ID NO: 512371 - RNA, 24 nt, Artificial Sequence
  Synthetic
ccuguuuuuguaaauaaaguuuua

SEQ ID NO: 512372 - RNA, 18 nt, Artificial Sequence
  Synthetic
cauaagaaucaaguuuua

SEQ ID NO: 512373 - RNA, 19 nt, Artificial Sequence
  Synthetic
acauaagaaucaaguuuua

SEQ ID NO: 512374 - RNA, 20 nt, Artificial Sequence
  Synthetic
gacauaagaaucaaguuuua

SEQ ID NO: 512375 - RNA, 21 nt, Artificial Sequence
  Synthetic
ugacauaagaaucaaguuuua

SEQ ID NO: 512376 - RNA, 22 nt, Artificial Sequence
  Synthetic
augacauaagaaucaaguuuua

SEQ ID NO: 512377 - RNA, 23 nt, Artificial Sequence
  Synthetic
caugacauaagaaucaaguuuua

SEQ ID NO: 512378 - RNA, 24 nt, Artificial Sequence
  Synthetic
acaugacauaagaaucaaguuuua

SEQ ID NO: 512379 - RNA, 18 nt, Artificial Sequence
  Synthetic
auugcuuuguaaguuuua

SEQ ID NO: 512380 - RNA, 19 nt, Artificial Sequence
  Synthetic
aauugcuuuguaaguuuua

SEQ ID NO: 512381 - RNA, 20 nt, Artificial Sequence
  Synthetic
aaauugcuuuguaaguuuua

SEQ ID NO: 512382 - RNA, 21 nt, Artificial Sequence
  Synthetic
gaaauugcuuuguaaguuuua

SEQ ID NO: 512383 - RNA, 22 nt, Artificial Sequence
  Synthetic
ugaaauugcuuuguaaguuuua

SEQ ID NO: 512384 - RNA, 23 nt, Artificial Sequence
  Synthetic
augaaauugcuuuguaaguuuua

SEQ ID NO: 512385 - RNA, 24 nt, Artificial Sequence
  Synthetic
caugaaauugcuuuguaaguuuua

SEQ ID NO: 512386 - RNA, 18 nt, Artificial Sequence
  Synthetic
cagaugugaccaguuuua

SEQ ID NO: 512387 - RNA, 19 nt, Artificial Sequence
  Synthetic
ucagaugugaccaguuuua

SEQ ID NO: 512388 - RNA, 20 nt, Artificial Sequence
  Synthetic
gucagaugugaccaguuuua

SEQ ID NO: 512389 - RNA, 21 nt, Artificial Sequence
  Synthetic
agucagaugugaccaguuuua

SEQ ID NO: 512390 - RNA, 22 nt, Artificial Sequence
  Synthetic
gagucagaugugaccaguuuua

SEQ ID NO: 512391 - RNA, 23 nt, Artificial Sequence
  Synthetic
agagucagaugugaccaguuuua

SEQ ID NO: 512392 - RNA, 24 nt, Artificial Sequence
  Synthetic
uagagucagaugugaccaguuuua

SEQ ID NO: 512393 - RNA, 18 nt, Artificial Sequence
  Synthetic
gucagauaggcaguuuua

SEQ ID NO: 512394 - RNA, 19 nt, Artificial Sequence
  Synthetic
agucagauaggcaguuuua

SEQ ID NO: 512395 - RNA, 20 nt, Artificial Sequence
  Synthetic
cagucagauaggcaguuuua

SEQ ID NO: 512396 - RNA, 21 nt, Artificial Sequence
  Synthetic
acagucagauaggcaguuuua

SEQ ID NO: 512397 - RNA, 22 nt, Artificial Sequence
  Synthetic
cacagucagauaggcaguuuua

SEQ ID NO: 512398 - RNA, 23 nt, Artificial Sequence
  Synthetic
acacagucagauaggcaguuuua

SEQ ID NO: 512399 - RNA, 24 nt, Artificial Sequence
  Synthetic
aacacagucagauaggcaguuuua

SEQ ID NO: 512400 - RNA, 18 nt, Artificial Sequence
  Synthetic
aaacccuaggcaguuuua

SEQ ID NO: 512401 - RNA, 19 nt, Artificial Sequence
  Synthetic
caaacccuaggcaguuuua

SEQ ID NO: 512402 - RNA, 20 nt, Artificial Sequence
  Synthetic
ccaaacccuaggcaguuuua

SEQ ID NO: 512403 - RNA, 21 nt, Artificial Sequence
  Synthetic
cccaaacccuaggcaguuuua

SEQ ID NO: 512404 - RNA, 22 nt, Artificial Sequence
  Synthetic
ccccaaacccuaggcaguuuua

SEQ ID NO: 512405 - RNA, 23 nt, Artificial Sequence
  Synthetic
accccaaacccuaggcaguuuua

SEQ ID NO: 512406 - RNA, 24 nt, Artificial Sequence
  Synthetic
aaccccaaacccuaggcaguuuua

SEQ ID NO: 512407 - RNA, 18 nt, Artificial Sequence
  Synthetic
ucgauagccugaguuuua

SEQ ID NO: 512408 - RNA, 19 nt, Artificial Sequence
  Synthetic
gucgauagccugaguuuua

SEQ ID NO: 512409 - RNA, 20 nt, Artificial Sequence
  Synthetic
ggucgauagccugaguuuua

SEQ ID NO: 512410 - RNA, 21 nt, Artificial Sequence
  Synthetic
aggucgauagccugaguuuua

SEQ ID NO: 512411 - RNA, 22 nt, Artificial Sequence
  Synthetic
uaggucgauagccugaguuuua

SEQ ID NO: 512412 - RNA, 23 nt, Artificial Sequence
  Synthetic
guaggucgauagccugaguuuua

SEQ ID NO: 512413 - RNA, 24 nt, Artificial Sequence
  Synthetic
gguaggucgauagccugaguuuua

SEQ ID NO: 512414 - RNA, 18 nt, Artificial Sequence
  Synthetic
gcugcauguuuaguuuua

SEQ ID NO: 512415 - RNA, 19 nt, Artificial Sequence
  Synthetic
agcugcauguuuaguuuua

SEQ ID NO: 512416 - RNA, 20 nt, Artificial Sequence
  Synthetic
uagcugcauguuuaguuuua

SEQ ID NO: 512417 - RNA, 21 nt, Artificial Sequence
  Synthetic
guagcugcauguuuaguuuua

SEQ ID NO: 512418 - RNA, 22 nt, Artificial Sequence
  Synthetic
gguagcugcauguuuaguuuua

SEQ ID NO: 512419 - RNA, 23 nt, Artificial Sequence
  Synthetic
ugguagcugcauguuuaguuuua

SEQ ID NO: 512420 - RNA, 24 nt, Artificial Sequence
  Synthetic
augguagcugcauguuuaguuuua

SEQ ID NO: 512421 - RNA, 18 nt, Artificial Sequence
  Synthetic
gaucuacuacagguuuua

SEQ ID NO: 512422 - RNA, 19 nt, Artificial Sequence
  Synthetic
ggaucuacuacagguuuua

SEQ ID NO: 512423 - RNA, 20 nt, Artificial Sequence
  Synthetic
gggaucuacuacagguuuua

SEQ ID NO: 512424 - RNA, 21 nt, Artificial Sequence
  Synthetic
ggggaucuacuacagguuuua

SEQ ID NO: 512425 - RNA, 22 nt, Artificial Sequence
  Synthetic
aggggaucuacuacagguuuua

SEQ ID NO: 512426 - RNA, 23 nt, Artificial Sequence
  Synthetic
gaggggaucuacuacagguuuua

SEQ ID NO: 512427 - RNA, 24 nt, Artificial Sequence
  Synthetic
agaggggaucuacuacagguuuua

SEQ ID NO: 512428 - RNA, 18 nt, Artificial Sequence
  Synthetic
cuuauuaacuagguuuua

SEQ ID NO: 512429 - RNA, 19 nt, Artificial Sequence
  Synthetic
acuuauuaacuagguuuua

SEQ ID NO: 512430 - RNA, 20 nt, Artificial Sequence
  Synthetic
uacuuauuaacuagguuuua

SEQ ID NO: 512431 - RNA, 21 nt, Artificial Sequence
  Synthetic
guacuuauuaacuagguuuua

SEQ ID NO: 512432 - RNA, 22 nt, Artificial Sequence
  Synthetic
aguacuuauuaacuagguuuua

SEQ ID NO: 512433 - RNA, 23 nt, Artificial Sequence
  Synthetic
aaguacuuauuaacuagguuuua

SEQ ID NO: 512434 - RNA, 24 nt, Artificial Sequence
  Synthetic
aaaguacuuauuaacuagguuuua

SEQ ID NO: 512435 - RNA, 18 nt, Artificial Sequence
  Synthetic
agggccagguagguuuua

SEQ ID NO: 512436 - RNA, 19 nt, Artificial Sequence
  Synthetic
gagggccagguagguuuua

SEQ ID NO: 512437 - RNA, 20 nt, Artificial Sequence
  Synthetic
ggagggccagguagguuuua

SEQ ID NO: 512438 - RNA, 21 nt, Artificial Sequence
  Synthetic
aggagggccagguagguuuua

SEQ ID NO: 512439 - RNA, 22 nt, Artificial Sequence
  Synthetic
gaggagggccagguagguuuua

SEQ ID NO: 512440 - RNA, 23 nt, Artificial Sequence
  Synthetic
agaggagggccagguagguuuua

SEQ ID NO: 512441 - RNA, 24 nt, Artificial Sequence
  Synthetic
cagaggagggccagguagguuuua

SEQ ID NO: 512442 - RNA, 18 nt, Artificial Sequence
  Synthetic
auggcaaaggggguuuua

SEQ ID NO: 512443 - RNA, 19 nt, Artificial Sequence
  Synthetic
cauggcaaaggggguuuua

SEQ ID NO: 512444 - RNA, 20 nt, Artificial Sequence
  Synthetic
gcauggcaaaggggguuuua

SEQ ID NO: 512445 - RNA, 21 nt, Artificial Sequence
  Synthetic
ugcauggcaaaggggguuuua

SEQ ID NO: 512446 - RNA, 22 nt, Artificial Sequence
  Synthetic
augcauggcaaaggggguuuua

SEQ ID NO: 512447 - RNA, 23 nt, Artificial Sequence
  Synthetic
caugcauggcaaaggggguuuua

SEQ ID NO: 512448 - RNA, 24 nt, Artificial Sequence
  Synthetic
acaugcauggcaaaggggguuuua

SEQ ID NO: 512449 - RNA, 18 nt, Artificial Sequence
  Synthetic
aagcaaauaaauguuuua

SEQ ID NO: 512450 - RNA, 19 nt, Artificial Sequence
  Synthetic
caagcaaauaaauguuuua

SEQ ID NO: 512451 - RNA, 20 nt, Artificial Sequence
  Synthetic
ucaagcaaauaaauguuuua

SEQ ID NO: 512452 - RNA, 21 nt, Artificial Sequence
  Synthetic
aucaagcaaauaaauguuuua

SEQ ID NO: 512453 - RNA, 22 nt, Artificial Sequence
  Synthetic
aaucaagcaaauaaauguuuua

SEQ ID NO: 512454 - RNA, 23 nt, Artificial Sequence
  Synthetic
uaaucaagcaaauaaauguuuua

SEQ ID NO: 512455 - RNA, 24 nt, Artificial Sequence
  Synthetic
uuaaucaagcaaauaaauguuuua

SEQ ID NO: 512456 - RNA, 18 nt, Artificial Sequence
  Synthetic
uuuuuauugaauguuuua

SEQ ID NO: 512457 - RNA, 19 nt, Artificial Sequence
  Synthetic
auuuuuauugaauguuuua

SEQ ID NO: 512458 - RNA, 20 nt, Artificial Sequence
  Synthetic
uauuuuuauugaauguuuua

SEQ ID NO: 512459 - RNA, 21 nt, Artificial Sequence
  Synthetic
cuauuuuuauugaauguuuua

SEQ ID NO: 512460 - RNA, 22 nt, Artificial Sequence
  Synthetic
ucuauuuuuauugaauguuuua

SEQ ID NO: 512461 - RNA, 23 nt, Artificial Sequence
  Synthetic
uucuauuuuuauugaauguuuua

SEQ ID NO: 512462 - RNA, 24 nt, Artificial Sequence
  Synthetic
auucuauuuuuauugaauguuuua

SEQ ID NO: 512463 - RNA, 18 nt, Artificial Sequence
  Synthetic
aaagcauuuccuguuuua

SEQ ID NO: 512464 - RNA, 19 nt, Artificial Sequence
  Synthetic
uaaagcauuuccuguuuua

SEQ ID NO: 512465 - RNA, 20 nt, Artificial Sequence
  Synthetic
uuaaagcauuuccuguuuua

SEQ ID NO: 512466 - RNA, 21 nt, Artificial Sequence
  Synthetic
cuuaaagcauuuccuguuuua

SEQ ID NO: 512467 - RNA, 22 nt, Artificial Sequence
  Synthetic
ucuuaaagcauuuccuguuuua

SEQ ID NO: 512468 - RNA, 23 nt, Artificial Sequence
  Synthetic
aucuuaaagcauuuccuguuuua

SEQ ID NO: 512469 - RNA, 24 nt, Artificial Sequence
  Synthetic
gaucuuaaagcauuuccuguuuua

SEQ ID NO: 512470 - RNA, 18 nt, Artificial Sequence
  Synthetic
uugguggcucuuguuuua

SEQ ID NO: 512471 - RNA, 19 nt, Artificial Sequence
  Synthetic
auugguggcucuuguuuua

SEQ ID NO: 512472 - RNA, 20 nt, Artificial Sequence
  Synthetic
aauugguggcucuuguuuua

SEQ ID NO: 512473 - RNA, 21 nt, Artificial Sequence
  Synthetic
gaauugguggcucuuguuuua

SEQ ID NO: 512474 - RNA, 22 nt, Artificial Sequence
  Synthetic
ugaauugguggcucuuguuuua

SEQ ID NO: 512475 - RNA, 23 nt, Artificial Sequence
  Synthetic
uugaauugguggcucuuguuuua

SEQ ID NO: 512476 - RNA, 24 nt, Artificial Sequence
  Synthetic
uuugaauugguggcucuuguuuua

SEQ ID NO: 512477 - RNA, 18 nt, Artificial Sequence
  Synthetic
uauuuuuaauuuguuuua

SEQ ID NO: 512478 - RNA, 19 nt, Artificial Sequence
  Synthetic
cuauuuuuaauuuguuuua

SEQ ID NO: 512479 - RNA, 20 nt, Artificial Sequence
  Synthetic
acuauuuuuaauuuguuuua

SEQ ID NO: 512480 - RNA, 21 nt, Artificial Sequence
  Synthetic
uacuauuuuuaauuuguuuua

SEQ ID NO: 512481 - RNA, 22 nt, Artificial Sequence
  Synthetic
auacuauuuuuaauuuguuuua

SEQ ID NO: 512482 - RNA, 23 nt, Artificial Sequence
  Synthetic
aauacuauuuuuaauuuguuuua

SEQ ID NO: 512483 - RNA, 24 nt, Artificial Sequence
  Synthetic
caauacuauuuuuaauuuguuuua

SEQ ID NO: 512484 - RNA, 18 nt, Artificial Sequence
  Synthetic
uucuuucuugaauuuuua

SEQ ID NO: 512485 - RNA, 19 nt, Artificial Sequence
  Synthetic
uuucuuucuugaauuuuua

SEQ ID NO: 512486 - RNA, 20 nt, Artificial Sequence
  Synthetic
uuuucuuucuugaauuuuua

SEQ ID NO: 512487 - RNA, 21 nt, Artificial Sequence
  Synthetic
uuuuucuuucuugaauuuuua

SEQ ID NO: 512488 - RNA, 22 nt, Artificial Sequence
  Synthetic
uuuuuucuuucuugaauuuuua

SEQ ID NO: 512489 - RNA, 23 nt, Artificial Sequence
  Synthetic
uuuuuuucuuucuugaauuuuua

SEQ ID NO: 512490 - RNA, 24 nt, Artificial Sequence
  Synthetic
auuuuuuucuuucuugaauuuuua

SEQ ID NO: 512491 - RNA, 18 nt, Artificial Sequence
  Synthetic
caaaacaaguaauuuuua

SEQ ID NO: 512492 - RNA, 19 nt, Artificial Sequence
  Synthetic
acaaaacaaguaauuuuua

SEQ ID NO: 512493 - RNA, 20 nt, Artificial Sequence
  Synthetic
aacaaaacaaguaauuuuua

SEQ ID NO: 512494 - RNA, 21 nt, Artificial Sequence
  Synthetic
gaacaaaacaaguaauuuuua

SEQ ID NO: 512495 - RNA, 22 nt, Artificial Sequence
  Synthetic
ugaacaaaacaaguaauuuuua

SEQ ID NO: 512496 - RNA, 23 nt, Artificial Sequence
  Synthetic
augaacaaaacaaguaauuuuua

SEQ ID NO: 512497 - RNA, 24 nt, Artificial Sequence
  Synthetic
caugaacaaaacaaguaauuuuua

SEQ ID NO: 512498 - RNA, 18 nt, Artificial Sequence
  Synthetic
gugagugcuuaauuuuua

SEQ ID NO: 512499 - RNA, 19 nt, Artificial Sequence
  Synthetic
agugagugcuuaauuuuua

SEQ ID NO: 512500 - RNA, 20 nt, Artificial Sequence
  Synthetic
gagugagugcuuaauuuuua

SEQ ID NO: 512501 - RNA, 21 nt, Artificial Sequence
  Synthetic
agagugagugcuuaauuuuua

SEQ ID NO: 512502 - RNA, 22 nt, Artificial Sequence
  Synthetic
aagagugagugcuuaauuuuua

SEQ ID NO: 512503 - RNA, 23 nt, Artificial Sequence
  Synthetic
aaagagugagugcuuaauuuuua

SEQ ID NO: 512504 - RNA, 24 nt, Artificial Sequence
  Synthetic
caaagagugagugcuuaauuuuua

SEQ ID NO: 512505 - RNA, 18 nt, Artificial Sequence
  Synthetic
cuauucaauacauuuuua

SEQ ID NO: 512506 - RNA, 19 nt, Artificial Sequence
  Synthetic
acuauucaauacauuuuua

SEQ ID NO: 512507 - RNA, 20 nt, Artificial Sequence
  Synthetic
gacuauucaauacauuuuua

SEQ ID NO: 512508 - RNA, 21 nt, Artificial Sequence
  Synthetic
ugacuauucaauacauuuuua

SEQ ID NO: 512509 - RNA, 22 nt, Artificial Sequence
  Synthetic
augacuauucaauacauuuuua

SEQ ID NO: 512510 - RNA, 23 nt, Artificial Sequence
  Synthetic
aaugacuauucaauacauuuuua

SEQ ID NO: 512511 - RNA, 24 nt, Artificial Sequence
  Synthetic
gaaugacuauucaauacauuuuua

SEQ ID NO: 512512 - RNA, 18 nt, Artificial Sequence
  Synthetic
caaacuuugccauuuuua

SEQ ID NO: 512513 - RNA, 19 nt, Artificial Sequence
  Synthetic
ucaaacuuugccauuuuua

SEQ ID NO: 512514 - RNA, 20 nt, Artificial Sequence
  Synthetic
cucaaacuuugccauuuuua

SEQ ID NO: 512515 - RNA, 21 nt, Artificial Sequence
  Synthetic
ccucaaacuuugccauuuuua

SEQ ID NO: 512516 - RNA, 22 nt, Artificial Sequence
  Synthetic
accucaaacuuugccauuuuua

SEQ ID NO: 512517 - RNA, 23 nt, Artificial Sequence
  Synthetic
aaccucaaacuuugccauuuuua

SEQ ID NO: 512518 - RNA, 24 nt, Artificial Sequence
  Synthetic
aaaccucaaacuuugccauuuuua

SEQ ID NO: 512519 - RNA, 18 nt, Artificial Sequence
  Synthetic
cuaaacaauucauuuuua

SEQ ID NO: 512520 - RNA, 19 nt, Artificial Sequence
  Synthetic
acuaaacaauucauuuuua

SEQ ID NO: 512521 - RNA, 20 nt, Artificial Sequence
  Synthetic
cacuaaacaauucauuuuua

SEQ ID NO: 512522 - RNA, 21 nt, Artificial Sequence
  Synthetic
acacuaaacaauucauuuuua

SEQ ID NO: 512523 - RNA, 22 nt, Artificial Sequence
  Synthetic
aacacuaaacaauucauuuuua

SEQ ID NO: 512524 - RNA, 23 nt, Artificial Sequence
  Synthetic
uaacacuaaacaauucauuuuua

SEQ ID NO: 512525 - RNA, 24 nt, Artificial Sequence
  Synthetic
uuaacacuaaacaauucauuuuua

SEQ ID NO: 512526 - RNA, 18 nt, Artificial Sequence
  Synthetic
aaaaguaauucauuuuua

SEQ ID NO: 512527 - RNA, 19 nt, Artificial Sequence
  Synthetic
caaaaguaauucauuuuua

SEQ ID NO: 512528 - RNA, 20 nt, Artificial Sequence
  Synthetic
ucaaaaguaauucauuuuua

SEQ ID NO: 512529 - RNA, 21 nt, Artificial Sequence
  Synthetic
uucaaaaguaauucauuuuua

SEQ ID NO: 512530 - RNA, 22 nt, Artificial Sequence
  Synthetic
guucaaaaguaauucauuuuua

SEQ ID NO: 512531 - RNA, 23 nt, Artificial Sequence
  Synthetic
uguucaaaaguaauucauuuuua

SEQ ID NO: 512532 - RNA, 24 nt, Artificial Sequence
  Synthetic
auguucaaaaguaauucauuuuua

SEQ ID NO: 512533 - RNA, 18 nt, Artificial Sequence
  Synthetic
cucaauuuuucauuuuua

SEQ ID NO: 512534 - RNA, 19 nt, Artificial Sequence
  Synthetic
acucaauuuuucauuuuua

SEQ ID NO: 512535 - RNA, 20 nt, Artificial Sequence
  Synthetic
cacucaauuuuucauuuuua

SEQ ID NO: 512536 - RNA, 21 nt, Artificial Sequence
  Synthetic
ucacucaauuuuucauuuuua

SEQ ID NO: 512537 - RNA, 22 nt, Artificial Sequence
  Synthetic
uucacucaauuuuucauuuuua

SEQ ID NO: 512538 - RNA, 23 nt, Artificial Sequence
  Synthetic
auucacucaauuuuucauuuuua

SEQ ID NO: 512539 - RNA, 24 nt, Artificial Sequence
  Synthetic
aauucacucaauuuuucauuuuua

SEQ ID NO: 512540 - RNA, 18 nt, Artificial Sequence
  Synthetic
gguuucauuagauuuuua

SEQ ID NO: 512541 - RNA, 19 nt, Artificial Sequence
  Synthetic
ggguuucauuagauuuuua

SEQ ID NO: 512542 - RNA, 20 nt, Artificial Sequence
  Synthetic
aggguuucauuagauuuuua

SEQ ID NO: 512543 - RNA, 21 nt, Artificial Sequence
  Synthetic
aaggguuucauuagauuuuua

SEQ ID NO: 512544 - RNA, 22 nt, Artificial Sequence
  Synthetic
caaggguuucauuagauuuuua

SEQ ID NO: 512545 - RNA, 23 nt, Artificial Sequence
  Synthetic
ucaaggguuucauuagauuuuua

SEQ ID NO: 512546 - RNA, 24 nt, Artificial Sequence
  Synthetic
cucaaggguuucauuagauuuuua

SEQ ID NO: 512547 - RNA, 18 nt, Artificial Sequence
  Synthetic
uggccugagugauuuuua

SEQ ID NO: 512548 - RNA, 19 nt, Artificial Sequence
  Synthetic
uuggccugagugauuuuua

SEQ ID NO: 512549 - RNA, 20 nt, Artificial Sequence
  Synthetic
cuuggccugagugauuuuua

SEQ ID NO: 512550 - RNA, 21 nt, Artificial Sequence
  Synthetic
acuuggccugagugauuuuua

SEQ ID NO: 512551 - RNA, 22 nt, Artificial Sequence
  Synthetic
aacuuggccugagugauuuuua

SEQ ID NO: 512552 - RNA, 23 nt, Artificial Sequence
  Synthetic
aaacuuggccugagugauuuuua

SEQ ID NO: 512553 - RNA, 24 nt, Artificial Sequence
  Synthetic
gaaacuuggccugagugauuuuua

SEQ ID NO: 512554 - RNA, 18 nt, Artificial Sequence
  Synthetic
aaaaaugggauauuuuua

SEQ ID NO: 512555 - RNA, 19 nt, Artificial Sequence
  Synthetic
aaaaaaugggauauuuuua

SEQ ID NO: 512556 - RNA, 20 nt, Artificial Sequence
  Synthetic
aaaaaaaugggauauuuuua

SEQ ID NO: 512557 - RNA, 21 nt, Artificial Sequence
  Synthetic
uaaaaaaaugggauauuuuua

SEQ ID NO: 512558 - RNA, 22 nt, Artificial Sequence
  Synthetic
guaaaaaaaugggauauuuuua

SEQ ID NO: 512559 - RNA, 23 nt, Artificial Sequence
  Synthetic
gguaaaaaaaugggauauuuuua

SEQ ID NO: 512560 - RNA, 24 nt, Artificial Sequence
  Synthetic
agguaaaaaaaugggauauuuuua

SEQ ID NO: 512561 - RNA, 18 nt, Artificial Sequence
  Synthetic
auucauuuuauauuuuua

SEQ ID NO: 512562 - RNA, 19 nt, Artificial Sequence
  Synthetic
uauucauuuuauauuuuua

SEQ ID NO: 512563 - RNA, 20 nt, Artificial Sequence
  Synthetic
auauucauuuuauauuuuua

SEQ ID NO: 512564 - RNA, 21 nt, Artificial Sequence
  Synthetic
cauauucauuuuauauuuuua

SEQ ID NO: 512565 - RNA, 22 nt, Artificial Sequence
  Synthetic
acauauucauuuuauauuuuua

SEQ ID NO: 512566 - RNA, 23 nt, Artificial Sequence
  Synthetic
cacauauucauuuuauauuuuua

SEQ ID NO: 512567 - RNA, 24 nt, Artificial Sequence
  Synthetic
acacauauucauuuuauauuuuua

SEQ ID NO: 512568 - RNA, 18 nt, Artificial Sequence
  Synthetic
aucuuauuccuauuuuua

SEQ ID NO: 512569 - RNA, 19 nt, Artificial Sequence
  Synthetic
caucuuauuccuauuuuua

SEQ ID NO: 512570 - RNA, 20 nt, Artificial Sequence
  Synthetic
acaucuuauuccuauuuuua

SEQ ID NO: 512571 - RNA, 21 nt, Artificial Sequence
  Synthetic
aacaucuuauuccuauuuuua

SEQ ID NO: 512572 - RNA, 22 nt, Artificial Sequence
  Synthetic
aaacaucuuauuccuauuuuua

SEQ ID NO: 512573 - RNA, 23 nt, Artificial Sequence
  Synthetic
aaaacaucuuauuccuauuuuua

SEQ ID NO: 512574 - RNA, 24 nt, Artificial Sequence
  Synthetic
uaaaacaucuuauuccuauuuuua

SEQ ID NO: 512575 - RNA, 18 nt, Artificial Sequence
  Synthetic
uucaguauucuauuuuua

SEQ ID NO: 512576 - RNA, 19 nt, Artificial Sequence
  Synthetic
uuucaguauucuauuuuua

SEQ ID NO: 512577 - RNA, 20 nt, Artificial Sequence
  Synthetic
guuucaguauucuauuuuua

SEQ ID NO: 512578 - RNA, 21 nt, Artificial Sequence
  Synthetic
uguuucaguauucuauuuuua

SEQ ID NO: 512579 - RNA, 22 nt, Artificial Sequence
  Synthetic
uuguuucaguauucuauuuuua

SEQ ID NO: 512580 - RNA, 23 nt, Artificial Sequence
  Synthetic
uuuguuucaguauucuauuuuua

SEQ ID NO: 512581 - RNA, 24 nt, Artificial Sequence
  Synthetic
guuuguuucaguauucuauuuuua

SEQ ID NO: 512582 - RNA, 18 nt, Artificial Sequence
  Synthetic
uuugugcacguauuuuua

SEQ ID NO: 512583 - RNA, 19 nt, Artificial Sequence
  Synthetic
auuugugcacguauuuuua

SEQ ID NO: 512584 - RNA, 20 nt, Artificial Sequence
  Synthetic
gauuugugcacguauuuuua

SEQ ID NO: 512585 - RNA, 21 nt, Artificial Sequence
  Synthetic
agauuugugcacguauuuuua

SEQ ID NO: 512586 - RNA, 22 nt, Artificial Sequence
  Synthetic
aagauuugugcacguauuuuua

SEQ ID NO: 512587 - RNA, 23 nt, Artificial Sequence
  Synthetic
aaagauuugugcacguauuuuua

SEQ ID NO: 512588 - RNA, 24 nt, Artificial Sequence
  Synthetic
uaaagauuugugcacguauuuuua

SEQ ID NO: 512589 - RNA, 18 nt, Artificial Sequence
  Synthetic
caaggcccuguauuuuua

SEQ ID NO: 512590 - RNA, 19 nt, Artificial Sequence
  Synthetic
acaaggcccuguauuuuua

SEQ ID NO: 512591 - RNA, 20 nt, Artificial Sequence
  Synthetic
cacaaggcccuguauuuuua

SEQ ID NO: 512592 - RNA, 21 nt, Artificial Sequence
  Synthetic
ccacaaggcccuguauuuuua

SEQ ID NO: 512593 - RNA, 22 nt, Artificial Sequence
  Synthetic
accacaaggcccuguauuuuua

SEQ ID NO: 512594 - RNA, 23 nt, Artificial Sequence
  Synthetic
caccacaaggcccuguauuuuua

SEQ ID NO: 512595 - RNA, 24 nt, Artificial Sequence
  Synthetic
ccaccacaaggcccuguauuuuua

SEQ ID NO: 512596 - RNA, 18 nt, Artificial Sequence
  Synthetic
cuaauuuuuguauuuuua

SEQ ID NO: 512597 - RNA, 19 nt, Artificial Sequence
  Synthetic
gcuaauuuuuguauuuuua

SEQ ID NO: 512598 - RNA, 20 nt, Artificial Sequence
  Synthetic
agcuaauuuuuguauuuuua

SEQ ID NO: 512599 - RNA, 21 nt, Artificial Sequence
  Synthetic
cagcuaauuuuuguauuuuua

SEQ ID NO: 512600 - RNA, 22 nt, Artificial Sequence
  Synthetic
ccagcuaauuuuuguauuuuua

SEQ ID NO: 512601 - RNA, 23 nt, Artificial Sequence
  Synthetic
cccagcuaauuuuuguauuuuua

SEQ ID NO: 512602 - RNA, 24 nt, Artificial Sequence
  Synthetic
gcccagcuaauuuuuguauuuuua

SEQ ID NO: 512603 - RNA, 18 nt, Artificial Sequence
  Synthetic
gucauuuuuguauuuuua

SEQ ID NO: 512604 - RNA, 19 nt, Artificial Sequence
  Synthetic
ggucauuuuuguauuuuua

SEQ ID NO: 512605 - RNA, 20 nt, Artificial Sequence
  Synthetic
aggucauuuuuguauuuuua

SEQ ID NO: 512606 - RNA, 21 nt, Artificial Sequence
  Synthetic
caggucauuuuuguauuuuua

SEQ ID NO: 512607 - RNA, 22 nt, Artificial Sequence
  Synthetic
acaggucauuuuuguauuuuua

SEQ ID NO: 512608 - RNA, 23 nt, Artificial Sequence
  Synthetic
cacaggucauuuuuguauuuuua

SEQ ID NO: 512609 - RNA, 24 nt, Artificial Sequence
  Synthetic
gcacaggucauuuuuguauuuuua

SEQ ID NO: 512610 - RNA, 18 nt, Artificial Sequence
  Synthetic
agacaacuauuauuuuua

SEQ ID NO: 512611 - RNA, 19 nt, Artificial Sequence
  Synthetic
aagacaacuauuauuuuua

SEQ ID NO: 512612 - RNA, 20 nt, Artificial Sequence
  Synthetic
aaagacaacuauuauuuuua

SEQ ID NO: 512613 - RNA, 21 nt, Artificial Sequence
  Synthetic
aaaagacaacuauuauuuuua

SEQ ID NO: 512614 - RNA, 22 nt, Artificial Sequence
  Synthetic
aaaaagacaacuauuauuuuua

SEQ ID NO: 512615 - RNA, 23 nt, Artificial Sequence
  Synthetic
gaaaaagacaacuauuauuuuua

SEQ ID NO: 512616 - RNA, 24 nt, Artificial Sequence
  Synthetic
agaaaaagacaacuauuauuuuua

SEQ ID NO: 512617 - RNA, 18 nt, Artificial Sequence
  Synthetic
uugagucccuuauuuuua

SEQ ID NO: 512618 - RNA, 19 nt, Artificial Sequence
  Synthetic
uuugagucccuuauuuuua

SEQ ID NO: 512619 - RNA, 20 nt, Artificial Sequence
  Synthetic
guuugagucccuuauuuuua

SEQ ID NO: 512620 - RNA, 21 nt, Artificial Sequence
  Synthetic
uguuugagucccuuauuuuua

SEQ ID NO: 512621 - RNA, 22 nt, Artificial Sequence
  Synthetic
guguuugagucccuuauuuuua

SEQ ID NO: 512622 - RNA, 23 nt, Artificial Sequence
  Synthetic
uguguuugagucccuuauuuuua

SEQ ID NO: 512623 - RNA, 24 nt, Artificial Sequence
  Synthetic
auguguuugagucccuuauuuuua

SEQ ID NO: 512624 - RNA, 18 nt, Artificial Sequence
  Synthetic
aguuugagguuauuuuua

SEQ ID NO: 512625 - RNA, 19 nt, Artificial Sequence
  Synthetic
aaguuugagguuauuuuua

SEQ ID NO: 512626 - RNA, 20 nt, Artificial Sequence
  Synthetic
gaaguuugagguuauuuuua

SEQ ID NO: 512627 - RNA, 21 nt, Artificial Sequence
  Synthetic
ugaaguuugagguuauuuuua

SEQ ID NO: 512628 - RNA, 22 nt, Artificial Sequence
  Synthetic
cugaaguuugagguuauuuuua

SEQ ID NO: 512629 - RNA, 23 nt, Artificial Sequence
  Synthetic
ucugaaguuugagguuauuuuua

SEQ ID NO: 512630 - RNA, 24 nt, Artificial Sequence
  Synthetic
gucugaaguuugagguuauuuuua

SEQ ID NO: 512631 - RNA, 18 nt, Artificial Sequence
  Synthetic
acuuguuuuuuauuuuua

SEQ ID NO: 512632 - RNA, 19 nt, Artificial Sequence
  Synthetic
aacuuguuuuuuauuuuua

SEQ ID NO: 512633 - RNA, 20 nt, Artificial Sequence
  Synthetic
aaacuuguuuuuuauuuuua

SEQ ID NO: 512634 - RNA, 21 nt, Artificial Sequence
  Synthetic
aaaacuuguuuuuuauuuuua

SEQ ID NO: 512635 - RNA, 22 nt, Artificial Sequence
  Synthetic
gaaaacuuguuuuuuauuuuua

SEQ ID NO: 512636 - RNA, 23 nt, Artificial Sequence
  Synthetic
agaaaacuuguuuuuuauuuuua

SEQ ID NO: 512637 - RNA, 24 nt, Artificial Sequence
  Synthetic
aagaaaacuuguuuuuuauuuuua

SEQ ID NO: 512638 - RNA, 18 nt, Artificial Sequence
  Synthetic
caucucgacaacuuuuua

SEQ ID NO: 512639 - RNA, 19 nt, Artificial Sequence
  Synthetic
gcaucucgacaacuuuuua

SEQ ID NO: 512640 - RNA, 20 nt, Artificial Sequence
  Synthetic
agcaucucgacaacuuuuua

SEQ ID NO: 512641 - RNA, 21 nt, Artificial Sequence
  Synthetic
aagcaucucgacaacuuuuua

SEQ ID NO: 512642 - RNA, 22 nt, Artificial Sequence
  Synthetic
caagcaucucgacaacuuuuua

SEQ ID NO: 512643 - RNA, 23 nt, Artificial Sequence
  Synthetic
ucaagcaucucgacaacuuuuua

SEQ ID NO: 512644 - RNA, 24 nt, Artificial Sequence
  Synthetic
uucaagcaucucgacaacuuuuua

SEQ ID NO: 512645 - RNA, 18 nt, Artificial Sequence
  Synthetic
aaaugacaucccuuuuua

SEQ ID NO: 512646 - RNA, 19 nt, Artificial Sequence
  Synthetic
uaaaugacaucccuuuuua

SEQ ID NO: 512647 - RNA, 20 nt, Artificial Sequence
  Synthetic
uuaaaugacaucccuuuuua

SEQ ID NO: 512648 - RNA, 21 nt, Artificial Sequence
  Synthetic
auuaaaugacaucccuuuuua

SEQ ID NO: 512649 - RNA, 22 nt, Artificial Sequence
  Synthetic
gauuaaaugacaucccuuuuua

SEQ ID NO: 512650 - RNA, 23 nt, Artificial Sequence
  Synthetic
ugauuaaaugacaucccuuuuua

SEQ ID NO: 512651 - RNA, 24 nt, Artificial Sequence
  Synthetic
cugauuaaaugacaucccuuuuua

SEQ ID NO: 512652 - RNA, 18 nt, Artificial Sequence
  Synthetic
uucugaaucgccuuuuua

SEQ ID NO: 512653 - RNA, 19 nt, Artificial Sequence
  Synthetic
auucugaaucgccuuuuua

SEQ ID NO: 512654 - RNA, 20 nt, Artificial Sequence
  Synthetic
aauucugaaucgccuuuuua

SEQ ID NO: 512655 - RNA, 21 nt, Artificial Sequence
  Synthetic
caauucugaaucgccuuuuua

SEQ ID NO: 512656 - RNA, 22 nt, Artificial Sequence
  Synthetic
acaauucugaaucgccuuuuua

SEQ ID NO: 512657 - RNA, 23 nt, Artificial Sequence
  Synthetic
aacaauucugaaucgccuuuuua

SEQ ID NO: 512658 - RNA, 24 nt, Artificial Sequence
  Synthetic
uaacaauucugaaucgccuuuuua

SEQ ID NO: 512659 - RNA, 18 nt, Artificial Sequence
  Synthetic
caagaaauuagcuuuuua

SEQ ID NO: 512660 - RNA, 19 nt, Artificial Sequence
  Synthetic
gcaagaaauuagcuuuuua

SEQ ID NO: 512661 - RNA, 20 nt, Artificial Sequence
  Synthetic
agcaagaaauuagcuuuuua

SEQ ID NO: 512662 - RNA, 21 nt, Artificial Sequence
  Synthetic
cagcaagaaauuagcuuuuua

SEQ ID NO: 512663 - RNA, 22 nt, Artificial Sequence
  Synthetic
ccagcaagaaauuagcuuuuua

SEQ ID NO: 512664 - RNA, 23 nt, Artificial Sequence
  Synthetic
accagcaagaaauuagcuuuuua

SEQ ID NO: 512665 - RNA, 24 nt, Artificial Sequence
  Synthetic
uaccagcaagaaauuagcuuuuua

SEQ ID NO: 512666 - RNA, 18 nt, Artificial Sequence
  Synthetic
uuacuaucuggcuuuuua

SEQ ID NO: 512667 - RNA, 19 nt, Artificial Sequence
  Synthetic
uuuacuaucuggcuuuuua

SEQ ID NO: 512668 - RNA, 20 nt, Artificial Sequence
  Synthetic
auuuacuaucuggcuuuuua

SEQ ID NO: 512669 - RNA, 21 nt, Artificial Sequence
  Synthetic
uauuuacuaucuggcuuuuua

SEQ ID NO: 512670 - RNA, 22 nt, Artificial Sequence
  Synthetic
auauuuacuaucuggcuuuuua

SEQ ID NO: 512671 - RNA, 23 nt, Artificial Sequence
  Synthetic
aauauuuacuaucuggcuuuuua

SEQ ID NO: 512672 - RNA, 24 nt, Artificial Sequence
  Synthetic
aaauauuuacuaucuggcuuuuua

SEQ ID NO: 512673 - RNA, 18 nt, Artificial Sequence
  Synthetic
uaugaacuuaaguuuuua

SEQ ID NO: 512674 - RNA, 19 nt, Artificial Sequence
  Synthetic
auaugaacuuaaguuuuua

SEQ ID NO: 512675 - RNA, 20 nt, Artificial Sequence
  Synthetic
uauaugaacuuaaguuuuua

SEQ ID NO: 512676 - RNA, 21 nt, Artificial Sequence
  Synthetic
auauaugaacuuaaguuuuua

SEQ ID NO: 512677 - RNA, 22 nt, Artificial Sequence
  Synthetic
gauauaugaacuuaaguuuuua

SEQ ID NO: 512678 - RNA, 23 nt, Artificial Sequence
  Synthetic
ggauauaugaacuuaaguuuuua

SEQ ID NO: 512679 - RNA, 24 nt, Artificial Sequence
  Synthetic
gggauauaugaacuuaaguuuuua

SEQ ID NO: 512680 - RNA, 18 nt, Artificial Sequence
  Synthetic
gucuugugccgguuuuua

SEQ ID NO: 512681 - RNA, 19 nt, Artificial Sequence
  Synthetic
ugucuugugccgguuuuua

SEQ ID NO: 512682 - RNA, 20 nt, Artificial Sequence
  Synthetic
uugucuugugccgguuuuua

SEQ ID NO: 512683 - RNA, 21 nt, Artificial Sequence
  Synthetic
cuugucuugugccgguuuuua

SEQ ID NO: 512684 - RNA, 22 nt, Artificial Sequence
  Synthetic
ccuugucuugugccgguuuuua

SEQ ID NO: 512685 - RNA, 23 nt, Artificial Sequence
  Synthetic
uccuugucuugugccgguuuuua

SEQ ID NO: 512686 - RNA, 24 nt, Artificial Sequence
  Synthetic
auccuugucuugugccgguuuuua

SEQ ID NO: 512687 - RNA, 18 nt, Artificial Sequence
  Synthetic
gaagauaauugguuuuua

SEQ ID NO: 512688 - RNA, 19 nt, Artificial Sequence
  Synthetic
agaagauaauugguuuuua

SEQ ID NO: 512689 - RNA, 20 nt, Artificial Sequence
  Synthetic
aagaagauaauugguuuuua

SEQ ID NO: 512690 - RNA, 21 nt, Artificial Sequence
  Synthetic
uaagaagauaauugguuuuua

SEQ ID NO: 512691 - RNA, 22 nt, Artificial Sequence
  Synthetic
uuaagaagauaauugguuuuua

SEQ ID NO: 512692 - RNA, 23 nt, Artificial Sequence
  Synthetic
cuuaagaagauaauugguuuuua

SEQ ID NO: 512693 - RNA, 24 nt, Artificial Sequence
  Synthetic
ccuuaagaagauaauugguuuuua

SEQ ID NO: 512694 - RNA, 18 nt, Artificial Sequence
  Synthetic
cugauggcuauguuuuua

SEQ ID NO: 512695 - RNA, 19 nt, Artificial Sequence
  Synthetic
acugauggcuauguuuuua

SEQ ID NO: 512696 - RNA, 20 nt, Artificial Sequence
  Synthetic
cacugauggcuauguuuuua

SEQ ID NO: 512697 - RNA, 21 nt, Artificial Sequence
  Synthetic
acacugauggcuauguuuuua

SEQ ID NO: 512698 - RNA, 22 nt, Artificial Sequence
  Synthetic
cacacugauggcuauguuuuua

SEQ ID NO: 512699 - RNA, 23 nt, Artificial Sequence
  Synthetic
ccacacugauggcuauguuuuua

SEQ ID NO: 512700 - RNA, 24 nt, Artificial Sequence
  Synthetic
cccacacugauggcuauguuuuua

SEQ ID NO: 512701 - RNA, 18 nt, Artificial Sequence
  Synthetic
aaccauacuaauuuuuua

SEQ ID NO: 512702 - RNA, 19 nt, Artificial Sequence
  Synthetic
uaaccauacuaauuuuuua

SEQ ID NO: 512703 - RNA, 20 nt, Artificial Sequence
  Synthetic
uuaaccauacuaauuuuuua

SEQ ID NO: 512704 - RNA, 21 nt, Artificial Sequence
  Synthetic
auuaaccauacuaauuuuuua

SEQ ID NO: 512705 - RNA, 22 nt, Artificial Sequence
  Synthetic
uauuaaccauacuaauuuuuua

SEQ ID NO: 512706 - RNA, 23 nt, Artificial Sequence
  Synthetic
uuauuaaccauacuaauuuuuua

SEQ ID NO: 512707 - RNA, 24 nt, Artificial Sequence
  Synthetic
uuuauuaaccauacuaauuuuuua

SEQ ID NO: 512708 - RNA, 18 nt, Artificial Sequence
  Synthetic
ucccaaucgcauuuuuua

SEQ ID NO: 512709 - RNA, 19 nt, Artificial Sequence
  Synthetic
aucccaaucgcauuuuuua

SEQ ID NO: 512710 - RNA, 20 nt, Artificial Sequence
  Synthetic
aaucccaaucgcauuuuuua

SEQ ID NO: 512711 - RNA, 21 nt, Artificial Sequence
  Synthetic
uaaucccaaucgcauuuuuua

SEQ ID NO: 512712 - RNA, 22 nt, Artificial Sequence
  Synthetic
auaaucccaaucgcauuuuuua

SEQ ID NO: 512713 - RNA, 23 nt, Artificial Sequence
  Synthetic
cauaaucccaaucgcauuuuuua

SEQ ID NO: 512714 - RNA, 24 nt, Artificial Sequence
  Synthetic
ucauaaucccaaucgcauuuuuua

SEQ ID NO: 512715 - RNA, 18 nt, Artificial Sequence
  Synthetic
uuucccccauguuuuuua

SEQ ID NO: 512716 - RNA, 19 nt, Artificial Sequence
  Synthetic
auuucccccauguuuuuua

SEQ ID NO: 512717 - RNA, 20 nt, Artificial Sequence
  Synthetic
uauuucccccauguuuuuua

SEQ ID NO: 512718 - RNA, 21 nt, Artificial Sequence
  Synthetic
uuauuucccccauguuuuuua

SEQ ID NO: 512719 - RNA, 22 nt, Artificial Sequence
  Synthetic
auuauuucccccauguuuuuua

SEQ ID NO: 512720 - RNA, 23 nt, Artificial Sequence
  Synthetic
aauuauuucccccauguuuuuua

SEQ ID NO: 512721 - RNA, 24 nt, Artificial Sequence
  Synthetic
aaauuauuucccccauguuuuuua

SEQ ID NO: 512722 - RNA, 18 nt, Artificial Sequence
  Synthetic
aaauuucagauuuuuuua

SEQ ID NO: 512723 - RNA, 19 nt, Artificial Sequence
  Synthetic
caaauuucagauuuuuuua

SEQ ID NO: 512724 - RNA, 20 nt, Artificial Sequence
  Synthetic
ucaaauuucagauuuuuuua

SEQ ID NO: 512725 - RNA, 21 nt, Artificial Sequence
  Synthetic
uucaaauuucagauuuuuuua

SEQ ID NO: 512726 - RNA, 22 nt, Artificial Sequence
  Synthetic
uuucaaauuucagauuuuuuua

SEQ ID NO: 512727 - RNA, 23 nt, Artificial Sequence
  Synthetic
auuucaaauuucagauuuuuuua

SEQ ID NO: 512728 - RNA, 24 nt, Artificial Sequence
  Synthetic
cauuucaaauuucagauuuuuuua

SEQ ID NO: 512729 - RNA, 18 nt, Artificial Sequence
  Synthetic
gaauaaguuuuuuuuuua

SEQ ID NO: 512730 - RNA, 19 nt, Artificial Sequence
  Synthetic
agaauaaguuuuuuuuuua

SEQ ID NO: 512731 - RNA, 20 nt, Artificial Sequence
  Synthetic
cagaauaaguuuuuuuuuua

SEQ ID NO: 512732 - RNA, 21 nt, Artificial Sequence
  Synthetic
ccagaauaaguuuuuuuuuua

SEQ ID NO: 512733 - RNA, 22 nt, Artificial Sequence
  Synthetic
gccagaauaaguuuuuuuuuua

SEQ ID NO: 512734 - RNA, 23 nt, Artificial Sequence
  Synthetic
agccagaauaaguuuuuuuuuua

SEQ ID NO: 512735 - RNA, 24 nt, Artificial Sequence
  Synthetic
uagccagaauaaguuuuuuuuuua

SEQ ID NO: 512736 - RNA, 18 nt, Artificial Sequence
  Synthetic
aaaaaaaaaaaaaaaaac

SEQ ID NO: 512737 - RNA, 19 nt, Artificial Sequence
  Synthetic
aaaaaaaaaaaaaaaaaac

SEQ ID NO: 512738 - RNA, 20 nt, Artificial Sequence
  Synthetic
aaaaaaaaaaaaaaaaaaac

SEQ ID NO: 512739 - RNA, 21 nt, Artificial Sequence
  Synthetic
caaaaaaaaaaaaaaaaaaac

SEQ ID NO: 512740 - RNA, 22 nt, Artificial Sequence
  Synthetic
gcaaaaaaaaaaaaaaaaaaac

SEQ ID NO: 512741 - RNA, 23 nt, Artificial Sequence
  Synthetic
cgcaaaaaaaaaaaaaaaaaaac

SEQ ID NO: 512742 - RNA, 24 nt, Artificial Sequence
  Synthetic
gcgcaaaaaaaaaaaaaaaaaaac

SEQ ID NO: 512743 - RNA, 20 nt, Artificial Sequence
  Synthetic
gaaaaaaaaaaaaaaaaaac

SEQ ID NO: 512744 - RNA, 21 nt, Artificial Sequence
  Synthetic
ugaaaaaaaaaaaaaaaaaac

SEQ ID NO: 512745 - RNA, 22 nt, Artificial Sequence
  Synthetic
gugaaaaaaaaaaaaaaaaaac

SEQ ID NO: 512746 - RNA, 23 nt, Artificial Sequence
  Synthetic
ugugaaaaaaaaaaaaaaaaaac

SEQ ID NO: 512747 - RNA, 24 nt, Artificial Sequence
  Synthetic
augugaaaaaaaaaaaaaaaaaac

SEQ ID NO: 512748 - RNA, 18 nt, Artificial Sequence
  Synthetic
ggcaguacuuaaaaaaac

SEQ ID NO: 512749 - RNA, 19 nt, Artificial Sequence
  Synthetic
uggcaguacuuaaaaaaac

SEQ ID NO: 512750 - RNA, 20 nt, Artificial Sequence
  Synthetic
uuggcaguacuuaaaaaaac

SEQ ID NO: 512751 - RNA, 21 nt, Artificial Sequence
  Synthetic
cuuggcaguacuuaaaaaaac

SEQ ID NO: 512752 - RNA, 22 nt, Artificial Sequence
  Synthetic
ccuuggcaguacuuaaaaaaac

SEQ ID NO: 512753 - RNA, 23 nt, Artificial Sequence
  Synthetic
uccuuggcaguacuuaaaaaaac

SEQ ID NO: 512754 - RNA, 24 nt, Artificial Sequence
  Synthetic
uuccuuggcaguacuuaaaaaaac

SEQ ID NO: 512755 - RNA, 18 nt, Artificial Sequence
  Synthetic
aaacaagaaacaaaaaac

SEQ ID NO: 512756 - RNA, 19 nt, Artificial Sequence
  Synthetic
aaaacaagaaacaaaaaac

SEQ ID NO: 512757 - RNA, 20 nt, Artificial Sequence
  Synthetic
aaaaacaagaaacaaaaaac

SEQ ID NO: 512758 - RNA, 21 nt, Artificial Sequence
  Synthetic
aaaaaacaagaaacaaaaaac

SEQ ID NO: 512759 - RNA, 22 nt, Artificial Sequence
  Synthetic
aaaaaaacaagaaacaaaaaac

SEQ ID NO: 512760 - RNA, 23 nt, Artificial Sequence
  Synthetic
aaaaaaaacaagaaacaaaaaac

SEQ ID NO: 512761 - RNA, 24 nt, Artificial Sequence
  Synthetic
aaaaaaaaacaagaaacaaaaaac

SEQ ID NO: 512762 - RNA, 18 nt, Artificial Sequence
  Synthetic
auauuaccaacaaaaaac

SEQ ID NO: 512763 - RNA, 19 nt, Artificial Sequence
  Synthetic
uauauuaccaacaaaaaac

SEQ ID NO: 512764 - RNA, 20 nt, Artificial Sequence
  Synthetic
uuauauuaccaacaaaaaac

SEQ ID NO: 512765 - RNA, 21 nt, Artificial Sequence
  Synthetic
auuauauuaccaacaaaaaac

SEQ ID NO: 512766 - RNA, 22 nt, Artificial Sequence
  Synthetic
aauuauauuaccaacaaaaaac

SEQ ID NO: 512767 - RNA, 23 nt, Artificial Sequence
  Synthetic
gaauuauauuaccaacaaaaaac

SEQ ID NO: 512768 - RNA, 24 nt, Artificial Sequence
  Synthetic
agaauuauauuaccaacaaaaaac

SEQ ID NO: 512769 - RNA, 18 nt, Artificial Sequence
  Synthetic
acaaaccugacaaaaaac

SEQ ID NO: 512770 - RNA, 19 nt, Artificial Sequence
  Synthetic
gacaaaccugacaaaaaac

SEQ ID NO: 512771 - RNA, 20 nt, Artificial Sequence
  Synthetic
ugacaaaccugacaaaaaac

SEQ ID NO: 512772 - RNA, 21 nt, Artificial Sequence
  Synthetic
uugacaaaccugacaaaaaac

SEQ ID NO: 512773 - RNA, 22 nt, Artificial Sequence
  Synthetic
uuugacaaaccugacaaaaaac

SEQ ID NO: 512774 - RNA, 23 nt, Artificial Sequence
  Synthetic
cuuugacaaaccugacaaaaaac

SEQ ID NO: 512775 - RNA, 24 nt, Artificial Sequence
  Synthetic
ucuuugacaaaccugacaaaaaac

SEQ ID NO: 512776 - RNA, 18 nt, Artificial Sequence
  Synthetic
cuucauaugccaaaaaac

SEQ ID NO: 512777 - RNA, 19 nt, Artificial Sequence
  Synthetic
gcuucauaugccaaaaaac

SEQ ID NO: 512778 - RNA, 20 nt, Artificial Sequence
  Synthetic
ggcuucauaugccaaaaaac

SEQ ID NO: 512779 - RNA, 21 nt, Artificial Sequence
  Synthetic
aggcuucauaugccaaaaaac

SEQ ID NO: 512780 - RNA, 22 nt, Artificial Sequence
  Synthetic
uaggcuucauaugccaaaaaac

SEQ ID NO: 512781 - RNA, 23 nt, Artificial Sequence
  Synthetic
uuaggcuucauaugccaaaaaac

SEQ ID NO: 512782 - RNA, 24 nt, Artificial Sequence
  Synthetic
uuuaggcuucauaugccaaaaaac

SEQ ID NO: 512783 - RNA, 18 nt, Artificial Sequence
  Synthetic
uucccccaagcaaaaaac

SEQ ID NO: 512784 - RNA, 19 nt, Artificial Sequence
  Synthetic
guucccccaagcaaaaaac

SEQ ID NO: 512785 - RNA, 20 nt, Artificial Sequence
  Synthetic
aguucccccaagcaaaaaac

SEQ ID NO: 512786 - RNA, 21 nt, Artificial Sequence
  Synthetic
caguucccccaagcaaaaaac

SEQ ID NO: 512787 - RNA, 22 nt, Artificial Sequence
  Synthetic
ccaguucccccaagcaaaaaac

SEQ ID NO: 512788 - RNA, 23 nt, Artificial Sequence
  Synthetic
gccaguucccccaagcaaaaaac

SEQ ID NO: 512789 - RNA, 24 nt, Artificial Sequence
  Synthetic
agccaguucccccaagcaaaaaac

SEQ ID NO: 512790 - RNA, 18 nt, Artificial Sequence
  Synthetic
aagagcaaugcaaaaaac

SEQ ID NO: 512791 - RNA, 19 nt, Artificial Sequence
  Synthetic
caagagcaaugcaaaaaac

SEQ ID NO: 512792 - RNA, 20 nt, Artificial Sequence
  Synthetic
ucaagagcaaugcaaaaaac

SEQ ID NO: 512793 - RNA, 21 nt, Artificial Sequence
  Synthetic
cucaagagcaaugcaaaaaac

SEQ ID NO: 512794 - RNA, 22 nt, Artificial Sequence
  Synthetic
ucucaagagcaaugcaaaaaac

SEQ ID NO: 512795 - RNA, 23 nt, Artificial Sequence
  Synthetic
uucucaagagcaaugcaaaaaac

SEQ ID NO: 512796 - RNA, 24 nt, Artificial Sequence
  Synthetic
uuucucaagagcaaugcaaaaaac

SEQ ID NO: 512797 - RNA, 18 nt, Artificial Sequence
  Synthetic
agaaagaaaagaaaaaac

SEQ ID NO: 512798 - RNA, 19 nt, Artificial Sequence
  Synthetic
aagaaagaaaagaaaaaac

SEQ ID NO: 512799 - RNA, 20 nt, Artificial Sequence
  Synthetic
aaagaaagaaaagaaaaaac

SEQ ID NO: 512800 - RNA, 21 nt, Artificial Sequence
  Synthetic
gaaagaaagaaaagaaaaaac

SEQ ID NO: 512801 - RNA, 22 nt, Artificial Sequence
  Synthetic
agaaagaaagaaaagaaaaaac

SEQ ID NO: 512802 - RNA, 23 nt, Artificial Sequence
  Synthetic
aagaaagaaagaaaagaaaaaac

SEQ ID NO: 512803 - RNA, 24 nt, Artificial Sequence
  Synthetic
aaagaaagaaagaaaagaaaaaac

SEQ ID NO: 512804 - RNA, 18 nt, Artificial Sequence
  Synthetic
augagaggaauaaaaaac

SEQ ID NO: 512805 - RNA, 19 nt, Artificial Sequence
  Synthetic
caugagaggaauaaaaaac

SEQ ID NO: 512806 - RNA, 20 nt, Artificial Sequence
  Synthetic
acaugagaggaauaaaaaac

SEQ ID NO: 512807 - RNA, 21 nt, Artificial Sequence
  Synthetic
cacaugagaggaauaaaaaac

SEQ ID NO: 512808 - RNA, 22 nt, Artificial Sequence
  Synthetic
acacaugagaggaauaaaaaac

SEQ ID NO: 512809 - RNA, 23 nt, Artificial Sequence
  Synthetic
gacacaugagaggaauaaaaaac

SEQ ID NO: 512810 - RNA, 24 nt, Artificial Sequence
  Synthetic
ugacacaugagaggaauaaaaaac

SEQ ID NO: 512811 - RNA, 18 nt, Artificial Sequence
  Synthetic
cauauaauacacaaaaac

SEQ ID NO: 512812 - RNA, 19 nt, Artificial Sequence
  Synthetic
ucauauaauacacaaaaac

SEQ ID NO: 512813 - RNA, 20 nt, Artificial Sequence
  Synthetic
uucauauaauacacaaaaac

SEQ ID NO: 512814 - RNA, 21 nt, Artificial Sequence
  Synthetic
cuucauauaauacacaaaaac

SEQ ID NO: 512815 - RNA, 22 nt, Artificial Sequence
  Synthetic
ccuucauauaauacacaaaaac

SEQ ID NO: 512816 - RNA, 23 nt, Artificial Sequence
  Synthetic
uccuucauauaauacacaaaaac

SEQ ID NO: 512817 - RNA, 24 nt, Artificial Sequence
  Synthetic
uuccuucauauaauacacaaaaac

SEQ ID NO: 512818 - RNA, 18 nt, Artificial Sequence
  Synthetic
gacaaaccugacaaaaac

SEQ ID NO: 512819 - RNA, 19 nt, Artificial Sequence
  Synthetic
ugacaaaccugacaaaaac

SEQ ID NO: 512820 - RNA, 20 nt, Artificial Sequence
  Synthetic
uugacaaaccugacaaaaac

SEQ ID NO: 512821 - RNA, 21 nt, Artificial Sequence
  Synthetic
uuugacaaaccugacaaaaac

SEQ ID NO: 512822 - RNA, 22 nt, Artificial Sequence
  Synthetic
cuuugacaaaccugacaaaaac

SEQ ID NO: 512823 - RNA, 23 nt, Artificial Sequence
  Synthetic
ucuuugacaaaccugacaaaaac

SEQ ID NO: 512824 - RNA, 24 nt, Artificial Sequence
  Synthetic
aucuuugacaaaccugacaaaaac

SEQ ID NO: 512825 - RNA, 18 nt, Artificial Sequence
  Synthetic
aaagcaaaaagcaaaaac

SEQ ID NO: 512826 - RNA, 19 nt, Artificial Sequence
  Synthetic
aaaagcaaaaagcaaaaac

SEQ ID NO: 512827 - RNA, 20 nt, Artificial Sequence
  Synthetic
gaaaagcaaaaagcaaaaac

SEQ ID NO: 512828 - RNA, 21 nt, Artificial Sequence
  Synthetic
agaaaagcaaaaagcaaaaac

SEQ ID NO: 512829 - RNA, 22 nt, Artificial Sequence
  Synthetic
gagaaaagcaaaaagcaaaaac

SEQ ID NO: 512830 - RNA, 23 nt, Artificial Sequence
  Synthetic
ggagaaaagcaaaaagcaaaaac

SEQ ID NO: 512831 - RNA, 24 nt, Artificial Sequence
  Synthetic
aggagaaaagcaaaaagcaaaaac

SEQ ID NO: 512832 - RNA, 18 nt, Artificial Sequence
  Synthetic
aggauaacaggcaaaaac

SEQ ID NO: 512833 - RNA, 19 nt, Artificial Sequence
  Synthetic
uaggauaacaggcaaaaac

SEQ ID NO: 512834 - RNA, 20 nt, Artificial Sequence
  Synthetic
auaggauaacaggcaaaaac

SEQ ID NO: 512835 - RNA, 21 nt, Artificial Sequence
  Synthetic
gauaggauaacaggcaaaaac

SEQ ID NO: 512836 - RNA, 22 nt, Artificial Sequence
  Synthetic
ugauaggauaacaggcaaaaac

SEQ ID NO: 512837 - RNA, 23 nt, Artificial Sequence
  Synthetic
augauaggauaacaggcaaaaac

SEQ ID NO: 512838 - RNA, 24 nt, Artificial Sequence
  Synthetic
uaugauaggauaacaggcaaaaac

SEQ ID NO: 512839 - RNA, 21 nt, Artificial Sequence
  Synthetic
ucauacugaaugggcaaaaac

SEQ ID NO: 512840 - RNA, 22 nt, Artificial Sequence
  Synthetic
aucauacugaaugggcaaaaac

SEQ ID NO: 512841 - RNA, 23 nt, Artificial Sequence
  Synthetic
uaucauacugaaugggcaaaaac

SEQ ID NO: 512842 - RNA, 24 nt, Artificial Sequence
  Synthetic
auaucauacugaaugggcaaaaac

SEQ ID NO: 512843 - RNA, 18 nt, Artificial Sequence
  Synthetic
uuauggagaugcaaaaac

SEQ ID NO: 512844 - RNA, 19 nt, Artificial Sequence
  Synthetic
uuuauggagaugcaaaaac

SEQ ID NO: 512845 - RNA, 20 nt, Artificial Sequence
  Synthetic
cuuuauggagaugcaaaaac

SEQ ID NO: 512846 - RNA, 21 nt, Artificial Sequence
  Synthetic
acuuuauggagaugcaaaaac

SEQ ID NO: 512847 - RNA, 22 nt, Artificial Sequence
  Synthetic
uacuuuauggagaugcaaaaac

SEQ ID NO: 512848 - RNA, 23 nt, Artificial Sequence
  Synthetic
uuacuuuauggagaugcaaaaac

SEQ ID NO: 512849 - RNA, 24 nt, Artificial Sequence
  Synthetic
auuacuuuauggagaugcaaaaac

SEQ ID NO: 512850 - RNA, 18 nt, Artificial Sequence
  Synthetic
aaacucugucucaaaaac

SEQ ID NO: 512851 - RNA, 19 nt, Artificial Sequence
  Synthetic
aaaacucugucucaaaaac

SEQ ID NO: 512852 - RNA, 20 nt, Artificial Sequence
  Synthetic
caaaacucugucucaaaaac

SEQ ID NO: 512853 - RNA, 21 nt, Artificial Sequence
  Synthetic
gcaaaacucugucucaaaaac

SEQ ID NO: 512854 - RNA, 22 nt, Artificial Sequence
  Synthetic
agcaaaacucugucucaaaaac

SEQ ID NO: 512855 - RNA, 23 nt, Artificial Sequence
  Synthetic
gagcaaaacucugucucaaaaac

SEQ ID NO: 512856 - RNA, 24 nt, Artificial Sequence
  Synthetic
agagcaaaacucugucucaaaaac

SEQ ID NO: 512857 - RNA, 18 nt, Artificial Sequence
  Synthetic
auaucaaaaaagaaaaac

SEQ ID NO: 512858 - RNA, 19 nt, Artificial Sequence
  Synthetic
cauaucaaaaaagaaaaac

SEQ ID NO: 512859 - RNA, 20 nt, Artificial Sequence
  Synthetic
ucauaucaaaaaagaaaaac

SEQ ID NO: 512860 - RNA, 21 nt, Artificial Sequence
  Synthetic
aucauaucaaaaaagaaaaac

SEQ ID NO: 512861 - RNA, 22 nt, Artificial Sequence
  Synthetic
uaucauaucaaaaaagaaaaac

SEQ ID NO: 512862 - RNA, 23 nt, Artificial Sequence
  Synthetic
cuaucauaucaaaaaagaaaaac

SEQ ID NO: 512863 - RNA, 24 nt, Artificial Sequence
  Synthetic
acuaucauaucaaaaaagaaaaac

SEQ ID NO: 512864 - RNA, 18 nt, Artificial Sequence
  Synthetic
gcauggggcuagaaaaac

SEQ ID NO: 512865 - RNA, 19 nt, Artificial Sequence
  Synthetic
agcauggggcuagaaaaac

SEQ ID NO: 512866 - RNA, 20 nt, Artificial Sequence
  Synthetic
gagcauggggcuagaaaaac

SEQ ID NO: 512867 - RNA, 21 nt, Artificial Sequence
  Synthetic
agagcauggggcuagaaaaac

SEQ ID NO: 512868 - RNA, 22 nt, Artificial Sequence
  Synthetic
gagagcauggggcuagaaaaac

SEQ ID NO: 512869 - RNA, 23 nt, Artificial Sequence
  Synthetic
ggagagcauggggcuagaaaaac

SEQ ID NO: 512870 - RNA, 24 nt, Artificial Sequence
  Synthetic
aggagagcauggggcuagaaaaac

SEQ ID NO: 512871 - RNA, 18 nt, Artificial Sequence
  Synthetic
uuaugcaaagggaaaaac

SEQ ID NO: 512872 - RNA, 19 nt, Artificial Sequence
  Synthetic
uuuaugcaaagggaaaaac

SEQ ID NO: 512873 - RNA, 20 nt, Artificial Sequence
  Synthetic
uuuuaugcaaagggaaaaac

SEQ ID NO: 512874 - RNA, 21 nt, Artificial Sequence
  Synthetic
uuuuuaugcaaagggaaaaac

SEQ ID NO: 512875 - RNA, 22 nt, Artificial Sequence
  Synthetic
guuuuuaugcaaagggaaaaac

SEQ ID NO: 512876 - RNA, 23 nt, Artificial Sequence
  Synthetic
aguuuuuaugcaaagggaaaaac

SEQ ID NO: 512877 - RNA, 24 nt, Artificial Sequence
  Synthetic
caguuuuuaugcaaagggaaaaac

SEQ ID NO: 512878 - RNA, 18 nt, Artificial Sequence
  Synthetic
guauuuucagggaaaaac

SEQ ID NO: 512879 - RNA, 19 nt, Artificial Sequence
  Synthetic
gguauuuucagggaaaaac

SEQ ID NO: 512880 - RNA, 20 nt, Artificial Sequence
  Synthetic
cgguauuuucagggaaaaac

SEQ ID NO: 512881 - RNA, 21 nt, Artificial Sequence
  Synthetic
acgguauuuucagggaaaaac

SEQ ID NO: 512882 - RNA, 22 nt, Artificial Sequence
  Synthetic
cacgguauuuucagggaaaaac

SEQ ID NO: 512883 - RNA, 23 nt, Artificial Sequence
  Synthetic
ucacgguauuuucagggaaaaac

SEQ ID NO: 512884 - RNA, 24 nt, Artificial Sequence
  Synthetic
aucacgguauuuucagggaaaaac

SEQ ID NO: 512885 - RNA, 18 nt, Artificial Sequence
  Synthetic
aaacgaugagggaaaaac

SEQ ID NO: 512886 - RNA, 19 nt, Artificial Sequence
  Synthetic
aaaacgaugagggaaaaac

SEQ ID NO: 512887 - RNA, 20 nt, Artificial Sequence
  Synthetic
gaaaacgaugagggaaaaac

SEQ ID NO: 512888 - RNA, 21 nt, Artificial Sequence
  Synthetic
ggaaaacgaugagggaaaaac

SEQ ID NO: 512889 - RNA, 22 nt, Artificial Sequence
  Synthetic
uggaaaacgaugagggaaaaac

SEQ ID NO: 512890 - RNA, 23 nt, Artificial Sequence
  Synthetic
guggaaaacgaugagggaaaaac

SEQ ID NO: 512891 - RNA, 24 nt, Artificial Sequence
  Synthetic
uguggaaaacgaugagggaaaaac

SEQ ID NO: 512892 - RNA, 18 nt, Artificial Sequence
  Synthetic
aguugaguggggaaaaac

SEQ ID NO: 512893 - RNA, 19 nt, Artificial Sequence
  Synthetic
aaguugaguggggaaaaac

SEQ ID NO: 512894 - RNA, 20 nt, Artificial Sequence
  Synthetic
caaguugaguggggaaaaac

SEQ ID NO: 512895 - RNA, 21 nt, Artificial Sequence
  Synthetic
ccaaguugaguggggaaaaac

SEQ ID NO: 512896 - RNA, 22 nt, Artificial Sequence
  Synthetic
gccaaguugaguggggaaaaac

SEQ ID NO: 512897 - RNA, 23 nt, Artificial Sequence
  Synthetic
agccaaguugaguggggaaaaac

SEQ ID NO: 512898 - RNA, 24 nt, Artificial Sequence
  Synthetic
cagccaaguugaguggggaaaaac

SEQ ID NO: 512899 - RNA, 18 nt, Artificial Sequence
  Synthetic
gaggugagugggaaaaac

SEQ ID NO: 512900 - RNA, 19 nt, Artificial Sequence
  Synthetic
ugaggugagugggaaaaac

SEQ ID NO: 512901 - RNA, 20 nt, Artificial Sequence
  Synthetic
augaggugagugggaaaaac

SEQ ID NO: 512902 - RNA, 21 nt, Artificial Sequence
  Synthetic
caugaggugagugggaaaaac

SEQ ID NO: 512903 - RNA, 22 nt, Artificial Sequence
  Synthetic
gcaugaggugagugggaaaaac

SEQ ID NO: 512904 - RNA, 23 nt, Artificial Sequence
  Synthetic
ugcaugaggugagugggaaaaac

SEQ ID NO: 512905 - RNA, 24 nt, Artificial Sequence
  Synthetic
uugcaugaggugagugggaaaaac

SEQ ID NO: 512906 - RNA, 18 nt, Artificial Sequence
  Synthetic
auuagucauuugaaaaac

SEQ ID NO: 512907 - RNA, 19 nt, Artificial Sequence
  Synthetic
gauuagucauuugaaaaac

SEQ ID NO: 512908 - RNA, 20 nt, Artificial Sequence
  Synthetic
ugauuagucauuugaaaaac

SEQ ID NO: 512909 - RNA, 21 nt, Artificial Sequence
  Synthetic
cugauuagucauuugaaaaac

SEQ ID NO: 512910 - RNA, 22 nt, Artificial Sequence
  Synthetic
acugauuagucauuugaaaaac

SEQ ID NO: 512911 - RNA, 23 nt, Artificial Sequence
  Synthetic
aacugauuagucauuugaaaaac

SEQ ID NO: 512912 - RNA, 24 nt, Artificial Sequence
  Synthetic
uaacugauuagucauuugaaaaac

SEQ ID NO: 512913 - RNA, 18 nt, Artificial Sequence
  Synthetic
agaaagauuaauaaaaac

SEQ ID NO: 512914 - RNA, 19 nt, Artificial Sequence
  Synthetic
uagaaagauuaauaaaaac

SEQ ID NO: 512915 - RNA, 20 nt, Artificial Sequence
  Synthetic
uuagaaagauuaauaaaaac

SEQ ID NO: 512916 - RNA, 21 nt, Artificial Sequence
  Synthetic
uuuagaaagauuaauaaaaac

SEQ ID NO: 512917 - RNA, 22 nt, Artificial Sequence
  Synthetic
cuuuagaaagauuaauaaaaac

SEQ ID NO: 512918 - RNA, 23 nt, Artificial Sequence
  Synthetic
acuuuagaaagauuaauaaaaac

SEQ ID NO: 512919 - RNA, 24 nt, Artificial Sequence
  Synthetic
cacuuuagaaagauuaauaaaaac

SEQ ID NO: 512920 - RNA, 18 nt, Artificial Sequence
  Synthetic
cgcuagcaacauaaaaac

SEQ ID NO: 512921 - RNA, 19 nt, Artificial Sequence
  Synthetic
acgcuagcaacauaaaaac

SEQ ID NO: 512922 - RNA, 20 nt, Artificial Sequence
  Synthetic
uacgcuagcaacauaaaaac

SEQ ID NO: 512923 - RNA, 21 nt, Artificial Sequence
  Synthetic
auacgcuagcaacauaaaaac

SEQ ID NO: 512924 - RNA, 22 nt, Artificial Sequence
  Synthetic
uauacgcuagcaacauaaaaac

SEQ ID NO: 512925 - RNA, 23 nt, Artificial Sequence
  Synthetic
cuauacgcuagcaacauaaaaac

SEQ ID NO: 512926 - RNA, 24 nt, Artificial Sequence
  Synthetic
ucuauacgcuagcaacauaaaaac

SEQ ID NO: 512927 - RNA, 18 nt, Artificial Sequence
  Synthetic
ccugucucuacuaaaaac

SEQ ID NO: 512928 - RNA, 19 nt, Artificial Sequence
  Synthetic
cccugucucuacuaaaaac

SEQ ID NO: 512929 - RNA, 20 nt, Artificial Sequence
  Synthetic
acccugucucuacuaaaaac

SEQ ID NO: 512930 - RNA, 21 nt, Artificial Sequence
  Synthetic
aacccugucucuacuaaaaac

SEQ ID NO: 512931 - RNA, 22 nt, Artificial Sequence
  Synthetic
aaacccugucucuacuaaaaac

SEQ ID NO: 512932 - RNA, 23 nt, Artificial Sequence
  Synthetic
gaaacccugucucuacuaaaaac

SEQ ID NO: 512933 - RNA, 24 nt, Artificial Sequence
  Synthetic
ugaaacccugucucuacuaaaaac

SEQ ID NO: 512934 - RNA, 18 nt, Artificial Sequence
  Synthetic
agaaauaaaaguaaaaac

SEQ ID NO: 512935 - RNA, 19 nt, Artificial Sequence
  Synthetic
uagaaauaaaaguaaaaac

SEQ ID NO: 512936 - RNA, 20 nt, Artificial Sequence
  Synthetic
uuagaaauaaaaguaaaaac

SEQ ID NO: 512937 - RNA, 21 nt, Artificial Sequence
  Synthetic
cuuagaaauaaaaguaaaaac

SEQ ID NO: 512938 - RNA, 22 nt, Artificial Sequence
  Synthetic
gcuuagaaauaaaaguaaaaac

SEQ ID NO: 512939 - RNA, 23 nt, Artificial Sequence
  Synthetic
agcuuagaaauaaaaguaaaaac

SEQ ID NO: 512940 - RNA, 24 nt, Artificial Sequence
  Synthetic
uagcuuagaaauaaaaguaaaaac

SEQ ID NO: 512941 - RNA, 18 nt, Artificial Sequence
  Synthetic
gaucuugaggguaaaaac

SEQ ID NO: 512942 - RNA, 19 nt, Artificial Sequence
  Synthetic
agaucuugaggguaaaaac

SEQ ID NO: 512943 - RNA, 20 nt, Artificial Sequence
  Synthetic
aagaucuugaggguaaaaac

SEQ ID NO: 512944 - RNA, 21 nt, Artificial Sequence
  Synthetic
gaagaucuugaggguaaaaac

SEQ ID NO: 512945 - RNA, 22 nt, Artificial Sequence
  Synthetic
agaagaucuugaggguaaaaac

SEQ ID NO: 512946 - RNA, 23 nt, Artificial Sequence
  Synthetic
aagaagaucuugaggguaaaaac

SEQ ID NO: 512947 - RNA, 24 nt, Artificial Sequence
  Synthetic
aaagaagaucuugaggguaaaaac

SEQ ID NO: 512948 - RNA, 18 nt, Artificial Sequence
  Synthetic
aaagagaaaguuaaaaac

SEQ ID NO: 512949 - RNA, 19 nt, Artificial Sequence
  Synthetic
caaagagaaaguuaaaaac

SEQ ID NO: 512950 - RNA, 20 nt, Artificial Sequence
  Synthetic
ccaaagagaaaguuaaaaac

SEQ ID NO: 512951 - RNA, 21 nt, Artificial Sequence
  Synthetic
uccaaagagaaaguuaaaaac

SEQ ID NO: 512952 - RNA, 22 nt, Artificial Sequence
  Synthetic
uuccaaagagaaaguuaaaaac

SEQ ID NO: 512953 - RNA, 23 nt, Artificial Sequence
  Synthetic
uuuccaaagagaaaguuaaaaac

SEQ ID NO: 512954 - RNA, 24 nt, Artificial Sequence
  Synthetic
guuuccaaagagaaaguuaaaaac

SEQ ID NO: 512955 - RNA, 18 nt, Artificial Sequence
  Synthetic
aacaaaacaaaacaaaac

SEQ ID NO: 512956 - RNA, 19 nt, Artificial Sequence
  Synthetic
aaacaaaacaaaacaaaac

SEQ ID NO: 512957 - RNA, 20 nt, Artificial Sequence
  Synthetic
aaaacaaaacaaaacaaaac

SEQ ID NO: 512958 - RNA, 21 nt, Artificial Sequence
  Synthetic
caaaacaaaacaaaacaaaac

SEQ ID NO: 512959 - RNA, 22 nt, Artificial Sequence
  Synthetic
acaaaacaaaacaaaacaaaac

SEQ ID NO: 512960 - RNA, 23 nt, Artificial Sequence
  Synthetic
aacaaaacaaaacaaaacaaaac

SEQ ID NO: 512961 - RNA, 24 nt, Artificial Sequence
  Synthetic
aaacaaaacaaaacaaaacaaaac

SEQ ID NO: 512962 - RNA, 18 nt, Artificial Sequence
  Synthetic
gcacacacaaaacaaaac

SEQ ID NO: 512963 - RNA, 19 nt, Artificial Sequence
  Synthetic
agcacacacaaaacaaaac

SEQ ID NO: 512964 - RNA, 20 nt, Artificial Sequence
  Synthetic
aagcacacacaaaacaaaac

SEQ ID NO: 512965 - RNA, 21 nt, Artificial Sequence
  Synthetic
uaagcacacacaaaacaaaac

SEQ ID NO: 512966 - RNA, 22 nt, Artificial Sequence
  Synthetic
uuaagcacacacaaaacaaaac

SEQ ID NO: 512967 - RNA, 23 nt, Artificial Sequence
  Synthetic
auuaagcacacacaaaacaaaac

SEQ ID NO: 512968 - RNA, 24 nt, Artificial Sequence
  Synthetic
aauuaagcacacacaaaacaaaac

SEQ ID NO: 512969 - RNA, 18 nt, Artificial Sequence
  Synthetic
ucauaagcaaaacaaaac

SEQ ID NO: 512970 - RNA, 19 nt, Artificial Sequence
  Synthetic
uucauaagcaaaacaaaac

SEQ ID NO: 512971 - RNA, 20 nt, Artificial Sequence
  Synthetic
uuucauaagcaaaacaaaac

SEQ ID NO: 512972 - RNA, 21 nt, Artificial Sequence
  Synthetic
cuuucauaagcaaaacaaaac

SEQ ID NO: 512973 - RNA, 22 nt, Artificial Sequence
  Synthetic
acuuucauaagcaaaacaaaac

SEQ ID NO: 512974 - RNA, 23 nt, Artificial Sequence
  Synthetic
cacuuucauaagcaaaacaaaac

SEQ ID NO: 512975 - RNA, 24 nt, Artificial Sequence
  Synthetic
gcacuuucauaagcaaaacaaaac

SEQ ID NO: 512976 - RNA, 18 nt, Artificial Sequence
  Synthetic
gggacaucaaaacaaaac

SEQ ID NO: 512977 - RNA, 19 nt, Artificial Sequence
  Synthetic
agggacaucaaaacaaaac

SEQ ID NO: 512978 - RNA, 20 nt, Artificial Sequence
  Synthetic
cagggacaucaaaacaaaac

SEQ ID NO: 512979 - RNA, 21 nt, Artificial Sequence
  Synthetic
acagggacaucaaaacaaaac

SEQ ID NO: 512980 - RNA, 22 nt, Artificial Sequence
  Synthetic
aacagggacaucaaaacaaaac

SEQ ID NO: 512981 - RNA, 23 nt, Artificial Sequence
  Synthetic
aaacagggacaucaaaacaaaac

SEQ ID NO: 512982 - RNA, 24 nt, Artificial Sequence
  Synthetic
aaaacagggacaucaaaacaaaac

SEQ ID NO: 512983 - RNA, 18 nt, Artificial Sequence
  Synthetic
aaagaaaagaaacaaaac

SEQ ID NO: 512984 - RNA, 19 nt, Artificial Sequence
  Synthetic
aaaagaaaagaaacaaaac

SEQ ID NO: 512985 - RNA, 20 nt, Artificial Sequence
  Synthetic
aaaaagaaaagaaacaaaac

SEQ ID NO: 512986 - RNA, 21 nt, Artificial Sequence
  Synthetic
uaaaaagaaaagaaacaaaac

SEQ ID NO: 512987 - RNA, 22 nt, Artificial Sequence
  Synthetic
guaaaaagaaaagaaacaaaac

SEQ ID NO: 512988 - RNA, 23 nt, Artificial Sequence
  Synthetic
aguaaaaagaaaagaaacaaaac

SEQ ID NO: 512989 - RNA, 24 nt, Artificial Sequence
  Synthetic
aaguaaaaagaaaagaaacaaaac

SEQ ID NO: 512990 - RNA, 18 nt, Artificial Sequence
  Synthetic
gaacaaugaccacaaaac

SEQ ID NO: 512991 - RNA, 19 nt, Artificial Sequence
  Synthetic
agaacaaugaccacaaaac

SEQ ID NO: 512992 - RNA, 20 nt, Artificial Sequence
  Synthetic
aagaacaaugaccacaaaac

SEQ ID NO: 512993 - RNA, 21 nt, Artificial Sequence
  Synthetic
caagaacaaugaccacaaaac

SEQ ID NO: 512994 - RNA, 22 nt, Artificial Sequence
  Synthetic
gcaagaacaaugaccacaaaac

SEQ ID NO: 512995 - RNA, 23 nt, Artificial Sequence
  Synthetic
ggcaagaacaaugaccacaaaac

SEQ ID NO: 512996 - RNA, 24 nt, Artificial Sequence
  Synthetic
aggcaagaacaaugaccacaaaac

SEQ ID NO: 512997 - RNA, 18 nt, Artificial Sequence
  Synthetic
uaaguggugcuacaaaac

SEQ ID NO: 512998 - RNA, 19 nt, Artificial Sequence
  Synthetic
cuaaguggugcuacaaaac

SEQ ID NO: 512999 - RNA, 20 nt, Artificial Sequence
  Synthetic
gcuaaguggugcuacaaaac

SEQ ID NO: 513000 - RNA, 21 nt, Artificial Sequence
  Synthetic
agcuaaguggugcuacaaaac

SEQ ID NO: 513001 - RNA, 22 nt, Artificial Sequence
  Synthetic
uagcuaaguggugcuacaaaac

SEQ ID NO: 513002 - RNA, 23 nt, Artificial Sequence
  Synthetic
auagcuaaguggugcuacaaaac

SEQ ID NO: 513003 - RNA, 24 nt, Artificial Sequence
  Synthetic
gauagcuaaguggugcuacaaaac

SEQ ID NO: 513004 - RNA, 18 nt, Artificial Sequence
  Synthetic
uuuuauuuaaaccaaaac

SEQ ID NO: 513005 - RNA, 19 nt, Artificial Sequence
  Synthetic
uuuuuauuuaaaccaaaac

SEQ ID NO: 513006 - RNA, 20 nt, Artificial Sequence
  Synthetic
auuuuuauuuaaaccaaaac

SEQ ID NO: 513007 - RNA, 21 nt, Artificial Sequence
  Synthetic
aauuuuuauuuaaaccaaaac

SEQ ID NO: 513008 - RNA, 22 nt, Artificial Sequence
  Synthetic
caauuuuuauuuaaaccaaaac

SEQ ID NO: 513009 - RNA, 23 nt, Artificial Sequence
  Synthetic
ucaauuuuuauuuaaaccaaaac

SEQ ID NO: 513010 - RNA, 24 nt, Artificial Sequence
  Synthetic
uucaauuuuuauuuaaaccaaaac

SEQ ID NO: 513011 - RNA, 18 nt, Artificial Sequence
  Synthetic
aagucacuugaccaaaac

SEQ ID NO: 513012 - RNA, 19 nt, Artificial Sequence
  Synthetic
aaagucacuugaccaaaac

SEQ ID NO: 513013 - RNA, 20 nt, Artificial Sequence
  Synthetic
uaaagucacuugaccaaaac

SEQ ID NO: 513014 - RNA, 21 nt, Artificial Sequence
  Synthetic
guaaagucacuugaccaaaac

SEQ ID NO: 513015 - RNA, 22 nt, Artificial Sequence
  Synthetic
gguaaagucacuugaccaaaac

SEQ ID NO: 513016 - RNA, 23 nt, Artificial Sequence
  Synthetic
ugguaaagucacuugaccaaaac

SEQ ID NO: 513017 - RNA, 24 nt, Artificial Sequence
  Synthetic
uugguaaagucacuugaccaaaac

SEQ ID NO: 513018 - RNA, 18 nt, Artificial Sequence
  Synthetic
ucacccuaauaccaaaac

SEQ ID NO: 513019 - RNA, 19 nt, Artificial Sequence
  Synthetic
aucacccuaauaccaaaac

SEQ ID NO: 513020 - RNA, 20 nt, Artificial Sequence
  Synthetic
uaucacccuaauaccaaaac

SEQ ID NO: 513021 - RNA, 21 nt, Artificial Sequence
  Synthetic
guaucacccuaauaccaaaac

SEQ ID NO: 513022 - RNA, 22 nt, Artificial Sequence
  Synthetic
aguaucacccuaauaccaaaac

SEQ ID NO: 513023 - RNA, 23 nt, Artificial Sequence
  Synthetic
caguaucacccuaauaccaaaac

SEQ ID NO: 513024 - RNA, 24 nt, Artificial Sequence
  Synthetic
ucaguaucacccuaauaccaaaac

SEQ ID NO: 513025 - RNA, 18 nt, Artificial Sequence
  Synthetic
cauaaagaaauccaaaac

SEQ ID NO: 513026 - RNA, 19 nt, Artificial Sequence
  Synthetic
ccauaaagaaauccaaaac

SEQ ID NO: 513027 - RNA, 20 nt, Artificial Sequence
  Synthetic
accauaaagaaauccaaaac

SEQ ID NO: 513028 - RNA, 21 nt, Artificial Sequence
  Synthetic
aaccauaaagaaauccaaaac

SEQ ID NO: 513029 - RNA, 22 nt, Artificial Sequence
  Synthetic
aaaccauaaagaaauccaaaac

SEQ ID NO: 513030 - RNA, 23 nt, Artificial Sequence
  Synthetic
uaaaccauaaagaaauccaaaac

SEQ ID NO: 513031 - RNA, 24 nt, Artificial Sequence
  Synthetic
uuaaaccauaaagaaauccaaaac

SEQ ID NO: 513032 - RNA, 18 nt, Artificial Sequence
  Synthetic
uuguucucuguccaaaac

SEQ ID NO: 513033 - RNA, 19 nt, Artificial Sequence
  Synthetic
uuuguucucuguccaaaac

SEQ ID NO: 513034 - RNA, 20 nt, Artificial Sequence
  Synthetic
auuuguucucuguccaaaac

SEQ ID NO: 513035 - RNA, 21 nt, Artificial Sequence
  Synthetic
uauuuguucucuguccaaaac

SEQ ID NO: 513036 - RNA, 22 nt, Artificial Sequence
  Synthetic
uuauuuguucucuguccaaaac

SEQ ID NO: 513037 - RNA, 23 nt, Artificial Sequence
  Synthetic
auuauuuguucucuguccaaaac

SEQ ID NO: 513038 - RNA, 24 nt, Artificial Sequence
  Synthetic
gauuauuuguucucuguccaaaac

SEQ ID NO: 513039 - RNA, 18 nt, Artificial Sequence
  Synthetic
cuaaagugaaggcaaaac

SEQ ID NO: 513040 - RNA, 19 nt, Artificial Sequence
  Synthetic
ucuaaagugaaggcaaaac

SEQ ID NO: 513041 - RNA, 20 nt, Artificial Sequence
  Synthetic
uucuaaagugaaggcaaaac

SEQ ID NO: 513042 - RNA, 21 nt, Artificial Sequence
  Synthetic
auucuaaagugaaggcaaaac

SEQ ID NO: 513043 - RNA, 22 nt, Artificial Sequence
  Synthetic
aauucuaaagugaaggcaaaac

SEQ ID NO: 513044 - RNA, 23 nt, Artificial Sequence
  Synthetic
uaauucuaaagugaaggcaaaac

SEQ ID NO: 513045 - RNA, 24 nt, Artificial Sequence
  Synthetic
uuaauucuaaagugaaggcaaaac

SEQ ID NO: 513046 - RNA, 18 nt, Artificial Sequence
  Synthetic
auacugaaugggcaaaac

SEQ ID NO: 513047 - RNA, 19 nt, Artificial Sequence
  Synthetic
cauacugaaugggcaaaac

SEQ ID NO: 513048 - RNA, 20 nt, Artificial Sequence
  Synthetic
ucauacugaaugggcaaaac

SEQ ID NO: 513049 - RNA, 21 nt, Artificial Sequence
  Synthetic
aucauacugaaugggcaaaac

SEQ ID NO: 513050 - RNA, 22 nt, Artificial Sequence
  Synthetic
uaucauacugaaugggcaaaac

SEQ ID NO: 513051 - RNA, 23 nt, Artificial Sequence
  Synthetic
auaucauacugaaugggcaaaac

SEQ ID NO: 513052 - RNA, 24 nt, Artificial Sequence
  Synthetic
aauaucauacugaaugggcaaaac

SEQ ID NO: 513053 - RNA, 18 nt, Artificial Sequence
  Synthetic
guugcuggaagucaaaac

SEQ ID NO: 513054 - RNA, 19 nt, Artificial Sequence
  Synthetic
uguugcuggaagucaaaac

SEQ ID NO: 513055 - RNA, 20 nt, Artificial Sequence
  Synthetic
auguugcuggaagucaaaac

SEQ ID NO: 513056 - RNA, 21 nt, Artificial Sequence
  Synthetic
uauguugcuggaagucaaaac

SEQ ID NO: 513057 - RNA, 22 nt, Artificial Sequence
  Synthetic
auauguugcuggaagucaaaac

SEQ ID NO: 513058 - RNA, 23 nt, Artificial Sequence
  Synthetic
uauauguugcuggaagucaaaac

SEQ ID NO: 513059 - RNA, 24 nt, Artificial Sequence
  Synthetic
auauauguugcuggaagucaaaac

SEQ ID NO: 513060 - RNA, 18 nt, Artificial Sequence
  Synthetic
uaacagcagagucaaaac

SEQ ID NO: 513061 - RNA, 19 nt, Artificial Sequence
  Synthetic
uuaacagcagagucaaaac

SEQ ID NO: 513062 - RNA, 20 nt, Artificial Sequence
  Synthetic
guuaacagcagagucaaaac

SEQ ID NO: 513063 - RNA, 21 nt, Artificial Sequence
  Synthetic
aguuaacagcagagucaaaac

SEQ ID NO: 513064 - RNA, 22 nt, Artificial Sequence
  Synthetic
uaguuaacagcagagucaaaac

SEQ ID NO: 513065 - RNA, 23 nt, Artificial Sequence
  Synthetic
cuaguuaacagcagagucaaaac

SEQ ID NO: 513066 - RNA, 24 nt, Artificial Sequence
  Synthetic
gcuaguuaacagcagagucaaaac

SEQ ID NO: 513067 - RNA, 18 nt, Artificial Sequence
  Synthetic
ucuauccuuugucaaaac

SEQ ID NO: 513068 - RNA, 19 nt, Artificial Sequence
  Synthetic
cucuauccuuugucaaaac

SEQ ID NO: 513069 - RNA, 20 nt, Artificial Sequence
  Synthetic
acucuauccuuugucaaaac

SEQ ID NO: 513070 - RNA, 21 nt, Artificial Sequence
  Synthetic
aacucuauccuuugucaaaac

SEQ ID NO: 513071 - RNA, 22 nt, Artificial Sequence
  Synthetic
aaacucuauccuuugucaaaac

SEQ ID NO: 513072 - RNA, 23 nt, Artificial Sequence
  Synthetic
gaaacucuauccuuugucaaaac

SEQ ID NO: 513073 - RNA, 24 nt, Artificial Sequence
  Synthetic
agaaacucuauccuuugucaaaac

SEQ ID NO: 513074 - RNA, 18 nt, Artificial Sequence
  Synthetic
acaauguaacuucaaaac

SEQ ID NO: 513075 - RNA, 19 nt, Artificial Sequence
  Synthetic
gacaauguaacuucaaaac

SEQ ID NO: 513076 - RNA, 20 nt, Artificial Sequence
  Synthetic
agacaauguaacuucaaaac

SEQ ID NO: 513077 - RNA, 21 nt, Artificial Sequence
  Synthetic
cagacaauguaacuucaaaac

SEQ ID NO: 513078 - RNA, 22 nt, Artificial Sequence
  Synthetic
ccagacaauguaacuucaaaac

SEQ ID NO: 513079 - RNA, 23 nt, Artificial Sequence
  Synthetic
cccagacaauguaacuucaaaac

SEQ ID NO: 513080 - RNA, 24 nt, Artificial Sequence
  Synthetic
acccagacaauguaacuucaaaac

SEQ ID NO: 513081 - RNA, 18 nt, Artificial Sequence
  Synthetic
acaagaauccuucaaaac

SEQ ID NO: 513082 - RNA, 19 nt, Artificial Sequence
  Synthetic
gacaagaauccuucaaaac

SEQ ID NO: 513083 - RNA, 20 nt, Artificial Sequence
  Synthetic
ggacaagaauccuucaaaac

SEQ ID NO: 513084 - RNA, 21 nt, Artificial Sequence
  Synthetic
aggacaagaauccuucaaaac

SEQ ID NO: 513085 - RNA, 22 nt, Artificial Sequence
  Synthetic
aaggacaagaauccuucaaaac

SEQ ID NO: 513086 - RNA, 23 nt, Artificial Sequence
  Synthetic
aaaggacaagaauccuucaaaac

SEQ ID NO: 513087 - RNA, 24 nt, Artificial Sequence
  Synthetic
aaaaggacaagaauccuucaaaac

SEQ ID NO: 513088 - RNA, 18 nt, Artificial Sequence
  Synthetic
guuucucccuuucaaaac

SEQ ID NO: 513089 - RNA, 19 nt, Artificial Sequence
  Synthetic
aguuucucccuuucaaaac

SEQ ID NO: 513090 - RNA, 20 nt, Artificial Sequence
  Synthetic
gaguuucucccuuucaaaac

SEQ ID NO: 513091 - RNA, 21 nt, Artificial Sequence
  Synthetic
ugaguuucucccuuucaaaac

SEQ ID NO: 513092 - RNA, 22 nt, Artificial Sequence
  Synthetic
cugaguuucucccuuucaaaac

SEQ ID NO: 513093 - RNA, 23 nt, Artificial Sequence
  Synthetic
ucugaguuucucccuuucaaaac

SEQ ID NO: 513094 - RNA, 24 nt, Artificial Sequence
  Synthetic
cucugaguuucucccuuucaaaac

SEQ ID NO: 513095 - RNA, 18 nt, Artificial Sequence
  Synthetic
gggaugugaaaagaaaac

SEQ ID NO: 513096 - RNA, 19 nt, Artificial Sequence
  Synthetic
agggaugugaaaagaaaac

SEQ ID NO: 513097 - RNA, 20 nt, Artificial Sequence
  Synthetic
aagggaugugaaaagaaaac

SEQ ID NO: 513098 - RNA, 21 nt, Artificial Sequence
  Synthetic
gaagggaugugaaaagaaaac

SEQ ID NO: 513099 - RNA, 22 nt, Artificial Sequence
  Synthetic
agaagggaugugaaaagaaaac

SEQ ID NO: 513100 - RNA, 23 nt, Artificial Sequence
  Synthetic
aagaagggaugugaaaagaaaac

SEQ ID NO: 513101 - RNA, 24 nt, Artificial Sequence
  Synthetic
uaagaagggaugugaaaagaaaac

SEQ ID NO: 513102 - RNA, 18 nt, Artificial Sequence
  Synthetic
cuacaaauacaagaaaac

SEQ ID NO: 513103 - RNA, 19 nt, Artificial Sequence
  Synthetic
ucuacaaauacaagaaaac

SEQ ID NO: 513104 - RNA, 20 nt, Artificial Sequence
  Synthetic
uucuacaaauacaagaaaac

SEQ ID NO: 513105 - RNA, 21 nt, Artificial Sequence
  Synthetic
uuucuacaaauacaagaaaac

SEQ ID NO: 513106 - RNA, 22 nt, Artificial Sequence
  Synthetic
auuucuacaaauacaagaaaac

SEQ ID NO: 513107 - RNA, 23 nt, Artificial Sequence
  Synthetic
uauuucuacaaauacaagaaaac

SEQ ID NO: 513108 - RNA, 24 nt, Artificial Sequence
  Synthetic
cuauuucuacaaauacaagaaaac

SEQ ID NO: 513109 - RNA, 18 nt, Artificial Sequence
  Synthetic
ugggguacggaagaaaac

SEQ ID NO: 513110 - RNA, 19 nt, Artificial Sequence
  Synthetic
uugggguacggaagaaaac

SEQ ID NO: 513111 - RNA, 20 nt, Artificial Sequence
  Synthetic
cuugggguacggaagaaaac

SEQ ID NO: 513112 - RNA, 21 nt, Artificial Sequence
  Synthetic
acuugggguacggaagaaaac

SEQ ID NO: 513113 - RNA, 22 nt, Artificial Sequence
  Synthetic
uacuugggguacggaagaaaac

SEQ ID NO: 513114 - RNA, 23 nt, Artificial Sequence
  Synthetic
cuacuugggguacggaagaaaac

SEQ ID NO: 513115 - RNA, 24 nt, Artificial Sequence
  Synthetic
ucuacuugggguacggaagaaaac

SEQ ID NO: 513116 - RNA, 18 nt, Artificial Sequence
  Synthetic
gaaaccaaugaagaaaac

SEQ ID NO: 513117 - RNA, 19 nt, Artificial Sequence
  Synthetic
ggaaaccaaugaagaaaac

SEQ ID NO: 513118 - RNA, 20 nt, Artificial Sequence
  Synthetic
uggaaaccaaugaagaaaac

SEQ ID NO: 513119 - RNA, 21 nt, Artificial Sequence
  Synthetic
auggaaaccaaugaagaaaac

SEQ ID NO: 513120 - RNA, 22 nt, Artificial Sequence
  Synthetic
aauggaaaccaaugaagaaaac

SEQ ID NO: 513121 - RNA, 23 nt, Artificial Sequence
  Synthetic
aaauggaaaccaaugaagaaaac

SEQ ID NO: 513122 - RNA, 24 nt, Artificial Sequence
  Synthetic
uaaauggaaaccaaugaagaaaac

SEQ ID NO: 513123 - RNA, 18 nt, Artificial Sequence
  Synthetic
uuuuaugcaucagaaaac

SEQ ID NO: 513124 - RNA, 19 nt, Artificial Sequence
  Synthetic
uuuuuaugcaucagaaaac

SEQ ID NO: 513125 - RNA, 20 nt, Artificial Sequence
  Synthetic
auuuuuaugcaucagaaaac

SEQ ID NO: 513126 - RNA, 21 nt, Artificial Sequence
  Synthetic
uauuuuuaugcaucagaaaac

SEQ ID NO: 513127 - RNA, 22 nt, Artificial Sequence
  Synthetic
auauuuuuaugcaucagaaaac

SEQ ID NO: 513128 - RNA, 23 nt, Artificial Sequence
  Synthetic
cauauuuuuaugcaucagaaaac

SEQ ID NO: 513129 - RNA, 24 nt, Artificial Sequence
  Synthetic
ucauauuuuuaugcaucagaaaac

SEQ ID NO: 513130 - RNA, 18 nt, Artificial Sequence
  Synthetic
uucggguucucagaaaac

SEQ ID NO: 513131 - RNA, 19 nt, Artificial Sequence
  Synthetic
uuucggguucucagaaaac

SEQ ID NO: 513132 - RNA, 20 nt, Artificial Sequence
  Synthetic
guuucggguucucagaaaac

SEQ ID NO: 513133 - RNA, 21 nt, Artificial Sequence
  Synthetic
gguuucggguucucagaaaac

SEQ ID NO: 513134 - RNA, 22 nt, Artificial Sequence
  Synthetic
agguuucggguucucagaaaac

SEQ ID NO: 513135 - RNA, 23 nt, Artificial Sequence
  Synthetic
cagguuucggguucucagaaaac

SEQ ID NO: 513136 - RNA, 24 nt, Artificial Sequence
  Synthetic
gcagguuucggguucucagaaaac

SEQ ID NO: 513137 - RNA, 18 nt, Artificial Sequence
  Synthetic
aauucccucagagaaaac

SEQ ID NO: 513138 - RNA, 19 nt, Artificial Sequence
  Synthetic
aaauucccucagagaaaac

SEQ ID NO: 513139 - RNA, 20 nt, Artificial Sequence
  Synthetic
uaaauucccucagagaaaac

SEQ ID NO: 513140 - RNA, 21 nt, Artificial Sequence
  Synthetic
cuaaauucccucagagaaaac

SEQ ID NO: 513141 - RNA, 22 nt, Artificial Sequence
  Synthetic
acuaaauucccucagagaaaac

SEQ ID NO: 513142 - RNA, 23 nt, Artificial Sequence
  Synthetic
aacuaaauucccucagagaaaac

SEQ ID NO: 513143 - RNA, 24 nt, Artificial Sequence
  Synthetic
aaacuaaauucccucagagaaaac

SEQ ID NO: 513144 - RNA, 18 nt, Artificial Sequence
  Synthetic
acuguaucuagagaaaac

SEQ ID NO: 513145 - RNA, 19 nt, Artificial Sequence
  Synthetic
aacuguaucuagagaaaac

SEQ ID NO: 513146 - RNA, 20 nt, Artificial Sequence
  Synthetic
uaacuguaucuagagaaaac

SEQ ID NO: 513147 - RNA, 21 nt, Artificial Sequence
  Synthetic
cuaacuguaucuagagaaaac

SEQ ID NO: 513148 - RNA, 22 nt, Artificial Sequence
  Synthetic
ucuaacuguaucuagagaaaac

SEQ ID NO: 513149 - RNA, 23 nt, Artificial Sequence
  Synthetic
uucuaacuguaucuagagaaaac

SEQ ID NO: 513150 - RNA, 24 nt, Artificial Sequence
  Synthetic
uuucuaacuguaucuagagaaaac

SEQ ID NO: 513151 - RNA, 18 nt, Artificial Sequence
  Synthetic
gccuacauaugagaaaac

SEQ ID NO: 513152 - RNA, 19 nt, Artificial Sequence
  Synthetic
ggccuacauaugagaaaac

SEQ ID NO: 513153 - RNA, 20 nt, Artificial Sequence
  Synthetic
cggccuacauaugagaaaac

SEQ ID NO: 513154 - RNA, 21 nt, Artificial Sequence
  Synthetic
ucggccuacauaugagaaaac

SEQ ID NO: 513155 - RNA, 22 nt, Artificial Sequence
  Synthetic
cucggccuacauaugagaaaac

SEQ ID NO: 513156 - RNA, 23 nt, Artificial Sequence
  Synthetic
ucucggccuacauaugagaaaac

SEQ ID NO: 513157 - RNA, 24 nt, Artificial Sequence
  Synthetic
uucucggccuacauaugagaaaac

SEQ ID NO: 513158 - RNA, 18 nt, Artificial Sequence
  Synthetic
uccuuuaguaacgaaaac

SEQ ID NO: 513159 - RNA, 19 nt, Artificial Sequence
  Synthetic
uuccuuuaguaacgaaaac

SEQ ID NO: 513160 - RNA, 20 nt, Artificial Sequence
  Synthetic
cuuccuuuaguaacgaaaac

SEQ ID NO: 513161 - RNA, 21 nt, Artificial Sequence
  Synthetic
ucuuccuuuaguaacgaaaac

SEQ ID NO: 513162 - RNA, 22 nt, Artificial Sequence
  Synthetic
uucuuccuuuaguaacgaaaac

SEQ ID NO: 513163 - RNA, 23 nt, Artificial Sequence
  Synthetic
uuucuuccuuuaguaacgaaaac

SEQ ID NO: 513164 - RNA, 24 nt, Artificial Sequence
  Synthetic
uuuucuuccuuuaguaacgaaaac

SEQ ID NO: 513165 - RNA, 18 nt, Artificial Sequence
  Synthetic
ggacagucucaggaaaac

SEQ ID NO: 513166 - RNA, 19 nt, Artificial Sequence
  Synthetic
uggacagucucaggaaaac

SEQ ID NO: 513167 - RNA, 20 nt, Artificial Sequence
  Synthetic
uuggacagucucaggaaaac

SEQ ID NO: 513168 - RNA, 21 nt, Artificial Sequence
  Synthetic
auuggacagucucaggaaaac

SEQ ID NO: 513169 - RNA, 22 nt, Artificial Sequence
  Synthetic
aauuggacagucucaggaaaac

SEQ ID NO: 513170 - RNA, 23 nt, Artificial Sequence
  Synthetic
aaauuggacagucucaggaaaac

SEQ ID NO: 513171 - RNA, 24 nt, Artificial Sequence
  Synthetic
aaaauuggacagucucaggaaaac

SEQ ID NO: 513172 - RNA, 18 nt, Artificial Sequence
  Synthetic
aguagggaaauggaaaac

SEQ ID NO: 513173 - RNA, 19 nt, Artificial Sequence
  Synthetic
aaguagggaaauggaaaac

SEQ ID NO: 513174 - RNA, 20 nt, Artificial Sequence
  Synthetic
gaaguagggaaauggaaaac

SEQ ID NO: 513175 - RNA, 21 nt, Artificial Sequence
  Synthetic
agaaguagggaaauggaaaac

SEQ ID NO: 513176 - RNA, 22 nt, Artificial Sequence
  Synthetic
cagaaguagggaaauggaaaac

SEQ ID NO: 513177 - RNA, 23 nt, Artificial Sequence
  Synthetic
acagaaguagggaaauggaaaac

SEQ ID NO: 513178 - RNA, 24 nt, Artificial Sequence
  Synthetic
gacagaaguagggaaauggaaaac

SEQ ID NO: 513179 - RNA, 18 nt, Artificial Sequence
  Synthetic
gaaaaaauaaaugaaaac

SEQ ID NO: 513180 - RNA, 19 nt, Artificial Sequence
  Synthetic
ggaaaaaauaaaugaaaac

SEQ ID NO: 513181 - RNA, 20 nt, Artificial Sequence
  Synthetic
gggaaaaaauaaaugaaaac

SEQ ID NO: 513182 - RNA, 21 nt, Artificial Sequence
  Synthetic
ggggaaaaaauaaaugaaaac

SEQ ID NO: 513183 - RNA, 22 nt, Artificial Sequence
  Synthetic
aggggaaaaaauaaaugaaaac

SEQ ID NO: 513184 - RNA, 23 nt, Artificial Sequence
  Synthetic
caggggaaaaaauaaaugaaaac

SEQ ID NO: 513185 - RNA, 24 nt, Artificial Sequence
  Synthetic
acaggggaaaaaauaaaugaaaac

SEQ ID NO: 513186 - RNA, 18 nt, Artificial Sequence
  Synthetic
uucuaccuacaugaaaac

SEQ ID NO: 513187 - RNA, 19 nt, Artificial Sequence
  Synthetic
cuucuaccuacaugaaaac

SEQ ID NO: 513188 - RNA, 20 nt, Artificial Sequence
  Synthetic
ucuucuaccuacaugaaaac

SEQ ID NO: 513189 - RNA, 21 nt, Artificial Sequence
  Synthetic
uucuucuaccuacaugaaaac

SEQ ID NO: 513190 - RNA, 22 nt, Artificial Sequence
  Synthetic
uuucuucuaccuacaugaaaac

SEQ ID NO: 513191 - RNA, 23 nt, Artificial Sequence
  Synthetic
guuucuucuaccuacaugaaaac

SEQ ID NO: 513192 - RNA, 24 nt, Artificial Sequence
  Synthetic
uguuucuucuaccuacaugaaaac

SEQ ID NO: 513193 - RNA, 18 nt, Artificial Sequence
  Synthetic
aagaaugaagcugaaaac

SEQ ID NO: 513194 - RNA, 19 nt, Artificial Sequence
  Synthetic
caagaaugaagcugaaaac

SEQ ID NO: 513195 - RNA, 20 nt, Artificial Sequence
  Synthetic
ucaagaaugaagcugaaaac

SEQ ID NO: 513196 - RNA, 21 nt, Artificial Sequence
  Synthetic
aucaagaaugaagcugaaaac

SEQ ID NO: 513197 - RNA, 22 nt, Artificial Sequence
  Synthetic
gaucaagaaugaagcugaaaac

SEQ ID NO: 513198 - RNA, 23 nt, Artificial Sequence
  Synthetic
ugaucaagaaugaagcugaaaac

SEQ ID NO: 513199 - RNA, 24 nt, Artificial Sequence
  Synthetic
augaucaagaaugaagcugaaaac

SEQ ID NO: 513200 - RNA, 18 nt, Artificial Sequence
  Synthetic
gacaggucaggugaaaac

SEQ ID NO: 513201 - RNA, 19 nt, Artificial Sequence
  Synthetic
agacaggucaggugaaaac

SEQ ID NO: 513202 - RNA, 20 nt, Artificial Sequence
  Synthetic
gagacaggucaggugaaaac

SEQ ID NO: 513203 - RNA, 21 nt, Artificial Sequence
  Synthetic
ggagacaggucaggugaaaac

SEQ ID NO: 513204 - RNA, 22 nt, Artificial Sequence
  Synthetic
uggagacaggucaggugaaaac

SEQ ID NO: 513205 - RNA, 23 nt, Artificial Sequence
  Synthetic
auggagacaggucaggugaaaac

SEQ ID NO: 513206 - RNA, 24 nt, Artificial Sequence
  Synthetic
uauggagacaggucaggugaaaac

SEQ ID NO: 513207 - RNA, 18 nt, Artificial Sequence
  Synthetic
gaaggacuuugugaaaac

SEQ ID NO: 513208 - RNA, 19 nt, Artificial Sequence
  Synthetic
ggaaggacuuugugaaaac

SEQ ID NO: 513209 - RNA, 20 nt, Artificial Sequence
  Synthetic
uggaaggacuuugugaaaac

SEQ ID NO: 513210 - RNA, 21 nt, Artificial Sequence
  Synthetic
auggaaggacuuugugaaaac

SEQ ID NO: 513211 - RNA, 22 nt, Artificial Sequence
  Synthetic
gauggaaggacuuugugaaaac

SEQ ID NO: 513212 - RNA, 23 nt, Artificial Sequence
  Synthetic
ggauggaaggacuuugugaaaac

SEQ ID NO: 513213 - RNA, 24 nt, Artificial Sequence
  Synthetic
uggauggaaggacuuugugaaaac

SEQ ID NO: 513214 - RNA, 18 nt, Artificial Sequence
  Synthetic
agauuuaaaaaauaaaac

SEQ ID NO: 513215 - RNA, 19 nt, Artificial Sequence
  Synthetic
gagauuuaaaaaauaaaac

SEQ ID NO: 513216 - RNA, 20 nt, Artificial Sequence
  Synthetic
ugagauuuaaaaaauaaaac

SEQ ID NO: 513217 - RNA, 21 nt, Artificial Sequence
  Synthetic
gugagauuuaaaaaauaaaac

SEQ ID NO: 513218 - RNA, 22 nt, Artificial Sequence
  Synthetic
ugugagauuuaaaaaauaaaac

SEQ ID NO: 513219 - RNA, 23 nt, Artificial Sequence
  Synthetic
augugagauuuaaaaaauaaaac

SEQ ID NO: 513220 - RNA, 24 nt, Artificial Sequence
  Synthetic
gaugugagauuuaaaaaauaaaac

SEQ ID NO: 513221 - RNA, 18 nt, Artificial Sequence
  Synthetic
aaacuguguucauaaaac

SEQ ID NO: 513222 - RNA, 19 nt, Artificial Sequence
  Synthetic
aaaacuguguucauaaaac

SEQ ID NO: 513223 - RNA, 20 nt, Artificial Sequence
  Synthetic
uaaaacuguguucauaaaac

SEQ ID NO: 513224 - RNA, 21 nt, Artificial Sequence
  Synthetic
cuaaaacuguguucauaaaac

SEQ ID NO: 513225 - RNA, 22 nt, Artificial Sequence
  Synthetic
ucuaaaacuguguucauaaaac

SEQ ID NO: 513226 - RNA, 23 nt, Artificial Sequence
  Synthetic
uucuaaaacuguguucauaaaac

SEQ ID NO: 513227 - RNA, 24 nt, Artificial Sequence
  Synthetic
uuucuaaaacuguguucauaaaac

SEQ ID NO: 513228 - RNA, 18 nt, Artificial Sequence
  Synthetic
ugagaaaugagauaaaac

SEQ ID NO: 513229 - RNA, 19 nt, Artificial Sequence
  Synthetic
cugagaaaugagauaaaac

SEQ ID NO: 513230 - RNA, 20 nt, Artificial Sequence
  Synthetic
acugagaaaugagauaaaac

SEQ ID NO: 513231 - RNA, 21 nt, Artificial Sequence
  Synthetic
cacugagaaaugagauaaaac

SEQ ID NO: 513232 - RNA, 22 nt, Artificial Sequence
  Synthetic
gcacugagaaaugagauaaaac

SEQ ID NO: 513233 - RNA, 23 nt, Artificial Sequence
  Synthetic
ugcacugagaaaugagauaaaac

SEQ ID NO: 513234 - RNA, 24 nt, Artificial Sequence
  Synthetic
uugcacugagaaaugagauaaaac

SEQ ID NO: 513235 - RNA, 18 nt, Artificial Sequence
  Synthetic
caugcacagggauaaaac

SEQ ID NO: 513236 - RNA, 19 nt, Artificial Sequence
  Synthetic
gcaugcacagggauaaaac

SEQ ID NO: 513237 - RNA, 20 nt, Artificial Sequence
  Synthetic
agcaugcacagggauaaaac

SEQ ID NO: 513238 - RNA, 21 nt, Artificial Sequence
  Synthetic
cagcaugcacagggauaaaac

SEQ ID NO: 513239 - RNA, 22 nt, Artificial Sequence
  Synthetic
ucagcaugcacagggauaaaac

SEQ ID NO: 513240 - RNA, 23 nt, Artificial Sequence
  Synthetic
cucagcaugcacagggauaaaac

SEQ ID NO: 513241 - RNA, 24 nt, Artificial Sequence
  Synthetic
gcucagcaugcacagggauaaaac

SEQ ID NO: 513242 - RNA, 18 nt, Artificial Sequence
  Synthetic
aaauuuucauccuaaaac

SEQ ID NO: 513243 - RNA, 19 nt, Artificial Sequence
  Synthetic
gaaauuuucauccuaaaac

SEQ ID NO: 513244 - RNA, 20 nt, Artificial Sequence
  Synthetic
agaaauuuucauccuaaaac

SEQ ID NO: 513245 - RNA, 21 nt, Artificial Sequence
  Synthetic
aagaaauuuucauccuaaaac

SEQ ID NO: 513246 - RNA, 22 nt, Artificial Sequence
  Synthetic
aaagaaauuuucauccuaaaac

SEQ ID NO: 513247 - RNA, 23 nt, Artificial Sequence
  Synthetic
caaagaaauuuucauccuaaaac

SEQ ID NO: 513248 - RNA, 24 nt, Artificial Sequence
  Synthetic
acaaagaaauuuucauccuaaaac

SEQ ID NO: 513249 - RNA, 18 nt, Artificial Sequence
  Synthetic
gagaauuccuucuaaaac

SEQ ID NO: 513250 - RNA, 19 nt, Artificial Sequence
  Synthetic
ugagaauuccuucuaaaac

SEQ ID NO: 513251 - RNA, 20 nt, Artificial Sequence
  Synthetic
augagaauuccuucuaaaac

SEQ ID NO: 513252 - RNA, 21 nt, Artificial Sequence
  Synthetic
aaugagaauuccuucuaaaac

SEQ ID NO: 513253 - RNA, 22 nt, Artificial Sequence
  Synthetic
uaaugagaauuccuucuaaaac

SEQ ID NO: 513254 - RNA, 23 nt, Artificial Sequence
  Synthetic
auaaugagaauuccuucuaaaac

SEQ ID NO: 513255 - RNA, 24 nt, Artificial Sequence
  Synthetic
aauaaugagaauuccuucuaaaac

SEQ ID NO: 513256 - RNA, 18 nt, Artificial Sequence
  Synthetic
aggagacguagguaaaac

SEQ ID NO: 513257 - RNA, 19 nt, Artificial Sequence
  Synthetic
gaggagacguagguaaaac

SEQ ID NO: 513258 - RNA, 20 nt, Artificial Sequence
  Synthetic
agaggagacguagguaaaac

SEQ ID NO: 513259 - RNA, 21 nt, Artificial Sequence
  Synthetic
gagaggagacguagguaaaac

SEQ ID NO: 513260 - RNA, 22 nt, Artificial Sequence
  Synthetic
ugagaggagacguagguaaaac

SEQ ID NO: 513261 - RNA, 23 nt, Artificial Sequence
  Synthetic
uugagaggagacguagguaaaac

SEQ ID NO: 513262 - RNA, 24 nt, Artificial Sequence
  Synthetic
auugagaggagacguagguaaaac

SEQ ID NO: 513263 - RNA, 18 nt, Artificial Sequence
  Synthetic
auuuccagauuguaaaac

SEQ ID NO: 513264 - RNA, 19 nt, Artificial Sequence
  Synthetic
cauuuccagauuguaaaac

SEQ ID NO: 513265 - RNA, 20 nt, Artificial Sequence
  Synthetic
acauuuccagauuguaaaac

SEQ ID NO: 513266 - RNA, 21 nt, Artificial Sequence
  Synthetic
gacauuuccagauuguaaaac

SEQ ID NO: 513267 - RNA, 22 nt, Artificial Sequence
  Synthetic
agacauuuccagauuguaaaac

SEQ ID NO: 513268 - RNA, 23 nt, Artificial Sequence
  Synthetic
gagacauuuccagauuguaaaac

SEQ ID NO: 513269 - RNA, 24 nt, Artificial Sequence
  Synthetic
ggagacauuuccagauuguaaaac

SEQ ID NO: 513270 - RNA, 18 nt, Artificial Sequence
  Synthetic
acgacucccucuuaaaac

SEQ ID NO: 513271 - RNA, 19 nt, Artificial Sequence
  Synthetic
aacgacucccucuuaaaac

SEQ ID NO: 513272 - RNA, 20 nt, Artificial Sequence
  Synthetic
aaacgacucccucuuaaaac

SEQ ID NO: 513273 - RNA, 21 nt, Artificial Sequence
  Synthetic
uaaacgacucccucuuaaaac

SEQ ID NO: 513274 - RNA, 22 nt, Artificial Sequence
  Synthetic
auaaacgacucccucuuaaaac

SEQ ID NO: 513275 - RNA, 23 nt, Artificial Sequence
  Synthetic
aauaaacgacucccucuuaaaac

SEQ ID NO: 513276 - RNA, 24 nt, Artificial Sequence
  Synthetic
aaauaaacgacucccucuuaaaac

SEQ ID NO: 513277 - RNA, 18 nt, Artificial Sequence
  Synthetic
augaucuucuguuaaaac

SEQ ID NO: 513278 - RNA, 19 nt, Artificial Sequence
  Synthetic
caugaucuucuguuaaaac

SEQ ID NO: 513279 - RNA, 20 nt, Artificial Sequence
  Synthetic
gcaugaucuucuguuaaaac

SEQ ID NO: 513280 - RNA, 21 nt, Artificial Sequence
  Synthetic
ggcaugaucuucuguuaaaac

SEQ ID NO: 513281 - RNA, 22 nt, Artificial Sequence
  Synthetic
uggcaugaucuucuguuaaaac

SEQ ID NO: 513282 - RNA, 23 nt, Artificial Sequence
  Synthetic
cuggcaugaucuucuguuaaaac

SEQ ID NO: 513283 - RNA, 24 nt, Artificial Sequence
  Synthetic
ucuggcaugaucuucuguuaaaac

SEQ ID NO: 513284 - RNA, 18 nt, Artificial Sequence
  Synthetic
gaugagaauauuuaaaac

SEQ ID NO: 513285 - RNA, 19 nt, Artificial Sequence
  Synthetic
agaugagaauauuuaaaac

SEQ ID NO: 513286 - RNA, 20 nt, Artificial Sequence
  Synthetic
aagaugagaauauuuaaaac

SEQ ID NO: 513287 - RNA, 21 nt, Artificial Sequence
  Synthetic
gaagaugagaauauuuaaaac

SEQ ID NO: 513288 - RNA, 22 nt, Artificial Sequence
  Synthetic
ggaagaugagaauauuuaaaac

SEQ ID NO: 513289 - RNA, 23 nt, Artificial Sequence
  Synthetic
uggaagaugagaauauuuaaaac

SEQ ID NO: 513290 - RNA, 24 nt, Artificial Sequence
  Synthetic
uuggaagaugagaauauuuaaaac

SEQ ID NO: 513291 - RNA, 18 nt, Artificial Sequence
  Synthetic
aaaauagguauuuaaaac

SEQ ID NO: 513292 - RNA, 19 nt, Artificial Sequence
  Synthetic
uaaaauagguauuuaaaac

SEQ ID NO: 513293 - RNA, 20 nt, Artificial Sequence
  Synthetic
cuaaaauagguauuuaaaac

SEQ ID NO: 513294 - RNA, 21 nt, Artificial Sequence
  Synthetic
ucuaaaauagguauuuaaaac

SEQ ID NO: 513295 - RNA, 22 nt, Artificial Sequence
  Synthetic
uucuaaaauagguauuuaaaac

SEQ ID NO: 513296 - RNA, 23 nt, Artificial Sequence
  Synthetic
uuucuaaaauagguauuuaaaac

SEQ ID NO: 513297 - RNA, 24 nt, Artificial Sequence
  Synthetic
uuuucuaaaauagguauuuaaaac

SEQ ID NO: 513298 - RNA, 18 nt, Artificial Sequence
  Synthetic
cuucagagaaaaacaaac

SEQ ID NO: 513299 - RNA, 19 nt, Artificial Sequence
  Synthetic
ccuucagagaaaaacaaac

SEQ ID NO: 513300 - RNA, 20 nt, Artificial Sequence
  Synthetic
accuucagagaaaaacaaac

SEQ ID NO: 513301 - RNA, 21 nt, Artificial Sequence
  Synthetic
uaccuucagagaaaaacaaac

SEQ ID NO: 513302 - RNA, 22 nt, Artificial Sequence
  Synthetic
auaccuucagagaaaaacaaac

SEQ ID NO: 513303 - RNA, 23 nt, Artificial Sequence
  Synthetic
aauaccuucagagaaaaacaaac

SEQ ID NO: 513304 - RNA, 24 nt, Artificial Sequence
  Synthetic
gaauaccuucagagaaaaacaaac

SEQ ID NO: 513305 - RNA, 18 nt, Artificial Sequence
  Synthetic
uuuaucuaggaaacaaac

SEQ ID NO: 513306 - RNA, 19 nt, Artificial Sequence
  Synthetic
auuuaucuaggaaacaaac

SEQ ID NO: 513307 - RNA, 20 nt, Artificial Sequence
  Synthetic
aauuuaucuaggaaacaaac

SEQ ID NO: 513308 - RNA, 21 nt, Artificial Sequence
  Synthetic
aaauuuaucuaggaaacaaac

SEQ ID NO: 513309 - RNA, 22 nt, Artificial Sequence
  Synthetic
aaaauuuaucuaggaaacaaac

SEQ ID NO: 513310 - RNA, 23 nt, Artificial Sequence
  Synthetic
gaaaauuuaucuaggaaacaaac

SEQ ID NO: 513311 - RNA, 24 nt, Artificial Sequence
  Synthetic
agaaaauuuaucuaggaaacaaac

SEQ ID NO: 513312 - RNA, 18 nt, Artificial Sequence
  Synthetic
aacuuagcauaaacaaac

SEQ ID NO: 513313 - RNA, 19 nt, Artificial Sequence
  Synthetic
caacuuagcauaaacaaac

SEQ ID NO: 513314 - RNA, 20 nt, Artificial Sequence
  Synthetic
acaacuuagcauaaacaaac

SEQ ID NO: 513315 - RNA, 21 nt, Artificial Sequence
  Synthetic
aacaacuuagcauaaacaaac

SEQ ID NO: 513316 - RNA, 22 nt, Artificial Sequence
  Synthetic
aaacaacuuagcauaaacaaac

SEQ ID NO: 513317 - RNA, 23 nt, Artificial Sequence
  Synthetic
uaaacaacuuagcauaaacaaac

SEQ ID NO: 513318 - RNA, 24 nt, Artificial Sequence
  Synthetic
cuaaacaacuuagcauaaacaaac

SEQ ID NO: 513319 - RNA, 18 nt, Artificial Sequence
  Synthetic
uaaaaacacacaacaaac

SEQ ID NO: 513320 - RNA, 19 nt, Artificial Sequence
  Synthetic
auaaaaacacacaacaaac

SEQ ID NO: 513321 - RNA, 20 nt, Artificial Sequence
  Synthetic
gauaaaaacacacaacaaac

SEQ ID NO: 513322 - RNA, 21 nt, Artificial Sequence
  Synthetic
ugauaaaaacacacaacaaac

SEQ ID NO: 513323 - RNA, 22 nt, Artificial Sequence
  Synthetic
augauaaaaacacacaacaaac

SEQ ID NO: 513324 - RNA, 23 nt, Artificial Sequence
  Synthetic
caugauaaaaacacacaacaaac

SEQ ID NO: 513325 - RNA, 24 nt, Artificial Sequence
  Synthetic
ucaugauaaaaacacacaacaaac

SEQ ID NO: 513326 - RNA, 18 nt, Artificial Sequence
  Synthetic
uacaaguggccaacaaac

SEQ ID NO: 513327 - RNA, 19 nt, Artificial Sequence
  Synthetic
auacaaguggccaacaaac

SEQ ID NO: 513328 - RNA, 20 nt, Artificial Sequence
  Synthetic
cauacaaguggccaacaaac

SEQ ID NO: 513329 - RNA, 21 nt, Artificial Sequence
  Synthetic
acauacaaguggccaacaaac

SEQ ID NO: 513330 - RNA, 22 nt, Artificial Sequence
  Synthetic
gacauacaaguggccaacaaac

SEQ ID NO: 513331 - RNA, 23 nt, Artificial Sequence
  Synthetic
agacauacaaguggccaacaaac

SEQ ID NO: 513332 - RNA, 24 nt, Artificial Sequence
  Synthetic
aagacauacaaguggccaacaaac

SEQ ID NO: 513333 - RNA, 18 nt, Artificial Sequence
  Synthetic
aaaaucuguccaacaaac

SEQ ID NO: 513334 - RNA, 19 nt, Artificial Sequence
  Synthetic
aaaaaucuguccaacaaac

SEQ ID NO: 513335 - RNA, 20 nt, Artificial Sequence
  Synthetic
gaaaaaucuguccaacaaac

SEQ ID NO: 513336 - RNA, 21 nt, Artificial Sequence
  Synthetic
ggaaaaaucuguccaacaaac

SEQ ID NO: 513337 - RNA, 22 nt, Artificial Sequence
  Synthetic
aggaaaaaucuguccaacaaac

SEQ ID NO: 513338 - RNA, 23 nt, Artificial Sequence
  Synthetic
aaggaaaaaucuguccaacaaac

SEQ ID NO: 513339 - RNA, 24 nt, Artificial Sequence
  Synthetic
gaaggaaaaaucuguccaacaaac

SEQ ID NO: 513340 - RNA, 18 nt, Artificial Sequence
  Synthetic
aguacuuauugaacaaac

SEQ ID NO: 513341 - RNA, 19 nt, Artificial Sequence
  Synthetic
gaguacuuauugaacaaac

SEQ ID NO: 513342 - RNA, 20 nt, Artificial Sequence
  Synthetic
cgaguacuuauugaacaaac

SEQ ID NO: 513343 - RNA, 21 nt, Artificial Sequence
  Synthetic
ccgaguacuuauugaacaaac

SEQ ID NO: 513344 - RNA, 22 nt, Artificial Sequence
  Synthetic
uccgaguacuuauugaacaaac

SEQ ID NO: 513345 - RNA, 23 nt, Artificial Sequence
  Synthetic
guccgaguacuuauugaacaaac

SEQ ID NO: 513346 - RNA, 24 nt, Artificial Sequence
  Synthetic
gguccgaguacuuauugaacaaac

SEQ ID NO: 513347 - RNA, 18 nt, Artificial Sequence
  Synthetic
aaaaauacgguaacaaac

SEQ ID NO: 513348 - RNA, 19 nt, Artificial Sequence
  Synthetic
aaaaaauacgguaacaaac

SEQ ID NO: 513349 - RNA, 20 nt, Artificial Sequence
  Synthetic
uaaaaaauacgguaacaaac

SEQ ID NO: 513350 - RNA, 21 nt, Artificial Sequence
  Synthetic
uuaaaaaauacgguaacaaac

SEQ ID NO: 513351 - RNA, 22 nt, Artificial Sequence
  Synthetic
uuuaaaaaauacgguaacaaac

SEQ ID NO: 513352 - RNA, 23 nt, Artificial Sequence
  Synthetic
auuuaaaaaauacgguaacaaac

SEQ ID NO: 513353 - RNA, 24 nt, Artificial Sequence
  Synthetic
aauuuaaaaaauacgguaacaaac

SEQ ID NO: 513354 - RNA, 18 nt, Artificial Sequence
  Synthetic
accuuuaugcacacaaac

SEQ ID NO: 513355 - RNA, 19 nt, Artificial Sequence
  Synthetic
caccuuuaugcacacaaac

SEQ ID NO: 513356 - RNA, 20 nt, Artificial Sequence
  Synthetic
acaccuuuaugcacacaaac

SEQ ID NO: 513357 - RNA, 21 nt, Artificial Sequence
  Synthetic
aacaccuuuaugcacacaaac

SEQ ID NO: 513358 - RNA, 22 nt, Artificial Sequence
  Synthetic
gaacaccuuuaugcacacaaac

SEQ ID NO: 513359 - RNA, 23 nt, Artificial Sequence
  Synthetic
ugaacaccuuuaugcacacaaac

SEQ ID NO: 513360 - RNA, 24 nt, Artificial Sequence
  Synthetic
augaacaccuuuaugcacacaaac

SEQ ID NO: 513361 - RNA, 18 nt, Artificial Sequence
  Synthetic
uggcaaaaaaucacaaac

SEQ ID NO: 513362 - RNA, 19 nt, Artificial Sequence
  Synthetic
uuggcaaaaaaucacaaac

SEQ ID NO: 513363 - RNA, 20 nt, Artificial Sequence
  Synthetic
auuggcaaaaaaucacaaac

SEQ ID NO: 513364 - RNA, 21 nt, Artificial Sequence
  Synthetic
aauuggcaaaaaaucacaaac

SEQ ID NO: 513365 - RNA, 22 nt, Artificial Sequence
  Synthetic
aaauuggcaaaaaaucacaaac

SEQ ID NO: 513366 - RNA, 23 nt, Artificial Sequence
  Synthetic
aaaauuggcaaaaaaucacaaac

SEQ ID NO: 513367 - RNA, 24 nt, Artificial Sequence
  Synthetic
aaaaauuggcaaaaaaucacaaac

SEQ ID NO: 513368 - RNA, 18 nt, Artificial Sequence
  Synthetic
aucugcugauucacaaac

SEQ ID NO: 513369 - RNA, 19 nt, Artificial Sequence
  Synthetic
aaucugcugauucacaaac

SEQ ID NO: 513370 - RNA, 20 nt, Artificial Sequence
  Synthetic
aaaucugcugauucacaaac

SEQ ID NO: 513371 - RNA, 21 nt, Artificial Sequence
  Synthetic
aaaaucugcugauucacaaac

SEQ ID NO: 513372 - RNA, 22 nt, Artificial Sequence
  Synthetic
aaaaaucugcugauucacaaac

SEQ ID NO: 513373 - RNA, 23 nt, Artificial Sequence
  Synthetic
gaaaaaucugcugauucacaaac

SEQ ID NO: 513374 - RNA, 24 nt, Artificial Sequence
  Synthetic
ggaaaaaucugcugauucacaaac

SEQ ID NO: 513375 - RNA, 18 nt, Artificial Sequence
  Synthetic
gacuauaagaagacaaac

SEQ ID NO: 513376 - RNA, 19 nt, Artificial Sequence
  Synthetic
ugacuauaagaagacaaac

SEQ ID NO: 513377 - RNA, 20 nt, Artificial Sequence
  Synthetic
cugacuauaagaagacaaac

SEQ ID NO: 513378 - RNA, 21 nt, Artificial Sequence
  Synthetic
acugacuauaagaagacaaac

SEQ ID NO: 513379 - RNA, 22 nt, Artificial Sequence
  Synthetic
cacugacuauaagaagacaaac

SEQ ID NO: 513380 - RNA, 23 nt, Artificial Sequence
  Synthetic
acacugacuauaagaagacaaac

SEQ ID NO: 513381 - RNA, 24 nt, Artificial Sequence
  Synthetic
aacacugacuauaagaagacaaac

SEQ ID NO: 513382 - RNA, 18 nt, Artificial Sequence
  Synthetic
ugaaaagcaaggacaaac

SEQ ID NO: 513383 - RNA, 19 nt, Artificial Sequence
  Synthetic
augaaaagcaaggacaaac

SEQ ID NO: 513384 - RNA, 20 nt, Artificial Sequence
  Synthetic
uaugaaaagcaaggacaaac

SEQ ID NO: 513385 - RNA, 21 nt, Artificial Sequence
  Synthetic
cuaugaaaagcaaggacaaac

SEQ ID NO: 513386 - RNA, 22 nt, Artificial Sequence
  Synthetic
gcuaugaaaagcaaggacaaac

SEQ ID NO: 513387 - RNA, 23 nt, Artificial Sequence
  Synthetic
ggcuaugaaaagcaaggacaaac

SEQ ID NO: 513388 - RNA, 24 nt, Artificial Sequence
  Synthetic
uggcuaugaaaagcaaggacaaac

SEQ ID NO: 513389 - RNA, 21 nt, Artificial Sequence
  Synthetic
acuaucugaucuuugacaaac

SEQ ID NO: 513390 - RNA, 22 nt, Artificial Sequence
  Synthetic
aacuaucugaucuuugacaaac

SEQ ID NO: 513391 - RNA, 23 nt, Artificial Sequence
  Synthetic
caacuaucugaucuuugacaaac

SEQ ID NO: 513392 - RNA, 24 nt, Artificial Sequence
  Synthetic
acaacuaucugaucuuugacaaac

SEQ ID NO: 513393 - RNA, 18 nt, Artificial Sequence
  Synthetic
cugguuuuccuuacaaac

SEQ ID NO: 513394 - RNA, 19 nt, Artificial Sequence
  Synthetic
acugguuuuccuuacaaac

SEQ ID NO: 513395 - RNA, 20 nt, Artificial Sequence
  Synthetic
cacugguuuuccuuacaaac

SEQ ID NO: 513396 - RNA, 21 nt, Artificial Sequence
  Synthetic
gcacugguuuuccuuacaaac

SEQ ID NO: 513397 - RNA, 22 nt, Artificial Sequence
  Synthetic
agcacugguuuuccuuacaaac

SEQ ID NO: 513398 - RNA, 23 nt, Artificial Sequence
  Synthetic
aagcacugguuuuccuuacaaac

SEQ ID NO: 513399 - RNA, 24 nt, Artificial Sequence
  Synthetic
aaagcacugguuuuccuuacaaac

SEQ ID NO: 513400 - RNA, 18 nt, Artificial Sequence
  Synthetic
ugaaaaaccaaaccaaac

SEQ ID NO: 513401 - RNA, 19 nt, Artificial Sequence
  Synthetic
cugaaaaaccaaaccaaac

SEQ ID NO: 513402 - RNA, 20 nt, Artificial Sequence
  Synthetic
acugaaaaaccaaaccaaac

SEQ ID NO: 513403 - RNA, 21 nt, Artificial Sequence
  Synthetic
cacugaaaaaccaaaccaaac

SEQ ID NO: 513404 - RNA, 22 nt, Artificial Sequence
  Synthetic
ucacugaaaaaccaaaccaaac

SEQ ID NO: 513405 - RNA, 23 nt, Artificial Sequence
  Synthetic
aucacugaaaaaccaaaccaaac

SEQ ID NO: 513406 - RNA, 24 nt, Artificial Sequence
  Synthetic
gaucacugaaaaaccaaaccaaac

SEQ ID NO: 513407 - RNA, 18 nt, Artificial Sequence
  Synthetic
auuauaaugucaccaaac

SEQ ID NO: 513408 - RNA, 19 nt, Artificial Sequence
  Synthetic
cauuauaaugucaccaaac

SEQ ID NO: 513409 - RNA, 20 nt, Artificial Sequence
  Synthetic
ucauuauaaugucaccaaac

SEQ ID NO: 513410 - RNA, 21 nt, Artificial Sequence
  Synthetic
aucauuauaaugucaccaaac

SEQ ID NO: 513411 - RNA, 22 nt, Artificial Sequence
  Synthetic
uaucauuauaaugucaccaaac

SEQ ID NO: 513412 - RNA, 23 nt, Artificial Sequence
  Synthetic
cuaucauuauaaugucaccaaac

SEQ ID NO: 513413 - RNA, 24 nt, Artificial Sequence
  Synthetic
gcuaucauuauaaugucaccaaac

SEQ ID NO: 513414 - RNA, 18 nt, Artificial Sequence
  Synthetic
auauuucuaaagccaaac

SEQ ID NO: 513415 - RNA, 19 nt, Artificial Sequence
  Synthetic
uauauuucuaaagccaaac

SEQ ID NO: 513416 - RNA, 20 nt, Artificial Sequence
  Synthetic
auauauuucuaaagccaaac

SEQ ID NO: 513417 - RNA, 21 nt, Artificial Sequence
  Synthetic
aauauauuucuaaagccaaac

SEQ ID NO: 513418 - RNA, 22 nt, Artificial Sequence
  Synthetic
gaauauauuucuaaagccaaac

SEQ ID NO: 513419 - RNA, 23 nt, Artificial Sequence
  Synthetic
cgaauauauuucuaaagccaaac

SEQ ID NO: 513420 - RNA, 24 nt, Artificial Sequence
  Synthetic
acgaauauauuucuaaagccaaac

SEQ ID NO: 513421 - RNA, 18 nt, Artificial Sequence
  Synthetic
auaguucauuguccaaac

SEQ ID NO: 513422 - RNA, 19 nt, Artificial Sequence
  Synthetic
uauaguucauuguccaaac

SEQ ID NO: 513423 - RNA, 20 nt, Artificial Sequence
  Synthetic
cuauaguucauuguccaaac

SEQ ID NO: 513424 - RNA, 21 nt, Artificial Sequence
  Synthetic
ccuauaguucauuguccaaac

SEQ ID NO: 513425 - RNA, 22 nt, Artificial Sequence
  Synthetic
uccuauaguucauuguccaaac

SEQ ID NO: 513426 - RNA, 23 nt, Artificial Sequence
  Synthetic
auccuauaguucauuguccaaac

SEQ ID NO: 513427 - RNA, 24 nt, Artificial Sequence
  Synthetic
gauccuauaguucauuguccaaac

SEQ ID NO: 513428 - RNA, 18 nt, Artificial Sequence
  Synthetic
ccaaaaggaaaagcaaac

SEQ ID NO: 513429 - RNA, 19 nt, Artificial Sequence
  Synthetic
gccaaaaggaaaagcaaac

SEQ ID NO: 513430 - RNA, 20 nt, Artificial Sequence
  Synthetic
ugccaaaaggaaaagcaaac

SEQ ID NO: 513431 - RNA, 21 nt, Artificial Sequence
  Synthetic
augccaaaaggaaaagcaaac

SEQ ID NO: 513432 - RNA, 22 nt, Artificial Sequence
  Synthetic
uaugccaaaaggaaaagcaaac

SEQ ID NO: 513433 - RNA, 23 nt, Artificial Sequence
  Synthetic
auaugccaaaaggaaaagcaaac

SEQ ID NO: 513434 - RNA, 24 nt, Artificial Sequence
  Synthetic
uauaugccaaaaggaaaagcaaac

SEQ ID NO: 513435 - RNA, 18 nt, Artificial Sequence
  Synthetic
aaauugugaaaagcaaac

SEQ ID NO: 513436 - RNA, 19 nt, Artificial Sequence
  Synthetic
uaaauugugaaaagcaaac

SEQ ID NO: 513437 - RNA, 20 nt, Artificial Sequence
  Synthetic
uuaaauugugaaaagcaaac

SEQ ID NO: 513438 - RNA, 21 nt, Artificial Sequence
  Synthetic
guuaaauugugaaaagcaaac

SEQ ID NO: 513439 - RNA, 22 nt, Artificial Sequence
  Synthetic
aguuaaauugugaaaagcaaac

SEQ ID NO: 513440 - RNA, 23 nt, Artificial Sequence
  Synthetic
aaguuaaauugugaaaagcaaac

SEQ ID NO: 513441 - RNA, 24 nt, Artificial Sequence
  Synthetic
uaaguuaaauugugaaaagcaaac

SEQ ID NO: 513442 - RNA, 18 nt, Artificial Sequence
  Synthetic
ccauuauuucaggcaaac

SEQ ID NO: 513443 - RNA, 19 nt, Artificial Sequence
  Synthetic
accauuauuucaggcaaac

SEQ ID NO: 513444 - RNA, 20 nt, Artificial Sequence
  Synthetic
aaccauuauuucaggcaaac

SEQ ID NO: 513445 - RNA, 21 nt, Artificial Sequence
  Synthetic
gaaccauuauuucaggcaaac

SEQ ID NO: 513446 - RNA, 22 nt, Artificial Sequence
  Synthetic
ugaaccauuauuucaggcaaac

SEQ ID NO: 513447 - RNA, 23 nt, Artificial Sequence
  Synthetic
cugaaccauuauuucaggcaaac

SEQ ID NO: 513448 - RNA, 24 nt, Artificial Sequence
  Synthetic
ccugaaccauuauuucaggcaaac

SEQ ID NO: 513449 - RNA, 18 nt, Artificial Sequence
  Synthetic
agaauggggaaugcaaac

SEQ ID NO: 513450 - RNA, 19 nt, Artificial Sequence
  Synthetic
cagaauggggaaugcaaac

SEQ ID NO: 513451 - RNA, 20 nt, Artificial Sequence
  Synthetic
acagaauggggaaugcaaac

SEQ ID NO: 513452 - RNA, 21 nt, Artificial Sequence
  Synthetic
cacagaauggggaaugcaaac

SEQ ID NO: 513453 - RNA, 22 nt, Artificial Sequence
  Synthetic
acacagaauggggaaugcaaac

SEQ ID NO: 513454 - RNA, 23 nt, Artificial Sequence
  Synthetic
uacacagaauggggaaugcaaac

SEQ ID NO: 513455 - RNA, 24 nt, Artificial Sequence
  Synthetic
auacacagaauggggaaugcaaac

SEQ ID NO: 513456 - RNA, 18 nt, Artificial Sequence
  Synthetic
ucugucgguaaugcaaac

SEQ ID NO: 513457 - RNA, 19 nt, Artificial Sequence
  Synthetic
aucugucgguaaugcaaac

SEQ ID NO: 513458 - RNA, 20 nt, Artificial Sequence
  Synthetic
caucugucgguaaugcaaac

SEQ ID NO: 513459 - RNA, 21 nt, Artificial Sequence
  Synthetic
gcaucugucgguaaugcaaac

SEQ ID NO: 513460 - RNA, 22 nt, Artificial Sequence
  Synthetic
ugcaucugucgguaaugcaaac

SEQ ID NO: 513461 - RNA, 23 nt, Artificial Sequence
  Synthetic
cugcaucugucgguaaugcaaac

SEQ ID NO: 513462 - RNA, 24 nt, Artificial Sequence
  Synthetic
ucugcaucugucgguaaugcaaac

SEQ ID NO: 513463 - RNA, 18 nt, Artificial Sequence
  Synthetic
cuauuuguuaaugcaaac

SEQ ID NO: 513464 - RNA, 19 nt, Artificial Sequence
  Synthetic
acuauuuguuaaugcaaac

SEQ ID NO: 513465 - RNA, 20 nt, Artificial Sequence
  Synthetic
aacuauuuguuaaugcaaac

SEQ ID NO: 513466 - RNA, 21 nt, Artificial Sequence
  Synthetic
aaacuauuuguuaaugcaaac

SEQ ID NO: 513467 - RNA, 22 nt, Artificial Sequence
  Synthetic
caaacuauuuguuaaugcaaac

SEQ ID NO: 513468 - RNA, 23 nt, Artificial Sequence
  Synthetic
ucaaacuauuuguuaaugcaaac

SEQ ID NO: 513469 - RNA, 24 nt, Artificial Sequence
  Synthetic
cucaaacuauuuguuaaugcaaac

SEQ ID NO: 513470 - RNA, 18 nt, Artificial Sequence
  Synthetic
auuugcccuacugcaaac

SEQ ID NO: 513471 - RNA, 19 nt, Artificial Sequence
  Synthetic
cauuugcccuacugcaaac

SEQ ID NO: 513472 - RNA, 20 nt, Artificial Sequence
  Synthetic
gcauuugcccuacugcaaac

SEQ ID NO: 513473 - RNA, 21 nt, Artificial Sequence
  Synthetic
agcauuugcccuacugcaaac

SEQ ID NO: 513474 - RNA, 22 nt, Artificial Sequence
  Synthetic
aagcauuugcccuacugcaaac

SEQ ID NO: 513475 - RNA, 23 nt, Artificial Sequence
  Synthetic
caagcauuugcccuacugcaaac

SEQ ID NO: 513476 - RNA, 24 nt, Artificial Sequence
  Synthetic
acaagcauuugcccuacugcaaac

SEQ ID NO: 513477 - RNA, 18 nt, Artificial Sequence
  Synthetic
aggaagccaucugcaaac

SEQ ID NO: 513478 - RNA, 19 nt, Artificial Sequence
  Synthetic
aaggaagccaucugcaaac

SEQ ID NO: 513479 - RNA, 20 nt, Artificial Sequence
  Synthetic
gaaggaagccaucugcaaac

SEQ ID NO: 513480 - RNA, 21 nt, Artificial Sequence
  Synthetic
agaaggaagccaucugcaaac

SEQ ID NO: 513481 - RNA, 22 nt, Artificial Sequence
  Synthetic
gagaaggaagccaucugcaaac

SEQ ID NO: 513482 - RNA, 23 nt, Artificial Sequence
  Synthetic
agagaaggaagccaucugcaaac

SEQ ID NO: 513483 - RNA, 24 nt, Artificial Sequence
  Synthetic
gagagaaggaagccaucugcaaac

SEQ ID NO: 513484 - RNA, 21 nt, Artificial Sequence
  Synthetic
acaaucaugucgucugcaaac

SEQ ID NO: 513485 - RNA, 22 nt, Artificial Sequence
  Synthetic
uacaaucaugucgucugcaaac

SEQ ID NO: 513486 - RNA, 23 nt, Artificial Sequence
  Synthetic
auacaaucaugucgucugcaaac

SEQ ID NO: 513487 - RNA, 24 nt, Artificial Sequence
  Synthetic
uauacaaucaugucgucugcaaac

SEQ ID NO: 513488 - RNA, 18 nt, Artificial Sequence
  Synthetic
gcacaaaagggugcaaac

SEQ ID NO: 513489 - RNA, 19 nt, Artificial Sequence
  Synthetic
cgcacaaaagggugcaaac

SEQ ID NO: 513490 - RNA, 20 nt, Artificial Sequence
  Synthetic
acgcacaaaagggugcaaac

SEQ ID NO: 513491 - RNA, 21 nt, Artificial Sequence
  Synthetic
cacgcacaaaagggugcaaac

SEQ ID NO: 513492 - RNA, 22 nt, Artificial Sequence
  Synthetic
ccacgcacaaaagggugcaaac

SEQ ID NO: 513493 - RNA, 23 nt, Artificial Sequence
  Synthetic
uccacgcacaaaagggugcaaac

SEQ ID NO: 513494 - RNA, 24 nt, Artificial Sequence
  Synthetic
uuccacgcacaaaagggugcaaac

SEQ ID NO: 513495 - RNA, 18 nt, Artificial Sequence
  Synthetic
aaacucuuucuugcaaac

SEQ ID NO: 513496 - RNA, 19 nt, Artificial Sequence
  Synthetic
uaaacucuuucuugcaaac

SEQ ID NO: 513497 - RNA, 20 nt, Artificial Sequence
  Synthetic
auaaacucuuucuugcaaac

SEQ ID NO: 513498 - RNA, 21 nt, Artificial Sequence
  Synthetic
gauaaacucuuucuugcaaac

SEQ ID NO: 513499 - RNA, 22 nt, Artificial Sequence
  Synthetic
ugauaaacucuuucuugcaaac

SEQ ID NO: 513500 - RNA, 23 nt, Artificial Sequence
  Synthetic
gugauaaacucuuucuugcaaac

SEQ ID NO: 513501 - RNA, 24 nt, Artificial Sequence
  Synthetic
ggugauaaacucuuucuugcaaac

SEQ ID NO: 513502 - RNA, 18 nt, Artificial Sequence
  Synthetic
accacagugcaaucaaac

SEQ ID NO: 513503 - RNA, 19 nt, Artificial Sequence
  Synthetic
gaccacagugcaaucaaac

SEQ ID NO: 513504 - RNA, 20 nt, Artificial Sequence
  Synthetic
agaccacagugcaaucaaac

SEQ ID NO: 513505 - RNA, 21 nt, Artificial Sequence
  Synthetic
cagaccacagugcaaucaaac

SEQ ID NO: 513506 - RNA, 22 nt, Artificial Sequence
  Synthetic
ucagaccacagugcaaucaaac

SEQ ID NO: 513507 - RNA, 23 nt, Artificial Sequence
  Synthetic
cucagaccacagugcaaucaaac

SEQ ID NO: 513508 - RNA, 24 nt, Artificial Sequence
  Synthetic
ucucagaccacagugcaaucaaac

SEQ ID NO: 513509 - RNA, 18 nt, Artificial Sequence
  Synthetic
cuuaccuuagaaucaaac

SEQ ID NO: 513510 - RNA, 19 nt, Artificial Sequence
  Synthetic
acuuaccuuagaaucaaac

SEQ ID NO: 513511 - RNA, 20 nt, Artificial Sequence
  Synthetic
uacuuaccuuagaaucaaac

SEQ ID NO: 513512 - RNA, 21 nt, Artificial Sequence
  Synthetic
cuacuuaccuuagaaucaaac

SEQ ID NO: 513513 - RNA, 22 nt, Artificial Sequence
  Synthetic
ucuacuuaccuuagaaucaaac

SEQ ID NO: 513514 - RNA, 23 nt, Artificial Sequence
  Synthetic
aucuacuuaccuuagaaucaaac

SEQ ID NO: 513515 - RNA, 24 nt, Artificial Sequence
  Synthetic
uaucuacuuaccuuagaaucaaac

SEQ ID NO: 513516 - RNA, 18 nt, Artificial Sequence
  Synthetic
auuccaaggauaucaaac

SEQ ID NO: 513517 - RNA, 19 nt, Artificial Sequence
  Synthetic
gauuccaaggauaucaaac

SEQ ID NO: 513518 - RNA, 20 nt, Artificial Sequence
  Synthetic
ugauuccaaggauaucaaac

SEQ ID NO: 513519 - RNA, 21 nt, Artificial Sequence
  Synthetic
augauuccaaggauaucaaac

SEQ ID NO: 513520 - RNA, 22 nt, Artificial Sequence
  Synthetic
aaugauuccaaggauaucaaac

SEQ ID NO: 513521 - RNA, 23 nt, Artificial Sequence
  Synthetic
aaaugauuccaaggauaucaaac

SEQ ID NO: 513522 - RNA, 24 nt, Artificial Sequence
  Synthetic
caaaugauuccaaggauaucaaac

SEQ ID NO: 513523 - RNA, 18 nt, Artificial Sequence
  Synthetic
cuuuggaacuacucaaac

SEQ ID NO: 513524 - RNA, 19 nt, Artificial Sequence
  Synthetic
gcuuuggaacuacucaaac

SEQ ID NO: 513525 - RNA, 20 nt, Artificial Sequence
  Synthetic
agcuuuggaacuacucaaac

SEQ ID NO: 513526 - RNA, 21 nt, Artificial Sequence
  Synthetic
aagcuuuggaacuacucaaac

SEQ ID NO: 513527 - RNA, 22 nt, Artificial Sequence
  Synthetic
uaagcuuuggaacuacucaaac

SEQ ID NO: 513528 - RNA, 23 nt, Artificial Sequence
  Synthetic
uuaagcuuuggaacuacucaaac

SEQ ID NO: 513529 - RNA, 24 nt, Artificial Sequence
  Synthetic
uuuaagcuuuggaacuacucaaac

SEQ ID NO: 513530 - RNA, 18 nt, Artificial Sequence
  Synthetic
caggcuguuggcucaaac

SEQ ID NO: 513531 - RNA, 19 nt, Artificial Sequence
  Synthetic
ucaggcuguuggcucaaac

SEQ ID NO: 513532 - RNA, 20 nt, Artificial Sequence
  Synthetic
aucaggcuguuggcucaaac

SEQ ID NO: 513533 - RNA, 21 nt, Artificial Sequence
  Synthetic
uaucaggcuguuggcucaaac

SEQ ID NO: 513534 - RNA, 22 nt, Artificial Sequence
  Synthetic
cuaucaggcuguuggcucaaac

SEQ ID NO: 513535 - RNA, 23 nt, Artificial Sequence
  Synthetic
acuaucaggcuguuggcucaaac

SEQ ID NO: 513536 - RNA, 24 nt, Artificial Sequence
  Synthetic
cacuaucaggcuguuggcucaaac

SEQ ID NO: 513537 - RNA, 18 nt, Artificial Sequence
  Synthetic
auuuuuuaaaucucaaac

SEQ ID NO: 513538 - RNA, 19 nt, Artificial Sequence
  Synthetic
gauuuuuuaaaucucaaac

SEQ ID NO: 513539 - RNA, 20 nt, Artificial Sequence
  Synthetic
agauuuuuuaaaucucaaac

SEQ ID NO: 513540 - RNA, 21 nt, Artificial Sequence
  Synthetic
uagauuuuuuaaaucucaaac

SEQ ID NO: 513541 - RNA, 22 nt, Artificial Sequence
  Synthetic
cuagauuuuuuaaaucucaaac

SEQ ID NO: 513542 - RNA, 23 nt, Artificial Sequence
  Synthetic
ucuagauuuuuuaaaucucaaac

SEQ ID NO: 513543 - RNA, 24 nt, Artificial Sequence
  Synthetic
aucuagauuuuuuaaaucucaaac

SEQ ID NO: 513544 - RNA, 18 nt, Artificial Sequence
  Synthetic
auccaggccaucucaaac

SEQ ID NO: 513545 - RNA, 19 nt, Artificial Sequence
  Synthetic
cauccaggccaucucaaac

SEQ ID NO: 513546 - RNA, 20 nt, Artificial Sequence
  Synthetic
ccauccaggccaucucaaac

SEQ ID NO: 513547 - RNA, 21 nt, Artificial Sequence
  Synthetic
accauccaggccaucucaaac

SEQ ID NO: 513548 - RNA, 22 nt, Artificial Sequence
  Synthetic
caccauccaggccaucucaaac

SEQ ID NO: 513549 - RNA, 23 nt, Artificial Sequence
  Synthetic
ucaccauccaggccaucucaaac

SEQ ID NO: 513550 - RNA, 24 nt, Artificial Sequence
  Synthetic
aucaccauccaggccaucucaaac

SEQ ID NO: 513551 - RNA, 18 nt, Artificial Sequence
  Synthetic
uaacucuacaagucaaac

SEQ ID NO: 513552 - RNA, 19 nt, Artificial Sequence
  Synthetic
uuaacucuacaagucaaac

SEQ ID NO: 513553 - RNA, 20 nt, Artificial Sequence
  Synthetic
guuaacucuacaagucaaac

SEQ ID NO: 513554 - RNA, 21 nt, Artificial Sequence
  Synthetic
uguuaacucuacaagucaaac

SEQ ID NO: 513555 - RNA, 22 nt, Artificial Sequence
  Synthetic
cuguuaacucuacaagucaaac

SEQ ID NO: 513556 - RNA, 23 nt, Artificial Sequence
  Synthetic
ucuguuaacucuacaagucaaac

SEQ ID NO: 513557 - RNA, 24 nt, Artificial Sequence
  Synthetic
uucuguuaacucuacaagucaaac

SEQ ID NO: 513558 - RNA, 18 nt, Artificial Sequence
  Synthetic
ugaggcuugacgucaaac

SEQ ID NO: 513559 - RNA, 19 nt, Artificial Sequence
  Synthetic
gugaggcuugacgucaaac

SEQ ID NO: 513560 - RNA, 20 nt, Artificial Sequence
  Synthetic
agugaggcuugacgucaaac

SEQ ID NO: 513561 - RNA, 21 nt, Artificial Sequence
  Synthetic
gagugaggcuugacgucaaac

SEQ ID NO: 513562 - RNA, 22 nt, Artificial Sequence
  Synthetic
agagugaggcuugacgucaaac

SEQ ID NO: 513563 - RNA, 23 nt, Artificial Sequence
  Synthetic
aagagugaggcuugacgucaaac

SEQ ID NO: 513564 - RNA, 24 nt, Artificial Sequence
  Synthetic
aaagagugaggcuugacgucaaac

SEQ ID NO: 513565 - RNA, 18 nt, Artificial Sequence
  Synthetic
cacuaggaaaauucaaac

SEQ ID NO: 513566 - RNA, 19 nt, Artificial Sequence
  Synthetic
ucacuaggaaaauucaaac

SEQ ID NO: 513567 - RNA, 20 nt, Artificial Sequence
  Synthetic
uucacuaggaaaauucaaac

SEQ ID NO: 513568 - RNA, 21 nt, Artificial Sequence
  Synthetic
cuucacuaggaaaauucaaac

SEQ ID NO: 513569 - RNA, 22 nt, Artificial Sequence
  Synthetic
acuucacuaggaaaauucaaac

SEQ ID NO: 513570 - RNA, 23 nt, Artificial Sequence
  Synthetic
gacuucacuaggaaaauucaaac

SEQ ID NO: 513571 - RNA, 24 nt, Artificial Sequence
  Synthetic
ugacuucacuaggaaaauucaaac

SEQ ID NO: 513572 - RNA, 18 nt, Artificial Sequence
  Synthetic
ggaacagguaguucaaac

SEQ ID NO: 513573 - RNA, 19 nt, Artificial Sequence
  Synthetic
aggaacagguaguucaaac

SEQ ID NO: 513574 - RNA, 20 nt, Artificial Sequence
  Synthetic
uaggaacagguaguucaaac

SEQ ID NO: 513575 - RNA, 21 nt, Artificial Sequence
  Synthetic
auaggaacagguaguucaaac

SEQ ID NO: 513576 - RNA, 22 nt, Artificial Sequence
  Synthetic
aauaggaacagguaguucaaac

SEQ ID NO: 513577 - RNA, 23 nt, Artificial Sequence
  Synthetic
gaauaggaacagguaguucaaac

SEQ ID NO: 513578 - RNA, 24 nt, Artificial Sequence
  Synthetic
ggaauaggaacagguaguucaaac

SEQ ID NO: 513579 - RNA, 18 nt, Artificial Sequence
  Synthetic
agauuuuaaaaaagaaac

SEQ ID NO: 513580 - RNA, 19 nt, Artificial Sequence
  Synthetic
gagauuuuaaaaaagaaac

SEQ ID NO: 513581 - RNA, 20 nt, Artificial Sequence
  Synthetic
agagauuuuaaaaaagaaac

SEQ ID NO: 513582 - RNA, 21 nt, Artificial Sequence
  Synthetic
cagagauuuuaaaaaagaaac

SEQ ID NO: 513583 - RNA, 22 nt, Artificial Sequence
  Synthetic
ucagagauuuuaaaaaagaaac

SEQ ID NO: 513584 - RNA, 23 nt, Artificial Sequence
  Synthetic
gucagagauuuuaaaaaagaaac

SEQ ID NO: 513585 - RNA, 24 nt, Artificial Sequence
  Synthetic
agucagagauuuuaaaaaagaaac

SEQ ID NO: 513586 - RNA, 18 nt, Artificial Sequence
  Synthetic
gagcuuagucaaagaaac

SEQ ID NO: 513587 - RNA, 19 nt, Artificial Sequence
  Synthetic
cgagcuuagucaaagaaac

SEQ ID NO: 513588 - RNA, 20 nt, Artificial Sequence
  Synthetic
gcgagcuuagucaaagaaac

SEQ ID NO: 513589 - RNA, 21 nt, Artificial Sequence
  Synthetic
ggcgagcuuagucaaagaaac

SEQ ID NO: 513590 - RNA, 22 nt, Artificial Sequence
  Synthetic
uggcgagcuuagucaaagaaac

SEQ ID NO: 513591 - RNA, 23 nt, Artificial Sequence
  Synthetic
uuggcgagcuuagucaaagaaac

SEQ ID NO: 513592 - RNA, 24 nt, Artificial Sequence
  Synthetic
guuggcgagcuuagucaaagaaac

SEQ ID NO: 513593 - RNA, 18 nt, Artificial Sequence
  Synthetic
cagaaauuucaaagaaac

SEQ ID NO: 513594 - RNA, 19 nt, Artificial Sequence
  Synthetic
ccagaaauuucaaagaaac

SEQ ID NO: 513595 - RNA, 20 nt, Artificial Sequence
  Synthetic
uccagaaauuucaaagaaac

SEQ ID NO: 513596 - RNA, 21 nt, Artificial Sequence
  Synthetic
uuccagaaauuucaaagaaac

SEQ ID NO: 513597 - RNA, 22 nt, Artificial Sequence
  Synthetic
auuccagaaauuucaaagaaac

SEQ ID NO: 513598 - RNA, 23 nt, Artificial Sequence
  Synthetic
cauuccagaaauuucaaagaaac

SEQ ID NO: 513599 - RNA, 24 nt, Artificial Sequence
  Synthetic
acauuccagaaauuucaaagaaac

SEQ ID NO: 513600 - RNA, 18 nt, Artificial Sequence
  Synthetic
acuucaagaacaagaaac

SEQ ID NO: 513601 - RNA, 19 nt, Artificial Sequence
  Synthetic
gacuucaagaacaagaaac

SEQ ID NO: 513602 - RNA, 20 nt, Artificial Sequence
  Synthetic
ugacuucaagaacaagaaac

SEQ ID NO: 513603 - RNA, 21 nt, Artificial Sequence
  Synthetic
cugacuucaagaacaagaaac

SEQ ID NO: 513604 - RNA, 22 nt, Artificial Sequence
  Synthetic
acugacuucaagaacaagaaac

SEQ ID NO: 513605 - RNA, 23 nt, Artificial Sequence
  Synthetic
aacugacuucaagaacaagaaac

SEQ ID NO: 513606 - RNA, 24 nt, Artificial Sequence
  Synthetic
uaacugacuucaagaacaagaaac

SEQ ID NO: 513607 - RNA, 18 nt, Artificial Sequence
  Synthetic
auuuguaaaagaagaaac

SEQ ID NO: 513608 - RNA, 19 nt, Artificial Sequence
  Synthetic
aauuuguaaaagaagaaac

SEQ ID NO: 513609 - RNA, 20 nt, Artificial Sequence
  Synthetic
caauuuguaaaagaagaaac

SEQ ID NO: 513610 - RNA, 21 nt, Artificial Sequence
  Synthetic
acaauuuguaaaagaagaaac

SEQ ID NO: 513611 - RNA, 22 nt, Artificial Sequence
  Synthetic
uacaauuuguaaaagaagaaac

SEQ ID NO: 513612 - RNA, 23 nt, Artificial Sequence
  Synthetic
guacaauuuguaaaagaagaaac

SEQ ID NO: 513613 - RNA, 24 nt, Artificial Sequence
  Synthetic
aguacaauuuguaaaagaagaaac

SEQ ID NO: 513614 - RNA, 18 nt, Artificial Sequence
  Synthetic
cugcaccucagaagaaac

SEQ ID NO: 513615 - RNA, 19 nt, Artificial Sequence
  Synthetic
acugcaccucagaagaaac

SEQ ID NO: 513616 - RNA, 20 nt, Artificial Sequence
  Synthetic
gacugcaccucagaagaaac

SEQ ID NO: 513617 - RNA, 21 nt, Artificial Sequence
  Synthetic
ugacugcaccucagaagaaac

SEQ ID NO: 513618 - RNA, 22 nt, Artificial Sequence
  Synthetic
cugacugcaccucagaagaaac

SEQ ID NO: 513619 - RNA, 23 nt, Artificial Sequence
  Synthetic
ucugacugcaccucagaagaaac

SEQ ID NO: 513620 - RNA, 24 nt, Artificial Sequence
  Synthetic
cucugacugcaccucagaagaaac

SEQ ID NO: 513621 - RNA, 18 nt, Artificial Sequence
  Synthetic
augaacaugggaagaaac

SEQ ID NO: 513622 - RNA, 19 nt, Artificial Sequence
  Synthetic
uaugaacaugggaagaaac

SEQ ID NO: 513623 - RNA, 20 nt, Artificial Sequence
  Synthetic
guaugaacaugggaagaaac

SEQ ID NO: 513624 - RNA, 21 nt, Artificial Sequence
  Synthetic
aguaugaacaugggaagaaac

SEQ ID NO: 513625 - RNA, 22 nt, Artificial Sequence
  Synthetic
gaguaugaacaugggaagaaac

SEQ ID NO: 513626 - RNA, 23 nt, Artificial Sequence
  Synthetic
agaguaugaacaugggaagaaac

SEQ ID NO: 513627 - RNA, 24 nt, Artificial Sequence
  Synthetic
uagaguaugaacaugggaagaaac

SEQ ID NO: 513628 - RNA, 18 nt, Artificial Sequence
  Synthetic
acuccagagauaagaaac

SEQ ID NO: 513629 - RNA, 19 nt, Artificial Sequence
  Synthetic
cacuccagagauaagaaac

SEQ ID NO: 513630 - RNA, 20 nt, Artificial Sequence
  Synthetic
gcacuccagagauaagaaac

SEQ ID NO: 513631 - RNA, 21 nt, Artificial Sequence
  Synthetic
ugcacuccagagauaagaaac

SEQ ID NO: 513632 - RNA, 22 nt, Artificial Sequence
  Synthetic
cugcacuccagagauaagaaac

SEQ ID NO: 513633 - RNA, 23 nt, Artificial Sequence
  Synthetic
ucugcacuccagagauaagaaac

SEQ ID NO: 513634 - RNA, 24 nt, Artificial Sequence
  Synthetic
gucugcacuccagagauaagaaac

SEQ ID NO: 513635 - RNA, 18 nt, Artificial Sequence
  Synthetic
aaggcaggaaacagaaac

SEQ ID NO: 513636 - RNA, 19 nt, Artificial Sequence
  Synthetic
caaggcaggaaacagaaac

SEQ ID NO: 513637 - RNA, 20 nt, Artificial Sequence
  Synthetic
acaaggcaggaaacagaaac

SEQ ID NO: 513638 - RNA, 21 nt, Artificial Sequence
  Synthetic
aacaaggcaggaaacagaaac

SEQ ID NO: 513639 - RNA, 22 nt, Artificial Sequence
  Synthetic
aaacaaggcaggaaacagaaac

SEQ ID NO: 513640 - RNA, 23 nt, Artificial Sequence
  Synthetic
aaaacaaggcaggaaacagaaac

SEQ ID NO: 513641 - RNA, 24 nt, Artificial Sequence
  Synthetic
aaaaacaaggcaggaaacagaaac

SEQ ID NO: 513642 - RNA, 18 nt, Artificial Sequence
  Synthetic
guguaugacaucagaaac

SEQ ID NO: 513643 - RNA, 19 nt, Artificial Sequence
  Synthetic
gguguaugacaucagaaac

SEQ ID NO: 513644 - RNA, 20 nt, Artificial Sequence
  Synthetic
agguguaugacaucagaaac

SEQ ID NO: 513645 - RNA, 21 nt, Artificial Sequence
  Synthetic
gagguguaugacaucagaaac

SEQ ID NO: 513646 - RNA, 22 nt, Artificial Sequence
  Synthetic
agagguguaugacaucagaaac

SEQ ID NO: 513647 - RNA, 23 nt, Artificial Sequence
  Synthetic
cagagguguaugacaucagaaac

SEQ ID NO: 513648 - RNA, 24 nt, Artificial Sequence
  Synthetic
ccagagguguaugacaucagaaac

SEQ ID NO: 513649 - RNA, 18 nt, Artificial Sequence
  Synthetic
caacaaaccaucagaaac

SEQ ID NO: 513650 - RNA, 19 nt, Artificial Sequence
  Synthetic
ccaacaaaccaucagaaac

SEQ ID NO: 513651 - RNA, 20 nt, Artificial Sequence
  Synthetic
gccaacaaaccaucagaaac

SEQ ID NO: 513652 - RNA, 21 nt, Artificial Sequence
  Synthetic
ugccaacaaaccaucagaaac

SEQ ID NO: 513653 - RNA, 22 nt, Artificial Sequence
  Synthetic
uugccaacaaaccaucagaaac

SEQ ID NO: 513654 - RNA, 23 nt, Artificial Sequence
  Synthetic
auugccaacaaaccaucagaaac

SEQ ID NO: 513655 - RNA, 24 nt, Artificial Sequence
  Synthetic
gauugccaacaaaccaucagaaac

SEQ ID NO: 513656 - RNA, 18 nt, Artificial Sequence
  Synthetic
uucugaagaaagagaaac

SEQ ID NO: 513657 - RNA, 19 nt, Artificial Sequence
  Synthetic
uuucugaagaaagagaaac

SEQ ID NO: 513658 - RNA, 20 nt, Artificial Sequence
  Synthetic
guuucugaagaaagagaaac

SEQ ID NO: 513659 - RNA, 21 nt, Artificial Sequence
  Synthetic
uguuucugaagaaagagaaac

SEQ ID NO: 513660 - RNA, 22 nt, Artificial Sequence
  Synthetic
cuguuucugaagaaagagaaac

SEQ ID NO: 513661 - RNA, 23 nt, Artificial Sequence
  Synthetic
ucuguuucugaagaaagagaaac

SEQ ID NO: 513662 - RNA, 24 nt, Artificial Sequence
  Synthetic
cucuguuucugaagaaagagaaac

SEQ ID NO: 513663 - RNA, 18 nt, Artificial Sequence
  Synthetic
gcuuuucugaagagaaac

SEQ ID NO: 513664 - RNA, 19 nt, Artificial Sequence
  Synthetic
agcuuuucugaagagaaac

SEQ ID NO: 513665 - RNA, 20 nt, Artificial Sequence
  Synthetic
cagcuuuucugaagagaaac

SEQ ID NO: 513666 - RNA, 21 nt, Artificial Sequence
  Synthetic
gcagcuuuucugaagagaaac

SEQ ID NO: 513667 - RNA, 22 nt, Artificial Sequence
  Synthetic
ugcagcuuuucugaagagaaac

SEQ ID NO: 513668 - RNA, 23 nt, Artificial Sequence
  Synthetic
cugcagcuuuucugaagagaaac

SEQ ID NO: 513669 - RNA, 24 nt, Artificial Sequence
  Synthetic
ccugcagcuuuucugaagagaaac

SEQ ID NO: 513670 - RNA, 18 nt, Artificial Sequence
  Synthetic
ucaaggaacuagagaaac

SEQ ID NO: 513671 - RNA, 19 nt, Artificial Sequence
  Synthetic
uucaaggaacuagagaaac

SEQ ID NO: 513672 - RNA, 20 nt, Artificial Sequence
  Synthetic
uuucaaggaacuagagaaac

SEQ ID NO: 513673 - RNA, 21 nt, Artificial Sequence
  Synthetic
auuucaaggaacuagagaaac

SEQ ID NO: 513674 - RNA, 22 nt, Artificial Sequence
  Synthetic
cauuucaaggaacuagagaaac

SEQ ID NO: 513675 - RNA, 23 nt, Artificial Sequence
  Synthetic
acauuucaaggaacuagagaaac

SEQ ID NO: 513676 - RNA, 24 nt, Artificial Sequence
  Synthetic
cacauuucaaggaacuagagaaac

SEQ ID NO: 513677 - RNA, 18 nt, Artificial Sequence
  Synthetic
agagccacauggagaaac

SEQ ID NO: 513678 - RNA, 19 nt, Artificial Sequence
  Synthetic
aagagccacauggagaaac

SEQ ID NO: 513679 - RNA, 20 nt, Artificial Sequence
  Synthetic
aaagagccacauggagaaac

SEQ ID NO: 513680 - RNA, 21 nt, Artificial Sequence
  Synthetic
aaaagagccacauggagaaac

SEQ ID NO: 513681 - RNA, 22 nt, Artificial Sequence
  Synthetic
gaaaagagccacauggagaaac

SEQ ID NO: 513682 - RNA, 23 nt, Artificial Sequence
  Synthetic
cgaaaagagccacauggagaaac

SEQ ID NO: 513683 - RNA, 24 nt, Artificial Sequence
  Synthetic
acgaaaagagccacauggagaaac

SEQ ID NO: 513684 - RNA, 18 nt, Artificial Sequence
  Synthetic
gagaggauguggagaaac

SEQ ID NO: 513685 - RNA, 19 nt, Artificial Sequence
  Synthetic
ggagaggauguggagaaac

SEQ ID NO: 513686 - RNA, 20 nt, Artificial Sequence
  Synthetic
uggagaggauguggagaaac

SEQ ID NO: 513687 - RNA, 21 nt, Artificial Sequence
  Synthetic
cuggagaggauguggagaaac

SEQ ID NO: 513688 - RNA, 22 nt, Artificial Sequence
  Synthetic
gcuggagaggauguggagaaac

SEQ ID NO: 513689 - RNA, 23 nt, Artificial Sequence
  Synthetic
ugcuggagaggauguggagaaac

SEQ ID NO: 513690 - RNA, 24 nt, Artificial Sequence
  Synthetic
augcuggagaggauguggagaaac

SEQ ID NO: 513691 - RNA, 18 nt, Artificial Sequence
  Synthetic
ugggacauggugagaaac

SEQ ID NO: 513692 - RNA, 19 nt, Artificial Sequence
  Synthetic
uugggacauggugagaaac

SEQ ID NO: 513693 - RNA, 20 nt, Artificial Sequence
  Synthetic
auugggacauggugagaaac

SEQ ID NO: 513694 - RNA, 21 nt, Artificial Sequence
  Synthetic
gauugggacauggugagaaac

SEQ ID NO: 513695 - RNA, 22 nt, Artificial Sequence
  Synthetic
agauugggacauggugagaaac

SEQ ID NO: 513696 - RNA, 23 nt, Artificial Sequence
  Synthetic
uagauugggacauggugagaaac

SEQ ID NO: 513697 - RNA, 24 nt, Artificial Sequence
  Synthetic
guagauugggacauggugagaaac

SEQ ID NO: 513698 - RNA, 18 nt, Artificial Sequence
  Synthetic
acaacuguggugagaaac

SEQ ID NO: 513699 - RNA, 19 nt, Artificial Sequence
  Synthetic
aacaacuguggugagaaac

SEQ ID NO: 513700 - RNA, 20 nt, Artificial Sequence
  Synthetic
gaacaacuguggugagaaac

SEQ ID NO: 513701 - RNA, 21 nt, Artificial Sequence
  Synthetic
ugaacaacuguggugagaaac

SEQ ID NO: 513702 - RNA, 22 nt, Artificial Sequence
  Synthetic
augaacaacuguggugagaaac

SEQ ID NO: 513703 - RNA, 23 nt, Artificial Sequence
  Synthetic
gaugaacaacuguggugagaaac

SEQ ID NO: 513704 - RNA, 24 nt, Artificial Sequence
  Synthetic
ugaugaacaacuguggugagaaac

SEQ ID NO: 513705 - RNA, 18 nt, Artificial Sequence
  Synthetic
cuggagugauugagaaac

SEQ ID NO: 513706 - RNA, 19 nt, Artificial Sequence
  Synthetic
ccuggagugauugagaaac

SEQ ID NO: 513707 - RNA, 20 nt, Artificial Sequence
  Synthetic
accuggagugauugagaaac

SEQ ID NO: 513708 - RNA, 21 nt, Artificial Sequence
  Synthetic
gaccuggagugauugagaaac

SEQ ID NO: 513709 - RNA, 22 nt, Artificial Sequence
  Synthetic
agaccuggagugauugagaaac

SEQ ID NO: 513710 - RNA, 23 nt, Artificial Sequence
  Synthetic
cagaccuggagugauugagaaac

SEQ ID NO: 513711 - RNA, 24 nt, Artificial Sequence
  Synthetic
ccagaccuggagugauugagaaac

SEQ ID NO: 513712 - RNA, 18 nt, Artificial Sequence
  Synthetic
gagaacguuaauagaaac

SEQ ID NO: 513713 - RNA, 19 nt, Artificial Sequence
  Synthetic
agagaacguuaauagaaac

SEQ ID NO: 513714 - RNA, 20 nt, Artificial Sequence
  Synthetic
aagagaacguuaauagaaac

SEQ ID NO: 513715 - RNA, 21 nt, Artificial Sequence
  Synthetic
aaagagaacguuaauagaaac

SEQ ID NO: 513716 - RNA, 22 nt, Artificial Sequence
  Synthetic
caaagagaacguuaauagaaac

SEQ ID NO: 513717 - RNA, 23 nt, Artificial Sequence
  Synthetic
ucaaagagaacguuaauagaaac

SEQ ID NO: 513718 - RNA, 24 nt, Artificial Sequence
  Synthetic
aucaaagagaacguuaauagaaac

SEQ ID NO: 513719 - RNA, 18 nt, Artificial Sequence
  Synthetic
cagugguagccuagaaac

SEQ ID NO: 513720 - RNA, 19 nt, Artificial Sequence
  Synthetic
ucagugguagccuagaaac

SEQ ID NO: 513721 - RNA, 20 nt, Artificial Sequence
  Synthetic
aucagugguagccuagaaac

SEQ ID NO: 513722 - RNA, 21 nt, Artificial Sequence
  Synthetic
aaucagugguagccuagaaac

SEQ ID NO: 513723 - RNA, 22 nt, Artificial Sequence
  Synthetic
caaucagugguagccuagaaac

SEQ ID NO: 513724 - RNA, 23 nt, Artificial Sequence
  Synthetic
acaaucagugguagccuagaaac

SEQ ID NO: 513725 - RNA, 24 nt, Artificial Sequence
  Synthetic
uacaaucagugguagccuagaaac

SEQ ID NO: 513726 - RNA, 18 nt, Artificial Sequence
  Synthetic
uaaaaggauauuagaaac

SEQ ID NO: 513727 - RNA, 19 nt, Artificial Sequence
  Synthetic
uuaaaaggauauuagaaac

SEQ ID NO: 513728 - RNA, 20 nt, Artificial Sequence
  Synthetic
uuuaaaaggauauuagaaac

SEQ ID NO: 513729 - RNA, 21 nt, Artificial Sequence
  Synthetic
auuuaaaaggauauuagaaac

SEQ ID NO: 513730 - RNA, 22 nt, Artificial Sequence
  Synthetic
cauuuaaaaggauauuagaaac

SEQ ID NO: 513731 - RNA, 23 nt, Artificial Sequence
  Synthetic
acauuuaaaaggauauuagaaac

SEQ ID NO: 513732 - RNA, 24 nt, Artificial Sequence
  Synthetic
uacauuuaaaaggauauuagaaac

SEQ ID NO: 513733 - RNA, 18 nt, Artificial Sequence
  Synthetic
uaggcuaagguuagaaac

SEQ ID NO: 513734 - RNA, 19 nt, Artificial Sequence
  Synthetic
uuaggcuaagguuagaaac

SEQ ID NO: 513735 - RNA, 20 nt, Artificial Sequence
  Synthetic
auuaggcuaagguuagaaac

SEQ ID NO: 513736 - RNA, 21 nt, Artificial Sequence
  Synthetic
aauuaggcuaagguuagaaac

SEQ ID NO: 513737 - RNA, 22 nt, Artificial Sequence
  Synthetic
gaauuaggcuaagguuagaaac

SEQ ID NO: 513738 - RNA, 23 nt, Artificial Sequence
  Synthetic
agaauuaggcuaagguuagaaac

SEQ ID NO: 513739 - RNA, 24 nt, Artificial Sequence
  Synthetic
gagaauuaggcuaagguuagaaac

SEQ ID NO: 513740 - RNA, 18 nt, Artificial Sequence
  Synthetic
cuaggaggagagcgaaac

SEQ ID NO: 513741 - RNA, 19 nt, Artificial Sequence
  Synthetic
ccuaggaggagagcgaaac

SEQ ID NO: 513742 - RNA, 20 nt, Artificial Sequence
  Synthetic
accuaggaggagagcgaaac

SEQ ID NO: 513743 - RNA, 21 nt, Artificial Sequence
  Synthetic
caccuaggaggagagcgaaac

SEQ ID NO: 513744 - RNA, 22 nt, Artificial Sequence
  Synthetic
ucaccuaggaggagagcgaaac

SEQ ID NO: 513745 - RNA, 23 nt, Artificial Sequence
  Synthetic
aucaccuaggaggagagcgaaac

SEQ ID NO: 513746 - RNA, 24 nt, Artificial Sequence
  Synthetic
uaucaccuaggaggagagcgaaac

SEQ ID NO: 513747 - RNA, 18 nt, Artificial Sequence
  Synthetic
uucauccucuugcgaaac

SEQ ID NO: 513748 - RNA, 19 nt, Artificial Sequence
  Synthetic
uuucauccucuugcgaaac

SEQ ID NO: 513749 - RNA, 20 nt, Artificial Sequence
  Synthetic
auuucauccucuugcgaaac

SEQ ID NO: 513750 - RNA, 21 nt, Artificial Sequence
  Synthetic
gauuucauccucuugcgaaac

SEQ ID NO: 513751 - RNA, 22 nt, Artificial Sequence
  Synthetic
ggauuucauccucuugcgaaac

SEQ ID NO: 513752 - RNA, 23 nt, Artificial Sequence
  Synthetic
aggauuucauccucuugcgaaac

SEQ ID NO: 513753 - RNA, 24 nt, Artificial Sequence
  Synthetic
uaggauuucauccucuugcgaaac

SEQ ID NO: 513754 - RNA, 18 nt, Artificial Sequence
  Synthetic
aggagaaucacucgaaac

SEQ ID NO: 513755 - RNA, 19 nt, Artificial Sequence
  Synthetic
caggagaaucacucgaaac

SEQ ID NO: 513756 - RNA, 20 nt, Artificial Sequence
  Synthetic
gcaggagaaucacucgaaac

SEQ ID NO: 513757 - RNA, 21 nt, Artificial Sequence
  Synthetic
ggcaggagaaucacucgaaac

SEQ ID NO: 513758 - RNA, 22 nt, Artificial Sequence
  Synthetic
aggcaggagaaucacucgaaac

SEQ ID NO: 513759 - RNA, 23 nt, Artificial Sequence
  Synthetic
gaggcaggagaaucacucgaaac

SEQ ID NO: 513760 - RNA, 24 nt, Artificial Sequence
  Synthetic
ugaggcaggagaaucacucgaaac

SEQ ID NO: 513761 - RNA, 18 nt, Artificial Sequence
  Synthetic
cucucucucucucgaaac

SEQ ID NO: 513762 - RNA, 19 nt, Artificial Sequence
  Synthetic
ucucucucucucucgaaac

SEQ ID NO: 513763 - RNA, 20 nt, Artificial Sequence
  Synthetic
cucucucucucucucgaaac

SEQ ID NO: 513764 - RNA, 21 nt, Artificial Sequence
  Synthetic
ucucucucucucucucgaaac

SEQ ID NO: 513765 - RNA, 22 nt, Artificial Sequence
  Synthetic
cucucucucucucucucgaaac

SEQ ID NO: 513766 - RNA, 23 nt, Artificial Sequence
  Synthetic
ucucucucucucucucucgaaac

SEQ ID NO: 513767 - RNA, 24 nt, Artificial Sequence
  Synthetic
cucucucucucucucucucgaaac

SEQ ID NO: 513768 - RNA, 18 nt, Artificial Sequence
  Synthetic
uuaacugaaauaggaaac

SEQ ID NO: 513769 - RNA, 19 nt, Artificial Sequence
  Synthetic
auuaacugaaauaggaaac

SEQ ID NO: 513770 - RNA, 20 nt, Artificial Sequence
  Synthetic
cauuaacugaaauaggaaac

SEQ ID NO: 513771 - RNA, 21 nt, Artificial Sequence
  Synthetic
ucauuaacugaaauaggaaac

SEQ ID NO: 513772 - RNA, 22 nt, Artificial Sequence
  Synthetic
uucauuaacugaaauaggaaac

SEQ ID NO: 513773 - RNA, 23 nt, Artificial Sequence
  Synthetic
auucauuaacugaaauaggaaac

SEQ ID NO: 513774 - RNA, 24 nt, Artificial Sequence
  Synthetic
gauucauuaacugaaauaggaaac

SEQ ID NO: 513775 - RNA, 18 nt, Artificial Sequence
  Synthetic
uuauauagagacggaaac

SEQ ID NO: 513776 - RNA, 19 nt, Artificial Sequence
  Synthetic
auuauauagagacggaaac

SEQ ID NO: 513777 - RNA, 20 nt, Artificial Sequence
  Synthetic
cauuauauagagacggaaac

SEQ ID NO: 513778 - RNA, 21 nt, Artificial Sequence
  Synthetic
acauuauauagagacggaaac

SEQ ID NO: 513779 - RNA, 22 nt, Artificial Sequence
  Synthetic
uacauuauauagagacggaaac

SEQ ID NO: 513780 - RNA, 23 nt, Artificial Sequence
  Synthetic
auacauuauauagagacggaaac

SEQ ID NO: 513781 - RNA, 24 nt, Artificial Sequence
  Synthetic
aauacauuauauagagacggaaac

SEQ ID NO: 513782 - RNA, 18 nt, Artificial Sequence
  Synthetic
ugaacugugaccggaaac

SEQ ID NO: 513783 - RNA, 19 nt, Artificial Sequence
  Synthetic
augaacugugaccggaaac

SEQ ID NO: 513784 - RNA, 20 nt, Artificial Sequence
  Synthetic
gaugaacugugaccggaaac

SEQ ID NO: 513785 - RNA, 21 nt, Artificial Sequence
  Synthetic
ggaugaacugugaccggaaac

SEQ ID NO: 513786 - RNA, 22 nt, Artificial Sequence
  Synthetic
aggaugaacugugaccggaaac

SEQ ID NO: 513787 - RNA, 23 nt, Artificial Sequence
  Synthetic
uaggaugaacugugaccggaaac

SEQ ID NO: 513788 - RNA, 24 nt, Artificial Sequence
  Synthetic
uuaggaugaacugugaccggaaac

SEQ ID NO: 513789 - RNA, 18 nt, Artificial Sequence
  Synthetic
aagcuacugaagggaaac

SEQ ID NO: 513790 - RNA, 19 nt, Artificial Sequence
  Synthetic
caagcuacugaagggaaac

SEQ ID NO: 513791 - RNA, 20 nt, Artificial Sequence
  Synthetic
ccaagcuacugaagggaaac

SEQ ID NO: 513792 - RNA, 21 nt, Artificial Sequence
  Synthetic
accaagcuacugaagggaaac

SEQ ID NO: 513793 - RNA, 22 nt, Artificial Sequence
  Synthetic
uaccaagcuacugaagggaaac

SEQ ID NO: 513794 - RNA, 23 nt, Artificial Sequence
  Synthetic
auaccaagcuacugaagggaaac

SEQ ID NO: 513795 - RNA, 24 nt, Artificial Sequence
  Synthetic
aauaccaagcuacugaagggaaac

SEQ ID NO: 513796 - RNA, 18 nt, Artificial Sequence
  Synthetic
acaaucagagagggaaac

SEQ ID NO: 513797 - RNA, 19 nt, Artificial Sequence
  Synthetic
cacaaucagagagggaaac

SEQ ID NO: 513798 - RNA, 20 nt, Artificial Sequence
  Synthetic
ucacaaucagagagggaaac

SEQ ID NO: 513799 - RNA, 21 nt, Artificial Sequence
  Synthetic
uucacaaucagagagggaaac

SEQ ID NO: 513800 - RNA, 22 nt, Artificial Sequence
  Synthetic
cuucacaaucagagagggaaac

SEQ ID NO: 513801 - RNA, 23 nt, Artificial Sequence
  Synthetic
acuucacaaucagagagggaaac

SEQ ID NO: 513802 - RNA, 24 nt, Artificial Sequence
  Synthetic
aacuucacaaucagagagggaaac

SEQ ID NO: 513803 - RNA, 18 nt, Artificial Sequence
  Synthetic
gagagaaaauagggaaac

SEQ ID NO: 513804 - RNA, 19 nt, Artificial Sequence
  Synthetic
ugagagaaaauagggaaac

SEQ ID NO: 513805 - RNA, 20 nt, Artificial Sequence
  Synthetic
uugagagaaaauagggaaac

SEQ ID NO: 513806 - RNA, 21 nt, Artificial Sequence
  Synthetic
auugagagaaaauagggaaac

SEQ ID NO: 513807 - RNA, 22 nt, Artificial Sequence
  Synthetic
aauugagagaaaauagggaaac

SEQ ID NO: 513808 - RNA, 23 nt, Artificial Sequence
  Synthetic
aaauugagagaaaauagggaaac

SEQ ID NO: 513809 - RNA, 24 nt, Artificial Sequence
  Synthetic
caaauugagagaaaauagggaaac

SEQ ID NO: 513810 - RNA, 18 nt, Artificial Sequence
  Synthetic
uauuaugguaggggaaac

SEQ ID NO: 513811 - RNA, 19 nt, Artificial Sequence
  Synthetic
guauuaugguaggggaaac

SEQ ID NO: 513812 - RNA, 20 nt, Artificial Sequence
  Synthetic
gguauuaugguaggggaaac

SEQ ID NO: 513813 - RNA, 21 nt, Artificial Sequence
  Synthetic
agguauuaugguaggggaaac

SEQ ID NO: 513814 - RNA, 22 nt, Artificial Sequence
  Synthetic
gagguauuaugguaggggaaac

SEQ ID NO: 513815 - RNA, 23 nt, Artificial Sequence
  Synthetic
ugagguauuaugguaggggaaac

SEQ ID NO: 513816 - RNA, 24 nt, Artificial Sequence
  Synthetic
cugagguauuaugguaggggaaac

SEQ ID NO: 513817 - RNA, 18 nt, Artificial Sequence
  Synthetic
aaugucaaugggggaaac

SEQ ID NO: 513818 - RNA, 19 nt, Artificial Sequence
  Synthetic
aaaugucaaugggggaaac

SEQ ID NO: 513819 - RNA, 20 nt, Artificial Sequence
  Synthetic
uaaaugucaaugggggaaac

SEQ ID NO: 513820 - RNA, 21 nt, Artificial Sequence
  Synthetic
uuaaaugucaaugggggaaac

SEQ ID NO: 513821 - RNA, 22 nt, Artificial Sequence
  Synthetic
cuuaaaugucaaugggggaaac

SEQ ID NO: 513822 - RNA, 23 nt, Artificial Sequence
  Synthetic
ucuuaaaugucaaugggggaaac

SEQ ID NO: 513823 - RNA, 24 nt, Artificial Sequence
  Synthetic
uucuuaaaugucaaugggggaaac

SEQ ID NO: 513824 - RNA, 18 nt, Artificial Sequence
  Synthetic
caagaaaacaauggaaac

SEQ ID NO: 513825 - RNA, 19 nt, Artificial Sequence
  Synthetic
acaagaaaacaauggaaac

SEQ ID NO: 513826 - RNA, 20 nt, Artificial Sequence
  Synthetic
aacaagaaaacaauggaaac

SEQ ID NO: 513827 - RNA, 21 nt, Artificial Sequence
  Synthetic
aaacaagaaaacaauggaaac

SEQ ID NO: 513828 - RNA, 22 nt, Artificial Sequence
  Synthetic
gaaacaagaaaacaauggaaac

SEQ ID NO: 513829 - RNA, 23 nt, Artificial Sequence
  Synthetic
ugaaacaagaaaacaauggaaac

SEQ ID NO: 513830 - RNA, 24 nt, Artificial Sequence
  Synthetic
uugaaacaagaaaacaauggaaac

SEQ ID NO: 513831 - RNA, 18 nt, Artificial Sequence
  Synthetic
uguuugaaacauggaaac

SEQ ID NO: 513832 - RNA, 19 nt, Artificial Sequence
  Synthetic
uuguuugaaacauggaaac

SEQ ID NO: 513833 - RNA, 20 nt, Artificial Sequence
  Synthetic
auuguuugaaacauggaaac

SEQ ID NO: 513834 - RNA, 21 nt, Artificial Sequence
  Synthetic
uauuguuugaaacauggaaac

SEQ ID NO: 513835 - RNA, 22 nt, Artificial Sequence
  Synthetic
auauuguuugaaacauggaaac

SEQ ID NO: 513836 - RNA, 23 nt, Artificial Sequence
  Synthetic
uauauuguuugaaacauggaaac

SEQ ID NO: 513837 - RNA, 24 nt, Artificial Sequence
  Synthetic
cuauauuguuugaaacauggaaac

SEQ ID NO: 513838 - RNA, 18 nt, Artificial Sequence
  Synthetic
agguaaagcucuggaaac

SEQ ID NO: 513839 - RNA, 19 nt, Artificial Sequence
  Synthetic
cagguaaagcucuggaaac

SEQ ID NO: 513840 - RNA, 20 nt, Artificial Sequence
  Synthetic
ucagguaaagcucuggaaac

SEQ ID NO: 513841 - RNA, 21 nt, Artificial Sequence
  Synthetic
cucagguaaagcucuggaaac

SEQ ID NO: 513842 - RNA, 22 nt, Artificial Sequence
  Synthetic
ucucagguaaagcucuggaaac

SEQ ID NO: 513843 - RNA, 23 nt, Artificial Sequence
  Synthetic
uucucagguaaagcucuggaaac

SEQ ID NO: 513844 - RNA, 24 nt, Artificial Sequence
  Synthetic
uuucucagguaaagcucuggaaac

SEQ ID NO: 513845 - RNA, 18 nt, Artificial Sequence
  Synthetic
caugaaucacuuggaaac

SEQ ID NO: 513846 - RNA, 19 nt, Artificial Sequence
  Synthetic
ccaugaaucacuuggaaac

SEQ ID NO: 513847 - RNA, 20 nt, Artificial Sequence
  Synthetic
cccaugaaucacuuggaaac

SEQ ID NO: 513848 - RNA, 21 nt, Artificial Sequence
  Synthetic
gcccaugaaucacuuggaaac

SEQ ID NO: 513849 - RNA, 22 nt, Artificial Sequence
  Synthetic
ugcccaugaaucacuuggaaac

SEQ ID NO: 513850 - RNA, 23 nt, Artificial Sequence
  Synthetic
gugcccaugaaucacuuggaaac

SEQ ID NO: 513851 - RNA, 24 nt, Artificial Sequence
  Synthetic
ugugcccaugaaucacuuggaaac

SEQ ID NO: 513852 - RNA, 18 nt, Artificial Sequence
  Synthetic
uauaaaugaaaaugaaac

SEQ ID NO: 513853 - RNA, 19 nt, Artificial Sequence
  Synthetic
auauaaaugaaaaugaaac

SEQ ID NO: 513854 - RNA, 20 nt, Artificial Sequence
  Synthetic
gauauaaaugaaaaugaaac

SEQ ID NO: 513855 - RNA, 21 nt, Artificial Sequence
  Synthetic
ggauauaaaugaaaaugaaac

SEQ ID NO: 513856 - RNA, 22 nt, Artificial Sequence
  Synthetic
uggauauaaaugaaaaugaaac

SEQ ID NO: 513857 - RNA, 23 nt, Artificial Sequence
  Synthetic
auggauauaaaugaaaaugaaac

SEQ ID NO: 513858 - RNA, 24 nt, Artificial Sequence
  Synthetic
gauggauauaaaugaaaaugaaac

SEQ ID NO: 513859 - RNA, 18 nt, Artificial Sequence
  Synthetic
cucaaguagaaaugaaac

SEQ ID NO: 513860 - RNA, 19 nt, Artificial Sequence
  Synthetic
gcucaaguagaaaugaaac

SEQ ID NO: 513861 - RNA, 20 nt, Artificial Sequence
  Synthetic
agcucaaguagaaaugaaac

SEQ ID NO: 513862 - RNA, 21 nt, Artificial Sequence
  Synthetic
aagcucaaguagaaaugaaac

SEQ ID NO: 513863 - RNA, 22 nt, Artificial Sequence
  Synthetic
uaagcucaaguagaaaugaaac

SEQ ID NO: 513864 - RNA, 23 nt, Artificial Sequence
  Synthetic
auaagcucaaguagaaaugaaac

SEQ ID NO: 513865 - RNA, 24 nt, Artificial Sequence
  Synthetic
aauaagcucaaguagaaaugaaac

SEQ ID NO: 513866 - RNA, 18 nt, Artificial Sequence
  Synthetic
gcagugggccaaugaaac

SEQ ID NO: 513867 - RNA, 19 nt, Artificial Sequence
  Synthetic
ugcagugggccaaugaaac

SEQ ID NO: 513868 - RNA, 20 nt, Artificial Sequence
  Synthetic
cugcagugggccaaugaaac

SEQ ID NO: 513869 - RNA, 21 nt, Artificial Sequence
  Synthetic
ucugcagugggccaaugaaac

SEQ ID NO: 513870 - RNA, 22 nt, Artificial Sequence
  Synthetic
uucugcagugggccaaugaaac

SEQ ID NO: 513871 - RNA, 23 nt, Artificial Sequence
  Synthetic
uuucugcagugggccaaugaaac

SEQ ID NO: 513872 - RNA, 24 nt, Artificial Sequence
  Synthetic
auuucugcagugggccaaugaaac

SEQ ID NO: 513873 - RNA, 18 nt, Artificial Sequence
  Synthetic
caagguugugcaugaaac

SEQ ID NO: 513874 - RNA, 19 nt, Artificial Sequence
  Synthetic
ccaagguugugcaugaaac

SEQ ID NO: 513875 - RNA, 20 nt, Artificial Sequence
  Synthetic
uccaagguugugcaugaaac

SEQ ID NO: 513876 - RNA, 21 nt, Artificial Sequence
  Synthetic
cuccaagguugugcaugaaac

SEQ ID NO: 513877 - RNA, 22 nt, Artificial Sequence
  Synthetic
ccuccaagguugugcaugaaac

SEQ ID NO: 513878 - RNA, 23 nt, Artificial Sequence
  Synthetic
uccuccaagguugugcaugaaac

SEQ ID NO: 513879 - RNA, 24 nt, Artificial Sequence
  Synthetic
guccuccaagguugugcaugaaac

SEQ ID NO: 513880 - RNA, 18 nt, Artificial Sequence
  Synthetic
caggaacauggaugaaac

SEQ ID NO: 513881 - RNA, 19 nt, Artificial Sequence
  Synthetic
gcaggaacauggaugaaac

SEQ ID NO: 513882 - RNA, 20 nt, Artificial Sequence
  Synthetic
ugcaggaacauggaugaaac

SEQ ID NO: 513883 - RNA, 21 nt, Artificial Sequence
  Synthetic
uugcaggaacauggaugaaac

SEQ ID NO: 513884 - RNA, 22 nt, Artificial Sequence
  Synthetic
uuugcaggaacauggaugaaac

SEQ ID NO: 513885 - RNA, 23 nt, Artificial Sequence
  Synthetic
cuuugcaggaacauggaugaaac

SEQ ID NO: 513886 - RNA, 24 nt, Artificial Sequence
  Synthetic
ccuuugcaggaacauggaugaaac

SEQ ID NO: 513887 - RNA, 18 nt, Artificial Sequence
  Synthetic
uaaucauguauaugaaac

SEQ ID NO: 513888 - RNA, 19 nt, Artificial Sequence
  Synthetic
auaaucauguauaugaaac

SEQ ID NO: 513889 - RNA, 20 nt, Artificial Sequence
  Synthetic
gauaaucauguauaugaaac

SEQ ID NO: 513890 - RNA, 21 nt, Artificial Sequence
  Synthetic
ugauaaucauguauaugaaac

SEQ ID NO: 513891 - RNA, 22 nt, Artificial Sequence
  Synthetic
augauaaucauguauaugaaac

SEQ ID NO: 513892 - RNA, 23 nt, Artificial Sequence
  Synthetic
caugauaaucauguauaugaaac

SEQ ID NO: 513893 - RNA, 24 nt, Artificial Sequence
  Synthetic
acaugauaaucauguauaugaaac

SEQ ID NO: 513894 - RNA, 18 nt, Artificial Sequence
  Synthetic
accaugggucacugaaac

SEQ ID NO: 513895 - RNA, 19 nt, Artificial Sequence
  Synthetic
gaccaugggucacugaaac

SEQ ID NO: 513896 - RNA, 20 nt, Artificial Sequence
  Synthetic
ugaccaugggucacugaaac

SEQ ID NO: 513897 - RNA, 21 nt, Artificial Sequence
  Synthetic
uugaccaugggucacugaaac

SEQ ID NO: 513898 - RNA, 22 nt, Artificial Sequence
  Synthetic
guugaccaugggucacugaaac

SEQ ID NO: 513899 - RNA, 23 nt, Artificial Sequence
  Synthetic
aguugaccaugggucacugaaac

SEQ ID NO: 513900 - RNA, 24 nt, Artificial Sequence
  Synthetic
caguugaccaugggucacugaaac

SEQ ID NO: 513901 - RNA, 18 nt, Artificial Sequence
  Synthetic
agcagaagagacugaaac

SEQ ID NO: 513902 - RNA, 19 nt, Artificial Sequence
  Synthetic
gagcagaagagacugaaac

SEQ ID NO: 513903 - RNA, 20 nt, Artificial Sequence
  Synthetic
agagcagaagagacugaaac

SEQ ID NO: 513904 - RNA, 21 nt, Artificial Sequence
  Synthetic
aagagcagaagagacugaaac

SEQ ID NO: 513905 - RNA, 22 nt, Artificial Sequence
  Synthetic
aaagagcagaagagacugaaac

SEQ ID NO: 513906 - RNA, 23 nt, Artificial Sequence
  Synthetic
gaaagagcagaagagacugaaac

SEQ ID NO: 513907 - RNA, 24 nt, Artificial Sequence
  Synthetic
agaaagagcagaagagacugaaac

SEQ ID NO: 513908 - RNA, 18 nt, Artificial Sequence
  Synthetic
agaugaaguuacugaaac

SEQ ID NO: 513909 - RNA, 19 nt, Artificial Sequence
  Synthetic
gagaugaaguuacugaaac

SEQ ID NO: 513910 - RNA, 20 nt, Artificial Sequence
  Synthetic
ggagaugaaguuacugaaac

SEQ ID NO: 513911 - RNA, 21 nt, Artificial Sequence
  Synthetic
uggagaugaaguuacugaaac

SEQ ID NO: 513912 - RNA, 22 nt, Artificial Sequence
  Synthetic
uuggagaugaaguuacugaaac

SEQ ID NO: 513913 - RNA, 23 nt, Artificial Sequence
  Synthetic
uuuggagaugaaguuacugaaac

SEQ ID NO: 513914 - RNA, 24 nt, Artificial Sequence
  Synthetic
cuuuggagaugaaguuacugaaac

SEQ ID NO: 513915 - RNA, 18 nt, Artificial Sequence
  Synthetic
agugguuguaccugaaac

SEQ ID NO: 513916 - RNA, 19 nt, Artificial Sequence
  Synthetic
cagugguuguaccugaaac

SEQ ID NO: 513917 - RNA, 20 nt, Artificial Sequence
  Synthetic
ucagugguuguaccugaaac

SEQ ID NO: 513918 - RNA, 21 nt, Artificial Sequence
  Synthetic
gucagugguuguaccugaaac

SEQ ID NO: 513919 - RNA, 22 nt, Artificial Sequence
  Synthetic
ugucagugguuguaccugaaac

SEQ ID NO: 513920 - RNA, 23 nt, Artificial Sequence
  Synthetic
gugucagugguuguaccugaaac

SEQ ID NO: 513921 - RNA, 24 nt, Artificial Sequence
  Synthetic
ugugucagugguuguaccugaaac

SEQ ID NO: 513922 - RNA, 18 nt, Artificial Sequence
  Synthetic
ugaggccuaggcugaaac

SEQ ID NO: 513923 - RNA, 19 nt, Artificial Sequence
  Synthetic
augaggccuaggcugaaac

SEQ ID NO: 513924 - RNA, 20 nt, Artificial Sequence
  Synthetic
gaugaggccuaggcugaaac

SEQ ID NO: 513925 - RNA, 21 nt, Artificial Sequence
  Synthetic
agaugaggccuaggcugaaac

SEQ ID NO: 513926 - RNA, 22 nt, Artificial Sequence
  Synthetic
gagaugaggccuaggcugaaac

SEQ ID NO: 513927 - RNA, 23 nt, Artificial Sequence
  Synthetic
ugagaugaggccuaggcugaaac

SEQ ID NO: 513928 - RNA, 24 nt, Artificial Sequence
  Synthetic
augagaugaggccuaggcugaaac

SEQ ID NO: 513929 - RNA, 18 nt, Artificial Sequence
  Synthetic
ugaguagcguucugaaac

SEQ ID NO: 513930 - RNA, 19 nt, Artificial Sequence
  Synthetic
gugaguagcguucugaaac

SEQ ID NO: 513931 - RNA, 20 nt, Artificial Sequence
  Synthetic
ugugaguagcguucugaaac

SEQ ID NO: 513932 - RNA, 21 nt, Artificial Sequence
  Synthetic
cugugaguagcguucugaaac

SEQ ID NO: 513933 - RNA, 22 nt, Artificial Sequence
  Synthetic
ccugugaguagcguucugaaac

SEQ ID NO: 513934 - RNA, 23 nt, Artificial Sequence
  Synthetic
gccugugaguagcguucugaaac

SEQ ID NO: 513935 - RNA, 24 nt, Artificial Sequence
  Synthetic
ggccugugaguagcguucugaaac

SEQ ID NO: 513936 - RNA, 18 nt, Artificial Sequence
  Synthetic
ucacaaauguggugaaac

SEQ ID NO: 513937 - RNA, 19 nt, Artificial Sequence
  Synthetic
uucacaaauguggugaaac

SEQ ID NO: 513938 - RNA, 20 nt, Artificial Sequence
  Synthetic
auucacaaauguggugaaac

SEQ ID NO: 513939 - RNA, 21 nt, Artificial Sequence
  Synthetic
uauucacaaauguggugaaac

SEQ ID NO: 513940 - RNA, 22 nt, Artificial Sequence
  Synthetic
guauucacaaauguggugaaac

SEQ ID NO: 513941 - RNA, 23 nt, Artificial Sequence
  Synthetic
uguauucacaaauguggugaaac

SEQ ID NO: 513942 - RNA, 24 nt, Artificial Sequence
  Synthetic
auguauucacaaauguggugaaac

SEQ ID NO: 513943 - RNA, 18 nt, Artificial Sequence
  Synthetic
agucagaggaauugaaac

SEQ ID NO: 513944 - RNA, 19 nt, Artificial Sequence
  Synthetic
gagucagaggaauugaaac

SEQ ID NO: 513945 - RNA, 20 nt, Artificial Sequence
  Synthetic
cgagucagaggaauugaaac

SEQ ID NO: 513946 - RNA, 21 nt, Artificial Sequence
  Synthetic
gcgagucagaggaauugaaac

SEQ ID NO: 513947 - RNA, 22 nt, Artificial Sequence
  Synthetic
agcgagucagaggaauugaaac

SEQ ID NO: 513948 - RNA, 23 nt, Artificial Sequence
  Synthetic
uagcgagucagaggaauugaaac

SEQ ID NO: 513949 - RNA, 24 nt, Artificial Sequence
  Synthetic
uuagcgagucagaggaauugaaac

SEQ ID NO: 513950 - RNA, 18 nt, Artificial Sequence
  Synthetic
aggagaauuacuugaaac

SEQ ID NO: 513951 - RNA, 19 nt, Artificial Sequence
  Synthetic
caggagaauuacuugaaac

SEQ ID NO: 513952 - RNA, 20 nt, Artificial Sequence
  Synthetic
gcaggagaauuacuugaaac

SEQ ID NO: 513953 - RNA, 21 nt, Artificial Sequence
  Synthetic
ggcaggagaauuacuugaaac

SEQ ID NO: 513954 - RNA, 22 nt, Artificial Sequence
  Synthetic
aggcaggagaauuacuugaaac

SEQ ID NO: 513955 - RNA, 23 nt, Artificial Sequence
  Synthetic
gaggcaggagaauuacuugaaac

SEQ ID NO: 513956 - RNA, 24 nt, Artificial Sequence
  Synthetic
ugaggcaggagaauuacuugaaac

SEQ ID NO: 513957 - RNA, 18 nt, Artificial Sequence
  Synthetic
gaacuucuggcuugaaac

SEQ ID NO: 513958 - RNA, 19 nt, Artificial Sequence
  Synthetic
agaacuucuggcuugaaac

SEQ ID NO: 513959 - RNA, 20 nt, Artificial Sequence
  Synthetic
gagaacuucuggcuugaaac

SEQ ID NO: 513960 - RNA, 21 nt, Artificial Sequence
  Synthetic
ggagaacuucuggcuugaaac

SEQ ID NO: 513961 - RNA, 22 nt, Artificial Sequence
  Synthetic
aggagaacuucuggcuugaaac

SEQ ID NO: 513962 - RNA, 23 nt, Artificial Sequence
  Synthetic
caggagaacuucuggcuugaaac

SEQ ID NO: 513963 - RNA, 24 nt, Artificial Sequence
  Synthetic
gcaggagaacuucuggcuugaaac

SEQ ID NO: 513964 - RNA, 18 nt, Artificial Sequence
  Synthetic
cuugaagauaguugaaac

SEQ ID NO: 513965 - RNA, 19 nt, Artificial Sequence
  Synthetic
gcuugaagauaguugaaac

SEQ ID NO: 513966 - RNA, 20 nt, Artificial Sequence
  Synthetic
agcuugaagauaguugaaac

SEQ ID NO: 513967 - RNA, 21 nt, Artificial Sequence
  Synthetic
uagcuugaagauaguugaaac

SEQ ID NO: 513968 - RNA, 22 nt, Artificial Sequence
  Synthetic
guagcuugaagauaguugaaac

SEQ ID NO: 513969 - RNA, 23 nt, Artificial Sequence
  Synthetic
aguagcuugaagauaguugaaac

SEQ ID NO: 513970 - RNA, 24 nt, Artificial Sequence
  Synthetic
uaguagcuugaagauaguugaaac

SEQ ID NO: 513971 - RNA, 18 nt, Artificial Sequence
  Synthetic
aucuauauuguuugaaac

SEQ ID NO: 513972 - RNA, 19 nt, Artificial Sequence
  Synthetic
uaucuauauuguuugaaac

SEQ ID NO: 513973 - RNA, 20 nt, Artificial Sequence
  Synthetic
auaucuauauuguuugaaac

SEQ ID NO: 513974 - RNA, 21 nt, Artificial Sequence
  Synthetic
cauaucuauauuguuugaaac

SEQ ID NO: 513975 - RNA, 22 nt, Artificial Sequence
  Synthetic
acauaucuauauuguuugaaac

SEQ ID NO: 513976 - RNA, 23 nt, Artificial Sequence
  Synthetic
cacauaucuauauuguuugaaac

SEQ ID NO: 513977 - RNA, 24 nt, Artificial Sequence
  Synthetic
acacauaucuauauuguuugaaac

SEQ ID NO: 513978 - RNA, 22 nt, Artificial Sequence
  Synthetic
caacaccucuacgcaaauaaac

SEQ ID NO: 513979 - RNA, 23 nt, Artificial Sequence
  Synthetic
ucaacaccucuacgcaaauaaac

SEQ ID NO: 513980 - RNA, 24 nt, Artificial Sequence
  Synthetic
aucaacaccucuacgcaaauaaac

SEQ ID NO: 513981 - RNA, 18 nt, Artificial Sequence
  Synthetic
accucuaugcaaauaaac

SEQ ID NO: 513982 - RNA, 19 nt, Artificial Sequence
  Synthetic
caccucuaugcaaauaaac

SEQ ID NO: 513983 - RNA, 20 nt, Artificial Sequence
  Synthetic
acaccucuaugcaaauaaac

SEQ ID NO: 513984 - RNA, 21 nt, Artificial Sequence
  Synthetic
aacaccucuaugcaaauaaac

SEQ ID NO: 513985 - RNA, 22 nt, Artificial Sequence
  Synthetic
aaacaccucuaugcaaauaaac

SEQ ID NO: 513986 - RNA, 23 nt, Artificial Sequence
  Synthetic
caaacaccucuaugcaaauaaac

SEQ ID NO: 513987 - RNA, 24 nt, Artificial Sequence
  Synthetic
acaaacaccucuaugcaaauaaac

SEQ ID NO: 513988 - RNA, 18 nt, Artificial Sequence
  Synthetic
uguaaacagccaauaaac

SEQ ID NO: 513989 - RNA, 19 nt, Artificial Sequence
  Synthetic
auguaaacagccaauaaac

SEQ ID NO: 513990 - RNA, 20 nt, Artificial Sequence
  Synthetic
aauguaaacagccaauaaac

SEQ ID NO: 513991 - RNA, 21 nt, Artificial Sequence
  Synthetic
aaauguaaacagccaauaaac

SEQ ID NO: 513992 - RNA, 22 nt, Artificial Sequence
  Synthetic
aaaauguaaacagccaauaaac

SEQ ID NO: 513993 - RNA, 23 nt, Artificial Sequence
  Synthetic
aaaaauguaaacagccaauaaac

SEQ ID NO: 513994 - RNA, 24 nt, Artificial Sequence
  Synthetic
caaaaauguaaacagccaauaaac

SEQ ID NO: 513995 - RNA, 18 nt, Artificial Sequence
  Synthetic
aauagugaugcaauaaac

SEQ ID NO: 513996 - RNA, 19 nt, Artificial Sequence
  Synthetic
uaauagugaugcaauaaac

SEQ ID NO: 513997 - RNA, 20 nt, Artificial Sequence
  Synthetic
cuaauagugaugcaauaaac

SEQ ID NO: 513998 - RNA, 21 nt, Artificial Sequence
  Synthetic
acuaauagugaugcaauaaac

SEQ ID NO: 513999 - RNA, 22 nt, Artificial Sequence
  Synthetic
uacuaauagugaugcaauaaac

SEQ ID NO: 514000 - RNA, 23 nt, Artificial Sequence
  Synthetic
auacuaauagugaugcaauaaac

SEQ ID NO: 514001 - RNA, 24 nt, Artificial Sequence
  Synthetic
uauacuaauagugaugcaauaaac

SEQ ID NO: 514002 - RNA, 18 nt, Artificial Sequence
  Synthetic
ugaggaagaagaauaaac

SEQ ID NO: 514003 - RNA, 19 nt, Artificial Sequence
  Synthetic
uugaggaagaagaauaaac

SEQ ID NO: 514004 - RNA, 20 nt, Artificial Sequence
  Synthetic
cuugaggaagaagaauaaac

SEQ ID NO: 514005 - RNA, 21 nt, Artificial Sequence
  Synthetic
ucuugaggaagaagaauaaac

SEQ ID NO: 514006 - RNA, 22 nt, Artificial Sequence
  Synthetic
gucuugaggaagaagaauaaac

SEQ ID NO: 514007 - RNA, 23 nt, Artificial Sequence
  Synthetic
agucuugaggaagaagaauaaac

SEQ ID NO: 514008 - RNA, 24 nt, Artificial Sequence
  Synthetic
cagucuugaggaagaagaauaaac

SEQ ID NO: 514009 - RNA, 18 nt, Artificial Sequence
  Synthetic
uaaaauaaaauaauaaac

SEQ ID NO: 514010 - RNA, 19 nt, Artificial Sequence
  Synthetic
auaaaauaaaauaauaaac

SEQ ID NO: 514011 - RNA, 20 nt, Artificial Sequence
  Synthetic
aauaaaauaaaauaauaaac

SEQ ID NO: 514012 - RNA, 21 nt, Artificial Sequence
  Synthetic
aaauaaaauaaaauaauaaac

SEQ ID NO: 514013 - RNA, 22 nt, Artificial Sequence
  Synthetic
aaaauaaaauaaaauaauaaac

SEQ ID NO: 514014 - RNA, 23 nt, Artificial Sequence
  Synthetic
uaaaauaaaauaaaauaauaaac

SEQ ID NO: 514015 - RNA, 24 nt, Artificial Sequence
  Synthetic
auaaaauaaaauaaaauaauaaac

SEQ ID NO: 514016 - RNA, 18 nt, Artificial Sequence
  Synthetic
auggaaaagauaauaaac

SEQ ID NO: 514017 - RNA, 19 nt, Artificial Sequence
  Synthetic
aauggaaaagauaauaaac

SEQ ID NO: 514018 - RNA, 20 nt, Artificial Sequence
  Synthetic
uaauggaaaagauaauaaac

SEQ ID NO: 514019 - RNA, 21 nt, Artificial Sequence
  Synthetic
cuaauggaaaagauaauaaac

SEQ ID NO: 514020 - RNA, 22 nt, Artificial Sequence
  Synthetic
ucuaauggaaaagauaauaaac

SEQ ID NO: 514021 - RNA, 23 nt, Artificial Sequence
  Synthetic
uucuaauggaaaagauaauaaac

SEQ ID NO: 514022 - RNA, 24 nt, Artificial Sequence
  Synthetic
auucuaauggaaaagauaauaaac

SEQ ID NO: 514023 - RNA, 18 nt, Artificial Sequence
  Synthetic
uuuuaacuguuaauaaac

SEQ ID NO: 514024 - RNA, 19 nt, Artificial Sequence
  Synthetic
cuuuuaacuguuaauaaac

SEQ ID NO: 514025 - RNA, 20 nt, Artificial Sequence
  Synthetic
gcuuuuaacuguuaauaaac

SEQ ID NO: 514026 - RNA, 21 nt, Artificial Sequence
  Synthetic
ugcuuuuaacuguuaauaaac

SEQ ID NO: 514027 - RNA, 22 nt, Artificial Sequence
  Synthetic
augcuuuuaacuguuaauaaac

SEQ ID NO: 514028 - RNA, 23 nt, Artificial Sequence
  Synthetic
aaugcuuuuaacuguuaauaaac

SEQ ID NO: 514029 - RNA, 24 nt, Artificial Sequence
  Synthetic
aaaugcuuuuaacuguuaauaaac

SEQ ID NO: 514030 - RNA, 18 nt, Artificial Sequence
  Synthetic
gcuucugaagagauaaac

SEQ ID NO: 514031 - RNA, 19 nt, Artificial Sequence
  Synthetic
ugcuucugaagagauaaac

SEQ ID NO: 514032 - RNA, 20 nt, Artificial Sequence
  Synthetic
uugcuucugaagagauaaac

SEQ ID NO: 514033 - RNA, 21 nt, Artificial Sequence
  Synthetic
uuugcuucugaagagauaaac

SEQ ID NO: 514034 - RNA, 22 nt, Artificial Sequence
  Synthetic
uuuugcuucugaagagauaaac

SEQ ID NO: 514035 - RNA, 23 nt, Artificial Sequence
  Synthetic
auuuugcuucugaagagauaaac

SEQ ID NO: 514036 - RNA, 24 nt, Artificial Sequence
  Synthetic
cauuuugcuucugaagagauaaac

SEQ ID NO: 514037 - RNA, 18 nt, Artificial Sequence
  Synthetic
uuuuauagcuagauaaac

SEQ ID NO: 514038 - RNA, 19 nt, Artificial Sequence
  Synthetic
auuuuauagcuagauaaac

SEQ ID NO: 514039 - RNA, 20 nt, Artificial Sequence
  Synthetic
cauuuuauagcuagauaaac

SEQ ID NO: 514040 - RNA, 21 nt, Artificial Sequence
  Synthetic
ccauuuuauagcuagauaaac

SEQ ID NO: 514041 - RNA, 22 nt, Artificial Sequence
  Synthetic
cccauuuuauagcuagauaaac

SEQ ID NO: 514042 - RNA, 23 nt, Artificial Sequence
  Synthetic
ccccauuuuauagcuagauaaac

SEQ ID NO: 514043 - RNA, 24 nt, Artificial Sequence
  Synthetic
uccccauuuuauagcuagauaaac

SEQ ID NO: 514044 - RNA, 18 nt, Artificial Sequence
  Synthetic
aaauugcuuuagauaaac

SEQ ID NO: 514045 - RNA, 19 nt, Artificial Sequence
  Synthetic
gaaauugcuuuagauaaac

SEQ ID NO: 514046 - RNA, 20 nt, Artificial Sequence
  Synthetic
ugaaauugcuuuagauaaac

SEQ ID NO: 514047 - RNA, 21 nt, Artificial Sequence
  Synthetic
cugaaauugcuuuagauaaac

SEQ ID NO: 514048 - RNA, 22 nt, Artificial Sequence
  Synthetic
gcugaaauugcuuuagauaaac

SEQ ID NO: 514049 - RNA, 23 nt, Artificial Sequence
  Synthetic
agcugaaauugcuuuagauaaac

SEQ ID NO: 514050 - RNA, 24 nt, Artificial Sequence
  Synthetic
aagcugaaauugcuuuagauaaac

SEQ ID NO: 514051 - RNA, 18 nt, Artificial Sequence
  Synthetic
agaauaacagggauaaac

SEQ ID NO: 514052 - RNA, 19 nt, Artificial Sequence
  Synthetic
aagaauaacagggauaaac

SEQ ID NO: 514053 - RNA, 20 nt, Artificial Sequence
  Synthetic
caagaauaacagggauaaac

SEQ ID NO: 514054 - RNA, 21 nt, Artificial Sequence
  Synthetic
acaagaauaacagggauaaac

SEQ ID NO: 514055 - RNA, 22 nt, Artificial Sequence
  Synthetic
cacaagaauaacagggauaaac

SEQ ID NO: 514056 - RNA, 23 nt, Artificial Sequence
  Synthetic
acacaagaauaacagggauaaac

SEQ ID NO: 514057 - RNA, 24 nt, Artificial Sequence
  Synthetic
aacacaagaauaacagggauaaac

SEQ ID NO: 514058 - RNA, 18 nt, Artificial Sequence
  Synthetic
aagccaaaaaauauaaac

SEQ ID NO: 514059 - RNA, 19 nt, Artificial Sequence
  Synthetic
caagccaaaaaauauaaac

SEQ ID NO: 514060 - RNA, 20 nt, Artificial Sequence
  Synthetic
ccaagccaaaaaauauaaac

SEQ ID NO: 514061 - RNA, 21 nt, Artificial Sequence
  Synthetic
accaagccaaaaaauauaaac

SEQ ID NO: 514062 - RNA, 22 nt, Artificial Sequence
  Synthetic
aaccaagccaaaaaauauaaac

SEQ ID NO: 514063 - RNA, 23 nt, Artificial Sequence
  Synthetic
gaaccaagccaaaaaauauaaac

SEQ ID NO: 514064 - RNA, 24 nt, Artificial Sequence
  Synthetic
ggaaccaagccaaaaaauauaaac

SEQ ID NO: 514065 - RNA, 18 nt, Artificial Sequence
  Synthetic
gaagucaaaaguauaaac

SEQ ID NO: 514066 - RNA, 19 nt, Artificial Sequence
  Synthetic
agaagucaaaaguauaaac

SEQ ID NO: 514067 - RNA, 20 nt, Artificial Sequence
  Synthetic
cagaagucaaaaguauaaac

SEQ ID NO: 514068 - RNA, 21 nt, Artificial Sequence
  Synthetic
acagaagucaaaaguauaaac

SEQ ID NO: 514069 - RNA, 22 nt, Artificial Sequence
  Synthetic
cacagaagucaaaaguauaaac

SEQ ID NO: 514070 - RNA, 23 nt, Artificial Sequence
  Synthetic
acacagaagucaaaaguauaaac

SEQ ID NO: 514071 - RNA, 24 nt, Artificial Sequence
  Synthetic
uacacagaagucaaaaguauaaac

SEQ ID NO: 514072 - RNA, 18 nt, Artificial Sequence
  Synthetic
cagucuuauuuuauaaac

SEQ ID NO: 514073 - RNA, 19 nt, Artificial Sequence
  Synthetic
ccagucuuauuuuauaaac

SEQ ID NO: 514074 - RNA, 20 nt, Artificial Sequence
  Synthetic
gccagucuuauuuuauaaac

SEQ ID NO: 514075 - RNA, 21 nt, Artificial Sequence
  Synthetic
ggccagucuuauuuuauaaac

SEQ ID NO: 514076 - RNA, 22 nt, Artificial Sequence
  Synthetic
aggccagucuuauuuuauaaac

SEQ ID NO: 514077 - RNA, 23 nt, Artificial Sequence
  Synthetic
uaggccagucuuauuuuauaaac

SEQ ID NO: 514078 - RNA, 24 nt, Artificial Sequence
  Synthetic
auaggccagucuuauuuuauaaac

SEQ ID NO: 514079 - RNA, 18 nt, Artificial Sequence
  Synthetic
uuauauuuaaaacuaaac

SEQ ID NO: 514080 - RNA, 19 nt, Artificial Sequence
  Synthetic
auuauauuuaaaacuaaac

SEQ ID NO: 514081 - RNA, 20 nt, Artificial Sequence
  Synthetic
aauuauauuuaaaacuaaac

SEQ ID NO: 514082 - RNA, 21 nt, Artificial Sequence
  Synthetic
aaauuauauuuaaaacuaaac

SEQ ID NO: 514083 - RNA, 22 nt, Artificial Sequence
  Synthetic
gaaauuauauuuaaaacuaaac

SEQ ID NO: 514084 - RNA, 23 nt, Artificial Sequence
  Synthetic
agaaauuauauuuaaaacuaaac

SEQ ID NO: 514085 - RNA, 24 nt, Artificial Sequence
  Synthetic
aagaaauuauauuuaaaacuaaac

SEQ ID NO: 514086 - RNA, 18 nt, Artificial Sequence
  Synthetic
uacaaaguagcacuaaac

SEQ ID NO: 514087 - RNA, 19 nt, Artificial Sequence
  Synthetic
cuacaaaguagcacuaaac

SEQ ID NO: 514088 - RNA, 20 nt, Artificial Sequence
  Synthetic
ucuacaaaguagcacuaaac

SEQ ID NO: 514089 - RNA, 21 nt, Artificial Sequence
  Synthetic
cucuacaaaguagcacuaaac

SEQ ID NO: 514090 - RNA, 22 nt, Artificial Sequence
  Synthetic
gcucuacaaaguagcacuaaac

SEQ ID NO: 514091 - RNA, 23 nt, Artificial Sequence
  Synthetic
ggcucuacaaaguagcacuaaac

SEQ ID NO: 514092 - RNA, 24 nt, Artificial Sequence
  Synthetic
aggcucuacaaaguagcacuaaac

SEQ ID NO: 514093 - RNA, 18 nt, Artificial Sequence
  Synthetic
acuuugguuucacuaaac

SEQ ID NO: 514094 - RNA, 19 nt, Artificial Sequence
  Synthetic
uacuuugguuucacuaaac

SEQ ID NO: 514095 - RNA, 20 nt, Artificial Sequence
  Synthetic
uuacuuugguuucacuaaac

SEQ ID NO: 514096 - RNA, 21 nt, Artificial Sequence
  Synthetic
auuacuuugguuucacuaaac

SEQ ID NO: 514097 - RNA, 22 nt, Artificial Sequence
  Synthetic
cauuacuuugguuucacuaaac

SEQ ID NO: 514098 - RNA, 23 nt, Artificial Sequence
  Synthetic
ucauuacuuugguuucacuaaac

SEQ ID NO: 514099 - RNA, 24 nt, Artificial Sequence
  Synthetic
uucauuacuuugguuucacuaaac

SEQ ID NO: 514100 - RNA, 21 nt, Artificial Sequence
  Synthetic
uacacccucccaagacuaaac

SEQ ID NO: 514101 - RNA, 22 nt, Artificial Sequence
  Synthetic
auacacccucccaagacuaaac

SEQ ID NO: 514102 - RNA, 23 nt, Artificial Sequence
  Synthetic
cauacacccucccaagacuaaac

SEQ ID NO: 514103 - RNA, 24 nt, Artificial Sequence
  Synthetic
acauacacccucccaagacuaaac

SEQ ID NO: 514104 - RNA, 21 nt, Artificial Sequence
  Synthetic
uacacucucccaagacuaaac

SEQ ID NO: 514105 - RNA, 22 nt, Artificial Sequence
  Synthetic
auacacucucccaagacuaaac

SEQ ID NO: 514106 - RNA, 23 nt, Artificial Sequence
  Synthetic
cauacacucucccaagacuaaac

SEQ ID NO: 514107 - RNA, 24 nt, Artificial Sequence
  Synthetic
acauacacucucccaagacuaaac

SEQ ID NO: 514108 - RNA, 18 nt, Artificial Sequence
  Synthetic
accuucccaagacuaaac

SEQ ID NO: 514109 - RNA, 19 nt, Artificial Sequence
  Synthetic
caccuucccaagacuaaac

SEQ ID NO: 514110 - RNA, 20 nt, Artificial Sequence
  Synthetic
acaccuucccaagacuaaac

SEQ ID NO: 514111 - RNA, 21 nt, Artificial Sequence
  Synthetic
uacaccuucccaagacuaaac

SEQ ID NO: 514112 - RNA, 22 nt, Artificial Sequence
  Synthetic
auacaccuucccaagacuaaac

SEQ ID NO: 514113 - RNA, 23 nt, Artificial Sequence
  Synthetic
cauacaccuucccaagacuaaac

SEQ ID NO: 514114 - RNA, 24 nt, Artificial Sequence
  Synthetic
acauacaccuucccaagacuaaac

SEQ ID NO: 514115 - RNA, 18 nt, Artificial Sequence
  Synthetic
uagauucagggacuaaac

SEQ ID NO: 514116 - RNA, 19 nt, Artificial Sequence
  Synthetic
uuagauucagggacuaaac

SEQ ID NO: 514117 - RNA, 20 nt, Artificial Sequence
  Synthetic
cuuagauucagggacuaaac

SEQ ID NO: 514118 - RNA, 21 nt, Artificial Sequence
  Synthetic
acuuagauucagggacuaaac

SEQ ID NO: 514119 - RNA, 22 nt, Artificial Sequence
  Synthetic
gacuuagauucagggacuaaac

SEQ ID NO: 514120 - RNA, 23 nt, Artificial Sequence
  Synthetic
ugacuuagauucagggacuaaac

SEQ ID NO: 514121 - RNA, 24 nt, Artificial Sequence
  Synthetic
augacuuagauucagggacuaaac

SEQ ID NO: 514122 - RNA, 18 nt, Artificial Sequence
  Synthetic
guuuauaaacaccuaaac

SEQ ID NO: 514123 - RNA, 19 nt, Artificial Sequence
  Synthetic
uguuuauaaacaccuaaac

SEQ ID NO: 514124 - RNA, 20 nt, Artificial Sequence
  Synthetic
cuguuuauaaacaccuaaac

SEQ ID NO: 514125 - RNA, 21 nt, Artificial Sequence
  Synthetic
ccuguuuauaaacaccuaaac

SEQ ID NO: 514126 - RNA, 22 nt, Artificial Sequence
  Synthetic
cccuguuuauaaacaccuaaac

SEQ ID NO: 514127 - RNA, 23 nt, Artificial Sequence
  Synthetic
acccuguuuauaaacaccuaaac

SEQ ID NO: 514128 - RNA, 24 nt, Artificial Sequence
  Synthetic
aacccuguuuauaaacaccuaaac

SEQ ID NO: 514129 - RNA, 18 nt, Artificial Sequence
  Synthetic
uuaaucauaguccuaaac

SEQ ID NO: 514130 - RNA, 19 nt, Artificial Sequence
  Synthetic
guuaaucauaguccuaaac

SEQ ID NO: 514131 - RNA, 20 nt, Artificial Sequence
  Synthetic
uguuaaucauaguccuaaac

SEQ ID NO: 514132 - RNA, 21 nt, Artificial Sequence
  Synthetic
guguuaaucauaguccuaaac

SEQ ID NO: 514133 - RNA, 22 nt, Artificial Sequence
  Synthetic
aguguuaaucauaguccuaaac

SEQ ID NO: 514134 - RNA, 23 nt, Artificial Sequence
  Synthetic
caguguuaaucauaguccuaaac

SEQ ID NO: 514135 - RNA, 24 nt, Artificial Sequence
  Synthetic
ccaguguuaaucauaguccuaaac

SEQ ID NO: 514136 - RNA, 18 nt, Artificial Sequence
  Synthetic
cugaaggaagcgcuaaac

SEQ ID NO: 514137 - RNA, 19 nt, Artificial Sequence
  Synthetic
ccugaaggaagcgcuaaac

SEQ ID NO: 514138 - RNA, 20 nt, Artificial Sequence
  Synthetic
uccugaaggaagcgcuaaac

SEQ ID NO: 514139 - RNA, 21 nt, Artificial Sequence
  Synthetic
cuccugaaggaagcgcuaaac

SEQ ID NO: 514140 - RNA, 22 nt, Artificial Sequence
  Synthetic
gcuccugaaggaagcgcuaaac

SEQ ID NO: 514141 - RNA, 23 nt, Artificial Sequence
  Synthetic
agcuccugaaggaagcgcuaaac

SEQ ID NO: 514142 - RNA, 24 nt, Artificial Sequence
  Synthetic
gagcuccugaaggaagcgcuaaac

SEQ ID NO: 514143 - RNA, 18 nt, Artificial Sequence
  Synthetic
ugccugcuaaaucuaaac

SEQ ID NO: 514144 - RNA, 19 nt, Artificial Sequence
  Synthetic
cugccugcuaaaucuaaac

SEQ ID NO: 514145 - RNA, 20 nt, Artificial Sequence
  Synthetic
acugccugcuaaaucuaaac

SEQ ID NO: 514146 - RNA, 21 nt, Artificial Sequence
  Synthetic
aacugccugcuaaaucuaaac

SEQ ID NO: 514147 - RNA, 22 nt, Artificial Sequence
  Synthetic
aaacugccugcuaaaucuaaac

SEQ ID NO: 514148 - RNA, 23 nt, Artificial Sequence
  Synthetic
aaaacugccugcuaaaucuaaac

SEQ ID NO: 514149 - RNA, 24 nt, Artificial Sequence
  Synthetic
aaaaacugccugcuaaaucuaaac

SEQ ID NO: 514150 - RNA, 18 nt, Artificial Sequence
  Synthetic
auuuuaucaauucuaaac

SEQ ID NO: 514151 - RNA, 19 nt, Artificial Sequence
  Synthetic
uauuuuaucaauucuaaac

SEQ ID NO: 514152 - RNA, 20 nt, Artificial Sequence
  Synthetic
auauuuuaucaauucuaaac

SEQ ID NO: 514153 - RNA, 21 nt, Artificial Sequence
  Synthetic
uauauuuuaucaauucuaaac

SEQ ID NO: 514154 - RNA, 22 nt, Artificial Sequence
  Synthetic
cuauauuuuaucaauucuaaac

SEQ ID NO: 514155 - RNA, 23 nt, Artificial Sequence
  Synthetic
ucuauauuuuaucaauucuaaac

SEQ ID NO: 514156 - RNA, 24 nt, Artificial Sequence
  Synthetic
cucuauauuuuaucaauucuaaac

SEQ ID NO: 514157 - RNA, 18 nt, Artificial Sequence
  Synthetic
cuuagcuuuauucuaaac

SEQ ID NO: 514158 - RNA, 19 nt, Artificial Sequence
  Synthetic
acuuagcuuuauucuaaac

SEQ ID NO: 514159 - RNA, 20 nt, Artificial Sequence
  Synthetic
uacuuagcuuuauucuaaac

SEQ ID NO: 514160 - RNA, 21 nt, Artificial Sequence
  Synthetic
uuacuuagcuuuauucuaaac

SEQ ID NO: 514161 - RNA, 22 nt, Artificial Sequence
  Synthetic
uuuacuuagcuuuauucuaaac

SEQ ID NO: 514162 - RNA, 23 nt, Artificial Sequence
  Synthetic
uuuuacuuagcuuuauucuaaac

SEQ ID NO: 514163 - RNA, 24 nt, Artificial Sequence
  Synthetic
uuuuuacuuagcuuuauucuaaac

SEQ ID NO: 514164 - RNA, 18 nt, Artificial Sequence
  Synthetic
cagaguguccuucuaaac

SEQ ID NO: 514165 - RNA, 19 nt, Artificial Sequence
  Synthetic
acagaguguccuucuaaac

SEQ ID NO: 514166 - RNA, 20 nt, Artificial Sequence
  Synthetic
aacagaguguccuucuaaac

SEQ ID NO: 514167 - RNA, 21 nt, Artificial Sequence
  Synthetic
caacagaguguccuucuaaac

SEQ ID NO: 514168 - RNA, 22 nt, Artificial Sequence
  Synthetic
gcaacagaguguccuucuaaac

SEQ ID NO: 514169 - RNA, 23 nt, Artificial Sequence
  Synthetic
ggcaacagaguguccuucuaaac

SEQ ID NO: 514170 - RNA, 24 nt, Artificial Sequence
  Synthetic
aggcaacagaguguccuucuaaac

SEQ ID NO: 514171 - RNA, 18 nt, Artificial Sequence
  Synthetic
acaugugcuuuucuaaac

SEQ ID NO: 514172 - RNA, 19 nt, Artificial Sequence
  Synthetic
aacaugugcuuuucuaaac

SEQ ID NO: 514173 - RNA, 20 nt, Artificial Sequence
  Synthetic
aaacaugugcuuuucuaaac

SEQ ID NO: 514174 - RNA, 21 nt, Artificial Sequence
  Synthetic
uaaacaugugcuuuucuaaac

SEQ ID NO: 514175 - RNA, 22 nt, Artificial Sequence
  Synthetic
cuaaacaugugcuuuucuaaac

SEQ ID NO: 514176 - RNA, 23 nt, Artificial Sequence
  Synthetic
ucuaaacaugugcuuuucuaaac

SEQ ID NO: 514177 - RNA, 24 nt, Artificial Sequence
  Synthetic
gucuaaacaugugcuuuucuaaac

SEQ ID NO: 514178 - RNA, 18 nt, Artificial Sequence
  Synthetic
gagaauccaccaguaaac

SEQ ID NO: 514179 - RNA, 19 nt, Artificial Sequence
  Synthetic
ugagaauccaccaguaaac

SEQ ID NO: 514180 - RNA, 20 nt, Artificial Sequence
  Synthetic
cugagaauccaccaguaaac

SEQ ID NO: 514181 - RNA, 21 nt, Artificial Sequence
  Synthetic
acugagaauccaccaguaaac

SEQ ID NO: 514182 - RNA, 22 nt, Artificial Sequence
  Synthetic
uacugagaauccaccaguaaac

SEQ ID NO: 514183 - RNA, 23 nt, Artificial Sequence
  Synthetic
auacugagaauccaccaguaaac

SEQ ID NO: 514184 - RNA, 24 nt, Artificial Sequence
  Synthetic
gauacugagaauccaccaguaaac

SEQ ID NO: 514185 - RNA, 18 nt, Artificial Sequence
  Synthetic
aaaagugcugcaguaaac

SEQ ID NO: 514186 - RNA, 19 nt, Artificial Sequence
  Synthetic
gaaaagugcugcaguaaac

SEQ ID NO: 514187 - RNA, 20 nt, Artificial Sequence
  Synthetic
ugaaaagugcugcaguaaac

SEQ ID NO: 514188 - RNA, 21 nt, Artificial Sequence
  Synthetic
augaaaagugcugcaguaaac

SEQ ID NO: 514189 - RNA, 22 nt, Artificial Sequence
  Synthetic
uaugaaaagugcugcaguaaac

SEQ ID NO: 514190 - RNA, 23 nt, Artificial Sequence
  Synthetic
guaugaaaagugcugcaguaaac

SEQ ID NO: 514191 - RNA, 24 nt, Artificial Sequence
  Synthetic
aguaugaaaagugcugcaguaaac

SEQ ID NO: 514192 - RNA, 18 nt, Artificial Sequence
  Synthetic
uccaguagaagaguaaac

SEQ ID NO: 514193 - RNA, 19 nt, Artificial Sequence
  Synthetic
uuccaguagaagaguaaac

SEQ ID NO: 514194 - RNA, 20 nt, Artificial Sequence
  Synthetic
auuccaguagaagaguaaac

SEQ ID NO: 514195 - RNA, 21 nt, Artificial Sequence
  Synthetic
aauuccaguagaagaguaaac

SEQ ID NO: 514196 - RNA, 22 nt, Artificial Sequence
  Synthetic
uaauuccaguagaagaguaaac

SEQ ID NO: 514197 - RNA, 23 nt, Artificial Sequence
  Synthetic
guaauuccaguagaagaguaaac

SEQ ID NO: 514198 - RNA, 24 nt, Artificial Sequence
  Synthetic
uguaauuccaguagaagaguaaac

SEQ ID NO: 514199 - RNA, 18 nt, Artificial Sequence
  Synthetic
aaucuuaacagaguaaac

SEQ ID NO: 514200 - RNA, 19 nt, Artificial Sequence
  Synthetic
caaucuuaacagaguaaac

SEQ ID NO: 514201 - RNA, 20 nt, Artificial Sequence
  Synthetic
acaaucuuaacagaguaaac

SEQ ID NO: 514202 - RNA, 21 nt, Artificial Sequence
  Synthetic
cacaaucuuaacagaguaaac

SEQ ID NO: 514203 - RNA, 22 nt, Artificial Sequence
  Synthetic
acacaaucuuaacagaguaaac

SEQ ID NO: 514204 - RNA, 23 nt, Artificial Sequence
  Synthetic
aacacaaucuuaacagaguaaac

SEQ ID NO: 514205 - RNA, 24 nt, Artificial Sequence
  Synthetic
aaacacaaucuuaacagaguaaac

SEQ ID NO: 514206 - RNA, 18 nt, Artificial Sequence
  Synthetic
uuuuuuaaaugaguaaac

SEQ ID NO: 514207 - RNA, 19 nt, Artificial Sequence
  Synthetic
uuuuuuuaaaugaguaaac

SEQ ID NO: 514208 - RNA, 20 nt, Artificial Sequence
  Synthetic
cuuuuuuuaaaugaguaaac

SEQ ID NO: 514209 - RNA, 21 nt, Artificial Sequence
  Synthetic
gcuuuuuuuaaaugaguaaac

SEQ ID NO: 514210 - RNA, 22 nt, Artificial Sequence
  Synthetic
agcuuuuuuuaaaugaguaaac

SEQ ID NO: 514211 - RNA, 23 nt, Artificial Sequence
  Synthetic
cagcuuuuuuuaaaugaguaaac

SEQ ID NO: 514212 - RNA, 24 nt, Artificial Sequence
  Synthetic
ucagcuuuuuuuaaaugaguaaac

SEQ ID NO: 514213 - RNA, 18 nt, Artificial Sequence
  Synthetic
caggagaauggcguaaac

SEQ ID NO: 514214 - RNA, 19 nt, Artificial Sequence
  Synthetic
gcaggagaauggcguaaac

SEQ ID NO: 514215 - RNA, 20 nt, Artificial Sequence
  Synthetic
ggcaggagaauggcguaaac

SEQ ID NO: 514216 - RNA, 21 nt, Artificial Sequence
  Synthetic
aggcaggagaauggcguaaac

SEQ ID NO: 514217 - RNA, 22 nt, Artificial Sequence
  Synthetic
gaggcaggagaauggcguaaac

SEQ ID NO: 514218 - RNA, 23 nt, Artificial Sequence
  Synthetic
ugaggcaggagaauggcguaaac

SEQ ID NO: 514219 - RNA, 24 nt, Artificial Sequence
  Synthetic
cugaggcaggagaauggcguaaac

SEQ ID NO: 514220 - RNA, 18 nt, Artificial Sequence
  Synthetic
cuggagucccagguaaac

SEQ ID NO: 514221 - RNA, 19 nt, Artificial Sequence
  Synthetic
ucuggagucccagguaaac

SEQ ID NO: 514222 - RNA, 20 nt, Artificial Sequence
  Synthetic
cucuggagucccagguaaac

SEQ ID NO: 514223 - RNA, 21 nt, Artificial Sequence
  Synthetic
gcucuggagucccagguaaac

SEQ ID NO: 514224 - RNA, 22 nt, Artificial Sequence
  Synthetic
ugcucuggagucccagguaaac

SEQ ID NO: 514225 - RNA, 23 nt, Artificial Sequence
  Synthetic
gugcucuggagucccagguaaac

SEQ ID NO: 514226 - RNA, 24 nt, Artificial Sequence
  Synthetic
agugcucuggagucccagguaaac

SEQ ID NO: 514227 - RNA, 18 nt, Artificial Sequence
  Synthetic
uguccgugguauguaaac

SEQ ID NO: 514228 - RNA, 19 nt, Artificial Sequence
  Synthetic
guguccgugguauguaaac

SEQ ID NO: 514229 - RNA, 20 nt, Artificial Sequence
  Synthetic
gguguccgugguauguaaac

SEQ ID NO: 514230 - RNA, 21 nt, Artificial Sequence
  Synthetic
ugguguccgugguauguaaac

SEQ ID NO: 514231 - RNA, 22 nt, Artificial Sequence
  Synthetic
augguguccgugguauguaaac

SEQ ID NO: 514232 - RNA, 23 nt, Artificial Sequence
  Synthetic
gaugguguccgugguauguaaac

SEQ ID NO: 514233 - RNA, 24 nt, Artificial Sequence
  Synthetic
agaugguguccgugguauguaaac

SEQ ID NO: 514234 - RNA, 18 nt, Artificial Sequence
  Synthetic
ugaggggaaacuguaaac

SEQ ID NO: 514235 - RNA, 19 nt, Artificial Sequence
  Synthetic
gugaggggaaacuguaaac

SEQ ID NO: 514236 - RNA, 20 nt, Artificial Sequence
  Synthetic
ugugaggggaaacuguaaac

SEQ ID NO: 514237 - RNA, 21 nt, Artificial Sequence
  Synthetic
augugaggggaaacuguaaac

SEQ ID NO: 514238 - RNA, 22 nt, Artificial Sequence
  Synthetic
caugugaggggaaacuguaaac

SEQ ID NO: 514239 - RNA, 23 nt, Artificial Sequence
  Synthetic
ucaugugaggggaaacuguaaac

SEQ ID NO: 514240 - RNA, 24 nt, Artificial Sequence
  Synthetic
aucaugugaggggaaacuguaaac

SEQ ID NO: 514241 - RNA, 18 nt, Artificial Sequence
  Synthetic
caacaugacucauuaaac

SEQ ID NO: 514242 - RNA, 19 nt, Artificial Sequence
  Synthetic
ccaacaugacucauuaaac

SEQ ID NO: 514243 - RNA, 20 nt, Artificial Sequence
  Synthetic
uccaacaugacucauuaaac

SEQ ID NO: 514244 - RNA, 21 nt, Artificial Sequence
  Synthetic
auccaacaugacucauuaaac

SEQ ID NO: 514245 - RNA, 22 nt, Artificial Sequence
  Synthetic
uauccaacaugacucauuaaac

SEQ ID NO: 514246 - RNA, 23 nt, Artificial Sequence
  Synthetic
uuauccaacaugacucauuaaac

SEQ ID NO: 514247 - RNA, 24 nt, Artificial Sequence
  Synthetic
guuauccaacaugacucauuaaac

SEQ ID NO: 514248 - RNA, 18 nt, Artificial Sequence
  Synthetic
gcuccucuauccuuaaac

SEQ ID NO: 514249 - RNA, 19 nt, Artificial Sequence
  Synthetic
agcuccucuauccuuaaac

SEQ ID NO: 514250 - RNA, 20 nt, Artificial Sequence
  Synthetic
uagcuccucuauccuuaaac

SEQ ID NO: 514251 - RNA, 21 nt, Artificial Sequence
  Synthetic
uuagcuccucuauccuuaaac

SEQ ID NO: 514252 - RNA, 22 nt, Artificial Sequence
  Synthetic
cuuagcuccucuauccuuaaac

SEQ ID NO: 514253 - RNA, 23 nt, Artificial Sequence
  Synthetic
ucuuagcuccucuauccuuaaac

SEQ ID NO: 514254 - RNA, 24 nt, Artificial Sequence
  Synthetic
aucuuagcuccucuauccuuaaac

SEQ ID NO: 514255 - RNA, 18 nt, Artificial Sequence
  Synthetic
cuggagaguaucuuaaac

SEQ ID NO: 514256 - RNA, 19 nt, Artificial Sequence
  Synthetic
gcuggagaguaucuuaaac

SEQ ID NO: 514257 - RNA, 20 nt, Artificial Sequence
  Synthetic
agcuggagaguaucuuaaac

SEQ ID NO: 514258 - RNA, 21 nt, Artificial Sequence
  Synthetic
aagcuggagaguaucuuaaac

SEQ ID NO: 514259 - RNA, 22 nt, Artificial Sequence
  Synthetic
aaagcuggagaguaucuuaaac

SEQ ID NO: 514260 - RNA, 23 nt, Artificial Sequence
  Synthetic
uaaagcuggagaguaucuuaaac

SEQ ID NO: 514261 - RNA, 24 nt, Artificial Sequence
  Synthetic
uuaaagcuggagaguaucuuaaac

SEQ ID NO: 514262 - RNA, 18 nt, Artificial Sequence
  Synthetic
ccuccaggagaguuaaac

SEQ ID NO: 514263 - RNA, 19 nt, Artificial Sequence
  Synthetic
cccuccaggagaguuaaac

SEQ ID NO: 514264 - RNA, 20 nt, Artificial Sequence
  Synthetic
acccuccaggagaguuaaac

SEQ ID NO: 514265 - RNA, 21 nt, Artificial Sequence
  Synthetic
gacccuccaggagaguuaaac

SEQ ID NO: 514266 - RNA, 22 nt, Artificial Sequence
  Synthetic
agacccuccaggagaguuaaac

SEQ ID NO: 514267 - RNA, 23 nt, Artificial Sequence
  Synthetic
gagacccuccaggagaguuaaac

SEQ ID NO: 514268 - RNA, 24 nt, Artificial Sequence
  Synthetic
agagacccuccaggagaguuaaac

SEQ ID NO: 514269 - RNA, 18 nt, Artificial Sequence
  Synthetic
aaacccaccuaguuaaac

SEQ ID NO: 514270 - RNA, 19 nt, Artificial Sequence
  Synthetic
aaaacccaccuaguuaaac

SEQ ID NO: 514271 - RNA, 20 nt, Artificial Sequence
  Synthetic
aaaaacccaccuaguuaaac

SEQ ID NO: 514272 - RNA, 21 nt, Artificial Sequence
  Synthetic
caaaaacccaccuaguuaaac

SEQ ID NO: 514273 - RNA, 22 nt, Artificial Sequence
  Synthetic
ucaaaaacccaccuaguuaaac

SEQ ID NO: 514274 - RNA, 23 nt, Artificial Sequence
  Synthetic
aucaaaaacccaccuaguuaaac

SEQ ID NO: 514275 - RNA, 24 nt, Artificial Sequence
  Synthetic
gaucaaaaacccaccuaguuaaac

SEQ ID NO: 514276 - RNA, 18 nt, Artificial Sequence
  Synthetic
ucaucacaaggguuaaac

SEQ ID NO: 514277 - RNA, 19 nt, Artificial Sequence
  Synthetic
aucaucacaaggguuaaac

SEQ ID NO: 514278 - RNA, 20 nt, Artificial Sequence
  Synthetic
uaucaucacaaggguuaaac

SEQ ID NO: 514279 - RNA, 21 nt, Artificial Sequence
  Synthetic
uuaucaucacaaggguuaaac

SEQ ID NO: 514280 - RNA, 22 nt, Artificial Sequence
  Synthetic
auuaucaucacaaggguuaaac

SEQ ID NO: 514281 - RNA, 23 nt, Artificial Sequence
  Synthetic
cauuaucaucacaaggguuaaac

SEQ ID NO: 514282 - RNA, 24 nt, Artificial Sequence
  Synthetic
ccauuaucaucacaaggguuaaac

SEQ ID NO: 514283 - RNA, 18 nt, Artificial Sequence
  Synthetic
caugugaucauguuaaac

SEQ ID NO: 514284 - RNA, 19 nt, Artificial Sequence
  Synthetic
acaugugaucauguuaaac

SEQ ID NO: 514285 - RNA, 20 nt, Artificial Sequence
  Synthetic
aacaugugaucauguuaaac

SEQ ID NO: 514286 - RNA, 21 nt, Artificial Sequence
  Synthetic
uaacaugugaucauguuaaac

SEQ ID NO: 514287 - RNA, 22 nt, Artificial Sequence
  Synthetic
auaacaugugaucauguuaaac

SEQ ID NO: 514288 - RNA, 23 nt, Artificial Sequence
  Synthetic
aauaacaugugaucauguuaaac

SEQ ID NO: 514289 - RNA, 24 nt, Artificial Sequence
  Synthetic
aaauaacaugugaucauguuaaac

SEQ ID NO: 514290 - RNA, 18 nt, Artificial Sequence
  Synthetic
agauugaugcuguuaaac

SEQ ID NO: 514291 - RNA, 19 nt, Artificial Sequence
  Synthetic
aagauugaugcuguuaaac

SEQ ID NO: 514292 - RNA, 20 nt, Artificial Sequence
  Synthetic
aaagauugaugcuguuaaac

SEQ ID NO: 514293 - RNA, 21 nt, Artificial Sequence
  Synthetic
uaaagauugaugcuguuaaac

SEQ ID NO: 514294 - RNA, 22 nt, Artificial Sequence
  Synthetic
uuaaagauugaugcuguuaaac

SEQ ID NO: 514295 - RNA, 23 nt, Artificial Sequence
  Synthetic
uuuaaagauugaugcuguuaaac

SEQ ID NO: 514296 - RNA, 24 nt, Artificial Sequence
  Synthetic
cuuuaaagauugaugcuguuaaac

SEQ ID NO: 514297 - RNA, 18 nt, Artificial Sequence
  Synthetic
auguuguaaaauuuaaac

SEQ ID NO: 514298 - RNA, 19 nt, Artificial Sequence
  Synthetic
aauguuguaaaauuuaaac

SEQ ID NO: 514299 - RNA, 20 nt, Artificial Sequence
  Synthetic
aaauguuguaaaauuuaaac

SEQ ID NO: 514300 - RNA, 21 nt, Artificial Sequence
  Synthetic
gaaauguuguaaaauuuaaac

SEQ ID NO: 514301 - RNA, 22 nt, Artificial Sequence
  Synthetic
ugaaauguuguaaaauuuaaac

SEQ ID NO: 514302 - RNA, 23 nt, Artificial Sequence
  Synthetic
augaaauguuguaaaauuuaaac

SEQ ID NO: 514303 - RNA, 24 nt, Artificial Sequence
  Synthetic
uaugaaauguuguaaaauuuaaac

SEQ ID NO: 514304 - RNA, 18 nt, Artificial Sequence
  Synthetic
uuaguaagcccuuuaaac

SEQ ID NO: 514305 - RNA, 19 nt, Artificial Sequence
  Synthetic
uuuaguaagcccuuuaaac

SEQ ID NO: 514306 - RNA, 20 nt, Artificial Sequence
  Synthetic
auuuaguaagcccuuuaaac

SEQ ID NO: 514307 - RNA, 21 nt, Artificial Sequence
  Synthetic
cauuuaguaagcccuuuaaac

SEQ ID NO: 514308 - RNA, 22 nt, Artificial Sequence
  Synthetic
gcauuuaguaagcccuuuaaac

SEQ ID NO: 514309 - RNA, 23 nt, Artificial Sequence
  Synthetic
ggcauuuaguaagcccuuuaaac

SEQ ID NO: 514310 - RNA, 24 nt, Artificial Sequence
  Synthetic
gggcauuuaguaagcccuuuaaac

SEQ ID NO: 514311 - RNA, 18 nt, Artificial Sequence
  Synthetic
auucgggacuguuuaaac

SEQ ID NO: 514312 - RNA, 19 nt, Artificial Sequence
  Synthetic
aauucgggacuguuuaaac

SEQ ID NO: 514313 - RNA, 20 nt, Artificial Sequence
  Synthetic
aaauucgggacuguuuaaac

SEQ ID NO: 514314 - RNA, 21 nt, Artificial Sequence
  Synthetic
aaaauucgggacuguuuaaac

SEQ ID NO: 514315 - RNA, 22 nt, Artificial Sequence
  Synthetic
aaaaauucgggacuguuuaaac

SEQ ID NO: 514316 - RNA, 23 nt, Artificial Sequence
  Synthetic
aaaaaauucgggacuguuuaaac

SEQ ID NO: 514317 - RNA, 24 nt, Artificial Sequence
  Synthetic
uaaaaaauucgggacuguuuaaac

SEQ ID NO: 514318 - RNA, 18 nt, Artificial Sequence
  Synthetic
acuuucuacuguuuaaac

SEQ ID NO: 514319 - RNA, 19 nt, Artificial Sequence
  Synthetic
uacuuucuacuguuuaaac

SEQ ID NO: 514320 - RNA, 20 nt, Artificial Sequence
  Synthetic
uuacuuucuacuguuuaaac

SEQ ID NO: 514321 - RNA, 21 nt, Artificial Sequence
  Synthetic
auuacuuucuacuguuuaaac

SEQ ID NO: 514322 - RNA, 22 nt, Artificial Sequence
  Synthetic
aauuacuuucuacuguuuaaac

SEQ ID NO: 514323 - RNA, 23 nt, Artificial Sequence
  Synthetic
caauuacuuucuacuguuuaaac

SEQ ID NO: 514324 - RNA, 24 nt, Artificial Sequence
  Synthetic
ccaauuacuuucuacuguuuaaac

SEQ ID NO: 514325 - RNA, 18 nt, Artificial Sequence
  Synthetic
auuaucaggauuuuaaac

SEQ ID NO: 514326 - RNA, 19 nt, Artificial Sequence
  Synthetic
aauuaucaggauuuuaaac

SEQ ID NO: 514327 - RNA, 20 nt, Artificial Sequence
  Synthetic
gaauuaucaggauuuuaaac

SEQ ID NO: 514328 - RNA, 21 nt, Artificial Sequence
  Synthetic
agaauuaucaggauuuuaaac

SEQ ID NO: 514329 - RNA, 22 nt, Artificial Sequence
  Synthetic
uagaauuaucaggauuuuaaac

SEQ ID NO: 514330 - RNA, 23 nt, Artificial Sequence
  Synthetic
cuagaauuaucaggauuuuaaac

SEQ ID NO: 514331 - RNA, 24 nt, Artificial Sequence
  Synthetic
ucuagaauuaucaggauuuuaaac

SEQ ID NO: 514332 - RNA, 18 nt, Artificial Sequence
  Synthetic
uugguuaauauuuuaaac

SEQ ID NO: 514333 - RNA, 19 nt, Artificial Sequence
  Synthetic
uuugguuaauauuuuaaac

SEQ ID NO: 514334 - RNA, 20 nt, Artificial Sequence
  Synthetic
uuuugguuaauauuuuaaac

SEQ ID NO: 514335 - RNA, 21 nt, Artificial Sequence
  Synthetic
auuuugguuaauauuuuaaac

SEQ ID NO: 514336 - RNA, 22 nt, Artificial Sequence
  Synthetic
aauuuugguuaauauuuuaaac

SEQ ID NO: 514337 - RNA, 23 nt, Artificial Sequence
  Synthetic
aaauuuugguuaauauuuuaaac

SEQ ID NO: 514338 - RNA, 24 nt, Artificial Sequence
  Synthetic
uaaauuuugguuaauauuuuaaac

SEQ ID NO: 514339 - RNA, 18 nt, Artificial Sequence
  Synthetic
uuucaagcaguuuuaaac

SEQ ID NO: 514340 - RNA, 19 nt, Artificial Sequence
  Synthetic
uuuucaagcaguuuuaaac

SEQ ID NO: 514341 - RNA, 20 nt, Artificial Sequence
  Synthetic
guuuucaagcaguuuuaaac

SEQ ID NO: 514342 - RNA, 21 nt, Artificial Sequence
  Synthetic
uguuuucaagcaguuuuaaac

SEQ ID NO: 514343 - RNA, 22 nt, Artificial Sequence
  Synthetic
cuguuuucaagcaguuuuaaac

SEQ ID NO: 514344 - RNA, 23 nt, Artificial Sequence
  Synthetic
acuguuuucaagcaguuuuaaac

SEQ ID NO: 514345 - RNA, 24 nt, Artificial Sequence
  Synthetic
aacuguuuucaagcaguuuuaaac

SEQ ID NO: 514346 - RNA, 18 nt, Artificial Sequence
  Synthetic
cagcauugauuuuuaaac

SEQ ID NO: 514347 - RNA, 19 nt, Artificial Sequence
  Synthetic
gcagcauugauuuuuaaac

SEQ ID NO: 514348 - RNA, 20 nt, Artificial Sequence
  Synthetic
ugcagcauugauuuuuaaac

SEQ ID NO: 514349 - RNA, 21 nt, Artificial Sequence
  Synthetic
augcagcauugauuuuuaaac

SEQ ID NO: 514350 - RNA, 22 nt, Artificial Sequence
  Synthetic
aaugcagcauugauuuuuaaac

SEQ ID NO: 514351 - RNA, 23 nt, Artificial Sequence
  Synthetic
uaaugcagcauugauuuuuaaac

SEQ ID NO: 514352 - RNA, 24 nt, Artificial Sequence
  Synthetic
auaaugcagcauugauuuuuaaac

SEQ ID NO: 514353 - RNA, 18 nt, Artificial Sequence
  Synthetic
cccaacgaaaaaaacaac

SEQ ID NO: 514354 - RNA, 19 nt, Artificial Sequence
  Synthetic
ucccaacgaaaaaaacaac

SEQ ID NO: 514355 - RNA, 20 nt, Artificial Sequence
  Synthetic
gucccaacgaaaaaaacaac

SEQ ID NO: 514356 - RNA, 21 nt, Artificial Sequence
  Synthetic
ugucccaacgaaaaaaacaac

SEQ ID NO: 514357 - RNA, 22 nt, Artificial Sequence
  Synthetic
augucccaacgaaaaaaacaac

SEQ ID NO: 514358 - RNA, 23 nt, Artificial Sequence
  Synthetic
caugucccaacgaaaaaaacaac

SEQ ID NO: 514359 - RNA, 24 nt, Artificial Sequence
  Synthetic
ucaugucccaacgaaaaaaacaac

SEQ ID NO: 514360 - RNA, 18 nt, Artificial Sequence
  Synthetic
uuccauacacaaaacaac

SEQ ID NO: 514361 - RNA, 19 nt, Artificial Sequence
  Synthetic
cuuccauacacaaaacaac

SEQ ID NO: 514362 - RNA, 20 nt, Artificial Sequence
  Synthetic
acuuccauacacaaaacaac

SEQ ID NO: 514363 - RNA, 21 nt, Artificial Sequence
  Synthetic
cacuuccauacacaaaacaac

SEQ ID NO: 514364 - RNA, 22 nt, Artificial Sequence
  Synthetic
ucacuuccauacacaaaacaac

SEQ ID NO: 514365 - RNA, 23 nt, Artificial Sequence
  Synthetic
uucacuuccauacacaaaacaac

SEQ ID NO: 514366 - RNA, 24 nt, Artificial Sequence
  Synthetic
uuucacuuccauacacaaaacaac

SEQ ID NO: 514367 - RNA, 18 nt, Artificial Sequence
  Synthetic
aagaaaaaagaaaacaac

SEQ ID NO: 514368 - RNA, 19 nt, Artificial Sequence
  Synthetic
gaagaaaaaagaaaacaac

SEQ ID NO: 514369 - RNA, 20 nt, Artificial Sequence
  Synthetic
ugaagaaaaaagaaaacaac

SEQ ID NO: 514370 - RNA, 21 nt, Artificial Sequence
  Synthetic
augaagaaaaaagaaaacaac

SEQ ID NO: 514371 - RNA, 22 nt, Artificial Sequence
  Synthetic
uaugaagaaaaaagaaaacaac

SEQ ID NO: 514372 - RNA, 23 nt, Artificial Sequence
  Synthetic
auaugaagaaaaaagaaaacaac

SEQ ID NO: 514373 - RNA, 24 nt, Artificial Sequence
  Synthetic
uauaugaagaaaaaagaaaacaac

SEQ ID NO: 514374 - RNA, 18 nt, Artificial Sequence
  Synthetic
uuuagggcugcaaacaac

SEQ ID NO: 514375 - RNA, 19 nt, Artificial Sequence
  Synthetic
uuuuagggcugcaaacaac

SEQ ID NO: 514376 - RNA, 20 nt, Artificial Sequence
  Synthetic
auuuuagggcugcaaacaac

SEQ ID NO: 514377 - RNA, 21 nt, Artificial Sequence
  Synthetic
aauuuuagggcugcaaacaac

SEQ ID NO: 514378 - RNA, 22 nt, Artificial Sequence
  Synthetic
gaauuuuagggcugcaaacaac

SEQ ID NO: 514379 - RNA, 23 nt, Artificial Sequence
  Synthetic
ggaauuuuagggcugcaaacaac

SEQ ID NO: 514380 - RNA, 24 nt, Artificial Sequence
  Synthetic
uggaauuuuagggcugcaaacaac

SEQ ID NO: 514381 - RNA, 18 nt, Artificial Sequence
  Synthetic
auguguuacauaaacaac

SEQ ID NO: 514382 - RNA, 19 nt, Artificial Sequence
  Synthetic
aauguguuacauaaacaac

SEQ ID NO: 514383 - RNA, 20 nt, Artificial Sequence
  Synthetic
gaauguguuacauaaacaac

SEQ ID NO: 514384 - RNA, 21 nt, Artificial Sequence
  Synthetic
agaauguguuacauaaacaac

SEQ ID NO: 514385 - RNA, 22 nt, Artificial Sequence
  Synthetic
gagaauguguuacauaaacaac

SEQ ID NO: 514386 - RNA, 23 nt, Artificial Sequence
  Synthetic
agagaauguguuacauaaacaac

SEQ ID NO: 514387 - RNA, 24 nt, Artificial Sequence
  Synthetic
aagagaauguguuacauaaacaac

SEQ ID NO: 514388 - RNA, 18 nt, Artificial Sequence
  Synthetic
caucacccucacaacaac

SEQ ID NO: 514389 - RNA, 19 nt, Artificial Sequence
  Synthetic
gcaucacccucacaacaac

SEQ ID NO: 514390 - RNA, 20 nt, Artificial Sequence
  Synthetic
cgcaucacccucacaacaac

SEQ ID NO: 514391 - RNA, 21 nt, Artificial Sequence
  Synthetic
ucgcaucacccucacaacaac

SEQ ID NO: 514392 - RNA, 22 nt, Artificial Sequence
  Synthetic
uucgcaucacccucacaacaac

SEQ ID NO: 514393 - RNA, 23 nt, Artificial Sequence
  Synthetic
auucgcaucacccucacaacaac

SEQ ID NO: 514394 - RNA, 24 nt, Artificial Sequence
  Synthetic
aauucgcaucacccucacaacaac

SEQ ID NO: 514395 - RNA, 18 nt, Artificial Sequence
  Synthetic
aaaagcaauugcaacaac

SEQ ID NO: 514396 - RNA, 19 nt, Artificial Sequence
  Synthetic
aaaaagcaauugcaacaac

SEQ ID NO: 514397 - RNA, 20 nt, Artificial Sequence
  Synthetic
aaaaaagcaauugcaacaac

SEQ ID NO: 514398 - RNA, 21 nt, Artificial Sequence
  Synthetic
uaaaaaagcaauugcaacaac

SEQ ID NO: 514399 - RNA, 22 nt, Artificial Sequence
  Synthetic
auaaaaaagcaauugcaacaac

SEQ ID NO: 514400 - RNA, 23 nt, Artificial Sequence
  Synthetic
aauaaaaaagcaauugcaacaac

SEQ ID NO: 514401 - RNA, 24 nt, Artificial Sequence
  Synthetic
caauaaaaaagcaauugcaacaac

SEQ ID NO: 514402 - RNA, 18 nt, Artificial Sequence
  Synthetic
cacauuaacaucaacaac

SEQ ID NO: 514403 - RNA, 19 nt, Artificial Sequence
  Synthetic
acacauuaacaucaacaac

SEQ ID NO: 514404 - RNA, 20 nt, Artificial Sequence
  Synthetic
gacacauuaacaucaacaac

SEQ ID NO: 514405 - RNA, 21 nt, Artificial Sequence
  Synthetic
agacacauuaacaucaacaac

SEQ ID NO: 514406 - RNA, 22 nt, Artificial Sequence
  Synthetic
aagacacauuaacaucaacaac

SEQ ID NO: 514407 - RNA, 23 nt, Artificial Sequence
  Synthetic
caagacacauuaacaucaacaac

SEQ ID NO: 514408 - RNA, 24 nt, Artificial Sequence
  Synthetic
acaagacacauuaacaucaacaac

SEQ ID NO: 514409 - RNA, 18 nt, Artificial Sequence
  Synthetic
agaaccaagaucaacaac

SEQ ID NO: 514410 - RNA, 19 nt, Artificial Sequence
  Synthetic
cagaaccaagaucaacaac

SEQ ID NO: 514411 - RNA, 20 nt, Artificial Sequence
  Synthetic
ucagaaccaagaucaacaac

SEQ ID NO: 514412 - RNA, 21 nt, Artificial Sequence
  Synthetic
gucagaaccaagaucaacaac

SEQ ID NO: 514413 - RNA, 22 nt, Artificial Sequence
  Synthetic
ugucagaaccaagaucaacaac

SEQ ID NO: 514414 - RNA, 23 nt, Artificial Sequence
  Synthetic
gugucagaaccaagaucaacaac

SEQ ID NO: 514415 - RNA, 24 nt, Artificial Sequence
  Synthetic
ugugucagaaccaagaucaacaac

SEQ ID NO: 514416 - RNA, 18 nt, Artificial Sequence
  Synthetic
uuucagauagucaacaac

SEQ ID NO: 514417 - RNA, 19 nt, Artificial Sequence
  Synthetic
guuucagauagucaacaac

SEQ ID NO: 514418 - RNA, 20 nt, Artificial Sequence
  Synthetic
uguuucagauagucaacaac

SEQ ID NO: 514419 - RNA, 21 nt, Artificial Sequence
  Synthetic
uuguuucagauagucaacaac

SEQ ID NO: 514420 - RNA, 22 nt, Artificial Sequence
  Synthetic
auuguuucagauagucaacaac

SEQ ID NO: 514421 - RNA, 23 nt, Artificial Sequence
  Synthetic
cauuguuucagauagucaacaac

SEQ ID NO: 514422 - RNA, 24 nt, Artificial Sequence
  Synthetic
ucauuguuucagauagucaacaac

SEQ ID NO: 514423 - RNA, 18 nt, Artificial Sequence
  Synthetic
auggaaucaugacacaac

SEQ ID NO: 514424 - RNA, 19 nt, Artificial Sequence
  Synthetic
cauggaaucaugacacaac

SEQ ID NO: 514425 - RNA, 20 nt, Artificial Sequence
  Synthetic
ucauggaaucaugacacaac

SEQ ID NO: 514426 - RNA, 21 nt, Artificial Sequence
  Synthetic
aucauggaaucaugacacaac

SEQ ID NO: 514427 - RNA, 22 nt, Artificial Sequence
  Synthetic
caucauggaaucaugacacaac

SEQ ID NO: 514428 - RNA, 23 nt, Artificial Sequence
  Synthetic
ccaucauggaaucaugacacaac

SEQ ID NO: 514429 - RNA, 24 nt, Artificial Sequence
  Synthetic
uccaucauggaaucaugacacaac

SEQ ID NO: 514430 - RNA, 18 nt, Artificial Sequence
  Synthetic
gugccaagaauacacaac

SEQ ID NO: 514431 - RNA, 19 nt, Artificial Sequence
  Synthetic
ggugccaagaauacacaac

SEQ ID NO: 514432 - RNA, 20 nt, Artificial Sequence
  Synthetic
gggugccaagaauacacaac

SEQ ID NO: 514433 - RNA, 21 nt, Artificial Sequence
  Synthetic
ggggugccaagaauacacaac

SEQ ID NO: 514434 - RNA, 22 nt, Artificial Sequence
  Synthetic
aggggugccaagaauacacaac

SEQ ID NO: 514435 - RNA, 23 nt, Artificial Sequence
  Synthetic
uaggggugccaagaauacacaac

SEQ ID NO: 514436 - RNA, 24 nt, Artificial Sequence
  Synthetic
auaggggugccaagaauacacaac

SEQ ID NO: 514437 - RNA, 18 nt, Artificial Sequence
  Synthetic
uggaaacauaaccacaac

SEQ ID NO: 514438 - RNA, 19 nt, Artificial Sequence
  Synthetic
guggaaacauaaccacaac

SEQ ID NO: 514439 - RNA, 20 nt, Artificial Sequence
  Synthetic
aguggaaacauaaccacaac

SEQ ID NO: 514440 - RNA, 21 nt, Artificial Sequence
  Synthetic
caguggaaacauaaccacaac

SEQ ID NO: 514441 - RNA, 22 nt, Artificial Sequence
  Synthetic
acaguggaaacauaaccacaac

SEQ ID NO: 514442 - RNA, 23 nt, Artificial Sequence
  Synthetic
aacaguggaaacauaaccacaac

SEQ ID NO: 514443 - RNA, 24 nt, Artificial Sequence
  Synthetic
caacaguggaaacauaaccacaac

SEQ ID NO: 514444 - RNA, 18 nt, Artificial Sequence
  Synthetic
uugaauuuucaccacaac

SEQ ID NO: 514445 - RNA, 19 nt, Artificial Sequence
  Synthetic
auugaauuuucaccacaac

SEQ ID NO: 514446 - RNA, 20 nt, Artificial Sequence
  Synthetic
cauugaauuuucaccacaac

SEQ ID NO: 514447 - RNA, 21 nt, Artificial Sequence
  Synthetic
ucauugaauuuucaccacaac

SEQ ID NO: 514448 - RNA, 22 nt, Artificial Sequence
  Synthetic
cucauugaauuuucaccacaac

SEQ ID NO: 514449 - RNA, 23 nt, Artificial Sequence
  Synthetic
ccucauugaauuuucaccacaac

SEQ ID NO: 514450 - RNA, 24 nt, Artificial Sequence
  Synthetic
accucauugaauuuucaccacaac

SEQ ID NO: 514451 - RNA, 18 nt, Artificial Sequence
  Synthetic
acuauuugauagcacaac

SEQ ID NO: 514452 - RNA, 19 nt, Artificial Sequence
  Synthetic
uacuauuugauagcacaac

SEQ ID NO: 514453 - RNA, 20 nt, Artificial Sequence
  Synthetic
cuacuauuugauagcacaac

SEQ ID NO: 514454 - RNA, 21 nt, Artificial Sequence
  Synthetic
ccuacuauuugauagcacaac

SEQ ID NO: 514455 - RNA, 22 nt, Artificial Sequence
  Synthetic
accuacuauuugauagcacaac

SEQ ID NO: 514456 - RNA, 23 nt, Artificial Sequence
  Synthetic
gaccuacuauuugauagcacaac

SEQ ID NO: 514457 - RNA, 24 nt, Artificial Sequence
  Synthetic
agaccuacuauuugauagcacaac

SEQ ID NO: 514458 - RNA, 18 nt, Artificial Sequence
  Synthetic
aggguccauaugcacaac

SEQ ID NO: 514459 - RNA, 19 nt, Artificial Sequence
  Synthetic
uaggguccauaugcacaac

SEQ ID NO: 514460 - RNA, 20 nt, Artificial Sequence
  Synthetic
uuaggguccauaugcacaac

SEQ ID NO: 514461 - RNA, 21 nt, Artificial Sequence
  Synthetic
uuuaggguccauaugcacaac

SEQ ID NO: 514462 - RNA, 22 nt, Artificial Sequence
  Synthetic
uuuuaggguccauaugcacaac

SEQ ID NO: 514463 - RNA, 23 nt, Artificial Sequence
  Synthetic
guuuuaggguccauaugcacaac

SEQ ID NO: 514464 - RNA, 24 nt, Artificial Sequence
  Synthetic
aguuuuaggguccauaugcacaac

SEQ ID NO: 514465 - RNA, 18 nt, Artificial Sequence
  Synthetic
uucuacucaugucacaac

SEQ ID NO: 514466 - RNA, 19 nt, Artificial Sequence
  Synthetic
auucuacucaugucacaac

SEQ ID NO: 514467 - RNA, 20 nt, Artificial Sequence
  Synthetic
aauucuacucaugucacaac

SEQ ID NO: 514468 - RNA, 21 nt, Artificial Sequence
  Synthetic
aaauucuacucaugucacaac

SEQ ID NO: 514469 - RNA, 22 nt, Artificial Sequence
  Synthetic
uaaauucuacucaugucacaac

SEQ ID NO: 514470 - RNA, 23 nt, Artificial Sequence
  Synthetic
cuaaauucuacucaugucacaac

SEQ ID NO: 514471 - RNA, 24 nt, Artificial Sequence
  Synthetic
ucuaaauucuacucaugucacaac

SEQ ID NO: 514472 - RNA, 18 nt, Artificial Sequence
  Synthetic
cuuguuaacaaagacaac

SEQ ID NO: 514473 - RNA, 19 nt, Artificial Sequence
  Synthetic
acuuguuaacaaagacaac

SEQ ID NO: 514474 - RNA, 20 nt, Artificial Sequence
  Synthetic
cacuuguuaacaaagacaac

SEQ ID NO: 514475 - RNA, 21 nt, Artificial Sequence
  Synthetic
acacuuguuaacaaagacaac

SEQ ID NO: 514476 - RNA, 22 nt, Artificial Sequence
  Synthetic
aacacuuguuaacaaagacaac

SEQ ID NO: 514477 - RNA, 23 nt, Artificial Sequence
  Synthetic
aaacacuuguuaacaaagacaac

SEQ ID NO: 514478 - RNA, 24 nt, Artificial Sequence
  Synthetic
caaacacuuguuaacaaagacaac

SEQ ID NO: 514479 - RNA, 18 nt, Artificial Sequence
  Synthetic
acugaaaagaaagacaac

SEQ ID NO: 514480 - RNA, 19 nt, Artificial Sequence
  Synthetic
aacugaaaagaaagacaac

SEQ ID NO: 514481 - RNA, 20 nt, Artificial Sequence
  Synthetic
aaacugaaaagaaagacaac

SEQ ID NO: 514482 - RNA, 21 nt, Artificial Sequence
  Synthetic
aaaacugaaaagaaagacaac

SEQ ID NO: 514483 - RNA, 22 nt, Artificial Sequence
  Synthetic
uaaaacugaaaagaaagacaac

SEQ ID NO: 514484 - RNA, 23 nt, Artificial Sequence
  Synthetic
uuaaaacugaaaagaaagacaac

SEQ ID NO: 514485 - RNA, 24 nt, Artificial Sequence
  Synthetic
auuaaaacugaaaagaaagacaac

SEQ ID NO: 514486 - RNA, 18 nt, Artificial Sequence
  Synthetic
cacuuccuguaagacaac

SEQ ID NO: 514487 - RNA, 19 nt, Artificial Sequence
  Synthetic
ucacuuccuguaagacaac

SEQ ID NO: 514488 - RNA, 20 nt, Artificial Sequence
  Synthetic
gucacuuccuguaagacaac

SEQ ID NO: 514489 - RNA, 21 nt, Artificial Sequence
  Synthetic
agucacuuccuguaagacaac

SEQ ID NO: 514490 - RNA, 22 nt, Artificial Sequence
  Synthetic
uagucacuuccuguaagacaac

SEQ ID NO: 514491 - RNA, 23 nt, Artificial Sequence
  Synthetic
uuagucacuuccuguaagacaac

SEQ ID NO: 514492 - RNA, 24 nt, Artificial Sequence
  Synthetic
uuuagucacuuccuguaagacaac

SEQ ID NO: 514493 - RNA, 18 nt, Artificial Sequence
  Synthetic
aagaaucuguaagacaac

SEQ ID NO: 514494 - RNA, 19 nt, Artificial Sequence
  Synthetic
aaagaaucuguaagacaac

SEQ ID NO: 514495 - RNA, 20 nt, Artificial Sequence
  Synthetic
caaagaaucuguaagacaac

SEQ ID NO: 514496 - RNA, 21 nt, Artificial Sequence
  Synthetic
acaaagaaucuguaagacaac

SEQ ID NO: 514497 - RNA, 22 nt, Artificial Sequence
  Synthetic
aacaaagaaucuguaagacaac

SEQ ID NO: 514498 - RNA, 23 nt, Artificial Sequence
  Synthetic
gaacaaagaaucuguaagacaac

SEQ ID NO: 514499 - RNA, 24 nt, Artificial Sequence
  Synthetic
ggaacaaagaaucuguaagacaac

SEQ ID NO: 514500 - RNA, 18 nt, Artificial Sequence
  Synthetic
ggcuugguaccagacaac

SEQ ID NO: 514501 - RNA, 19 nt, Artificial Sequence
  Synthetic
gggcuugguaccagacaac

SEQ ID NO: 514502 - RNA, 20 nt, Artificial Sequence
  Synthetic
agggcuugguaccagacaac

SEQ ID NO: 514503 - RNA, 21 nt, Artificial Sequence
  Synthetic
uagggcuugguaccagacaac

SEQ ID NO: 514504 - RNA, 22 nt, Artificial Sequence
  Synthetic
cuagggcuugguaccagacaac

SEQ ID NO: 514505 - RNA, 23 nt, Artificial Sequence
  Synthetic
ccuagggcuugguaccagacaac

SEQ ID NO: 514506 - RNA, 24 nt, Artificial Sequence
  Synthetic
cccuagggcuugguaccagacaac

SEQ ID NO: 514507 - RNA, 18 nt, Artificial Sequence
  Synthetic
uggucaaauguagacaac

SEQ ID NO: 514508 - RNA, 19 nt, Artificial Sequence
  Synthetic
cuggucaaauguagacaac

SEQ ID NO: 514509 - RNA, 20 nt, Artificial Sequence
  Synthetic
ucuggucaaauguagacaac

SEQ ID NO: 514510 - RNA, 21 nt, Artificial Sequence
  Synthetic
aucuggucaaauguagacaac

SEQ ID NO: 514511 - RNA, 22 nt, Artificial Sequence
  Synthetic
gaucuggucaaauguagacaac

SEQ ID NO: 514512 - RNA, 23 nt, Artificial Sequence
  Synthetic
agaucuggucaaauguagacaac

SEQ ID NO: 514513 - RNA, 24 nt, Artificial Sequence
  Synthetic
aagaucuggucaaauguagacaac

SEQ ID NO: 514514 - RNA, 18 nt, Artificial Sequence
  Synthetic
uuuuaucacaaggacaac

SEQ ID NO: 514515 - RNA, 19 nt, Artificial Sequence
  Synthetic
auuuuaucacaaggacaac

SEQ ID NO: 514516 - RNA, 20 nt, Artificial Sequence
  Synthetic
aauuuuaucacaaggacaac

SEQ ID NO: 514517 - RNA, 21 nt, Artificial Sequence
  Synthetic
gaauuuuaucacaaggacaac

SEQ ID NO: 514518 - RNA, 22 nt, Artificial Sequence
  Synthetic
ugaauuuuaucacaaggacaac

SEQ ID NO: 514519 - RNA, 23 nt, Artificial Sequence
  Synthetic
uugaauuuuaucacaaggacaac

SEQ ID NO: 514520 - RNA, 24 nt, Artificial Sequence
  Synthetic
uuugaauuuuaucacaaggacaac

SEQ ID NO: 514521 - RNA, 18 nt, Artificial Sequence
  Synthetic
cacuccaacauggacaac

SEQ ID NO: 514522 - RNA, 19 nt, Artificial Sequence
  Synthetic
acacuccaacauggacaac

SEQ ID NO: 514523 - RNA, 20 nt, Artificial Sequence
  Synthetic
uacacuccaacauggacaac

SEQ ID NO: 514524 - RNA, 21 nt, Artificial Sequence
  Synthetic
uuacacuccaacauggacaac

SEQ ID NO: 514525 - RNA, 22 nt, Artificial Sequence
  Synthetic
auuacacuccaacauggacaac

SEQ ID NO: 514526 - RNA, 23 nt, Artificial Sequence
  Synthetic
cauuacacuccaacauggacaac

SEQ ID NO: 514527 - RNA, 24 nt, Artificial Sequence
  Synthetic
ccauuacacuccaacauggacaac

SEQ ID NO: 514528 - RNA, 18 nt, Artificial Sequence
  Synthetic
auuaaaacaaaugacaac

SEQ ID NO: 514529 - RNA, 19 nt, Artificial Sequence
  Synthetic
aauuaaaacaaaugacaac

SEQ ID NO: 514530 - RNA, 20 nt, Artificial Sequence
  Synthetic
aaauuaaaacaaaugacaac

SEQ ID NO: 514531 - RNA, 21 nt, Artificial Sequence
  Synthetic
aaaauuaaaacaaaugacaac

SEQ ID NO: 514532 - RNA, 22 nt, Artificial Sequence
  Synthetic
caaaauuaaaacaaaugacaac

SEQ ID NO: 514533 - RNA, 23 nt, Artificial Sequence
  Synthetic
ucaaaauuaaaacaaaugacaac

SEQ ID NO: 514534 - RNA, 24 nt, Artificial Sequence
  Synthetic
aucaaaauuaaaacaaaugacaac

SEQ ID NO: 514535 - RNA, 18 nt, Artificial Sequence
  Synthetic
uuugacaagaaugacaac

SEQ ID NO: 514536 - RNA, 19 nt, Artificial Sequence
  Synthetic
uuuugacaagaaugacaac

SEQ ID NO: 514537 - RNA, 20 nt, Artificial Sequence
  Synthetic
guuuugacaagaaugacaac

SEQ ID NO: 514538 - RNA, 21 nt, Artificial Sequence
  Synthetic
uguuuugacaagaaugacaac

SEQ ID NO: 514539 - RNA, 22 nt, Artificial Sequence
  Synthetic
cuguuuugacaagaaugacaac

SEQ ID NO: 514540 - RNA, 23 nt, Artificial Sequence
  Synthetic
ccuguuuugacaagaaugacaac

SEQ ID NO: 514541 - RNA, 24 nt, Artificial Sequence
  Synthetic
accuguuuugacaagaaugacaac

SEQ ID NO: 514542 - RNA, 18 nt, Artificial Sequence
  Synthetic
agacuaauuccugacaac

SEQ ID NO: 514543 - RNA, 19 nt, Artificial Sequence
  Synthetic
cagacuaauuccugacaac

SEQ ID NO: 514544 - RNA, 20 nt, Artificial Sequence
  Synthetic
acagacuaauuccugacaac

SEQ ID NO: 514545 - RNA, 21 nt, Artificial Sequence
  Synthetic
uacagacuaauuccugacaac

SEQ ID NO: 514546 - RNA, 22 nt, Artificial Sequence
  Synthetic
uuacagacuaauuccugacaac

SEQ ID NO: 514547 - RNA, 23 nt, Artificial Sequence
  Synthetic
uuuacagacuaauuccugacaac

SEQ ID NO: 514548 - RNA, 24 nt, Artificial Sequence
  Synthetic
guuuacagacuaauuccugacaac

SEQ ID NO: 514549 - RNA, 18 nt, Artificial Sequence
  Synthetic
gcccagagaugugacaac

SEQ ID NO: 514550 - RNA, 19 nt, Artificial Sequence
  Synthetic
ugcccagagaugugacaac

SEQ ID NO: 514551 - RNA, 20 nt, Artificial Sequence
  Synthetic
augcccagagaugugacaac

SEQ ID NO: 514552 - RNA, 21 nt, Artificial Sequence
  Synthetic
aaugcccagagaugugacaac

SEQ ID NO: 514553 - RNA, 22 nt, Artificial Sequence
  Synthetic
uaaugcccagagaugugacaac

SEQ ID NO: 514554 - RNA, 23 nt, Artificial Sequence
  Synthetic
uuaaugcccagagaugugacaac

SEQ ID NO: 514555 - RNA, 24 nt, Artificial Sequence
  Synthetic
guuaaugcccagagaugugacaac

SEQ ID NO: 514556 - RNA, 18 nt, Artificial Sequence
  Synthetic
agaugcauccaauacaac

SEQ ID NO: 514557 - RNA, 19 nt, Artificial Sequence
  Synthetic
gagaugcauccaauacaac

SEQ ID NO: 514558 - RNA, 20 nt, Artificial Sequence
  Synthetic
agagaugcauccaauacaac

SEQ ID NO: 514559 - RNA, 21 nt, Artificial Sequence
  Synthetic
uagagaugcauccaauacaac

SEQ ID NO: 514560 - RNA, 22 nt, Artificial Sequence
  Synthetic
auagagaugcauccaauacaac

SEQ ID NO: 514561 - RNA, 23 nt, Artificial Sequence
  Synthetic
gauagagaugcauccaauacaac

SEQ ID NO: 514562 - RNA, 24 nt, Artificial Sequence
  Synthetic
ggauagagaugcauccaauacaac

SEQ ID NO: 514563 - RNA, 18 nt, Artificial Sequence
  Synthetic
cauaaguaauaauacaac

SEQ ID NO: 514564 - RNA, 19 nt, Artificial Sequence
  Synthetic
ucauaaguaauaauacaac

SEQ ID NO: 514565 - RNA, 20 nt, Artificial Sequence
  Synthetic
uucauaaguaauaauacaac

SEQ ID NO: 514566 - RNA, 21 nt, Artificial Sequence
  Synthetic
guucauaaguaauaauacaac

SEQ ID NO: 514567 - RNA, 22 nt, Artificial Sequence
  Synthetic
uguucauaaguaauaauacaac

SEQ ID NO: 514568 - RNA, 23 nt, Artificial Sequence
  Synthetic
guguucauaaguaauaauacaac

SEQ ID NO: 514569 - RNA, 24 nt, Artificial Sequence
  Synthetic
gguguucauaaguaauaauacaac

SEQ ID NO: 514570 - RNA, 18 nt, Artificial Sequence
  Synthetic
cauaacuccugauacaac

SEQ ID NO: 514571 - RNA, 19 nt, Artificial Sequence
  Synthetic
ccauaacuccugauacaac

SEQ ID NO: 514572 - RNA, 20 nt, Artificial Sequence
  Synthetic
accauaacuccugauacaac

SEQ ID NO: 514573 - RNA, 21 nt, Artificial Sequence
  Synthetic
uaccauaacuccugauacaac

SEQ ID NO: 514574 - RNA, 22 nt, Artificial Sequence
  Synthetic
uuaccauaacuccugauacaac

SEQ ID NO: 514575 - RNA, 23 nt, Artificial Sequence
  Synthetic
cuuaccauaacuccugauacaac

SEQ ID NO: 514576 - RNA, 24 nt, Artificial Sequence
  Synthetic
ucuuaccauaacuccugauacaac

SEQ ID NO: 514577 - RNA, 18 nt, Artificial Sequence
  Synthetic
uucaauuagaaguacaac

SEQ ID NO: 514578 - RNA, 19 nt, Artificial Sequence
  Synthetic
uuucaauuagaaguacaac

SEQ ID NO: 514579 - RNA, 20 nt, Artificial Sequence
  Synthetic
uuuucaauuagaaguacaac

SEQ ID NO: 514580 - RNA, 21 nt, Artificial Sequence
  Synthetic
uuuuucaauuagaaguacaac

SEQ ID NO: 514581 - RNA, 22 nt, Artificial Sequence
  Synthetic
uuuuuucaauuagaaguacaac

SEQ ID NO: 514582 - RNA, 23 nt, Artificial Sequence
  Synthetic
uuuuuuucaauuagaaguacaac

SEQ ID NO: 514583 - RNA, 24 nt, Artificial Sequence
  Synthetic
auuuuuuucaauuagaaguacaac

SEQ ID NO: 514584 - RNA, 18 nt, Artificial Sequence
  Synthetic
caaacauguuaguacaac

SEQ ID NO: 514585 - RNA, 19 nt, Artificial Sequence
  Synthetic
ccaaacauguuaguacaac

SEQ ID NO: 514586 - RNA, 20 nt, Artificial Sequence
  Synthetic
uccaaacauguuaguacaac

SEQ ID NO: 514587 - RNA, 21 nt, Artificial Sequence
  Synthetic
auccaaacauguuaguacaac

SEQ ID NO: 514588 - RNA, 22 nt, Artificial Sequence
  Synthetic
uauccaaacauguuaguacaac

SEQ ID NO: 514589 - RNA, 23 nt, Artificial Sequence
  Synthetic
auauccaaacauguuaguacaac

SEQ ID NO: 514590 - RNA, 24 nt, Artificial Sequence
  Synthetic
aauauccaaacauguuaguacaac

SEQ ID NO: 514591 - RNA, 18 nt, Artificial Sequence
  Synthetic
caauggcaaauguacaac

SEQ ID NO: 514592 - RNA, 19 nt, Artificial Sequence
  Synthetic
ucaauggcaaauguacaac

SEQ ID NO: 514593 - RNA, 20 nt, Artificial Sequence
  Synthetic
gucaauggcaaauguacaac

SEQ ID NO: 514594 - RNA, 21 nt, Artificial Sequence
  Synthetic
cgucaauggcaaauguacaac

SEQ ID NO: 514595 - RNA, 22 nt, Artificial Sequence
  Synthetic
acgucaauggcaaauguacaac

SEQ ID NO: 514596 - RNA, 23 nt, Artificial Sequence
  Synthetic
cacgucaauggcaaauguacaac

SEQ ID NO: 514597 - RNA, 24 nt, Artificial Sequence
  Synthetic
ccacgucaauggcaaauguacaac

SEQ ID NO: 514598 - RNA, 18 nt, Artificial Sequence
  Synthetic
uugaacacacuguacaac

SEQ ID NO: 514599 - RNA, 19 nt, Artificial Sequence
  Synthetic
auugaacacacuguacaac

SEQ ID NO: 514600 - RNA, 20 nt, Artificial Sequence
  Synthetic
aauugaacacacuguacaac

SEQ ID NO: 514601 - RNA, 21 nt, Artificial Sequence
  Synthetic
aaauugaacacacuguacaac

SEQ ID NO: 514602 - RNA, 22 nt, Artificial Sequence
  Synthetic
aaaauugaacacacuguacaac

SEQ ID NO: 514603 - RNA, 23 nt, Artificial Sequence
  Synthetic
aaaaauugaacacacuguacaac

SEQ ID NO: 514604 - RNA, 24 nt, Artificial Sequence
  Synthetic
uaaaaauugaacacacuguacaac

SEQ ID NO: 514605 - RNA, 18 nt, Artificial Sequence
  Synthetic
auguucuuugaaaccaac

SEQ ID NO: 514606 - RNA, 19 nt, Artificial Sequence
  Synthetic
gauguucuuugaaaccaac

SEQ ID NO: 514607 - RNA, 20 nt, Artificial Sequence
  Synthetic
agauguucuuugaaaccaac

SEQ ID NO: 514608 - RNA, 21 nt, Artificial Sequence
  Synthetic
aagauguucuuugaaaccaac

SEQ ID NO: 514609 - RNA, 22 nt, Artificial Sequence
  Synthetic
aaagauguucuuugaaaccaac

SEQ ID NO: 514610 - RNA, 23 nt, Artificial Sequence
  Synthetic
uaaagauguucuuugaaaccaac

SEQ ID NO: 514611 - RNA, 24 nt, Artificial Sequence
  Synthetic
auaaagauguucuuugaaaccaac

SEQ ID NO: 514612 - RNA, 18 nt, Artificial Sequence
  Synthetic
uugggugccuaaaccaac

SEQ ID NO: 514613 - RNA, 19 nt, Artificial Sequence
  Synthetic
cuugggugccuaaaccaac

SEQ ID NO: 514614 - RNA, 20 nt, Artificial Sequence
  Synthetic
ucuugggugccuaaaccaac

SEQ ID NO: 514615 - RNA, 21 nt, Artificial Sequence
  Synthetic
cucuugggugccuaaaccaac

SEQ ID NO: 514616 - RNA, 22 nt, Artificial Sequence
  Synthetic
gcucuugggugccuaaaccaac

SEQ ID NO: 514617 - RNA, 23 nt, Artificial Sequence
  Synthetic
ggcucuugggugccuaaaccaac

SEQ ID NO: 514618 - RNA, 24 nt, Artificial Sequence
  Synthetic
gggcucuugggugccuaaaccaac

SEQ ID NO: 514619 - RNA, 18 nt, Artificial Sequence
  Synthetic
ccuaguuucuaaaccaac

SEQ ID NO: 514620 - RNA, 19 nt, Artificial Sequence
  Synthetic
accuaguuucuaaaccaac

SEQ ID NO: 514621 - RNA, 20 nt, Artificial Sequence
  Synthetic
aaccuaguuucuaaaccaac

SEQ ID NO: 514622 - RNA, 21 nt, Artificial Sequence
  Synthetic
gaaccuaguuucuaaaccaac

SEQ ID NO: 514623 - RNA, 22 nt, Artificial Sequence
  Synthetic
ggaaccuaguuucuaaaccaac

SEQ ID NO: 514624 - RNA, 23 nt, Artificial Sequence
  Synthetic
aggaaccuaguuucuaaaccaac

SEQ ID NO: 514625 - RNA, 24 nt, Artificial Sequence
  Synthetic
gaggaaccuaguuucuaaaccaac

SEQ ID NO: 514626 - RNA, 18 nt, Artificial Sequence
  Synthetic
ccuucaauacccaccaac

SEQ ID NO: 514627 - RNA, 19 nt, Artificial Sequence
  Synthetic
cccuucaauacccaccaac

SEQ ID NO: 514628 - RNA, 20 nt, Artificial Sequence
  Synthetic
ucccuucaauacccaccaac

SEQ ID NO: 514629 - RNA, 21 nt, Artificial Sequence
  Synthetic
cucccuucaauacccaccaac

SEQ ID NO: 514630 - RNA, 22 nt, Artificial Sequence
  Synthetic
acucccuucaauacccaccaac

SEQ ID NO: 514631 - RNA, 23 nt, Artificial Sequence
  Synthetic
uacucccuucaauacccaccaac

SEQ ID NO: 514632 - RNA, 24 nt, Artificial Sequence
  Synthetic
auacucccuucaauacccaccaac

SEQ ID NO: 514633 - RNA, 18 nt, Artificial Sequence
  Synthetic
agaaaaauauucaccaac

SEQ ID NO: 514634 - RNA, 19 nt, Artificial Sequence
  Synthetic
cagaaaaauauucaccaac

SEQ ID NO: 514635 - RNA, 20 nt, Artificial Sequence
  Synthetic
gcagaaaaauauucaccaac

SEQ ID NO: 514636 - RNA, 21 nt, Artificial Sequence
  Synthetic
agcagaaaaauauucaccaac

SEQ ID NO: 514637 - RNA, 22 nt, Artificial Sequence
  Synthetic
uagcagaaaaauauucaccaac

SEQ ID NO: 514638 - RNA, 23 nt, Artificial Sequence
  Synthetic
uuagcagaaaaauauucaccaac

SEQ ID NO: 514639 - RNA, 24 nt, Artificial Sequence
  Synthetic
uuuagcagaaaaauauucaccaac

SEQ ID NO: 514640 - RNA, 18 nt, Artificial Sequence
  Synthetic
gagaccagccugaccaac

SEQ ID NO: 514641 - RNA, 19 nt, Artificial Sequence
  Synthetic
cgagaccagccugaccaac

SEQ ID NO: 514642 - RNA, 20 nt, Artificial Sequence
  Synthetic
ucgagaccagccugaccaac

SEQ ID NO: 514643 - RNA, 21 nt, Artificial Sequence
  Synthetic
cucgagaccagccugaccaac

SEQ ID NO: 514644 - RNA, 22 nt, Artificial Sequence
  Synthetic
gcucgagaccagccugaccaac

SEQ ID NO: 514645 - RNA, 23 nt, Artificial Sequence
  Synthetic
agcucgagaccagccugaccaac

SEQ ID NO: 514646 - RNA, 24 nt, Artificial Sequence
  Synthetic
gagcucgagaccagccugaccaac

SEQ ID NO: 514647 - RNA, 18 nt, Artificial Sequence
  Synthetic
gagaccagcuugaccaac

SEQ ID NO: 514648 - RNA, 19 nt, Artificial Sequence
  Synthetic
cgagaccagcuugaccaac

SEQ ID NO: 514649 - RNA, 20 nt, Artificial Sequence
  Synthetic
ucgagaccagcuugaccaac

SEQ ID NO: 514650 - RNA, 21 nt, Artificial Sequence
  Synthetic
uucgagaccagcuugaccaac

SEQ ID NO: 514651 - RNA, 22 nt, Artificial Sequence
  Synthetic
guucgagaccagcuugaccaac

SEQ ID NO: 514652 - RNA, 23 nt, Artificial Sequence
  Synthetic
aguucgagaccagcuugaccaac

SEQ ID NO: 514653 - RNA, 24 nt, Artificial Sequence
  Synthetic
gaguucgagaccagcuugaccaac

SEQ ID NO: 514654 - RNA, 18 nt, Artificial Sequence
  Synthetic
ugucauuaaaauaccaac

SEQ ID NO: 514655 - RNA, 19 nt, Artificial Sequence
  Synthetic
gugucauuaaaauaccaac

SEQ ID NO: 514656 - RNA, 20 nt, Artificial Sequence
  Synthetic
agugucauuaaaauaccaac

SEQ ID NO: 514657 - RNA, 21 nt, Artificial Sequence
  Synthetic
cagugucauuaaaauaccaac

SEQ ID NO: 514658 - RNA, 22 nt, Artificial Sequence
  Synthetic
ccagugucauuaaaauaccaac

SEQ ID NO: 514659 - RNA, 23 nt, Artificial Sequence
  Synthetic
accagugucauuaaaauaccaac

SEQ ID NO: 514660 - RNA, 24 nt, Artificial Sequence
  Synthetic
uaccagugucauuaaaauaccaac

SEQ ID NO: 514661 - RNA, 18 nt, Artificial Sequence
  Synthetic
aucagauaacuuaccaac

SEQ ID NO: 514662 - RNA, 19 nt, Artificial Sequence
  Synthetic
uaucagauaacuuaccaac

SEQ ID NO: 514663 - RNA, 20 nt, Artificial Sequence
  Synthetic
uuaucagauaacuuaccaac

SEQ ID NO: 514664 - RNA, 21 nt, Artificial Sequence
  Synthetic
auuaucagauaacuuaccaac

SEQ ID NO: 514665 - RNA, 22 nt, Artificial Sequence
  Synthetic
aauuaucagauaacuuaccaac

SEQ ID NO: 514666 - RNA, 23 nt, Artificial Sequence
  Synthetic
gaauuaucagauaacuuaccaac

SEQ ID NO: 514667 - RNA, 24 nt, Artificial Sequence
  Synthetic
agaauuaucagauaacuuaccaac

SEQ ID NO: 514668 - RNA, 18 nt, Artificial Sequence
  Synthetic
gugaacauaguacccaac

SEQ ID NO: 514669 - RNA, 19 nt, Artificial Sequence
  Synthetic
agugaacauaguacccaac

SEQ ID NO: 514670 - RNA, 20 nt, Artificial Sequence
  Synthetic
uagugaacauaguacccaac

SEQ ID NO: 514671 - RNA, 21 nt, Artificial Sequence
  Synthetic
auagugaacauaguacccaac

SEQ ID NO: 514672 - RNA, 22 nt, Artificial Sequence
  Synthetic
gauagugaacauaguacccaac

SEQ ID NO: 514673 - RNA, 23 nt, Artificial Sequence
  Synthetic
agauagugaacauaguacccaac

SEQ ID NO: 514674 - RNA, 24 nt, Artificial Sequence
  Synthetic
cagauagugaacauaguacccaac

SEQ ID NO: 514675 - RNA, 18 nt, Artificial Sequence
  Synthetic
ggucaugggaaccccaac

SEQ ID NO: 514676 - RNA, 19 nt, Artificial Sequence
  Synthetic
gggucaugggaaccccaac

SEQ ID NO: 514677 - RNA, 20 nt, Artificial Sequence
  Synthetic
agggucaugggaaccccaac

SEQ ID NO: 514678 - RNA, 21 nt, Artificial Sequence
  Synthetic
gagggucaugggaaccccaac

SEQ ID NO: 514679 - RNA, 22 nt, Artificial Sequence
  Synthetic
agagggucaugggaaccccaac

SEQ ID NO: 514680 - RNA, 23 nt, Artificial Sequence
  Synthetic
gagagggucaugggaaccccaac

SEQ ID NO: 514681 - RNA, 24 nt, Artificial Sequence
  Synthetic
agagagggucaugggaaccccaac

SEQ ID NO: 514682 - RNA, 18 nt, Artificial Sequence
  Synthetic
cacccccgccaccccaac

SEQ ID NO: 514683 - RNA, 19 nt, Artificial Sequence
  Synthetic
ccacccccgccaccccaac

SEQ ID NO: 514684 - RNA, 20 nt, Artificial Sequence
  Synthetic
cccacccccgccaccccaac

SEQ ID NO: 514685 - RNA, 21 nt, Artificial Sequence
  Synthetic
ccccacccccgccaccccaac

SEQ ID NO: 514686 - RNA, 22 nt, Artificial Sequence
  Synthetic
cccccacccccgccaccccaac

SEQ ID NO: 514687 - RNA, 23 nt, Artificial Sequence
  Synthetic
ccccccacccccgccaccccaac

SEQ ID NO: 514688 - RNA, 24 nt, Artificial Sequence
  Synthetic
accccccacccccgccaccccaac

SEQ ID NO: 514689 - RNA, 18 nt, Artificial Sequence
  Synthetic
accccccccccccccaac

SEQ ID NO: 514690 - RNA, 19 nt, Artificial Sequence
  Synthetic
caccccccccccccccaac

SEQ ID NO: 514691 - RNA, 20 nt, Artificial Sequence
  Synthetic
acaccccccccccccccaac

SEQ ID NO: 514692 - RNA, 21 nt, Artificial Sequence
  Synthetic
aacaccccccccccccccaac

SEQ ID NO: 514693 - RNA, 22 nt, Artificial Sequence
  Synthetic
aaacaccccccccccccccaac

SEQ ID NO: 514694 - RNA, 23 nt, Artificial Sequence
  Synthetic
caaacaccccccccccccccaac

SEQ ID NO: 514695 - RNA, 24 nt, Artificial Sequence
  Synthetic
ucaaacaccccccccccccccaac

SEQ ID NO: 514696 - RNA, 18 nt, Artificial Sequence
  Synthetic
aaagauuguuuccccaac

SEQ ID NO: 514697 - RNA, 19 nt, Artificial Sequence
  Synthetic
aaaagauuguuuccccaac

SEQ ID NO: 514698 - RNA, 20 nt, Artificial Sequence
  Synthetic
caaaagauuguuuccccaac

SEQ ID NO: 514699 - RNA, 21 nt, Artificial Sequence
  Synthetic
ccaaaagauuguuuccccaac

SEQ ID NO: 514700 - RNA, 22 nt, Artificial Sequence
  Synthetic
cccaaaagauuguuuccccaac

SEQ ID NO: 514701 - RNA, 23 nt, Artificial Sequence
  Synthetic
ccccaaaagauuguuuccccaac

SEQ ID NO: 514702 - RNA, 24 nt, Artificial Sequence
  Synthetic
uccccaaaagauuguuuccccaac

SEQ ID NO: 514703 - RNA, 18 nt, Artificial Sequence
  Synthetic
uuuaguucaaaagccaac

SEQ ID NO: 514704 - RNA, 19 nt, Artificial Sequence
  Synthetic
auuuaguucaaaagccaac

SEQ ID NO: 514705 - RNA, 20 nt, Artificial Sequence
  Synthetic
aauuuaguucaaaagccaac

SEQ ID NO: 514706 - RNA, 21 nt, Artificial Sequence
  Synthetic
aaauuuaguucaaaagccaac

SEQ ID NO: 514707 - RNA, 22 nt, Artificial Sequence
  Synthetic
aaaauuuaguucaaaagccaac

SEQ ID NO: 514708 - RNA, 23 nt, Artificial Sequence
  Synthetic
uaaaauuuaguucaaaagccaac

SEQ ID NO: 514709 - RNA, 24 nt, Artificial Sequence
  Synthetic
uuaaaauuuaguucaaaagccaac

SEQ ID NO: 514710 - RNA, 18 nt, Artificial Sequence
  Synthetic
acguggccaucagccaac

SEQ ID NO: 514711 - RNA, 19 nt, Artificial Sequence
  Synthetic
aacguggccaucagccaac

SEQ ID NO: 514712 - RNA, 20 nt, Artificial Sequence
  Synthetic
aaacguggccaucagccaac

SEQ ID NO: 514713 - RNA, 21 nt, Artificial Sequence
  Synthetic
uaaacguggccaucagccaac

SEQ ID NO: 514714 - RNA, 22 nt, Artificial Sequence
  Synthetic
cuaaacguggccaucagccaac

SEQ ID NO: 514715 - RNA, 23 nt, Artificial Sequence
  Synthetic
acuaaacguggccaucagccaac

SEQ ID NO: 514716 - RNA, 24 nt, Artificial Sequence
  Synthetic
aacuaaacguggccaucagccaac

SEQ ID NO: 514717 - RNA, 18 nt, Artificial Sequence
  Synthetic
ccccaaaccauagccaac

SEQ ID NO: 514718 - RNA, 19 nt, Artificial Sequence
  Synthetic
cccccaaaccauagccaac

SEQ ID NO: 514719 - RNA, 20 nt, Artificial Sequence
  Synthetic
acccccaaaccauagccaac

SEQ ID NO: 514720 - RNA, 21 nt, Artificial Sequence
  Synthetic
aacccccaaaccauagccaac

SEQ ID NO: 514721 - RNA, 22 nt, Artificial Sequence
  Synthetic
aaacccccaaaccauagccaac

SEQ ID NO: 514722 - RNA, 23 nt, Artificial Sequence
  Synthetic
aaaacccccaaaccauagccaac

SEQ ID NO: 514723 - RNA, 24 nt, Artificial Sequence
  Synthetic
caaaacccccaaaccauagccaac

SEQ ID NO: 514724 - RNA, 18 nt, Artificial Sequence
  Synthetic
guuuauguaauggccaac

SEQ ID NO: 514725 - RNA, 19 nt, Artificial Sequence
  Synthetic
gguuuauguaauggccaac

SEQ ID NO: 514726 - RNA, 20 nt, Artificial Sequence
  Synthetic
agguuuauguaauggccaac

SEQ ID NO: 514727 - RNA, 21 nt, Artificial Sequence
  Synthetic
cagguuuauguaauggccaac

SEQ ID NO: 514728 - RNA, 22 nt, Artificial Sequence
  Synthetic
ccagguuuauguaauggccaac

SEQ ID NO: 514729 - RNA, 23 nt, Artificial Sequence
  Synthetic
gccagguuuauguaauggccaac

SEQ ID NO: 514730 - RNA, 24 nt, Artificial Sequence
  Synthetic
ugccagguuuauguaauggccaac

SEQ ID NO: 514731 - RNA, 18 nt, Artificial Sequence
  Synthetic
uugcuuuaaaaugccaac

SEQ ID NO: 514732 - RNA, 19 nt, Artificial Sequence
  Synthetic
auugcuuuaaaaugccaac

SEQ ID NO: 514733 - RNA, 20 nt, Artificial Sequence
  Synthetic
cauugcuuuaaaaugccaac

SEQ ID NO: 514734 - RNA, 21 nt, Artificial Sequence
  Synthetic
ccauugcuuuaaaaugccaac

SEQ ID NO: 514735 - RNA, 22 nt, Artificial Sequence
  Synthetic
gccauugcuuuaaaaugccaac

SEQ ID NO: 514736 - RNA, 23 nt, Artificial Sequence
  Synthetic
ugccauugcuuuaaaaugccaac

SEQ ID NO: 514737 - RNA, 24 nt, Artificial Sequence
  Synthetic
gugccauugcuuuaaaaugccaac

SEQ ID NO: 514738 - RNA, 18 nt, Artificial Sequence
  Synthetic
acuauuaaucaauccaac

SEQ ID NO: 514739 - RNA, 19 nt, Artificial Sequence
  Synthetic
aacuauuaaucaauccaac

SEQ ID NO: 514740 - RNA, 20 nt, Artificial Sequence
  Synthetic
aaacuauuaaucaauccaac

SEQ ID NO: 514741 - RNA, 21 nt, Artificial Sequence
  Synthetic
uaaacuauuaaucaauccaac

SEQ ID NO: 514742 - RNA, 22 nt, Artificial Sequence
  Synthetic
cuaaacuauuaaucaauccaac

SEQ ID NO: 514743 - RNA, 23 nt, Artificial Sequence
  Synthetic
ucuaaacuauuaaucaauccaac

SEQ ID NO: 514744 - RNA, 24 nt, Artificial Sequence
  Synthetic
aucuaaacuauuaaucaauccaac

SEQ ID NO: 514745 - RNA, 18 nt, Artificial Sequence
  Synthetic
gugccauuacacuccaac

SEQ ID NO: 514746 - RNA, 19 nt, Artificial Sequence
  Synthetic
ugugccauuacacuccaac

SEQ ID NO: 514747 - RNA, 20 nt, Artificial Sequence
  Synthetic
uugugccauuacacuccaac

SEQ ID NO: 514748 - RNA, 21 nt, Artificial Sequence
  Synthetic
auugugccauuacacuccaac

SEQ ID NO: 514749 - RNA, 22 nt, Artificial Sequence
  Synthetic
gauugugccauuacacuccaac

SEQ ID NO: 514750 - RNA, 23 nt, Artificial Sequence
  Synthetic
agauugugccauuacacuccaac

SEQ ID NO: 514751 - RNA, 24 nt, Artificial Sequence
  Synthetic
gagauugugccauuacacuccaac

SEQ ID NO: 514752 - RNA, 18 nt, Artificial Sequence
  Synthetic
guaccauuguacuccaac

SEQ ID NO: 514753 - RNA, 19 nt, Artificial Sequence
  Synthetic
uguaccauuguacuccaac

SEQ ID NO: 514754 - RNA, 20 nt, Artificial Sequence
  Synthetic
uuguaccauuguacuccaac

SEQ ID NO: 514755 - RNA, 21 nt, Artificial Sequence
  Synthetic
auuguaccauuguacuccaac

SEQ ID NO: 514756 - RNA, 22 nt, Artificial Sequence
  Synthetic
gauuguaccauuguacuccaac

SEQ ID NO: 514757 - RNA, 23 nt, Artificial Sequence
  Synthetic
agauuguaccauuguacuccaac

SEQ ID NO: 514758 - RNA, 24 nt, Artificial Sequence
  Synthetic
gagauuguaccauuguacuccaac

SEQ ID NO: 514759 - RNA, 18 nt, Artificial Sequence
  Synthetic
uaaaaggauuaguccaac

SEQ ID NO: 514760 - RNA, 19 nt, Artificial Sequence
  Synthetic
auaaaaggauuaguccaac

SEQ ID NO: 514761 - RNA, 20 nt, Artificial Sequence
  Synthetic
gauaaaaggauuaguccaac

SEQ ID NO: 514762 - RNA, 21 nt, Artificial Sequence
  Synthetic
ugauaaaaggauuaguccaac

SEQ ID NO: 514763 - RNA, 22 nt, Artificial Sequence
  Synthetic
augauaaaaggauuaguccaac

SEQ ID NO: 514764 - RNA, 23 nt, Artificial Sequence
  Synthetic
aaugauaaaaggauuaguccaac

SEQ ID NO: 514765 - RNA, 24 nt, Artificial Sequence
  Synthetic
uaaugauaaaaggauuaguccaac

SEQ ID NO: 514766 - RNA, 18 nt, Artificial Sequence
  Synthetic
gaaauuuaaacguccaac

SEQ ID NO: 514767 - RNA, 19 nt, Artificial Sequence
  Synthetic
cgaaauuuaaacguccaac

SEQ ID NO: 514768 - RNA, 20 nt, Artificial Sequence
  Synthetic
ccgaaauuuaaacguccaac

SEQ ID NO: 514769 - RNA, 21 nt, Artificial Sequence
  Synthetic
uccgaaauuuaaacguccaac

SEQ ID NO: 514770 - RNA, 22 nt, Artificial Sequence
  Synthetic
cuccgaaauuuaaacguccaac

SEQ ID NO: 514771 - RNA, 23 nt, Artificial Sequence
  Synthetic
ccuccgaaauuuaaacguccaac

SEQ ID NO: 514772 - RNA, 24 nt, Artificial Sequence
  Synthetic
accuccgaaauuuaaacguccaac

SEQ ID NO: 514773 - RNA, 18 nt, Artificial Sequence
  Synthetic
cucugugauccuuccaac

SEQ ID NO: 514774 - RNA, 19 nt, Artificial Sequence
  Synthetic
gcucugugauccuuccaac

SEQ ID NO: 514775 - RNA, 20 nt, Artificial Sequence
  Synthetic
ugcucugugauccuuccaac

SEQ ID NO: 514776 - RNA, 21 nt, Artificial Sequence
  Synthetic
augcucugugauccuuccaac

SEQ ID NO: 514777 - RNA, 22 nt, Artificial Sequence
  Synthetic
aaugcucugugauccuuccaac

SEQ ID NO: 514778 - RNA, 23 nt, Artificial Sequence
  Synthetic
aaaugcucugugauccuuccaac

SEQ ID NO: 514779 - RNA, 24 nt, Artificial Sequence
  Synthetic
caaaugcucugugauccuuccaac

SEQ ID NO: 514780 - RNA, 18 nt, Artificial Sequence
  Synthetic
auaguauagaaaagcaac

SEQ ID NO: 514781 - RNA, 19 nt, Artificial Sequence
  Synthetic
aauaguauagaaaagcaac

SEQ ID NO: 514782 - RNA, 20 nt, Artificial Sequence
  Synthetic
aaauaguauagaaaagcaac

SEQ ID NO: 514783 - RNA, 21 nt, Artificial Sequence
  Synthetic
aaaauaguauagaaaagcaac

SEQ ID NO: 514784 - RNA, 22 nt, Artificial Sequence
  Synthetic
aaaaauaguauagaaaagcaac

SEQ ID NO: 514785 - RNA, 23 nt, Artificial Sequence
  Synthetic
gaaaaauaguauagaaaagcaac

SEQ ID NO: 514786 - RNA, 24 nt, Artificial Sequence
  Synthetic
ggaaaaauaguauagaaaagcaac

SEQ ID NO: 514787 - RNA, 18 nt, Artificial Sequence
  Synthetic
ggggauauucaaagcaac

SEQ ID NO: 514788 - RNA, 19 nt, Artificial Sequence
  Synthetic
uggggauauucaaagcaac

SEQ ID NO: 514789 - RNA, 20 nt, Artificial Sequence
  Synthetic
auggggauauucaaagcaac

SEQ ID NO: 514790 - RNA, 21 nt, Artificial Sequence
  Synthetic
aauggggauauucaaagcaac

SEQ ID NO: 514791 - RNA, 22 nt, Artificial Sequence
  Synthetic
uaauggggauauucaaagcaac

SEQ ID NO: 514792 - RNA, 23 nt, Artificial Sequence
  Synthetic
cuaauggggauauucaaagcaac

SEQ ID NO: 514793 - RNA, 24 nt, Artificial Sequence
  Synthetic
ucuaauggggauauucaaagcaac

SEQ ID NO: 514794 - RNA, 18 nt, Artificial Sequence
  Synthetic
aauucaaacuaaagcaac

SEQ ID NO: 514795 - RNA, 19 nt, Artificial Sequence
  Synthetic
caauucaaacuaaagcaac

SEQ ID NO: 514796 - RNA, 20 nt, Artificial Sequence
  Synthetic
ucaauucaaacuaaagcaac

SEQ ID NO: 514797 - RNA, 21 nt, Artificial Sequence
  Synthetic
cucaauucaaacuaaagcaac

SEQ ID NO: 514798 - RNA, 22 nt, Artificial Sequence
  Synthetic
acucaauucaaacuaaagcaac

SEQ ID NO: 514799 - RNA, 23 nt, Artificial Sequence
  Synthetic
aacucaauucaaacuaaagcaac

SEQ ID NO: 514800 - RNA, 24 nt, Artificial Sequence
  Synthetic
aaacucaauucaaacuaaagcaac

SEQ ID NO: 514801 - RNA, 18 nt, Artificial Sequence
  Synthetic
cugacaaaaacaagcaac

SEQ ID NO: 514802 - RNA, 19 nt, Artificial Sequence
  Synthetic
ccugacaaaaacaagcaac

SEQ ID NO: 514803 - RNA, 20 nt, Artificial Sequence
  Synthetic
accugacaaaaacaagcaac

SEQ ID NO: 514804 - RNA, 21 nt, Artificial Sequence
  Synthetic
aaccugacaaaaacaagcaac

SEQ ID NO: 514805 - RNA, 22 nt, Artificial Sequence
  Synthetic
aaaccugacaaaaacaagcaac

SEQ ID NO: 514806 - RNA, 23 nt, Artificial Sequence
  Synthetic
caaaccugacaaaaacaagcaac

SEQ ID NO: 514807 - RNA, 24 nt, Artificial Sequence
  Synthetic
acaaaccugacaaaaacaagcaac

SEQ ID NO: 514808 - RNA, 18 nt, Artificial Sequence
  Synthetic
caguuuuacccaagcaac

SEQ ID NO: 514809 - RNA, 19 nt, Artificial Sequence
  Synthetic
acaguuuuacccaagcaac

SEQ ID NO: 514810 - RNA, 20 nt, Artificial Sequence
  Synthetic
uacaguuuuacccaagcaac

SEQ ID NO: 514811 - RNA, 21 nt, Artificial Sequence
  Synthetic
guacaguuuuacccaagcaac

SEQ ID NO: 514812 - RNA, 22 nt, Artificial Sequence
  Synthetic
uguacaguuuuacccaagcaac

SEQ ID NO: 514813 - RNA, 23 nt, Artificial Sequence
  Synthetic
cuguacaguuuuacccaagcaac

SEQ ID NO: 514814 - RNA, 24 nt, Artificial Sequence
  Synthetic
ucuguacaguuuuacccaagcaac

SEQ ID NO: 514815 - RNA, 18 nt, Artificial Sequence
  Synthetic
ccaagauuuggaagcaac

SEQ ID NO: 514816 - RNA, 19 nt, Artificial Sequence
  Synthetic
gccaagauuuggaagcaac

SEQ ID NO: 514817 - RNA, 20 nt, Artificial Sequence
  Synthetic
agccaagauuuggaagcaac

SEQ ID NO: 514818 - RNA, 21 nt, Artificial Sequence
  Synthetic
uagccaagauuuggaagcaac

SEQ ID NO: 514819 - RNA, 22 nt, Artificial Sequence
  Synthetic
auagccaagauuuggaagcaac

SEQ ID NO: 514820 - RNA, 23 nt, Artificial Sequence
  Synthetic
aauagccaagauuuggaagcaac

SEQ ID NO: 514821 - RNA, 24 nt, Artificial Sequence
  Synthetic
uaauagccaagauuuggaagcaac

SEQ ID NO: 514822 - RNA, 18 nt, Artificial Sequence
  Synthetic
aaauuuuauuuaagcaac

SEQ ID NO: 514823 - RNA, 19 nt, Artificial Sequence
  Synthetic
aaaauuuuauuuaagcaac

SEQ ID NO: 514824 - RNA, 20 nt, Artificial Sequence
  Synthetic
caaaauuuuauuuaagcaac

SEQ ID NO: 514825 - RNA, 21 nt, Artificial Sequence
  Synthetic
acaaaauuuuauuuaagcaac

SEQ ID NO: 514826 - RNA, 22 nt, Artificial Sequence
  Synthetic
uacaaaauuuuauuuaagcaac

SEQ ID NO: 514827 - RNA, 23 nt, Artificial Sequence
  Synthetic
auacaaaauuuuauuuaagcaac

SEQ ID NO: 514828 - RNA, 24 nt, Artificial Sequence
  Synthetic
cauacaaaauuuuauuuaagcaac

SEQ ID NO: 514829 - RNA, 18 nt, Artificial Sequence
  Synthetic
ccauagaggaacagcaac

SEQ ID NO: 514830 - RNA, 19 nt, Artificial Sequence
  Synthetic
gccauagaggaacagcaac

SEQ ID NO: 514831 - RNA, 20 nt, Artificial Sequence
  Synthetic
ugccauagaggaacagcaac

SEQ ID NO: 514832 - RNA, 21 nt, Artificial Sequence
  Synthetic
gugccauagaggaacagcaac

SEQ ID NO: 514833 - RNA, 22 nt, Artificial Sequence
  Synthetic
ggugccauagaggaacagcaac

SEQ ID NO: 514834 - RNA, 23 nt, Artificial Sequence
  Synthetic
aggugccauagaggaacagcaac

SEQ ID NO: 514835 - RNA, 24 nt, Artificial Sequence
  Synthetic
aaggugccauagaggaacagcaac

SEQ ID NO: 514836 - RNA, 18 nt, Artificial Sequence
  Synthetic
ucaaguuucuucagcaac

SEQ ID NO: 514837 - RNA, 19 nt, Artificial Sequence
  Synthetic
uucaaguuucuucagcaac

SEQ ID NO: 514838 - RNA, 20 nt, Artificial Sequence
  Synthetic
auucaaguuucuucagcaac

SEQ ID NO: 514839 - RNA, 21 nt, Artificial Sequence
  Synthetic
aauucaaguuucuucagcaac

SEQ ID NO: 514840 - RNA, 22 nt, Artificial Sequence
  Synthetic
caauucaaguuucuucagcaac

SEQ ID NO: 514841 - RNA, 23 nt, Artificial Sequence
  Synthetic
acaauucaaguuucuucagcaac

SEQ ID NO: 514842 - RNA, 24 nt, Artificial Sequence
  Synthetic
gacaauucaaguuucuucagcaac

SEQ ID NO: 514843 - RNA, 18 nt, Artificial Sequence
  Synthetic
cccaccaaauuuagcaac

SEQ ID NO: 514844 - RNA, 19 nt, Artificial Sequence
  Synthetic
acccaccaaauuuagcaac

SEQ ID NO: 514845 - RNA, 20 nt, Artificial Sequence
  Synthetic
gacccaccaaauuuagcaac

SEQ ID NO: 514846 - RNA, 21 nt, Artificial Sequence
  Synthetic
ggacccaccaaauuuagcaac

SEQ ID NO: 514847 - RNA, 22 nt, Artificial Sequence
  Synthetic
aggacccaccaaauuuagcaac

SEQ ID NO: 514848 - RNA, 23 nt, Artificial Sequence
  Synthetic
gaggacccaccaaauuuagcaac

SEQ ID NO: 514849 - RNA, 24 nt, Artificial Sequence
  Synthetic
agaggacccaccaaauuuagcaac

SEQ ID NO: 514850 - RNA, 18 nt, Artificial Sequence
  Synthetic
guaaauuauuaaggcaac

SEQ ID NO: 514851 - RNA, 19 nt, Artificial Sequence
  Synthetic
cguaaauuauuaaggcaac

SEQ ID NO: 514852 - RNA, 20 nt, Artificial Sequence
  Synthetic
acguaaauuauuaaggcaac

SEQ ID NO: 514853 - RNA, 21 nt, Artificial Sequence
  Synthetic
aacguaaauuauuaaggcaac

SEQ ID NO: 514854 - RNA, 22 nt, Artificial Sequence
  Synthetic
caacguaaauuauuaaggcaac

SEQ ID NO: 514855 - RNA, 23 nt, Artificial Sequence
  Synthetic
gcaacguaaauuauuaaggcaac

SEQ ID NO: 514856 - RNA, 24 nt, Artificial Sequence
  Synthetic
ggcaacguaaauuauuaaggcaac

SEQ ID NO: 514857 - RNA, 18 nt, Artificial Sequence
  Synthetic
uuagaacucagaggcaac

SEQ ID NO: 514858 - RNA, 19 nt, Artificial Sequence
  Synthetic
cuuagaacucagaggcaac

SEQ ID NO: 514859 - RNA, 20 nt, Artificial Sequence
  Synthetic
ucuuagaacucagaggcaac

SEQ ID NO: 514860 - RNA, 21 nt, Artificial Sequence
  Synthetic
cucuuagaacucagaggcaac

SEQ ID NO: 514861 - RNA, 22 nt, Artificial Sequence
  Synthetic
ucucuuagaacucagaggcaac

SEQ ID NO: 514862 - RNA, 23 nt, Artificial Sequence
  Synthetic
gucucuuagaacucagaggcaac

SEQ ID NO: 514863 - RNA, 24 nt, Artificial Sequence
  Synthetic
ugucucuuagaacucagaggcaac

SEQ ID NO: 514864 - RNA, 20 nt, Artificial Sequence
  Synthetic
cgcacuccagccugggcaac

SEQ ID NO: 514865 - RNA, 21 nt, Artificial Sequence
  Synthetic
ccgcacuccagccugggcaac

SEQ ID NO: 514866 - RNA, 22 nt, Artificial Sequence
  Synthetic
accgcacuccagccugggcaac

SEQ ID NO: 514867 - RNA, 23 nt, Artificial Sequence
  Synthetic
caccgcacuccagccugggcaac

SEQ ID NO: 514868 - RNA, 24 nt, Artificial Sequence
  Synthetic
ccaccgcacuccagccugggcaac

SEQ ID NO: 514869 - RNA, 21 nt, Artificial Sequence
  Synthetic
uugcacuccagccugggcaac

SEQ ID NO: 514870 - RNA, 22 nt, Artificial Sequence
  Synthetic
auugcacuccagccugggcaac

SEQ ID NO: 514871 - RNA, 23 nt, Artificial Sequence
  Synthetic
cauugcacuccagccugggcaac

SEQ ID NO: 514872 - RNA, 24 nt, Artificial Sequence
  Synthetic
acauugcacuccagccugggcaac

SEQ ID NO: 514873 - RNA, 23 nt, Artificial Sequence
  Synthetic
gauugcacuccagccugggcaac

SEQ ID NO: 514874 - RNA, 24 nt, Artificial Sequence
  Synthetic
agauugcacuccagccugggcaac

SEQ ID NO: 514875 - RNA, 18 nt, Artificial Sequence
  Synthetic
gauuuauguaauggcaac

SEQ ID NO: 514876 - RNA, 19 nt, Artificial Sequence
  Synthetic
agauuuauguaauggcaac

SEQ ID NO: 514877 - RNA, 20 nt, Artificial Sequence
  Synthetic
cagauuuauguaauggcaac

SEQ ID NO: 514878 - RNA, 21 nt, Artificial Sequence
  Synthetic
acagauuuauguaauggcaac

SEQ ID NO: 514879 - RNA, 22 nt, Artificial Sequence
  Synthetic
cacagauuuauguaauggcaac

SEQ ID NO: 514880 - RNA, 23 nt, Artificial Sequence
  Synthetic
gcacagauuuauguaauggcaac

SEQ ID NO: 514881 - RNA, 24 nt, Artificial Sequence
  Synthetic
ggcacagauuuauguaauggcaac

SEQ ID NO: 514882 - RNA, 18 nt, Artificial Sequence
  Synthetic
acuuacagauguggcaac

SEQ ID NO: 514883 - RNA, 19 nt, Artificial Sequence
  Synthetic
aacuuacagauguggcaac

SEQ ID NO: 514884 - RNA, 20 nt, Artificial Sequence
  Synthetic
uaacuuacagauguggcaac

SEQ ID NO: 514885 - RNA, 21 nt, Artificial Sequence
  Synthetic
guaacuuacagauguggcaac

SEQ ID NO: 514886 - RNA, 22 nt, Artificial Sequence
  Synthetic
uguaacuuacagauguggcaac

SEQ ID NO: 514887 - RNA, 23 nt, Artificial Sequence
  Synthetic
uuguaacuuacagauguggcaac

SEQ ID NO: 514888 - RNA, 24 nt, Artificial Sequence
  Synthetic
uuuguaacuuacagauguggcaac

SEQ ID NO: 514889 - RNA, 18 nt, Artificial Sequence
  Synthetic
uuugucagguuuggcaac

SEQ ID NO: 514890 - RNA, 19 nt, Artificial Sequence
  Synthetic
auuugucagguuuggcaac

SEQ ID NO: 514891 - RNA, 20 nt, Artificial Sequence
  Synthetic
cauuugucagguuuggcaac

SEQ ID NO: 514892 - RNA, 21 nt, Artificial Sequence
  Synthetic
acauuugucagguuuggcaac

SEQ ID NO: 514893 - RNA, 22 nt, Artificial Sequence
  Synthetic
aacauuugucagguuuggcaac

SEQ ID NO: 514894 - RNA, 23 nt, Artificial Sequence
  Synthetic
aaacauuugucagguuuggcaac

SEQ ID NO: 514895 - RNA, 24 nt, Artificial Sequence
  Synthetic
aaaacauuugucagguuuggcaac

SEQ ID NO: 514896 - RNA, 18 nt, Artificial Sequence
  Synthetic
gaagagauaaaaugcaac

SEQ ID NO: 514897 - RNA, 19 nt, Artificial Sequence
  Synthetic
agaagagauaaaaugcaac

SEQ ID NO: 514898 - RNA, 20 nt, Artificial Sequence
  Synthetic
cagaagagauaaaaugcaac

SEQ ID NO: 514899 - RNA, 21 nt, Artificial Sequence
  Synthetic
acagaagagauaaaaugcaac

SEQ ID NO: 514900 - RNA, 22 nt, Artificial Sequence
  Synthetic
aacagaagagauaaaaugcaac

SEQ ID NO: 514901 - RNA, 23 nt, Artificial Sequence
  Synthetic
aaacagaagagauaaaaugcaac

SEQ ID NO: 514902 - RNA, 24 nt, Artificial Sequence
  Synthetic
aaaacagaagagauaaaaugcaac

SEQ ID NO: 514903 - RNA, 18 nt, Artificial Sequence
  Synthetic
uucuucaauaaaugcaac

SEQ ID NO: 514904 - RNA, 19 nt, Artificial Sequence
  Synthetic
cuucuucaauaaaugcaac

SEQ ID NO: 514905 - RNA, 20 nt, Artificial Sequence
  Synthetic
ucuucuucaauaaaugcaac

SEQ ID NO: 514906 - RNA, 21 nt, Artificial Sequence
  Synthetic
uucuucuucaauaaaugcaac

SEQ ID NO: 514907 - RNA, 22 nt, Artificial Sequence
  Synthetic
uuucuucuucaauaaaugcaac

SEQ ID NO: 514908 - RNA, 23 nt, Artificial Sequence
  Synthetic
uuuucuucuucaauaaaugcaac

SEQ ID NO: 514909 - RNA, 24 nt, Artificial Sequence
  Synthetic
uuuuucuucuucaauaaaugcaac

SEQ ID NO: 514910 - RNA, 18 nt, Artificial Sequence
  Synthetic
uuccuugguaacugcaac

SEQ ID NO: 514911 - RNA, 19 nt, Artificial Sequence
  Synthetic
uuuccuugguaacugcaac

SEQ ID NO: 514912 - RNA, 20 nt, Artificial Sequence
  Synthetic
auuuccuugguaacugcaac

SEQ ID NO: 514913 - RNA, 21 nt, Artificial Sequence
  Synthetic
aauuuccuugguaacugcaac

SEQ ID NO: 514914 - RNA, 22 nt, Artificial Sequence
  Synthetic
aaauuuccuugguaacugcaac

SEQ ID NO: 514915 - RNA, 23 nt, Artificial Sequence
  Synthetic
caaauuuccuugguaacugcaac

SEQ ID NO: 514916 - RNA, 24 nt, Artificial Sequence
  Synthetic
ccaaauuuccuugguaacugcaac

SEQ ID NO: 514917 - RNA, 18 nt, Artificial Sequence
  Synthetic
ccccaaucaaccugcaac

SEQ ID NO: 514918 - RNA, 19 nt, Artificial Sequence
  Synthetic
accccaaucaaccugcaac

SEQ ID NO: 514919 - RNA, 20 nt, Artificial Sequence
  Synthetic
gaccccaaucaaccugcaac

SEQ ID NO: 514920 - RNA, 21 nt, Artificial Sequence
  Synthetic
cgaccccaaucaaccugcaac

SEQ ID NO: 514921 - RNA, 22 nt, Artificial Sequence
  Synthetic
gcgaccccaaucaaccugcaac

SEQ ID NO: 514922 - RNA, 23 nt, Artificial Sequence
  Synthetic
agcgaccccaaucaaccugcaac

SEQ ID NO: 514923 - RNA, 24 nt, Artificial Sequence
  Synthetic
gagcgaccccaaucaaccugcaac

SEQ ID NO: 514924 - RNA, 18 nt, Artificial Sequence
  Synthetic
aguauuugauagugcaac

SEQ ID NO: 514925 - RNA, 19 nt, Artificial Sequence
  Synthetic
uaguauuugauagugcaac

SEQ ID NO: 514926 - RNA, 20 nt, Artificial Sequence
  Synthetic
cuaguauuugauagugcaac

SEQ ID NO: 514927 - RNA, 21 nt, Artificial Sequence
  Synthetic
ccuaguauuugauagugcaac

SEQ ID NO: 514928 - RNA, 22 nt, Artificial Sequence
  Synthetic
accuaguauuugauagugcaac

SEQ ID NO: 514929 - RNA, 23 nt, Artificial Sequence
  Synthetic
gaccuaguauuugauagugcaac

SEQ ID NO: 514930 - RNA, 24 nt, Artificial Sequence
  Synthetic
agaccuaguauuugauagugcaac

SEQ ID NO: 514931 - RNA, 18 nt, Artificial Sequence
  Synthetic
uugauugacuauugcaac

SEQ ID NO: 514932 - RNA, 19 nt, Artificial Sequence
  Synthetic
cuugauugacuauugcaac

SEQ ID NO: 514933 - RNA, 20 nt, Artificial Sequence
  Synthetic
acuugauugacuauugcaac

SEQ ID NO: 514934 - RNA, 21 nt, Artificial Sequence
  Synthetic
cacuugauugacuauugcaac

SEQ ID NO: 514935 - RNA, 22 nt, Artificial Sequence
  Synthetic
ccacuugauugacuauugcaac

SEQ ID NO: 514936 - RNA, 23 nt, Artificial Sequence
  Synthetic
uccacuugauugacuauugcaac

SEQ ID NO: 514937 - RNA, 24 nt, Artificial Sequence
  Synthetic
auccacuugauugacuauugcaac

SEQ ID NO: 514938 - RNA, 18 nt, Artificial Sequence
  Synthetic
augagaagguuuugcaac

SEQ ID NO: 514939 - RNA, 19 nt, Artificial Sequence
  Synthetic
uaugagaagguuuugcaac

SEQ ID NO: 514940 - RNA, 20 nt, Artificial Sequence
  Synthetic
guaugagaagguuuugcaac

SEQ ID NO: 514941 - RNA, 21 nt, Artificial Sequence
  Synthetic
uguaugagaagguuuugcaac

SEQ ID NO: 514942 - RNA, 22 nt, Artificial Sequence
  Synthetic
uuguaugagaagguuuugcaac

SEQ ID NO: 514943 - RNA, 23 nt, Artificial Sequence
  Synthetic
uuuguaugagaagguuuugcaac

SEQ ID NO: 514944 - RNA, 24 nt, Artificial Sequence
  Synthetic
auuuguaugagaagguuuugcaac

SEQ ID NO: 514945 - RNA, 18 nt, Artificial Sequence
  Synthetic
aaugccaucaaaaucaac

SEQ ID NO: 514946 - RNA, 19 nt, Artificial Sequence
  Synthetic
caaugccaucaaaaucaac

SEQ ID NO: 514947 - RNA, 20 nt, Artificial Sequence
  Synthetic
ccaaugccaucaaaaucaac

SEQ ID NO: 514948 - RNA, 21 nt, Artificial Sequence
  Synthetic
accaaugccaucaaaaucaac

SEQ ID NO: 514949 - RNA, 22 nt, Artificial Sequence
  Synthetic
gaccaaugccaucaaaaucaac

SEQ ID NO: 514950 - RNA, 23 nt, Artificial Sequence
  Synthetic
agaccaaugccaucaaaaucaac

SEQ ID NO: 514951 - RNA, 24 nt, Artificial Sequence
  Synthetic
uagaccaaugccaucaaaaucaac

SEQ ID NO: 514952 - RNA, 18 nt, Artificial Sequence
  Synthetic
uugcuguuggaaaucaac

SEQ ID NO: 514953 - RNA, 19 nt, Artificial Sequence
  Synthetic
guugcuguuggaaaucaac

SEQ ID NO: 514954 - RNA, 20 nt, Artificial Sequence
  Synthetic
gguugcuguuggaaaucaac

SEQ ID NO: 514955 - RNA, 21 nt, Artificial Sequence
  Synthetic
agguugcuguuggaaaucaac

SEQ ID NO: 514956 - RNA, 22 nt, Artificial Sequence
  Synthetic
aagguugcuguuggaaaucaac

SEQ ID NO: 514957 - RNA, 23 nt, Artificial Sequence
  Synthetic
aaagguugcuguuggaaaucaac

SEQ ID NO: 514958 - RNA, 24 nt, Artificial Sequence
  Synthetic
uaaagguugcuguuggaaaucaac

SEQ ID NO: 514959 - RNA, 18 nt, Artificial Sequence
  Synthetic
uugcacauaagaaucaac

SEQ ID NO: 514960 - RNA, 19 nt, Artificial Sequence
  Synthetic
guugcacauaagaaucaac

SEQ ID NO: 514961 - RNA, 20 nt, Artificial Sequence
  Synthetic
aguugcacauaagaaucaac

SEQ ID NO: 514962 - RNA, 21 nt, Artificial Sequence
  Synthetic
caguugcacauaagaaucaac

SEQ ID NO: 514963 - RNA, 22 nt, Artificial Sequence
  Synthetic
acaguugcacauaagaaucaac

SEQ ID NO: 514964 - RNA, 23 nt, Artificial Sequence
  Synthetic
gacaguugcacauaagaaucaac

SEQ ID NO: 514965 - RNA, 24 nt, Artificial Sequence
  Synthetic
agacaguugcacauaagaaucaac

SEQ ID NO: 514966 - RNA, 18 nt, Artificial Sequence
  Synthetic
uaccaguguuuaaucaac

SEQ ID NO: 514967 - RNA, 19 nt, Artificial Sequence
  Synthetic
uuaccaguguuuaaucaac

SEQ ID NO: 514968 - RNA, 20 nt, Artificial Sequence
  Synthetic
uuuaccaguguuuaaucaac

SEQ ID NO: 514969 - RNA, 21 nt, Artificial Sequence
  Synthetic
uuuuaccaguguuuaaucaac

SEQ ID NO: 514970 - RNA, 22 nt, Artificial Sequence
  Synthetic
auuuuaccaguguuuaaucaac

SEQ ID NO: 514971 - RNA, 23 nt, Artificial Sequence
  Synthetic
gauuuuaccaguguuuaaucaac

SEQ ID NO: 514972 - RNA, 24 nt, Artificial Sequence
  Synthetic
ugauuuuaccaguguuuaaucaac

SEQ ID NO: 514973 - RNA, 18 nt, Artificial Sequence
  Synthetic
acuuccauuaacaucaac

SEQ ID NO: 514974 - RNA, 19 nt, Artificial Sequence
  Synthetic
aacuuccauuaacaucaac

SEQ ID NO: 514975 - RNA, 20 nt, Artificial Sequence
  Synthetic
aaacuuccauuaacaucaac

SEQ ID NO: 514976 - RNA, 21 nt, Artificial Sequence
  Synthetic
caaacuuccauuaacaucaac

SEQ ID NO: 514977 - RNA, 22 nt, Artificial Sequence
  Synthetic
acaaacuuccauuaacaucaac

SEQ ID NO: 514978 - RNA, 23 nt, Artificial Sequence
  Synthetic
uacaaacuuccauuaacaucaac

SEQ ID NO: 514979 - RNA, 24 nt, Artificial Sequence
  Synthetic
auacaaacuuccauuaacaucaac

SEQ ID NO: 514980 - RNA, 18 nt, Artificial Sequence
  Synthetic
augccacagagcaucaac

SEQ ID NO: 514981 - RNA, 19 nt, Artificial Sequence
  Synthetic
gaugccacagagcaucaac

SEQ ID NO: 514982 - RNA, 20 nt, Artificial Sequence
  Synthetic
agaugccacagagcaucaac

SEQ ID NO: 514983 - RNA, 21 nt, Artificial Sequence
  Synthetic
cagaugccacagagcaucaac

SEQ ID NO: 514984 - RNA, 22 nt, Artificial Sequence
  Synthetic
ccagaugccacagagcaucaac

SEQ ID NO: 514985 - RNA, 23 nt, Artificial Sequence
  Synthetic
uccagaugccacagagcaucaac

SEQ ID NO: 514986 - RNA, 24 nt, Artificial Sequence
  Synthetic
cuccagaugccacagagcaucaac

SEQ ID NO: 514987 - RNA, 18 nt, Artificial Sequence
  Synthetic
auuuuucagaagaucaac

SEQ ID NO: 514988 - RNA, 19 nt, Artificial Sequence
  Synthetic
cauuuuucagaagaucaac

SEQ ID NO: 514989 - RNA, 20 nt, Artificial Sequence
  Synthetic
ucauuuuucagaagaucaac

SEQ ID NO: 514990 - RNA, 21 nt, Artificial Sequence
  Synthetic
aucauuuuucagaagaucaac

SEQ ID NO: 514991 - RNA, 22 nt, Artificial Sequence
  Synthetic
caucauuuuucagaagaucaac

SEQ ID NO: 514992 - RNA, 23 nt, Artificial Sequence
  Synthetic
ccaucauuuuucagaagaucaac

SEQ ID NO: 514993 - RNA, 24 nt, Artificial Sequence
  Synthetic
uccaucauuuuucagaagaucaac

SEQ ID NO: 514994 - RNA, 18 nt, Artificial Sequence
  Synthetic
ggagccgaugcgaucaac

SEQ ID NO: 514995 - RNA, 19 nt, Artificial Sequence
  Synthetic
aggagccgaugcgaucaac

SEQ ID NO: 514996 - RNA, 20 nt, Artificial Sequence
  Synthetic
caggagccgaugcgaucaac

SEQ ID NO: 514997 - RNA, 21 nt, Artificial Sequence
  Synthetic
ucaggagccgaugcgaucaac

SEQ ID NO: 514998 - RNA, 22 nt, Artificial Sequence
  Synthetic
cucaggagccgaugcgaucaac

SEQ ID NO: 514999 - RNA, 23 nt, Artificial Sequence
  Synthetic
ccucaggagccgaugcgaucaac

SEQ ID NO: 515000 - RNA, 24 nt, Artificial Sequence
  Synthetic
gccucaggagccgaugcgaucaac

SEQ ID NO: 515001 - RNA, 18 nt, Artificial Sequence
  Synthetic
augaauauguggaucaac

SEQ ID NO: 515002 - RNA, 19 nt, Artificial Sequence
  Synthetic
gaugaauauguggaucaac

SEQ ID NO: 515003 - RNA, 20 nt, Artificial Sequence
  Synthetic
ugaugaauauguggaucaac

SEQ ID NO: 515004 - RNA, 21 nt, Artificial Sequence
  Synthetic
uugaugaauauguggaucaac

SEQ ID NO: 515005 - RNA, 22 nt, Artificial Sequence
  Synthetic
cuugaugaauauguggaucaac

SEQ ID NO: 515006 - RNA, 23 nt, Artificial Sequence
  Synthetic
ucuugaugaauauguggaucaac

SEQ ID NO: 515007 - RNA, 24 nt, Artificial Sequence
  Synthetic
cucuugaugaauauguggaucaac

SEQ ID NO: 515008 - RNA, 18 nt, Artificial Sequence
  Synthetic
aagaccagccugaucaac

SEQ ID NO: 515009 - RNA, 19 nt, Artificial Sequence
  Synthetic
uaagaccagccugaucaac

SEQ ID NO: 515010 - RNA, 20 nt, Artificial Sequence
  Synthetic
uuaagaccagccugaucaac

SEQ ID NO: 515011 - RNA, 21 nt, Artificial Sequence
  Synthetic
uuuaagaccagccugaucaac

SEQ ID NO: 515012 - RNA, 22 nt, Artificial Sequence
  Synthetic
guuuaagaccagccugaucaac

SEQ ID NO: 515013 - RNA, 23 nt, Artificial Sequence
  Synthetic
aguuuaagaccagccugaucaac

SEQ ID NO: 515014 - RNA, 24 nt, Artificial Sequence
  Synthetic
gaguuuaagaccagccugaucaac

SEQ ID NO: 515015 - RNA, 18 nt, Artificial Sequence
  Synthetic
uggaccacaaauaucaac

SEQ ID NO: 515016 - RNA, 19 nt, Artificial Sequence
  Synthetic
uuggaccacaaauaucaac

SEQ ID NO: 515017 - RNA, 20 nt, Artificial Sequence
  Synthetic
guuggaccacaaauaucaac

SEQ ID NO: 515018 - RNA, 21 nt, Artificial Sequence
  Synthetic
gguuggaccacaaauaucaac

SEQ ID NO: 515019 - RNA, 22 nt, Artificial Sequence
  Synthetic
ggguuggaccacaaauaucaac

SEQ ID NO: 515020 - RNA, 23 nt, Artificial Sequence
  Synthetic
gggguuggaccacaaauaucaac

SEQ ID NO: 515021 - RNA, 24 nt, Artificial Sequence
  Synthetic
agggguuggaccacaaauaucaac

SEQ ID NO: 515022 - RNA, 18 nt, Artificial Sequence
  Synthetic
aucucgaagcauaucaac

SEQ ID NO: 515023 - RNA, 19 nt, Artificial Sequence
  Synthetic
uaucucgaagcauaucaac

SEQ ID NO: 515024 - RNA, 20 nt, Artificial Sequence
  Synthetic
uuaucucgaagcauaucaac

SEQ ID NO: 515025 - RNA, 21 nt, Artificial Sequence
  Synthetic
uuuaucucgaagcauaucaac

SEQ ID NO: 515026 - RNA, 22 nt, Artificial Sequence
  Synthetic
uuuuaucucgaagcauaucaac

SEQ ID NO: 515027 - RNA, 23 nt, Artificial Sequence
  Synthetic
guuuuaucucgaagcauaucaac

SEQ ID NO: 515028 - RNA, 24 nt, Artificial Sequence
  Synthetic
gguuuuaucucgaagcauaucaac

SEQ ID NO: 515029 - RNA, 18 nt, Artificial Sequence
  Synthetic
auucugaagucuaucaac

SEQ ID NO: 515030 - RNA, 19 nt, Artificial Sequence
  Synthetic
aauucugaagucuaucaac

SEQ ID NO: 515031 - RNA, 20 nt, Artificial Sequence
  Synthetic
gaauucugaagucuaucaac

SEQ ID NO: 515032 - RNA, 21 nt, Artificial Sequence
  Synthetic
agaauucugaagucuaucaac

SEQ ID NO: 515033 - RNA, 22 nt, Artificial Sequence
  Synthetic
uagaauucugaagucuaucaac

SEQ ID NO: 515034 - RNA, 23 nt, Artificial Sequence
  Synthetic
uuagaauucugaagucuaucaac

SEQ ID NO: 515035 - RNA, 24 nt, Artificial Sequence
  Synthetic
uuuagaauucugaagucuaucaac

SEQ ID NO: 515036 - RNA, 18 nt, Artificial Sequence
  Synthetic
uugagaucuuuuaucaac

SEQ ID NO: 515037 - RNA, 19 nt, Artificial Sequence
  Synthetic
guugagaucuuuuaucaac

SEQ ID NO: 515038 - RNA, 20 nt, Artificial Sequence
  Synthetic
uguugagaucuuuuaucaac

SEQ ID NO: 515039 - RNA, 21 nt, Artificial Sequence
  Synthetic
auguugagaucuuuuaucaac

SEQ ID NO: 515040 - RNA, 22 nt, Artificial Sequence
  Synthetic
aauguugagaucuuuuaucaac

SEQ ID NO: 515041 - RNA, 23 nt, Artificial Sequence
  Synthetic
aaauguugagaucuuuuaucaac

SEQ ID NO: 515042 - RNA, 24 nt, Artificial Sequence
  Synthetic
gaaauguugagaucuuuuaucaac

SEQ ID NO: 515043 - RNA, 18 nt, Artificial Sequence
  Synthetic
aaccuugugacacucaac

SEQ ID NO: 515044 - RNA, 19 nt, Artificial Sequence
  Synthetic
caaccuugugacacucaac

SEQ ID NO: 515045 - RNA, 20 nt, Artificial Sequence
  Synthetic
acaaccuugugacacucaac

SEQ ID NO: 515046 - RNA, 21 nt, Artificial Sequence
  Synthetic
uacaaccuugugacacucaac

SEQ ID NO: 515047 - RNA, 22 nt, Artificial Sequence
  Synthetic
uuacaaccuugugacacucaac

SEQ ID NO: 515048 - RNA, 23 nt, Artificial Sequence
  Synthetic
auuacaaccuugugacacucaac

SEQ ID NO: 515049 - RNA, 24 nt, Artificial Sequence
  Synthetic
uauuacaaccuugugacacucaac

SEQ ID NO: 515050 - RNA, 18 nt, Artificial Sequence
  Synthetic
cugacuugccaccucaac

SEQ ID NO: 515051 - RNA, 19 nt, Artificial Sequence
  Synthetic
gcugacuugccaccucaac

SEQ ID NO: 515052 - RNA, 20 nt, Artificial Sequence
  Synthetic
agcugacuugccaccucaac

SEQ ID NO: 515053 - RNA, 21 nt, Artificial Sequence
  Synthetic
cagcugacuugccaccucaac

SEQ ID NO: 515054 - RNA, 22 nt, Artificial Sequence
  Synthetic
acagcugacuugccaccucaac

SEQ ID NO: 515055 - RNA, 23 nt, Artificial Sequence
  Synthetic
uacagcugacuugccaccucaac

SEQ ID NO: 515056 - RNA, 24 nt, Artificial Sequence
  Synthetic
auacagcugacuugccaccucaac

SEQ ID NO: 515057 - RNA, 18 nt, Artificial Sequence
  Synthetic
guagacaaagaccucaac

SEQ ID NO: 515058 - RNA, 19 nt, Artificial Sequence
  Synthetic
gguagacaaagaccucaac

SEQ ID NO: 515059 - RNA, 20 nt, Artificial Sequence
  Synthetic
agguagacaaagaccucaac

SEQ ID NO: 515060 - RNA, 21 nt, Artificial Sequence
  Synthetic
uagguagacaaagaccucaac

SEQ ID NO: 515061 - RNA, 22 nt, Artificial Sequence
  Synthetic
cuagguagacaaagaccucaac

SEQ ID NO: 515062 - RNA, 23 nt, Artificial Sequence
  Synthetic
ccuagguagacaaagaccucaac

SEQ ID NO: 515063 - RNA, 24 nt, Artificial Sequence
  Synthetic
cccuagguagacaaagaccucaac

SEQ ID NO: 515064 - RNA, 18 nt, Artificial Sequence
  Synthetic
ccucuuuugucccucaac

SEQ ID NO: 515065 - RNA, 19 nt, Artificial Sequence
  Synthetic
uccucuuuugucccucaac

SEQ ID NO: 515066 - RNA, 20 nt, Artificial Sequence
  Synthetic
guccucuuuugucccucaac

SEQ ID NO: 515067 - RNA, 21 nt, Artificial Sequence
  Synthetic
uguccucuuuugucccucaac

SEQ ID NO: 515068 - RNA, 22 nt, Artificial Sequence
  Synthetic
uuguccucuuuugucccucaac

SEQ ID NO: 515069 - RNA, 23 nt, Artificial Sequence
  Synthetic
auuguccucuuuugucccucaac

SEQ ID NO: 515070 - RNA, 24 nt, Artificial Sequence
  Synthetic
aauuguccucuuuugucccucaac

SEQ ID NO: 515071 - RNA, 18 nt, Artificial Sequence
  Synthetic
gauauguugguccucaac

SEQ ID NO: 515072 - RNA, 19 nt, Artificial Sequence
  Synthetic
ugauauguugguccucaac

SEQ ID NO: 515073 - RNA, 20 nt, Artificial Sequence
  Synthetic
cugauauguugguccucaac

SEQ ID NO: 515074 - RNA, 21 nt, Artificial Sequence
  Synthetic
ucugauauguugguccucaac

SEQ ID NO: 515075 - RNA, 22 nt, Artificial Sequence
  Synthetic
aucugauauguugguccucaac

SEQ ID NO: 515076 - RNA, 23 nt, Artificial Sequence
  Synthetic
aaucugauauguugguccucaac

SEQ ID NO: 515077 - RNA, 24 nt, Artificial Sequence
  Synthetic
caaucugauauguugguccucaac

SEQ ID NO: 515078 - RNA, 18 nt, Artificial Sequence
  Synthetic
ugcaaaagacaucucaac

SEQ ID NO: 515079 - RNA, 19 nt, Artificial Sequence
  Synthetic
cugcaaaagacaucucaac

SEQ ID NO: 515080 - RNA, 20 nt, Artificial Sequence
  Synthetic
gcugcaaaagacaucucaac

SEQ ID NO: 515081 - RNA, 21 nt, Artificial Sequence
  Synthetic
agcugcaaaagacaucucaac

SEQ ID NO: 515082 - RNA, 22 nt, Artificial Sequence
  Synthetic
aagcugcaaaagacaucucaac

SEQ ID NO: 515083 - RNA, 23 nt, Artificial Sequence
  Synthetic
aaagcugcaaaagacaucucaac

SEQ ID NO: 515084 - RNA, 24 nt, Artificial Sequence
  Synthetic
gaaagcugcaaaagacaucucaac

SEQ ID NO: 515085 - RNA, 18 nt, Artificial Sequence
  Synthetic
caaauugaagcucucaac

SEQ ID NO: 515086 - RNA, 19 nt, Artificial Sequence
  Synthetic
ucaaauugaagcucucaac

SEQ ID NO: 515087 - RNA, 20 nt, Artificial Sequence
  Synthetic
cucaaauugaagcucucaac

SEQ ID NO: 515088 - RNA, 21 nt, Artificial Sequence
  Synthetic
ucucaaauugaagcucucaac

SEQ ID NO: 515089 - RNA, 22 nt, Artificial Sequence
  Synthetic
uucucaaauugaagcucucaac

SEQ ID NO: 515090 - RNA, 23 nt, Artificial Sequence
  Synthetic
uuucucaaauugaagcucucaac

SEQ ID NO: 515091 - RNA, 24 nt, Artificial Sequence
  Synthetic
guuucucaaauugaagcucucaac

SEQ ID NO: 515092 - RNA, 18 nt, Artificial Sequence
  Synthetic
cuuuguuucguucucaac

SEQ ID NO: 515093 - RNA, 19 nt, Artificial Sequence
  Synthetic
ucuuuguuucguucucaac

SEQ ID NO: 515094 - RNA, 20 nt, Artificial Sequence
  Synthetic
gucuuuguuucguucucaac

SEQ ID NO: 515095 - RNA, 21 nt, Artificial Sequence
  Synthetic
ugucuuuguuucguucucaac

SEQ ID NO: 515096 - RNA, 22 nt, Artificial Sequence
  Synthetic
augucuuuguuucguucucaac

SEQ ID NO: 515097 - RNA, 23 nt, Artificial Sequence
  Synthetic
uaugucuuuguuucguucucaac

SEQ ID NO: 515098 - RNA, 24 nt, Artificial Sequence
  Synthetic
auaugucuuuguuucguucucaac

SEQ ID NO: 515099 - RNA, 18 nt, Artificial Sequence
  Synthetic
ggguucuuuacagucaac

SEQ ID NO: 515100 - RNA, 19 nt, Artificial Sequence
  Synthetic
uggguucuuuacagucaac

SEQ ID NO: 515101 - RNA, 20 nt, Artificial Sequence
  Synthetic
auggguucuuuacagucaac

SEQ ID NO: 515102 - RNA, 21 nt, Artificial Sequence
  Synthetic
uauggguucuuuacagucaac

SEQ ID NO: 515103 - RNA, 22 nt, Artificial Sequence
  Synthetic
auauggguucuuuacagucaac

SEQ ID NO: 515104 - RNA, 23 nt, Artificial Sequence
  Synthetic
aauauggguucuuuacagucaac

SEQ ID NO: 515105 - RNA, 24 nt, Artificial Sequence
  Synthetic
aaauauggguucuuuacagucaac

SEQ ID NO: 515106 - RNA, 18 nt, Artificial Sequence
  Synthetic
uuaucauuccaugucaac

SEQ ID NO: 515107 - RNA, 19 nt, Artificial Sequence
  Synthetic
cuuaucauuccaugucaac

SEQ ID NO: 515108 - RNA, 20 nt, Artificial Sequence
  Synthetic
ccuuaucauuccaugucaac

SEQ ID NO: 515109 - RNA, 21 nt, Artificial Sequence
  Synthetic
uccuuaucauuccaugucaac

SEQ ID NO: 515110 - RNA, 22 nt, Artificial Sequence
  Synthetic
cuccuuaucauuccaugucaac

SEQ ID NO: 515111 - RNA, 23 nt, Artificial Sequence
  Synthetic
ccuccuuaucauuccaugucaac

SEQ ID NO: 515112 - RNA, 24 nt, Artificial Sequence
  Synthetic
uccuccuuaucauuccaugucaac

SEQ ID NO: 515113 - RNA, 18 nt, Artificial Sequence
  Synthetic
aaauuaacgaaauucaac

SEQ ID NO: 515114 - RNA, 19 nt, Artificial Sequence
  Synthetic
aaaauuaacgaaauucaac

SEQ ID NO: 515115 - RNA, 20 nt, Artificial Sequence
  Synthetic
uaaaauuaacgaaauucaac

SEQ ID NO: 515116 - RNA, 21 nt, Artificial Sequence
  Synthetic
auaaaauuaacgaaauucaac

SEQ ID NO: 515117 - RNA, 22 nt, Artificial Sequence
  Synthetic
uauaaaauuaacgaaauucaac

SEQ ID NO: 515118 - RNA, 23 nt, Artificial Sequence
  Synthetic
guauaaaauuaacgaaauucaac

SEQ ID NO: 515119 - RNA, 24 nt, Artificial Sequence
  Synthetic
uguauaaaauuaacgaaauucaac

SEQ ID NO: 515120 - RNA, 18 nt, Artificial Sequence
  Synthetic
uaaagggaucaauucaac

SEQ ID NO: 515121 - RNA, 19 nt, Artificial Sequence
  Synthetic
guaaagggaucaauucaac

SEQ ID NO: 515122 - RNA, 20 nt, Artificial Sequence
  Synthetic
gguaaagggaucaauucaac

SEQ ID NO: 515123 - RNA, 21 nt, Artificial Sequence
  Synthetic
ugguaaagggaucaauucaac

SEQ ID NO: 515124 - RNA, 22 nt, Artificial Sequence
  Synthetic
augguaaagggaucaauucaac

SEQ ID NO: 515125 - RNA, 23 nt, Artificial Sequence
  Synthetic
aaugguaaagggaucaauucaac

SEQ ID NO: 515126 - RNA, 24 nt, Artificial Sequence
  Synthetic
uaaugguaaagggaucaauucaac

SEQ ID NO: 515127 - RNA, 18 nt, Artificial Sequence
  Synthetic
aguacauguucauucaac

SEQ ID NO: 515128 - RNA, 19 nt, Artificial Sequence
  Synthetic
caguacauguucauucaac

SEQ ID NO: 515129 - RNA, 20 nt, Artificial Sequence
  Synthetic
gcaguacauguucauucaac

SEQ ID NO: 515130 - RNA, 21 nt, Artificial Sequence
  Synthetic
ggcaguacauguucauucaac

SEQ ID NO: 515131 - RNA, 22 nt, Artificial Sequence
  Synthetic
aggcaguacauguucauucaac

SEQ ID NO: 515132 - RNA, 23 nt, Artificial Sequence
  Synthetic
uaggcaguacauguucauucaac

SEQ ID NO: 515133 - RNA, 24 nt, Artificial Sequence
  Synthetic
uuaggcaguacauguucauucaac

SEQ ID NO: 515134 - RNA, 18 nt, Artificial Sequence
  Synthetic
uaaguuaugggauucaac

SEQ ID NO: 515135 - RNA, 19 nt, Artificial Sequence
  Synthetic
uuaaguuaugggauucaac

SEQ ID NO: 515136 - RNA, 20 nt, Artificial Sequence
  Synthetic
auuaaguuaugggauucaac

SEQ ID NO: 515137 - RNA, 21 nt, Artificial Sequence
  Synthetic
gauuaaguuaugggauucaac

SEQ ID NO: 515138 - RNA, 22 nt, Artificial Sequence
  Synthetic
ggauuaaguuaugggauucaac

SEQ ID NO: 515139 - RNA, 23 nt, Artificial Sequence
  Synthetic
uggauuaaguuaugggauucaac

SEQ ID NO: 515140 - RNA, 24 nt, Artificial Sequence
  Synthetic
uuggauuaaguuaugggauucaac

SEQ ID NO: 515141 - RNA, 18 nt, Artificial Sequence
  Synthetic
uccacuuaauuauucaac

SEQ ID NO: 515142 - RNA, 19 nt, Artificial Sequence
  Synthetic
auccacuuaauuauucaac

SEQ ID NO: 515143 - RNA, 20 nt, Artificial Sequence
  Synthetic
aauccacuuaauuauucaac

SEQ ID NO: 515144 - RNA, 21 nt, Artificial Sequence
  Synthetic
uaauccacuuaauuauucaac

SEQ ID NO: 515145 - RNA, 22 nt, Artificial Sequence
  Synthetic
uuaauccacuuaauuauucaac

SEQ ID NO: 515146 - RNA, 23 nt, Artificial Sequence
  Synthetic
uuuaauccacuuaauuauucaac

SEQ ID NO: 515147 - RNA, 24 nt, Artificial Sequence
  Synthetic
uuuuaauccacuuaauuauucaac

SEQ ID NO: 515148 - RNA, 18 nt, Artificial Sequence
  Synthetic
cuugaaaacuuguucaac

SEQ ID NO: 515149 - RNA, 19 nt, Artificial Sequence
  Synthetic
acuugaaaacuuguucaac

SEQ ID NO: 515150 - RNA, 20 nt, Artificial Sequence
  Synthetic
aacuugaaaacuuguucaac

SEQ ID NO: 515151 - RNA, 21 nt, Artificial Sequence
  Synthetic
aaacuugaaaacuuguucaac

SEQ ID NO: 515152 - RNA, 22 nt, Artificial Sequence
  Synthetic
caaacuugaaaacuuguucaac

SEQ ID NO: 515153 - RNA, 23 nt, Artificial Sequence
  Synthetic
acaaacuugaaaacuuguucaac

SEQ ID NO: 515154 - RNA, 24 nt, Artificial Sequence
  Synthetic
aacaaacuugaaaacuuguucaac

SEQ ID NO: 515155 - RNA, 18 nt, Artificial Sequence
  Synthetic
ccauaaccccauuucaac

SEQ ID NO: 515156 - RNA, 19 nt, Artificial Sequence
  Synthetic
gccauaaccccauuucaac

SEQ ID NO: 515157 - RNA, 20 nt, Artificial Sequence
  Synthetic
ugccauaaccccauuucaac

SEQ ID NO: 515158 - RNA, 21 nt, Artificial Sequence
  Synthetic
uugccauaaccccauuucaac

SEQ ID NO: 515159 - RNA, 22 nt, Artificial Sequence
  Synthetic
guugccauaaccccauuucaac

SEQ ID NO: 515160 - RNA, 23 nt, Artificial Sequence
  Synthetic
uguugccauaaccccauuucaac

SEQ ID NO: 515161 - RNA, 24 nt, Artificial Sequence
  Synthetic
uuguugccauaaccccauuucaac

SEQ ID NO: 515162 - RNA, 18 nt, Artificial Sequence
  Synthetic
ccagauuagcauuucaac

SEQ ID NO: 515163 - RNA, 19 nt, Artificial Sequence
  Synthetic
gccagauuagcauuucaac

SEQ ID NO: 515164 - RNA, 20 nt, Artificial Sequence
  Synthetic
ugccagauuagcauuucaac

SEQ ID NO: 515165 - RNA, 21 nt, Artificial Sequence
  Synthetic
augccagauuagcauuucaac

SEQ ID NO: 515166 - RNA, 22 nt, Artificial Sequence
  Synthetic
uaugccagauuagcauuucaac

SEQ ID NO: 515167 - RNA, 23 nt, Artificial Sequence
  Synthetic
uuaugccagauuagcauuucaac

SEQ ID NO: 515168 - RNA, 24 nt, Artificial Sequence
  Synthetic
auuaugccagauuagcauuucaac

SEQ ID NO: 515169 - RNA, 18 nt, Artificial Sequence
  Synthetic
augaaaugaccuuucaac

SEQ ID NO: 515170 - RNA, 19 nt, Artificial Sequence
  Synthetic
aaugaaaugaccuuucaac

SEQ ID NO: 515171 - RNA, 20 nt, Artificial Sequence
  Synthetic
caaugaaaugaccuuucaac

SEQ ID NO: 515172 - RNA, 21 nt, Artificial Sequence
  Synthetic
ucaaugaaaugaccuuucaac

SEQ ID NO: 515173 - RNA, 22 nt, Artificial Sequence
  Synthetic
aucaaugaaaugaccuuucaac

SEQ ID NO: 515174 - RNA, 23 nt, Artificial Sequence
  Synthetic
uaucaaugaaaugaccuuucaac

SEQ ID NO: 515175 - RNA, 24 nt, Artificial Sequence
  Synthetic
uuaucaaugaaaugaccuuucaac

SEQ ID NO: 515176 - RNA, 18 nt, Artificial Sequence
  Synthetic
acaaucucugcuuucaac

SEQ ID NO: 515177 - RNA, 19 nt, Artificial Sequence
  Synthetic
aacaaucucugcuuucaac

SEQ ID NO: 515178 - RNA, 20 nt, Artificial Sequence
  Synthetic
caacaaucucugcuuucaac

SEQ ID NO: 515179 - RNA, 21 nt, Artificial Sequence
  Synthetic
ucaacaaucucugcuuucaac

SEQ ID NO: 515180 - RNA, 22 nt, Artificial Sequence
  Synthetic
aucaacaaucucugcuuucaac

SEQ ID NO: 515181 - RNA, 23 nt, Artificial Sequence
  Synthetic
uaucaacaaucucugcuuucaac

SEQ ID NO: 515182 - RNA, 24 nt, Artificial Sequence
  Synthetic
cuaucaacaaucucugcuuucaac

SEQ ID NO: 515183 - RNA, 18 nt, Artificial Sequence
  Synthetic
agaccagugauuuucaac

SEQ ID NO: 515184 - RNA, 19 nt, Artificial Sequence
  Synthetic
uagaccagugauuuucaac

SEQ ID NO: 515185 - RNA, 20 nt, Artificial Sequence
  Synthetic
cuagaccagugauuuucaac

SEQ ID NO: 515186 - RNA, 21 nt, Artificial Sequence
  Synthetic
ccuagaccagugauuuucaac

SEQ ID NO: 515187 - RNA, 22 nt, Artificial Sequence
  Synthetic
cccuagaccagugauuuucaac

SEQ ID NO: 515188 - RNA, 23 nt, Artificial Sequence
  Synthetic
ccccuagaccagugauuuucaac

SEQ ID NO: 515189 - RNA, 24 nt, Artificial Sequence
  Synthetic
cccccuagaccagugauuuucaac

SEQ ID NO: 515190 - RNA, 18 nt, Artificial Sequence
  Synthetic
aucccuauuuuuuucaac

SEQ ID NO: 515191 - RNA, 19 nt, Artificial Sequence
  Synthetic
aaucccuauuuuuuucaac

SEQ ID NO: 515192 - RNA, 20 nt, Artificial Sequence
  Synthetic
uaaucccuauuuuuuucaac

SEQ ID NO: 515193 - RNA, 21 nt, Artificial Sequence
  Synthetic
auaaucccuauuuuuuucaac

SEQ ID NO: 515194 - RNA, 22 nt, Artificial Sequence
  Synthetic
cauaaucccuauuuuuuucaac

SEQ ID NO: 515195 - RNA, 23 nt, Artificial Sequence
  Synthetic
ccauaaucccuauuuuuuucaac

SEQ ID NO: 515196 - RNA, 24 nt, Artificial Sequence
  Synthetic
cccauaaucccuauuuuuuucaac

SEQ ID NO: 515197 - RNA, 18 nt, Artificial Sequence
  Synthetic
uuuuuuuuuuuuuucaac

SEQ ID NO: 515198 - RNA, 19 nt, Artificial Sequence
  Synthetic
uuuuuuuuuuuuuuucaac

SEQ ID NO: 515199 - RNA, 20 nt, Artificial Sequence
  Synthetic
uuuuuuuuuuuuuuuucaac

SEQ ID NO: 515200 - RNA, 21 nt, Artificial Sequence
  Synthetic
uuuuuuuuuuuuuuuuucaac

SEQ ID NO: 515201 - RNA, 22 nt, Artificial Sequence
  Synthetic
guuuuuuuuuuuuuuuuucaac

SEQ ID NO: 515202 - RNA, 23 nt, Artificial Sequence
  Synthetic
uguuuuuuuuuuuuuuuuucaac

SEQ ID NO: 515203 - RNA, 24 nt, Artificial Sequence
  Synthetic
auguuuuuuuuuuuuuuuuucaac

SEQ ID NO: 515204 - RNA, 18 nt, Artificial Sequence
  Synthetic
gugaagugagaaaagaac

SEQ ID NO: 515205 - RNA, 19 nt, Artificial Sequence
  Synthetic
ugugaagugagaaaagaac

SEQ ID NO: 515206 - RNA, 20 nt, Artificial Sequence
  Synthetic
augugaagugagaaaagaac

SEQ ID NO: 515207 - RNA, 21 nt, Artificial Sequence
  Synthetic
caugugaagugagaaaagaac

SEQ ID NO: 515208 - RNA, 22 nt, Artificial Sequence
  Synthetic
acaugugaagugagaaaagaac

SEQ ID NO: 515209 - RNA, 23 nt, Artificial Sequence
  Synthetic
uacaugugaagugagaaaagaac

SEQ ID NO: 515210 - RNA, 24 nt, Artificial Sequence
  Synthetic
guacaugugaagugagaaaagaac

SEQ ID NO: 515211 - RNA, 18 nt, Artificial Sequence
  Synthetic
caucacaauuaaaagaac

SEQ ID NO: 515212 - RNA, 19 nt, Artificial Sequence
  Synthetic
acaucacaauuaaaagaac

SEQ ID NO: 515213 - RNA, 20 nt, Artificial Sequence
  Synthetic
aacaucacaauuaaaagaac

SEQ ID NO: 515214 - RNA, 21 nt, Artificial Sequence
  Synthetic
uaacaucacaauuaaaagaac

SEQ ID NO: 515215 - RNA, 22 nt, Artificial Sequence
  Synthetic
cuaacaucacaauuaaaagaac

SEQ ID NO: 515216 - RNA, 23 nt, Artificial Sequence
  Synthetic
ccuaacaucacaauuaaaagaac

SEQ ID NO: 515217 - RNA, 24 nt, Artificial Sequence
  Synthetic
cccuaacaucacaauuaaaagaac

SEQ ID NO: 515218 - RNA, 18 nt, Artificial Sequence
  Synthetic
ugggaggguagaaagaac

SEQ ID NO: 515219 - RNA, 19 nt, Artificial Sequence
  Synthetic
gugggaggguagaaagaac

SEQ ID NO: 515220 - RNA, 20 nt, Artificial Sequence
  Synthetic
ggugggaggguagaaagaac

SEQ ID NO: 515221 - RNA, 21 nt, Artificial Sequence
  Synthetic
gggugggaggguagaaagaac

SEQ ID NO: 515222 - RNA, 22 nt, Artificial Sequence
  Synthetic
ggggugggaggguagaaagaac

SEQ ID NO: 515223 - RNA, 23 nt, Artificial Sequence
  Synthetic
cggggugggaggguagaaagaac

SEQ ID NO: 515224 - RNA, 24 nt, Artificial Sequence
  Synthetic
acggggugggaggguagaaagaac

SEQ ID NO: 515225 - RNA, 18 nt, Artificial Sequence
  Synthetic
uucuagagcauaaagaac

SEQ ID NO: 515226 - RNA, 19 nt, Artificial Sequence
  Synthetic
uuucuagagcauaaagaac

SEQ ID NO: 515227 - RNA, 20 nt, Artificial Sequence
  Synthetic
guuucuagagcauaaagaac

SEQ ID NO: 515228 - RNA, 21 nt, Artificial Sequence
  Synthetic
uguuucuagagcauaaagaac

SEQ ID NO: 515229 - RNA, 22 nt, Artificial Sequence
  Synthetic
guguuucuagagcauaaagaac

SEQ ID NO: 515230 - RNA, 23 nt, Artificial Sequence
  Synthetic
aguguuucuagagcauaaagaac

SEQ ID NO: 515231 - RNA, 24 nt, Artificial Sequence
  Synthetic
caguguuucuagagcauaaagaac

SEQ ID NO: 515232 - RNA, 18 nt, Artificial Sequence
  Synthetic
aagugaaauauaaagaac

SEQ ID NO: 515233 - RNA, 19 nt, Artificial Sequence
  Synthetic
aaagugaaauauaaagaac

SEQ ID NO: 515234 - RNA, 20 nt, Artificial Sequence
  Synthetic
uaaagugaaauauaaagaac

SEQ ID NO: 515235 - RNA, 21 nt, Artificial Sequence
  Synthetic
auaaagugaaauauaaagaac

SEQ ID NO: 515236 - RNA, 22 nt, Artificial Sequence
  Synthetic
uauaaagugaaauauaaagaac

SEQ ID NO: 515237 - RNA, 23 nt, Artificial Sequence
  Synthetic
auauaaagugaaauauaaagaac

SEQ ID NO: 515238 - RNA, 24 nt, Artificial Sequence
  Synthetic
cauauaaagugaaauauaaagaac

SEQ ID NO: 515239 - RNA, 18 nt, Artificial Sequence
  Synthetic
aacuaguagcuaaagaac

SEQ ID NO: 515240 - RNA, 19 nt, Artificial Sequence
  Synthetic
caacuaguagcuaaagaac

SEQ ID NO: 515241 - RNA, 20 nt, Artificial Sequence
  Synthetic
acaacuaguagcuaaagaac

SEQ ID NO: 515242 - RNA, 21 nt, Artificial Sequence
  Synthetic
uacaacuaguagcuaaagaac

SEQ ID NO: 515243 - RNA, 22 nt, Artificial Sequence
  Synthetic
guacaacuaguagcuaaagaac

SEQ ID NO: 515244 - RNA, 23 nt, Artificial Sequence
  Synthetic
aguacaacuaguagcuaaagaac

SEQ ID NO: 515245 - RNA, 24 nt, Artificial Sequence
  Synthetic
aaguacaacuaguagcuaaagaac

SEQ ID NO: 515246 - RNA, 18 nt, Artificial Sequence
  Synthetic
gccaugaggguaaagaac

SEQ ID NO: 515247 - RNA, 19 nt, Artificial Sequence
  Synthetic
agccaugaggguaaagaac

SEQ ID NO: 515248 - RNA, 20 nt, Artificial Sequence
  Synthetic
aagccaugaggguaaagaac

SEQ ID NO: 515249 - RNA, 21 nt, Artificial Sequence
  Synthetic
gaagccaugaggguaaagaac

SEQ ID NO: 515250 - RNA, 22 nt, Artificial Sequence
  Synthetic
ugaagccaugaggguaaagaac

SEQ ID NO: 515251 - RNA, 23 nt, Artificial Sequence
  Synthetic
cugaagccaugaggguaaagaac

SEQ ID NO: 515252 - RNA, 24 nt, Artificial Sequence
  Synthetic
acugaagccaugaggguaaagaac

SEQ ID NO: 515253 - RNA, 18 nt, Artificial Sequence
  Synthetic
gguagcauuaacaagaac

SEQ ID NO: 515254 - RNA, 19 nt, Artificial Sequence
  Synthetic
agguagcauuaacaagaac

SEQ ID NO: 515255 - RNA, 20 nt, Artificial Sequence
  Synthetic
aagguagcauuaacaagaac

SEQ ID NO: 515256 - RNA, 21 nt, Artificial Sequence
  Synthetic
uaagguagcauuaacaagaac

SEQ ID NO: 515257 - RNA, 22 nt, Artificial Sequence
  Synthetic
uuaagguagcauuaacaagaac

SEQ ID NO: 515258 - RNA, 23 nt, Artificial Sequence
  Synthetic
cuuaagguagcauuaacaagaac

SEQ ID NO: 515259 - RNA, 24 nt, Artificial Sequence
  Synthetic
acuuaagguagcauuaacaagaac

SEQ ID NO: 515260 - RNA, 18 nt, Artificial Sequence
  Synthetic
ucuguggaauacaagaac

SEQ ID NO: 515261 - RNA, 19 nt, Artificial Sequence
  Synthetic
uucuguggaauacaagaac

SEQ ID NO: 515262 - RNA, 20 nt, Artificial Sequence
  Synthetic
uuucuguggaauacaagaac

SEQ ID NO: 515263 - RNA, 21 nt, Artificial Sequence
  Synthetic
uuuucuguggaauacaagaac

SEQ ID NO: 515264 - RNA, 22 nt, Artificial Sequence
  Synthetic
auuuucuguggaauacaagaac

SEQ ID NO: 515265 - RNA, 23 nt, Artificial Sequence
  Synthetic
uauuuucuguggaauacaagaac

SEQ ID NO: 515266 - RNA, 24 nt, Artificial Sequence
  Synthetic
auauuuucuguggaauacaagaac

SEQ ID NO: 515267 - RNA, 18 nt, Artificial Sequence
  Synthetic
uuaacugacuucaagaac

SEQ ID NO: 515268 - RNA, 19 nt, Artificial Sequence
  Synthetic
cuuaacugacuucaagaac

SEQ ID NO: 515269 - RNA, 20 nt, Artificial Sequence
  Synthetic
gcuuaacugacuucaagaac

SEQ ID NO: 515270 - RNA, 21 nt, Artificial Sequence
  Synthetic
agcuuaacugacuucaagaac

SEQ ID NO: 515271 - RNA, 22 nt, Artificial Sequence
  Synthetic
gagcuuaacugacuucaagaac

SEQ ID NO: 515272 - RNA, 23 nt, Artificial Sequence
  Synthetic
agagcuuaacugacuucaagaac

SEQ ID NO: 515273 - RNA, 24 nt, Artificial Sequence
  Synthetic
aagagcuuaacugacuucaagaac

SEQ ID NO: 515274 - RNA, 18 nt, Artificial Sequence
  Synthetic
auuuggaggaagaagaac

SEQ ID NO: 515275 - RNA, 19 nt, Artificial Sequence
  Synthetic
cauuuggaggaagaagaac

SEQ ID NO: 515276 - RNA, 20 nt, Artificial Sequence
  Synthetic
ccauuuggaggaagaagaac

SEQ ID NO: 515277 - RNA, 21 nt, Artificial Sequence
  Synthetic
uccauuuggaggaagaagaac

SEQ ID NO: 515278 - RNA, 22 nt, Artificial Sequence
  Synthetic
uuccauuuggaggaagaagaac

SEQ ID NO: 515279 - RNA, 23 nt, Artificial Sequence
  Synthetic
cuuccauuuggaggaagaagaac

SEQ ID NO: 515280 - RNA, 24 nt, Artificial Sequence
  Synthetic
acuuccauuuggaggaagaagaac

SEQ ID NO: 515281 - RNA, 18 nt, Artificial Sequence
  Synthetic
gggccacuggagaagaac

SEQ ID NO: 515282 - RNA, 19 nt, Artificial Sequence
  Synthetic
ugggccacuggagaagaac

SEQ ID NO: 515283 - RNA, 20 nt, Artificial Sequence
  Synthetic
augggccacuggagaagaac

SEQ ID NO: 515284 - RNA, 21 nt, Artificial Sequence
  Synthetic
aaugggccacuggagaagaac

SEQ ID NO: 515285 - RNA, 22 nt, Artificial Sequence
  Synthetic
gaaugggccacuggagaagaac

SEQ ID NO: 515286 - RNA, 23 nt, Artificial Sequence
  Synthetic
cgaaugggccacuggagaagaac

SEQ ID NO: 515287 - RNA, 24 nt, Artificial Sequence
  Synthetic
acgaaugggccacuggagaagaac

SEQ ID NO: 515288 - RNA, 18 nt, Artificial Sequence
  Synthetic
auaagucuuaugaagaac

SEQ ID NO: 515289 - RNA, 19 nt, Artificial Sequence
  Synthetic
uauaagucuuaugaagaac

SEQ ID NO: 515290 - RNA, 20 nt, Artificial Sequence
  Synthetic
auauaagucuuaugaagaac

SEQ ID NO: 515291 - RNA, 21 nt, Artificial Sequence
  Synthetic
uauauaagucuuaugaagaac

SEQ ID NO: 515292 - RNA, 22 nt, Artificial Sequence
  Synthetic
uuauauaagucuuaugaagaac

SEQ ID NO: 515293 - RNA, 23 nt, Artificial Sequence
  Synthetic
guuauauaagucuuaugaagaac

SEQ ID NO: 515294 - RNA, 24 nt, Artificial Sequence
  Synthetic
uguuauauaagucuuaugaagaac

SEQ ID NO: 515295 - RNA, 18 nt, Artificial Sequence
  Synthetic
uguagcaaagauaagaac

SEQ ID NO: 515296 - RNA, 19 nt, Artificial Sequence
  Synthetic
guguagcaaagauaagaac

SEQ ID NO: 515297 - RNA, 20 nt, Artificial Sequence
  Synthetic
uguguagcaaagauaagaac

SEQ ID NO: 515298 - RNA, 21 nt, Artificial Sequence
  Synthetic
guguguagcaaagauaagaac

SEQ ID NO: 515299 - RNA, 22 nt, Artificial Sequence
  Synthetic
uguguguagcaaagauaagaac

SEQ ID NO: 515300 - RNA, 23 nt, Artificial Sequence
  Synthetic
cuguguguagcaaagauaagaac

SEQ ID NO: 515301 - RNA, 24 nt, Artificial Sequence
  Synthetic
ccuguguguagcaaagauaagaac

SEQ ID NO: 515302 - RNA, 18 nt, Artificial Sequence
  Synthetic
auauauguagauaagaac

SEQ ID NO: 515303 - RNA, 19 nt, Artificial Sequence
  Synthetic
aauauauguagauaagaac

SEQ ID NO: 515304 - RNA, 20 nt, Artificial Sequence
  Synthetic
aaauauauguagauaagaac

SEQ ID NO: 515305 - RNA, 21 nt, Artificial Sequence
  Synthetic
aaaauauauguagauaagaac

SEQ ID NO: 515306 - RNA, 22 nt, Artificial Sequence
  Synthetic
uaaaauauauguagauaagaac

SEQ ID NO: 515307 - RNA, 23 nt, Artificial Sequence
  Synthetic
uuaaaauauauguagauaagaac

SEQ ID NO: 515308 - RNA, 24 nt, Artificial Sequence
  Synthetic
auuaaaauauauguagauaagaac

SEQ ID NO: 515309 - RNA, 18 nt, Artificial Sequence
  Synthetic
agccauuaugauaagaac

SEQ ID NO: 515310 - RNA, 19 nt, Artificial Sequence
  Synthetic
cagccauuaugauaagaac

SEQ ID NO: 515311 - RNA, 20 nt, Artificial Sequence
  Synthetic
ccagccauuaugauaagaac

SEQ ID NO: 515312 - RNA, 21 nt, Artificial Sequence
  Synthetic
accagccauuaugauaagaac

SEQ ID NO: 515313 - RNA, 22 nt, Artificial Sequence
  Synthetic
caccagccauuaugauaagaac

SEQ ID NO: 515314 - RNA, 23 nt, Artificial Sequence
  Synthetic
acaccagccauuaugauaagaac

SEQ ID NO: 515315 - RNA, 24 nt, Artificial Sequence
  Synthetic
gacaccagccauuaugauaagaac

SEQ ID NO: 515316 - RNA, 18 nt, Artificial Sequence
  Synthetic
ucaugauuuuauaagaac

SEQ ID NO: 515317 - RNA, 19 nt, Artificial Sequence
  Synthetic
uucaugauuuuauaagaac

SEQ ID NO: 515318 - RNA, 20 nt, Artificial Sequence
  Synthetic
auucaugauuuuauaagaac

SEQ ID NO: 515319 - RNA, 21 nt, Artificial Sequence
  Synthetic
gauucaugauuuuauaagaac

SEQ ID NO: 515320 - RNA, 22 nt, Artificial Sequence
  Synthetic
ggauucaugauuuuauaagaac

SEQ ID NO: 515321 - RNA, 23 nt, Artificial Sequence
  Synthetic
aggauucaugauuuuauaagaac

SEQ ID NO: 515322 - RNA, 24 nt, Artificial Sequence
  Synthetic
uaggauucaugauuuuauaagaac

SEQ ID NO: 515323 - RNA, 18 nt, Artificial Sequence
  Synthetic
ugacuuuuaucuaagaac

SEQ ID NO: 515324 - RNA, 19 nt, Artificial Sequence
  Synthetic
augacuuuuaucuaagaac

SEQ ID NO: 515325 - RNA, 20 nt, Artificial Sequence
  Synthetic
uaugacuuuuaucuaagaac

SEQ ID NO: 515326 - RNA, 21 nt, Artificial Sequence
  Synthetic
cuaugacuuuuaucuaagaac

SEQ ID NO: 515327 - RNA, 22 nt, Artificial Sequence
  Synthetic
acuaugacuuuuaucuaagaac

SEQ ID NO: 515328 - RNA, 23 nt, Artificial Sequence
  Synthetic
uacuaugacuuuuaucuaagaac

SEQ ID NO: 515329 - RNA, 24 nt, Artificial Sequence
  Synthetic
guacuaugacuuuuaucuaagaac

SEQ ID NO: 515330 - RNA, 18 nt, Artificial Sequence
  Synthetic
uuucuacaagaacagaac

SEQ ID NO: 515331 - RNA, 19 nt, Artificial Sequence
  Synthetic
cuuucuacaagaacagaac

SEQ ID NO: 515332 - RNA, 20 nt, Artificial Sequence
  Synthetic
ccuuucuacaagaacagaac

SEQ ID NO: 515333 - RNA, 21 nt, Artificial Sequence
  Synthetic
uccuuucuacaagaacagaac

SEQ ID NO: 515334 - RNA, 22 nt, Artificial Sequence
  Synthetic
cuccuuucuacaagaacagaac

SEQ ID NO: 515335 - RNA, 23 nt, Artificial Sequence
  Synthetic
ucuccuuucuacaagaacagaac

SEQ ID NO: 515336 - RNA, 24 nt, Artificial Sequence
  Synthetic
gucuccuuucuacaagaacagaac

SEQ ID NO: 515337 - RNA, 18 nt, Artificial Sequence
  Synthetic
uccucaaggauacagaac

SEQ ID NO: 515338 - RNA, 19 nt, Artificial Sequence
  Synthetic
uuccucaaggauacagaac

SEQ ID NO: 515339 - RNA, 20 nt, Artificial Sequence
  Synthetic
auuccucaaggauacagaac

SEQ ID NO: 515340 - RNA, 21 nt, Artificial Sequence
  Synthetic
gauuccucaaggauacagaac

SEQ ID NO: 515341 - RNA, 22 nt, Artificial Sequence
  Synthetic
cgauuccucaaggauacagaac

SEQ ID NO: 515342 - RNA, 23 nt, Artificial Sequence
  Synthetic
gcgauuccucaaggauacagaac

SEQ ID NO: 515343 - RNA, 24 nt, Artificial Sequence
  Synthetic
ggcgauuccucaaggauacagaac

SEQ ID NO: 515344 - RNA, 18 nt, Artificial Sequence
  Synthetic
aaguuccagccccagaac

SEQ ID NO: 515345 - RNA, 19 nt, Artificial Sequence
  Synthetic
uaaguuccagccccagaac

SEQ ID NO: 515346 - RNA, 20 nt, Artificial Sequence
  Synthetic
uuaaguuccagccccagaac

SEQ ID NO: 515347 - RNA, 21 nt, Artificial Sequence
  Synthetic
guuaaguuccagccccagaac

SEQ ID NO: 515348 - RNA, 22 nt, Artificial Sequence
  Synthetic
cguuaaguuccagccccagaac

SEQ ID NO: 515349 - RNA, 23 nt, Artificial Sequence
  Synthetic
acguuaaguuccagccccagaac

SEQ ID NO: 515350 - RNA, 24 nt, Artificial Sequence
  Synthetic
gacguuaaguuccagccccagaac

SEQ ID NO: 515351 - RNA, 18 nt, Artificial Sequence
  Synthetic
aaguagauauugcagaac

SEQ ID NO: 515352 - RNA, 19 nt, Artificial Sequence
  Synthetic
aaaguagauauugcagaac

SEQ ID NO: 515353 - RNA, 20 nt, Artificial Sequence
  Synthetic
caaaguagauauugcagaac

SEQ ID NO: 515354 - RNA, 21 nt, Artificial Sequence
  Synthetic
ucaaaguagauauugcagaac

SEQ ID NO: 515355 - RNA, 22 nt, Artificial Sequence
  Synthetic
gucaaaguagauauugcagaac

SEQ ID NO: 515356 - RNA, 23 nt, Artificial Sequence
  Synthetic
ugucaaaguagauauugcagaac

SEQ ID NO: 515357 - RNA, 24 nt, Artificial Sequence
  Synthetic
augucaaaguagauauugcagaac

SEQ ID NO: 515358 - RNA, 18 nt, Artificial Sequence
  Synthetic
ccuacccaggaucagaac

SEQ ID NO: 515359 - RNA, 19 nt, Artificial Sequence
  Synthetic
cccuacccaggaucagaac

SEQ ID NO: 515360 - RNA, 20 nt, Artificial Sequence
  Synthetic
acccuacccaggaucagaac

SEQ ID NO: 515361 - RNA, 21 nt, Artificial Sequence
  Synthetic
gacccuacccaggaucagaac

SEQ ID NO: 515362 - RNA, 22 nt, Artificial Sequence
  Synthetic
ugacccuacccaggaucagaac

SEQ ID NO: 515363 - RNA, 23 nt, Artificial Sequence
  Synthetic
cugacccuacccaggaucagaac

SEQ ID NO: 515364 - RNA, 24 nt, Artificial Sequence
  Synthetic
ucugacccuacccaggaucagaac

SEQ ID NO: 515365 - RNA, 18 nt, Artificial Sequence
  Synthetic
aagauauguguucagaac

SEQ ID NO: 515366 - RNA, 19 nt, Artificial Sequence
  Synthetic
aaagauauguguucagaac

SEQ ID NO: 515367 - RNA, 20 nt, Artificial Sequence
  Synthetic
gaaagauauguguucagaac

SEQ ID NO: 515368 - RNA, 21 nt, Artificial Sequence
  Synthetic
agaaagauauguguucagaac

SEQ ID NO: 515369 - RNA, 22 nt, Artificial Sequence
  Synthetic
aagaaagauauguguucagaac

SEQ ID NO: 515370 - RNA, 23 nt, Artificial Sequence
  Synthetic
gaagaaagauauguguucagaac

SEQ ID NO: 515371 - RNA, 24 nt, Artificial Sequence
  Synthetic
ggaagaaagauauguguucagaac

SEQ ID NO: 515372 - RNA, 18 nt, Artificial Sequence
  Synthetic
guacgauugcaagagaac

SEQ ID NO: 515373 - RNA, 19 nt, Artificial Sequence
  Synthetic
uguacgauugcaagagaac

SEQ ID NO: 515374 - RNA, 20 nt, Artificial Sequence
  Synthetic
uuguacgauugcaagagaac

SEQ ID NO: 515375 - RNA, 21 nt, Artificial Sequence
  Synthetic
auuguacgauugcaagagaac

SEQ ID NO: 515376 - RNA, 22 nt, Artificial Sequence
  Synthetic
aauuguacgauugcaagagaac

SEQ ID NO: 515377 - RNA, 23 nt, Artificial Sequence
  Synthetic
aaauuguacgauugcaagagaac

SEQ ID NO: 515378 - RNA, 24 nt, Artificial Sequence
  Synthetic
aaaauuguacgauugcaagagaac

SEQ ID NO: 515379 - RNA, 18 nt, Artificial Sequence
  Synthetic
cagacccaggaagagaac

SEQ ID NO: 515380 - RNA, 19 nt, Artificial Sequence
  Synthetic
ucagacccaggaagagaac

SEQ ID NO: 515381 - RNA, 20 nt, Artificial Sequence
  Synthetic
aucagacccaggaagagaac

SEQ ID NO: 515382 - RNA, 21 nt, Artificial Sequence
  Synthetic
caucagacccaggaagagaac

SEQ ID NO: 515383 - RNA, 22 nt, Artificial Sequence
  Synthetic
ucaucagacccaggaagagaac

SEQ ID NO: 515384 - RNA, 23 nt, Artificial Sequence
  Synthetic
gucaucagacccaggaagagaac

SEQ ID NO: 515385 - RNA, 24 nt, Artificial Sequence
  Synthetic
agucaucagacccaggaagagaac

SEQ ID NO: 515386 - RNA, 18 nt, Artificial Sequence
  Synthetic
aaaauggcugaagagaac

SEQ ID NO: 515387 - RNA, 19 nt, Artificial Sequence
  Synthetic
gaaaauggcugaagagaac

SEQ ID NO: 515388 - RNA, 20 nt, Artificial Sequence
  Synthetic
ugaaaauggcugaagagaac

SEQ ID NO: 515389 - RNA, 21 nt, Artificial Sequence
  Synthetic
cugaaaauggcugaagagaac

SEQ ID NO: 515390 - RNA, 22 nt, Artificial Sequence
  Synthetic
acugaaaauggcugaagagaac

SEQ ID NO: 515391 - RNA, 23 nt, Artificial Sequence
  Synthetic
aacugaaaauggcugaagagaac

SEQ ID NO: 515392 - RNA, 24 nt, Artificial Sequence
  Synthetic
caacugaaaauggcugaagagaac

SEQ ID NO: 515393 - RNA, 18 nt, Artificial Sequence
  Synthetic
ggggccugggcagagaac

SEQ ID NO: 515394 - RNA, 19 nt, Artificial Sequence
  Synthetic
uggggccugggcagagaac

SEQ ID NO: 515395 - RNA, 20 nt, Artificial Sequence
  Synthetic
uuggggccugggcagagaac

SEQ ID NO: 515396 - RNA, 21 nt, Artificial Sequence
  Synthetic
auuggggccugggcagagaac

SEQ ID NO: 515397 - RNA, 22 nt, Artificial Sequence
  Synthetic
uauuggggccugggcagagaac

SEQ ID NO: 515398 - RNA, 23 nt, Artificial Sequence
  Synthetic
auauuggggccugggcagagaac

SEQ ID NO: 515399 - RNA, 24 nt, Artificial Sequence
  Synthetic
uauauuggggccugggcagagaac

SEQ ID NO: 515400 - RNA, 18 nt, Artificial Sequence
  Synthetic
agagagaucugagagaac

SEQ ID NO: 515401 - RNA, 19 nt, Artificial Sequence
  Synthetic
gagagagaucugagagaac

SEQ ID NO: 515402 - RNA, 20 nt, Artificial Sequence
  Synthetic
cgagagagaucugagagaac

SEQ ID NO: 515403 - RNA, 21 nt, Artificial Sequence
  Synthetic
ccgagagagaucugagagaac

SEQ ID NO: 515404 - RNA, 22 nt, Artificial Sequence
  Synthetic
accgagagagaucugagagaac

SEQ ID NO: 515405 - RNA, 23 nt, Artificial Sequence
  Synthetic
aaccgagagagaucugagagaac

SEQ ID NO: 515406 - RNA, 24 nt, Artificial Sequence
  Synthetic
aaaccgagagagaucugagagaac

SEQ ID NO: 515407 - RNA, 18 nt, Artificial Sequence
  Synthetic
ucagaagaaguagagaac

SEQ ID NO: 515408 - RNA, 19 nt, Artificial Sequence
  Synthetic
cucagaagaaguagagaac

SEQ ID NO: 515409 - RNA, 20 nt, Artificial Sequence
  Synthetic
acucagaagaaguagagaac

SEQ ID NO: 515410 - RNA, 21 nt, Artificial Sequence
  Synthetic
gacucagaagaaguagagaac

SEQ ID NO: 515411 - RNA, 22 nt, Artificial Sequence
  Synthetic
agacucagaagaaguagagaac

SEQ ID NO: 515412 - RNA, 23 nt, Artificial Sequence
  Synthetic
aagacucagaagaaguagagaac

SEQ ID NO: 515413 - RNA, 24 nt, Artificial Sequence
  Synthetic
aaagacucagaagaaguagagaac

SEQ ID NO: 515414 - RNA, 18 nt, Artificial Sequence
  Synthetic
gaaauaauaucugagaac

SEQ ID NO: 515415 - RNA, 19 nt, Artificial Sequence
  Synthetic
ugaaauaauaucugagaac

SEQ ID NO: 515416 - RNA, 20 nt, Artificial Sequence
  Synthetic
augaaauaauaucugagaac

SEQ ID NO: 515417 - RNA, 21 nt, Artificial Sequence
  Synthetic
aaugaaauaauaucugagaac

SEQ ID NO: 515418 - RNA, 22 nt, Artificial Sequence
  Synthetic
aaaugaaauaauaucugagaac

SEQ ID NO: 515419 - RNA, 23 nt, Artificial Sequence
  Synthetic
aaaaugaaauaauaucugagaac

SEQ ID NO: 515420 - RNA, 24 nt, Artificial Sequence
  Synthetic
gaaaaugaaauaauaucugagaac

SEQ ID NO: 515421 - RNA, 18 nt, Artificial Sequence
  Synthetic
ucacuuauaagugagaac

SEQ ID NO: 515422 - RNA, 19 nt, Artificial Sequence
  Synthetic
uucacuuauaagugagaac

SEQ ID NO: 515423 - RNA, 20 nt, Artificial Sequence
  Synthetic
uuucacuuauaagugagaac

SEQ ID NO: 515424 - RNA, 21 nt, Artificial Sequence
  Synthetic
cuuucacuuauaagugagaac

SEQ ID NO: 515425 - RNA, 22 nt, Artificial Sequence
  Synthetic
ucuuucacuuauaagugagaac

SEQ ID NO: 515426 - RNA, 23 nt, Artificial Sequence
  Synthetic
gucuuucacuuauaagugagaac

SEQ ID NO: 515427 - RNA, 24 nt, Artificial Sequence
  Synthetic
ugucuuucacuuauaagugagaac

SEQ ID NO: 515428 - RNA, 18 nt, Artificial Sequence
  Synthetic
agcgacagcauugagaac

SEQ ID NO: 515429 - RNA, 19 nt, Artificial Sequence
  Synthetic
cagcgacagcauugagaac

SEQ ID NO: 515430 - RNA, 20 nt, Artificial Sequence
  Synthetic
ucagcgacagcauugagaac

SEQ ID NO: 515431 - RNA, 21 nt, Artificial Sequence
  Synthetic
uucagcgacagcauugagaac

SEQ ID NO: 515432 - RNA, 22 nt, Artificial Sequence
  Synthetic
uuucagcgacagcauugagaac

SEQ ID NO: 515433 - RNA, 23 nt, Artificial Sequence
  Synthetic
auuucagcgacagcauugagaac

SEQ ID NO: 515434 - RNA, 24 nt, Artificial Sequence
  Synthetic
aauuucagcgacagcauugagaac

SEQ ID NO: 515435 - RNA, 18 nt, Artificial Sequence
  Synthetic
ugcgggauacuugagaac

SEQ ID NO: 515436 - RNA, 19 nt, Artificial Sequence
  Synthetic
cugcgggauacuugagaac

SEQ ID NO: 515437 - RNA, 20 nt, Artificial Sequence
  Synthetic
acugcgggauacuugagaac

SEQ ID NO: 515438 - RNA, 21 nt, Artificial Sequence
  Synthetic
gacugcgggauacuugagaac

SEQ ID NO: 515439 - RNA, 22 nt, Artificial Sequence
  Synthetic
agacugcgggauacuugagaac

SEQ ID NO: 515440 - RNA, 23 nt, Artificial Sequence
  Synthetic
uagacugcgggauacuugagaac

SEQ ID NO: 515441 - RNA, 24 nt, Artificial Sequence
  Synthetic
guagacugcgggauacuugagaac

SEQ ID NO: 515442 - RNA, 18 nt, Artificial Sequence
  Synthetic
guuauuucaguugagaac

SEQ ID NO: 515443 - RNA, 19 nt, Artificial Sequence
  Synthetic
aguuauuucaguugagaac

SEQ ID NO: 515444 - RNA, 20 nt, Artificial Sequence
  Synthetic
uaguuauuucaguugagaac

SEQ ID NO: 515445 - RNA, 21 nt, Artificial Sequence
  Synthetic
uuaguuauuucaguugagaac

SEQ ID NO: 515446 - RNA, 22 nt, Artificial Sequence
  Synthetic
cuuaguuauuucaguugagaac

SEQ ID NO: 515447 - RNA, 23 nt, Artificial Sequence
  Synthetic
gcuuaguuauuucaguugagaac

SEQ ID NO: 515448 - RNA, 24 nt, Artificial Sequence
  Synthetic
agcuuaguuauuucaguugagaac

SEQ ID NO: 515449 - RNA, 18 nt, Artificial Sequence
  Synthetic
gccacaauagaauagaac

SEQ ID NO: 515450 - RNA, 19 nt, Artificial Sequence
  Synthetic
agccacaauagaauagaac

SEQ ID NO: 515451 - RNA, 20 nt, Artificial Sequence
  Synthetic
uagccacaauagaauagaac

SEQ ID NO: 515452 - RNA, 21 nt, Artificial Sequence
  Synthetic
uuagccacaauagaauagaac

SEQ ID NO: 515453 - RNA, 22 nt, Artificial Sequence
  Synthetic
cuuagccacaauagaauagaac

SEQ ID NO: 515454 - RNA, 23 nt, Artificial Sequence
  Synthetic
gcuuagccacaauagaauagaac

SEQ ID NO: 515455 - RNA, 24 nt, Artificial Sequence
  Synthetic
agcuuagccacaauagaauagaac

SEQ ID NO: 515456 - RNA, 18 nt, Artificial Sequence
  Synthetic
cagcaacguggauagaac

SEQ ID NO: 515457 - RNA, 19 nt, Artificial Sequence
  Synthetic
gcagcaacguggauagaac

SEQ ID NO: 515458 - RNA, 20 nt, Artificial Sequence
  Synthetic
ugcagcaacguggauagaac

SEQ ID NO: 515459 - RNA, 21 nt, Artificial Sequence
  Synthetic
uugcagcaacguggauagaac

SEQ ID NO: 515460 - RNA, 22 nt, Artificial Sequence
  Synthetic
uuugcagcaacguggauagaac

SEQ ID NO: 515461 - RNA, 23 nt, Artificial Sequence
  Synthetic
auuugcagcaacguggauagaac

SEQ ID NO: 515462 - RNA, 24 nt, Artificial Sequence
  Synthetic
cauuugcagcaacguggauagaac

SEQ ID NO: 515463 - RNA, 18 nt, Artificial Sequence
  Synthetic
acuaucaauuuauagaac

SEQ ID NO: 515464 - RNA, 19 nt, Artificial Sequence
  Synthetic
uacuaucaauuuauagaac

SEQ ID NO: 515465 - RNA, 20 nt, Artificial Sequence
  Synthetic
uuacuaucaauuuauagaac

SEQ ID NO: 515466 - RNA, 21 nt, Artificial Sequence
  Synthetic
auuacuaucaauuuauagaac

SEQ ID NO: 515467 - RNA, 22 nt, Artificial Sequence
  Synthetic
gauuacuaucaauuuauagaac

SEQ ID NO: 515468 - RNA, 23 nt, Artificial Sequence
  Synthetic
ugauuacuaucaauuuauagaac

SEQ ID NO: 515469 - RNA, 24 nt, Artificial Sequence
  Synthetic
augauuacuaucaauuuauagaac

SEQ ID NO: 515470 - RNA, 18 nt, Artificial Sequence
  Synthetic
aguguacuuuuauagaac

SEQ ID NO: 515471 - RNA, 19 nt, Artificial Sequence
  Synthetic
aaguguacuuuuauagaac

SEQ ID NO: 515472 - RNA, 20 nt, Artificial Sequence
  Synthetic
aaaguguacuuuuauagaac

SEQ ID NO: 515473 - RNA, 21 nt, Artificial Sequence
  Synthetic
gaaaguguacuuuuauagaac

SEQ ID NO: 515474 - RNA, 22 nt, Artificial Sequence
  Synthetic
agaaaguguacuuuuauagaac

SEQ ID NO: 515475 - RNA, 23 nt, Artificial Sequence
  Synthetic
aagaaaguguacuuuuauagaac

SEQ ID NO: 515476 - RNA, 24 nt, Artificial Sequence
  Synthetic
caagaaaguguacuuuuauagaac

SEQ ID NO: 515477 - RNA, 18 nt, Artificial Sequence
  Synthetic
uccucaggggccuagaac

SEQ ID NO: 515478 - RNA, 19 nt, Artificial Sequence
  Synthetic
uuccucaggggccuagaac

SEQ ID NO: 515479 - RNA, 20 nt, Artificial Sequence
  Synthetic
auuccucaggggccuagaac

SEQ ID NO: 515480 - RNA, 21 nt, Artificial Sequence
  Synthetic
gauuccucaggggccuagaac

SEQ ID NO: 515481 - RNA, 22 nt, Artificial Sequence
  Synthetic
cgauuccucaggggccuagaac

SEQ ID NO: 515482 - RNA, 23 nt, Artificial Sequence
  Synthetic
gcgauuccucaggggccuagaac

SEQ ID NO: 515483 - RNA, 24 nt, Artificial Sequence
  Synthetic
ggcgauuccucaggggccuagaac

SEQ ID NO: 515484 - RNA, 18 nt, Artificial Sequence
  Synthetic
uccucaaagaucuagaac

SEQ ID NO: 515485 - RNA, 19 nt, Artificial Sequence
  Synthetic
cuccucaaagaucuagaac

SEQ ID NO: 515486 - RNA, 20 nt, Artificial Sequence
  Synthetic
gcuccucaaagaucuagaac

SEQ ID NO: 515487 - RNA, 21 nt, Artificial Sequence
  Synthetic
agcuccucaaagaucuagaac

SEQ ID NO: 515488 - RNA, 22 nt, Artificial Sequence
  Synthetic
cagcuccucaaagaucuagaac

SEQ ID NO: 515489 - RNA, 23 nt, Artificial Sequence
  Synthetic
ccagcuccucaaagaucuagaac

SEQ ID NO: 515490 - RNA, 24 nt, Artificial Sequence
  Synthetic
uccagcuccucaaagaucuagaac

SEQ ID NO: 515491 - RNA, 21 nt, Artificial Sequence
  Synthetic
gauuccucaaggaucuagaac

SEQ ID NO: 515492 - RNA, 22 nt, Artificial Sequence
  Synthetic
agauuccucaaggaucuagaac

SEQ ID NO: 515493 - RNA, 23 nt, Artificial Sequence
  Synthetic
cagauuccucaaggaucuagaac

SEQ ID NO: 515494 - RNA, 24 nt, Artificial Sequence
  Synthetic
gcagauuccucaaggaucuagaac

SEQ ID NO: 515495 - RNA, 22 nt, Artificial Sequence
  Synthetic
cgauuccucaaggaucuagaac

SEQ ID NO: 515496 - RNA, 23 nt, Artificial Sequence
  Synthetic
gcgauuccucaaggaucuagaac

SEQ ID NO: 515497 - RNA, 24 nt, Artificial Sequence
  Synthetic
ggcgauuccucaaggaucuagaac

SEQ ID NO: 515498 - RNA, 18 nt, Artificial Sequence
  Synthetic
gauagguguaucuagaac

SEQ ID NO: 515499 - RNA, 19 nt, Artificial Sequence
  Synthetic
cgauagguguaucuagaac

SEQ ID NO: 515500 - RNA, 20 nt, Artificial Sequence
  Synthetic
ucgauagguguaucuagaac

SEQ ID NO: 515501 - RNA, 21 nt, Artificial Sequence
  Synthetic
uucgauagguguaucuagaac

SEQ ID NO: 515502 - RNA, 22 nt, Artificial Sequence
  Synthetic
uuucgauagguguaucuagaac

SEQ ID NO: 515503 - RNA, 23 nt, Artificial Sequence
  Synthetic
uuuucgauagguguaucuagaac

SEQ ID NO: 515504 - RNA, 24 nt, Artificial Sequence
  Synthetic
uuuuucgauagguguaucuagaac

SEQ ID NO: 515505 - RNA, 18 nt, Artificial Sequence
  Synthetic
uugccauaaaauuagaac

SEQ ID NO: 515506 - RNA, 19 nt, Artificial Sequence
  Synthetic
auugccauaaaauuagaac

SEQ ID NO: 515507 - RNA, 20 nt, Artificial Sequence
  Synthetic
aauugccauaaaauuagaac

SEQ ID NO: 515508 - RNA, 21 nt, Artificial Sequence
  Synthetic
aaauugccauaaaauuagaac

SEQ ID NO: 515509 - RNA, 22 nt, Artificial Sequence
  Synthetic
uaaauugccauaaaauuagaac

SEQ ID NO: 515510 - RNA, 23 nt, Artificial Sequence
  Synthetic
uuaaauugccauaaaauuagaac

SEQ ID NO: 515511 - RNA, 24 nt, Artificial Sequence
  Synthetic
guuaaauugccauaaaauuagaac

SEQ ID NO: 515512 - RNA, 18 nt, Artificial Sequence
  Synthetic
aauuuaaacuauuagaac

SEQ ID NO: 515513 - RNA, 19 nt, Artificial Sequence
  Synthetic
aaauuuaaacuauuagaac

SEQ ID NO: 515514 - RNA, 20 nt, Artificial Sequence
  Synthetic
aaaauuuaaacuauuagaac

SEQ ID NO: 515515 - RNA, 21 nt, Artificial Sequence
  Synthetic
aaaaauuuaaacuauuagaac

SEQ ID NO: 515516 - RNA, 22 nt, Artificial Sequence
  Synthetic
gaaaaauuuaaacuauuagaac

SEQ ID NO: 515517 - RNA, 23 nt, Artificial Sequence
  Synthetic
agaaaaauuuaaacuauuagaac

SEQ ID NO: 515518 - RNA, 24 nt, Artificial Sequence
  Synthetic
uagaaaaauuuaaacuauuagaac

SEQ ID NO: 515519 - RNA, 18 nt, Artificial Sequence
  Synthetic
gcugauaaguguuagaac

SEQ ID NO: 515520 - RNA, 19 nt, Artificial Sequence
  Synthetic
agcugauaaguguuagaac

SEQ ID NO: 515521 - RNA, 20 nt, Artificial Sequence
  Synthetic
uagcugauaaguguuagaac

SEQ ID NO: 515522 - RNA, 21 nt, Artificial Sequence
  Synthetic
auagcugauaaguguuagaac

SEQ ID NO: 515523 - RNA, 22 nt, Artificial Sequence
  Synthetic
uauagcugauaaguguuagaac

SEQ ID NO: 515524 - RNA, 23 nt, Artificial Sequence
  Synthetic
auauagcugauaaguguuagaac

SEQ ID NO: 515525 - RNA, 24 nt, Artificial Sequence
  Synthetic
cauauagcugauaaguguuagaac

SEQ ID NO: 515526 - RNA, 18 nt, Artificial Sequence
  Synthetic
gcaucauugguuuagaac

SEQ ID NO: 515527 - RNA, 19 nt, Artificial Sequence
  Synthetic
agcaucauugguuuagaac

SEQ ID NO: 515528 - RNA, 20 nt, Artificial Sequence
  Synthetic
aagcaucauugguuuagaac

SEQ ID NO: 515529 - RNA, 21 nt, Artificial Sequence
  Synthetic
aaagcaucauugguuuagaac

SEQ ID NO: 515530 - RNA, 22 nt, Artificial Sequence
  Synthetic
aaaagcaucauugguuuagaac

SEQ ID NO: 515531 - RNA, 23 nt, Artificial Sequence
  Synthetic
gaaaagcaucauugguuuagaac

SEQ ID NO: 515532 - RNA, 24 nt, Artificial Sequence
  Synthetic
ugaaaagcaucauugguuuagaac

SEQ ID NO: 515533 - RNA, 18 nt, Artificial Sequence
  Synthetic
auuccaggaaaaacgaac

SEQ ID NO: 515534 - RNA, 19 nt, Artificial Sequence
  Synthetic
uauuccaggaaaaacgaac

SEQ ID NO: 515535 - RNA, 20 nt, Artificial Sequence
  Synthetic
uuauuccaggaaaaacgaac

SEQ ID NO: 515536 - RNA, 21 nt, Artificial Sequence
  Synthetic
uuuauuccaggaaaaacgaac

SEQ ID NO: 515537 - RNA, 22 nt, Artificial Sequence
  Synthetic
auuuauuccaggaaaaacgaac

SEQ ID NO: 515538 - RNA, 23 nt, Artificial Sequence
  Synthetic
uauuuauuccaggaaaaacgaac

SEQ ID NO: 515539 - RNA, 24 nt, Artificial Sequence
  Synthetic
auauuuauuccaggaaaaacgaac

SEQ ID NO: 515540 - RNA, 18 nt, Artificial Sequence
  Synthetic
cagagucagaagacgaac

SEQ ID NO: 515541 - RNA, 19 nt, Artificial Sequence
  Synthetic
acagagucagaagacgaac

SEQ ID NO: 515542 - RNA, 20 nt, Artificial Sequence
  Synthetic
uacagagucagaagacgaac

SEQ ID NO: 515543 - RNA, 21 nt, Artificial Sequence
  Synthetic
auacagagucagaagacgaac

SEQ ID NO: 515544 - RNA, 22 nt, Artificial Sequence
  Synthetic
gauacagagucagaagacgaac

SEQ ID NO: 515545 - RNA, 23 nt, Artificial Sequence
  Synthetic
agauacagagucagaagacgaac

SEQ ID NO: 515546 - RNA, 24 nt, Artificial Sequence
  Synthetic
aagauacagagucagaagacgaac

SEQ ID NO: 515547 - RNA, 18 nt, Artificial Sequence
  Synthetic
ugaggguaaauggcgaac

SEQ ID NO: 515548 - RNA, 19 nt, Artificial Sequence
  Synthetic
augaggguaaauggcgaac

SEQ ID NO: 515549 - RNA, 20 nt, Artificial Sequence
  Synthetic
caugaggguaaauggcgaac

SEQ ID NO: 515550 - RNA, 21 nt, Artificial Sequence
  Synthetic
gcaugaggguaaauggcgaac

SEQ ID NO: 515551 - RNA, 22 nt, Artificial Sequence
  Synthetic
ugcaugaggguaaauggcgaac

SEQ ID NO: 515552 - RNA, 23 nt, Artificial Sequence
  Synthetic
uugcaugaggguaaauggcgaac

SEQ ID NO: 515553 - RNA, 24 nt, Artificial Sequence
  Synthetic
cuugcaugaggguaaauggcgaac

SEQ ID NO: 515554 - RNA, 18 nt, Artificial Sequence
  Synthetic
aagagauuaaaaucgaac

SEQ ID NO: 515555 - RNA, 19 nt, Artificial Sequence
  Synthetic
uaagagauuaaaaucgaac

SEQ ID NO: 515556 - RNA, 20 nt, Artificial Sequence
  Synthetic
auaagagauuaaaaucgaac

SEQ ID NO: 515557 - RNA, 21 nt, Artificial Sequence
  Synthetic
gauaagagauuaaaaucgaac

SEQ ID NO: 515558 - RNA, 22 nt, Artificial Sequence
  Synthetic
ugauaagagauuaaaaucgaac

SEQ ID NO: 515559 - RNA, 23 nt, Artificial Sequence
  Synthetic
augauaagagauuaaaaucgaac

SEQ ID NO: 515560 - RNA, 24 nt, Artificial Sequence
  Synthetic
aaugauaagagauuaaaaucgaac

SEQ ID NO: 515561 - RNA, 18 nt, Artificial Sequence
  Synthetic
ucccuuguggucucgaac

SEQ ID NO: 515562 - RNA, 19 nt, Artificial Sequence
  Synthetic
uucccuuguggucucgaac

SEQ ID NO: 515563 - RNA, 20 nt, Artificial Sequence
  Synthetic
uuucccuuguggucucgaac

SEQ ID NO: 515564 - RNA, 21 nt, Artificial Sequence
  Synthetic
cuuucccuuguggucucgaac

SEQ ID NO: 515565 - RNA, 22 nt, Artificial Sequence
  Synthetic
gcuuucccuuguggucucgaac

SEQ ID NO: 515566 - RNA, 23 nt, Artificial Sequence
  Synthetic
agcuuucccuuguggucucgaac

SEQ ID NO: 515567 - RNA, 24 nt, Artificial Sequence
  Synthetic
cagcuuucccuuguggucucgaac

SEQ ID NO: 515568 - RNA, 18 nt, Artificial Sequence
  Synthetic
ugucagaggcguucgaac

SEQ ID NO: 515569 - RNA, 19 nt, Artificial Sequence
  Synthetic
augucagaggcguucgaac

SEQ ID NO: 515570 - RNA, 20 nt, Artificial Sequence
  Synthetic
uaugucagaggcguucgaac

SEQ ID NO: 515571 - RNA, 21 nt, Artificial Sequence
  Synthetic
auaugucagaggcguucgaac

SEQ ID NO: 515572 - RNA, 22 nt, Artificial Sequence
  Synthetic
aauaugucagaggcguucgaac

SEQ ID NO: 515573 - RNA, 23 nt, Artificial Sequence
  Synthetic
aaauaugucagaggcguucgaac

SEQ ID NO: 515574 - RNA, 24 nt, Artificial Sequence
  Synthetic
gaaauaugucagaggcguucgaac

SEQ ID NO: 515575 - RNA, 18 nt, Artificial Sequence
  Synthetic
gcuuggugagaaaggaac

SEQ ID NO: 515576 - RNA, 19 nt, Artificial Sequence
  Synthetic
ugcuuggugagaaaggaac

SEQ ID NO: 515577 - RNA, 20 nt, Artificial Sequence
  Synthetic
augcuuggugagaaaggaac

SEQ ID NO: 515578 - RNA, 21 nt, Artificial Sequence
  Synthetic
gaugcuuggugagaaaggaac

SEQ ID NO: 515579 - RNA, 22 nt, Artificial Sequence
  Synthetic
ugaugcuuggugagaaaggaac

SEQ ID NO: 515580 - RNA, 23 nt, Artificial Sequence
  Synthetic
augaugcuuggugagaaaggaac

SEQ ID NO: 515581 - RNA, 24 nt, Artificial Sequence
  Synthetic
aaugaugcuuggugagaaaggaac

SEQ ID NO: 515582 - RNA, 18 nt, Artificial Sequence
  Synthetic
gaggaguggccaaggaac

SEQ ID NO: 515583 - RNA, 19 nt, Artificial Sequence
  Synthetic
ggaggaguggccaaggaac

SEQ ID NO: 515584 - RNA, 20 nt, Artificial Sequence
  Synthetic
uggaggaguggccaaggaac

SEQ ID NO: 515585 - RNA, 21 nt, Artificial Sequence
  Synthetic
cuggaggaguggccaaggaac

SEQ ID NO: 515586 - RNA, 22 nt, Artificial Sequence
  Synthetic
ccuggaggaguggccaaggaac

SEQ ID NO: 515587 - RNA, 23 nt, Artificial Sequence
  Synthetic
gccuggaggaguggccaaggaac

SEQ ID NO: 515588 - RNA, 24 nt, Artificial Sequence
  Synthetic
ugccuggaggaguggccaaggaac

SEQ ID NO: 515589 - RNA, 18 nt, Artificial Sequence
  Synthetic
ugucacauuucaaggaac

SEQ ID NO: 515590 - RNA, 19 nt, Artificial Sequence
  Synthetic
augucacauuucaaggaac

SEQ ID NO: 515591 - RNA, 20 nt, Artificial Sequence
  Synthetic
aaugucacauuucaaggaac

SEQ ID NO: 515592 - RNA, 21 nt, Artificial Sequence
  Synthetic
uaaugucacauuucaaggaac

SEQ ID NO: 515593 - RNA, 22 nt, Artificial Sequence
  Synthetic
cuaaugucacauuucaaggaac

SEQ ID NO: 515594 - RNA, 23 nt, Artificial Sequence
  Synthetic
ccuaaugucacauuucaaggaac

SEQ ID NO: 515595 - RNA, 24 nt, Artificial Sequence
  Synthetic
accuaaugucacauuucaaggaac

SEQ ID NO: 515596 - RNA, 18 nt, Artificial Sequence
  Synthetic
guuaggggaagaaggaac

SEQ ID NO: 515597 - RNA, 19 nt, Artificial Sequence
  Synthetic
gguuaggggaagaaggaac

SEQ ID NO: 515598 - RNA, 20 nt, Artificial Sequence
  Synthetic
ggguuaggggaagaaggaac

SEQ ID NO: 515599 - RNA, 21 nt, Artificial Sequence
  Synthetic
gggguuaggggaagaaggaac

SEQ ID NO: 515600 - RNA, 22 nt, Artificial Sequence
  Synthetic
agggguuaggggaagaaggaac

SEQ ID NO: 515601 - RNA, 23 nt, Artificial Sequence
  Synthetic
uagggguuaggggaagaaggaac

SEQ ID NO: 515602 - RNA, 24 nt, Artificial Sequence
  Synthetic
guagggguuaggggaagaaggaac

SEQ ID NO: 515603 - RNA, 18 nt, Artificial Sequence
  Synthetic
uaauagguuggaaggaac

SEQ ID NO: 515604 - RNA, 19 nt, Artificial Sequence
  Synthetic
uuaauagguuggaaggaac

SEQ ID NO: 515605 - RNA, 20 nt, Artificial Sequence
  Synthetic
cuuaauagguuggaaggaac

SEQ ID NO: 515606 - RNA, 21 nt, Artificial Sequence
  Synthetic
ccuuaauagguuggaaggaac

SEQ ID NO: 515607 - RNA, 22 nt, Artificial Sequence
  Synthetic
accuuaauagguuggaaggaac

SEQ ID NO: 515608 - RNA, 23 nt, Artificial Sequence
  Synthetic
aaccuuaauagguuggaaggaac

SEQ ID NO: 515609 - RNA, 24 nt, Artificial Sequence
  Synthetic
gaaccuuaauagguuggaaggaac

SEQ ID NO: 515610 - RNA, 18 nt, Artificial Sequence
  Synthetic
guugggguuggaaggaac

SEQ ID NO: 515611 - RNA, 19 nt, Artificial Sequence
  Synthetic
uguugggguuggaaggaac

SEQ ID NO: 515612 - RNA, 20 nt, Artificial Sequence
  Synthetic
cuguugggguuggaaggaac

SEQ ID NO: 515613 - RNA, 21 nt, Artificial Sequence
  Synthetic
gcuguugggguuggaaggaac

SEQ ID NO: 515614 - RNA, 22 nt, Artificial Sequence
  Synthetic
ggcuguugggguuggaaggaac

SEQ ID NO: 515615 - RNA, 23 nt, Artificial Sequence
  Synthetic
aggcuguugggguuggaaggaac

SEQ ID NO: 515616 - RNA, 24 nt, Artificial Sequence
  Synthetic
uaggcuguugggguuggaaggaac

SEQ ID NO: 515617 - RNA, 18 nt, Artificial Sequence
  Synthetic
caucacaccugaaggaac

SEQ ID NO: 515618 - RNA, 19 nt, Artificial Sequence
  Synthetic
acaucacaccugaaggaac

SEQ ID NO: 515619 - RNA, 20 nt, Artificial Sequence
  Synthetic
aacaucacaccugaaggaac

SEQ ID NO: 515620 - RNA, 21 nt, Artificial Sequence
  Synthetic
uaacaucacaccugaaggaac

SEQ ID NO: 515621 - RNA, 22 nt, Artificial Sequence
  Synthetic
cuaacaucacaccugaaggaac

SEQ ID NO: 515622 - RNA, 23 nt, Artificial Sequence
  Synthetic
ccuaacaucacaccugaaggaac

SEQ ID NO: 515623 - RNA, 24 nt, Artificial Sequence
  Synthetic
accuaacaucacaccugaaggaac

SEQ ID NO: 515624 - RNA, 18 nt, Artificial Sequence
  Synthetic
gcaaauuaacgcaggaac

SEQ ID NO: 515625 - RNA, 19 nt, Artificial Sequence
  Synthetic
agcaaauuaacgcaggaac

SEQ ID NO: 515626 - RNA, 20 nt, Artificial Sequence
  Synthetic
aagcaaauuaacgcaggaac

SEQ ID NO: 515627 - RNA, 21 nt, Artificial Sequence
  Synthetic
uaagcaaauuaacgcaggaac

SEQ ID NO: 515628 - RNA, 22 nt, Artificial Sequence
  Synthetic
auaagcaaauuaacgcaggaac

SEQ ID NO: 515629 - RNA, 23 nt, Artificial Sequence
  Synthetic
cauaagcaaauuaacgcaggaac

SEQ ID NO: 515630 - RNA, 24 nt, Artificial Sequence
  Synthetic
ucauaagcaaauuaacgcaggaac

SEQ ID NO: 515631 - RNA, 18 nt, Artificial Sequence
  Synthetic
augauugcaaagaggaac

SEQ ID NO: 515632 - RNA, 19 nt, Artificial Sequence
  Synthetic
aaugauugcaaagaggaac

SEQ ID NO: 515633 - RNA, 20 nt, Artificial Sequence
  Synthetic
uaaugauugcaaagaggaac

SEQ ID NO: 515634 - RNA, 21 nt, Artificial Sequence
  Synthetic
cuaaugauugcaaagaggaac

SEQ ID NO: 515635 - RNA, 22 nt, Artificial Sequence
  Synthetic
acuaaugauugcaaagaggaac

SEQ ID NO: 515636 - RNA, 23 nt, Artificial Sequence
  Synthetic
gacuaaugauugcaaagaggaac

SEQ ID NO: 515637 - RNA, 24 nt, Artificial Sequence
  Synthetic
agacuaaugauugcaaagaggaac

SEQ ID NO: 515638 - RNA, 18 nt, Artificial Sequence
  Synthetic
uugcuucaugagaggaac

SEQ ID NO: 515639 - RNA, 19 nt, Artificial Sequence
  Synthetic
uuugcuucaugagaggaac

SEQ ID NO: 515640 - RNA, 20 nt, Artificial Sequence
  Synthetic
auuugcuucaugagaggaac

SEQ ID NO: 515641 - RNA, 21 nt, Artificial Sequence
  Synthetic
gauuugcuucaugagaggaac

SEQ ID NO: 515642 - RNA, 22 nt, Artificial Sequence
  Synthetic
ugauuugcuucaugagaggaac

SEQ ID NO: 515643 - RNA, 23 nt, Artificial Sequence
  Synthetic
uugauuugcuucaugagaggaac

SEQ ID NO: 515644 - RNA, 24 nt, Artificial Sequence
  Synthetic
auugauuugcuucaugagaggaac

SEQ ID NO: 515645 - RNA, 18 nt, Artificial Sequence
  Synthetic
guuggacaaaugaggaac

SEQ ID NO: 515646 - RNA, 19 nt, Artificial Sequence
  Synthetic
uguuggacaaaugaggaac

SEQ ID NO: 515647 - RNA, 20 nt, Artificial Sequence
  Synthetic
cuguuggacaaaugaggaac

SEQ ID NO: 515648 - RNA, 21 nt, Artificial Sequence
  Synthetic
acuguuggacaaaugaggaac

SEQ ID NO: 515649 - RNA, 22 nt, Artificial Sequence
  Synthetic
cacuguuggacaaaugaggaac

SEQ ID NO: 515650 - RNA, 23 nt, Artificial Sequence
  Synthetic
ucacuguuggacaaaugaggaac

SEQ ID NO: 515651 - RNA, 24 nt, Artificial Sequence
  Synthetic
aucacuguuggacaaaugaggaac

SEQ ID NO: 515652 - RNA, 18 nt, Artificial Sequence
  Synthetic
aauuuggaaaugaggaac

SEQ ID NO: 515653 - RNA, 19 nt, Artificial Sequence
  Synthetic
aaauuuggaaaugaggaac

SEQ ID NO: 515654 - RNA, 20 nt, Artificial Sequence
  Synthetic
aaaauuuggaaaugaggaac

SEQ ID NO: 515655 - RNA, 21 nt, Artificial Sequence
  Synthetic
uaaaauuuggaaaugaggaac

SEQ ID NO: 515656 - RNA, 22 nt, Artificial Sequence
  Synthetic
auaaaauuuggaaaugaggaac

SEQ ID NO: 515657 - RNA, 23 nt, Artificial Sequence
  Synthetic
uauaaaauuuggaaaugaggaac

SEQ ID NO: 515658 - RNA, 24 nt, Artificial Sequence
  Synthetic
guauaaaauuuggaaaugaggaac

SEQ ID NO: 515659 - RNA, 18 nt, Artificial Sequence
  Synthetic
aagugaaggaugaggaac

SEQ ID NO: 515660 - RNA, 19 nt, Artificial Sequence
  Synthetic
aaagugaaggaugaggaac

SEQ ID NO: 515661 - RNA, 20 nt, Artificial Sequence
  Synthetic
uaaagugaaggaugaggaac

SEQ ID NO: 515662 - RNA, 21 nt, Artificial Sequence
  Synthetic
auaaagugaaggaugaggaac

SEQ ID NO: 515663 - RNA, 22 nt, Artificial Sequence
  Synthetic
aauaaagugaaggaugaggaac

SEQ ID NO: 515664 - RNA, 23 nt, Artificial Sequence
  Synthetic
caauaaagugaaggaugaggaac

SEQ ID NO: 515665 - RNA, 24 nt, Artificial Sequence
  Synthetic
ucaauaaagugaaggaugaggaac

SEQ ID NO: 515666 - RNA, 18 nt, Artificial Sequence
  Synthetic
cugccagagcugaggaac

SEQ ID NO: 515667 - RNA, 19 nt, Artificial Sequence
  Synthetic
acugccagagcugaggaac

SEQ ID NO: 515668 - RNA, 20 nt, Artificial Sequence
  Synthetic
gacugccagagcugaggaac

SEQ ID NO: 515669 - RNA, 21 nt, Artificial Sequence
  Synthetic
ggacugccagagcugaggaac

SEQ ID NO: 515670 - RNA, 22 nt, Artificial Sequence
  Synthetic
cggacugccagagcugaggaac

SEQ ID NO: 515671 - RNA, 23 nt, Artificial Sequence
  Synthetic
gcggacugccagagcugaggaac

SEQ ID NO: 515672 - RNA, 24 nt, Artificial Sequence
  Synthetic
ggcggacugccagagcugaggaac

SEQ ID NO: 515673 - RNA, 18 nt, Artificial Sequence
  Synthetic
ggguaaaaauugaggaac

SEQ ID NO: 515674 - RNA, 19 nt, Artificial Sequence
  Synthetic
uggguaaaaauugaggaac

SEQ ID NO: 515675 - RNA, 20 nt, Artificial Sequence
  Synthetic
auggguaaaaauugaggaac

SEQ ID NO: 515676 - RNA, 21 nt, Artificial Sequence
  Synthetic
cauggguaaaaauugaggaac

SEQ ID NO: 515677 - RNA, 22 nt, Artificial Sequence
  Synthetic
ucauggguaaaaauugaggaac

SEQ ID NO: 515678 - RNA, 23 nt, Artificial Sequence
  Synthetic
cucauggguaaaaauugaggaac

SEQ ID NO: 515679 - RNA, 24 nt, Artificial Sequence
  Synthetic
ucucauggguaaaaauugaggaac

SEQ ID NO: 515680 - RNA, 18 nt, Artificial Sequence
  Synthetic
uuaagcaacauuaggaac

SEQ ID NO: 515681 - RNA, 19 nt, Artificial Sequence
  Synthetic
auuaagcaacauuaggaac

SEQ ID NO: 515682 - RNA, 20 nt, Artificial Sequence
  Synthetic
aauuaagcaacauuaggaac

SEQ ID NO: 515683 - RNA, 21 nt, Artificial Sequence
  Synthetic
aaauuaagcaacauuaggaac

SEQ ID NO: 515684 - RNA, 22 nt, Artificial Sequence
  Synthetic
aaaauuaagcaacauuaggaac

SEQ ID NO: 515685 - RNA, 23 nt, Artificial Sequence
  Synthetic
aaaaauuaagcaacauuaggaac

SEQ ID NO: 515686 - RNA, 24 nt, Artificial Sequence
  Synthetic
aaaaaauuaagcaacauuaggaac

SEQ ID NO: 515687 - RNA, 18 nt, Artificial Sequence
  Synthetic
caaggguauuuuaggaac

SEQ ID NO: 515688 - RNA, 19 nt, Artificial Sequence
  Synthetic
ccaaggguauuuuaggaac

SEQ ID NO: 515689 - RNA, 20 nt, Artificial Sequence
  Synthetic
accaaggguauuuuaggaac

SEQ ID NO: 515690 - RNA, 21 nt, Artificial Sequence
  Synthetic
aaccaaggguauuuuaggaac

SEQ ID NO: 515691 - RNA, 22 nt, Artificial Sequence
  Synthetic
aaaccaaggguauuuuaggaac

SEQ ID NO: 515692 - RNA, 23 nt, Artificial Sequence
  Synthetic
gaaaccaaggguauuuuaggaac

SEQ ID NO: 515693 - RNA, 24 nt, Artificial Sequence
  Synthetic
ggaaaccaaggguauuuuaggaac

SEQ ID NO: 515694 - RNA, 18 nt, Artificial Sequence
  Synthetic
uguauuccaagagggaac

SEQ ID NO: 515695 - RNA, 19 nt, Artificial Sequence
  Synthetic
auguauuccaagagggaac

SEQ ID NO: 515696 - RNA, 20 nt, Artificial Sequence
  Synthetic
aauguauuccaagagggaac

SEQ ID NO: 515697 - RNA, 21 nt, Artificial Sequence
  Synthetic
gaauguauuccaagagggaac

SEQ ID NO: 515698 - RNA, 22 nt, Artificial Sequence
  Synthetic
agaauguauuccaagagggaac

SEQ ID NO: 515699 - RNA, 23 nt, Artificial Sequence
  Synthetic
gagaauguauuccaagagggaac

SEQ ID NO: 515700 - RNA, 24 nt, Artificial Sequence
  Synthetic
agagaauguauuccaagagggaac

SEQ ID NO: 515701 - RNA, 18 nt, Artificial Sequence
  Synthetic
ucauaacugggagggaac

SEQ ID NO: 515702 - RNA, 19 nt, Artificial Sequence
  Synthetic
cucauaacugggagggaac

SEQ ID NO: 515703 - RNA, 20 nt, Artificial Sequence
  Synthetic
gcucauaacugggagggaac

SEQ ID NO: 515704 - RNA, 21 nt, Artificial Sequence
  Synthetic
ggcucauaacugggagggaac

SEQ ID NO: 515705 - RNA, 22 nt, Artificial Sequence
  Synthetic
aggcucauaacugggagggaac

SEQ ID NO: 515706 - RNA, 23 nt, Artificial Sequence
  Synthetic
gaggcucauaacugggagggaac

SEQ ID NO: 515707 - RNA, 24 nt, Artificial Sequence
  Synthetic
agaggcucauaacugggagggaac

SEQ ID NO: 515708 - RNA, 18 nt, Artificial Sequence
  Synthetic
ggaaacacuguagggaac

SEQ ID NO: 515709 - RNA, 19 nt, Artificial Sequence
  Synthetic
aggaaacacuguagggaac

SEQ ID NO: 515710 - RNA, 20 nt, Artificial Sequence
  Synthetic
uaggaaacacuguagggaac

SEQ ID NO: 515711 - RNA, 21 nt, Artificial Sequence
  Synthetic
cuaggaaacacuguagggaac

SEQ ID NO: 515712 - RNA, 22 nt, Artificial Sequence
  Synthetic
ccuaggaaacacuguagggaac

SEQ ID NO: 515713 - RNA, 23 nt, Artificial Sequence
  Synthetic
uccuaggaaacacuguagggaac

SEQ ID NO: 515714 - RNA, 24 nt, Artificial Sequence
  Synthetic
auccuaggaaacacuguagggaac

SEQ ID NO: 515715 - RNA, 18 nt, Artificial Sequence
  Synthetic
ugagguuugcuggggaac

SEQ ID NO: 515716 - RNA, 19 nt, Artificial Sequence
  Synthetic
uugagguuugcuggggaac

SEQ ID NO: 515717 - RNA, 20 nt, Artificial Sequence
  Synthetic
guugagguuugcuggggaac

SEQ ID NO: 515718 - RNA, 21 nt, Artificial Sequence
  Synthetic
gguugagguuugcuggggaac

SEQ ID NO: 515719 - RNA, 22 nt, Artificial Sequence
  Synthetic
ugguugagguuugcuggggaac

SEQ ID NO: 515720 - RNA, 23 nt, Artificial Sequence
  Synthetic
uugguugagguuugcuggggaac

SEQ ID NO: 515721 - RNA, 24 nt, Artificial Sequence
  Synthetic
auugguugagguuugcuggggaac

SEQ ID NO: 515722 - RNA, 18 nt, Artificial Sequence
  Synthetic
auuacuaaucuggggaac

SEQ ID NO: 515723 - RNA, 19 nt, Artificial Sequence
  Synthetic
gauuacuaaucuggggaac

SEQ ID NO: 515724 - RNA, 20 nt, Artificial Sequence
  Synthetic
agauuacuaaucuggggaac

SEQ ID NO: 515725 - RNA, 21 nt, Artificial Sequence
  Synthetic
uagauuacuaaucuggggaac

SEQ ID NO: 515726 - RNA, 22 nt, Artificial Sequence
  Synthetic
guagauuacuaaucuggggaac

SEQ ID NO: 515727 - RNA, 23 nt, Artificial Sequence
  Synthetic
aguagauuacuaaucuggggaac

SEQ ID NO: 515728 - RNA, 24 nt, Artificial Sequence
  Synthetic
gaguagauuacuaaucuggggaac

SEQ ID NO: 515729 - RNA, 18 nt, Artificial Sequence
  Synthetic
aauuucucaguugggaac

SEQ ID NO: 515730 - RNA, 19 nt, Artificial Sequence
  Synthetic
gaauuucucaguugggaac

SEQ ID NO: 515731 - RNA, 20 nt, Artificial Sequence
  Synthetic
ugaauuucucaguugggaac

SEQ ID NO: 515732 - RNA, 21 nt, Artificial Sequence
  Synthetic
cugaauuucucaguugggaac

SEQ ID NO: 515733 - RNA, 22 nt, Artificial Sequence
  Synthetic
ucugaauuucucaguugggaac

SEQ ID NO: 515734 - RNA, 23 nt, Artificial Sequence
  Synthetic
uucugaauuucucaguugggaac

SEQ ID NO: 515735 - RNA, 24 nt, Artificial Sequence
  Synthetic
cuucugaauuucucaguugggaac

SEQ ID NO: 515736 - RNA, 18 nt, Artificial Sequence
  Synthetic
auaggacagaaauggaac

SEQ ID NO: 515737 - RNA, 19 nt, Artificial Sequence
  Synthetic
gauaggacagaaauggaac

SEQ ID NO: 515738 - RNA, 20 nt, Artificial Sequence
  Synthetic
ugauaggacagaaauggaac

SEQ ID NO: 515739 - RNA, 21 nt, Artificial Sequence
  Synthetic
cugauaggacagaaauggaac

SEQ ID NO: 515740 - RNA, 22 nt, Artificial Sequence
  Synthetic
ucugauaggacagaaauggaac

SEQ ID NO: 515741 - RNA, 23 nt, Artificial Sequence
  Synthetic
cucugauaggacagaaauggaac

SEQ ID NO: 515742 - RNA, 24 nt, Artificial Sequence
  Synthetic
acucugauaggacagaaauggaac

SEQ ID NO: 515743 - RNA, 18 nt, Artificial Sequence
  Synthetic
caacaucauggauggaac

SEQ ID NO: 515744 - RNA, 19 nt, Artificial Sequence
  Synthetic
gcaacaucauggauggaac

SEQ ID NO: 515745 - RNA, 20 nt, Artificial Sequence
  Synthetic
ugcaacaucauggauggaac

SEQ ID NO: 515746 - RNA, 21 nt, Artificial Sequence
  Synthetic
uugcaacaucauggauggaac

SEQ ID NO: 515747 - RNA, 22 nt, Artificial Sequence
  Synthetic
uuugcaacaucauggauggaac

SEQ ID NO: 515748 - RNA, 23 nt, Artificial Sequence
  Synthetic
auuugcaacaucauggauggaac

SEQ ID NO: 515749 - RNA, 24 nt, Artificial Sequence
  Synthetic
cauuugcaacaucauggauggaac

SEQ ID NO: 515750 - RNA, 18 nt, Artificial Sequence
  Synthetic
caacaucuuggauggaac

SEQ ID NO: 515751 - RNA, 19 nt, Artificial Sequence
  Synthetic
gcaacaucuuggauggaac

SEQ ID NO: 515752 - RNA, 20 nt, Artificial Sequence
  Synthetic
ugcaacaucuuggauggaac

SEQ ID NO: 515753 - RNA, 21 nt, Artificial Sequence
  Synthetic
uugcaacaucuuggauggaac

SEQ ID NO: 515754 - RNA, 22 nt, Artificial Sequence
  Synthetic
uuugcaacaucuuggauggaac

SEQ ID NO: 515755 - RNA, 23 nt, Artificial Sequence
  Synthetic
auuugcaacaucuuggauggaac

SEQ ID NO: 515756 - RNA, 24 nt, Artificial Sequence
  Synthetic
cauuugcaacaucuuggauggaac

SEQ ID NO: 515757 - RNA, 18 nt, Artificial Sequence
  Synthetic
auuucugaaugauggaac

SEQ ID NO: 515758 - RNA, 19 nt, Artificial Sequence
  Synthetic
cauuucugaaugauggaac

SEQ ID NO: 515759 - RNA, 20 nt, Artificial Sequence
  Synthetic
gcauuucugaaugauggaac

SEQ ID NO: 515760 - RNA, 21 nt, Artificial Sequence
  Synthetic
agcauuucugaaugauggaac

SEQ ID NO: 515761 - RNA, 22 nt, Artificial Sequence
  Synthetic
gagcauuucugaaugauggaac

SEQ ID NO: 515762 - RNA, 23 nt, Artificial Sequence
  Synthetic
agagcauuucugaaugauggaac

SEQ ID NO: 515763 - RNA, 24 nt, Artificial Sequence
  Synthetic
aagagcauuucugaaugauggaac

SEQ ID NO: 515764 - RNA, 18 nt, Artificial Sequence
  Synthetic
acaugagcaugauggaac

SEQ ID NO: 515765 - RNA, 19 nt, Artificial Sequence
  Synthetic
aacaugagcaugauggaac

SEQ ID NO: 515766 - RNA, 20 nt, Artificial Sequence
  Synthetic
aaacaugagcaugauggaac

SEQ ID NO: 515767 - RNA, 21 nt, Artificial Sequence
  Synthetic
gaaacaugagcaugauggaac

SEQ ID NO: 515768 - RNA, 22 nt, Artificial Sequence
  Synthetic
ugaaacaugagcaugauggaac

SEQ ID NO: 515769 - RNA, 23 nt, Artificial Sequence
  Synthetic
uugaaacaugagcaugauggaac

SEQ ID NO: 515770 - RNA, 24 nt, Artificial Sequence
  Synthetic
cuugaaacaugagcaugauggaac

SEQ ID NO: 515771 - RNA, 18 nt, Artificial Sequence
  Synthetic
cagguuccacgguggaac

SEQ ID NO: 515772 - RNA, 19 nt, Artificial Sequence
  Synthetic
acagguuccacgguggaac

SEQ ID NO: 515773 - RNA, 20 nt, Artificial Sequence
  Synthetic
gacagguuccacgguggaac

SEQ ID NO: 515774 - RNA, 21 nt, Artificial Sequence
  Synthetic
agacagguuccacgguggaac

SEQ ID NO: 515775 - RNA, 22 nt, Artificial Sequence
  Synthetic
cagacagguuccacgguggaac

SEQ ID NO: 515776 - RNA, 23 nt, Artificial Sequence
  Synthetic
ucagacagguuccacgguggaac

SEQ ID NO: 515777 - RNA, 24 nt, Artificial Sequence
  Synthetic
gucagacagguuccacgguggaac

SEQ ID NO: 515778 - RNA, 18 nt, Artificial Sequence
  Synthetic
uggcagucaucuuggaac

SEQ ID NO: 515779 - RNA, 19 nt, Artificial Sequence
  Synthetic
cuggcagucaucuuggaac

SEQ ID NO: 515780 - RNA, 20 nt, Artificial Sequence
  Synthetic
gcuggcagucaucuuggaac

SEQ ID NO: 515781 - RNA, 21 nt, Artificial Sequence
  Synthetic
ugcuggcagucaucuuggaac

SEQ ID NO: 515782 - RNA, 22 nt, Artificial Sequence
  Synthetic
uugcuggcagucaucuuggaac

SEQ ID NO: 515783 - RNA, 23 nt, Artificial Sequence
  Synthetic
guugcuggcagucaucuuggaac

SEQ ID NO: 515784 - RNA, 24 nt, Artificial Sequence
  Synthetic
uguugcuggcagucaucuuggaac

SEQ ID NO: 515785 - RNA, 18 nt, Artificial Sequence
  Synthetic
uuaagguuaguuuggaac

SEQ ID NO: 515786 - RNA, 19 nt, Artificial Sequence
  Synthetic
uuuaagguuaguuuggaac

SEQ ID NO: 515787 - RNA, 20 nt, Artificial Sequence
  Synthetic
auuuaagguuaguuuggaac

SEQ ID NO: 515788 - RNA, 21 nt, Artificial Sequence
  Synthetic
cauuuaagguuaguuuggaac

SEQ ID NO: 515789 - RNA, 22 nt, Artificial Sequence
  Synthetic
acauuuaagguuaguuuggaac

SEQ ID NO: 515790 - RNA, 23 nt, Artificial Sequence
  Synthetic
aacauuuaagguuaguuuggaac

SEQ ID NO: 515791 - RNA, 24 nt, Artificial Sequence
  Synthetic
uaacauuuaagguuaguuuggaac

SEQ ID NO: 515792 - RNA, 18 nt, Artificial Sequence
  Synthetic
cagaccuuaaaaaugaac

SEQ ID NO: 515793 - RNA, 19 nt, Artificial Sequence
  Synthetic
acagaccuuaaaaaugaac

SEQ ID NO: 515794 - RNA, 20 nt, Artificial Sequence
  Synthetic
uacagaccuuaaaaaugaac

SEQ ID NO: 515795 - RNA, 21 nt, Artificial Sequence
  Synthetic
cuacagaccuuaaaaaugaac

SEQ ID NO: 515796 - RNA, 22 nt, Artificial Sequence
  Synthetic
ucuacagaccuuaaaaaugaac

SEQ ID NO: 515797 - RNA, 23 nt, Artificial Sequence
  Synthetic
aucuacagaccuuaaaaaugaac

SEQ ID NO: 515798 - RNA, 24 nt, Artificial Sequence
  Synthetic
aaucuacagaccuuaaaaaugaac

SEQ ID NO: 515799 - RNA, 18 nt, Artificial Sequence
  Synthetic
caauaggagacaaugaac

SEQ ID NO: 515800 - RNA, 19 nt, Artificial Sequence
  Synthetic
gcaauaggagacaaugaac

SEQ ID NO: 515801 - RNA, 20 nt, Artificial Sequence
  Synthetic
agcaauaggagacaaugaac

SEQ ID NO: 515802 - RNA, 21 nt, Artificial Sequence
  Synthetic
uagcaauaggagacaaugaac

SEQ ID NO: 515803 - RNA, 22 nt, Artificial Sequence
  Synthetic
guagcaauaggagacaaugaac

SEQ ID NO: 515804 - RNA, 23 nt, Artificial Sequence
  Synthetic
aguagcaauaggagacaaugaac

SEQ ID NO: 515805 - RNA, 24 nt, Artificial Sequence
  Synthetic
aaguagcaauaggagacaaugaac

SEQ ID NO: 515806 - RNA, 18 nt, Artificial Sequence
  Synthetic
ucagggaaaaacaugaac

SEQ ID NO: 515807 - RNA, 19 nt, Artificial Sequence
  Synthetic
uucagggaaaaacaugaac

SEQ ID NO: 515808 - RNA, 20 nt, Artificial Sequence
  Synthetic
uuucagggaaaaacaugaac

SEQ ID NO: 515809 - RNA, 21 nt, Artificial Sequence
  Synthetic
uuuucagggaaaaacaugaac

SEQ ID NO: 515810 - RNA, 22 nt, Artificial Sequence
  Synthetic
auuuucagggaaaaacaugaac

SEQ ID NO: 515811 - RNA, 23 nt, Artificial Sequence
  Synthetic
uauuuucagggaaaaacaugaac

SEQ ID NO: 515812 - RNA, 24 nt, Artificial Sequence
  Synthetic
guauuuucagggaaaaacaugaac

SEQ ID NO: 515813 - RNA, 18 nt, Artificial Sequence
  Synthetic
auaaagaauaacaugaac

SEQ ID NO: 515814 - RNA, 19 nt, Artificial Sequence
  Synthetic
aauaaagaauaacaugaac

SEQ ID NO: 515815 - RNA, 20 nt, Artificial Sequence
  Synthetic
aaauaaagaauaacaugaac

SEQ ID NO: 515816 - RNA, 21 nt, Artificial Sequence
  Synthetic
aaaauaaagaauaacaugaac

SEQ ID NO: 515817 - RNA, 22 nt, Artificial Sequence
  Synthetic
aaaaauaaagaauaacaugaac

SEQ ID NO: 515818 - RNA, 23 nt, Artificial Sequence
  Synthetic
aaaaaauaaagaauaacaugaac

SEQ ID NO: 515819 - RNA, 24 nt, Artificial Sequence
  Synthetic
uaaaaaauaaagaauaacaugaac

SEQ ID NO: 515820 - RNA, 18 nt, Artificial Sequence
  Synthetic
aaccaaauguccaugaac

SEQ ID NO: 515821 - RNA, 19 nt, Artificial Sequence
  Synthetic
gaaccaaauguccaugaac

SEQ ID NO: 515822 - RNA, 20 nt, Artificial Sequence
  Synthetic
ugaaccaaauguccaugaac

SEQ ID NO: 515823 - RNA, 21 nt, Artificial Sequence
  Synthetic
cugaaccaaauguccaugaac

SEQ ID NO: 515824 - RNA, 22 nt, Artificial Sequence
  Synthetic
ccugaaccaaauguccaugaac

SEQ ID NO: 515825 - RNA, 23 nt, Artificial Sequence
  Synthetic
uccugaaccaaauguccaugaac

SEQ ID NO: 515826 - RNA, 24 nt, Artificial Sequence
  Synthetic
cuccugaaccaaauguccaugaac

SEQ ID NO: 515827 - RNA, 18 nt, Artificial Sequence
  Synthetic
uuuaaauccaucaugaac

SEQ ID NO: 515828 - RNA, 19 nt, Artificial Sequence
  Synthetic
uuuuaaauccaucaugaac

SEQ ID NO: 515829 - RNA, 20 nt, Artificial Sequence
  Synthetic
auuuuaaauccaucaugaac

SEQ ID NO: 515830 - RNA, 21 nt, Artificial Sequence
  Synthetic
cauuuuaaauccaucaugaac

SEQ ID NO: 515831 - RNA, 22 nt, Artificial Sequence
  Synthetic
ucauuuuaaauccaucaugaac

SEQ ID NO: 515832 - RNA, 23 nt, Artificial Sequence
  Synthetic
aucauuuuaaauccaucaugaac

SEQ ID NO: 515833 - RNA, 24 nt, Artificial Sequence
  Synthetic
caucauuuuaaauccaucaugaac

SEQ ID NO: 515834 - RNA, 18 nt, Artificial Sequence
  Synthetic
gucuuccaauucaugaac

SEQ ID NO: 515835 - RNA, 19 nt, Artificial Sequence
  Synthetic
agucuuccaauucaugaac

SEQ ID NO: 515836 - RNA, 20 nt, Artificial Sequence
  Synthetic
gagucuuccaauucaugaac

SEQ ID NO: 515837 - RNA, 21 nt, Artificial Sequence
  Synthetic
ugagucuuccaauucaugaac

SEQ ID NO: 515838 - RNA, 22 nt, Artificial Sequence
  Synthetic
uugagucuuccaauucaugaac

SEQ ID NO: 515839 - RNA, 23 nt, Artificial Sequence
  Synthetic
auugagucuuccaauucaugaac

SEQ ID NO: 515840 - RNA, 24 nt, Artificial Sequence
  Synthetic
uauugagucuuccaauucaugaac

SEQ ID NO: 515841 - RNA, 18 nt, Artificial Sequence
  Synthetic
augacaacauggaugaac

SEQ ID NO: 515842 - RNA, 19 nt, Artificial Sequence
  Synthetic
uaugacaacauggaugaac

SEQ ID NO: 515843 - RNA, 20 nt, Artificial Sequence
  Synthetic
uuaugacaacauggaugaac

SEQ ID NO: 515844 - RNA, 21 nt, Artificial Sequence
  Synthetic
uuuaugacaacauggaugaac

SEQ ID NO: 515845 - RNA, 22 nt, Artificial Sequence
  Synthetic
auuuaugacaacauggaugaac

SEQ ID NO: 515846 - RNA, 23 nt, Artificial Sequence
  Synthetic
cauuuaugacaacauggaugaac

SEQ ID NO: 515847 - RNA, 24 nt, Artificial Sequence
  Synthetic
ucauuuaugacaacauggaugaac

SEQ ID NO: 515848 - RNA, 18 nt, Artificial Sequence
  Synthetic
ggcagaaauaauaugaac

SEQ ID NO: 515849 - RNA, 19 nt, Artificial Sequence
  Synthetic
aggcagaaauaauaugaac

SEQ ID NO: 515850 - RNA, 20 nt, Artificial Sequence
  Synthetic
gaggcagaaauaauaugaac

SEQ ID NO: 515851 - RNA, 21 nt, Artificial Sequence
  Synthetic
ugaggcagaaauaauaugaac

SEQ ID NO: 515852 - RNA, 22 nt, Artificial Sequence
  Synthetic
cugaggcagaaauaauaugaac

SEQ ID NO: 515853 - RNA, 23 nt, Artificial Sequence
  Synthetic
acugaggcagaaauaauaugaac

SEQ ID NO: 515854 - RNA, 24 nt, Artificial Sequence
  Synthetic
gacugaggcagaaauaauaugaac

SEQ ID NO: 515855 - RNA, 18 nt, Artificial Sequence
  Synthetic
uucuaauagaguaugaac

SEQ ID NO: 515856 - RNA, 19 nt, Artificial Sequence
  Synthetic
auucuaauagaguaugaac

SEQ ID NO: 515857 - RNA, 20 nt, Artificial Sequence
  Synthetic
gauucuaauagaguaugaac

SEQ ID NO: 515858 - RNA, 21 nt, Artificial Sequence
  Synthetic
agauucuaauagaguaugaac

SEQ ID NO: 515859 - RNA, 22 nt, Artificial Sequence
  Synthetic
cagauucuaauagaguaugaac

SEQ ID NO: 515860 - RNA, 23 nt, Artificial Sequence
  Synthetic
ucagauucuaauagaguaugaac

SEQ ID NO: 515861 - RNA, 24 nt, Artificial Sequence
  Synthetic
cucagauucuaauagaguaugaac

SEQ ID NO: 515862 - RNA, 18 nt, Artificial Sequence
  Synthetic
ccaccucacauuaugaac

SEQ ID NO: 515863 - RNA, 19 nt, Artificial Sequence
  Synthetic
cccaccucacauuaugaac

SEQ ID NO: 515864 - RNA, 20 nt, Artificial Sequence
  Synthetic
ucccaccucacauuaugaac

SEQ ID NO: 515865 - RNA, 21 nt, Artificial Sequence
  Synthetic
uucccaccucacauuaugaac

SEQ ID NO: 515866 - RNA, 22 nt, Artificial Sequence
  Synthetic
uuucccaccucacauuaugaac

SEQ ID NO: 515867 - RNA, 23 nt, Artificial Sequence
  Synthetic
uuuucccaccucacauuaugaac

SEQ ID NO: 515868 - RNA, 24 nt, Artificial Sequence
  Synthetic
uuuuucccaccucacauuaugaac

SEQ ID NO: 515869 - RNA, 18 nt, Artificial Sequence
  Synthetic
acacaguagucacugaac

SEQ ID NO: 515870 - RNA, 19 nt, Artificial Sequence
  Synthetic
uacacaguagucacugaac

SEQ ID NO: 515871 - RNA, 20 nt, Artificial Sequence
  Synthetic
auacacaguagucacugaac

SEQ ID NO: 515872 - RNA, 21 nt, Artificial Sequence
  Synthetic
aauacacaguagucacugaac

SEQ ID NO: 515873 - RNA, 22 nt, Artificial Sequence
  Synthetic
uaauacacaguagucacugaac

SEQ ID NO: 515874 - RNA, 23 nt, Artificial Sequence
  Synthetic
auaauacacaguagucacugaac

SEQ ID NO: 515875 - RNA, 24 nt, Artificial Sequence
  Synthetic
uauaauacacaguagucacugaac

SEQ ID NO: 515876 - RNA, 18 nt, Artificial Sequence
  Synthetic
uuuggaaaacgacugaac

SEQ ID NO: 515877 - RNA, 19 nt, Artificial Sequence
  Synthetic
uuuuggaaaacgacugaac

SEQ ID NO: 515878 - RNA, 20 nt, Artificial Sequence
  Synthetic
auuuuggaaaacgacugaac

SEQ ID NO: 515879 - RNA, 21 nt, Artificial Sequence
  Synthetic
aauuuuggaaaacgacugaac

SEQ ID NO: 515880 - RNA, 22 nt, Artificial Sequence
  Synthetic
gaauuuuggaaaacgacugaac

SEQ ID NO: 515881 - RNA, 23 nt, Artificial Sequence
  Synthetic
agaauuuuggaaaacgacugaac

SEQ ID NO: 515882 - RNA, 24 nt, Artificial Sequence
  Synthetic
uagaauuuuggaaaacgacugaac

SEQ ID NO: 515883 - RNA, 18 nt, Artificial Sequence
  Synthetic
uaauagagaugacugaac

SEQ ID NO: 515884 - RNA, 19 nt, Artificial Sequence
  Synthetic
uuaauagagaugacugaac

SEQ ID NO: 515885 - RNA, 20 nt, Artificial Sequence
  Synthetic
uuuaauagagaugacugaac

SEQ ID NO: 515886 - RNA, 21 nt, Artificial Sequence
  Synthetic
auuuaauagagaugacugaac

SEQ ID NO: 515887 - RNA, 22 nt, Artificial Sequence
  Synthetic
cauuuaauagagaugacugaac

SEQ ID NO: 515888 - RNA, 23 nt, Artificial Sequence
  Synthetic
acauuuaauagagaugacugaac

SEQ ID NO: 515889 - RNA, 24 nt, Artificial Sequence
  Synthetic
gacauuuaauagagaugacugaac

SEQ ID NO: 515890 - RNA, 18 nt, Artificial Sequence
  Synthetic
aauaguguuugacugaac

SEQ ID NO: 515891 - RNA, 19 nt, Artificial Sequence
  Synthetic
caauaguguuugacugaac

SEQ ID NO: 515892 - RNA, 20 nt, Artificial Sequence
  Synthetic
acaauaguguuugacugaac

SEQ ID NO: 515893 - RNA, 21 nt, Artificial Sequence
  Synthetic
aacaauaguguuugacugaac

SEQ ID NO: 515894 - RNA, 22 nt, Artificial Sequence
  Synthetic
uaacaauaguguuugacugaac

SEQ ID NO: 515895 - RNA, 23 nt, Artificial Sequence
  Synthetic
uuaacaauaguguuugacugaac

SEQ ID NO: 515896 - RNA, 24 nt, Artificial Sequence
  Synthetic
uuuaacaauaguguuugacugaac

SEQ ID NO: 515897 - RNA, 18 nt, Artificial Sequence
  Synthetic
gguuuuaaguuacugaac

SEQ ID NO: 515898 - RNA, 19 nt, Artificial Sequence
  Synthetic
ggguuuuaaguuacugaac

SEQ ID NO: 515899 - RNA, 20 nt, Artificial Sequence
  Synthetic
uggguuuuaaguuacugaac

SEQ ID NO: 515900 - RNA, 21 nt, Artificial Sequence
  Synthetic
auggguuuuaaguuacugaac

SEQ ID NO: 515901 - RNA, 22 nt, Artificial Sequence
  Synthetic
aauggguuuuaaguuacugaac

SEQ ID NO: 515902 - RNA, 23 nt, Artificial Sequence
  Synthetic
caauggguuuuaaguuacugaac

SEQ ID NO: 515903 - RNA, 24 nt, Artificial Sequence
  Synthetic
acaauggguuuuaaguuacugaac

SEQ ID NO: 515904 - RNA, 18 nt, Artificial Sequence
  Synthetic
caugagaaucaccugaac

SEQ ID NO: 515905 - RNA, 19 nt, Artificial Sequence
  Synthetic
gcaugagaaucaccugaac

SEQ ID NO: 515906 - RNA, 20 nt, Artificial Sequence
  Synthetic
ggcaugagaaucaccugaac

SEQ ID NO: 515907 - RNA, 21 nt, Artificial Sequence
  Synthetic
uggcaugagaaucaccugaac

SEQ ID NO: 515908 - RNA, 22 nt, Artificial Sequence
  Synthetic
guggcaugagaaucaccugaac

SEQ ID NO: 515909 - RNA, 23 nt, Artificial Sequence
  Synthetic
uguggcaugagaaucaccugaac

SEQ ID NO: 515910 - RNA, 24 nt, Artificial Sequence
  Synthetic
cuguggcaugagaaucaccugaac

SEQ ID NO: 515911 - RNA, 18 nt, Artificial Sequence
  Synthetic
gaagagagaagccugaac

SEQ ID NO: 515912 - RNA, 19 nt, Artificial Sequence
  Synthetic
ugaagagagaagccugaac

SEQ ID NO: 515913 - RNA, 20 nt, Artificial Sequence
  Synthetic
uugaagagagaagccugaac

SEQ ID NO: 515914 - RNA, 21 nt, Artificial Sequence
  Synthetic
auugaagagagaagccugaac

SEQ ID NO: 515915 - RNA, 22 nt, Artificial Sequence
  Synthetic
aauugaagagagaagccugaac

SEQ ID NO: 515916 - RNA, 23 nt, Artificial Sequence
  Synthetic
gaauugaagagagaagccugaac

SEQ ID NO: 515917 - RNA, 24 nt, Artificial Sequence
  Synthetic
ggaauugaagagagaagccugaac

SEQ ID NO: 515918 - RNA, 18 nt, Artificial Sequence
  Synthetic
cauaaucaugagcugaac

SEQ ID NO: 515919 - RNA, 19 nt, Artificial Sequence
  Synthetic
acauaaucaugagcugaac

SEQ ID NO: 515920 - RNA, 20 nt, Artificial Sequence
  Synthetic
uacauaaucaugagcugaac

SEQ ID NO: 515921 - RNA, 21 nt, Artificial Sequence
  Synthetic
auacauaaucaugagcugaac

SEQ ID NO: 515922 - RNA, 22 nt, Artificial Sequence
  Synthetic
aauacauaaucaugagcugaac

SEQ ID NO: 515923 - RNA, 23 nt, Artificial Sequence
  Synthetic
gaauacauaaucaugagcugaac

SEQ ID NO: 515924 - RNA, 24 nt, Artificial Sequence
  Synthetic
agaauacauaaucaugagcugaac

SEQ ID NO: 515925 - RNA, 18 nt, Artificial Sequence
  Synthetic
ucacauaaccaucugaac

SEQ ID NO: 515926 - RNA, 19 nt, Artificial Sequence
  Synthetic
aucacauaaccaucugaac

SEQ ID NO: 515927 - RNA, 20 nt, Artificial Sequence
  Synthetic
gaucacauaaccaucugaac

SEQ ID NO: 515928 - RNA, 21 nt, Artificial Sequence
  Synthetic
agaucacauaaccaucugaac

SEQ ID NO: 515929 - RNA, 22 nt, Artificial Sequence
  Synthetic
aagaucacauaaccaucugaac

SEQ ID NO: 515930 - RNA, 23 nt, Artificial Sequence
  Synthetic
caagaucacauaaccaucugaac

SEQ ID NO: 515931 - RNA, 24 nt, Artificial Sequence
  Synthetic
acaagaucacauaaccaucugaac

SEQ ID NO: 515932 - RNA, 18 nt, Artificial Sequence
  Synthetic
uugguucucaaagugaac

SEQ ID NO: 515933 - RNA, 19 nt, Artificial Sequence
  Synthetic
cuugguucucaaagugaac

SEQ ID NO: 515934 - RNA, 20 nt, Artificial Sequence
  Synthetic
acuugguucucaaagugaac

SEQ ID NO: 515935 - RNA, 21 nt, Artificial Sequence
  Synthetic
cacuugguucucaaagugaac

SEQ ID NO: 515936 - RNA, 22 nt, Artificial Sequence
  Synthetic
ucacuugguucucaaagugaac

SEQ ID NO: 515937 - RNA, 23 nt, Artificial Sequence
  Synthetic
gucacuugguucucaaagugaac

SEQ ID NO: 515938 - RNA, 24 nt, Artificial Sequence
  Synthetic
ugucacuugguucucaaagugaac

SEQ ID NO: 515939 - RNA, 18 nt, Artificial Sequence
  Synthetic
aacagcgaagaagugaac

SEQ ID NO: 515940 - RNA, 19 nt, Artificial Sequence
  Synthetic
aaacagcgaagaagugaac

SEQ ID NO: 515941 - RNA, 20 nt, Artificial Sequence
  Synthetic
aaaacagcgaagaagugaac

SEQ ID NO: 515942 - RNA, 21 nt, Artificial Sequence
  Synthetic
aaaaacagcgaagaagugaac

SEQ ID NO: 515943 - RNA, 22 nt, Artificial Sequence
  Synthetic
uaaaaacagcgaagaagugaac

SEQ ID NO: 515944 - RNA, 23 nt, Artificial Sequence
  Synthetic
cuaaaaacagcgaagaagugaac

SEQ ID NO: 515945 - RNA, 24 nt, Artificial Sequence
  Synthetic
ccuaaaaacagcgaagaagugaac

SEQ ID NO: 515946 - RNA, 18 nt, Artificial Sequence
  Synthetic
ucagcugaguacgugaac

SEQ ID NO: 515947 - RNA, 19 nt, Artificial Sequence
  Synthetic
aucagcugaguacgugaac

SEQ ID NO: 515948 - RNA, 20 nt, Artificial Sequence
  Synthetic
uaucagcugaguacgugaac

SEQ ID NO: 515949 - RNA, 21 nt, Artificial Sequence
  Synthetic
uuaucagcugaguacgugaac

SEQ ID NO: 515950 - RNA, 22 nt, Artificial Sequence
  Synthetic
guuaucagcugaguacgugaac

SEQ ID NO: 515951 - RNA, 23 nt, Artificial Sequence
  Synthetic
aguuaucagcugaguacgugaac

SEQ ID NO: 515952 - RNA, 24 nt, Artificial Sequence
  Synthetic
caguuaucagcugaguacgugaac

SEQ ID NO: 515953 - RNA, 22 nt, Artificial Sequence
  Synthetic
gaggcaggagaauggcgugaac

SEQ ID NO: 515954 - RNA, 23 nt, Artificial Sequence
  Synthetic
ugaggcaggagaauggcgugaac

SEQ ID NO: 515955 - RNA, 24 nt, Artificial Sequence
  Synthetic
cugaggcaggagaauggcgugaac

SEQ ID NO: 515956 - RNA, 18 nt, Artificial Sequence
  Synthetic
aucagauaacaggugaac

SEQ ID NO: 515957 - RNA, 19 nt, Artificial Sequence
  Synthetic
aaucagauaacaggugaac

SEQ ID NO: 515958 - RNA, 20 nt, Artificial Sequence
  Synthetic
aaaucagauaacaggugaac

SEQ ID NO: 515959 - RNA, 21 nt, Artificial Sequence
  Synthetic
gaaaucagauaacaggugaac

SEQ ID NO: 515960 - RNA, 22 nt, Artificial Sequence
  Synthetic
ugaaaucagauaacaggugaac

SEQ ID NO: 515961 - RNA, 23 nt, Artificial Sequence
  Synthetic
augaaaucagauaacaggugaac

SEQ ID NO: 515962 - RNA, 24 nt, Artificial Sequence
  Synthetic
aaugaaaucagauaacaggugaac

SEQ ID NO: 515963 - RNA, 18 nt, Artificial Sequence
  Synthetic
cugugacuaucggugaac

SEQ ID NO: 515964 - RNA, 19 nt, Artificial Sequence
  Synthetic
gcugugacuaucggugaac

SEQ ID NO: 515965 - RNA, 20 nt, Artificial Sequence
  Synthetic
agcugugacuaucggugaac

SEQ ID NO: 515966 - RNA, 21 nt, Artificial Sequence
  Synthetic
cagcugugacuaucggugaac

SEQ ID NO: 515967 - RNA, 22 nt, Artificial Sequence
  Synthetic
ccagcugugacuaucggugaac

SEQ ID NO: 515968 - RNA, 23 nt, Artificial Sequence
  Synthetic
accagcugugacuaucggugaac

SEQ ID NO: 515969 - RNA, 24 nt, Artificial Sequence
  Synthetic
aaccagcugugacuaucggugaac

SEQ ID NO: 515970 - RNA, 18 nt, Artificial Sequence
  Synthetic
guugauuuaauggugaac

SEQ ID NO: 515971 - RNA, 19 nt, Artificial Sequence
  Synthetic
aguugauuuaauggugaac

SEQ ID NO: 515972 - RNA, 20 nt, Artificial Sequence
  Synthetic
aaguugauuuaauggugaac

SEQ ID NO: 515973 - RNA, 21 nt, Artificial Sequence
  Synthetic
uaaguugauuuaauggugaac

SEQ ID NO: 515974 - RNA, 22 nt, Artificial Sequence
  Synthetic
auaaguugauuuaauggugaac

SEQ ID NO: 515975 - RNA, 23 nt, Artificial Sequence
  Synthetic
aauaaguugauuuaauggugaac

SEQ ID NO: 515976 - RNA, 24 nt, Artificial Sequence
  Synthetic
aaauaaguugauuuaauggugaac

SEQ ID NO: 515977 - RNA, 18 nt, Artificial Sequence
  Synthetic
acaggaaaacaugugaac

SEQ ID NO: 515978 - RNA, 19 nt, Artificial Sequence
  Synthetic
gacaggaaaacaugugaac

SEQ ID NO: 515979 - RNA, 20 nt, Artificial Sequence
  Synthetic
ggacaggaaaacaugugaac

SEQ ID NO: 515980 - RNA, 21 nt, Artificial Sequence
  Synthetic
gggacaggaaaacaugugaac

SEQ ID NO: 515981 - RNA, 22 nt, Artificial Sequence
  Synthetic
ggggacaggaaaacaugugaac

SEQ ID NO: 515982 - RNA, 23 nt, Artificial Sequence
  Synthetic
uggggacaggaaaacaugugaac

SEQ ID NO: 515983 - RNA, 24 nt, Artificial Sequence
  Synthetic
cuggggacaggaaaacaugugaac

SEQ ID NO: 515984 - RNA, 18 nt, Artificial Sequence
  Synthetic
acaagauuaucugugaac

SEQ ID NO: 515985 - RNA, 19 nt, Artificial Sequence
  Synthetic
aacaagauuaucugugaac

SEQ ID NO: 515986 - RNA, 20 nt, Artificial Sequence
  Synthetic
caacaagauuaucugugaac

SEQ ID NO: 515987 - RNA, 21 nt, Artificial Sequence
  Synthetic
acaacaagauuaucugugaac

SEQ ID NO: 515988 - RNA, 22 nt, Artificial Sequence
  Synthetic
gacaacaagauuaucugugaac

SEQ ID NO: 515989 - RNA, 23 nt, Artificial Sequence
  Synthetic
ugacaacaagauuaucugugaac

SEQ ID NO: 515990 - RNA, 24 nt, Artificial Sequence
  Synthetic
uugacaacaagauuaucugugaac

SEQ ID NO: 515991 - RNA, 18 nt, Artificial Sequence
  Synthetic
aaggaaacuucauugaac

SEQ ID NO: 515992 - RNA, 19 nt, Artificial Sequence
  Synthetic
aaaggaaacuucauugaac

SEQ ID NO: 515993 - RNA, 20 nt, Artificial Sequence
  Synthetic
aaaaggaaacuucauugaac

SEQ ID NO: 515994 - RNA, 21 nt, Artificial Sequence
  Synthetic
aaaaaggaaacuucauugaac

SEQ ID NO: 515995 - RNA, 22 nt, Artificial Sequence
  Synthetic
gaaaaaggaaacuucauugaac

SEQ ID NO: 515996 - RNA, 23 nt, Artificial Sequence
  Synthetic
agaaaaaggaaacuucauugaac

SEQ ID NO: 515997 - RNA, 24 nt, Artificial Sequence
  Synthetic
aagaaaaaggaaacuucauugaac

SEQ ID NO: 515998 - RNA, 18 nt, Artificial Sequence
  Synthetic
caacaacacggauugaac

SEQ ID NO: 515999 - RNA, 19 nt, Artificial Sequence
  Synthetic
gcaacaacacggauugaac

SEQ ID NO: 516000 - RNA, 20 nt, Artificial Sequence
  Synthetic
ugcaacaacacggauugaac

SEQ ID NO: 516001 - RNA, 21 nt, Artificial Sequence
  Synthetic
uugcaacaacacggauugaac

SEQ ID NO: 516002 - RNA, 22 nt, Artificial Sequence
  Synthetic
uuugcaacaacacggauugaac

SEQ ID NO: 516003 - RNA, 23 nt, Artificial Sequence
  Synthetic
auuugcaacaacacggauugaac

SEQ ID NO: 516004 - RNA, 24 nt, Artificial Sequence
  Synthetic
cauuugcaacaacacggauugaac

SEQ ID NO: 516005 - RNA, 18 nt, Artificial Sequence
  Synthetic
uugaauacuguauugaac

SEQ ID NO: 516006 - RNA, 19 nt, Artificial Sequence
  Synthetic
auugaauacuguauugaac

SEQ ID NO: 516007 - RNA, 20 nt, Artificial Sequence
  Synthetic
uauugaauacuguauugaac

SEQ ID NO: 516008 - RNA, 21 nt, Artificial Sequence
  Synthetic
uuauugaauacuguauugaac

SEQ ID NO: 516009 - RNA, 22 nt, Artificial Sequence
  Synthetic
uuuauugaauacuguauugaac

SEQ ID NO: 516010 - RNA, 23 nt, Artificial Sequence
  Synthetic
auuuauugaauacuguauugaac

SEQ ID NO: 516011 - RNA, 24 nt, Artificial Sequence
  Synthetic
aauuuauugaauacuguauugaac

SEQ ID NO: 516012 - RNA, 18 nt, Artificial Sequence
  Synthetic
caggagaaccacuugaac

SEQ ID NO: 516013 - RNA, 19 nt, Artificial Sequence
  Synthetic
gcaggagaaccacuugaac

SEQ ID NO: 516014 - RNA, 20 nt, Artificial Sequence
  Synthetic
ggcaggagaaccacuugaac

SEQ ID NO: 516015 - RNA, 21 nt, Artificial Sequence
  Synthetic
aggcaggagaaccacuugaac

SEQ ID NO: 516016 - RNA, 22 nt, Artificial Sequence
  Synthetic
gaggcaggagaaccacuugaac

SEQ ID NO: 516017 - RNA, 23 nt, Artificial Sequence
  Synthetic
ugaggcaggagaaccacuugaac

SEQ ID NO: 516018 - RNA, 24 nt, Artificial Sequence
  Synthetic
cugaggcaggagaaccacuugaac

SEQ ID NO: 516019 - RNA, 18 nt, Artificial Sequence
  Synthetic
cacaagaaucacuugaac

SEQ ID NO: 516020 - RNA, 19 nt, Artificial Sequence
  Synthetic
gcacaagaaucacuugaac

SEQ ID NO: 516021 - RNA, 20 nt, Artificial Sequence
  Synthetic
ggcacaagaaucacuugaac

SEQ ID NO: 516022 - RNA, 21 nt, Artificial Sequence
  Synthetic
aggcacaagaaucacuugaac

SEQ ID NO: 516023 - RNA, 22 nt, Artificial Sequence
  Synthetic
gaggcacaagaaucacuugaac

SEQ ID NO: 516024 - RNA, 23 nt, Artificial Sequence
  Synthetic
cgaggcacaagaaucacuugaac

SEQ ID NO: 516025 - RNA, 24 nt, Artificial Sequence
  Synthetic
ccgaggcacaagaaucacuugaac

SEQ ID NO: 516026 - RNA, 18 nt, Artificial Sequence
  Synthetic
cagaagaaucacuugaac

SEQ ID NO: 516027 - RNA, 19 nt, Artificial Sequence
  Synthetic
gcagaagaaucacuugaac

SEQ ID NO: 516028 - RNA, 20 nt, Artificial Sequence
  Synthetic
ggcagaagaaucacuugaac

SEQ ID NO: 516029 - RNA, 21 nt, Artificial Sequence
  Synthetic
aggcagaagaaucacuugaac

SEQ ID NO: 516030 - RNA, 22 nt, Artificial Sequence
  Synthetic
gaggcagaagaaucacuugaac

SEQ ID NO: 516031 - RNA, 23 nt, Artificial Sequence
  Synthetic
ugaggcagaagaaucacuugaac

SEQ ID NO: 516032 - RNA, 24 nt, Artificial Sequence
  Synthetic
cugaggcagaagaaucacuugaac

SEQ ID NO: 516033 - RNA, 21 nt, Artificial Sequence
  Synthetic
aggcaggagaaucacuugaac

SEQ ID NO: 516034 - RNA, 22 nt, Artificial Sequence
  Synthetic
gaggcaggagaaucacuugaac

SEQ ID NO: 516035 - RNA, 23 nt, Artificial Sequence
  Synthetic
ugaggcaggagaaucacuugaac

SEQ ID NO: 516036 - RNA, 24 nt, Artificial Sequence
  Synthetic
uugaggcaggagaaucacuugaac

SEQ ID NO: 516037 - RNA, 21 nt, Artificial Sequence
  Synthetic
aggcaggagaaucccuugaac

SEQ ID NO: 516038 - RNA, 22 nt, Artificial Sequence
  Synthetic
gaggcaggagaaucccuugaac

SEQ ID NO: 516039 - RNA, 23 nt, Artificial Sequence
  Synthetic
ugaggcaggagaaucccuugaac

SEQ ID NO: 516040 - RNA, 24 nt, Artificial Sequence
  Synthetic
cugaggcaggagaaucccuugaac

SEQ ID NO: 516041 - RNA, 18 nt, Artificial Sequence
  Synthetic
cuguggagucccuugaac

SEQ ID NO: 516042 - RNA, 19 nt, Artificial Sequence
  Synthetic
acuguggagucccuugaac

SEQ ID NO: 516043 - RNA, 20 nt, Artificial Sequence
  Synthetic
cacuguggagucccuugaac

SEQ ID NO: 516044 - RNA, 21 nt, Artificial Sequence
  Synthetic
gcacuguggagucccuugaac

SEQ ID NO: 516045 - RNA, 22 nt, Artificial Sequence
  Synthetic
agcacuguggagucccuugaac

SEQ ID NO: 516046 - RNA, 23 nt, Artificial Sequence
  Synthetic
aagcacuguggagucccuugaac

SEQ ID NO: 516047 - RNA, 24 nt, Artificial Sequence
  Synthetic
aaagcacuguggagucccuugaac

SEQ ID NO: 516048 - RNA, 18 nt, Artificial Sequence
  Synthetic
cacacgaaaagcuugaac

SEQ ID NO: 516049 - RNA, 19 nt, Artificial Sequence
  Synthetic
gcacacgaaaagcuugaac

SEQ ID NO: 516050 - RNA, 20 nt, Artificial Sequence
  Synthetic
ggcacacgaaaagcuugaac

SEQ ID NO: 516051 - RNA, 21 nt, Artificial Sequence
  Synthetic
aggcacacgaaaagcuugaac

SEQ ID NO: 516052 - RNA, 22 nt, Artificial Sequence
  Synthetic
gaggcacacgaaaagcuugaac

SEQ ID NO: 516053 - RNA, 23 nt, Artificial Sequence
  Synthetic
ggaggcacacgaaaagcuugaac

SEQ ID NO: 516054 - RNA, 24 nt, Artificial Sequence
  Synthetic
cggaggcacacgaaaagcuugaac

SEQ ID NO: 516055 - RNA, 18 nt, Artificial Sequence
  Synthetic
caugagaagcgcuugaac

SEQ ID NO: 516056 - RNA, 19 nt, Artificial Sequence
  Synthetic
gcaugagaagcgcuugaac

SEQ ID NO: 516057 - RNA, 20 nt, Artificial Sequence
  Synthetic
ggcaugagaagcgcuugaac

SEQ ID NO: 516058 - RNA, 21 nt, Artificial Sequence
  Synthetic
aggcaugagaagcgcuugaac

SEQ ID NO: 516059 - RNA, 22 nt, Artificial Sequence
  Synthetic
gaggcaugagaagcgcuugaac

SEQ ID NO: 516060 - RNA, 23 nt, Artificial Sequence
  Synthetic
ugaggcaugagaagcgcuugaac

SEQ ID NO: 516061 - RNA, 24 nt, Artificial Sequence
  Synthetic
cugaggcaugagaagcgcuugaac

SEQ ID NO: 516062 - RNA, 18 nt, Artificial Sequence
  Synthetic
uuggaggaucgcuugaac

SEQ ID NO: 516063 - RNA, 19 nt, Artificial Sequence
  Synthetic
guuggaggaucgcuugaac

SEQ ID NO: 516064 - RNA, 20 nt, Artificial Sequence
  Synthetic
gguuggaggaucgcuugaac

SEQ ID NO: 516065 - RNA, 21 nt, Artificial Sequence
  Synthetic
agguuggaggaucgcuugaac

SEQ ID NO: 516066 - RNA, 22 nt, Artificial Sequence
  Synthetic
gagguuggaggaucgcuugaac

SEQ ID NO: 516067 - RNA, 23 nt, Artificial Sequence
  Synthetic
ugagguuggaggaucgcuugaac

SEQ ID NO: 516068 - RNA, 24 nt, Artificial Sequence
  Synthetic
cugagguuggaggaucgcuugaac

SEQ ID NO: 516069 - RNA, 21 nt, Artificial Sequence
  Synthetic
aggcaggagaauugcuugaac

SEQ ID NO: 516070 - RNA, 22 nt, Artificial Sequence
  Synthetic
gaggcaggagaauugcuugaac

SEQ ID NO: 516071 - RNA, 23 nt, Artificial Sequence
  Synthetic
ugaggcaggagaauugcuugaac

SEQ ID NO: 516072 - RNA, 24 nt, Artificial Sequence
  Synthetic
cugaggcaggagaauugcuugaac

SEQ ID NO: 516073 - RNA, 18 nt, Artificial Sequence
  Synthetic
cgggagaauugcuugaac

SEQ ID NO: 516074 - RNA, 19 nt, Artificial Sequence
  Synthetic
gcgggagaauugcuugaac

SEQ ID NO: 516075 - RNA, 20 nt, Artificial Sequence
  Synthetic
ggcgggagaauugcuugaac

SEQ ID NO: 516076 - RNA, 21 nt, Artificial Sequence
  Synthetic
aggcgggagaauugcuugaac

SEQ ID NO: 516077 - RNA, 22 nt, Artificial Sequence
  Synthetic
gaggcgggagaauugcuugaac

SEQ ID NO: 516078 - RNA, 23 nt, Artificial Sequence
  Synthetic
ugaggcgggagaauugcuugaac

SEQ ID NO: 516079 - RNA, 24 nt, Artificial Sequence
  Synthetic
cugaggcgggagaauugcuugaac

SEQ ID NO: 516080 - RNA, 18 nt, Artificial Sequence
  Synthetic
gaaagaguacaguugaac

SEQ ID NO: 516081 - RNA, 19 nt, Artificial Sequence
  Synthetic
agaaagaguacaguugaac

SEQ ID NO: 516082 - RNA, 20 nt, Artificial Sequence
  Synthetic
aagaaagaguacaguugaac

SEQ ID NO: 516083 - RNA, 21 nt, Artificial Sequence
  Synthetic
aaagaaagaguacaguugaac

SEQ ID NO: 516084 - RNA, 22 nt, Artificial Sequence
  Synthetic
gaaagaaagaguacaguugaac

SEQ ID NO: 516085 - RNA, 23 nt, Artificial Sequence
  Synthetic
agaaagaaagaguacaguugaac

SEQ ID NO: 516086 - RNA, 24 nt, Artificial Sequence
  Synthetic
aagaaagaaagaguacaguugaac

SEQ ID NO: 516087 - RNA, 18 nt, Artificial Sequence
  Synthetic
caggagaaucauuugaac

SEQ ID NO: 516088 - RNA, 19 nt, Artificial Sequence
  Synthetic
gcaggagaaucauuugaac

SEQ ID NO: 516089 - RNA, 20 nt, Artificial Sequence
  Synthetic
ggcaggagaaucauuugaac

SEQ ID NO: 516090 - RNA, 21 nt, Artificial Sequence
  Synthetic
aggcaggagaaucauuugaac

SEQ ID NO: 516091 - RNA, 22 nt, Artificial Sequence
  Synthetic
gaggcaggagaaucauuugaac

SEQ ID NO: 516092 - RNA, 23 nt, Artificial Sequence
  Synthetic
ugaggcaggagaaucauuugaac

SEQ ID NO: 516093 - RNA, 24 nt, Artificial Sequence
  Synthetic
cugaggcaggagaaucauuugaac

SEQ ID NO: 516094 - RNA, 18 nt, Artificial Sequence
  Synthetic
aucuguggaacuuugaac

SEQ ID NO: 516095 - RNA, 19 nt, Artificial Sequence
  Synthetic
gaucuguggaacuuugaac

SEQ ID NO: 516096 - RNA, 20 nt, Artificial Sequence
  Synthetic
agaucuguggaacuuugaac

SEQ ID NO: 516097 - RNA, 21 nt, Artificial Sequence
  Synthetic
gagaucuguggaacuuugaac

SEQ ID NO: 516098 - RNA, 22 nt, Artificial Sequence
  Synthetic
agagaucuguggaacuuugaac

SEQ ID NO: 516099 - RNA, 23 nt, Artificial Sequence
  Synthetic
uagagaucuguggaacuuugaac

SEQ ID NO: 516100 - RNA, 24 nt, Artificial Sequence
  Synthetic
cuagagaucuguggaacuuugaac

SEQ ID NO: 516101 - RNA, 18 nt, Artificial Sequence
  Synthetic
aaauacugaacuuugaac

SEQ ID NO: 516102 - RNA, 19 nt, Artificial Sequence
  Synthetic
uaaauacugaacuuugaac

SEQ ID NO: 516103 - RNA, 20 nt, Artificial Sequence
  Synthetic
auaaauacugaacuuugaac

SEQ ID NO: 516104 - RNA, 21 nt, Artificial Sequence
  Synthetic
aauaaauacugaacuuugaac

SEQ ID NO: 516105 - RNA, 22 nt, Artificial Sequence
  Synthetic
caauaaauacugaacuuugaac

SEQ ID NO: 516106 - RNA, 23 nt, Artificial Sequence
  Synthetic
acaauaaauacugaacuuugaac

SEQ ID NO: 516107 - RNA, 24 nt, Artificial Sequence
  Synthetic
uacaauaaauacugaacuuugaac

SEQ ID NO: 516108 - RNA, 18 nt, Artificial Sequence
  Synthetic
auuaggaaauguuugaac

SEQ ID NO: 516109 - RNA, 19 nt, Artificial Sequence
  Synthetic
uauuaggaaauguuugaac

SEQ ID NO: 516110 - RNA, 20 nt, Artificial Sequence
  Synthetic
cuauuaggaaauguuugaac

SEQ ID NO: 516111 - RNA, 21 nt, Artificial Sequence
  Synthetic
acuauuaggaaauguuugaac

SEQ ID NO: 516112 - RNA, 22 nt, Artificial Sequence
  Synthetic
gacuauuaggaaauguuugaac

SEQ ID NO: 516113 - RNA, 23 nt, Artificial Sequence
  Synthetic
agacuauuaggaaauguuugaac

SEQ ID NO: 516114 - RNA, 24 nt, Artificial Sequence
  Synthetic
aagacuauuaggaaauguuugaac

SEQ ID NO: 516115 - RNA, 18 nt, Artificial Sequence
  Synthetic
aucuguggaauuuugaac

SEQ ID NO: 516116 - RNA, 19 nt, Artificial Sequence
  Synthetic
gaucuguggaauuuugaac

SEQ ID NO: 516117 - RNA, 20 nt, Artificial Sequence
  Synthetic
agaucuguggaauuuugaac

SEQ ID NO: 516118 - RNA, 21 nt, Artificial Sequence
  Synthetic
gagaucuguggaauuuugaac

SEQ ID NO: 516119 - RNA, 22 nt, Artificial Sequence
  Synthetic
agagaucuguggaauuuugaac

SEQ ID NO: 516120 - RNA, 23 nt, Artificial Sequence
  Synthetic
gagagaucuguggaauuuugaac

SEQ ID NO: 516121 - RNA, 24 nt, Artificial Sequence
  Synthetic
cgagagaucuguggaauuuugaac

SEQ ID NO: 516122 - RNA, 18 nt, Artificial Sequence
  Synthetic
uuauaaaggauuuugaac

SEQ ID NO: 516123 - RNA, 19 nt, Artificial Sequence
  Synthetic
uuuauaaaggauuuugaac

SEQ ID NO: 516124 - RNA, 20 nt, Artificial Sequence
  Synthetic
uuuuauaaaggauuuugaac

SEQ ID NO: 516125 - RNA, 21 nt, Artificial Sequence
  Synthetic
auuuuauaaaggauuuugaac

SEQ ID NO: 516126 - RNA, 22 nt, Artificial Sequence
  Synthetic
uauuuuauaaaggauuuugaac

SEQ ID NO: 516127 - RNA, 23 nt, Artificial Sequence
  Synthetic
auauuuuauaaaggauuuugaac

SEQ ID NO: 516128 - RNA, 24 nt, Artificial Sequence
  Synthetic
aauauuuuauaaaggauuuugaac

SEQ ID NO: 516129 - RNA, 18 nt, Artificial Sequence
  Synthetic
uaggagaaucuuuugaac

SEQ ID NO: 516130 - RNA, 19 nt, Artificial Sequence
  Synthetic
guaggagaaucuuuugaac

SEQ ID NO: 516131 - RNA, 20 nt, Artificial Sequence
  Synthetic
gguaggagaaucuuuugaac

SEQ ID NO: 516132 - RNA, 21 nt, Artificial Sequence
  Synthetic
agguaggagaaucuuuugaac

SEQ ID NO: 516133 - RNA, 22 nt, Artificial Sequence
  Synthetic
gagguaggagaaucuuuugaac

SEQ ID NO: 516134 - RNA, 23 nt, Artificial Sequence
  Synthetic
ugagguaggagaaucuuuugaac

SEQ ID NO: 516135 - RNA, 24 nt, Artificial Sequence
  Synthetic
cugagguaggagaaucuuuugaac

SEQ ID NO: 516136 - RNA, 18 nt, Artificial Sequence
  Synthetic
uucaggaauaaaaauaac

SEQ ID NO: 516137 - RNA, 19 nt, Artificial Sequence
  Synthetic
auucaggaauaaaaauaac

SEQ ID NO: 516138 - RNA, 20 nt, Artificial Sequence
  Synthetic
cauucaggaauaaaaauaac

SEQ ID NO: 516139 - RNA, 21 nt, Artificial Sequence
  Synthetic
ucauucaggaauaaaaauaac

SEQ ID NO: 516140 - RNA, 22 nt, Artificial Sequence
  Synthetic
uucauucaggaauaaaaauaac

SEQ ID NO: 516141 - RNA, 23 nt, Artificial Sequence
  Synthetic
cuucauucaggaauaaaaauaac

SEQ ID NO: 516142 - RNA, 24 nt, Artificial Sequence
  Synthetic
ucuucauucaggaauaaaaauaac

SEQ ID NO: 516143 - RNA, 18 nt, Artificial Sequence
  Synthetic
cuuacaaagcaaaauaac

SEQ ID NO: 516144 - RNA, 19 nt, Artificial Sequence
  Synthetic
gcuuacaaagcaaaauaac

SEQ ID NO: 516145 - RNA, 20 nt, Artificial Sequence
  Synthetic
agcuuacaaagcaaaauaac

SEQ ID NO: 516146 - RNA, 21 nt, Artificial Sequence
  Synthetic
uagcuuacaaagcaaaauaac

SEQ ID NO: 516147 - RNA, 22 nt, Artificial Sequence
  Synthetic
guagcuuacaaagcaaaauaac

SEQ ID NO: 516148 - RNA, 23 nt, Artificial Sequence
  Synthetic
gguagcuuacaaagcaaaauaac

SEQ ID NO: 516149 - RNA, 24 nt, Artificial Sequence
  Synthetic
agguagcuuacaaagcaaaauaac

SEQ ID NO: 516150 - RNA, 18 nt, Artificial Sequence
  Synthetic
aaggacaaagaaaauaac

SEQ ID NO: 516151 - RNA, 19 nt, Artificial Sequence
  Synthetic
aaaggacaaagaaaauaac

SEQ ID NO: 516152 - RNA, 20 nt, Artificial Sequence
  Synthetic
caaaggacaaagaaaauaac

SEQ ID NO: 516153 - RNA, 21 nt, Artificial Sequence
  Synthetic
ucaaaggacaaagaaaauaac

SEQ ID NO: 516154 - RNA, 22 nt, Artificial Sequence
  Synthetic
aucaaaggacaaagaaaauaac

SEQ ID NO: 516155 - RNA, 23 nt, Artificial Sequence
  Synthetic
gaucaaaggacaaagaaaauaac

SEQ ID NO: 516156 - RNA, 24 nt, Artificial Sequence
  Synthetic
agaucaaaggacaaagaaaauaac

SEQ ID NO: 516157 - RNA, 18 nt, Artificial Sequence
  Synthetic
gaggaaauagaaaauaac

SEQ ID NO: 516158 - RNA, 19 nt, Artificial Sequence
  Synthetic
agaggaaauagaaaauaac

SEQ ID NO: 516159 - RNA, 20 nt, Artificial Sequence
  Synthetic
cagaggaaauagaaaauaac

SEQ ID NO: 516160 - RNA, 21 nt, Artificial Sequence
  Synthetic
acagaggaaauagaaaauaac

SEQ ID NO: 516161 - RNA, 22 nt, Artificial Sequence
  Synthetic
aacagaggaaauagaaaauaac

SEQ ID NO: 516162 - RNA, 23 nt, Artificial Sequence
  Synthetic
aaacagaggaaauagaaaauaac

SEQ ID NO: 516163 - RNA, 24 nt, Artificial Sequence
  Synthetic
gaaacagaggaaauagaaaauaac

SEQ ID NO: 516164 - RNA, 18 nt, Artificial Sequence
  Synthetic
uuuuggacauaaaauaac

SEQ ID NO: 516165 - RNA, 19 nt, Artificial Sequence
  Synthetic
auuuuggacauaaaauaac

SEQ ID NO: 516166 - RNA, 20 nt, Artificial Sequence
  Synthetic
gauuuuggacauaaaauaac

SEQ ID NO: 516167 - RNA, 21 nt, Artificial Sequence
  Synthetic
ugauuuuggacauaaaauaac

SEQ ID NO: 516168 - RNA, 22 nt, Artificial Sequence
  Synthetic
augauuuuggacauaaaauaac

SEQ ID NO: 516169 - RNA, 23 nt, Artificial Sequence
  Synthetic
caugauuuuggacauaaaauaac

SEQ ID NO: 516170 - RNA, 24 nt, Artificial Sequence
  Synthetic
gcaugauuuuggacauaaaauaac

SEQ ID NO: 516171 - RNA, 18 nt, Artificial Sequence
  Synthetic
aauaugcauagaaauaac

SEQ ID NO: 516172 - RNA, 19 nt, Artificial Sequence
  Synthetic
uaauaugcauagaaauaac

SEQ ID NO: 516173 - RNA, 20 nt, Artificial Sequence
  Synthetic
uuaauaugcauagaaauaac

SEQ ID NO: 516174 - RNA, 21 nt, Artificial Sequence
  Synthetic
uuuaauaugcauagaaauaac

SEQ ID NO: 516175 - RNA, 22 nt, Artificial Sequence
  Synthetic
uuuuaauaugcauagaaauaac

SEQ ID NO: 516176 - RNA, 23 nt, Artificial Sequence
  Synthetic
auuuuaauaugcauagaaauaac

SEQ ID NO: 516177 - RNA, 24 nt, Artificial Sequence
  Synthetic
aauuuuaauaugcauagaaauaac

SEQ ID NO: 516178 - RNA, 18 nt, Artificial Sequence
  Synthetic
gaugguuuuuuaaauaac

SEQ ID NO: 516179 - RNA, 19 nt, Artificial Sequence
  Synthetic
agaugguuuuuuaaauaac

SEQ ID NO: 516180 - RNA, 20 nt, Artificial Sequence
  Synthetic
aagaugguuuuuuaaauaac

SEQ ID NO: 516181 - RNA, 21 nt, Artificial Sequence
  Synthetic
uaagaugguuuuuuaaauaac

SEQ ID NO: 516182 - RNA, 22 nt, Artificial Sequence
  Synthetic
uuaagaugguuuuuuaaauaac

SEQ ID NO: 516183 - RNA, 23 nt, Artificial Sequence
  Synthetic
uuuaagaugguuuuuuaaauaac

SEQ ID NO: 516184 - RNA, 24 nt, Artificial Sequence
  Synthetic
guuuaagaugguuuuuuaaauaac

SEQ ID NO: 516185 - RNA, 18 nt, Artificial Sequence
  Synthetic
aaaggaagaaucaauaac

SEQ ID NO: 516186 - RNA, 19 nt, Artificial Sequence
  Synthetic
gaaaggaagaaucaauaac

SEQ ID NO: 516187 - RNA, 20 nt, Artificial Sequence
  Synthetic
ggaaaggaagaaucaauaac

SEQ ID NO: 516188 - RNA, 21 nt, Artificial Sequence
  Synthetic
uggaaaggaagaaucaauaac

SEQ ID NO: 516189 - RNA, 22 nt, Artificial Sequence
  Synthetic
auggaaaggaagaaucaauaac

SEQ ID NO: 516190 - RNA, 23 nt, Artificial Sequence
  Synthetic
uauggaaaggaagaaucaauaac

SEQ ID NO: 516191 - RNA, 24 nt, Artificial Sequence
  Synthetic
uuauggaaaggaagaaucaauaac

SEQ ID NO: 516192 - RNA, 18 nt, Artificial Sequence
  Synthetic
cucaagcuacucaauaac

SEQ ID NO: 516193 - RNA, 19 nt, Artificial Sequence
  Synthetic
acucaagcuacucaauaac

SEQ ID NO: 516194 - RNA, 20 nt, Artificial Sequence
  Synthetic
aacucaagcuacucaauaac

SEQ ID NO: 516195 - RNA, 21 nt, Artificial Sequence
  Synthetic
gaacucaagcuacucaauaac

SEQ ID NO: 516196 - RNA, 22 nt, Artificial Sequence
  Synthetic
ggaacucaagcuacucaauaac

SEQ ID NO: 516197 - RNA, 23 nt, Artificial Sequence
  Synthetic
aggaacucaagcuacucaauaac

SEQ ID NO: 516198 - RNA, 24 nt, Artificial Sequence
  Synthetic
aaggaacucaagcuacucaauaac

SEQ ID NO: 516199 - RNA, 18 nt, Artificial Sequence
  Synthetic
uaaaaaauaaagaauaac

SEQ ID NO: 516200 - RNA, 19 nt, Artificial Sequence
  Synthetic
uuaaaaaauaaagaauaac

SEQ ID NO: 516201 - RNA, 20 nt, Artificial Sequence
  Synthetic
uuuaaaaaauaaagaauaac

SEQ ID NO: 516202 - RNA, 21 nt, Artificial Sequence
  Synthetic
uuuuaaaaaauaaagaauaac

SEQ ID NO: 516203 - RNA, 22 nt, Artificial Sequence
  Synthetic
auuuuaaaaaauaaagaauaac

SEQ ID NO: 516204 - RNA, 23 nt, Artificial Sequence
  Synthetic
cauuuuaaaaaauaaagaauaac

SEQ ID NO: 516205 - RNA, 24 nt, Artificial Sequence
  Synthetic
acauuuuaaaaaauaaagaauaac

SEQ ID NO: 516206 - RNA, 18 nt, Artificial Sequence
  Synthetic
ucagcauuucagaauaac

SEQ ID NO: 516207 - RNA, 19 nt, Artificial Sequence
  Synthetic
uucagcauuucagaauaac

SEQ ID NO: 516208 - RNA, 20 nt, Artificial Sequence
  Synthetic
auucagcauuucagaauaac

SEQ ID NO: 516209 - RNA, 21 nt, Artificial Sequence
  Synthetic
cauucagcauuucagaauaac

SEQ ID NO: 516210 - RNA, 22 nt, Artificial Sequence
  Synthetic
ccauucagcauuucagaauaac

SEQ ID NO: 516211 - RNA, 23 nt, Artificial Sequence
  Synthetic
uccauucagcauuucagaauaac

SEQ ID NO: 516212 - RNA, 24 nt, Artificial Sequence
  Synthetic
auccauucagcauuucagaauaac

SEQ ID NO: 516213 - RNA, 18 nt, Artificial Sequence
  Synthetic
acugucuuuuugaauaac

SEQ ID NO: 516214 - RNA, 19 nt, Artificial Sequence
  Synthetic
aacugucuuuuugaauaac

SEQ ID NO: 516215 - RNA, 20 nt, Artificial Sequence
  Synthetic
uaacugucuuuuugaauaac

SEQ ID NO: 516216 - RNA, 21 nt, Artificial Sequence
  Synthetic
auaacugucuuuuugaauaac

SEQ ID NO: 516217 - RNA, 22 nt, Artificial Sequence
  Synthetic
uauaacugucuuuuugaauaac

SEQ ID NO: 516218 - RNA, 23 nt, Artificial Sequence
  Synthetic
cuauaacugucuuuuugaauaac

SEQ ID NO: 516219 - RNA, 24 nt, Artificial Sequence
  Synthetic
ccuauaacugucuuuuugaauaac

SEQ ID NO: 516220 - RNA, 18 nt, Artificial Sequence
  Synthetic
gcauuugaaaauaauaac

SEQ ID NO: 516221 - RNA, 19 nt, Artificial Sequence
  Synthetic
ugcauuugaaaauaauaac

SEQ ID NO: 516222 - RNA, 20 nt, Artificial Sequence
  Synthetic
augcauuugaaaauaauaac

SEQ ID NO: 516223 - RNA, 21 nt, Artificial Sequence
  Synthetic
aaugcauuugaaaauaauaac

SEQ ID NO: 516224 - RNA, 22 nt, Artificial Sequence
  Synthetic
caaugcauuugaaaauaauaac

SEQ ID NO: 516225 - RNA, 23 nt, Artificial Sequence
  Synthetic
gcaaugcauuugaaaauaauaac

SEQ ID NO: 516226 - RNA, 24 nt, Artificial Sequence
  Synthetic
ugcaaugcauuugaaaauaauaac

SEQ ID NO: 516227 - RNA, 18 nt, Artificial Sequence
  Synthetic
ucaaaugggaauaauaac

SEQ ID NO: 516228 - RNA, 19 nt, Artificial Sequence
  Synthetic
uucaaaugggaauaauaac

SEQ ID NO: 516229 - RNA, 20 nt, Artificial Sequence
  Synthetic
auucaaaugggaauaauaac

SEQ ID NO: 516230 - RNA, 21 nt, Artificial Sequence
  Synthetic
gauucaaaugggaauaauaac

SEQ ID NO: 516231 - RNA, 22 nt, Artificial Sequence
  Synthetic
agauucaaaugggaauaauaac

SEQ ID NO: 516232 - RNA, 23 nt, Artificial Sequence
  Synthetic
aagauucaaaugggaauaauaac

SEQ ID NO: 516233 - RNA, 24 nt, Artificial Sequence
  Synthetic
gaagauucaaaugggaauaauaac

SEQ ID NO: 516234 - RNA, 18 nt, Artificial Sequence
  Synthetic
uuauauggggauaauaac

SEQ ID NO: 516235 - RNA, 19 nt, Artificial Sequence
  Synthetic
auuauauggggauaauaac

SEQ ID NO: 516236 - RNA, 20 nt, Artificial Sequence
  Synthetic
uauuauauggggauaauaac

SEQ ID NO: 516237 - RNA, 21 nt, Artificial Sequence
  Synthetic
cuauuauauggggauaauaac

SEQ ID NO: 516238 - RNA, 22 nt, Artificial Sequence
  Synthetic
ucuauuauauggggauaauaac

SEQ ID NO: 516239 - RNA, 23 nt, Artificial Sequence
  Synthetic
cucuauuauauggggauaauaac

SEQ ID NO: 516240 - RNA, 24 nt, Artificial Sequence
  Synthetic
ccucuauuauauggggauaauaac

SEQ ID NO: 516241 - RNA, 18 nt, Artificial Sequence
  Synthetic
guucuccuggauaauaac

SEQ ID NO: 516242 - RNA, 19 nt, Artificial Sequence
  Synthetic
aguucuccuggauaauaac

SEQ ID NO: 516243 - RNA, 20 nt, Artificial Sequence
  Synthetic
aaguucuccuggauaauaac

SEQ ID NO: 516244 - RNA, 21 nt, Artificial Sequence
  Synthetic
gaaguucuccuggauaauaac

SEQ ID NO: 516245 - RNA, 22 nt, Artificial Sequence
  Synthetic
ggaaguucuccuggauaauaac

SEQ ID NO: 516246 - RNA, 23 nt, Artificial Sequence
  Synthetic
gggaaguucuccuggauaauaac

SEQ ID NO: 516247 - RNA, 24 nt, Artificial Sequence
  Synthetic
ggggaaguucuccuggauaauaac

SEQ ID NO: 516248 - RNA, 18 nt, Artificial Sequence
  Synthetic
gcaaccaaaacuaauaac

SEQ ID NO: 516249 - RNA, 19 nt, Artificial Sequence
  Synthetic
agcaaccaaaacuaauaac

SEQ ID NO: 516250 - RNA, 20 nt, Artificial Sequence
  Synthetic
aagcaaccaaaacuaauaac

SEQ ID NO: 516251 - RNA, 21 nt, Artificial Sequence
  Synthetic
caagcaaccaaaacuaauaac

SEQ ID NO: 516252 - RNA, 22 nt, Artificial Sequence
  Synthetic
acaagcaaccaaaacuaauaac

SEQ ID NO: 516253 - RNA, 23 nt, Artificial Sequence
  Synthetic
aacaagcaaccaaaacuaauaac

SEQ ID NO: 516254 - RNA, 24 nt, Artificial Sequence
  Synthetic
uaacaagcaaccaaaacuaauaac

SEQ ID NO: 516255 - RNA, 18 nt, Artificial Sequence
  Synthetic
gcugcugaaaaacauaac

SEQ ID NO: 516256 - RNA, 19 nt, Artificial Sequence
  Synthetic
agcugcugaaaaacauaac

SEQ ID NO: 516257 - RNA, 20 nt, Artificial Sequence
  Synthetic
cagcugcugaaaaacauaac

SEQ ID NO: 516258 - RNA, 21 nt, Artificial Sequence
  Synthetic
acagcugcugaaaaacauaac

SEQ ID NO: 516259 - RNA, 22 nt, Artificial Sequence
  Synthetic
aacagcugcugaaaaacauaac

SEQ ID NO: 516260 - RNA, 23 nt, Artificial Sequence
  Synthetic
aaacagcugcugaaaaacauaac

SEQ ID NO: 516261 - RNA, 24 nt, Artificial Sequence
  Synthetic
aaaacagcugcugaaaaacauaac

SEQ ID NO: 516262 - RNA, 18 nt, Artificial Sequence
  Synthetic
uaauacuuggcacauaac

SEQ ID NO: 516263 - RNA, 19 nt, Artificial Sequence
  Synthetic
cuaauacuuggcacauaac

SEQ ID NO: 516264 - RNA, 20 nt, Artificial Sequence
  Synthetic
ucuaauacuuggcacauaac

SEQ ID NO: 516265 - RNA, 21 nt, Artificial Sequence
  Synthetic
aucuaauacuuggcacauaac

SEQ ID NO: 516266 - RNA, 22 nt, Artificial Sequence
  Synthetic
uaucuaauacuuggcacauaac

SEQ ID NO: 516267 - RNA, 23 nt, Artificial Sequence
  Synthetic
guaucuaauacuuggcacauaac

SEQ ID NO: 516268 - RNA, 24 nt, Artificial Sequence
  Synthetic
uguaucuaauacuuggcacauaac

SEQ ID NO: 516269 - RNA, 18 nt, Artificial Sequence
  Synthetic
cccagcagcauacauaac

SEQ ID NO: 516270 - RNA, 19 nt, Artificial Sequence
  Synthetic
gcccagcagcauacauaac

SEQ ID NO: 516271 - RNA, 20 nt, Artificial Sequence
  Synthetic
ugcccagcagcauacauaac

SEQ ID NO: 516272 - RNA, 21 nt, Artificial Sequence
  Synthetic
gugcccagcagcauacauaac

SEQ ID NO: 516273 - RNA, 22 nt, Artificial Sequence
  Synthetic
agugcccagcagcauacauaac

SEQ ID NO: 516274 - RNA, 23 nt, Artificial Sequence
  Synthetic
cagugcccagcagcauacauaac

SEQ ID NO: 516275 - RNA, 24 nt, Artificial Sequence
  Synthetic
ucagugcccagcagcauacauaac

SEQ ID NO: 516276 - RNA, 18 nt, Artificial Sequence
  Synthetic
gacuagaucuagcauaac

SEQ ID NO: 516277 - RNA, 19 nt, Artificial Sequence
  Synthetic
agacuagaucuagcauaac

SEQ ID NO: 516278 - RNA, 20 nt, Artificial Sequence
  Synthetic
cagacuagaucuagcauaac

SEQ ID NO: 516279 - RNA, 21 nt, Artificial Sequence
  Synthetic
gcagacuagaucuagcauaac

SEQ ID NO: 516280 - RNA, 22 nt, Artificial Sequence
  Synthetic
ggcagacuagaucuagcauaac

SEQ ID NO: 516281 - RNA, 23 nt, Artificial Sequence
  Synthetic
aggcagacuagaucuagcauaac

SEQ ID NO: 516282 - RNA, 24 nt, Artificial Sequence
  Synthetic
uaggcagacuagaucuagcauaac

SEQ ID NO: 516283 - RNA, 18 nt, Artificial Sequence
  Synthetic
aggggagaggcucauaac

SEQ ID NO: 516284 - RNA, 19 nt, Artificial Sequence
  Synthetic
caggggagaggcucauaac

SEQ ID NO: 516285 - RNA, 20 nt, Artificial Sequence
  Synthetic
gcaggggagaggcucauaac

SEQ ID NO: 516286 - RNA, 21 nt, Artificial Sequence
  Synthetic
ggcaggggagaggcucauaac

SEQ ID NO: 516287 - RNA, 22 nt, Artificial Sequence
  Synthetic
uggcaggggagaggcucauaac

SEQ ID NO: 516288 - RNA, 23 nt, Artificial Sequence
  Synthetic
guggcaggggagaggcucauaac

SEQ ID NO: 516289 - RNA, 24 nt, Artificial Sequence
  Synthetic
gguggcaggggagaggcucauaac

SEQ ID NO: 516290 - RNA, 18 nt, Artificial Sequence
  Synthetic
gaaguguaaauucauaac

SEQ ID NO: 516291 - RNA, 19 nt, Artificial Sequence
  Synthetic
agaaguguaaauucauaac

SEQ ID NO: 516292 - RNA, 20 nt, Artificial Sequence
  Synthetic
gagaaguguaaauucauaac

SEQ ID NO: 516293 - RNA, 21 nt, Artificial Sequence
  Synthetic
ugagaaguguaaauucauaac

SEQ ID NO: 516294 - RNA, 22 nt, Artificial Sequence
  Synthetic
cugagaaguguaaauucauaac

SEQ ID NO: 516295 - RNA, 23 nt, Artificial Sequence
  Synthetic
ucugagaaguguaaauucauaac

SEQ ID NO: 516296 - RNA, 24 nt, Artificial Sequence
  Synthetic
cucugagaaguguaaauucauaac

SEQ ID NO: 516297 - RNA, 18 nt, Artificial Sequence
  Synthetic
ucagcuugcuaagauaac

SEQ ID NO: 516298 - RNA, 19 nt, Artificial Sequence
  Synthetic
cucagcuugcuaagauaac

SEQ ID NO: 516299 - RNA, 20 nt, Artificial Sequence
  Synthetic
gcucagcuugcuaagauaac

SEQ ID NO: 516300 - RNA, 21 nt, Artificial Sequence
  Synthetic
ugcucagcuugcuaagauaac

SEQ ID NO: 516301 - RNA, 22 nt, Artificial Sequence
  Synthetic
cugcucagcuugcuaagauaac

SEQ ID NO: 516302 - RNA, 23 nt, Artificial Sequence
  Synthetic
ccugcucagcuugcuaagauaac

SEQ ID NO: 516303 - RNA, 24 nt, Artificial Sequence
  Synthetic
uccugcucagcuugcuaagauaac

SEQ ID NO: 516304 - RNA, 18 nt, Artificial Sequence
  Synthetic
aguugauaaacagauaac

SEQ ID NO: 516305 - RNA, 19 nt, Artificial Sequence
  Synthetic
caguugauaaacagauaac

SEQ ID NO: 516306 - RNA, 20 nt, Artificial Sequence
  Synthetic
ucaguugauaaacagauaac

SEQ ID NO: 516307 - RNA, 21 nt, Artificial Sequence
  Synthetic
gucaguugauaaacagauaac

SEQ ID NO: 516308 - RNA, 22 nt, Artificial Sequence
  Synthetic
ggucaguugauaaacagauaac

SEQ ID NO: 516309 - RNA, 23 nt, Artificial Sequence
  Synthetic
aggucaguugauaaacagauaac

SEQ ID NO: 516310 - RNA, 24 nt, Artificial Sequence
  Synthetic
gaggucaguugauaaacagauaac

SEQ ID NO: 516311 - RNA, 18 nt, Artificial Sequence
  Synthetic
uuaauuaaaucagauaac

SEQ ID NO: 516312 - RNA, 19 nt, Artificial Sequence
  Synthetic
cuuaauuaaaucagauaac

SEQ ID NO: 516313 - RNA, 20 nt, Artificial Sequence
  Synthetic
ucuuaauuaaaucagauaac

SEQ ID NO: 516314 - RNA, 21 nt, Artificial Sequence
  Synthetic
aucuuaauuaaaucagauaac

SEQ ID NO: 516315 - RNA, 22 nt, Artificial Sequence
  Synthetic
uaucuuaauuaaaucagauaac

SEQ ID NO: 516316 - RNA, 23 nt, Artificial Sequence
  Synthetic
cuaucuuaauuaaaucagauaac

SEQ ID NO: 516317 - RNA, 24 nt, Artificial Sequence
  Synthetic
acuaucuuaauuaaaucagauaac

SEQ ID NO: 516318 - RNA, 18 nt, Artificial Sequence
  Synthetic
aaaggccuuaaggauaac

SEQ ID NO: 516319 - RNA, 19 nt, Artificial Sequence
  Synthetic
gaaaggccuuaaggauaac

SEQ ID NO: 516320 - RNA, 20 nt, Artificial Sequence
  Synthetic
agaaaggccuuaaggauaac

SEQ ID NO: 516321 - RNA, 21 nt, Artificial Sequence
  Synthetic
gagaaaggccuuaaggauaac

SEQ ID NO: 516322 - RNA, 22 nt, Artificial Sequence
  Synthetic
agagaaaggccuuaaggauaac

SEQ ID NO: 516323 - RNA, 23 nt, Artificial Sequence
  Synthetic
uagagaaaggccuuaaggauaac

SEQ ID NO: 516324 - RNA, 24 nt, Artificial Sequence
  Synthetic
guagagaaaggccuuaaggauaac

SEQ ID NO: 516325 - RNA, 18 nt, Artificial Sequence
  Synthetic
cugugggcugaggauaac

SEQ ID NO: 516326 - RNA, 19 nt, Artificial Sequence
  Synthetic
gcugugggcugaggauaac

SEQ ID NO: 516327 - RNA, 20 nt, Artificial Sequence
  Synthetic
ugcugugggcugaggauaac

SEQ ID NO: 516328 - RNA, 21 nt, Artificial Sequence
  Synthetic
cugcugugggcugaggauaac

SEQ ID NO: 516329 - RNA, 22 nt, Artificial Sequence
  Synthetic
acugcugugggcugaggauaac

SEQ ID NO: 516330 - RNA, 23 nt, Artificial Sequence
  Synthetic
uacugcugugggcugaggauaac

SEQ ID NO: 516331 - RNA, 24 nt, Artificial Sequence
  Synthetic
auacugcugugggcugaggauaac

SEQ ID NO: 516332 - RNA, 18 nt, Artificial Sequence
  Synthetic
aaauucuauagugauaac

SEQ ID NO: 516333 - RNA, 19 nt, Artificial Sequence
  Synthetic
aaaauucuauagugauaac

SEQ ID NO: 516334 - RNA, 20 nt, Artificial Sequence
  Synthetic
uaaaauucuauagugauaac

SEQ ID NO: 516335 - RNA, 21 nt, Artificial Sequence
  Synthetic
auaaaauucuauagugauaac

SEQ ID NO: 516336 - RNA, 22 nt, Artificial Sequence
  Synthetic
gauaaaauucuauagugauaac

SEQ ID NO: 516337 - RNA, 23 nt, Artificial Sequence
  Synthetic
agauaaaauucuauagugauaac

SEQ ID NO: 516338 - RNA, 24 nt, Artificial Sequence
  Synthetic
aagauaaaauucuauagugauaac

SEQ ID NO: 516339 - RNA, 18 nt, Artificial Sequence
  Synthetic
cacugaaucauugauaac

SEQ ID NO: 516340 - RNA, 19 nt, Artificial Sequence
  Synthetic
ucacugaaucauugauaac

SEQ ID NO: 516341 - RNA, 20 nt, Artificial Sequence
  Synthetic
aucacugaaucauugauaac

SEQ ID NO: 516342 - RNA, 21 nt, Artificial Sequence
  Synthetic
caucacugaaucauugauaac

SEQ ID NO: 516343 - RNA, 22 nt, Artificial Sequence
  Synthetic
acaucacugaaucauugauaac

SEQ ID NO: 516344 - RNA, 23 nt, Artificial Sequence
  Synthetic
aacaucacugaaucauugauaac

SEQ ID NO: 516345 - RNA, 24 nt, Artificial Sequence
  Synthetic
caacaucacugaaucauugauaac

SEQ ID NO: 516346 - RNA, 18 nt, Artificial Sequence
  Synthetic
ucaagagcauaauauaac

SEQ ID NO: 516347 - RNA, 19 nt, Artificial Sequence
  Synthetic
cucaagagcauaauauaac

SEQ ID NO: 516348 - RNA, 20 nt, Artificial Sequence
  Synthetic
acucaagagcauaauauaac

SEQ ID NO: 516349 - RNA, 21 nt, Artificial Sequence
  Synthetic
gacucaagagcauaauauaac

SEQ ID NO: 516350 - RNA, 22 nt, Artificial Sequence
  Synthetic
agacucaagagcauaauauaac

SEQ ID NO: 516351 - RNA, 23 nt, Artificial Sequence
  Synthetic
cagacucaagagcauaauauaac

SEQ ID NO: 516352 - RNA, 24 nt, Artificial Sequence
  Synthetic
acagacucaagagcauaauauaac

SEQ ID NO: 516353 - RNA, 18 nt, Artificial Sequence
  Synthetic
auaucuuauacauauaac

SEQ ID NO: 516354 - RNA, 19 nt, Artificial Sequence
  Synthetic
gauaucuuauacauauaac

SEQ ID NO: 516355 - RNA, 20 nt, Artificial Sequence
  Synthetic
agauaucuuauacauauaac

SEQ ID NO: 516356 - RNA, 21 nt, Artificial Sequence
  Synthetic
uagauaucuuauacauauaac

SEQ ID NO: 516357 - RNA, 22 nt, Artificial Sequence
  Synthetic
auagauaucuuauacauauaac

SEQ ID NO: 516358 - RNA, 23 nt, Artificial Sequence
  Synthetic
aauagauaucuuauacauauaac

SEQ ID NO: 516359 - RNA, 24 nt, Artificial Sequence
  Synthetic
uaauagauaucuuauacauauaac

SEQ ID NO: 516360 - RNA, 18 nt, Artificial Sequence
  Synthetic
uaccguaagucauauaac

SEQ ID NO: 516361 - RNA, 19 nt, Artificial Sequence
  Synthetic
auaccguaagucauauaac

SEQ ID NO: 516362 - RNA, 20 nt, Artificial Sequence
  Synthetic
cauaccguaagucauauaac

SEQ ID NO: 516363 - RNA, 21 nt, Artificial Sequence
  Synthetic
acauaccguaagucauauaac

SEQ ID NO: 516364 - RNA, 22 nt, Artificial Sequence
  Synthetic
uacauaccguaagucauauaac

SEQ ID NO: 516365 - RNA, 23 nt, Artificial Sequence
  Synthetic
uuacauaccguaagucauauaac

SEQ ID NO: 516366 - RNA, 24 nt, Artificial Sequence
  Synthetic
uuuacauaccguaagucauauaac

SEQ ID NO: 516367 - RNA, 18 nt, Artificial Sequence
  Synthetic
uugcauagcauauauaac

SEQ ID NO: 516368 - RNA, 19 nt, Artificial Sequence
  Synthetic
guugcauagcauauauaac

SEQ ID NO: 516369 - RNA, 20 nt, Artificial Sequence
  Synthetic
uguugcauagcauauauaac

SEQ ID NO: 516370 - RNA, 21 nt, Artificial Sequence
  Synthetic
uuguugcauagcauauauaac

SEQ ID NO: 516371 - RNA, 22 nt, Artificial Sequence
  Synthetic
uuuguugcauagcauauauaac

SEQ ID NO: 516372 - RNA, 23 nt, Artificial Sequence
  Synthetic
guuuguugcauagcauauauaac

SEQ ID NO: 516373 - RNA, 24 nt, Artificial Sequence
  Synthetic
gguuuguugcauagcauauauaac

SEQ ID NO: 516374 - RNA, 18 nt, Artificial Sequence
  Synthetic
aauucauauuuauauaac

SEQ ID NO: 516375 - RNA, 19 nt, Artificial Sequence
  Synthetic
aaauucauauuuauauaac

SEQ ID NO: 516376 - RNA, 20 nt, Artificial Sequence
  Synthetic
aaaauucauauuuauauaac

SEQ ID NO: 516377 - RNA, 21 nt, Artificial Sequence
  Synthetic
uaaaauucauauuuauauaac

SEQ ID NO: 516378 - RNA, 22 nt, Artificial Sequence
  Synthetic
uuaaaauucauauuuauauaac

SEQ ID NO: 516379 - RNA, 23 nt, Artificial Sequence
  Synthetic
uuuaaaauucauauuuauauaac

SEQ ID NO: 516380 - RNA, 24 nt, Artificial Sequence
  Synthetic
guuuaaaauucauauuuauauaac

SEQ ID NO: 516381 - RNA, 18 nt, Artificial Sequence
  Synthetic
ccuacaauuuucuauaac

SEQ ID NO: 516382 - RNA, 19 nt, Artificial Sequence
  Synthetic
cccuacaauuuucuauaac

SEQ ID NO: 516383 - RNA, 20 nt, Artificial Sequence
  Synthetic
ucccuacaauuuucuauaac

SEQ ID NO: 516384 - RNA, 21 nt, Artificial Sequence
  Synthetic
aucccuacaauuuucuauaac

SEQ ID NO: 516385 - RNA, 22 nt, Artificial Sequence
  Synthetic
aaucccuacaauuuucuauaac

SEQ ID NO: 516386 - RNA, 23 nt, Artificial Sequence
  Synthetic
uaaucccuacaauuuucuauaac

SEQ ID NO: 516387 - RNA, 24 nt, Artificial Sequence
  Synthetic
auaaucccuacaauuuucuauaac

SEQ ID NO: 516388 - RNA, 18 nt, Artificial Sequence
  Synthetic
uugcaaaacugguauaac

SEQ ID NO: 516389 - RNA, 19 nt, Artificial Sequence
  Synthetic
auugcaaaacugguauaac

SEQ ID NO: 516390 - RNA, 20 nt, Artificial Sequence
  Synthetic
uauugcaaaacugguauaac

SEQ ID NO: 516391 - RNA, 21 nt, Artificial Sequence
  Synthetic
cuauugcaaaacugguauaac

SEQ ID NO: 516392 - RNA, 22 nt, Artificial Sequence
  Synthetic
acuauugcaaaacugguauaac

SEQ ID NO: 516393 - RNA, 23 nt, Artificial Sequence
  Synthetic
aacuauugcaaaacugguauaac

SEQ ID NO: 516394 - RNA, 24 nt, Artificial Sequence
  Synthetic
gaacuauugcaaaacugguauaac

SEQ ID NO: 516395 - RNA, 18 nt, Artificial Sequence
  Synthetic
gugugaguaauguauaac

SEQ ID NO: 516396 - RNA, 19 nt, Artificial Sequence
  Synthetic
ggugugaguaauguauaac

SEQ ID NO: 516397 - RNA, 20 nt, Artificial Sequence
  Synthetic
aggugugaguaauguauaac

SEQ ID NO: 516398 - RNA, 21 nt, Artificial Sequence
  Synthetic
caggugugaguaauguauaac

SEQ ID NO: 516399 - RNA, 22 nt, Artificial Sequence
  Synthetic
acaggugugaguaauguauaac

SEQ ID NO: 516400 - RNA, 23 nt, Artificial Sequence
  Synthetic
aacaggugugaguaauguauaac

SEQ ID NO: 516401 - RNA, 24 nt, Artificial Sequence
  Synthetic
uaacaggugugaguaauguauaac

SEQ ID NO: 516402 - RNA, 18 nt, Artificial Sequence
  Synthetic
aaucauacauauuauaac

SEQ ID NO: 516403 - RNA, 19 nt, Artificial Sequence
  Synthetic
aaaucauacauauuauaac

SEQ ID NO: 516404 - RNA, 20 nt, Artificial Sequence
  Synthetic
gaaaucauacauauuauaac

SEQ ID NO: 516405 - RNA, 21 nt, Artificial Sequence
  Synthetic
ugaaaucauacauauuauaac

SEQ ID NO: 516406 - RNA, 22 nt, Artificial Sequence
  Synthetic
gugaaaucauacauauuauaac

SEQ ID NO: 516407 - RNA, 23 nt, Artificial Sequence
  Synthetic
agugaaaucauacauauuauaac

SEQ ID NO: 516408 - RNA, 24 nt, Artificial Sequence
  Synthetic
cagugaaaucauacauauuauaac

SEQ ID NO: 516409 - RNA, 18 nt, Artificial Sequence
  Synthetic
aauuaguucccuuauaac

SEQ ID NO: 516410 - RNA, 19 nt, Artificial Sequence
  Synthetic
gaauuaguucccuuauaac

SEQ ID NO: 516411 - RNA, 20 nt, Artificial Sequence
  Synthetic
ggaauuaguucccuuauaac

SEQ ID NO: 516412 - RNA, 21 nt, Artificial Sequence
  Synthetic
uggaauuaguucccuuauaac

SEQ ID NO: 516413 - RNA, 22 nt, Artificial Sequence
  Synthetic
auggaauuaguucccuuauaac

SEQ ID NO: 516414 - RNA, 23 nt, Artificial Sequence
  Synthetic
gauggaauuaguucccuuauaac

SEQ ID NO: 516415 - RNA, 24 nt, Artificial Sequence
  Synthetic
ugauggaauuaguucccuuauaac

SEQ ID NO: 516416 - RNA, 18 nt, Artificial Sequence
  Synthetic
uuaguggagaguuauaac

SEQ ID NO: 516417 - RNA, 19 nt, Artificial Sequence
  Synthetic
auuaguggagaguuauaac

SEQ ID NO: 516418 - RNA, 20 nt, Artificial Sequence
  Synthetic
uauuaguggagaguuauaac

SEQ ID NO: 516419 - RNA, 21 nt, Artificial Sequence
  Synthetic
auauuaguggagaguuauaac

SEQ ID NO: 516420 - RNA, 22 nt, Artificial Sequence
  Synthetic
aauauuaguggagaguuauaac

SEQ ID NO: 516421 - RNA, 23 nt, Artificial Sequence
  Synthetic
uaauauuaguggagaguuauaac

SEQ ID NO: 516422 - RNA, 24 nt, Artificial Sequence
  Synthetic
guaauauuaguggagaguuauaac

SEQ ID NO: 516423 - RNA, 18 nt, Artificial Sequence
  Synthetic
uuuauaauauguuauaac

SEQ ID NO: 516424 - RNA, 19 nt, Artificial Sequence
  Synthetic
uuuuauaauauguuauaac

SEQ ID NO: 516425 - RNA, 20 nt, Artificial Sequence
  Synthetic
uuuuuauaauauguuauaac

SEQ ID NO: 516426 - RNA, 21 nt, Artificial Sequence
  Synthetic
uuuuuuauaauauguuauaac

SEQ ID NO: 516427 - RNA, 22 nt, Artificial Sequence
  Synthetic
auuuuuuauaauauguuauaac

SEQ ID NO: 516428 - RNA, 23 nt, Artificial Sequence
  Synthetic
aauuuuuuauaauauguuauaac

SEQ ID NO: 516429 - RNA, 24 nt, Artificial Sequence
  Synthetic
uaauuuuuuauaauauguuauaac

SEQ ID NO: 516430 - RNA, 18 nt, Artificial Sequence
  Synthetic
ucaccaagauuuuauaac

SEQ ID NO: 516431 - RNA, 19 nt, Artificial Sequence
  Synthetic
aucaccaagauuuuauaac

SEQ ID NO: 516432 - RNA, 20 nt, Artificial Sequence
  Synthetic
aaucaccaagauuuuauaac

SEQ ID NO: 516433 - RNA, 21 nt, Artificial Sequence
  Synthetic
gaaucaccaagauuuuauaac

SEQ ID NO: 516434 - RNA, 22 nt, Artificial Sequence
  Synthetic
agaaucaccaagauuuuauaac

SEQ ID NO: 516435 - RNA, 23 nt, Artificial Sequence
  Synthetic
cagaaucaccaagauuuuauaac

SEQ ID NO: 516436 - RNA, 24 nt, Artificial Sequence
  Synthetic
ucagaaucaccaagauuuuauaac

SEQ ID NO: 516437 - RNA, 18 nt, Artificial Sequence
  Synthetic
gaaggaaacuuuuauaac

SEQ ID NO: 516438 - RNA, 19 nt, Artificial Sequence
  Synthetic
agaaggaaacuuuuauaac

SEQ ID NO: 516439 - RNA, 20 nt, Artificial Sequence
  Synthetic
aagaaggaaacuuuuauaac

SEQ ID NO: 516440 - RNA, 21 nt, Artificial Sequence
  Synthetic
aaagaaggaaacuuuuauaac

SEQ ID NO: 516441 - RNA, 22 nt, Artificial Sequence
  Synthetic
aaaagaaggaaacuuuuauaac

SEQ ID NO: 516442 - RNA, 23 nt, Artificial Sequence
  Synthetic
aaaaagaaggaaacuuuuauaac

SEQ ID NO: 516443 - RNA, 24 nt, Artificial Sequence
  Synthetic
gaaaaagaaggaaacuuuuauaac

SEQ ID NO: 516444 - RNA, 18 nt, Artificial Sequence
  Synthetic
caaucaggcuaaacuaac

SEQ ID NO: 516445 - RNA, 19 nt, Artificial Sequence
  Synthetic
ucaaucaggcuaaacuaac

SEQ ID NO: 516446 - RNA, 20 nt, Artificial Sequence
  Synthetic
uucaaucaggcuaaacuaac

SEQ ID NO: 516447 - RNA, 21 nt, Artificial Sequence
  Synthetic
uuucaaucaggcuaaacuaac

SEQ ID NO: 516448 - RNA, 22 nt, Artificial Sequence
  Synthetic
auuucaaucaggcuaaacuaac

SEQ ID NO: 516449 - RNA, 23 nt, Artificial Sequence
  Synthetic
cauuucaaucaggcuaaacuaac

SEQ ID NO: 516450 - RNA, 24 nt, Artificial Sequence
  Synthetic
acauuucaaucaggcuaaacuaac

SEQ ID NO: 516451 - RNA, 18 nt, Artificial Sequence
  Synthetic
caacucuguauaacuaac

SEQ ID NO: 516452 - RNA, 19 nt, Artificial Sequence
  Synthetic
ucaacucuguauaacuaac

SEQ ID NO: 516453 - RNA, 20 nt, Artificial Sequence
  Synthetic
uucaacucuguauaacuaac

SEQ ID NO: 516454 - RNA, 21 nt, Artificial Sequence
  Synthetic
guucaacucuguauaacuaac

SEQ ID NO: 516455 - RNA, 22 nt, Artificial Sequence
  Synthetic
aguucaacucuguauaacuaac

SEQ ID NO: 516456 - RNA, 23 nt, Artificial Sequence
  Synthetic
uaguucaacucuguauaacuaac

SEQ ID NO: 516457 - RNA, 24 nt, Artificial Sequence
  Synthetic
auaguucaacucuguauaacuaac

SEQ ID NO: 516458 - RNA, 18 nt, Artificial Sequence
  Synthetic
ccagugacacagacuaac

SEQ ID NO: 516459 - RNA, 19 nt, Artificial Sequence
  Synthetic
cccagugacacagacuaac

SEQ ID NO: 516460 - RNA, 20 nt, Artificial Sequence
  Synthetic
ucccagugacacagacuaac

SEQ ID NO: 516461 - RNA, 21 nt, Artificial Sequence
  Synthetic
cucccagugacacagacuaac

SEQ ID NO: 516462 - RNA, 22 nt, Artificial Sequence
  Synthetic
acucccagugacacagacuaac

SEQ ID NO: 516463 - RNA, 23 nt, Artificial Sequence
  Synthetic
gacucccagugacacagacuaac

SEQ ID NO: 516464 - RNA, 24 nt, Artificial Sequence
  Synthetic
ggacucccagugacacagacuaac

SEQ ID NO: 516465 - RNA, 18 nt, Artificial Sequence
  Synthetic
guacagcauguuacuaac

SEQ ID NO: 516466 - RNA, 19 nt, Artificial Sequence
  Synthetic
uguacagcauguuacuaac

SEQ ID NO: 516467 - RNA, 20 nt, Artificial Sequence
  Synthetic
cuguacagcauguuacuaac

SEQ ID NO: 516468 - RNA, 21 nt, Artificial Sequence
  Synthetic
gcuguacagcauguuacuaac

SEQ ID NO: 516469 - RNA, 22 nt, Artificial Sequence
  Synthetic
ugcuguacagcauguuacuaac

SEQ ID NO: 516470 - RNA, 23 nt, Artificial Sequence
  Synthetic
augcuguacagcauguuacuaac

SEQ ID NO: 516471 - RNA, 24 nt, Artificial Sequence
  Synthetic
aaugcuguacagcauguuacuaac

SEQ ID NO: 516472 - RNA, 18 nt, Artificial Sequence
  Synthetic
ggggacacuuuaccuaac

SEQ ID NO: 516473 - RNA, 19 nt, Artificial Sequence
  Synthetic
aggggacacuuuaccuaac

SEQ ID NO: 516474 - RNA, 20 nt, Artificial Sequence
  Synthetic
caggggacacuuuaccuaac

SEQ ID NO: 516475 - RNA, 21 nt, Artificial Sequence
  Synthetic
gcaggggacacuuuaccuaac

SEQ ID NO: 516476 - RNA, 22 nt, Artificial Sequence
  Synthetic
ugcaggggacacuuuaccuaac

SEQ ID NO: 516477 - RNA, 23 nt, Artificial Sequence
  Synthetic
uugcaggggacacuuuaccuaac

SEQ ID NO: 516478 - RNA, 24 nt, Artificial Sequence
  Synthetic
guugcaggggacacuuuaccuaac

SEQ ID NO: 516479 - RNA, 18 nt, Artificial Sequence
  Synthetic
ccaaagcacaacccuaac

SEQ ID NO: 516480 - RNA, 19 nt, Artificial Sequence
  Synthetic
cccaaagcacaacccuaac

SEQ ID NO: 516481 - RNA, 20 nt, Artificial Sequence
  Synthetic
ccccaaagcacaacccuaac

SEQ ID NO: 516482 - RNA, 21 nt, Artificial Sequence
  Synthetic
accccaaagcacaacccuaac

SEQ ID NO: 516483 - RNA, 22 nt, Artificial Sequence
  Synthetic
gaccccaaagcacaacccuaac

SEQ ID NO: 516484 - RNA, 23 nt, Artificial Sequence
  Synthetic
agaccccaaagcacaacccuaac

SEQ ID NO: 516485 - RNA, 24 nt, Artificial Sequence
  Synthetic
cagaccccaaagcacaacccuaac

SEQ ID NO: 516486 - RNA, 18 nt, Artificial Sequence
  Synthetic
aguguugaagucccuaac

SEQ ID NO: 516487 - RNA, 19 nt, Artificial Sequence
  Synthetic
gaguguugaagucccuaac

SEQ ID NO: 516488 - RNA, 20 nt, Artificial Sequence
  Synthetic
ggaguguugaagucccuaac

SEQ ID NO: 516489 - RNA, 21 nt, Artificial Sequence
  Synthetic
aggaguguugaagucccuaac

SEQ ID NO: 516490 - RNA, 22 nt, Artificial Sequence
  Synthetic
gaggaguguugaagucccuaac

SEQ ID NO: 516491 - RNA, 23 nt, Artificial Sequence
  Synthetic
agaggaguguugaagucccuaac

SEQ ID NO: 516492 - RNA, 24 nt, Artificial Sequence
  Synthetic
gagaggaguguugaagucccuaac

SEQ ID NO: 516493 - RNA, 18 nt, Artificial Sequence
  Synthetic
uauaauugcccuccuaac

SEQ ID NO: 516494 - RNA, 19 nt, Artificial Sequence
  Synthetic
auauaauugcccuccuaac

SEQ ID NO: 516495 - RNA, 20 nt, Artificial Sequence
  Synthetic
uauauaauugcccuccuaac

SEQ ID NO: 516496 - RNA, 21 nt, Artificial Sequence
  Synthetic
uuauauaauugcccuccuaac

SEQ ID NO: 516497 - RNA, 22 nt, Artificial Sequence
  Synthetic
uuuauauaauugcccuccuaac

SEQ ID NO: 516498 - RNA, 23 nt, Artificial Sequence
  Synthetic
guuuauauaauugcccuccuaac

SEQ ID NO: 516499 - RNA, 24 nt, Artificial Sequence
  Synthetic
aguuuauauaauugcccuccuaac

SEQ ID NO: 516500 - RNA, 18 nt, Artificial Sequence
  Synthetic
agauauaucacagcuaac

SEQ ID NO: 516501 - RNA, 19 nt, Artificial Sequence
  Synthetic
aagauauaucacagcuaac

SEQ ID NO: 516502 - RNA, 20 nt, Artificial Sequence
  Synthetic
aaagauauaucacagcuaac

SEQ ID NO: 516503 - RNA, 21 nt, Artificial Sequence
  Synthetic
aaaagauauaucacagcuaac

SEQ ID NO: 516504 - RNA, 22 nt, Artificial Sequence
  Synthetic
gaaaagauauaucacagcuaac

SEQ ID NO: 516505 - RNA, 23 nt, Artificial Sequence
  Synthetic
ggaaaagauauaucacagcuaac

SEQ ID NO: 516506 - RNA, 24 nt, Artificial Sequence
  Synthetic
uggaaaagauauaucacagcuaac

SEQ ID NO: 516507 - RNA, 18 nt, Artificial Sequence
  Synthetic
aaacagucagcagcuaac

SEQ ID NO: 516508 - RNA, 19 nt, Artificial Sequence
  Synthetic
gaaacagucagcagcuaac

SEQ ID NO: 516509 - RNA, 20 nt, Artificial Sequence
  Synthetic
agaaacagucagcagcuaac

SEQ ID NO: 516510 - RNA, 21 nt, Artificial Sequence
  Synthetic
gagaaacagucagcagcuaac

SEQ ID NO: 516511 - RNA, 22 nt, Artificial Sequence
  Synthetic
ugagaaacagucagcagcuaac

SEQ ID NO: 516512 - RNA, 23 nt, Artificial Sequence
  Synthetic
cugagaaacagucagcagcuaac

SEQ ID NO: 516513 - RNA, 24 nt, Artificial Sequence
  Synthetic
ucugagaaacagucagcagcuaac

SEQ ID NO: 516514 - RNA, 18 nt, Artificial Sequence
  Synthetic
uuccuugauuuagcuaac

SEQ ID NO: 516515 - RNA, 19 nt, Artificial Sequence
  Synthetic
cuuccuugauuuagcuaac

SEQ ID NO: 516516 - RNA, 20 nt, Artificial Sequence
  Synthetic
ccuuccuugauuuagcuaac

SEQ ID NO: 516517 - RNA, 21 nt, Artificial Sequence
  Synthetic
gccuuccuugauuuagcuaac

SEQ ID NO: 516518 - RNA, 22 nt, Artificial Sequence
  Synthetic
agccuuccuugauuuagcuaac

SEQ ID NO: 516519 - RNA, 23 nt, Artificial Sequence
  Synthetic
aagccuuccuugauuuagcuaac

SEQ ID NO: 516520 - RNA, 24 nt, Artificial Sequence
  Synthetic
gaagccuuccuugauuuagcuaac

SEQ ID NO: 516521 - RNA, 18 nt, Artificial Sequence
  Synthetic
uguaguucaagggcuaac

SEQ ID NO: 516522 - RNA, 19 nt, Artificial Sequence
  Synthetic
auguaguucaagggcuaac

SEQ ID NO: 516523 - RNA, 20 nt, Artificial Sequence
  Synthetic
cauguaguucaagggcuaac

SEQ ID NO: 516524 - RNA, 21 nt, Artificial Sequence
  Synthetic
ucauguaguucaagggcuaac

SEQ ID NO: 516525 - RNA, 22 nt, Artificial Sequence
  Synthetic
cucauguaguucaagggcuaac

SEQ ID NO: 516526 - RNA, 23 nt, Artificial Sequence
  Synthetic
ccucauguaguucaagggcuaac

SEQ ID NO: 516527 - RNA, 24 nt, Artificial Sequence
  Synthetic
accucauguaguucaagggcuaac

SEQ ID NO: 516528 - RNA, 18 nt, Artificial Sequence
  Synthetic
acacugaagagggcuaac

SEQ ID NO: 516529 - RNA, 19 nt, Artificial Sequence
  Synthetic
aacacugaagagggcuaac

SEQ ID NO: 516530 - RNA, 20 nt, Artificial Sequence
  Synthetic
uaacacugaagagggcuaac

SEQ ID NO: 516531 - RNA, 21 nt, Artificial Sequence
  Synthetic
uuaacacugaagagggcuaac

SEQ ID NO: 516532 - RNA, 22 nt, Artificial Sequence
  Synthetic
auuaacacugaagagggcuaac

SEQ ID NO: 516533 - RNA, 23 nt, Artificial Sequence
  Synthetic
uauuaacacugaagagggcuaac

SEQ ID NO: 516534 - RNA, 24 nt, Artificial Sequence
  Synthetic
auauuaacacugaagagggcuaac

SEQ ID NO: 516535 - RNA, 18 nt, Artificial Sequence
  Synthetic
gagaccauccuggcuaac

SEQ ID NO: 516536 - RNA, 19 nt, Artificial Sequence
  Synthetic
cgagaccauccuggcuaac

SEQ ID NO: 516537 - RNA, 20 nt, Artificial Sequence
  Synthetic
ucgagaccauccuggcuaac

SEQ ID NO: 516538 - RNA, 21 nt, Artificial Sequence
  Synthetic
aucgagaccauccuggcuaac

SEQ ID NO: 516539 - RNA, 22 nt, Artificial Sequence
  Synthetic
gaucgagaccauccuggcuaac

SEQ ID NO: 516540 - RNA, 23 nt, Artificial Sequence
  Synthetic
agaucgagaccauccuggcuaac

SEQ ID NO: 516541 - RNA, 24 nt, Artificial Sequence
  Synthetic
gagaucgagaccauccuggcuaac

SEQ ID NO: 516542 - RNA, 18 nt, Artificial Sequence
  Synthetic
auguauugaacaucuaac

SEQ ID NO: 516543 - RNA, 19 nt, Artificial Sequence
  Synthetic
cauguauugaacaucuaac

SEQ ID NO: 516544 - RNA, 20 nt, Artificial Sequence
  Synthetic
acauguauugaacaucuaac

SEQ ID NO: 516545 - RNA, 21 nt, Artificial Sequence
  Synthetic
aacauguauugaacaucuaac

SEQ ID NO: 516546 - RNA, 22 nt, Artificial Sequence
  Synthetic
uaacauguauugaacaucuaac

SEQ ID NO: 516547 - RNA, 23 nt, Artificial Sequence
  Synthetic
uuaacauguauugaacaucuaac

SEQ ID NO: 516548 - RNA, 24 nt, Artificial Sequence
  Synthetic
auuaacauguauugaacaucuaac

SEQ ID NO: 516549 - RNA, 18 nt, Artificial Sequence
  Synthetic
cuuccuuuagacucuaac

SEQ ID NO: 516550 - RNA, 19 nt, Artificial Sequence
  Synthetic
ucuuccuuuagacucuaac

SEQ ID NO: 516551 - RNA, 20 nt, Artificial Sequence
  Synthetic
cucuuccuuuagacucuaac

SEQ ID NO: 516552 - RNA, 21 nt, Artificial Sequence
  Synthetic
ucucuuccuuuagacucuaac

SEQ ID NO: 516553 - RNA, 22 nt, Artificial Sequence
  Synthetic
uucucuuccuuuagacucuaac

SEQ ID NO: 516554 - RNA, 23 nt, Artificial Sequence
  Synthetic
guucucuuccuuuagacucuaac

SEQ ID NO: 516555 - RNA, 24 nt, Artificial Sequence
  Synthetic
uguucucuuccuuuagacucuaac

SEQ ID NO: 516556 - RNA, 18 nt, Artificial Sequence
  Synthetic
aguaaaauggugucuaac

SEQ ID NO: 516557 - RNA, 19 nt, Artificial Sequence
  Synthetic
uaguaaaauggugucuaac

SEQ ID NO: 516558 - RNA, 20 nt, Artificial Sequence
  Synthetic
auaguaaaauggugucuaac

SEQ ID NO: 516559 - RNA, 21 nt, Artificial Sequence
  Synthetic
cauaguaaaauggugucuaac

SEQ ID NO: 516560 - RNA, 22 nt, Artificial Sequence
  Synthetic
ucauaguaaaauggugucuaac

SEQ ID NO: 516561 - RNA, 23 nt, Artificial Sequence
  Synthetic
uucauaguaaaauggugucuaac

SEQ ID NO: 516562 - RNA, 24 nt, Artificial Sequence
  Synthetic
uuucauaguaaaauggugucuaac

SEQ ID NO: 516563 - RNA, 18 nt, Artificial Sequence
  Synthetic
uuguaugaaaauucuaac

SEQ ID NO: 516564 - RNA, 19 nt, Artificial Sequence
  Synthetic
uuuguaugaaaauucuaac

SEQ ID NO: 516565 - RNA, 20 nt, Artificial Sequence
  Synthetic
auuuguaugaaaauucuaac

SEQ ID NO: 516566 - RNA, 21 nt, Artificial Sequence
  Synthetic
cauuuguaugaaaauucuaac

SEQ ID NO: 516567 - RNA, 22 nt, Artificial Sequence
  Synthetic
gcauuuguaugaaaauucuaac

SEQ ID NO: 516568 - RNA, 23 nt, Artificial Sequence
  Synthetic
ugcauuuguaugaaaauucuaac

SEQ ID NO: 516569 - RNA, 24 nt, Artificial Sequence
  Synthetic
uugcauuuguaugaaaauucuaac

SEQ ID NO: 516570 - RNA, 18 nt, Artificial Sequence
  Synthetic
uuacauaaaauuucuaac

SEQ ID NO: 516571 - RNA, 19 nt, Artificial Sequence
  Synthetic
uuuacauaaaauuucuaac

SEQ ID NO: 516572 - RNA, 20 nt, Artificial Sequence
  Synthetic
uuuuacauaaaauuucuaac

SEQ ID NO: 516573 - RNA, 21 nt, Artificial Sequence
  Synthetic
cuuuuacauaaaauuucuaac

SEQ ID NO: 516574 - RNA, 22 nt, Artificial Sequence
  Synthetic
ucuuuuacauaaaauuucuaac

SEQ ID NO: 516575 - RNA, 23 nt, Artificial Sequence
  Synthetic
aucuuuuacauaaaauuucuaac

SEQ ID NO: 516576 - RNA, 24 nt, Artificial Sequence
  Synthetic
uaucuuuuacauaaaauuucuaac

SEQ ID NO: 516577 - RNA, 18 nt, Artificial Sequence
  Synthetic
cuaauucaaauuucuaac

SEQ ID NO: 516578 - RNA, 19 nt, Artificial Sequence
  Synthetic
acuaauucaaauuucuaac

SEQ ID NO: 516579 - RNA, 20 nt, Artificial Sequence
  Synthetic
uacuaauucaaauuucuaac

SEQ ID NO: 516580 - RNA, 21 nt, Artificial Sequence
  Synthetic
auacuaauucaaauuucuaac

SEQ ID NO: 516581 - RNA, 22 nt, Artificial Sequence
  Synthetic
gauacuaauucaaauuucuaac

SEQ ID NO: 516582 - RNA, 23 nt, Artificial Sequence
  Synthetic
agauacuaauucaaauuucuaac

SEQ ID NO: 516583 - RNA, 24 nt, Artificial Sequence
  Synthetic
cagauacuaauucaaauuucuaac

SEQ ID NO: 516584 - RNA, 18 nt, Artificial Sequence
  Synthetic
cuggauuggcaaaguaac

SEQ ID NO: 516585 - RNA, 19 nt, Artificial Sequence
  Synthetic
ucuggauuggcaaaguaac

SEQ ID NO: 516586 - RNA, 20 nt, Artificial Sequence
  Synthetic
uucuggauuggcaaaguaac

SEQ ID NO: 516587 - RNA, 21 nt, Artificial Sequence
  Synthetic
auucuggauuggcaaaguaac

SEQ ID NO: 516588 - RNA, 22 nt, Artificial Sequence
  Synthetic
aauucuggauuggcaaaguaac

SEQ ID NO: 516589 - RNA, 23 nt, Artificial Sequence
  Synthetic
aaauucuggauuggcaaaguaac

SEQ ID NO: 516590 - RNA, 24 nt, Artificial Sequence
  Synthetic
gaaauucuggauuggcaaaguaac

SEQ ID NO: 516591 - RNA, 18 nt, Artificial Sequence
  Synthetic
uccugggaucaaaguaac

SEQ ID NO: 516592 - RNA, 19 nt, Artificial Sequence
  Synthetic
auccugggaucaaaguaac

SEQ ID NO: 516593 - RNA, 20 nt, Artificial Sequence
  Synthetic
cauccugggaucaaaguaac

SEQ ID NO: 516594 - RNA, 21 nt, Artificial Sequence
  Synthetic
ccauccugggaucaaaguaac

SEQ ID NO: 516595 - RNA, 22 nt, Artificial Sequence
  Synthetic
accauccugggaucaaaguaac

SEQ ID NO: 516596 - RNA, 23 nt, Artificial Sequence
  Synthetic
uaccauccugggaucaaaguaac

SEQ ID NO: 516597 - RNA, 24 nt, Artificial Sequence
  Synthetic
uuaccauccugggaucaaaguaac

SEQ ID NO: 516598 - RNA, 18 nt, Artificial Sequence
  Synthetic
aauaauuuagacaguaac

SEQ ID NO: 516599 - RNA, 19 nt, Artificial Sequence
  Synthetic
aaauaauuuagacaguaac

SEQ ID NO: 516600 - RNA, 20 nt, Artificial Sequence
  Synthetic
aaaauaauuuagacaguaac

SEQ ID NO: 516601 - RNA, 21 nt, Artificial Sequence
  Synthetic
aaaaauaauuuagacaguaac

SEQ ID NO: 516602 - RNA, 22 nt, Artificial Sequence
  Synthetic
uaaaaauaauuuagacaguaac

SEQ ID NO: 516603 - RNA, 23 nt, Artificial Sequence
  Synthetic
auaaaaauaauuuagacaguaac

SEQ ID NO: 516604 - RNA, 24 nt, Artificial Sequence
  Synthetic
aauaaaaauaauuuagacaguaac

SEQ ID NO: 516605 - RNA, 18 nt, Artificial Sequence
  Synthetic
ggauucacugccaguaac

SEQ ID NO: 516606 - RNA, 19 nt, Artificial Sequence
  Synthetic
uggauucacugccaguaac

SEQ ID NO: 516607 - RNA, 20 nt, Artificial Sequence
  Synthetic
auggauucacugccaguaac

SEQ ID NO: 516608 - RNA, 21 nt, Artificial Sequence
  Synthetic
uauggauucacugccaguaac

SEQ ID NO: 516609 - RNA, 22 nt, Artificial Sequence
  Synthetic
guauggauucacugccaguaac

SEQ ID NO: 516610 - RNA, 23 nt, Artificial Sequence
  Synthetic
cguauggauucacugccaguaac

SEQ ID NO: 516611 - RNA, 24 nt, Artificial Sequence
  Synthetic
ccguauggauucacugccaguaac

SEQ ID NO: 516612 - RNA, 18 nt, Artificial Sequence
  Synthetic
uugugcgcauucaguaac

SEQ ID NO: 516613 - RNA, 19 nt, Artificial Sequence
  Synthetic
guugugcgcauucaguaac

SEQ ID NO: 516614 - RNA, 20 nt, Artificial Sequence
  Synthetic
uguugugcgcauucaguaac

SEQ ID NO: 516615 - RNA, 21 nt, Artificial Sequence
  Synthetic
auguugugcgcauucaguaac

SEQ ID NO: 516616 - RNA, 22 nt, Artificial Sequence
  Synthetic
aauguugugcgcauucaguaac

SEQ ID NO: 516617 - RNA, 23 nt, Artificial Sequence
  Synthetic
gaauguugugcgcauucaguaac

SEQ ID NO: 516618 - RNA, 24 nt, Artificial Sequence
  Synthetic
ugaauguugugcgcauucaguaac

SEQ ID NO: 516619 - RNA, 18 nt, Artificial Sequence
  Synthetic
acaaagauguagaguaac

SEQ ID NO: 516620 - RNA, 19 nt, Artificial Sequence
  Synthetic
gacaaagauguagaguaac

SEQ ID NO: 516621 - RNA, 20 nt, Artificial Sequence
  Synthetic
ugacaaagauguagaguaac

SEQ ID NO: 516622 - RNA, 21 nt, Artificial Sequence
  Synthetic
uugacaaagauguagaguaac

SEQ ID NO: 516623 - RNA, 22 nt, Artificial Sequence
  Synthetic
auugacaaagauguagaguaac

SEQ ID NO: 516624 - RNA, 23 nt, Artificial Sequence
  Synthetic
uauugacaaagauguagaguaac

SEQ ID NO: 516625 - RNA, 24 nt, Artificial Sequence
  Synthetic
auauugacaaagauguagaguaac

SEQ ID NO: 516626 - RNA, 18 nt, Artificial Sequence
  Synthetic
aaaauaggauggaguaac

SEQ ID NO: 516627 - RNA, 19 nt, Artificial Sequence
  Synthetic
aaaaauaggauggaguaac

SEQ ID NO: 516628 - RNA, 20 nt, Artificial Sequence
  Synthetic
gaaaaauaggauggaguaac

SEQ ID NO: 516629 - RNA, 21 nt, Artificial Sequence
  Synthetic
ugaaaaauaggauggaguaac

SEQ ID NO: 516630 - RNA, 22 nt, Artificial Sequence
  Synthetic
augaaaaauaggauggaguaac

SEQ ID NO: 516631 - RNA, 23 nt, Artificial Sequence
  Synthetic
uaugaaaaauaggauggaguaac

SEQ ID NO: 516632 - RNA, 24 nt, Artificial Sequence
  Synthetic
guaugaaaaauaggauggaguaac

SEQ ID NO: 516633 - RNA, 18 nt, Artificial Sequence
  Synthetic
uacauuuucuugaguaac

SEQ ID NO: 516634 - RNA, 19 nt, Artificial Sequence
  Synthetic
auacauuuucuugaguaac

SEQ ID NO: 516635 - RNA, 20 nt, Artificial Sequence
  Synthetic
aauacauuuucuugaguaac

SEQ ID NO: 516636 - RNA, 21 nt, Artificial Sequence
  Synthetic
aaauacauuuucuugaguaac

SEQ ID NO: 516637 - RNA, 22 nt, Artificial Sequence
  Synthetic
uaaauacauuuucuugaguaac

SEQ ID NO: 516638 - RNA, 23 nt, Artificial Sequence
  Synthetic
auaaauacauuuucuugaguaac

SEQ ID NO: 516639 - RNA, 24 nt, Artificial Sequence
  Synthetic
aauaaauacauuuucuugaguaac

SEQ ID NO: 516640 - RNA, 18 nt, Artificial Sequence
  Synthetic
acaugaaucaaagguaac

SEQ ID NO: 516641 - RNA, 19 nt, Artificial Sequence
  Synthetic
cacaugaaucaaagguaac

SEQ ID NO: 516642 - RNA, 20 nt, Artificial Sequence
  Synthetic
ucacaugaaucaaagguaac

SEQ ID NO: 516643 - RNA, 21 nt, Artificial Sequence
  Synthetic
gucacaugaaucaaagguaac

SEQ ID NO: 516644 - RNA, 22 nt, Artificial Sequence
  Synthetic
ugucacaugaaucaaagguaac

SEQ ID NO: 516645 - RNA, 23 nt, Artificial Sequence
  Synthetic
cugucacaugaaucaaagguaac

SEQ ID NO: 516646 - RNA, 24 nt, Artificial Sequence
  Synthetic
acugucacaugaaucaaagguaac

SEQ ID NO: 516647 - RNA, 18 nt, Artificial Sequence
  Synthetic
gagcuauucugagguaac

SEQ ID NO: 516648 - RNA, 19 nt, Artificial Sequence
  Synthetic
agagcuauucugagguaac

SEQ ID NO: 516649 - RNA, 20 nt, Artificial Sequence
  Synthetic
aagagcuauucugagguaac

SEQ ID NO: 516650 - RNA, 21 nt, Artificial Sequence
  Synthetic
aaagagcuauucugagguaac

SEQ ID NO: 516651 - RNA, 22 nt, Artificial Sequence
  Synthetic
aaaagagcuauucugagguaac

SEQ ID NO: 516652 - RNA, 23 nt, Artificial Sequence
  Synthetic
caaaagagcuauucugagguaac

SEQ ID NO: 516653 - RNA, 24 nt, Artificial Sequence
  Synthetic
acaaaagagcuauucugagguaac

SEQ ID NO: 516654 - RNA, 18 nt, Artificial Sequence
  Synthetic
aaucuccagguagguaac

SEQ ID NO: 516655 - RNA, 19 nt, Artificial Sequence
  Synthetic
aaaucuccagguagguaac

SEQ ID NO: 516656 - RNA, 20 nt, Artificial Sequence
  Synthetic
caaaucuccagguagguaac

SEQ ID NO: 516657 - RNA, 21 nt, Artificial Sequence
  Synthetic
ucaaaucuccagguagguaac

SEQ ID NO: 516658 - RNA, 22 nt, Artificial Sequence
  Synthetic
cucaaaucuccagguagguaac

SEQ ID NO: 516659 - RNA, 23 nt, Artificial Sequence
  Synthetic
ucucaaaucuccagguagguaac

SEQ ID NO: 516660 - RNA, 24 nt, Artificial Sequence
  Synthetic
uucucaaaucuccagguagguaac

SEQ ID NO: 516661 - RNA, 18 nt, Artificial Sequence
  Synthetic
gucagcaucagugguaac

SEQ ID NO: 516662 - RNA, 19 nt, Artificial Sequence
  Synthetic
agucagcaucagugguaac

SEQ ID NO: 516663 - RNA, 20 nt, Artificial Sequence
  Synthetic
cagucagcaucagugguaac

SEQ ID NO: 516664 - RNA, 21 nt, Artificial Sequence
  Synthetic
ccagucagcaucagugguaac

SEQ ID NO: 516665 - RNA, 22 nt, Artificial Sequence
  Synthetic
gccagucagcaucagugguaac

SEQ ID NO: 516666 - RNA, 23 nt, Artificial Sequence
  Synthetic
ugccagucagcaucagugguaac

SEQ ID NO: 516667 - RNA, 24 nt, Artificial Sequence
  Synthetic
augccagucagcaucagugguaac

SEQ ID NO: 516668 - RNA, 18 nt, Artificial Sequence
  Synthetic
auuugguuaauauguaac

SEQ ID NO: 516669 - RNA, 19 nt, Artificial Sequence
  Synthetic
uauuugguuaauauguaac

SEQ ID NO: 516670 - RNA, 20 nt, Artificial Sequence
  Synthetic
guauuugguuaauauguaac

SEQ ID NO: 516671 - RNA, 21 nt, Artificial Sequence
  Synthetic
uguauuugguuaauauguaac

SEQ ID NO: 516672 - RNA, 22 nt, Artificial Sequence
  Synthetic
cuguauuugguuaauauguaac

SEQ ID NO: 516673 - RNA, 23 nt, Artificial Sequence
  Synthetic
acuguauuugguuaauauguaac

SEQ ID NO: 516674 - RNA, 24 nt, Artificial Sequence
  Synthetic
uacuguauuugguuaauauguaac

SEQ ID NO: 516675 - RNA, 18 nt, Artificial Sequence
  Synthetic
guaaaugacauauguaac

SEQ ID NO: 516676 - RNA, 19 nt, Artificial Sequence
  Synthetic
aguaaaugacauauguaac

SEQ ID NO: 516677 - RNA, 20 nt, Artificial Sequence
  Synthetic
aaguaaaugacauauguaac

SEQ ID NO: 516678 - RNA, 21 nt, Artificial Sequence
  Synthetic
gaaguaaaugacauauguaac

SEQ ID NO: 516679 - RNA, 22 nt, Artificial Sequence
  Synthetic
ggaaguaaaugacauauguaac

SEQ ID NO: 516680 - RNA, 23 nt, Artificial Sequence
  Synthetic
gggaaguaaaugacauauguaac

SEQ ID NO: 516681 - RNA, 24 nt, Artificial Sequence
  Synthetic
ugggaaguaaaugacauauguaac

SEQ ID NO: 516682 - RNA, 18 nt, Artificial Sequence
  Synthetic
gaaauuugcauauguaac

SEQ ID NO: 516683 - RNA, 19 nt, Artificial Sequence
  Synthetic
agaaauuugcauauguaac

SEQ ID NO: 516684 - RNA, 20 nt, Artificial Sequence
  Synthetic
cagaaauuugcauauguaac

SEQ ID NO: 516685 - RNA, 21 nt, Artificial Sequence
  Synthetic
acagaaauuugcauauguaac

SEQ ID NO: 516686 - RNA, 22 nt, Artificial Sequence
  Synthetic
uacagaaauuugcauauguaac

SEQ ID NO: 516687 - RNA, 23 nt, Artificial Sequence
  Synthetic
cuacagaaauuugcauauguaac

SEQ ID NO: 516688 - RNA, 24 nt, Artificial Sequence
  Synthetic
acuacagaaauuugcauauguaac

SEQ ID NO: 516689 - RNA, 18 nt, Artificial Sequence
  Synthetic
ucuuuaugacacuguaac

SEQ ID NO: 516690 - RNA, 19 nt, Artificial Sequence
  Synthetic
aucuuuaugacacuguaac

SEQ ID NO: 516691 - RNA, 20 nt, Artificial Sequence
  Synthetic
aaucuuuaugacacuguaac

SEQ ID NO: 516692 - RNA, 21 nt, Artificial Sequence
  Synthetic
gaaucuuuaugacacuguaac

SEQ ID NO: 516693 - RNA, 22 nt, Artificial Sequence
  Synthetic
agaaucuuuaugacacuguaac

SEQ ID NO: 516694 - RNA, 23 nt, Artificial Sequence
  Synthetic
aagaaucuuuaugacacuguaac

SEQ ID NO: 516695 - RNA, 24 nt, Artificial Sequence
  Synthetic
aaagaaucuuuaugacacuguaac

SEQ ID NO: 516696 - RNA, 18 nt, Artificial Sequence
  Synthetic
uaugucucucacuguaac

SEQ ID NO: 516697 - RNA, 19 nt, Artificial Sequence
  Synthetic
uuaugucucucacuguaac

SEQ ID NO: 516698 - RNA, 20 nt, Artificial Sequence
  Synthetic
uuuaugucucucacuguaac

SEQ ID NO: 516699 - RNA, 21 nt, Artificial Sequence
  Synthetic
guuuaugucucucacuguaac

SEQ ID NO: 516700 - RNA, 22 nt, Artificial Sequence
  Synthetic
uguuuaugucucucacuguaac

SEQ ID NO: 516701 - RNA, 23 nt, Artificial Sequence
  Synthetic
guguuuaugucucucacuguaac

SEQ ID NO: 516702 - RNA, 24 nt, Artificial Sequence
  Synthetic
aguguuuaugucucucacuguaac

SEQ ID NO: 516703 - RNA, 18 nt, Artificial Sequence
  Synthetic
uggauugaucuguguaac

SEQ ID NO: 516704 - RNA, 19 nt, Artificial Sequence
  Synthetic
uuggauugaucuguguaac

SEQ ID NO: 516705 - RNA, 20 nt, Artificial Sequence
  Synthetic
auuggauugaucuguguaac

SEQ ID NO: 516706 - RNA, 21 nt, Artificial Sequence
  Synthetic
aauuggauugaucuguguaac

SEQ ID NO: 516707 - RNA, 22 nt, Artificial Sequence
  Synthetic
caauuggauugaucuguguaac

SEQ ID NO: 516708 - RNA, 23 nt, Artificial Sequence
  Synthetic
acaauuggauugaucuguguaac

SEQ ID NO: 516709 - RNA, 24 nt, Artificial Sequence
  Synthetic
aacaauuggauugaucuguguaac

SEQ ID NO: 516710 - RNA, 18 nt, Artificial Sequence
  Synthetic
aaaacuagugauuguaac

SEQ ID NO: 516711 - RNA, 19 nt, Artificial Sequence
  Synthetic
caaaacuagugauuguaac

SEQ ID NO: 516712 - RNA, 20 nt, Artificial Sequence
  Synthetic
acaaaacuagugauuguaac

SEQ ID NO: 516713 - RNA, 21 nt, Artificial Sequence
  Synthetic
cacaaaacuagugauuguaac

SEQ ID NO: 516714 - RNA, 22 nt, Artificial Sequence
  Synthetic
ccacaaaacuagugauuguaac

SEQ ID NO: 516715 - RNA, 23 nt, Artificial Sequence
  Synthetic
cccacaaaacuagugauuguaac

SEQ ID NO: 516716 - RNA, 24 nt, Artificial Sequence
  Synthetic
ccccacaaaacuagugauuguaac

SEQ ID NO: 516717 - RNA, 18 nt, Artificial Sequence
  Synthetic
agagguuuggcuuguaac

SEQ ID NO: 516718 - RNA, 19 nt, Artificial Sequence
  Synthetic
aagagguuuggcuuguaac

SEQ ID NO: 516719 - RNA, 20 nt, Artificial Sequence
  Synthetic
gaagagguuuggcuuguaac

SEQ ID NO: 516720 - RNA, 21 nt, Artificial Sequence
  Synthetic
ugaagagguuuggcuuguaac

SEQ ID NO: 516721 - RNA, 22 nt, Artificial Sequence
  Synthetic
uugaagagguuuggcuuguaac

SEQ ID NO: 516722 - RNA, 23 nt, Artificial Sequence
  Synthetic
auugaagagguuuggcuuguaac

SEQ ID NO: 516723 - RNA, 24 nt, Artificial Sequence
  Synthetic
cauugaagagguuuggcuuguaac

SEQ ID NO: 516724 - RNA, 18 nt, Artificial Sequence
  Synthetic
aaaauacaaaaaauuaac

SEQ ID NO: 516725 - RNA, 19 nt, Artificial Sequence
  Synthetic
aaaaauacaaaaaauuaac

SEQ ID NO: 516726 - RNA, 20 nt, Artificial Sequence
  Synthetic
caaaaauacaaaaaauuaac

SEQ ID NO: 516727 - RNA, 21 nt, Artificial Sequence
  Synthetic
ccaaaaauacaaaaaauuaac

SEQ ID NO: 516728 - RNA, 22 nt, Artificial Sequence
  Synthetic
accaaaaauacaaaaaauuaac

SEQ ID NO: 516729 - RNA, 23 nt, Artificial Sequence
  Synthetic
uaccaaaaauacaaaaaauuaac

SEQ ID NO: 516730 - RNA, 24 nt, Artificial Sequence
  Synthetic
cuaccaaaaauacaaaaaauuaac

SEQ ID NO: 516731 - RNA, 18 nt, Artificial Sequence
  Synthetic
agagacagaauaauuaac

SEQ ID NO: 516732 - RNA, 19 nt, Artificial Sequence
  Synthetic
aagagacagaauaauuaac

SEQ ID NO: 516733 - RNA, 20 nt, Artificial Sequence
  Synthetic
caagagacagaauaauuaac

SEQ ID NO: 516734 - RNA, 21 nt, Artificial Sequence
  Synthetic
ucaagagacagaauaauuaac

SEQ ID NO: 516735 - RNA, 22 nt, Artificial Sequence
  Synthetic
uucaagagacagaauaauuaac

SEQ ID NO: 516736 - RNA, 23 nt, Artificial Sequence
  Synthetic
auucaagagacagaauaauuaac

SEQ ID NO: 516737 - RNA, 24 nt, Artificial Sequence
  Synthetic
cauucaagagacagaauaauuaac

SEQ ID NO: 516738 - RNA, 18 nt, Artificial Sequence
  Synthetic
aagguaguuauaauuaac

SEQ ID NO: 516739 - RNA, 19 nt, Artificial Sequence
  Synthetic
gaagguaguuauaauuaac

SEQ ID NO: 516740 - RNA, 20 nt, Artificial Sequence
  Synthetic
ugaagguaguuauaauuaac

SEQ ID NO: 516741 - RNA, 21 nt, Artificial Sequence
  Synthetic
gugaagguaguuauaauuaac

SEQ ID NO: 516742 - RNA, 22 nt, Artificial Sequence
  Synthetic
ugugaagguaguuauaauuaac

SEQ ID NO: 516743 - RNA, 23 nt, Artificial Sequence
  Synthetic
cugugaagguaguuauaauuaac

SEQ ID NO: 516744 - RNA, 24 nt, Artificial Sequence
  Synthetic
ccugugaagguaguuauaauuaac

SEQ ID NO: 516745 - RNA, 18 nt, Artificial Sequence
  Synthetic
aaauaaaaggccauuaac

SEQ ID NO: 516746 - RNA, 19 nt, Artificial Sequence
  Synthetic
aaaauaaaaggccauuaac

SEQ ID NO: 516747 - RNA, 20 nt, Artificial Sequence
  Synthetic
uaaaauaaaaggccauuaac

SEQ ID NO: 516748 - RNA, 21 nt, Artificial Sequence
  Synthetic
guaaaauaaaaggccauuaac

SEQ ID NO: 516749 - RNA, 22 nt, Artificial Sequence
  Synthetic
aguaaaauaaaaggccauuaac

SEQ ID NO: 516750 - RNA, 23 nt, Artificial Sequence
  Synthetic
gaguaaaauaaaaggccauuaac

SEQ ID NO: 516751 - RNA, 24 nt, Artificial Sequence
  Synthetic
agaguaaaauaaaaggccauuaac

SEQ ID NO: 516752 - RNA, 18 nt, Artificial Sequence
  Synthetic
cagaagucauccauuaac

SEQ ID NO: 516753 - RNA, 19 nt, Artificial Sequence
  Synthetic
acagaagucauccauuaac

SEQ ID NO: 516754 - RNA, 20 nt, Artificial Sequence
  Synthetic
aacagaagucauccauuaac

SEQ ID NO: 516755 - RNA, 21 nt, Artificial Sequence
  Synthetic
aaacagaagucauccauuaac

SEQ ID NO: 516756 - RNA, 22 nt, Artificial Sequence
  Synthetic
gaaacagaagucauccauuaac

SEQ ID NO: 516757 - RNA, 23 nt, Artificial Sequence
  Synthetic
ugaaacagaagucauccauuaac

SEQ ID NO: 516758 - RNA, 24 nt, Artificial Sequence
  Synthetic
augaaacagaagucauccauuaac

SEQ ID NO: 516759 - RNA, 18 nt, Artificial Sequence
  Synthetic
uucuuccuuuccauuaac

SEQ ID NO: 516760 - RNA, 19 nt, Artificial Sequence
  Synthetic
auucuuccuuuccauuaac

SEQ ID NO: 516761 - RNA, 20 nt, Artificial Sequence
  Synthetic
gauucuuccuuuccauuaac

SEQ ID NO: 516762 - RNA, 21 nt, Artificial Sequence
  Synthetic
ugauucuuccuuuccauuaac

SEQ ID NO: 516763 - RNA, 22 nt, Artificial Sequence
  Synthetic
uugauucuuccuuuccauuaac

SEQ ID NO: 516764 - RNA, 23 nt, Artificial Sequence
  Synthetic
auugauucuuccuuuccauuaac

SEQ ID NO: 516765 - RNA, 24 nt, Artificial Sequence
  Synthetic
uauugauucuuccuuuccauuaac

SEQ ID NO: 516766 - RNA, 18 nt, Artificial Sequence
  Synthetic
acuuaagguagcauuaac

SEQ ID NO: 516767 - RNA, 19 nt, Artificial Sequence
  Synthetic
aacuuaagguagcauuaac

SEQ ID NO: 516768 - RNA, 20 nt, Artificial Sequence
  Synthetic
gaacuuaagguagcauuaac

SEQ ID NO: 516769 - RNA, 21 nt, Artificial Sequence
  Synthetic
ugaacuuaagguagcauuaac

SEQ ID NO: 516770 - RNA, 22 nt, Artificial Sequence
  Synthetic
uugaacuuaagguagcauuaac

SEQ ID NO: 516771 - RNA, 23 nt, Artificial Sequence
  Synthetic
auugaacuuaagguagcauuaac

SEQ ID NO: 516772 - RNA, 24 nt, Artificial Sequence
  Synthetic
aauugaacuuaagguagcauuaac

SEQ ID NO: 516773 - RNA, 18 nt, Artificial Sequence
  Synthetic
accuggccaggcauuaac

SEQ ID NO: 516774 - RNA, 19 nt, Artificial Sequence
  Synthetic
aaccuggccaggcauuaac

SEQ ID NO: 516775 - RNA, 20 nt, Artificial Sequence
  Synthetic
gaaccuggccaggcauuaac

SEQ ID NO: 516776 - RNA, 21 nt, Artificial Sequence
  Synthetic
agaaccuggccaggcauuaac

SEQ ID NO: 516777 - RNA, 22 nt, Artificial Sequence
  Synthetic
gagaaccuggccaggcauuaac

SEQ ID NO: 516778 - RNA, 23 nt, Artificial Sequence
  Synthetic
ggagaaccuggccaggcauuaac

SEQ ID NO: 516779 - RNA, 24 nt, Artificial Sequence
  Synthetic
aggagaaccuggccaggcauuaac

SEQ ID NO: 516780 - RNA, 18 nt, Artificial Sequence
  Synthetic
uuaaaaauaaucauuaac

SEQ ID NO: 516781 - RNA, 19 nt, Artificial Sequence
  Synthetic
uuuaaaaauaaucauuaac

SEQ ID NO: 516782 - RNA, 20 nt, Artificial Sequence
  Synthetic
uuuuaaaaauaaucauuaac

SEQ ID NO: 516783 - RNA, 21 nt, Artificial Sequence
  Synthetic
uuuuuaaaaauaaucauuaac

SEQ ID NO: 516784 - RNA, 22 nt, Artificial Sequence
  Synthetic
uuuuuuaaaaauaaucauuaac

SEQ ID NO: 516785 - RNA, 23 nt, Artificial Sequence
  Synthetic
auuuuuuaaaaauaaucauuaac

SEQ ID NO: 516786 - RNA, 24 nt, Artificial Sequence
  Synthetic
cauuuuuuaaaaauaaucauuaac

SEQ ID NO: 516787 - RNA, 18 nt, Artificial Sequence
  Synthetic
caauaaagcaucauuaac

SEQ ID NO: 516788 - RNA, 19 nt, Artificial Sequence
  Synthetic
acaauaaagcaucauuaac

SEQ ID NO: 516789 - RNA, 20 nt, Artificial Sequence
  Synthetic
uacaauaaagcaucauuaac

SEQ ID NO: 516790 - RNA, 21 nt, Artificial Sequence
  Synthetic
auacaauaaagcaucauuaac

SEQ ID NO: 516791 - RNA, 22 nt, Artificial Sequence
  Synthetic
uauacaauaaagcaucauuaac

SEQ ID NO: 516792 - RNA, 23 nt, Artificial Sequence
  Synthetic
auauacaauaaagcaucauuaac

SEQ ID NO: 516793 - RNA, 24 nt, Artificial Sequence
  Synthetic
gauauacaauaaagcaucauuaac

SEQ ID NO: 516794 - RNA, 18 nt, Artificial Sequence
  Synthetic
cagaauaugcagauuaac

SEQ ID NO: 516795 - RNA, 19 nt, Artificial Sequence
  Synthetic
ucagaauaugcagauuaac

SEQ ID NO: 516796 - RNA, 20 nt, Artificial Sequence
  Synthetic
gucagaauaugcagauuaac

SEQ ID NO: 516797 - RNA, 21 nt, Artificial Sequence
  Synthetic
agucagaauaugcagauuaac

SEQ ID NO: 516798 - RNA, 22 nt, Artificial Sequence
  Synthetic
aagucagaauaugcagauuaac

SEQ ID NO: 516799 - RNA, 23 nt, Artificial Sequence
  Synthetic
aaagucagaauaugcagauuaac

SEQ ID NO: 516800 - RNA, 24 nt, Artificial Sequence
  Synthetic
gaaagucagaauaugcagauuaac

SEQ ID NO: 516801 - RNA, 18 nt, Artificial Sequence
  Synthetic
aaggaauugucuauuaac

SEQ ID NO: 516802 - RNA, 19 nt, Artificial Sequence
  Synthetic
aaaggaauugucuauuaac

SEQ ID NO: 516803 - RNA, 20 nt, Artificial Sequence
  Synthetic
uaaaggaauugucuauuaac

SEQ ID NO: 516804 - RNA, 21 nt, Artificial Sequence
  Synthetic
auaaaggaauugucuauuaac

SEQ ID NO: 516805 - RNA, 22 nt, Artificial Sequence
  Synthetic
aauaaaggaauugucuauuaac

SEQ ID NO: 516806 - RNA, 23 nt, Artificial Sequence
  Synthetic
aaauaaaggaauugucuauuaac

SEQ ID NO: 516807 - RNA, 24 nt, Artificial Sequence
  Synthetic
aaaauaaaggaauugucuauuaac

SEQ ID NO: 516808 - RNA, 18 nt, Artificial Sequence
  Synthetic
uaaggaaaagcacuuaac

SEQ ID NO: 516809 - RNA, 19 nt, Artificial Sequence
  Synthetic
guaaggaaaagcacuuaac

SEQ ID NO: 516810 - RNA, 20 nt, Artificial Sequence
  Synthetic
gguaaggaaaagcacuuaac

SEQ ID NO: 516811 - RNA, 21 nt, Artificial Sequence
  Synthetic
agguaaggaaaagcacuuaac

SEQ ID NO: 516812 - RNA, 22 nt, Artificial Sequence
  Synthetic
gagguaaggaaaagcacuuaac

SEQ ID NO: 516813 - RNA, 23 nt, Artificial Sequence
  Synthetic
agagguaaggaaaagcacuuaac

SEQ ID NO: 516814 - RNA, 24 nt, Artificial Sequence
  Synthetic
uagagguaaggaaaagcacuuaac

SEQ ID NO: 516815 - RNA, 18 nt, Artificial Sequence
  Synthetic
uuucacuucugacuuaac

SEQ ID NO: 516816 - RNA, 19 nt, Artificial Sequence
  Synthetic
auuucacuucugacuuaac

SEQ ID NO: 516817 - RNA, 20 nt, Artificial Sequence
  Synthetic
uauuucacuucugacuuaac

SEQ ID NO: 516818 - RNA, 21 nt, Artificial Sequence
  Synthetic
uuauuucacuucugacuuaac

SEQ ID NO: 516819 - RNA, 22 nt, Artificial Sequence
  Synthetic
uuuauuucacuucugacuuaac

SEQ ID NO: 516820 - RNA, 23 nt, Artificial Sequence
  Synthetic
uuuuauuucacuucugacuuaac

SEQ ID NO: 516821 - RNA, 24 nt, Artificial Sequence
  Synthetic
guuuuauuucacuucugacuuaac

SEQ ID NO: 516822 - RNA, 18 nt, Artificial Sequence
  Synthetic
cuccucagccuacuuaac

SEQ ID NO: 516823 - RNA, 19 nt, Artificial Sequence
  Synthetic
ccuccucagccuacuuaac

SEQ ID NO: 516824 - RNA, 20 nt, Artificial Sequence
  Synthetic
accuccucagccuacuuaac

SEQ ID NO: 516825 - RNA, 21 nt, Artificial Sequence
  Synthetic
caccuccucagccuacuuaac

SEQ ID NO: 516826 - RNA, 22 nt, Artificial Sequence
  Synthetic
ccaccuccucagccuacuuaac

SEQ ID NO: 516827 - RNA, 23 nt, Artificial Sequence
  Synthetic
uccaccuccucagccuacuuaac

SEQ ID NO: 516828 - RNA, 24 nt, Artificial Sequence
  Synthetic
cuccaccuccucagccuacuuaac

SEQ ID NO: 516829 - RNA, 18 nt, Artificial Sequence
  Synthetic
uauuuccaugcccuuaac

SEQ ID NO: 516830 - RNA, 19 nt, Artificial Sequence
  Synthetic
uuauuuccaugcccuuaac

SEQ ID NO: 516831 - RNA, 20 nt, Artificial Sequence
  Synthetic
uuuauuuccaugcccuuaac

SEQ ID NO: 516832 - RNA, 21 nt, Artificial Sequence
  Synthetic
cuuuauuuccaugcccuuaac

SEQ ID NO: 516833 - RNA, 22 nt, Artificial Sequence
  Synthetic
ucuuuauuuccaugcccuuaac

SEQ ID NO: 516834 - RNA, 23 nt, Artificial Sequence
  Synthetic
aucuuuauuuccaugcccuuaac

SEQ ID NO: 516835 - RNA, 24 nt, Artificial Sequence
  Synthetic
caucuuuauuuccaugcccuuaac

SEQ ID NO: 516836 - RNA, 18 nt, Artificial Sequence
  Synthetic
uuggagguggggcuuaac

SEQ ID NO: 516837 - RNA, 19 nt, Artificial Sequence
  Synthetic
auuggagguggggcuuaac

SEQ ID NO: 516838 - RNA, 20 nt, Artificial Sequence
  Synthetic
uauuggagguggggcuuaac

SEQ ID NO: 516839 - RNA, 21 nt, Artificial Sequence
  Synthetic
auauuggagguggggcuuaac

SEQ ID NO: 516840 - RNA, 22 nt, Artificial Sequence
  Synthetic
aauauuggagguggggcuuaac

SEQ ID NO: 516841 - RNA, 23 nt, Artificial Sequence
  Synthetic
caauauuggagguggggcuuaac

SEQ ID NO: 516842 - RNA, 24 nt, Artificial Sequence
  Synthetic
ucaauauuggagguggggcuuaac

SEQ ID NO: 516843 - RNA, 18 nt, Artificial Sequence
  Synthetic
uuccaucuaaaucuuaac

SEQ ID NO: 516844 - RNA, 19 nt, Artificial Sequence
  Synthetic
cuuccaucuaaaucuuaac

SEQ ID NO: 516845 - RNA, 20 nt, Artificial Sequence
  Synthetic
acuuccaucuaaaucuuaac

SEQ ID NO: 516846 - RNA, 21 nt, Artificial Sequence
  Synthetic
uacuuccaucuaaaucuuaac

SEQ ID NO: 516847 - RNA, 22 nt, Artificial Sequence
  Synthetic
uuacuuccaucuaaaucuuaac

SEQ ID NO: 516848 - RNA, 23 nt, Artificial Sequence
  Synthetic
auuacuuccaucuaaaucuuaac

SEQ ID NO: 516849 - RNA, 24 nt, Artificial Sequence
  Synthetic
gauuacuuccaucuaaaucuuaac

SEQ ID NO: 516850 - RNA, 18 nt, Artificial Sequence
  Synthetic
aaccauaacagucuuaac

SEQ ID NO: 516851 - RNA, 19 nt, Artificial Sequence
  Synthetic
uaaccauaacagucuuaac

SEQ ID NO: 516852 - RNA, 20 nt, Artificial Sequence
  Synthetic
uuaaccauaacagucuuaac

SEQ ID NO: 516853 - RNA, 21 nt, Artificial Sequence
  Synthetic
cuuaaccauaacagucuuaac

SEQ ID NO: 516854 - RNA, 22 nt, Artificial Sequence
  Synthetic
ucuuaaccauaacagucuuaac

SEQ ID NO: 516855 - RNA, 23 nt, Artificial Sequence
  Synthetic
uucuuaaccauaacagucuuaac

SEQ ID NO: 516856 - RNA, 24 nt, Artificial Sequence
  Synthetic
uuucuuaaccauaacagucuuaac

SEQ ID NO: 516857 - RNA, 18 nt, Artificial Sequence
  Synthetic
uacaaccacaaaguuaac

SEQ ID NO: 516858 - RNA, 19 nt, Artificial Sequence
  Synthetic
guacaaccacaaaguuaac

SEQ ID NO: 516859 - RNA, 20 nt, Artificial Sequence
  Synthetic
cguacaaccacaaaguuaac

SEQ ID NO: 516860 - RNA, 21 nt, Artificial Sequence
  Synthetic
acguacaaccacaaaguuaac

SEQ ID NO: 516861 - RNA, 22 nt, Artificial Sequence
  Synthetic
uacguacaaccacaaaguuaac

SEQ ID NO: 516862 - RNA, 23 nt, Artificial Sequence
  Synthetic
auacguacaaccacaaaguuaac

SEQ ID NO: 516863 - RNA, 24 nt, Artificial Sequence
  Synthetic
aauacguacaaccacaaaguuaac

SEQ ID NO: 516864 - RNA, 18 nt, Artificial Sequence
  Synthetic
gaaacuuugaggguuaac

SEQ ID NO: 516865 - RNA, 19 nt, Artificial Sequence
  Synthetic
agaaacuuugaggguuaac

SEQ ID NO: 516866 - RNA, 20 nt, Artificial Sequence
  Synthetic
gagaaacuuugaggguuaac

SEQ ID NO: 516867 - RNA, 21 nt, Artificial Sequence
  Synthetic
ugagaaacuuugaggguuaac

SEQ ID NO: 516868 - RNA, 22 nt, Artificial Sequence
  Synthetic
cugagaaacuuugaggguuaac

SEQ ID NO: 516869 - RNA, 23 nt, Artificial Sequence
  Synthetic
ucugagaaacuuugaggguuaac

SEQ ID NO: 516870 - RNA, 24 nt, Artificial Sequence
  Synthetic
uucugagaaacuuugaggguuaac

SEQ ID NO: 516871 - RNA, 18 nt, Artificial Sequence
  Synthetic
caugguuacaaauuuaac

SEQ ID NO: 516872 - RNA, 19 nt, Artificial Sequence
  Synthetic
ucaugguuacaaauuuaac

SEQ ID NO: 516873 - RNA, 20 nt, Artificial Sequence
  Synthetic
uucaugguuacaaauuuaac

SEQ ID NO: 516874 - RNA, 21 nt, Artificial Sequence
  Synthetic
guucaugguuacaaauuuaac

SEQ ID NO: 516875 - RNA, 22 nt, Artificial Sequence
  Synthetic
uguucaugguuacaaauuuaac

SEQ ID NO: 516876 - RNA, 23 nt, Artificial Sequence
  Synthetic
auguucaugguuacaaauuuaac

SEQ ID NO: 516877 - RNA, 24 nt, Artificial Sequence
  Synthetic
uauguucaugguuacaaauuuaac

SEQ ID NO: 516878 - RNA, 18 nt, Artificial Sequence
  Synthetic
uauagaaaacaauuuaac

SEQ ID NO: 516879 - RNA, 19 nt, Artificial Sequence
  Synthetic
uuauagaaaacaauuuaac

SEQ ID NO: 516880 - RNA, 20 nt, Artificial Sequence
  Synthetic
uuuauagaaaacaauuuaac

SEQ ID NO: 516881 - RNA, 21 nt, Artificial Sequence
  Synthetic
guuuauagaaaacaauuuaac

SEQ ID NO: 516882 - RNA, 22 nt, Artificial Sequence
  Synthetic
gguuuauagaaaacaauuuaac

SEQ ID NO: 516883 - RNA, 23 nt, Artificial Sequence
  Synthetic
ggguuuauagaaaacaauuuaac

SEQ ID NO: 516884 - RNA, 24 nt, Artificial Sequence
  Synthetic
aggguuuauagaaaacaauuuaac

SEQ ID NO: 516885 - RNA, 18 nt, Artificial Sequence
  Synthetic
aggagcgcagaauuuaac

SEQ ID NO: 516886 - RNA, 19 nt, Artificial Sequence
  Synthetic
aaggagcgcagaauuuaac

SEQ ID NO: 516887 - RNA, 20 nt, Artificial Sequence
  Synthetic
caaggagcgcagaauuuaac

SEQ ID NO: 516888 - RNA, 21 nt, Artificial Sequence
  Synthetic
ccaaggagcgcagaauuuaac

SEQ ID NO: 516889 - RNA, 22 nt, Artificial Sequence
  Synthetic
uccaaggagcgcagaauuuaac

SEQ ID NO: 516890 - RNA, 23 nt, Artificial Sequence
  Synthetic
uuccaaggagcgcagaauuuaac

SEQ ID NO: 516891 - RNA, 24 nt, Artificial Sequence
  Synthetic
uuuccaaggagcgcagaauuuaac

SEQ ID NO: 516892 - RNA, 18 nt, Artificial Sequence
  Synthetic
gaaauuugcauauuuaac

SEQ ID NO: 516893 - RNA, 19 nt, Artificial Sequence
  Synthetic
agaaauuugcauauuuaac

SEQ ID NO: 516894 - RNA, 20 nt, Artificial Sequence
  Synthetic
uagaaauuugcauauuuaac

SEQ ID NO: 516895 - RNA, 21 nt, Artificial Sequence
  Synthetic
guagaaauuugcauauuuaac

SEQ ID NO: 516896 - RNA, 22 nt, Artificial Sequence
  Synthetic
uguagaaauuugcauauuuaac

SEQ ID NO: 516897 - RNA, 23 nt, Artificial Sequence
  Synthetic
cuguagaaauuugcauauuuaac

SEQ ID NO: 516898 - RNA, 24 nt, Artificial Sequence
  Synthetic
gcuguagaaauuugcauauuuaac

SEQ ID NO: 516899 - RNA, 18 nt, Artificial Sequence
  Synthetic
uaaaauucucccuuuaac

SEQ ID NO: 516900 - RNA, 19 nt, Artificial Sequence
  Synthetic
cuaaaauucucccuuuaac

SEQ ID NO: 516901 - RNA, 20 nt, Artificial Sequence
  Synthetic
ucuaaaauucucccuuuaac

SEQ ID NO: 516902 - RNA, 21 nt, Artificial Sequence
  Synthetic
cucuaaaauucucccuuuaac

SEQ ID NO: 516903 - RNA, 22 nt, Artificial Sequence
  Synthetic
acucuaaaauucucccuuuaac

SEQ ID NO: 516904 - RNA, 23 nt, Artificial Sequence
  Synthetic
aacucuaaaauucucccuuuaac

SEQ ID NO: 516905 - RNA, 24 nt, Artificial Sequence
  Synthetic
caacucuaaaauucucccuuuaac

SEQ ID NO: 516906 - RNA, 18 nt, Artificial Sequence
  Synthetic
augaugaaugccuuuaac

SEQ ID NO: 516907 - RNA, 19 nt, Artificial Sequence
  Synthetic
aaugaugaaugccuuuaac

SEQ ID NO: 516908 - RNA, 20 nt, Artificial Sequence
  Synthetic
caaugaugaaugccuuuaac

SEQ ID NO: 516909 - RNA, 21 nt, Artificial Sequence
  Synthetic
acaaugaugaaugccuuuaac

SEQ ID NO: 516910 - RNA, 22 nt, Artificial Sequence
  Synthetic
gacaaugaugaaugccuuuaac

SEQ ID NO: 516911 - RNA, 23 nt, Artificial Sequence
  Synthetic
ugacaaugaugaaugccuuuaac

SEQ ID NO: 516912 - RNA, 24 nt, Artificial Sequence
  Synthetic
augacaaugaugaaugccuuuaac

SEQ ID NO: 516913 - RNA, 18 nt, Artificial Sequence
  Synthetic
aagcuguuguucuuuaac

SEQ ID NO: 516914 - RNA, 19 nt, Artificial Sequence
  Synthetic
gaagcuguuguucuuuaac

SEQ ID NO: 516915 - RNA, 20 nt, Artificial Sequence
  Synthetic
ggaagcuguuguucuuuaac

SEQ ID NO: 516916 - RNA, 21 nt, Artificial Sequence
  Synthetic
aggaagcuguuguucuuuaac

SEQ ID NO: 516917 - RNA, 22 nt, Artificial Sequence
  Synthetic
gaggaagcuguuguucuuuaac

SEQ ID NO: 516918 - RNA, 23 nt, Artificial Sequence
  Synthetic
cgaggaagcuguuguucuuuaac

SEQ ID NO: 516919 - RNA, 24 nt, Artificial Sequence
  Synthetic
acgaggaagcuguuguucuuuaac

SEQ ID NO: 516920 - RNA, 18 nt, Artificial Sequence
  Synthetic
auucuuauaaaguuuaac

SEQ ID NO: 516921 - RNA, 19 nt, Artificial Sequence
  Synthetic
aauucuuauaaaguuuaac

SEQ ID NO: 516922 - RNA, 20 nt, Artificial Sequence
  Synthetic
aaauucuuauaaaguuuaac

SEQ ID NO: 516923 - RNA, 21 nt, Artificial Sequence
  Synthetic
uaaauucuuauaaaguuuaac

SEQ ID NO: 516924 - RNA, 22 nt, Artificial Sequence
  Synthetic
auaaauucuuauaaaguuuaac

SEQ ID NO: 516925 - RNA, 23 nt, Artificial Sequence
  Synthetic
aauaaauucuuauaaaguuuaac

SEQ ID NO: 516926 - RNA, 24 nt, Artificial Sequence
  Synthetic
uaauaaauucuuauaaaguuuaac

SEQ ID NO: 516927 - RNA, 18 nt, Artificial Sequence
  Synthetic
gaaugaauaugguuuaac

SEQ ID NO: 516928 - RNA, 19 nt, Artificial Sequence
  Synthetic
agaaugaauaugguuuaac

SEQ ID NO: 516929 - RNA, 20 nt, Artificial Sequence
  Synthetic
uagaaugaauaugguuuaac

SEQ ID NO: 516930 - RNA, 21 nt, Artificial Sequence
  Synthetic
cuagaaugaauaugguuuaac

SEQ ID NO: 516931 - RNA, 22 nt, Artificial Sequence
  Synthetic
ccuagaaugaauaugguuuaac

SEQ ID NO: 516932 - RNA, 23 nt, Artificial Sequence
  Synthetic
cccuagaaugaauaugguuuaac

SEQ ID NO: 516933 - RNA, 24 nt, Artificial Sequence
  Synthetic
ccccuagaaugaauaugguuuaac

SEQ ID NO: 516934 - RNA, 18 nt, Artificial Sequence
  Synthetic
aucugaagaauguuuaac

SEQ ID NO: 516935 - RNA, 19 nt, Artificial Sequence
  Synthetic
aaucugaagaauguuuaac

SEQ ID NO: 516936 - RNA, 20 nt, Artificial Sequence
  Synthetic
uaaucugaagaauguuuaac

SEQ ID NO: 516937 - RNA, 21 nt, Artificial Sequence
  Synthetic
auaaucugaagaauguuuaac

SEQ ID NO: 516938 - RNA, 22 nt, Artificial Sequence
  Synthetic
cauaaucugaagaauguuuaac

SEQ ID NO: 516939 - RNA, 23 nt, Artificial Sequence
  Synthetic
acauaaucugaagaauguuuaac

SEQ ID NO: 516940 - RNA, 24 nt, Artificial Sequence
  Synthetic
uacauaaucugaagaauguuuaac

SEQ ID NO: 516941 - RNA, 18 nt, Artificial Sequence
  Synthetic
ugugugcguguguuuaac

SEQ ID NO: 516942 - RNA, 19 nt, Artificial Sequence
  Synthetic
gugugugcguguguuuaac

SEQ ID NO: 516943 - RNA, 20 nt, Artificial Sequence
  Synthetic
ugugugugcguguguuuaac

SEQ ID NO: 516944 - RNA, 21 nt, Artificial Sequence
  Synthetic
uugugugugcguguguuuaac

SEQ ID NO: 516945 - RNA, 22 nt, Artificial Sequence
  Synthetic
auugugugugcguguguuuaac

SEQ ID NO: 516946 - RNA, 23 nt, Artificial Sequence
  Synthetic
gauugugugugcguguguuuaac

SEQ ID NO: 516947 - RNA, 24 nt, Artificial Sequence
  Synthetic
cgauugugugugcguguguuuaac

SEQ ID NO: 516948 - RNA, 18 nt, Artificial Sequence
  Synthetic
uuaugacacuuguuuaac

SEQ ID NO: 516949 - RNA, 19 nt, Artificial Sequence
  Synthetic
uuuaugacacuuguuuaac

SEQ ID NO: 516950 - RNA, 20 nt, Artificial Sequence
  Synthetic
auuuaugacacuuguuuaac

SEQ ID NO: 516951 - RNA, 21 nt, Artificial Sequence
  Synthetic
gauuuaugacacuuguuuaac

SEQ ID NO: 516952 - RNA, 22 nt, Artificial Sequence
  Synthetic
ugauuuaugacacuuguuuaac

SEQ ID NO: 516953 - RNA, 23 nt, Artificial Sequence
  Synthetic
uugauuuaugacacuuguuuaac

SEQ ID NO: 516954 - RNA, 24 nt, Artificial Sequence
  Synthetic
uuugauuuaugacacuuguuuaac

SEQ ID NO: 516955 - RNA, 18 nt, Artificial Sequence
  Synthetic
uaaaaauauuauuuuaac

SEQ ID NO: 516956 - RNA, 19 nt, Artificial Sequence
  Synthetic
cuaaaaauauuauuuuaac

SEQ ID NO: 516957 - RNA, 20 nt, Artificial Sequence
  Synthetic
acuaaaaauauuauuuuaac

SEQ ID NO: 516958 - RNA, 21 nt, Artificial Sequence
  Synthetic
aacuaaaaauauuauuuuaac

SEQ ID NO: 516959 - RNA, 22 nt, Artificial Sequence
  Synthetic
uaacuaaaaauauuauuuuaac

SEQ ID NO: 516960 - RNA, 23 nt, Artificial Sequence
  Synthetic
auaacuaaaaauauuauuuuaac

SEQ ID NO: 516961 - RNA, 24 nt, Artificial Sequence
  Synthetic
uauaacuaaaaauauuauuuuaac

SEQ ID NO: 516962 - RNA, 18 nt, Artificial Sequence
  Synthetic
acaacugucuguuuuaac

SEQ ID NO: 516963 - RNA, 19 nt, Artificial Sequence
  Synthetic
cacaacugucuguuuuaac

SEQ ID NO: 516964 - RNA, 20 nt, Artificial Sequence
  Synthetic
gcacaacugucuguuuuaac

SEQ ID NO: 516965 - RNA, 21 nt, Artificial Sequence
  Synthetic
ugcacaacugucuguuuuaac

SEQ ID NO: 516966 - RNA, 22 nt, Artificial Sequence
  Synthetic
augcacaacugucuguuuuaac

SEQ ID NO: 516967 - RNA, 23 nt, Artificial Sequence
  Synthetic
uaugcacaacugucuguuuuaac

SEQ ID NO: 516968 - RNA, 24 nt, Artificial Sequence
  Synthetic
uuaugcacaacugucuguuuuaac

SEQ ID NO: 516969 - RNA, 18 nt, Artificial Sequence
  Synthetic
cuuauucccauuuuuaac

SEQ ID NO: 516970 - RNA, 19 nt, Artificial Sequence
  Synthetic
ucuuauucccauuuuuaac

SEQ ID NO: 516971 - RNA, 20 nt, Artificial Sequence
  Synthetic
gucuuauucccauuuuuaac

SEQ ID NO: 516972 - RNA, 21 nt, Artificial Sequence
  Synthetic
ugucuuauucccauuuuuaac

SEQ ID NO: 516973 - RNA, 22 nt, Artificial Sequence
  Synthetic
cugucuuauucccauuuuuaac

SEQ ID NO: 516974 - RNA, 23 nt, Artificial Sequence
  Synthetic
ucugucuuauucccauuuuuaac

SEQ ID NO: 516975 - RNA, 24 nt, Artificial Sequence
  Synthetic
aucugucuuauucccauuuuuaac

SEQ ID NO: 516976 - RNA, 18 nt, Artificial Sequence
  Synthetic
agagacaucauuuuuaac

SEQ ID NO: 516977 - RNA, 19 nt, Artificial Sequence
  Synthetic
aagagacaucauuuuuaac

SEQ ID NO: 516978 - RNA, 20 nt, Artificial Sequence
  Synthetic
aaagagacaucauuuuuaac

SEQ ID NO: 516979 - RNA, 21 nt, Artificial Sequence
  Synthetic
uaaagagacaucauuuuuaac

SEQ ID NO: 516980 - RNA, 22 nt, Artificial Sequence
  Synthetic
uuaaagagacaucauuuuuaac

SEQ ID NO: 516981 - RNA, 23 nt, Artificial Sequence
  Synthetic
guuaaagagacaucauuuuuaac

SEQ ID NO: 516982 - RNA, 24 nt, Artificial Sequence
  Synthetic
gguuaaagagacaucauuuuuaac

SEQ ID NO: 516983 - RNA, 18 nt, Artificial Sequence
  Synthetic
ccacgauggaaaaaacac

SEQ ID NO: 516984 - RNA, 19 nt, Artificial Sequence
  Synthetic
accacgauggaaaaaacac

SEQ ID NO: 516985 - RNA, 20 nt, Artificial Sequence
  Synthetic
uaccacgauggaaaaaacac

SEQ ID NO: 516986 - RNA, 21 nt, Artificial Sequence
  Synthetic
auaccacgauggaaaaaacac

SEQ ID NO: 516987 - RNA, 22 nt, Artificial Sequence
  Synthetic
uauaccacgauggaaaaaacac

SEQ ID NO: 516988 - RNA, 23 nt, Artificial Sequence
  Synthetic
uuauaccacgauggaaaaaacac

SEQ ID NO: 516989 - RNA, 24 nt, Artificial Sequence
  Synthetic
auuauaccacgauggaaaaaacac

SEQ ID NO: 516990 - RNA, 18 nt, Artificial Sequence
  Synthetic
aaaaauauuaaaaaacac

SEQ ID NO: 516991 - RNA, 19 nt, Artificial Sequence
  Synthetic
caaaaauauuaaaaaacac

SEQ ID NO: 516992 - RNA, 20 nt, Artificial Sequence
  Synthetic
ccaaaaauauuaaaaaacac

SEQ ID NO: 516993 - RNA, 21 nt, Artificial Sequence
  Synthetic
uccaaaaauauuaaaaaacac

SEQ ID NO: 516994 - RNA, 22 nt, Artificial Sequence
  Synthetic
uuccaaaaauauuaaaaaacac

SEQ ID NO: 516995 - RNA, 23 nt, Artificial Sequence
  Synthetic
guuccaaaaauauuaaaaaacac

SEQ ID NO: 516996 - RNA, 24 nt, Artificial Sequence
  Synthetic
cguuccaaaaauauuaaaaaacac

SEQ ID NO: 516997 - RNA, 18 nt, Artificial Sequence
  Synthetic
cccaauagauaaaaacac

SEQ ID NO: 516998 - RNA, 19 nt, Artificial Sequence
  Synthetic
ucccaauagauaaaaacac

SEQ ID NO: 516999 - RNA, 20 nt, Artificial Sequence
  Synthetic
cucccaauagauaaaaacac

SEQ ID NO: 517000 - RNA, 21 nt, Artificial Sequence
  Synthetic
ucucccaauagauaaaaacac

SEQ ID NO: 517001 - RNA, 22 nt, Artificial Sequence
  Synthetic
gucucccaauagauaaaaacac

SEQ ID NO: 517002 - RNA, 23 nt, Artificial Sequence
  Synthetic
agucucccaauagauaaaaacac

SEQ ID NO: 517003 - RNA, 24 nt, Artificial Sequence
  Synthetic
cagucucccaauagauaaaaacac

SEQ ID NO: 517004 - RNA, 18 nt, Artificial Sequence
  Synthetic
ugucucuacuaaaaacac

SEQ ID NO: 517005 - RNA, 19 nt, Artificial Sequence
  Synthetic
cugucucuacuaaaaacac

SEQ ID NO: 517006 - RNA, 20 nt, Artificial Sequence
  Synthetic
ccugucucuacuaaaaacac

SEQ ID NO: 517007 - RNA, 21 nt, Artificial Sequence
  Synthetic
cccugucucuacuaaaaacac

SEQ ID NO: 517008 - RNA, 22 nt, Artificial Sequence
  Synthetic
acccugucucuacuaaaaacac

SEQ ID NO: 517009 - RNA, 23 nt, Artificial Sequence
  Synthetic
aacccugucucuacuaaaaacac

SEQ ID NO: 517010 - RNA, 24 nt, Artificial Sequence
  Synthetic
aaacccugucucuacuaaaaacac

SEQ ID NO: 517011 - RNA, 18 nt, Artificial Sequence
  Synthetic
cuagaggaaacaaaacac

SEQ ID NO: 517012 - RNA, 19 nt, Artificial Sequence
  Synthetic
ucuagaggaaacaaaacac

SEQ ID NO: 517013 - RNA, 20 nt, Artificial Sequence
  Synthetic
uucuagaggaaacaaaacac

SEQ ID NO: 517014 - RNA, 21 nt, Artificial Sequence
  Synthetic
auucuagaggaaacaaaacac

SEQ ID NO: 517015 - RNA, 22 nt, Artificial Sequence
  Synthetic
cauucuagaggaaacaaaacac

SEQ ID NO: 517016 - RNA, 23 nt, Artificial Sequence
  Synthetic
ucauucuagaggaaacaaaacac

SEQ ID NO: 517017 - RNA, 24 nt, Artificial Sequence
  Synthetic
aucauucuagaggaaacaaaacac

SEQ ID NO: 517018 - RNA, 18 nt, Artificial Sequence
  Synthetic
agagggaguacaaaacac

SEQ ID NO: 517019 - RNA, 19 nt, Artificial Sequence
  Synthetic
cagagggaguacaaaacac

SEQ ID NO: 517020 - RNA, 20 nt, Artificial Sequence
  Synthetic
ucagagggaguacaaaacac

SEQ ID NO: 517021 - RNA, 21 nt, Artificial Sequence
  Synthetic
gucagagggaguacaaaacac

SEQ ID NO: 517022 - RNA, 22 nt, Artificial Sequence
  Synthetic
ggucagagggaguacaaaacac

SEQ ID NO: 517023 - RNA, 23 nt, Artificial Sequence
  Synthetic
aggucagagggaguacaaaacac

SEQ ID NO: 517024 - RNA, 24 nt, Artificial Sequence
  Synthetic
caggucagagggaguacaaaacac

SEQ ID NO: 517025 - RNA, 18 nt, Artificial Sequence
  Synthetic
accgaacaaagaaaacac

SEQ ID NO: 517026 - RNA, 19 nt, Artificial Sequence
  Synthetic
caccgaacaaagaaaacac

SEQ ID NO: 517027 - RNA, 20 nt, Artificial Sequence
  Synthetic
ccaccgaacaaagaaaacac

SEQ ID NO: 517028 - RNA, 21 nt, Artificial Sequence
  Synthetic
gccaccgaacaaagaaaacac

SEQ ID NO: 517029 - RNA, 22 nt, Artificial Sequence
  Synthetic
agccaccgaacaaagaaaacac

SEQ ID NO: 517030 - RNA, 23 nt, Artificial Sequence
  Synthetic
cagccaccgaacaaagaaaacac

SEQ ID NO: 517031 - RNA, 24 nt, Artificial Sequence
  Synthetic
acagccaccgaacaaagaaaacac

SEQ ID NO: 517032 - RNA, 18 nt, Artificial Sequence
  Synthetic
gcaacuuuaagaaaacac

SEQ ID NO: 517033 - RNA, 19 nt, Artificial Sequence
  Synthetic
agcaacuuuaagaaaacac

SEQ ID NO: 517034 - RNA, 20 nt, Artificial Sequence
  Synthetic
gagcaacuuuaagaaaacac

SEQ ID NO: 517035 - RNA, 21 nt, Artificial Sequence
  Synthetic
ggagcaacuuuaagaaaacac

SEQ ID NO: 517036 - RNA, 22 nt, Artificial Sequence
  Synthetic
gggagcaacuuuaagaaaacac

SEQ ID NO: 517037 - RNA, 23 nt, Artificial Sequence
  Synthetic
ugggagcaacuuuaagaaaacac

SEQ ID NO: 517038 - RNA, 24 nt, Artificial Sequence
  Synthetic
augggagcaacuuuaagaaaacac

SEQ ID NO: 517039 - RNA, 18 nt, Artificial Sequence
  Synthetic
aaauaguauggaaaacac

SEQ ID NO: 517040 - RNA, 19 nt, Artificial Sequence
  Synthetic
aaaauaguauggaaaacac

SEQ ID NO: 517041 - RNA, 20 nt, Artificial Sequence
  Synthetic
aaaaauaguauggaaaacac

SEQ ID NO: 517042 - RNA, 21 nt, Artificial Sequence
  Synthetic
gaaaaauaguauggaaaacac

SEQ ID NO: 517043 - RNA, 22 nt, Artificial Sequence
  Synthetic
agaaaaauaguauggaaaacac

SEQ ID NO: 517044 - RNA, 23 nt, Artificial Sequence
  Synthetic
cagaaaaauaguauggaaaacac

SEQ ID NO: 517045 - RNA, 24 nt, Artificial Sequence
  Synthetic
acagaaaaauaguauggaaaacac

SEQ ID NO: 517046 - RNA, 18 nt, Artificial Sequence
  Synthetic
auugaacaaugaaaacac

SEQ ID NO: 517047 - RNA, 19 nt, Artificial Sequence
  Synthetic
aauugaacaaugaaaacac

SEQ ID NO: 517048 - RNA, 20 nt, Artificial Sequence
  Synthetic
gaauugaacaaugaaaacac

SEQ ID NO: 517049 - RNA, 21 nt, Artificial Sequence
  Synthetic
ggaauugaacaaugaaaacac

SEQ ID NO: 517050 - RNA, 22 nt, Artificial Sequence
  Synthetic
gggaauugaacaaugaaaacac

SEQ ID NO: 517051 - RNA, 23 nt, Artificial Sequence
  Synthetic
ugggaauugaacaaugaaaacac

SEQ ID NO: 517052 - RNA, 24 nt, Artificial Sequence
  Synthetic
gugggaauugaacaaugaaaacac

SEQ ID NO: 517053 - RNA, 18 nt, Artificial Sequence
  Synthetic
uuuuaccucugaaaacac

SEQ ID NO: 517054 - RNA, 19 nt, Artificial Sequence
  Synthetic
uuuuuaccucugaaaacac

SEQ ID NO: 517055 - RNA, 20 nt, Artificial Sequence
  Synthetic
auuuuuaccucugaaaacac

SEQ ID NO: 517056 - RNA, 21 nt, Artificial Sequence
  Synthetic
aauuuuuaccucugaaaacac

SEQ ID NO: 517057 - RNA, 22 nt, Artificial Sequence
  Synthetic
aaauuuuuaccucugaaaacac

SEQ ID NO: 517058 - RNA, 23 nt, Artificial Sequence
  Synthetic
aaaauuuuuaccucugaaaacac

SEQ ID NO: 517059 - RNA, 24 nt, Artificial Sequence
  Synthetic
gaaaauuuuuaccucugaaaacac

SEQ ID NO: 517060 - RNA, 18 nt, Artificial Sequence
  Synthetic
uugagcuacguaaaacac

SEQ ID NO: 517061 - RNA, 19 nt, Artificial Sequence
  Synthetic
auugagcuacguaaaacac

SEQ ID NO: 517062 - RNA, 20 nt, Artificial Sequence
  Synthetic
uauugagcuacguaaaacac

SEQ ID NO: 517063 - RNA, 21 nt, Artificial Sequence
  Synthetic
guauugagcuacguaaaacac

SEQ ID NO: 517064 - RNA, 22 nt, Artificial Sequence
  Synthetic
aguauugagcuacguaaaacac

SEQ ID NO: 517065 - RNA, 23 nt, Artificial Sequence
  Synthetic
aaguauugagcuacguaaaacac

SEQ ID NO: 517066 - RNA, 24 nt, Artificial Sequence
  Synthetic
uaaguauugagcuacguaaaacac

SEQ ID NO: 517067 - RNA, 18 nt, Artificial Sequence
  Synthetic
ucaaaacuauacaaacac

SEQ ID NO: 517068 - RNA, 19 nt, Artificial Sequence
  Synthetic
cucaaaacuauacaaacac

SEQ ID NO: 517069 - RNA, 20 nt, Artificial Sequence
  Synthetic
ccucaaaacuauacaaacac

SEQ ID NO: 517070 - RNA, 21 nt, Artificial Sequence
  Synthetic
cccucaaaacuauacaaacac

SEQ ID NO: 517071 - RNA, 22 nt, Artificial Sequence
  Synthetic
acccucaaaacuauacaaacac

SEQ ID NO: 517072 - RNA, 23 nt, Artificial Sequence
  Synthetic
aacccucaaaacuauacaaacac

SEQ ID NO: 517073 - RNA, 24 nt, Artificial Sequence
  Synthetic
gaacccucaaaacuauacaaacac

SEQ ID NO: 517074 - RNA, 18 nt, Artificial Sequence
  Synthetic
uggaagcuauacaaacac

SEQ ID NO: 517075 - RNA, 19 nt, Artificial Sequence
  Synthetic
uuggaagcuauacaaacac

SEQ ID NO: 517076 - RNA, 20 nt, Artificial Sequence
  Synthetic
uuuggaagcuauacaaacac

SEQ ID NO: 517077 - RNA, 21 nt, Artificial Sequence
  Synthetic
uuuuggaagcuauacaaacac

SEQ ID NO: 517078 - RNA, 22 nt, Artificial Sequence
  Synthetic
auuuuggaagcuauacaaacac

SEQ ID NO: 517079 - RNA, 23 nt, Artificial Sequence
  Synthetic
aauuuuggaagcuauacaaacac

SEQ ID NO: 517080 - RNA, 24 nt, Artificial Sequence
  Synthetic
gaauuuuggaagcuauacaaacac

SEQ ID NO: 517081 - RNA, 18 nt, Artificial Sequence
  Synthetic
cagauauucagcaaacac

SEQ ID NO: 517082 - RNA, 19 nt, Artificial Sequence
  Synthetic
ucagauauucagcaaacac

SEQ ID NO: 517083 - RNA, 20 nt, Artificial Sequence
  Synthetic
gucagauauucagcaaacac

SEQ ID NO: 517084 - RNA, 21 nt, Artificial Sequence
  Synthetic
agucagauauucagcaaacac

SEQ ID NO: 517085 - RNA, 22 nt, Artificial Sequence
  Synthetic
uagucagauauucagcaaacac

SEQ ID NO: 517086 - RNA, 23 nt, Artificial Sequence
  Synthetic
auagucagauauucagcaaacac

SEQ ID NO: 517087 - RNA, 24 nt, Artificial Sequence
  Synthetic
gauagucagauauucagcaaacac

SEQ ID NO: 517088 - RNA, 18 nt, Artificial Sequence
  Synthetic
uccauaucuaagaaacac

SEQ ID NO: 517089 - RNA, 19 nt, Artificial Sequence
  Synthetic
auccauaucuaagaaacac

SEQ ID NO: 517090 - RNA, 20 nt, Artificial Sequence
  Synthetic
aauccauaucuaagaaacac

SEQ ID NO: 517091 - RNA, 21 nt, Artificial Sequence
  Synthetic
aaauccauaucuaagaaacac

SEQ ID NO: 517092 - RNA, 22 nt, Artificial Sequence
  Synthetic
aaaauccauaucuaagaaacac

SEQ ID NO: 517093 - RNA, 23 nt, Artificial Sequence
  Synthetic
caaaauccauaucuaagaaacac

SEQ ID NO: 517094 - RNA, 24 nt, Artificial Sequence
  Synthetic
ucaaaauccauaucuaagaaacac

SEQ ID NO: 517095 - RNA, 18 nt, Artificial Sequence
  Synthetic
gcuauuuauuggaaacac

SEQ ID NO: 517096 - RNA, 19 nt, Artificial Sequence
  Synthetic
agcuauuuauuggaaacac

SEQ ID NO: 517097 - RNA, 20 nt, Artificial Sequence
  Synthetic
cagcuauuuauuggaaacac

SEQ ID NO: 517098 - RNA, 21 nt, Artificial Sequence
  Synthetic
acagcuauuuauuggaaacac

SEQ ID NO: 517099 - RNA, 22 nt, Artificial Sequence
  Synthetic
uacagcuauuuauuggaaacac

SEQ ID NO: 517100 - RNA, 23 nt, Artificial Sequence
  Synthetic
auacagcuauuuauuggaaacac

SEQ ID NO: 517101 - RNA, 24 nt, Artificial Sequence
  Synthetic
uauacagcuauuuauuggaaacac

SEQ ID NO: 517102 - RNA, 18 nt, Artificial Sequence
  Synthetic
aucuccugccugaaacac

SEQ ID NO: 517103 - RNA, 19 nt, Artificial Sequence
  Synthetic
aaucuccugccugaaacac

SEQ ID NO: 517104 - RNA, 20 nt, Artificial Sequence
  Synthetic
uaaucuccugccugaaacac

SEQ ID NO: 517105 - RNA, 21 nt, Artificial Sequence
  Synthetic
uuaaucuccugccugaaacac

SEQ ID NO: 517106 - RNA, 22 nt, Artificial Sequence
  Synthetic
cuuaaucuccugccugaaacac

SEQ ID NO: 517107 - RNA, 23 nt, Artificial Sequence
  Synthetic
acuuaaucuccugccugaaacac

SEQ ID NO: 517108 - RNA, 24 nt, Artificial Sequence
  Synthetic
aacuuaaucuccugccugaaacac

SEQ ID NO: 517109 - RNA, 18 nt, Artificial Sequence
  Synthetic
acauugccuuugaaacac

SEQ ID NO: 517110 - RNA, 19 nt, Artificial Sequence
  Synthetic
cacauugccuuugaaacac

SEQ ID NO: 517111 - RNA, 20 nt, Artificial Sequence
  Synthetic
gcacauugccuuugaaacac

SEQ ID NO: 517112 - RNA, 21 nt, Artificial Sequence
  Synthetic
ugcacauugccuuugaaacac

SEQ ID NO: 517113 - RNA, 22 nt, Artificial Sequence
  Synthetic
uugcacauugccuuugaaacac

SEQ ID NO: 517114 - RNA, 23 nt, Artificial Sequence
  Synthetic
uuugcacauugccuuugaaacac

SEQ ID NO: 517115 - RNA, 24 nt, Artificial Sequence
  Synthetic
auuugcacauugccuuugaaacac

SEQ ID NO: 517116 - RNA, 18 nt, Artificial Sequence
  Synthetic
cagcagaaacauaaacac

SEQ ID NO: 517117 - RNA, 19 nt, Artificial Sequence
  Synthetic
ucagcagaaacauaaacac

SEQ ID NO: 517118 - RNA, 20 nt, Artificial Sequence
  Synthetic
uucagcagaaacauaaacac

SEQ ID NO: 517119 - RNA, 21 nt, Artificial Sequence
  Synthetic
cuucagcagaaacauaaacac

SEQ ID NO: 517120 - RNA, 22 nt, Artificial Sequence
  Synthetic
ccuucagcagaaacauaaacac

SEQ ID NO: 517121 - RNA, 23 nt, Artificial Sequence
  Synthetic
gccuucagcagaaacauaaacac

SEQ ID NO: 517122 - RNA, 24 nt, Artificial Sequence
  Synthetic
agccuucagcagaaacauaaacac

SEQ ID NO: 517123 - RNA, 18 nt, Artificial Sequence
  Synthetic
ucuguuauuauuaaacac

SEQ ID NO: 517124 - RNA, 19 nt, Artificial Sequence
  Synthetic
aucuguuauuauuaaacac

SEQ ID NO: 517125 - RNA, 20 nt, Artificial Sequence
  Synthetic
aaucuguuauuauuaaacac

SEQ ID NO: 517126 - RNA, 21 nt, Artificial Sequence
  Synthetic
aaaucuguuauuauuaaacac

SEQ ID NO: 517127 - RNA, 22 nt, Artificial Sequence
  Synthetic
uaaaucuguuauuauuaaacac

SEQ ID NO: 517128 - RNA, 23 nt, Artificial Sequence
  Synthetic
uuaaaucuguuauuauuaaacac

SEQ ID NO: 517129 - RNA, 24 nt, Artificial Sequence
  Synthetic
cuuaaaucuguuauuauuaaacac

SEQ ID NO: 517130 - RNA, 18 nt, Artificial Sequence
  Synthetic
gggucccucccacaacac

SEQ ID NO: 517131 - RNA, 19 nt, Artificial Sequence
  Synthetic
ugggucccucccacaacac

SEQ ID NO: 517132 - RNA, 20 nt, Artificial Sequence
  Synthetic
cugggucccucccacaacac

SEQ ID NO: 517133 - RNA, 21 nt, Artificial Sequence
  Synthetic
ccugggucccucccacaacac

SEQ ID NO: 517134 - RNA, 22 nt, Artificial Sequence
  Synthetic
cccugggucccucccacaacac

SEQ ID NO: 517135 - RNA, 23 nt, Artificial Sequence
  Synthetic
ccccugggucccucccacaacac

SEQ ID NO: 517136 - RNA, 24 nt, Artificial Sequence
  Synthetic
cccccugggucccucccacaacac

SEQ ID NO: 517137 - RNA, 18 nt, Artificial Sequence
  Synthetic
uugauucacagacaacac

SEQ ID NO: 517138 - RNA, 19 nt, Artificial Sequence
  Synthetic
uuugauucacagacaacac

SEQ ID NO: 517139 - RNA, 20 nt, Artificial Sequence
  Synthetic
cuuugauucacagacaacac

SEQ ID NO: 517140 - RNA, 21 nt, Artificial Sequence
  Synthetic
ccuuugauucacagacaacac

SEQ ID NO: 517141 - RNA, 22 nt, Artificial Sequence
  Synthetic
uccuuugauucacagacaacac

SEQ ID NO: 517142 - RNA, 23 nt, Artificial Sequence
  Synthetic
cuccuuugauucacagacaacac

SEQ ID NO: 517143 - RNA, 24 nt, Artificial Sequence
  Synthetic
acuccuuugauucacagacaacac

SEQ ID NO: 517144 - RNA, 18 nt, Artificial Sequence
  Synthetic
uacggaguaugacaacac

SEQ ID NO: 517145 - RNA, 19 nt, Artificial Sequence
  Synthetic
auacggaguaugacaacac

SEQ ID NO: 517146 - RNA, 20 nt, Artificial Sequence
  Synthetic
uauacggaguaugacaacac

SEQ ID NO: 517147 - RNA, 21 nt, Artificial Sequence
  Synthetic
uuauacggaguaugacaacac

SEQ ID NO: 517148 - RNA, 22 nt, Artificial Sequence
  Synthetic
uuuauacggaguaugacaacac

SEQ ID NO: 517149 - RNA, 23 nt, Artificial Sequence
  Synthetic
uuuuauacggaguaugacaacac

SEQ ID NO: 517150 - RNA, 24 nt, Artificial Sequence
  Synthetic
cuuuuauacggaguaugacaacac

SEQ ID NO: 517151 - RNA, 18 nt, Artificial Sequence
  Synthetic
gcugaugccucccaacac

SEQ ID NO: 517152 - RNA, 19 nt, Artificial Sequence
  Synthetic
ugcugaugccucccaacac

SEQ ID NO: 517153 - RNA, 20 nt, Artificial Sequence
  Synthetic
cugcugaugccucccaacac

SEQ ID NO: 517154 - RNA, 21 nt, Artificial Sequence
  Synthetic
ucugcugaugccucccaacac

SEQ ID NO: 517155 - RNA, 22 nt, Artificial Sequence
  Synthetic
aucugcugaugccucccaacac

SEQ ID NO: 517156 - RNA, 23 nt, Artificial Sequence
  Synthetic
gaucugcugaugccucccaacac

SEQ ID NO: 517157 - RNA, 24 nt, Artificial Sequence
  Synthetic
ugaucugcugaugccucccaacac

SEQ ID NO: 517158 - RNA, 18 nt, Artificial Sequence
  Synthetic
aaaaugauucugcaacac

SEQ ID NO: 517159 - RNA, 19 nt, Artificial Sequence
  Synthetic
aaaaaugauucugcaacac

SEQ ID NO: 517160 - RNA, 20 nt, Artificial Sequence
  Synthetic
uaaaaaugauucugcaacac

SEQ ID NO: 517161 - RNA, 21 nt, Artificial Sequence
  Synthetic
auaaaaaugauucugcaacac

SEQ ID NO: 517162 - RNA, 22 nt, Artificial Sequence
  Synthetic
aauaaaaaugauucugcaacac

SEQ ID NO: 517163 - RNA, 23 nt, Artificial Sequence
  Synthetic
aaauaaaaaugauucugcaacac

SEQ ID NO: 517164 - RNA, 24 nt, Artificial Sequence
  Synthetic
gaaauaaaaaugauucugcaacac

SEQ ID NO: 517165 - RNA, 18 nt, Artificial Sequence
  Synthetic
caguaugaugcucaacac

SEQ ID NO: 517166 - RNA, 19 nt, Artificial Sequence
  Synthetic
ccaguaugaugcucaacac

SEQ ID NO: 517167 - RNA, 20 nt, Artificial Sequence
  Synthetic
accaguaugaugcucaacac

SEQ ID NO: 517168 - RNA, 21 nt, Artificial Sequence
  Synthetic
caccaguaugaugcucaacac

SEQ ID NO: 517169 - RNA, 22 nt, Artificial Sequence
  Synthetic
gcaccaguaugaugcucaacac

SEQ ID NO: 517170 - RNA, 23 nt, Artificial Sequence
  Synthetic
agcaccaguaugaugcucaacac

SEQ ID NO: 517171 - RNA, 24 nt, Artificial Sequence
  Synthetic
cagcaccaguaugaugcucaacac

SEQ ID NO: 517172 - RNA, 18 nt, Artificial Sequence
  Synthetic
augcuaauuucucaacac

SEQ ID NO: 517173 - RNA, 19 nt, Artificial Sequence
  Synthetic
aaugcuaauuucucaacac

SEQ ID NO: 517174 - RNA, 20 nt, Artificial Sequence
  Synthetic
aaaugcuaauuucucaacac

SEQ ID NO: 517175 - RNA, 21 nt, Artificial Sequence
  Synthetic
caaaugcuaauuucucaacac

SEQ ID NO: 517176 - RNA, 22 nt, Artificial Sequence
  Synthetic
acaaaugcuaauuucucaacac

SEQ ID NO: 517177 - RNA, 23 nt, Artificial Sequence
  Synthetic
aacaaaugcuaauuucucaacac

SEQ ID NO: 517178 - RNA, 24 nt, Artificial Sequence
  Synthetic
uaacaaaugcuaauuucucaacac

SEQ ID NO: 517179 - RNA, 18 nt, Artificial Sequence
  Synthetic
uuuuaucacagucaacac

SEQ ID NO: 517180 - RNA, 19 nt, Artificial Sequence
  Synthetic
uuuuuaucacagucaacac

SEQ ID NO: 517181 - RNA, 20 nt, Artificial Sequence
  Synthetic
uuuuuuaucacagucaacac

SEQ ID NO: 517182 - RNA, 21 nt, Artificial Sequence
  Synthetic
auuuuuuaucacagucaacac

SEQ ID NO: 517183 - RNA, 22 nt, Artificial Sequence
  Synthetic
uauuuuuuaucacagucaacac

SEQ ID NO: 517184 - RNA, 23 nt, Artificial Sequence
  Synthetic
cuauuuuuuaucacagucaacac

SEQ ID NO: 517185 - RNA, 24 nt, Artificial Sequence
  Synthetic
acuauuuuuuaucacagucaacac

SEQ ID NO: 517186 - RNA, 18 nt, Artificial Sequence
  Synthetic
caacaaauaugucaacac

SEQ ID NO: 517187 - RNA, 19 nt, Artificial Sequence
  Synthetic
gcaacaaauaugucaacac

SEQ ID NO: 517188 - RNA, 20 nt, Artificial Sequence
  Synthetic
ugcaacaaauaugucaacac

SEQ ID NO: 517189 - RNA, 21 nt, Artificial Sequence
  Synthetic
gugcaacaaauaugucaacac

SEQ ID NO: 517190 - RNA, 22 nt, Artificial Sequence
  Synthetic
agugcaacaaauaugucaacac

SEQ ID NO: 517191 - RNA, 23 nt, Artificial Sequence
  Synthetic
gagugcaacaaauaugucaacac

SEQ ID NO: 517192 - RNA, 24 nt, Artificial Sequence
  Synthetic
cgagugcaacaaauaugucaacac

SEQ ID NO: 517193 - RNA, 18 nt, Artificial Sequence
  Synthetic
uaaaaagugcaagaacac

SEQ ID NO: 517194 - RNA, 19 nt, Artificial Sequence
  Synthetic
auaaaaagugcaagaacac

SEQ ID NO: 517195 - RNA, 20 nt, Artificial Sequence
  Synthetic
aauaaaaagugcaagaacac

SEQ ID NO: 517196 - RNA, 21 nt, Artificial Sequence
  Synthetic
aaauaaaaagugcaagaacac

SEQ ID NO: 517197 - RNA, 22 nt, Artificial Sequence
  Synthetic
gaaauaaaaagugcaagaacac

SEQ ID NO: 517198 - RNA, 23 nt, Artificial Sequence
  Synthetic
agaaauaaaaagugcaagaacac

SEQ ID NO: 517199 - RNA, 24 nt, Artificial Sequence
  Synthetic
aagaaauaaaaagugcaagaacac

SEQ ID NO: 517200 - RNA, 18 nt, Artificial Sequence
  Synthetic
uuuauuaguuaagaacac

SEQ ID NO: 517201 - RNA, 19 nt, Artificial Sequence
  Synthetic
uuuuauuaguuaagaacac

SEQ ID NO: 517202 - RNA, 20 nt, Artificial Sequence
  Synthetic
uuuuuauuaguuaagaacac

SEQ ID NO: 517203 - RNA, 21 nt, Artificial Sequence
  Synthetic
uuuuuuauuaguuaagaacac

SEQ ID NO: 517204 - RNA, 22 nt, Artificial Sequence
  Synthetic
guuuuuuauuaguuaagaacac

SEQ ID NO: 517205 - RNA, 23 nt, Artificial Sequence
  Synthetic
gguuuuuuauuaguuaagaacac

SEQ ID NO: 517206 - RNA, 24 nt, Artificial Sequence
  Synthetic
agguuuuuuauuaguuaagaacac

SEQ ID NO: 517207 - RNA, 18 nt, Artificial Sequence
  Synthetic
auggaacaaugagaacac

SEQ ID NO: 517208 - RNA, 19 nt, Artificial Sequence
  Synthetic
aauggaacaaugagaacac

SEQ ID NO: 517209 - RNA, 20 nt, Artificial Sequence
  Synthetic
gaauggaacaaugagaacac

SEQ ID NO: 517210 - RNA, 21 nt, Artificial Sequence
  Synthetic
ggaauggaacaaugagaacac

SEQ ID NO: 517211 - RNA, 22 nt, Artificial Sequence
  Synthetic
gggaauggaacaaugagaacac

SEQ ID NO: 517212 - RNA, 23 nt, Artificial Sequence
  Synthetic
ugggaauggaacaaugagaacac

SEQ ID NO: 517213 - RNA, 24 nt, Artificial Sequence
  Synthetic
gugggaauggaacaaugagaacac

SEQ ID NO: 517214 - RNA, 24 nt, Artificial Sequence
  Synthetic
uugggaauugaacaaugagaacac

SEQ ID NO: 517215 - RNA, 18 nt, Artificial Sequence
  Synthetic
gcuaaaugaugagaacac

SEQ ID NO: 517216 - RNA, 19 nt, Artificial Sequence
  Synthetic
agcuaaaugaugagaacac

SEQ ID NO: 517217 - RNA, 20 nt, Artificial Sequence
  Synthetic
gagcuaaaugaugagaacac

SEQ ID NO: 517218 - RNA, 21 nt, Artificial Sequence
  Synthetic
ggagcuaaaugaugagaacac

SEQ ID NO: 517219 - RNA, 22 nt, Artificial Sequence
  Synthetic
gggagcuaaaugaugagaacac

SEQ ID NO: 517220 - RNA, 23 nt, Artificial Sequence
  Synthetic
ugggagcuaaaugaugagaacac

SEQ ID NO: 517221 - RNA, 24 nt, Artificial Sequence
  Synthetic
gugggagcuaaaugaugagaacac

SEQ ID NO: 517222 - RNA, 18 nt, Artificial Sequence
  Synthetic
guggaacagugagaacac

SEQ ID NO: 517223 - RNA, 19 nt, Artificial Sequence
  Synthetic
aguggaacagugagaacac

SEQ ID NO: 517224 - RNA, 20 nt, Artificial Sequence
  Synthetic
gaguggaacagugagaacac

SEQ ID NO: 517225 - RNA, 21 nt, Artificial Sequence
  Synthetic
ggaguggaacagugagaacac

SEQ ID NO: 517226 - RNA, 22 nt, Artificial Sequence
  Synthetic
gggaguggaacagugagaacac

SEQ ID NO: 517227 - RNA, 23 nt, Artificial Sequence
  Synthetic
ugggaguggaacagugagaacac

SEQ ID NO: 517228 - RNA, 24 nt, Artificial Sequence
  Synthetic
gugggaguggaacagugagaacac

SEQ ID NO: 517229 - RNA, 18 nt, Artificial Sequence
  Synthetic
gaauagcgucuagaacac

SEQ ID NO: 517230 - RNA, 19 nt, Artificial Sequence
  Synthetic
ugaauagcgucuagaacac

SEQ ID NO: 517231 - RNA, 20 nt, Artificial Sequence
  Synthetic
uugaauagcgucuagaacac

SEQ ID NO: 517232 - RNA, 21 nt, Artificial Sequence
  Synthetic
uuugaauagcgucuagaacac

SEQ ID NO: 517233 - RNA, 22 nt, Artificial Sequence
  Synthetic
cuuugaauagcgucuagaacac

SEQ ID NO: 517234 - RNA, 23 nt, Artificial Sequence
  Synthetic
acuuugaauagcgucuagaacac

SEQ ID NO: 517235 - RNA, 24 nt, Artificial Sequence
  Synthetic
uacuuugaauagcgucuagaacac

SEQ ID NO: 517236 - RNA, 18 nt, Artificial Sequence
  Synthetic
gcugaggugguagaacac

SEQ ID NO: 517237 - RNA, 19 nt, Artificial Sequence
  Synthetic
ggcugaggugguagaacac

SEQ ID NO: 517238 - RNA, 20 nt, Artificial Sequence
  Synthetic
aggcugaggugguagaacac

SEQ ID NO: 517239 - RNA, 21 nt, Artificial Sequence
  Synthetic
gaggcugaggugguagaacac

SEQ ID NO: 517240 - RNA, 22 nt, Artificial Sequence
  Synthetic
ggaggcugaggugguagaacac

SEQ ID NO: 517241 - RNA, 23 nt, Artificial Sequence
  Synthetic
gggaggcugaggugguagaacac

SEQ ID NO: 517242 - RNA, 24 nt, Artificial Sequence
  Synthetic
ugggaggcugaggugguagaacac

SEQ ID NO: 517243 - RNA, 18 nt, Artificial Sequence
  Synthetic
cuugaaaucaaggaacac

SEQ ID NO: 517244 - RNA, 19 nt, Artificial Sequence
  Synthetic
gcuugaaaucaaggaacac

SEQ ID NO: 517245 - RNA, 20 nt, Artificial Sequence
  Synthetic
ugcuugaaaucaaggaacac

SEQ ID NO: 517246 - RNA, 21 nt, Artificial Sequence
  Synthetic
cugcuugaaaucaaggaacac

SEQ ID NO: 517247 - RNA, 22 nt, Artificial Sequence
  Synthetic
gcugcuugaaaucaaggaacac

SEQ ID NO: 517248 - RNA, 23 nt, Artificial Sequence
  Synthetic
ugcugcuugaaaucaaggaacac

SEQ ID NO: 517249 - RNA, 24 nt, Artificial Sequence
  Synthetic
gugcugcuugaaaucaaggaacac

SEQ ID NO: 517250 - RNA, 18 nt, Artificial Sequence
  Synthetic
gcaugaagucaggaacac

SEQ ID NO: 517251 - RNA, 19 nt, Artificial Sequence
  Synthetic
ugcaugaagucaggaacac

SEQ ID NO: 517252 - RNA, 20 nt, Artificial Sequence
  Synthetic
augcaugaagucaggaacac

SEQ ID NO: 517253 - RNA, 21 nt, Artificial Sequence
  Synthetic
caugcaugaagucaggaacac

SEQ ID NO: 517254 - RNA, 22 nt, Artificial Sequence
  Synthetic
gcaugcaugaagucaggaacac

SEQ ID NO: 517255 - RNA, 23 nt, Artificial Sequence
  Synthetic
ugcaugcaugaagucaggaacac

SEQ ID NO: 517256 - RNA, 24 nt, Artificial Sequence
  Synthetic
augcaugcaugaagucaggaacac

SEQ ID NO: 517257 - RNA, 18 nt, Artificial Sequence
  Synthetic
cugaagugggcggaacac

SEQ ID NO: 517258 - RNA, 19 nt, Artificial Sequence
  Synthetic
gcugaagugggcggaacac

SEQ ID NO: 517259 - RNA, 20 nt, Artificial Sequence
  Synthetic
ggcugaagugggcggaacac

SEQ ID NO: 517260 - RNA, 21 nt, Artificial Sequence
  Synthetic
aggcugaagugggcggaacac

SEQ ID NO: 517261 - RNA, 22 nt, Artificial Sequence
  Synthetic
gaggcugaagugggcggaacac

SEQ ID NO: 517262 - RNA, 23 nt, Artificial Sequence
  Synthetic
ggaggcugaagugggcggaacac

SEQ ID NO: 517263 - RNA, 24 nt, Artificial Sequence
  Synthetic
gggaggcugaagugggcggaacac

SEQ ID NO: 517264 - RNA, 18 nt, Artificial Sequence
  Synthetic
auucacagaggggaacac

SEQ ID NO: 517265 - RNA, 19 nt, Artificial Sequence
  Synthetic
cauucacagaggggaacac

SEQ ID NO: 517266 - RNA, 20 nt, Artificial Sequence
  Synthetic
ucauucacagaggggaacac

SEQ ID NO: 517267 - RNA, 21 nt, Artificial Sequence
  Synthetic
aucauucacagaggggaacac

SEQ ID NO: 517268 - RNA, 22 nt, Artificial Sequence
  Synthetic
aaucauucacagaggggaacac

SEQ ID NO: 517269 - RNA, 23 nt, Artificial Sequence
  Synthetic
aaaucauucacagaggggaacac

SEQ ID NO: 517270 - RNA, 24 nt, Artificial Sequence
  Synthetic
gaaaucauucacagaggggaacac

SEQ ID NO: 517271 - RNA, 18 nt, Artificial Sequence
  Synthetic
agguuugcuggggaacac

SEQ ID NO: 517272 - RNA, 19 nt, Artificial Sequence
  Synthetic
gagguuugcuggggaacac

SEQ ID NO: 517273 - RNA, 20 nt, Artificial Sequence
  Synthetic
ugagguuugcuggggaacac

SEQ ID NO: 517274 - RNA, 21 nt, Artificial Sequence
  Synthetic
uugagguuugcuggggaacac

SEQ ID NO: 517275 - RNA, 22 nt, Artificial Sequence
  Synthetic
guugagguuugcuggggaacac

SEQ ID NO: 517276 - RNA, 23 nt, Artificial Sequence
  Synthetic
gguugagguuugcuggggaacac

SEQ ID NO: 517277 - RNA, 24 nt, Artificial Sequence
  Synthetic
ugguugagguuugcuggggaacac

SEQ ID NO: 517278 - RNA, 18 nt, Artificial Sequence
  Synthetic
cagcagcaucaugaacac

SEQ ID NO: 517279 - RNA, 19 nt, Artificial Sequence
  Synthetic
ccagcagcaucaugaacac

SEQ ID NO: 517280 - RNA, 20 nt, Artificial Sequence
  Synthetic
accagcagcaucaugaacac

SEQ ID NO: 517281 - RNA, 21 nt, Artificial Sequence
  Synthetic
aaccagcagcaucaugaacac

SEQ ID NO: 517282 - RNA, 22 nt, Artificial Sequence
  Synthetic
gaaccagcagcaucaugaacac

SEQ ID NO: 517283 - RNA, 23 nt, Artificial Sequence
  Synthetic
ugaaccagcagcaucaugaacac

SEQ ID NO: 517284 - RNA, 24 nt, Artificial Sequence
  Synthetic
cugaaccagcagcaucaugaacac

SEQ ID NO: 517285 - RNA, 18 nt, Artificial Sequence
  Synthetic
uacgugcuucaugaacac

SEQ ID NO: 517286 - RNA, 19 nt, Artificial Sequence
  Synthetic
auacgugcuucaugaacac

SEQ ID NO: 517287 - RNA, 20 nt, Artificial Sequence
  Synthetic
cauacgugcuucaugaacac

SEQ ID NO: 517288 - RNA, 21 nt, Artificial Sequence
  Synthetic
ccauacgugcuucaugaacac

SEQ ID NO: 517289 - RNA, 22 nt, Artificial Sequence
  Synthetic
gccauacgugcuucaugaacac

SEQ ID NO: 517290 - RNA, 23 nt, Artificial Sequence
  Synthetic
ggccauacgugcuucaugaacac

SEQ ID NO: 517291 - RNA, 24 nt, Artificial Sequence
  Synthetic
aggccauacgugcuucaugaacac

SEQ ID NO: 517292 - RNA, 18 nt, Artificial Sequence
  Synthetic
aucaaaacaacugaacac

SEQ ID NO: 517293 - RNA, 19 nt, Artificial Sequence
  Synthetic
aaucaaaacaacugaacac

SEQ ID NO: 517294 - RNA, 20 nt, Artificial Sequence
  Synthetic
aaaucaaaacaacugaacac

SEQ ID NO: 517295 - RNA, 21 nt, Artificial Sequence
  Synthetic
aaaaucaaaacaacugaacac

SEQ ID NO: 517296 - RNA, 22 nt, Artificial Sequence
  Synthetic
aaaaaucaaaacaacugaacac

SEQ ID NO: 517297 - RNA, 23 nt, Artificial Sequence
  Synthetic
uaaaaaucaaaacaacugaacac

SEQ ID NO: 517298 - RNA, 24 nt, Artificial Sequence
  Synthetic
guaaaaaucaaaacaacugaacac

SEQ ID NO: 517299 - RNA, 18 nt, Artificial Sequence
  Synthetic
cacgugugaggugaacac

SEQ ID NO: 517300 - RNA, 19 nt, Artificial Sequence
  Synthetic
gcacgugugaggugaacac

SEQ ID NO: 517301 - RNA, 20 nt, Artificial Sequence
  Synthetic
ugcacgugugaggugaacac

SEQ ID NO: 517302 - RNA, 21 nt, Artificial Sequence
  Synthetic
uugcacgugugaggugaacac

SEQ ID NO: 517303 - RNA, 22 nt, Artificial Sequence
  Synthetic
cuugcacgugugaggugaacac

SEQ ID NO: 517304 - RNA, 23 nt, Artificial Sequence
  Synthetic
gcuugcacgugugaggugaacac

SEQ ID NO: 517305 - RNA, 24 nt, Artificial Sequence
  Synthetic
ggcuugcacgugugaggugaacac

SEQ ID NO: 517306 - RNA, 18 nt, Artificial Sequence
  Synthetic
aaagcaacucuugaacac

SEQ ID NO: 517307 - RNA, 19 nt, Artificial Sequence
  Synthetic
uaaagcaacucuugaacac

SEQ ID NO: 517308 - RNA, 20 nt, Artificial Sequence
  Synthetic
auaaagcaacucuugaacac

SEQ ID NO: 517309 - RNA, 21 nt, Artificial Sequence
  Synthetic
uauaaagcaacucuugaacac

SEQ ID NO: 517310 - RNA, 22 nt, Artificial Sequence
  Synthetic
cuauaaagcaacucuugaacac

SEQ ID NO: 517311 - RNA, 23 nt, Artificial Sequence
  Synthetic
ccuauaaagcaacucuugaacac

SEQ ID NO: 517312 - RNA, 24 nt, Artificial Sequence
  Synthetic
cccuauaaagcaacucuugaacac

SEQ ID NO: 517313 - RNA, 21 nt, Artificial Sequence
  Synthetic
ucauucucagcaaacuaacac

SEQ ID NO: 517314 - RNA, 22 nt, Artificial Sequence
  Synthetic
gucauucucagcaaacuaacac

SEQ ID NO: 517315 - RNA, 23 nt, Artificial Sequence
  Synthetic
cgucauucucagcaaacuaacac

SEQ ID NO: 517316 - RNA, 24 nt, Artificial Sequence
  Synthetic
ccgucauucucagcaaacuaacac

SEQ ID NO: 517317 - RNA, 18 nt, Artificial Sequence
  Synthetic
uucuuagcaaacuaacac

SEQ ID NO: 517318 - RNA, 19 nt, Artificial Sequence
  Synthetic
auucuuagcaaacuaacac

SEQ ID NO: 517319 - RNA, 20 nt, Artificial Sequence
  Synthetic
cauucuuagcaaacuaacac

SEQ ID NO: 517320 - RNA, 21 nt, Artificial Sequence
  Synthetic
ucauucuuagcaaacuaacac

SEQ ID NO: 517321 - RNA, 22 nt, Artificial Sequence
  Synthetic
aucauucuuagcaaacuaacac

SEQ ID NO: 517322 - RNA, 23 nt, Artificial Sequence
  Synthetic
caucauucuuagcaaacuaacac

SEQ ID NO: 517323 - RNA, 24 nt, Artificial Sequence
  Synthetic
ccaucauucuuagcaaacuaacac

SEQ ID NO: 517324 - RNA, 18 nt, Artificial Sequence
  Synthetic
cacauuuugcacuaacac

SEQ ID NO: 517325 - RNA, 19 nt, Artificial Sequence
  Synthetic
ccacauuuugcacuaacac

SEQ ID NO: 517326 - RNA, 20 nt, Artificial Sequence
  Synthetic
uccacauuuugcacuaacac

SEQ ID NO: 517327 - RNA, 21 nt, Artificial Sequence
  Synthetic
guccacauuuugcacuaacac

SEQ ID NO: 517328 - RNA, 22 nt, Artificial Sequence
  Synthetic
aguccacauuuugcacuaacac

SEQ ID NO: 517329 - RNA, 23 nt, Artificial Sequence
  Synthetic
caguccacauuuugcacuaacac

SEQ ID NO: 517330 - RNA, 24 nt, Artificial Sequence
  Synthetic
ccaguccacauuuugcacuaacac

SEQ ID NO: 517331 - RNA, 18 nt, Artificial Sequence
  Synthetic
gacuaauuuuccuaacac

SEQ ID NO: 517332 - RNA, 19 nt, Artificial Sequence
  Synthetic
ggacuaauuuuccuaacac

SEQ ID NO: 517333 - RNA, 20 nt, Artificial Sequence
  Synthetic
gggacuaauuuuccuaacac

SEQ ID NO: 517334 - RNA, 21 nt, Artificial Sequence
  Synthetic
agggacuaauuuuccuaacac

SEQ ID NO: 517335 - RNA, 22 nt, Artificial Sequence
  Synthetic
aagggacuaauuuuccuaacac

SEQ ID NO: 517336 - RNA, 23 nt, Artificial Sequence
  Synthetic
uaagggacuaauuuuccuaacac

SEQ ID NO: 517337 - RNA, 24 nt, Artificial Sequence
  Synthetic
cuaagggacuaauuuuccuaacac

SEQ ID NO: 517338 - RNA, 18 nt, Artificial Sequence
  Synthetic
ugcugcucugucuaacac

SEQ ID NO: 517339 - RNA, 19 nt, Artificial Sequence
  Synthetic
gugcugcucugucuaacac

SEQ ID NO: 517340 - RNA, 20 nt, Artificial Sequence
  Synthetic
ugugcugcucugucuaacac

SEQ ID NO: 517341 - RNA, 21 nt, Artificial Sequence
  Synthetic
cugugcugcucugucuaacac

SEQ ID NO: 517342 - RNA, 22 nt, Artificial Sequence
  Synthetic
gcugugcugcucugucuaacac

SEQ ID NO: 517343 - RNA, 23 nt, Artificial Sequence
  Synthetic
ggcugugcugcucugucuaacac

SEQ ID NO: 517344 - RNA, 24 nt, Artificial Sequence
  Synthetic
gggcugugcugcucugucuaacac

SEQ ID NO: 517345 - RNA, 18 nt, Artificial Sequence
  Synthetic
ugaaaauaaaaguaacac

SEQ ID NO: 517346 - RNA, 19 nt, Artificial Sequence
  Synthetic
gugaaaauaaaaguaacac

SEQ ID NO: 517347 - RNA, 20 nt, Artificial Sequence
  Synthetic
ugugaaaauaaaaguaacac

SEQ ID NO: 517348 - RNA, 21 nt, Artificial Sequence
  Synthetic
gugugaaaauaaaaguaacac

SEQ ID NO: 517349 - RNA, 22 nt, Artificial Sequence
  Synthetic
agugugaaaauaaaaguaacac

SEQ ID NO: 517350 - RNA, 23 nt, Artificial Sequence
  Synthetic
cagugugaaaauaaaaguaacac

SEQ ID NO: 517351 - RNA, 24 nt, Artificial Sequence
  Synthetic
ucagugugaaaauaaaaguaacac

SEQ ID NO: 517352 - RNA, 18 nt, Artificial Sequence
  Synthetic
aggaauuuaaaguaacac

SEQ ID NO: 517353 - RNA, 19 nt, Artificial Sequence
  Synthetic
caggaauuuaaaguaacac

SEQ ID NO: 517354 - RNA, 20 nt, Artificial Sequence
  Synthetic
ucaggaauuuaaaguaacac

SEQ ID NO: 517355 - RNA, 21 nt, Artificial Sequence
  Synthetic
uucaggaauuuaaaguaacac

SEQ ID NO: 517356 - RNA, 22 nt, Artificial Sequence
  Synthetic
auucaggaauuuaaaguaacac

SEQ ID NO: 517357 - RNA, 23 nt, Artificial Sequence
  Synthetic
cauucaggaauuuaaaguaacac

SEQ ID NO: 517358 - RNA, 24 nt, Artificial Sequence
  Synthetic
ucauucaggaauuuaaaguaacac

SEQ ID NO: 517359 - RNA, 18 nt, Artificial Sequence
  Synthetic
uacuauuacuaguaacac

SEQ ID NO: 517360 - RNA, 19 nt, Artificial Sequence
  Synthetic
uuacuauuacuaguaacac

SEQ ID NO: 517361 - RNA, 20 nt, Artificial Sequence
  Synthetic
auuacuauuacuaguaacac

SEQ ID NO: 517362 - RNA, 21 nt, Artificial Sequence
  Synthetic
cauuacuauuacuaguaacac

SEQ ID NO: 517363 - RNA, 22 nt, Artificial Sequence
  Synthetic
ccauuacuauuacuaguaacac

SEQ ID NO: 517364 - RNA, 23 nt, Artificial Sequence
  Synthetic
gccauuacuauuacuaguaacac

SEQ ID NO: 517365 - RNA, 24 nt, Artificial Sequence
  Synthetic
ugccauuacuauuacuaguaacac

SEQ ID NO: 517366 - RNA, 18 nt, Artificial Sequence
  Synthetic
aagggagaaaauuaacac

SEQ ID NO: 517367 - RNA, 19 nt, Artificial Sequence
  Synthetic
gaagggagaaaauuaacac

SEQ ID NO: 517368 - RNA, 20 nt, Artificial Sequence
  Synthetic
agaagggagaaaauuaacac

SEQ ID NO: 517369 - RNA, 21 nt, Artificial Sequence
  Synthetic
aagaagggagaaaauuaacac

SEQ ID NO: 517370 - RNA, 22 nt, Artificial Sequence
  Synthetic
aaagaagggagaaaauuaacac

SEQ ID NO: 517371 - RNA, 23 nt, Artificial Sequence
  Synthetic
caaagaagggagaaaauuaacac

SEQ ID NO: 517372 - RNA, 24 nt, Artificial Sequence
  Synthetic
ccaaagaagggagaaaauuaacac

SEQ ID NO: 517373 - RNA, 18 nt, Artificial Sequence
  Synthetic
uugauauaucauuaacac

SEQ ID NO: 517374 - RNA, 19 nt, Artificial Sequence
  Synthetic
auugauauaucauuaacac

SEQ ID NO: 517375 - RNA, 20 nt, Artificial Sequence
  Synthetic
cauugauauaucauuaacac

SEQ ID NO: 517376 - RNA, 21 nt, Artificial Sequence
  Synthetic
acauugauauaucauuaacac

SEQ ID NO: 517377 - RNA, 22 nt, Artificial Sequence
  Synthetic
uacauugauauaucauuaacac

SEQ ID NO: 517378 - RNA, 23 nt, Artificial Sequence
  Synthetic
auacauugauauaucauuaacac

SEQ ID NO: 517379 - RNA, 24 nt, Artificial Sequence
  Synthetic
cauacauugauauaucauuaacac

SEQ ID NO: 517380 - RNA, 18 nt, Artificial Sequence
  Synthetic
gggaaaucauauuaacac

SEQ ID NO: 517381 - RNA, 19 nt, Artificial Sequence
  Synthetic
agggaaaucauauuaacac

SEQ ID NO: 517382 - RNA, 20 nt, Artificial Sequence
  Synthetic
cagggaaaucauauuaacac

SEQ ID NO: 517383 - RNA, 21 nt, Artificial Sequence
  Synthetic
acagggaaaucauauuaacac

SEQ ID NO: 517384 - RNA, 22 nt, Artificial Sequence
  Synthetic
gacagggaaaucauauuaacac

SEQ ID NO: 517385 - RNA, 23 nt, Artificial Sequence
  Synthetic
ugacagggaaaucauauuaacac

SEQ ID NO: 517386 - RNA, 24 nt, Artificial Sequence
  Synthetic
augacagggaaaucauauuaacac

SEQ ID NO: 517387 - RNA, 18 nt, Artificial Sequence
  Synthetic
ugggauguaauuuaacac

SEQ ID NO: 517388 - RNA, 19 nt, Artificial Sequence
  Synthetic
uugggauguaauuuaacac

SEQ ID NO: 517389 - RNA, 20 nt, Artificial Sequence
  Synthetic
uuugggauguaauuuaacac

SEQ ID NO: 517390 - RNA, 21 nt, Artificial Sequence
  Synthetic
cuuugggauguaauuuaacac

SEQ ID NO: 517391 - RNA, 22 nt, Artificial Sequence
  Synthetic
ucuuugggauguaauuuaacac

SEQ ID NO: 517392 - RNA, 23 nt, Artificial Sequence
  Synthetic
aucuuugggauguaauuuaacac

SEQ ID NO: 517393 - RNA, 24 nt, Artificial Sequence
  Synthetic
aaucuuugggauguaauuuaacac

SEQ ID NO: 517394 - RNA, 18 nt, Artificial Sequence
  Synthetic
cccuagaaucuaacacac

SEQ ID NO: 517395 - RNA, 19 nt, Artificial Sequence
  Synthetic
ucccuagaaucuaacacac

SEQ ID NO: 517396 - RNA, 20 nt, Artificial Sequence
  Synthetic
aucccuagaaucuaacacac

SEQ ID NO: 517397 - RNA, 21 nt, Artificial Sequence
  Synthetic
uaucccuagaaucuaacacac

SEQ ID NO: 517398 - RNA, 22 nt, Artificial Sequence
  Synthetic
guaucccuagaaucuaacacac

SEQ ID NO: 517399 - RNA, 23 nt, Artificial Sequence
  Synthetic
uguaucccuagaaucuaacacac

SEQ ID NO: 517400 - RNA, 24 nt, Artificial Sequence
  Synthetic
uuguaucccuagaaucuaacacac

SEQ ID NO: 517401 - RNA, 18 nt, Artificial Sequence
  Synthetic
uaagggcuucccacacac

SEQ ID NO: 517402 - RNA, 19 nt, Artificial Sequence
  Synthetic
uuaagggcuucccacacac

SEQ ID NO: 517403 - RNA, 20 nt, Artificial Sequence
  Synthetic
auuaagggcuucccacacac

SEQ ID NO: 517404 - RNA, 21 nt, Artificial Sequence
  Synthetic
gauuaagggcuucccacacac

SEQ ID NO: 517405 - RNA, 22 nt, Artificial Sequence
  Synthetic
ugauuaagggcuucccacacac

SEQ ID NO: 517406 - RNA, 23 nt, Artificial Sequence
  Synthetic
uugauuaagggcuucccacacac

SEQ ID NO: 517407 - RNA, 24 nt, Artificial Sequence
  Synthetic
auugauuaagggcuucccacacac

SEQ ID NO: 517408 - RNA, 18 nt, Artificial Sequence
  Synthetic
gcaggcaacaucacacac

SEQ ID NO: 517409 - RNA, 19 nt, Artificial Sequence
  Synthetic
cgcaggcaacaucacacac

SEQ ID NO: 517410 - RNA, 20 nt, Artificial Sequence
  Synthetic
gcgcaggcaacaucacacac

SEQ ID NO: 517411 - RNA, 21 nt, Artificial Sequence
  Synthetic
agcgcaggcaacaucacacac

SEQ ID NO: 517412 - RNA, 22 nt, Artificial Sequence
  Synthetic
cagcgcaggcaacaucacacac

SEQ ID NO: 517413 - RNA, 23 nt, Artificial Sequence
  Synthetic
acagcgcaggcaacaucacacac

SEQ ID NO: 517414 - RNA, 24 nt, Artificial Sequence
  Synthetic
cacagcgcaggcaacaucacacac

SEQ ID NO: 517415 - RNA, 21 nt, Artificial Sequence
  Synthetic
aggaaggggaacaucacacac

SEQ ID NO: 517416 - RNA, 22 nt, Artificial Sequence
  Synthetic
caggaaggggaacaucacacac

SEQ ID NO: 517417 - RNA, 23 nt, Artificial Sequence
  Synthetic
gcaggaaggggaacaucacacac

SEQ ID NO: 517418 - RNA, 24 nt, Artificial Sequence
  Synthetic
cgcaggaaggggaacaucacacac

SEQ ID NO: 517419 - RNA, 18 nt, Artificial Sequence
  Synthetic
gcggggaacaucacacac

SEQ ID NO: 517420 - RNA, 19 nt, Artificial Sequence
  Synthetic
ggcggggaacaucacacac

SEQ ID NO: 517421 - RNA, 20 nt, Artificial Sequence
  Synthetic
gggcggggaacaucacacac

SEQ ID NO: 517422 - RNA, 21 nt, Artificial Sequence
  Synthetic
agggcggggaacaucacacac

SEQ ID NO: 517423 - RNA, 22 nt, Artificial Sequence
  Synthetic
cagggcggggaacaucacacac

SEQ ID NO: 517424 - RNA, 23 nt, Artificial Sequence
  Synthetic
acagggcggggaacaucacacac

SEQ ID NO: 517425 - RNA, 24 nt, Artificial Sequence
  Synthetic
cacagggcggggaacaucacacac

SEQ ID NO: 517426 - RNA, 18 nt, Artificial Sequence
  Synthetic
uguuuaauaacuacacac

SEQ ID NO: 517427 - RNA, 19 nt, Artificial Sequence
  Synthetic
uuguuuaauaacuacacac

SEQ ID NO: 517428 - RNA, 20 nt, Artificial Sequence
  Synthetic
auuguuuaauaacuacacac

SEQ ID NO: 517429 - RNA, 21 nt, Artificial Sequence
  Synthetic
gauuguuuaauaacuacacac

SEQ ID NO: 517430 - RNA, 22 nt, Artificial Sequence
  Synthetic
ugauuguuuaauaacuacacac

SEQ ID NO: 517431 - RNA, 23 nt, Artificial Sequence
  Synthetic
augauuguuuaauaacuacacac

SEQ ID NO: 517432 - RNA, 24 nt, Artificial Sequence
  Synthetic
aaugauuguuuaauaacuacacac

SEQ ID NO: 517433 - RNA, 18 nt, Artificial Sequence
  Synthetic
ccuugcgcugcuacacac

SEQ ID NO: 517434 - RNA, 19 nt, Artificial Sequence
  Synthetic
cccuugcgcugcuacacac

SEQ ID NO: 517435 - RNA, 20 nt, Artificial Sequence
  Synthetic
ucccuugcgcugcuacacac

SEQ ID NO: 517436 - RNA, 21 nt, Artificial Sequence
  Synthetic
aucccuugcgcugcuacacac

SEQ ID NO: 517437 - RNA, 22 nt, Artificial Sequence
  Synthetic
uaucccuugcgcugcuacacac

SEQ ID NO: 517438 - RNA, 23 nt, Artificial Sequence
  Synthetic
auaucccuugcgcugcuacacac

SEQ ID NO: 517439 - RNA, 24 nt, Artificial Sequence
  Synthetic
uauaucccuugcgcugcuacacac

SEQ ID NO: 517440 - RNA, 18 nt, Artificial Sequence
  Synthetic
guugggaauuaaccacac

SEQ ID NO: 517441 - RNA, 19 nt, Artificial Sequence
  Synthetic
cguugggaauuaaccacac

SEQ ID NO: 517442 - RNA, 20 nt, Artificial Sequence
  Synthetic
acguugggaauuaaccacac

SEQ ID NO: 517443 - RNA, 21 nt, Artificial Sequence
  Synthetic
cacguugggaauuaaccacac

SEQ ID NO: 517444 - RNA, 22 nt, Artificial Sequence
  Synthetic
ccacguugggaauuaaccacac

SEQ ID NO: 517445 - RNA, 23 nt, Artificial Sequence
  Synthetic
gccacguugggaauuaaccacac

SEQ ID NO: 517446 - RNA, 24 nt, Artificial Sequence
  Synthetic
ggccacguugggaauuaaccacac

SEQ ID NO: 517447 - RNA, 18 nt, Artificial Sequence
  Synthetic
gaucagacccacccacac

SEQ ID NO: 517448 - RNA, 19 nt, Artificial Sequence
  Synthetic
ggaucagacccacccacac

SEQ ID NO: 517449 - RNA, 20 nt, Artificial Sequence
  Synthetic
uggaucagacccacccacac

SEQ ID NO: 517450 - RNA, 21 nt, Artificial Sequence
  Synthetic
uuggaucagacccacccacac

SEQ ID NO: 517451 - RNA, 22 nt, Artificial Sequence
  Synthetic
auuggaucagacccacccacac

SEQ ID NO: 517452 - RNA, 23 nt, Artificial Sequence
  Synthetic
gauuggaucagacccacccacac

SEQ ID NO: 517453 - RNA, 24 nt, Artificial Sequence
  Synthetic
ugauuggaucagacccacccacac

SEQ ID NO: 517454 - RNA, 18 nt, Artificial Sequence
  Synthetic
aaauuacuuuacccacac

SEQ ID NO: 517455 - RNA, 19 nt, Artificial Sequence
  Synthetic
aaaauuacuuuacccacac

SEQ ID NO: 517456 - RNA, 20 nt, Artificial Sequence
  Synthetic
aaaaauuacuuuacccacac

SEQ ID NO: 517457 - RNA, 21 nt, Artificial Sequence
  Synthetic
aaaaaauuacuuuacccacac

SEQ ID NO: 517458 - RNA, 22 nt, Artificial Sequence
  Synthetic
gaaaaaauuacuuuacccacac

SEQ ID NO: 517459 - RNA, 23 nt, Artificial Sequence
  Synthetic
ggaaaaaauuacuuuacccacac

SEQ ID NO: 517460 - RNA, 24 nt, Artificial Sequence
  Synthetic
uggaaaaaauuacuuuacccacac

SEQ ID NO: 517461 - RNA, 18 nt, Artificial Sequence
  Synthetic
gcuaaaaccaccccacac

SEQ ID NO: 517462 - RNA, 19 nt, Artificial Sequence
  Synthetic
agcuaaaaccaccccacac

SEQ ID NO: 517463 - RNA, 20 nt, Artificial Sequence
  Synthetic
uagcuaaaaccaccccacac

SEQ ID NO: 517464 - RNA, 21 nt, Artificial Sequence
  Synthetic
uuagcuaaaaccaccccacac

SEQ ID NO: 517465 - RNA, 22 nt, Artificial Sequence
  Synthetic
guuagcuaaaaccaccccacac

SEQ ID NO: 517466 - RNA, 23 nt, Artificial Sequence
  Synthetic
gguuagcuaaaaccaccccacac

SEQ ID NO: 517467 - RNA, 24 nt, Artificial Sequence
  Synthetic
ugguuagcuaaaaccaccccacac

SEQ ID NO: 517468 - RNA, 18 nt, Artificial Sequence
  Synthetic
auuuuuucuuucccacac

SEQ ID NO: 517469 - RNA, 19 nt, Artificial Sequence
  Synthetic
aauuuuuucuuucccacac

SEQ ID NO: 517470 - RNA, 20 nt, Artificial Sequence
  Synthetic
aaauuuuuucuuucccacac

SEQ ID NO: 517471 - RNA, 21 nt, Artificial Sequence
  Synthetic
uaaauuuuuucuuucccacac

SEQ ID NO: 517472 - RNA, 22 nt, Artificial Sequence
  Synthetic
uuaaauuuuuucuuucccacac

SEQ ID NO: 517473 - RNA, 23 nt, Artificial Sequence
  Synthetic
auuaaauuuuuucuuucccacac

SEQ ID NO: 517474 - RNA, 24 nt, Artificial Sequence
  Synthetic
cauuaaauuuuuucuuucccacac

SEQ ID NO: 517475 - RNA, 18 nt, Artificial Sequence
  Synthetic
ggcuucccugggccacac

SEQ ID NO: 517476 - RNA, 19 nt, Artificial Sequence
  Synthetic
uggcuucccugggccacac

SEQ ID NO: 517477 - RNA, 20 nt, Artificial Sequence
  Synthetic
uuggcuucccugggccacac

SEQ ID NO: 517478 - RNA, 21 nt, Artificial Sequence
  Synthetic
uuuggcuucccugggccacac

SEQ ID NO: 517479 - RNA, 22 nt, Artificial Sequence
  Synthetic
uuuuggcuucccugggccacac

SEQ ID NO: 517480 - RNA, 23 nt, Artificial Sequence
  Synthetic
cuuuuggcuucccugggccacac

SEQ ID NO: 517481 - RNA, 24 nt, Artificial Sequence
  Synthetic
ucuuuuggcuucccugggccacac

SEQ ID NO: 517482 - RNA, 18 nt, Artificial Sequence
  Synthetic
auguuuucauggccacac

SEQ ID NO: 517483 - RNA, 19 nt, Artificial Sequence
  Synthetic
aauguuuucauggccacac

SEQ ID NO: 517484 - RNA, 20 nt, Artificial Sequence
  Synthetic
gaauguuuucauggccacac

SEQ ID NO: 517485 - RNA, 21 nt, Artificial Sequence
  Synthetic
ugaauguuuucauggccacac

SEQ ID NO: 517486 - RNA, 22 nt, Artificial Sequence
  Synthetic
gugaauguuuucauggccacac

SEQ ID NO: 517487 - RNA, 23 nt, Artificial Sequence
  Synthetic
ugugaauguuuucauggccacac

SEQ ID NO: 517488 - RNA, 24 nt, Artificial Sequence
  Synthetic
gugugaauguuuucauggccacac

SEQ ID NO: 517489 - RNA, 18 nt, Artificial Sequence
  Synthetic
cgcccaacagauccacac

SEQ ID NO: 517490 - RNA, 19 nt, Artificial Sequence
  Synthetic
ucgcccaacagauccacac

SEQ ID NO: 517491 - RNA, 20 nt, Artificial Sequence
  Synthetic
gucgcccaacagauccacac

SEQ ID NO: 517492 - RNA, 21 nt, Artificial Sequence
  Synthetic
ggucgcccaacagauccacac

SEQ ID NO: 517493 - RNA, 22 nt, Artificial Sequence
  Synthetic
aggucgcccaacagauccacac

SEQ ID NO: 517494 - RNA, 23 nt, Artificial Sequence
  Synthetic
aaggucgcccaacagauccacac

SEQ ID NO: 517495 - RNA, 24 nt, Artificial Sequence
  Synthetic
caaggucgcccaacagauccacac

SEQ ID NO: 517496 - RNA, 18 nt, Artificial Sequence
  Synthetic
cuggauaauucuccacac

SEQ ID NO: 517497 - RNA, 19 nt, Artificial Sequence
  Synthetic
acuggauaauucuccacac

SEQ ID NO: 517498 - RNA, 20 nt, Artificial Sequence
  Synthetic
uacuggauaauucuccacac

SEQ ID NO: 517499 - RNA, 21 nt, Artificial Sequence
  Synthetic
cuacuggauaauucuccacac

SEQ ID NO: 517500 - RNA, 22 nt, Artificial Sequence
  Synthetic
ccuacuggauaauucuccacac

SEQ ID NO: 517501 - RNA, 23 nt, Artificial Sequence
  Synthetic
cccuacuggauaauucuccacac

SEQ ID NO: 517502 - RNA, 24 nt, Artificial Sequence
  Synthetic
ccccuacuggauaauucuccacac

SEQ ID NO: 517503 - RNA, 18 nt, Artificial Sequence
  Synthetic
guauugauggcagcacac

SEQ ID NO: 517504 - RNA, 19 nt, Artificial Sequence
  Synthetic
uguauugauggcagcacac

SEQ ID NO: 517505 - RNA, 20 nt, Artificial Sequence
  Synthetic
uuguauugauggcagcacac

SEQ ID NO: 517506 - RNA, 21 nt, Artificial Sequence
  Synthetic
uuuguauugauggcagcacac

SEQ ID NO: 517507 - RNA, 22 nt, Artificial Sequence
  Synthetic
uuuuguauugauggcagcacac

SEQ ID NO: 517508 - RNA, 23 nt, Artificial Sequence
  Synthetic
cuuuuguauugauggcagcacac

SEQ ID NO: 517509 - RNA, 24 nt, Artificial Sequence
  Synthetic
acuuuuguauugauggcagcacac

SEQ ID NO: 517510 - RNA, 18 nt, Artificial Sequence
  Synthetic
gcuaagcacugagcacac

SEQ ID NO: 517511 - RNA, 19 nt, Artificial Sequence
  Synthetic
agcuaagcacugagcacac

SEQ ID NO: 517512 - RNA, 20 nt, Artificial Sequence
  Synthetic
gagcuaagcacugagcacac

SEQ ID NO: 517513 - RNA, 21 nt, Artificial Sequence
  Synthetic
ggagcuaagcacugagcacac

SEQ ID NO: 517514 - RNA, 22 nt, Artificial Sequence
  Synthetic
gggagcuaagcacugagcacac

SEQ ID NO: 517515 - RNA, 23 nt, Artificial Sequence
  Synthetic
ugggagcuaagcacugagcacac

SEQ ID NO: 517516 - RNA, 24 nt, Artificial Sequence
  Synthetic
gugggagcuaagcacugagcacac

SEQ ID NO: 517517 - RNA, 18 nt, Artificial Sequence
  Synthetic
aauaacuccacugcacac

SEQ ID NO: 517518 - RNA, 19 nt, Artificial Sequence
  Synthetic
uaauaacuccacugcacac

SEQ ID NO: 517519 - RNA, 20 nt, Artificial Sequence
  Synthetic
auaauaacuccacugcacac

SEQ ID NO: 517520 - RNA, 21 nt, Artificial Sequence
  Synthetic
uauaauaacuccacugcacac

SEQ ID NO: 517521 - RNA, 22 nt, Artificial Sequence
  Synthetic
auauaauaacuccacugcacac

SEQ ID NO: 517522 - RNA, 23 nt, Artificial Sequence
  Synthetic
aauauaauaacuccacugcacac

SEQ ID NO: 517523 - RNA, 24 nt, Artificial Sequence
  Synthetic
gaauauaauaacuccacugcacac

SEQ ID NO: 517524 - RNA, 18 nt, Artificial Sequence
  Synthetic
ugugguguaugugcacac

SEQ ID NO: 517525 - RNA, 19 nt, Artificial Sequence
  Synthetic
gugugguguaugugcacac

SEQ ID NO: 517526 - RNA, 20 nt, Artificial Sequence
  Synthetic
ugugugguguaugugcacac

SEQ ID NO: 517527 - RNA, 21 nt, Artificial Sequence
  Synthetic
gugugugguguaugugcacac

SEQ ID NO: 517528 - RNA, 22 nt, Artificial Sequence
  Synthetic
ugugugugguguaugugcacac

SEQ ID NO: 517529 - RNA, 23 nt, Artificial Sequence
  Synthetic
gugugugugguguaugugcacac

SEQ ID NO: 517530 - RNA, 24 nt, Artificial Sequence
  Synthetic
ugugugugugguguaugugcacac

SEQ ID NO: 517531 - RNA, 18 nt, Artificial Sequence
  Synthetic
uccguauuuugugcacac

SEQ ID NO: 517532 - RNA, 19 nt, Artificial Sequence
  Synthetic
auccguauuuugugcacac

SEQ ID NO: 517533 - RNA, 20 nt, Artificial Sequence
  Synthetic
aauccguauuuugugcacac

SEQ ID NO: 517534 - RNA, 21 nt, Artificial Sequence
  Synthetic
uaauccguauuuugugcacac

SEQ ID NO: 517535 - RNA, 22 nt, Artificial Sequence
  Synthetic
uuaauccguauuuugugcacac

SEQ ID NO: 517536 - RNA, 23 nt, Artificial Sequence
  Synthetic
uuuaauccguauuuugugcacac

SEQ ID NO: 517537 - RNA, 24 nt, Artificial Sequence
  Synthetic
auuuaauccguauuuugugcacac

SEQ ID NO: 517538 - RNA, 18 nt, Artificial Sequence
  Synthetic
gacuaccuaacaucacac

SEQ ID NO: 517539 - RNA, 19 nt, Artificial Sequence
  Synthetic
ugacuaccuaacaucacac

SEQ ID NO: 517540 - RNA, 20 nt, Artificial Sequence
  Synthetic
cugacuaccuaacaucacac

SEQ ID NO: 517541 - RNA, 21 nt, Artificial Sequence
  Synthetic
ucugacuaccuaacaucacac

SEQ ID NO: 517542 - RNA, 22 nt, Artificial Sequence
  Synthetic
gucugacuaccuaacaucacac

SEQ ID NO: 517543 - RNA, 23 nt, Artificial Sequence
  Synthetic
agucugacuaccuaacaucacac

SEQ ID NO: 517544 - RNA, 24 nt, Artificial Sequence
  Synthetic
cagucugacuaccuaacaucacac

SEQ ID NO: 517545 - RNA, 18 nt, Artificial Sequence
  Synthetic
ggagggaugugaucacac

SEQ ID NO: 517546 - RNA, 19 nt, Artificial Sequence
  Synthetic
cggagggaugugaucacac

SEQ ID NO: 517547 - RNA, 20 nt, Artificial Sequence
  Synthetic
acggagggaugugaucacac

SEQ ID NO: 517548 - RNA, 21 nt, Artificial Sequence
  Synthetic
aacggagggaugugaucacac

SEQ ID NO: 517549 - RNA, 22 nt, Artificial Sequence
  Synthetic
uaacggagggaugugaucacac

SEQ ID NO: 517550 - RNA, 23 nt, Artificial Sequence
  Synthetic
auaacggagggaugugaucacac

SEQ ID NO: 517551 - RNA, 24 nt, Artificial Sequence
  Synthetic
aauaacggagggaugugaucacac

SEQ ID NO: 517552 - RNA, 18 nt, Artificial Sequence
  Synthetic
cauaugccuaacucacac

SEQ ID NO: 517553 - RNA, 19 nt, Artificial Sequence
  Synthetic
ccauaugccuaacucacac

SEQ ID NO: 517554 - RNA, 20 nt, Artificial Sequence
  Synthetic
cccauaugccuaacucacac

SEQ ID NO: 517555 - RNA, 21 nt, Artificial Sequence
  Synthetic
gcccauaugccuaacucacac

SEQ ID NO: 517556 - RNA, 22 nt, Artificial Sequence
  Synthetic
ugcccauaugccuaacucacac

SEQ ID NO: 517557 - RNA, 23 nt, Artificial Sequence
  Synthetic
uugcccauaugccuaacucacac

SEQ ID NO: 517558 - RNA, 24 nt, Artificial Sequence
  Synthetic
uuugcccauaugccuaacucacac

SEQ ID NO: 517559 - RNA, 18 nt, Artificial Sequence
  Synthetic
agcucggaaaccucacac

SEQ ID NO: 517560 - RNA, 19 nt, Artificial Sequence
  Synthetic
aagcucggaaaccucacac

SEQ ID NO: 517561 - RNA, 20 nt, Artificial Sequence
  Synthetic
gaagcucggaaaccucacac

SEQ ID NO: 517562 - RNA, 21 nt, Artificial Sequence
  Synthetic
agaagcucggaaaccucacac

SEQ ID NO: 517563 - RNA, 22 nt, Artificial Sequence
  Synthetic
aagaagcucggaaaccucacac

SEQ ID NO: 517564 - RNA, 23 nt, Artificial Sequence
  Synthetic
gaagaagcucggaaaccucacac

SEQ ID NO: 517565 - RNA, 24 nt, Artificial Sequence
  Synthetic
cgaagaagcucggaaaccucacac

SEQ ID NO: 517566 - RNA, 18 nt, Artificial Sequence
  Synthetic
guacaugaagucucacac

SEQ ID NO: 517567 - RNA, 19 nt, Artificial Sequence
  Synthetic
cguacaugaagucucacac

SEQ ID NO: 517568 - RNA, 20 nt, Artificial Sequence
  Synthetic
ccguacaugaagucucacac

SEQ ID NO: 517569 - RNA, 21 nt, Artificial Sequence
  Synthetic
accguacaugaagucucacac

SEQ ID NO: 517570 - RNA, 22 nt, Artificial Sequence
  Synthetic
gaccguacaugaagucucacac

SEQ ID NO: 517571 - RNA, 23 nt, Artificial Sequence
  Synthetic
ugaccguacaugaagucucacac

SEQ ID NO: 517572 - RNA, 24 nt, Artificial Sequence
  Synthetic
augaccguacaugaagucucacac

SEQ ID NO: 517573 - RNA, 18 nt, Artificial Sequence
  Synthetic
cccaagugucauucacac

SEQ ID NO: 517574 - RNA, 19 nt, Artificial Sequence
  Synthetic
acccaagugucauucacac

SEQ ID NO: 517575 - RNA, 20 nt, Artificial Sequence
  Synthetic
uacccaagugucauucacac

SEQ ID NO: 517576 - RNA, 21 nt, Artificial Sequence
  Synthetic
uuacccaagugucauucacac

SEQ ID NO: 517577 - RNA, 22 nt, Artificial Sequence
  Synthetic
uuuacccaagugucauucacac

SEQ ID NO: 517578 - RNA, 23 nt, Artificial Sequence
  Synthetic
uuuuacccaagugucauucacac

SEQ ID NO: 517579 - RNA, 24 nt, Artificial Sequence
  Synthetic
guuuuacccaagugucauucacac

SEQ ID NO: 517580 - RNA, 21 nt, Artificial Sequence
  Synthetic
auuuaugcagccaaaagacac

SEQ ID NO: 517581 - RNA, 22 nt, Artificial Sequence
  Synthetic
cauuuaugcagccaaaagacac

SEQ ID NO: 517582 - RNA, 23 nt, Artificial Sequence
  Synthetic
acauuuaugcagccaaaagacac

SEQ ID NO: 517583 - RNA, 24 nt, Artificial Sequence
  Synthetic
gacauuuaugcagccaaaagacac

SEQ ID NO: 517584 - RNA, 18 nt, Artificial Sequence
  Synthetic
aaauaugucaaaagacac

SEQ ID NO: 517585 - RNA, 19 nt, Artificial Sequence
  Synthetic
aaaauaugucaaaagacac

SEQ ID NO: 517586 - RNA, 20 nt, Artificial Sequence
  Synthetic
aaaaauaugucaaaagacac

SEQ ID NO: 517587 - RNA, 21 nt, Artificial Sequence
  Synthetic
uaaaaauaugucaaaagacac

SEQ ID NO: 517588 - RNA, 22 nt, Artificial Sequence
  Synthetic
auaaaaauaugucaaaagacac

SEQ ID NO: 517589 - RNA, 23 nt, Artificial Sequence
  Synthetic
aauaaaaauaugucaaaagacac

SEQ ID NO: 517590 - RNA, 24 nt, Artificial Sequence
  Synthetic
uaauaaaaauaugucaaaagacac

SEQ ID NO: 517591 - RNA, 18 nt, Artificial Sequence
  Synthetic
gcacugcugaaaagacac

SEQ ID NO: 517592 - RNA, 19 nt, Artificial Sequence
  Synthetic
ggcacugcugaaaagacac

SEQ ID NO: 517593 - RNA, 20 nt, Artificial Sequence
  Synthetic
gggcacugcugaaaagacac

SEQ ID NO: 517594 - RNA, 21 nt, Artificial Sequence
  Synthetic
ggggcacugcugaaaagacac

SEQ ID NO: 517595 - RNA, 22 nt, Artificial Sequence
  Synthetic
uggggcacugcugaaaagacac

SEQ ID NO: 517596 - RNA, 23 nt, Artificial Sequence
  Synthetic
guggggcacugcugaaaagacac

SEQ ID NO: 517597 - RNA, 24 nt, Artificial Sequence
  Synthetic
aguggggcacugcugaaaagacac

SEQ ID NO: 517598 - RNA, 18 nt, Artificial Sequence
  Synthetic
aaagucaauaaaagacac

SEQ ID NO: 517599 - RNA, 19 nt, Artificial Sequence
  Synthetic
caaagucaauaaaagacac

SEQ ID NO: 517600 - RNA, 20 nt, Artificial Sequence
  Synthetic
ucaaagucaauaaaagacac

SEQ ID NO: 517601 - RNA, 21 nt, Artificial Sequence
  Synthetic
aucaaagucaauaaaagacac

SEQ ID NO: 517602 - RNA, 22 nt, Artificial Sequence
  Synthetic
uaucaaagucaauaaaagacac

SEQ ID NO: 517603 - RNA, 23 nt, Artificial Sequence
  Synthetic
auaucaaagucaauaaaagacac

SEQ ID NO: 517604 - RNA, 24 nt, Artificial Sequence
  Synthetic
gauaucaaagucaauaaaagacac

SEQ ID NO: 517605 - RNA, 18 nt, Artificial Sequence
  Synthetic
ggcuuuuucagaagacac

SEQ ID NO: 517606 - RNA, 19 nt, Artificial Sequence
  Synthetic
aggcuuuuucagaagacac

SEQ ID NO: 517607 - RNA, 20 nt, Artificial Sequence
  Synthetic
aaggcuuuuucagaagacac

SEQ ID NO: 517608 - RNA, 21 nt, Artificial Sequence
  Synthetic
aaaggcuuuuucagaagacac

SEQ ID NO: 517609 - RNA, 22 nt, Artificial Sequence
  Synthetic
caaaggcuuuuucagaagacac

SEQ ID NO: 517610 - RNA, 23 nt, Artificial Sequence
  Synthetic
gcaaaggcuuuuucagaagacac

SEQ ID NO: 517611 - RNA, 24 nt, Artificial Sequence
  Synthetic
agcaaaggcuuuuucagaagacac

SEQ ID NO: 517612 - RNA, 18 nt, Artificial Sequence
  Synthetic
aaagcagagagaagacac

SEQ ID NO: 517613 - RNA, 19 nt, Artificial Sequence
  Synthetic
aaaagcagagagaagacac

SEQ ID NO: 517614 - RNA, 20 nt, Artificial Sequence
  Synthetic
gaaaagcagagagaagacac

SEQ ID NO: 517615 - RNA, 21 nt, Artificial Sequence
  Synthetic
agaaaagcagagagaagacac

SEQ ID NO: 517616 - RNA, 22 nt, Artificial Sequence
  Synthetic
aagaaaagcagagagaagacac

SEQ ID NO: 517617 - RNA, 23 nt, Artificial Sequence
  Synthetic
gaagaaaagcagagagaagacac

SEQ ID NO: 517618 - RNA, 24 nt, Artificial Sequence
  Synthetic
ugaagaaaagcagagagaagacac

SEQ ID NO: 517619 - RNA, 18 nt, Artificial Sequence
  Synthetic
uaggcagauguaagacac

SEQ ID NO: 517620 - RNA, 19 nt, Artificial Sequence
  Synthetic
guaggcagauguaagacac

SEQ ID NO: 517621 - RNA, 20 nt, Artificial Sequence
  Synthetic
uguaggcagauguaagacac

SEQ ID NO: 517622 - RNA, 21 nt, Artificial Sequence
  Synthetic
uuguaggcagauguaagacac

SEQ ID NO: 517623 - RNA, 22 nt, Artificial Sequence
  Synthetic
uuuguaggcagauguaagacac

SEQ ID NO: 517624 - RNA, 23 nt, Artificial Sequence
  Synthetic
cuuuguaggcagauguaagacac

SEQ ID NO: 517625 - RNA, 24 nt, Artificial Sequence
  Synthetic
ucuuuguaggcagauguaagacac

SEQ ID NO: 517626 - RNA, 18 nt, Artificial Sequence
  Synthetic
uaugcagcuaacagacac

SEQ ID NO: 517627 - RNA, 19 nt, Artificial Sequence
  Synthetic
uuaugcagcuaacagacac

SEQ ID NO: 517628 - RNA, 20 nt, Artificial Sequence
  Synthetic
uuuaugcagcuaacagacac

SEQ ID NO: 517629 - RNA, 21 nt, Artificial Sequence
  Synthetic
auuuaugcagcuaacagacac

SEQ ID NO: 517630 - RNA, 22 nt, Artificial Sequence
  Synthetic
cauuuaugcagcuaacagacac

SEQ ID NO: 517631 - RNA, 23 nt, Artificial Sequence
  Synthetic
acauuuaugcagcuaacagacac

SEQ ID NO: 517632 - RNA, 24 nt, Artificial Sequence
  Synthetic
gacauuuaugcagcuaacagacac

SEQ ID NO: 517633 - RNA, 18 nt, Artificial Sequence
  Synthetic
uuaaaaauuuucagacac

SEQ ID NO: 517634 - RNA, 19 nt, Artificial Sequence
  Synthetic
guuaaaaauuuucagacac

SEQ ID NO: 517635 - RNA, 20 nt, Artificial Sequence
  Synthetic
gguuaaaaauuuucagacac

SEQ ID NO: 517636 - RNA, 21 nt, Artificial Sequence
  Synthetic
agguuaaaaauuuucagacac

SEQ ID NO: 517637 - RNA, 22 nt, Artificial Sequence
  Synthetic
uagguuaaaaauuuucagacac

SEQ ID NO: 517638 - RNA, 23 nt, Artificial Sequence
  Synthetic
auagguuaaaaauuuucagacac

SEQ ID NO: 517639 - RNA, 24 nt, Artificial Sequence
  Synthetic
aauagguuaaaaauuuucagacac

SEQ ID NO: 517640 - RNA, 18 nt, Artificial Sequence
  Synthetic
cuuugccagcagagacac

SEQ ID NO: 517641 - RNA, 19 nt, Artificial Sequence
  Synthetic
gcuuugccagcagagacac

SEQ ID NO: 517642 - RNA, 20 nt, Artificial Sequence
  Synthetic
ugcuuugccagcagagacac

SEQ ID NO: 517643 - RNA, 21 nt, Artificial Sequence
  Synthetic
gugcuuugccagcagagacac

SEQ ID NO: 517644 - RNA, 22 nt, Artificial Sequence
  Synthetic
agugcuuugccagcagagacac

SEQ ID NO: 517645 - RNA, 23 nt, Artificial Sequence
  Synthetic
uagugcuuugccagcagagacac

SEQ ID NO: 517646 - RNA, 24 nt, Artificial Sequence
  Synthetic
cuagugcuuugccagcagagacac

SEQ ID NO: 517647 - RNA, 18 nt, Artificial Sequence
  Synthetic
ggaagccaaaggagacac

SEQ ID NO: 517648 - RNA, 19 nt, Artificial Sequence
  Synthetic
gggaagccaaaggagacac

SEQ ID NO: 517649 - RNA, 20 nt, Artificial Sequence
  Synthetic
ggggaagccaaaggagacac

SEQ ID NO: 517650 - RNA, 21 nt, Artificial Sequence
  Synthetic
uggggaagccaaaggagacac

SEQ ID NO: 517651 - RNA, 22 nt, Artificial Sequence
  Synthetic
guggggaagccaaaggagacac

SEQ ID NO: 517652 - RNA, 23 nt, Artificial Sequence
  Synthetic
uguggggaagccaaaggagacac

SEQ ID NO: 517653 - RNA, 24 nt, Artificial Sequence
  Synthetic
cuguggggaagccaaaggagacac

SEQ ID NO: 517654 - RNA, 18 nt, Artificial Sequence
  Synthetic
uuuucaugaaggagacac

SEQ ID NO: 517655 - RNA, 19 nt, Artificial Sequence
  Synthetic
guuuucaugaaggagacac

SEQ ID NO: 517656 - RNA, 20 nt, Artificial Sequence
  Synthetic
aguuuucaugaaggagacac

SEQ ID NO: 517657 - RNA, 21 nt, Artificial Sequence
  Synthetic
aaguuuucaugaaggagacac

SEQ ID NO: 517658 - RNA, 22 nt, Artificial Sequence
  Synthetic
uaaguuuucaugaaggagacac

SEQ ID NO: 517659 - RNA, 23 nt, Artificial Sequence
  Synthetic
uuaaguuuucaugaaggagacac

SEQ ID NO: 517660 - RNA, 24 nt, Artificial Sequence
  Synthetic
uuuaaguuuucaugaaggagacac

SEQ ID NO: 517661 - RNA, 18 nt, Artificial Sequence
  Synthetic
acauuucaaaauagacac

SEQ ID NO: 517662 - RNA, 19 nt, Artificial Sequence
  Synthetic
gacauuucaaaauagacac

SEQ ID NO: 517663 - RNA, 20 nt, Artificial Sequence
  Synthetic
ggacauuucaaaauagacac

SEQ ID NO: 517664 - RNA, 21 nt, Artificial Sequence
  Synthetic
gggacauuucaaaauagacac

SEQ ID NO: 517665 - RNA, 22 nt, Artificial Sequence
  Synthetic
agggacauuucaaaauagacac

SEQ ID NO: 517666 - RNA, 23 nt, Artificial Sequence
  Synthetic
uagggacauuucaaaauagacac

SEQ ID NO: 517667 - RNA, 24 nt, Artificial Sequence
  Synthetic
auagggacauuucaaaauagacac

SEQ ID NO: 517668 - RNA, 18 nt, Artificial Sequence
  Synthetic
gacaggaacaauagacac

SEQ ID NO: 517669 - RNA, 19 nt, Artificial Sequence
  Synthetic
agacaggaacaauagacac

SEQ ID NO: 517670 - RNA, 20 nt, Artificial Sequence
  Synthetic
aagacaggaacaauagacac

SEQ ID NO: 517671 - RNA, 21 nt, Artificial Sequence
  Synthetic
aaagacaggaacaauagacac

SEQ ID NO: 517672 - RNA, 22 nt, Artificial Sequence
  Synthetic
uaaagacaggaacaauagacac

SEQ ID NO: 517673 - RNA, 23 nt, Artificial Sequence
  Synthetic
auaaagacaggaacaauagacac

SEQ ID NO: 517674 - RNA, 24 nt, Artificial Sequence
  Synthetic
cauaaagacaggaacaauagacac

SEQ ID NO: 517675 - RNA, 18 nt, Artificial Sequence
  Synthetic
guguggaauaauagacac

SEQ ID NO: 517676 - RNA, 19 nt, Artificial Sequence
  Synthetic
aguguggaauaauagacac

SEQ ID NO: 517677 - RNA, 20 nt, Artificial Sequence
  Synthetic
gaguguggaauaauagacac

SEQ ID NO: 517678 - RNA, 21 nt, Artificial Sequence
  Synthetic
agaguguggaauaauagacac

SEQ ID NO: 517679 - RNA, 22 nt, Artificial Sequence
  Synthetic
cagaguguggaauaauagacac

SEQ ID NO: 517680 - RNA, 23 nt, Artificial Sequence
  Synthetic
acagaguguggaauaauagacac

SEQ ID NO: 517681 - RNA, 24 nt, Artificial Sequence
  Synthetic
cacagaguguggaauaauagacac

SEQ ID NO: 517682 - RNA, 18 nt, Artificial Sequence
  Synthetic
ugcuacacaacuagacac

SEQ ID NO: 517683 - RNA, 19 nt, Artificial Sequence
  Synthetic
augcuacacaacuagacac

SEQ ID NO: 517684 - RNA, 20 nt, Artificial Sequence
  Synthetic
uaugcuacacaacuagacac

SEQ ID NO: 517685 - RNA, 21 nt, Artificial Sequence
  Synthetic
uuaugcuacacaacuagacac

SEQ ID NO: 517686 - RNA, 22 nt, Artificial Sequence
  Synthetic
auuaugcuacacaacuagacac

SEQ ID NO: 517687 - RNA, 23 nt, Artificial Sequence
  Synthetic
gauuaugcuacacaacuagacac

SEQ ID NO: 517688 - RNA, 24 nt, Artificial Sequence
  Synthetic
ugauuaugcuacacaacuagacac

SEQ ID NO: 517689 - RNA, 18 nt, Artificial Sequence
  Synthetic
aacauguugaguagacac

SEQ ID NO: 517690 - RNA, 19 nt, Artificial Sequence
  Synthetic
gaacauguugaguagacac

SEQ ID NO: 517691 - RNA, 20 nt, Artificial Sequence
  Synthetic
ugaacauguugaguagacac

SEQ ID NO: 517692 - RNA, 21 nt, Artificial Sequence
  Synthetic
cugaacauguugaguagacac

SEQ ID NO: 517693 - RNA, 22 nt, Artificial Sequence
  Synthetic
acugaacauguugaguagacac

SEQ ID NO: 517694 - RNA, 23 nt, Artificial Sequence
  Synthetic
gacugaacauguugaguagacac

SEQ ID NO: 517695 - RNA, 24 nt, Artificial Sequence
  Synthetic
agacugaacauguugaguagacac

SEQ ID NO: 517696 - RNA, 18 nt, Artificial Sequence
  Synthetic
cagcauuuacaaggacac

SEQ ID NO: 517697 - RNA, 19 nt, Artificial Sequence
  Synthetic
ucagcauuuacaaggacac

SEQ ID NO: 517698 - RNA, 20 nt, Artificial Sequence
  Synthetic
aucagcauuuacaaggacac

SEQ ID NO: 517699 - RNA, 21 nt, Artificial Sequence
  Synthetic
aaucagcauuuacaaggacac

SEQ ID NO: 517700 - RNA, 22 nt, Artificial Sequence
  Synthetic
caaucagcauuuacaaggacac

SEQ ID NO: 517701 - RNA, 23 nt, Artificial Sequence
  Synthetic
ucaaucagcauuuacaaggacac

SEQ ID NO: 517702 - RNA, 24 nt, Artificial Sequence
  Synthetic
aucaaucagcauuuacaaggacac

SEQ ID NO: 517703 - RNA, 18 nt, Artificial Sequence
  Synthetic
uacuaugcaacaggacac

SEQ ID NO: 517704 - RNA, 19 nt, Artificial Sequence
  Synthetic
auacuaugcaacaggacac

SEQ ID NO: 517705 - RNA, 20 nt, Artificial Sequence
  Synthetic
cauacuaugcaacaggacac

SEQ ID NO: 517706 - RNA, 21 nt, Artificial Sequence
  Synthetic
ccauacuaugcaacaggacac

SEQ ID NO: 517707 - RNA, 22 nt, Artificial Sequence
  Synthetic
uccauacuaugcaacaggacac

SEQ ID NO: 517708 - RNA, 23 nt, Artificial Sequence
  Synthetic
cuccauacuaugcaacaggacac

SEQ ID NO: 517709 - RNA, 24 nt, Artificial Sequence
  Synthetic
ucuccauacuaugcaacaggacac

SEQ ID NO: 517710 - RNA, 18 nt, Artificial Sequence
  Synthetic
aaauaacuuucaggacac

SEQ ID NO: 517711 - RNA, 19 nt, Artificial Sequence
  Synthetic
caaauaacuuucaggacac

SEQ ID NO: 517712 - RNA, 20 nt, Artificial Sequence
  Synthetic
ucaaauaacuuucaggacac

SEQ ID NO: 517713 - RNA, 21 nt, Artificial Sequence
  Synthetic
uucaaauaacuuucaggacac

SEQ ID NO: 517714 - RNA, 22 nt, Artificial Sequence
  Synthetic
auucaaauaacuuucaggacac

SEQ ID NO: 517715 - RNA, 23 nt, Artificial Sequence
  Synthetic
uauucaaauaacuuucaggacac

SEQ ID NO: 517716 - RNA, 24 nt, Artificial Sequence
  Synthetic
uuauucaaauaacuuucaggacac

SEQ ID NO: 517717 - RNA, 18 nt, Artificial Sequence
  Synthetic
gguagggcuggaggacac

SEQ ID NO: 517718 - RNA, 19 nt, Artificial Sequence
  Synthetic
ggguagggcuggaggacac

SEQ ID NO: 517719 - RNA, 20 nt, Artificial Sequence
  Synthetic
aggguagggcuggaggacac

SEQ ID NO: 517720 - RNA, 21 nt, Artificial Sequence
  Synthetic
aaggguagggcuggaggacac

SEQ ID NO: 517721 - RNA, 22 nt, Artificial Sequence
  Synthetic
gaaggguagggcuggaggacac

SEQ ID NO: 517722 - RNA, 23 nt, Artificial Sequence
  Synthetic
ugaaggguagggcuggaggacac

SEQ ID NO: 517723 - RNA, 24 nt, Artificial Sequence
  Synthetic
augaaggguagggcuggaggacac

SEQ ID NO: 517724 - RNA, 18 nt, Artificial Sequence
  Synthetic
cugaaaacacagggacac

SEQ ID NO: 517725 - RNA, 19 nt, Artificial Sequence
  Synthetic
ucugaaaacacagggacac

SEQ ID NO: 517726 - RNA, 20 nt, Artificial Sequence
  Synthetic
cucugaaaacacagggacac

SEQ ID NO: 517727 - RNA, 21 nt, Artificial Sequence
  Synthetic
ccucugaaaacacagggacac

SEQ ID NO: 517728 - RNA, 22 nt, Artificial Sequence
  Synthetic
accucugaaaacacagggacac

SEQ ID NO: 517729 - RNA, 23 nt, Artificial Sequence
  Synthetic
uaccucugaaaacacagggacac

SEQ ID NO: 517730 - RNA, 24 nt, Artificial Sequence
  Synthetic
uuaccucugaaaacacagggacac

SEQ ID NO: 517731 - RNA, 18 nt, Artificial Sequence
  Synthetic
ggucagaagcagggacac

SEQ ID NO: 517732 - RNA, 19 nt, Artificial Sequence
  Synthetic
uggucagaagcagggacac

SEQ ID NO: 517733 - RNA, 20 nt, Artificial Sequence
  Synthetic
auggucagaagcagggacac

SEQ ID NO: 517734 - RNA, 21 nt, Artificial Sequence
  Synthetic
uauggucagaagcagggacac

SEQ ID NO: 517735 - RNA, 22 nt, Artificial Sequence
  Synthetic
auauggucagaagcagggacac

SEQ ID NO: 517736 - RNA, 23 nt, Artificial Sequence
  Synthetic
cauauggucagaagcagggacac

SEQ ID NO: 517737 - RNA, 24 nt, Artificial Sequence
  Synthetic
acauauggucagaagcagggacac

SEQ ID NO: 517738 - RNA, 18 nt, Artificial Sequence
  Synthetic
aaugccuucaggggacac

SEQ ID NO: 517739 - RNA, 19 nt, Artificial Sequence
  Synthetic
aaaugccuucaggggacac

SEQ ID NO: 517740 - RNA, 20 nt, Artificial Sequence
  Synthetic
caaaugccuucaggggacac

SEQ ID NO: 517741 - RNA, 21 nt, Artificial Sequence
  Synthetic
ucaaaugccuucaggggacac

SEQ ID NO: 517742 - RNA, 22 nt, Artificial Sequence
  Synthetic
aucaaaugccuucaggggacac

SEQ ID NO: 517743 - RNA, 23 nt, Artificial Sequence
  Synthetic
aaucaaaugccuucaggggacac

SEQ ID NO: 517744 - RNA, 24 nt, Artificial Sequence
  Synthetic
aaaucaaaugccuucaggggacac

SEQ ID NO: 517745 - RNA, 18 nt, Artificial Sequence
  Synthetic
uucacugccuggggacac

SEQ ID NO: 517746 - RNA, 19 nt, Artificial Sequence
  Synthetic
guucacugccuggggacac

SEQ ID NO: 517747 - RNA, 20 nt, Artificial Sequence
  Synthetic
aguucacugccuggggacac

SEQ ID NO: 517748 - RNA, 21 nt, Artificial Sequence
  Synthetic
uaguucacugccuggggacac

SEQ ID NO: 517749 - RNA, 22 nt, Artificial Sequence
  Synthetic
auaguucacugccuggggacac

SEQ ID NO: 517750 - RNA, 23 nt, Artificial Sequence
  Synthetic
aauaguucacugccuggggacac

SEQ ID NO: 517751 - RNA, 24 nt, Artificial Sequence
  Synthetic
gaauaguucacugccuggggacac

SEQ ID NO: 517752 - RNA, 18 nt, Artificial Sequence
  Synthetic
ucuugaaguuggggacac

SEQ ID NO: 517753 - RNA, 19 nt, Artificial Sequence
  Synthetic
uucuugaaguuggggacac

SEQ ID NO: 517754 - RNA, 20 nt, Artificial Sequence
  Synthetic
auucuugaaguuggggacac

SEQ ID NO: 517755 - RNA, 21 nt, Artificial Sequence
  Synthetic
aauucuugaaguuggggacac

SEQ ID NO: 517756 - RNA, 22 nt, Artificial Sequence
  Synthetic
gaauucuugaaguuggggacac

SEQ ID NO: 517757 - RNA, 23 nt, Artificial Sequence
  Synthetic
ggaauucuugaaguuggggacac

SEQ ID NO: 517758 - RNA, 24 nt, Artificial Sequence
  Synthetic
aggaauucuugaaguuggggacac

SEQ ID NO: 517759 - RNA, 18 nt, Artificial Sequence
  Synthetic
uguucauuccugggacac

SEQ ID NO: 517760 - RNA, 19 nt, Artificial Sequence
  Synthetic
cuguucauuccugggacac

SEQ ID NO: 517761 - RNA, 20 nt, Artificial Sequence
  Synthetic
acuguucauuccugggacac

SEQ ID NO: 517762 - RNA, 21 nt, Artificial Sequence
  Synthetic
cacuguucauuccugggacac

SEQ ID NO: 517763 - RNA, 22 nt, Artificial Sequence
  Synthetic
ccacuguucauuccugggacac

SEQ ID NO: 517764 - RNA, 23 nt, Artificial Sequence
  Synthetic
uccacuguucauuccugggacac

SEQ ID NO: 517765 - RNA, 24 nt, Artificial Sequence
  Synthetic
auccacuguucauuccugggacac

SEQ ID NO: 517766 - RNA, 18 nt, Artificial Sequence
  Synthetic
agaggcagucugggacac

SEQ ID NO: 517767 - RNA, 19 nt, Artificial Sequence
  Synthetic
gagaggcagucugggacac

SEQ ID NO: 517768 - RNA, 20 nt, Artificial Sequence
  Synthetic
ugagaggcagucugggacac

SEQ ID NO: 517769 - RNA, 21 nt, Artificial Sequence
  Synthetic
cugagaggcagucugggacac

SEQ ID NO: 517770 - RNA, 22 nt, Artificial Sequence
  Synthetic
ccugagaggcagucugggacac

SEQ ID NO: 517771 - RNA, 23 nt, Artificial Sequence
  Synthetic
accugagaggcagucugggacac

SEQ ID NO: 517772 - RNA, 24 nt, Artificial Sequence
  Synthetic
aaccugagaggcagucugggacac

SEQ ID NO: 517773 - RNA, 24 nt, Artificial Sequence
  Synthetic
ggaacaaugagaacacauggacac

SEQ ID NO: 517774 - RNA, 18 nt, Artificial Sequence
  Synthetic
gugagaacacauggacac

SEQ ID NO: 517775 - RNA, 19 nt, Artificial Sequence
  Synthetic
agugagaacacauggacac

SEQ ID NO: 517776 - RNA, 20 nt, Artificial Sequence
  Synthetic
cagugagaacacauggacac

SEQ ID NO: 517777 - RNA, 21 nt, Artificial Sequence
  Synthetic
acagugagaacacauggacac

SEQ ID NO: 517778 - RNA, 22 nt, Artificial Sequence
  Synthetic
aacagugagaacacauggacac

SEQ ID NO: 517779 - RNA, 23 nt, Artificial Sequence
  Synthetic
gaacagugagaacacauggacac

SEQ ID NO: 517780 - RNA, 24 nt, Artificial Sequence
  Synthetic
ggaacagugagaacacauggacac

SEQ ID NO: 517781 - RNA, 18 nt, Artificial Sequence
  Synthetic
augaaaacauauggacac

SEQ ID NO: 517782 - RNA, 19 nt, Artificial Sequence
  Synthetic
aaugaaaacauauggacac

SEQ ID NO: 517783 - RNA, 20 nt, Artificial Sequence
  Synthetic
caaugaaaacauauggacac

SEQ ID NO: 517784 - RNA, 21 nt, Artificial Sequence
  Synthetic
acaaugaaaacauauggacac

SEQ ID NO: 517785 - RNA, 22 nt, Artificial Sequence
  Synthetic
aacaaugaaaacauauggacac

SEQ ID NO: 517786 - RNA, 23 nt, Artificial Sequence
  Synthetic
aaacaaugaaaacauauggacac

SEQ ID NO: 517787 - RNA, 24 nt, Artificial Sequence
  Synthetic
uaaacaaugaaaacauauggacac

SEQ ID NO: 517788 - RNA, 18 nt, Artificial Sequence
  Synthetic
ugccacugagcuggacac

SEQ ID NO: 517789 - RNA, 19 nt, Artificial Sequence
  Synthetic
augccacugagcuggacac

SEQ ID NO: 517790 - RNA, 20 nt, Artificial Sequence
  Synthetic
aaugccacugagcuggacac

SEQ ID NO: 517791 - RNA, 21 nt, Artificial Sequence
  Synthetic
aaaugccacugagcuggacac

SEQ ID NO: 517792 - RNA, 22 nt, Artificial Sequence
  Synthetic
uaaaugccacugagcuggacac

SEQ ID NO: 517793 - RNA, 23 nt, Artificial Sequence
  Synthetic
auaaaugccacugagcuggacac

SEQ ID NO: 517794 - RNA, 24 nt, Artificial Sequence
  Synthetic
aauaaaugccacugagcuggacac

SEQ ID NO: 517795 - RNA, 18 nt, Artificial Sequence
  Synthetic
agaaaacaauguggacac

SEQ ID NO: 517796 - RNA, 19 nt, Artificial Sequence
  Synthetic
aagaaaacaauguggacac

SEQ ID NO: 517797 - RNA, 20 nt, Artificial Sequence
  Synthetic
aaagaaaacaauguggacac

SEQ ID NO: 517798 - RNA, 21 nt, Artificial Sequence
  Synthetic
gaaagaaaacaauguggacac

SEQ ID NO: 517799 - RNA, 22 nt, Artificial Sequence
  Synthetic
agaaagaaaacaauguggacac

SEQ ID NO: 517800 - RNA, 23 nt, Artificial Sequence
  Synthetic
aagaaagaaaacaauguggacac

SEQ ID NO: 517801 - RNA, 24 nt, Artificial Sequence
  Synthetic
aaagaaagaaaacaauguggacac

SEQ ID NO: 517802 - RNA, 18 nt, Artificial Sequence
  Synthetic
acucuauaccaaugacac

SEQ ID NO: 517803 - RNA, 19 nt, Artificial Sequence
  Synthetic
aacucuauaccaaugacac

SEQ ID NO: 517804 - RNA, 20 nt, Artificial Sequence
  Synthetic
aaacucuauaccaaugacac

SEQ ID NO: 517805 - RNA, 21 nt, Artificial Sequence
  Synthetic
gaaacucuauaccaaugacac

SEQ ID NO: 517806 - RNA, 22 nt, Artificial Sequence
  Synthetic
ugaaacucuauaccaaugacac

SEQ ID NO: 517807 - RNA, 23 nt, Artificial Sequence
  Synthetic
cugaaacucuauaccaaugacac

SEQ ID NO: 517808 - RNA, 24 nt, Artificial Sequence
  Synthetic
acugaaacucuauaccaaugacac

SEQ ID NO: 517809 - RNA, 18 nt, Artificial Sequence
  Synthetic
gggucccucccaugacac

SEQ ID NO: 517810 - RNA, 19 nt, Artificial Sequence
  Synthetic
ugggucccucccaugacac

SEQ ID NO: 517811 - RNA, 20 nt, Artificial Sequence
  Synthetic
cugggucccucccaugacac

SEQ ID NO: 517812 - RNA, 21 nt, Artificial Sequence
  Synthetic
acugggucccucccaugacac

SEQ ID NO: 517813 - RNA, 22 nt, Artificial Sequence
  Synthetic
cacugggucccucccaugacac

SEQ ID NO: 517814 - RNA, 23 nt, Artificial Sequence
  Synthetic
ucacugggucccucccaugacac

SEQ ID NO: 517815 - RNA, 24 nt, Artificial Sequence
  Synthetic
cucacugggucccucccaugacac

SEQ ID NO: 517816 - RNA, 18 nt, Artificial Sequence
  Synthetic
uauuuaacuucaugacac

SEQ ID NO: 517817 - RNA, 19 nt, Artificial Sequence
  Synthetic
uuauuuaacuucaugacac

SEQ ID NO: 517818 - RNA, 20 nt, Artificial Sequence
  Synthetic
guuauuuaacuucaugacac

SEQ ID NO: 517819 - RNA, 21 nt, Artificial Sequence
  Synthetic
uguuauuuaacuucaugacac

SEQ ID NO: 517820 - RNA, 22 nt, Artificial Sequence
  Synthetic
auguuauuuaacuucaugacac

SEQ ID NO: 517821 - RNA, 23 nt, Artificial Sequence
  Synthetic
cauguuauuuaacuucaugacac

SEQ ID NO: 517822 - RNA, 24 nt, Artificial Sequence
  Synthetic
acauguuauuuaacuucaugacac

SEQ ID NO: 517823 - RNA, 18 nt, Artificial Sequence
  Synthetic
acguuggcuuccugacac

SEQ ID NO: 517824 - RNA, 19 nt, Artificial Sequence
  Synthetic
cacguuggcuuccugacac

SEQ ID NO: 517825 - RNA, 20 nt, Artificial Sequence
  Synthetic
ccacguuggcuuccugacac

SEQ ID NO: 517826 - RNA, 21 nt, Artificial Sequence
  Synthetic
gccacguuggcuuccugacac

SEQ ID NO: 517827 - RNA, 22 nt, Artificial Sequence
  Synthetic
ugccacguuggcuuccugacac

SEQ ID NO: 517828 - RNA, 23 nt, Artificial Sequence
  Synthetic
cugccacguuggcuuccugacac

SEQ ID NO: 517829 - RNA, 24 nt, Artificial Sequence
  Synthetic
ucugccacguuggcuuccugacac

SEQ ID NO: 517830 - RNA, 18 nt, Artificial Sequence
  Synthetic
cugugggacaagugacac

SEQ ID NO: 517831 - RNA, 19 nt, Artificial Sequence
  Synthetic
acugugggacaagugacac

SEQ ID NO: 517832 - RNA, 20 nt, Artificial Sequence
  Synthetic
uacugugggacaagugacac

SEQ ID NO: 517833 - RNA, 21 nt, Artificial Sequence
  Synthetic
auacugugggacaagugacac

SEQ ID NO: 517834 - RNA, 22 nt, Artificial Sequence
  Synthetic
cauacugugggacaagugacac

SEQ ID NO: 517835 - RNA, 23 nt, Artificial Sequence
  Synthetic
ucauacugugggacaagugacac

SEQ ID NO: 517836 - RNA, 24 nt, Artificial Sequence
  Synthetic
aucauacugugggacaagugacac

SEQ ID NO: 517837 - RNA, 21 nt, Artificial Sequence
  Synthetic
accuggucucucccuugacac

SEQ ID NO: 517838 - RNA, 22 nt, Artificial Sequence
  Synthetic
caccuggucucucccuugacac

SEQ ID NO: 517839 - RNA, 23 nt, Artificial Sequence
  Synthetic
ccaccuggucucucccuugacac

SEQ ID NO: 517840 - RNA, 24 nt, Artificial Sequence
  Synthetic
uccaccuggucucucccuugacac

SEQ ID NO: 517841 - RNA, 18 nt, Artificial Sequence
  Synthetic
gaaaaucucucuugacac

SEQ ID NO: 517842 - RNA, 19 nt, Artificial Sequence
  Synthetic
ggaaaaucucucuugacac

SEQ ID NO: 517843 - RNA, 20 nt, Artificial Sequence
  Synthetic
gggaaaaucucucuugacac

SEQ ID NO: 517844 - RNA, 21 nt, Artificial Sequence
  Synthetic
ugggaaaaucucucuugacac

SEQ ID NO: 517845 - RNA, 22 nt, Artificial Sequence
  Synthetic
cugggaaaaucucucuugacac

SEQ ID NO: 517846 - RNA, 23 nt, Artificial Sequence
  Synthetic
ccugggaaaaucucucuugacac

SEQ ID NO: 517847 - RNA, 24 nt, Artificial Sequence
  Synthetic
gccugggaaaaucucucuugacac

SEQ ID NO: 517848 - RNA, 18 nt, Artificial Sequence
  Synthetic
gcccagccaaguugacac

SEQ ID NO: 517849 - RNA, 19 nt, Artificial Sequence
  Synthetic
ggcccagccaaguugacac

SEQ ID NO: 517850 - RNA, 20 nt, Artificial Sequence
  Synthetic
cggcccagccaaguugacac

SEQ ID NO: 517851 - RNA, 21 nt, Artificial Sequence
  Synthetic
gcggcccagccaaguugacac

SEQ ID NO: 517852 - RNA, 22 nt, Artificial Sequence
  Synthetic
ugcggcccagccaaguugacac

SEQ ID NO: 517853 - RNA, 23 nt, Artificial Sequence
  Synthetic
cugcggcccagccaaguugacac

SEQ ID NO: 517854 - RNA, 24 nt, Artificial Sequence
  Synthetic
ccugcggcccagccaaguugacac

SEQ ID NO: 517855 - RNA, 18 nt, Artificial Sequence
  Synthetic
auuuuuaucaguugacac

SEQ ID NO: 517856 - RNA, 19 nt, Artificial Sequence
  Synthetic
uauuuuuaucaguugacac

SEQ ID NO: 517857 - RNA, 20 nt, Artificial Sequence
  Synthetic
cuauuuuuaucaguugacac

SEQ ID NO: 517858 - RNA, 21 nt, Artificial Sequence
  Synthetic
ucuauuuuuaucaguugacac

SEQ ID NO: 517859 - RNA, 22 nt, Artificial Sequence
  Synthetic
aucuauuuuuaucaguugacac

SEQ ID NO: 517860 - RNA, 23 nt, Artificial Sequence
  Synthetic
aaucuauuuuuaucaguugacac

SEQ ID NO: 517861 - RNA, 24 nt, Artificial Sequence
  Synthetic
aaaucuauuuuuaucaguugacac

SEQ ID NO: 517862 - RNA, 18 nt, Artificial Sequence
  Synthetic
aacugaugauuuugacac

SEQ ID NO: 517863 - RNA, 19 nt, Artificial Sequence
  Synthetic
caacugaugauuuugacac

SEQ ID NO: 517864 - RNA, 20 nt, Artificial Sequence
  Synthetic
ucaacugaugauuuugacac

SEQ ID NO: 517865 - RNA, 21 nt, Artificial Sequence
  Synthetic
cucaacugaugauuuugacac

SEQ ID NO: 517866 - RNA, 22 nt, Artificial Sequence
  Synthetic
ccucaacugaugauuuugacac

SEQ ID NO: 517867 - RNA, 23 nt, Artificial Sequence
  Synthetic
gccucaacugaugauuuugacac

SEQ ID NO: 517868 - RNA, 24 nt, Artificial Sequence
  Synthetic
agccucaacugaugauuuugacac

SEQ ID NO: 517869 - RNA, 18 nt, Artificial Sequence
  Synthetic
cuuaaaaaaaaaauacac

SEQ ID NO: 517870 - RNA, 19 nt, Artificial Sequence
  Synthetic
ucuuaaaaaaaaaauacac

SEQ ID NO: 517871 - RNA, 20 nt, Artificial Sequence
  Synthetic
aucuuaaaaaaaaaauacac

SEQ ID NO: 517872 - RNA, 21 nt, Artificial Sequence
  Synthetic
gaucuuaaaaaaaaaauacac

SEQ ID NO: 517873 - RNA, 22 nt, Artificial Sequence
  Synthetic
ggaucuuaaaaaaaaaauacac

SEQ ID NO: 517874 - RNA, 23 nt, Artificial Sequence
  Synthetic
aggaucuuaaaaaaaaaauacac

SEQ ID NO: 517875 - RNA, 24 nt, Artificial Sequence
  Synthetic
aaggaucuuaaaaaaaaaauacac

SEQ ID NO: 517876 - RNA, 18 nt, Artificial Sequence
  Synthetic
cuucaauuaaaaauacac

SEQ ID NO: 517877 - RNA, 19 nt, Artificial Sequence
  Synthetic
ucuucaauuaaaaauacac

SEQ ID NO: 517878 - RNA, 20 nt, Artificial Sequence
  Synthetic
gucuucaauuaaaaauacac

SEQ ID NO: 517879 - RNA, 21 nt, Artificial Sequence
  Synthetic
ugucuucaauuaaaaauacac

SEQ ID NO: 517880 - RNA, 22 nt, Artificial Sequence
  Synthetic
uugucuucaauuaaaaauacac

SEQ ID NO: 517881 - RNA, 23 nt, Artificial Sequence
  Synthetic
guugucuucaauuaaaaauacac

SEQ ID NO: 517882 - RNA, 24 nt, Artificial Sequence
  Synthetic
gguugucuucaauuaaaaauacac

SEQ ID NO: 517883 - RNA, 18 nt, Artificial Sequence
  Synthetic
ucaguauucaaaauacac

SEQ ID NO: 517884 - RNA, 19 nt, Artificial Sequence
  Synthetic
gucaguauucaaaauacac

SEQ ID NO: 517885 - RNA, 20 nt, Artificial Sequence
  Synthetic
ggucaguauucaaaauacac

SEQ ID NO: 517886 - RNA, 21 nt, Artificial Sequence
  Synthetic
gggucaguauucaaaauacac

SEQ ID NO: 517887 - RNA, 22 nt, Artificial Sequence
  Synthetic
ggggucaguauucaaaauacac

SEQ ID NO: 517888 - RNA, 23 nt, Artificial Sequence
  Synthetic
aggggucaguauucaaaauacac

SEQ ID NO: 517889 - RNA, 24 nt, Artificial Sequence
  Synthetic
aaggggucaguauucaaaauacac

SEQ ID NO: 517890 - RNA, 18 nt, Artificial Sequence
  Synthetic
ccugaaucuaaaauacac

SEQ ID NO: 517891 - RNA, 19 nt, Artificial Sequence
  Synthetic
uccugaaucuaaaauacac

SEQ ID NO: 517892 - RNA, 20 nt, Artificial Sequence
  Synthetic
uuccugaaucuaaaauacac

SEQ ID NO: 517893 - RNA, 21 nt, Artificial Sequence
  Synthetic
auuccugaaucuaaaauacac

SEQ ID NO: 517894 - RNA, 22 nt, Artificial Sequence
  Synthetic
uauuccugaaucuaaaauacac

SEQ ID NO: 517895 - RNA, 23 nt, Artificial Sequence
  Synthetic
guauuccugaaucuaaaauacac

SEQ ID NO: 517896 - RNA, 24 nt, Artificial Sequence
  Synthetic
uguauuccugaaucuaaaauacac

SEQ ID NO: 517897 - RNA, 18 nt, Artificial Sequence
  Synthetic
aagaucaaauaaauacac

SEQ ID NO: 517898 - RNA, 19 nt, Artificial Sequence
  Synthetic
caagaucaaauaaauacac

SEQ ID NO: 517899 - RNA, 20 nt, Artificial Sequence
  Synthetic
ucaagaucaaauaaauacac

SEQ ID NO: 517900 - RNA, 21 nt, Artificial Sequence
  Synthetic
uucaagaucaaauaaauacac

SEQ ID NO: 517901 - RNA, 22 nt, Artificial Sequence
  Synthetic
auucaagaucaaauaaauacac

SEQ ID NO: 517902 - RNA, 23 nt, Artificial Sequence
  Synthetic
uauucaagaucaaauaaauacac

SEQ ID NO: 517903 - RNA, 24 nt, Artificial Sequence
  Synthetic
auauucaagaucaaauaaauacac

SEQ ID NO: 517904 - RNA, 18 nt, Artificial Sequence
  Synthetic
auaauaugcuaaauacac

SEQ ID NO: 517905 - RNA, 19 nt, Artificial Sequence
  Synthetic
cauaauaugcuaaauacac

SEQ ID NO: 517906 - RNA, 20 nt, Artificial Sequence
  Synthetic
ucauaauaugcuaaauacac

SEQ ID NO: 517907 - RNA, 21 nt, Artificial Sequence
  Synthetic
uucauaauaugcuaaauacac

SEQ ID NO: 517908 - RNA, 22 nt, Artificial Sequence
  Synthetic
auucauaauaugcuaaauacac

SEQ ID NO: 517909 - RNA, 23 nt, Artificial Sequence
  Synthetic
uauucauaauaugcuaaauacac

SEQ ID NO: 517910 - RNA, 24 nt, Artificial Sequence
  Synthetic
auauucauaauaugcuaaauacac

SEQ ID NO: 517911 - RNA, 18 nt, Artificial Sequence
  Synthetic
acucauuucauaauacac

SEQ ID NO: 517912 - RNA, 19 nt, Artificial Sequence
  Synthetic
aacucauuucauaauacac

SEQ ID NO: 517913 - RNA, 20 nt, Artificial Sequence
  Synthetic
aaacucauuucauaauacac

SEQ ID NO: 517914 - RNA, 21 nt, Artificial Sequence
  Synthetic
aaaacucauuucauaauacac

SEQ ID NO: 517915 - RNA, 22 nt, Artificial Sequence
  Synthetic
caaaacucauuucauaauacac

SEQ ID NO: 517916 - RNA, 23 nt, Artificial Sequence
  Synthetic
ucaaaacucauuucauaauacac

SEQ ID NO: 517917 - RNA, 24 nt, Artificial Sequence
  Synthetic
aucaaaacucauuucauaauacac

SEQ ID NO: 517918 - RNA, 18 nt, Artificial Sequence
  Synthetic
guuacugaaaacauacac

SEQ ID NO: 517919 - RNA, 19 nt, Artificial Sequence
  Synthetic
uguuacugaaaacauacac

SEQ ID NO: 517920 - RNA, 20 nt, Artificial Sequence
  Synthetic
auguuacugaaaacauacac

SEQ ID NO: 517921 - RNA, 21 nt, Artificial Sequence
  Synthetic
cauguuacugaaaacauacac

SEQ ID NO: 517922 - RNA, 22 nt, Artificial Sequence
  Synthetic
ucauguuacugaaaacauacac

SEQ ID NO: 517923 - RNA, 23 nt, Artificial Sequence
  Synthetic
aucauguuacugaaaacauacac

SEQ ID NO: 517924 - RNA, 24 nt, Artificial Sequence
  Synthetic
aaucauguuacugaaaacauacac

SEQ ID NO: 517925 - RNA, 18 nt, Artificial Sequence
  Synthetic
ucaccauaccccauacac

SEQ ID NO: 517926 - RNA, 19 nt, Artificial Sequence
  Synthetic
cucaccauaccccauacac

SEQ ID NO: 517927 - RNA, 20 nt, Artificial Sequence
  Synthetic
ucucaccauaccccauacac

SEQ ID NO: 517928 - RNA, 21 nt, Artificial Sequence
  Synthetic
cucucaccauaccccauacac

SEQ ID NO: 517929 - RNA, 22 nt, Artificial Sequence
  Synthetic
ucucucaccauaccccauacac

SEQ ID NO: 517930 - RNA, 23 nt, Artificial Sequence
  Synthetic
cucucucaccauaccccauacac

SEQ ID NO: 517931 - RNA, 24 nt, Artificial Sequence
  Synthetic
ccucucucaccauaccccauacac

SEQ ID NO: 517932 - RNA, 18 nt, Artificial Sequence
  Synthetic
agacauccauccauacac

SEQ ID NO: 517933 - RNA, 19 nt, Artificial Sequence
  Synthetic
aagacauccauccauacac

SEQ ID NO: 517934 - RNA, 20 nt, Artificial Sequence
  Synthetic
aaagacauccauccauacac

SEQ ID NO: 517935 - RNA, 21 nt, Artificial Sequence
  Synthetic
caaagacauccauccauacac

SEQ ID NO: 517936 - RNA, 22 nt, Artificial Sequence
  Synthetic
ucaaagacauccauccauacac

SEQ ID NO: 517937 - RNA, 23 nt, Artificial Sequence
  Synthetic
cucaaagacauccauccauacac

SEQ ID NO: 517938 - RNA, 24 nt, Artificial Sequence
  Synthetic
ccucaaagacauccauccauacac

SEQ ID NO: 517939 - RNA, 18 nt, Artificial Sequence
  Synthetic
uuucuguucagcauacac

SEQ ID NO: 517940 - RNA, 19 nt, Artificial Sequence
  Synthetic
auuucuguucagcauacac

SEQ ID NO: 517941 - RNA, 20 nt, Artificial Sequence
  Synthetic
uauuucuguucagcauacac

SEQ ID NO: 517942 - RNA, 21 nt, Artificial Sequence
  Synthetic
uuauuucuguucagcauacac

SEQ ID NO: 517943 - RNA, 22 nt, Artificial Sequence
  Synthetic
uuuauuucuguucagcauacac

SEQ ID NO: 517944 - RNA, 23 nt, Artificial Sequence
  Synthetic
uuuuauuucuguucagcauacac

SEQ ID NO: 517945 - RNA, 24 nt, Artificial Sequence
  Synthetic
uuuuuauuucuguucagcauacac

SEQ ID NO: 517946 - RNA, 18 nt, Artificial Sequence
  Synthetic
uuauuuuugaucauacac

SEQ ID NO: 517947 - RNA, 19 nt, Artificial Sequence
  Synthetic
auuauuuuugaucauacac

SEQ ID NO: 517948 - RNA, 20 nt, Artificial Sequence
  Synthetic
aauuauuuuugaucauacac

SEQ ID NO: 517949 - RNA, 21 nt, Artificial Sequence
  Synthetic
uaauuauuuuugaucauacac

SEQ ID NO: 517950 - RNA, 22 nt, Artificial Sequence
  Synthetic
auaauuauuuuugaucauacac

SEQ ID NO: 517951 - RNA, 23 nt, Artificial Sequence
  Synthetic
cauaauuauuuuugaucauacac

SEQ ID NO: 517952 - RNA, 24 nt, Artificial Sequence
  Synthetic
ccauaauuauuuuugaucauacac

SEQ ID NO: 517953 - RNA, 18 nt, Artificial Sequence
  Synthetic
uuauucacuaucauacac

SEQ ID NO: 517954 - RNA, 19 nt, Artificial Sequence
  Synthetic
cuuauucacuaucauacac

SEQ ID NO: 517955 - RNA, 20 nt, Artificial Sequence
  Synthetic
acuuauucacuaucauacac

SEQ ID NO: 517956 - RNA, 21 nt, Artificial Sequence
  Synthetic
cacuuauucacuaucauacac

SEQ ID NO: 517957 - RNA, 22 nt, Artificial Sequence
  Synthetic
acacuuauucacuaucauacac

SEQ ID NO: 517958 - RNA, 23 nt, Artificial Sequence
  Synthetic
cacacuuauucacuaucauacac

SEQ ID NO: 517959 - RNA, 24 nt, Artificial Sequence
  Synthetic
ucacacuuauucacuaucauacac

SEQ ID NO: 517960 - RNA, 18 nt, Artificial Sequence
  Synthetic
aaugugguacauauacac

SEQ ID NO: 517961 - RNA, 19 nt, Artificial Sequence
  Synthetic
aaaugugguacauauacac

SEQ ID NO: 517962 - RNA, 20 nt, Artificial Sequence
  Synthetic
aaaaugugguacauauacac

SEQ ID NO: 517963 - RNA, 21 nt, Artificial Sequence
  Synthetic
gaaaaugugguacauauacac

SEQ ID NO: 517964 - RNA, 22 nt, Artificial Sequence
  Synthetic
agaaaaugugguacauauacac

SEQ ID NO: 517965 - RNA, 23 nt, Artificial Sequence
  Synthetic
uagaaaaugugguacauauacac

SEQ ID NO: 517966 - RNA, 24 nt, Artificial Sequence
  Synthetic
auagaaaaugugguacauauacac

SEQ ID NO: 517967 - RNA, 18 nt, Artificial Sequence
  Synthetic
ugcuugcaagcuauacac

SEQ ID NO: 517968 - RNA, 19 nt, Artificial Sequence
  Synthetic
uugcuugcaagcuauacac

SEQ ID NO: 517969 - RNA, 20 nt, Artificial Sequence
  Synthetic
cuugcuugcaagcuauacac

SEQ ID NO: 517970 - RNA, 21 nt, Artificial Sequence
  Synthetic
acuugcuugcaagcuauacac

SEQ ID NO: 517971 - RNA, 22 nt, Artificial Sequence
  Synthetic
cacuugcuugcaagcuauacac

SEQ ID NO: 517972 - RNA, 23 nt, Artificial Sequence
  Synthetic
gcacuugcuugcaagcuauacac

SEQ ID NO: 517973 - RNA, 24 nt, Artificial Sequence
  Synthetic
ugcacuugcuugcaagcuauacac

SEQ ID NO: 517974 - RNA, 18 nt, Artificial Sequence
  Synthetic
acuucuaaaucuauacac

SEQ ID NO: 517975 - RNA, 19 nt, Artificial Sequence
  Synthetic
gacuucuaaaucuauacac

SEQ ID NO: 517976 - RNA, 20 nt, Artificial Sequence
  Synthetic
agacuucuaaaucuauacac

SEQ ID NO: 517977 - RNA, 21 nt, Artificial Sequence
  Synthetic
uagacuucuaaaucuauacac

SEQ ID NO: 517978 - RNA, 22 nt, Artificial Sequence
  Synthetic
uuagacuucuaaaucuauacac

SEQ ID NO: 517979 - RNA, 23 nt, Artificial Sequence
  Synthetic
auuagacuucuaaaucuauacac

SEQ ID NO: 517980 - RNA, 24 nt, Artificial Sequence
  Synthetic
cauuagacuucuaaaucuauacac

SEQ ID NO: 517981 - RNA, 18 nt, Artificial Sequence
  Synthetic
guuggguuauguauacac

SEQ ID NO: 517982 - RNA, 19 nt, Artificial Sequence
  Synthetic
aguuggguuauguauacac

SEQ ID NO: 517983 - RNA, 20 nt, Artificial Sequence
  Synthetic
aaguuggguuauguauacac

SEQ ID NO: 517984 - RNA, 21 nt, Artificial Sequence
  Synthetic
aaaguuggguuauguauacac

SEQ ID NO: 517985 - RNA, 22 nt, Artificial Sequence
  Synthetic
gaaaguuggguuauguauacac

SEQ ID NO: 517986 - RNA, 23 nt, Artificial Sequence
  Synthetic
ggaaaguuggguuauguauacac

SEQ ID NO: 517987 - RNA, 24 nt, Artificial Sequence
  Synthetic
gggaaaguuggguuauguauacac

SEQ ID NO: 517988 - RNA, 18 nt, Artificial Sequence
  Synthetic
auugaaaggauuauacac

SEQ ID NO: 517989 - RNA, 19 nt, Artificial Sequence
  Synthetic
uauugaaaggauuauacac

SEQ ID NO: 517990 - RNA, 20 nt, Artificial Sequence
  Synthetic
auauugaaaggauuauacac

SEQ ID NO: 517991 - RNA, 21 nt, Artificial Sequence
  Synthetic
uauauugaaaggauuauacac

SEQ ID NO: 517992 - RNA, 22 nt, Artificial Sequence
  Synthetic
guauauugaaaggauuauacac

SEQ ID NO: 517993 - RNA, 23 nt, Artificial Sequence
  Synthetic
aguauauugaaaggauuauacac

SEQ ID NO: 517994 - RNA, 24 nt, Artificial Sequence
  Synthetic
caguauauugaaaggauuauacac

SEQ ID NO: 517995 - RNA, 18 nt, Artificial Sequence
  Synthetic
augaaaauauuuauacac

SEQ ID NO: 517996 - RNA, 19 nt, Artificial Sequence
  Synthetic
gaugaaaauauuuauacac

SEQ ID NO: 517997 - RNA, 20 nt, Artificial Sequence
  Synthetic
ggaugaaaauauuuauacac

SEQ ID NO: 517998 - RNA, 21 nt, Artificial Sequence
  Synthetic
aggaugaaaauauuuauacac

SEQ ID NO: 517999 - RNA, 22 nt, Artificial Sequence
  Synthetic
gaggaugaaaauauuuauacac

SEQ ID NO: 518000 - RNA, 23 nt, Artificial Sequence
  Synthetic
agaggaugaaaauauuuauacac

SEQ ID NO: 518001 - RNA, 24 nt, Artificial Sequence
  Synthetic
cagaggaugaaaauauuuauacac

SEQ ID NO: 518002 - RNA, 18 nt, Artificial Sequence
  Synthetic
ggaauguuauuuauacac

SEQ ID NO: 518003 - RNA, 19 nt, Artificial Sequence
  Synthetic
aggaauguuauuuauacac

SEQ ID NO: 518004 - RNA, 20 nt, Artificial Sequence
  Synthetic
gaggaauguuauuuauacac

SEQ ID NO: 518005 - RNA, 21 nt, Artificial Sequence
  Synthetic
ggaggaauguuauuuauacac

SEQ ID NO: 518006 - RNA, 22 nt, Artificial Sequence
  Synthetic
gggaggaauguuauuuauacac

SEQ ID NO: 518007 - RNA, 23 nt, Artificial Sequence
  Synthetic
agggaggaauguuauuuauacac

SEQ ID NO: 518008 - RNA, 24 nt, Artificial Sequence
  Synthetic
uagggaggaauguuauuuauacac

SEQ ID NO: 518009 - RNA, 18 nt, Artificial Sequence
  Synthetic
aaguuuugaaaacuacac

SEQ ID NO: 518010 - RNA, 19 nt, Artificial Sequence
  Synthetic
uaaguuuugaaaacuacac

SEQ ID NO: 518011 - RNA, 20 nt, Artificial Sequence
  Synthetic
auaaguuuugaaaacuacac

SEQ ID NO: 518012 - RNA, 21 nt, Artificial Sequence
  Synthetic
gauaaguuuugaaaacuacac

SEQ ID NO: 518013 - RNA, 22 nt, Artificial Sequence
  Synthetic
agauaaguuuugaaaacuacac

SEQ ID NO: 518014 - RNA, 23 nt, Artificial Sequence
  Synthetic
aagauaaguuuugaaaacuacac

SEQ ID NO: 518015 - RNA, 24 nt, Artificial Sequence
  Synthetic
aaagauaaguuuugaaaacuacac

SEQ ID NO: 518016 - RNA, 18 nt, Artificial Sequence
  Synthetic
auccucuuacaacuacac

SEQ ID NO: 518017 - RNA, 19 nt, Artificial Sequence
  Synthetic
gauccucuuacaacuacac

SEQ ID NO: 518018 - RNA, 20 nt, Artificial Sequence
  Synthetic
ugauccucuuacaacuacac

SEQ ID NO: 518019 - RNA, 21 nt, Artificial Sequence
  Synthetic
cugauccucuuacaacuacac

SEQ ID NO: 518020 - RNA, 22 nt, Artificial Sequence
  Synthetic
gcugauccucuuacaacuacac

SEQ ID NO: 518021 - RNA, 23 nt, Artificial Sequence
  Synthetic
agcugauccucuuacaacuacac

SEQ ID NO: 518022 - RNA, 24 nt, Artificial Sequence
  Synthetic
aagcugauccucuuacaacuacac

SEQ ID NO: 518023 - RNA, 18 nt, Artificial Sequence
  Synthetic
aauguguuaauacuacac

SEQ ID NO: 518024 - RNA, 19 nt, Artificial Sequence
  Synthetic
aaauguguuaauacuacac

SEQ ID NO: 518025 - RNA, 20 nt, Artificial Sequence
  Synthetic
caaauguguuaauacuacac

SEQ ID NO: 518026 - RNA, 21 nt, Artificial Sequence
  Synthetic
ucaaauguguuaauacuacac

SEQ ID NO: 518027 - RNA, 22 nt, Artificial Sequence
  Synthetic
gucaaauguguuaauacuacac

SEQ ID NO: 518028 - RNA, 23 nt, Artificial Sequence
  Synthetic
agucaaauguguuaauacuacac

SEQ ID NO: 518029 - RNA, 24 nt, Artificial Sequence
  Synthetic
aagucaaauguguuaauacuacac

SEQ ID NO: 518030 - RNA, 18 nt, Artificial Sequence
  Synthetic
uggggagacaaccuacac

SEQ ID NO: 518031 - RNA, 19 nt, Artificial Sequence
  Synthetic
cuggggagacaaccuacac

SEQ ID NO: 518032 - RNA, 20 nt, Artificial Sequence
  Synthetic
ucuggggagacaaccuacac

SEQ ID NO: 518033 - RNA, 21 nt, Artificial Sequence
  Synthetic
cucuggggagacaaccuacac

SEQ ID NO: 518034 - RNA, 22 nt, Artificial Sequence
  Synthetic
ucucuggggagacaaccuacac

SEQ ID NO: 518035 - RNA, 23 nt, Artificial Sequence
  Synthetic
uucucuggggagacaaccuacac

SEQ ID NO: 518036 - RNA, 24 nt, Artificial Sequence
  Synthetic
auucucuggggagacaaccuacac

SEQ ID NO: 518037 - RNA, 18 nt, Artificial Sequence
  Synthetic
ucuuucuacaaccuacac

SEQ ID NO: 518038 - RNA, 19 nt, Artificial Sequence
  Synthetic
gucuuucuacaaccuacac

SEQ ID NO: 518039 - RNA, 20 nt, Artificial Sequence
  Synthetic
agucuuucuacaaccuacac

SEQ ID NO: 518040 - RNA, 21 nt, Artificial Sequence
  Synthetic
cagucuuucuacaaccuacac

SEQ ID NO: 518041 - RNA, 22 nt, Artificial Sequence
  Synthetic
acagucuuucuacaaccuacac

SEQ ID NO: 518042 - RNA, 23 nt, Artificial Sequence
  Synthetic
cacagucuuucuacaaccuacac

SEQ ID NO: 518043 - RNA, 24 nt, Artificial Sequence
  Synthetic
ccacagucuuucuacaaccuacac

SEQ ID NO: 518044 - RNA, 18 nt, Artificial Sequence
  Synthetic
uaguuggggaaccuacac

SEQ ID NO: 518045 - RNA, 19 nt, Artificial Sequence
  Synthetic
guaguuggggaaccuacac

SEQ ID NO: 518046 - RNA, 20 nt, Artificial Sequence
  Synthetic
aguaguuggggaaccuacac

SEQ ID NO: 518047 - RNA, 21 nt, Artificial Sequence
  Synthetic
gaguaguuggggaaccuacac

SEQ ID NO: 518048 - RNA, 22 nt, Artificial Sequence
  Synthetic
agaguaguuggggaaccuacac

SEQ ID NO: 518049 - RNA, 23 nt, Artificial Sequence
  Synthetic
cagaguaguuggggaaccuacac

SEQ ID NO: 518050 - RNA, 24 nt, Artificial Sequence
  Synthetic
gcagaguaguuggggaaccuacac

SEQ ID NO: 518051 - RNA, 18 nt, Artificial Sequence
  Synthetic
ccagcuuuacagcuacac

SEQ ID NO: 518052 - RNA, 19 nt, Artificial Sequence
  Synthetic
uccagcuuuacagcuacac

SEQ ID NO: 518053 - RNA, 20 nt, Artificial Sequence
  Synthetic
cuccagcuuuacagcuacac

SEQ ID NO: 518054 - RNA, 21 nt, Artificial Sequence
  Synthetic
acuccagcuuuacagcuacac

SEQ ID NO: 518055 - RNA, 22 nt, Artificial Sequence
  Synthetic
uacuccagcuuuacagcuacac

SEQ ID NO: 518056 - RNA, 23 nt, Artificial Sequence
  Synthetic
auacuccagcuuuacagcuacac

SEQ ID NO: 518057 - RNA, 24 nt, Artificial Sequence
  Synthetic
uauacuccagcuuuacagcuacac

SEQ ID NO: 518058 - RNA, 18 nt, Artificial Sequence
  Synthetic
cuguagucccagcuacac

SEQ ID NO: 518059 - RNA, 19 nt, Artificial Sequence
  Synthetic
ccuguagucccagcuacac

SEQ ID NO: 518060 - RNA, 20 nt, Artificial Sequence
  Synthetic
gccuguagucccagcuacac

SEQ ID NO: 518061 - RNA, 21 nt, Artificial Sequence
  Synthetic
cgccuguagucccagcuacac

SEQ ID NO: 518062 - RNA, 22 nt, Artificial Sequence
  Synthetic
gcgccuguagucccagcuacac

SEQ ID NO: 518063 - RNA, 23 nt, Artificial Sequence
  Synthetic
cgcgccuguagucccagcuacac

SEQ ID NO: 518064 - RNA, 24 nt, Artificial Sequence
  Synthetic
gcgcgccuguagucccagcuacac

SEQ ID NO: 518065 - RNA, 18 nt, Artificial Sequence
  Synthetic
ccacauggcuagcuacac

SEQ ID NO: 518066 - RNA, 19 nt, Artificial Sequence
  Synthetic
uccacauggcuagcuacac

SEQ ID NO: 518067 - RNA, 20 nt, Artificial Sequence
  Synthetic
uuccacauggcuagcuacac

SEQ ID NO: 518068 - RNA, 21 nt, Artificial Sequence
  Synthetic
guuccacauggcuagcuacac

SEQ ID NO: 518069 - RNA, 22 nt, Artificial Sequence
  Synthetic
aguuccacauggcuagcuacac

SEQ ID NO: 518070 - RNA, 23 nt, Artificial Sequence
  Synthetic
caguuccacauggcuagcuacac

SEQ ID NO: 518071 - RNA, 24 nt, Artificial Sequence
  Synthetic
ucaguuccacauggcuagcuacac

SEQ ID NO: 518072 - RNA, 18 nt, Artificial Sequence
  Synthetic
ucccuugcgcugcuacac

SEQ ID NO: 518073 - RNA, 19 nt, Artificial Sequence
  Synthetic
aucccuugcgcugcuacac

SEQ ID NO: 518074 - RNA, 20 nt, Artificial Sequence
  Synthetic
uaucccuugcgcugcuacac

SEQ ID NO: 518075 - RNA, 21 nt, Artificial Sequence
  Synthetic
auaucccuugcgcugcuacac

SEQ ID NO: 518076 - RNA, 22 nt, Artificial Sequence
  Synthetic
uauaucccuugcgcugcuacac

SEQ ID NO: 518077 - RNA, 23 nt, Artificial Sequence
  Synthetic
cuauaucccuugcgcugcuacac

SEQ ID NO: 518078 - RNA, 24 nt, Artificial Sequence
  Synthetic
acuauaucccuugcgcugcuacac

SEQ ID NO: 518079 - RNA, 18 nt, Artificial Sequence
  Synthetic
aaaacauuaugaguacac

SEQ ID NO: 518080 - RNA, 19 nt, Artificial Sequence
  Synthetic
uaaaacauuaugaguacac

SEQ ID NO: 518081 - RNA, 20 nt, Artificial Sequence
  Synthetic
auaaaacauuaugaguacac

SEQ ID NO: 518082 - RNA, 21 nt, Artificial Sequence
  Synthetic
uauaaaacauuaugaguacac

SEQ ID NO: 518083 - RNA, 22 nt, Artificial Sequence
  Synthetic
uuauaaaacauuaugaguacac

SEQ ID NO: 518084 - RNA, 23 nt, Artificial Sequence
  Synthetic
uuuauaaaacauuaugaguacac

SEQ ID NO: 518085 - RNA, 24 nt, Artificial Sequence
  Synthetic
auuuauaaaacauuaugaguacac

SEQ ID NO: 518086 - RNA, 18 nt, Artificial Sequence
  Synthetic
ggagacagacacguacac

SEQ ID NO: 518087 - RNA, 19 nt, Artificial Sequence
  Synthetic
uggagacagacacguacac

SEQ ID NO: 518088 - RNA, 20 nt, Artificial Sequence
  Synthetic
uuggagacagacacguacac

SEQ ID NO: 518089 - RNA, 21 nt, Artificial Sequence
  Synthetic
guuggagacagacacguacac

SEQ ID NO: 518090 - RNA, 22 nt, Artificial Sequence
  Synthetic
aguuggagacagacacguacac

SEQ ID NO: 518091 - RNA, 23 nt, Artificial Sequence
  Synthetic
aaguuggagacagacacguacac

SEQ ID NO: 518092 - RNA, 24 nt, Artificial Sequence
  Synthetic
gaaguuggagacagacacguacac

SEQ ID NO: 518093 - RNA, 18 nt, Artificial Sequence
  Synthetic
acuacuuuucauguacac

SEQ ID NO: 518094 - RNA, 19 nt, Artificial Sequence
  Synthetic
aacuacuuuucauguacac

SEQ ID NO: 518095 - RNA, 20 nt, Artificial Sequence
  Synthetic
aaacuacuuuucauguacac

SEQ ID NO: 518096 - RNA, 21 nt, Artificial Sequence
  Synthetic
uaaacuacuuuucauguacac

SEQ ID NO: 518097 - RNA, 22 nt, Artificial Sequence
  Synthetic
auaaacuacuuuucauguacac

SEQ ID NO: 518098 - RNA, 23 nt, Artificial Sequence
  Synthetic
aauaaacuacuuuucauguacac

SEQ ID NO: 518099 - RNA, 24 nt, Artificial Sequence
  Synthetic
caauaaacuacuuuucauguacac

SEQ ID NO: 518100 - RNA, 18 nt, Artificial Sequence
  Synthetic
gugcuuuccuaauuacac

SEQ ID NO: 518101 - RNA, 19 nt, Artificial Sequence
  Synthetic
ugugcuuuccuaauuacac

SEQ ID NO: 518102 - RNA, 20 nt, Artificial Sequence
  Synthetic
cugugcuuuccuaauuacac

SEQ ID NO: 518103 - RNA, 21 nt, Artificial Sequence
  Synthetic
acugugcuuuccuaauuacac

SEQ ID NO: 518104 - RNA, 22 nt, Artificial Sequence
  Synthetic
uacugugcuuuccuaauuacac

SEQ ID NO: 518105 - RNA, 23 nt, Artificial Sequence
  Synthetic
auacugugcuuuccuaauuacac

SEQ ID NO: 518106 - RNA, 24 nt, Artificial Sequence
  Synthetic
aauacugugcuuuccuaauuacac

SEQ ID NO: 518107 - RNA, 18 nt, Artificial Sequence
  Synthetic
uaauaaauaauauuacac

SEQ ID NO: 518108 - RNA, 19 nt, Artificial Sequence
  Synthetic
auaauaaauaauauuacac

SEQ ID NO: 518109 - RNA, 20 nt, Artificial Sequence
  Synthetic
aauaauaaauaauauuacac

SEQ ID NO: 518110 - RNA, 21 nt, Artificial Sequence
  Synthetic
gaauaauaaauaauauuacac

SEQ ID NO: 518111 - RNA, 22 nt, Artificial Sequence
  Synthetic
ggaauaauaaauaauauuacac

SEQ ID NO: 518112 - RNA, 23 nt, Artificial Sequence
  Synthetic
aggaauaauaaauaauauuacac

SEQ ID NO: 518113 - RNA, 24 nt, Artificial Sequence
  Synthetic
aaggaauaauaaauaauauuacac

SEQ ID NO: 518114 - RNA, 18 nt, Artificial Sequence
  Synthetic
cuugcccuuguauuacac

SEQ ID NO: 518115 - RNA, 19 nt, Artificial Sequence
  Synthetic
acuugcccuuguauuacac

SEQ ID NO: 518116 - RNA, 20 nt, Artificial Sequence
  Synthetic
cacuugcccuuguauuacac

SEQ ID NO: 518117 - RNA, 21 nt, Artificial Sequence
  Synthetic
gcacuugcccuuguauuacac

SEQ ID NO: 518118 - RNA, 22 nt, Artificial Sequence
  Synthetic
agcacuugcccuuguauuacac

SEQ ID NO: 518119 - RNA, 23 nt, Artificial Sequence
  Synthetic
cagcacuugcccuuguauuacac

SEQ ID NO: 518120 - RNA, 24 nt, Artificial Sequence
  Synthetic
ucagcacuugcccuuguauuacac

SEQ ID NO: 518121 - RNA, 18 nt, Artificial Sequence
  Synthetic
acacucuggaaguuacac

SEQ ID NO: 518122 - RNA, 19 nt, Artificial Sequence
  Synthetic
aacacucuggaaguuacac

SEQ ID NO: 518123 - RNA, 20 nt, Artificial Sequence
  Synthetic
uaacacucuggaaguuacac

SEQ ID NO: 518124 - RNA, 21 nt, Artificial Sequence
  Synthetic
uuaacacucuggaaguuacac

SEQ ID NO: 518125 - RNA, 22 nt, Artificial Sequence
  Synthetic
auuaacacucuggaaguuacac

SEQ ID NO: 518126 - RNA, 23 nt, Artificial Sequence
  Synthetic
aauuaacacucuggaaguuacac

SEQ ID NO: 518127 - RNA, 24 nt, Artificial Sequence
  Synthetic
aaauuaacacucuggaaguuacac

SEQ ID NO: 518128 - RNA, 18 nt, Artificial Sequence
  Synthetic
uagaaucagacuuuacac

SEQ ID NO: 518129 - RNA, 19 nt, Artificial Sequence
  Synthetic
cuagaaucagacuuuacac

SEQ ID NO: 518130 - RNA, 20 nt, Artificial Sequence
  Synthetic
acuagaaucagacuuuacac

SEQ ID NO: 518131 - RNA, 21 nt, Artificial Sequence
  Synthetic
gacuagaaucagacuuuacac

SEQ ID NO: 518132 - RNA, 22 nt, Artificial Sequence
  Synthetic
ggacuagaaucagacuuuacac

SEQ ID NO: 518133 - RNA, 23 nt, Artificial Sequence
  Synthetic
uggacuagaaucagacuuuacac

SEQ ID NO: 518134 - RNA, 24 nt, Artificial Sequence
  Synthetic
uuggacuagaaucagacuuuacac

SEQ ID NO: 518135 - RNA, 18 nt, Artificial Sequence
  Synthetic
caucauauuguuuuacac

SEQ ID NO: 518136 - RNA, 19 nt, Artificial Sequence
  Synthetic
ccaucauauuguuuuacac

SEQ ID NO: 518137 - RNA, 20 nt, Artificial Sequence
  Synthetic
uccaucauauuguuuuacac

SEQ ID NO: 518138 - RNA, 21 nt, Artificial Sequence
  Synthetic
uuccaucauauuguuuuacac

SEQ ID NO: 518139 - RNA, 22 nt, Artificial Sequence
  Synthetic
uuuccaucauauuguuuuacac

SEQ ID NO: 518140 - RNA, 23 nt, Artificial Sequence
  Synthetic
cuuuccaucauauuguuuuacac

SEQ ID NO: 518141 - RNA, 24 nt, Artificial Sequence
  Synthetic
gcuuuccaucauauuguuuuacac

SEQ ID NO: 518142 - RNA, 18 nt, Artificial Sequence
  Synthetic
auauucauuuuuuuacac

SEQ ID NO: 518143 - RNA, 19 nt, Artificial Sequence
  Synthetic
uauauucauuuuuuuacac

SEQ ID NO: 518144 - RNA, 20 nt, Artificial Sequence
  Synthetic
cuauauucauuuuuuuacac

SEQ ID NO: 518145 - RNA, 21 nt, Artificial Sequence
  Synthetic
acuauauucauuuuuuuacac

SEQ ID NO: 518146 - RNA, 22 nt, Artificial Sequence
  Synthetic
uacuauauucauuuuuuuacac

SEQ ID NO: 518147 - RNA, 23 nt, Artificial Sequence
  Synthetic
guacuauauucauuuuuuuacac

SEQ ID NO: 518148 - RNA, 24 nt, Artificial Sequence
  Synthetic
gguacuauauucauuuuuuuacac

SEQ ID NO: 518149 - RNA, 21 nt, Artificial Sequence
  Synthetic
agaaaugcaaaucaaaaccac

SEQ ID NO: 518150 - RNA, 22 nt, Artificial Sequence
  Synthetic
gagaaaugcaaaucaaaaccac

SEQ ID NO: 518151 - RNA, 23 nt, Artificial Sequence
  Synthetic
ggagaaaugcaaaucaaaaccac

SEQ ID NO: 518152 - RNA, 24 nt, Artificial Sequence
  Synthetic
uggagaaaugcaaaucaaaaccac

SEQ ID NO: 518153 - RNA, 18 nt, Artificial Sequence
  Synthetic
caacuccaaagaaaccac

SEQ ID NO: 518154 - RNA, 19 nt, Artificial Sequence
  Synthetic
acaacuccaaagaaaccac

SEQ ID NO: 518155 - RNA, 20 nt, Artificial Sequence
  Synthetic
aacaacuccaaagaaaccac

SEQ ID NO: 518156 - RNA, 21 nt, Artificial Sequence
  Synthetic
aaacaacuccaaagaaaccac

SEQ ID NO: 518157 - RNA, 22 nt, Artificial Sequence
  Synthetic
gaaacaacuccaaagaaaccac

SEQ ID NO: 518158 - RNA, 23 nt, Artificial Sequence
  Synthetic
agaaacaacuccaaagaaaccac

SEQ ID NO: 518159 - RNA, 24 nt, Artificial Sequence
  Synthetic
aagaaacaacuccaaagaaaccac

SEQ ID NO: 518160 - RNA, 18 nt, Artificial Sequence
  Synthetic
aaccccagaagcaaccac

SEQ ID NO: 518161 - RNA, 19 nt, Artificial Sequence
  Synthetic
aaaccccagaagcaaccac

SEQ ID NO: 518162 - RNA, 20 nt, Artificial Sequence
  Synthetic
caaaccccagaagcaaccac

SEQ ID NO: 518163 - RNA, 21 nt, Artificial Sequence
  Synthetic
ucaaaccccagaagcaaccac

SEQ ID NO: 518164 - RNA, 22 nt, Artificial Sequence
  Synthetic
cucaaaccccagaagcaaccac

SEQ ID NO: 518165 - RNA, 23 nt, Artificial Sequence
  Synthetic
acucaaaccccagaagcaaccac

SEQ ID NO: 518166 - RNA, 24 nt, Artificial Sequence
  Synthetic
aacucaaaccccagaagcaaccac

SEQ ID NO: 518167 - RNA, 18 nt, Artificial Sequence
  Synthetic
aagggguauuucaaccac

SEQ ID NO: 518168 - RNA, 19 nt, Artificial Sequence
  Synthetic
gaagggguauuucaaccac

SEQ ID NO: 518169 - RNA, 20 nt, Artificial Sequence
  Synthetic
ggaagggguauuucaaccac

SEQ ID NO: 518170 - RNA, 21 nt, Artificial Sequence
  Synthetic
aggaagggguauuucaaccac

SEQ ID NO: 518171 - RNA, 22 nt, Artificial Sequence
  Synthetic
aaggaagggguauuucaaccac

SEQ ID NO: 518172 - RNA, 23 nt, Artificial Sequence
  Synthetic
uaaggaagggguauuucaaccac

SEQ ID NO: 518173 - RNA, 24 nt, Artificial Sequence
  Synthetic
uuaaggaagggguauuucaaccac

SEQ ID NO: 518174 - RNA, 18 nt, Artificial Sequence
  Synthetic
cugaggcaggagaaccac

SEQ ID NO: 518175 - RNA, 19 nt, Artificial Sequence
  Synthetic
gcugaggcaggagaaccac

SEQ ID NO: 518176 - RNA, 20 nt, Artificial Sequence
  Synthetic
ggcugaggcaggagaaccac

SEQ ID NO: 518177 - RNA, 21 nt, Artificial Sequence
  Synthetic
aggcugaggcaggagaaccac

SEQ ID NO: 518178 - RNA, 22 nt, Artificial Sequence
  Synthetic
gaggcugaggcaggagaaccac

SEQ ID NO: 518179 - RNA, 23 nt, Artificial Sequence
  Synthetic
ggaggcugaggcaggagaaccac

SEQ ID NO: 518180 - RNA, 24 nt, Artificial Sequence
  Synthetic
gggaggcugaggcaggagaaccac

SEQ ID NO: 518181 - RNA, 18 nt, Artificial Sequence
  Synthetic
gagauguucccuaaccac

SEQ ID NO: 518182 - RNA, 19 nt, Artificial Sequence
  Synthetic
ugagauguucccuaaccac

SEQ ID NO: 518183 - RNA, 20 nt, Artificial Sequence
  Synthetic
augagauguucccuaaccac

SEQ ID NO: 518184 - RNA, 21 nt, Artificial Sequence
  Synthetic
aaugagauguucccuaaccac

SEQ ID NO: 518185 - RNA, 22 nt, Artificial Sequence
  Synthetic
caaugagauguucccuaaccac

SEQ ID NO: 518186 - RNA, 23 nt, Artificial Sequence
  Synthetic
ucaaugagauguucccuaaccac

SEQ ID NO: 518187 - RNA, 24 nt, Artificial Sequence
  Synthetic
cucaaugagauguucccuaaccac

SEQ ID NO: 518188 - RNA, 18 nt, Artificial Sequence
  Synthetic
ggauucuaaucuaaccac

SEQ ID NO: 518189 - RNA, 19 nt, Artificial Sequence
  Synthetic
aggauucuaaucuaaccac

SEQ ID NO: 518190 - RNA, 20 nt, Artificial Sequence
  Synthetic
caggauucuaaucuaaccac

SEQ ID NO: 518191 - RNA, 21 nt, Artificial Sequence
  Synthetic
ucaggauucuaaucuaaccac

SEQ ID NO: 518192 - RNA, 22 nt, Artificial Sequence
  Synthetic
aucaggauucuaaucuaaccac

SEQ ID NO: 518193 - RNA, 23 nt, Artificial Sequence
  Synthetic
uaucaggauucuaaucuaaccac

SEQ ID NO: 518194 - RNA, 24 nt, Artificial Sequence
  Synthetic
uuaucaggauucuaaucuaaccac

SEQ ID NO: 518195 - RNA, 18 nt, Artificial Sequence
  Synthetic
aagacauguuguaaccac

SEQ ID NO: 518196 - RNA, 19 nt, Artificial Sequence
  Synthetic
gaagacauguuguaaccac

SEQ ID NO: 518197 - RNA, 20 nt, Artificial Sequence
  Synthetic
agaagacauguuguaaccac

SEQ ID NO: 518198 - RNA, 21 nt, Artificial Sequence
  Synthetic
uagaagacauguuguaaccac

SEQ ID NO: 518199 - RNA, 22 nt, Artificial Sequence
  Synthetic
auagaagacauguuguaaccac

SEQ ID NO: 518200 - RNA, 23 nt, Artificial Sequence
  Synthetic
gauagaagacauguuguaaccac

SEQ ID NO: 518201 - RNA, 24 nt, Artificial Sequence
  Synthetic
agauagaagacauguuguaaccac

SEQ ID NO: 518202 - RNA, 18 nt, Artificial Sequence
  Synthetic
cuucauuagcaacaccac

SEQ ID NO: 518203 - RNA, 19 nt, Artificial Sequence
  Synthetic
gcuucauuagcaacaccac

SEQ ID NO: 518204 - RNA, 20 nt, Artificial Sequence
  Synthetic
agcuucauuagcaacaccac

SEQ ID NO: 518205 - RNA, 21 nt, Artificial Sequence
  Synthetic
uagcuucauuagcaacaccac

SEQ ID NO: 518206 - RNA, 22 nt, Artificial Sequence
  Synthetic
auagcuucauuagcaacaccac

SEQ ID NO: 518207 - RNA, 23 nt, Artificial Sequence
  Synthetic
gauagcuucauuagcaacaccac

SEQ ID NO: 518208 - RNA, 24 nt, Artificial Sequence
  Synthetic
ugauagcuucauuagcaacaccac

SEQ ID NO: 518209 - RNA, 18 nt, Artificial Sequence
  Synthetic
uuuuguugagaacaccac

SEQ ID NO: 518210 - RNA, 19 nt, Artificial Sequence
  Synthetic
uuuuuguugagaacaccac

SEQ ID NO: 518211 - RNA, 20 nt, Artificial Sequence
  Synthetic
auuuuuguugagaacaccac

SEQ ID NO: 518212 - RNA, 21 nt, Artificial Sequence
  Synthetic
gauuuuuguugagaacaccac

SEQ ID NO: 518213 - RNA, 22 nt, Artificial Sequence
  Synthetic
agauuuuuguugagaacaccac

SEQ ID NO: 518214 - RNA, 23 nt, Artificial Sequence
  Synthetic
cagauuuuuguugagaacaccac

SEQ ID NO: 518215 - RNA, 24 nt, Artificial Sequence
  Synthetic
gcagauuuuuguugagaacaccac

SEQ ID NO: 518216 - RNA, 18 nt, Artificial Sequence
  Synthetic
cguaauaaaucacaccac

SEQ ID NO: 518217 - RNA, 19 nt, Artificial Sequence
  Synthetic
acguaauaaaucacaccac

SEQ ID NO: 518218 - RNA, 20 nt, Artificial Sequence
  Synthetic
uacguaauaaaucacaccac

SEQ ID NO: 518219 - RNA, 21 nt, Artificial Sequence
  Synthetic
cuacguaauaaaucacaccac

SEQ ID NO: 518220 - RNA, 22 nt, Artificial Sequence
  Synthetic
ucuacguaauaaaucacaccac

SEQ ID NO: 518221 - RNA, 23 nt, Artificial Sequence
  Synthetic
gucuacguaauaaaucacaccac

SEQ ID NO: 518222 - RNA, 24 nt, Artificial Sequence
  Synthetic
ugucuacguaauaaaucacaccac

SEQ ID NO: 518223 - RNA, 18 nt, Artificial Sequence
  Synthetic
acaauaucuugacaccac

SEQ ID NO: 518224 - RNA, 19 nt, Artificial Sequence
  Synthetic
aacaauaucuugacaccac

SEQ ID NO: 518225 - RNA, 20 nt, Artificial Sequence
  Synthetic
caacaauaucuugacaccac

SEQ ID NO: 518226 - RNA, 21 nt, Artificial Sequence
  Synthetic
ucaacaauaucuugacaccac

SEQ ID NO: 518227 - RNA, 22 nt, Artificial Sequence
  Synthetic
uucaacaauaucuugacaccac

SEQ ID NO: 518228 - RNA, 23 nt, Artificial Sequence
  Synthetic
uuucaacaauaucuugacaccac

SEQ ID NO: 518229 - RNA, 24 nt, Artificial Sequence
  Synthetic
uuuucaacaauaucuugacaccac

SEQ ID NO: 518230 - RNA, 18 nt, Artificial Sequence
  Synthetic
auaacuuuuugacaccac

SEQ ID NO: 518231 - RNA, 19 nt, Artificial Sequence
  Synthetic
aauaacuuuuugacaccac

SEQ ID NO: 518232 - RNA, 20 nt, Artificial Sequence
  Synthetic
aaauaacuuuuugacaccac

SEQ ID NO: 518233 - RNA, 21 nt, Artificial Sequence
  Synthetic
aaaauaacuuuuugacaccac

SEQ ID NO: 518234 - RNA, 22 nt, Artificial Sequence
  Synthetic
caaaauaacuuuuugacaccac

SEQ ID NO: 518235 - RNA, 23 nt, Artificial Sequence
  Synthetic
ccaaaauaacuuuuugacaccac

SEQ ID NO: 518236 - RNA, 24 nt, Artificial Sequence
  Synthetic
uccaaaauaacuuuuugacaccac

SEQ ID NO: 518237 - RNA, 18 nt, Artificial Sequence
  Synthetic
caaaucaaaauacaccac

SEQ ID NO: 518238 - RNA, 19 nt, Artificial Sequence
  Synthetic
gcaaaucaaaauacaccac

SEQ ID NO: 518239 - RNA, 20 nt, Artificial Sequence
  Synthetic
ggcaaaucaaaauacaccac

SEQ ID NO: 518240 - RNA, 21 nt, Artificial Sequence
  Synthetic
cggcaaaucaaaauacaccac

SEQ ID NO: 518241 - RNA, 22 nt, Artificial Sequence
  Synthetic
gcggcaaaucaaaauacaccac

SEQ ID NO: 518242 - RNA, 23 nt, Artificial Sequence
  Synthetic
ugcggcaaaucaaaauacaccac

SEQ ID NO: 518243 - RNA, 24 nt, Artificial Sequence
  Synthetic
cugcggcaaaucaaaauacaccac

SEQ ID NO: 518244 - RNA, 18 nt, Artificial Sequence
  Synthetic
gacaaugguguacaccac

SEQ ID NO: 518245 - RNA, 19 nt, Artificial Sequence
  Synthetic
ugacaaugguguacaccac

SEQ ID NO: 518246 - RNA, 20 nt, Artificial Sequence
  Synthetic
uugacaaugguguacaccac

SEQ ID NO: 518247 - RNA, 21 nt, Artificial Sequence
  Synthetic
auugacaaugguguacaccac

SEQ ID NO: 518248 - RNA, 22 nt, Artificial Sequence
  Synthetic
cauugacaaugguguacaccac

SEQ ID NO: 518249 - RNA, 23 nt, Artificial Sequence
  Synthetic
ccauugacaaugguguacaccac

SEQ ID NO: 518250 - RNA, 24 nt, Artificial Sequence
  Synthetic
uccauugacaaugguguacaccac

SEQ ID NO: 518251 - RNA, 18 nt, Artificial Sequence
  Synthetic
guauauucucaccaccac

SEQ ID NO: 518252 - RNA, 19 nt, Artificial Sequence
  Synthetic
uguauauucucaccaccac

SEQ ID NO: 518253 - RNA, 20 nt, Artificial Sequence
  Synthetic
cuguauauucucaccaccac

SEQ ID NO: 518254 - RNA, 21 nt, Artificial Sequence
  Synthetic
gcuguauauucucaccaccac

SEQ ID NO: 518255 - RNA, 22 nt, Artificial Sequence
  Synthetic
ugcuguauauucucaccaccac

SEQ ID NO: 518256 - RNA, 23 nt, Artificial Sequence
  Synthetic
uugcuguauauucucaccaccac

SEQ ID NO: 518257 - RNA, 24 nt, Artificial Sequence
  Synthetic
auugcuguauauucucaccaccac

SEQ ID NO: 518258 - RNA, 18 nt, Artificial Sequence
  Synthetic
cauccaguugcccaccac

SEQ ID NO: 518259 - RNA, 19 nt, Artificial Sequence
  Synthetic
acauccaguugcccaccac

SEQ ID NO: 518260 - RNA, 20 nt, Artificial Sequence
  Synthetic
gacauccaguugcccaccac

SEQ ID NO: 518261 - RNA, 21 nt, Artificial Sequence
  Synthetic
ugacauccaguugcccaccac

SEQ ID NO: 518262 - RNA, 22 nt, Artificial Sequence
  Synthetic
augacauccaguugcccaccac

SEQ ID NO: 518263 - RNA, 23 nt, Artificial Sequence
  Synthetic
caugacauccaguugcccaccac

SEQ ID NO: 518264 - RNA, 24 nt, Artificial Sequence
  Synthetic
gcaugacauccaguugcccaccac

SEQ ID NO: 518265 - RNA, 18 nt, Artificial Sequence
  Synthetic
guaauuauaaugcaccac

SEQ ID NO: 518266 - RNA, 19 nt, Artificial Sequence
  Synthetic
aguaauuauaaugcaccac

SEQ ID NO: 518267 - RNA, 20 nt, Artificial Sequence
  Synthetic
uaguaauuauaaugcaccac

SEQ ID NO: 518268 - RNA, 21 nt, Artificial Sequence
  Synthetic
uuaguaauuauaaugcaccac

SEQ ID NO: 518269 - RNA, 22 nt, Artificial Sequence
  Synthetic
auuaguaauuauaaugcaccac

SEQ ID NO: 518270 - RNA, 23 nt, Artificial Sequence
  Synthetic
uauuaguaauuauaaugcaccac

SEQ ID NO: 518271 - RNA, 24 nt, Artificial Sequence
  Synthetic
cuauuaguaauuauaaugcaccac

SEQ ID NO: 518272 - RNA, 18 nt, Artificial Sequence
  Synthetic
uucuccagcaugcaccac

SEQ ID NO: 518273 - RNA, 19 nt, Artificial Sequence
  Synthetic
cuucuccagcaugcaccac

SEQ ID NO: 518274 - RNA, 20 nt, Artificial Sequence
  Synthetic
ucuucuccagcaugcaccac

SEQ ID NO: 518275 - RNA, 21 nt, Artificial Sequence
  Synthetic
cucuucuccagcaugcaccac

SEQ ID NO: 518276 - RNA, 22 nt, Artificial Sequence
  Synthetic
ucucuucuccagcaugcaccac

SEQ ID NO: 518277 - RNA, 23 nt, Artificial Sequence
  Synthetic
uucucuucuccagcaugcaccac

SEQ ID NO: 518278 - RNA, 24 nt, Artificial Sequence
  Synthetic
cuucucuucuccagcaugcaccac

SEQ ID NO: 518279 - RNA, 18 nt, Artificial Sequence
  Synthetic
ugaagaauaucucaccac

SEQ ID NO: 518280 - RNA, 19 nt, Artificial Sequence
  Synthetic
cugaagaauaucucaccac

SEQ ID NO: 518281 - RNA, 20 nt, Artificial Sequence
  Synthetic
acugaagaauaucucaccac

SEQ ID NO: 518282 - RNA, 21 nt, Artificial Sequence
  Synthetic
cacugaagaauaucucaccac

SEQ ID NO: 518283 - RNA, 22 nt, Artificial Sequence
  Synthetic
acacugaagaauaucucaccac

SEQ ID NO: 518284 - RNA, 23 nt, Artificial Sequence
  Synthetic
gacacugaagaauaucucaccac

SEQ ID NO: 518285 - RNA, 24 nt, Artificial Sequence
  Synthetic
ugacacugaagaauaucucaccac

SEQ ID NO: 518286 - RNA, 18 nt, Artificial Sequence
  Synthetic
agaucugucagucaccac

SEQ ID NO: 518287 - RNA, 19 nt, Artificial Sequence
  Synthetic
aagaucugucagucaccac

SEQ ID NO: 518288 - RNA, 20 nt, Artificial Sequence
  Synthetic
caagaucugucagucaccac

SEQ ID NO: 518289 - RNA, 21 nt, Artificial Sequence
  Synthetic
gcaagaucugucagucaccac

SEQ ID NO: 518290 - RNA, 22 nt, Artificial Sequence
  Synthetic
ugcaagaucugucagucaccac

SEQ ID NO: 518291 - RNA, 23 nt, Artificial Sequence
  Synthetic
augcaagaucugucagucaccac

SEQ ID NO: 518292 - RNA, 24 nt, Artificial Sequence
  Synthetic
aaugcaagaucugucagucaccac

SEQ ID NO: 518293 - RNA, 18 nt, Artificial Sequence
  Synthetic
uaucuauguauucaccac

SEQ ID NO: 518294 - RNA, 19 nt, Artificial Sequence
  Synthetic
guaucuauguauucaccac

SEQ ID NO: 518295 - RNA, 20 nt, Artificial Sequence
  Synthetic
uguaucuauguauucaccac

SEQ ID NO: 518296 - RNA, 21 nt, Artificial Sequence
  Synthetic
auguaucuauguauucaccac

SEQ ID NO: 518297 - RNA, 22 nt, Artificial Sequence
  Synthetic
aauguaucuauguauucaccac

SEQ ID NO: 518298 - RNA, 23 nt, Artificial Sequence
  Synthetic
gaauguaucuauguauucaccac

SEQ ID NO: 518299 - RNA, 24 nt, Artificial Sequence
  Synthetic
ugaauguaucuauguauucaccac

SEQ ID NO: 518300 - RNA, 18 nt, Artificial Sequence
  Synthetic
cugagacaggcagaccac

SEQ ID NO: 518301 - RNA, 19 nt, Artificial Sequence
  Synthetic
gcugagacaggcagaccac

SEQ ID NO: 518302 - RNA, 20 nt, Artificial Sequence
  Synthetic
ggcugagacaggcagaccac

SEQ ID NO: 518303 - RNA, 21 nt, Artificial Sequence
  Synthetic
aggcugagacaggcagaccac

SEQ ID NO: 518304 - RNA, 22 nt, Artificial Sequence
  Synthetic
gaggcugagacaggcagaccac

SEQ ID NO: 518305 - RNA, 23 nt, Artificial Sequence
  Synthetic
ggaggcugagacaggcagaccac

SEQ ID NO: 518306 - RNA, 24 nt, Artificial Sequence
  Synthetic
gggaggcugagacaggcagaccac

SEQ ID NO: 518307 - RNA, 18 nt, Artificial Sequence
  Synthetic
ugagcccacugagaccac

SEQ ID NO: 518308 - RNA, 19 nt, Artificial Sequence
  Synthetic
uugagcccacugagaccac

SEQ ID NO: 518309 - RNA, 20 nt, Artificial Sequence
  Synthetic
cuugagcccacugagaccac

SEQ ID NO: 518310 - RNA, 21 nt, Artificial Sequence
  Synthetic
ccuugagcccacugagaccac

SEQ ID NO: 518311 - RNA, 22 nt, Artificial Sequence
  Synthetic
cccuugagcccacugagaccac

SEQ ID NO: 518312 - RNA, 23 nt, Artificial Sequence
  Synthetic
ccccuugagcccacugagaccac

SEQ ID NO: 518313 - RNA, 24 nt, Artificial Sequence
  Synthetic
cccccuugagcccacugagaccac

SEQ ID NO: 518314 - RNA, 18 nt, Artificial Sequence
  Synthetic
uagccauguugagaccac

SEQ ID NO: 518315 - RNA, 19 nt, Artificial Sequence
  Synthetic
guagccauguugagaccac

SEQ ID NO: 518316 - RNA, 20 nt, Artificial Sequence
  Synthetic
aguagccauguugagaccac

SEQ ID NO: 518317 - RNA, 21 nt, Artificial Sequence
  Synthetic
gaguagccauguugagaccac

SEQ ID NO: 518318 - RNA, 22 nt, Artificial Sequence
  Synthetic
agaguagccauguugagaccac

SEQ ID NO: 518319 - RNA, 23 nt, Artificial Sequence
  Synthetic
cagaguagccauguugagaccac

SEQ ID NO: 518320 - RNA, 24 nt, Artificial Sequence
  Synthetic
gcagaguagccauguugagaccac

SEQ ID NO: 518321 - RNA, 18 nt, Artificial Sequence
  Synthetic
auaaaagaaaaggaccac

SEQ ID NO: 518322 - RNA, 19 nt, Artificial Sequence
  Synthetic
aauaaaagaaaaggaccac

SEQ ID NO: 518323 - RNA, 20 nt, Artificial Sequence
  Synthetic
gaauaaaagaaaaggaccac

SEQ ID NO: 518324 - RNA, 21 nt, Artificial Sequence
  Synthetic
agaauaaaagaaaaggaccac

SEQ ID NO: 518325 - RNA, 22 nt, Artificial Sequence
  Synthetic
cagaauaaaagaaaaggaccac

SEQ ID NO: 518326 - RNA, 23 nt, Artificial Sequence
  Synthetic
ucagaauaaaagaaaaggaccac

SEQ ID NO: 518327 - RNA, 24 nt, Artificial Sequence
  Synthetic
uucagaauaaaagaaaaggaccac

SEQ ID NO: 518328 - RNA, 18 nt, Artificial Sequence
  Synthetic
gaauagucccaugaccac

SEQ ID NO: 518329 - RNA, 19 nt, Artificial Sequence
  Synthetic
ugaauagucccaugaccac

SEQ ID NO: 518330 - RNA, 20 nt, Artificial Sequence
  Synthetic
gugaauagucccaugaccac

SEQ ID NO: 518331 - RNA, 21 nt, Artificial Sequence
  Synthetic
ggugaauagucccaugaccac

SEQ ID NO: 518332 - RNA, 22 nt, Artificial Sequence
  Synthetic
uggugaauagucccaugaccac

SEQ ID NO: 518333 - RNA, 23 nt, Artificial Sequence
  Synthetic
guggugaauagucccaugaccac

SEQ ID NO: 518334 - RNA, 24 nt, Artificial Sequence
  Synthetic
aguggugaauagucccaugaccac

SEQ ID NO: 518335 - RNA, 18 nt, Artificial Sequence
  Synthetic
aucagauaauuauaccac

SEQ ID NO: 518336 - RNA, 19 nt, Artificial Sequence
  Synthetic
aaucagauaauuauaccac

SEQ ID NO: 518337 - RNA, 20 nt, Artificial Sequence
  Synthetic
aaaucagauaauuauaccac

SEQ ID NO: 518338 - RNA, 21 nt, Artificial Sequence
  Synthetic
caaaucagauaauuauaccac

SEQ ID NO: 518339 - RNA, 22 nt, Artificial Sequence
  Synthetic
acaaaucagauaauuauaccac

SEQ ID NO: 518340 - RNA, 23 nt, Artificial Sequence
  Synthetic
uacaaaucagauaauuauaccac

SEQ ID NO: 518341 - RNA, 24 nt, Artificial Sequence
  Synthetic
auacaaaucagauaauuauaccac

SEQ ID NO: 518342 - RNA, 18 nt, Artificial Sequence
  Synthetic
uccaagcuauuauaccac

SEQ ID NO: 518343 - RNA, 19 nt, Artificial Sequence
  Synthetic
uuccaagcuauuauaccac

SEQ ID NO: 518344 - RNA, 20 nt, Artificial Sequence
  Synthetic
uuuccaagcuauuauaccac

SEQ ID NO: 518345 - RNA, 21 nt, Artificial Sequence
  Synthetic
cuuuccaagcuauuauaccac

SEQ ID NO: 518346 - RNA, 22 nt, Artificial Sequence
  Synthetic
ccuuuccaagcuauuauaccac

SEQ ID NO: 518347 - RNA, 23 nt, Artificial Sequence
  Synthetic
uccuuuccaagcuauuauaccac

SEQ ID NO: 518348 - RNA, 24 nt, Artificial Sequence
  Synthetic
guccuuuccaagcuauuauaccac

SEQ ID NO: 518349 - RNA, 18 nt, Artificial Sequence
  Synthetic
caugauucugccuaccac

SEQ ID NO: 518350 - RNA, 19 nt, Artificial Sequence
  Synthetic
ccaugauucugccuaccac

SEQ ID NO: 518351 - RNA, 20 nt, Artificial Sequence
  Synthetic
cccaugauucugccuaccac

SEQ ID NO: 518352 - RNA, 21 nt, Artificial Sequence
  Synthetic
gcccaugauucugccuaccac

SEQ ID NO: 518353 - RNA, 22 nt, Artificial Sequence
  Synthetic
ggcccaugauucugccuaccac

SEQ ID NO: 518354 - RNA, 23 nt, Artificial Sequence
  Synthetic
gggcccaugauucugccuaccac

SEQ ID NO: 518355 - RNA, 24 nt, Artificial Sequence
  Synthetic
ggggcccaugauucugccuaccac

SEQ ID NO: 518356 - RNA, 18 nt, Artificial Sequence
  Synthetic
aauaugauguucuaccac

SEQ ID NO: 518357 - RNA, 19 nt, Artificial Sequence
  Synthetic
aaauaugauguucuaccac

SEQ ID NO: 518358 - RNA, 20 nt, Artificial Sequence
  Synthetic
uaaauaugauguucuaccac

SEQ ID NO: 518359 - RNA, 21 nt, Artificial Sequence
  Synthetic
uuaaauaugauguucuaccac

SEQ ID NO: 518360 - RNA, 22 nt, Artificial Sequence
  Synthetic
uuuaaauaugauguucuaccac

SEQ ID NO: 518361 - RNA, 23 nt, Artificial Sequence
  Synthetic
uuuuaaauaugauguucuaccac

SEQ ID NO: 518362 - RNA, 24 nt, Artificial Sequence
  Synthetic
auuuuaaauaugauguucuaccac

SEQ ID NO: 518363 - RNA, 18 nt, Artificial Sequence
  Synthetic
ugaauacauuucuaccac

SEQ ID NO: 518364 - RNA, 19 nt, Artificial Sequence
  Synthetic
cugaauacauuucuaccac

SEQ ID NO: 518365 - RNA, 20 nt, Artificial Sequence
  Synthetic
acugaauacauuucuaccac

SEQ ID NO: 518366 - RNA, 21 nt, Artificial Sequence
  Synthetic
cacugaauacauuucuaccac

SEQ ID NO: 518367 - RNA, 22 nt, Artificial Sequence
  Synthetic
ucacugaauacauuucuaccac

SEQ ID NO: 518368 - RNA, 23 nt, Artificial Sequence
  Synthetic
gucacugaauacauuucuaccac

SEQ ID NO: 518369 - RNA, 24 nt, Artificial Sequence
  Synthetic
ggucacugaauacauuucuaccac

SEQ ID NO: 518370 - RNA, 18 nt, Artificial Sequence
  Synthetic
uacaguccaauaacccac

SEQ ID NO: 518371 - RNA, 19 nt, Artificial Sequence
  Synthetic
cuacaguccaauaacccac

SEQ ID NO: 518372 - RNA, 20 nt, Artificial Sequence
  Synthetic
acuacaguccaauaacccac

SEQ ID NO: 518373 - RNA, 21 nt, Artificial Sequence
  Synthetic
gacuacaguccaauaacccac

SEQ ID NO: 518374 - RNA, 22 nt, Artificial Sequence
  Synthetic
agacuacaguccaauaacccac

SEQ ID NO: 518375 - RNA, 23 nt, Artificial Sequence
  Synthetic
aagacuacaguccaauaacccac

SEQ ID NO: 518376 - RNA, 24 nt, Artificial Sequence
  Synthetic
gaagacuacaguccaauaacccac

SEQ ID NO: 518377 - RNA, 18 nt, Artificial Sequence
  Synthetic
aagcaguuaguuacccac

SEQ ID NO: 518378 - RNA, 19 nt, Artificial Sequence
  Synthetic
uaagcaguuaguuacccac

SEQ ID NO: 518379 - RNA, 20 nt, Artificial Sequence
  Synthetic
auaagcaguuaguuacccac

SEQ ID NO: 518380 - RNA, 21 nt, Artificial Sequence
  Synthetic
uauaagcaguuaguuacccac

SEQ ID NO: 518381 - RNA, 22 nt, Artificial Sequence
  Synthetic
uuauaagcaguuaguuacccac

SEQ ID NO: 518382 - RNA, 23 nt, Artificial Sequence
  Synthetic
uuuauaagcaguuaguuacccac

SEQ ID NO: 518383 - RNA, 24 nt, Artificial Sequence
  Synthetic
uuuuauaagcaguuaguuacccac

SEQ ID NO: 518384 - RNA, 18 nt, Artificial Sequence
  Synthetic
uggucaucccaaccccac

SEQ ID NO: 518385 - RNA, 19 nt, Artificial Sequence
  Synthetic
auggucaucccaaccccac

SEQ ID NO: 518386 - RNA, 20 nt, Artificial Sequence
  Synthetic
aauggucaucccaaccccac

SEQ ID NO: 518387 - RNA, 21 nt, Artificial Sequence
  Synthetic
aaauggucaucccaaccccac

SEQ ID NO: 518388 - RNA, 22 nt, Artificial Sequence
  Synthetic
uaaauggucaucccaaccccac

SEQ ID NO: 518389 - RNA, 23 nt, Artificial Sequence
  Synthetic
cuaaauggucaucccaaccccac

SEQ ID NO: 518390 - RNA, 24 nt, Artificial Sequence
  Synthetic
ucuaaauggucaucccaaccccac

SEQ ID NO: 518391 - RNA, 18 nt, Artificial Sequence
  Synthetic
cgggggucaggaccccac

SEQ ID NO: 518392 - RNA, 19 nt, Artificial Sequence
  Synthetic
acgggggucaggaccccac

SEQ ID NO: 518393 - RNA, 20 nt, Artificial Sequence
  Synthetic
cacgggggucaggaccccac

SEQ ID NO: 518394 - RNA, 21 nt, Artificial Sequence
  Synthetic
gcacgggggucaggaccccac

SEQ ID NO: 518395 - RNA, 22 nt, Artificial Sequence
  Synthetic
ggcacgggggucaggaccccac

SEQ ID NO: 518396 - RNA, 23 nt, Artificial Sequence
  Synthetic
aggcacgggggucaggaccccac

SEQ ID NO: 518397 - RNA, 24 nt, Artificial Sequence
  Synthetic
gaggcacgggggucaggaccccac

SEQ ID NO: 518398 - RNA, 18 nt, Artificial Sequence
  Synthetic
guaagcuauaucccccac

SEQ ID NO: 518399 - RNA, 19 nt, Artificial Sequence
  Synthetic
aguaagcuauaucccccac

SEQ ID NO: 518400 - RNA, 20 nt, Artificial Sequence
  Synthetic
caguaagcuauaucccccac

SEQ ID NO: 518401 - RNA, 21 nt, Artificial Sequence
  Synthetic
gcaguaagcuauaucccccac

SEQ ID NO: 518402 - RNA, 22 nt, Artificial Sequence
  Synthetic
ugcaguaagcuauaucccccac

SEQ ID NO: 518403 - RNA, 23 nt, Artificial Sequence
  Synthetic
cugcaguaagcuauaucccccac

SEQ ID NO: 518404 - RNA, 24 nt, Artificial Sequence
  Synthetic
gcugcaguaagcuauaucccccac

SEQ ID NO: 518405 - RNA, 18 nt, Artificial Sequence
  Synthetic
ccaacacagaguccccac

SEQ ID NO: 518406 - RNA, 19 nt, Artificial Sequence
  Synthetic
cccaacacagaguccccac

SEQ ID NO: 518407 - RNA, 20 nt, Artificial Sequence
  Synthetic
ccccaacacagaguccccac

SEQ ID NO: 518408 - RNA, 21 nt, Artificial Sequence
  Synthetic
gccccaacacagaguccccac

SEQ ID NO: 518409 - RNA, 22 nt, Artificial Sequence
  Synthetic
agccccaacacagaguccccac

SEQ ID NO: 518410 - RNA, 23 nt, Artificial Sequence
  Synthetic
gagccccaacacagaguccccac

SEQ ID NO: 518411 - RNA, 24 nt, Artificial Sequence
  Synthetic
ggagccccaacacagaguccccac

SEQ ID NO: 518412 - RNA, 18 nt, Artificial Sequence
  Synthetic
cccacauagaguccccac

SEQ ID NO: 518413 - RNA, 19 nt, Artificial Sequence
  Synthetic
ccccacauagaguccccac

SEQ ID NO: 518414 - RNA, 20 nt, Artificial Sequence
  Synthetic
cccccacauagaguccccac

SEQ ID NO: 518415 - RNA, 21 nt, Artificial Sequence
  Synthetic
gcccccacauagaguccccac

SEQ ID NO: 518416 - RNA, 22 nt, Artificial Sequence
  Synthetic
agcccccacauagaguccccac

SEQ ID NO: 518417 - RNA, 23 nt, Artificial Sequence
  Synthetic
gagcccccacauagaguccccac

SEQ ID NO: 518418 - RNA, 24 nt, Artificial Sequence
  Synthetic
ggagcccccacauagaguccccac

SEQ ID NO: 518419 - RNA, 18 nt, Artificial Sequence
  Synthetic
ccauuguuccaggcccac

SEQ ID NO: 518420 - RNA, 19 nt, Artificial Sequence
  Synthetic
accauuguuccaggcccac

SEQ ID NO: 518421 - RNA, 20 nt, Artificial Sequence
  Synthetic
caccauuguuccaggcccac

SEQ ID NO: 518422 - RNA, 21 nt, Artificial Sequence
  Synthetic
acaccauuguuccaggcccac

SEQ ID NO: 518423 - RNA, 22 nt, Artificial Sequence
  Synthetic
uacaccauuguuccaggcccac

SEQ ID NO: 518424 - RNA, 23 nt, Artificial Sequence
  Synthetic
uuacaccauuguuccaggcccac

SEQ ID NO: 518425 - RNA, 24 nt, Artificial Sequence
  Synthetic
cuuacaccauuguuccaggcccac

SEQ ID NO: 518426 - RNA, 18 nt, Artificial Sequence
  Synthetic
acaguguugagggcccac

SEQ ID NO: 518427 - RNA, 19 nt, Artificial Sequence
  Synthetic
aacaguguugagggcccac

SEQ ID NO: 518428 - RNA, 20 nt, Artificial Sequence
  Synthetic
aaacaguguugagggcccac

SEQ ID NO: 518429 - RNA, 21 nt, Artificial Sequence
  Synthetic
caaacaguguugagggcccac

SEQ ID NO: 518430 - RNA, 22 nt, Artificial Sequence
  Synthetic
gcaaacaguguugagggcccac

SEQ ID NO: 518431 - RNA, 23 nt, Artificial Sequence
  Synthetic
ggcaaacaguguugagggcccac

SEQ ID NO: 518432 - RNA, 24 nt, Artificial Sequence
  Synthetic
uggcaaacaguguugagggcccac

SEQ ID NO: 518433 - RNA, 18 nt, Artificial Sequence
  Synthetic
uauggggacaugucccac

SEQ ID NO: 518434 - RNA, 19 nt, Artificial Sequence
  Synthetic
uuauggggacaugucccac

SEQ ID NO: 518435 - RNA, 20 nt, Artificial Sequence
  Synthetic
auuauggggacaugucccac

SEQ ID NO: 518436 - RNA, 21 nt, Artificial Sequence
  Synthetic
gauuauggggacaugucccac

SEQ ID NO: 518437 - RNA, 22 nt, Artificial Sequence
  Synthetic
ggauuauggggacaugucccac

SEQ ID NO: 518438 - RNA, 23 nt, Artificial Sequence
  Synthetic
gggauuauggggacaugucccac

SEQ ID NO: 518439 - RNA, 24 nt, Artificial Sequence
  Synthetic
ugggauuauggggacaugucccac

SEQ ID NO: 518440 - RNA, 18 nt, Artificial Sequence
  Synthetic
aaagcuuucccuucccac

SEQ ID NO: 518441 - RNA, 19 nt, Artificial Sequence
  Synthetic
aaaagcuuucccuucccac

SEQ ID NO: 518442 - RNA, 20 nt, Artificial Sequence
  Synthetic
caaaagcuuucccuucccac

SEQ ID NO: 518443 - RNA, 21 nt, Artificial Sequence
  Synthetic
ucaaaagcuuucccuucccac

SEQ ID NO: 518444 - RNA, 22 nt, Artificial Sequence
  Synthetic
cucaaaagcuuucccuucccac

SEQ ID NO: 518445 - RNA, 23 nt, Artificial Sequence
  Synthetic
ccucaaaagcuuucccuucccac

SEQ ID NO: 518446 - RNA, 24 nt, Artificial Sequence
  Synthetic
uccucaaaagcuuucccuucccac

SEQ ID NO: 518447 - RNA, 18 nt, Artificial Sequence
  Synthetic
aaaaaaacccaaagccac

SEQ ID NO: 518448 - RNA, 19 nt, Artificial Sequence
  Synthetic
caaaaaaacccaaagccac

SEQ ID NO: 518449 - RNA, 20 nt, Artificial Sequence
  Synthetic
ucaaaaaaacccaaagccac

SEQ ID NO: 518450 - RNA, 21 nt, Artificial Sequence
  Synthetic
cucaaaaaaacccaaagccac

SEQ ID NO: 518451 - RNA, 22 nt, Artificial Sequence
  Synthetic
ucucaaaaaaacccaaagccac

SEQ ID NO: 518452 - RNA, 23 nt, Artificial Sequence
  Synthetic
uucucaaaaaaacccaaagccac

SEQ ID NO: 518453 - RNA, 24 nt, Artificial Sequence
  Synthetic
uuucucaaaaaaacccaaagccac

SEQ ID NO: 518454 - RNA, 18 nt, Artificial Sequence
  Synthetic
aacaugaaucaaagccac

SEQ ID NO: 518455 - RNA, 19 nt, Artificial Sequence
  Synthetic
uaacaugaaucaaagccac

SEQ ID NO: 518456 - RNA, 20 nt, Artificial Sequence
  Synthetic
guaacaugaaucaaagccac

SEQ ID NO: 518457 - RNA, 21 nt, Artificial Sequence
  Synthetic
uguaacaugaaucaaagccac

SEQ ID NO: 518458 - RNA, 22 nt, Artificial Sequence
  Synthetic
auguaacaugaaucaaagccac

SEQ ID NO: 518459 - RNA, 23 nt, Artificial Sequence
  Synthetic
uauguaacaugaaucaaagccac

SEQ ID NO: 518460 - RNA, 24 nt, Artificial Sequence
  Synthetic
guauguaacaugaaucaaagccac

SEQ ID NO: 518461 - RNA, 18 nt, Artificial Sequence
  Synthetic
gaaacuaaagcaagccac

SEQ ID NO: 518462 - RNA, 19 nt, Artificial Sequence
  Synthetic
ggaaacuaaagcaagccac

SEQ ID NO: 518463 - RNA, 20 nt, Artificial Sequence
  Synthetic
aggaaacuaaagcaagccac

SEQ ID NO: 518464 - RNA, 21 nt, Artificial Sequence
  Synthetic
uaggaaacuaaagcaagccac

SEQ ID NO: 518465 - RNA, 22 nt, Artificial Sequence
  Synthetic
guaggaaacuaaagcaagccac

SEQ ID NO: 518466 - RNA, 23 nt, Artificial Sequence
  Synthetic
uguaggaaacuaaagcaagccac

SEQ ID NO: 518467 - RNA, 24 nt, Artificial Sequence
  Synthetic
cuguaggaaacuaaagcaagccac

SEQ ID NO: 518468 - RNA, 18 nt, Artificial Sequence
  Synthetic
gccuguaaucccagccac

SEQ ID NO: 518469 - RNA, 19 nt, Artificial Sequence
  Synthetic
ugccuguaaucccagccac

SEQ ID NO: 518470 - RNA, 20 nt, Artificial Sequence
  Synthetic
gugccuguaaucccagccac

SEQ ID NO: 518471 - RNA, 21 nt, Artificial Sequence
  Synthetic
ggugccuguaaucccagccac

SEQ ID NO: 518472 - RNA, 22 nt, Artificial Sequence
  Synthetic
gggugccuguaaucccagccac

SEQ ID NO: 518473 - RNA, 23 nt, Artificial Sequence
  Synthetic
ugggugccuguaaucccagccac

SEQ ID NO: 518474 - RNA, 24 nt, Artificial Sequence
  Synthetic
gugggugccuguaaucccagccac

SEQ ID NO: 518475 - RNA, 18 nt, Artificial Sequence
  Synthetic
gccuguagucccagccac

SEQ ID NO: 518476 - RNA, 19 nt, Artificial Sequence
  Synthetic
ugccuguagucccagccac

SEQ ID NO: 518477 - RNA, 20 nt, Artificial Sequence
  Synthetic
gugccuguagucccagccac

SEQ ID NO: 518478 - RNA, 21 nt, Artificial Sequence
  Synthetic
cgugccuguagucccagccac

SEQ ID NO: 518479 - RNA, 22 nt, Artificial Sequence
  Synthetic
acgugccuguagucccagccac

SEQ ID NO: 518480 - RNA, 23 nt, Artificial Sequence
  Synthetic
cacgugccuguagucccagccac

SEQ ID NO: 518481 - RNA, 24 nt, Artificial Sequence
  Synthetic
gcacgugccuguagucccagccac

SEQ ID NO: 518482 - RNA, 18 nt, Artificial Sequence
  Synthetic
agaaacgaaaagagccac

SEQ ID NO: 518483 - RNA, 19 nt, Artificial Sequence
  Synthetic
cagaaacgaaaagagccac

SEQ ID NO: 518484 - RNA, 20 nt, Artificial Sequence
  Synthetic
gcagaaacgaaaagagccac

SEQ ID NO: 518485 - RNA, 21 nt, Artificial Sequence
  Synthetic
ggcagaaacgaaaagagccac

SEQ ID NO: 518486 - RNA, 22 nt, Artificial Sequence
  Synthetic
aggcagaaacgaaaagagccac

SEQ ID NO: 518487 - RNA, 23 nt, Artificial Sequence
  Synthetic
aaggcagaaacgaaaagagccac

SEQ ID NO: 518488 - RNA, 24 nt, Artificial Sequence
  Synthetic
uaaggcagaaacgaaaagagccac

SEQ ID NO: 518489 - RNA, 18 nt, Artificial Sequence
  Synthetic
ccaccgauacagagccac

SEQ ID NO: 518490 - RNA, 19 nt, Artificial Sequence
  Synthetic
accaccgauacagagccac

SEQ ID NO: 518491 - RNA, 20 nt, Artificial Sequence
  Synthetic
aaccaccgauacagagccac

SEQ ID NO: 518492 - RNA, 21 nt, Artificial Sequence
  Synthetic
aaaccaccgauacagagccac

SEQ ID NO: 518493 - RNA, 22 nt, Artificial Sequence
  Synthetic
aaaaccaccgauacagagccac

SEQ ID NO: 518494 - RNA, 23 nt, Artificial Sequence
  Synthetic
gaaaaccaccgauacagagccac

SEQ ID NO: 518495 - RNA, 24 nt, Artificial Sequence
  Synthetic
ugaaaaccaccgauacagagccac

SEQ ID NO: 518496 - RNA, 18 nt, Artificial Sequence
  Synthetic
uuaaaagaauauagccac

SEQ ID NO: 518497 - RNA, 19 nt, Artificial Sequence
  Synthetic
uuuaaaagaauauagccac

SEQ ID NO: 518498 - RNA, 20 nt, Artificial Sequence
  Synthetic
cuuuaaaagaauauagccac

SEQ ID NO: 518499 - RNA, 21 nt, Artificial Sequence
  Synthetic
ucuuuaaaagaauauagccac

SEQ ID NO: 518500 - RNA, 22 nt, Artificial Sequence
  Synthetic
uucuuuaaaagaauauagccac

SEQ ID NO: 518501 - RNA, 23 nt, Artificial Sequence
  Synthetic
auucuuuaaaagaauauagccac

SEQ ID NO: 518502 - RNA, 24 nt, Artificial Sequence
  Synthetic
uauucuuuaaaagaauauagccac

SEQ ID NO: 518503 - RNA, 18 nt, Artificial Sequence
  Synthetic
uuuguuacuuauagccac

SEQ ID NO: 518504 - RNA, 19 nt, Artificial Sequence
  Synthetic
cuuuguuacuuauagccac

SEQ ID NO: 518505 - RNA, 20 nt, Artificial Sequence
  Synthetic
acuuuguuacuuauagccac

SEQ ID NO: 518506 - RNA, 21 nt, Artificial Sequence
  Synthetic
gacuuuguuacuuauagccac

SEQ ID NO: 518507 - RNA, 22 nt, Artificial Sequence
  Synthetic
ggacuuuguuacuuauagccac

SEQ ID NO: 518508 - RNA, 23 nt, Artificial Sequence
  Synthetic
uggacuuuguuacuuauagccac

SEQ ID NO: 518509 - RNA, 24 nt, Artificial Sequence
  Synthetic
auggacuuuguuacuuauagccac

SEQ ID NO: 518510 - RNA, 18 nt, Artificial Sequence
  Synthetic
ucuugauuggcuagccac

SEQ ID NO: 518511 - RNA, 19 nt, Artificial Sequence
  Synthetic
uucuugauuggcuagccac

SEQ ID NO: 518512 - RNA, 20 nt, Artificial Sequence
  Synthetic
auucuugauuggcuagccac

SEQ ID NO: 518513 - RNA, 21 nt, Artificial Sequence
  Synthetic
uauucuugauuggcuagccac

SEQ ID NO: 518514 - RNA, 22 nt, Artificial Sequence
  Synthetic
cuauucuugauuggcuagccac

SEQ ID NO: 518515 - RNA, 23 nt, Artificial Sequence
  Synthetic
acuauucuugauuggcuagccac

SEQ ID NO: 518516 - RNA, 24 nt, Artificial Sequence
  Synthetic
uacuauucuugauuggcuagccac

SEQ ID NO: 518517 - RNA, 18 nt, Artificial Sequence
  Synthetic
aggacuguagguagccac

SEQ ID NO: 518518 - RNA, 19 nt, Artificial Sequence
  Synthetic
caggacuguagguagccac

SEQ ID NO: 518519 - RNA, 20 nt, Artificial Sequence
  Synthetic
gcaggacuguagguagccac

SEQ ID NO: 518520 - RNA, 21 nt, Artificial Sequence
  Synthetic
agcaggacuguagguagccac

SEQ ID NO: 518521 - RNA, 22 nt, Artificial Sequence
  Synthetic
cagcaggacuguagguagccac

SEQ ID NO: 518522 - RNA, 23 nt, Artificial Sequence
  Synthetic
gcagcaggacuguagguagccac

SEQ ID NO: 518523 - RNA, 24 nt, Artificial Sequence
  Synthetic
agcagcaggacuguagguagccac

SEQ ID NO: 518524 - RNA, 18 nt, Artificial Sequence
  Synthetic
aauggguauagaggccac

SEQ ID NO: 518525 - RNA, 19 nt, Artificial Sequence
  Synthetic
caauggguauagaggccac

SEQ ID NO: 518526 - RNA, 20 nt, Artificial Sequence
  Synthetic
ccaauggguauagaggccac

SEQ ID NO: 518527 - RNA, 21 nt, Artificial Sequence
  Synthetic
gccaauggguauagaggccac

SEQ ID NO: 518528 - RNA, 22 nt, Artificial Sequence
  Synthetic
ugccaauggguauagaggccac

SEQ ID NO: 518529 - RNA, 23 nt, Artificial Sequence
  Synthetic
uugccaauggguauagaggccac

SEQ ID NO: 518530 - RNA, 24 nt, Artificial Sequence
  Synthetic
cuugccaauggguauagaggccac

SEQ ID NO: 518531 - RNA, 18 nt, Artificial Sequence
  Synthetic
caugguggugagggccac

SEQ ID NO: 518532 - RNA, 19 nt, Artificial Sequence
  Synthetic
ucaugguggugagggccac

SEQ ID NO: 518533 - RNA, 20 nt, Artificial Sequence
  Synthetic
cucaugguggugagggccac

SEQ ID NO: 518534 - RNA, 21 nt, Artificial Sequence
  Synthetic
ccucaugguggugagggccac

SEQ ID NO: 518535 - RNA, 22 nt, Artificial Sequence
  Synthetic
cccucaugguggugagggccac

SEQ ID NO: 518536 - RNA, 23 nt, Artificial Sequence
  Synthetic
acccucaugguggugagggccac

SEQ ID NO: 518537 - RNA, 24 nt, Artificial Sequence
  Synthetic
aacccucaugguggugagggccac

SEQ ID NO: 518538 - RNA, 18 nt, Artificial Sequence
  Synthetic
gcuuuacgaaugggccac

SEQ ID NO: 518539 - RNA, 19 nt, Artificial Sequence
  Synthetic
agcuuuacgaaugggccac

SEQ ID NO: 518540 - RNA, 20 nt, Artificial Sequence
  Synthetic
uagcuuuacgaaugggccac

SEQ ID NO: 518541 - RNA, 21 nt, Artificial Sequence
  Synthetic
auagcuuuacgaaugggccac

SEQ ID NO: 518542 - RNA, 22 nt, Artificial Sequence
  Synthetic
uauagcuuuacgaaugggccac

SEQ ID NO: 518543 - RNA, 23 nt, Artificial Sequence
  Synthetic
uuauagcuuuacgaaugggccac

SEQ ID NO: 518544 - RNA, 24 nt, Artificial Sequence
  Synthetic
uuuauagcuuuacgaaugggccac

SEQ ID NO: 518545 - RNA, 18 nt, Artificial Sequence
  Synthetic
ccuuauuaucugggccac

SEQ ID NO: 518546 - RNA, 19 nt, Artificial Sequence
  Synthetic
uccuuauuaucugggccac

SEQ ID NO: 518547 - RNA, 20 nt, Artificial Sequence
  Synthetic
guccuuauuaucugggccac

SEQ ID NO: 518548 - RNA, 21 nt, Artificial Sequence
  Synthetic
aguccuuauuaucugggccac

SEQ ID NO: 518549 - RNA, 22 nt, Artificial Sequence
  Synthetic
aaguccuuauuaucugggccac

SEQ ID NO: 518550 - RNA, 23 nt, Artificial Sequence
  Synthetic
caaguccuuauuaucugggccac

SEQ ID NO: 518551 - RNA, 24 nt, Artificial Sequence
  Synthetic
ucaaguccuuauuaucugggccac

SEQ ID NO: 518552 - RNA, 18 nt, Artificial Sequence
  Synthetic
ggcaauguauuuggccac

SEQ ID NO: 518553 - RNA, 19 nt, Artificial Sequence
  Synthetic
uggcaauguauuuggccac

SEQ ID NO: 518554 - RNA, 20 nt, Artificial Sequence
  Synthetic
auggcaauguauuuggccac

SEQ ID NO: 518555 - RNA, 21 nt, Artificial Sequence
  Synthetic
uauggcaauguauuuggccac

SEQ ID NO: 518556 - RNA, 22 nt, Artificial Sequence
  Synthetic
uuauggcaauguauuuggccac

SEQ ID NO: 518557 - RNA, 23 nt, Artificial Sequence
  Synthetic
auuauggcaauguauuuggccac

SEQ ID NO: 518558 - RNA, 24 nt, Artificial Sequence
  Synthetic
uauuauggcaauguauuuggccac

SEQ ID NO: 518559 - RNA, 18 nt, Artificial Sequence
  Synthetic
uccauuggcuuuggccac

SEQ ID NO: 518560 - RNA, 19 nt, Artificial Sequence
  Synthetic
auccauuggcuuuggccac

SEQ ID NO: 518561 - RNA, 20 nt, Artificial Sequence
  Synthetic
uauccauuggcuuuggccac

SEQ ID NO: 518562 - RNA, 21 nt, Artificial Sequence
  Synthetic
guauccauuggcuuuggccac

SEQ ID NO: 518563 - RNA, 22 nt, Artificial Sequence
  Synthetic
aguauccauuggcuuuggccac

SEQ ID NO: 518564 - RNA, 23 nt, Artificial Sequence
  Synthetic
aaguauccauuggcuuuggccac

SEQ ID NO: 518565 - RNA, 24 nt, Artificial Sequence
  Synthetic
aaaguauccauuggcuuuggccac

SEQ ID NO: 518566 - RNA, 18 nt, Artificial Sequence
  Synthetic
gaaagugcugaaugccac

SEQ ID NO: 518567 - RNA, 19 nt, Artificial Sequence
  Synthetic
ggaaagugcugaaugccac

SEQ ID NO: 518568 - RNA, 20 nt, Artificial Sequence
  Synthetic
aggaaagugcugaaugccac

SEQ ID NO: 518569 - RNA, 21 nt, Artificial Sequence
  Synthetic
aaggaaagugcugaaugccac

SEQ ID NO: 518570 - RNA, 22 nt, Artificial Sequence
  Synthetic
caaggaaagugcugaaugccac

SEQ ID NO: 518571 - RNA, 23 nt, Artificial Sequence
  Synthetic
acaaggaaagugcugaaugccac

SEQ ID NO: 518572 - RNA, 24 nt, Artificial Sequence
  Synthetic
aacaaggaaagugcugaaugccac

SEQ ID NO: 518573 - RNA, 18 nt, Artificial Sequence
  Synthetic
uucucuuuaauaugccac

SEQ ID NO: 518574 - RNA, 19 nt, Artificial Sequence
  Synthetic
uuucucuuuaauaugccac

SEQ ID NO: 518575 - RNA, 20 nt, Artificial Sequence
  Synthetic
cuuucucuuuaauaugccac

SEQ ID NO: 518576 - RNA, 21 nt, Artificial Sequence
  Synthetic
ucuuucucuuuaauaugccac

SEQ ID NO: 518577 - RNA, 22 nt, Artificial Sequence
  Synthetic
uucuuucucuuuaauaugccac

SEQ ID NO: 518578 - RNA, 23 nt, Artificial Sequence
  Synthetic
uuucuuucucuuuaauaugccac

SEQ ID NO: 518579 - RNA, 24 nt, Artificial Sequence
  Synthetic
uuuucuuucucuuuaauaugccac

SEQ ID NO: 518580 - RNA, 18 nt, Artificial Sequence
  Synthetic
uugccaucuuugugccac

SEQ ID NO: 518581 - RNA, 19 nt, Artificial Sequence
  Synthetic
uuugccaucuuugugccac

SEQ ID NO: 518582 - RNA, 20 nt, Artificial Sequence
  Synthetic
auuugccaucuuugugccac

SEQ ID NO: 518583 - RNA, 21 nt, Artificial Sequence
  Synthetic
uauuugccaucuuugugccac

SEQ ID NO: 518584 - RNA, 22 nt, Artificial Sequence
  Synthetic
auauuugccaucuuugugccac

SEQ ID NO: 518585 - RNA, 23 nt, Artificial Sequence
  Synthetic
uauauuugccaucuuugugccac

SEQ ID NO: 518586 - RNA, 24 nt, Artificial Sequence
  Synthetic
auauauuugccaucuuugugccac

SEQ ID NO: 518587 - RNA, 18 nt, Artificial Sequence
  Synthetic
auuuuugacaauugccac

SEQ ID NO: 518588 - RNA, 19 nt, Artificial Sequence
  Synthetic
aauuuuugacaauugccac

SEQ ID NO: 518589 - RNA, 20 nt, Artificial Sequence
  Synthetic
aaauuuuugacaauugccac

SEQ ID NO: 518590 - RNA, 21 nt, Artificial Sequence
  Synthetic
caaauuuuugacaauugccac

SEQ ID NO: 518591 - RNA, 22 nt, Artificial Sequence
  Synthetic
ccaaauuuuugacaauugccac

SEQ ID NO: 518592 - RNA, 23 nt, Artificial Sequence
  Synthetic
cccaaauuuuugacaauugccac

SEQ ID NO: 518593 - RNA, 24 nt, Artificial Sequence
  Synthetic
ccccaaauuuuugacaauugccac

SEQ ID NO: 518594 - RNA, 18 nt, Artificial Sequence
  Synthetic
acaacagcaugcauccac

SEQ ID NO: 518595 - RNA, 19 nt, Artificial Sequence
  Synthetic
gacaacagcaugcauccac

SEQ ID NO: 518596 - RNA, 20 nt, Artificial Sequence
  Synthetic
agacaacagcaugcauccac

SEQ ID NO: 518597 - RNA, 21 nt, Artificial Sequence
  Synthetic
gagacaacagcaugcauccac

SEQ ID NO: 518598 - RNA, 22 nt, Artificial Sequence
  Synthetic
ugagacaacagcaugcauccac

SEQ ID NO: 518599 - RNA, 23 nt, Artificial Sequence
  Synthetic
uugagacaacagcaugcauccac

SEQ ID NO: 518600 - RNA, 24 nt, Artificial Sequence
  Synthetic
uuugagacaacagcaugcauccac

SEQ ID NO: 518601 - RNA, 18 nt, Artificial Sequence
  Synthetic
uauauaccuaucauccac

SEQ ID NO: 518602 - RNA, 19 nt, Artificial Sequence
  Synthetic
uuauauaccuaucauccac

SEQ ID NO: 518603 - RNA, 20 nt, Artificial Sequence
  Synthetic
auuauauaccuaucauccac

SEQ ID NO: 518604 - RNA, 21 nt, Artificial Sequence
  Synthetic
uauuauauaccuaucauccac

SEQ ID NO: 518605 - RNA, 22 nt, Artificial Sequence
  Synthetic
auauuauauaccuaucauccac

SEQ ID NO: 518606 - RNA, 23 nt, Artificial Sequence
  Synthetic
uauauuauauaccuaucauccac

SEQ ID NO: 518607 - RNA, 24 nt, Artificial Sequence
  Synthetic
auauauuauauaccuaucauccac

SEQ ID NO: 518608 - RNA, 18 nt, Artificial Sequence
  Synthetic
cucacaagccucauccac

SEQ ID NO: 518609 - RNA, 19 nt, Artificial Sequence
  Synthetic
ccucacaagccucauccac

SEQ ID NO: 518610 - RNA, 20 nt, Artificial Sequence
  Synthetic
cccucacaagccucauccac

SEQ ID NO: 518611 - RNA, 21 nt, Artificial Sequence
  Synthetic
gcccucacaagccucauccac

SEQ ID NO: 518612 - RNA, 22 nt, Artificial Sequence
  Synthetic
ggcccucacaagccucauccac

SEQ ID NO: 518613 - RNA, 23 nt, Artificial Sequence
  Synthetic
aggcccucacaagccucauccac

SEQ ID NO: 518614 - RNA, 24 nt, Artificial Sequence
  Synthetic
caggcccucacaagccucauccac

SEQ ID NO: 518615 - RNA, 18 nt, Artificial Sequence
  Synthetic
guuccauuugagauccac

SEQ ID NO: 518616 - RNA, 19 nt, Artificial Sequence
  Synthetic
uguuccauuugagauccac

SEQ ID NO: 518617 - RNA, 20 nt, Artificial Sequence
  Synthetic
uuguuccauuugagauccac

SEQ ID NO: 518618 - RNA, 21 nt, Artificial Sequence
  Synthetic
auuguuccauuugagauccac

SEQ ID NO: 518619 - RNA, 22 nt, Artificial Sequence
  Synthetic
gauuguuccauuugagauccac

SEQ ID NO: 518620 - RNA, 23 nt, Artificial Sequence
  Synthetic
ugauuguuccauuugagauccac

SEQ ID NO: 518621 - RNA, 24 nt, Artificial Sequence
  Synthetic
augauuguuccauuugagauccac

SEQ ID NO: 518622 - RNA, 18 nt, Artificial Sequence
  Synthetic
ugucuaaccuuuauccac

SEQ ID NO: 518623 - RNA, 19 nt, Artificial Sequence
  Synthetic
augucuaaccuuuauccac

SEQ ID NO: 518624 - RNA, 20 nt, Artificial Sequence
  Synthetic
aaugucuaaccuuuauccac

SEQ ID NO: 518625 - RNA, 21 nt, Artificial Sequence
  Synthetic
uaaugucuaaccuuuauccac

SEQ ID NO: 518626 - RNA, 22 nt, Artificial Sequence
  Synthetic
uuaaugucuaaccuuuauccac

SEQ ID NO: 518627 - RNA, 23 nt, Artificial Sequence
  Synthetic
guuaaugucuaaccuuuauccac

SEQ ID NO: 518628 - RNA, 24 nt, Artificial Sequence
  Synthetic
gguuaaugucuaaccuuuauccac

SEQ ID NO: 518629 - RNA, 18 nt, Artificial Sequence
  Synthetic
uuccgaaguucacuccac

SEQ ID NO: 518630 - RNA, 19 nt, Artificial Sequence
  Synthetic
uuuccgaaguucacuccac

SEQ ID NO: 518631 - RNA, 20 nt, Artificial Sequence
  Synthetic
uuuuccgaaguucacuccac

SEQ ID NO: 518632 - RNA, 21 nt, Artificial Sequence
  Synthetic
uuuuuccgaaguucacuccac

SEQ ID NO: 518633 - RNA, 22 nt, Artificial Sequence
  Synthetic
cuuuuuccgaaguucacuccac

SEQ ID NO: 518634 - RNA, 23 nt, Artificial Sequence
  Synthetic
acuuuuuccgaaguucacuccac

SEQ ID NO: 518635 - RNA, 24 nt, Artificial Sequence
  Synthetic
gacuuuuuccgaaguucacuccac

SEQ ID NO: 518636 - RNA, 18 nt, Artificial Sequence
  Synthetic
cauggaacuagucuccac

SEQ ID NO: 518637 - RNA, 19 nt, Artificial Sequence
  Synthetic
acauggaacuagucuccac

SEQ ID NO: 518638 - RNA, 20 nt, Artificial Sequence
  Synthetic
uacauggaacuagucuccac

SEQ ID NO: 518639 - RNA, 21 nt, Artificial Sequence
  Synthetic
auacauggaacuagucuccac

SEQ ID NO: 518640 - RNA, 22 nt, Artificial Sequence
  Synthetic
uauacauggaacuagucuccac

SEQ ID NO: 518641 - RNA, 23 nt, Artificial Sequence
  Synthetic
auauacauggaacuagucuccac

SEQ ID NO: 518642 - RNA, 24 nt, Artificial Sequence
  Synthetic
uauauacauggaacuagucuccac

SEQ ID NO: 518643 - RNA, 18 nt, Artificial Sequence
  Synthetic
agguugaaaguucuccac

SEQ ID NO: 518644 - RNA, 19 nt, Artificial Sequence
  Synthetic
gagguugaaaguucuccac

SEQ ID NO: 518645 - RNA, 20 nt, Artificial Sequence
  Synthetic
ggagguugaaaguucuccac

SEQ ID NO: 518646 - RNA, 21 nt, Artificial Sequence
  Synthetic
aggagguugaaaguucuccac

SEQ ID NO: 518647 - RNA, 22 nt, Artificial Sequence
  Synthetic
caggagguugaaaguucuccac

SEQ ID NO: 518648 - RNA, 23 nt, Artificial Sequence
  Synthetic
gcaggagguugaaaguucuccac

SEQ ID NO: 518649 - RNA, 24 nt, Artificial Sequence
  Synthetic
agcaggagguugaaaguucuccac

SEQ ID NO: 518650 - RNA, 18 nt, Artificial Sequence
  Synthetic
uuuuuuuuuuuucuccac

SEQ ID NO: 518651 - RNA, 19 nt, Artificial Sequence
  Synthetic
uuuuuuuuuuuuucuccac

SEQ ID NO: 518652 - RNA, 20 nt, Artificial Sequence
  Synthetic
guuuuuuuuuuuuucuccac

SEQ ID NO: 518653 - RNA, 21 nt, Artificial Sequence
  Synthetic
aguuuuuuuuuuuuucuccac

SEQ ID NO: 518654 - RNA, 22 nt, Artificial Sequence
  Synthetic
gaguuuuuuuuuuuuucuccac

SEQ ID NO: 518655 - RNA, 23 nt, Artificial Sequence
  Synthetic
ggaguuuuuuuuuuuuucuccac

SEQ ID NO: 518656 - RNA, 24 nt, Artificial Sequence
  Synthetic
gggaguuuuuuuuuuuuucuccac

SEQ ID NO: 518657 - RNA, 18 nt, Artificial Sequence
  Synthetic
auguccucauaaguccac

SEQ ID NO: 518658 - RNA, 19 nt, Artificial Sequence
  Synthetic
cauguccucauaaguccac

SEQ ID NO: 518659 - RNA, 20 nt, Artificial Sequence
  Synthetic
gcauguccucauaaguccac

SEQ ID NO: 518660 - RNA, 21 nt, Artificial Sequence
  Synthetic
agcauguccucauaaguccac

SEQ ID NO: 518661 - RNA, 22 nt, Artificial Sequence
  Synthetic
aagcauguccucauaaguccac

SEQ ID NO: 518662 - RNA, 23 nt, Artificial Sequence
  Synthetic
uaagcauguccucauaaguccac

SEQ ID NO: 518663 - RNA, 24 nt, Artificial Sequence
  Synthetic
auaagcauguccucauaaguccac

SEQ ID NO: 518664 - RNA, 18 nt, Artificial Sequence
  Synthetic
cucuacuauauaguccac

SEQ ID NO: 518665 - RNA, 19 nt, Artificial Sequence
  Synthetic
ccucuacuauauaguccac

SEQ ID NO: 518666 - RNA, 20 nt, Artificial Sequence
  Synthetic
uccucuacuauauaguccac

SEQ ID NO: 518667 - RNA, 21 nt, Artificial Sequence
  Synthetic
auccucuacuauauaguccac

SEQ ID NO: 518668 - RNA, 22 nt, Artificial Sequence
  Synthetic
uauccucuacuauauaguccac

SEQ ID NO: 518669 - RNA, 23 nt, Artificial Sequence
  Synthetic
auauccucuacuauauaguccac

SEQ ID NO: 518670 - RNA, 24 nt, Artificial Sequence
  Synthetic
cauauccucuacuauauaguccac

SEQ ID NO: 518671 - RNA, 18 nt, Artificial Sequence
  Synthetic
uagaccagguccguccac

SEQ ID NO: 518672 - RNA, 19 nt, Artificial Sequence
  Synthetic
guagaccagguccguccac

SEQ ID NO: 518673 - RNA, 20 nt, Artificial Sequence
  Synthetic
aguagaccagguccguccac

SEQ ID NO: 518674 - RNA, 21 nt, Artificial Sequence
  Synthetic
gaguagaccagguccguccac

SEQ ID NO: 518675 - RNA, 22 nt, Artificial Sequence
  Synthetic
agaguagaccagguccguccac

SEQ ID NO: 518676 - RNA, 23 nt, Artificial Sequence
  Synthetic
uagaguagaccagguccguccac

SEQ ID NO: 518677 - RNA, 24 nt, Artificial Sequence
  Synthetic
uuagaguagaccagguccguccac

SEQ ID NO: 518678 - RNA, 18 nt, Artificial Sequence
  Synthetic
cuccauggagagguccac

SEQ ID NO: 518679 - RNA, 19 nt, Artificial Sequence
  Synthetic
gcuccauggagagguccac

SEQ ID NO: 518680 - RNA, 20 nt, Artificial Sequence
  Synthetic
ugcuccauggagagguccac

SEQ ID NO: 518681 - RNA, 21 nt, Artificial Sequence
  Synthetic
cugcuccauggagagguccac

SEQ ID NO: 518682 - RNA, 22 nt, Artificial Sequence
  Synthetic
acugcuccauggagagguccac

SEQ ID NO: 518683 - RNA, 23 nt, Artificial Sequence
  Synthetic
aacugcuccauggagagguccac

SEQ ID NO: 518684 - RNA, 24 nt, Artificial Sequence
  Synthetic
aaacugcuccauggagagguccac

SEQ ID NO: 518685 - RNA, 18 nt, Artificial Sequence
  Synthetic
uucacguuugugguccac

SEQ ID NO: 518686 - RNA, 19 nt, Artificial Sequence
  Synthetic
uuucacguuugugguccac

SEQ ID NO: 518687 - RNA, 20 nt, Artificial Sequence
  Synthetic
auuucacguuugugguccac

SEQ ID NO: 518688 - RNA, 21 nt, Artificial Sequence
  Synthetic
gauuucacguuugugguccac

SEQ ID NO: 518689 - RNA, 22 nt, Artificial Sequence
  Synthetic
agauuucacguuugugguccac

SEQ ID NO: 518690 - RNA, 23 nt, Artificial Sequence
  Synthetic
aagauuucacguuugugguccac

SEQ ID NO: 518691 - RNA, 24 nt, Artificial Sequence
  Synthetic
uaagauuucacguuugugguccac

SEQ ID NO: 518692 - RNA, 18 nt, Artificial Sequence
  Synthetic
aauuccauaauuguccac

SEQ ID NO: 518693 - RNA, 19 nt, Artificial Sequence
  Synthetic
caauuccauaauuguccac

SEQ ID NO: 518694 - RNA, 20 nt, Artificial Sequence
  Synthetic
gcaauuccauaauuguccac

SEQ ID NO: 518695 - RNA, 21 nt, Artificial Sequence
  Synthetic
agcaauuccauaauuguccac

SEQ ID NO: 518696 - RNA, 22 nt, Artificial Sequence
  Synthetic
gagcaauuccauaauuguccac

SEQ ID NO: 518697 - RNA, 23 nt, Artificial Sequence
  Synthetic
ugagcaauuccauaauuguccac

SEQ ID NO: 518698 - RNA, 24 nt, Artificial Sequence
  Synthetic
uugagcaauuccauaauuguccac

SEQ ID NO: 518699 - RNA, 18 nt, Artificial Sequence
  Synthetic
uccuaccuacaauuccac

SEQ ID NO: 518700 - RNA, 19 nt, Artificial Sequence
  Synthetic
auccuaccuacaauuccac

SEQ ID NO: 518701 - RNA, 20 nt, Artificial Sequence
  Synthetic
gauccuaccuacaauuccac

SEQ ID NO: 518702 - RNA, 21 nt, Artificial Sequence
  Synthetic
ugauccuaccuacaauuccac

SEQ ID NO: 518703 - RNA, 22 nt, Artificial Sequence
  Synthetic
augauccuaccuacaauuccac

SEQ ID NO: 518704 - RNA, 23 nt, Artificial Sequence
  Synthetic
aaugauccuaccuacaauuccac

SEQ ID NO: 518705 - RNA, 24 nt, Artificial Sequence
  Synthetic
aaaugauccuaccuacaauuccac

SEQ ID NO: 518706 - RNA, 18 nt, Artificial Sequence
  Synthetic
auccucugugccuuccac

SEQ ID NO: 518707 - RNA, 19 nt, Artificial Sequence
  Synthetic
aauccucugugccuuccac

SEQ ID NO: 518708 - RNA, 20 nt, Artificial Sequence
  Synthetic
aaauccucugugccuuccac

SEQ ID NO: 518709 - RNA, 21 nt, Artificial Sequence
  Synthetic
aaaauccucugugccuuccac

SEQ ID NO: 518710 - RNA, 22 nt, Artificial Sequence
  Synthetic
gaaaauccucugugccuuccac

SEQ ID NO: 518711 - RNA, 23 nt, Artificial Sequence
  Synthetic
ugaaaauccucugugccuuccac

SEQ ID NO: 518712 - RNA, 24 nt, Artificial Sequence
  Synthetic
cugaaaauccucugugccuuccac

SEQ ID NO: 518713 - RNA, 18 nt, Artificial Sequence
  Synthetic
agcuaacauuccuuccac

SEQ ID NO: 518714 - RNA, 19 nt, Artificial Sequence
  Synthetic
aagcuaacauuccuuccac

SEQ ID NO: 518715 - RNA, 20 nt, Artificial Sequence
  Synthetic
aaagcuaacauuccuuccac

SEQ ID NO: 518716 - RNA, 21 nt, Artificial Sequence
  Synthetic
gaaagcuaacauuccuuccac

SEQ ID NO: 518717 - RNA, 22 nt, Artificial Sequence
  Synthetic
ggaaagcuaacauuccuuccac

SEQ ID NO: 518718 - RNA, 23 nt, Artificial Sequence
  Synthetic
uggaaagcuaacauuccuuccac

SEQ ID NO: 518719 - RNA, 24 nt, Artificial Sequence
  Synthetic
uuggaaagcuaacauuccuuccac

SEQ ID NO: 518720 - RNA, 18 nt, Artificial Sequence
  Synthetic
auacguaacaucuuccac

SEQ ID NO: 518721 - RNA, 19 nt, Artificial Sequence
  Synthetic
cauacguaacaucuuccac

SEQ ID NO: 518722 - RNA, 20 nt, Artificial Sequence
  Synthetic
acauacguaacaucuuccac

SEQ ID NO: 518723 - RNA, 21 nt, Artificial Sequence
  Synthetic
uacauacguaacaucuuccac

SEQ ID NO: 518724 - RNA, 22 nt, Artificial Sequence
  Synthetic
guacauacguaacaucuuccac

SEQ ID NO: 518725 - RNA, 23 nt, Artificial Sequence
  Synthetic
gguacauacguaacaucuuccac

SEQ ID NO: 518726 - RNA, 24 nt, Artificial Sequence
  Synthetic
agguacauacguaacaucuuccac

SEQ ID NO: 518727 - RNA, 18 nt, Artificial Sequence
  Synthetic
uaacuaauuuaguuccac

SEQ ID NO: 518728 - RNA, 19 nt, Artificial Sequence
  Synthetic
uuaacuaauuuaguuccac

SEQ ID NO: 518729 - RNA, 20 nt, Artificial Sequence
  Synthetic
auuaacuaauuuaguuccac

SEQ ID NO: 518730 - RNA, 21 nt, Artificial Sequence
  Synthetic
uauuaacuaauuuaguuccac

SEQ ID NO: 518731 - RNA, 22 nt, Artificial Sequence
  Synthetic
auauuaacuaauuuaguuccac

SEQ ID NO: 518732 - RNA, 23 nt, Artificial Sequence
  Synthetic
cauauuaacuaauuuaguuccac

SEQ ID NO: 518733 - RNA, 24 nt, Artificial Sequence
  Synthetic
acauauuaacuaauuuaguuccac

SEQ ID NO: 518734 - RNA, 18 nt, Artificial Sequence
  Synthetic
aacugcagggauuuccac

SEQ ID NO: 518735 - RNA, 19 nt, Artificial Sequence
  Synthetic
aaacugcagggauuuccac

SEQ ID NO: 518736 - RNA, 20 nt, Artificial Sequence
  Synthetic
gaaacugcagggauuuccac

SEQ ID NO: 518737 - RNA, 21 nt, Artificial Sequence
  Synthetic
ugaaacugcagggauuuccac

SEQ ID NO: 518738 - RNA, 22 nt, Artificial Sequence
  Synthetic
cugaaacugcagggauuuccac

SEQ ID NO: 518739 - RNA, 23 nt, Artificial Sequence
  Synthetic
ucugaaacugcagggauuuccac

SEQ ID NO: 518740 - RNA, 24 nt, Artificial Sequence
  Synthetic
cucugaaacugcagggauuuccac

SEQ ID NO: 518741 - RNA, 18 nt, Artificial Sequence
  Synthetic
ugcuagugaaaaaagcac

SEQ ID NO: 518742 - RNA, 19 nt, Artificial Sequence
  Synthetic
augcuagugaaaaaagcac

SEQ ID NO: 518743 - RNA, 20 nt, Artificial Sequence
  Synthetic
aaugcuagugaaaaaagcac

SEQ ID NO: 518744 - RNA, 21 nt, Artificial Sequence
  Synthetic
aaaugcuagugaaaaaagcac

SEQ ID NO: 518745 - RNA, 22 nt, Artificial Sequence
  Synthetic
uaaaugcuagugaaaaaagcac

SEQ ID NO: 518746 - RNA, 23 nt, Artificial Sequence
  Synthetic
auaaaugcuagugaaaaaagcac

SEQ ID NO: 518747 - RNA, 24 nt, Artificial Sequence
  Synthetic
aauaaaugcuagugaaaaaagcac

SEQ ID NO: 518748 - RNA, 18 nt, Artificial Sequence
  Synthetic
gcccuuuuagcaaagcac

SEQ ID NO: 518749 - RNA, 19 nt, Artificial Sequence
  Synthetic
ggcccuuuuagcaaagcac

SEQ ID NO: 518750 - RNA, 20 nt, Artificial Sequence
  Synthetic
gggcccuuuuagcaaagcac

SEQ ID NO: 518751 - RNA, 21 nt, Artificial Sequence
  Synthetic
agggcccuuuuagcaaagcac

SEQ ID NO: 518752 - RNA, 22 nt, Artificial Sequence
  Synthetic
aagggcccuuuuagcaaagcac

SEQ ID NO: 518753 - RNA, 23 nt, Artificial Sequence
  Synthetic
aaagggcccuuuuagcaaagcac

SEQ ID NO: 518754 - RNA, 24 nt, Artificial Sequence
  Synthetic
gaaagggcccuuuuagcaaagcac

SEQ ID NO: 518755 - RNA, 18 nt, Artificial Sequence
  Synthetic
ucacaaucuagaaagcac

SEQ ID NO: 518756 - RNA, 19 nt, Artificial Sequence
  Synthetic
cucacaaucuagaaagcac

SEQ ID NO: 518757 - RNA, 20 nt, Artificial Sequence
  Synthetic
ucucacaaucuagaaagcac

SEQ ID NO: 518758 - RNA, 21 nt, Artificial Sequence
  Synthetic
aucucacaaucuagaaagcac

SEQ ID NO: 518759 - RNA, 22 nt, Artificial Sequence
  Synthetic
uaucucacaaucuagaaagcac

SEQ ID NO: 518760 - RNA, 23 nt, Artificial Sequence
  Synthetic
guaucucacaaucuagaaagcac

SEQ ID NO: 518761 - RNA, 24 nt, Artificial Sequence
  Synthetic
aguaucucacaaucuagaaagcac

SEQ ID NO: 518762 - RNA, 18 nt, Artificial Sequence
  Synthetic
auuuguuaagacaagcac

SEQ ID NO: 518763 - RNA, 19 nt, Artificial Sequence
  Synthetic
uauuuguuaagacaagcac

SEQ ID NO: 518764 - RNA, 20 nt, Artificial Sequence
  Synthetic
cuauuuguuaagacaagcac

SEQ ID NO: 518765 - RNA, 21 nt, Artificial Sequence
  Synthetic
ucuauuuguuaagacaagcac

SEQ ID NO: 518766 - RNA, 22 nt, Artificial Sequence
  Synthetic
cucuauuuguuaagacaagcac

SEQ ID NO: 518767 - RNA, 23 nt, Artificial Sequence
  Synthetic
ucucuauuuguuaagacaagcac

SEQ ID NO: 518768 - RNA, 24 nt, Artificial Sequence
  Synthetic
cucucuauuuguuaagacaagcac

SEQ ID NO: 518769 - RNA, 18 nt, Artificial Sequence
  Synthetic
cuggcucuaggcaagcac

SEQ ID NO: 518770 - RNA, 19 nt, Artificial Sequence
  Synthetic
gcuggcucuaggcaagcac

SEQ ID NO: 518771 - RNA, 20 nt, Artificial Sequence
  Synthetic
ggcuggcucuaggcaagcac

SEQ ID NO: 518772 - RNA, 21 nt, Artificial Sequence
  Synthetic
gggcuggcucuaggcaagcac

SEQ ID NO: 518773 - RNA, 22 nt, Artificial Sequence
  Synthetic
agggcuggcucuaggcaagcac

SEQ ID NO: 518774 - RNA, 23 nt, Artificial Sequence
  Synthetic
uagggcuggcucuaggcaagcac

SEQ ID NO: 518775 - RNA, 24 nt, Artificial Sequence
  Synthetic
guagggcuggcucuaggcaagcac

SEQ ID NO: 518776 - RNA, 18 nt, Artificial Sequence
  Synthetic
aaaugggaaaagaagcac

SEQ ID NO: 518777 - RNA, 19 nt, Artificial Sequence
  Synthetic
gaaaugggaaaagaagcac

SEQ ID NO: 518778 - RNA, 20 nt, Artificial Sequence
  Synthetic
agaaaugggaaaagaagcac

SEQ ID NO: 518779 - RNA, 21 nt, Artificial Sequence
  Synthetic
cagaaaugggaaaagaagcac

SEQ ID NO: 518780 - RNA, 22 nt, Artificial Sequence
  Synthetic
acagaaaugggaaaagaagcac

SEQ ID NO: 518781 - RNA, 23 nt, Artificial Sequence
  Synthetic
aacagaaaugggaaaagaagcac

SEQ ID NO: 518782 - RNA, 24 nt, Artificial Sequence
  Synthetic
uaacagaaaugggaaaagaagcac

SEQ ID NO: 518783 - RNA, 18 nt, Artificial Sequence
  Synthetic
gguagaaauaagaagcac

SEQ ID NO: 518784 - RNA, 19 nt, Artificial Sequence
  Synthetic
agguagaaauaagaagcac

SEQ ID NO: 518785 - RNA, 20 nt, Artificial Sequence
  Synthetic
gagguagaaauaagaagcac

SEQ ID NO: 518786 - RNA, 21 nt, Artificial Sequence
  Synthetic
agagguagaaauaagaagcac

SEQ ID NO: 518787 - RNA, 22 nt, Artificial Sequence
  Synthetic
aagagguagaaauaagaagcac

SEQ ID NO: 518788 - RNA, 23 nt, Artificial Sequence
  Synthetic
aaagagguagaaauaagaagcac

SEQ ID NO: 518789 - RNA, 24 nt, Artificial Sequence
  Synthetic
aaaagagguagaaauaagaagcac

SEQ ID NO: 518790 - RNA, 18 nt, Artificial Sequence
  Synthetic
caaguucuucagaagcac

SEQ ID NO: 518791 - RNA, 19 nt, Artificial Sequence
  Synthetic
ucaaguucuucagaagcac

SEQ ID NO: 518792 - RNA, 20 nt, Artificial Sequence
  Synthetic
uucaaguucuucagaagcac

SEQ ID NO: 518793 - RNA, 21 nt, Artificial Sequence
  Synthetic
guucaaguucuucagaagcac

SEQ ID NO: 518794 - RNA, 22 nt, Artificial Sequence
  Synthetic
aguucaaguucuucagaagcac

SEQ ID NO: 518795 - RNA, 23 nt, Artificial Sequence
  Synthetic
uaguucaaguucuucagaagcac

SEQ ID NO: 518796 - RNA, 24 nt, Artificial Sequence
  Synthetic
guaguucaaguucuucagaagcac

SEQ ID NO: 518797 - RNA, 18 nt, Artificial Sequence
  Synthetic
uuucaauaauggaagcac

SEQ ID NO: 518798 - RNA, 19 nt, Artificial Sequence
  Synthetic
uuuucaauaauggaagcac

SEQ ID NO: 518799 - RNA, 20 nt, Artificial Sequence
  Synthetic
uuuuucaauaauggaagcac

SEQ ID NO: 518800 - RNA, 21 nt, Artificial Sequence
  Synthetic
uuuuuucaauaauggaagcac

SEQ ID NO: 518801 - RNA, 22 nt, Artificial Sequence
  Synthetic
uuuuuuucaauaauggaagcac

SEQ ID NO: 518802 - RNA, 23 nt, Artificial Sequence
  Synthetic
uuuuuuuucaauaauggaagcac

SEQ ID NO: 518803 - RNA, 24 nt, Artificial Sequence
  Synthetic
auuuuuuuucaauaauggaagcac

SEQ ID NO: 518804 - RNA, 18 nt, Artificial Sequence
  Synthetic
uauauuuaaaugaagcac

SEQ ID NO: 518805 - RNA, 19 nt, Artificial Sequence
  Synthetic
auauauuuaaaugaagcac

SEQ ID NO: 518806 - RNA, 20 nt, Artificial Sequence
  Synthetic
uauauauuuaaaugaagcac

SEQ ID NO: 518807 - RNA, 21 nt, Artificial Sequence
  Synthetic
guauauauuuaaaugaagcac

SEQ ID NO: 518808 - RNA, 22 nt, Artificial Sequence
  Synthetic
aguauauauuuaaaugaagcac

SEQ ID NO: 518809 - RNA, 23 nt, Artificial Sequence
  Synthetic
caguauauauuuaaaugaagcac

SEQ ID NO: 518810 - RNA, 24 nt, Artificial Sequence
  Synthetic
ucaguauauauuuaaaugaagcac

SEQ ID NO: 518811 - RNA, 18 nt, Artificial Sequence
  Synthetic
ccaagugugcugaagcac

SEQ ID NO: 518812 - RNA, 19 nt, Artificial Sequence
  Synthetic
accaagugugcugaagcac

SEQ ID NO: 518813 - RNA, 20 nt, Artificial Sequence
  Synthetic
uaccaagugugcugaagcac

SEQ ID NO: 518814 - RNA, 21 nt, Artificial Sequence
  Synthetic
cuaccaagugugcugaagcac

SEQ ID NO: 518815 - RNA, 22 nt, Artificial Sequence
  Synthetic
acuaccaagugugcugaagcac

SEQ ID NO: 518816 - RNA, 23 nt, Artificial Sequence
  Synthetic
aacuaccaagugugcugaagcac

SEQ ID NO: 518817 - RNA, 24 nt, Artificial Sequence
  Synthetic
caacuaccaagugugcugaagcac

SEQ ID NO: 518818 - RNA, 18 nt, Artificial Sequence
  Synthetic
caguuuugagugaagcac

SEQ ID NO: 518819 - RNA, 19 nt, Artificial Sequence
  Synthetic
ucaguuuugagugaagcac

SEQ ID NO: 518820 - RNA, 20 nt, Artificial Sequence
  Synthetic
uucaguuuugagugaagcac

SEQ ID NO: 518821 - RNA, 21 nt, Artificial Sequence
  Synthetic
guucaguuuugagugaagcac

SEQ ID NO: 518822 - RNA, 22 nt, Artificial Sequence
  Synthetic
uguucaguuuugagugaagcac

SEQ ID NO: 518823 - RNA, 23 nt, Artificial Sequence
  Synthetic
cuguucaguuuugagugaagcac

SEQ ID NO: 518824 - RNA, 24 nt, Artificial Sequence
  Synthetic
ucuguucaguuuugagugaagcac

SEQ ID NO: 518825 - RNA, 18 nt, Artificial Sequence
  Synthetic
ucacauuuggugaagcac

SEQ ID NO: 518826 - RNA, 19 nt, Artificial Sequence
  Synthetic
gucacauuuggugaagcac

SEQ ID NO: 518827 - RNA, 20 nt, Artificial Sequence
  Synthetic
ugucacauuuggugaagcac

SEQ ID NO: 518828 - RNA, 21 nt, Artificial Sequence
  Synthetic
gugucacauuuggugaagcac

SEQ ID NO: 518829 - RNA, 22 nt, Artificial Sequence
  Synthetic
ggugucacauuuggugaagcac

SEQ ID NO: 518830 - RNA, 23 nt, Artificial Sequence
  Synthetic
uggugucacauuuggugaagcac

SEQ ID NO: 518831 - RNA, 24 nt, Artificial Sequence
  Synthetic
cuggugucacauuuggugaagcac

SEQ ID NO: 518832 - RNA, 18 nt, Artificial Sequence
  Synthetic
auuuuaagcuugaagcac

SEQ ID NO: 518833 - RNA, 19 nt, Artificial Sequence
  Synthetic
uauuuuaagcuugaagcac

SEQ ID NO: 518834 - RNA, 20 nt, Artificial Sequence
  Synthetic
guauuuuaagcuugaagcac

SEQ ID NO: 518835 - RNA, 21 nt, Artificial Sequence
  Synthetic
aguauuuuaagcuugaagcac

SEQ ID NO: 518836 - RNA, 22 nt, Artificial Sequence
  Synthetic
gaguauuuuaagcuugaagcac

SEQ ID NO: 518837 - RNA, 23 nt, Artificial Sequence
  Synthetic
ugaguauuuuaagcuugaagcac

SEQ ID NO: 518838 - RNA, 24 nt, Artificial Sequence
  Synthetic
gugaguauuuuaagcuugaagcac

SEQ ID NO: 518839 - RNA, 18 nt, Artificial Sequence
  Synthetic
cagcugucuuugaagcac

SEQ ID NO: 518840 - RNA, 19 nt, Artificial Sequence
  Synthetic
ucagcugucuuugaagcac

SEQ ID NO: 518841 - RNA, 20 nt, Artificial Sequence
  Synthetic
cucagcugucuuugaagcac

SEQ ID NO: 518842 - RNA, 21 nt, Artificial Sequence
  Synthetic
ucucagcugucuuugaagcac

SEQ ID NO: 518843 - RNA, 22 nt, Artificial Sequence
  Synthetic
uucucagcugucuuugaagcac

SEQ ID NO: 518844 - RNA, 23 nt, Artificial Sequence
  Synthetic
cuucucagcugucuuugaagcac

SEQ ID NO: 518845 - RNA, 24 nt, Artificial Sequence
  Synthetic
gcuucucagcugucuuugaagcac

SEQ ID NO: 518846 - RNA, 18 nt, Artificial Sequence
  Synthetic
uucuaugguuugaagcac

SEQ ID NO: 518847 - RNA, 19 nt, Artificial Sequence
  Synthetic
uuucuaugguuugaagcac

SEQ ID NO: 518848 - RNA, 20 nt, Artificial Sequence
  Synthetic
uuuucuaugguuugaagcac

SEQ ID NO: 518849 - RNA, 21 nt, Artificial Sequence
  Synthetic
cuuuucuaugguuugaagcac

SEQ ID NO: 518850 - RNA, 22 nt, Artificial Sequence
  Synthetic
ccuuuucuaugguuugaagcac

SEQ ID NO: 518851 - RNA, 23 nt, Artificial Sequence
  Synthetic
cccuuuucuaugguuugaagcac

SEQ ID NO: 518852 - RNA, 24 nt, Artificial Sequence
  Synthetic
ucccuuuucuaugguuugaagcac

SEQ ID NO: 518853 - RNA, 18 nt, Artificial Sequence
  Synthetic
gguaucaaaaguaagcac

SEQ ID NO: 518854 - RNA, 19 nt, Artificial Sequence
  Synthetic
agguaucaaaaguaagcac

SEQ ID NO: 518855 - RNA, 20 nt, Artificial Sequence
  Synthetic
gagguaucaaaaguaagcac

SEQ ID NO: 518856 - RNA, 21 nt, Artificial Sequence
  Synthetic
cgagguaucaaaaguaagcac

SEQ ID NO: 518857 - RNA, 22 nt, Artificial Sequence
  Synthetic
ucgagguaucaaaaguaagcac

SEQ ID NO: 518858 - RNA, 23 nt, Artificial Sequence
  Synthetic
cucgagguaucaaaaguaagcac

SEQ ID NO: 518859 - RNA, 24 nt, Artificial Sequence
  Synthetic
acucgagguaucaaaaguaagcac

SEQ ID NO: 518860 - RNA, 18 nt, Artificial Sequence
  Synthetic
cacaugcuuuguaagcac

SEQ ID NO: 518861 - RNA, 19 nt, Artificial Sequence
  Synthetic
acacaugcuuuguaagcac

SEQ ID NO: 518862 - RNA, 20 nt, Artificial Sequence
  Synthetic
gacacaugcuuuguaagcac

SEQ ID NO: 518863 - RNA, 21 nt, Artificial Sequence
  Synthetic
agacacaugcuuuguaagcac

SEQ ID NO: 518864 - RNA, 22 nt, Artificial Sequence
  Synthetic
cagacacaugcuuuguaagcac

SEQ ID NO: 518865 - RNA, 23 nt, Artificial Sequence
  Synthetic
acagacacaugcuuuguaagcac

SEQ ID NO: 518866 - RNA, 24 nt, Artificial Sequence
  Synthetic
gacagacacaugcuuuguaagcac

SEQ ID NO: 518867 - RNA, 18 nt, Artificial Sequence
  Synthetic
auaugcuaagcacagcac

SEQ ID NO: 518868 - RNA, 19 nt, Artificial Sequence
  Synthetic
cauaugcuaagcacagcac

SEQ ID NO: 518869 - RNA, 20 nt, Artificial Sequence
  Synthetic
gcauaugcuaagcacagcac

SEQ ID NO: 518870 - RNA, 21 nt, Artificial Sequence
  Synthetic
ggcauaugcuaagcacagcac

SEQ ID NO: 518871 - RNA, 22 nt, Artificial Sequence
  Synthetic
aggcauaugcuaagcacagcac

SEQ ID NO: 518872 - RNA, 23 nt, Artificial Sequence
  Synthetic
aaggcauaugcuaagcacagcac

SEQ ID NO: 518873 - RNA, 24 nt, Artificial Sequence
  Synthetic
caaggcauaugcuaagcacagcac

SEQ ID NO: 518874 - RNA, 18 nt, Artificial Sequence
  Synthetic
uguucuuuugcacagcac

SEQ ID NO: 518875 - RNA, 19 nt, Artificial Sequence
  Synthetic
guguucuuuugcacagcac

SEQ ID NO: 518876 - RNA, 20 nt, Artificial Sequence
  Synthetic
gguguucuuuugcacagcac

SEQ ID NO: 518877 - RNA, 21 nt, Artificial Sequence
  Synthetic
ugguguucuuuugcacagcac

SEQ ID NO: 518878 - RNA, 22 nt, Artificial Sequence
  Synthetic
cugguguucuuuugcacagcac

SEQ ID NO: 518879 - RNA, 23 nt, Artificial Sequence
  Synthetic
ucugguguucuuuugcacagcac

SEQ ID NO: 518880 - RNA, 24 nt, Artificial Sequence
  Synthetic
uucugguguucuuuugcacagcac

SEQ ID NO: 518881 - RNA, 18 nt, Artificial Sequence
  Synthetic
gagauugggauacagcac

SEQ ID NO: 518882 - RNA, 19 nt, Artificial Sequence
  Synthetic
agagauugggauacagcac

SEQ ID NO: 518883 - RNA, 20 nt, Artificial Sequence
  Synthetic
uagagauugggauacagcac

SEQ ID NO: 518884 - RNA, 21 nt, Artificial Sequence
  Synthetic
cuagagauugggauacagcac

SEQ ID NO: 518885 - RNA, 22 nt, Artificial Sequence
  Synthetic
gcuagagauugggauacagcac

SEQ ID NO: 518886 - RNA, 23 nt, Artificial Sequence
  Synthetic
agcuagagauugggauacagcac

SEQ ID NO: 518887 - RNA, 24 nt, Artificial Sequence
  Synthetic
aagcuagagauugggauacagcac

SEQ ID NO: 518888 - RNA, 18 nt, Artificial Sequence
  Synthetic
uccccaacguggcagcac

SEQ ID NO: 518889 - RNA, 19 nt, Artificial Sequence
  Synthetic
auccccaacguggcagcac

SEQ ID NO: 518890 - RNA, 20 nt, Artificial Sequence
  Synthetic
aauccccaacguggcagcac

SEQ ID NO: 518891 - RNA, 21 nt, Artificial Sequence
  Synthetic
uaauccccaacguggcagcac

SEQ ID NO: 518892 - RNA, 22 nt, Artificial Sequence
  Synthetic
uuaauccccaacguggcagcac

SEQ ID NO: 518893 - RNA, 23 nt, Artificial Sequence
  Synthetic
cuuaauccccaacguggcagcac

SEQ ID NO: 518894 - RNA, 24 nt, Artificial Sequence
  Synthetic
acuuaauccccaacguggcagcac

SEQ ID NO: 518895 - RNA, 18 nt, Artificial Sequence
  Synthetic
ugaaaaccuuggcagcac

SEQ ID NO: 518896 - RNA, 19 nt, Artificial Sequence
  Synthetic
cugaaaaccuuggcagcac

SEQ ID NO: 518897 - RNA, 20 nt, Artificial Sequence
  Synthetic
acugaaaaccuuggcagcac

SEQ ID NO: 518898 - RNA, 21 nt, Artificial Sequence
  Synthetic
aacugaaaaccuuggcagcac

SEQ ID NO: 518899 - RNA, 22 nt, Artificial Sequence
  Synthetic
aaacugaaaaccuuggcagcac

SEQ ID NO: 518900 - RNA, 23 nt, Artificial Sequence
  Synthetic
gaaacugaaaaccuuggcagcac

SEQ ID NO: 518901 - RNA, 24 nt, Artificial Sequence
  Synthetic
ggaaacugaaaaccuuggcagcac

SEQ ID NO: 518902 - RNA, 18 nt, Artificial Sequence
  Synthetic
ucccugaaaaugcagcac

SEQ ID NO: 518903 - RNA, 19 nt, Artificial Sequence
  Synthetic
uucccugaaaaugcagcac

SEQ ID NO: 518904 - RNA, 20 nt, Artificial Sequence
  Synthetic
guucccugaaaaugcagcac

SEQ ID NO: 518905 - RNA, 21 nt, Artificial Sequence
  Synthetic
uguucccugaaaaugcagcac

SEQ ID NO: 518906 - RNA, 22 nt, Artificial Sequence
  Synthetic
uuguucccugaaaaugcagcac

SEQ ID NO: 518907 - RNA, 23 nt, Artificial Sequence
  Synthetic
auuguucccugaaaaugcagcac

SEQ ID NO: 518908 - RNA, 24 nt, Artificial Sequence
  Synthetic
cauuguucccugaaaaugcagcac

SEQ ID NO: 518909 - RNA, 18 nt, Artificial Sequence
  Synthetic
ccucucugcugucagcac

SEQ ID NO: 518910 - RNA, 19 nt, Artificial Sequence
  Synthetic
accucucugcugucagcac

SEQ ID NO: 518911 - RNA, 20 nt, Artificial Sequence
  Synthetic
uaccucucugcugucagcac

SEQ ID NO: 518912 - RNA, 21 nt, Artificial Sequence
  Synthetic
uuaccucucugcugucagcac

SEQ ID NO: 518913 - RNA, 22 nt, Artificial Sequence
  Synthetic
cuuaccucucugcugucagcac

SEQ ID NO: 518914 - RNA, 23 nt, Artificial Sequence
  Synthetic
acuuaccucucugcugucagcac

SEQ ID NO: 518915 - RNA, 24 nt, Artificial Sequence
  Synthetic
aacuuaccucucugcugucagcac

SEQ ID NO: 518916 - RNA, 18 nt, Artificial Sequence
  Synthetic
gaggaaaauaaagagcac

SEQ ID NO: 518917 - RNA, 19 nt, Artificial Sequence
  Synthetic
agaggaaaauaaagagcac

SEQ ID NO: 518918 - RNA, 20 nt, Artificial Sequence
  Synthetic
gagaggaaaauaaagagcac

SEQ ID NO: 518919 - RNA, 21 nt, Artificial Sequence
  Synthetic
ggagaggaaaauaaagagcac

SEQ ID NO: 518920 - RNA, 22 nt, Artificial Sequence
  Synthetic
aggagaggaaaauaaagagcac

SEQ ID NO: 518921 - RNA, 23 nt, Artificial Sequence
  Synthetic
gaggagaggaaaauaaagagcac

SEQ ID NO: 518922 - RNA, 24 nt, Artificial Sequence
  Synthetic
ugaggagaggaaaauaaagagcac

SEQ ID NO: 518923 - RNA, 18 nt, Artificial Sequence
  Synthetic
auaaccuugugggagcac

SEQ ID NO: 518924 - RNA, 19 nt, Artificial Sequence
  Synthetic
gauaaccuugugggagcac

SEQ ID NO: 518925 - RNA, 20 nt, Artificial Sequence
  Synthetic
ugauaaccuugugggagcac

SEQ ID NO: 518926 - RNA, 21 nt, Artificial Sequence
  Synthetic
cugauaaccuugugggagcac

SEQ ID NO: 518927 - RNA, 22 nt, Artificial Sequence
  Synthetic
ucugauaaccuugugggagcac

SEQ ID NO: 518928 - RNA, 23 nt, Artificial Sequence
  Synthetic
gucugauaaccuugugggagcac

SEQ ID NO: 518929 - RNA, 24 nt, Artificial Sequence
  Synthetic
ggucugauaaccuugugggagcac

SEQ ID NO: 518930 - RNA, 18 nt, Artificial Sequence
  Synthetic
acuggagugcaugagcac

SEQ ID NO: 518931 - RNA, 19 nt, Artificial Sequence
  Synthetic
aacuggagugcaugagcac

SEQ ID NO: 518932 - RNA, 20 nt, Artificial Sequence
  Synthetic
gaacuggagugcaugagcac

SEQ ID NO: 518933 - RNA, 21 nt, Artificial Sequence
  Synthetic
ggaacuggagugcaugagcac

SEQ ID NO: 518934 - RNA, 22 nt, Artificial Sequence
  Synthetic
gggaacuggagugcaugagcac

SEQ ID NO: 518935 - RNA, 23 nt, Artificial Sequence
  Synthetic
ugggaacuggagugcaugagcac

SEQ ID NO: 518936 - RNA, 24 nt, Artificial Sequence
  Synthetic
gugggaacuggagugcaugagcac

SEQ ID NO: 518937 - RNA, 18 nt, Artificial Sequence
  Synthetic
uuacaguuucaugagcac

SEQ ID NO: 518938 - RNA, 19 nt, Artificial Sequence
  Synthetic
auuacaguuucaugagcac

SEQ ID NO: 518939 - RNA, 20 nt, Artificial Sequence
  Synthetic
aauuacaguuucaugagcac

SEQ ID NO: 518940 - RNA, 21 nt, Artificial Sequence
  Synthetic
aaauuacaguuucaugagcac

SEQ ID NO: 518941 - RNA, 22 nt, Artificial Sequence
  Synthetic
aaaauuacaguuucaugagcac

SEQ ID NO: 518942 - RNA, 23 nt, Artificial Sequence
  Synthetic
uaaaauuacaguuucaugagcac

SEQ ID NO: 518943 - RNA, 24 nt, Artificial Sequence
  Synthetic
cuaaaauuacaguuucaugagcac

SEQ ID NO: 518944 - RNA, 18 nt, Artificial Sequence
  Synthetic
cauauggcuacugagcac

SEQ ID NO: 518945 - RNA, 19 nt, Artificial Sequence
  Synthetic
acauauggcuacugagcac

SEQ ID NO: 518946 - RNA, 20 nt, Artificial Sequence
  Synthetic
cacauauggcuacugagcac

SEQ ID NO: 518947 - RNA, 21 nt, Artificial Sequence
  Synthetic
acacauauggcuacugagcac

SEQ ID NO: 518948 - RNA, 22 nt, Artificial Sequence
  Synthetic
gacacauauggcuacugagcac

SEQ ID NO: 518949 - RNA, 23 nt, Artificial Sequence
  Synthetic
agacacauauggcuacugagcac

SEQ ID NO: 518950 - RNA, 24 nt, Artificial Sequence
  Synthetic
uagacacauauggcuacugagcac

SEQ ID NO: 518951 - RNA, 18 nt, Artificial Sequence
  Synthetic
aagcuugugacauagcac

SEQ ID NO: 518952 - RNA, 19 nt, Artificial Sequence
  Synthetic
gaagcuugugacauagcac

SEQ ID NO: 518953 - RNA, 20 nt, Artificial Sequence
  Synthetic
agaagcuugugacauagcac

SEQ ID NO: 518954 - RNA, 21 nt, Artificial Sequence
  Synthetic
cagaagcuugugacauagcac

SEQ ID NO: 518955 - RNA, 22 nt, Artificial Sequence
  Synthetic
acagaagcuugugacauagcac

SEQ ID NO: 518956 - RNA, 23 nt, Artificial Sequence
  Synthetic
aacagaagcuugugacauagcac

SEQ ID NO: 518957 - RNA, 24 nt, Artificial Sequence
  Synthetic
gaacagaagcuugugacauagcac

SEQ ID NO: 518958 - RNA, 18 nt, Artificial Sequence
  Synthetic
ucuaguauuugauagcac

SEQ ID NO: 518959 - RNA, 19 nt, Artificial Sequence
  Synthetic
aucuaguauuugauagcac

SEQ ID NO: 518960 - RNA, 20 nt, Artificial Sequence
  Synthetic
gaucuaguauuugauagcac

SEQ ID NO: 518961 - RNA, 21 nt, Artificial Sequence
  Synthetic
agaucuaguauuugauagcac

SEQ ID NO: 518962 - RNA, 22 nt, Artificial Sequence
  Synthetic
aagaucuaguauuugauagcac

SEQ ID NO: 518963 - RNA, 23 nt, Artificial Sequence
  Synthetic
uaagaucuaguauuugauagcac

SEQ ID NO: 518964 - RNA, 24 nt, Artificial Sequence
  Synthetic
auaagaucuaguauuugauagcac

SEQ ID NO: 518965 - RNA, 18 nt, Artificial Sequence
  Synthetic
uuagcauaucaaacgcac

SEQ ID NO: 518966 - RNA, 19 nt, Artificial Sequence
  Synthetic
auuagcauaucaaacgcac

SEQ ID NO: 518967 - RNA, 20 nt, Artificial Sequence
  Synthetic
cauuagcauaucaaacgcac

SEQ ID NO: 518968 - RNA, 21 nt, Artificial Sequence
  Synthetic
ccauuagcauaucaaacgcac

SEQ ID NO: 518969 - RNA, 22 nt, Artificial Sequence
  Synthetic
cccauuagcauaucaaacgcac

SEQ ID NO: 518970 - RNA, 23 nt, Artificial Sequence
  Synthetic
ucccauuagcauaucaaacgcac

SEQ ID NO: 518971 - RNA, 24 nt, Artificial Sequence
  Synthetic
aucccauuagcauaucaaacgcac

SEQ ID NO: 518972 - RNA, 18 nt, Artificial Sequence
  Synthetic
aaaauucuuaacacgcac

SEQ ID NO: 518973 - RNA, 19 nt, Artificial Sequence
  Synthetic
uaaaauucuuaacacgcac

SEQ ID NO: 518974 - RNA, 20 nt, Artificial Sequence
  Synthetic
auaaaauucuuaacacgcac

SEQ ID NO: 518975 - RNA, 21 nt, Artificial Sequence
  Synthetic
uauaaaauucuuaacacgcac

SEQ ID NO: 518976 - RNA, 22 nt, Artificial Sequence
  Synthetic
guauaaaauucuuaacacgcac

SEQ ID NO: 518977 - RNA, 23 nt, Artificial Sequence
  Synthetic
aguauaaaauucuuaacacgcac

SEQ ID NO: 518978 - RNA, 24 nt, Artificial Sequence
  Synthetic
uaguauaaaauucuuaacacgcac

SEQ ID NO: 518979 - RNA, 18 nt, Artificial Sequence
  Synthetic
guccaagguuuuccgcac

SEQ ID NO: 518980 - RNA, 19 nt, Artificial Sequence
  Synthetic
gguccaagguuuuccgcac

SEQ ID NO: 518981 - RNA, 20 nt, Artificial Sequence
  Synthetic
agguccaagguuuuccgcac

SEQ ID NO: 518982 - RNA, 21 nt, Artificial Sequence
  Synthetic
cagguccaagguuuuccgcac

SEQ ID NO: 518983 - RNA, 22 nt, Artificial Sequence
  Synthetic
gcagguccaagguuuuccgcac

SEQ ID NO: 518984 - RNA, 23 nt, Artificial Sequence
  Synthetic
ugcagguccaagguuuuccgcac

SEQ ID NO: 518985 - RNA, 24 nt, Artificial Sequence
  Synthetic
uugcagguccaagguuuuccgcac

SEQ ID NO: 518986 - RNA, 18 nt, Artificial Sequence
  Synthetic
gaacagcacugagcgcac

SEQ ID NO: 518987 - RNA, 19 nt, Artificial Sequence
  Synthetic
ggaacagcacugagcgcac

SEQ ID NO: 518988 - RNA, 20 nt, Artificial Sequence
  Synthetic
uggaacagcacugagcgcac

SEQ ID NO: 518989 - RNA, 21 nt, Artificial Sequence
  Synthetic
uuggaacagcacugagcgcac

SEQ ID NO: 518990 - RNA, 22 nt, Artificial Sequence
  Synthetic
cuuggaacagcacugagcgcac

SEQ ID NO: 518991 - RNA, 23 nt, Artificial Sequence
  Synthetic
acuuggaacagcacugagcgcac

SEQ ID NO: 518992 - RNA, 24 nt, Artificial Sequence
  Synthetic
cacuuggaacagcacugagcgcac

SEQ ID NO: 518993 - RNA, 18 nt, Artificial Sequence
  Synthetic
aguugaggacaggcgcac

SEQ ID NO: 518994 - RNA, 19 nt, Artificial Sequence
  Synthetic
aaguugaggacaggcgcac

SEQ ID NO: 518995 - RNA, 20 nt, Artificial Sequence
  Synthetic
aaaguugaggacaggcgcac

SEQ ID NO: 518996 - RNA, 21 nt, Artificial Sequence
  Synthetic
caaaguugaggacaggcgcac

SEQ ID NO: 518997 - RNA, 22 nt, Artificial Sequence
  Synthetic
gcaaaguugaggacaggcgcac

SEQ ID NO: 518998 - RNA, 23 nt, Artificial Sequence
  Synthetic
ggcaaaguugaggacaggcgcac

SEQ ID NO: 518999 - RNA, 24 nt, Artificial Sequence
  Synthetic
aggcaaaguugaggacaggcgcac

SEQ ID NO: 519000 - RNA, 18 nt, Artificial Sequence
  Synthetic
ucacuaggggcugcgcac

SEQ ID NO: 519001 - RNA, 19 nt, Artificial Sequence
  Synthetic
cucacuaggggcugcgcac

SEQ ID NO: 519002 - RNA, 20 nt, Artificial Sequence
  Synthetic
ucucacuaggggcugcgcac

SEQ ID NO: 519003 - RNA, 21 nt, Artificial Sequence
  Synthetic
aucucacuaggggcugcgcac

SEQ ID NO: 519004 - RNA, 22 nt, Artificial Sequence
  Synthetic
gaucucacuaggggcugcgcac

SEQ ID NO: 519005 - RNA, 23 nt, Artificial Sequence
  Synthetic
ugaucucacuaggggcugcgcac

SEQ ID NO: 519006 - RNA, 24 nt, Artificial Sequence
  Synthetic
uugaucucacuaggggcugcgcac

SEQ ID NO: 519007 - RNA, 18 nt, Artificial Sequence
  Synthetic
uauucucaggucucgcac

SEQ ID NO: 519008 - RNA, 19 nt, Artificial Sequence
  Synthetic
cuauucucaggucucgcac

SEQ ID NO: 519009 - RNA, 20 nt, Artificial Sequence
  Synthetic
ccuauucucaggucucgcac

SEQ ID NO: 519010 - RNA, 21 nt, Artificial Sequence
  Synthetic
uccuauucucaggucucgcac

SEQ ID NO: 519011 - RNA, 22 nt, Artificial Sequence
  Synthetic
uuccuauucucaggucucgcac

SEQ ID NO: 519012 - RNA, 23 nt, Artificial Sequence
  Synthetic
auuccuauucucaggucucgcac

SEQ ID NO: 519013 - RNA, 24 nt, Artificial Sequence
  Synthetic
aauuccuauucucaggucucgcac

SEQ ID NO: 519014 - RNA, 18 nt, Artificial Sequence
  Synthetic
uaaaagaaagaaaggcac

SEQ ID NO: 519015 - RNA, 19 nt, Artificial Sequence
  Synthetic
cuaaaagaaagaaaggcac

SEQ ID NO: 519016 - RNA, 20 nt, Artificial Sequence
  Synthetic
acuaaaagaaagaaaggcac

SEQ ID NO: 519017 - RNA, 21 nt, Artificial Sequence
  Synthetic
uacuaaaagaaagaaaggcac

SEQ ID NO: 519018 - RNA, 22 nt, Artificial Sequence
  Synthetic
guacuaaaagaaagaaaggcac

SEQ ID NO: 519019 - RNA, 23 nt, Artificial Sequence
  Synthetic
uguacuaaaagaaagaaaggcac

SEQ ID NO: 519020 - RNA, 24 nt, Artificial Sequence
  Synthetic
uuguacuaaaagaaagaaaggcac

SEQ ID NO: 519021 - RNA, 18 nt, Artificial Sequence
  Synthetic
acaugacuagaaaggcac

SEQ ID NO: 519022 - RNA, 19 nt, Artificial Sequence
  Synthetic
cacaugacuagaaaggcac

SEQ ID NO: 519023 - RNA, 20 nt, Artificial Sequence
  Synthetic
gcacaugacuagaaaggcac

SEQ ID NO: 519024 - RNA, 21 nt, Artificial Sequence
  Synthetic
ugcacaugacuagaaaggcac

SEQ ID NO: 519025 - RNA, 22 nt, Artificial Sequence
  Synthetic
uugcacaugacuagaaaggcac

SEQ ID NO: 519026 - RNA, 23 nt, Artificial Sequence
  Synthetic
auugcacaugacuagaaaggcac

SEQ ID NO: 519027 - RNA, 24 nt, Artificial Sequence
  Synthetic
gauugcacaugacuagaaaggcac

SEQ ID NO: 519028 - RNA, 18 nt, Artificial Sequence
  Synthetic
cagaauuaugaaaggcac

SEQ ID NO: 519029 - RNA, 19 nt, Artificial Sequence
  Synthetic
ucagaauuaugaaaggcac

SEQ ID NO: 519030 - RNA, 20 nt, Artificial Sequence
  Synthetic
aucagaauuaugaaaggcac

SEQ ID NO: 519031 - RNA, 21 nt, Artificial Sequence
  Synthetic
uaucagaauuaugaaaggcac

SEQ ID NO: 519032 - RNA, 22 nt, Artificial Sequence
  Synthetic
uuaucagaauuaugaaaggcac

SEQ ID NO: 519033 - RNA, 23 nt, Artificial Sequence
  Synthetic
auuaucagaauuaugaaaggcac

SEQ ID NO: 519034 - RNA, 24 nt, Artificial Sequence
  Synthetic
uauuaucagaauuaugaaaggcac

SEQ ID NO: 519035 - RNA, 18 nt, Artificial Sequence
  Synthetic
aucuugccuucaaggcac

SEQ ID NO: 519036 - RNA, 19 nt, Artificial Sequence
  Synthetic
uaucuugccuucaaggcac

SEQ ID NO: 519037 - RNA, 20 nt, Artificial Sequence
  Synthetic
auaucuugccuucaaggcac

SEQ ID NO: 519038 - RNA, 21 nt, Artificial Sequence
  Synthetic
uauaucuugccuucaaggcac

SEQ ID NO: 519039 - RNA, 22 nt, Artificial Sequence
  Synthetic
auauaucuugccuucaaggcac

SEQ ID NO: 519040 - RNA, 23 nt, Artificial Sequence
  Synthetic
aauauaucuugccuucaaggcac

SEQ ID NO: 519041 - RNA, 24 nt, Artificial Sequence
  Synthetic
caauauaucuugccuucaaggcac

SEQ ID NO: 519042 - RNA, 18 nt, Artificial Sequence
  Synthetic
gcgugugacuccaggcac

SEQ ID NO: 519043 - RNA, 19 nt, Artificial Sequence
  Synthetic
ggcgugugacuccaggcac

SEQ ID NO: 519044 - RNA, 20 nt, Artificial Sequence
  Synthetic
uggcgugugacuccaggcac

SEQ ID NO: 519045 - RNA, 21 nt, Artificial Sequence
  Synthetic
auggcgugugacuccaggcac

SEQ ID NO: 519046 - RNA, 22 nt, Artificial Sequence
  Synthetic
aauggcgugugacuccaggcac

SEQ ID NO: 519047 - RNA, 23 nt, Artificial Sequence
  Synthetic
aaauggcgugugacuccaggcac

SEQ ID NO: 519048 - RNA, 24 nt, Artificial Sequence
  Synthetic
aaaauggcgugugacuccaggcac

SEQ ID NO: 519049 - RNA, 18 nt, Artificial Sequence
  Synthetic
uuugggaggcggaggcac

SEQ ID NO: 519050 - RNA, 19 nt, Artificial Sequence
  Synthetic
auuugggaggcggaggcac

SEQ ID NO: 519051 - RNA, 20 nt, Artificial Sequence
  Synthetic
uauuugggaggcggaggcac

SEQ ID NO: 519052 - RNA, 21 nt, Artificial Sequence
  Synthetic
uuauuugggaggcggaggcac

SEQ ID NO: 519053 - RNA, 22 nt, Artificial Sequence
  Synthetic
guuauuugggaggcggaggcac

SEQ ID NO: 519054 - RNA, 23 nt, Artificial Sequence
  Synthetic
aguuauuugggaggcggaggcac

SEQ ID NO: 519055 - RNA, 24 nt, Artificial Sequence
  Synthetic
caguuauuugggaggcggaggcac

SEQ ID NO: 519056 - RNA, 18 nt, Artificial Sequence
  Synthetic
augaggauaaugaggcac

SEQ ID NO: 519057 - RNA, 19 nt, Artificial Sequence
  Synthetic
aaugaggauaaugaggcac

SEQ ID NO: 519058 - RNA, 20 nt, Artificial Sequence
  Synthetic
aaaugaggauaaugaggcac

SEQ ID NO: 519059 - RNA, 21 nt, Artificial Sequence
  Synthetic
gaaaugaggauaaugaggcac

SEQ ID NO: 519060 - RNA, 22 nt, Artificial Sequence
  Synthetic
ugaaaugaggauaaugaggcac

SEQ ID NO: 519061 - RNA, 23 nt, Artificial Sequence
  Synthetic
gugaaaugaggauaaugaggcac

SEQ ID NO: 519062 - RNA, 24 nt, Artificial Sequence
  Synthetic
ggugaaaugaggauaaugaggcac

SEQ ID NO: 519063 - RNA, 18 nt, Artificial Sequence
  Synthetic
gggcaccauucuaggcac

SEQ ID NO: 519064 - RNA, 19 nt, Artificial Sequence
  Synthetic
ugggcaccauucuaggcac

SEQ ID NO: 519065 - RNA, 20 nt, Artificial Sequence
  Synthetic
cugggcaccauucuaggcac

SEQ ID NO: 519066 - RNA, 21 nt, Artificial Sequence
  Synthetic
ucugggcaccauucuaggcac

SEQ ID NO: 519067 - RNA, 22 nt, Artificial Sequence
  Synthetic
aucugggcaccauucuaggcac

SEQ ID NO: 519068 - RNA, 23 nt, Artificial Sequence
  Synthetic
gaucugggcaccauucuaggcac

SEQ ID NO: 519069 - RNA, 24 nt, Artificial Sequence
  Synthetic
ugaucugggcaccauucuaggcac

SEQ ID NO: 519070 - RNA, 18 nt, Artificial Sequence
  Synthetic
agggaauguucuaggcac

SEQ ID NO: 519071 - RNA, 19 nt, Artificial Sequence
  Synthetic
cagggaauguucuaggcac

SEQ ID NO: 519072 - RNA, 20 nt, Artificial Sequence
  Synthetic
ccagggaauguucuaggcac

SEQ ID NO: 519073 - RNA, 21 nt, Artificial Sequence
  Synthetic
gccagggaauguucuaggcac

SEQ ID NO: 519074 - RNA, 22 nt, Artificial Sequence
  Synthetic
ugccagggaauguucuaggcac

SEQ ID NO: 519075 - RNA, 23 nt, Artificial Sequence
  Synthetic
augccagggaauguucuaggcac

SEQ ID NO: 519076 - RNA, 24 nt, Artificial Sequence
  Synthetic
uaugccagggaauguucuaggcac

SEQ ID NO: 519077 - RNA, 18 nt, Artificial Sequence
  Synthetic
cccugguggcguaggcac

SEQ ID NO: 519078 - RNA, 19 nt, Artificial Sequence
  Synthetic
gcccugguggcguaggcac

SEQ ID NO: 519079 - RNA, 20 nt, Artificial Sequence
  Synthetic
ggcccugguggcguaggcac

SEQ ID NO: 519080 - RNA, 21 nt, Artificial Sequence
  Synthetic
gggcccugguggcguaggcac

SEQ ID NO: 519081 - RNA, 22 nt, Artificial Sequence
  Synthetic
agggcccugguggcguaggcac

SEQ ID NO: 519082 - RNA, 23 nt, Artificial Sequence
  Synthetic
cagggcccugguggcguaggcac

SEQ ID NO: 519083 - RNA, 24 nt, Artificial Sequence
  Synthetic
ccagggcccugguggcguaggcac

SEQ ID NO: 519084 - RNA, 18 nt, Artificial Sequence
  Synthetic
ccccaaccuuuucggcac

SEQ ID NO: 519085 - RNA, 19 nt, Artificial Sequence
  Synthetic
uccccaaccuuuucggcac

SEQ ID NO: 519086 - RNA, 20 nt, Artificial Sequence
  Synthetic
auccccaaccuuuucggcac

SEQ ID NO: 519087 - RNA, 21 nt, Artificial Sequence
  Synthetic
aauccccaaccuuuucggcac

SEQ ID NO: 519088 - RNA, 22 nt, Artificial Sequence
  Synthetic
caauccccaaccuuuucggcac

SEQ ID NO: 519089 - RNA, 23 nt, Artificial Sequence
  Synthetic
gcaauccccaaccuuuucggcac

SEQ ID NO: 519090 - RNA, 24 nt, Artificial Sequence
  Synthetic
agcaauccccaaccuuuucggcac

SEQ ID NO: 519091 - RNA, 18 nt, Artificial Sequence
  Synthetic
aguaaucccagagggcac

SEQ ID NO: 519092 - RNA, 19 nt, Artificial Sequence
  Synthetic
gaguaaucccagagggcac

SEQ ID NO: 519093 - RNA, 20 nt, Artificial Sequence
  Synthetic
cgaguaaucccagagggcac

SEQ ID NO: 519094 - RNA, 21 nt, Artificial Sequence
  Synthetic
ccgaguaaucccagagggcac

SEQ ID NO: 519095 - RNA, 22 nt, Artificial Sequence
  Synthetic
gccgaguaaucccagagggcac

SEQ ID NO: 519096 - RNA, 23 nt, Artificial Sequence
  Synthetic
ugccgaguaaucccagagggcac

SEQ ID NO: 519097 - RNA, 24 nt, Artificial Sequence
  Synthetic
cugccgaguaaucccagagggcac

SEQ ID NO: 519098 - RNA, 18 nt, Artificial Sequence
  Synthetic
ucaaauuuaagugggcac

SEQ ID NO: 519099 - RNA, 19 nt, Artificial Sequence
  Synthetic
cucaaauuuaagugggcac

SEQ ID NO: 519100 - RNA, 20 nt, Artificial Sequence
  Synthetic
ucucaaauuuaagugggcac

SEQ ID NO: 519101 - RNA, 21 nt, Artificial Sequence
  Synthetic
uucucaaauuuaagugggcac

SEQ ID NO: 519102 - RNA, 22 nt, Artificial Sequence
  Synthetic
guucucaaauuuaagugggcac

SEQ ID NO: 519103 - RNA, 23 nt, Artificial Sequence
  Synthetic
gguucucaaauuuaagugggcac

SEQ ID NO: 519104 - RNA, 24 nt, Artificial Sequence
  Synthetic
ugguucucaaauuuaagugggcac

SEQ ID NO: 519105 - RNA, 18 nt, Artificial Sequence
  Synthetic
uaucagcaauuugggcac

SEQ ID NO: 519106 - RNA, 19 nt, Artificial Sequence
  Synthetic
auaucagcaauuugggcac

SEQ ID NO: 519107 - RNA, 20 nt, Artificial Sequence
  Synthetic
uauaucagcaauuugggcac

SEQ ID NO: 519108 - RNA, 21 nt, Artificial Sequence
  Synthetic
uuauaucagcaauuugggcac

SEQ ID NO: 519109 - RNA, 22 nt, Artificial Sequence
  Synthetic
uuuauaucagcaauuugggcac

SEQ ID NO: 519110 - RNA, 23 nt, Artificial Sequence
  Synthetic
auuuauaucagcaauuugggcac

SEQ ID NO: 519111 - RNA, 24 nt, Artificial Sequence
  Synthetic
gauuuauaucagcaauuugggcac

SEQ ID NO: 519112 - RNA, 18 nt, Artificial Sequence
  Synthetic
gaauugagcuaauggcac

SEQ ID NO: 519113 - RNA, 19 nt, Artificial Sequence
  Synthetic
agaauugagcuaauggcac

SEQ ID NO: 519114 - RNA, 20 nt, Artificial Sequence
  Synthetic
aagaauugagcuaauggcac

SEQ ID NO: 519115 - RNA, 21 nt, Artificial Sequence
  Synthetic
gaagaauugagcuaauggcac

SEQ ID NO: 519116 - RNA, 22 nt, Artificial Sequence
  Synthetic
ugaagaauugagcuaauggcac

SEQ ID NO: 519117 - RNA, 23 nt, Artificial Sequence
  Synthetic
gugaagaauugagcuaauggcac

SEQ ID NO: 519118 - RNA, 24 nt, Artificial Sequence
  Synthetic
cgugaagaauugagcuaauggcac

SEQ ID NO: 519119 - RNA, 18 nt, Artificial Sequence
  Synthetic
gugaccacaacauggcac

SEQ ID NO: 519120 - RNA, 19 nt, Artificial Sequence
  Synthetic
ggugaccacaacauggcac

SEQ ID NO: 519121 - RNA, 20 nt, Artificial Sequence
  Synthetic
gggugaccacaacauggcac

SEQ ID NO: 519122 - RNA, 21 nt, Artificial Sequence
  Synthetic
agggugaccacaacauggcac

SEQ ID NO: 519123 - RNA, 22 nt, Artificial Sequence
  Synthetic
uagggugaccacaacauggcac

SEQ ID NO: 519124 - RNA, 23 nt, Artificial Sequence
  Synthetic
auagggugaccacaacauggcac

SEQ ID NO: 519125 - RNA, 24 nt, Artificial Sequence
  Synthetic
cauagggugaccacaacauggcac

SEQ ID NO: 519126 - RNA, 18 nt, Artificial Sequence
  Synthetic
uaaaauguggcauggcac

SEQ ID NO: 519127 - RNA, 19 nt, Artificial Sequence
  Synthetic
uuaaaauguggcauggcac

SEQ ID NO: 519128 - RNA, 20 nt, Artificial Sequence
  Synthetic
uuuaaaauguggcauggcac

SEQ ID NO: 519129 - RNA, 21 nt, Artificial Sequence
  Synthetic
uuuuaaaauguggcauggcac

SEQ ID NO: 519130 - RNA, 22 nt, Artificial Sequence
  Synthetic
auuuuaaaauguggcauggcac

SEQ ID NO: 519131 - RNA, 23 nt, Artificial Sequence
  Synthetic
uauuuuaaaauguggcauggcac

SEQ ID NO: 519132 - RNA, 24 nt, Artificial Sequence
  Synthetic
uuauuuuaaaauguggcauggcac

SEQ ID NO: 519133 - RNA, 18 nt, Artificial Sequence
  Synthetic
cucauauaaauauggcac

SEQ ID NO: 519134 - RNA, 19 nt, Artificial Sequence
  Synthetic
ucucauauaaauauggcac

SEQ ID NO: 519135 - RNA, 20 nt, Artificial Sequence
  Synthetic
aucucauauaaauauggcac

SEQ ID NO: 519136 - RNA, 21 nt, Artificial Sequence
  Synthetic
uaucucauauaaauauggcac

SEQ ID NO: 519137 - RNA, 22 nt, Artificial Sequence
  Synthetic
auaucucauauaaauauggcac

SEQ ID NO: 519138 - RNA, 23 nt, Artificial Sequence
  Synthetic
uauaucucauauaaauauggcac

SEQ ID NO: 519139 - RNA, 24 nt, Artificial Sequence
  Synthetic
auauaucucauauaaauauggcac

SEQ ID NO: 519140 - RNA, 18 nt, Artificial Sequence
  Synthetic
aacuuggccaacuggcac

SEQ ID NO: 519141 - RNA, 19 nt, Artificial Sequence
  Synthetic
caacuuggccaacuggcac

SEQ ID NO: 519142 - RNA, 20 nt, Artificial Sequence
  Synthetic
acaacuuggccaacuggcac

SEQ ID NO: 519143 - RNA, 21 nt, Artificial Sequence
  Synthetic
cacaacuuggccaacuggcac

SEQ ID NO: 519144 - RNA, 22 nt, Artificial Sequence
  Synthetic
ucacaacuuggccaacuggcac

SEQ ID NO: 519145 - RNA, 23 nt, Artificial Sequence
  Synthetic
uucacaacuuggccaacuggcac

SEQ ID NO: 519146 - RNA, 24 nt, Artificial Sequence
  Synthetic
auucacaacuuggccaacuggcac

SEQ ID NO: 519147 - RNA, 18 nt, Artificial Sequence
  Synthetic
acugacagcaccuggcac

SEQ ID NO: 519148 - RNA, 19 nt, Artificial Sequence
  Synthetic
aacugacagcaccuggcac

SEQ ID NO: 519149 - RNA, 20 nt, Artificial Sequence
  Synthetic
gaacugacagcaccuggcac

SEQ ID NO: 519150 - RNA, 21 nt, Artificial Sequence
  Synthetic
agaacugacagcaccuggcac

SEQ ID NO: 519151 - RNA, 22 nt, Artificial Sequence
  Synthetic
aagaacugacagcaccuggcac

SEQ ID NO: 519152 - RNA, 23 nt, Artificial Sequence
  Synthetic
gaagaacugacagcaccuggcac

SEQ ID NO: 519153 - RNA, 24 nt, Artificial Sequence
  Synthetic
ugaagaacugacagcaccuggcac

SEQ ID NO: 519154 - RNA, 18 nt, Artificial Sequence
  Synthetic
acauuuccucauuggcac

SEQ ID NO: 519155 - RNA, 19 nt, Artificial Sequence
  Synthetic
uacauuuccucauuggcac

SEQ ID NO: 519156 - RNA, 20 nt, Artificial Sequence
  Synthetic
auacauuuccucauuggcac

SEQ ID NO: 519157 - RNA, 21 nt, Artificial Sequence
  Synthetic
uauacauuuccucauuggcac

SEQ ID NO: 519158 - RNA, 22 nt, Artificial Sequence
  Synthetic
uuauacauuuccucauuggcac

SEQ ID NO: 519159 - RNA, 23 nt, Artificial Sequence
  Synthetic
uuuauacauuuccucauuggcac

SEQ ID NO: 519160 - RNA, 24 nt, Artificial Sequence
  Synthetic
uuuuauacauuuccucauuggcac

SEQ ID NO: 519161 - RNA, 18 nt, Artificial Sequence
  Synthetic
cccugacccuuuuggcac

SEQ ID NO: 519162 - RNA, 19 nt, Artificial Sequence
  Synthetic
ucccugacccuuuuggcac

SEQ ID NO: 519163 - RNA, 20 nt, Artificial Sequence
  Synthetic
gucccugacccuuuuggcac

SEQ ID NO: 519164 - RNA, 21 nt, Artificial Sequence
  Synthetic
ggucccugacccuuuuggcac

SEQ ID NO: 519165 - RNA, 22 nt, Artificial Sequence
  Synthetic
uggucccugacccuuuuggcac

SEQ ID NO: 519166 - RNA, 23 nt, Artificial Sequence
  Synthetic
guggucccugacccuuuuggcac

SEQ ID NO: 519167 - RNA, 24 nt, Artificial Sequence
  Synthetic
aguggucccugacccuuuuggcac

SEQ ID NO: 519168 - RNA, 18 nt, Artificial Sequence
  Synthetic
aagcucuucaggaugcac

SEQ ID NO: 519169 - RNA, 19 nt, Artificial Sequence
  Synthetic
caagcucuucaggaugcac

SEQ ID NO: 519170 - RNA, 20 nt, Artificial Sequence
  Synthetic
gcaagcucuucaggaugcac

SEQ ID NO: 519171 - RNA, 21 nt, Artificial Sequence
  Synthetic
ugcaagcucuucaggaugcac

SEQ ID NO: 519172 - RNA, 22 nt, Artificial Sequence
  Synthetic
augcaagcucuucaggaugcac

SEQ ID NO: 519173 - RNA, 23 nt, Artificial Sequence
  Synthetic
aaugcaagcucuucaggaugcac

SEQ ID NO: 519174 - RNA, 24 nt, Artificial Sequence
  Synthetic
uaaugcaagcucuucaggaugcac

SEQ ID NO: 519175 - RNA, 18 nt, Artificial Sequence
  Synthetic
auccagagacaacugcac

SEQ ID NO: 519176 - RNA, 19 nt, Artificial Sequence
  Synthetic
uauccagagacaacugcac

SEQ ID NO: 519177 - RNA, 20 nt, Artificial Sequence
  Synthetic
uuauccagagacaacugcac

SEQ ID NO: 519178 - RNA, 21 nt, Artificial Sequence
  Synthetic
uuuauccagagacaacugcac

SEQ ID NO: 519179 - RNA, 22 nt, Artificial Sequence
  Synthetic
guuuauccagagacaacugcac

SEQ ID NO: 519180 - RNA, 23 nt, Artificial Sequence
  Synthetic
uguuuauccagagacaacugcac

SEQ ID NO: 519181 - RNA, 24 nt, Artificial Sequence
  Synthetic
guguuuauccagagacaacugcac

SEQ ID NO: 519182 - RNA, 18 nt, Artificial Sequence
  Synthetic
aggcgugagccacugcac

SEQ ID NO: 519183 - RNA, 19 nt, Artificial Sequence
  Synthetic
uaggcgugagccacugcac

SEQ ID NO: 519184 - RNA, 20 nt, Artificial Sequence
  Synthetic
auaggcgugagccacugcac

SEQ ID NO: 519185 - RNA, 21 nt, Artificial Sequence
  Synthetic
uauaggcgugagccacugcac

SEQ ID NO: 519186 - RNA, 22 nt, Artificial Sequence
  Synthetic
uuauaggcgugagccacugcac

SEQ ID NO: 519187 - RNA, 23 nt, Artificial Sequence
  Synthetic
auuauaggcgugagccacugcac

SEQ ID NO: 519188 - RNA, 24 nt, Artificial Sequence
  Synthetic
gauuauaggcgugagccacugcac

SEQ ID NO: 519189 - RNA, 18 nt, Artificial Sequence
  Synthetic
aucugaaagucacugcac

SEQ ID NO: 519190 - RNA, 19 nt, Artificial Sequence
  Synthetic
gaucugaaagucacugcac

SEQ ID NO: 519191 - RNA, 20 nt, Artificial Sequence
  Synthetic
agaucugaaagucacugcac

SEQ ID NO: 519192 - RNA, 21 nt, Artificial Sequence
  Synthetic
cagaucugaaagucacugcac

SEQ ID NO: 519193 - RNA, 22 nt, Artificial Sequence
  Synthetic
ccagaucugaaagucacugcac

SEQ ID NO: 519194 - RNA, 23 nt, Artificial Sequence
  Synthetic
uccagaucugaaagucacugcac

SEQ ID NO: 519195 - RNA, 24 nt, Artificial Sequence
  Synthetic
auccagaucugaaagucacugcac

SEQ ID NO: 519196 - RNA, 18 nt, Artificial Sequence
  Synthetic
auauauauauagcugcac

SEQ ID NO: 519197 - RNA, 19 nt, Artificial Sequence
  Synthetic
uauauauauauagcugcac

SEQ ID NO: 519198 - RNA, 20 nt, Artificial Sequence
  Synthetic
auauauauauauagcugcac

SEQ ID NO: 519199 - RNA, 21 nt, Artificial Sequence
  Synthetic
uauauauauauauagcugcac

SEQ ID NO: 519200 - RNA, 22 nt, Artificial Sequence
  Synthetic
auauauauauauauagcugcac

SEQ ID NO: 519201 - RNA, 23 nt, Artificial Sequence
  Synthetic
uauauauauauauauagcugcac

SEQ ID NO: 519202 - RNA, 24 nt, Artificial Sequence
  Synthetic
auauauauauauauauagcugcac

SEQ ID NO: 519203 - RNA, 21 nt, Artificial Sequence
  Synthetic
agccuaugugugucucugcac
